United States Patent Application Publication US 2007/0061916 A1 - sequence listing, part 16

SEQ ID NO: 96259 - protein, 43 aa, Gossypium hirsutum
  Clone ID: LIB3135-036-Q1-K1-C5.pep
AGMDYIHYLTNLLIEHNLLLFVGASLVVSAHIGQCATPFTGND

SEQ ID NO: 96260 - protein, 64 aa, Gossypium hirsutum
  Clone ID: LIB3135-036-Q1-K1-C8.pep
SLITMQPSEVSGIQYLVPSNPSPYSPHFSMNQSNKPALDSNQFLNPLYNFYIPPHIQDISPHSC

SEQ ID NO: 96261 - protein, 70 aa, Gossypium hirsutum
  Clone ID: LIB3135-036-Q1-K1-D10.pep
AAAAGFLLAGFYLLVDIYGYQRMTLVLEWMGKHALVIYILAACNLIPIVIQGFYWKQPPNNILSLIGIGR

SEQ ID NO: 96262 - protein, 52 aa, Gossypium hirsutum
  unsure (1)..(52): unsure at all Xaa locations
  Clone ID: LIB3135-036-Q1-K1-D6.pep
KMISAGEATYNKWRRPDPXIGPCAPGGSKFTQNPVPPSGIEILCDYGKEEHD

SEQ ID NO: 96263 - protein, 141 aa, Gossypium hirsutum
  unsure (1)..(141): unsure at all Xaa locations
  Clone ID: LIB3135-036-Q1-K1-D8.pep
KDFYVGTFGVSVETYNQNHLKNTAVNEGNSDRLWWFQVCTEVAYFQVAPSNDSIRSTKINTKYHLDLCKNVFGEGIYPEVDMTNIYYGGTKIAGSKIVFTNGSQDPXWRHASKQTSSPDMPSDIITCHNCGHGTDMRGCPQ

SEQ ID NO: 96264 - protein, 91 aa, Gossypium hirsutum
  unsure (1)..(91): unsure at all Xaa locations
  Clone ID: LIB3135-036-Q1-K1-E10.pep
IYLRDFAKFNVALLAKXGWRLINISEFIISRVLKVKYFPNSDFYKAQLGNLPSFTWKNIWAARGLFNNGRCWRVGKGDKFPHXGDSWIPGI

SEQ ID NO: 96265 - protein, 154 aa, Gossypium hirsutum
  unsure (1)..(154): unsure at all Xaa locations
  Clone ID: LIB3135-036-Q1-K1-E11.pep
VILYILLCGVPPFWAETEQGVAQAIFRSVIDFKRDPWPKVSDNAKDLVRKMLNPDPKQRLTAQEVLDHPWLQNAKKAPNVSLGETVKARLKQFSVMNKLKKRALKVIAEHLSVEEVAGIKEGFQLMDTANRGKINIDXVRGGLHKLGHTIPDAD

SEQ ID NO: 96266 - protein, 90 aa, Gossypium hirsutum
  unsure (1)..(90): unsure at all Xaa locations
  Clone ID: LIB3135-036-Q1-K1-E3.pep
TYSDDALLVSARGSLLLRARMFVNKPDGMVREERGPYGDPQHPYFYEEEDVWMAPGFINQFYQSPXYWKTYLPXVDQERKMGLNSFYKAS

SEQ ID NO: 96267 - protein, 67 aa, Gossypium hirsutum
  Clone ID: LIB3135-036-Q1-K1-E4.pep
REGNFPGGCGHSWVAMLPLSGQVKPINHFSTEQTGFLTNCVENRGADRVGSQAEAGTAPLKWHMPPS

SEQ ID NO: 96268 - protein, 123 aa, Gossypium hirsutum
  unsure (1)..(123): unsure at all Xaa locations
  Clone ID: LIB3135-036-Q1-K1-F2.pep
EKSRVSIEVAAGGAASAAAHSASNVRATYDTDTAQNIQRDLTAASTXSATWDAREPSAGRQHYXSLLFRIAVTPQGNTSFVSXAHRXTNTLTATKATVMLAHQCNRVGLDKDVNVFNQLVPNL

SEQ ID NO: 96269 - protein, 74 aa, Gossypium hirsutum
  Clone ID: LIB3135-036-Q1-K1-F5.pep
NIPERRNMVHECGHVICPFFLAMLKAINQRVNKTDNCKEQLQTYCRPSSTAATPSDTALNAIVLVRVLVCKPPS

SEQ ID NO: 96270 - protein, 68 aa, Gossypium hirsutum
  Clone ID: LIB3135-036-Q1-K1-F7.pep
HVHLPYRSFVYRPLSQAVGISYTSFHLMSIMCRETLELMTIKCMSLPPVSRCLVVAGHASFHRLWSHA

SEQ ID NO: 96271 - protein, 54 aa, Gossypium hirsutum
  Clone ID: LIB3135-036-Q1-K1-G11.pep
QTDIHQAMAAAALQEMRAVDPSRSATTTLLQFQQPQNLSCRPAALMQSQMLQQS

SEQ ID NO: 96272 - protein, 45 aa, Gossypium hirsutum
  Clone ID: LIB3135-036-Q1-K1-G3.pep
SNSSSSRDFSLNKNHFQLQLSLELFSRFNFISRMVFFFHVIKIHH

SEQ ID NO: 96273 - protein, 90 aa, Gossypium hirsutum
  unsure (1)..(90): unsure at all Xaa locations
  Clone ID: LIB3135-036-Q1-K1-H10.pep
PTGLTTEAKSVEMHNGAMQEDIAGDNVAWNMKNVPVKDLKQIFVAYNSKRGSXREATSFTCKDIIMNHAGQMVEGYAPCLDGHTFHIARK

SEQ ID NO: 96274 - protein, 87 aa, Gossypium hirsutum
  Clone ID: LIB3135-036-Q1-K1-H11.pep
KQEENRLLFRDEQMQKIVSILLASSAPQDVITWRGDNTGDYTAKTGYSWLNTAEGTNIQSNLLSKFYKKKLRNKGTKQDQNTSMESC

SEQ ID NO: 96275 - protein, 100 aa, Gossypium hirsutum
  unsure (1)..(100): unsure at all Xaa locations
  Clone ID: LIB3135-036-Q1-K1-H2.pep
TRTREVLQILTWAEIYYHAQTVSADGARPTFFTVXAAVYTLQIAXWLILQCXHIPVLGILCNTLFAGAXHGAELCYLRDGGRLLLAQPRNPVESQGRQTK

SEQ ID NO: 96276 - protein, 56 aa, Gossypium hirsutum
  Clone ID: LIB3135-036-Q1-K1-H4.pep
PRVRNDIFLVLAPSFTSFGLALFMSYGLFCLCVYVFTSVFIYDKFIVDLKSGRIQA

SEQ ID NO: 96277 - protein, 61 aa, Gossypium hirsutum
  Clone ID: LIB3135-036-Q1-K1-H5.pep
FWHCSEFHGTTRNLQRLCLSALFTLKTKTRHGVNLIKNQSCSFVKNLLVKGGGMLLLLLSE

SEQ ID NO: 96278 - protein, 87 aa, Gossypium hirsutum
  Clone ID: LIB3135-036-Q1-K1-H7.pep
DEIAIRTVGTATEETCTMRAREEAEAPDVISDTFYIHDLTDVALIESGSTYLYISVEKIPHISKVGENIEFVINGHTACTIRRAQGY

SEQ ID NO: 96279 - protein, 53 aa, Gossypium hirsutum
  Clone ID: LIB3135-037-Q1-K1-A4.pep
TFGAPVLKDQCSSTCSGGRMAFFIGKICTKSRRGFNNPDCGKSLRCAYLTARI

SEQ ID NO: 96280 - protein, 148 aa, Gossypium hirsutum
  Clone ID: LIB3135-037-Q1-K1-A5.pep
GEVAKKQQMPPASVMTRLILIMVWRKLIRNPNTYSSLFGLTWSLISFRWNIQMPTIVSGSIAILSDAGLGMAMFSLGLFMALQPKIIACGKSVATFSMAVRFLTGPAVIAATSIAIGLRGVLLHVAIVQAALPQGIVPFVFAKEYNVH

SEQ ID NO: 96281 - protein, 87 aa, Gossypium hirsutum
  Clone ID: LIB3135-037-Q1-K1-A9.pep
RPRVRLLAQILCFKEWISFYMTCCVRSWIKATPQPPPMPNLIPFLLLEHHLFQVFNLADVHPSLLAKTYLLDRNQGCVLSSEIVIVI

SEQ ID NO: 96282 - protein, 52 aa, Gossypium hirsutum
  Clone ID: LIB3135-037-Q1-K1-B11.pep
AGWCVIPNIFLMCFGERKRRHLLKQHVVVASYMIKKRNTLHIYSILYHPNET

SEQ ID NO: 96283 - protein, 35 aa, Gossypium hirsutum
  Clone ID: LIB3135-037-Q1-K1-B12.pep
LNLALYSKQVYGMTHPRYLYTCQSSYLLLVVCTNE

SEQ ID NO: 96284 - protein, 52 aa, Gossypium hirsutum
  Clone ID: LIB3135-037-Q1-K1-B3.pep
KYDWLGEPYFSLAWGRVDSLGCDCYCEIFSMCMLPGTQEYLSAIEHLLYIYI

SEQ ID NO: 96285 - protein, 70 aa, Gossypium hirsutum
  Clone ID: LIB3135-037-Q1-K1-B5.pep
KTHKLSTRKADTSRGRSFLVPIARTNASSFLDLNHSSYPPTMGRPITAGWYMNNPAATDSIRLLVSNPFL

SEQ ID NO: 96286 - protein, 90 aa, Gossypium hirsutum
  unsure (1)..(90): unsure at all Xaa locations
  Clone ID: LIB3135-037-Q1-K1-B8.pep
MYGGAPKGPQITDRKRRGDIGYASPRRLIHLLDSLYTTWRRVTYLVLKEVDRMLDMRIEPQTRKIVFXSLPELQTLYWSATRPKDIESLA

SEQ ID NO: 96287 - protein, 62 aa, Gossypium hirsutum
  Clone ID: LIB3135-037-Q1-K1-C3.pep
SNRTQLKITLIRHIQLAARNDEQLSKLLGDVTIANGGVMPNIHNLLLPKKTGTSKTSGADDD

SEQ ID NO: 96288 - protein, 62 aa, Gossypium hirsutum
  Clone ID: LIB3135-037-Q1-K1-C6.pep
GWSAGLLLLFIEQWGEYRYYPESVGCRKYVPALGCMALLFLYKRVWRPIRQTYVCAQCLQGS

SEQ ID NO: 96289 - protein, 40 aa, Gossypium hirsutum
  Clone ID: LIB3135-037-Q1-K1-D12.pep
PRTGLDRRIHTLPVLELTSVLNMSLLVPTEPDREEGPTLP

SEQ ID NO: 96290 - protein, 128 aa, Gossypium hirsutum
  unsure (1)..(128): unsure at all Xaa locations
  Clone ID: LIB3135-037-Q1-K1-D5.pep
EEFYVGTIFVFGETDNQNDLGNTAGNEGNSYRVWRLQVGTEVAYFQEALXNDSIRCTKLYTEYHLYLCKKVLXECIYPQADMTNIYYXAQKVEVXKIAFTGVSQDAWRHVLQQTLSSDMPFVQLTCHT

SEQ ID NO: 96291 - protein, 55 aa, Gossypium hirsutum
  Clone ID: LIB3135-037-Q1-K1-D6.pep
KSFARDPFFYFQTLPNGGRAITLFRVRRTIMEYWDLPCLIRRPALRTLRRSFYIC

SEQ ID NO: 96292 - protein, 43 aa, Gossypium hirsutum
  Clone ID: LIB3135-037-Q1-K1-D7.pep
LPAKTKRKNLNEMVKNYDRYLQERAPWKAIIEYKKFCRSTTLF

SEQ ID NO: 96293 - protein, 52 aa, Gossypium hirsutum
  Clone ID: LIB3135-037-Q1-K1-D9.pep
QRCFLFLSFLTILMNCLIYPKRCFVHHCIYPQKTEVKARSNLAPTCPHTRPR

SEQ ID NO: 96294 - protein, 45 aa, Gossypium hirsutum
  Clone ID: LIB3135-037-Q1-K1-E12.pep
AHAFEMRQRVSSLKVYPCMRSKSYNGSMRQDPHLKTNLTSKKGWD

SEQ ID NO: 96295 - protein, 46 aa, Gossypium hirsutum
  Clone ID: LIB3135-037-Q1-K1-E6.pep
PLTISPEFNPYYDIEQDPHVRPFFFRIVSFLHESRKRLSSLTANKI

SEQ ID NO: 96296 - protein, 113 aa, Gossypium hirsutum
  unsure (1)..(113): unsure at all Xaa locations
  Clone ID: LIB3135-037-Q1-K1-E7.pep
PTLTYGLNLIFVLTRAYVGSVTNACFFNSTCIRTNTKDREKKNYTLPDQKQXPPHEKEPLLIFYESSXKQIPTCEMEQSWMKEHXLLSPVRGRKACEKHHRKHNRIGPALQLN

SEQ ID NO: 96297 - protein, 99 aa, Gossypium hirsutum
  unsure (1)..(99): unsure at all Xaa locations
  Clone ID: LIB3135-037-Q1-K1-F6.pep
YLLGDMTILIDAGLEGLKDVVALAPPPENGSTERYPEDDTYFICTXPENGPILISNDAVAVLDPQTRLARDEVAYCVCAPLVTLIFTVSSMSLSWTSVI

SEQ ID NO: 96298 - protein, 80 aa, Gossypium hirsutum
  Clone ID: LIB3135-037-Q1-K1-F8.pep
KRDEWAEGMCVPRGMCGPRYVWWPAVRDMRGIRGAPMVLRSDHPERLPRSVLFWRLCKVNFPQMTLALSRWAGILINKWA

SEQ ID NO: 96299 - protein, 94 aa, Gossypium hirsutum
  unsure (1)..(94): unsure at all Xaa locations
  Clone ID: LIB3135-037-Q1-K1-G5.pep
MRSTTHFLILLLGEDPLGAASFGTYXFTNYGKPTTAVYEPTYEKATSYEHKPSVYVPTEKEQPVPEPLFVTPPXIETPDAWPPLYESTGKENAP

SEQ ID NO: 96300 - protein, 145 aa, Gossypium hirsutum
  Clone ID: LIB3135-037-Q1-K1-G7.pep
VTTINPTLVGDPRPSKHCRGFAPSGCVPSKIGFCSSHELNGEKFSGSGKSCNQINASETRISITSEDGLHEDHEHEKDPTFSSSGTVLPESHSTCFYQCCFGCLHALLSWMPKALVTEWTSDESHWTAVDVYETAALLSAHHLST

SEQ ID NO: 96301 - protein, 143 aa, Gossypium hirsutum
  unsure (1)..(143): unsure at all Xaa locations
  Clone ID: LIB3135-037-Q1-K1-G8.pep
PTRPPTRPFTRPLTCREEWEQFGMVVPWCSQVEVLFHPSLGCFVTHCGWNSTLESMAAGVPVVAFPQWTDQRTNAKLIEDVWGNGVRVSANEEGMVERDEIDRCLDLVMGDDKKGIEVKKNVEKWKRLAREARMEGXLLGYEA

SEQ ID NO: 96302 - protein, 62 aa, Gossypium hirsutum
  Clone ID: LIB3135-037-Q1-K1-H11.pep
KLPCHTAASMQLPREFTLFAVLMQTNQIALSHIPKANNLAWWQLHSTTSIYKNIPAVFMMAA

SEQ ID NO: 96303 - protein, 119 aa, Gossypium hirsutum
  unsure (1)..(119): unsure at all Xaa locations
  Clone ID: LIB3135-037-Q1-K1-H2.pep
HLIILLLGVFSLATTAVGTXHARHDGKPPTLLFKPAKVXKPPPYEXHAYKPPNAKPSPYEHKPSVYEPPKKVLPEPMATAYTPSKKEKPEPEPPVYEPSTNDKPEPNTPDYTXPMKEKP

SEQ ID NO: 96304 - protein, 62 aa, Gossypium hirsutum
  Clone ID: LIB3135-037-Q1-K1-H7.pep
ALAMGSTKVSALRVLVRGLDDRHSLVKTQLGRSANAWLLLAMRRSWSKCTYNSHSTTEFGNG

SEQ ID NO: 96305 - protein, 83 aa, Gossypium hirsutum
  Clone ID: LIB3135-037-Q1-K1-H9.pep
LRISGEQTVSHYIPWKVVLYHLKGHASSLRLTDGRPSPQQGALIHSVNWLYLQKTLLPMTLSAALFIGPPPANFTSFELRTRG

SEQ ID NO: 96306 - protein, 113 aa, Gossypium hirsutum
  Clone ID: LIB3135-038-Q1-K1-A3.pep
PRVRPRVRPRVRGMVSSILQIVIAPITAGLLLNRVFPRLCEAMRPFLPPLSVLDTACCVGAPLAININSGLSPFGLTDSVLIAAFHLSAFIAGYFLRGSLLHKAPDVKALRRT

SEQ ID NO: 96307 - protein, 45 aa, Gossypium hirsutum
  Clone ID: LIB3135-038-Q1-K1-A8.pep
SVGIGKIVEFSFTRVVDCAFSGFLPHGSPDCSGTLNIVYHVWLSP

SEQ ID NO: 96308 - protein, 62 aa, Gossypium hirsutum
  Clone ID: LIB3135-038-Q1-K1-A9.pep
PIQTQSSQIHALELKGLHDSYHPFFFKPDSVRPSRSPRELSSSTLTQLQGALVGCVFQKKPV

SEQ ID NO: 96309 - protein, 117 aa, Gossypium hirsutum
  Clone ID: LIB3135-038-Q1-K1-B1.pep
IAAHLEALEFDVSLVATEWFLCLFAKSLPSETTLRVWDVLFYEGAKVLFHAALAIFKMKEEDLLLAHQVGDVINIIQRTTHHLFDPDELLTVAFNKIGFMTTNTISKQRKKQEPGVM

SEQ ID NO: 96310 - protein, 69 aa, Gossypium hirsutum
  Clone ID: LIB3135-038-Q1-K1-B11.pep
CLQTHTMETITKQKLRGLKNSFTFILPLQEFFPISFNCNLNQRTIRGSLSHLIKVYHILLEMEIRPHPT

SEQ ID NO: 96311 - protein, 84 aa, Gossypium hirsutum
  Clone ID: LIB3135-038-Q1-K1-C10.pep
EGEVLTEKIGVETWVRALSVSSLPTTPAERFSILFKERAKWEWKDLEPYIRDLNVPGLSSEALLLKYTRRSQPSIDAEPVFSAR

SEQ ID NO: 96312 - protein, 125 aa, Gossypium hirsutum
  Clone ID: LIB3135-038-Q1-K1-C12.pep
PTRSGARWRRTTGQEVYSPVLLAFTYENMETWKSSHLTKATAMDPGYTLPLNVALITLQELSDGTALLRLAHLYEEAEDSTYSQLAKVELKKMFNGRTIKEVQEMSFTTNHVKSEMKKLSWKVEG

SEQ ID NO: 96313 - protein, 79 aa, Gossypium hirsutum
  Clone ID: LIB3135-038-Q1-K1-C2.pep
PVFAEYIPQRGYHLHDVKAYGQMLKDAGPDHVIAEEPTHQLIHDLGRGLDKTEKDKDSFITDFYEEDYDYPWGTERKAD

SEQ ID NO: 96314 - protein, 50 aa, Gossypium hirsutum
  Clone ID: LIB3135-038-Q1-K1-C9.pep
YILFVCSRTKACIPMSERRLSLFFFIFSLSSARLCQTLIYMLNSKSGRVG

SEQ ID NO: 96315 - protein, 58 aa, Gossypium hirsutum
  Clone ID: LIB3135-038-Q1-K1-D1.pep
TFICRIKTYFSAFVLTKVSLLISCTLLCESRIMVRERKEKKVKGTRLVSCFFTNWCLV

SEQ ID NO: 96316 - protein, 52 aa, Gossypium hirsutum
  Clone ID: LIB3135-038-Q1-K1-D11.pep
ETDGCANVPIFCRPGVGDLWIYMWPDTIQPYMQKPREPYAGCGLTNQGTDRN

SEQ ID NO: 96317 - protein, 60 aa, Gossypium hirsutum
  Clone ID: LIB3135-038-Q1-K1-D4.pep
GNLLNPTIDILNKPIKCHHNILNKTQIDILNKPIKCHHNILNKTQNEDEHLSLNKEGGSA

SEQ ID NO: 96318 - protein, 82 aa, Gossypium hirsutum
  Clone ID: LIB3135-038-Q1-K1-D5.pep
ILFMVRQSVRSVDRRNDPDSTDVVLSSVSRYRNMLQLHSPRALLHPVRRPQFPLCPRLFSVIKTIEVPCMLIVGRTLVSNAW

SEQ ID NO: 96319 - protein, 152 aa, Gossypium hirsutum
  Clone ID: LIB3135-038-Q1-K1-D6.pep
GELDVSKNRLSGLLPNNLGSCVSLEELFLDGNLFEGPIPSSLSSLRGLAALDVSENNLSGKVPEFLASFGTLKYLNLSFNDFEGVIPSEGVFKNSSATFVEGNNKLCGGITELHLSRCNSEKSSNTSLRLKFVIVAVILGVTLIFLFLLIML

SEQ ID NO: 96320 - protein, 71 aa, Gossypium hirsutum
  unsure (1)..(71): unsure at all Xaa locations
  Clone ID: LIB3135-038-Q1-K1-D7.pep
PTRPLRIIIDYIYWLSCSTGGQTFLSPISCEQXTTLWLSQDLESQILSNIFLMIETLVFGPQELNLALKPY

SEQ ID NO: 96321 - protein, 51 aa, Gossypium hirsutum
  unsure (1)..(51): unsure at all Xaa locations
  Clone ID: LIB3135-038-Q1-K1-D8.pep
MVELYYTTIFRRNPLCILSLASGVVSNWESXARHHNFAFLWNRACFKRPKP

SEQ ID NO: 96322 - protein, 47 aa, Gossypium hirsutum
  Clone ID: LIB3135-038-Q1-K1-E11.pep
LRLHSPTLLSTYLTDKTVVLCAKSHDSHGNQRGEFNGDAHILFKEKK

SEQ ID NO: 96323 - protein, 86 aa, Gossypium hirsutum
  unsure (1)..(86): unsure at all Xaa locations
  Clone ID: LIB3135-038-Q1-K1-E2.pep
LTPVQTAKEVDYVVDYKWSSXMEIXLEEGLEHRMYLRLPTYXHRRYCTMWKLTMKLCTDWCNDLNELVEDLKEYPNAFIRTIVINN

SEQ ID NO: 96324 - protein, 77 aa, Gossypium hirsutum
  Clone ID: LIB3135-038-Q1-K1-F2.pep
PTRPGGLIGRCGSNISRIRIESGATIKVYGGKGEQNVRHIQFSGSSQQVALAKQRVDECIYSQMIQQAGTQPPGLQM

SEQ ID NO: 96325 - protein, 105 aa, Gossypium hirsutum
  unsure (1)..(105): unsure at all Xaa locations
  Clone ID: LIB3135-038-Q1-K1-F3.pep
DWKRERGWRTXFKRPGVDAFLEHLAKFYEIVVYSDQMNMYVDPVCERLDPNHCIRYRLSRGDTKYQNGKHYRDLSKLNRNPAKILYVSAHAFESSLQPENCVPIK

SEQ ID NO: 96326 - protein, 55 aa, Gossypium hirsutum
  unsure (1)..(55): unsure at all Xaa locations
  Clone ID: LIB3135-038-Q1-K1-F5.pep
DSEQCFHYRFLPQDXREPLRRFDQYTWLVTRIVDEXNLFQSLPKDLRRDIKRHLC

SEQ ID NO: 96327 - protein, 53 aa, Gossypium hirsutum
  Clone ID: LIB3135-038-Q1-K1-F9.pep
HEWGVLQGNKTYHICHCLFTWTEQSLISCLPADIWIRTLSLIGMQTALLNKPS

SEQ ID NO: 96328 - protein, 73 aa, Gossypium hirsutum
  Clone ID: LIB3135-038-Q1-K1-G12.pep
GRKTRAQTTHPRRRAKKPPEAEPQPPKAPGYTPPKKEEPEPRTPRHEAPKKPTLGQYARHPPLGKPQQRDPNG

SEQ ID NO: 96329 - protein, 55 aa, Gossypium hirsutum
  Clone ID: LIB3135-038-Q1-K1-G2.pep
KDPPLPLKEKVQLPFKLLEKGILSENSFSGNRTGRVIRSLSFAHGKGFYFIFCIS

SEQ ID NO: 96330 - protein, 78 aa, Gossypium hirsutum
  Clone ID: LIB3135-038-Q1-K1-G6.pep
NPNPIKLFVIDRWCYLTSFKKPRRNSEKYAYRPAPRPAPARNPPPQPAHHAPCSNTANSESEGTLLGGIGSTISQGMA

SEQ ID NO: 96331 - protein, 73 aa, Gossypium hirsutum
  Clone ID: LIB3135-038-Q1-K1-G7.pep
PRVRGRVGFYPGGKRQLYGYMAMKEDLDSFNQHSQGKSMLKFEMRSYQEMVVKHITRMREDNQQLMFYKNKVA

SEQ ID NO: 96332 - protein, 43 aa, Gossypium hirsutum
  Clone ID: LIB3135-038-Q1-K1-G9.pep
LFFFFSDVTRDVLYINLLKIASRHIYGQLFHSGFRLLSKKVKT

SEQ ID NO: 96333 - protein, 60 aa, Gossypium hirsutum
  Clone ID: LIB3135-038-Q1-K1-H10.pep
REVYANEPWEDFQGGPLNRGPLSYLSRTFGHGLRLFETHMLHWLDNIRRGKGTLGMTCKR

SEQ ID NO: 96334 - protein, 55 aa, Gossypium hirsutum
  unsure (1)..(55): unsure at all Xaa locations
  Clone ID: LIB3135-038-Q1-K1-H7.pep
GRDSDKRKRDTAFYNECRGDGNIIKMRFNXKKPXXSDASMSSEEPACSXSGRTDS

SEQ ID NO: 96335 - protein, 46 aa, Gossypium hirsutum
  Clone ID: LIB3135-038-Q1-K1-H8.pep
RAHLTNRAIFKCGWVHLVTECARTAIAVLLILRDDTVQSHGNCMKE

SEQ ID NO: 96336 - protein, 75 aa, Gossypium hirsutum
  Clone ID: LIB3135-039-Q1-K1-A2.pep
TKLKNLKERRPTRGNRRSSSSPLGIILPNIKLLGLIYFCGVGPSLKSSHRIASFGTFFLVCLEDHFGMYKLVRCV

SEQ ID NO: 96337 - protein, 78 aa, Gossypium hirsutum
  unsure (1)..(78): unsure at all Xaa locations
  Clone ID: LIB3135-039-Q1-K1-A3.pep
CFACXXEMKCQKKMSCTIFFIKMFQIPMKREVFLNLGPDVRVWWLRREYAEQNPIASFSSLVATSSFPFQPYHQPPPP

SEQ ID NO: 96338 - protein, 84 aa, Gossypium hirsutum
  unsure (1)..(84): unsure at all Xaa locations
  Clone ID: LIB3135-039-Q1-K1-A9.pep
SRCRCKASAIEFKFRYHQAKTLHSRVREHRSLTSYSPXPFFFFFFFFFFXXXIKYFFLILEGQINYYVILKLKLSYTFFCLIIY

SEQ ID NO: 96339 - protein, 90 aa, Gossypium hirsutum
  Clone ID: LIB3135-039-Q1-K1-B1.pep
TEKTDVYSMGIVLMELVSGKMPTDILFGVDMALPAGTLCELGEINNCDSVKVCFEPCNSCLISGDCLFSFKPQNNPHFICLINIDMVCEV

SEQ ID NO: 96340 - protein, 152 aa, Gossypium hirsutum
  unsure (1)..(152): unsure at all Xaa locations
  Clone ID: LIB3135-039-Q1-K1-B11.pep
CPSYPYTDPYYGGVVPPYVPESLVHSHSLGVHPARMALPLEMAEEPVYVNAKQYHGILRRRQSRAKAELEKKLIKVRKPYLHESRHLHAMRRARGCGGRFLNTKKLDSDASKATPNKSSDTSLNLPSQCPEXTSGISVTNQMSWNDNSSCGH

SEQ ID NO: 96341 - protein, 56 aa, Gossypium hirsutum
  Clone ID: LIB3135-039-Q1-K1-B2.pep
CREIPINQIWEIHISSTKTKNCYIKLSPAPTISHLNPQIKRNETPIFSSPIFLYIN

SEQ ID NO: 96342 - protein, 55 aa, Gossypium hirsutum
  unsure (1)..(55): unsure at all Xaa locations
  Clone ID: LIB3135-039-Q1-K1-B5.pep
VMAILGGCLLAKDISAKIQHKKPLVLHKVTFFWLVASDISVQTLDYLHACSCWXF

SEQ ID NO: 96343 - protein, 122 aa, Gossypium hirsutum
  unsure (1)..(122): unsure at all Xaa locations
  Clone ID: LIB3135-039-Q1-K1-B8.pep
MPLSEGPWTIFGQYLTVQPWTMAFDPIQAYASVVMTXNLIPXLPSYLYNSKIITEIGELVGKVVKLDMSTDSRTRGRFARLAVYVDLEKPLVSQILINGRKQKVEYESLSIICFHCGRYGHA

SEQ ID NO: 96344 - protein, 82 aa, Gossypium hirsutum
  Clone ID: LIB3135-039-Q1-K1-C12.pep
HASKLLEKVNVNDLITSVISGGGSGPGADAGASGAAGGGADDGAAADDENKEEEKEESDDDMGYNMGDYTHDLTQRISLRIC

SEQ ID NO: 96345 - protein, 145 aa, Gossypium hirsutum
  Clone ID: LIB3135-039-Q1-K1-C2.pep
RKSDYVREPIPKAGLESLWKKMMELEKPKMDFNPYGGKMAEIAAEEIPFPHKAGNLWKIQYLANWNEAGIEATNPYIDLTRRLHEFMTPFVSKNPRQAFLNYRDADLGSSSHGKASYSEARLNGMKWFMGNFDRLVQIKTDVDPT

SEQ ID NO: 96346 - protein, 51 aa, Gossypium hirsutum
  Clone ID: LIB3135-039-Q1-K1-C7.pep
VMIDSTYSRKLLSHSLKRQLNHIGSIDINRCATLFIRASKDIASLPSVGGG

SEQ ID NO: 96347 - protein, 25 aa, Gossypium hirsutum
  Clone ID: LIB3135-039-Q1-K1-C8.pep
TIYSSPYPIYRRAGLNIKAQLHLYY

SEQ ID NO: 96348 - protein, 94 aa, Gossypium hirsutum
  Clone ID: LIB3135-039-Q1-K1-C9.pep
TQSIGQDLIGIFEIRVLGIDKLCFTPDLGGRKAISNPSELATMTSFLGRSVHSRTRFPIFPHIRWLSIAFAILSTVLHLLRRAELPLGFEFRLD

SEQ ID NO: 96349 - protein, 70 aa, Gossypium hirsutum
  Clone ID: LIB3135-039-Q1-K1-D2.pep
FVSSWLMITIYIHACMYAFLMNFFRVYRTYVCLLLDVLWLNLRRHNVIFIWYQVGITVTVSIFGHWGVNK

SEQ ID NO: 96350 - protein, 39 aa, Gossypium hirsutum
  Clone ID: LIB3135-039-Q1-K1-D5.pep
IAKISVYIFYETALSKFLITLGILAHINSGINSYSFTCF

SEQ ID NO: 96351 - protein, 50 aa, Gossypium hirsutum
  Clone ID: LIB3135-039-Q1-K1-D8.pep
QVLLGFSPIHVMTVVFLTFQAHIIFHNNCWVWIGTRFLIFRFQCYTLHVL

SEQ ID NO: 96352 - protein, 76 aa, Gossypium hirsutum
  unsure (1)..(76): unsure at all Xaa locations
  Clone ID: LIB3135-039-Q1-K1-E5.pep
LAQTDVTIKSIXCVMEPTLHFEVPTKPKSFGFFFSRCLCWVPLWGKHQSSLRMKNVIGLALKITSRLHVFIQRVLR

SEQ ID NO: 96353 - protein, 57 aa, Gossypium hirsutum
  Clone ID: LIB3135-039-Q1-K1-E6.pep
SIFYTVFVSIYISLNLTFSRATLPEKPCSFTTFSFSLTNLCFTQFLTRKSIMGSCGN

SEQ ID NO: 96354 - protein, 95 aa, Gossypium hirsutum
  unsure (1)..(95): unsure at all Xaa locations
  Clone ID: LIB3135-039-Q1-K1-F4.pep
GVRLKPNVIFGLKLIDLSRDSLGIEQDEPLGVKFGCKLYRMPDEHVFLMKPRDXLLRRVKXLASLGLTLVEQEMLTNTAPIALRVLEACIYYGAI

SEQ ID NO: 96355 - protein, 81 aa, Gossypium hirsutum
  Clone ID: LIB3135-039-Q1-K1-F9.pep
HAYVHASGFFYGLLLKDMDMAEPNVLWLIFGILHMILYASYKNHAKKMVVEDPKLQLRDHHIVDVIKLESGESTDENTTDP

SEQ ID NO: 96356 - protein, 53 aa, Gossypium hirsutum
  Clone ID: LIB3135-039-Q1-K1-G12.pep
PHKCMFYILTKVIRRIYSGTRDIHFSEIYNQQLPHHVFTKGTKIRCIGLFSKV

SEQ ID NO: 96357 - protein, 72 aa, Gossypium hirsutum
  Clone ID: LIB3135-039-Q1-K1-G2.pep
TALTPCAILDVLSPPYSDDLGRPSTYFLDFPIPSLPGYAWLEEREVKLPCDLVVKGAPYLGPPLDVPDDDLC

SEQ ID NO: 96358 - protein, 64 aa, Gossypium hirsutum
  unsure (1)..(64): unsure at all Xaa locations
  Clone ID: LIB3135-039-Q1-K1-G3.pep
DAWARINFLLCLNNWNFTFRIVKNFHCSWEIKMKCTLLYLSXQNQKLRSTRISNKKKKAREEKF

SEQ ID NO: 96359 - protein, 40 aa, Gossypium hirsutum
  Clone ID: LIB3135-039-Q1-K1-G7.pep
TQKIKSGELTDHINLMNLHLKPKLSSSNILQDRRTRALPH

SEQ ID NO: 96360 - protein, 72 aa, Gossypium hirsutum
  Clone ID: LIB3135-039-Q1-K1-G8.pep
ETLCRGEKRGSSLGLRPPSNSGSRTSRATIYGGRRVKTLALSSEIQVTLFPFNISVVYSMYACFRKKEKKIK

SEQ ID NO: 96361 - protein, 133 aa, Gossypium hirsutum
  Clone ID: LIB3135-039-Q1-K1-H2.pep
PRRENPLQLKCLNHISLVCRSVEKSVDFYQNILGFFPVKRPGSFDFSGAWLFNYGIGIHLLQSDNPDSMPKIGGINPKNNHISFQCESMAPLEKKLKELNIEYVTSGVEEGGIRVDQLFFHDPNGYMIELCNC

SEQ ID NO: 96362 - protein, 63 aa, Gossypium hirsutum
  Clone ID: LIB3135-040-Q1-K1-A11.pep
LNSFLVIEFIGIWVFIDIYVSEVQLTKWCCLDRKNMLARHEESCLDFKSMRSFIPTFPDPYFL

SEQ ID NO: 96363 - protein, 64 aa, Gossypium hirsutum
  unsure (1)..(64): unsure at all Xaa locations
  Clone ID: LIB3135-040-Q1-K1-A12.pep
NLQTSYIFIKQIFGPKAPLQSGMGSRVRPASEQKRSSTTQYRYPSLTRTRQRQRNLFSXFRPFF

SEQ ID NO: 96364 - protein, 42 aa, Gossypium hirsutum
  Clone ID: LIB3135-040-Q1-K1-A2.pep
CPIIDSTRTLSDKFFFECQTLTTIVHTWTKQNAWSDEWADAW

SEQ ID NO: 96365 - protein, 53 aa, Gossypium hirsutum
  Clone ID: LIB3135-040-Q1-K1-A4.pep
KSKSFFYHAHILKTYIRSGCSFLKISHQLYGSKMCLFRLHPTLLNHHVGSTYT

SEQ ID NO: 96366 - protein, 93 aa, Gossypium hirsutum
  Clone ID: LIB3135-040-Q1-K1-A5.pep
PRVRGNEGGKNENIWTTRWAAKRMITMMLFGFGVGFVYYGIQLNAENLNFNLYLTVIINAAMEIPAVFIGGILLGFTDRRLLSSLSAISAGVS

SEQ ID NO: 96367 - protein, 110 aa, Gossypium hirsutum
  Clone ID: LIB3135-040-Q1-K1-A6.pep
PTRPRKQRTAFPPNFVHSLDGSHMMMTAVACRDAGLYFAGVHDSFWTHACDVEKMNQILREKFVELYSMPVLENLLESFETSYPSLVFPPLPERGNFDLLEVLKSPYFFN

SEQ ID NO: 96368 - protein, 69 aa, Gossypium hirsutum
  Clone ID: LIB3135-040-Q1-K1-A7.pep
FKNLNTKFKQFVEGTRIITTTIIFLQCLKIYEKPKTRWLLLDLILPQASSGTDSLEHNRLSEPYNIFLI

SEQ ID NO: 96369 - protein, 106 aa, Gossypium hirsutum
  Clone ID: LIB3135-040-Q1-K1-B6.pep
NEVNSMAKHSLCIFHIPTVVFAFLLFLFVRVAGFRCFLYSSYNCRADAVLSNSPLNLSFSLMSRRRMKCLLSFLLTSFSSIGGGSTPANVEASAVLLPFLLFDFCR

SEQ ID NO: 96370 - protein, 45 aa, Gossypium hirsutum
  Clone ID: LIB3135-040-Q1-K1-B7.pep
RFLLKNPSARKQMGMEGRKKVERNYLKKHMYKRFVEVLTRCMRSR

SEQ ID NO: 96371 - protein, 67 aa, Gossypium hirsutum
  unsure (1)..(67): unsure at all Xaa locations
  Clone ID: LIB3135-040-Q1-K1-C3.pep
MQYLNYGAAVSEVEIXLLTGQTTILQTDIIYDCGKXLNPAXLGQIEGAFVQGIGFFMLEEYPTNSKD

SEQ ID NO: 96372 - protein, 90 aa, Gossypium hirsutum
  unsure (1)..(90): unsure at all Xaa locations
  Clone ID: LIB3135-040-Q1-K1-C7.pep
QRHTLLVKIASVREVVLGAPAIVILKHLASRTDAPDIDQIVALVHRPNETFLLVPXADKVTVLFTMRLKDSIDTVLATAFLHELMDSWRS

SEQ ID NO: 96373 - protein, 109 aa, Gossypium hirsutum
  Clone ID: LIB3135-040-Q1-K1-D5.pep
KNPGGTVAPCGGYVAGRKGWVDAAAARLSTPGLGVDCGSTPGDIMRAFFHGLFLAPQMVGEAIKGTFLVAEDMASKGYNVHALTRVPRSDTVQAVHLGNRELLLAFCEA

SEQ ID NO: 96374 - protein, 70 aa, Gossypium hirsutum
  Clone ID: LIB3135-040-Q1-K1-D6.pep
YAGKFVGKDIDSEVRSASREAPGLLEEEVDVVINAPAASRPNVEVARFSWKFLIYIFREVGQNIHLFPSH

SEQ ID NO: 96375 - protein, 52 aa, Gossypium hirsutum
  Clone ID: LIB3135-040-Q1-K1-D7.pep
KTHRKPGLLCPRGSLCFVGRRFISCEFVHRVDFILSTLIFASLVLEKKGSNA

SEQ ID NO: 96376 - protein, 85 aa, Gossypium hirsutum
  Clone ID: LIB3135-040-Q1-K1-E1.pep
DAWENIFSSFGANDYIFDSLVSIAHCNEIEKVREKENEEKEFEKEIEIVQECEREKEIKRKEKEIEKEKEIKKESEVENKIENER

SEQ ID NO: 96377 - protein, 89 aa, Gossypium hirsutum
  unsure (1)..(89): unsure at all Xaa locations
  Clone ID: LIB3135-040-Q1-K1-E10.pep
PTRPASLVRFWCMWGYSFSXWIPTALLLLIPVEILRWIIILIAGSASSCFVALNLKSYIEGANDLKMMVVAAFLLQMALAIFIKVWFFP

SEQ ID NO: 96378 - protein, 71 aa, Gossypium hirsutum
  unsure (1)..(71): unsure at all Xaa locations
  Clone ID: LIB3135-040-Q1-K1-E4.pep
GRVGAILVLGRDLVVVPKLIGPXPPAMSSPEASPERHIEDTWMQELNANRPPTPTRGRPQVANDRGSLAWI

SEQ ID NO: 96379 - protein, 84 aa, Gossypium hirsutum
  Clone ID: LIB3135-040-Q1-K1-E6.pep
NEPDAVVEERKKESEELSRRAKRMTIEIGPSSFASRKKKSRKNTSSLIALMACEGECFWHVIQLQIFQFFVWQNRKANYQIPLD

SEQ ID NO: 96380 - protein, 152 aa, Gossypium hirsutum
  Clone ID: LIB3135-040-Q1-K1-E8.pep
ETLSNNALKRERRARERQVREEEKKKVTTNKTPENQRQQVANNDTMDPSQFLSNRIKSLALLKESGVNPYPHKFDISMSITEFIDKYRSLHVGEHVENTEISLAGRILNKRSSSSKLYFYDLHGNGAKIQVMADARYIHKYIRIPTWMKMSS

SEQ ID NO: 96381 - protein, 55 aa, Gossypium hirsutum
  Clone ID: LIB3135-040-Q1-K1-F11.pep
YPVQDSPKILQDTITNNFITIPTIIACTLILFIHDCLSNGCDSSILISYTLFNKS

SEQ ID NO: 96382 - protein, 64 aa, Gossypium hirsutum
  Clone ID: LIB3135-040-Q1-K1-F3.pep
YGLFPYSTHSRQALYGVNDAFPAAFMFKNYPNPQIFHSDTTHPPLTMQASSPVCISYIPYSSHN

SEQ ID NO: 96383 - protein, 53 aa, Gossypium hirsutum
  Clone ID: LIB3135-040-Q1-K1-F4.pep
VFFYFLKTIPKIFLIYPYFPKECTDFNYNLFYLYFLSFLQKKAFNAINNLLTI

SEQ ID NO: 96384 - protein, 95 aa, Gossypium hirsutum
  unsure (1)..(95): unsure at all Xaa locations
  Clone ID: LIB3135-040-Q1-K1-F5.pep
KVVVPISGGSKAGGSGMSMENSFTHLTRLIIQVQGVAHVRKVRARERYLLALCVERXILVSELDRQCGLFSQNKQPKYQVRFGGERHWYMAYEDI

SEQ ID NO: 96385 - protein, 92 aa, Gossypium hirsutum
  Clone ID: LIB3135-040-Q1-K1-F6.pep
PTRPEGSEEGSSPRASVSDNGGYNSANLASKRALISKLNEEKNATILENNKLQQELELLGREAKRDYSGMKFVYVILVGLVSIILGYLLKLT

SEQ ID NO: 96386 - protein, 67 aa, Gossypium hirsutum
  Clone ID: LIB3135-040-Q1-K1-F7.pep
VGQVFHLTRPASPTFYKYYLSYTIKTNLNRTLKIFDCINLKHTCYLQSITYTYHVHPFVRSLTKNNI

SEQ ID NO: 96387 - protein, 60 aa, Gossypium hirsutum
  Clone ID: LIB3135-040-Q1-K1-F9.pep
NIISYRYPRRVHITKIENALKIVLCNMKLYHNSRTCIQLMLYSEEDQLSVGQMQKFSYML

SEQ ID NO: 96388 - protein, 144 aa, Gossypium hirsutum
  unsure (1)..(144): unsure at all Xaa locations
  Clone ID: LIB3135-040-Q1-K1-G2.pep
IGTVDDSNREIAAFFAHVTHETGHFCYIXEINGASRDYCDETNTQYPCNPNKSYYGRRPIQLYWNFNYGPAGESIGFDGLNXPETDATDPIMYFKTAVWYXVNSVQPAINQGLGATILAINGALECDGVNPCTVERRVEYYIDY

SEQ ID NO: 96389 - protein, 44 aa, Gossypium hirsutum
  unsure (1)..(44): unsure at all Xaa locations
  Clone ID: LIB3135-040-Q1-K1-G4.pep
IKAXYFPLFLKTGTTNGDMILQKSXILIINPSTEPNRYESEISY

SEQ ID NO: 96390 - protein, 120 aa, Gossypium hirsutum
  unsure (1)..(120): unsure at all Xaa locations
  Clone ID: LIB3135-040-Q1-K1-G6.pep
MSKSVIEMPPKGGGSGRSLXKNEMLSKKGDFFAAFHKTGTTXAGKSVHEARTQAAYTRATERLIVCDKNCEKNNYMVKNIYCRGAXTDTDTXAVTDIVRSQIQLHRYHTAIEPMVATALT

SEQ ID NO: 96391 - protein, 88 aa, Gossypium hirsutum
  Clone ID: LIB3135-040-Q1-K1-H8.pep
ENKTDSIPSLSLPLSLLLLAGPMAGHGFIGGCLHTHERRPVLGETGPFRSFSERVRNRGLHDLQYHKERRDPSALFLSVTDNGQTPRG

SEQ ID NO: 96392 - protein, 89 aa, Gossypium hirsutum
  unsure (1)..(89): unsure at all Xaa locations
  Clone ID: LIB3135-041-Q1-K1-A1.pep
HPFFHSSETIAALSKHIHPQGIRPALTTTLKTTSTKVVRTGXSLLTQQYYETKDIILEGAITLDYRSGHMNARAAIDSRLMIDKGYDDY

SEQ ID NO: 96393 - protein, 55 aa, Gossypium hirsutum
  Clone ID: LIB3135-041-Q1-K1-A6.pep
TLLITGHNYDNRFTLSTIVCRIVIDSDYPAHWLYAYYYGLSLLSAQMAHTTTHNI

SEQ ID NO: 96394 - protein, 72 aa, Gossypium hirsutum
  Clone ID: LIB3135-041-Q1-K1-A8.pep
CADHCKYVATEVLKDHGYDGASYDISSCGGILFVIMAGYWPFDEPSLIGLYNKIWEASFSCPSRFSSSARNL

SEQ ID NO: 96395 - protein, 52 aa, Gossypium hirsutum
  Clone ID: LIB3135-041-Q1-K1-A9.pep
SFIQDSTNPRNPHHKSSQIVPWSHKLSNSWIIVHVFILVENWSANLFYLAYK

SEQ ID NO: 96396 - protein, 51 aa, Gossypium hirsutum
  Clone ID: LIB3135-041-Q1-K1-B11.pep
CNFLGGFEVVVRNKRGKLRTRNFHVISALLLDGFPIRFRVRLTAAAVLLHL

SEQ ID NO: 96397 - protein, 56 aa, Gossypium hirsutum
  Clone ID: LIB3135-041-Q1-K1-B2.pep
PALPVFFSVVVSARSRVATSYEMIRTVAARGARIGTLLAMDPIFDFFLSFLWSWSK

SEQ ID NO: 96398 - protein, 64 aa, Gossypium hirsutum
  Clone ID: LIB3135-041-Q1-K1-B7.pep
ALPTKVASNCSFRFDTRYHGLWHARRMCMSPGPAATNMGNILAPTAVMGVFLALIVADLGPLTE

SEQ ID NO: 96399 - protein, 78 aa, Gossypium hirsutum
  unsure (1)..(78): unsure at all Xaa locations
  Clone ID: LIB3135-041-Q1-K1-B8.pep
SAYRPSALWATARGPPPQPAQHAPPPAPAQSGSGGSLLGGIGSTISHCMAFETVSAASHKACXAVIGPRTIQHETAVS

SEQ ID NO: 96400 - protein, 90 aa, Gossypium hirsutum
  Clone ID: LIB3135-041-Q1-K1-C10.pep
HTYGHEYIHYVGSWGPAIIGGAHNEGLAALAETMNKGTSFGAPRLLNNVIAEEGITARPTIKMGRYINSGTEACMGVLRLAHAFTGREKI

SEQ ID NO: 96401 - protein, 57 aa, Gossypium hirsutum
  Clone ID: LIB3135-041-Q1-K1-C4.pep
ISVSQQIVRRRHYRIDKIYQHFFEDEKLKLELKPKTIVVLILIISFIMYRLSEIMCI

SEQ ID NO: 96402 - protein, 70 aa, Gossypium hirsutum
  unsure (1)..(70): unsure at all Xaa locations
  Clone ID: LIB3135-041-Q1-K1-C5.pep
ARKKSSKAVGDPNKPLRPANTFSLFMKAFXAILXYKHPKDKSASTLGTSCVEISLNLSVSKKPPYLAKAL

SEQ ID NO: 96403 - protein, 84 aa, Gossypium hirsutum
  Clone ID: LIB3135-041-Q1-K1-C6.pep
NVWAKTLRESVISEPHRCVCHIGVILYSLAIYVFTLGEVGSQSFIEDQGVRRVNIALRIGTLILCGGHAGTNARVHTICDVSTK

SEQ ID NO: 96404 - protein, 54 aa, Gossypium hirsutum
  Clone ID: LIB3135-041-Q1-K1-C7.pep
YFIILYRLPHFRLSCAYSRDERIRSTSYWCTLNYITIKYIHYFYGLECNSHMLL

SEQ ID NO: 96405 - protein, 107 aa, Gossypium hirsutum
  Clone ID: LIB3135-041-Q1-K1-D8.pep
REFDSNGFDIFSIIDCKSLLVLPKYVAFKGYNNKYLCVRENYITFSADDIGDSTVACETFVTDDGKVHIKSICAGKFWWADPKWIWVGYDDPSNNDRTTFRPVKIDR

SEQ ID NO: 96406 - protein, 64 aa, Gossypium hirsutum
  Clone ID: LIB3135-041-Q1-K1-E1.pep
IVQDHMMWLVVCLELKYLNASSSHKHREGYTRMTIQFDAAFDNRNFKWAFGIVVWGERGRLVAK

SEQ ID NO: 96407 - protein, 42 aa, Gossypium hirsutum
  Clone ID: LIB3135-041-Q1-K1-E10.pep
DAIHATYDECLKCGMDGYVSEPFMEKNLYHAVANFFKAKPTS

SEQ ID NO: 96408 - protein, 107 aa, Gossypium hirsutum
  Clone ID: LIB3135-041-Q1-K1-E12.pep
QSVLPNDAAAKAGAANSSGTGGCTECGMQCKLKNTLDNCVDDRPYTKPRMWKRRCMEPCMKSHYIGDDSCAICCCLTQCQAKGYEPTEQTTGHIPRKVHIMEDMHDI

SEQ ID NO: 96409 - protein, 86 aa, Gossypium hirsutum
  unsure (1)..(86): unsure at all Xaa locations
  Clone ID: LIB3135-041-Q1-K1-E7.pep
GRVGLGMGGAKRHREVLXGDNIHGITYSANRLFARRGRVKRINGFIYNETRGVLKILLYNVIRDAVTYTDHSKRNTETXMDVAYAL

SEQ ID NO: 96410 - protein, 89 aa, Gossypium hirsutum
  unsure (1)..(89): unsure at all Xaa locations
  Clone ID: LIB3135-041-Q1-K1-E8.pep
DPLRTYSYRFRAAVLMGDHKENEAIAELTRALALKPDLLLLHLEADFHDSMGEYAFTVRDCETHICLEPNHADTVXLYNKRREPVLERY

SEQ ID NO: 96411 - protein, 53 aa, Gossypium hirsutum
  unsure (1)..(53): unsure at all Xaa locations
  Clone ID: LIB3135-041-Q1-K1-F1.pep
MMLCLIYDFVMVSLCFLCPSTILCLHEXHFPSLWIKXKKKKKXKNKNKKKNKK

SEQ ID NO: 96412 - protein, 96 aa, Gossypium hirsutum
  Clone ID: LIB3135-041-Q1-K1-F8.pep
DFGAIGDGKHYDTSSIQLAIESCGTKPCYVTFPTGTYLTATIFLKSNVILDIPKGSTILGGTKLEDYPKEFDRWYVILAENARDVGITGGGVVDGQ

SEQ ID NO: 96413 - protein, 47 aa, Gossypium hirsutum
  Clone ID: LIB3135-041-Q1-K1-G11.pep
IIFFLNFNYILFIFFIFFFFFIFFFFFLNVLNAMLSDNKHNGSTSQN

SEQ ID NO: 96414 - protein, 69 aa, Gossypium hirsutum
  unsure (1)..(69): unsure at all Xaa locations
  Clone ID: LIB3135-041-Q1-K1-G3.pep
FYRAGIALFVATLLFLYMGILTVIGVVNEKTNFPTVGIQGIASALRXGVIFYLVYCKCLHFMWPYYTRK

SEQ ID NO: 96415 - protein, 81 aa, Gossypium hirsutum
  Clone ID: LIB3135-041-Q1-K1-G4.pep
STIFLFTKNTYIHSYTHTFRVLVIHGKTNASLYWCLRELVHILKCSSAYFPSRPFLLEVSHELYHSTLPCIVQDDLWIPDP

SEQ ID NO: 96416 - protein, 93 aa, Gossypium hirsutum
  unsure (1)..(93): unsure at all Xaa locations
  Clone ID: LIB3135-041-Q1-K1-G6.pep
ILLCAVCITAHLISRSDHVLRTPLHCWIMAIVMALLSGFAXVYTEAIINNRPSRNINLQNFWLYIFVMAFNACSILIQVFDAVIIHGFFSLYS

SEQ ID NO: 96417 - protein, 66 aa, Gossypium hirsutum
  Clone ID: LIB3135-041-Q1-K1-H3.pep
AHAGLGQVELSELDGPFVKISLKGRFWHKRTTVVARVGNYLKQRIPEILEVEIEDEKQLYDSPENF

SEQ ID NO: 96418 - protein, 65 aa, Gossypium hirsutum
  Clone ID: LIB3135-041-Q1-K1-H5.pep
MGCILESGLLPALLAAVALLISSEEAARDPAETTTENNNGEAATATTQAELEDGHGRYHGRRHGW

SEQ ID NO: 96419 - protein, 65 aa, Gossypium hirsutum
  Clone ID: LIB3135-041-Q1-K1-H7.pep
VVYLVCFFYYTLLCHCCSVSSFVIVSCADFTAAIKLPVAFCVLSQLLVMDINRDVSLSDNMFLSL

SEQ ID NO: 96420 - protein, 42 aa, Gossypium hirsutum
  Clone ID: LIB3135-041-Q1-K1-H8.pep
ATRSSSIASASEDKVVNHSLSGSDLSNRNNVILREAKQTRPS

SEQ ID NO: 96421 - protein, 98 aa, Gossypium hirsutum
  Clone ID: LIB3135-042-Q1-K1-A4.pep
KKIVYSIQINTFKRKKVFYLASSFSKKKKNMSTIVGVWMDEFERLKERVQSKRSFMLKAKKDQQLVKERHVEEEKEAGKETIMSEATLCMLMDRFAPC

SEQ ID NO: 96422 - protein, 53 aa, Gossypium hirsutum
  Clone ID: LIB3135-042-Q1-K1-B10.pep
RPAEGIRVLSWRRTKPCQEIGPRGQVQMMSALTMAKGTLPWSFPWPIHIPIIG

SEQ ID NO: 96423 - protein, 51 aa, Gossypium hirsutum
  Clone ID: LIB3135-042-Q1-K1-B4.pep
FILHKSFNKGKTGLNEMFTLRNAFTNHIYGASNKKENARAANDEMGNVSLE

SEQ ID NO: 96424 - protein, 46 aa, Gossypium hirsutum
  Clone ID: LIB3135-042-Q1-K1-B7.pep
LIEPHSGSAYLCQMSVCITYSSPQSLLGGLIWNHWGTGLFLVRIIC

SEQ ID NO: 96425 - protein, 52 aa, Gossypium hirsutum
  Clone ID: LIB3135-042-Q1-K1-C10.pep
LNLYHAHYLASHKVTDNIGAFISVAYILVLYCEHASRGTALNIPLSSRIFDR

SEQ ID NO: 96426 - protein, 88 aa, Gossypium hirsutum
  unsure (1)..(88): unsure at all Xaa locations
  Clone ID: LIB3135-042-Q1-K1-C12.pep
CGMITHESLSMRITNNRGWFHKASALSIADHSQYILYLHSIYMVLIRLSVRRLTAACETVVSVLIFSRAALLRSEISMRSFYIVXTRG

SEQ ID NO: 96427 - protein, 94 aa, Gossypium hirsutum
  Clone ID: LIB3135-042-Q1-K1-C4.pep
MAVLVILLSWMAFPALACSYNGGGSNNKGCKDCIAEQMKYGCPRCVPLLRCMARCLWGGSSRSKCMRRCDCDGGKPTLSDCKKCMSRCKCSCVA

SEQ ID NO: 96428 - protein, 95 aa, Gossypium hirsutum
  Clone ID: LIB3135-042-Q1-K1-C7.pep
VRNPLLISTVSNFTDLFLKPVPRLLPRLSVHRSNGVLQEGKTPLSFLFYFSPSKEKKEKKLKENEKRSRENREIAFPYSDVLYFVTISPFLFNNK

SEQ ID NO: 96429 - protein, 47 aa, Gossypium hirsutum
  Clone ID: LIB3135-042-Q1-K1-D1.pep
LTIDKKMRRLSGLLCIYIDLSISHFGTSLPQNMVTGECQRNPGANEW

SEQ ID NO: 96430 - protein, 90 aa, Gossypium hirsutum
  Clone ID: LIB3135-042-Q1-K1-D2.pep
TDQAKLITDYVYFLIDMFFPHLLHHFYPCAFHFYFNLINISFFIILITLYLYMLCIFIYYYSFTFHMSFFLFFIMIFFINIIFIFIILLF

SEQ ID NO: 96431 - protein, 99 aa, Gossypium hirsutum
  Clone ID: LIB3135-042-Q1-K1-D3.pep
PKTPHKSCNDSLLLVIYCQTSSNKANLISHRLFIGRNLYLQRCPHPLQFTTRPQHVIRILQLCLTQRTRYFHTQSTTRQIIKVRHQIIHQSPNTYFNFP

SEQ ID NO: 96432 - protein, 55 aa, Gossypium hirsutum
  Clone ID: LIB3135-042-Q1-K1-D7.pep
TLDLKDPAGPSSNTYFPKMDDDDLHFCASTEGSHVPPTNGPTLEPSMRVVISSNQ

SEQ ID NO: 96433 - protein, 58 aa, Gossypium hirsutum
  unsure (1)..(58): unsure at all Xaa locations
  Clone ID: LIB3135-042-Q1-K1-E12.pep
HPQCARVVMCQRWDMIDERVSAIVLAXSGRSGSLSDSSEGVFRVDIGNGIEQPTPLLC

SEQ ID NO: 96434 - protein, 47 aa, Gossypium hirsutum
  Clone ID: LIB3135-042-Q1-K1-E5.pep
MVESSKKQNADLKENVGSIDSRYGLLNNSKVMDITEVNIVVYQKNKR

SEQ ID NO: 96435 - protein, 78 aa, Gossypium hirsutum
  Clone ID: LIB3135-042-Q1-K1-E7.pep
QALMKKHMARPAADTNLLLMKKEALDALPDKLIEAAVIPNLSPSAANRLMACFTPPIEGYIENAIEAAQKSSTNQKLT

SEQ ID NO: 96436 - protein, 50 aa, Gossypium hirsutum
  unsure (1)..(50): unsure at all Xaa locations
  Clone ID: LIB3135-042-Q1-K1-E8.pep
VKPKMGDALLFWSMRPDATLDSXSLHGGCPVISGNKWSSTKWLHVEEYKL

SEQ ID NO: 96437 - protein, 64 aa, Gossypium hirsutum
  Clone ID: LIB3135-042-Q1-K1-E9.pep
NILDHYRLSPHSVAGVRTLDAPLFPPTIDSQRDVLHLKNSSNTLVSQLYQLASHCHFRTWLNKY

SEQ ID NO: 96438 - protein, 115 aa, Gossypium hirsutum
  Clone ID: LIB3135-042-Q1-K1-F12.pep
LAPFVVSVSGDRLIDMVKDNGIIRDVVWQDEASGLLLEAPTSVAEPDSMPLYLTLVENEEEQESQLNIGKRRLGCIHVLIFLPPMFHLLLQMEVSDASTIVRIRTDHWPCLAYID

SEQ ID NO: 96439 - protein, 113 aa, Gossypium hirsutum
  Clone ID: LIB3135-042-Q1-K1-F6.pep
PRVRTANADRHAGNILIGKGDDGRTVLISIDHGYCLPENFEDCTFDWVYWPQSRLPYSPDTLNYIKSLDAEQDIALLNYYGWDVPVECARTLRIFTMLLKKGAERGLTPFTIW

SEQ ID NO: 96440 - protein, 110 aa, Gossypium hirsutum
  unsure (1)..(110): unsure at all Xaa locations
  Clone ID: LIB3135-042-Q1-K1-G10.pep
HASVKILHFDIKPHNILXDENFNPKVSDFGLAKLYPVDDSIISLTAARGTFGYMAPELFYKNIGNIXSYKADIYSFGMMLMEIVGRRKNLKDSVDHSSQNYFPTWIYDQF

SEQ ID NO: 96441 - protein, 47 aa, Gossypium hirsutum
  Clone ID: LIB3135-042-Q1-K1-G11.pep
PTRSCQQTTIMTPGLASEGAGQLVPACLRYTYQGRIGYLMVNTYKHC

SEQ ID NO: 96442 - protein, 43 aa, Gossypium hirsutum
  Clone ID: LIB3135-042-Q1-K1-G4.pep
DAAISSIQRDTSAPLYLTPIIFQKNWHVFPPELEFAIRSILNL

SEQ ID NO: 96443 - protein, 86 aa, Gossypium hirsutum
  unsure (1)..(86): unsure at all Xaa locations
  Clone ID: LIB3135-042-Q1-K1-G6.pep
NGNGNGNGRRRRREVEETDKGLIWKLPQLKLKEVGKVGPAFGLGAGCGLGFGIGLVGGAGYGPGIPGLQVXLCFGAGCGVGLRFCY

SEQ ID NO: 96444 - protein, 90 aa, Gossypium hirsutum
  Clone ID: LIB3135-042-Q1-K1-G7.pep
DAWADAWVVVHHPLHLLHTLRQGMVVGTMSLNFLTLLMLVVTAGSSIIMLWGNMKCKMRNMLKNYGRIFFQAPIRYLHFEKEEILAPHTH

SEQ ID NO: 96445 - protein, 51 aa, Gossypium hirsutum
  Clone ID: LIB3135-042-Q1-K1-H10.pep
RSILLVFIFYAVFAVRRYGGALCLFSSCILNCTLMFCLIIFSINKICLDFP

SEQ ID NO: 96446 - protein, 69 aa, Gossypium hirsutum
  unsure (1)..(69): unsure at all Xaa locations
  Clone ID: LIB3135-042-Q1-K1-H2.pep
DHVVRPLVSTTQSGDXSTLWVVDATACLTLTKPETLARIGPFVLGLHRSMYIQARSFRLNPSSTYKILT

SEQ ID NO: 96447 - protein, 66 aa, Gossypium hirsutum
  Clone ID: LIB3135-042-Q1-K1-H5.pep
HKAMTMLTYNCSRVRTDYRVSQGSFKTCSHIPYNIILTYHICDCLKKKQDGAYVTRYESDRRHHST

SEQ ID NO: 96448 - protein, 64 aa, Gossypium hirsutum
  Clone ID: LIB3135-042-Q1-K1-H9.pep
RREGLFDSHHTRNYRSGWTARAWGGLDYIGSIPERLLECILYLRHPAIAFIFEASALTASTLSL

SEQ ID NO: 96449 - protein, 128 aa, Gossypium hirsutum
  Clone ID: LIB3135-043-P1-K1-A10.pep
IDMLSLETYPGVKRITIRPHTDRWVFPETNTGIIVLAEGRLMNLGCATGHPSFVMSCSFTNHVIAQLELWKEKSSLTYEKKVYVLPKHLDEKVAALHLGKLGAKLTKLTKSEADYISVPIEGPYKPCH

SEQ ID NO: 96450 - protein, 66 aa, Gossypium hirsutum
  Clone ID: LIB3135-043-P1-K1-A11.pep
KHQSPQVPLPGKCTLLSETAAEFRYDAMPSINPNPNPSPTLPPTNKPQPNYSLHAIRQVHAELRIR

SEQ ID NO: 96451 - protein, 80 aa, Gossypium hirsutum
  unsure (1)..(80): unsure at all Xaa locations
  Clone ID: LIB3135-043-P1-K1-A12.pep
MGGGGAHGGTTYKGXRIPHNKRWHTVAGKGLCAEMWFWVFYRAKQDGATLLGLRHPWEGHDDHSHGHGHGHEASSSSSSH

SEQ ID NO: 96452 - protein, 48 aa, Gossypium hirsutum
  Clone ID: LIB3135-043-P1-K1-A7.pep
KTKSLGKILKNLFIFSQPNMKLRKTQSLKSNQFKQYSLLPNGIPLFKP

SEQ ID NO: 96453 - protein, 105 aa, Gossypium hirsutum
  Clone ID: LIB3135-043-P1-K1-B10.pep
HGAHRPAVVVVVLAAGKVRLHAAINCRGEPAVQQRVRVHHRAPAAAGAQLVFALHIMQHFECGRRLCWLLSVVGQESLVVPFLISGASVIISTVPLLILVELLSA

SEQ ID NO: 96454 - protein, 117 aa, Gossypium hirsutum
  Clone ID: LIB3135-043-P1-K1-B12.pep
LSEMANLFISLHLAVAPGVDNNPNNLVACTTFFYEATRAMLCLIRLETDPQDRTQLPLTVASGDQHLTFELKEFAKEHLIDIPRTQAAPPMAMVQTQLLTAAPGTYNDPVAMLAGLL

SEQ ID NO: 96455 - protein, 80 aa, Gossypium hirsutum
  Clone ID: LIB3135-043-P1-K1-B3.pep
LPLLWIPFFYIYKKTEYRVSSSTQPGNSCFKILRFLNFTWNLDLGDFQRSGCVCLIVADLNILVLARFGLFFFYLVFTLK

SEQ ID NO: 96456 - protein, 42 aa, Gossypium hirsutum
  Clone ID: LIB3135-043-P1-K1-B5.pep
LFFFFFFFFFWPGKDLPFLGRAALSFSICEGTVRGFFSQECL

SEQ ID NO: 96457 - protein, 74 aa, Gossypium hirsutum
  Clone ID: LIB3135-043-P1-K1-B7.pep
QPCLSRQHPLAHWMAHKRMVQWYSIHVLELIYLSSSMCALFCLLVLFLVFLFFLLCFFFPCISILYACCSLSRL

SEQ ID NO: 96458 - protein, 82 aa, Gossypium hirsutum
  Clone ID: LIB3135-043-P1-K1-B9.pep
RLLSLRLEQAFNENHLPNNIDTSIVITESTSHLIIDGNGRLMLDKHAIIRWIRMHTGDKECKNIRPHKKFHGATPQSSAFKQ

SEQ ID NO: 96459 - protein, 75 aa, Gossypium hirsutum
  Clone ID: LIB3135-043-P1-K1-C1.pep
AYHVVMMLNGIREHDSVISVLSYRSMAGELTSQDDTHHMYMVLNHSTGSPHIAFPPAKVRHGPPGPDAWATGFGR

SEQ ID NO: 96460 - protein, 52 aa, Gossypium hirsutum
  Clone ID: LIB3135-043-P1-K1-C10.pep
CIKNLNNPGVDSLSHFQLIPCGHSCYEESRDLTPGGLADLQRAGCDSCWYKD

SEQ ID NO: 96461 - protein, 60 aa, Gossypium hirsutum
  Clone ID: LIB3135-043-P1-K1-C11.pep
LQFNIQAEDARDTRQCSVRSVHAANSEKTYKGMYVVLSVMVPWHQLSFYHGINSLLGRWF

SEQ ID NO: 96462 - protein, 50 aa, Gossypium hirsutum
  Clone ID: LIB3135-043-P1-K1-C12.pep
SAEHTWVIGTILPCPVGAAASPGGGKRLDQGQAWQITAASGTTQARIWAR

SEQ ID NO: 96463 - protein, 70 aa, Gossypium hirsutum
  Clone ID: LIB3135-043-P1-K1-C2.pep
PTRPTTLSSTRSSTRPRLLAGTTSVLLTYDLSKKILLRKLENMHFSNTIVFIHTYPDRIYGVYIQESFHL

SEQ ID NO: 96464 - protein, 48 aa, Gossypium hirsutum
  Clone ID: LIB3135-043-P1-K1-C3.pep
ENPTHHPTIILQSSKLFFLPIINPLLMLFFTKFHLLPYNTIIIPINLL

SEQ ID NO: 96465 - protein, 55 aa, Gossypium hirsutum
  Clone ID: LIB3135-043-P1-K1-C6.pep
PRILLTILFNIINFFYTKPHPSPLLLFHLNSNLSYLQIIFFHPPHNKILYLSFTT

SEQ ID NO: 96466 - protein, 69 aa, Gossypium hirsutum
  Clone ID: LIB3135-043-P1-K1-C9.pep
LARNHLNAHVERSKYEGKGRQGCKIGNVYLPMKGVQLVHVHLTKWNPSQVDGCETVTHHPSPPFLISEL

SEQ ID NO: 96467 - protein, 50 aa, Gossypium hirsutum
  Clone ID: LIB3135-043-P1-K1-D10.pep
TVPLRKRHCMRDDRIMPLDYFALLFSVTPDYYLRLMRTFGEPYMGSNFGS

SEQ ID NO: 96468 - protein, 48 aa, Gossypium hirsutum
  Clone ID: LIB3135-043-P1-K1-D8.pep
RMFYYKVEVFMQVMFLLKNFTGVSNDGNKVGIKMCNGKITVFLSKLSI

SEQ ID NO: 96469 - protein, 99 aa, Gossypium hirsutum
  unsure (1)..(99): unsure at all Xaa locations
  Clone ID: LIB3135-043-P1-K1-D9.pep
IDSLNPLMHAGGVDFMDEDCSTTARLGSKTRTPHFDYILTQQAMVTVDKKAPIDQDLISXFMSDPVHGAIEVCAQLRPTVDIXVTADADFVRPELRQSS

SEQ ID NO: 96470 - protein, 73 aa, Gossypium hirsutum
  Clone ID: LIB3135-043-P1-K1-E1.pep
LLDEVKKGSSLDVNGSIIAALVVHGLCFSSRESEAFWALDELRSRGCKPDFIAYSIVEEAFRMTNNVVVRELF

SEQ ID NO: 96471 - protein, 68 aa, Gossypium hirsutum
  Clone ID: LIB3135-043-P1-K1-E10.pep
YDLQSKTHPCLQSRANKRCLRLLFHLGAWVGISRFVLSWFGARSAPVFSPATATACFFKMAAAIESSS

SEQ ID NO: 96472 - protein, 111 aa, Gossypium hirsutum
  Clone ID: LIB3135-043-P1-K1-E11.pep
LAHSSGHARFCLSRTGLVSLPSSAAAGSGPCRLSSLASLLRRHGAASGHAAAGSSTWLARGTSSGRRGGAGVSTTGASSVATTVGVWTSAVAMGDDQKVCPPIEWLATSRG

SEQ ID NO: 96473 - protein, 106 aa, Gossypium hirsutum
  Clone ID: LIB3135-043-P1-K1-E12.pep
VHKNSTREPVRKIQLRTSCHDATFLKTPQQQKLSQFLPSWTRTKDTSKRDSGAASDFCCLRRVLGRLQRQFLCLACLVRLHRILEFLHGGRVLELQSKCSEAARRP

SEQ ID NO: 96474 - protein, 105 aa, Gossypium hirsutum
  Clone ID: LIB3135-043-P1-K1-E5.pep
LGEDREKVPVAGAVAICSPGDLLIGDRFICRRLLQKLYDRALTIGLQGYAKLGGIQSEASGIVYLVTGFCSNSFTLWSFTVPIIPVSVFFVGRMGFLDMSQLMNV

SEQ ID NO: 96475 - protein, 56 aa, Gossypium hirsutum
  Clone ID: LIB3135-043-P1-K1-E7.pep
NHKFCLHYVKHPYSKLNHTLSYVYRPKISSIIFYNQVLYMFLDEKFSSSFIVCITI

SEQ ID NO: 96476 - protein, 94 aa, Gossypium hirsutum
  Clone ID: LIB3135-043-P1-K1-E9.pep
PLPLFTLLTHSKIPLRTPEEVSFGHVQTISTDVKSISPQLVPPRPYPGYLRFGLYPLCAHKTKVTCASQLLTCWTCCLFVGQHSAPYSITGALE

SEQ ID NO: 96477 - protein, 49 aa, Gossypium hirsutum
  Clone ID: LIB3135-043-P1-K1-F10.pep
RLNLILHDQIRLLDLSHRLSSQSPLQHLLLPAQLLVQHLYQGFAFADAW

SEQ ID NO: 96478 - protein, 66 aa, Gossypium hirsutum
  Clone ID: LIB3135-043-P1-K1-F11.pep
KSMWFLAPPLITPSACIRQTCFFFCGKNHQAPWRLVSEFRSGARFYFMWTSELSGCARAEIFCNVF

SEQ ID NO: 96479 - protein, 102 aa, Gossypium hirsutum
  Clone ID: LIB3135-043-P1-K1-F12.pep
AQFGISLPDLHHLTRLQSSLSPHAHGLRHQLDHGARPRIAGGLIVGHPAARDDISCLLTIGTAPHKKPSDVKSAAAAPAPQLMLFGKPILTEQQIFLGFRPL

SEQ ID NO: 96480 - protein, 76 aa, Gossypium hirsutum
  Clone ID: LIB3135-043-P1-K1-F9.pep
MANARSGVAVNDECMLKFGELQSKRLHRFITFKMDDKFKEIVVDQVGDRATSYDDFTNSLPENDCRYAIYDFDFVT

SEQ ID NO: 96481 - protein, 74 aa, Gossypium hirsutum
  Clone ID: LIB3135-043-P1-K1-G1.pep
DRQKNDDRCTCIRLSSHQLFIAVSITKANLLEKTVINLKANHEGILLRHDMSIINEDHIHIITFIINLLMEATL

SEQ ID NO: 96482 - protein, 84 aa, Gossypium hirsutum
  Clone ID: LIB3135-043-P1-K1-G11.pep
DRNNSHIVKVQYRQLQIIILEFWDSNRLMYREHQFKFACAITYVINNDQDTVFVNSCPHCSAGPSPCSWLTATVFIPCRGGSTG

SEQ ID NO: 96483 - protein, 61 aa, Gossypium hirsutum
  Clone ID: LIB3135-043-P1-K1-G12.pep
SIYQSAKSAEQRMICSMYIRIVRILILYNAAWLNIMIKFAERLNESPASLIDSVHFNLIML

SEQ ID NO: 96484 - protein, 75 aa, Gossypium hirsutum
  Clone ID: LIB3135-043-P1-K1-G5.pep
HSYTLHIHTRKNMYILFNSQFAPLAHLETHPSYMASNSPTALIQHKSLNHSHLPLSFVDISGTTLSSMETKNSSS

SEQ ID NO: 96485 - protein, 63 aa, Gossypium hirsutum
  Clone ID: LIB3135-043-P1-K1-H10.pep
PIPAITSNHSKFYIALNWFLTAASFSLLFISLNKLRLLCPSLRMSFEFSVLQLLELRLFSYWN

SEQ ID NO: 96486 - protein, 59 aa, Gossypium hirsutum
  Clone ID: LIB3135-043-P1-K1-H11.pep
KVKLSVLQFYKVDDTTSGGTRLRKECPNSECGAGVFMANHFDRHYCGKCGLTYVYNQKA

SEQ ID NO: 96487 - protein, 51 aa, Gossypium hirsutum
  Clone ID: LIB3135-043-P1-K1-H12.pep
CYTQSYWRHISNLIPSATTLEVLPNNAEHHVIYILINTLNAAHQFALYNTI

SEQ ID NO: 96488 - protein, 89 aa, Gossypium hirsutum
  Clone ID: LIB3135-043-P1-K1-H3.pep
LNSRASLHICLSTSSRYYHGSQTLIREPNVTSIIIIRLIRMGIKMIRRITFSTSYLEMGERRAIYYPITKNLTFPGPNMHFHSFLQIHL

SEQ ID NO: 96489 - protein, 42 aa, Gossypium hirsutum
  Clone ID: LIB3135-043-P1-K1-H7.pep
MAGFKKATALILTVAFLVNLALMDDADGDDYINIPVRKHNAL

SEQ ID NO: 96490 - protein, 70 aa, Gossypium hirsutum
  Clone ID: LIB3135-043-P1-K1-H9.pep
AVHLSRIKRLVYGAKAEAAIAIGFDDFIADALRGTGFYQKANMEIKKADGNGALIAEQVFEKTKEKFQMY

SEQ ID NO: 96491 - protein, 59 aa, Gossypium hirsutum
  Clone ID: LIB3135-044-Q1-K1-A12.pep
FQSNVAGQSQTDLTNSVPSDSLVHPQPTSQPQLNETRQYQTLIHHSNSQHTGQFQSNVP

SEQ ID NO: 96492 - protein, 132 aa, Gossypium hirsutum
  Clone ID: LIB3135-044-Q1-K1-A2.pep
PRVRSEAKFLRRATFLKHNLWVTPYSREEMHPGGEFPNQNPRVGEGLATWVKQNRSLEEADIVLWYVFGVTHIPRLEDWPVMPVERIGFMLMPHGFFNCSPAVDVPPSATDLELKDTDIATKPIQNGIIAKL

SEQ ID NO: 96493 - protein, 94 aa, Gossypium hirsutum
  Clone ID: LIB3135-044-Q1-K1-A3.pep
RTAYVVVTAVVAMIFPFFNGFCGLIGAGSSWPLTVYFPIEMHIAQTNLPKYSFRWTWLKILSWVCLIESLIAAAGSVHGLIQSLKTYKPFQTQE

SEQ ID NO: 96494 - protein, 48 aa, Gossypium hirsutum
  Clone ID: LIB3135-044-Q1-K1-A7.pep
HAFVYTYYLYWFDAFTNRSRFYITYESSNQSMLIYYELDSQGKFVLRK

SEQ ID NO: 96495 - protein, 116 aa, Gossypium hirsutum
  Clone ID: LIB3135-044-Q1-K1-A8.pep
APLPFVSYLLYVKKKKNKQKEQTKGKKSNLRKNLRFVFCFFKSFFLRIFPSIFVSLYTEFPPPPLHDLNRPLNSRNGKDKSTKSKKRFILFCWHDFCYLVAASTVGGDYARRGGAT

SEQ ID NO: 96496 - protein, 50 aa, Gossypium hirsutum
  Clone ID: LIB3135-044-Q1-K1-B10.pep
YFTHGNPLRTLLNYSLLSQNHLLFQISASSTHKLNKNFLKPFIIFNYILI

SEQ ID NO: 96497 - protein, 86 aa, Gossypium hirsutum
  unsure (1)..(86): unsure at all Xaa locations
  Clone ID: LIB3135-044-Q1-K1-B12.pep
PGPFFNFDPNPQLEMLFHYLNNSLKLRAGSRESSPINDWAHGWAHSTYARGLVLKKXXXKKKKXXIIEKFCFFFFKNFXXKIRGGG

SEQ ID NO: 96498 - protein, 96 aa, Gossypium hirsutum
  Clone ID: LIB3135-044-Q1-K1-B3.pep
KSSSSYHHPKPWPLLVHSNKMSTLPNSPSKPISTRRLSSSWRTSSSPSPLPTNSPSRNVTSSLLPTRTSSAPFVLSVGSFFSFSIIMNFFSSPTTF

SEQ ID NO: 96499 - protein, 112 aa, Gossypium hirsutum
  unsure (1)..(112): unsure at all Xaa locations
  Clone ID: LIB3135-044-Q1-K1-B4.pep
KIPPLSMFTVHIVXNTCCSLGWTISSWLLMEKIPNLCDTFLLPHDSPLTCPMDRVFFDASLIWXLFGPRKIFGTKSEYGNVNTIFFSGALSPFLVWLAHKLFSDKEWIRLIH

SEQ ID NO: 96500 - protein, 52 aa, Gossypium hirsutum
  unsure (1)..(52): unsure at all Xaa locations
  Clone ID: LIB3135-044-Q1-K1-B5.pep
QDSMPYGSNILIFREYFHLNKWFIEHLTGINNWSIEHLNPDHWQMXYLPPHF

SEQ ID NO: 96501 - protein, 102 aa, Gossypium hirsutum
  Clone ID: LIB3135-044-Q1-K1-B6.pep
QKILQIPLTTIPHDNFLAWRGESTGEYSVRSGYKLLLHGNLLTNNSYKLWDSDLPSKILITVSRATLNYLPTLVNLRIKRLHQRGSMSKMQERPGEQGAYIP

SEQ ID NO: 96502 - protein, 136 aa, Gossypium hirsutum
  Clone ID: LIB3135-044-Q1-K1-C12.pep
GYKEPDPDAISNEILQAEPEPGDKLLPQLGISNMKIDEPHLDDQELQRIQDTVTGVCSRLQKAIEMLRAEVNPTKATVVLQTLFKIIRNVIEHPDEMKFRRLRKANPIIQRNIANYKAAMEILLLIGFSENVIFDE

SEQ ID NO: 96503 - protein, 40 aa, Gossypium hirsutum
  Clone ID: LIB3135-044-Q1-K1-C5.pep
CPLMSAVVAYLPNKSLLLSSKLSTFRIASPLYLKEESHDW

SEQ ID NO: 96504 - protein, 138 aa, Gossypium hirsutum
  Clone ID: LIB3135-044-Q1-K1-D11.pep
AVDNTGRTVVLGLDFETNLIGMPVFGGDKKFLVDSKGELLLVDMYLSIESEPGSSSSSAGFGFVEEYFENLALYMNERMVKFKVFKLDDAGKQWVEAKDLDDRVLFLGDGCTFSASIEDLSVCRGNCIIYVDNFFYSL

SEQ ID NO: 96505 - protein, 62 aa, Gossypium hirsutum
  unsure (1)..(62): unsure at all Xaa locations
  Clone ID: LIB3135-044-Q1-K1-D2.pep
SSFFFFFFFFFFFFFXRLKSAKQYPLAENIFKVIQSYISEHKTRNKHVKTMQNQSILEKKGK

SEQ ID NO: 96506 - protein, 53 aa, Gossypium hirsutum
  Clone ID: LIB3135-044-Q1-K1-D5.pep
LAIIIMLCKVSELRYVKVDIYFCKEDDKPCFSTIACMYGHMRIIILQEIIKLT

SEQ ID NO: 96507 - protein, 117 aa, Gossypium hirsutum
  unsure (1)..(117): unsure at all Xaa locations
  Clone ID: LIB3135-044-Q1-K1-D7.pep
GSTPRVPXFNIPMEFCPSXGGCHNMRWSADINAQFPNELKAPGGSNNPCTVFKTNKYCCTQRFRTCGPTRHSTFFKDLCPDSYSYPQDDPSITFTYTDPYNYMVMFCPRGSPHIHIV

SEQ ID NO: 96508 - protein, 120 aa, Gossypium hirsutum
  Clone ID: LIB3135-044-Q1-K1-E3.pep
MARASSGLAYPERFYAAAAYVGFDGSPNSNDKDIGSRFSNDVALILYALYQQATVGPCNVPKPSLWNPVEQGKWKSWKQLGNMVSAEAMRLFVKILEEEEPGWYSRASNSVLEPVTDVQM

SEQ ID NO: 96509 - protein, 55 aa, Gossypium hirsutum
  Clone ID: LIB3135-044-Q1-K1-E4.pep
NKQIIYQQKQKSLIQIFYTKVLLPKTGKTPPGLRTPHQFHCTCNLHKEYINFVLT

SEQ ID NO: 96510 - protein, 61 aa, Gossypium hirsutum
  Clone ID: LIB3135-044-Q1-K1-E9.pep
TLWPSLLPLWFSHRTVPVCHAGDRRPPSATVSGPESGGRSLKKVDEVNGGRWSDGMVADRG

SEQ ID NO: 96511 - protein, 61 aa, Gossypium hirsutum
  Clone ID: LIB3135-044-Q1-K1-F10.pep
NLNTDKFVSAVEMQWGRGVSHTACLIHIILLYKLERIENHSLTLKQDEYLRRKIEPNSLIL

SEQ ID NO: 96512 - protein, 51 aa, Gossypium hirsutum
  Clone ID: LIB3135-044-Q1-K1-F2.pep
PTRPPGTYCFLQETSLLYSLIIHLCICVNIKIPHTLQKFYYTFHYNLLRLS

SEQ ID NO: 96513 - protein, 62 aa, Gossypium hirsutum
  Clone ID: LIB3135-044-Q1-K1-F4.pep
IPTLVLTLSIDWELQYCQLHPHQSFTSFIINNTPHILIKTNLTHIIHLQYRRRTCFQNQVYI

SEQ ID NO: 96514 - protein, 84 aa, Gossypium hirsutum
  Clone ID: LIB3135-044-Q1-K1-F6.pep
PTRPQDERVGDDEDVVEEVVVSSDEDEDEDEEDTAEEDGNEEQLGGSKQQNKKQKPKNLSNKNVRSHHHAKNNKSKKRKRAKLN

SEQ ID NO: 96515 - protein, 57 aa, Gossypium hirsutum
  Clone ID: LIB3135-044-Q1-K1-F7.pep
QLIVEGFQRKLIEETCNSPGCYPTCSLMFHFLPSLNPCKFLQIKVHHPPCYKPSLHR

SEQ ID NO: 96516 - protein, 112 aa, Gossypium hirsutum
  unsure (1)..(112): unsure at all Xaa locations
  Clone ID: LIB3135-044-Q1-K1-G4.pep
TIVVNRFRRVLHLCIEETQSAFVLGRQITDNIMIAYELLHSFKXEKKRGGTGYFALKLDMSKAYGRMEWNYLESMMKMQGFCNRWIELIMKCVRPMSYSVVINGIQGQNLNQ

SEQ ID NO: 96517 - protein, 88 aa, Gossypium hirsutum
  Clone ID: LIB3135-044-Q1-K1-G5.pep
DYIRGETVMKSQGVSLPSKPINRKMRCSKKGSNYSTYEHKDGNFKDNRSKQQKREFAKFNIKNHTKICLMVQKIFNLKTKQENEEFFK

SEQ ID NO: 96518 - protein, 72 aa, Gossypium hirsutum
  unsure (1)..(72): unsure at all Xaa locations
  Clone ID: LIB3135-044-Q1-K1-H10.pep
MRFHDGVLKSVIGYGCGWFMWVGXTVFYGQYKCTGPGASFAGRVSWSRELTDEEAKPFLSLSFIDGSEWIKL

SEQ ID NO: 96519 - protein, 45 aa, Gossypium hirsutum
  Clone ID: LIB3135-044-Q1-K1-H12.pep
FTITIQVERTPPWLLSFSTKKCLPTPLNITFFQNNIKSLFHCNLG

SEQ ID NO: 96520 - protein, 85 aa, Gossypium hirsutum
  Clone ID: LIB3135-044-Q1-K1-H2.pep
EIILPSLSLVSARCFCKFCILVNRYSYFSCVVYLMLVHLDENVCDGLHVISFYSRSLQFPYLFQPTVKLFVFPMNGSIIMNTQAL

SEQ ID NO: 96521 - protein, 65 aa, Gossypium hirsutum
  Clone ID: LIB3135-044-Q1-K1-H3.pep
HERGSKIGSFKRAPPHFFYFFLSCIYVFFIFYFFLFFFLFFFFFFFFFFFFFFYLFFFPQNYFEI

SEQ ID NO: 96522 - protein, 97 aa, Gossypium hirsutum
  Clone ID: LIB3135-044-Q1-K1-H4.pep
DTMKTASIISISATTFFYLCGGALGYAAFGDKTPGNLLTGFGFYEPYWLIDFANMCIVLHLVGGYQVYSQPLFANVEKWVSVKFPDSGIIHKDFKLK

SEQ ID NO: 96523 - protein, 75 aa, Gossypium hirsutum
  Clone ID: LIB3135-044-Q1-K1-H5.pep
FGSISGEWSIGWKVIDNAINNSKRDGLVHVQYKKWLKRWILRKSGIGEKNVYNNCNNICKKIVKDFELLKKYFEV

SEQ ID NO: 96524 - protein, 39 aa, Gossypium hirsutum
  Clone ID: LIB3135-045-Q1-K1-A10.pep
PTHLDSLTLTTVTYQAIINAIIQRNPISSMHINLIFDIA

SEQ ID NO: 96525 - protein, 133 aa, Gossypium hirsutum
  Clone ID: LIB3135-045-Q1-K1-A3.pep
QSRGSPPRNIRTGKLIWFPEIPSAAATVPRLHALRHIHSSYRLRTQNCPTDTLAGSPLWPRRLDRGRARVSLFLQTSGLKDSALEQGSKGRLKIAPFVRCWLLDAAVPRRSHGGNHGRKLKLIVGKEAEREGD

SEQ ID NO: 96526 - protein, 39 aa, Gossypium hirsutum
  Clone ID: LIB3135-045-Q1-K1-A4.pep
CPSYFYFNLIALKMGLAPLLKVATPPPCLYLNARNYNPH

SEQ ID NO: 96527 - protein, 142 aa, Gossypium hirsutum
  Clone ID: LIB3135-045-Q1-K1-B1.pep
AILEMRVHMDCEGCAVKIKKALGKLKGVDSVDVDMRMQKVTVMGWAASDQKKMLKRVRKSGKRAELWPYPYKPDNQFYYEYYERQPTITYHATGHSSSYYYYKHGNDGHDHGYYQPPPYSTLVDEQASSIFSDEKPHACSIM

SEQ ID NO: 96528 - protein, 57 aa, Gossypium hirsutum
  Clone ID: LIB3135-045-Q1-K1-B10.pep
MCNDFEIVLMIPFTILINYNSFINVRTDRYPEQDVEPQRKYIIERTRERTRASARVF

SEQ ID NO: 96529 - protein, 51 aa, Gossypium hirsutum
  Clone ID: LIB3135-045-Q1-K1-B3.pep
CIGTNSEKNLCDTIKKIFCRMNEYVRLVHIEGPTIFCMIIFYFGLLWILCK

SEQ ID NO: 96530 - protein, 73 aa, Gossypium hirsutum
  Clone ID: LIB3135-045-Q1-K1-B6.pep
TCIDGAVLLPRIPDLCASIISTPPFLSDRMSMYKTAPSKHYHRLANDLTTATPAYFFLLVGSLVFIISDPFHS

SEQ ID NO: 96531 - protein, 75 aa, Gossypium hirsutum
  Clone ID: LIB3135-045-Q1-K1-C2.pep
KNYVRAANEQNNTLFQSLNIFCILPDSYFKRCYILVLNDLCILCSFLIVVKPYFCLNITFLRVCKQIHMHYISLL

SEQ ID NO: 96532 - protein, 130 aa, Gossypium hirsutum
  unsure (1)..(130): unsure at all Xaa locations
  Clone ID: LIB3135-045-Q1-K1-C4.pep
NSXNNRINFIFKGRENEAGVVWERANNLSQDFRIHNLLELPAIPTTPIYKTWTKPLNDYIKINFDASVSNGKVSFSVIVRDSDDFIVGSSGGSKEKIMYAEWTEMESLDERLKIATTLKVSNVIFESDCT

SEQ ID NO: 96533 - protein, 77 aa, Gossypium hirsutum
  Clone ID: LIB3135-045-Q1-K1-D3.pep
MGGGKGGSGGGSKGGCGGSGGGSGNVGGGSTSKGGGGASGMMVAPGSGGAAIISRGAFESNPQGYFAGLHSSEKGNK

SEQ ID NO: 96534 - protein, 42 aa, Gossypium hirsutum
  Clone ID: LIB3135-045-Q1-K1-D5.pep
PNFEFSSVSHDELLYVGEELLQNGDRCQTYIAENLTSESLYR

SEQ ID NO: 96535 - protein, 86 aa, Gossypium hirsutum
  unsure (1)..(86): unsure at all Xaa locations
  Clone ID: LIB3135-045-Q1-K1-D6.pep
ADGGVRIKMARPVYFLFPRPTDMQGMQDLLKELRXLVPNGAKYSIDAHLYQTVKHILFLMSVTNQAEKLRQWVHRVVSDLNNTRSF

SEQ ID NO: 96536 - protein, 58 aa, Gossypium hirsutum
  Clone ID: LIB3135-045-Q1-K1-E3.pep
SKATIGAPGTSTLDAKINIWGGLYSGSLNVPNQPKVAPEELYATQFSHPHEMRFYDTG

SEQ ID NO: 96537 - protein, 47 aa, Gossypium hirsutum
  Clone ID: LIB3135-045-Q1-K1-E4.pep
GKKHLFDVPMFRSYIVMRTHYFTIIVGQLPEAKYTLLNNEEQEDKKR

SEQ ID NO: 96538 - protein, 39 aa, Gossypium hirsutum
  Clone ID: LIB3135-045-Q1-K1-F10.pep
SSCLPSQINFHSIPLFRSPRFPLTRHSLSPIRSLNPPRF

SEQ ID NO: 96539 - protein, 129 aa, Gossypium hirsutum
  Clone ID: LIB3135-045-Q1-K1-F2.pep
FMHRAFQSYEKHRGPLGNVRKGVLVSMGYGTITAYALMSLEARGTLFVTPGMETYDGMIVGEHSRDTDLDVNPVRSKELSNMRAAGKDENVKLSPPKLMTLEEAIGYVASDELIEVTPKAIRLRKRYLD

SEQ ID NO: 96540 - protein, 109 aa, Gossypium hirsutum
  Clone ID: LIB3135-045-Q1-K1-F3.pep
ARLHSTRVLGSFGYHAPEYAMTGQLNAKSDVYSFGVVLLELLTGRKPVDHTLPRGQQSLLTWATPRLIEDKVRQCVDQRLGGDYPPKAAAKMAAVAALCVQYEADFKPN

SEQ ID NO: 96541 - protein, 145 aa, Gossypium hirsutum
  Clone ID: LIB3135-045-Q1-K1-F4.pep
NVNQRPGKLVTVDGETELEVETLLKASAYILGTSGWSIVYKAVLENGTAFAVRRIGESSVERLKDFESRVRMIAKLRHPNLVKIRGFYWGDTEKLVIYDYASNGSLACTTTAYRRSGSSSVWHLPLEACLKIARGVARGLAYIHE

SEQ ID NO: 96542 - protein, 85 aa, Gossypium hirsutum
  Clone ID: LIB3135-045-Q1-K1-F5.pep
PREDLKDEVLASIPRGTVPVGGPVDALPYYMPAQHAPQVGTPGMIMGKPVMDPALYAQQSHPYMAQPQQMWPPPGPEQQQSSSDH

SEQ ID NO: 96543 - protein, 39 aa, Gossypium hirsutum
  Clone ID: LIB3135-045-Q1-K1-G5.pep
MFIMLVLRFLLFVDQVSVGLKKERCICIKRPPAPRLLYE

SEQ ID NO: 96544 - protein, 67 aa, Gossypium hirsutum
  Clone ID: LIB3135-045-Q1-K1-G7.pep
IQRHNHLHNINVQVHVLVHCNHHHTHHAFCILRNHRAIRILNNLHGSRIPTIHIWPLLLEPKHRLFQ

SEQ ID NO: 96545 - protein, 56 aa, Gossypium hirsutum
  unsure (1)..(56): unsure at all Xaa locations
  Clone ID: LIB3135-045-Q1-K1-G9.pep
PRFLPRVLPLVRRKPRLELLMAIKMXSNXIVLLYVPLLINLLFWEIDGPAIDFQLL

SEQ ID NO: 96546 - protein, 81 aa, Gossypium hirsutum
  unsure (1)..(81): unsure at all Xaa locations
  Clone ID: LIB3135-045-Q1-K1-H11.pep
GGLNYYRAMNLNWELMAPGAXLQIQVPGKFIVRDLYITYHIPGVKEYLQNGGFKKNVPFLQELVVNEGVAHXINQRKALGD

SEQ ID NO: 96547 - protein, 119 aa, Gossypium hirsutum
  Clone ID: LIB3135-045-Q1-K1-H2.pep
HASELLLPIPFLAEESALVSVEGDMSVKGHKADVGVNDMEGSVGFSDSNDFGFVGNESHSQGVGDEEIPGFNLNSAGLLGRPQVNKQINKLGIFLGESLVLEFMNFVCVKSLKNYCFSL

SEQ ID NO: 96548 - protein, 91 aa, Gossypium hirsutum
  unsure (1)..(91): unsure at all Xaa locations
  Clone ID: LIB3135-045-Q1-K1-H8.pep
SPRVRPLVRPLFRPRVRPRVRRSSPPPSALPPPPYYYKSPPPPKHVXEPPYIYKSPSPPSPSPPSPYYYKSPPPPVHSAPPPYYYKCPTPP

SEQ ID NO: 96549 - protein, 54 aa, Gossypium hirsutum
  Clone ID: LIB3135-046-Q1-K1-A10.pep
DKKKKIFFVGELFVPNQLRGMHVPHFNNKVLIIIFQHREYSNVSFFFGRRKRVL

SEQ ID NO: 96550 - protein, 59 aa, Gossypium hirsutum
  Clone ID: LIB3135-046-Q1-K1-A12.pep
IICDGVLFCSAFHVYLGKQKEIGGVLSICMSYVICLSRRNIYLLVMLLRLKKKRTRGRT

SEQ ID NO: 96551 - protein, 97 aa, Gossypium hirsutum
  Clone ID: LIB3135-046-Q1-K1-A5.pep
AKESEKPTKTRKARGPEHRGHFKNTRETAIANRKSAKEKAKTHEEDGTAHKQARPSRRFRGGVGRTAQAKNRHSNGQGRGPGKTAKLILDGPKNAES

SEQ ID NO: 96552 - protein, 52 aa, Gossypium hirsutum
  Clone ID: LIB3135-046-Q1-K1-B1.pep
VSSQVVRLKSQLCLCHARIPPCKHGISPATPMNHVVGRVVVDLAFNDNKEML

SEQ ID NO: 96553 - protein, 99 aa, Gossypium hirsutum
  unsure (1)..(99): unsure at all Xaa locations
  Clone ID: LIB3135-046-Q1-K1-B10.pep
PPTNPPLHPPTYSTPSPSPAERPTDPKPQRSLAAVHGVDFCKSCKYSVSNTPLGAHPILCAAVXFTCDNTIYKSLFNVNTVKNSSPFLLAPKTVTSFGA

SEQ ID NO: 96554 - protein, 78 aa, Gossypium hirsutum
  Clone ID: LIB3135-046-Q1-K1-B4.pep
GFNFRTRGPQEKPSLDNILNQGNAPRRLRLLMKISNVPMKVSAGCFDDGKLTSAGLGEEEEVQSTLTEVTEAEATGQT

SEQ ID NO: 96555 - protein, 101 aa, Gossypium hirsutum
  unsure (1)..(101): unsure at all Xaa locations
  Clone ID: LIB3135-046-Q1-K1-B7.pep
TLFPFSGACSLSFLPSYNSTYADQWGLNAGSFGTPSKLLXADEESSVTIGKSFTCFNVENVEDNRRALRELRFTTPGSLHYLCGVILFEETLYQKTLSDKP

SEQ ID NO: 96556 - protein, 123 aa, Gossypium hirsutum
  Clone ID: LIB3135-046-Q1-K1-B9.pep
ILVKRKGLKLNPISIMYYVSPCSALCLFIPWIFLEKPKMDAHGMWNLHPVVLTLNSICTFALNLSVFLVISHTSALTIRVAGVVKDWVVVLVSALLFADTKLTVINLFGYGIAIAGVAAYNNH

SEQ ID NO: 96557 - protein, 44 aa, Gossypium hirsutum
  Clone ID: LIB3135-046-Q1-K1-C10.pep
DPTEGYVSAHADGLSRANRCTASHAPQKPSTRRLIIVFSRYANG

SEQ ID NO: 96558 - protein, 53 aa, Gossypium hirsutum
  unsure (1)..(53): unsure at all Xaa locations
  Clone ID: LIB3135-046-Q1-K1-C12.pep
GGRALKRHDHTYLLEYELAQDKLDGECCLMXYSYAACDWINSRACDEWTHFGC

SEQ ID NO: 96559 - protein, 96 aa, Gossypium hirsutum
  Clone ID: LIB3135-046-Q1-K1-C3.pep
FPMLKAQQDAHIEKGSRGGVGILTTLVINNRQCIGTLDRRADIKAISAGLQETTKPAILLTEDVQTNECLEKNGVCCQDKSGNITACTDTLRRRVC

SEQ ID NO: 96560 - protein, 106 aa, Gossypium hirsutum
  unsure (1)..(106): unsure at all Xaa locations
  Clone ID: LIB3135-046-Q1-K1-C7.pep
IIFSHPSDFFPVCTTERGGMEAYLPEFEKPGVKLLGLSCYDXQSHNEWIKDFESYTXPGFKVAYSIVSHSNIVIIKQLNMLDPNEKHFSWNELTSRAFDIVGFDNK

SEQ ID NO: 96561 - protein, 89 aa, Gossypium hirsutum
  unsure (1)..(89): unsure at all Xaa locations
  Clone ID: LIB3135-046-Q1-K1-D10.pep
AMDVPFCGVYYLNFVRLVWGTGDGMVTXVLAMILALFSESSGXIRAGSRSPLTDNFPTHRHIAHTTDPREXFRGVCFKILSWACLPISL

SEQ ID NO: 96562 - protein, 64 aa, Gossypium hirsutum
  Clone ID: LIB3135-046-Q1-K1-D12.pep
TARVTRTLSISIGDPFLSTIFFLNWEWERSIFCSFYLSDGGLISQMILWSVGQFFPFFLYFLLQ

SEQ ID NO: 96563 - protein, 53 aa, Gossypium hirsutum
  Clone ID: LIB3135-046-Q1-K1-D4.pep
LPFHVSACLNKSVYHGHASHKNIRFRSYALVYKIIWSNRVHRSLACHSSNYVH

SEQ ID NO: 96564 - protein, 49 aa, Gossypium hirsutum
  Clone ID: LIB3135-046-Q1-K1-D5.pep
RRVRSTHFIRHVTNVGDPNSGYKVTGMPPSGTLLTVEPTQLVFMRVGQK

SEQ ID NO: 96565 - protein, 60 aa, Gossypium hirsutum
  Clone ID: LIB3135-046-Q1-K1-D8.pep
TKRAKIDPKKRKIEKRANHIFFCNFHFFGYIKPFFSICKVDTHRISIQRQKKILNRKKEI

SEQ ID NO: 96566 - protein, 115 aa, Gossypium hirsutum
  unsure (1)..(115): unsure at all Xaa locations
  Clone ID: LIB3135-046-Q1-K1-E1.pep
AMGATNAFCRLTIGNGPPRQTKVVNHSTTPEWKEGFTWAFDVPPKGQKLHIICKSKNTFGKTTLGRVTIQIDKVVTEGVYSGLFSLNHDSNKDGSSRTLEIEIIWSNRTXNDENI

SEQ ID NO: 96567 - protein, 139 aa, Gossypium hirsutum
  Clone ID: LIB3135-046-Q1-K1-E2.pep
PTRPPTRPPTRPGSRSWSRSSRSRSRSRSRSRSRSRSRSWSRGRSRSYSRSPGRGRSRSHSRGRRSRSRSHSYERKDVAKRAFDSPPGSNEHNLQQKDVAKRAFDSPPPSNEQNFEQKDVAKHASDSPGAQGNSVPENN

SEQ ID NO: 96568 - protein, 78 aa, Gossypium hirsutum
  Clone ID: LIB3135-046-Q1-K1-E4.pep
PTRPSLCWFSDRVFCKQISSWRINPQGHALWHLLRGFNSYFANTFLMFCPAQQRGWAPNVAYLMGILPYVKTEKPKTQ

SEQ ID NO: 96569 - protein, 60 aa, Gossypium hirsutum
  Clone ID: LIB3135-046-Q1-K1-E5.pep
NIVMTTAMINIKRIVITTAVWPTTISAMKTMTTSHTGRSLYILDICNNKLLINDRSMPTL

SEQ ID NO: 96570 - protein, 76 aa, Gossypium hirsutum
  unsure (1)..(76): unsure at all Xaa locations
  Clone ID: LIB3135-046-Q1-K1-E8.pep
PRATPPVIHYASSFITVYCKQISXWGINPPGQSLLHLLIGFNSYFSNTFLKICHAKQPGWAPKVSYLIGILPYVNI

SEQ ID NO: 96571 - protein, 89 aa, Gossypium hirsutum
  Clone ID: LIB3135-046-Q1-K1-E9.pep
TSPCKRNLYSTNPSTLGSARSIDNVLPEMDCSIYRVLFSTLSSNPIHIFVTTRFMTLFLHPHYYNPQLLLLDPLFLVVFFYYDFFIYHT

SEQ ID NO: 96572 - protein, 88 aa, Gossypium hirsutum
  Clone ID: LIB3135-046-Q1-K1-F3.pep
MQIQKEEQARSSLPGESTIRVIIHGHHPSQGTSSDRLGKLVYLPDSLQDLFNLAEKKFGKRGSTILMADGSKVEELNVLRENDHLFVV

SEQ ID NO: 96573 - protein, 83 aa, Gossypium hirsutum
  Clone ID: LIB3135-046-Q1-K1-F6.pep
LSSTKGVYQRNEKSFFHQSFRPGILFLSISFQEEEERRSSSIQQGRLAKSYTPFFNPPLFLPLSLLVPDPVGSTFLQTPTLTQ

SEQ ID NO: 96574 - protein, 82 aa, Gossypium hirsutum
  Clone ID: LIB3135-046-Q1-K1-F7.pep
LISTKGRYQRNEKSFFHQSFMPGILFLSILFQEEDERASSSIQEGRLAQSYTPFFNPPLFLALALLGPDPVGLTFFGTPTLT

SEQ ID NO: 96575 - protein, 62 aa, Gossypium hirsutum
  Clone ID: LIB3135-046-Q1-K1-F9.pep
TSREGILEYAKREMQWNCRYKAVKLHHCSPAHKQTCLLEKKFEYANILFDHTPLSLWQGILV

SEQ ID NO: 96576 - protein, 96 aa, Gossypium hirsutum
  Clone ID: LIB3135-046-Q1-K1-G12.pep
DQSPRVYEQAFRVYAGNLAWGVDNTRLEQIFSEHGKVLEARVVYDRETGRSRGFCFVTMSSETELNDAIAALDGQSLDGRALRVNVAEQKPRRSPS

SEQ ID NO: 96577 - protein, 54 aa, Gossypium hirsutum
  Clone ID: LIB3135-046-Q1-K1-G2.pep
YISFGLRDLTPHSSMHALFEAVYRSHVKSSWYFSICLVGSHVNLIYLSCHLTFL

SEQ ID NO: 96578 - protein, 58 aa, Gossypium hirsutum
  unsure (1)..(58): unsure at all Xaa locations
  Clone ID: LIB3135-046-Q1-K1-G3.pep
DVSLKEQLRHQWHMVVVYYHLKNPFNDLFYSNLFGLFCAPXLAKKKKKSKGGSSRSIT

SEQ ID NO: 96579 - protein, 127 aa, Gossypium hirsutum
  Clone ID: LIB3135-046-Q1-K1-G5.pep
DQFTKNSYFNSSWHIARSCFLMLFGGTLAFFMVLTEYILVSITSAVTVTIAGVVKEAVTILVAVFYLHDEFTWLKGAGLLTIMVGVSLFNWYKYLKLQKGKLEEDEAAIALTANHAAKYVILDEMED

SEQ ID NO: 96580 - protein, 61 aa, Gossypium hirsutum
  Clone ID: LIB3135-046-Q1-K1-G7.pep
FSIAFKIRARLSDASLICSIRFEYSNVTNGVKGGIYLNTCSSIMLLLQTLSSTDFLPHVVK

SEQ ID NO: 96581 - protein, 54 aa, Gossypium hirsutum
  Clone ID: LIB3135-046-Q1-K1-H11.pep
ANSSLFNASALAEKIQTLGHVVIASPEKTIFSSLTTPFYEIMIKMQLHPITVLP

SEQ ID NO: 96582 - protein, 124 aa, Gossypium hirsutum
  Clone ID: LIB3135-046-Q1-K1-H3.pep
ITLRPFKLEDADDFLLFAGDDQVTNYLRWQTLSSKQEALDHIKDVCIPHPWRRSICNDNCSIGFISIFPFSGEEDRFKANIGFGVAVKYWGHGIATKAVKMAVPQFFVDFPDVVRLEAFIDAQN

SEQ ID NO: 96583 - protein, 90 aa, Gossypium hirsutum
  Clone ID: LIB3135-046-Q1-K1-H8.pep
PFFFFGDFFFTFPIQPNLMDFLKFELPYPGFFKDQKAPFPSDFHLNPLSASHFFNSKSLWNTQMNLLILKKNITLRIFCPKSHTRLDPYF

SEQ ID NO: 96584 - protein, 74 aa, Gossypium hirsutum
  Clone ID: LIB3135-046-Q1-K1-H9.pep
PHSHQHILITWLHINSPHQSAYVTTKPSNTRTTKSISYNSKAKRTKSITRHSAKNATNAVTYNKFIRFHFTLYM

SEQ ID NO: 96585 - protein, 58 aa, Gossypium hirsutum
  Clone ID: LIB3135-047-Q1-K1-A2.pep
NNQIVILHTFSFCNIRTVLLSKDKQNSKIKTKLHQITKSHTTITTSVERQNKNLTTKL

SEQ ID NO: 96586 - protein, 50 aa, Gossypium hirsutum
  Clone ID: LIB3135-047-Q1-K1-A5.pep
TNPIFFDFFTNFKCFLLLFLTLYRYKNGNVSTNFIRYFFFKCEGDNELVK

SEQ ID NO: 96587 - protein, 139 aa, Gossypium hirsutum
  Clone ID: LIB3135-047-Q1-K1-B7.pep
GRVGGRVGGRVGGRVGKNWRPLKALLLKPYSHFPNIKSDLFSLLIQMAPSLSLALPLQSKKISCTRQQLSNIIYVVFLITLLAGSSFATRPGKTIICGRYSFHDRVPEKVLRRAFRFQRTGCLNLFSPKGIPLYPPFWV

SEQ ID NO: 96588 - protein, 123 aa, Gossypium hirsutum
  Clone ID: LIB3135-047-Q1-K1-B9.pep
IKKKKKKKNRGIKLKRSAPLYKTILTYPTKLQNFLYYFLTLKKTLCLFFNNSFTFKTLPLLILFFFISTYPFSPLLILSIRPLQISLSIIFPSFLLYIYPPFFFSFSSSFFFFPFPLLTVILF

SEQ ID NO: 96589 - protein, 80 aa, Gossypium hirsutum
  Clone ID: LIB3135-047-Q1-K1-C1.pep
GDMMVGLLFHQQCIFCLSSFRFPRHIYHIRVSCLHLVHLSLHADDIFPHDALSKVISTLPPLLLRSLETGSRMNMCLYAW

SEQ ID NO: 96590 - protein, 67 aa, Gossypium hirsutum
  Clone ID: LIB3135-047-Q1-K1-C9.pep
SILLEVPCWGSHRLTNLLSVHFVFTELFIETNICSMKTCLNVISRISYTIFFLFPAQNFHIDYEKKH

SEQ ID NO: 96591 - protein, 46 aa, Gossypium hirsutum
  Clone ID: LIB3135-047-Q1-K1-D11.pep
PRVRTHVRFIYLYLPQMNGRGVSSHLIKIYLLHKPVYFYELKHTTC

SEQ ID NO: 96592 - protein, 60 aa, Gossypium hirsutum
  Clone ID: LIB3135-047-Q1-K1-D6.pep
FAACYPSTKFILHWPLVVGGRVSCPLYDSFYSSLERVGLPNNFYIIALHLDAFDVTLWSF

SEQ ID NO: 96593 - protein, 64 aa, Gossypium hirsutum
  Clone ID: LIB3135-047-Q1-K1-E1.pep
SRGNEERLWYCMKPSRFPDLCLEGLAKQDLLPFGFLNLGLLSPRGSMFRDTCSRVKALYALCCS

SEQ ID NO: 96594 - protein, 105 aa, Gossypium hirsutum
  Clone ID: LIB3135-047-Q1-K1-E12.pep
PRVRVYGKSFFSRRQLALARGNSYYDGMFRKFCPSKSHKQALSNRMPSLVPCCHPFSYRILFEFYFIIFLLKPLSLYALPQQWFRLQSFNCLNLSFVKKPPFYKH

SEQ ID NO: 96595 - protein, 112 aa, Gossypium hirsutum
  unsure (1)..(112): unsure at all Xaa locations
  Clone ID: LIB3135-047-Q1-K1-E7.pep
MFVQWGQEFTVEEVGXLKKELTKLLSQNRXPDTKKEVASLPLDRFLNCPSSLEVDRRFNNAVCSDARDRSEEDIVRTISIILRRCKDICGEDNKKKAIGKKSISFLLKKMFV

SEQ ID NO: 96596 - protein, 106 aa, Gossypium hirsutum
  Clone ID: LIB3135-047-Q1-K1-E8.pep
IFVRDITIFFKEELIINSPKGIYGRCASFYIAWGPRITIHYVTNIFIHGLNIHYFMHGGNAIVRDFPRHYCWRTLSYWDCVSIFCGSLFLCGLYTSCIISFIVFFD

SEQ ID NO: 96597 - protein, 48 aa, Gossypium hirsutum
  Clone ID: LIB3135-047-Q1-K1-F10.pep
KVPRKNGDLYINAVSCLTPAGKDFIITLYTYNFYNSCLHITITSLVAM

SEQ ID NO: 96598 - protein, 116 aa, Gossypium hirsutum
  Clone ID: LIB3135-047-Q1-K1-F11.pep
PRVRPRVRVEEPGENLSYGDEDEEEESYEGCSKVNDEDETEDGFFVPDGYLSEDEGVQVDRMESDVPVQDIQSSHISKQDGRNEEFSALLLQQKCLNNITEHALRKNQVLVILNLF

SEQ ID NO: 96599 - protein, 57 aa, Gossypium hirsutum
  Clone ID: LIB3135-047-Q1-K1-F12.pep
MSFPFTLSFISLLATSSTSGVNTGSLPLTTKASFLTRNKLTICDKVHIIILSHQHFQ

SEQ ID NO: 96600 - protein, 59 aa, Gossypium hirsutum
  Clone ID: LIB3135-047-Q1-K1-F5.pep
EVEVQLGKRLQASIVRQLKEAEMAMQWTLIYKLTSRLRVLLQSAPSKRLLFEYSATSQD

SEQ ID NO: 96601 - protein, 46 aa, Gossypium hirsutum
  Clone ID: LIB3135-047-Q1-K1-F6.pep
VGELIGTHVSKKRMTDYALSCLVIPPARYTCMEPGLPCKQIIRTRD

SEQ ID NO: 96602 - protein, 64 aa, Gossypium hirsutum
  Clone ID: LIB3135-047-Q1-K1-F7.pep
WPITLNPCKGKLATSFYENRFGFRHKSSVRSYFSLQTFMSVNSSHPLTVHGSWSKISMGTSLMW

SEQ ID NO: 96603 - protein, 116 aa, Gossypium hirsutum
  Clone ID: LIB3135-047-Q1-K1-F8.pep
GISILTYAPSNAVWWASYSGAQRLVWGGIGCYLKGGGDETIRPDSKTVMAVQGASAAMAGGISALITMPLDTIKTRLQVLDGEENRLRGPTIGQTVRIFVKEGGWLACYRGLGPMW

SEQ ID NO: 96604 - protein, 63 aa, Gossypium hirsutum
  Clone ID: LIB3135-047-Q1-K1-G2.pep
KVRWFVAEVSDQNFVDEEQGEKARKGCSSPKKLKTPVTDASCNDQVKFNTINPLFTLANSHLS

SEQ ID NO: 96605 - protein, 69 aa, Gossypium hirsutum
  Clone ID: LIB3135-047-Q1-K1-G3.pep
YYNNFKFIFIYFFFFEKNLSLFIIIFIAMPYDTNAYTKSPIYLPPNPFPNTPPPPLQWLLIWPNTGNRF

SEQ ID NO: 96606 - protein, 73 aa, Gossypium hirsutum
  Clone ID: LIB3135-047-Q1-K1-G6.pep
VPNRGYGRISMVSLHYSEGGVLFPCKAWTKNFPATLWNCICLSPLHEQWGWSNGYSDWWLQWDYWEPTLWKIK

SEQ ID NO: 96607 - protein, 44 aa, Gossypium hirsutum
  Clone ID: LIB3135-047-Q1-K1-H3.pep
KFGSHKMDTHSSNHHFNCPQINFKNPPPPPLQWLLIWLNTGTRF

SEQ ID NO: 96608 - protein, 89 aa, Gossypium hirsutum
  unsure (1)..(89): unsure at all Xaa locations
  Clone ID: LIB3135-048-Q1-K1-A2.pep
PRVRSARILSRALEMCDNKIKAETLIVEGNPKDKLCEISEEMKVDLLFVGNRGLGRIQRAFLGSVSDYCAHYAXCPVLIVKPPKEMAGQ

SEQ ID NO: 96609 - protein, 51 aa, Gossypium hirsutum
  Clone ID: LIB3135-048-Q1-K1-A3.pep
HILRECSLTRCCSNKSSASSIDPNAGTLSIIISPKELTLYCLATNPYYSKY

SEQ ID NO: 96610 - protein, 47 aa, Gossypium hirsutum
  unsure (1)..(47): unsure at all Xaa locations
  Clone ID: LIB3135-048-Q1-K1-A5.pep
CITTAQLRGITIISSRKLISALFSCRAIXYHMLDCVLATPECTWLCI

SEQ ID NO: 96611 - protein, 61 aa, Gossypium hirsutum
  Clone ID: LIB3135-048-Q1-K1-A7.pep
STILVARSRKTFGSNTAMLASRILIVANILLFGLILLSKTIYYNTCYCTTNQFLRMKGFEQ

SEQ ID NO: 96612 - protein, 89 aa, Gossypium hirsutum
  Clone ID: LIB3135-048-Q1-K1-A9.pep
FSLLPIENFHNHSLFRSIVRQNRRRKCPKGPIAIKGGHRKAFLCPSTTSRLPYPIMLRLISPYHPTKRHLLSRFVLRFQLWQRRRLLIL

SEQ ID NO: 96613 - protein, 109 aa, Gossypium hirsutum
  unsure (1)..(109): unsure at all Xaa locations
  Clone ID: LIB3135-048-Q1-K1-B1.pep
DYDSSYNELLGWITTMREYVPGTMIELQTRPYYDPDDQLQPRKRIFHRMFWTFDPYVRAFSYCKLFVQVDRTSLYEXYTQILLLVVAQDSNRNMLPIAVAIVDKENLKS

SEQ ID NO: 96614 - protein, 114 aa, Gossypium hirsutum
  Clone ID: LIB3135-048-Q1-K1-B6.pep
AQMLKQISPRVFSSRMQGNYIREQVLASYECLLSFCTPKEECFISPQLAVYLMYRGHSSQISSECIHHIKRCYGSLRTVVIGYTVCFSTPVIGDSKGQRVPQAAIYRHQHRSRR

SEQ ID NO: 96615 - protein, 124 aa, Gossypium hirsutum
  Clone ID: LIB3135-048-Q1-K1-C11.pep
MAMLRAFSTRRNRDGYERLLLETEVEEPVISSNGQFEAQLKRARSVPARVFGLSRKFNGPELGLPEKCQEKSSTMTNSNKKGSKSKTIHPLFSLFDGRRKKKTTAKPEFARYIEYLKERGMWDM

SEQ ID NO: 96616 - protein, 108 aa, Gossypium hirsutum
  unsure (1)..(108): unsure at all Xaa locations
  Clone ID: LIB3135-048-Q1-K1-C7.pep
LAHAVNGGLGVVFRLPEPLNEHVPNLTYPDYNXNAGVLDLEITAGPAIIFHPRREDMPHSPPEGRVPDATNGGDHLRQVFSAHFCLSNQYNYNLYSGHTLARCQKERS

SEQ ID NO: 96617 - protein, 71 aa, Gossypium hirsutum
  Clone ID: LIB3135-048-Q1-K1-D12.pep
PKFRTLGKFEFFVQDINSDIIFYIYIYLLFCFPFVGIFFLLQNMVNLYMNSRDFMKETKPNAYIESSRVNF

SEQ ID NO: 96618 - protein, 61 aa, Gossypium hirsutum
  Clone ID: LIB3135-048-Q1-K1-D5.pep
RHPRRFPRPSTSRTISPPKKNMKLRRRINGHSSDRRAFQSNDDIIIGSKLYTPGFQGWEKT

SEQ ID NO: 96619 - protein, 48 aa, Gossypium hirsutum
  Clone ID: LIB3135-048-Q1-K1-D6.pep
TLPWLLRNPGFQWMEPTPPFQKPPTTFLKDRNRFHFLRLLTSLQIQHL

SEQ ID NO: 96620 - protein, 61 aa, Gossypium hirsutum
  Clone ID: LIB3135-048-Q1-K1-D8.pep
LGALLRMWKRVGNKETNIIENRGSCRYPSIPKRQPLQEKRISSYFIFFLRDLILLIPVESY

SEQ ID NO: 96621 - protein, 62 aa, Gossypium hirsutum
  Clone ID: LIB3135-048-Q1-K1-D9.pep
GEHASVNPWDYFDVGFPYSDGIHPRADSDILQWHVLVRNRLRVTLLCFVGSPGGINKNDLRG

SEQ ID NO: 96622 - protein, 45 aa, Gossypium hirsutum
  Clone ID: LIB3135-048-Q1-K1-E12.pep
QTFLNNLFFFFNKIMIFFFFKEIYIFLFYFLKICALLLLNIFLSL

SEQ ID NO: 96623 - protein, 67 aa, Gossypium hirsutum
  Clone ID: LIB3135-048-Q1-K1-E6.pep
PRVLPRVLTGSDMRRMTYEDSGRVTNVSYDTRHADLHDLFGPFGALSRLYAAIDQNTGTSGGVRACQ

SEQ ID NO: 96624 - protein, 67 aa, Gossypium hirsutum
  Clone ID: LIB3135-048-Q1-K1-E7.pep
SRHVKRTTASLPPSDHVDHTSRETHQVSELVMNAAVINNEDVITPPRTQACHLEEKSRIHPLRAKIQ

SEQ ID NO: 96625 - protein, 56 aa, Gossypium hirsutum
  unsure (1)..(56): unsure at all Xaa locations
  Clone ID: LIB3135-048-Q1-K1-F5.pep
QWIYSCSLFNPNMNHLRLYDSWGERDGLFLSGTVHRICRIEPNCPCHKTXLMIYSL

SEQ ID NO: 96626 - protein, 75 aa, Gossypium hirsutum
  Clone ID: LIB3135-048-Q1-K1-F6.pep
SKLSSVVFSCFLTRICLEESGVEKEGGFHPRTGYLTSCQEANYPLYLLWTDFYIRREILVTLLTILISKMTFWKE

SEQ ID NO: 96627 - protein, 63 aa, Gossypium hirsutum
  Clone ID: LIB3135-048-Q1-K1-F8.pep
KPQVGALLVIAVPINYQKNFLPARTPIITPSKADKAPSLESQNSVHVKGLLTCDSTSLNLSCK

SEQ ID NO: 96628 - protein, 76 aa, Gossypium hirsutum
  Clone ID: LIB3135-048-Q1-K1-G11.pep
MCRCAARSVRGSNLRRPGYTTGVPERKVAVLGTAGGIGRPLAMLTKLNPAVSQLGLYDIADTPSGAADVSHINFRS

SEQ ID NO: 96629 - protein, 58 aa, Gossypium hirsutum
  unsure (1)..(58): unsure at all Xaa locations
  Clone ID: LIB3135-048-Q1-K1-G12.pep
KXGPTHASGGSNALLLHHTTIKLLTPNPLSLSKKGTLLLSLSLIINKVAFKMGTKTMY

SEQ ID NO: 96630 - protein, 162 aa, Gossypium hirsutum
  Clone ID: LIB3135-048-Q1-K1-G3.pep
LVRLLGFCVDQQEQLLVYEFMPNSSLDVVLFDPKKRAQLNWSKRLNIINGIARGILYLHEDSRLRIIHRDLKASNVLLDFDMNPKISDFGMARIFAGADSEANTARIVGTYGYIAPEYAMEGLYSIKSDVFSFGVLLLEIITGRRNARFNQKKHAQTLVAYA

SEQ ID NO: 96631 - protein, 93 aa, Gossypium hirsutum
  Clone ID: LIB3135-048-Q1-K1-G4.pep
KCDIGWGSTYFGAHAFNYEELEEATDNFNPSKQLGEGGFGTVYYGVLRDGRVVSEKHLYENNIKRVDHYMNEIEILTRMLHTNLMKLYGCTSR

SEQ ID NO: 96632 - protein, 111 aa, Gossypium hirsutum
  Clone ID: LIB3135-048-Q1-K1-G7.pep
HAYSHAFVHASVIREGLHCDPCFSGRAIAMPKMLIDGAVKYEDGTPATEAQMWKDVETFLSWAAKPEMEERKLMGFKWIFALSLALLQAAYYRHLRSSVLKSSRLGLDVVN

SEQ ID NO: 96633 - protein, 93 aa, Gossypium hirsutum
  unsure (1)..(93): unsure at all Xaa locations
  Clone ID: LIB3135-048-Q1-K1-H1.pep
PTRXPTRXLFSLFFSPNSSGDAIFHVSVFILYENPILNYLRRYNFCSTLFCPLFLLFKPCFPPLFFFFWLVHQHFLCCFNFLFDIQILFSNFR

SEQ ID NO: 96634 - protein, 54 aa, Gossypium hirsutum
  Clone ID: LIB3135-048-Q1-K1-H10.pep
SDHSLHVNVMLPCSYISAFCWFHGKKKSYSFIFHAFNEFSKCVDIVYECVCFLH

SEQ ID NO: 96635 - protein, 72 aa, Gossypium hirsutum
  Clone ID: LIB3135-048-Q1-K1-H2.pep
QAYNHHTKQKCVDSKEGKRAEASSSIYVMGGKVPRKKILFFPSLIPETGLHLSIRLPSSSKSLAGKAPPFNE

SEQ ID NO: 96636 - protein, 75 aa, Gossypium hirsutum
  unsure (1)..(75): unsure at all Xaa locations
  Clone ID: LIB3135-048-Q1-K1-H3.pep
INLHEIHLSLASWSNKKEARIDRPYKQVGXMDSERDALSSHSLSAVWVVLTPRATXLTSELASARFVCFPSFLST

SEQ ID NO: 96637 - protein, 57 aa, Gossypium hirsutum
  unsure (1)..(57): unsure at all Xaa locations
  Clone ID: LIB3135-048-Q1-K1-H5.pep
LYWNSVLNLYRYNLLHSXWVEAVSLYDGHKLSTVTSIWDSGYSAMNSWTITHCCSIH

SEQ ID NO: 96638 - protein, 69 aa, Gossypium hirsutum
  unsure (1)..(69): unsure at all Xaa locations
  Clone ID: LIB3135-048-Q1-K1-H7.pep
GNAICYVGIRMHFYEMKKFNGNCLDRRISLRNRKSXVISCNSKQYGMTKESSYKSRCIRNAMDFCFRFN

SEQ ID NO: 96639 - protein, 42 aa, Gossypium hirsutum
  Clone ID: LIB3135-049-Q1-K1-A11.pep
NVAVNEGLFNKRAGQLRWCKNNGYVRVRKGPLNFTILYIVIF

SEQ ID NO: 96640 - protein, 117 aa, Gossypium hirsutum
  Clone ID: LIB3135-049-Q1-K1-A12.pep
DARVLLTYYFLKHFIYCETPGQTGGWTLIQQDKNKKKHLEKPAQFDIWSSIISQMAEESSKSVPDPYVHPLVKRSASSLSEKSLEICTESLGSETGYNGFSSYPPSETSDMQEEDGQ

SEQ ID NO: 96641 - protein, 79 aa, Gossypium hirsutum
  unsure (1)..(79): unsure at all Xaa locations
  Clone ID: LIB3135-049-Q1-K1-A3.pep
AAHTVGFSHCGKVXNRIYNTSXQVQATRTLNQAYATQXQHMCSKNAHSRTALDMDPNTPQAIKHVYYKDLLQGKASFTH

SEQ ID NO: 96642 - protein, 139 aa, Gossypium hirsutum
  unsure (1)..(139): unsure at all Xaa locations
  Clone ID: LIB3135-049-Q1-K1-A6.pep
RTGEEGRARRRATPTRSNTQSDKKDQKEGRSEGNHKATRPETRDTSFKGQSAEDPTVRQTDATQAQKRGAEEANPGPGSNREINTRTKDPTMQYTKHQNGGQDDKNSTHSXRMTEGGHQGDKPEKISXDNKNEAAAGGG

SEQ ID NO: 96643 - protein, 78 aa, Gossypium hirsutum
  Clone ID: LIB3135-049-Q1-K1-B1.pep
RENLPSLLLNHGESRVVYRANLVVVTIPFLVEDWKRLLFITRLIGSAVDTRETPTRQAKRVRGQQAKSYAFISLLRLK

SEQ ID NO: 96644 - protein, 66 aa, Gossypium hirsutum
  Clone ID: LIB3135-049-Q1-K1-B11.pep
HGSLPLYCSSSHTPLVAHHTVVNTRRLFDSDIDTAFMQTVCIRSQLLKTIMCLGFLPLLPSTGRHN

SEQ ID NO: 96645 - protein, 54 aa, Gossypium hirsutum
  Clone ID: LIB3135-049-Q1-K1-B3.pep
PPFDPFIWVLSIFTSFFGVPVELTFLLYGAQFFSQIYPRGKFFLVNLVFESGKF

SEQ ID NO: 96646 - protein, 73 aa, Gossypium hirsutum
  Clone ID: LIB3135-049-Q1-K1-B5.pep
NKRKKVLFLPWPACIIHTPFFKYGLFQSHERNESITLCLLSSNSFSPPCGGLSGVCGGSDQSGDEEKSFPIFP

SEQ ID NO: 96647 - protein, 82 aa, Gossypium hirsutum
  Clone ID: LIB3135-049-Q1-K1-B6.pep
CFLLILRCALRPSCDQGGRALVPQFSCVRMAFFVPSVQAFCSSVRLPRDGLFGAFSVPLPLFVFCLVVSGSSFPPWVRTCSP

SEQ ID NO: 96648 - protein, 46 aa, Gossypium hirsutum
  Clone ID: LIB3135-049-Q1-K1-B9.pep
MKTGSRSLIRVQTGPLQLMILYICVYHEYVLQVPHCNDSLSGTGAT

SEQ ID NO: 96649 - protein, 64 aa, Gossypium hirsutum
  Clone ID: LIB3135-049-Q1-K1-C1.pep
GLLFLLGSGTIRCSPATSSCPRGSGSSHLTWSRQVLLVLISMSKLIMSYHSPRQYVHVAIRTRV

SEQ ID NO: 96650 - protein, 79 aa, Gossypium hirsutum
  Clone ID: LIB3135-049-Q1-K1-C6.pep
HSDSYDGGLMPEPLIIDARAWIHEISTVSVYYSQKPPSTERPGQNPGGKKTLMSSTILRLYQMTLRGVQIRGSCLARLI

SEQ ID NO: 96651 - protein, 59 aa, Gossypium hirsutum
  Clone ID: LIB3135-049-Q1-K1-C8.pep
RPRVRLTLDTLPFFWGFFLYGVLVQGFWVPPTKPTQTKFSTTTPKPLAGKCNGEVAGYV

SEQ ID NO: 96652 - protein, 63 aa, Gossypium hirsutum
  Clone ID: LIB3135-049-Q1-K1-D10.pep
ERAHGECHKGIIGYLRLIVATDLSERCYPRRNQQSHTPIYSWIPQIGRWSLNEMPFFALSSIP

SEQ ID NO: 96653 - protein, 119 aa, Gossypium hirsutum
  Clone ID: LIB3135-049-Q1-K1-D12.pep
LSNPTTSRGLISPLHDERLAFKFAQYKPESGRGADGREKAFGRPERIRSTSLVMDAVLPDQVNSVCGLCQKHLRRKPYILGNTLPSGEFSVVAVLVCGHVYHEDCLEKRTSFEERRDPR

SEQ ID NO: 96654 - protein, 104 aa, Gossypium hirsutum
  Clone ID: LIB3135-049-Q1-K1-D2.pep
PTRPPHFRYTAFLLVFLSLWFLLQVFWFPPTKPTQTKFSTTTPKPSAGKCNGDVAVYVYNLPAEFNLGLLDDCSHLNVYTNMCPHVANHGLCQPLDNMDLQSSD

SEQ ID NO: 96655 - protein, 45 aa, Gossypium hirsutum
  Clone ID: LIB3135-049-Q1-K1-D3.pep
RLFIRINPVIPTPFPVRCLCGGGDDLGLRSVLFLGPNRLASHPLK

SEQ ID NO: 96656 - protein, 49 aa, Gossypium hirsutum
  Clone ID: LIB3135-049-Q1-K1-D5.pep
DQDGLTARGSSASTIKNFRHWLKMPRLRMHASKHPPLCWNGHMTSNHPR

SEQ ID NO: 96657 - protein, 126 aa, Gossypium hirsutum
  unsure (1)..(126): unsure at all Xaa locations
  Clone ID: LIB3135-049-Q1-K1-D9.pep
FFLFFYYFLAQTAGRLNTWESLTTGIAQQAKGVIAPKEKTPFITFVLGGPGSGKGTQCIKIVETFGFAHLSAGDLLRREIASKSADGAMILNTLKEGKIRPSHVTVKLIQXEMVLSYNHKILIDGF

SEQ ID NO: 96658 - protein, 88 aa, Gossypium hirsutum
  unsure (1)..(88): unsure at all Xaa locations
  Clone ID: LIB3135-049-Q1-K1-E11.pep
HHYAGRALIVTIHFPSHYPIKPSYVASMTKDLHPNINSHGSIRLDFPKVQWIPALTIFKALLFXLXLLTDPNPDNPLVPEIAYMYHTD

SEQ ID NO: 96659 - protein, 64 aa, Gossypium hirsutum
  Clone ID: LIB3135-049-Q1-K1-E2.pep
FPASCCKALCSSISVHIFAVSGSADLVRDVDAYSLAGRVPAKLPLFLSALFGSLQAPTHGCIVF

SEQ ID NO: 96660 - protein, 69 aa, Gossypium hirsutum
  Clone ID: LIB3135-049-Q1-K1-F2.pep
SGCLLAMHPGLPWLERLGIFHRRDIVRSIRQNFRCDEHKKRCISCSSMRLGMGRFQHNKQYRQIVFKEP

SEQ ID NO: 96661 - protein, 62 aa, Gossypium hirsutum
  Clone ID: LIB3135-049-Q1-K1-F3.pep
ATEKAGVKNTCENNSRGKKQSVQKNSACLNDFDRYKIRLATIKKAGVVRHRASLRLKKENAP

SEQ ID NO: 96662 - protein, 122 aa, Gossypium hirsutum
  Clone ID: LIB3135-049-Q1-K1-F6.pep
PSLNCTSEVVLAHTRGENIFPSSIYWLVDVQDVAYAHIQAFEIPSATGRYCLVERVVEFPEILKTLNELYPTLGLERKCEEHDDPLKRIYQVSQEKAKTLGLSFTPWERSLQETVESLKEKG

SEQ ID NO: 96663 - protein, 118 aa, Gossypium hirsutum
  Clone ID: LIB3135-049-Q1-K1-F7.pep
PRVRRAGKQEENAFSGGPDYDEPENMPMGEDIPYKKEKHENGEAELGKKETMDNGQPRSQASLEELSRSNQDALPASLAEKEKQTEQAATDSSRKQKMEHNLEEQETHPSSGIQEYGE

SEQ ID NO: 96664 - protein, 52 aa, Gossypium hirsutum
  unsure (1)..(52): unsure at all Xaa locations
  Clone ID: LIB3135-049-Q1-K1-G12.pep
IHVVLCILGFFLNLRTCXKKKKKNIKFFIYNNNLIFNIYFFFFYNKYHFSFI

SEQ ID NO: 96665 - protein, 78 aa, Gossypium hirsutum
  Clone ID: LIB3135-049-Q1-K1-G2.pep
KNGFSWVFLVGFTFNGLSCSWIWWGRNKAYTSLYMGGVRLNAQGGALGVMEPYSQGYWTNTPTFNTPLFNNGLNCGSC

SEQ ID NO: 96666 - protein, 143 aa, Gossypium hirsutum
  Clone ID: LIB3135-049-Q1-K1-G3.pep
FEKIASTLMPEKDWSIRIAAMQRVEGLVSGGAADYPCFRGLLKQLVGPLSAQLSDRRSSIVKQACHLLCFLSKEFLGEFESCAEMFIPVLFKLVVITVLVIAESADNCIKMMLHNCKVACVLSRIADCAKNDRNAVLRARCCE

SEQ ID NO: 96667 - protein, 44 aa, Gossypium hirsutum
  Clone ID: LIB3135-049-Q1-K1-H1.pep
SSSYLKKLVIDMGYSFLRKNCRGPSVALNIPHINLIEVGMIYYV

SEQ ID NO: 96668 - protein, 83 aa, Gossypium hirsutum
  Clone ID: LIB3135-049-Q1-K1-H3.pep
VPEFKSQQSGKNSVSASTPILNSTSLAKSSSINTTYAAVTNNTSGGDNLLASVKGGSPSSISEYLIETLPGWHAEDFLESSSP

SEQ ID NO: 96669 - protein, 65 aa, Gossypium hirsutum
  unsure (1)..(65): unsure at all Xaa locations
  Clone ID: LIB3135-049-Q1-K1-H6.pep
MSKDWRIGVSMGFSKGSKAALXWSIDNIVVKGDTLFLIHVKPNLSDAVSDPFWFTRGSPFVSFSG

SEQ ID NO: 96670 - protein, 120 aa, Gossypium hirsutum
  Clone ID: LIB3135-050-Q1-K1-A11.pep
HFEACHIRLAPVYIALLRGMGDNNEAKNYSYSLEVGGNGRKLIWHGVPRSIRDSHRKIRDSFDGLIIQRNMALFFSRGDRKELKLRVTGTIWKEHGRGCACKYGLILFCSDPKQYIRVSF

SEQ ID NO: 96671 - protein, 49 aa, Gossypium hirsutum
  Clone ID: LIB3135-050-Q1-K1-A4.pep
ETQHQLNPLNALNCSFCQVGSFLAPLHLIHSGLYHHWLTGTKHIVNIYT

SEQ ID NO: 96672 - protein, 54 aa, Gossypium hirsutum
  Clone ID: LIB3135-050-Q1-K1-A9.pep
CKTVVIVDCGQASSNVICHNLKSIYVCIYVCVCGWVHACNYKALSQTGNFLVLF

SEQ ID NO: 96673 - protein, 46 aa, Gossypium hirsutum
  Clone ID: LIB3135-050-Q1-K1-B3.pep
RQLFAGLSINYIKIVPSVAVGFAAYDMMKVWLRIPPRQKLQAESSG

SEQ ID NO: 96674 - protein, 41 aa, Gossypium hirsutum
  unsure (1)..(41): unsure at all Xaa locations
  Clone ID: LIB3135-050-Q1-K1-B4.pep
FAALPQKVSVLRSSCTIPWYALNLTAQNFCTITLGINRTLX

SEQ ID NO: 96675 - protein, 49 aa, Gossypium hirsutum
  Clone ID: LIB3135-050-Q1-K1-C1.pep
RQFEYCPPIGGQRSKPSALGTISLCPSISGINTAYMCLIRCTVPTAIIE

SEQ ID NO: 96676 - protein, 106 aa, Gossypium hirsutum
  Clone ID: LIB3135-050-Q1-K1-C10.pep
KTTVTFHNSDDNDEFDKSLWTMRILAEIRIHIWRLFDKYVCDCCNVTCRKLSVEIVSPVCKKDPENADHAMWSCGISQGIWASLPPLILSMEAWTCCENRFANTRS

SEQ ID NO: 96677 - protein, 118 aa, Gossypium hirsutum
  unsure (1)..(118): unsure at all Xaa locations
  Clone ID: LIB3135-050-Q1-K1-C11.pep
FSTLSDPSPAKPLVSLWWNTIQTYMKKAGRSDARIVLANQVTDRNYSIRKILKKSQVSLLAKRVHSEPDGLTFVLTAKDVAVEGFCTSNCGFHEPXEKSAFVWVGNSETQCPGQCAPS

SEQ ID NO: 96678 - protein, 48 aa, Gossypium hirsutum
  Clone ID: LIB3135-050-Q1-K1-C2.pep
ELVYCWKIGGHRSKHRELGNLYICPKITGINTAYKCLKRWTVIFVIHD

SEQ ID NO: 96679 - protein, 110 aa, Gossypium hirsutum
  unsure (1)..(110): unsure at all Xaa locations
  Clone ID: LIB3135-050-Q1-K1-C4.pep
HAFATTHLLIFLLGVAALTTPSLGTHESXPNSGKPSTSVYKPPKVKPPPYEHKPPVYEPPKMEKPEPKPPVYTPPKIEMPDPKPPLCESPKKEKPEPXPPVYTPPKKENA

SEQ ID NO: 96680 - protein, 52 aa, Gossypium hirsutum
  Clone ID: LIB3135-050-Q1-K1-C6.pep
YVFTDSMLSVYVQKVLKMVIKKPRDYPLNLRHKRFLKLVYVFWVVLYNSLKL

SEQ ID NO: 96681 - protein, 48 aa, Gossypium hirsutum
  Clone ID: LIB3135-050-Q1-K1-D1.pep
LYQALPSSICICIIFPKIHMHPRYGIASHIVSMIVYDSIALLHASTFV

SEQ ID NO: 96682 - protein, 122 aa, Gossypium hirsutum
  unsure (1)..(122): unsure at all Xaa locations
  Clone ID: LIB3135-050-Q1-K1-D11.pep
HASGHAYGYVRAGEPREAYTLTNCLGEHGVQPNVVIFTTCALKGDALRGQMNHALLRXYEKMCHISFTLKLTTFETPIWGYGEAKQPXKVDNLLRIMAXTGIFAYRSTIQLLADAWRAIVLL

SEQ ID NO: 96683 - protein, 88 aa, Gossypium hirsutum
  Clone ID: LIB3135-050-Q1-K1-D12.pep
LHSGIEGSLSGGGMGYAPQIRLALQPMNAFCGNTPNSSAMCAMHASYFASKETKADDNSMGLHSRNAKASYPDLALANMIMCGEKCKD

SEQ ID NO: 96684 - protein, 47 aa, Gossypium hirsutum
  Clone ID: LIB3135-050-Q1-K1-D5.pep
DLGVSYDEVNERWMCMYLSNLLIMFRSICVIRSLYDGLVNQEEGCTV

SEQ ID NO: 96685 - protein, 35 aa, Gossypium hirsutum
  Clone ID: LIB3135-050-Q1-K1-D8.pep
RERENDSLAVYVLAVAVASERLERAPAFILHTYYL

SEQ ID NO: 96686 - protein, 84 aa, Gossypium hirsutum
  Clone ID: LIB3135-050-Q1-K1-D9.pep
RPRVRSMPSRGTTVSLKVRTRVAFRQSVVAPYENLDDKDTQIPGSEEDRQAPHGEAQFSEKVSVKVYHLPGGYTGALLTVDRDM

SEQ ID NO: 96687 - protein, 65 aa, Gossypium hirsutum
  Clone ID: LIB3135-050-Q1-K1-E5.pep
PRYVWHVPDVNGPALQRELRAFYGQAPAVVEICVHAGADVPDQYKPTMRLDIGIPTSLREAEMVV

SEQ ID NO: 96688 - protein, 91 aa, Gossypium hirsutum
  Clone ID: LIB3135-050-Q1-K1-E6.pep
KSRETKLVVESFLVIDTRRISFNSYVTIHSEVALFLMSECLILSIKVLPLSIARVSPPWSALIFSNSAGPHQGLSCEPCNVLRQELLLSLS

SEQ ID NO: 96689 - protein, 82 aa, Gossypium hirsutum
  Clone ID: LIB3135-050-Q1-K1-E7.pep
PRVRPLFRLFCLFIPFVRYRGQSGWNPLDGSRVVSNILIIYLEPCLTCPERLSSCSSRFWQLTPCELCSIHMLPFILKYPSF

SEQ ID NO: 96690 - protein, 62 aa, Gossypium hirsutum
  Clone ID: LIB3135-050-Q1-K1-E8.pep
AWGLIHGMTNYWAVSTLGWIAVVFIFSLKHSGAYDFSFLEIEPVTDPSLPSVPFFGNGRTCK

SEQ ID NO: 96691 - protein, 91 aa, Gossypium hirsutum
  unsure (1)..(91): unsure at all Xaa locations
  Clone ID: LIB3135-050-Q1-K1-F2.pep
AVGPFKTKCCSLISGLADLEGDVGLCTAIKAHGLVVNLDVPVXLSLLLKCCEKQMHCLLQDELKQWLGVSFTKIYFSERVKCGELICQGFA

SEQ ID NO: 96692 - protein, 91 aa, Gossypium hirsutum
  Clone ID: LIB3135-050-Q1-K1-F3.pep
WCSRILLAFCCNTAEHLSYKWCRRTYASSAFHCHFMQATHMILVIAALTLIIIYTEACRRLDLTIVGSLVGEHFLISPQTGYPQELFKVTS

SEQ ID NO: 96693 - protein, 153 aa, Gossypium hirsutum
  unsure (1)..(153): unsure at all Xaa locations
  Clone ID: LIB3135-050-Q1-K1-F4.pep
HMLKHKRSGKKGYMAIKLNMSXAYDMVEWNFIREIMIQMGFDQKWVDALMKCVTTVSYSVVINGHIGXKFLPTIGLRQGDPLSLFLFLLCGQGLSGLLRLATNEKFFKGVKXCRSGPPISHLLFADDCILFGDATTNGAHLFKDILREYRSSS

SEQ ID NO: 96694 - protein, 123 aa, Gossypium hirsutum
  Clone ID: LIB3135-050-Q1-K1-F9.pep
PTRPGGFVTHCGWNSTLEGVCAGVPMVTWPIFAEQFYNEKLVTQVLKIGVAVGVQKWVRLEGDFVERGAIEKAVKEIMKSDRAEAMRNKAKALAETAKKAVEKGGSSYSDLDALIEEISLHSH

SEQ ID NO: 96695 - protein, 96 aa, Gossypium hirsutum
  Clone ID: LIB3135-050-Q1-K1-G5.pep
RLRTLQRAIALLELILIEVVYGDASKSAYGTTISAASFALGGSENGSLHYLVEPREVRKLELKQGTKLQLASCFGSTRLKGEGFAAAVQQVEEFAT

SEQ ID NO: 96696 - protein, 91 aa, Gossypium hirsutum
  Clone ID: LIB3135-050-Q1-K1-G8.pep
LLLCIFSIFASFREYLRVNVSLHKIKIWLFISEKKEEEFEIKYNVFLLFALAVGFLVCLQVCWYCASWHLSWRCTEALEIVEVAAAQGIEP

SEQ ID NO: 96697 - protein, 85 aa, Gossypium hirsutum
  unsure (1)..(85): unsure at all Xaa locations
  Clone ID: LIB3135-050-Q1-K1-H11.pep
LTHFWGTEFGPEFKGYREGDSXPTAFPHICITVDDMYEACGRFQRLGVEFVXEPHDSYACIKDAPRYWIEISDLNGICAILGNGA

SEQ ID NO: 96698 - protein, 65 aa, Gossypium hirsutum
  Clone ID: LIB3135-050-Q1-K1-H12.pep
RCPRGCLLSSVSSSIIPSASFLSLSLGVLFASSSLVCFVVVSARSPPAASCVIRGPTASPSATLV

SEQ ID NO: 96699 - protein, 81 aa, Gossypium hirsutum
  Clone ID: LIB3135-050-Q1-K1-H2.pep
IDRLFNQLIKSHASLVRIDVYYHRRFIDLYRLQMLDNISRGYLNLLPLEKLSRRLRVVGSPTSAAYHLSRNQGLHKCERVA

SEQ ID NO: 96700 - protein, 50 aa, Gossypium hirsutum
  Clone ID: LIB3135-050-Q1-K1-H4.pep
HPVYDTVVHTLRARPRTQPPPIGYDIVHHRATSPTTSTCAPTSSTSCRLP

SEQ ID NO: 96701 - protein, 51 aa, Gossypium hirsutum
  Clone ID: LIB3135-050-Q1-K1-H5.pep
LLHFPRFTQVMKGAVFRSYECKASDRDCVFHTRIYMHPHTLPRSESIPRML

SEQ ID NO: 96702 - protein, 68 aa, Gossypium hirsutum
  Clone ID: LIB3135-050-Q1-K1-H8.pep
KASRVLLVALYWESLALHCITQYINIYISTSKQCPSPLNINRISCFACELFIQIGFLNLESVLMPRRK

SEQ ID NO: 96703 - protein, 141 aa, Gossypium hirsutum
  unsure (1)..(141): unsure at all Xaa locations
  Clone ID: LIB3135-050-Q1-K1-H9.pep
YNKPCRPGTHCSTLDKLYAGEQKLYKEVKEEETTKLERERKLMLLQKQDENHDWSKTEKIQSSVENLDNVLRHLQNSISTYCSSILEIIDEELYPQLETLISGLMEMWKMMYKCHRVQNLISQQLNHVTDIXIDLTTDSDR

SEQ ID NO: 96704 - protein, 58 aa, Gossypium hirsutum
  Clone ID: LIB3135-051-Q1-K1-A6.pep
ILQASPRCAICLPSMTEHYDLFINSGCNALTDLSYHKPDLGPCTRCIRLLCFHAQSTH

SEQ ID NO: 96705 - protein, 104 aa, Gossypium hirsutum
  unsure (1)..(104): unsure at all Xaa locations
  Clone ID: LIB3135-051-Q1-K1-B1.pep
LQSWNYIYRSLFTDKTLDLTWDSFDLTKHGERVKYKSFNEIIIKEPRLWKRSVSRSQFVMMPEVPFQEYRDGSXKYVSTRKHALLXYXDRTLCRTWKEPCYRAS

SEQ ID NO: 96706 - protein, 42 aa, Gossypium hirsutum
  Clone ID: LIB3135-051-Q1-K1-B3.pep
TDDRFYNAGCESNYILAHYQGPRMVLCLWEKLQKEHQAYCCE

SEQ ID NO: 96707 - protein, 46 aa, Gossypium hirsutum
  Clone ID: LIB3135-051-Q1-K1-C11.pep
PRVRKDLPLSCFTFSFFPRISFGLFETHPRFNSALLWSLDATNATD

SEQ ID NO: 96708 - protein, 86 aa, Gossypium hirsutum
  unsure (1)..(86): unsure at all Xaa locations
  Clone ID: LIB3135-051-Q1-K1-C12.pep
GSTMFKDFHRRLQRDLKKIVDAGVLASDTRLGGEVKAHPVEVNVVSHPIQRFAVWFGGSVLASTPEFFAACHTKAEYXEYGASICR

SEQ ID NO: 96709 - protein, 132 aa, Gossypium hirsutum
  unsure (1)..(132): unsure at all Xaa locations
  Clone ID: LIB3135-051-Q1-K1-C2.pep
IARKILQIPLSKSTNEDFQVWRREATGDFSVRSAYKLLQEANIDPSFYLQTNTKSFYRKLWNLHMPSKIKITVSKIAXNYIPTFSNLKLRKVMTEDRCMRCGQGEEDSNHVFQLCPTVKEIWSHLNFSRVFS

SEQ ID NO: 96710 - protein, 139 aa, Gossypium hirsutum
  Clone ID: LIB3135-051-Q1-K1-C5.pep
MADTLLFTCLLLFLAAMQGVHAVDYAINDNTGNSGGGVRFRTEIGAQSSLQTMSSATDFIWDIFQQTNPSDRKNVPKVTLFIENGDGVAFAINNEIHVNANYLGNYTSDLRKEFNGVLYHEMTHIWQWNGNGQTPGGLI

SEQ ID NO: 96711 - protein, 88 aa, Gossypium hirsutum
  Clone ID: LIB3135-051-Q1-K1-C6.pep
TTSINPFFLAMATYGVGLAEAYVMRSLHKEKMKKMDKQQASKSEEEEEENNNKMVFDDEMKMPASCFSWVSKKTHFARVSDASGKPNV

SEQ ID NO: 96712 - protein, 69 aa, Gossypium hirsutum
  Clone ID: LIB3135-051-Q1-K1-C7.pep
LSLMPGFETSTYRILGSRASSLSYSCCEICATDRSLAKMFTLAVKTSRQPSFSLYIVKRPGSLIATHVT

SEQ ID NO: 96713 - protein, 44 aa, Gossypium hirsutum
  unsure (1)..(44): unsure at all Xaa locations
  Clone ID: LIB3135-051-Q1-K1-D1.pep
GNMKDRDVGERWGHNGFKTVHKENYGAFKNLKNNPQISLPXRVG

SEQ ID NO: 96714 - protein, 68 aa, Gossypium hirsutum
  Clone ID: LIB3135-051-Q1-K1-D11.pep
INEGLVRSDRYVGHPVGSCEWDSIPRKVPSNIYGSLLPNIAQEVYSPASSSQDLATLKKAQLGEIYFD

SEQ ID NO: 96715 - protein, 46 aa, Gossypium hirsutum
  Clone ID: LIB3135-051-Q1-K1-D5.pep
VSSQLLKASDLRLVTFVPRDGERKGAESTFNENCKDAADQDDKYHL

SEQ ID NO: 96716 - protein, 62 aa, Gossypium hirsutum
  Clone ID: LIB3135-051-Q1-K1-D7.pep
SGFTPPGLEYNNPSPQRYIAITRAAFLSLPPVSISCQVYSLPRNSHSNCNCVTKPSTQVSGM

SEQ ID NO: 96717 - protein, 110 aa, Gossypium hirsutum
  Clone ID: LIB3135-051-Q1-K1-E11.pep
IDMSSNKFEGSIPETVGNLISLQVLNFSHNHLTGHIPSSLGNLVALESLDLSCNELVGEIPSELTGLNFLEVLNLSENQLVGLIPQGKQFNTFLNDFYAAIYDCVGFPFK

SEQ ID NO: 96718 - protein, 121 aa, Gossypium hirsutum
  Clone ID: LIB3135-051-Q1-K1-E12.pep
PFKHRQELVLAFLVQRICRRARGCSKHFGSSSNPYSFRYLASWGQPSWRSMARKRSCRQSHLCIQLSNLLCGFDLQHPRSRHFHTCDNTAHLQISLAPGNCYCHHFHGRHLRVRSFRGYFP

SEQ ID NO: 96719 - protein, 67 aa, Gossypium hirsutum
  Clone ID: LIB3135-051-Q1-K1-E2.pep
TVTHEIFINEKGSGMRSNTWKTFIKASEEIRNNTAILNIILLKDPKLQQPKQGIPPSLQLEPRCWPY

SEQ ID NO: 96720 - protein, 95 aa, Gossypium hirsutum
  unsure (1)..(95): unsure at all Xaa locations
  Clone ID: LIB3135-051-Q1-K1-E5.pep
ERAGRKLGGLRVENSYWLNEESSYKYFEVILVVPAHNTIRYDPGMNWICNVDHTHRLRPXLTSAGMKYRGLLGKGHLHQTARPLRRSPWKRNITL

SEQ ID NO: 96721 - protein, 61 aa, Gossypium hirsutum
  Clone ID: LIB3135-051-Q1-K1-E6.pep
DKSNPADRLMMFDQILKARMNMRIEYESVQTTIFTCSPRYLGNHNFQYKCNFLSILHISYY

SEQ ID NO: 96722 - protein, 65 aa, Gossypium hirsutum
  Clone ID: LIB3135-051-Q1-K1-E7.pep
KKSGMGSNPKTHRGHTGVLVSRLSYILARVGRKFHEIFQTVILILEGILRSHYFLLKVLERICQT

SEQ ID NO: 96723 - protein, 96 aa, Gossypium hirsutum
  Clone ID: LIB3135-051-Q1-K1-F2.pep
DSYLYRHLENLQAQDRFIVYRMVVVLFRRGLTFEQTMCLLEVMWADQATIKAGLSKNTWRRIRQKAPPTDDLLVDAIAASILQKKKLIIEKYRRID

SEQ ID NO: 96724 - protein, 102 aa, Gossypium hirsutum
  Clone ID: LIB3135-051-Q1-K1-F3.pep
MPPAYARGHTYNPAKLPSQKAPKVSICRLAYHNKPEIPVILLGTISWAYYGVVLTIFVTLHSCVMHPFFKPHLLREDSRVWALIFLAHDAASFVVYTAHNYF

SEQ ID NO: 96725 - protein, 86 aa, Gossypium hirsutum
  unsure (1)..(86): unsure at all Xaa locations
  Clone ID: LIB3135-051-Q1-K1-F9.pep
GIYTLATCIVNALRKFPTCGPNGKLELLKDLYALSLKKRDILVLHGPSVLSKELEKERIXRGVRKFKVTTEVQKAYLEYLSFPKGD

SEQ ID NO: 96726 - protein, 130 aa, Gossypium hirsutum
  Clone ID: LIB3135-051-Q1-K1-G3.pep
MNPAGLAMADTENPAELPSEKAPKVFIRRLAYLNKPEIPVILLGTIAAAANGVIFPIFGILISSVIDAFFKPHELREDSRFWALIFLALGAAAFVVCSAQNYFLFIAGSKLIQRITSICFEKKVPMELWW

SEQ ID NO: 96727 - protein, 99 aa, Gossypium hirsutum
  Clone ID: LIB3135-051-Q1-K1-G9.pep
TDCPGPPLLSSPKPWSNLTGDRGGGDKSPRTLLVRETHKEDITVGCKRKRTDDHTPTMTLLPFFLEPISIQKHHHHHPPADEDNNIDLELRLGHPPKVK

SEQ ID NO: 96728 - protein, 87 aa, Gossypium hirsutum
  unsure (1)..(87): unsure at all Xaa locations
  Clone ID: LIB3135-051-Q1-K1-H11.pep
EQGRLNGAPILVFEIAQFHVGDVVTSMHKASFIPGGGECVLYGTVMGSLGAYASDTSRDDVDFFSHLEMHMRHEHPPLCRRXHMAYI

SEQ ID NO: 96729 - protein, 116 aa, Gossypium hirsutum
  Clone ID: LIB3135-051-Q1-K1-H2.pep
HASADLLHCRVGTNSQMIMALSRLSLPFSLLVLSLPVIASAGYDDSSKYGFDGIPADSPQANPIYGTKEDIYTPKPEEKVEEKEKPYYGTQKEEKENRLTIGVQGLVLCKSDSGYS

SEQ ID NO: 96730 - protein, 87 aa, Gossypium hirsutum
  Clone ID: LIB3135-051-Q1-K1-H4.pep
SVYSQAIVFMLTSRLQSVSAISSPCNSINVGQSVHDVLHSINVGVQHTHNEVQVFVHHHRLVVLRKAAAKLMDSEQAKHMSTAVSAV

SEQ ID NO: 96731 - protein, 69 aa, Gossypium hirsutum
  Clone ID: LIB3135-051-Q1-K1-H5.pep
ITNNGYLWYSTCKFRMDLIGNHHSNILQTKYIMDENLMKNTRINVRKKKKPSLNLLGIFQVFSLLALLE

SEQ ID NO: 96732 - protein, 73 aa, Gossypium hirsutum
  Clone ID: LIB3135-052-Q1-K1-A2.pep
RLRNREQLRMVCSHEKIVSLTLVLYLTYSSLRRKQAQGIILSVLISKPGAIKEMNLNVIRPIFAFREVLYRYS

SEQ ID NO: 96733 - protein, 88 aa, Gossypium hirsutum
  Clone ID: LIB3135-052-Q1-K1-A3.pep
PRVGLCVRRAPNARVYTLAEKESLEPNRAMHIIANGGRGHDRDYRFIYRHLMKGFSSGLGCMIYQSRYSLSHTLTIFVIRLQIYRSPW

SEQ ID NO: 96734 - protein, 68 aa, Gossypium hirsutum
  Clone ID: LIB3135-052-Q1-K1-A5.pep
LGLVRRLTSHTKLNKNLRRSQYKSHTLSTRVRSSPSDVTQCRDTRPPTHAVVTGGMYTGGLLSPTGRV

SEQ ID NO: 96735 - protein, 45 aa, Gossypium hirsutum
  Clone ID: LIB3135-052-Q1-K1-A8.pep
ATRLVRSVGTNNVSAQVSSRREFHNVEPILSGIFYAINVVRASQA

SEQ ID NO: 96736 - protein, 72 aa, Gossypium hirsutum
  Clone ID: LIB3135-052-Q1-K1-A9.pep
VIATMTEIVGPRLYSCCNCRNQVALHDDVISKSFQGRNGRAFLFSHAMNVMVGPKEDRQLMTVLYTVADVYL

SEQ ID NO: 96737 - protein, 91 aa, Gossypium hirsutum
  Clone ID: LIB3135-052-Q1-K1-B1.pep
MSFRGTNASSGMGVADHSKSTYLELQRKKVFRYVVFKINEKKKEDCKIINPYNLWMMWSPSVSRIRAKMLYATSKERFISELKGIHYEIQA

SEQ ID NO: 96738 - protein, 63 aa, Gossypium hirsutum
  Clone ID: LIB3135-052-Q1-K1-B10.pep
PRVRPRVRVLALEDLQLNTNGCSLDAIREKYKQQKFKMWYHGYLPGKGWINLFKKKKKADLMV

SEQ ID NO: 96739 - protein, 42 aa, Gossypium hirsutum
  Clone ID: LIB3135-052-Q1-K1-B11.pep
SGYNTYSVVTNLYPMGELKNRMGPCCLEPMEAITIAGPIAMP

SEQ ID NO: 96740 - protein, 42 aa, Gossypium hirsutum
  Clone ID: LIB3135-052-Q1-K1-B3.pep
KEMTAEKHTIDESEPKHPRKSYAYKINMPLKDINKAKTLGVS

SEQ ID NO: 96741 - protein, 37 aa, Gossypium hirsutum
  Clone ID: LIB3135-052-Q1-K1-B4.pep
QCLLGQSTYVLHTMLINNLIIIKIFKNKNSSFHVEKK

SEQ ID NO: 96742 - protein, 51 aa, Gossypium hirsutum
  Clone ID: LIB3135-052-Q1-K1-B9.pep
RFSQHPCTIREMRTTMKQNSQQSRNYLERRVILKIIPILLNYAQECHEICN

SEQ ID NO: 96743 - protein, 62 aa, Gossypium hirsutum
  Clone ID: LIB3135-052-Q1-K1-C10.pep
SPYYKTSPPLNKKRKEFFFLKKKLFRKLSHSPPLHLVPYRKVKKIYRQVCPQNCPLTRELNE

SEQ ID NO: 96744 - protein, 67 aa, Gossypium hirsutum
  Clone ID: LIB3135-052-Q1-K1-C4.pep
RSGDSQLNLILYEPTRCSMAFWTGDLFIGLSVQRPVKLVASVGKLWPYLTIAYILERHNNAAFHYID

SEQ ID NO: 96745 - protein, 87 aa, Gossypium hirsutum
  Clone ID: LIB3135-052-Q1-K1-D4.pep
PLVRIKDTFYSCSILPYDREGRFLYTCENADGSTYGKAYFMSTCDKSIIKQWAFALKEKNIWTLSFYMINLLEGRLKLRDMYVYIIT

SEQ ID NO: 96746 - protein, 47 aa, Gossypium hirsutum
  Clone ID: LIB3135-052-Q1-K1-D5.pep
IFLLTTCLIVWHFYRFSDSAFFSGLKITFLLFKTNAPKHVNRKSPSV

SEQ ID NO: 96747 - protein, 62 aa, Gossypium hirsutum
  Clone ID: LIB3135-052-Q1-K1-E11.pep
FGRHQRFHHTRRCRSTATSVPFVPHVEKMKGVMVAVDRFEHLVCPPHFFLLYYFELFFFNFF

SEQ ID NO: 96748 - protein, 61 aa, Gossypium hirsutum
  Clone ID: LIB3135-052-Q1-K1-E9.pep
FLTWYSLRATTQEVRVVKVFMDILNADPASLAEQLVDTFSDCIWSKKSSVVPAGLCMKLWH

SEQ ID NO: 96749 - protein, 91 aa, Gossypium hirsutum
  Clone ID: LIB3135-052-Q1-K1-F1.pep
MARILKRIGEKRKSTVTYSDFPGLGIDERVAVGKYSFPKSLKSTVENITHMHGDVSENSTMPQCVDETIYILFCATIKEMDDLQLPEVTEN

SEQ ID NO: 96750 - protein, 75 aa, Gossypium hirsutum
  Clone ID: LIB3135-052-Q1-K1-F3.pep
HACGFFFPAPSPFLLGIQPSLCHHGGSSVPCTSTPPLVHGSKPGIAAKISESIGVAEWDVGERRAARGLLMIGAC

SEQ ID NO: 96751 - protein, 52 aa, Gossypium hirsutum
  Clone ID: LIB3135-052-Q1-K1-G1.pep
HWQTCDCGGLHECRGWGVPPNTLAEYSLNQFGDMDLYVICLIDGSMILKGYG

SEQ ID NO: 96752 - protein, 47 aa, Gossypium hirsutum
  Clone ID: LIB3135-052-Q1-K1-G10.pep
KRIVNTGSSLLHKMLAGSRNSYFCHHKITFPTNIKERKSKRLQRTRG

SEQ ID NO: 96753 - protein, 44 aa, Gossypium hirsutum
  Clone ID: LIB3135-052-Q1-K1-G12.pep
MASSEPGGCRPYSKSPVPFAQSTAKKEKRVIKWHGAWAAGIPAG

SEQ ID NO: 96754 - protein, 59 aa, Gossypium hirsutum
  Clone ID: LIB3135-052-Q1-K1-G8.pep
PKEQRCPALTIFMGLLSNCAVRTDTNPVDPLVPEIAHMYKTDRANSETTVLSCTQKFSL

SEQ ID NO: 96755 - protein, 49 aa, Gossypium hirsutum
  Clone ID: LIB3135-052-Q1-K1-H1.pep
RVYYLWWPHALFLVNAKPSGVRRIISMGPPFTTQHGGPILFGPTNGYIY

SEQ ID NO: 96756 - protein, 123 aa, Gossypium hirsutum
  Clone ID: LIB3135-052-Q1-K1-H3.pep
QFTVDPFDDSDVSSDDSSDFDSPEKATFLSRFICKGLRTQDPPRLSIRIDEDPKASTSTSKKQGFHVSIDPWKLINLSRDKALLAADKARQRLMIQKPAVELNALKPLPLETKHGPLMNPERI

SEQ ID NO: 96757 - protein, 61 aa, Gossypium hirsutum
  Clone ID: LIB3135-052-Q1-K1-H8.pep
NQWTMHCNAMSSNTTAKTHLIPNQNILLYTLVLIAGRTATRALPITFATRMANWTRNGTGP

SEQ ID NO: 96758 - protein, 45 aa, Gossypium hirsutum
  Clone ID: LIB3135-053-Q1-K1-A7.pep
PHRISATTSPPLNIHENHTRCQNSNLLHGDLYILKHLKTLFLFCS

SEQ ID NO: 96759 - protein, 134 aa, Gossypium hirsutum
  Clone ID: LIB3135-053-Q1-K1-B1.pep
NPTVAMIAQANITSSDNNSSVPFSTIFALDDILKTGPEDNSEVIGNAQGLGILIADTNTTNLLWYWDFGFITGKFNGSSISMFSRNPTTVTVRELSVVGGRGKFMMAKGFAQLKDYSRNDTTIIAELNVTVIHY

SEQ ID NO: 96760 - protein, 90 aa, Gossypium hirsutum
  unsure (1)..(90): unsure at all Xaa locations
  Clone ID: LIB3135-053-Q1-K1-B11.pep
MVYIRHLSFNYTGRLFYNILSWVNPGDTQLKRLATHTPFTSCRYSKXARTDRPFQQLHSLNVKWHALCYCALNSAVLVVTLIVTPSLFSS

SEQ ID NO: 96761 - protein, 73 aa, Gossypium hirsutum
  unsure (1)..(73): unsure at all Xaa locations
  Clone ID: LIB3135-053-Q1-K1-B4.pep
YHFFFKRFNFFFFXSAFEPLGYFVLKEKLQLPCMSQDVIQEKATHTQFQTFKHQAILEREHLEEGKPFKARPP

SEQ ID NO: 96762 - protein, 61 aa, Gossypium hirsutum
  unsure (1)..(61): unsure at all Xaa locations
  Clone ID: LIB3135-053-Q1-K1-B5.pep
VEVXSCMRHPHLVLLIGACPEYGCLVYEYMENGSLEDRLFRKDNTPSIPXKIRFRIAAEIA

SEQ ID NO: 96763 - protein, 31 aa, Gossypium hirsutum
  Clone ID: LIB3135-053-Q1-K1-C11.pep
WDKELLDIMARNNFYNSLTSMYFWIFVLQYP

SEQ ID NO: 96764 - protein, 84 aa, Gossypium hirsutum
  Clone ID: LIB3135-053-Q1-K1-C12.pep
KGKHKGWGGVIDGAENYASSSWCLEELAENVKQKNDKADKEYQMCYEGDPSDLIKQKGKLKKPSTNTKNDTRKIKTRLKRGEKL

SEQ ID NO: 96765 - protein, 71 aa, Gossypium hirsutum
  Clone ID: LIB3135-053-Q1-K1-C4.pep
HASAFALALCLVLIALLLTTMSLGQFGNDPRHLLFSVVWGSISVGIASFVRAKGRIFCNRPRLQLHDKPGY

SEQ ID NO: 96766 - protein, 97 aa, Gossypium hirsutum
  Clone ID: LIB3135-053-Q1-K1-D1.pep
MGDVSCKRPTITHVILDMDGLLLDTEKFYTEVQETILARFNKTFDWSLKAKMMGMKAIEAARVFVEETGISDSLSAEDFLVERESMLQSLFPTSELM

SEQ ID NO: 96767 - protein, 70 aa, Gossypium hirsutum
  Clone ID: LIB3135-053-Q1-K1-D4.pep
TIGILKDTRGSCTHSTVIMPYPRYGLTCNLVSMAIAQPWSYTKSHIDVNVPDMVLHEASYDAISQIWSYT

SEQ ID NO: 96768 - protein, 107 aa, Gossypium hirsutum
  Clone ID: LIB3135-053-Q1-K1-D6.pep
PPFCSIKMLLQFTLPVLPSSWACPLRLLFLPSNLNLFCRFAPSDYQPFLSFSLQHNLRLAFSTFSFLFLSVTLLLALSWGVVKLLQLKGSMHEDIGRLSSFISYCFC

SEQ ID NO: 96769 - protein, 50 aa, Gossypium hirsutum
  Clone ID: LIB3135-053-Q1-K1-E10.pep
WAVGATSAVLELASSERKYLSFQTSINLVFKINVILEWIFIICLASTSTK

SEQ ID NO: 96770 - protein, 80 aa, Gossypium hirsutum
  Clone ID: LIB3135-053-Q1-K1-E11.pep
NYVTIVPPHNFQDTKISKMFINTLSVFKHVYFVPGGTPFPYILIWSFFLNTHFLPLPFLYTVCISRGLNLSNTPTVFFSY

SEQ ID NO: 96771 - protein, 77 aa, Gossypium hirsutum
  Clone ID: LIB3135-053-Q1-K1-E2.pep
SQEWDYNRFLFDRKPSQDIQNCFNPPVYSIKLKKKIQNLYVPTLLYHRIISYWDYAMIFGIPQTSLTSNPVALQHCT

SEQ ID NO: 96772 - protein, 44 aa, Gossypium hirsutum
  Clone ID: LIB3135-053-Q1-K1-E5.pep
TTRLVTQLSEIFIFSTEIKKFQYGHGHYFYHCKKIERVVERVAA

SEQ ID NO: 96773 - protein, 112 aa, Gossypium hirsutum
  Clone ID: LIB3135-053-Q1-K1-E8.pep
ERKPRGDPRDRADQQKREIFRIGEARNHGGARDGDTRPRRGQKTITVLINNGGDTSEEETQEGPDNGKKTRNYTAGAEAIHNGESKGWTTKECREEELTEASETATGAKKDR

SEQ ID NO: 96774 - protein, 56 aa, Gossypium hirsutum
  Clone ID: LIB3135-053-Q1-K1-E9.pep
LHHRPSRRTSGSTNMNSQSSRSHAIFTISMEQKKIASCLSGVNDDTGEDILCAKLH

SEQ ID NO: 96775 - protein, 83 aa, Gossypium hirsutum
  unsure (1)..(83): unsure at all Xaa locations
  Clone ID: LIB3135-053-Q1-K1-F4.pep
GGEEGEKEEVRGEKGGGGERKGXGERRGRGEKKSNRGEGGEEGEGGEGGEEKRREGRREGIREGEGKARKKRKGERRKEEEGG

SEQ ID NO: 96776 - protein, 79 aa, Gossypium hirsutum
  Clone ID: LIB3135-053-Q1-K1-F6.pep
LNLPLILSDARKDALIERWTGVKNIKDPYMTDITEFGVVEDNTHLKGRVKLQDLVKGKTQVICGIYYKLCLYAKDENML

SEQ ID NO: 96777 - protein, 90 aa, Gossypium hirsutum
  Clone ID: LIB3135-053-Q1-K1-F9.pep
MNPPQRQVASARNANNMPGKSKSVLSQENDMEIDPWTLLEDGAGSGPSSSSTAAIGGSDNANLRASSWLKGAVRVRQTDPSYIGAVDDDS

SEQ ID NO: 96778 - protein, 96 aa, Gossypium hirsutum
  Clone ID: LIB3135-053-Q1-K1-G11.pep
FFVLLRRASFGFATFKKHMEEKLSPMSMSLGNSDTNSPYLPLGSLVLSQVMNMDLERNLDNAATGEGATISTTATAVPGPSGGGVDSLGKKSGRVG

SEQ ID NO: 96779 - protein, 106 aa, Gossypium hirsutum
  unsure (1)..(106): unsure at all Xaa locations
  Clone ID: LIB3135-053-Q1-K1-G3.pep
MRSKRHSHNKFMRFITVPFKALVKARDLYVRSLTSCASKVSYGHGSGGCSAQYSXLPRSFISAMSATCNDNEDLRELIXAASATSLGHRKEMEMLLKQQLRVQMGS

SEQ ID NO: 96780 - protein, 99 aa, Gossypium hirsutum
  unsure (1)..(99): unsure at all Xaa locations
  Clone ID: LIB3135-053-Q1-K1-G9.pep
SPSGSFFRSCSPVSVVRPAFCPLLLPRLWCFPAIPARPVSALLPSCAASACPLFRLSQCPRCFHPHSLKVLSSVLSRFPRPRXRVCFLKSCLCLCSCAC

SEQ ID NO: 96781 - protein, 144 aa, Gossypium hirsutum
  Clone ID: LIB3135-053-Q1-K1-H7.pep
GTGEQTLSRDIYRLGHRFDFGRMLSCYFTTAGCYFSTLVTGLTGYVFLYGRLYLVLSGLEQGLSGEPAIRDNKPLQVALASQSFGQIGFLMALPMLMEIGLERGFRTALSEFILMQLQLAPVFFTFSLGTKTHYYGRTLLYGGA

SEQ ID NO: 96782 - protein, 56 aa, Gossypium hirsutum
  unsure (1)..(56): unsure at all Xaa locations
  Clone ID: LIB3135-053-Q1-K1-H8.pep
KFMIFXXPIKLTQSTYIYITCINLWFKKTHSDTWAESILTLIVLITKVLIIAHHLK

SEQ ID NO: 96783 - protein, 146 aa, Gossypium hirsutum
  unsure (1)..(146): unsure at all Xaa locations
  Clone ID: LIB3135-054-Q1-K1-A3.pep
EKELSENRKKYAKLKEELLLTPSELARMKEEAFQSNKHNNAHNDTAGPLIRHEISHEDHPLSLGKASVWHQYFEHTEIAEHIDRDLQRTHPEMKFFSGESSFGRKHRESMRNVLLLFSKLNPAIRYVQCMNDVLAPLYYVXSTDTD

SEQ ID NO: 96784 - protein, 63 aa, Gossypium hirsutum
  Clone ID: LIB3135-054-Q1-K1-A7.pep
MSHCCVYSSLQKSMSLFSDLSFPCATQRSIISVERFIASEAIQKRDSIHLTNQVHSGPSHMVT

SEQ ID NO: 96785 - protein, 78 aa, Gossypium hirsutum
  Clone ID: LIB3135-054-Q1-K1-A8.pep
LKRNGIFMKGFLSKIEPGPAGEIGALGSKVISEEPMHKVQESVFQVAEMVERSRRKAGSMVDAPLNAMSYLIKGGKNF

SEQ ID NO: 96786 - protein, 59 aa, Gossypium hirsutum
  unsure (1)..(59): unsure at all Xaa locations
  Clone ID: LIB3135-054-Q1-K1-B10.pep
PTRSLMTRLTXILDEKEGPFEVSRGGTLKXQEKDGIDYAAVTVQLPGGEREHFLFTIKQ

SEQ ID NO: 96787 - protein, 51 aa, Gossypium hirsutum
  unsure (1)..(51): unsure at all Xaa locations
  Clone ID: LIB3135-054-Q1-K1-B11.pep
GYIKAALVFCKGSPLFSRPIWXRFKLVPIQLGGNSESLSNFSFHFLFEWVG

SEQ ID NO: 96788 - protein, 34 aa, Gossypium hirsutum
  Clone ID: LIB3135-054-Q1-K1-B12.pep
KTHCENIIKINVVYRAAGRLSTLYLDGHQSLIVI

SEQ ID NO: 96789 - protein, 46 aa, Gossypium hirsutum
  Clone ID: LIB3135-054-Q1-K1-B5.pep
RNFEMANHSVDTGYKFLLTNSFQSKSNPIPVLILKHIFPKLTQLAC

SEQ ID NO: 96790 - protein, 57 aa, Gossypium hirsutum
  Clone ID: LIB3135-054-Q1-K1-B6.pep
PFSHWILSTHRNNISFNKPQFMSQSPPSINLSGTVRANLLQILSKFIWHTHSLSVIC

SEQ ID NO: 96791 - protein, 30 aa, Gossypium hirsutum
  Clone ID: LIB3135-054-Q1-K1-B7.pep
MVERLCFFLSKASYLLTKHIIAPYMFGVMS

SEQ ID NO: 96792 - protein, 48 aa, Gossypium hirsutum
  Clone ID: LIB3135-054-Q1-K1-B8.pep
WLFLSCNTVGPVLIHSLCWITNDGISPRISSIFNLRMQIHNLEILIRC

SEQ ID NO: 96793 - protein, 54 aa, Gossypium hirsutum
  Clone ID: LIB3135-054-Q1-K1-B9.pep
ILIGVYCFHYFFCLFSLPFMLISPVKQWHRLSPTPLHVSGILVSCHRKYGAHGA

SEQ ID NO: 96794 - protein, 105 aa, Gossypium hirsutum
  Clone ID: LIB3135-054-Q1-K1-C12.pep
PTRPAWWNLQRMWVHRRTTSFFFAFIDCIVRQLGLSQTTFTLTAKVVTDDVSKMYQQEIMDFGSTSTMFTVISTLAMLNLFSLIGVVVKVFMGGLECKDMEKVGI

SEQ ID NO: 96795 - protein, 144 aa, Gossypium hirsutum
  Clone ID: LIB3135-054-Q1-K1-C5.pep
GIGMAVVEELATLGATVYTCSLNQHQLNECLKEWKMKGFQVFGSVCDATSPAQREALINNVFSMFNAQLNILINNVGTNDWKPTAEYTNTELSTLLSTNFESAYHFSQLAYPLLKASGRGSNCFVSCVAGVFSINVGSIYGSTK

SEQ ID NO: 96796 - protein, 86 aa, Gossypium hirsutum
  unsure (1)..(86): unsure at all Xaa locations
  Clone ID: LIB3135-054-Q1-K1-D2.pep
LIRLFSSSDLNVLNKLDDLGWRLCWERIPXTSQRVCLLVANIFLKSKRCGFDGYWWRSCSYRHKFLGFGEFLGISYVLVRVTTVFS

SEQ ID NO: 96797 - protein, 64 aa, Gossypium hirsutum
  Clone ID: LIB3135-054-Q1-K1-D3.pep
LQRVSILGHSVRFIESKYSITSPTIGIFLQQLLHQYRSRDSKHSLDFNNNTLIVGQQLRRCHEE

SEQ ID NO: 96798 - protein, 44 aa, Gossypium hirsutum
  Clone ID: LIB3135-054-Q1-K1-D5.pep
RGGNTRSAEAVCVAFAKICENFFRNLTWVPFGETTRIKGWLMLI

SEQ ID NO: 96799 - protein, 44 aa, Gossypium hirsutum
  Clone ID: LIB3135-054-Q1-K1-D6.pep
AHSPTFLRVFSLSPFLSLLLRAHVGLPCIYRGFFLRLNKCTTFT

SEQ ID NO: 96800 - protein, 125 aa, Gossypium hirsutum
  unsure (1)..(125): unsure at all Xaa locations
  Clone ID: LIB3135-054-Q1-K1-D8.pep
HAYGHAFAHAYDESKVGHIFVVGNFGELFEIVLYFLGLVDKFFYLSGIYDMELTICDAVMENSLLVAIGHIEIDLSEALDKAPRPSFXAIDPYLRYGPIGEIRHIFRASEKRTPQGLSLALLKLT

SEQ ID NO: 96801 - protein, 103 aa, Gossypium hirsutum
  Clone ID: LIB3135-054-Q1-K1-E10.pep
SLNGSISFSETYGNPGLALSEDFEIKEIEVRPAIFLFLHSTTMSLFWLLHEFIFGLFIILSYRCFINLILISQMWGFVYGSKYDEILGLSRTEMPGICPWVNT

SEQ ID NO: 96802 - protein, 95 aa, Gossypium hirsutum
  Clone ID: LIB3135-054-Q1-K1-E11.pep
HASATRPSTRSIVPKSPGLFFNENMSPLLMKMAERWPWSYSHVGVELPLDHINSAFLKKTGDLSCAHNMEALLHILDGYHAKGHTFVLSNGKDPA

SEQ ID NO: 96803 - protein, 72 aa, Gossypium hirsutum
  Clone ID: LIB3135-054-Q1-K1-E12.pep
NFKFDLCNGLKGLGFFFQVLLGQQKIFIIGGFHYLWIKAFFYQQNMPISSRKQKKKKKKKKKKKKKKERAPP

SEQ ID NO: 96804 - protein, 114 aa, Gossypium hirsutum
  Clone ID: LIB3135-054-Q1-K1-E2.pep
MATLATLGTTSLLRFQKADPLTASPSPHLLGSLSSQLSGIKLSCNLPDVAPLKSISSPFTPSLQPVARRVCPFTGKKANKANKVSFSNHKTKKLQFVNLQYKKVWWEAGKRYVK

SEQ ID NO: 96805 - protein, 42 aa, Gossypium hirsutum
  Clone ID: LIB3135-054-Q1-K1-E4.pep
TAARLSIFGKNADIDSFTKALHRIEKILYRHYNLDLYELELF

SEQ ID NO: 96806 - protein, 75 aa, Gossypium hirsutum
  unsure (1)..(75): unsure at all Xaa locations
  Clone ID: LIB3135-054-Q1-K1-E5.pep
RIEQVILHSLVSNQKDNMRLVGGSFTPTCILNHNPRFIDNSAVLNSTGIDEIISICLDDTXMINAWVKTYPENKY

SEQ ID NO: 96807 - protein, 145 aa, Gossypium hirsutum
  unsure (1)..(145): unsure at all Xaa locations
  Clone ID: LIB3135-054-Q1-K1-E6.pep
PRVRKNGRADFHPVDTESVKGCKFWFAFTIFDRYDEPHYPSNINIRSKNLXRYLMVADQLSLKLIKENVTALKDINQGMWAGLWRLIPLKHQPADEPRMTEQEPTILTIRLFLHAQHMLKIDRHMETILDPLIILETYLWSDMHT

SEQ ID NO: 96808 - protein, 84 aa, Gossypium hirsutum
  unsure (1)..(84): unsure at all Xaa locations
  Clone ID: LIB3135-054-Q1-K1-F5.pep
TDPDLKFKNVVLTPHVGAGSLGSYGSMARDVDDVALQLYDGXPLKGIELMNELTQNQTYQCENQNINDIAFNVHYIDHAGAYLI

SEQ ID NO: 96809 - protein, 91 aa, Gossypium hirsutum
  unsure (1)..(91): unsure at all Xaa locations
  Clone ID: LIB3135-054-Q1-K1-F6.pep
PFFYEPKPGKTSGYXPTKKKKPEPKPPMYEPSKKPTMYEPKPPKPPVYTPPKKEKPEPKPPMYEPSINPPIYEPKPPKLPVYAPPKEENAQ

SEQ ID NO: 96810 - protein, 63 aa, Gossypium hirsutum
  Clone ID: LIB3135-054-Q1-K1-F7.pep
KEPTQGLFFFIFSFALVWFFFLLFFIFFFLFFFFFFFFFFFFFFFFFFFFFFFQNEILILIVL

SEQ ID NO: 96811 - protein, 43 aa, Gossypium hirsutum
  Clone ID: LIB3135-054-Q1-K1-F8.pep
SIIVCFPVKSQCQNKYLLGSFISSKSGCLSNALHTIMCCKTTV

SEQ ID NO: 96812 - protein, 63 aa, Gossypium hirsutum
  Clone ID: LIB3135-054-Q1-K1-G3.pep
LEAVNSRINVNPSFEGFHSKDLGWQPIDGAGMIFGSQTAREYAQGLHPEWLQMHVGGNFKRAT

SEQ ID NO: 96813 - protein, 42 aa, Gossypium hirsutum
  Clone ID: LIB3135-054-Q1-K1-G4.pep
KPISLIKSQHKLNYLYSKQIFSSSRFLQICVDYSFFFSFLFF

SEQ ID NO: 96814 - protein, 62 aa, Gossypium hirsutum
  Clone ID: LIB3135-054-Q1-K1-G5.pep
ICIQGQILFTGLMHKFFLESKELTGECCLFYIEKQKAVNFSRPHVTLMFIFIHTCLGVYLSV

SEQ ID NO: 96815 - protein, 66 aa, Gossypium hirsutum
  Clone ID: LIB3135-054-Q1-K1-G6.pep
IVFLFFSFFLPSRIMISFPILYVYEYMMYQSILGSENNHIQAQEISPSWSTVNQLIDAETCTWNRA

SEQ ID NO: 96816 - protein, 41 aa, Gossypium hirsutum
  Clone ID: LIB3135-054-Q1-K1-G7.pep
RAFTQVHLCAFINTSPKKRHSGIIGRRIKPVYLPAILAHIL

SEQ ID NO: 96817 - protein, 77 aa, Gossypium hirsutum
  Clone ID: LIB3135-054-Q1-K1-G9.pep
FPFSSHKVCKWRRYTKIHNLSCGYVGNVQSCVHPASTRATAILSANPTTTVSVTATPFSVIKTPSLIWMIMKGVRQV

SEQ ID NO: 96818 - protein, 50 aa, Gossypium hirsutum
  Clone ID: LIB3135-054-Q1-K1-H2.pep
FYKDVCFLSPIHWKKNNFWVHFVLKIKLEKKLETLVIVLYYVKSTTLLSL

SEQ ID NO: 96819 - protein, 35 aa, Gossypium hirsutum
  Clone ID: LIB3135-054-Q1-K1-H3.pep
LSLHVFRKPHHVCSSAIIVIRDESQVGVSPLLALH

SEQ ID NO: 96820 - protein, 104 aa, Gossypium hirsutum
  Clone ID: LIB3135-054-Q1-K1-H5.pep
ALLTFFFFFLKFNPLRLLGIFESTLKLLALALTSLFRSTAAASASLIEAGSDRSDLYLSPYDRLKVSSLCYKRNFNSYCVAYLSTKAHSLQKCISWSMQPIKAT

SEQ ID NO: 96821 - protein, 71 aa, Gossypium hirsutum
  Clone ID: LIB3135-054-Q1-K1-H6.pep
EHFLAGFINGPSYGDKDGRFLSPIYWKKKKFWGQLELNINLELKVETLRNDLYYLKSATLLAFGTLFICLN

SEQ ID NO: 96822 - protein, 58 aa, Gossypium hirsutum
  Clone ID: LIB3135-054-Q1-K1-H8.pep
ISFRSFCAPRLWLLWVLSWLRAFELKQKKRVGGGGVIFPRVLPVKKSRVNVKIHRTRP

SEQ ID NO: 96823 - protein, 52 aa, Gossypium hirsutum
  unsure (1)..(52): unsure at all Xaa locations
  Clone ID: LIB3135-055-Q1-K1-A9.pep
RPPSVLKLSNNNMQHHKLLPYPKLKAXTKPDHEGMAQPSSHCSAFQILHQYH

SEQ ID NO: 96824 - protein, 96 aa, Gossypium hirsutum
  Clone ID: LIB3135-055-Q1-K1-B12.pep
LCCCNKMYATTPKCSKGWYGEIVNDISSYLKNVCFSPDKITFAPISVFDGDNMMHRSTILDWYRGPTLLEALDHINEPKKPSDKPFRLPLHDVYKI

SEQ ID NO: 96825 - protein, 55 aa, Gossypium hirsutum
  Clone ID: LIB3135-055-Q1-K1-B2.pep
LGGKALKKVSVPHQIRTQVERSRKGKCRNDLIGIWKYILCTSLSLSVWLSLLTKL

SEQ ID NO: 96826 - protein, 57 aa, Gossypium hirsutum
  Clone ID: LIB3135-055-Q1-K1-B5.pep
SPEAHFFEELVKSKVAIEAFKRYQLTPSEANESNYVAHLVYRNSKVPSSLLNASHCS

SEQ ID NO: 96827 - protein, 52 aa, Gossypium hirsutum
  Clone ID: LIB3135-055-Q1-K1-C7.pep
EDADASRDKREINDYKNPGPQVNRQTEYIFRLISHWSFIAFYPCSLSCEDKT

SEQ ID NO: 96828 - protein, 124 aa, Gossypium hirsutum
  unsure (1)..(124): unsure at all Xaa locations
  Clone ID: LIB3135-055-Q1-K1-C9.pep
HHVHYTCFYLIPGCDLHVWEWGIVRTIVHCGXLHDVHANKAKAVVQAADPDXNLVTLIVIEGDLMEHVESFGFTIYFCGKSNGLRRSFAXWTLKYXKLHGXIEHPETLLQFVQDVYKDIYCHLT

SEQ ID NO: 96829 - protein, 34 aa, Gossypium hirsutum
  Clone ID: LIB3135-055-Q1-K1-D12.pep
HDRKFLGQKPVTYYTTLVPWMGMLKKFETMFIEP

SEQ ID NO: 96830 - protein, 85 aa, Gossypium hirsutum
  Clone ID: LIB3135-055-Q1-K1-E11.pep
TCFSVNTKGAFLCAKEAANMLNPRRGGRIILLSSSMAAALKPGFGAYASSNAAIEAMVKILAKELKGTGITANCVAPMPIATEMF

SEQ ID NO: 96831 - protein, 35 aa, Gossypium hirsutum
  Clone ID: LIB3135-055-Q1-K1-E6.pep
WWRWWWRLVLEGWFVGDSGGFGVALSLISIRLFYM

SEQ ID NO: 96832 - protein, 55 aa, Gossypium hirsutum
  Clone ID: LIB3135-055-Q1-K1-E8.pep
SHSKEELPQSSHIFFLVFLKSFVSFIIMIFYFIFCVFYHPFLHSKVCLWCICPLF

SEQ ID NO: 96833 - protein, 77 aa, Gossypium hirsutum
  Clone ID: LIB3135-055-Q1-K1-E9.pep
ELSGFYYPYGKSKAYNWYRRRILTAWAPREANLYKIQLTCCYLQLNVVFAEPNANKNGRKGTSFTTKNQYCSYIVTL

SEQ ID NO: 96834 - protein, 105 aa, Gossypium hirsutum
  unsure (1)..(105): unsure at all Xaa locations
  Clone ID: LIB3135-055-Q1-K1-F1.pep
RKGADKLFMMVYNLALETYPGGSKHEPNHHXLLDGVSXCVEQSGTSKIGDFRPEXETTERRAKRVPESFVHTIIYDPILIHVVRDVSDNTHAKPKHTYNPIVINK

SEQ ID NO: 96835 - protein, 151 aa, Gossypium hirsutum
  Clone ID: LIB3135-055-Q1-K1-F3.pep
PRVRPRVRTASLLESRAEQASLQWFECYDRDQNEDLLESMRYFIEAAEVHSSIDAGNKTRRACAQASLVSLQIRIPDSKWLNLSETNARRALVEQSRFQEALIVAEAYGLNQPTEWALVLWNQMLNPELTEEFVAEFVAVLSLQPSMLSEL

SEQ ID NO: 96836 - protein, 52 aa, Gossypium hirsutum
  Clone ID: LIB3135-055-Q1-K1-H12.pep
IGNGGKESCILKESKQSTIKLHGNHIYRFSCSLMILSFSGNNQSQTILYYYP

SEQ ID NO: 96837 - protein, 54 aa, Gossypium hirsutum
  Clone ID: LIB3135-055-Q1-K1-H2.pep
GWAKTFVGLFVLVPTKHFALLMSGEGSIIPAGLDLQPPSLRTRQSYKHSHSITL

SEQ ID NO: 96838 - protein, 57 aa, Gossypium hirsutum
  unsure (1)..(57): unsure at all Xaa locations
  Clone ID: LIB3135-055-Q1-K1-H9.pep
DPSMEYYSRSEFGLTCHTRHRVGVDTTWLGLIIPYPLRDEXGGFRGIKLTNGGMRPD

SEQ ID NO: 96839 - protein, 83 aa, Gossypium hirsutum
  Clone ID: LIB3135-056-Q1-K1-A1.pep
KKSSRSLWQGQSTTISNYGGNHLEFSLLGAPTNYYNRLHWILVVIIYRPRIKNFTGNYGIYIFLQRSKLQFGKLPGTIFLLLR

SEQ ID NO: 96840 - protein, 43 aa, Gossypium hirsutum
  Clone ID: LIB3135-056-Q1-K1-A11.pep
KNSLNDKTSNSRMPNPNLNKINLQIPCARFHKCLTKLEYFNHS

SEQ ID NO: 96841 - protein, 58 aa, Gossypium hirsutum
  Clone ID: LIB3135-056-Q1-K1-A12.pep
VGLLYECAPMSFIVEQAGGKGSDGHQRILDIQPVEIHQRVPLYIGSQEEVEKLEKYLA

SEQ ID NO: 96842 - protein, 130 aa, Gossypium hirsutum
  Clone ID: LIB3135-056-Q1-K1-A6.pep
SEMKKKLNRPLAGPSSPHFLHMLSINKAQGKQQTTFINNYTARNPKTDIRVHQTRSYYPDSVSSSSHSPTPIFINKPLHRLRYLLNPYIRQLYFLPSIAKPCVVAFAPRASSFLMTVKASFSTHTSLKPN

SEQ ID NO: 96843 - protein, 72 aa, Gossypium hirsutum
  Clone ID: LIB3135-056-Q1-K1-A7.pep
KCQQKRPNFQIDYLTTLFTKLRGLQIPSKIKIHMWRIAKDYIPTLYKLRGCNLVANTIYSVCQAAKEPVSHL

SEQ ID NO: 96844 - protein, 57 aa, Gossypium hirsutum
  Clone ID: LIB3135-056-Q1-K1-B3.pep
YRHKKLERSLCSILYRRILLILKSSVSSFRGIEFKIKRLITRGKGLSKAYLLSIPPF

SEQ ID NO: 96845 - protein, 72 aa, Gossypium hirsutum
  Clone ID: LIB3135-056-Q1-K1-B8.pep
RQGARENKKLKKKKKKKKEKGKKKKKRKQKKKKKKKKKKGGRPKKRNQTNARGQGMKYFFDGANKKKLAGRL

SEQ ID NO: 96846 - protein, 103 aa, Gossypium hirsutum
  Clone ID: LIB3135-056-Q1-K1-C1.pep
VKFLTQILTPERKSTFGCKDPLTLHFTTRLVTNLPNLPNRTQLLRPFPLFQPISHLRYGLDPSLSGRVCCNYPRKSPCPRKAKRKTSRLHTLRNFSRSSFELS

SEQ ID NO: 96847 - protein, 77 aa, Gossypium hirsutum
  Clone ID: LIB3135-056-Q1-K1-C10.pep
PPRAISIFPISTYNKSTIQRRLTLTFHKQSLLLSLHHFNHMLLAFPASYPLSSSLYSLFLGEEDACGNQWLEAETQH

SEQ ID NO: 96848 - protein, 80 aa, Gossypium hirsutum
  unsure (1)..(80): unsure at all Xaa locations
  Clone ID: LIB3135-056-Q1-K1-C4.pep
MCASERTLRRPENRVPTPETDFRSAFEVLDADRDGKISRDDLRRFYAGFSYGFEDADXMIGTMISLADLNSDGFVEYDEF

SEQ ID NO: 96849 - protein, 71 aa, Gossypium hirsutum
  Clone ID: LIB3135-056-Q1-K1-D1.pep
TQFRKDKAITNPSPLAFWRSNHPLTFGHLPLCQKPAPPLHRSRLHRLSNDLHLQGIRKKRQKIIQNQVVWL

SEQ ID NO: 96850 - protein, 96 aa, Gossypium hirsutum
  Clone ID: LIB3135-056-Q1-K1-D10.pep
RGMPLYMLHRSMLLAKLLALDLPLEHEGRIQFIRLSIMKVCLWLCIYLCLLVLILISCRINDWISWNYKRLWLWNFFGYLARCCINRRYFLCREHQ

SEQ ID NO: 96851 - protein, 54 aa, Gossypium hirsutum
  Clone ID: LIB3135-056-Q1-K1-D11.pep
RVRGRVGNNLRFKYNVQSLFKKGGKIKKKGRTKIREPRLNTWACDEIDLYIVAT

SEQ ID NO: 96852 - protein, 97 aa, Gossypium hirsutum
  Clone ID: LIB3135-056-Q1-K1-D4.pep
AVWPSVYTAMAFMDQFDKDSDGMIENEGFPDQTYDAWPVDGVSAYSGGLWVAALQATASIAHQVGDDEAAAYFHTKYQKAKSVYATLWNGFYFNYDN

SEQ ID NO: 96853 - protein, 58 aa, Gossypium hirsutum
  Clone ID: LIB3135-056-Q1-K1-D6.pep
KCLLFQCFFFKLMWNIILRDMSNLPLLFSKKKNNLTLFINYYSNLISTMITKMCFTFN

SEQ ID NO: 96854 - protein, 45 aa, Gossypium hirsutum
  Clone ID: LIB3135-056-Q1-K1-D9.pep
AGRGAGLMLARLVKLELAPNVTFCSYRWHESTYIIGRADSMRMLT

SEQ ID NO: 96855 - protein, 120 aa, Gossypium hirsutum
  unsure (1)..(120): unsure at all Xaa locations
  Clone ID: LIB3135-056-Q1-K1-E2.pep
RVRCPDGERAQRGRLRDLAVFERVHGDPRKTSPSLAVXKRTISVKHVQASDVRPLAVLEDTLNYLLNLLDSSEHPFEVVHDFIFDRTRSIRQDLSMQHIVNDRAICMYEKMGRYFLPRNI

SEQ ID NO: 96856 - protein, 126 aa, Gossypium hirsutum
  Clone ID: LIB3135-056-Q1-K1-E8.pep
QGVADELIPLMQERFPELGLLKEDYIEMTWIESILFWNQLSNETSEILLDRSNRNSLVPLSYKSKSDYVRKPMPEIALQGLWSRLLEVNETSTAVVNIISYGGKMDEIPETETPFPHRKGTLYKIN

SEQ ID NO: 96857 - protein, 150 aa, Gossypium hirsutum
  unsure (1)..(150): unsure at all Xaa locations
  Clone ID: LIB3135-056-Q1-K1-E9.pep
KDRYALKYVYAWHAITGYWGGVKPGITEMEHYEPKLVYPVSSPGVRSNDYSDVLQSITINGVGLVKPEKAFEFYNDLHSYLASAGIDGVKVDVQSILETLGAGHGGXRVKLTRKYHQALEASISSTFHDNAIIACMSHNTDPLYRAKSTA

SEQ ID NO: 96858 - protein, 118 aa, Gossypium hirsutum
  unsure (1)..(118): unsure at all Xaa locations
  Clone ID: LIB3135-056-Q1-K1-F10.pep
HASARPTQQGEIPVPRAGHAGVTGAENCFIVGGGDNKSGAXETVVLNMSTLACSGVTSLEGRVPLASEGLSMDLGLLNGEDILLSCGGFNGHFHSDVHVLRPSHKSSYAIQANGWVFS

SEQ ID NO: 96859 - protein, 68 aa, Gossypium hirsutum
  Clone ID: LIB3135-056-Q1-K1-F8.pep
IKKSLSRKASSSHPRRRPLRAFLARAPTITFEDSPSKLRSPRSNRSLTEPRELTCRRTAALRARAEKA

SEQ ID NO: 96860 - protein, 51 aa, Gossypium hirsutum
  Clone ID: LIB3135-056-Q1-K1-F9.pep
EHPGVNTAVMKLSVHITHPHSSSDRADLHEKLNNTLQSRKHLNMVTSLMHN

SEQ ID NO: 96861 - protein, 82 aa, Gossypium hirsutum
  Clone ID: LIB3135-056-Q1-K1-G1.pep
KNPSPIHKTKKGGTKNPSLINCCRPMSEFGHRLCSTATVTSATYLLHYHFPIHGGRHGGRHDCDRSTPRRILGWQREKGERI

SEQ ID NO: 96862 - protein, 55 aa, Gossypium hirsutum
  Clone ID: LIB3135-056-Q1-K1-G12.pep
GRVGSSLSLASSFAVSLLPTRLVPHTAAIEEPHIAHCCCALFYLRKPLLHGLELL

SEQ ID NO: 96863 - protein, 120 aa, Gossypium hirsutum
  Clone ID: LIB3135-056-Q1-K1-G4.pep
ASACRFSPSHASFLPICSLHFFSFLFLSATLSIAFSTNRPFSFLGLSVTLSIALSWWVSTLLQLKGCSSYISAPIKSVQVSFPDCMFLLLLIFYCCLFPFESSYIIEVKEKFIFICCACI

SEQ ID NO: 96864 - protein, 102 aa, Gossypium hirsutum
  Clone ID: LIB3135-056-Q1-K1-H1.pep
AFFEIRGLHWPSQDEEETLIFVPRNTKLVPNVTPPNSSGFGGGGESLLPTAADTPCFKASRHHNLLHMLQYISYSNLKCSVYVFFKYAYVCTYMRVSLLLVV

SEQ ID NO: 96865 - protein, 66 aa, Gossypium hirsutum
  Clone ID: LIB3135-056-Q1-K1-H2.pep
TKQSQVLFLLILLFEDGPHFKTKLKIVNMIRAQLLFFALWFIQIMPYLCSFLSCYLFLTKKVWDLT

SEQ ID NO: 96866 - protein, 50 aa, Gossypium hirsutum
  Clone ID: LIB3135-056-Q1-K1-H9.pep
RRWKKDSVFFKKAKKLFDVEILHTDPPKEGSRIGVVRLCSYWENLMSDCR

SEQ ID NO: 96867 - protein, 51 aa, Gossypium hirsutum
  Clone ID: LIB3135-057-Q1-K1-A3.pep
LLKGGKCQMRGGRFRGSKLTAPGLRRHNLSIGDLNINSLAGVSQRRDWENL

SEQ ID NO: 96868 - protein, 64 aa, Gossypium hirsutum
  Clone ID: LIB3135-057-Q1-K1-A4.pep
KLSPSRMIKFAALHTVKHPRRSCIRSTDKIRIILYHSTVAFRIQSQWIRCSHVHVKRCMHSPFV

SEQ ID NO: 96869 - protein, 129 aa, Gossypium hirsutum
  Clone ID: LIB3135-057-Q1-K1-A8.pep
IKRGTFIEFRSGMLNVSPIGRNCSQEERDEFEKYDKVHNIRPKMVSVLREKFAHLNLTFSIGGQISFDGWDKTYCLRYLEEFQEIHFFGDKTYEGGNDHEIYESERTEGHTVTSPDDTVEQCKALFMSN

SEQ ID NO: 96870 - protein, 68 aa, Gossypium hirsutum
  Clone ID: LIB3135-057-Q1-K1-B10.pep
VAQSIIFFPNSAILLKREHHKIIVLPSLHRHYFLPENNTNTSLSPTKVTNSFQGLAYHRKVLYKYQKF

SEQ ID NO: 96871 - protein, 60 aa, Gossypium hirsutum
  Clone ID: LIB3135-057-Q1-K1-B11.pep
CPTLFSLLCYACFFLAFQFLFHVFNGLSPIMASSSFPGLARLLEVVVTFPVFCYLFLVLD

SEQ ID NO: 96872 - protein, 80 aa, Gossypium hirsutum
  Clone ID: LIB3135-057-Q1-K1-B2.pep
FRQQWRIMGYGTLVWKNLRAFFPSQLAEVSLSSPQHDLSFLSVLAFSFQPFLPILFILSLCNLTSPPISLTMPGNQKVMW

SEQ ID NO: 96873 - protein, 85 aa, Gossypium hirsutum
  Clone ID: LIB3135-057-Q1-K1-B5.pep
EIKFLVKTITLKSGCLHRPGGGLLSTVLPQRSMQLFSFYAFWESIRHSSIVKRLPYQVSIARGLDFGSHSVHAMVHNLCIHWGYP

SEQ ID NO: 96874 - protein, 40 aa, Gossypium hirsutum
  Clone ID: LIB3135-057-Q1-K1-C10.pep
GFMQDAISFRWIRFNRAVDAFFLQPYVVHGRVCGPGMHVC

SEQ ID NO: 96875 - protein, 52 aa, Gossypium hirsutum
  Clone ID: LIB3135-057-Q1-K1-C5.pep
FSGQAPSVNFVYSESVSITLAIHSCRFENRSYIVPNILSPGNCCMSNDPSTP

SEQ ID NO: 96876 - protein, 83 aa, Gossypium hirsutum
  Clone ID: LIB3135-057-Q1-K1-C7.pep
LCSFARFFCCPQLFLAARPSSYPACVCSLAPSSSLFQFVVSLLSHHVAVYGRGSPSSVILAPPTSLLEIVVSHDLFFSRYAWS

SEQ ID NO: 96877 - protein, 81 aa, Gossypium hirsutum
  Clone ID: LIB3135-057-Q1-K1-D11.pep
PTQKNNHETEGKEIEEATANTYSVQNETNQEVKSVQADKYDHGEVQNDHGDNPKDVGMKIQKGAEETMAKAHAKVVRDRKK

SEQ ID NO: 96878 - protein, 47 aa, Gossypium hirsutum
  Clone ID: LIB3135-057-Q1-K1-D12.pep
GIKRILKTNNWPSKNIKVFKKNLKITSSARSHFHLPMLFFFLKPLIY

SEQ ID NO: 96879 - protein, 66 aa, Gossypium hirsutum
  unsure (1)..(66): unsure at all Xaa locations
  Clone ID: LIB3135-057-Q1-K1-D3.pep
GTRTNGIETYMRHRCGKIENLSMLTQRTEPRANGITXPLRHNLLRVDYGHRHTDTKFGTYLPSYDV

SEQ ID NO: 96880 - protein, 66 aa, Gossypium hirsutum
  Clone ID: LIB3135-057-Q1-K1-D4.pep
RLVDVLTLHQAGIGLLLVALLPLLTNLKHRIQLMGLPLPHQLIYHRLMVLRTLGRIQPHLNLLQLV

SEQ ID NO: 96881 - protein, 73 aa, Gossypium hirsutum
  Clone ID: LIB3135-057-Q1-K1-D9.pep
HAFVHAYDHAWELCKVRDKRGYGAKDKPGGDKEGHLEGVTYSDRRGDGRYSISNGEDETDKLWEIRKMSSDTS

SEQ ID NO: 96882 - protein, 59 aa, Gossypium hirsutum
  Clone ID: LIB3135-057-Q1-K1-E1.pep
WGAAFAKLLDEIGGSLYDYDFMENNTIVNGARIQTNPLGGHTYVNALHPYDNWLQDIDE

SEQ ID NO: 96883 - protein, 46 aa, Gossypium hirsutum
  Clone ID: LIB3135-057-Q1-K1-E11.pep
IGYRAFSNNIESKGSSPFLRIYNSLLLIERDAIHLPSKLVLVAYCW

SEQ ID NO: 96884 - protein, 59 aa, Gossypium hirsutum
  Clone ID: LIB3135-057-Q1-K1-E2.pep
PGPKAEWSFLHGKRDPEENQQKRQATHEKGAPPPRLFIPFVFLLLVRFTICVFLTLTIF

SEQ ID NO: 96885 - protein, 69 aa, Gossypium hirsutum
  Clone ID: LIB3135-057-Q1-K1-E4.pep
ARPNMRQAVRYLDGEAELPELLKPSRIYEGVGEGFDAFLHSSMSSTFDNTSSYSFTDQHGNGGTSIVSL

SEQ ID NO: 96886 - protein, 108 aa, Gossypium hirsutum
  unsure (1)..(108): unsure at all Xaa locations
  Clone ID: LIB3135-057-Q1-K1-E5.pep
VVECLIRRDVYDGMSEELACRNTVACITGIVPKTISTKGMLAVYNSLIEEGKKRFEGAYIASYYTCMEILYECYXNIASGSEIHSDVLAGRPFYXKEGLPAFPMGEID

SEQ ID NO: 96887 - protein, 80 aa, Gossypium hirsutum
  unsure (1)..(80): unsure at all Xaa locations
  Clone ID: LIB3135-057-Q1-K1-E8.pep
MGIVSPRDVALLGAVEIGRTHCVNLEHRLYPXVYPALNPDHVSHILHNYSCQMPDPNSCQFVIKNRTTLMYLYNNYYWNI

SEQ ID NO: 96888 - protein, 74 aa, Gossypium hirsutum
  Clone ID: LIB3135-057-Q1-K1-F3.pep
SVTSGSCIHKEVSRYMVCNVGTSPWLVFMIKFVQHDVWWYMFGRMTCFSFRVVYNAGQGVRGYGYVTSSRYWPV

SEQ ID NO: 96889 - protein, 75 aa, Gossypium hirsutum
  Clone ID: LIB3135-057-Q1-K1-F9.pep
PTRSAEFTSRGGASGSGKTSLAHKMENIVGREVVSLESYFKPEQVKDFKYDDFNSLDLPLLSKEWKHCFQNHWKQ

SEQ ID NO: 96890 - protein, 66 aa, Gossypium hirsutum
  Clone ID: LIB3135-057-Q1-K1-G1.pep
KCSLAHHGNQLTNHALRLIHRYYCGTLEDQIYHISCYTLHAHAGSAATCASEKSTWQGCRLHRSKL

SEQ ID NO: 96891 - protein, 31 aa, Gossypium hirsutum
  Clone ID: LIB3135-057-Q1-K1-G9.pep
HVKLCHSVQVDQIRCHERKNIMRELRDHGSP

SEQ ID NO: 96892 - protein, 80 aa, Gossypium hirsutum
  Clone ID: LIB3135-057-Q1-K1-H1.pep
GRCSISVSFMATSHHDQEPATLQQQCAGSVLCPGVITTRHVSFFLPDMLCCLCLWVHPLSCSTFLHIIMLKSIPCGISII

SEQ ID NO: 96893 - protein, 100 aa, Gossypium hirsutum
  Clone ID: LIB3135-057-Q1-K1-H2.pep
YTPKVQAYSSVVTSLSSEETAEGTNISIIEKECWIQKQLSAFVAASGDQQSWRKGKPLSTEVAVLKDHVPSFDVTREPEVIDLLTPSASYRVRPCTKKRR

SEQ ID NO: 96894 - protein, 50 aa, Gossypium hirsutum
  Clone ID: LIB3135-057-Q1-K1-H8.pep
RKNIMKALILGVILHFAPSTKKWANYSLYIKSKSKLIISVKISSISTVKN

SEQ ID NO: 96895 - protein, 80 aa, Gossypium hirsutum
  Clone ID: LIB3135-057-Q1-K1-H9.pep
RGSRALLNFPHRIGDNEPEPVRVKAKRGATNDSVSFNGSFPKKTRSLEANKAELTTVFQLGLLQVGEQLLVNEKLSQLLK

SEQ ID NO: 96896 - protein, 148 aa, Gossypium hirsutum
  Clone ID: LIB3135-058-Q1-K1-A6.pep
VRGIGSSLSSSTKGKRSERDRDGKGLGREVLPRNGTNKIGRPASNVKGERKLKIKPKQKMTQLSVSVNGILGEMSEHPKPSTSISKSNEITINNNAKEKDDFGLDVLDDLQLPGQDLGSWLNIDDDGLQDHDFMGLEIPMDDLSDLNM

SEQ ID NO: 96897 - protein, 136 aa, Gossypium hirsutum
  Clone ID: LIB3135-058-Q1-K1-A7.pep
MASSASSGRAATETKPFSVLFACLGNICRSPAAEGVFRDIVKKKGLDSKFNIDSAGTINYHEGNLADPRMRAASKRRDIEITSISRPIRPSDFRDFDLIIAMDKRNREDILEAFNRWKSRDKLPADAYKKVRLMCS

SEQ ID NO: 96898 - protein, 57 aa, Gossypium hirsutum
  Clone ID: LIB3135-058-Q1-K1-A8.pep
NKYLFPKLDQTSHHGIITINREHLDVYDVSKAMILGVLIIIANPFRRRYKTLRYGHI

SEQ ID NO: 96899 - protein, 52 aa, Gossypium hirsutum
  Clone ID: LIB3135-058-Q1-K1-B1.pep
RVPSPSAKRDHNSELDDGFRVCSVYRVRVPYNIRTNGRVCTRLNSTRLYNLW

SEQ ID NO: 96900 - protein, 49 aa, Gossypium hirsutum
  Clone ID: LIB3135-058-Q1-K1-B3.pep
HKPDSKPNSPNPNFLIPNLIKPNYHAAQNKNQRQGTLEAPSAVSLQARL

SEQ ID NO: 96901 - protein, 65 aa, Gossypium hirsutum
  Clone ID: LIB3135-058-Q1-K1-C1.pep
LENLSHQEQPPYEAKTRSNSWIKNYYSNKRKWLEFGIRDMTKDNEDGNRLFNDRKASHHDHFRNL

SEQ ID NO: 96902 - protein, 67 aa, Gossypium hirsutum
  Clone ID: LIB3135-058-Q1-K1-C11.pep
PPTRPISAKAQRKVAREIKTARAFGLMPFTTMGTKSFVFGRSMEVDNKDYEYEAFDDMTPAMDEKDA

SEQ ID NO: 96903 - protein, 96 aa, Gossypium hirsutum
  Clone ID: LIB3135-058-Q1-K1-C6.pep
EKLDIDCVHNNAVMELLIGVRTLLTELISGLGAQDSAPMSLGLSDSLSRYKRNFSANKGDTMSEQAIAMLDDLAKKLNTYAMRIHEWYGWHFSELT

SEQ ID NO: 96904 - protein, 59 aa, Gossypium hirsutum
  unsure (1)..(59): unsure at all Xaa locations
  Clone ID: LIB3135-058-Q1-K1-D1.pep
HACQPCDLSLDACHEMQYRQLTEHSALAYGHLCGRYXQFIFALELYCSMYLISCHPRVW

SEQ ID NO: 96905 - protein, 151 aa, Gossypium hirsutum
  Clone ID: LIB3135-058-Q1-K1-D12.pep
PTRPSVHVLTTGYWPTYPPMGVRLPHELNIYQDIFKEFYLSKYSGRRLMWQNSLGHCVLKANFTKGKKELAVSLFQTVVLMLFNDAEKLSFQDIKDSTAIEDKELRRTLQSLACGKVRVLQKLPKGREVEDDDSFVFNERFSAPLYRIKEM

SEQ ID NO: 96906 - protein, 115 aa, Gossypium hirsutum
  unsure (1)..(115): unsure at all Xaa locations
  Clone ID: LIB3135-058-Q1-K1-D5.pep
PSRNKKSIQTDQKPSRTEAVVLRWLVLFFSFFFVDISWPIDVFYTHICVNRQYIQKKSEYILKHTKKERNFFIPEAITRWPERRRHGGAMAGASPAYGPAEKIKSSVFFFFXRVG

SEQ ID NO: 96907 - protein, 53 aa, Gossypium hirsutum
  Clone ID: LIB3135-058-Q1-K1-D8.pep
AYYYFNYPFVVLDHSSIEQMLLRVKILCLLIWCSNNGTEFAMGLKLSFPFCFF

SEQ ID NO: 96908 - protein, 46 aa, Gossypium hirsutum
  Clone ID: LIB3135-058-Q1-K1-E4.pep
MCLPIGALLNDSLHLWDIWDSLFYFMIKIISTVTYNNSILFYIFGP

SEQ ID NO: 96909 - protein, 43 aa, Gossypium hirsutum
  Clone ID: LIB3135-058-Q1-K1-E7.pep
YHQRYDAFIKFSDHTTQMGRFFSLPGGARMEWVNTICFLHHLI

SEQ ID NO: 96910 - protein, 70 aa, Gossypium hirsutum
  Clone ID: LIB3135-058-Q1-K1-E9.pep
DMDDVHRFDPVHGQWAQIETGGEKPTGRRAFSIGGIGKCMIIYGWEVDPRDLCYHRAEKISGEVYCVDTD

SEQ ID NO: 96911 - protein, 69 aa, Gossypium hirsutum
  Clone ID: LIB3135-058-Q1-K1-F1.pep
FLKTGVPDRLVISIGWIIELLIHPMESYEPGRFTLPETRLFFTLLFPCLPNTNPIEMKVYNPGRSEGFG

SEQ ID NO: 96912 - protein, 43 aa, Gossypium hirsutum
  Clone ID: LIB3135-058-Q1-K1-F4.pep
IISGSYQILSLYSTVCHFAEDSDPHGGIYRTHTINLRITGYNR

SEQ ID NO: 96913 - protein, 72 aa, Gossypium hirsutum
  Clone ID: LIB3135-058-Q1-K1-F5.pep
SGAECASTVDAALVVSLNICFTSGMDTTTAYVHVRQYDSTIYPCVSVSLKNAARNYARNNEEIMKENTLSTT

SEQ ID NO: 96914 - protein, 52 aa, Gossypium hirsutum
  Clone ID: LIB3135-058-Q1-K1-F9.pep
TISPIKQSEDDKHPNQQQKILQNIIRLLPSCRQLGKPMSNTTVKCIEPIRKP

SEQ ID NO: 96915 - protein, 140 aa, Gossypium hirsutum
  unsure (1)..(140): unsure at all Xaa locations
  Clone ID: LIB3135-058-Q1-K1-G10.pep
KRXGIEDCFEQIISFETLNPNLSESKCVVLKPSTDAIKIALHVARVDSPRTLFLDDNVQNISAGKTLGLWTCLVGKSGEGKEADYAIEEVKTLGDVIPEIWVNKQDGGDRSRSEWELDQFNISDLIENDVGLALTAPLCT

SEQ ID NO: 96916 - protein, 31 aa, Gossypium hirsutum
  Clone ID: LIB3135-058-Q1-K1-G11.pep
QHNINSTLVLTNDSPITTQSKLLFYQFCLHS

SEQ ID NO: 96917 - protein, 134 aa, Gossypium hirsutum
  Clone ID: LIB3135-058-Q1-K1-G2.pep
NPSSQVASSLGSCLEAQVQENQSKLRGLETVSNRLQEEIDEKDNEVSVLRKKLAEIHWGNTKLSKKLSGNLNSACDVLLTVRVFHSVLHDACRATHKFSKILIGLMIKAGWDLDLVANSIYPDIVYAKIGLTRF

SEQ ID NO: 96918 - protein, 52 aa, Gossypium hirsutum
  Clone ID: LIB3135-058-Q1-K1-G3.pep
AGPLCKKKETRERTGAPLGRDRSFMKGSAAGGTTSAFYGFNHVMPIVRRYVK

SEQ ID NO: 96919 - protein, 50 aa, Gossypium hirsutum
  Clone ID: LIB3135-058-Q1-K1-G5.pep
ISTEFFFRWFIRCFFSTIINFILDHLSNHSSSNTNTSLNSRVIFTNMHND

SEQ ID NO: 96920 - protein, 108 aa, Gossypium hirsutum
  Clone ID: LIB3135-058-Q1-K1-G8.pep
MSRPWLLVFIVLIVMLTSQFEWKQQVGEEIELTSTVSLKDQSLSKRQEYVKENIILSQERNIQKLNEQVRNLREQLLWCKAETEISNGSAFALSEHLSEIEQQPMLDD

SEQ ID NO: 96921 - protein, 74 aa, Gossypium hirsutum
  Clone ID: LIB3135-058-Q1-K1-H12.pep
FQIPKSFLFFPGLASFPMKNSQENPIFMQAEVEDEGVWGKGCGCFNLFCLKRRRSYNHINESNTLLHQRGEQHT

SEQ ID NO: 96922 - protein, 132 aa, Gossypium hirsutum
  unsure (1)..(132): unsure at all Xaa locations
  Clone ID: LIB3135-058-Q1-K1-H3.pep
SLSRRFQHTRMLLCDHARSFGLKFKVEEMGIHDLVNEFMAMKKQGGGTKEWLAFNCMVGLPHIGKNKSRKLVNEFLGIAKQLLTSCGDNARTTKRGIITLREXDACENLKDGTGSSFGHILCALMHYQAIRN

SEQ ID NO: 96923 - protein, 65 aa, Gossypium hirsutum
  Clone ID: LIB3135-058-Q1-K1-H6.pep
SSKALNIFQKVRNIVSSISFTIMPIYHHFHKNGKISFPSLKPPQNNFQPKSSHFESQIQNLYHQI

SEQ ID NO: 96924 - protein, 86 aa, Gossypium hirsutum
  Clone ID: LIB3135-058-Q1-K1-H9.pep
STKLNPIWSSLSAWGSSFFFSSAGGGASAPPPPPAASGVVAAFVEIEYSESFSIIKSKFSILFASLANMEGWKVGLLSKTDCYVLT

SEQ ID NO: 96925 - protein, 109 aa, Gossypium hirsutum
  unsure (1)..(109): unsure at all Xaa locations
  Clone ID: LIB3135-059-Q1-K1-A12.pep
STTRTVPYCWKFTANKLQNRARDICCVAKLKNYSKGKSFXTYNENYTVDLHLKKDIGDLQVASDALLRIAGVSKHSMFLDMDTTDIAAGELGITIKNKYKLAQRILLTL

SEQ ID NO: 96926 - protein, 103 aa, Gossypium hirsutum
  Clone ID: LIB3135-059-Q1-K1-B12.pep
MIRPRHKEMPIAGAVLAAAMMLHISEPFESVIFGVLSCGHTFHAECLEQTTQKARISDPPCPVCTKLEEQNSPENRVFSRLKNSISRLTSFSEDGPSRTWSCA

SEQ ID NO: 96927 - protein, 108 aa, Gossypium hirsutum
  unsure (1)..(108): unsure at all Xaa locations
  Clone ID: LIB3135-059-Q1-K1-B9.pep
GRYTKTSRKVIIIIMDNMNTSKWNRIFPTGEVRRLIDTRKAWPPCNRPFTLFSYSXNMNDISFSSSSLLLTNVQTPLQLSSSIDHYSKPHLASQLKRMPSLRHPCRAM

SEQ ID NO: 96928 - protein, 143 aa, Gossypium hirsutum
  unsure (1)..(143): unsure at all Xaa locations
  Clone ID: LIB3135-059-Q1-K1-C12.pep
HASAHASASVDVHVSKDNEGQERAVEKRPKRLAMDVSPFGLLDPMSPMRSMRQMMDTMDRIFEDXLTFPGTNRTRGDVRAPWDIKDGEHDIKKRFDMPRLGKDEVKVSVEDDILVIKGEHKKEETQDDWTNKKYSSYNTSLQL

SEQ ID NO: 96929 - protein, 68 aa, Gossypium hirsutum
  Clone ID: LIB3135-059-Q1-K1-C9.pep
PLTPHSAREQKSSDCKSPRYHIKYITNSLKKLKPKTDPSAETSKREQVFSEPSTTIKRKQAVIQKRNR

SEQ ID NO: 96930 - protein, 55 aa, Gossypium hirsutum
  Clone ID: LIB3135-059-Q1-K1-D10.pep
HLDSIENGRFQRGLEAQVIPPIFHKHFIFWRKRLILIKEFLIFDLMLGSDIPQPL

SEQ ID NO: 96931 - protein, 74 aa, Gossypium hirsutum
  Clone ID: LIB3135-059-Q1-K1-D11.pep
TLLLGKKIVSQMALRVKSSEKMKKTAEESVVSEREKRPKSKSRPKSKLKKKTKIDAKMPKKPPTAFFYFLEAFR

SEQ ID NO: 96932 - protein, 34 aa, Gossypium hirsutum
  unsure (1)..(34): unsure at all Xaa locations
  Clone ID: LIB3135-059-Q1-K1-D12.pep
IISKSQFRKHTNQIMNLKSNKYNDDHXCISIIXE

SEQ ID NO: 96933 - protein, 37 aa, Gossypium hirsutum
  Clone ID: LIB3135-059-Q1-K1-D9.pep
VLNITILRAQNPNIRVIYKSFKALSTMGRALHRAPNR

SEQ ID NO: 96934 - protein, 131 aa, Gossypium hirsutum
  unsure (1)..(131): unsure at all Xaa locations
  Clone ID: LIB3135-059-Q1-K1-F9.pep
PTRPPTRPSTLPHRSLVPRCCCLQIPVEYXQRLSPLVSNGFLPPASKPGRGKITTASTLLDIIKYVEIAISCRKGRTGTAAGDVAFPKGKENLASVLKRYKRRLSTKQVSTDDGTGSRKVPTTPMLASYNS

SEQ ID NO: 96935 - protein, 53 aa, Gossypium hirsutum
  Clone ID: LIB3135-059-Q1-K1-G12.pep
RFRCSHGGRDRGFSGCCLAISRDRAQHRRSISDPLCYAVGSKDMCCKDQGIIA

SEQ ID NO: 96936 - protein, 133 aa, Gossypium hirsutum
  unsure (1)..(133): unsure at all Xaa locations
  Clone ID: LIB3135-059-Q1-K1-G9.pep
KAFDVGNPYGXYKAPYALSYRNMAILGVQGVSALPHHCLQLCYGFFAFAIAANLLRDFSPKNIGKWVPLPMAMAVPFLVGAYFAIDMCVGSLVVFAWHKLNGKKADLMVPAVASGLICGDGLWLLPSSILAFV

SEQ ID NO: 96937 - protein, 44 aa, Gossypium hirsutum
  Clone ID: LIB3135-059-Q1-K1-H10.pep
NIWIYELGICNLLCTECNLLKFYVNYSKLESSLPKCMQLSMLIL

SEQ ID NO: 96938 - protein, 69 aa, Gossypium hirsutum
  Clone ID: LIB3135-059-Q1-K1-H11.pep
ANILSIEGVGVVDHFMQDNKSKSNYIKYKIEISKLQIWNFFMRWVGIKYAQNQTTNLTMHLVISVMTLK

SEQ ID NO: 96939 - protein, 74 aa, Gossypium hirsutum
  Clone ID: LIB3135-060-Q1-K1-A1.pep
YMRDTSICILKSQLTKLYEQVKSPFFALDRNPLQALKIIHSLPTCTKPTNGFIGLHTCRSTRQRTRGSSWNSRV

SEQ ID NO: 96940 - protein, 71 aa, Gossypium hirsutum
  unsure (1)..(71): unsure at all Xaa locations
  Clone ID: LIB3135-060-Q1-K1-A11.pep
DRRVRPRVRDHQLQRQCFHYVLHLLGLSLSPLTLQRLXLLLLCYMKGGGVASQGLIHAAQFATTQVICKAT

SEQ ID NO: 96941 - protein, 127 aa, Gossypium hirsutum
  Clone ID: LIB3135-060-Q1-K1-A2.pep
LGLNNRLIHVYHFSKETAQRQMQVQNFGEPFFLVIHEGETLAEVKLRIQKKLQVSDEEFSKWKFAFMSLGQPEYLQDSDIVFKRFQRRDVYGAWEQYLGLEHSDTSPRRTYVNQNRNTFEKPVKIYN

SEQ ID NO: 96942 - protein, 74 aa, Gossypium hirsutum
  Clone ID: LIB3135-060-Q1-K1-A3.pep
KKLDTRAKEIYKYSEFLKYSYLDQRAAPYLGHKLISPFIQRKHIFFVSHIIYLLGHFLTPNSLVKTLALPNLYS

SEQ ID NO: 96943 - protein, 48 aa, Gossypium hirsutum
  Clone ID: LIB3135-060-Q1-K1-A4.pep
AHSPLYIYQTLKISHSSYFTDILYNNCSPTITVNTIFIIILYMLSSLT

SEQ ID NO: 96944 - protein, 77 aa, Gossypium hirsutum
  Clone ID: LIB3135-060-Q1-K1-A7.pep
KGNSPLSGKREERKDLLKVPGLECGRVFKPHARFSRLIHGPSREDVRSFAIARIQRSQTYRSVASRITKVVMPEGGM

SEQ ID NO: 96945 - protein, 53 aa, Gossypium hirsutum
  Clone ID: LIB3135-060-Q1-K1-B1.pep
LERKKNTSTRAQRWKLAFNKVHEKAQIYKMKRKRKTLMAGSYCREYYCPILYI

SEQ ID NO: 96946 - protein, 52 aa, Gossypium hirsutum
  Clone ID: LIB3135-060-Q1-K1-B2.pep
PNLFMVYSFCIEYYLPYSVYIAKRIFICCLQVLFSFYSILQAASLYWYTSKA

SEQ ID NO: 96947 - protein, 76 aa, Gossypium hirsutum
  unsure (1)..(76): unsure at all Xaa locations
  Clone ID: LIB3135-060-Q1-K1-B7.pep
APLLRHPLTWLKPVLCCSEKVPYEAIKMDFAEHITSEVGCVGIPEGFYQIQKNIANNQHDVIFCPYIPGGAGXHIL

SEQ ID NO: 96948 - protein, 47 aa, Gossypium hirsutum
  Clone ID: LIB3135-060-Q1-K1-C1.pep
ESCYLFPTLLVSFEWHMKSIFISSAGLFNKKQRVHPFHCLNLSFVCN

SEQ ID NO: 96949 - protein, 79 aa, Gossypium hirsutum
  unsure (1)..(79): unsure at all Xaa locations
  Clone ID: LIB3135-060-Q1-K1-C12.pep
PTRSVNPGRQTIDYXFKIXKREDDYMLVFCPTVCDFCKVMCRDVGVFIDNAGVRQLALNYFPLKNMFKKAWNLKIHPYF

SEQ ID NO: 96950 - protein, 97 aa, Gossypium hirsutum
  unsure (1)..(97): unsure at all Xaa locations
  Clone ID: LIB3135-060-Q1-K1-C6.pep
GALMNISPPFPDLLFXIPNSYMFTLKNNKLSGXLPVNIGNLKQLAALSLEWNRLTGSIPSSIFDLTQLTNTVLGKNEFSIHFPSVIKQISNLSYLNS

SEQ ID NO: 96951 - protein, 116 aa, Gossypium hirsutum
  Clone ID: LIB3135-060-Q1-K1-C9.pep
FGRPTLVSTFTSPIYLTKTMVRCIQGSLNLFVQDYHCQLSIFLSPFNYLCKTLLVRVVNSSLPNFIWLALPPKYSKNHFKASYPKTKFQPPHCFFFLKPFLKPVSLIKTGKIPSPL

SEQ ID NO: 96952 - protein, 143 aa, Gossypium hirsutum
  Clone ID: LIB3135-060-Q1-K1-D1.pep
WGAGWNLLSLLLAVKRSKRISGIDALRHPFLCGPRWRVVPSMDIIRWGLGSTAVRITEEYIYRTAQRDRLAHFIELMEMLNPHSRPKNWLELLPGKWRLLYSTGRHIGLTLRQPPLRVLIGDAYLTIARPSKSNARLSVTSEI

SEQ ID NO: 96953 - protein, 54 aa, Gossypium hirsutum
  Clone ID: LIB3135-060-Q1-K1-D11.pep
IRGRDLYCIFKEVYSALNIIKVTADRVVFHITFTLMVKTLMTTSIASDGTINQN

SEQ ID NO: 96954 - protein, 80 aa, Gossypium hirsutum
  unsure (1)..(80): unsure at all Xaa locations
  Clone ID: LIB3135-060-Q1-K1-E1.pep
SSLPXYTQMVLILHRTLPQLARFHSTQHHPLTTRTIPPIICIIVLLINQPNRHNTIHYMFLNISSKHYLIILQNSTNFLL

SEQ ID NO: 96955 - protein, 134 aa, Gossypium hirsutum
  unsure (1)..(134): unsure at all Xaa locations
  Clone ID: LIB3135-060-Q1-K1-E11.pep
YTLYIYLKSLTTLKNSGLSGNTHIXLPLDNPLNHLLVPVAYMFRTQYSALSTYYLYTFKQLLSSNLTISCTEKSLTDHVAINAHRNAYLTDLKRNKLFKVFVDRDILFTLTNPTLTSKEWYKNLALFNRILYHP

SEQ ID NO: 96956 - protein, 86 aa, Gossypium hirsutum
  Clone ID: LIB3135-060-Q1-K1-E12.pep
TITIGYMTTYHINPLKPIHYSHPHLYIITHDTILTNIPYHFFFSLHFLIPYTYPTSSISFYLQLSPSTVHDPIEFLTFKLSFHNYL

SEQ ID NO: 96957 - protein, 99 aa, Gossypium hirsutum
  Clone ID: LIB3135-060-Q1-K1-E4.pep
PRVRPLVRPLVLPHVRPLLRASFSITSMAITAAYYTLSWHMDRGEQPLSEMLVTFALSVGTAVGMDFFATWTHLALWHASLWHMHESHHPPREEPFELN

SEQ ID NO: 96958 - protein, 141 aa, Gossypium hirsutum
  Clone ID: LIB3135-060-Q1-K1-E5.pep
VQTGEIAGLGSYTNGELSPSGSSNRLKNQISFSSRLPSSLGILSQISEVVDDAKLETGCQYGSWNDSANFPENFSGSKTTQDNDSNFFSANQNSASGSRLHVLSHHLSLPKTSNETPAMEKFLSFQDPVPCKIRAKRGCAT

SEQ ID NO: 96959 - protein, 64 aa, Gossypium hirsutum
  Clone ID: LIB3135-060-Q1-K1-E6.pep
KKKKKIKKLKYYTNKKKKKKRKYKQKKKKKITYNKKLASPFKISKLTSPSIQRHNSSIWTPKLN

SEQ ID NO: 96960 - protein, 63 aa, Gossypium hirsutum
  Clone ID: LIB3135-060-Q1-K1-E7.pep
NHKVLFCFYLRYSIYIFVFCIRLEFSFFLKERKERKTRNLFRINASIRSLGLLVKIGVRNKNP

SEQ ID NO: 96961 - protein, 53 aa, Gossypium hirsutum
  Clone ID: LIB3135-060-Q1-K1-E8.pep
NLYKSNKKKKYYKTRPEYLINPYRHNHLLICLSFPTIKKNLTPPHMHYTTNPS

SEQ ID NO: 96962 - protein, 82 aa, Gossypium hirsutum
  unsure (1)..(82): unsure at all Xaa locations
  Clone ID: LIB3135-060-Q1-K1-E9.pep
GVPNAPVYTPPNKENPDPKPPASHRLIYLLNXPPSFDPKPPNXPFYTPPNKENPEPKQPILEFPKKPPIGHFQEHPPLGNPH

SEQ ID NO: 96963 - protein, 67 aa, Gossypium hirsutum
  Clone ID: LIB3135-060-Q1-K1-F1.pep
HSTWIHPSLKRSMDESPALHSLRQRFSSREKPGSHISWQLKLTLAFSLMQGKKKSIFTLMAPPNWEN

SEQ ID NO: 96964 - protein, 125 aa, Gossypium hirsutum
  unsure (1)..(125): unsure at all Xaa locations
  Clone ID: LIB3135-060-Q1-K1-F12.pep
MRPNLTHTPLMDSLTSIVKGDTVNAYYYHIVSPFTNTAVGAXLTHSFSSNENTLTIGTQHALYPFTTIIVQLNNYGKTSGLIHHEWLPKCLFNIFGDMDTTSIXNTAKVSLAFSLKPQGKAISLL

SEQ ID NO: 96965 - protein, 53 aa, Gossypium hirsutum
  Clone ID: LIB3135-060-Q1-K1-F9.pep
LLKTAIYFSFNHPNCYSVLIINVEIFFFCPLNIIFLSIKFLFLLIIFFPQVII

SEQ ID NO: 96966 - protein, 54 aa, Gossypium hirsutum
  Clone ID: LIB3135-060-Q1-K1-G11.pep
VEIRKYLYSQYFYGWHRYRGRSKLAGSPVTDCVQQAVIRIDDLDGSARRMGRRP

SEQ ID NO: 96967 - protein, 79 aa, Gossypium hirsutum
  Clone ID: LIB3135-060-Q1-K1-G4.pep
RPLQIKPNADGYASPSQAMELNLKSSSSSSSSAAAAAATSSTSFSSFYQSKDPIPLLSPLVLPTLLQSSYLHQEGNTAT

SEQ ID NO: 96968 - protein, 68 aa, Gossypium hirsutum
  Clone ID: LIB3135-060-Q1-K1-G7.pep
SKTTFTYGSAFLTPISTKKASDLIYAFSIGKFLGFLSFLSFKKKLKTRHMQKKKKYIEHGTEKFKITF

SEQ ID NO: 96969 - protein, 99 aa, Gossypium hirsutum
  Clone ID: LIB3135-060-Q1-K1-H10.pep
ITDSTDASHAYFHAVFHASCSGYHPSLSLALTEMGPLHRAANKNCRPLVELLLRFIPEKSSSKLGLENQMAAGGIHESFLFTPDALSPSSLTPLHIAAG

SEQ ID NO: 96970 - protein, 73 aa, Gossypium hirsutum
  Clone ID: LIB3135-060-Q1-K1-H2.pep
QSAPKTVVLLMQIQAGFRFFLTEEELVSFYLRYQLDGRRQEMHSVIPVLNIYDVEPWDLPRIAFLPPHYNLQF

SEQ ID NO: 96971 - protein, 95 aa, Gossypium hirsutum
  Clone ID: LIB3135-060-Q1-K1-H3.pep
TIRDESVDLSSAYSQGIRNWVTQVLQSSGVDISQASISVKIDVGKRVAAGMTSMPSSSKEKDIQYTSNQEMAQTGVRSYTEESDQAYKRHGTGKS

SEQ ID NO: 96972 - protein, 50 aa, Gossypium hirsutum
  Clone ID: LIB3135-060-Q1-K1-H4.pep
AHSIVSRSRMEAYMMIYQILFISGFSYNTMYEMYEVTKDISYNHLFICES

SEQ ID NO: 96973 - protein, 44 aa, Gossypium hirsutum
  Clone ID: LIB3135-060-Q1-K1-H5.pep
SICFTLFIHLSFHLYQVKLENDKHPTNNKTKQKIKGNSVSSDAW

SEQ ID NO: 96974 - protein, 104 aa, Gossypium hirsutum
  Clone ID: LIB3135-060-Q1-K1-H6.pep
LVDSDSLGKKVAPPEGRSRIDIRLRTKNQKPVEEVVDVGDQNLNVEDVEEFVPKTWNLRPRKPISKPRNQNGGAPKMVASAHDNKTQRPESSRSMNVTESKPAE

SEQ ID NO: 96975 - protein, 96 aa, Gossypium hirsutum
  Clone ID: LIB3135-061-Q1-K1-A4.pep
LAEANDGEEKEGKVEKKVNEKQMKDTKNTTSRLYKDQCTAFVSNLNITAKDEDLHQFFSDVGGVTAIRILHDKFTGKSRGLAYVDFKDDVHLAAAV

SEQ ID NO: 96976 - protein, 102 aa, Gossypium hirsutum
  Clone ID: LIB3135-061-Q1-K1-A5.pep
PDSHPPFDMDECGDRILDLLSLAADIDVMPFGDLVKGQEKHDVARSFSALLQLVNNGDVLLELTGLRGESVCHTPENPLHVHILTSRQEECGNSTWNSQNER

SEQ ID NO: 96977 - protein, 59 aa, Gossypium hirsutum
  Clone ID: LIB3135-061-Q1-K1-A6.pep
AFESNVKIGLAKSAVSRNSQCVKRTRPSHLRYVFTRSMELPRTPGIPIMDNNMAHYPRV

SEQ ID NO: 96978 - protein, 119 aa, Gossypium hirsutum
  unsure (1)..(119): unsure at all Xaa locations
  Clone ID: LIB3135-061-Q1-K1-A7.pep
ASLQAVTTCARRLDAWCEALQTIVFFMGYSAWHXTDGQWYHGRAXDSETNPFNNESYLKPYPPMMVVFEPVLLGXMKTHITYLNITRLTDLXKDGHPSIYRKHPKQTLPADERVAPLKY

SEQ ID NO: 96979 - protein, 41 aa, Gossypium hirsutum
  Clone ID: LIB3135-061-Q1-K1-A9.pep
ILYAYGAKFAKIQYSIDVWCFVYRLTIRILLMLWNIICSLL

SEQ ID NO: 96980 - protein, 116 aa, Gossypium hirsutum
  Clone ID: LIB3135-061-Q1-K1-B4.pep
GYQPSRWFPSEGKHWRSSFTSLSRPSRFCGSLPFIDNLLHFLAIKAMLAVPLKPTPSFAVFEFASPAAATALLSRLPFSSPLFTLSVEAFAAALLILLACFFLVLESCCSILLSSV

SEQ ID NO: 96981 - protein, 57 aa, Gossypium hirsutum
  Clone ID: LIB3135-061-Q1-K1-B5.pep
TYITFFHKIFKFFALVEGCTLFLKVTPDSLSDKFNPSILKFNYLIVQYSNHDLEYLS

SEQ ID NO: 96982 - protein, 52 aa, Gossypium hirsutum
  Clone ID: LIB3135-061-Q1-K1-C1.pep
VKNVIDSHVLNLDKVHVKNVGDSTKLLFCLKLTKLTKAYSVRSCFWSVGCGF

SEQ ID NO: 96983 - protein, 136 aa, Gossypium hirsutum
  Clone ID: LIB3135-061-Q1-K1-C11.pep
LYTVRSGYQMLTYASDYTDSTQGNIDFYKKIWSLQITPKNKIANWRIIHNFIPTASILYNRRLAISPMCPRCNIEAETPLHISTRCGPAQEVWRQVNLEWTLSGNHEDYWSWFTHLLRSSDTTPVLPSPGRVGGRV

SEQ ID NO: 96984 - protein, 58 aa, Gossypium hirsutum
  Clone ID: LIB3135-061-Q1-K1-C5.pep
RKVKMKKVDVAVMIYGSSSRYIQPTGLIDEGTELVWDSVVGFERNHMVAKALQFFKCL

SEQ ID NO: 96985 - protein, 64 aa, Gossypium hirsutum
  Clone ID: LIB3135-061-Q1-K1-C6.pep
NDHASTQTDGCQPTNIYSSATLLYNRVGDISINTTSKTTPLPTFQQYLTHQHRRFCQLLLRIHK

SEQ ID NO: 96986 - protein, 65 aa, Gossypium hirsutum
  Clone ID: LIB3135-061-Q1-K1-C7.pep
QSRVRFITDTRVQILPTQGWSASTSSPNQLSKLSLLYNWSLPTQILSDIFLSEQCELGLPTTRSL

SEQ ID NO: 96987 - protein, 22 aa, Gossypium hirsutum
  Clone ID: LIB3135-061-Q1-K1-C9.pep
QAFTLNQFMVYTALTMEGTLTG

SEQ ID NO: 96988 - protein, 93 aa, Gossypium hirsutum
  Clone ID: LIB3135-061-Q1-K1-D1.pep
NKQMSKSHNLKGKRLRKMKAFYLTYDTPKAPVNVDTPSTSSSLSKVAKGGLLLKTHFSIYFTGDESVQNKSNLYKSYICPFYMVTLNNTLSFL

SEQ ID NO: 96989 - protein, 97 aa, Gossypium hirsutum
  Clone ID: LIB3135-061-Q1-K1-D10.pep
GLNPGRPTVRKRKKTGIYHSEITWKFDREGLVNFVNHPTGFFTSFSMIFTSKKILFYLLFYISFFLTLSSFIIFLNYFLPIFLFYSFISLIFLLLIY

SEQ ID NO: 96990 - protein, 30 aa, Gossypium hirsutum
  Clone ID: LIB3135-061-Q1-K1-D12.pep
HSNIWPKFIVFTPTPLSWYQKYFLNNSKAS

SEQ ID NO: 96991 - protein, 102 aa, Gossypium hirsutum
  Clone ID: LIB3135-061-Q1-K1-D6.pep
PRVRSISFPVVRAVSDKLGEPVDILHLDAHPDIYDCFEGNKYSHASSFARIMEGGYARRLLQVGITSITTEGREQGKKVGMEQYEKRTFLKKRHFFENLKLW

SEQ ID NO: 96992 - protein, 38 aa, Gossypium hirsutum
  Clone ID: LIB3135-061-Q1-K1-D7.pep
FTSFQRVHWLGYEAFNALSLLIMPETFTLTKIKMVTQP

SEQ ID NO: 96993 - protein, 67 aa, Gossypium hirsutum
  Clone ID: LIB3135-061-Q1-K1-D9.pep
GHSNSHFFFLYMQRPFLFFFLVLFLVFFFFFFFFFFFFFVCSIVDNDQAPCIFFISISGARSKDMLA

SEQ ID NO: 96994 - protein, 74 aa, Gossypium hirsutum
  Clone ID: LIB3135-061-Q1-K1-E10.pep
RNLKKKGIEGKSAPGGDARFRRFSKSKGLYFICWRVLLNHRARVMRPELRILSLPLTLCKIKFGLESSKSLWLS

SEQ ID NO: 96995 - protein, 43 aa, Gossypium hirsutum
  Clone ID: LIB3135-061-Q1-K1-E11.pep
TSVSSTSFILVSGVHIKATWGLRSTKFIFLPSAFDDLAFIFFT

SEQ ID NO: 96996 - protein, 51 aa, Gossypium hirsutum
  Clone ID: LIB3135-061-Q1-K1-E2.pep
RGRNDYDFGLPSDLISVAAKRNRYQRQKSLMLLEMESQHAKGLPSVPLNPH

SEQ ID NO: 96997 - protein, 36 aa, Gossypium hirsutum
  Clone ID: LIB3135-061-Q1-K1-E3.pep
MIFFLIFFYFFFFFIFFFFFFFFFIFFFFFFFFFFF

SEQ ID NO: 96998 - protein, 37 aa, Gossypium hirsutum
  Clone ID: LIB3135-061-Q1-K1-E6.pep
HTPARSIKDASRALLLISLYQLNLASLLALGAPPALV

SEQ ID NO: 96999 - protein, 96 aa, Gossypium hirsutum
  Clone ID: LIB3135-061-Q1-K1-E7.pep
TISGENVLTWPHVVKDVDCYTIQLNELESISTRYKFQSMMRAPLHGFAFWFDVEFSGPANSSIITPSLSPLIGISDDDPVDDIPTKKRTHLNEPLV

SEQ ID NO: 97000 - protein, 41 aa, Gossypium hirsutum
  Clone ID: LIB3135-061-Q1-K1-F11.pep
MSQNSQTLQSAAASRFRYLKPIPFRSSSCTRCQTGLPRLLG

SEQ ID NO: 97001 - protein, 66 aa, Gossypium hirsutum
  Clone ID: LIB3135-061-Q1-K1-F2.pep
SQAFKLADESDCRQMITHDSEMRGNIDEDRKKVPVHGQCFLVEWYSTSEDELFDNYHKKYSEECEQ

SEQ ID NO: 97002 - protein, 59 aa, Gossypium hirsutum
  Clone ID: LIB3135-061-Q1-K1-F3.pep
SDYIYGTDKGYRYHKKVLRKVKEGSKVDGAQNRCSYYYSAHHMLCSAKHILPPTGQKHE

SEQ ID NO: 97003 - protein, 99 aa, Gossypium hirsutum
  Clone ID: LIB3135-061-Q1-K1-F4.pep
DVMIWRGYKSGKYIVQSGFKWLMTNTLHLQDYYTDQTNIKAYFTKLWNLPIPSKIKILLWRFSNNYLPTLSNLKTRRLTTDDACPICSMEEKIVEHLFR

SEQ ID NO: 97004 - protein, 89 aa, Gossypium hirsutum
  Clone ID: LIB3135-061-Q1-K1-F5.pep
WNRILGPSSERIVYALVQHMGHGIREYFLASAELKFNCFLLMPVVDKLPALLREDLESAFSDDMDNVFNISNLRHSLGPRKRNTEIDLK

SEQ ID NO: 97005 - protein, 83 aa, Gossypium hirsutum
  unsure (1)..(83): unsure at all Xaa locations
  Clone ID: LIB3135-061-Q1-K1-F6.pep
ERPTRPTPPSPTHTLQTFITGLDTDMGTDGYNDELTHATSTNINFCLKNILSNSEICNDEYXPCRYSMNXTETDTTLTIHVTP

SEQ ID NO: 97006 - protein, 38 aa, Gossypium hirsutum
  Clone ID: LIB3135-061-Q1-K1-F7.pep
WKHKNGHPKRSSTHLNIYTLSHLYGCGTYNVNSRLCFL

SEQ ID NO: 97007 - protein, 48 aa, Gossypium hirsutum
  Clone ID: LIB3135-061-Q1-K1-G2.pep
GDPRVRNILKNPKLEFTVLIPHLYMGKGDYILGSIRTPFINITYISDS

SEQ ID NO: 97008 - protein, 102 aa, Gossypium hirsutum
  unsure (1)..(102): unsure at all Xaa locations
  Clone ID: LIB3135-061-Q1-K1-G3.pep
VNMGSFGNELGPSVLPPLMDASSAFNAKKNPVSESVYVPCFSNPVDVQRIQLDTIDHFPENPLLLPVSSNPTDIFPRFQAPNPFFSAQPVTFPPNLHXPCSV

SEQ ID NO: 97009 - protein, 64 aa, Gossypium hirsutum
  Clone ID: LIB3135-061-Q1-K1-G6.pep
KAGATHPFLKIVFILLTCSPTTLSFGERVPSWETSQLSSFLPYSPIEIYISFNNTVSSYCSEKP

SEQ ID NO: 97010 - protein, 45 aa, Gossypium hirsutum
  Clone ID: LIB3135-061-Q1-K1-G8.pep
PSISHPFPPTNKPLIHQIALTCNHYSIVTCYHTQTLFTFTPFVNF

SEQ ID NO: 97011 - protein, 77 aa, Gossypium hirsutum
  unsure (1)..(77): unsure at all Xaa locations
  Clone ID: LIB3135-061-Q1-K1-H5.pep
PRVRKNKSGGLMYVQDKREEDRDEIFKLLYDGAHIYFCGLRGMMPGIQXTLKRVAVQRGENWDEKPSQLKKNKQLAC

SEQ ID NO: 97012 - protein, 134 aa, Gossypium hirsutum
  Clone ID: LIB3135-062-Q1-K1-A11.pep
MASAMLLFGLLVAFFHPSSAQIGVCYGMMGNDLPSKPDAASLFKHRNIRRMRLYEPNQPALQALKGSDIEVMFGLFNDDLPRIAGSQAEANTWVQNNVKNYCDVKIRCIAVGNEVQPLDSKARSLFPGLRNIHN

SEQ ID NO: 97013 - protein, 89 aa, Gossypium hirsutum
  unsure (1)..(89): unsure at all Xaa locations
  Clone ID: LIB3135-062-Q1-K1-A4.pep
QALAKMTPKLLGALVNPSTLNMIGHMFLKRMYDYDEASEQNSWKLLSKVTXSHDNFLEVNALIFDFIDNVKDYILHANNILPMDPDSYT

SEQ ID NO: 97014 - protein, 85 aa, Gossypium hirsutum
  Clone ID: LIB3135-062-Q1-K1-B1.pep
GDPRVRPRLPTPQFFFYSISLKKGHTELLCSYKLLLKNIIINQNDNLKIQFAICYMLNFDCLRSRTIVPELSYLLRSGLRLGTHL

SEQ ID NO: 97015 - protein, 132 aa, Gossypium hirsutum
  Clone ID: LIB3135-062-Q1-K1-B11.pep
MTQPLLTIGPTIPSMYLDERREKDKDYDLNLFKLDSTSTCWLTTKPPCSVVYVSFGSMANLTIDQMKELARGLKQTGLHFLWVVRPSELPKVPHCFIEEMGDKALIVTWIPQTEVLANDAIWCFFTHCGWNF

SEQ ID NO: 97016 - protein, 79 aa, Gossypium hirsutum
  Clone ID: LIB3135-062-Q1-K1-B5.pep
MTYSTINPTKPIFHKSQYQIHNISITLFSKNVKNLDKFFSDFIQFSNDNILIFKLPFKIPTNILHITTIKSSLFLNNKH

SEQ ID NO: 97017 - protein, 77 aa, Gossypium hirsutum
  Clone ID: LIB3135-062-Q1-K1-B7.pep
YHIHTIISTLSSKNFKNLYNFYAHLILITKYNILMFNMPIIIPTIFFFITSTNSSFFQLTNTFYLFDLPFHNLVIYL

SEQ ID NO: 97018 - protein, 30 aa, Gossypium hirsutum
  Clone ID: LIB3135-062-Q1-K1-C1.pep
KMLEFLQSPSYITTVSDTKFKCRYRRGMTS

SEQ ID NO: 97019 - protein, 125 aa, Gossypium hirsutum
  Clone ID: LIB3135-062-Q1-K1-C8.pep
FGHVASDSLVNPPHKSSYMSAKEYGHGLFLDFTGQETQDQTPPHQFIDNWPKDQSSRSIVTWPNELKPDWTQLSMSIPMVTSEFSSTLSSPVKEKLDLSSLMLVQEFDHIQMGLGVNNDITEQTR

SEQ ID NO: 97020 - protein, 67 aa, Gossypium hirsutum
  Clone ID: LIB3135-062-Q1-K1-D11.pep
LEKGFIFNMCYILKSLSIQENLNIISCRINTLQPLLLNKNYHPLKHLDIACLRTSLKNTQRALPFIL

SEQ ID NO: 97021 - protein, 83 aa, Gossypium hirsutum
  unsure (1)..(83): unsure at all Xaa locations
  Clone ID: LIB3135-062-Q1-K1-D3.pep
HLENSDTNASVKANILDMDGTPPYQLEVLLHSMQLDDCRTFSDYNLLKESTLHLLLHLHGXMHIFGKTLTGKTITFDVHSLDT

SEQ ID NO: 97022 - protein, 93 aa, Gossypium hirsutum
  Clone ID: LIB3135-062-Q1-K1-D4.pep
KFVNIFVKILIIILHIKLIHHTIIHIIILMNIPMSMKVSQQGKNHYEEVDVVVDIDLNVGSSFRSHFAPQFAQNFLDTFVVSCVAQGFADAWA

SEQ ID NO: 97023 - protein, 67 aa, Gossypium hirsutum
  Clone ID: LIB3135-062-Q1-K1-D5.pep
HRYITPLFLQLYICSGILDYGGYSKVLNKSFVEQILAAFHAPSIILCILFDPINTHMGLALHTGEHE

SEQ ID NO: 97024 - protein, 92 aa, Gossypium hirsutum
  unsure (1)..(92): unsure at all Xaa locations
  Clone ID: LIB3135-062-Q1-K1-E2.pep
MFFRGKRTDGEGLASDKNGDHAPPNKVSKTFSEGDSDDSDDVNVFHISNTRTVSLQNRNGTIWLDIPEFXSNDRQQLAAKKGRSVIIEHCNN

SEQ ID NO: 97025 - protein, 75 aa, Gossypium hirsutum
  Clone ID: LIB3135-062-Q1-K1-E3.pep
RDVLNGCIAINQVTKGKTDAFKGLRKHLLEELEQAFPDEVESYREIRASAAAEYKRLAQSQSILQNGDVKVKTEL

SEQ ID NO: 97026 - protein, 32 aa, Gossypium hirsutum
  Clone ID: LIB3135-062-Q1-K1-E4.pep
TRAEAHRFIEPIDRITCVMITTGLYDYQRFYE

SEQ ID NO: 97027 - protein, 73 aa, Gossypium hirsutum
  Clone ID: LIB3135-062-Q1-K1-E9.pep
DCIRLSWSFIAPNQVSSENILGSMINSGTRVRLSSVFTTSDMVGLSAGNEFLQRKATFAILTASFSLIAVAYL

SEQ ID NO: 97028 - protein, 81 aa, Gossypium hirsutum
  Clone ID: LIB3135-062-Q1-K1-F2.pep
HSNPDASVADVVSKYCESSSLASVVDFLISCFICWISIIDYWLLFWGITLCRAAIGRWCCSSDHIWCSRSVGSWFTSWRFI

SEQ ID NO: 97029 - protein, 80 aa, Gossypium hirsutum
  unsure (1)..(80): unsure at all Xaa locations
  Clone ID: LIB3135-062-Q1-K1-F3.pep
MDERKDTLRKVVLEQLTTSTCYNLLLMIYYAVRCCGXPWVRVKTMIKREYHEVQMTAWSVXPSVGWINHRYMPLQLQVIF

SEQ ID NO: 97030 - protein, 43 aa, Gossypium hirsutum
  unsure (1)..(43): unsure at all Xaa locations
  Clone ID: LIB3135-062-Q1-K1-F9.pep
RLMILIDIGEKSGKKFRRLKSKGIEEIGREXWGGIFMVISDKN

SEQ ID NO: 97031 - protein, 53 aa, Gossypium hirsutum
  Clone ID: LIB3135-062-Q1-K1-G10.pep
QAARPVRYYAFFKECWLPSPPLGCHRTIASVSTKSLQRDHPEPSGLIHSKLWM

SEQ ID NO: 97032 - protein, 67 aa, Gossypium hirsutum
  unsure (1)..(67): unsure at all Xaa locations
  Clone ID: LIB3135-062-Q1-K1-G6.pep
MGTTQKLSLSMNAICHKCKANRIKSATLYTCYGWQGTGMXITTLPRGLXMIQQMHQDSSECKCSRYM

SEQ ID NO: 97033 - protein, 74 aa, Gossypium hirsutum
  unsure (1)..(74): unsure at all Xaa locations
  Clone ID: LIB3135-062-Q1-K1-G7.pep
PRXRIGHIAVFIELPLNEVXGKLSQMILYNNFAGTMHQGAGXLVIFDNPIDDVIYFAPLYTISNMPRVGDSLYV

SEQ ID NO: 97034 - protein, 62 aa, Gossypium hirsutum
  Clone ID: LIB3135-062-Q1-K1-H1.pep
FSRHSHFQPYPQYATSQSGMRGLTSRFHIQVSAKNPISAGSTFTSSGCAASTQFMTTFVRTN

SEQ ID NO: 97035 - protein, 50 aa, Gossypium hirsutum
  Clone ID: LIB3135-062-Q1-K1-H10.pep
IICKEKKWVSKIINNTVSTLIIYIRLRQFPLSEAKGIEINKMISWQDLTH

SEQ ID NO: 97036 - protein, 73 aa, Gossypium hirsutum
  unsure (1)..(73): unsure at all Xaa locations
  Clone ID: LIB3135-062-Q1-K1-H3.pep
AFIELLDCGTSNYPGSSRDCGLLAACEAHETLPQSAEFPXVFTSCLTTPIKMTLRWCILWLSVPVFWILWPLD

SEQ ID NO: 97037 - protein, 120 aa, Gossypium hirsutum
  unsure (1)..(120): unsure at all Xaa locations
  Clone ID: LIB3135-062-Q1-K1-H6.pep
GRPTPTATRNDPNKPNTPATSFFSFMERFRGQYMTDHPTNKSHAPVRKSPLYKLKNSTEAENSPYEANAVLPTVEYEKNMNAYNMRQAEGPKNXRCXSNKSVSEVNDEDDDDKSIPRPTR

SEQ ID NO: 97038 - protein, 50 aa, Gossypium hirsutum
  Clone ID: LIB3146-002-P1-K1-F12.pep
TSGSPGLPAFAAASPFFFFLSLRLLQSLCGRSLSMDVRPGLQRRSLHFEG

SEQ ID NO: 97039 - protein, 41 aa, Gossypium hirsutum
  Clone ID: LIB3146-002-P1-K2-E6.pep
NNALTNLSKCTCLSHRRKFYTQTNTTHPYIIYTQALLITNR

SEQ ID NO: 97040 - protein, 53 aa, Gossypium hirsutum
  Clone ID: LIB3146-002-P1-K2-H4.pep
KEPVYCSRKIVGFALRILHYMGTSFLPFEIFLLNFVQLLHYQRRLLIKMSLYS

SEQ ID NO: 97041 - protein, 51 aa, Gossypium hirsutum
  Clone ID: LIB3146-003-P1-K1-E7.pep
YCFFKKLSLFFFYFFFFFFFFYFFFFFFFFFFFFFFFFFFFFFFFFFFSPI

SEQ ID NO: 97042 - protein, 102 aa, Gossypium hirsutum
  Clone ID: LIB3146-006-Q1-K1-G1.pep
NASADPWPAAWPEPLWELERFVTNYKKKGSKIKRQALMANNVASNDSNRRDTTVEKMDVAMDMKKPKKGDAADEDVDIGDEMPMSSFPPVEIEKDYDRASSS

SEQ ID NO: 97043 - protein, 50 aa, Gossypium hirsutum
  Clone ID: LIB3146-007-Q1-K1-E12.pep
LSFLGNRPPLTHDIGHSSIYHPVLRSLSHIGQCVSFLSFSQILISNKKFF

SEQ ID NO: 97044 - protein, 93 aa, Gossypium hirsutum
  Clone ID: LIB3146-007-Q1-K1-E4.pep
IYNSLLLLGFARLASTLSLDYQVHVGEYGVNWNFFFTLAGVSILTSILNVPAEYSGILGSVILVGYQSWLTNGLNVYLLSNERGTDVISRNKE

SEQ ID NO: 97045 - protein, 58 aa, Gossypium hirsutum
  Clone ID: LIB3146-007-Q1-K1-E5.pep
WMSICIEKFLLVRLTLFLQIQRASRLFNSWGSANGKEFHRGCNQMVVYIRSCQSRLSA

SEQ ID NO: 97046 - protein, 61 aa, Gossypium hirsutum
  Clone ID: LIB3146-007-Q1-K1-F1.pep
KSITDSIPFQVCNTLQRIQASLTRKQLVVKDIIRTLNHRNLLVLIMFTLITLRLLITNLSI

SEQ ID NO: 97047 - protein, 71 aa, Gossypium hirsutum
  Clone ID: LIB3146-007-Q1-K1-F12.pep
KREPTPRKPLHTSFYCGPASLGRVFNSVSLKANKMVNLCSGPQESNKMYLIIIGRTFKDPTFFASATHNLL

SEQ ID NO: 97048 - protein, 37 aa, Gossypium hirsutum
  Clone ID: LIB3146-007-Q1-K1-F6.pep
RQLSSPLSRPTVITTMCDLVGPISSQHKDQKTRWDAW

SEQ ID NO: 97049 - protein, 101 aa, Gossypium hirsutum
  Clone ID: LIB3146-007-Q1-K1-H1.pep
HASAHAYGGFETMYNGHTGRRLTAMIFLGPTYYQRLKHMVDDKIHSRGRGPVQILTRQPAEGRSRDGGLRFGEMERDCMIAHGAAHFLKERLFDQSDAYRV

SEQ ID NO: 97050 - protein, 45 aa, Gossypium hirsutum
  Clone ID: LIB3146-007-Q1-K1-H6.pep
LRCNFVECLLERESYNVKNKKKKKKKKKKKKKRKKNKKIGRLFKR

SEQ ID NO: 97051 - protein, 65 aa, Gossypium hirsutum
  unsure (1)..(65): unsure at all Xaa locations
  Clone ID: LIB3146-007-Q1-K1-H7.pep
IYIPNLXNLXYKKITSNNKCLFFYPSPKQNLHISFFNITNITQYXLFYYTLXLIFFSTHQFIHNP

SEQ ID NO: 97052 - protein, 118 aa, Gossypium hirsutum
  Clone ID: LIB3146-008-Q1-K1-A1.pep
GLEGISLLTSSKELVDLIKNVDVVFHSKQAVSRKSALNSLYRIVPSIREQLKDWEDGLCESDADGSFLHENWNKDLKLFSDGEDGGQRLLQLFILRAEAELQGGDIAHAHSLQIIDSL

SEQ ID NO: 97053 - protein, 48 aa, Gossypium hirsutum
  Clone ID: LIB3146-008-Q1-K1-A12.pep
KCDMNVLVMIMQMMFYVCLYGYLTCYLHVNLLSIYAYSLFFIFCSFDK

SEQ ID NO: 97054 - protein, 47 aa, Gossypium hirsutum
  Clone ID: LIB3146-008-Q1-K1-A6.pep
SHKSLDNDYNHYIVTTVCSLIIAPASVTWDSLKTNCFPFFKQYKRTR

SEQ ID NO: 97055 - protein, 51 aa, Gossypium hirsutum
  Clone ID: LIB3146-008-Q1-K1-B10.pep
ALEELTSREAEYEDSKKGFYLYSELATLGSITTEVGGTTLEPLQASLAFVE

SEQ ID NO: 97056 - protein, 71 aa, Gossypium hirsutum
  Clone ID: LIB3146-008-Q1-K1-C1.pep
HPLTLFLLFCCTKNENKLIHTSELLALMFNHKASASKGKISRIFINIRNNIGIITMYREKNLVHYGRPHAS

SEQ ID NO: 97057 - protein, 67 aa, Gossypium hirsutum
  Clone ID: LIB3146-008-Q1-K1-C12.pep
TNLMQLLYNLKCNRKTTCKEGLNKGKTQQCDESLTSLYFQGRFKWNNGGKFKTARAITVANMRLYSI

SEQ ID NO: 97058 - protein, 63 aa, Gossypium hirsutum
  Clone ID: LIB3146-008-Q1-K1-C8.pep
NVHPVNHHGRVRFCRQLKTLENEKNTMQRFFLRMNSIKYRSCHRIKMSGLIATIVLVGAPRTM

SEQ ID NO: 97059 - protein, 75 aa, Gossypium hirsutum
  Clone ID: LIB3146-008-Q1-K1-D10.pep
KKNITKSTKTCYRHSSRTRGSRIFPFLDLMCDFDLNHNNSNFHPTTFPYKKSFEVMSEEKYNPILGAYHKKRKGT

SEQ ID NO: 97060 - protein, 133 aa, Gossypium hirsutum
  Clone ID: LIB3146-008-Q1-K1-D7.pep
KKLNERLYSLRSLVPKISKLDRASILGDAIEFVKELENQKKELQDELEEHSDNDNGAKKTGMNGVHKKFQSEIFLQNDQIPVYFNPEHDKGPNGFPVGGNGSVSRAQNQEVDTCADKTQQMEVQVEVAQIDGN

SEQ ID NO: 97061 - protein, 67 aa, Gossypium hirsutum
  Clone ID: LIB3146-008-Q1-K1-D8.pep
FDKSRKVGGPRALHPSQCYCLGVEDMELLSGEELHTPNSFLVMLNGLILGKHRRPQLFHQYADPSRS

SEQ ID NO: 97062 - protein, 55 aa, Gossypium hirsutum
  Clone ID: LIB3146-008-Q1-K1-D9.pep
ATNAFCYMKFVTSIRLIPGLKFFFLLDCAGIREAGHKISGNKLWMDHRSLWVHLY

SEQ ID NO: 97063 - protein, 88 aa, Gossypium hirsutum
  Clone ID: LIB3146-008-Q1-K1-F11.pep
PTRPVVVCLFLVVTMRVKKGLEVRKVVVLEGILTGGIHIKVAVVKTGGKNGGGLPYELQKNGGINRDGNGGKKGAPYFVSDGIPIMGC

SEQ ID NO: 97064 - protein, 72 aa, Gossypium hirsutum
  Clone ID: LIB3146-008-Q1-K1-G12.pep
VHVFFFVIVFLCRVKTHKWRIALVRSVLFMLLDHVRLSFIKHTLPYTPIVLGININKSFFVICLNMGGRFRG

SEQ ID NO: 97065 - protein, 134 aa, Gossypium hirsutum
  Clone ID: LIB3146-008-Q1-K1-G3.pep
QSRSLINKAKIVAAKKDIKALEELANVEVEKFMDLWNGNKAFRDDYERRILKSLDTRLLSRDGRIRNPDEKPLVLPEITVHTGTEALPKPGAKQPKEEAKSSPQPGTKHLKKGQKDAETKAMESKSSSENVVAD

SEQ ID NO: 97066 - protein, 48 aa, Gossypium hirsutum
  Clone ID: LIB3146-008-Q1-K1-G5.pep
CRPSSIQHCRLTVILCPCRLGRMYSQVRFRGFVVYIEDNCFSLPIDQV

SEQ ID NO: 97067 - protein, 32 aa, Gossypium hirsutum
  Clone ID: LIB3146-009-Q1-K1-A5.pep
HACGLSAGSFFCDLNRYPSSEIISSVMKSLPA

SEQ ID NO: 97068 - protein, 92 aa, Gossypium hirsutum
  Clone ID: LIB3146-009-Q1-K1-A8.pep
SPSSENWTLDVDTNIIIHAEHKIFLKTCFILIRTSRKQLPESLLTFKSSNIKIRLRRKNMTPLLNPKKGYPSVQLRSYPKLKRLKTFCTPCL

SEQ ID NO: 97069 - protein, 145 aa, Gossypium hirsutum
  Clone ID: LIB3146-009-Q1-K1-B4.pep
HASAHASEKVLREQIADGQPRTHMPWKKIIVVVEGIYSMEGELCKLPEIVAICKKYKAYVYLDEAHSIGAVGKTGRGVCELLGVDTADVDIMMGTFTKSFWSCGGYIAGSNELIQYLKDTCPAYLYATSISPSAAQQIISSIIGY

SEQ ID NO: 97070 - protein, 102 aa, Gossypium hirsutum
  Clone ID: LIB3146-009-Q1-K1-B6.pep
HASGHLPVSLLNFENLQEINLAYNGLTGRVPVAYGQRLGRPWKSLFLDDNFLSGRIPRQFNSSALRISGSLANNCLSCPVTIPICGGGQRPASACIGEIGNH

SEQ ID NO: 97071 - protein, 74 aa, Gossypium hirsutum
  Clone ID: LIB3146-009-Q1-K1-C2.pep
PRVRPRVRPRVRVTQRFGNLDFKLKFVEHNIRFLQEVIQNRRSDLLEWCIIFLLTIENVIAIYEIVRESSGVSL

SEQ ID NO: 97072 - protein, 46 aa, Gossypium hirsutum
  Clone ID: LIB3146-009-Q1-K1-C8.pep
SPYKTYVYAAGLPMAAGRAIFTRWETKAVAAVKTNTSTYIMPKPEA

SEQ ID NO: 97073 - protein, 95 aa, Gossypium hirsutum
  Clone ID: LIB3146-009-Q1-K1-D3.pep
PRVRSKGARFQSLEAKAVDDNQRAKPKSIVCADCDGNGAKQCSQCKGTGVNSVDHYNGRFKAGGLCWLCRGKREILCGDCNGAGFIGGFMSTFDD

SEQ ID NO: 97074 - protein, 62 aa, Gossypium hirsutum
  Clone ID: LIB3146-009-Q1-K1-D6.pep
DSKTKVPYTSKFKYIDKKNSALAPSKWTFHLHFLPCLNILDPFPHCMMLGHKTKSFKTAKVL

SEQ ID NO: 97075 - protein, 61 aa, Gossypium hirsutum
  Clone ID: LIB3146-009-Q1-K1-D7.pep
GSFKFPGSIIYILPKTENKTKANPKEKPSKAWRTATLDFSWEEGGCPYCFSQKGCSRLIRL

SEQ ID NO: 97076 - protein, 60 aa, Gossypium hirsutum
  Clone ID: LIB3146-009-Q1-K1-E2.pep
HFKFNTPNIYCSFYLSNSLNSIITFVARHHPRPSFLAISSLHSSIAQPTKAIASTASSFS

SEQ ID NO: 97077 - protein, 96 aa, Gossypium hirsutum
  Clone ID: LIB3146-009-Q1-K1-E3.pep
LSTNLIYFVSAERMGIKDIYILHGTCFGTYIAKGSSSENCIKDCVIPESVVETVKDTHHTSSSRFCKLVCTTILCSKLSTKENKEKRKKIPGFSLV

SEQ ID NO: 97078 - protein, 74 aa, Gossypium hirsutum
  Clone ID: LIB3146-009-Q1-K1-E4.pep
KGNHNKRTSYVLNKKTSRYPAYNIYLQKVISTICSPLDFYLIKHPYIIPTQKPRTEISNFNCIHSHLSDFSGGC

SEQ ID NO: 97079 - protein, 49 aa, Gossypium hirsutum
  Clone ID: LIB3146-009-Q1-K1-E6.pep
PLVHTHMLKRVEQTLDSHRRGTSWVENDRPVPTYTLAIAHSTSVICICA

SEQ ID NO: 97080 - protein, 110 aa, Gossypium hirsutum
  Clone ID: LIB3146-009-Q1-K1-F3.pep
GNLLEVAHVVPAFNQGELHPVWQQPKLHEYCHSKGIHLSGYSPLGSQAGENIKRRVQENPVLKMVAERLGKSPAQVALRWGLQRGHRVLPHSTSEARLEENPDVFNWSIP

SEQ ID NO: 97081 - protein, 61 aa, Gossypium hirsutum
  Clone ID: LIB3146-009-Q1-K1-F5.pep
CLVHQQLDVILKNTVRHSPDISGGNILTRKSYKVSYRQPSWRPQVRIQTRRSVSNNKSICS

SEQ ID NO: 97082 - protein, 144 aa, Gossypium hirsutum
  Clone ID: LIB3146-009-Q1-K1-G1.pep
NIKSCIKALCNFNAAKGFEIGKDTTLPVTYIRSMEAPLENLGGKPPSERNILAFFAGGMHGYLRPILLQYWQNKESDMKIFGPMPRDVEGKRKYREHMKSSKYCICAKGYEVHTPRVVESNYYECVPVIISNNYVPPFFEVLNW

SEQ ID NO: 97083 - protein, 66 aa, Gossypium hirsutum
  Clone ID: LIB3146-009-Q1-K1-G3.pep
IGLCDSTTQFNFHSSFCRGRFCYATAINTFFHVYRWMVTYISSVTYDVCIIKDSISMVIIYEHPFP

SEQ ID NO: 97084 - protein, 37 aa, Gossypium hirsutum
  Clone ID: LIB3146-009-Q1-K1-H2.pep
RQHGKVPTSGLIMYGCLRHHPKCQPNIFLARIQRLPK

SEQ ID NO: 97085 - protein, 43 aa, Gossypium hirsutum
  Clone ID: LIB3146-009-Q1-K1-H5.pep
RTRGFRLILVDSRIHRLARYYKKTKKLPPVWKYESTTASTLVA

SEQ ID NO: 97086 - protein, 96 aa, Gossypium hirsutum
  Clone ID: LIB3146-009-Q1-K1-H6.pep
PTRPSCFPISHGPSARRLHELFLRQFCDAHTCSGKAKPFPRGGKKQTNLLYMATSILLMMLLPLFYLLYYLYQRDMKQETQVLRRVSQVGRKAKPS

SEQ ID NO: 97087 - protein, 35 aa, Gossypium hirsutum
  Clone ID: LIB3146-010-Q1-K1-A10.pep
IWPNFILALPIQKFWLPFNLITFLASILTKPLNSY

SEQ ID NO: 97088 - protein, 110 aa, Gossypium hirsutum
  Clone ID: LIB3146-010-Q1-K1-A7.pep
DAWVEYLHYDCDPGIVHRDIKPENILLDSDMEPHISDFGSAKLLDESVASEPSMVVAGTVGHIAPENAFRTTWSKEADVYSYGVVLLELITGKRALDPSFMGETDIVGWV

SEQ ID NO: 97089 - protein, 95 aa, Gossypium hirsutum
  Clone ID: LIB3146-010-Q1-K1-A8.pep
NPNQPKTEKSENPTIFSSSLLPSLDTAVIVSTHERTAAYMSRTSPSHSPRTLIQCLLATKSGITSSKRQQKLRQKGGIFERFFIIFGYIKQSKKL

SEQ ID NO: 97090 - protein, 78 aa, Gossypium hirsutum
  Clone ID: LIB3146-010-Q1-K1-B11.pep
QERLKGTQVGGGFFLFVILSKNPNSLLFFFLTSQSDWSSSFQSFWFLFCPLSSLIIISPPNCFHWLFLNSFWPLQHQT

SEQ ID NO: 97091 - protein, 36 aa, Gossypium hirsutum
  Clone ID: LIB3146-010-Q1-K1-B2.pep
NHHNELYFPRFTNLKPIVRTLLSQQNIFTTSFGRVA

SEQ ID NO: 97092 - protein, 114 aa, Gossypium hirsutum
  Clone ID: LIB3146-010-Q1-K1-B4.pep
PRVRKKVLLALQAFTLQLQGCNFNLSTTSEFPRRIGRLSEEGHGLTPCTEGSLAPPFPASTRYKLGRTSETYDWSDLETCNNERSVLSQFQDEHFRLKNKRYTPNARERMYKFG

SEQ ID NO: 97093 - protein, 52 aa, Gossypium hirsutum
  Clone ID: LIB3146-010-Q1-K1-B7.pep
KTFNCHRFRFRPNFVPSLLSPVGVMCCGSCTEELCIIVICRPTRFNSKWLYM

SEQ ID NO: 97094 - protein, 83 aa, Gossypium hirsutum
  Clone ID: LIB3146-010-Q1-K1-C3.pep
ITFYVNYRFFLQCKVDIRYVSLLSKINQMAKQPFVSFSVSRVHLIYLCKAESEFFFLVLKLNYIFLYFIILIVYIFIIFKKLN

SEQ ID NO: 97095 - protein, 110 aa, Gossypium hirsutum
  Clone ID: LIB3146-010-Q1-K1-D6.pep
GGSNTKNLSYSSTSGQSPAQAKRSKPNCQGIHVPRCQVEDCNFDLSSAKDYHRKHRICESHSKSPKVIVRGQERRFCQQCSKFHGLSEFDEKKRSCRRRLSDHNARRRKP

SEQ ID NO: 97096 - protein, 65 aa, Gossypium hirsutum
  Clone ID: LIB3146-010-Q1-K1-E5.pep
ISLTYHAYRLLLKIHCGSSTGLDAESRSSCKSPFKGLRLYWDGMELGTMVAMTVGYRILTYAFLR

SEQ ID NO: 97097 - protein, 56 aa, Gossypium hirsutum
  Clone ID: LIB3146-010-Q1-K1-E6.pep
LNQHLCIVQGLITLFNHGTSREKWDESTHNLTWLGCKASTYTLIFFFFFSGSELGT

SEQ ID NO: 97098 - protein, 110 aa, Gossypium hirsutum
  Clone ID: LIB3146-010-Q1-K1-E8.pep
RKPKPLAAYLFSDDEKIKRKFVQNIYAGGMAINDTILQVTVPTLPFGGVGESGMGSYHGKFSFDAFSHKKAVLYRSFAGDSPTRYPPYTPGKKKQIKALLSGKLLNIMLA

SEQ ID NO: 97099 - protein, 114 aa, Gossypium hirsutum
  Clone ID: LIB3146-010-Q1-K1-F12.pep
HEPRCYFSPNEGLNRYCISKLYNLNKLSRYVVAKSELAGAGTPDASYSLSEVKLSSKVRGVCFYAVTAIAAISLIGFMIVAHPFVLLFDRYRRKAQHFVAKLWAAATVAPFFKI

SEQ ID NO: 97100 - protein, 110 aa, Gossypium hirsutum
  Clone ID: LIB3146-010-Q1-K1-F3.pep
TYLKPKKITYSFLLTCYFFGISPWVKITIYCYDLYSQYYTIYFCFATILCLFLHYLVFVLFLSFSCRWRGGQRWRWEAYPCHFGATMAMACQTSGSEHADKAQGAGPMET

SEQ ID NO: 97101 - protein, 80 aa, Gossypium hirsutum
  Clone ID: LIB3146-010-Q1-K1-G12.pep
ISSREPHSFLGNARTLLRGWVPTSRFPFPQYSSCNISLSRALVSDNMVAACALSATKWNGGSPIARISPNKLILGQVKFG

SEQ ID NO: 97102 - protein, 58 aa, Gossypium hirsutum
  unsure (1)..(58): unsure at all Xaa locations
  Clone ID: LIB3146-010-Q1-K1-G2.pep
RITWLFANQGNRGGADDGYXKITRGEDECGFELDVVTGLPSTKNLDRGGADTGIGEDA

SEQ ID NO: 97103 - protein, 112 aa, Gossypium hirsutum
  Clone ID: LIB3146-010-Q1-K1-G3.pep
AVAGVVTAGAFFLALFAGALIWVYSKKFKHENKLGQSFASEIIKSPKEFTYKELKAATRCFDANRIIGHGAFGTVYKGILPENGDIVAVKRCSHNSQGKNEFLAELLIIGTL

SEQ ID NO: 97104 - protein, 113 aa, Gossypium hirsutum
  unsure (1)..(113): unsure at all Xaa locations
  Clone ID: LIB3146-010-Q1-K1-G4.pep
PNTRVDGKGVFIRPFCVECLEFCFMTFNVGIWSSRVNRNMTKMIGFLLRKQWKRKLFFCWDRKLCTITKFKTLENDEKPLVLKELIKLWDRCLPELPWRKGDYDXINTLLLDD

SEQ ID NO: 97105 - protein, 97 aa, Gossypium hirsutum
  Clone ID: LIB3146-010-Q1-K1-G8.pep
VIKSVASLRSQAAAILVLLTVKAMQTQTGKAQSCSTELTNLNVCAPFVVPGATQTNPSPDCCAALQSVQHDCLCNTLSIASRLPSQCNLPTLTCGNR

SEQ ID NO: 97106 - protein, 98 aa, Gossypium hirsutum
  Clone ID: LIB3146-010-Q1-K1-H1.pep
CRTFCYALWVIKHLSCLEWKPLENGTVRINFDAAFNHHHFRSAVGLVVRNDRGEVLVSKSVVENRIASSFVAEACTCAHAVRLGITMCLDAVEIEGDA

SEQ ID NO: 97107 - protein, 114 aa, Gossypium hirsutum
  Clone ID: LIB3146-010-Q1-K1-H12.pep
PTRPIRVNYKGSMLQGKFPKQIVPADEKPEKVKAVAEVPNPKPDHKPADVPEKQNKAVQEGHPQTTLEKQTGDDSNTDGVAKEAGKVSEKTPDKQEEMEDQRHASNGADHRLME

SEQ ID NO: 97108 - protein, 111 aa, Gossypium hirsutum
  Clone ID: LIB3146-010-Q1-K1-H5.pep
GRSGKSCRLRWCNQLSPQVEHRAFTPEEDETIIRAHARFGNKWATIARLLNGRTDNAIKNHWNSTLKRKCLSVGEESNFITHGGYDGNLGGEGKQQPLKRSVSAGLYMSPG

SEQ ID NO: 97109 - protein, 84 aa, Gossypium hirsutum
  Clone ID: LIB3146-010-Q1-K1-H7.pep
AEIAEEASNQSGGHGRSVSKESGEDSKGSRGRKRVENIQFKGKNTFAVPRNVKPLGWTNKPGTREEEDEKPKSNDEFRKMFMKT

SEQ ID NO: 97110 - protein, 50 aa, Gossypium hirsutum
  Clone ID: LIB3146-010-Q1-K1-H9.pep
MDVENNNNCTNNKNFFLGITTEKYVYHILNNNFSNCQICIISLLSVYCLT

SEQ ID NO: 97111 - protein, 99 aa, Gossypium hirsutum
  Clone ID: LIB3146-011-Q1-K1-A1.pep
VAPGGTGLKINFDAAFNKHRKESCSGLVIRNNKAEVICSKSIINSNIHPPLQQKWWQVSKHWQLEFHLGLREVEIEGDSRPVIRKLQEKLEDRSERTRG

SEQ ID NO: 97112 - protein, 45 aa, Gossypium hirsutum
  Clone ID: LIB3146-011-Q1-K1-A2.pep
GISPWVIRLSSHKNDLLPNNHLVDFLDAFFNVGKLPKKEPLYNRK

SEQ ID NO: 97113 - protein, 79 aa, Gossypium hirsutum
  Clone ID: LIB3146-011-Q1-K1-A3.pep
PNNPRLNWPNWPNLFSALGNPSQGLRRKQKRLFVSPWDCGVIRGQNQTRLFVSRRSSHPPSEPRLQALNQAVVYGQINP

SEQ ID NO: 97114 - protein, 53 aa, Gossypium hirsutum
  Clone ID: LIB3146-011-Q1-K1-A6.pep
KKNSLCVFFFFNKIPLYLKPNLPSLIHNIPRRVPKKGMDSLHGQVAYHQEFYY

SEQ ID NO: 97115 - protein, 85 aa, Gossypium hirsutum
  Clone ID: LIB3146-011-Q1-K1-A9.pep
TAALSWRRTLSPDTPMIHSGTSLTTKKSYVQQMVTCSASGSTQAVNLASGTSVRPTSILVVGSTGTLGRQIVRRALDECYDVRCL

SEQ ID NO: 97116 - protein, 100 aa, Gossypium hirsutum
  Clone ID: LIB3146-011-Q1-K1-B2.pep
FGWGSWQFNIRLTFIMGTAIGWLLVKITKAPQHLRGLILSCCAAGNVGHLPLIVVPAICREKGSPFGAPDICHTYGTAYASLSMAIGAIYLWSVVYNVVR

SEQ ID NO: 97117 - protein, 102 aa, Gossypium hirsutum
  Clone ID: LIB3146-011-Q1-K1-B4.pep
KHLTNQKAVDIVQNHSRSGIARRLVKTALQEAAKKREMRYSDLKKIDRGVRRHFHDDITVIVVFLNSNLVSKASSVKGPNLSVRGGGVTLPPRTLAPCAMPV

SEQ ID NO: 97118 - protein, 85 aa, Gossypium hirsutum
  Clone ID: LIB3146-011-Q1-K1-B5.pep
DHSFAATGSVGSSPLSHSLGSELHRAETVTSDVALINNWEAFYISKDFILNQSHIGGNTIADEKFMSVLVKIMPKLKQLHGKLLD

SEQ ID NO: 97119 - protein, 57 aa, Gossypium hirsutum
  Clone ID: LIB3146-011-Q1-K1-B6.pep
LKKTKTLRPPLKIEIRLPFLCYKRITMDRAITYCKSISLLPSTYLLLTAALLGKTYC

SEQ ID NO: 97120 - protein, 99 aa, Gossypium hirsutum
  Clone ID: LIB3146-011-Q1-K1-B9.pep
RPRVRQLARSHHFTTGPSVLPNTFCPRKKKLKREDHGRTTYRRAEIWVLRGVCALCPRDGGGCFTNELGTGMRSLGQNPTEAERQDMSKEDDAAGNGTI

SEQ ID NO: 97121 - protein, 49 aa, Gossypium hirsutum
  Clone ID: LIB3146-011-Q1-K1-C10.pep
FITNSGLITPHLNHTALSIRCFIYIYHVGLYQTSNGSEQALTRIVLTIV

SEQ ID NO: 97122 - protein, 121 aa, Gossypium hirsutum
  unsure (1)..(121): unsure at all Xaa locations
  Clone ID: LIB3146-011-Q1-K1-C4.pep
GSGIPPLPLVMAEAVWICGTPWYRFKTPQGSPLTIVWRVLLLALKKKKQPYPSHPSLLNDYDNRKVPYTPRFKFLDKAAMLDDNCAVNAEKKXPWLVSTVTHVEEVKMVIKLLPIWSTCIL

SEQ ID NO: 97123 - protein, 49 aa, Gossypium hirsutum
  Clone ID: LIB3146-011-Q1-K1-C6.pep
ISIPLLSVSGSNGMSKKVVSYFSDSDAAYCLAANKPLLLVPLQSDFLSF

SEQ ID NO: 97124 - protein, 77 aa, Gossypium hirsutum
  unsure (1)..(77): unsure at all Xaa locations
  Clone ID: LIB3146-011-Q1-K1-C9.pep
TKHACIVSIEYQWCPFPPPQPPPXPPPFPPPAPPPTPPPKPPPLPYPPPAPPPNPPPFPIPPPTPPPCPPPIPPTRP

SEQ ID NO: 97125 - protein, 120 aa, Gossypium hirsutum
  Clone ID: LIB3146-011-Q1-K1-D10.pep
YRCRICSGATHAYAHAFYSACAGCCNLKTFPVIPRHFPILELSDSNIEEVPDSIEHLVRLIKLCLKNSKVYIVSSNLAKLESLHDLDLSHCPIAGFPKIPRSLTELNLSETQIENVCLCS

SEQ ID NO: 97126 - protein, 60 aa, Gossypium hirsutum
  Clone ID: LIB3146-011-Q1-K1-D2.pep
YKGSKMKKKMTVMMIIIIIPKHCTLHPFFFHSKHNTMTCYHAYLLHHHQHDIHVCMCLAS

SEQ ID NO: 97127 - protein, 70 aa, Gossypium hirsutum
  unsure (1)..(70): unsure at all Xaa locations
  Clone ID: LIB3146-011-Q1-K1-D7.pep
LTTNKFKKATQLFECXISTFTTHKLFPYHTFIFNSRLTNIIWTDRASQQQNVLNAHEISTFIRKIPTLSE

SEQ ID NO: 97128 - protein, 64 aa, Gossypium hirsutum
  Clone ID: LIB3146-011-Q1-K1-D8.pep
FSCHPTNTSVWNTIIIVHRNHWGCIRRKIRSSCKLSRLCREINNSFLKTKQKLFLSIFWSKKQS

SEQ ID NO: 97129 - protein, 62 aa, Gossypium hirsutum
  Clone ID: LIB3146-011-Q1-K1-E1.pep
AKTKNEQAYILQAQQSSPNPKINTAKHKNKTLAASASAPQQHPRRAQRPIAARFGLHARQTL

SEQ ID NO: 97130 - protein, 58 aa, Gossypium hirsutum
  Clone ID: LIB3146-011-Q1-K1-E12.pep
FTRIDVTPELETLRQGMEYGIKEYVLKTNMKLNDEFKLAKKALNNTVGVIMRALIFEL

SEQ ID NO: 97131 - protein, 38 aa, Gossypium hirsutum
  Clone ID: LIB3146-011-Q1-K1-E3.pep
RIIQTALAKIKKQKSIHLVVSVELVFGISDMCSSKTMF

SEQ ID NO: 97132 - protein, 73 aa, Gossypium hirsutum
  Clone ID: LIB3146-011-Q1-K1-E7.pep
NGYVIRQNRPEAHVISQIKKCTGLYFTSPIKQPKHKDHHSKSQKQNPSGICFSAATGYTQRPKPDRKKFRPPR

SEQ ID NO: 97133 - protein, 41 aa, Gossypium hirsutum
  Clone ID: LIB3146-011-Q1-K1-F5.pep
LILGQFECHHNSGLRLSHLQICRKSADCFSSPRALCNLTKD

SEQ ID NO: 97134 - protein, 106 aa, Gossypium hirsutum
  Clone ID: LIB3146-011-Q1-K1-F6.pep
RFETAQNLVEVHHSGVVKGASTLAKSVFTVVEPTVEKCAVSIWQTLNKIPLFPQVASVVVPTAAFFTEKYNQTVATGAEKGYKVASILPVVPTQKIAKVFSVRKSD

SEQ ID NO: 97135 - protein, 40 aa, Gossypium hirsutum
  Clone ID: LIB3146-011-Q1-K1-F9.pep
DHTESFLIDASCLIGGGTLYIIKEVWIPSLKYIITSIVLG

SEQ ID NO: 97136 - protein, 61 aa, Gossypium hirsutum
  Clone ID: LIB3146-011-Q1-K1-G11.pep
YIVLTRPDVAYAVNRVCQFMHAPTNLHMVALKRILRYLRGTLSYGLLFRTSERLSLVGYAD

SEQ ID NO: 97137 - protein, 95 aa, Gossypium hirsutum
  Clone ID: LIB3146-011-Q1-K1-G4.pep
ILASQAVIHSRISISFMAEAYARLQAVNLGIFMGLYTIEIVGDSKAVIKKCQNTGTDKSVIGAIVRDIQSRKDRFQEIEFHFVPKPKNVDAHVIT

SEQ ID NO: 97138 - protein, 68 aa, Gossypium hirsutum
  Clone ID: LIB3146-011-Q1-K1-G8.pep
TVNRSLERMSSFSKLRIHAMNTAVNGSASARRRSRNRGFFFISILGALCAVLWFLIGTVRVLGRSISS

SEQ ID NO: 97139 - protein, 57 aa, Gossypium hirsutum
  Clone ID: LIB3146-011-Q1-K1-H2.pep
HSCALFGDEQTGIPETDEVIRTSFSSLKRLVLEAVAFGSFLWDIEEYVDTVYKLKDN

SEQ ID NO: 97140 - protein, 121 aa, Gossypium hirsutum
  unsure (1)..(121): unsure at all Xaa locations
  Clone ID: LIB3146-011-Q1-K1-H8.pep
ADGLVPLYLCVTLGTTSTTAVDPIELLAGVAKEHGMWVHVDAAYAGSACICPEFRHHLNGVELVDSLSLSPHKWLLSGLDCCCLWVKNPTALVRALSTNPRYLRNXQSEIDSVVDFKDWQV

SEQ ID NO: 97141 - protein, 60 aa, Gossypium hirsutum
  Clone ID: LIB3146-012-Q1-K1-A10.pep
RMISLAGACLLLSIKKTDLLPSRVIHISSMVILLIMPTFQRQTALTITHKCQTCYQNQLL

SEQ ID NO: 97142 - protein, 32 aa, Gossypium hirsutum
  Clone ID: LIB3146-012-Q1-K1-A12.pep
KLLTICFSKPILNHIISMRIKSLTKSSFPSPM

SEQ ID NO: 97143 - protein, 59 aa, Gossypium hirsutum
  Clone ID: LIB3146-012-Q1-K1-A2.pep
SNMWHRGRNMDVINQSGDHNKKGRPFWYDKHVYNPHQCMLKGKGNVNICYLYCRISERV

SEQ ID NO: 97144 - protein, 33 aa, Gossypium hirsutum
  Clone ID: LIB3146-012-Q1-K1-A3.pep
LITCGQTPLIGKCIFQEFYDDVIKNLFRLSMLG

SEQ ID NO: 97145 - protein, 134 aa, Gossypium hirsutum
  Clone ID: LIB3146-012-Q1-K1-A5.pep
HAFEKKKNQNLKKKSSLKNAQSPMKQIRSTPPWLCLIWWPETYKPTFLTDFWSPSSIKHRFKGKTPRTWPKSVEQPRNAYLFSFFDLTRMENGHQQGVRGMWRQAERRWQSQRWRAALVKLKEARVCWLKSFTI

SEQ ID NO: 97146 - protein, 128 aa, Gossypium hirsutum
  unsure (1)..(128): unsure at all Xaa locations
  Clone ID: LIB3146-012-Q1-K1-A8.pep
NKINKGTFITSYKADMPSGWVLSEKRLNSMDRTIIHHQNKMIRXLERLSKLCHDNLVHPIGVVIYEDIALMLHHYLPNGTLAQLLHESSKQSEYQSDWPRTLSIAIGVPEGLAFLHHVAVIHLDISSS

SEQ ID NO: 97147 - protein, 95 aa, Gossypium hirsutum
  Clone ID: LIB3146-012-Q1-K1-B11.pep
PKIIPTSLSMNELFTSNGGGNSSSEVGLMPVIGKAMTSIPISHAAPISYIMQRKPRVDEEPFTVVTLLNSLRSGKYAIHFTAEDLDITALRPMAN

SEQ ID NO: 97148 - protein, 38 aa, Gossypium hirsutum
  Clone ID: LIB3146-012-Q1-K1-B12.pep
VLIIFLPPPLYKRSLIHIKRCFPNHLGLISYPQTVLEI

SEQ ID NO: 97149 - protein, 84 aa, Gossypium hirsutum
  Clone ID: LIB3146-012-Q1-K1-B4.pep
CFQKVLFYKEAPPQFFILFFLVLIFSVFCSFKWLFFCFYFFFLMLFFFFFFFFFFFFFFFFFFFFFFFFFFLGTKTTTFIKYMD

SEQ ID NO: 97150 - protein, 74 aa, Gossypium hirsutum
  Clone ID: LIB3146-012-Q1-K1-B5.pep
RTALGHSQTKLRNNFVNYCVKFEVGFKIVYFASTSINLGGSYQCFLLNWRWLSLSYESQIIYNSWLCKKKKQKG

SEQ ID NO: 97151 - protein, 68 aa, Gossypium hirsutum
  Clone ID: LIB3146-012-Q1-K1-B6.pep
VLVDSVSNAVVDDCTYQVSVRSPGVLLDVCEHCFYVQQSIPIDDLFARLRPLGMQVTSKVILSLLKIK

SEQ ID NO: 97152 - protein, 63 aa, Gossypium hirsutum
  Clone ID: LIB3146-012-Q1-K1-C1.pep
SIKVQQGFSSNTSPCHLPSFTWRSICSARELIVEEIVWRVGSGARINIWNDLWLPGIESWFII

SEQ ID NO: 97153 - protein, 52 aa, Gossypium hirsutum
  Clone ID: LIB3146-012-Q1-K1-C10.pep
SGFLLGRKRLSYIRRLEFESKLIARTELNPKFVFLTFLLLKQIFLYHIFAVL

SEQ ID NO: 97154 - protein, 41 aa, Gossypium hirsutum
  Clone ID: LIB3146-012-Q1-K1-C12.pep
KRIIGGTFIECGASILKNPLQKLQTPDLDCLNPKFCIPYFL

SEQ ID NO: 97155 - protein, 122 aa, Gossypium hirsutum
  unsure (1)..(122): unsure at all Xaa locations
  Clone ID: LIB3146-012-Q1-K1-C5.pep
VNMVPNGLXIPRLRDRVVKIITDYRTETYLRHGCNDILKADCVNLSVKYYNEAKRAVCLSNEEDDARSKRDASRAYQIITPSVRNMEVXSKTRGSGRCCMCFDPFSIQNVSVNVFFCCHAYH

SEQ ID NO: 97156 - protein, 47 aa, Gossypium hirsutum
  Clone ID: LIB3146-012-Q1-K1-C9.pep
PTRSTTRPKKFAINVVYSLVSKNCREPDVVLNVPHTSLLEVGMIYHV

SEQ ID NO: 97157 - protein, 106 aa, Gossypium hirsutum
  Clone ID: LIB3146-012-Q1-K1-D1.pep
THASEKYAFKCHRKSEAGRDIVYPVNAIAFHPVYGTFATGGCDGFVNVWDGNNKKRLYQYSKYPTSVAALSFSRDGRLLAVASSYTFEEGDKAHEPDAIFVRSVNE

SEQ ID NO: 97158 - protein, 73 aa, Gossypium hirsutum
  Clone ID: LIB3146-012-Q1-K1-D11.pep
AHTFYHAAFITVALTYFQGAAEDHAGRLKVFLWGGATGLVIYTYCLCYYNARSNMSSFMQTSIFFGYMDRICY

SEQ ID NO: 97159 - protein, 49 aa, Gossypium hirsutum
  Clone ID: LIB3146-012-Q1-K1-D12.pep
DSERITNLTILDIILHNSTITPDQLINIFYKNYYMLLHIFNTQGLLEIT

SEQ ID NO: 97160 - protein, 71 aa, Gossypium hirsutum
  Clone ID: LIB3146-012-Q1-K1-D3.pep
CTVGPSSPVSDQRQYVGLTANHTHPVVGPCYDGFQRLIEASVLASFLYSRRQARSKHGIRYCLGFFFERVG

SEQ ID NO: 97161 - protein, 72 aa, Gossypium hirsutum
  unsure (1)..(72): unsure at all Xaa locations
  Clone ID: LIB3146-012-Q1-K1-E10.pep
QGARXPGCDPHVTLHVVERPPFYSTVATYIELGDDGLYKGSWFTDNWSDKEHMPNIPCSFRNAKEIMKLHAH

SEQ ID NO: 97162 - protein, 62 aa, Gossypium hirsutum
  Clone ID: LIB3146-012-Q1-K1-E12.pep
MALLMAMVVPSKLTTHYITPNFLTLSLSQPFLDIFSSNTTSHWTALCSHLSIQARLPTKRTW

SEQ ID NO: 97163 - protein, 58 aa, Gossypium hirsutum
  Clone ID: LIB3146-012-Q1-K1-E4.pep
CYCQISGLVVYRSLQAPEVYGHYEWTLCLCQQRVDRPMVSIFIKYEVHIARVHLPSKN

SEQ ID NO: 97164 - protein, 59 aa, Gossypium hirsutum
  Clone ID: LIB3146-012-Q1-K1-E5.pep
HSIKYYMCTPILLPMNSFPLYFTFLSTRLIKLLLNCQIRLRRNEKNANFYGRAYNKSER

SEQ ID NO: 97165 - protein, 33 aa, Gossypium hirsutum
  Clone ID: LIB3146-012-Q1-K1-E9.pep
RPSFFFYILATFFREALYINGVIINTTLCISLI

SEQ ID NO: 97166 - protein, 85 aa, Gossypium hirsutum
  unsure (1)..(85): unsure at all Xaa locations
  Clone ID: LIB3146-012-Q1-K1-F10.pep
PLVLKYASEKLLINWIQPWVAGEPYIVIGCRDYAGRLARTEXLRSKDITHRAKINNFWLGVVLLAFVDEVLCWLYRTGKEYYDYI

SEQ ID NO: 97167 - protein, 57 aa, Gossypium hirsutum
  Clone ID: LIB3146-012-Q1-K1-F11.pep
GKKKFSVLLFSSRGFHERLMNLIHLCEMSCSKFTGQLCPFSLVPLVLLSFLSFPINE

SEQ ID NO: 97168 - protein, 90 aa, Gossypium hirsutum
  Clone ID: LIB3146-012-Q1-K1-F12.pep
RLLQARASYFFFLPFPRRRGNHQPAGAPNARVPRSAGAGSTFVASPPARGNRMLLSCGSLSSWVRRFVACIGGCFGCAQPTPIIAVDEPT

SEQ ID NO: 97169 - protein, 95 aa, Gossypium hirsutum
  Clone ID: LIB3146-012-Q1-K1-F3.pep
PRVRPFTRQFRYLPMSNISRTNPAVGVVTLDSVQHGPNPNFRVYVAGGMSEAPRGGAMYELKLEMYDSTDDTWHVVGFVPTEFAVRLTVWTPNES

SEQ ID NO: 97170 - protein, 80 aa, Gossypium hirsutum
  Clone ID: LIB3146-012-Q1-K1-F5.pep
MYSHETKWLHVIRYPSSAEHKYVANMLLRSCHRRNIVLEPSLSHHVCYPYPMIPAYYSVTTVHFWYQLSFIQRFYLVFLC

SEQ ID NO: 97171 - protein, 51 aa, Gossypium hirsutum
  Clone ID: LIB3146-012-Q1-K1-F8.pep
MLSLNGSHSDYAPDPYQSVRMMEIGYEWRNGPSITCPFMLHIVSLIESSRL

SEQ ID NO: 97172 - protein, 62 aa, Gossypium hirsutum
  Clone ID: LIB3146-012-Q1-K1-F9.pep
KCNITSIKHQPVCCSLKKEDSHYQLLLINRRTRATANYIYKPNKYRKLQADHRGSSRIDIKK

SEQ ID NO: 97173 - protein, 72 aa, Gossypium hirsutum
  Clone ID: LIB3146-012-Q1-K1-G10.pep
VFSQSRTSSNLTPSLLTALWAVASMAVLFKMPVVTGLYVGLMMLALASSTEYHELFQPGWANNHFIYERKLL

SEQ ID NO: 97174 - protein, 125 aa, Gossypium hirsutum
  Clone ID: LIB3146-012-Q1-K1-G6.pep
KICGLMDVKKLTMEASMRAAQNDRLPLRVVVQVLFFEQVKAATRAQSRNSDARATCVSKMSPDEEWDKTMGEDCRSLKKKMSEVDTNEDGGQKNSKMGKKKSRNSKSGVQLLPSRSRRIFHKLWV

SEQ ID NO: 97175 - protein, 98 aa, Gossypium hirsutum
  Clone ID: LIB3146-012-Q1-K1-G7.pep
PSHVIKRSRRVFIYALCPRGSLRHNYCSHIFKQCLTSLAAWQMLTLSWVTINSRAKFRDWLIRVLLQLNKEQRRLLGSPPWLFWHYKKKIVHDLERVG

SEQ ID NO: 97176 - protein, 81 aa, Gossypium hirsutum
  Clone ID: LIB3146-012-Q1-K1-H3.pep
NLKLTPDHYCEMGEGITTGCEWIYGSGCLPPRGPYGSGMLWGYIIPIDYGILKLVQNCISIIRLVYHYIHGISCLSGHNNY

SEQ ID NO: 97177 - protein, 71 aa, Gossypium hirsutum
  Clone ID: LIB3146-012-Q1-K1-H5.pep
FKFWGPKKKKLGCKGGGIKFDSLKRALSILKQTGWGKGWVNGWGKGWEKGRGFFFFLCLFYVFIYCFCPRV

SEQ ID NO: 97178 - protein, 102 aa, Gossypium hirsutum
  Clone ID: LIB3146-012-Q1-K1-H6.pep
RLCLFLIFVVVNLRLVCLTTLFIKNESKKVNQYTYLFRGPAGTHFRHHQSRAGRGVSSFFLSVPRIRRLSLQARRERRAEKPVSRNSGHWPWRRRWSLVLKG

SEQ ID NO: 97179 - protein, 137 aa, Gossypium hirsutum
  unsure (1)..(137): unsure at all Xaa locations
  Clone ID: LIB3146-012-Q1-K1-H8.pep
TTASLSLTILMLFTAVNTNKGGIKYGESRFTVLYRGIPLGKAXVSGFYQEAHSTRNVEATIAADRANLMQADAGDLIRDACIYDRVQLRVLSDDGAXIRVLDFDSSVVHVSVDCAIVISPRQHSLTYKQCGYAGLNG

SEQ ID NO: 97180 - protein, 112 aa, Gossypium hirsutum
  unsure (1)..(112): unsure at all Xaa locations
  Clone ID: LIB3146-012-Q1-K1-H9.pep
EQLESSMVFWENAIHDFGRXNVFDESTSCSESPSISSIQLSIETQPKSPQIDMNSEPSTVVTPEPVTSMEQPAPSPAGVNDGFWEQLLTENPRLTDILEVLAERKDPDTRKD

SEQ ID NO: 97181 - protein, 39 aa, Gossypium hirsutum
  Clone ID: LIB3146-013-Q1-K1-A6.pep
LLHSLMPHYMRYDSPYSMLLRAGKSLPLTEYAASMLSVL

SEQ ID NO: 97182 - protein, 115 aa, Gossypium hirsutum
  Clone ID: LIB3146-013-Q1-K1-A9.pep
PTRTPTRPPTRPAKIKISMEYPLRPPLFTVNLYSPGESSSKNDYSGWQNEVRAMEAEVNLHMLKMVPPDDENYTLSHQVYCLAMLFDYYMDEATPSSEKRKSSSEIDVGLCKPVS

SEQ ID NO: 97183 - protein, 115 aa, Gossypium hirsutum
  Clone ID: LIB3146-013-Q1-K1-B1.pep
NGGPTARPRKSTRAASVSAPTQRLLVPMLSDARFIEEYIKTNKRRLQNMHALFEAGLKGLNIRCAHSNAGLSLRADMSKLISSYSEKGEHELRDMLLNAGKNNVTPCSACHCIEP

SEQ ID NO: 97184 - protein, 46 aa, Gossypium hirsutum
  Clone ID: LIB3146-013-Q1-K1-B11.pep
LNIPKKSGRTYSEILCVQAVVPFNMPGRSNQTPRRKSQSSTSISHL

SEQ ID NO: 97185 - protein, 73 aa, Gossypium hirsutum
  Clone ID: LIB3146-013-Q1-K1-B12.pep
SWHYLLSMVDLQHRTLAVITRCPRCVLGAHTMNHLFRDCAGRYSSYPQIKVISFDSHYGPSTPTGPCTNGSSR

SEQ ID NO: 97186 - protein, 81 aa, Gossypium hirsutum
  Clone ID: LIB3146-013-Q1-K1-B8.pep
PPEYGLLAFVSSCYLVSCIGFFCYRSQYLFSSQNMSGWSAAVLPLRPLCSSEWCSASASSSCVVVMGRWSSNRPRAVGRVG

SEQ ID NO: 97187 - protein, 72 aa, Gossypium hirsutum
  unsure (1)..(72): unsure at all Xaa locations
  Clone ID: LIB3146-013-Q1-K1-C11.pep
SDILLTFSPRTSSAEVLIYLCIRAVFAFSLVTPIKENHNVTQIIYFSYSVSKSEIGSLRXLHFMGGIALTLC

SEQ ID NO: 97188 - protein, 74 aa, Gossypium hirsutum
  unsure (1)..(74): unsure at all Xaa locations
  Clone ID: LIB3146-013-Q1-K1-C6.pep
LCSFSFPAFPXSSXLVXLXSALVXFLVCLCXCVXCPCPVXSXVLCFASSVFCPSVVLXWXFXCSPVAXPSRGFX

SEQ ID NO: 97189 - protein, 75 aa, Gossypium hirsutum
  Clone ID: LIB3146-013-Q1-K1-C7.pep
DFWFYIRVGETNRSNRPLFVFVRPPYTAATNVGGHKPWWLDDDHIGRRRREKGEKRGKLLVFFARVVGRVGVRVG

SEQ ID NO: 97190 - protein, 61 aa, Gossypium hirsutum
  Clone ID: LIB3146-013-Q1-K1-D1.pep
PTRPTTRAARCPFEQVTATLLNFVRLFRKAHEENMKQVDLEKKKAEKEKAKGINLTKKGAN

SEQ ID NO: 97191 - protein, 42 aa, Gossypium hirsutum
  Clone ID: LIB3146-013-Q1-K1-D11.pep
YQLNPSCLPRNPMFKTVVSYLTEPKDWSYTTTSSLHIIEVVG

SEQ ID NO: 97192 - protein, 44 aa, Gossypium hirsutum
  Clone ID: LIB3146-013-Q1-K1-D2.pep
YIHSFHLELRCGNKGKHEAKLALHNNFLSTHKSKQYIDNDGAYY

SEQ ID NO: 97193 - protein, 41 aa, Gossypium hirsutum
  unsure (1)..(41): unsure at all Xaa locations
  Clone ID: LIB3146-013-Q1-K1-D4.pep
LPRLCPSALVVFVWXRXGFGPRALLALFXXXAWPSSLLVAS

SEQ ID NO: 97194 - protein, 114 aa, Gossypium hirsutum
  Clone ID: LIB3146-013-Q1-K1-D7.pep
GATHAYALFNMMTFKVMTTFMSPPPEATFLAFHPQDNNIIAIGMEDSTIQIYNVRVDEVKTKLKGHQNRITGLAFSQTLNSLVSSGADAQLCVWSIDGWEKKKSKFIQAPAGRQ

SEQ ID NO: 97195 - protein, 77 aa, Gossypium hirsutum
  unsure (1)..(77): unsure at all Xaa locations
  Clone ID: LIB3146-013-Q1-K1-E11.pep
VFFFXSXFFXPQXXXSHNCFIFFLFLGVVGLGGLYSSSTASLPFFYALMHYNTAIPLWKLHLYIENFNVKFSIPLFL

SEQ ID NO: 97196 - protein, 57 aa, Gossypium hirsutum
  Clone ID: LIB3146-013-Q1-K1-E8.pep
AVSPPKFFCPVFGSLRNKHSSRSYSVSTLSIQSFKPPTVVLPVLLVLYKASVNPRVR

SEQ ID NO: 97197 - protein, 45 aa, Gossypium hirsutum
  Clone ID: LIB3146-013-Q1-K1-F10.pep
IPFFVRQFQYRTDRGSPHFPHSTWTWAKRMKLAAPVVVVASYHVN

SEQ ID NO: 97198 - protein, 58 aa, Gossypium hirsutum
  unsure (1)..(58): unsure at all Xaa locations
  Clone ID: LIB3146-013-Q1-K1-F2.pep
FFPSRASFXXVRSPGPVSSLSAVXAVGSXCLSXXVCLWARVXVPLXCLWVPGLCCFSX

SEQ ID NO: 97199 - protein, 62 aa, Gossypium hirsutum
  unsure (1)..(62): unsure at all Xaa locations
  Clone ID: LIB3146-013-Q1-K1-F6.pep
LVLVLASXGGXXVSXFVLGLXFAVXAAAIVSFXFASWXGXXGAGRSRARGRRRGSPRAFRSG

SEQ ID NO: 97200 - protein, 104 aa, Gossypium hirsutum
  Clone ID: LIB3146-013-Q1-K1-F9.pep
TRQRPDLIHDILTTLRRNIDTPVTCKIRLLKTSQDTVELARRIEKTGVSALAVHGRQVADRPRDPAKWNEIADVVSALTIPAIANGDVFEYDDIQRIKGATSAS

SEQ ID NO: 97201 - protein, 49 aa, Gossypium hirsutum
  Clone ID: LIB3146-013-Q1-K1-G10.pep
WTDVSSICCIISAGEAVCTTFLFVLELNQTSMFMQPKQMAALCCCRDLT

SEQ ID NO: 97202 - protein, 67 aa, Gossypium hirsutum
  Clone ID: LIB3146-013-Q1-K1-G3.pep
KLDSRGCDEYLLFGRSKSNHADSHWQSRRMKIFEYGEGNYPGIFQSEAPIIYYRSLTWILVVILYMP

SEQ ID NO: 97203 - protein, 44 aa, Gossypium hirsutum
  unsure (1)..(44): unsure at all Xaa locations
  Clone ID: LIB3146-013-Q1-K1-G4.pep
RKGDXRTRRDGETIKGVLGISNQICGGLLTNIFIFKNEANDEYA

SEQ ID NO: 97204 - protein, 62 aa, Gossypium hirsutum
  unsure (1)..(62): unsure at all Xaa locations
  Clone ID: LIB3146-013-Q1-K1-G7.pep
GATHANRRGRARPGLTKKNKERRXKXAXAXRTGGKGSKRRKKKAGHKTTTTDDKRGQSTXKR

SEQ ID NO: 97205 - protein, 93 aa, Gossypium hirsutum
  unsure (1)..(93): unsure at all Xaa locations
  Clone ID: LIB3146-013-Q1-K1-H1.pep
VILASSVVQDLRTVVILRRFEIYVCACCVLPGLXFXFSCLLVPVLAPGXLSPFLXCWFLARGCCPXRRNVCSSGCLCTWSXRTRGSPRAFRSV

SEQ ID NO: 97206 - protein, 40 aa, Gossypium hirsutum
  Clone ID: LIB3146-013-Q1-K1-H3.pep
HINSKHKIRHIENRWNIIHQHIWLSVFLSHYYYLFISLFT

SEQ ID NO: 97207 - protein, 88 aa, Gossypium hirsutum
  unsure (1)..(88): unsure at all Xaa locations
  Clone ID: LIB3146-014-Q1-K1-A1.pep
IENLLASEETILSMRDGTVLVIMILSTHSIKWTLTPQISNIVIGSDQGTYIVNFGGKLGNKLLNECSYXGKTSXXLIKGQHKVLFKIL

SEQ ID NO: 97208 - protein, 50 aa, Gossypium hirsutum
  Clone ID: LIB3146-014-Q1-K1-A10.pep
MGPFYRETHHNRGIRSKFNTLYTAGQAVVLFLVTCSTSNAIHNNKRSPSL

SEQ ID NO: 97209 - protein, 77 aa, Gossypium hirsutum
  Clone ID: LIB3146-014-Q1-K1-A12.pep
KMENPEANHLPEVDSLPDGFVESPTDSLAPKTPILEQEKPLQSDYKEEDLVATEFGASKGQKQRTFPFPLSEGDRFN

SEQ ID NO: 97210 - protein, 110 aa, Gossypium hirsutum
  Clone ID: LIB3146-014-Q1-K1-A3.pep
RTGATQPVRLHPAGDTPSSCRLFDAIVSHCVPVIVSDKIELPYEDEIDYSEFSIFFSMKEALEPGYLVNQLRQFPKDRWVEMWKQLKNISHHFEFQYPPKKEDGVNMLWR

SEQ ID NO: 97211 - protein, 47 aa, Gossypium hirsutum
  Clone ID: LIB3146-014-Q1-K1-A8.pep
FTPNLCSTRKKKPDHYLYSIHKLKLMVHFLITQKCLFINQCTTSILQ

SEQ ID NO: 97212 - protein, 65 aa, Gossypium hirsutum
  Clone ID: LIB3146-014-Q1-K1-B1.pep
PSRPPTRPPTRPHTCLLSGVYIGNVKVLVRLQFGIDGPKDVAMKLAVRSEDEAVSDAIHEIVASG

SEQ ID NO: 97213 - protein, 79 aa, Gossypium hirsutum
  unsure (1)..(79): unsure at all Xaa locations
  Clone ID: LIB3146-014-Q1-K1-B6.pep
HYCILNTDDSKTXYSSCKIASQHSDLSGRNSVTAGWFSCLTGQNRNMPFLIQISNRNFHRSCTPAYFIQQQLNFPSLFA

SEQ ID NO: 97214 - protein, 123 aa, Gossypium hirsutum
  unsure (1)..(123): unsure at all Xaa locations
  Clone ID: LIB3146-014-Q1-K1-B8.pep
CFNQLSKLLQSDSKAITALRRNPYLMVCNFDTYVLPNIKTLIDNGVPESNIVTMFNYHPWSFVMLPDRFKEIVKDVKEMGFNPLMVKFLHAVILFRKVSKPAMEKXFDVYKKWGWSDDEIWEL

SEQ ID NO: 97215 - protein, 70 aa, Gossypium hirsutum
  Clone ID: LIB3146-014-Q1-K1-B9.pep
PTRPPTRPITSYLALAIFKHSKKLSEVREQTEGIAMERRLPMPLLGAALAIGINLAAKWVGYRHLTWMIV

SEQ ID NO: 97216 - protein, 132 aa, Gossypium hirsutum
  unsure (1)..(132): unsure at all Xaa locations
  Clone ID: LIB3146-014-Q1-K1-C10.pep
MEAVTALLGGRIHVGVLLQEKKVRDDSRTLLQTGISSEDNLDALGFTLEPGPVIGPRPIFSEEPPLQLPRGSAPQNLTSSLVVTPALDTGXIPAATPDPPLLTNSAKPVDSNYEHVSSQTDMLTDQNLSESR

SEQ ID NO: 97217 - protein, 115 aa, Gossypium hirsutum
  Clone ID: LIB3146-014-Q1-K1-C2.pep
WPLVQRDPARRNFLLTSLNYSLTSAIDVLESIDAHGGVRNLLKQKQHVEFIQRWHLFRYKLDKAVSALSHFDFEMAFYYIKSSDHDLYAIHDLVYTSSQEIEASLVCFKDPPFPW

SEQ ID NO: 97218 - protein, 39 aa, Gossypium hirsutum
  Clone ID: LIB3146-014-Q1-K1-C4.pep
VHYHEAGLLPVIIMGTIVFDLSCVCFGQGRIRRFRGVRF

SEQ ID NO: 97219 - protein, 66 aa, Gossypium hirsutum
  unsure (1)..(66): unsure at all Xaa locations
  Clone ID: LIB3146-014-Q1-K1-C5.pep
FLVLHIYIYISYRKRSSXEYAEPSLKHFCMMTSVLPELAHRSYKQWVLGGSIKESPLICNYISQLY

SEQ ID NO: 97220 - protein, 63 aa, Gossypium hirsutum
  Clone ID: LIB3146-014-Q1-K1-D2.pep
NYSRDNVEAKPSLHFLLLMRNYQEANAARRECSANLNLIFLQALSYLPISWLRNQPAASAMPK

SEQ ID NO: 97221 - protein, 90 aa, Gossypium hirsutum
  Clone ID: LIB3146-014-Q1-K1-D3.pep
LRLKILVLGLGFLYILDLFKEKKKKNPFYILFHGFYSLFSLSVCSLCCCCVSFSFCRAWLVLVEQVAGSQGHGAVRGLVAQVGVGLVRVC

SEQ ID NO: 97222 - protein, 66 aa, Gossypium hirsutum
  Clone ID: LIB3146-014-Q1-K1-D8.pep
RTRGRTRGRTRGRTRGFLQQNKNLINPSLCQAFNSATAAAIQGRFMASVIPVSDRDGDGMKRDEAR

SEQ ID NO: 97223 - protein, 57 aa, Gossypium hirsutum
  Clone ID: LIB3146-014-Q1-K1-E10.pep
QRARDRLKRIKAEPYFKKGKLNLVIATCFKGKSTVVAEETKVNLTASFLCKRFRLLN

SEQ ID NO: 97224 - protein, 143 aa, Gossypium hirsutum
  Clone ID: LIB3146-014-Q1-K1-E4.pep
FSAREKRKDFFGSRPKMKYDGKPPLAAKSPIRLRPRRSLPSNSASLQTPPGSLTRSQKPILTWGIEESEIRPEYRSISCELRVLARTVRDELGNGETEAAGLGKKTVLSVTNSCPVVERGRFYEEYSARRNERLKTKKGETQN

SEQ ID NO: 97225 - protein, 68 aa, Gossypium hirsutum
  Clone ID: LIB3146-014-Q1-K1-E5.pep
SSVSQFVVHYHSITYPELLPLRLLPSSSLLLQFSKYSQALSVVLNDALTIEIVLNLTGSNLPEGWPNA

SEQ ID NO: 97226 - protein, 45 aa, Gossypium hirsutum
  Clone ID: LIB3146-014-Q1-K1-E6.pep
ISNFYTGKTTPFCLPFSFPAHNWPNPQGPGLCQMEFFGREELVLI

SEQ ID NO: 97227 - protein, 113 aa, Gossypium hirsutum
  unsure (1)..(113): unsure at all Xaa locations
  Clone ID: LIB3146-014-Q1-K1-E9.pep
EELXRDFSIRSAYKLLQYNSLDPNSYLLQPETKNFYRKLWDLQMPSKIAITIWRISWNYFLLLANLRCKKVTANDRCPRCSLGEEDSNHIFRQCPTISEIRPSINLSWTGRVG

SEQ ID NO: 97228 - protein, 50 aa, Gossypium hirsutum
  Clone ID: LIB3146-014-Q1-K1-F10.pep
ISTQPSSVLASNYTSSSTIRVTTPTATVLPNVLRNTLTSALTFREHFNAK

SEQ ID NO: 97229 - protein, 79 aa, Gossypium hirsutum
  Clone ID: LIB3146-014-Q1-K1-F3.pep
SPRVRVKGFKKLKSAGLPVPWLNGERKFIQRSWLCMTLFVHDFISCIIDKDINVSRFNAKEVYFKVLSINLLLLSTSFP

SEQ ID NO: 97230 - protein, 130 aa, Gossypium hirsutum
  unsure (1)..(130): unsure at all Xaa locations
  Clone ID: LIB3146-014-Q1-K1-F6.pep
RGVGSGEKPAVPTVTSVRGSPAAXLLKPALEFVSPQPVSGADILAPAVRDSVVISGGPSWEVQMGRKDSLGASKEAATNNIPGPNSTVPMLVAKIQNVGLSFNDMIALSGAHTLXMARCSTFSSRLQGSN

SEQ ID NO: 97231 - protein, 76 aa, Gossypium hirsutum
  unsure (1)..(76): unsure at all Xaa locations
  Clone ID: LIB3146-014-Q1-K1-F8.pep
HNSRGTGGRVGGGGGGGGGGGRSGGTDLKRYECGEPGHFARECQTPGCSGXRHKRQPRYRKNPNYRLRSYNAHGLS

SEQ ID NO: 97232 - protein, 133 aa, Gossypium hirsutum
  Clone ID: LIB3146-014-Q1-K1-G11.pep
KGHLANHPLPPKTTHHQLSNRTDSASSSSSSSGDDEQEKSRETLLEDKSLVYGLRENPKKSFRFADPEFSFAGDSASVVQDRESETESRNPTRRRSKRKPKVGTANATTATDEIKKPKLLTSFPSLIDSPAEP

SEQ ID NO: 97233 - protein, 133 aa, Gossypium hirsutum
  Clone ID: LIB3146-014-Q1-K1-G12.pep
PRVRPRVRKGLLQVIEHQPGFSYLDDPMNPLYTLLPKLRQVLVERALKDCKGDENGFSIFKRIPVFIEELKERLEEELPKARTKFGNGEFGIANKIEKCRSYPIYGFVRTEIGTQLLIGEKRVSPGEDIEKIY

SEQ ID NO: 97234 - protein, 50 aa, Gossypium hirsutum
  Clone ID: LIB3146-014-Q1-K1-G5.pep
GKTSLPNAVLYQRRVDAKSKFKTSWSQVQNLYNRHERDGREEAPTGPTRP

SEQ ID NO: 97235 - protein, 50 aa, Gossypium hirsutum
  Clone ID: LIB3146-014-Q1-K1-G6.pep
LQNKQVLLAVQYRKQKKKEKEKRRDFLTVSFMMKFFILHFIILYDTIYIQ

SEQ ID NO: 97236 - protein, 117 aa, Gossypium hirsutum
  Clone ID: LIB3146-014-Q1-K1-G8.pep
LVDAAVRSSSSDKTAVVALAGGVGTLDEMFEILALIQLERIGSELPVPFIVMNYDSFYAKLLDFLDDCEDWGTVSKGEVSSLWKICNTNSDALVYLAEFYDLPFSDEHKHGTEARSA

SEQ ID NO: 97237 - protein, 63 aa, Gossypium hirsutum
  unsure (1)..(63): unsure at all Xaa locations
  Clone ID: LIB3146-014-Q1-K1-H2.pep
CDELSAQIPFQFLIREAISFSSPNIYDIVSYLFIILINVIPFVNKMDPFFVKSNFASXXKXXX

SEQ ID NO: 97238 - protein, 91 aa, Gossypium hirsutum
  Clone ID: LIB3146-014-Q1-K1-H4.pep
LRCKIPFEVCNFPVTETRFHPLPPFAWLKEGKISRMCGSNMLLGFRGSISSCFRGTTIRDKGKLEQAEEKMTFQEINYGSFSIIIPCFSKQ

SEQ ID NO: 97239 - protein, 97 aa, Gossypium hirsutum
  Clone ID: LIB3146-014-Q1-K1-H9.pep
KTLVSIKDVKAAFIGHDHTGDFCGNLEGIWFRYGGGFGYHGYGRIVLARRARVILPELMKGDNEWMVVERIKTWERIDDENLIKIDEHVLCELSPSI

SEQ ID NO: 97240 - protein, 51 aa, Gossypium hirsutum
  Clone ID: LIB3146-015-Q1-K1-A10.pep
SMQNGSPLWEYASNLILTQPLIRIFFQIWDGDCSQKCARAGECVPLNSPLQ

SEQ ID NO: 97241 - protein, 58 aa, Gossypium hirsutum
  Clone ID: LIB3146-015-Q1-K1-A12.pep
TFFHVFFFLKPHNGIHSINRKLKGLLFILARHIFIFKMQPATRTIPYSYPFTIICNES

SEQ ID NO: 97242 - protein, 99 aa, Gossypium hirsutum
  Clone ID: LIB3146-015-Q1-K1-A4.pep
KPKHPFVIFLVTNIRNQKQKRKFRRLTSIFFPLLSRSLYLFFYFILFFYLLTYFKTKKRIKEEEETNPISRGPDHRLRWKSWVASRRHDDGGDDEFYKP

SEQ ID NO: 97243 - protein, 52 aa, Gossypium hirsutum
  Clone ID: LIB3146-015-Q1-K1-A6.pep
KLYIISIHQHSTSKSRRGHFHSYHNIMTFIHTSTTFYLFRSSYQVSHIHYII

SEQ ID NO: 97244 - protein, 95 aa, Gossypium hirsutum
  Clone ID: LIB3146-015-Q1-K1-A8.pep
HASGSGLKKLIFLVEGDPGTSEAAESIKTACFTTEILEGFDVQRTSSLHDTLRKYACLTRAIAQYYKLHLPEGHSKLSGVCPPFNEFIIRCQEAG

SEQ ID NO: 97245 - protein, 73 aa, Gossypium hirsutum
  Clone ID: LIB3146-015-Q1-K1-B12.pep
RSNVLYWTIFFYDGDQRKRCDCFGNGLHFEHIKGTSLRLTTIIRPLCVFNRPHHVVALIRSPDNLFKVFYISR

SEQ ID NO: 97246 - protein, 91 aa, Gossypium hirsutum
  Clone ID: LIB3146-015-Q1-K1-B2.pep
EVREFCFADSKGIKNSKSKKKNRRRKDQQKTTSANEAIKNHNKEPNGLNQVCHSAEVGQKVRAGVGATSNLHDVEDNIFDNKNELDDGDID

SEQ ID NO: 97247 - protein, 103 aa, Gossypium hirsutum
  Clone ID: LIB3146-015-Q1-K1-B7.pep
LRELGSGTFGTVYHGKWRGSDVVIKRIKKSCFTSRSSEHERLTNELWREAYILSKLYHSNAVALYGVAQDGTGGTMATCTHFMCYGSLKHVLLSKDWQLDRMK

SEQ ID NO: 97248 - protein, 105 aa, Gossypium hirsutum
  unsure (1)..(105): unsure at all Xaa locations
  Clone ID: LIB3146-015-Q1-K1-B8.pep
AGGRLIEQTAIERHDEEDHAANILKELVLVINYXPDMRDGYGDIKPENIHDTVTEHMKLAHLVLTDMMSNVHNWTCRVGKAAYVCLNVLTGHYTEKVDIWSDGVL

SEQ ID NO: 97249 - protein, 58 aa, Gossypium hirsutum
  Clone ID: LIB3146-015-Q1-K1-C6.pep
QLECSFHAANTLYVDPFDVAHVHMLEQLRPWVPYPSCTTILGALISLRPCHRWSRVCI

SEQ ID NO: 97250 - protein, 100 aa, Gossypium hirsutum
  unsure (1)..(100): unsure at all Xaa locations
  Clone ID: LIB3146-015-Q1-K1-D11.pep
KNPTPFDVIFKMGAYKVFSELXPHVQIVNYTRNQAILEALEDSDRIHMEDYDIGLRAQWAYCMHELPMRSKGVRTSLTMTAHVFIXTYHTIELMIIRENL

SEQ ID NO: 97251 - protein, 143 aa, Gossypium hirsutum
  Clone ID: LIB3146-015-Q1-K1-D2.pep
HAFEDAWGRDSATSLAPGFRFHPTDEELVRYYLKRKILNRPSFDAISVIDIYRSEPWDLPDKSKLKSRDLEWYFFSALDKKYGNGSRTNRATERGYWKTTGKDRAIRFKERVVGMKKTLVYHKGRAPRGERTNWVMHEYRLTD

SEQ ID NO: 97252 - protein, 48 aa, Gossypium hirsutum
  Clone ID: LIB3146-015-Q1-K1-D5.pep
SSAGSCSIVYSCSYSASVLCETSLALDDPSVVTWCIQSLNTAKKPRAR

SEQ ID NO: 97253 - protein, 44 aa, Gossypium hirsutum
  Clone ID: LIB3146-015-Q1-K1-E11.pep
PTRSVKGCLNITTRFSVDSEKSVHAKTQASQSVEEIIVEDSDTA

SEQ ID NO: 97254 - protein, 72 aa, Gossypium hirsutum
  unsure (1)..(72): unsure at all Xaa locations
  Clone ID: LIB3146-015-Q1-K1-E12.pep
CYNDCSQIDAFLRSDQNRCASKLLSAYTEGDVEEIKRVXIKLARKLPTGDVAELKEEAAKGEEEALDENDLT

SEQ ID NO: 97255 - protein, 49 aa, Gossypium hirsutum
  Clone ID: LIB3146-015-Q1-K1-E6.pep
LWYTKSCIYSILVGSMRLRQIYRYTDCLPYSWRHRSVGLFHAIKEFPRN

SEQ ID NO: 97256 - protein, 66 aa, Gossypium hirsutum
  unsure (1)..(66): unsure at all Xaa locations
  Clone ID: LIB3146-015-Q1-K1-E8.pep
ICIFYRPYWRCFFPNTHAIIYVVDASDTDXIGIAKDEFHAILERDPWPQVSDNAKDLVKKMLNTDP

SEQ ID NO: 97257 - protein, 46 aa, Gossypium hirsutum
  unsure (1)..(46): unsure at all Xaa locations
  Clone ID: LIB3146-015-Q1-K1-F2.pep
MLENAMSTFMIQGAWRNRDPAXLSPIFGISXTTMKLFNFICLRVFY

SEQ ID NO: 97258 - protein, 66 aa, Gossypium hirsutum
  Clone ID: LIB3146-015-Q1-K1-F5.pep
NSFNLHDVFFPLFSTTKSVEISRAHFSKKLNEIGLRLSDIQSPVKRRRTFIVRAPCNISLNVPSQC

SEQ ID NO: 97259 - protein, 96 aa, Gossypium hirsutum
  unsure (1)..(96): unsure at all Xaa locations
  Clone ID: LIB3146-015-Q1-K1-F9.pep
GICLEHGLTTXRLESYTKHRADEAKHWVRDVTVRAQIGQFVNLREVLGAXSMNNVTRMLLWRQXYGPYIVGPRYNMEVMHITHEXFWLLRVIYSGD

SEQ ID NO: 97260 - protein, 30 aa, Gossypium hirsutum
  Clone ID: LIB3146-015-Q1-K1-G12.pep
ESNKLTNKAKGVYKVLDLMEFHRLIKPMRA

SEQ ID NO: 97261 - protein, 122 aa, Gossypium hirsutum
  Clone ID: LIB3146-015-Q1-K1-G5.pep
SKAGNVLFYGWPELLGKRTNIGSKRMGELDPKALHDTSESRFPSDEAEIQATTLCSSWQVNLKNPDWHSFKVIVRGGNTKEILNEEDEILTHLTLEWGEEIYNAVVTALKELNEYNPKGEIC

SEQ ID NO: 97262 - protein, 36 aa, Gossypium hirsutum
  Clone ID: LIB3146-015-Q1-K1-G7.pep
SHTIIPLATMFLVSCNLILSHVFLHINFQCKLKLNI

SEQ ID NO: 97263 - protein, 60 aa, Gossypium hirsutum
  Clone ID: LIB3146-015-Q1-K1-G8.pep
MDGGNFFLILIENSPNRHVTSPKRKTGFFKKAKDLTVFCDPGVKIFMFSTTGNLHEFITP

SEQ ID NO: 97264 - protein, 104 aa, Gossypium hirsutum
  unsure (1)..(104): unsure at all Xaa locations
  Clone ID: LIB3146-015-Q1-K1-H10.pep
RPRVLPMHHFLFMRGKLFIRGTVDYPDSLTPDQCKALEAVLSTRHRXQLTDMELVECEETTMHDVYIDEEMRRKQAQAQHEAYDEDEDMHGGAHRVSMRSPMIK

SEQ ID NO: 97265 - protein, 118 aa, Gossypium hirsutum
  unsure (1)..(118): unsure at all Xaa locations
  Clone ID: LIB3146-015-Q1-K1-H12.pep
LIKRCKGRVFALQDEPEVCTVWLPLDDAPGLAMAQAFGDYCLKEYRVIFMPEFFHRLLTXNDQFFDLASDGVCDVXINEDVVVIASSASSRTSLARMLCLXSALEWKLKYTTXKMDDC

SEQ ID NO: 97266 - protein, 56 aa, Gossypium hirsutum
  Clone ID: LIB3146-015-Q1-K1-H4.pep
NVCFLKMFFVIGELKPPSTDINTYPTQKFILLQKESTCKPLPQNITQKRSYYRSYM

SEQ ID NO: 97267 - protein, 27 aa, Gossypium hirsutum
  Clone ID: LIB3146-015-Q1-K1-H5.pep
ILPYFFFIILKYPIEGLFLKQKSLSSN

SEQ ID NO: 97268 - protein, 86 aa, Gossypium hirsutum
  unsure (1)..(86): unsure at all Xaa locations
  Clone ID: LIB3146-015-Q1-K1-H6.pep
SAIGAGYIILPWWAGXQALLGTLTPDIAVLTLXYRINGLGVAIVNDYKSSEGDKALGLQALHRASGAETAKWISVGAIDIPQMSIR

SEQ ID NO: 97269 - protein, 79 aa, Gossypium hirsutum
  Clone ID: LIB3146-016-Q1-K1-A1.pep
NFFIKKNKSIGKLIFTNNPNNFIINLEVVDFSNYPTLHKLKIYLLKYLKSKTLNLNEFIYGIYIQKEKWGREGGGSKQA

SEQ ID NO: 97270 - protein, 58 aa, Gossypium hirsutum
  Clone ID: LIB3146-016-Q1-K1-A11.pep
KNSFLLLIISCKMTNYKVKASCTFASTNIPISAYAFYKIFIHGKKLLLPISESRSHGS

SEQ ID NO: 97271 - protein, 70 aa, Gossypium hirsutum
  unsure (1)..(70): unsure at all Xaa locations
  Clone ID: LIB3146-016-Q1-K1-A2.pep
REKMFIFAERVGWKIQNQEEAVVHQFCQEIGVKRRVLKVWMHNNKHNLARXNPCNSTANATAAAPTTTAA

SEQ ID NO: 97272 - protein, 58 aa, Gossypium hirsutum
  Clone ID: LIB3146-016-Q1-K1-A3.pep
PRVRGRMVHIYLSTMFDQGLAYIKRAGLDSYEAEYCLGHKAKAVWSYYYVCVYSLQIL

SEQ ID NO: 97273 - protein, 75 aa, Gossypium hirsutum
  Clone ID: LIB3146-016-Q1-K1-A9.pep
WGLQLPSKITITIWRISWDFIPHLANLRYRRITVSDRCPRCHVGVEDSPHIFRQCPGFSREELRTNAAFSVLLYG

SEQ ID NO: 97274 - protein, 65 aa, Gossypium hirsutum
  Clone ID: LIB3146-016-Q1-K1-B1.pep
KKNGKWPVKNKGSEPRRKHFHKWVNQKERVKNPPKSWPNFKRKNSNNLLGTFSGYKPGETHLTRG

SEQ ID NO: 97275 - protein, 65 aa, Gossypium hirsutum
  Clone ID: LIB3146-016-Q1-K1-B10.pep
YVGKRPFLSALLGLRKNGLRGCLIKGPESQSRFVSKNRLCVGNRHARRTMMGFKTKAEESYRTCG

SEQ ID NO: 97276 - protein, 54 aa, Gossypium hirsutum
  Clone ID: LIB3146-016-Q1-K1-B12.pep
NAYLVTSGRGLLLGASVFYPLILGFDSPYNRRMIETHYSLHLKTNHVSYSNSKS

SEQ ID NO: 97277 - protein, 60 aa, Gossypium hirsutum
  Clone ID: LIB3146-016-Q1-K1-B4.pep
RHDIDPCRMNGGIQYTLQHGIRELNLTHVRQQSSQNIVLSNLKDVLSFQNFSDHESIQSL

SEQ ID NO: 97278 - protein, 78 aa, Gossypium hirsutum
  unsure (1)..(78): unsure at all Xaa locations
  Clone ID: LIB3146-016-Q1-K1-B5.pep
LHLQEGKICNFQPITLLLRGFRLGGLNLLHCNFRKARFTVVISICPTASSGVLEFYFFSLLHHSLENMIYFMDLFMXK

SEQ ID NO: 97279 - protein, 50 aa, Gossypium hirsutum
  Clone ID: LIB3146-016-Q1-K1-B7.pep
RTDRPAIFYFCFNFVSFFFFWKQFLILFIFFFFSFFLRGSYECIFNSFHV

SEQ ID NO: 97280 - protein, 71 aa, Gossypium hirsutum
  unsure (1)..(71): unsure at all Xaa locations
  Clone ID: LIB3146-016-Q1-K1-B8.pep
RTRRXPHSGFMFLFLFHIPEPHLNSAESIMVSSTTSTCPFFPINNCWHRMFTTMVGCFFFFIFTCTFGYCL

SEQ ID NO: 97281 - protein, 43 aa, Gossypium hirsutum
  Clone ID: LIB3146-016-Q1-K1-C6.pep
GENLRKRKKSVRSCGIPCKEHMDSSNYYSHFIIDCWHCIIIHS

SEQ ID NO: 97282 - protein, 109 aa, Gossypium hirsutum
  unsure (1)..(109): unsure at all Xaa locations
  Clone ID: LIB3146-016-Q1-K1-C7.pep
HSLVRQVHMVAPLDKQFSLLYVLLKEHIADDVDYKVLVFCTLAMVTKLVADVLREMNLNVREIHSRKSQSYRTRVSDEFRKSKGLILVTSDVSARGVDYPDVXLVLQVG

SEQ ID NO: 97283 - protein, 109 aa, Gossypium hirsutum
  unsure (1)..(109): unsure at all Xaa locations
  Clone ID: LIB3146-016-Q1-K1-C8.pep
HAYGKLKGFFNAGFEAILGESVDVIDDVTCSVIWGRKSVIEEIRDSCITREIXPDILALFIELSGDPAGNXTDDSVIDIVLDGVNAGRDTSTSTLTWTMYMSMTNARVD

SEQ ID NO: 97284 - protein, 76 aa, Gossypium hirsutum
  Clone ID: LIB3146-016-Q1-K1-D11.pep
LSGHIDSTSENARKVDEEEKAADELSEDSREPASKATGSEPEEAEESDHVESKSPILKKTSKGSSSTLDVADSRDF

SEQ ID NO: 97285 - protein, 51 aa, Gossypium hirsutum
  Clone ID: LIB3146-016-Q1-K1-D12.pep
IKSSQKDTYLDTNIIYFFTWLQLMRSLKHRYIITLLRNTTYTGPKENVGYC

SEQ ID NO: 97286 - protein, 114 aa, Gossypium hirsutum
  Clone ID: LIB3146-016-Q1-K1-D7.pep
NKLVHEGQRKIALAITDFIRNYVYKLDGLNNSIHVQRMELEKWQLSENPFVKINFDAAYRKHENKSCSGIAIRDSMGRVLSFTVELNENVPSVFAAEAIACVQSIQLGLDLGFT

SEQ ID NO: 97287 - protein, 59 aa, Gossypium hirsutum
  unsure (1)..(59): unsure at all Xaa locations
  Clone ID: LIB3146-016-Q1-K1-D8.pep
IKFFLILNNIFFILFXXXXRFMKSSLFQWQKVAKKYISITHHDCFLGLHLKPLKTNLKP

SEQ ID NO: 97288 - protein, 55 aa, Gossypium hirsutum
  Clone ID: LIB3146-016-Q1-K1-D9.pep
KRGVFRGGHILKFWKQLDIHAVVLLLKSQKNRFDQPFSNSSIVSELLLFSSEITS

SEQ ID NO: 97289 - protein, 54 aa, Gossypium hirsutum
  Clone ID: LIB3146-016-Q1-K1-E1.pep
SPNKVTKLYLEINKSSKSSVLLYFIPVPSLLNVNQSTKGIPEEQMNHSCQRTNA

SEQ ID NO: 97290 - protein, 41 aa, Gossypium hirsutum
  unsure (1)..(41): unsure at all Xaa locations
  Clone ID: LIB3146-016-Q1-K1-E3.pep
SSLMDCIHENLVNFFHQSLCLLAFNGTLKQWNIDSLCPXKX

SEQ ID NO: 97291 - protein, 97 aa, Gossypium hirsutum
  Clone ID: LIB3146-016-Q1-K1-E8.pep
WYAFSWLPISLSLLQPWLDNWWRRTSMIDQCLTLLGGINLLYHVAVECLINPAYNLPRSSPVYPRIIDTAINFHLNLECAGEAKGIGSIGEFVMEYI

SEQ ID NO: 97292 - protein, 124 aa, Gossypium hirsutum
  Clone ID: LIB3146-016-Q1-K1-G10.pep
GPPACGKDFVGGLASTVTEVDFKNYFDQFGKITDVVVMYDHNTQRPRGFGFITYDSEEAVDKVLHKTFHELNGKLVEVKRAVPKELSPGVTNRNVIGYNYGLNRAFNFLNSYAQGFNLSSIRGI

SEQ ID NO: 97293 - protein, 96 aa, Gossypium hirsutum
  Clone ID: LIB3146-016-Q1-K1-G12.pep
GGLTLFKWFTPPPRIWLGTWLWRGSWHRWGQLKSNFVGMPAFKEKKNILSINNMKVAMFIYPRVNCIRANWDDSYWGSLLTLNLSGSPNLLLLFLF

SEQ ID NO: 97294 - protein, 56 aa, Gossypium hirsutum
  Clone ID: LIB3146-016-Q1-K1-G6.pep
HVPPSLSNNINLTCQCWPSQTHKTVIVMLYAAPSKSGRPPNPAPPGPPNRWGKPCP

SEQ ID NO: 97295 - protein, 29 aa, Gossypium hirsutum
  Clone ID: LIB3146-016-Q1-K1-G7.pep
HYLIDRSLFSKVRKQDIIKSPLFQVIETL

SEQ ID NO: 97296 - protein, 46 aa, Gossypium hirsutum
  Clone ID: LIB3146-016-Q1-K1-H6.pep
RSNFRERSVGNVAVGSLQRLHRLNRFDAKVPCLSAAASGSCFGLSW

SEQ ID NO: 97297 - protein, 63 aa, Gossypium hirsutum
  Clone ID: LIB3146-017-Q1-K1-A2.pep
RWVLTKGTKWFLNFEQKTRGPTSWGDWFFLPPFEGNNTTEDGRDTASRSSEDLRKSRLGFPQG

SEQ ID NO: 97298 - protein, 38 aa, Gossypium hirsutum
  Clone ID: LIB3146-017-Q1-K1-A3.pep
AQLRSAIRAVTYTKHHLFFGSGEHLSYLKGLRHIQLDI

SEQ ID NO: 97299 - protein, 138 aa, Gossypium hirsutum
  unsure (1)..(138): unsure at all Xaa locations
  Clone ID: LIB3146-017-Q1-K1-A4.pep
NFRVKFDDFFVSGVIAEIEVGMGPCGELPYPSYPVKHGWKYPGIGEFQFXCYDKYLMKRLKKAAEIRGHTFWGRAPYNSGSYNSAPHETGFFRDGGDYDSYYGRFFLNWYSQILVDHGDRVLALANLAFESTCIAAKL

SEQ ID NO: 97300 - protein, 53 aa, Gossypium hirsutum
  Clone ID: LIB3146-017-Q1-K1-A5.pep
TIKIVAFICLRLHFSHLCLKCYVLVTLSFCYEMVTLSLSSITSLTTIVYDSPN

SEQ ID NO: 97301 - protein, 61 aa, Gossypium hirsutum
  Clone ID: LIB3146-017-Q1-K1-A7.pep
TLVSSIKADFIKHLDKTIGGRFTTIAPKLNYIIQYMLYSITKLTESAKVRDSYDRIFQSNY

SEQ ID NO: 97302 - protein, 45 aa, Gossypium hirsutum
  Clone ID: LIB3146-017-Q1-K1-A9.pep
GCAGKQRHISSIASLKYILLAGGLQLVVWENPDISQLIFTCKHSP

SEQ ID NO: 97303 - protein, 61 aa, Gossypium hirsutum
  Clone ID: LIB3146-017-Q1-K1-B1.pep
WPLPPHLPPGSPQAMVHRRVGEEKEMKWLWELLYGFSLCFFLTLVWNTQLEFTTNCYYYIW

SEQ ID NO: 97304 - protein, 41 aa, Gossypium hirsutum
  Clone ID: LIB3146-017-Q1-K1-B10.pep
LKLTNHDDNSLAAFHLYSYDLCIILVSGIQLLFIASCSTSW

SEQ ID NO: 97305 - protein, 146 aa, Gossypium hirsutum
  unsure (1)..(146): unsure at all Xaa locations
  Clone ID: LIB3146-017-Q1-K1-B11.pep
AVQESFGTDKWRFTGFYGLLDVRFHAEAWSFLRSLEQDQSFPXLVCGDFNEILFSFEKRGGVVRDERCMKEFRNALSAFLLEDLGFKGSWFTLERGRLVYSNIRERLDRRDANFAWWDRFPSFSLKHLPHLISDHRGQKRHLCTKL

SEQ ID NO: 97306 - protein, 84 aa, Gossypium hirsutum
  Clone ID: LIB3146-017-Q1-K1-B3.pep
LKTGSYFDFSGHNKKISTPKSPDFKIVSIKGAPPFHFLFVYVFFSFFFVIKKMFFLFFFFFFFFFFYFNLIFFFFFFFFFFFFL

SEQ ID NO: 97307 - protein, 35 aa, Gossypium hirsutum
  Clone ID: LIB3146-017-Q1-K1-B4.pep
WAGFHMSAVAAYLKWRSLLLLILPKNVEIFFKFPN

SEQ ID NO: 97308 - protein, 66 aa, Gossypium hirsutum
  Clone ID: LIB3146-017-Q1-K1-B5.pep
LTGLAKRFTIFFLWWKKLTPPPPGPLSGTTIFFIFFLLLQNSLDELRTKQCQKTLLYILVQGTIPF

SEQ ID NO: 97309 - protein, 141 aa, Gossypium hirsutum
  Clone ID: LIB3146-017-Q1-K1-B7.pep
DIGFEVDKFHKRKKQDGGFNAFYDNEPGRSGSNSKRSSKGVLAPANWKSSTKEKEWSELESRDAEIQSSTQEAVIDNNESKVKKVKLKVGGVTRTIHANSTVNGLPGTGSYARKNSLQGSSNDGHSPPGRSGLQGVPWKDF

SEQ ID NO: 97310 - protein, 85 aa, Gossypium hirsutum
  Clone ID: LIB3146-017-Q1-K1-B9.pep
RHAFDSCRPRAAPLIFFFPLGDGRQKEKMKSPIIYYKEGHMFLQKHFWVLKKRPQIDFELCAMTTKEFTLRTITRIMRVILLKNS

SEQ ID NO: 97311 - protein, 129 aa, Gossypium hirsutum
  Clone ID: LIB3146-017-Q1-K1-C1.pep
LEITERPFLWVVREDITKGKHHNYPKGFNERVGNQCRIVSWAPQAAVLGHSSIACFISHCGWNSTMEGVSNGVPFLCWPYFADQFLNESYISDIWKLGLKLQKDEGGIIRKEEIKSKVEQLVGDENFKT

SEQ ID NO: 97312 - protein, 35 aa, Gossypium hirsutum
  Clone ID: LIB3146-017-Q1-K1-C11.pep
TPTRSKETIHLLTCFMKNNIYGEPSNKSIIPTIIS

SEQ ID NO: 97313 - protein, 72 aa, Gossypium hirsutum
  Clone ID: LIB3146-017-Q1-K1-C12.pep
SLENEQLLYVLYECKKDLTAPGAIGTAPTDYLDIDTPVGKTNESQHRDASLEECTISVCKPHWMHARSCRRA

SEQ ID NO: 97314 - protein, 53 aa, Gossypium hirsutum
  Clone ID: LIB3146-017-Q1-K1-C4.pep
IYFHYYVTSRPYTPMTNLRLSSTFILIKRSTTLYKISRHQKTLYKILNIHKIS

SEQ ID NO: 97315 - protein, 43 aa, Gossypium hirsutum
  Clone ID: LIB3146-017-Q1-K1-D11.pep
SLWKSQSASLEQPLRLLIFHGLVVDFFDPKLKAEPLANKQRVR

SEQ ID NO: 97316 - protein, 91 aa, Gossypium hirsutum
  Clone ID: LIB3146-017-Q1-K1-D12.pep
HSPINLLPGHFNYSIPLETLCRDTEMTIWHYHGGCQDSRGVDPDNKELGVETLKDIDGSTFNFLSGTNTYATVMMLGTYKGVKILRERLGH

SEQ ID NO: 97317 - protein, 76 aa, Gossypium hirsutum
  Clone ID: LIB3146-017-Q1-K1-D4.pep
KRRFNMNINVPEAKPIGVTSKNTKETENKQISDTNVVQKGIQKPSLNRCILKFPLFSTFLQKKIFSLMVYFVGWNN

SEQ ID NO: 97318 - protein, 61 aa, Gossypium hirsutum
  Clone ID: LIB3146-017-Q1-K1-D5.pep
NLFCFISTFIACLINHALLILYTSDSPFFNFFFFFSFSPQIKIYDDTYILTSLHIHSMHLQ

SEQ ID NO: 97319 - protein, 53 aa, Gossypium hirsutum
  Clone ID: LIB3146-017-Q1-K1-D8.pep
LIKVSQQHQLCLLNHVELTHLITGCHSLFLLTGICVNAFSLYVRIPSRLTPFN

SEQ ID NO: 97320 - protein, 91 aa, Gossypium hirsutum
  Clone ID: LIB3146-017-Q1-K1-D9.pep
MVAEHAGDSKALERTKFLHFLLVLFDDQIIKISSQLNSEEQRIHNREGIITYSVFSSDCDYLRVRIAYFVFVPLQRLKAWLLSPIKERKRN

SEQ ID NO: 97321 - protein, 60 aa, Gossypium hirsutum
  Clone ID: LIB3146-017-Q1-K1-E11.pep
GKCFAGEDMSQAYYLKAEVVQKQIDEINRKQLFNELVFTFFANKRCQGPSSKLLKTAFSY

SEQ ID NO: 97322 - protein, 60 aa, Gossypium hirsutum
  unsure (1)..(60): unsure at all Xaa locations
  Clone ID: LIB3146-017-Q1-K1-E2.pep
GTIKRMLKKVGAFSKDPFRDTCVTVWGVSELDACSDAXARTVWVNQHXVPNWNDLWLPKC

SEQ ID NO: 97323 - protein, 46 aa, Gossypium hirsutum
  Clone ID: LIB3146-017-Q1-K1-E3.pep
VEVEQIYETAFDVNQGRGQGVVDFVEMIGYEFLSPIYGTVRSRNRN

SEQ ID NO: 97324 - protein, 82 aa, Gossypium hirsutum
  Clone ID: LIB3146-017-Q1-K1-E4.pep
RTYHSYSQPRMDPIFANSAPWLYPPYNLCVPQSNVYNDTSRVQNQSHPATYNGSTNGEGPFKVNGGDKSYYNELESLLLDNQ

SEQ ID NO: 97325 - protein, 75 aa, Gossypium hirsutum
  Clone ID: LIB3146-017-Q1-K1-E5.pep
KPGLDPHVTSYHINPPPFFFPIKTTITGGLNKPYILPLPPYNLPNLSSNFQNQPTTSSPLNSHFPYLPIQYKSLY

SEQ ID NO: 97326 - protein, 53 aa, Gossypium hirsutum
  Clone ID: LIB3146-017-Q1-K1-E8.pep
MSTNLASIRNAGKADLCALICYLQFSLLSLEYVHCRGSICCRLSPRIKDSESW

SEQ ID NO: 97327 - protein, 69 aa, Gossypium hirsutum
  Clone ID: LIB3146-017-Q1-K1-E9.pep
RLRTTGGKVEVAIIQHSSLLYVSLPDKLSQWPQLLVPPRTLCTSHFFLDNYTCAALSLTPLSPPLFYQL

SEQ ID NO: 97328 - protein, 66 aa, Gossypium hirsutum
  Clone ID: LIB3146-017-Q1-K1-F1.pep
QTLDPFLASTSIHHHDGGQQLQGLEKSILNLEVPSRLRFQRSKKEPTAYSQGQITLFLLLLLLRCR

SEQ ID NO: 97329 - protein, 120 aa, Gossypium hirsutum
  Clone ID: LIB3146-017-Q1-K1-F12.pep
PTRSTTRALTLSENHNRVRTGRMRSTCTDLFGPISTRDDLVRMASEAKKSAHEEVRKMVLKMEAMEEKYARMENHITRMTSSMEKCLKKVGEIFKYFGSQNRLQNQKRMMLNGLLYPPLC

SEQ ID NO: 97330 - protein, 98 aa, Gossypium hirsutum
  Clone ID: LIB3146-017-Q1-K1-F2.pep
YILLYVKTTFPENIFRKSVKQQKIFYTDSIKHQKILFSKSFYRKIKHFPKIILRKTFYWQSNGPLEKKFSWPSSSSSSSMKGIGKLSMTVGWLRGLQR

SEQ ID NO: 97331 - protein, 110 aa, Gossypium hirsutum
  Clone ID: LIB3146-017-Q1-K1-F3.pep
MDYRRYNSSHEANLGTKQQISEEQAYQDSLVEELAEDFRLPINHKPTENVDLDNVQQATLDTKLNSSNVGFRLLQKMGWKGKGLGKDEQGIIEPIRSGIRDPKLGIGKQE

SEQ ID NO: 97332 - protein, 80 aa, Gossypium hirsutum
  Clone ID: LIB3146-017-Q1-K1-F4.pep
TLTRSVVYTDVKSTLKRTHELDDRFDDAIKQLGGTDTATPKGVMRDKGISGHTKCHLKSYLQKYMAGEKPSEQYRSQRDS

SEQ ID NO: 97333 - protein, 79 aa, Gossypium hirsutum
  Clone ID: LIB3146-017-Q1-K1-F5.pep
HGDTNRTLLDVGLQLDFPTVLQIEPTIIVTSRPEHVYHVTLCERRKGHGVAHQLGLRKKKKKEKVGKTVLSTVRQMSIQ

SEQ ID NO: 97334 - protein, 118 aa, Gossypium hirsutum
  Clone ID: LIB3146-017-Q1-K1-F6.pep
KFRIFLWILTWILYSGLLGSLISLLQARTTSSVVVFGLSSEFIKINFDGAYDGTHHQSASGIVIRNEEGVVLLSCSEIHHGVTSAFAAKAIACRKAVPIGFEHEWPKIKIEGYRTCGR

SEQ ID NO: 97335 - protein, 52 aa, Gossypium hirsutum
  Clone ID: LIB3146-017-Q1-K1-F7.pep
NNRWTCLFFFFFLHNILCDLRLKDLFPFRNILVLNIRYRAKVFLYLIRVLFQ

SEQ ID NO: 97336 - protein, 59 aa, Gossypium hirsutum
  Clone ID: LIB3146-017-Q1-K1-G1.pep
IDLTSFLVIKRKKKYHLLLFMCMYVMCLFAGLHAYVRMSVYISLLLCHHTHVSNSIYLT

SEQ ID NO: 97337 - protein, 71 aa, Gossypium hirsutum
  Clone ID: LIB3146-017-Q1-K1-G3.pep
SGKKVLFCGGGATVFCLLIFWGKQKWKIGTLCIEICLSFCLVYYLFTFFNQCNIFLQKKKKKKKQKKKKKK

SEQ ID NO: 97338 - protein, 54 aa, Gossypium hirsutum
  Clone ID: LIB3146-017-Q1-K1-G6.pep
PGACYYFQFMTFLLIFYSFESFCQSDPYFAFPGKNAHTLVRNCYRKLRLFTTNI

SEQ ID NO: 97339 - protein, 64 aa, Gossypium hirsutum
  Clone ID: LIB3146-017-Q1-K1-H2.pep
GPTRPKTLRITIRLTSFDDDDYHYGGGEDEEDVEYQQNEDEEEEDEDEEALQPPMKRKKLIVRK

SEQ ID NO: 97340 - protein, 70 aa, Gossypium hirsutum
  Clone ID: LIB3146-017-Q1-K1-H3.pep
KKVEFRFNLYVIGELILEGFTIFPNSIEALGNGESPQVTNLTRKIDAFFRFWTLSSFKSHENKGDSFVLK

SEQ ID NO: 97341 - protein, 56 aa, Gossypium hirsutum
  Clone ID: LIB3146-017-Q1-K1-H7.pep
IIEFLFNFFIILNLILTKFTYFPNSIHTLFLFKFHPNSNLTIKISAYFPNFEFSSI

SEQ ID NO: 97342 - protein, 40 aa, Gossypium hirsutum
  Clone ID: LIB3146-017-Q1-K1-H8.pep
GKGSNCDQNIHLYYILNPLKLTSQLTSNPFLYLFSNNHLT

SEQ ID NO: 97343 - protein, 63 aa, Gossypium hirsutum
  unsure (1)..(63): unsure at all Xaa locations
  Clone ID: LIB3146-018-Q1-K1-A10.pep
NDTAGKKSGKAAKDPNKPXRPARASFDVMAEFREQYMTDHPKNIFVAAVGKAGGDKWKSWLEA

SEQ ID NO: 97344 - protein, 44 aa, Gossypium hirsutum
  Clone ID: LIB3146-018-Q1-K1-A11.pep
IATFMPMSCRQIEPKCKSCFLSSPSQLSINIALPISPRTRLHEI

SEQ ID NO: 97345 - protein, 147 aa, Gossypium hirsutum
  Clone ID: LIB3146-018-Q1-K1-A7.pep
VDEEQPLCISGDSGGGIFLWSINIPFGQDPLKKWYEEKDWRYSGIHALAVSENGYLYTGSGDKLIKEWSLRDGTLSGTMTGHKSVVSAVAVNNGVLYSGSWDGTVRLWSLSDHSLLTVLGEGMLRSVSTVLSLAADQHTLIATYENG

SEQ ID NO: 97346 - protein, 109 aa, Gossypium hirsutum
  unsure (1)..(109): unsure at all Xaa locations
  Clone ID: LIB3146-018-Q1-K1-A8.pep
GKXHVMGSSSLHYPKVNYVRYVVGLSFLCKFLIPASXXLLSKSISFHVCLHSXFLHLXLXLFKSRSXNFSQWXSRPCHCSSPMCTSQNSGFFXLRAAILXSRRYMLEGD

SEQ ID NO: 97347 - protein, 111 aa, Gossypium hirsutum
  Clone ID: LIB3146-018-Q1-K1-B10.pep
TPTRSTTRPLGFAVSGGCRGIGRFNVSIDGGKTSTEATTFQKTGTPYIADGVSNDTWSWMLFELTFDIPQSTEIIAKAGDSSAYVQPEKAQDIWHLRGILNTSWHIIHILI

SEQ ID NO: 97348 - protein, 51 aa, Gossypium hirsutum
  Clone ID: LIB3146-018-Q1-K1-B3.pep
KGLLFWLNKFAYASIFIVIGAWILFRFVGPALNLYQLDSPPLPPTSMFKGS

SEQ ID NO: 97349 - protein, 68 aa, Gossypium hirsutum
  Clone ID: LIB3146-018-Q1-K1-B6.pep
ARSQRLNFFPSGDTSSILLETKTTGGCGDGYVPSKEIETLSMLSDDPGVDFQTTLEHMVETHGMKDWE

SEQ ID NO: 97350 - protein, 43 aa, Gossypium hirsutum
  Clone ID: LIB3146-018-Q1-K1-C10.pep
LSSKIFHIFSNQSGLCMIVNIQSCAVSRVLILLLIGLSTPCRW

SEQ ID NO: 97351 - protein, 45 aa, Gossypium hirsutum
  Clone ID: LIB3146-018-Q1-K1-C12.pep
LNGFSARIRVCRKEMRDSIQRTLKTPLSIFCERKAMDSRILPIVF

SEQ ID NO: 97352 - protein, 72 aa, Gossypium hirsutum
  unsure (1)..(72): unsure at all Xaa locations
  Clone ID: LIB3146-018-Q1-K1-C4.pep
EVYGGWATLSLTPQLLRTITTQLDQAASGEHREHKXDISFFELNGLNPRPYRTRSHYAILVTHQPTHFFYLF

SEQ ID NO: 97353 - protein, 84 aa, Gossypium hirsutum
  Clone ID: LIB3146-018-Q1-K1-C5.pep
FIQGGPKVFFLFLAKPIKEEFRFSSHAPLSSAILGKETVHVNIEVIGHVDSGKSTTTGHSIYKLDAIDMRVIARFDNDAADMNK

SEQ ID NO: 97354 - protein, 133 aa, Gossypium hirsutum
  Clone ID: LIB3146-018-Q1-K1-C7.pep
PTRSPTRALTRTPTRSHLAMCCLEELMSTAWRRPLGMPHASADGRGRMNHADVRHKDTTNAANVIGRINGIAPDRNSEEEENAMDPPQPAQRGATELAEAALLPKNLCTMDPTWHPWLRLYTWYPTNVQPCCR

SEQ ID NO: 97355 - protein, 64 aa, Gossypium hirsutum
  Clone ID: LIB3146-018-Q1-K1-C8.pep
ADALDKRSASRMDKRVNTVAKLGYKKCIVPMSAEKSLATLDLGELEIIGCNDSKGVINTAMTKN

SEQ ID NO: 97356 - protein, 50 aa, Gossypium hirsutum
  unsure (1)..(50): unsure at all Xaa locations
  Clone ID: LIB3146-018-Q1-K1-D10.pep
KSNLQTRIFIILDSKISKVAXESPCSTAFIVSTCNKLILEAHLLKSLPHS

SEQ ID NO: 97357 - protein, 41 aa, Gossypium hirsutum
  Clone ID: LIB3146-018-Q1-K1-D12.pep
PSTDSNSIIMHACNNYAFLHIYALFFSTANDQGSFPFFKGL

SEQ ID NO: 97358 - protein, 56 aa, Gossypium hirsutum
  Clone ID: LIB3146-018-Q1-K1-D2.pep
TGPFEDLTNIHHMAQATVATDQHVDPTTQDAALLGLAMSEPPRGPYRSLGYLRSNF

SEQ ID NO: 97359 - protein, 40 aa, Gossypium hirsutum
  Clone ID: LIB3146-018-Q1-K1-D6.pep
IDYAYHSMHSESRTLQEAMSIYPLMFKHSLFFPQLTEEEQ

SEQ ID NO: 97360 - protein, 62 aa, Gossypium hirsutum
  Clone ID: LIB3146-018-Q1-K1-D7.pep
NHRSFFFLFTLTTCRGGLYTITNSHLLYKYQSIPNYHILFIFYTYILFFFQKHHNIHLKYLI

SEQ ID NO: 97361 - protein, 66 aa, Gossypium hirsutum
  Clone ID: LIB3146-018-Q1-K1-E2.pep
YLCRAAVAPFSPIPPSETCCNAIKALGQPCLCVIVNGPPISGVDRNMALQLPEKCTANFEPCDIMK

SEQ ID NO: 97362 - protein, 82 aa, Gossypium hirsutum
  Clone ID: LIB3146-018-Q1-K1-E7.pep
THAYDHIFQSLHTFFFYLPHIKSGCLFFNHHIHLHNDIPIHESPHILHYTPIKNFSHTKYLHLTLYNLMKPILIPSYNFLNP

SEQ ID NO: 97363 - protein, 105 aa, Gossypium hirsutum
  Clone ID: LIB3146-018-Q1-K1-F1.pep
FGFWVTGGEIETESILATGLQGFFEAVGLLLRGTEDKKEALENLHLMSLCLDEIDDGGIILETDANVIDGQVDSHRMDAGAPLCEQTITQALATAREHLTRSLLK

SEQ ID NO: 97364 - protein, 131 aa, Gossypium hirsutum
  Clone ID: LIB3146-018-Q1-K1-F12.pep
RLDEFNQPNRLLEKRLNQSGQVFVLDNLHLSTLNPTHFITVLRQTEKSIRGFIRLMIDEMKLADWDINAAARSIQSGVMYWKEDDKRFAFESFICREMFKAFHLPYFSLFGSSVPQGKKHPQVFFDRSMEL

SEQ ID NO: 97365 - protein, 98 aa, Gossypium hirsutum
  Clone ID: LIB3146-018-Q1-K1-F2.pep
TRSIKALQAGSIIARLLKDPSVILPDAHIPLQAKELMHTCCDSNMNTKEDLRIVSSLLYNKIISSMIARLYHAANTTRVCHDGVQRTGYTVLAAMIED

SEQ ID NO: 97366 - protein, 61 aa, Gossypium hirsutum
  Clone ID: LIB3146-018-Q1-K1-F3.pep
PALLPGRSTQYVLRYAQQNCQSVSHTLTVTQNRSPQHSAQDLVLTQVLRPMHPSINSCFQS

SEQ ID NO: 97367 - protein, 78 aa, Gossypium hirsutum
  Clone ID: LIB3146-018-Q1-K1-F4.pep
MKKYHRLMPMTNSTETSSTPQTPTYPTAHKENVCKSAFHTGRDLPTISIRSDVIDKAQPNFSTDYDWLYRGETNIKHR

SEQ ID NO: 97368 - protein, 38 aa, Gossypium hirsutum
  Clone ID: LIB3146-018-Q1-K1-F7.pep
IFFVKKNFFKFFFFFFFFFFYFFFFFFFFFFFFFFFWQ

SEQ ID NO: 97369 - protein, 57 aa, Gossypium hirsutum
  Clone ID: LIB3146-018-Q1-K1-G8.pep
STHPFFFFHYQSQKKASVFNTQPPPSIQQSFSLIKTHPKPITPYNIIYLPKHHSSTH

SEQ ID NO: 97370 - protein, 97 aa, Gossypium hirsutum
  unsure (1)..(97): unsure at all Xaa locations
  Clone ID: LIB3146-018-Q1-K1-H10.pep
NERPRVRPPCVRADPKMSFAAIVCGTKGWTNIGVIESLSAKVDTLILGXGVMLTFYNGQRSAVASLLVQEDHLYLATWLNENDNAKGGSLLLPTDVN

SEQ ID NO: 97371 - protein, 89 aa, Gossypium hirsutum
  Clone ID: LIB3146-018-Q1-K1-H6.pep
HAYADTWCSARCLCFHPVPSPQMNASGPSPSKFERLQISTPLFFIPSFLISNLTIVYFSFIIMVDDYSRKKISTTAVLSKKPASERAYK

SEQ ID NO: 97372 - protein, 124 aa, Gossypium hirsutum
  Clone ID: LIB3146-018-Q1-K1-H7.pep
HPRVHSHTLKRTPNFFTFIINKNTPAVFKNTSPPSNSKLKTTPFYSSHHNYKTNNFQNFFLFSNNKKKPPLIFPKNTQKKNLTYQIFSSFHIQNSLHNQQLLIIYFLLFIPYLFKIKYFFYFFK

SEQ ID NO: 97373 - protein, 92 aa, Gossypium hirsutum
  unsure (1)..(92): unsure at all Xaa locations
  Clone ID: LIB3146-018-Q1-K1-H8.pep
GLGKPITSQLEQPNHNQNRIFLNTYRKLGRTLDTDPLYAILHESIYXQGAYSRWPAHRVMADHESKYDAIKAAKEGRPGLFTSEMIFSWTLD

SEQ ID NO: 97374 - protein, 82 aa, Gossypium hirsutum
  Clone ID: LIB3146-019-Q1-K1-A11.pep
YTTLFRRGELRSVPSSIQGTGSIISSASLDNSLSDLYQSPPRPLPYDAEAKYFRLQRDGLVSRHEKGSSQSHEESEPLRGEN

SEQ ID NO: 97375 - protein, 84 aa, Gossypium hirsutum
  Clone ID: LIB3146-019-Q1-K1-A5.pep
YLKIASYLLENPFLVSSPFDRSTASCVTRTTRVFCDPSIMILTAAFFLAMGDDLSAALTASTDRELLIPVAVSVDHDSPKTSSY

SEQ ID NO: 97376 - protein, 53 aa, Gossypium hirsutum
  Clone ID: LIB3146-019-Q1-K1-A6.pep
YSLLSSVNVGQVTLVWRTQTSSHSISPSLASFIVFGTLVGERVVERVGGRVGV

SEQ ID NO: 97377 - protein, 53 aa, Gossypium hirsutum
  Clone ID: LIB3146-019-Q1-K1-A7.pep
VYTLQGLILGKENRSSLLEKWQLTLIPPIFNPTHMKVGIFTGLNSFERQRLCF

SEQ ID NO: 97378 - protein, 54 aa, Gossypium hirsutum
  Clone ID: LIB3146-019-Q1-K1-A8.pep
IVETTTALGRFSAQGRLARQISALDMYVLHLSFVSFSKIDLANDLSSWNWLVKF

SEQ ID NO: 97379 - protein, 123 aa, Gossypium hirsutum
  unsure (1)..(123): unsure at all Xaa locations
  Clone ID: LIB3146-019-Q1-K1-B1.pep
SHHVITVILIGYSYITSFFRIGSIILALHDASDVFLEAAKVFKYSERELGASVCFGLFAISWLLLRLIFFPFWVIKTSSYDVREFLNLSESYPMSLYYVFNTMLLMLLVFHVYXGFLICSMIM

SEQ ID NO: 97380 - protein, 63 aa, Gossypium hirsutum
  Clone ID: LIB3146-019-Q1-K1-B5.pep
TFTKIKAKIVEPNIDSVSRVPFQFVLRRHRHHRIKYSIILSTISLSSPTLHRQHVSRSIDRSG

SEQ ID NO: 97381 - protein, 115 aa, Gossypium hirsutum
  unsure (1)..(115): unsure at all Xaa locations
  Clone ID: LIB3146-019-Q1-K1-C12.pep
RLLHIVPSAILLIFLREHGWXWSYSGFVAHSTTAVKAVPCGLPVTRGGSFGGQVILPLAHTIEHEEFMEVIKLENMGHYREDIXMPGDIXFLLHLSIGVDDNADWYFVLFLSFAP

SEQ ID NO: 97382 - protein, 68 aa, Gossypium hirsutum
  Clone ID: LIB3146-019-Q1-K1-C3.pep
INSLPKLEDLDKMHGPLIGKLVYSKALRAVTNKTDPMGPLHGEDYLSSLFLKPVLNSRLGKIENLLDI

SEQ ID NO: 97383 - protein, 48 aa, Gossypium hirsutum
  Clone ID: LIB3146-019-Q1-K1-C5.pep
ERVDLAHPIEPVRSQCRLQGSPDWTVESQEFMRYSHHRDGSRFCEDPY

SEQ ID NO: 97384 - protein, 54 aa, Gossypium hirsutum
  Clone ID: LIB3146-019-Q1-K1-C6.pep
TIIYLSRKNIFMLKIKSKYQMQSIRRLIGTAIFAPPENKAKFGGCFYLCLNKKP

SEQ ID NO: 97385 - protein, 43 aa, Gossypium hirsutum
  Clone ID: LIB3146-019-Q1-K1-C7.pep
FFGRSFFSYCFLLKRRVFSSWRFLVIDRNICEPESMKAIRSTL

SEQ ID NO: 97386 - protein, 108 aa, Gossypium hirsutum
  unsure (1)..(108): unsure at all Xaa locations
  Clone ID: LIB3146-019-Q1-K1-D12.pep
TLXXWPISHPXGPAXXNLXISXHRTPFXLWXXQLXVRLXFRLVANSYXXPLRXKXXMWXFXXCXXFRXQXIRVPSXXXAHSXXTXXHYXXLXXPSXXILXXDGRGTDG

SEQ ID NO: 97387 - protein, 96 aa, Gossypium hirsutum
  Clone ID: LIB3146-019-Q1-K1-D3.pep
GVSSNAFDEVLKATPPSLSAFLAGLPSIEGPAPNVDIALSICLQNDYPTVQTKKATSLPSQKTAGPAPSTRDLSGSSKSHPIPSNSSFKPRDRQLG

SEQ ID NO: 97388 - protein, 119 aa, Gossypium hirsutum
  Clone ID: LIB3146-019-Q1-K1-D5.pep
IRFCAPNTNTNQTKSDPSLRYWFRAKGKLSDDQALHRCVVAFASDLIFSAVSLNPHRRKGFKSASLSLDHSMWFHRHLKADDWLLFEIVSPTASVTRSFVSGQMFNRKGELVVSLTQEA

SEQ ID NO: 97389 - protein, 64 aa, Gossypium hirsutum
  unsure (1)..(64): unsure at all Xaa locations
  Clone ID: LIB3146-019-Q1-K1-D7.pep
DLEKRLAITSRICILIERXPNRKGDRFQAVLSFYFRDYRHIRVQGPYLTXQDTFGAITDGPGIF

SEQ ID NO: 97390 - protein, 91 aa, Gossypium hirsutum
  unsure (1)..(91): unsure at all Xaa locations
  Clone ID: LIB3146-019-Q1-K1-D8.pep
YRCKFCRTHLALPDDLAWRAFHCRRGKAYLFNKAIPFFMVNITVGALEEREMLSXMPTAADIFCCXLRQIVGWKYQAAHEKNQKFKERKFV

SEQ ID NO: 97391 - protein, 63 aa, Gossypium hirsutum
  unsure (1)..(63): unsure at all Xaa locations
  Clone ID: LIB3146-019-Q1-K1-E11.pep
KKKKKKKKKKKKKKKKKKKKKKKKKKKKKKIKKKKKKKNKKKFXXKKKKKKNKGGAVLKKYFY

SEQ ID NO: 97392 - protein, 88 aa, Gossypium hirsutum
  unsure (1)..(88): unsure at all Xaa locations
  Clone ID: LIB3146-019-Q1-K1-E12.pep
MPIGEIPFMRGQLYIQFTDDFPDSLTPYHFNALKAXVLSPNASFYLSDMDLDYCQETTLHDFNIEEVMRLIHNSISTCSLFLICVHAF

SEQ ID NO: 97393 - protein, 60 aa, Gossypium hirsutum
  Clone ID: LIB3146-019-Q1-K1-E3.pep
IMLKVHLCSLLSMYTSFFVLWRSSKALPKIEPKFIIQAGKSYLNPTMPSISYVIVGWLTL

SEQ ID NO: 97394 - protein, 121 aa, Gossypium hirsutum
  unsure (1)..(121): unsure at all Xaa locations
  Clone ID: LIB3146-019-Q1-K1-E9.pep
HPVLYIDFVQCDMGGLXWRRQIPDTVVINPPFGTRKMGLDMDFLFVALNGASQAVYSLHKTSTXDYIKRTFLRDLNAINADDLCELPFDVPQLYKSHKKKEVYIAEHLCRFDPKMCQVKDN

SEQ ID NO: 97395 - protein, 111 aa, Gossypium hirsutum
  unsure (1)..(111): unsure at all Xaa locations
  Clone ID: LIB3146-019-Q1-K1-F10.pep
HVGLFIGENAHSERLAIIPSVLHIVLINITRKFNDARMYITFNGMDDEEDNRLPLNEILDDKIXSTXFKGYLDAVAHAINDXADLRGYYAWSLLDNLEXSQCYTKRFVLDY

SEQ ID NO: 97396 - protein, 62 aa, Gossypium hirsutum
  Clone ID: LIB3146-019-Q1-K1-F12.pep
KLLEKLHWLCYKYFLRGPGGNDIHKTNVPNMMIAFRHETWIDDMQHLYSGRARIPEEIYPAM

SEQ ID NO: 97397 - protein, 78 aa, Gossypium hirsutum
  Clone ID: LIB3146-019-Q1-K1-F4.pep
RGVMRFIHGSRLRSSLTSPWRFLRAKAAGQEPFLKELSVATGMKPSVLIGAEDRIIYPGAPFATKNRSLPLIGGGSTK

SEQ ID NO: 97398 - protein, 103 aa, Gossypium hirsutum
  Clone ID: LIB3146-019-Q1-K1-F7.pep
GGEGVGDGGGGGGCEENLAGNVEQNGGFLTQQEVLQPLLEPGTETQTQALFTSLLMMQTQESERIVNGGNVVLNGNPYNQTSQVLSFISLKKNSMLLGFRKLY

SEQ ID NO: 97399 - protein, 96 aa, Gossypium hirsutum
  Clone ID: LIB3146-019-Q1-K1-G1.pep
PTVHALVPNALDYRQMTSINLGEVPARKKVQSGERDVRVGRADAFTSEGVWLELRRKIAPETLRVSGCFKKMGHFELGYGLGLVLSYSGLEMYLGK

SEQ ID NO: 97400 - protein, 92 aa, Gossypium hirsutum
  Clone ID: LIB3146-019-Q1-K1-G3.pep
HASGKMSYRFLSRKTFSLLFGLPSSLFISVHRPFSSLASPSKSLPRHLRRSTDRRPYLCILKKLSNHSREKKTQNRKLVGFLINGVILDVEP

SEQ ID NO: 97401 - protein, 42 aa, Gossypium hirsutum
  Clone ID: LIB3146-019-Q1-K1-G8.pep
ASHYTLLPTSYRQNMTSIEPRTFFSVSDGDGATRASRPAFKA

SEQ ID NO: 97402 - protein, 40 aa, Gossypium hirsutum
  Clone ID: LIB3146-019-Q1-K1-H2.pep
EKYFFFLLIFSVNPGYKSLILYLQKDYTDPSTEYTLTLAH

SEQ ID NO: 97403 - protein, 34 aa, Gossypium hirsutum
  Clone ID: LIB3146-019-Q1-K1-H5.pep
NLILYSTAPTMKRNKTNKHTTHCMPLPSPLSFRF

SEQ ID NO: 97404 - protein, 42 aa, Gossypium hirsutum
  Clone ID: LIB3146-020-Q1-K1-A4.pep
GSKFFLVQGLTWIKANVPTLRPIRFSFNDYMNSKEQKNLSAK

SEQ ID NO: 97405 - protein, 104 aa, Gossypium hirsutum
  Clone ID: LIB3146-020-Q1-K1-A5.pep
PRVRGRVGGRVGGAIGVVESDNLRLRCRIAPSAYIPSLSVSGSNGAAYAVVIAAHPSEPNQIALGMSDGAVHVIEPSQDNGSHNPSNSSNPSLTVKQPTELPSR

SEQ ID NO: 97406 - protein, 140 aa, Gossypium hirsutum
  Clone ID: LIB3146-020-Q1-K1-A7.pep
LEDKHFSSLGHSDDAILPETQANGHQKCDVTESVDELAPDFEEDLKNVGGSSQGAEESTISPTAWVEIEEHQKLPDQCEDQTGEITSSTCTAPVGSASPRVRHSLSQMLQEESSEADTTEWGNAENPPAMVYQKDAPKGL

SEQ ID NO: 97407 - protein, 72 aa, Gossypium hirsutum
  Clone ID: LIB3146-020-Q1-K1-A8.pep
DGDEFFMKLSDQWGVFLFDGDLGSSIDCLSFLFWSLFPLFWCLSLLHLFGVISLSNNIHLHYFCNDHVLTRN

SEQ ID NO: 97408 - protein, 68 aa, Gossypium hirsutum
  Clone ID: LIB3146-020-Q1-K1-A9.pep
SFSPVLDHQEVWLKFYRIRIEAVLLKSNVLSEVQRSLIDGGMRVEDLPVGPLPRSGSSPHLGQQTLTS

SEQ ID NO: 97409 - protein, 94 aa, Gossypium hirsutum
  Clone ID: LIB3146-020-Q1-K1-B10.pep
RGDPLEEYPVPSAYKLFQETNSGPSNNFIQTEIRNFYRKLWNLQIPPKIKITCCRIYWNYIPTLANLKNKKVVVQARCPRCHIPMKIAPTSSGT

SEQ ID NO: 97410 - protein, 48 aa, Gossypium hirsutum
  Clone ID: LIB3146-020-Q1-K1-B11.pep
SAGEEGNRDWSVVRLRKCAKINRKDYVYNDMIKGLLVDFDNKCNWKNA

SEQ ID NO: 97411 - protein, 70 aa, Gossypium hirsutum
  Clone ID: LIB3146-020-Q1-K1-C10.pep
NRITKFNISGEQKQPPGNDDAKTIANSTFSILPIGLCLWMSSLSLYKPISSAAILLKYNHLFIQLETSCI

SEQ ID NO: 97412 - protein, 98 aa, Gossypium hirsutum
  Clone ID: LIB3146-020-Q1-K1-C11.pep
SSSRPSFSNLPRVSLMFQGAEMSVSGERLLYRVPDMNKGSDSVYCFTFGNSDLLGIEAFVIGHHHQQNVWMEFDLVKSRVGFAEIRCELAGQRLGIGP

SEQ ID NO: 97413 - protein, 63 aa, Gossypium hirsutum
  Clone ID: LIB3146-020-Q1-K1-C5.pep
HSARISDLLDTCFTLGCLWSMRSFLFLELTFCVGSRSTGHLFHSRLLAVHVVPLPRAPWTSAN

SEQ ID NO: 97414 - protein, 105 aa, Gossypium hirsutum
  Clone ID: LIB3146-020-Q1-K1-C9.pep
MGDPSAPIWAATANNQAPPQAQVGGMDREARVLRYREKRKNRKFEKTIRYASRKAYAESRPRIKGRFAKRSETDNEVDHMYNSASSAATAAAFMYDNQYGIVPSF

SEQ ID NO: 97415 - protein, 142 aa, Gossypium hirsutum
  Clone ID: LIB3146-020-Q1-K1-D3.pep
PRVRPRVRANRVEKALLFLEEMDEKGFPPCPAAYCSLINSLGKAKRYEAASELFQELKENCGHSSARVYAVMIKLFGKCGHLSKAVDLFNEMKKLGCNPDVYTYNALMSGMIRAGMIDEAHSLLRTMEENGCTPDLNSHNII

SEQ ID NO: 97416 - protein, 66 aa, Gossypium hirsutum
  Clone ID: LIB3146-020-Q1-K1-D8.pep
CLSSSGVIIIFYFCFDPPPTPPLTTRVFDFFTLSISHINTYMHFLLCRAEFPGSKSFIFFSIKSLS

SEQ ID NO: 97417 - protein, 111 aa, Gossypium hirsutum
  Clone ID: LIB3146-020-Q1-K1-D9.pep
MMGYMVNWSWTSTFVWTSSSTVVATLFSTGPNNPTFHLPSIKLTDFKLNLPHVDTELIPNVHATIIIIVHIHYRYTAMFIFYESTLLIAAQVKCLSQRARSCQVLKLPTRL

SEQ ID NO: 97418 - protein, 92 aa, Gossypium hirsutum
  Clone ID: LIB3146-020-Q1-K1-E1.pep
LIHKHHSHSGILLYIHIDRYMTQTPICPYIKATTLLSFSIKINIILRENWAKIGIKFPVSPFLRQVKAPIGSIISSGWCHQGISSCNQTIIV

SEQ ID NO: 97419 - protein, 46 aa, Gossypium hirsutum
  unsure (1)..(46): unsure at all Xaa locations
  Clone ID: LIB3146-020-Q1-K1-E10.pep
EXSTGAIQNFLDAQTLCKVGLVHNSWSIFSVTALQRGQTTLSRKVL

SEQ ID NO: 97420 - protein, 60 aa, Gossypium hirsutum
  Clone ID: LIB3146-020-Q1-K1-E12.pep
RRVFLNQPRDFQVEIPSQSVPTITFYRVKLIHLCITLLSLITLILTIILHITLHKLIGLN

SEQ ID NO: 97421 - protein, 110 aa, Gossypium hirsutum
  Clone ID: LIB3146-020-Q1-K1-E6.pep
PTRPAHSSLSFSGLTGESGAGDYQDCGASSMLLMGEPPWCPPCTESSIPSATRSDAVMRYKEKKKTRKFEKRVRYASRKARADVRKRVKGRFVKAGDAYDYDPLNQTRSC

SEQ ID NO: 97422 - protein, 53 aa, Gossypium hirsutum
  Clone ID: LIB3146-020-Q1-K1-E7.pep
VNHGKVYCCMREDSLRRFSLWLVSNLCVGDIICICVRFRRLMSVQEDQLSVVL

SEQ ID NO: 97423 - protein, 135 aa, Gossypium hirsutum
  unsure (1)..(135): unsure at all Xaa locations
  Clone ID: LIB3146-020-Q1-K1-E8.pep
NDLHGCIIDFGLTPLMTWRGVSSRCARFLAPCVIESRKITQKSDVYSYCVLLLXMLTGKATTQSSWHEDVVYLPRWVQTVVREERTVDVFDVELMKYQNIEEELLQMLHIAMTXVARLSDMRPTMEEVSRMIEEI

SEQ ID NO: 97424 - protein, 50 aa, Gossypium hirsutum
  Clone ID: LIB3146-020-Q1-K1-E9.pep
EKKLTRIPLVTADLVTQKAAVHLMAAGGLKFRFQSGLGPILLWVWLGFSS

SEQ ID NO: 97425 - protein, 78 aa, Gossypium hirsutum
  Clone ID: LIB3146-020-Q1-K1-F10.pep
PVFTAIFTPLALVITAIFSGFLWKETLHWGSVAGVVLLVGGLYSVLWGKKKEDEKMVRNEQNPGTNKEEIVLECITHQ

SEQ ID NO: 97426 - protein, 65 aa, Gossypium hirsutum
  Clone ID: LIB3146-020-Q1-K1-F2.pep
TTILQKKNISKKQTNEAALNKEQSMLLTITVCTVSCKMPGASTVVTRQTTAAAAAALSTVPRHMR

SEQ ID NO: 97427 - protein, 123 aa, Gossypium hirsutum
  unsure (1)..(123): unsure at all Xaa locations
  Clone ID: LIB3146-020-Q1-K1-F8.pep
DFVEVALQFGMIMMFACAFPLAFAFSALNIIAXMRTDAFKLLAMLRLPVPRAVFTIGAWLNIFQFLILMSICTNSALLVWLYDQEGKWKLDPGLAAILVMEHVLLLIKFVFYRFVPYEPSFVR

SEQ ID NO: 97428 - protein, 48 aa, Gossypium hirsutum
  Clone ID: LIB3146-020-Q1-K1-F9.pep
FVFLSILSDFGVLSPTFHMKASMLKMLSNKSFSKGWVLISNVHSRTSG

SEQ ID NO: 97429 - protein, 44 aa, Gossypium hirsutum
  Clone ID: LIB3146-020-Q1-K1-G12.pep
CLYILFETNSGVLLVSDLINSTNRTWKRNLINNTFQSDIAAKNF

SEQ ID NO: 97430 - protein, 117 aa, Gossypium hirsutum
  Clone ID: LIB3146-020-Q1-K1-G2.pep
MDSQLLRLNPPNNLSIKPLHSPHFPSFAAPSFIRLSPLSFPSATVTGSACKRIRCAMKSYKLSELSHVEVESLKARPRIDFSSIFSVIQPIVDDVRSRGDAAVRVYTEKFDKVKLEK

SEQ ID NO: 97431 - protein, 138 aa, Gossypium hirsutum
  Clone ID: LIB3146-020-Q1-K1-G3.pep
SQLQQQQQQQPPTQFQQSQQGHQNTSMSSGSSSSQKNLQNQQQRSHGGDVSSGSGNSQVFHASKKDSPHPLQLWQQQQQPSQNDSHQPRQLDGESDGKDGPSTATDSRVSRSNMNIYGQNFAMPVQPSNFALMTAASM

SEQ ID NO: 97432 - protein, 30 aa, Gossypium hirsutum
  Clone ID: LIB3146-020-Q1-K1-H10.pep
LPNGRHGMIRSAYNLYLPWYLAKGMATMSM

SEQ ID NO: 97433 - protein, 147 aa, Gossypium hirsutum
  Clone ID: LIB3146-020-Q1-K1-H5.pep
FPMAIEDYMTKLKDTSTSGAVFFAVCRGKVSEGLDFADHAGRAVVITGMPFATRTDPKVRLKREYLDLQAQSPREGCKMIKLLSGEEWYNQQASRAVNQSVGRVIRHRHDYGAIIFCDERFAQSSRQSQISVWILPHIKCYSKFGDA

SEQ ID NO: 97434 - protein, 53 aa, Gossypium hirsutum
  Clone ID: LIB3146-020-Q1-K1-H7.pep
AMMLECQISSAIAHSIVLEDVSVPAVSMFKCKALMGASKSFVLTAQQTFSYVI

SEQ ID NO: 97435 - protein, 56 aa, Gossypium hirsutum
  unsure (1)..(56): unsure at all Xaa locations
  Clone ID: LIB3146-021-Q1-K1-A1.pep
PRVRVYNFSFYPCTFPLLVGPCSSMLPTMSTYPNYLFTIFHIKANYLSQRLXAQDL

SEQ ID NO: 97436 - protein, 114 aa, Gossypium hirsutum
  unsure (1)..(114): unsure at all Xaa locations
  Clone ID: LIB3146-021-Q1-K1-A11.pep
HASDRRLLGTEVSLPPENGNKTHDSYLSETNFDTNLVVILAALLCALICAVGLNSIVRCALRCSRGFRRRPQNKQLXRLATTGLKKRDLRQIPVAVYGEGVSLPSMECPICLGE

SEQ ID NO: 97437 - protein, 81 aa, Gossypium hirsutum
  Clone ID: LIB3146-021-Q1-K1-A2.pep
ARIDDVLYVNDVIKRCAEAETVSLFDRRGLGGLPIQKRMSPSPFSIQHTPYASPFATPTFCSSTPLTGSPGRAPSSLKRNI

SEQ ID NO: 97438 - protein, 54 aa, Gossypium hirsutum
  Clone ID: LIB3146-021-Q1-K1-A3.pep
KRMCPSPLLIQHTLYASNFTTATFCSLTPLTGSPGRAPSFLKKNILKEEFNLEN

SEQ ID NO: 97439 - protein, 40 aa, Gossypium hirsutum
  Clone ID: LIB3146-021-Q1-K1-A5.pep
FYFFTLKSLNLIILSNLKKQHRTAQWCSYGLITRLKSEKI

SEQ ID NO: 97440 - protein, 81 aa, Gossypium hirsutum
  Clone ID: LIB3146-021-Q1-K1-B10.pep
VLRPSENRSETQAIEIAITKLLLRSYYDIVRKNIEDSVPKAIMHFLVSLNRVDLLIVYFLVSFCYLSMFTFKLLMTGIQKR

SEQ ID NO: 97441 - protein, 76 aa, Gossypium hirsutum
  Clone ID: LIB3146-021-Q1-K1-B3.pep
RLWPNTETGASCMRMQHFKECFDTNLWTQSKIHNYCIEQTQGGNLTSFTKVNSHLGYRAFRSSTMSGSRGYNMRMM

SEQ ID NO: 97442 - protein, 102 aa, Gossypium hirsutum
  Clone ID: LIB3146-021-Q1-K1-B4.pep
SFRFLINNFKKFGTLFDMDSKSEWTSVLAITDDTSYAVTALNAYWEFENENPKRFDPQIILQASSLARLPLESYNVDLVIYISRSVEFPFDELYAEIFIVLV

SEQ ID NO: 97443 - protein, 78 aa, Gossypium hirsutum
  Clone ID: LIB3146-021-Q1-K1-B9.pep
MGNEAKTTSNVGGGGFRARMEHYIYSGEKKHVMAGIAIVALVFGAPWFLMNRGTKHQSHQDYMEKADKARSQRLSSSK

SEQ ID NO: 97444 - protein, 71 aa, Gossypium hirsutum
  Clone ID: LIB3146-021-Q1-K1-C10.pep
MIKKNKKNLLKKKKKNGRGLFSGRTIKNPDSLPLICYNKPSYTWYLTTFIWPRLFNNLIEITLVKSTISSL

SEQ ID NO: 97445 - protein, 47 aa, Gossypium hirsutum
  Clone ID: LIB3146-021-Q1-K1-C12.pep
TSVMVPIIKHNIRSYYKAHEVTIILCISDLPQQAGLSGYSRPITTND

SEQ ID NO: 97446 - protein, 47 aa, Gossypium hirsutum
  Clone ID: LIB3146-021-Q1-K1-C3.pep
SAAKTLMVPDVISSQQSIFRLATNGLGTLKVRCRYGSSDRSDVFVHC

SEQ ID NO: 97447 - protein, 55 aa, Gossypium hirsutum
  Clone ID: LIB3146-021-Q1-K1-D12.pep
DRPNPGPHASRIRFVHLGTGSTAENKTDSPQKTRRRGSSMGTAKTLHGLNTNFNL

SEQ ID NO: 97448 - protein, 104 aa, Gossypium hirsutum
  Clone ID: LIB3146-021-Q1-K1-D3.pep
DLKFLPFFFLDSSTTASFFSPYLARTPNHTDPSCLLVSKLWSSLHVLAKPFLVQAPFPKLSLILVSFLLVNLGTGILFPSATKVILTNFRDRKEHSKASPFTFI

SEQ ID NO: 97449 - protein, 60 aa, Gossypium hirsutum
  Clone ID: LIB3146-021-Q1-K1-D7.pep
AAAAIGDYIRYCIHDTFKRNNQMFSLWLSSEAELLFVDLEEQDTYRLHSNPFLYSFNFSY

SEQ ID NO: 97450 - protein, 107 aa, Gossypium hirsutum
  Clone ID: LIB3146-021-Q1-K1-D8.pep
MEDKTSQFKSADIDEKGIRKEKPEELVMALAEAKADAILQRLPVSDYVKEAEPTLLITSDQVVVYEGVIREKPANEEEAHQFIKGYSSGHAATVGSVLVTNLKTGFR

SEQ ID NO: 97451 - protein, 69 aa, Gossypium hirsutum
  Clone ID: LIB3146-021-Q1-K1-E1.pep
LRLFRNTYKLRKFQQPGSKAAASITCFTPSSSSYTISYFFHICSTPHQEVKAEALTRLLCQESSLCSYV

SEQ ID NO: 97452 - protein, 65 aa, Gossypium hirsutum
  Clone ID: LIB3146-021-Q1-K1-E10.pep
MNCSCCLEWTGIFMEVHDNPLNAPVDGPTQWPLRHLEELLEELIAIAGVSKGKKRFNIDLTPYSG

SEQ ID NO: 97453 - protein, 82 aa, Gossypium hirsutum
  Clone ID: LIB3146-021-Q1-K1-E4.pep
HSSEEQAKVLQHSPVCIGAVWGCFIRTITSRIAQISNTHLSNYLALSISFPLDIFPVICLDNLLAYIIIISCLCFFSLTLNY

SEQ ID NO: 97454 - protein, 61 aa, Gossypium hirsutum
  Clone ID: LIB3146-021-Q1-K1-E6.pep
MPTNQDSRPTAESDHGEFSLSEVPLEKRTGFLSITMVLLSFTFFTGTMFAGGKIGVAFDVV

SEQ ID NO: 97455 - protein, 130 aa, Gossypium hirsutum
  Clone ID: LIB3146-021-Q1-K1-F10.pep
HASDTVKQIQSTCSQIITFSHFVPRQELCPEKRMLFYPNLPKIIGSDWLEDRIRSIHGVESSSFACHVFGHTHFCWDAVVDGIRYVQAPLACPIERKRRMNGGETLVPFRIYLDGEFGAKIMPCYWSDFY

SEQ ID NO: 97456 - protein, 85 aa, Gossypium hirsutum
  unsure (1)..(85): unsure at all Xaa locations
  Clone ID: LIB3146-021-Q1-K1-F7.pep
NMLQIPWKSHYPSSFTVLDNTFHHPFGGPFHLLQFEQSFSYYLNLQAQHQICTKKKKKKKKKNEEEEEEEEEEEEKESXEHKNNR

SEQ ID NO: 97457 - protein, 116 aa, Gossypium hirsutum
  Clone ID: LIB3146-021-Q1-K1-G10.pep
HASASQLRTYNLTASDLVKDHLRYLMGGRLNVENEVLCRFVFPERPGALMKFLDTFSPQWNISLFHYRGQGETGANVLVGIQVGKSEMEEFIQRSESLGYEYVLVTNDSNFQLLMH

SEQ ID NO: 97458 - protein, 68 aa, Gossypium hirsutum
  Clone ID: LIB3146-021-Q1-K1-G11.pep
LQHIYICFSTLHPSRLAEDVLVGVYISLLCRKFIHVLGIEIQGFPPPLPVWVLILFHYDSVNATHRIQ

SEQ ID NO: 97459 - protein, 37 aa, Gossypium hirsutum
  Clone ID: LIB3146-021-Q1-K1-G2.pep
GNDKGVLTAITECVVHIVFKLIIYQLHIMVGTPLPSS

SEQ ID NO: 97460 - protein, 62 aa, Gossypium hirsutum
  unsure (1)..(62): unsure at all Xaa locations
  Clone ID: LIB3146-021-Q1-K1-H3.pep
SLVQSLSRNPRLSLRLNHQENYDNRFSFFFYIFPLLFFFVFSFIMYETSHFVGIYLAADXXX

SEQ ID NO: 97461 - protein, 68 aa, Gossypium hirsutum
  unsure (1)..(68): unsure at all Xaa locations
  Clone ID: LIB3146-021-Q1-K1-H4.pep
EXPGXGPTPXPLLVVFHLYXLAFKPPSEPLXICVDEGHEIARFGVLIHXSSVIARRCEPQFEKWCNFM

SEQ ID NO: 97462 - protein, 91 aa, Gossypium hirsutum
  unsure (1)..(91): unsure at all Xaa locations
  Clone ID: LIB3146-021-Q1-K1-H5.pep
GKLALCEATGRASKNVEQWDGCCGVRTCVAXGKLPKVSAELFGPLCNWARINSLGFIDLGLIGPNVFGPLFYFFMLIYLGPGLKLGITIIF

SEQ ID NO: 97463 - protein, 90 aa, Gossypium hirsutum
  Clone ID: LIB3146-022-Q1-K1-A3.pep
CSSARIEVEELLPQSHGYTERQFLLRKSLAIHILRCNLGEMQQDQVHSCIKDIMKKRAIHIHSGILTLASLCNQSGGHYPIEKLYEPWWQ

SEQ ID NO: 97464 - protein, 65 aa, Gossypium hirsutum
  Clone ID: LIB3146-022-Q1-K1-A6.pep
FTISLAITAVHIHVRLQVLLYQSALESPLGITAIGKAISTQQCSSAGYDTSSKASFIVSTTASNT

SEQ ID NO: 97465 - protein, 97 aa, Gossypium hirsutum
  Clone ID: LIB3146-022-Q1-K1-B8.pep
KRRIGEFSPLVIQTKISFLCVVFSSLKNIYKSSLKKKNKSRRDSLSEHGFETGLKDPFLAVVGHRVWCALVIRWREKSMSTRGFKVSTSKGKIENVF

SEQ ID NO: 97466 - protein, 69 aa, Gossypium hirsutum
  Clone ID: LIB3146-022-Q1-K1-C12.pep
ETLGHPRCKPHAATLTHVRPSSRVARPRPVPPPRLRDLWFVVWSLDSSKVGSREGVGFSPFILLMLWSN

SEQ ID NO: 97467 - protein, 60 aa, Gossypium hirsutum
  Clone ID: LIB3146-022-Q1-K1-D2.pep
PSMADKQSLCIHLNPKIKKGGCMNRLTFRKKKKNRRSCQNCEHRPYKRHHWDGLGLRRAA

SEQ ID NO: 97468 - protein, 62 aa, Gossypium hirsutum
  Clone ID: LIB3146-022-Q1-K1-D4.pep
PCKAAKLKLLSNLNTITTSAGGMIMANIQNKKEEDKVLKELIAKALHKGSSGGTGLKKIGMK

SEQ ID NO: 97469 - protein, 127 aa, Gossypium hirsutum
  Clone ID: LIB3146-022-Q1-K1-D6.pep
RSPGPWSSLMRRSPDGFGGRWELPHRRSPPLYRMERIRSPDRPCFAGEMGVRRHGSPPYLPQPSNDLRDLDPSRDHGHPRSGISNKSPSGRILLRNSRRLDLVDPREKNECDDYFGGPMPSGKVHDL

SEQ ID NO: 97470 - protein, 132 aa, Gossypium hirsutum
  unsure (1)..(132): unsure at all Xaa locations
  Clone ID: LIB3146-022-Q1-K1-E1.pep
AEXEPSNGTELETPREGTVGARCGGSSVSHGWLPGDIPRSLLALAFEYRTCLGAPRLCAVAPDLATLGFGLRXLVLELGPPVNTGLGILGFGPFXLGVGFCTXAYYNLGLMGFEIWNVSGLLKFGLFIFIXX

SEQ ID NO: 97471 - protein, 58 aa, Gossypium hirsutum
  Clone ID: LIB3146-022-Q1-K1-E10.pep
TNLNATGGSIILHQITPSMQLIYPKHISSHLTDISYKNTYPQILSTSSALLCPTKKLK

SEQ ID NO: 97472 - protein, 84 aa, Gossypium hirsutum
  unsure (1)..(84): unsure at all Xaa locations
  Clone ID: LIB3146-022-Q1-K1-E12.pep
DAWADAWADAWADAWVVTFLFLGLCAFSPKGLFVGAIAIFVVLACKQFIYIYYPVLGFQSIRGAAGVSLVRNSLYIYIIQXYLI

SEQ ID NO: 97473 - protein, 53 aa, Gossypium hirsutum
  Clone ID: LIB3146-022-Q1-K1-E4.pep
GQNMMERLSIITIHRKQCDHRPRMKFNLPNCNDTINIMKRSSIYLSCMPNRLC

SEQ ID NO: 97474 - protein, 143 aa, Gossypium hirsutum
  Clone ID: LIB3146-022-Q1-K1-E5.pep
HASGAWSFARPFTPLMWAVTAAFFLIVGSVVWILEHRRNDEFRGPPKQQFVTILWFSFSTMFFSHRENTVSSLGRLVLIIWLFVVLIINSSYTASLTSFLTVQQLSSPIKGIDTLIGSNERIGFQVGSFTEGYLMEELNIPKS

SEQ ID NO: 97475 - protein, 106 aa, Gossypium hirsutum
  Clone ID: LIB3146-022-Q1-K1-E6.pep
YETHTTTLLNKPYNVDPQRYFLQHNDNRSSALSHAGYNLINKLLTYDPAKRITSDDALNHDAFPELSLSKSNYFLPTFPPKLLIEHFSWLIWRNLTQPKNFYPHFT

SEQ ID NO: 97476 - protein, 97 aa, Gossypium hirsutum
  unsure (1)..(97): unsure at all Xaa locations
  Clone ID: LIB3146-022-Q1-K1-F10.pep
MSKVMMGGMLAKSLQAPDVVFEKVWRAVYLAFIGVVFGGSGVFRXKLAENALRLVLAVTRSGLLTEKVLKTPQVFLKTPTLSVHKHGPWYITPIGNM

SEQ ID NO: 97477 - protein, 40 aa, Gossypium hirsutum
  Clone ID: LIB3146-022-Q1-K1-G5.pep
FVRMVALHYPFFEAEHMYYIESKVLALQSVSFEVLIMYNI

SEQ ID NO: 97478 - protein, 44 aa, Gossypium hirsutum
  Clone ID: LIB3146-022-Q1-K1-G7.pep
TFFAFAYCVLIKQKKKDNLYHFSRYQKIKIICSLDKKKKKKKRP

SEQ ID NO: 97479 - protein, 48 aa, Gossypium hirsutum
  Clone ID: LIB3146-022-Q1-K1-H11.pep
KQNPIHSLLNSPMGAYNHVADLLKKNHSPGMRFLHTVRRWEYRLHLFY

SEQ ID NO: 97480 - protein, 85 aa, Gossypium hirsutum
  unsure (1)..(85): unsure at all Xaa locations
  Clone ID: LIB3146-022-Q1-K1-H2.pep
HAXAHASAHAYGNNEIFMWCINHPFTSFNNPSKNYKVCSVITTHFCDKNYTHKANHLSDACKKCNHSLKAYSANAAIDLSIFLNY

SEQ ID NO: 97481 - protein, 51 aa, Gossypium hirsutum
  Clone ID: LIB3146-022-Q1-K1-H3.pep
QHSIDHSTLISGDNREVEHGLSVKLQVQKLIIQATSHENLCQNYVGWCPFW

SEQ ID NO: 97482 - protein, 76 aa, Gossypium hirsutum
  Clone ID: LIB3146-023-Q1-K1-A1.pep
NLTRFSKPSGYINGYLKKYHSTIGAMKKLGSKNHLLDSSAKRKAFQLTTEAKKAALSGLEMFVEPPESWLIHLLRN

SEQ ID NO: 97483 - protein, 43 aa, Gossypium hirsutum
  Clone ID: LIB3146-023-Q1-K1-A12.pep
TQFILSMACCRIHGFPCMFAALHTLVAPLERISMYNKTFTFYL

SEQ ID NO: 97484 - protein, 123 aa, Gossypium hirsutum
  Clone ID: LIB3146-023-Q1-K1-A7.pep
MEEEKGTTGSINLSLNGKEEKINLSGQVHHLPFCIKFNGPCTVSQYFKPKLKGMEIDGLAVEEAHFRGRKLQGTTISLPNGYAGFVLAKNNSGKRKACDVSEGNSNDWEMKAKFDKLTYWNHD

SEQ ID NO: 97485 - protein, 67 aa, Gossypium hirsutum
  Clone ID: LIB3146-023-Q1-K1-A9.pep
KSVKMTLTQADPAWTGLSLLTEKPTLMIFGRYTTIYGVAYVILSIQIINRCWSMRMKPKTELRKELK

SEQ ID NO: 97486 - protein, 128 aa, Gossypium hirsutum
  Clone ID: LIB3146-023-Q1-K1-B1.pep
FRFFLLLQDSVTAEGAKVSEEGIIETFENDDEALDAFDNVLVVMDLSHFGRLRVSGDDRIQFLHNQTTANFECLSEGQGCETVFVTPTARTIDIAYAWIMKKAVLLVLSPETCGNITEMLNKYIFFAD

SEQ ID NO: 97487 - protein, 60 aa, Gossypium hirsutum
  Clone ID: LIB3146-023-Q1-K1-B12.pep
KWRQMLKKGQSIRPLQRNNKAGFINGCQSLTLMLRNRFLWEADRLSETRLSFEGLIVSWQ

SEQ ID NO: 97488 - protein, 60 aa, Gossypium hirsutum
  Clone ID: LIB3146-023-Q1-K1-B5.pep
PTQQDYRPRLKQCCCCLIFIEVTDYEEMQHRSVTTYRHPQPRITGITGGNRLTDSNARCL

SEQ ID NO: 97489 - protein, 73 aa, Gossypium hirsutum
  Clone ID: LIB3146-023-Q1-K1-B9.pep
LSVCMFVIVGHVDNMCPSRKAGNSSYPIVRIDTAGYVKICYDRASSWLFPQTHCRSPTLRSLCAEKQPEMHRR

SEQ ID NO: 97490 - protein, 58 aa, Gossypium hirsutum
  Clone ID: LIB3146-023-Q1-K1-C12.pep
PLHVTSSLLKILTYHSMFPLLINLTKSLSLFIPIILIITSQNNSIIYLFIHYKIISIF

SEQ ID NO: 97491 - protein, 87 aa, Gossypium hirsutum
  Clone ID: LIB3146-023-Q1-K1-C2.pep
CTETSCRFCFAKCVLLIAISEKYEMGFPYYYYHYYHYYYYYYYYYYRLQRGLKRKPMALIKKLRKAVICSYLSSFISYVYQFWIILI

SEQ ID NO: 97492 - protein, 135 aa, Gossypium hirsutum
  Clone ID: LIB3146-023-Q1-K1-C3.pep
MKQIFKPNISNGDLYRDDQEGSSRTTMSGNGDTMIQTSGFHRFLHAKYLNPAQAVPLYILAQILGSIMAALMGEFIYGIKSDVLTTRPGQGCQAAFLAELIADFIVVFVIAAVTQQARSVGPLSGLVIGMSIALA

SEQ ID NO: 97493 - protein, 60 aa, Gossypium hirsutum
  Clone ID: LIB3146-023-Q1-K1-C5.pep
NYYAWTGSCPYPHLRVSQSLTCPLYLPRSGASALHLPTHTGSNSCCFYARGPTISHNAMT

SEQ ID NO: 97494 - protein, 66 aa, Gossypium hirsutum
  Clone ID: LIB3146-023-Q1-K1-C7.pep
QHGSIRAFIILCLLTKSFYILNALISMAGSSSCYRNQANDGFHGLHGFAPRVLVIVIQRGLDIDGM

SEQ ID NO: 97495 - protein, 86 aa, Gossypium hirsutum
  unsure (1)..(86): unsure at all Xaa locations
  Clone ID: LIB3146-023-Q1-K1-D11.pep
CGKLLILIGYTWHGNVRNVMRRKETNHHEALXGHDSQSRLFQIDLICYDIIDSAIKGCAGGIHLPSTCXVNQVHEPXKELLDPASK

SEQ ID NO: 97496 - protein, 66 aa, Gossypium hirsutum
  Clone ID: LIB3146-023-Q1-K1-D5.pep
EHFSLGMSVIHTCLFQVQIINPCKWTKYITWIKYFRARSDLSWSITLFESTPASGSKPSNNLPWIL

SEQ ID NO: 97497 - protein, 75 aa, Gossypium hirsutum
  Clone ID: LIB3146-023-Q1-K1-D8.pep
PLRATVTGLLLQTCRWRLGAGQIWDNAGLKINRTDLLASNLRELKIDMCTRSTSDDDNDHTKSQPKSDAFVVAED

SEQ ID NO: 97498 - protein, 44 aa, Gossypium hirsutum
  Clone ID: LIB3146-023-Q1-K1-E1.pep
HSLTLIFTRSLSFRRRRAATGPGLKMGPQINYARGRENYWKDGI

SEQ ID NO: 97499 - protein, 73 aa, Gossypium hirsutum
  Clone ID: LIB3146-023-Q1-K1-E10.pep
KDCFSAIFDYNFNIRYRLFNNMHLNMSFLISLSRKGFHTLLKVDRPIFISPSPVLWVKKKKRRKTPERTRGSP

SEQ ID NO: 97500 - protein, 52 aa, Gossypium hirsutum
  Clone ID: LIB3146-023-Q1-K1-E6.pep
RGSFLPFRLILSTATLTDDDDGLCHYLPHLHERHQEDTSCACTRTRACRLDA

SEQ ID NO: 97501 - protein, 108 aa, Gossypium hirsutum
  Clone ID: LIB3146-023-Q1-K1-E7.pep
PRVRSSCALSLLSNQPWGSRNQALNFSVNGVISTEGSSAAQPTTLHGAVVNPYSNASLDFNGSDTVRSSHKMLPHLDLGQIPDPVNCQFSSDLELSQQSWMSYMEHEQ

SEQ ID NO: 97502 - protein, 102 aa, Gossypium hirsutum
  unsure (1)..(102): unsure at all Xaa locations
  Clone ID: LIB3146-023-Q1-K1-E8.pep
AYSFSSTVTEEDEFLCPNLNHQLQRHQGICSDTRTRTSARDLVANAVEXPLASDQQEQDLVDLDKDPKLDYDCGLTSRKLPVLVEENSTNAADVHIMMNKSP

SEQ ID NO: 97503 - protein, 38 aa, Gossypium hirsutum
  Clone ID: LIB3146-023-Q1-K1-F11.pep
YSTINKNPLYTFQLHSSAYVLLEHIRIPPHIHYAAHQQ

SEQ ID NO: 97504 - protein, 71 aa, Gossypium hirsutum
  unsure (1)..(71): unsure at all Xaa locations
  Clone ID: LIB3146-023-Q1-K1-F5.pep
KETARKVGYSTNTEISSFTEKMKIVFRKHNNMHPCILAQFRKHNNGNNXSSMLNFQEYLLQTRLCSISCPT

SEQ ID NO: 97505 - protein, 44 aa, Gossypium hirsutum
  Clone ID: LIB3146-023-Q1-K1-F7.pep
RSVVEHFTTLGIIYNEMYIRLSSHHLVKHDHIRLSTQSNNPNHA

SEQ ID NO: 97506 - protein, 41 aa, Gossypium hirsutum
  Clone ID: LIB3146-023-Q1-K1-F9.pep
CMEGCPVVASHVLSQPWMYYRSESAYDIPMMLCPFPFTRII

SEQ ID NO: 97507 - protein, 67 aa, Gossypium hirsutum
  Clone ID: LIB3146-023-Q1-K1-G11.pep
HTFSLPLNFPKTTICGGLIQRWDAPTHNYLHMLNIAVYQSALKTQILYHVPETKSKSFFLFHSTNVK

SEQ ID NO: 97508 - protein, 71 aa, Gossypium hirsutum
  Clone ID: LIB3146-023-Q1-K1-G3.pep
HSSAVAASVAPPEATEPNPESVLNSTDSLADRPVSQPISYPATYLCPQFGPDYDHAAHDSHHRPQHIPADH

SEQ ID NO: 97509 - protein, 65 aa, Gossypium hirsutum
  unsure (1)..(65): unsure at all Xaa locations
  Clone ID: LIB3146-023-Q1-K1-G6.pep
RVXPRVRPLVLPLLLPRPRDDIRELALTLMRRLYALNLLFIFKAILKRISLRLMRIEFMTMISID

SEQ ID NO: 97510 - protein, 82 aa, Gossypium hirsutum
  Clone ID: LIB3146-023-Q1-K1-G9.pep
ISPTYHMGGAFSKRRPATNHHPNKIYIVGYHPPLKNQHLQKDSLSIVKLFSFSNTKRCKRRVLTPTSSTSLMNDTSLSTYPY

SEQ ID NO: 97511 - protein, 48 aa, Gossypium hirsutum
  unsure (1)..(48): unsure at all Xaa locations
  Clone ID: LIB3146-023-Q1-K1-H10.pep
MKKKDDNRKLFYSRAKQNAKEYGAHEKELIKMKLEARXKRGFYVNTEA

SEQ ID NO: 97512 - protein, 47 aa, Gossypium hirsutum
  Clone ID: LIB3146-023-Q1-K1-H2.pep
RPRVRGRVGSNAPGVQEQVLIKKIIKPHDKYIAYVTDFFQNHTLFHK

SEQ ID NO: 97513 - protein, 47 aa, Gossypium hirsutum
  Clone ID: LIB3146-023-Q1-K1-H4.pep
RRVRRRLSSNDPSVQDQVHMRKVIEHHDKSMPYLAKFVHKHTVFKTR

SEQ ID NO: 97514 - protein, 78 aa, Gossypium hirsutum
  Clone ID: LIB3146-024-Q1-K1-A1.pep
GTILLKKPLYRESTDIVIHSVGDQPEYKAIAEIGTELAGDKNLQESEIDGMKEIKTTDAGKVVEKPALRVTETTRPVL

SEQ ID NO: 97515 - protein, 111 aa, Gossypium hirsutum
  unsure (1)..(111): unsure at all Xaa locations
  Clone ID: LIB3146-024-Q1-K1-B1.pep
KDISRVPGLIRRRAAKYHSLTPQIDDLFRRKNASDPSXPTLTVEIETHKQTQFLLEASILHQHASYTNRKLMTLQTNIGKSYYIDDILRSGSAKPSTKQSMDWITNNLHEV

SEQ ID NO: 97516 - protein, 144 aa, Gossypium hirsutum
  unsure (1)..(144): unsure at all Xaa locations
  Clone ID: LIB3146-024-Q1-K1-B10.pep
IKQGQYVYDIPTAANSIGGAPGDLSNHLQNLKAKGEITYELKDPAYCYKIVKVPSDFCSLTELLTRWLLDIENCKVWKXDAMYSSAVFVVDTCEKTHDCNVAQQTTCLQERILDYFKGDNNLDVLDKMGQNSPFVPADIKVFLQ

SEQ ID NO: 97517 - protein, 133 aa, Gossypium hirsutum
  unsure (1)..(133): unsure at all Xaa locations
  Clone ID: LIB3146-024-Q1-K1-B5.pep
ELLNLEKLGKSDFSRVPSLMRKQARRYQALTAKIDDLCRRMQASDPSEPTLSVEFETQRQTEFLLEAFRLQQHASETGQKLMALQTEIGKSYYKDDIGRSGSAKAGTKQSMDSIRNNLREVXRKLEIWLARII

SEQ ID NO: 97518 - protein, 34 aa, Gossypium hirsutum
  Clone ID: LIB3146-024-Q1-K1-B6.pep
FLPLFHYSIRSPSCLLNHPTLELHHFLRPSVSDF

SEQ ID NO: 97519 - protein, 55 aa, Gossypium hirsutum
  Clone ID: LIB3146-024-Q1-K1-B7.pep
NSPIVWPKWPGQVRSLETLSHQAQVRNSLTRNQYRSIQASSTSLRAISAPYGHRT

SEQ ID NO: 97520 - protein, 73 aa, Gossypium hirsutum
  Clone ID: LIB3146-024-Q1-K1-C12.pep
FYRKSIQSLNHKRYIIDSSIIHIRQLINVHEGATSEPTGDSMSVHLRPLRCAMRHLRRSKHGNDRDALDTMVF

SEQ ID NO: 97521 - protein, 117 aa, Gossypium hirsutum
  Clone ID: LIB3146-024-Q1-K1-C3.pep
KMFEVFADMEELGVKPSISVVSMVGNAFQKLGMLDKYDKLKKKYPPPKWEYRYIKGKRVKIQVKQLQEFDKKAKGVSEDKETEENSSLEHQEAEASLNKIAKGATEDNETEWIMKEA

SEQ ID NO: 97522 - protein, 60 aa, Gossypium hirsutum
  Clone ID: LIB3146-024-Q1-K1-C7.pep
ISKRASAFFFIISLVQFFFFFECFFFFSFLVRLIFWYVLLAFCGDFFFFCFDENNTSFGH

SEQ ID NO: 97523 - protein, 71 aa, Gossypium hirsutum
  Clone ID: LIB3146-024-Q1-K1-D10.pep
DSWSCFIMKTARSSSKNDCISIITCHYSIIISACLRSVIYFGLKHNLKSHVAFMQMDHIAGIFQCTDDAET

SEQ ID NO: 97524 - protein, 83 aa, Gossypium hirsutum
  Clone ID: LIB3146-024-Q1-K1-D12.pep
YRTELGVKILYWGAESQAGDQHRRAKIRGCGLMKAELVCLMMSLDCCKEEKEKLEASMQDCRGEKSQISLELSVAQELLVAYT

SEQ ID NO: 97525 - protein, 101 aa, Gossypium hirsutum
  Clone ID: LIB3146-024-Q1-K1-D2.pep
QECERQLAAKEASLPLEPSADEENAVNLLVRMPDGSRRGRLFLKSDRLQSLYDFIDIGRGVKPGTYRLVRPYPRRAFSDDECSLTLNELGLANKQDALFWS

SEQ ID NO: 97526 - protein, 56 aa, Gossypium hirsutum
  Clone ID: LIB3146-024-Q1-K1-D5.pep
HASDFLHFFGMEGDEGAANDLKGSVTHTNALNSFTASSQIIFARVVGVLLLLLDSG

SEQ ID NO: 97527 - protein, 98 aa, Gossypium hirsutum
  Clone ID: LIB3146-024-Q1-K1-D8.pep
FQMETKEKKKKKKNPNRIIKAKTNKGTTFLLFLILISIGFFFIFRISSFYFQNPPFDNRFLCGFIAKILVTVLSLFGLASAAAFSLCFCYFWVTLQVC

SEQ ID NO: 97528 - protein, 118 aa, Gossypium hirsutum
  unsure (1)..(118): unsure at all Xaa locations
  Clone ID: LIB3146-024-Q1-K1-D9.pep
MRPDEIKVPNWIGPDVRRLISKILDPNTKTRISMEKIMENSWIRKGLDPKPELVDPEVKEPAIGLQTGTPCNLNAXDIISVSAGFDLSGLFTEQEQKKEVRFTFNKTASTILSKLEDV

SEQ ID NO: 97529 - protein, 96 aa, Gossypium hirsutum
  Clone ID: LIB3146-024-Q1-K1-E10.pep
SNSLNSIYILSALLLLLICVCLNFISPYVMSTINSSSNSLITLCCSSYFSSQYHIEPASTSCSFSFSVVTSGSTSPSSLVFFFFFFFFFFFFFFFT

SEQ ID NO: 97530 - protein, 133 aa, Gossypium hirsutum
  Clone ID: LIB3146-024-Q1-K1-E12.pep
AGEFSGPIAIPLPVGSVLVLNGNGADVAKHCVPAVPTKRISITFRRMDELKRPIGYAPESDLQGIEPLSYDAERPKGFNSPKSERPVRQPFRREDKREAKGLTENNEPSEWRSSTRPRRGPSYRRRFTVNQSR

SEQ ID NO: 97531 - protein, 96 aa, Gossypium hirsutum
  Clone ID: LIB3146-024-Q1-K1-E8.pep
QLRHAEMFLRTFRHKRRVRRCVHICITGLTTPCLPCFTIPDEGQRHISMGALNSNRPDTLTTHMPYFKKVTSCLTCVVCDEPHTLRLYLVHKLSIR

SEQ ID NO: 97532 - protein, 68 aa, Gossypium hirsutum
  Clone ID: LIB3146-024-Q1-K1-E9.pep
FKLSSAHFSVWTPSKTTSAIEKVVTLIKVCFRVFIRFFKRPLISLFDLHFVYKLLLNYFIYMYIQISV

SEQ ID NO: 97533 - protein, 53 aa, Gossypium hirsutum
  Clone ID: LIB3146-024-Q1-K1-F10.pep
SKRPIGVPPTREYASSLVCLHILSPPPTVCPAPWKPSPHSNQQLLAPLQRTRG

SEQ ID NO: 97534 - protein, 75 aa, Gossypium hirsutum
  Clone ID: LIB3146-024-Q1-K1-G11.pep
SHCFFSTQSFSNSRPMAAGAYKMAAYNNSPLEINTVGGNTNRFKKPYAGKMFPKVCRAAVGNIKNNRVMHSTATF

SEQ ID NO: 97535 - protein, 53 aa, Gossypium hirsutum
  Clone ID: LIB3146-024-Q1-K1-G3.pep
FSLFYSTEKPCHCVHVSVRLEHSGRSTYFFFFYLLPHFIFFLSSKEEKAAVHS

SEQ ID NO: 97536 - protein, 103 aa, Gossypium hirsutum
  Clone ID: LIB3146-024-Q1-K1-G4.pep
PRMRPLFRLCYAKTCEERAAFTVAHNPCTCLATPSCTAYGLMFKIGCNFLQLWNGDAIITVYALVGKLYIFVIGHFECLCIQRGKIQSALNTEKSVTSVYRMD

SEQ ID NO: 97537 - protein, 55 aa, Gossypium hirsutum
  Clone ID: LIB3146-024-Q1-K1-H1.pep
NLKLSVLGSKKTSHFISAGIDLHWLVNIQGTHFHIRDLRPFLKNPSYSPPTWPLR

SEQ ID NO: 97538 - protein, 56 aa, Gossypium hirsutum
  Clone ID: LIB3146-024-Q1-K1-H11.pep
RQGFTTAHLHHHIENSEDRLLTSGATGTPPESDPIHDIFHIDTTMSSYKCTLQRFE

SEQ ID NO: 97539 - protein, 132 aa, Gossypium hirsutum
  Clone ID: LIB3146-024-Q1-K1-H4.pep
GIGADDQNETLFTTLVDTDILLKPNRPALVVSSTSWTPDEDFGILLEAAVMYDRRVAALLDENDSADEGVLWKEISGGKQYLYPRLLFIITGKGPEKEKYEEKIKRLNLKRVAFRTMWLSAEEYPLLLGSAD

SEQ ID NO: 97540 - protein, 135 aa, Gossypium hirsutum
  unsure (1)..(135): unsure at all Xaa locations
  Clone ID: LIB3146-024-Q1-K1-H5.pep
RPRVRANVLVHEDQAWGGRIRGSMPFRRTLILLLAAEPLQHYLQAYXREPTRPKIKISVSAHSTCDTAPQCFNNKATRVRDNKXIPAYVIAITGQSTRKTIFIDGSATVYPHGVIDPTEELGTLADTYGICLHDD

SEQ ID NO: 97541 - protein, 70 aa, Gossypium hirsutum
  unsure (1)..(70): unsure at all Xaa locations
  Clone ID: LIB3146-025-Q1-K1-B11.pep
SFFFFXFFFKQNTHYISYFSNNIKXFKHHSYILLTYLYHPSQIXNQXINLLTKSIFYTITLPYLXTPINP

SEQ ID NO: 97542 - protein, 52 aa, Gossypium hirsutum
  Clone ID: LIB3146-025-Q1-K1-B3.pep
KAVRLQKIIRPVIYLGEHMTGDDWNAHFYMANSLVYQGQMTFSLYNLITPSP

SEQ ID NO: 97543 - protein, 66 aa, Gossypium hirsutum
  unsure (1)..(66): unsure at all Xaa locations
  Clone ID: LIB3146-025-Q1-K1-B4.pep
LTLFQTRRSYAWGRWDCTFLHGERPGLSMPNDXVLIIECTRSPSPMLLPLPTLSSTCITGTLIEVE

SEQ ID NO: 97544 - protein, 102 aa, Gossypium hirsutum
  Clone ID: LIB3146-025-Q1-K1-B5.pep
KISIMNRDHDPHSKARDSDVRVNLLQVFEDVVFVGVEVFATIHSEGYRHMYHLMGQRESNSRVVTLVTLEATPFFIIRRHCKVTVFFQQRESVNPQAVLSQG

SEQ ID NO: 97545 - protein, 72 aa, Gossypium hirsutum
  Clone ID: LIB3146-025-Q1-K1-D5.pep
RLKFYILSFRPIPCMKKRYPKRLEFHSSHNSYFLFHPFYMNVSSTSGIQKKQAVISSNAGDNSRYSMGFPRT

SEQ ID NO: 97546 - protein, 73 aa, Gossypium hirsutum
  Clone ID: LIB3146-025-Q1-K1-D6.pep
NPFSPVWRMWMIWRSVSLLCGLCQVEGKKNVNKNKNKNKNKKLTISRVSSSHIVCKSLEEFYVKLLLLRKIDR

SEQ ID NO: 97547 - protein, 48 aa, Gossypium hirsutum
  Clone ID: LIB3146-025-Q1-K1-E2.pep
KTIKHLNNFKILIQLIFNRFNRSIPIFSLSVQNLFQIDTSVGSRFKHP

SEQ ID NO: 97548 - protein, 78 aa, Gossypium hirsutum
  Clone ID: LIB3146-025-Q1-K1-F3.pep
MSLLTAANQVRAGHILIKHQVSSQKAYCKDPEGLVFYTNNRNTSVSLLKQHLDDIIYNIPTVDKVVSKFSLMLCDKNY

SEQ ID NO: 97549 - protein, 121 aa, Gossypium hirsutum
  Clone ID: LIB3146-025-Q1-K1-G11.pep
PFQQRLSRQTQRRKITVNIRITCGQTTPTITLTPNTQPLCSSPNKIIQSYNTETYKKLNGILFTAKHTLQNPQTKPMAVPSITDLDINAINDPEPYMTNTKNIKRHVNINLYNKIYIAKIM

SEQ ID NO: 97550 - protein, 151 aa, Gossypium hirsutum
  Clone ID: LIB3146-025-Q1-K1-G3.pep
GFGTIFGEQQTGDVGNVGIDLFFEMLFESLSKVEEHRVVSVPYQSVEIDININPHLPSEYINYLENPMEIINDAEKAAEKDIWSLMQFTENLRRQYGKEPYSMEILLKKLYVRRMAADLGINRIYASGKMVGMETRMSKRVFKLMTDSMIS

SEQ ID NO: 97551 - protein, 55 aa, Gossypium hirsutum
  Clone ID: LIB3146-025-Q1-K1-H6.pep
SFKTAPPFFLFIKLNFFFLLLFFFFFSFFIFFYLFFLFFFFFFFFPLAKFSTFMY

SEQ ID NO: 97552 - protein, 58 aa, Gossypium hirsutum
  Clone ID: LIB3146-025-Q1-K1-H8.pep
YFEYILVFIKSVEMLHNNPSHSLGFTKDISLFLLSSFILFQNLLCESQARMEHFVLAF

SEQ ID NO: 97553 - protein, 66 aa, Gossypium hirsutum
  Clone ID: LIB3146-025-Q1-K2-A11.pep
QLHNFVEVKKHRDVSYNFNYIFLFFFFCFNQIHSLCRKEKNGTANIPAYLMCLRLISLLLFFQSHK

SEQ ID NO: 97554 - protein, 66 aa, Gossypium hirsutum
  Clone ID: LIB3146-025-Q1-K2-B3.pep
PLCAKNSLQLLRQLDEHRFCQSRMQGPLGVISIGYVSNPLHREVCLWPSANALWALAYALDVSQLM

SEQ ID NO: 97555 - protein, 135 aa, Gossypium hirsutum
  Clone ID: LIB3146-025-Q1-K2-B5.pep
TPIIFAGQITSVLGSVEELHAPSELSSSIPATFSPFSSSVESGDCNNESFSSSVENDDSFVEYSPSSSSSSSSSSSSSIRLSSTKNDDLSGEYSSSSSFSSAGCNDSINGYSSFSSAGYNDSIKGYSSSSSSPAE

SEQ ID NO: 97556 - protein, 135 aa, Gossypium hirsutum
  Clone ID: LIB3146-025-Q1-K2-B6.pep
DGRFSTDAIDAVGWRRKLCMVNVAKQGILYDAANDIWEQMPEGMVGGWRGPVAAMDEEVLYAVDEGKGLLTRYNQDSDNWEVIMEVESLKGACQMAAAGGRLCVICGDGEILVIDVVAAPPKFWAVQRPAELEPL

SEQ ID NO: 97557 - protein, 59 aa, Gossypium hirsutum
  Clone ID: LIB3146-025-Q1-K2-B8.pep
KKEYSNIKHMQLSSTSYHIIHHRTISRDIATLLRLFAICSSEAYLNAIYMHINLIIFVS

SEQ ID NO: 97558 - protein, 106 aa, Gossypium hirsutum
  Clone ID: LIB3146-025-Q1-K2-D5.pep
MTEAGDPFVESEVIGSDHLMEPSFHKYVTVRRGGGGADMEEQESSGSNSIAGSGQQHWGFSSSSWEPNSADSTDRWSLRTKSRQEDYNSPLGLHRHAFAEAGSGMK

SEQ ID NO: 97559 - protein, 135 aa, Gossypium hirsutum
  Clone ID: LIB3146-025-Q1-K2-D7.pep
GRVGGRVGSHASANFPFVEGNPFTATLWVGLEGFHMTVNGRHETSFAYREKLEPWSVSGVKVVGGLDLLSAFAKGLPVPEDHDLIVNSKILKAPVITRKRLVMLVGVFSTGNNFERRMALRRSWMQFEAVRSGDV

SEQ ID NO: 97560 - protein, 97 aa, Gossypium hirsutum
  Clone ID: LIB3146-025-Q1-K2-D8.pep
PRVREKLTKQTLLEQTMSEQLKERQEQEKRLQKVAKTMNHMERAKREEAAPLIEAAFQRRLLEEKVLHEREQQMFYLHLHFHILKGRAAFICRSLSS

SEQ ID NO: 97561 - protein, 66 aa, Gossypium hirsutum
  Clone ID: LIB3146-025-Q1-K2-E9.pep
RMVEVKCNTKGKFQHKGQKTEILVFMPTKASKDNCNDPIVSEKRSNQNPHHQTNVLASLPIHICML

SEQ ID NO: 97562 - protein, 82 aa, Gossypium hirsutum
  unsure (1)..(82): unsure at all Xaa locations
  Clone ID: LIB3146-025-Q1-K2-F4.pep
ANVTRIGHAGAIVRLQGSSSLTSMYTRKGKKGINQDAMTVWENFTGEKNVFFCGVFDRHGPSGHKVAXHVCDALPLKLSTMH

SEQ ID NO: 97563 - protein, 59 aa, Gossypium hirsutum
  Clone ID: LIB3146-025-Q1-K2-G6.pep
QGKTCPKFYFRVYSALSSSTAGPLFKSKSLWAVTSLLRIPDNDFIGCIGTSSLRLYPVE

SEQ ID NO: 97564 - protein, 132 aa, Gossypium hirsutum
  unsure (1)..(132): unsure at all Xaa locations
  Clone ID: LIB3146-025-Q1-K2-G8.pep
PTRPPTRPFVYISKELKPRTYRIKAGNTVNIAGLMRVXIDKSFVESLYVTVWASPYLPLHMGKTENAQRILEDHIGHQLQPPIGEQREGQLGSWVRKEFHISGNSWESSSVDIAAAGIGWFAIGLKGEAVLG

SEQ ID NO: 97565 - protein, 116 aa, Gossypium hirsutum
  Clone ID: LIB3146-025-Q1-K2-H10.pep
IEFGDPADVFLAKRNRNGPIQPPITSWISVASTKRIIMDRNLRAVAHIRQNTVVHVRAAPTFQVSPTMVATYLAVRSVRAMEYKTVLRLSGEKTGDFRKRATRSRQLILGLYIYQL

SEQ ID NO: 97566 - protein, 107 aa, Gossypium hirsutum
  Clone ID: LIB3146-025-Q1-K2-H3.pep
SLHRPDVLPINDLGIRKGVQLLYSLEELPRPSQMDQLCEKWRPYRSVASWYLWRFVEAKGAPSSAAAVAAGASLQPLPQEEHQHQQQPQLLDPINSILDLGACTWGQ

SEQ ID NO: 97567 - protein, 62 aa, Gossypium hirsutum
  Clone ID: LIB3146-025-Q1-K2-H8.pep
LPRNFTVRSSEESDSYGRVAAEFEGNVDAVSTEDQNWSGLEGVTRVNSLVQLPRFSEERPNP

SEQ ID NO: 97568 - protein, 45 aa, Gossypium hirsutum
  unsure (1)..(45): unsure at all Xaa locations
  Clone ID: LIB3146-025-Q1-K2-H9.pep
GETLKAPQLKRPLXPFFLSFRVAVKMINYDFSKNAHLEGQKDQAH

SEQ ID NO: 97569 - protein, 60 aa, Gossypium hirsutum
  Clone ID: LIB3146-026-Q1-K2-B4.pep
VRQRILHINSEMLPCIYGAQLIVSKDEDLNKRGIHMTGDEWMHIPTGERAGLQCQMALCL

SEQ ID NO: 97570 - protein, 50 aa, Gossypium hirsutum
  Clone ID: LIB3146-026-Q1-K2-B5.pep
YPPLILMPNPTTFRFFSSSRPTLDPLTLADYHIFSSSSLASRAWIYSLYS

SEQ ID NO: 97571 - protein, 51 aa, Gossypium hirsutum
  Clone ID: LIB3146-026-Q1-K2-D7.pep
PTDAECMENGLSNTDFVHCVMVIRWLDCKGHIAKNFRLKYLTCYSITINLA

SEQ ID NO: 97572 - protein, 86 aa, Gossypium hirsutum
  Clone ID: LIB3146-026-Q1-K2-E2.pep
SRSPPRPFYGQTYGLIYSNFWFKLFLYFKDLLEKFLRLKSTLKFIHLFRPVGPFNLFFLFKVVIFYIKDVWIEKPQMYRSGKKVWN

SEQ ID NO: 97573 - protein, 65 aa, Gossypium hirsutum
  Clone ID: LIB3146-026-Q1-K2-E3.pep
KKFQEFQGNNPYVNRFKTIKRLEVGNDIPSQIFQPEKVMKISSPEIKGLMVSKKSSDQSHRHIKG

SEQ ID NO: 97574 - protein, 31 aa, Gossypium hirsutum
  Clone ID: LIB3146-026-Q1-K2-E7.pep
IGYDHLERLTAKEAMAYSYFYPIRNAESSRT

SEQ ID NO: 97575 - protein, 59 aa, Gossypium hirsutum
  Clone ID: LIB3146-026-Q1-K2-F2.pep
GPSRPPTLRPSLPEGFNKVLLWSIPQNIPGHFIGPFQKHLTFTHPFENKKPFQRTPPIS

SEQ ID NO: 97576 - protein, 73 aa, Gossypium hirsutum
  Clone ID: LIB3146-026-Q1-K2-F5.pep
GTESLAIRALRSGPVGQVYLTNTRNAWAWLQDTYAVRKCDNIYDSAHDLPRNRLCSQRTRPAVGNIQSVLTWP

SEQ ID NO: 97577 - protein, 104 aa, Gossypium hirsutum
  Clone ID: LIB3146-026-Q1-K2-F7.pep
GMVDRLKVEGKVVNTREGNTELVVLDQADNGQIQGRPSGVVHGVKATRYSWTIHQKSDGALKGVYGSPRRNLRKDLWYGLSCIATNINLPWLITGILMLCLMRM

SEQ ID NO: 97578 - protein, 57 aa, Gossypium hirsutum
  Clone ID: LIB3146-026-Q1-K2-F8.pep
QKPAMLSICLRRTHICLCLSALAWELVKKGMIFDGATKSDLHLIGTRYQELWRLYRG

SEQ ID NO: 97579 - protein, 100 aa, Gossypium hirsutum
  Clone ID: LIB3146-026-Q1-K2-F9.pep
IRLILKQGPDQVQGHVRDSAAKSAATNTEDHTKDVVTALPNTLPDIARLGSWWWSVRLTVLGPDVGESGEESSVVRIFVRVFIRDSIECLAGSIAGSSGK

SEQ ID NO: 97580 - protein, 41 aa, Gossypium hirsutum
  Clone ID: LIB3146-026-Q1-K2-G11.pep
LKQPSLKKITHKYDPNTNHILATLNLILVFLFCLSMNYLKI

SEQ ID NO: 97581 - protein, 47 aa, Gossypium hirsutum
  Clone ID: LIB3146-026-Q1-K2-G3.pep
ALGPILGDHQTGEVGKVGLDLSFESFLESWSKVENHRVRSSPNSQGE

SEQ ID NO: 97582 - protein, 51 aa, Gossypium hirsutum
  unsure (1)..(51): unsure at all Xaa locations
  Clone ID: LIB3146-026-Q1-K2-G6.pep
GNTSCVRGPSQNGWGAHMGKIMRRRTLSDSIKRAYMRGERVLXIYPRHPLV

SEQ ID NO: 97583 - protein, 85 aa, Gossypium hirsutum
  Clone ID: LIB3146-026-Q1-K2-G9.pep
MGIYSTEMEAVTDATGLFSTAFFTNLAMMVVVYKIVCGMFLGPEDLRQKLHKEPIHVGDITESKLRAYKGSDTKKPILIAMKGQI

SEQ ID NO: 97584 - protein, 53 aa, Gossypium hirsutum
  Clone ID: LIB3146-026-Q1-K2-H3.pep
ELGALALDFSHMTFTRFDFHKENFLFHARVLGYENLKKKCFWTYPTLKTGYST

SEQ ID NO: 97585 - protein, 141 aa, Gossypium hirsutum
  Clone ID: LIB3146-027-Q1-K1-A11.pep
EVVIGLEYLHCLGIIYRDLKPENILLQKDGHVVLTDFDLSFMTPCKPQVLKHPLPNKRRRSRNQPPPTFVAEPSTQSNSFVGTEEYIAPEIITGAGHSSAIDWWALGILLYEMLYGRTPFRGKNRQKTFSNILHKDLSFPS

SEQ ID NO: 97586 - protein, 90 aa, Gossypium hirsutum
  Clone ID: LIB3146-027-Q1-K1-A12.pep
KNHDKMKKIMLATTQTDREGTFINHYPFCPMMAADKTLIATANMPILDFHAFPMCKHLNCFPPFIQECQNPLRILRNLLVDNFLTSFLAS

SEQ ID NO: 97587 - protein, 80 aa, Gossypium hirsutum
  Clone ID: LIB3146-027-Q1-K1-A6.pep
WALVIWVNFWTGVMNIWVGLVLSGPGKNGLLQLPLFARCHVMGTEHRLKSPILPGHTRPWCSSSFLNSLIPFFNINFILI

SEQ ID NO: 97588 - protein, 39 aa, Gossypium hirsutum
  Clone ID: LIB3146-027-Q1-K1-B11.pep
MIGLPIQLANIWCNFINCSLTQMRMGSPFFFNLTKLVFL

SEQ ID NO: 97589 - protein, 37 aa, Gossypium hirsutum
  Clone ID: LIB3146-027-Q1-K1-B12.pep
LDPRTTVGKNTNHLFLVTLPHMIDIPPTDTIQSFDEA

SEQ ID NO: 97590 - protein, 64 aa, Gossypium hirsutum
  Clone ID: LIB3146-027-Q1-K1-B5.pep
TSTVYAETTALGVRIAAGPKMSTAKVASFNALTCVYCAPKTHLSTGSCVRTFWCLLPLQDDHDG

SEQ ID NO: 97591 - protein, 120 aa, Gossypium hirsutum
  unsure (1)..(120): unsure at all Xaa locations
  Clone ID: LIB3146-027-Q1-K1-C1.pep
VRYLLQTLKHVTRDDAPIDLIAMCHKPIDENPYFQYESSLPGHDKLXHICAWTYASPVQLYVSFGDAVIFDTTHRLDAYDMLLGVWAGVENHGMTTFFGCVLLRDENIQSFSWGLKVENL

SEQ ID NO: 97592 - protein, 91 aa, Gossypium hirsutum
  unsure (1)..(91): unsure at all Xaa locations
  Clone ID: LIB3146-027-Q1-K1-C2.pep
NRWQTNRGQCIRSCHLNILAIFSVEARVGQVAYKLLLPYSARIHSTFHVSQLKKHIGSSVSAFTXPPVGSDGALLKTPIRVLNRRLIKQGN

SEQ ID NO: 97593 - protein, 65 aa, Gossypium hirsutum
  Clone ID: LIB3146-027-Q1-K1-C8.pep
QVGDLVLRNTEASFLALQQGKMAPNWEGPYNVVEKIGYGAYRIAKMDGSVLPRTWNARHLKKYYV

SEQ ID NO: 97594 - protein, 58 aa, Gossypium hirsutum
  Clone ID: LIB3146-027-Q1-K1-D10.pep
HASAHASGPLAWRFFRILVLISMTYIMLTSLKVMIGMGLQKHATWYVSRCRKRKHHLD

SEQ ID NO: 97595 - protein, 126 aa, Gossypium hirsutum
  unsure (1)..(126): unsure at all Xaa locations
  Clone ID: LIB3146-027-Q1-K1-D2.pep
EKIFRIPLAEKPHDDFRAWSGELSGEYTMRSAYKLLQSXEGDLELMLYKPTIXEFYKKLWLLNLPXKIKITIWKISWNYLPIRVNMLNRMLTNTTICPRCERGTKNMDHLFRECPVSISVCRELSC

SEQ ID NO: 97596 - protein, 136 aa, Gossypium hirsutum
  Clone ID: LIB3146-027-Q1-K1-E1.pep
PIGAAYVDSLFGLEPPTRGPLGDEEYVTLCSEAISAGTDTSATTVEWAMLHLVMNQEIQEQLYQEIIDCVGKDGEIKEEDVEKMPYLEAIVKETFRRHPPGHFLLSHAATKDTELAGYTIPAGVYVEIYTAWITED

SEQ ID NO: 97597 - protein, 67 aa, Gossypium hirsutum
  Clone ID: LIB3146-027-Q1-K1-E9.pep
PTRPPTRPELLNTLKLGLHCVDPSPSARPEVHQVLQQLEEIRPESETPASSAPSGDDGAGGVPSTSE

SEQ ID NO: 97598 - protein, 114 aa, Gossypium hirsutum
  unsure (1)..(114): unsure at all Xaa locations
  Clone ID: LIB3146-027-Q1-K1-F1.pep
VQNSRSFTYCSHLSHKHEQTSRSALPSFIAXVDDLERLKMPGCGKVHPAFGPVEEETKRLAVLHEEPGALAYPLRYDVSQARKSIDASDTDLKPFMYTCAKNAMERSVSPDAFI

SEQ ID NO: 97599 - protein, 140 aa, Gossypium hirsutum
  Clone ID: LIB3146-027-Q1-K1-F11.pep
ALNANLKRIEESTAALAAADDWVLTYPPGGTRQSGWPSSASVGNTTIFQHKLTSSAHRFNSMVQDFFEDVGPLLSMELGGQTLEGLFRVFDSYVNMLIKALPGLMDEETNFEDTGNKIVRMAETEAQQIALLANASLLAD

SEQ ID NO: 97600 - protein, 61 aa, Gossypium hirsutum
  unsure (1)..(61): unsure at all Xaa locations
  Clone ID: LIB3146-027-Q1-K1-F2.pep
KTGLVCSVNMLSLSQWGQCHMNKEKLVVLLFFIGLMYNLIHFFLTXKKKKKKKKKKKKKKK

SEQ ID NO: 97601 - protein, 93 aa, Gossypium hirsutum
  Clone ID: LIB3146-027-Q1-K1-F3.pep
YGTRLHGPGRCEHLGREQLQHHSKDHRVNPVFVSSTSSAIYVVGLCLCTVMVALTAMGDVGIVWITMRVMETLKPTLEIAMFGVLTIGHRLRG

SEQ ID NO: 97602 - protein, 68 aa, Gossypium hirsutum
  Clone ID: LIB3146-027-Q1-K1-F4.pep
HRLPSHLPHLTTLKNPLSFAMHGLYRPLMCPHHRHCSNEIHNALFTVTAERPTYTDVTAATSINEGAC

SEQ ID NO: 97603 - protein, 60 aa, Gossypium hirsutum
  Clone ID: LIB3146-027-Q1-K1-F8.pep
SARQESVHNLSVRYVSLINGFRRCWNIKSAHLINRCKEWLERYGFGMFNHAGDFTGGGPA

SEQ ID NO: 97604 - protein, 61 aa, Gossypium hirsutum
  Clone ID: LIB3146-027-Q1-K1-G1.pep
CHGRTDAIYGSHSCSRMLNVSLPISIGERNDQSSSIEAKNNQVSTSFPEQVRSKGCSLPLK

SEQ ID NO: 97605 - protein, 50 aa, Gossypium hirsutum
  Clone ID: LIB3146-027-Q1-K1-G12.pep
RWMLVMVQNESDTLLMLLVLHHFLSFCAYGTVMVWYGSLTILDLGLFEQR

SEQ ID NO: 97606 - protein, 61 aa, Gossypium hirsutum
  Clone ID: LIB3146-027-Q1-K1-G3.pep
GVWQVYLDGHERNHIRVRVLMRRCRVCLMAYWVWLSDRNGRQSRAFLVERQLETVKSSPRR

SEQ ID NO: 97607 - protein, 105 aa, Gossypium hirsutum
  unsure (1)..(105): unsure at all Xaa locations
  Clone ID: LIB3146-027-Q1-K1-G7.pep
HPHIREFMSYTFLDCQPPHQERXFFEMAAQTSHLWSLQKDIRRPTIPENPPQSILGSFKPSISXIYQVSPARGSIDLDVTTPKHLNHTVYLKHITVDLFAIEHKI

SEQ ID NO: 97608 - protein, 56 aa, Gossypium hirsutum
  Clone ID: LIB3146-027-Q1-K1-G9.pep
FACFCMYIHLFDFLNHAGILTFYFGCKFEALFKGFDRRGRKRKCLKHYIILSDLIK

SEQ ID NO: 97609 - protein, 136 aa, Gossypium hirsutum
  Clone ID: LIB3146-027-Q1-K1-H1.pep
PRVRELMAYAYLAVSPPSMSKQFDEIAAAASNKSTIKKDLRYPDIEEKALQFILDSCESSISKYSKFLQASGSMDLDVTTPKQLNRRVFLKQLAVDLCTSEQRILFRAQYILRTRLRDMRSGELRALRIFDGLRNI

SEQ ID NO: 97610 - protein, 82 aa, Gossypium hirsutum
  Clone ID: LIB3146-027-Q1-K1-H10.pep
EIKEQKQEKGGSFYFQIFVLLYFIFAFEQKMERKHLTGEPTVTSSKDSSPSSRSDLKVRGRGLFFRFSSDLKSLALDPFEAG

SEQ ID NO: 97611 - protein, 142 aa, Gossypium hirsutum
  Clone ID: LIB3146-027-Q1-K1-H11.pep
NLNRLVLAGNRFTGRIPDSLGRLKKLLILDLSRNSLSGHLPLGLGGLASLLKFDLSNNQLKGKLFARNAYLKNLTLLDVRNNQFSGGLNQPILDMHSLEELMLSCNPLGGDIMRLDWQSLQSLVVLDLSNVGLKGEIPESLS

SEQ ID NO: 97612 - protein, 76 aa, Gossypium hirsutum
  Clone ID: LIB3146-027-Q1-K1-H12.pep
YANRCRTRRGAAKRAATRTTNRIPHLTGVDTVVASLTAELRDPPRRLATILVHLPMDTLMMHVMMHVPVTLTETIT

SEQ ID NO: 97613 - protein, 46 aa, Gossypium hirsutum
  Clone ID: LIB3146-027-Q1-K1-H3.pep
RDIITKSVSHSPLDDLDGDHGIAHFASLQSVEDGSEIAFYISPTIL

SEQ ID NO: 97614 - protein, 106 aa, Gossypium hirsutum
  unsure (1)..(106): unsure at all Xaa locations
  Clone ID: LIB3146-027-Q1-K1-H5.pep
RVRELMAYAFLAGTPPIMNKQFEEIAAAPSNKSSFKNDLRHPDIEEKTLECTLDSCESSVSKNSKLLQAXGSMDLDVTTSKQLNLIMFLTQPSVDLCTRDQSKLFF

SEQ ID NO: 97615 - protein, 130 aa, Gossypium hirsutum
  Clone ID: LIB3146-027-Q1-K1-H6.pep
MLGISVFVVVLVPYLAVLVYISLVWQLASVVSVLEDDYGIKAMKKSKALIKGKTGVAVAMFLVLVVCFIGIQVVFEIGVLFYWSMSVEMRIGIPILCFLMLFMVVLFGLVAQTVIYFVCKSYHHENIDKS

SEQ ID NO: 97616 - protein, 87 aa, Gossypium hirsutum
  Clone ID: LIB3146-028-Q1-K1-A12.pep
CNDRKILIIMMENETGLCFYVNRGSQPRKCSHIKFRLSFRMWMSACGATSCSSSPESMPYKFEITSLESPTYVVLKSNRSAYRTLSL

SEQ ID NO: 97617 - protein, 125 aa, Gossypium hirsutum
  Clone ID: LIB3146-028-Q1-K1-A6.pep
PRVRGRVGLEKGDPPDAITYKVIFRGLCSGGGPIGEAVDFVVEMTEKGFLPEFSSFYMLAEGLCALSMEDTLIKLVNMVIDKANCSDSEVSIIRGFLRIRKFQDALATLGNILDSRKQKKPYWSG

SEQ ID NO: 97618 - protein, 58 aa, Gossypium hirsutum
  Clone ID: LIB3146-028-Q1-K1-B11.pep
YPTSVSIPSPFIQGCVSKRSRSSNGFQDQYNDYVSITPGFIHIEPCYTQTSGSITHST

SEQ ID NO: 97619 - protein, 122 aa, Gossypium hirsutum
  unsure (1)..(122): unsure at all Xaa locations
  Clone ID: LIB3146-028-Q1-K1-B3.pep
RIDARGAEIEPAREGMRIWCELIEMLNAHKMGMTTDTVNTYGYIAKAIXTHDVHGNSXRTNIKVHEPQNRVSTTVAIXIVAETTITQLQKEPALMNEYRVPYLNVHNGDSKGYYCLMEYTGQ

SEQ ID NO: 97620 - protein, 129 aa, Gossypium hirsutum
  Clone ID: LIB3146-028-Q1-K1-C5.pep
LLKPSDVILSFDGVKVANDGTVPFRHGERIGFSYLVSQKYTGDTALVKVLRDSKILEFDIKLATHKRLIPAHTSAIPPSYYIIAGFVFTAVTVPYLRSEYGKDYEFDAPVKLLDKHLHAMAESTDEQLV

SEQ ID NO: 97621 - protein, 130 aa, Gossypium hirsutum
  Clone ID: LIB3146-028-Q1-K1-C7.pep
SDNVSGKISGSGNSKCHCSKRRKNRVKKVIRVPAISSKIADIPPDEYSWRKYGQKPIKGSPFPRGYYKCSSVRGCPARKHVERAPDDPSMLIVTYEGEHRHTQPAMHENMAPAVGMDWTSSQRDNKQILI

SEQ ID NO: 97622 - protein, 107 aa, Gossypium hirsutum
  Clone ID: LIB3146-028-Q1-K1-C8.pep
LINGPTNVTLNSTGEQYYICTIARHCELGQRLAITVSATSSSPLPAPSPTTPATPSPTSNDCTPAPTSGPTAGSIPAPNATPNSSSSSSVLATLLLSLFPIFMGLIF

SEQ ID NO: 97623 - protein, 58 aa, Gossypium hirsutum
  Clone ID: LIB3146-028-Q1-K1-C9.pep
ILDANLILPFEAVIFFGITFAVSPPNETCNLNIYLLKEMTFHALAVAKKKKKKKKKKK

SEQ ID NO: 97624 - protein, 64 aa, Gossypium hirsutum
  Clone ID: LIB3146-028-Q1-K1-D1.pep
LYHLTVNNISLDNKQCDSLMGRINSVKKHIRVPVITTKISVYSTIRLFMAEILAKANQSLPHFR

SEQ ID NO: 97625 - protein, 44 aa, Gossypium hirsutum
  Clone ID: LIB3146-028-Q1-K1-D3.pep
PAMFEVYQLLRAIGEQYNFTTEDEISMPSDTNDVGYLEELIVAR

SEQ ID NO: 97626 - protein, 131 aa, Gossypium hirsutum
  Clone ID: LIB3146-028-Q1-K1-D8.pep
RNDRDYRDRLERSEKSRADDILIEKSRDRSIERHGRECSVERSIDRNLDRLGDKAKDERSKDERSKVRYADTSVEKSHADDRFHGQSLPPPPPLPPHMVPQSVNATGRRDDDPDRRFGSTRHTQRLSPRHE

SEQ ID NO: 97627 - protein, 60 aa, Gossypium hirsutum
  Clone ID: LIB3146-028-Q1-K1-E10.pep
IHVGRYLTQDYLPVRKLMVKKIVLIAIVRHKEHDNVHIVLSKAATLSDLTVNMELTGLFN

SEQ ID NO: 97628 - protein, 97 aa, Gossypium hirsutum
  Clone ID: LIB3146-028-Q1-K1-E11.pep
ERNSKRESEISSNGDTNQNALERAAYADANSLLDKEEQDIERAITGITEVQMKEIQDKFLRFEEMDLQTEKERQQLESMKNLLFIDQLNLSFRRNYT

SEQ ID NO: 97629 - protein, 125 aa, Gossypium hirsutum
  Clone ID: LIB3146-028-Q1-K1-E5.pep
SKICHPAEFDFYLCSHAGIQGTSRPAHYHVLWDENNFTADGIQSLTNNLCYTYARCTRSVSVVPPAYYAHLAAFRARFYMEPEMQENGSNSCSNGQNKGTRVVGESGVRPLPALKENVKRVMFYC

SEQ ID NO: 97630 - protein, 45 aa, Gossypium hirsutum
  Clone ID: LIB3146-028-Q1-K1-E8.pep
NISIAVQSSYVRSSSAILPKTNPDFRATKNYFNTRMIDLSIADAW

SEQ ID NO: 97631 - protein, 41 aa, Gossypium hirsutum
  Clone ID: LIB3146-028-Q1-K1-F9.pep
GGQMGMRQLDPKASKAEGNGLATAKDLNRLTAVLIKMRGGH

SEQ ID NO: 97632 - protein, 85 aa, Gossypium hirsutum
  Clone ID: LIB3146-028-Q1-K1-G11.pep
ALQHESSFNYIQSSIRHTAFTIFSHFGLTFTWISYYPLVENKMGRSSPWTSHNNSFLLALHKKVTSTKHHLRNCRCFEEAYGCRN

SEQ ID NO: 97633 - protein, 59 aa, Gossypium hirsutum
  Clone ID: LIB3146-028-Q1-K1-G2.pep
NGHAGFLLSCYDAKLSYDSKTDTFQARYSPHVRQTTEQNISWDRLRAPPVDTCSYDLHI

SEQ ID NO: 97634 - protein, 60 aa, Gossypium hirsutum
  Clone ID: LIB3146-028-Q1-K1-G7.pep
FNIHPHHLPVNNSISILYPNFAMFLNPMPIFHSQETSVKQFIQGVHFYKLPPSVIVHRLK

SEQ ID NO: 97635 - protein, 130 aa, Gossypium hirsutum
  unsure (1)..(130): unsure at all Xaa locations
  Clone ID: LIB3146-028-Q1-K1-G8.pep
PTRPTTRTRKLHYNPGGICTIVQINDLKNSTRLTKWELRQATKQALQLLXDNYPEFVARQVFINVPWWYLAANKMISPFLTQRTRSKFVFAGPSKSAENLFRYIAAEQVPDRYGGLIKDGEFGNTDAVTE

SEQ ID NO: 97636 - protein, 61 aa, Gossypium hirsutum
  Clone ID: LIB3146-028-Q1-K1-H11.pep
KKKGTLNKFQESSQTFKDGEVNVCYILFLFYFPIFSSYFILPNLYWDSSILRCFQPFLIFF

SEQ ID NO: 97637 - protein, 99 aa, Gossypium hirsutum
  Clone ID: LIB3146-028-Q1-K1-H3.pep
VVVNSVSVLRHLLFIYKTLKLLFVFLFKLIVSRNYESVSDFLDNFEKNSPNALSLSLSPLSNKIYIEIHYIYNTNILDCLEIDDYIYLSFFMFILLSMF

SEQ ID NO: 97638 - protein, 64 aa, Gossypium hirsutum
  Clone ID: LIB3146-028-Q1-K1-H4.pep
CYGEPFIGDFVFFSTRKLDFFGSFILCKPFNALVYRVTKGLKMVTLTHFVLVTKRSIGLTLQYT

SEQ ID NO: 97639 - protein, 130 aa, Gossypium hirsutum
  Clone ID: LIB3146-028-Q1-K1-H5.pep
RLLAAILFKVMHPHEVLPPVLGASVYAIAWILSYDGLSGIPTPAESVDSLTSRVRSTDINKSMPVMKDTSPNPSRFLLSLLNRSPFSCSSFQKGVKGPAVGAVTNGVESMSYNQQAPVMSAGMSLYQAAL

SEQ ID NO: 97640 - protein, 34 aa, Gossypium hirsutum
  Clone ID: LIB3146-030-Q1-K1-A1.pep
GLLYELGAIPKACACLEPNNQPSVPFGVYKSDTT

SEQ ID NO: 97641 - protein, 67 aa, Gossypium hirsutum
  Clone ID: LIB3146-030-Q1-K1-A11.pep
DITLYQTRSASNLLSRAITVTVIAFSTGSYVVLKPSHGLAIASCFICPAVYFCYYIEVFIAWVKMDL

SEQ ID NO: 97642 - protein, 57 aa, Gossypium hirsutum
  Clone ID: LIB3146-030-Q1-K1-A4.pep
EKVPSSNCHQLFASHKLIVPGNQKLKQAKLLRIPGGLIDRWTFCISSTRLLICLIEP

SEQ ID NO: 97643 - protein, 56 aa, Gossypium hirsutum
  Clone ID: LIB3146-030-Q1-K1-A5.pep
DLAAALKEMNGKYVGNRPIKLRKSNWKERIDQDALVRQKNHYQKKPKLQKKGILHK

SEQ ID NO: 97644 - protein, 131 aa, Gossypium hirsutum
  Clone ID: LIB3146-030-Q1-K1-A9.pep
DAWAGIVTDEMLSMPKAPYLVIGLLEALAAATGMAAGAILSGASIPILSQTFLVWQILLSTIFLGRRYRVNQLLGCFLVTVGVVITVASGSSSGHSLKEAGIFWSLMMIVSFLLQAADTVLKEVIFLDAEK

SEQ ID NO: 97645 - protein, 42 aa, Gossypium hirsutum
  Clone ID: LIB3146-030-Q1-K1-B5.pep
KSELNESDKRNTQHSFSVRKWRHPSDQVVKINFDAAYDARTC

SEQ ID NO: 97646 - protein, 40 aa, Gossypium hirsutum
  Clone ID: LIB3146-030-Q1-K1-C12.pep
VPAIKEPFQGFLTIMLAMPLFVFFGREENDKMVRTFYIKR

SEQ ID NO: 97647 - protein, 128 aa, Gossypium hirsutum
  Clone ID: LIB3146-030-Q1-K1-C3.pep
LLFHFLIKNRKLKDASVLFNEMVKNEFFPSKTDCIAAVKIFLDIGDPYVAVKVWKFMIENYDSDLDETGNLLINGLRDANMLPEAVKYAEDMIEKGIKVTSATLSRLKHSLSREKKDGVYERTLKKWK

SEQ ID NO: 97648 - protein, 78 aa, Gossypium hirsutum
  Clone ID: LIB3146-030-Q1-K1-D1.pep
KKLEDCLEEEEMESESNRRVLVMQRKYISYETLRRDMVPCATPGASYYDCNGGHQANHYNRGCEVITRCARGIKGIKA

SEQ ID NO: 97649 - protein, 82 aa, Gossypium hirsutum
  Clone ID: LIB3146-030-Q1-K1-D12.pep
ILWFYHKFLSRGHSWPVNTSNLYRLVNDHISFFRLRFRRRWVLFRSGFRRKLFSCVHIFHSENIPLVKIHTQLFCFLPSIII

SEQ ID NO: 97650 - protein, 127 aa, Gossypium hirsutum
  Clone ID: LIB3146-030-Q1-K1-D5.pep
MQKPEAEDCNVSHLQSKETISAPSFQSQPQYHAPKSRAAAIDRQRRLRIDESIKALQELLPSSSERGLGNALDDIIDYVKFLQLQVKELSRSRLGGEPTSNPFVFFEGYGHYVLHEQMINEPLEEMM

SEQ ID NO: 97651 - protein, 131 aa, Gossypium hirsutum
  Clone ID: LIB3146-030-Q1-K1-D8.pep
PRVRRTIYEEADANKRRKRYARPLIDLHMKIYYSEGMEPWSLKKNTISDVPEGAIIIREHTALNNLFNCLWFNEVNLFTPRDQLSFGYVVYRLKGLFKFFMFQNCEYYSLFILHPHTREHSSKVEWVKSLS

SEQ ID NO: 97652 - protein, 46 aa, Gossypium hirsutum
  Clone ID: LIB3146-030-Q1-K1-E11.pep
ITNQYRLSVTMFLKCSKNSNTKINSKFILHGDELISVQTIISTLTI

SEQ ID NO: 97653 - protein, 92 aa, Gossypium hirsutum
  Clone ID: LIB3146-030-Q1-K1-E5.pep
TPASQTPTKEAPNIYLVGAENETLPYWLSSTSALLCLLQKNLRSNGFLSAGTQRSGGNTGFLGRVSYDKWINGAGEALARSRFYCVEPILYV

SEQ ID NO: 97654 - protein, 67 aa, Gossypium hirsutum
  Clone ID: LIB3146-030-Q1-K1-F3.pep
SLPFFGHFLWNNTEHKTNLKDKDGRPDEAAPQSTQMKQVMCALSIQKENISNHQSPGANPRPDDIAA

SEQ ID NO: 97655 - protein, 112 aa, Gossypium hirsutum
  Clone ID: LIB3146-030-Q1-K1-F5.pep
SDSDDEDEGRRKRRKEKRKKRDDSSDEDNDDHRRHRKRKSRKEKRRRRSHRHSDDSESSDVSDDPGKRHRRKSQRHESLSDSDVSGSDDSRVGRGAKRSEKRSRKRHHEDDE

SEQ ID NO: 97656 - protein, 124 aa, Gossypium hirsutum
  Clone ID: LIB3146-030-Q1-K1-F7.pep
VKKNKIVNRPLAGTTRRGKTQAEDELAEKLLLSNEKECAEHIMLVDLGRNDVGKVSKYGSVKVEKLMNIERYSHVMHISSTVTGELQDHLTSWDVLRAALPVGTVSGAPKVKAMELIDELEVSR

SEQ ID NO: 97657 - protein, 94 aa, Gossypium hirsutum
  Clone ID: LIB3146-030-Q1-K1-F9.pep
GTAKRGPKGGVKVAAPPEKEQDTVVNTLFKKRAMHFALPGALALQKDLHRSVEWPIDGRIQRQKRMLKLTLKVPPASNHFTKTLDTNLSTILFK

SEQ ID NO: 97658 - protein, 83 aa, Gossypium hirsutum
  unsure (1)..(83): unsure at all Xaa locations
  Clone ID: LIB3146-030-Q1-K1-G10.pep
ENYEFLSRCIKENLGFHNGKPLAACIIYKCLHHWHSFESERTAIFDYIIEXINDVLKVGAENETLPYWAVNTLALLCLLQKNL

SEQ ID NO: 97659 - protein, 44 aa, Gossypium hirsutum
  Clone ID: LIB3146-030-Q1-K1-G11.pep
DKHRYSNLSFINSLDANYISFFYKSENNRARGGRQAKLIRSQTL

SEQ ID NO: 97660 - protein, 36 aa, Gossypium hirsutum
  Clone ID: LIB3146-030-Q1-K1-G7.pep
ISFIHIIIKDKKKQLAHCNSIIYQAAWLFFIFFLFV

SEQ ID NO: 97661 - protein, 77 aa, Gossypium hirsutum
  Clone ID: LIB3146-030-Q1-K1-G9.pep
MLESNIVLTQGYDLRSLHTCLEKFPTNQSAIMSQKASYLITVVQINCYFQRTIVQYFIWQFPNKLIPYSRPFSLRFF

SEQ ID NO: 97662 - protein, 58 aa, Gossypium hirsutum
  Clone ID: LIB3146-030-Q1-K1-H2.pep
LHQINLISTLNQLCSSIFLLLIMNCIPLYSEISLSVPYSCNTCVYNTLIHVHENEIYS

SEQ ID NO: 97663 - protein, 65 aa, Gossypium hirsutum
  Clone ID: LIB3146-030-Q1-K1-H5.pep
TPMRPVLAGVEARVEVTLRVQGGIKGLYQNRGHLHLPDYPDQGQGPTNCRFCCCCRNVCRMASIC

SEQ ID NO: 97664 - protein, 74 aa, Gossypium hirsutum
  unsure (1)..(74): unsure at all Xaa locations
  Clone ID: LIB3146-032-Q1-K1-A1.pep
APINIRSERMATEKLRIECEDQTPHNXKLSQRGARQWPMWGCTASKERWSYTTRETCYLYGGKGQEYPAGRHDF

SEQ ID NO: 97665 - protein, 45 aa, Gossypium hirsutum
  Clone ID: LIB3146-032-Q1-K1-B1.pep
ILLRSKKKKKKKKKKKKKKKKKKKKKKKKKKIKKIIKKKKKKKKK

SEQ ID NO: 97666 - protein, 67 aa, Gossypium hirsutum
  Clone ID: LIB3146-032-Q1-K1-B12.pep
PRVLPLMHERILFCKLLAVAGILCCSTGLYRIKIELELYGCHRVREISATWKQLVAYHLAYCMVSVK

SEQ ID NO: 97667 - protein, 50 aa, Gossypium hirsutum
  Clone ID: LIB3146-032-Q1-K1-B8.pep
TIPPQSPLISPAQKSSKLQFPLSRSIVKLKLKETTKNTRTSFSCLAYISV

SEQ ID NO: 97668 - protein, 89 aa, Gossypium hirsutum
  Clone ID: LIB3146-032-Q1-K1-B9.pep
HFLLDGKKGYQCTYKYWYHRNFSIRYNLNNVLVTQPNPTHHNQTNTAGKSRQTEIHLNLILTDEMRSKANQNQHFTKSDAWADAWADAW

SEQ ID NO: 97669 - protein, 87 aa, Gossypium hirsutum
  Clone ID: LIB3146-032-Q1-K1-C1.pep
ALGIFEFCCGRGCASRTAMTLKQGLGPSPFAFNFDAIINYQHKLFPFCSDLLLYTHHIHINHFLLYTIIHATMRETKKISTLNQKPP

SEQ ID NO: 97670 - protein, 87 aa, Gossypium hirsutum
  Clone ID: LIB3146-032-Q1-K1-C2.pep
MRRTSSYNEAVVSEASFMEILKKPALHGTEVPVYGSAFEPPSSDVASQAGRSGKKKGKKGRQIDPALLGFKVSSNRILMGEIQRLDD

SEQ ID NO: 97671 - protein, 127 aa, Gossypium hirsutum
  unsure (1)..(127): unsure at all Xaa locations
  Clone ID: LIB3146-032-Q1-K1-C4.pep
QKPGPTSERNYGLFYPNEQRVYNIPLSQKGLNGNQSPPASNVNQTAPVNNWGGVSKATSGQTWCMASPNAEAEELXEGLDYACGEGGADCGPIQPNGACYNPNSLVAHASYAYNSYYQKRARVKWSC

SEQ ID NO: 97672 - protein, 57 aa, Gossypium hirsutum
  Clone ID: LIB3146-032-Q1-K1-C5.pep
PYAVAFIAPQRVASLSRNPTRLFVSDTPVVFAHSLLLSISVDPLPIKASVNQHRWMA

SEQ ID NO: 97673 - protein, 102 aa, Gossypium hirsutum
  unsure (1)..(102): unsure at all Xaa locations
  Clone ID: LIB3146-032-Q1-K1-D10.pep
MDLGNWFDDWEGYRSRKTVLEVLRELDADILGLQDVKAEEEKGMRPLSDLAAALGMNYVFAESWAPEYGNAVLSKWPIKXWKVQKIFDDADFMNXLKATIDV

SEQ ID NO: 97674 - protein, 52 aa, Gossypium hirsutum
  Clone ID: LIB3146-032-Q1-K1-E12.pep
YGRTFADCNIHNESSVHLVLRLRRGMHTFVKTLTGSTITLEDESSDTIDCVK

SEQ ID NO: 97675 - protein, 106 aa, Gossypium hirsutum
  unsure (1)..(106): unsure at all Xaa locations
  Clone ID: LIB3146-032-Q1-K1-E2.pep
PTVGLTARDYTRMYWAVHPGGPAILNRIEKRLXLFPEKLSAKRRTLXGYGNASVTHIVCVGYMIDEILMNQQQQMKECQEEQSEWGLILAFGPAVTFEGILARHLT

SEQ ID NO: 97676 - protein, 46 aa, Gossypium hirsutum
  Clone ID: LIB3146-032-Q1-K1-E5.pep
TTIVGAPRVKFDWIRHKDHGEPMSACKSGCFSGRVSSLTVVNFVAS

SEQ ID NO: 97677 - protein, 41 aa, Gossypium hirsutum
  Clone ID: LIB3146-032-Q1-K1-E6.pep
QKLKNGLDKKPKNLENNLKISPPKLQNPSGCSPAIQHRIDT

SEQ ID NO: 97678 - protein, 45 aa, Gossypium hirsutum
  Clone ID: LIB3146-032-Q1-K1-E7.pep
IQDTYTIFLIKQYIPTEWKCLIKTKNVKSNVIMHSNTINLGFTPF

SEQ ID NO: 97679 - protein, 67 aa, Gossypium hirsutum
  Clone ID: LIB3146-032-Q1-K1-F1.pep
MAGPTRASTRPPFSFLCALSVLIYNSLLYFYLLIPLNPFNFKELLLGVCYARLFSQVLLLSVFLFWV

SEQ ID NO: 97680 - protein, 72 aa, Gossypium hirsutum
  Clone ID: LIB3146-032-Q1-K1-F2.pep
PFNSWFFILIRLKTLVSHLIPMAQGGREPARKSAERLAEKSQAEKKISKEAAQIEEKKVRKRQTYKIYIFRY

SEQ ID NO: 97681 - protein, 68 aa, Gossypium hirsutum
  Clone ID: LIB3146-032-Q1-K1-G7.pep
GSSFDSTNNLYCASPLNAQLAASSTASCIDRNGSDTNRHNAQKPCPRQLLLAYACAAASLQRSNSVSQ

SEQ ID NO: 97682 - protein, 49 aa, Gossypium hirsutum
  Clone ID: LIB3146-032-Q1-K1-H11.pep
RTRGIARAALLFIFIYLFLFGVDEILTVTKYTLSPINKKNDLWYQTVLF

SEQ ID NO: 97683 - protein, 88 aa, Gossypium hirsutum
  Clone ID: LIB3146-032-Q1-K1-H3.pep
SKLTPGEEETCCSRNEDVLDDATLVQSNHHELHYCDFQIVYSSTFRVPVLYFRAYCSDGRPLPLDEIEKELPACSSKELSKKKWTFIT

SEQ ID NO: 97684 - protein, 79 aa, Gossypium hirsutum
  unsure (1)..(79): unsure at all Xaa locations
  Clone ID: LIB3146-032-Q1-K1-H4.pep
EXPGXXTHAXPVLXWCXGEXKXELXLTXTVXXXGAXPLESWLLNXXFAIXXWSLXGSWVGITXPLGGCTVGLWKVEVGG

SEQ ID NO: 97685 - protein, 95 aa, Gossypium hirsutum
  unsure (1)..(95): unsure at all Xaa locations
  Clone ID: LIB3146-032-Q1-K1-H5.pep
AHCXPWKVIXVTFLVRTPLRXLXXSRSLLWFQTGHVCDSRGDNLYCFNVIHXHFGPFFLMXLIEREKLFMKGYGPXLASFGLFGLNEERIHSKVL

SEQ ID NO: 97686 - protein, 94 aa, Gossypium hirsutum
  Clone ID: LIB3146-032-Q1-K1-H8.pep
PNQVIEEKLGEPTESSDDSTKGLTDGECRDAGYDAEYVTDENAPKSRIYSIAWSIDSSTITSKMMYASIYDRFKHKLDRIQVGLQATYPTANAI

SEQ ID NO: 97687 - protein, 63 aa, Gossypium hirsutum
  Clone ID: LIB3146-033-Q1-K1-A1.pep
GRVGEEVAAAAQYLKDTLGKEGVQDLITNLSKDRDGKILVENIVKLGSQMEDDNSREEEEGRM

SEQ ID NO: 97688 - protein, 118 aa, Gossypium hirsutum
  Clone ID: LIB3146-033-Q1-K1-A2.pep
MEEPSKSPLPEPGLGVLQANGIDPSIYIASDSTPRYLRLKPGNEAEIEGIEAEIKCKLEKVNWLPGFYSLRPDILIANSKSYLDGKIYGIDAASGAAVSVLNISPGDHVLDLCAAPRA

SEQ ID NO: 97689 - protein, 93 aa, Gossypium hirsutum
  unsure (1)..(93): unsure at all Xaa locations
  Clone ID: LIB3146-033-Q1-K1-A4.pep
LCFDIDKHAYVQQLEVSGIKLAQLVQDLQRTRSRXFFVGGCAAAFGNISSRAAMFDMEYSRWLEDDHTHLSELTTGLHAHLPDTDLQTIVDGY

SEQ ID NO: 97690 - protein, 54 aa, Gossypium hirsutum
  Clone ID: LIB3146-033-Q1-K1-B5.pep
NGKCRNGIQQRKNSYEYGVYGTTCPIPPGKNFTYILHVKDQIGRFFYLPYLAFH

SEQ ID NO: 97691 - protein, 132 aa, Gossypium hirsutum
  Clone ID: LIB3146-033-Q1-K1-B6.pep
LVIVKDACNVPDDDSVGNESGVRLFKNSTPGIVFDHLDEIQGPQKKPKLLPRRGIDENSKEFRRQLLSIAVDGKDILAAARYASQRSLARLEAKEATAKEKAKREEARIAELKRIRGERWLPSMAREMQLSK

SEQ ID NO: 97692 - protein, 69 aa, Gossypium hirsutum
  Clone ID: LIB3146-033-Q1-K1-C10.pep
GDEFGKCYALTGIGAVHIFLGIGFVVYIYNAPVQSSGLWVFPSCVKMRGWRRYSLRDVEAWLSRTAIFP

SEQ ID NO: 97693 - protein, 102 aa, Gossypium hirsutum
  unsure (1)..(102): unsure at all Xaa locations
  Clone ID: LIB3146-033-Q1-K1-C7.pep
HTSEGILYEPGEHSDHVGVIKYVPYVGDSNRAIDVYSSXIFMGGXNTIVLHNKCXYMLLDATNILXMVLLAELNTTNQVNADREGMLHFFHTWATMLIYLIK

SEQ ID NO: 97694 - protein, 31 aa, Gossypium hirsutum
  Clone ID: LIB3146-033-Q1-K1-D9.pep
NSKISFKGKTRSLTTSCTLKFACYWIDIPMV

SEQ ID NO: 97695 - protein, 50 aa, Gossypium hirsutum
  Clone ID: LIB3146-033-Q1-K1-E12.pep
KDVYSLIDEMRWLDSTMGGEWSVKRMNSARQKWSGLKLRDSCEKKIVCMV

SEQ ID NO: 97696 - protein, 93 aa, Gossypium hirsutum
  unsure (1)..(93): unsure at all Xaa locations
  Clone ID: LIB3146-033-Q1-K1-F10.pep
GRADYKHQIESKCMSVLPRPCDFNLFMVQTGXKAHERQLRLYDIRLRHTELHSFGWKQESSDSQSALINQAWSPDGLYLSSGSADPVIHIFDI

SEQ ID NO: 97697 - protein, 45 aa, Gossypium hirsutum
  unsure (1)..(45): unsure at all Xaa locations
  Clone ID: LIB3146-033-Q1-K1-F11.pep
LYLQQNXQQPIYHHSKIKEKNNMLKIQNEELRFNLRKKEIVLSHL

SEQ ID NO: 97698 - protein, 124 aa, Gossypium hirsutum
  Clone ID: LIB3146-033-Q1-K1-F5.pep
GGSDGILHPTLDEKLNNLHEAIAELAAKPKSDESEEEHVLENFHSSRTIRKLILDCPALASTLWKKSLEGKCQLWAQGHSSKVVSAFLESSDSEVRKVAKEELQPLVDDGTLKIPETKQSANEN

SEQ ID NO: 97699 - protein, 130 aa, Gossypium hirsutum
  unsure (1)..(130): unsure at all Xaa locations
  Clone ID: LIB3146-033-Q1-K1-F9.pep
PTRPVNYNKKVLELEREVGKLSGQENLQQRIHHHAKIKEENNMLKIQNEELGVKLRRTEVVLSRVREELGHYRASIGKSPCVNFDEEQRLNNKLRESDEDGCNCAQXLLALCTSVLKAAGITMPISDICP

SEQ ID NO: 97700 - protein, 68 aa, Gossypium hirsutum
  Clone ID: LIB3146-033-Q1-K1-G6.pep
IYVEWLTIGRVASHCSTSTYAAEYSLSHKTDSTSSDPICDCIYIHSVILHTFHDTVFMIQQFFQCHPF

SEQ ID NO: 97701 - protein, 47 aa, Gossypium hirsutum
  Clone ID: LIB3146-033-Q1-K1-G9.pep
TRGEKKHNYEFMIYIQFNEPHFEDNPFHFLRPGKNTPNLTLTKTLQK

SEQ ID NO: 97702 - protein, 57 aa, Gossypium hirsutum
  Clone ID: LIB3146-033-Q1-K1-H12.pep
PIYKPNTQTTNIASISLLAQKNTGYSRNLKKIEANWCCSICQGNGIRLHPRLAIPHT

SEQ ID NO: 97703 - protein, 73 aa, Gossypium hirsutum
  Clone ID: LIB3146-033-Q1-K1-H2.pep
VIPCLEEVVVQVRSPLNAEQKMNTLESLLKYGKNLKKMVIRILQMKSSHSSTDEFFDEICRLRFMNRKIVRIE

SEQ ID NO: 97704 - protein, 123 aa, Gossypium hirsutum
  Clone ID: LIB3146-033-Q1-K1-H3.pep
LLSIPYSTVDPIISRHFDSEKTDNSVYIYILNLGVAPKQPYAYSYSHSESSAGYTNCLGTLWTGNKRYLWIDLGAGPVDYGPALSGDGVLPRGEFHPLAAAHGRPKSEKTLLADLASLIYSAY

SEQ ID NO: 97705 - protein, 71 aa, Gossypium hirsutum
  Clone ID: LIB3146-033-Q1-K1-H4.pep
PELVKSLKQVKEKVVQISLTNSIHWNAHTFALTESGKLYAFGAGDKGQLGVELMNNQTERINPERIDIDLE

SEQ ID NO: 97706 - protein, 73 aa, Gossypium hirsutum
  Clone ID: LIB3146-033-Q1-K1-H5.pep
VAYFQTPSFPITLKHLIIGECPELEYIAQKFEETACLESILFFRSGIKYLPRGLGKLKHLQEIWLLSCSNLVS

SEQ ID NO: 97707 - protein, 63 aa, Gossypium hirsutum
  Clone ID: LIB3146-033-Q1-K1-H7.pep
SRKELLFLVFNFFSLFFTWLILLLLVQSFFFLELTDHHHHHHHHHHHRIHTYIMGFLFFAFFF

SEQ ID NO: 97708 - protein, 63 aa, Gossypium hirsutum
  Clone ID: LIB3146-033-Q1-K1-H8.pep
SRKELLFIVFNFFSLFFTWLILLLLVQSLFFLELTDHHHHHNHHHHHMIHTYIMGFFFFGFFF

SEQ ID NO: 97709 - protein, 74 aa, Gossypium hirsutum
  Clone ID: LIB3146-034-Q1-K1-A1.pep
LSGKITCKRKLLRKFYRSLLQRLIPRILKFGKENYPASFQYAVPINSNDKYPRCCSWAEESLHSSVNVLGFQEW

SEQ ID NO: 97710 - protein, 52 aa, Gossypium hirsutum
  Clone ID: LIB3146-034-Q1-K1-A12.pep
CRICQEEDSAENIETPCAYTVCLNYSHRKCVQHWCNVIGVIICEICHLPYQP

SEQ ID NO: 97711 - protein, 30 aa, Gossypium hirsutum
  Clone ID: LIB3146-034-Q1-K1-A2.pep
TTYISFTLFPALSDHSFNNASPKLWREGSP

SEQ ID NO: 97712 - protein, 68 aa, Gossypium hirsutum
  Clone ID: LIB3146-034-Q1-K1-A9.pep
AMKQTGQFLDNARIFQHLPGTVNRGDNSFEYTFANNTTKQARIRSKMVKMKQSDHSPNKLRISDTLLV

SEQ ID NO: 97713 - protein, 95 aa, Gossypium hirsutum
  Clone ID: LIB3146-034-Q1-K1-B2.pep
MNNHNNLLLPFCILSGSAVVYSDGNARIFDITHKITSQLPTFDSQKGLGHFIWLVSSIKNGSMANISEFKLGTHTGTNVDAPSHFFQKYYEEGFD

SEQ ID NO: 97714 - protein, 45 aa, Gossypium hirsutum
  Clone ID: LIB3146-034-Q1-K1-B7.pep
GYAFTGPHRKEMAGVWTSIDSSSNAIFIRCEHIQQQSLAKTITVN

SEQ ID NO: 97715 - protein, 53 aa, Gossypium hirsutum
  Clone ID: LIB3146-034-Q1-K1-C11.pep
PTRPAAATIRSYSSPLEIPSAVGQRWDVPVGISPSSGLHPEPSIGSVPAGASI

SEQ ID NO: 97716 - protein, 40 aa, Gossypium hirsutum
  Clone ID: LIB3146-034-Q1-K1-C12.pep
FLEEQELIDFYILGKNNIMVEGYLKKIYFLYGEIRCFRKG

SEQ ID NO: 97717 - protein, 106 aa, Gossypium hirsutum
  Clone ID: LIB3146-034-Q1-K1-C4.pep
VTHTSTFAKGWTVPSLVKFLTPASGLQGYWDPYPIDMEFRPPCMVLSTIGISKPGKLEGQSTKECTTHLHQLHVCIPSSRNKTRLLYRMSLDFAPVLKHISFMHYL

SEQ ID NO: 97718 - protein, 45 aa, Gossypium hirsutum
  Clone ID: LIB3146-034-Q1-K1-C6.pep
FYMKSIKGLEDPMVSQPEQEWPFYSICAILLTLTSAPKGSCYNQF

SEQ ID NO: 97719 - protein, 42 aa, Gossypium hirsutum
  Clone ID: LIB3146-034-Q1-K1-D10.pep
MKSGIRVCVLVCLKLFLYIMNPRYPKESERSNFTTWLLIHVN

SEQ ID NO: 97720 - protein, 57 aa, Gossypium hirsutum
  unsure (1)..(57): unsure at all Xaa locations
  Clone ID: LIB3146-034-Q1-K1-D11.pep
PKTKFQSAKIRFTYYKKFKHPIPIAISCATSHISTLINFMXTPRSELTFLFGDLDYI

SEQ ID NO: 97721 - protein, 57 aa, Gossypium hirsutum
  Clone ID: LIB3146-034-Q1-K1-D7.pep
DMYLDKDGEFREMNIYTAICEFRGTSHTTKQSYTKSLQNKISILKKENERLMKLKEL

SEQ ID NO: 97722 - protein, 85 aa, Gossypium hirsutum
  unsure (1)..(85): unsure at all Xaa locations
  Clone ID: LIB3146-034-Q1-K1-E1.pep
RGAPEDIVEKNVERRQKRMIXKNRESAARSRARKQAYTNELENKVSCLEEENERLRKRKELEKLLPSAPPPEPKYQLRRTSSAPF

SEQ ID NO: 97723 - protein, 81 aa, Gossypium hirsutum
  unsure (1)..(81): unsure at all Xaa locations
  Clone ID: LIB3146-034-Q1-K1-E2.pep
IPQDPLHELKTNPNTXKSSPYLKEPSNIGNFSNSSWNILEVHQRFDFSQLSRSIFSVQLMHHTGFLKLESQLIKSDHHQHY

SEQ ID NO: 97724 - protein, 68 aa, Gossypium hirsutum
  Clone ID: LIB3146-034-Q1-K1-E3.pep
HASASVRIGKGFQAEIPDWCGPMDIDDDTIREPLYLYSSEYTYYLYSNKSCKFNSTGSCLQCHDFLNC

SEQ ID NO: 97725 - protein, 97 aa, Gossypium hirsutum
  Clone ID: LIB3146-034-Q1-K1-E7.pep
HFITSQEVQNVQTKRPRNEAVYDEETELQKSTSPCIDQIPSNQHNNIGVGGTSGFCLALCLNQNNGVELEQQPLLPMNLCHNFRLESDGELSLKPGF

SEQ ID NO: 97726 - protein, 61 aa, Gossypium hirsutum
  Clone ID: LIB3146-034-Q1-K1-F7.pep
DEKLTNLKLEWGEEIYNALVTALKELNEYNPSGRYVISELWNFKENMKATLKEVFGYVVRN

SEQ ID NO: 97727 - protein, 93 aa, Gossypium hirsutum
  Clone ID: LIB3146-034-Q1-K1-F8.pep
KKLIIKRLLKNTFFLLFILIHIFKFIFIFLSMHGRFTIVFTINLEFIPENYDYLQIAREELGNKEQSNLLNSTKYHLTTNMDRSRGKATGRVG

SEQ ID NO: 97728 - protein, 54 aa, Gossypium hirsutum
  Clone ID: LIB3146-034-Q1-K1-G12.pep
YKPRTDTRIDVDLYLYKELDAIYGHVHHTLCASCRYLQGILLHSPQYTSEMHEA

SEQ ID NO: 97729 - protein, 41 aa, Gossypium hirsutum
  unsure (1)..(41): unsure at all Xaa locations
  Clone ID: LIB3146-034-Q1-K1-G4.pep
KHLCELCHKKYKPVWMKGGNHCDXELYPDYITHMKKFISTG

SEQ ID NO: 97730 - protein, 101 aa, Gossypium hirsutum
  Clone ID: LIB3146-034-Q1-K1-G6.pep
PTRPATRVPTRAQKHAYYRWGPILCVTFTPFRLDVGVLAFGGVSPIQCMMIQPYSFSNHMGVFRQLHGSAKWPCIKVYCVSFAHGRTASCSCLVVAMCLQL

SEQ ID NO: 97731 - protein, 123 aa, Gossypium hirsutum
  Clone ID: LIB3146-035-P1-K1-A1.pep
GRVGLEAKRSKLSASAEPFNAGALYHPLNSVSVTCVYDVTASQGMLVEPVVPPVAARVPCGPRSPLFYRNNNSYGSFLRYQTPILEQNGFGSPRVMNPHAPEFVPSKIWHMTGTGDLSGSEEA

SEQ ID NO: 97732 - protein, 42 aa, Gossypium hirsutum
  Clone ID: LIB3146-035-P1-K1-A8.pep
VNCLVEKLSHQRKIGTVGPISDIKTETNSRPSDVLESARADI

SEQ ID NO: 97733 - protein, 52 aa, Gossypium hirsutum
  Clone ID: LIB3146-035-P1-K1-C2.pep
QTFCQELESDLSELGVTKIEGMLLKMILENPFSGSVCQFFEKVDGSVGGSVG

SEQ ID NO: 97734 - protein, 39 aa, Gossypium hirsutum
  Clone ID: LIB3146-035-P1-K1-E5.pep
IHVSGSLNASLVLVHLGGRGFKFLPDPIYCGRSGARENL

SEQ ID NO: 97735 - protein, 67 aa, Gossypium hirsutum
  Clone ID: LIB3146-035-P1-K1-E6.pep
QGQPCVRKCDNVSHTISSGMLLGATSSASSVISTDKSDLTLCPTVCSHAHLETHILREVSFRLPNAW

SEQ ID NO: 97736 - protein, 75 aa, Gossypium hirsutum
  unsure (1)..(75): unsure at all Xaa locations
  Clone ID: LIB3146-035-P1-K1-F1.pep
PTRPFISSAYVAPETRESKDMSEKRDIYGFGLILIELLTGKSPADAEFGDQHQSMVEXARYCYSDCHLDMRVDPM

SEQ ID NO: 97737 - protein, 129 aa, Gossypium hirsutum
  Clone ID: LIB3146-035-P1-K1-F4.pep
MERGKKRRREAEEIEAENRDANHSLSLEQNLSFSDTNVALRMMRAQFPQIDKVAIQPFILQSQLYSSVKDRTQVDRELESLRRDKVVRIFKLNTGQDDHGIMFLEDYLKQLEHVVKRMEEKKQGDVDVF

SEQ ID NO: 97738 - protein, 41 aa, Gossypium hirsutum
  Clone ID: LIB3146-035-P1-K1-G3.pep
HSELSDRRTWKLRAIESDLTSQKNVLGHYSNTLGERSHSGW

SEQ ID NO: 97739 - protein, 71 aa, Gossypium hirsutum
  Clone ID: LIB3146-035-P1-K1-H1.pep
HASELSPIPVSRKCFKETKFNAEEVVFKEYIHTTKCLISFHIISLSTVFDLLLLFNNTYFSFHKEHFLLFN

SEQ ID NO: 97740 - protein, 94 aa, Gossypium hirsutum
  unsure (1)..(94): unsure at all Xaa locations
  Clone ID: LIB3146-035-P1-K1-H7.pep
ENGDRNRHGRRVCSSLXRYPVVGSRFREEKSHFSLCNQCYSEGKVPPSFKQDEYKFKEYGRVAEAMXDKCMYFTLQSHKISVTSWVYRSILLHS

SEQ ID NO: 97741 - protein, 45 aa, Gossypium hirsutum
  Clone ID: LIB3146-036-P1-K1-A1.pep
LMVFSILMNIRRKEGSIFRICSTSIPNRSVSLVLKALFQTSDACP

SEQ ID NO: 97742 - protein, 60 aa, Gossypium hirsutum
  Clone ID: LIB3146-036-P1-K1-A2.pep
TRIRLFETGAFNTERYLRLQVDVLFIPFTALPLIKLLIIMKNTIIFSLTIFNLTTIFHPF

SEQ ID NO: 97743 - protein, 85 aa, Gossypium hirsutum
  Clone ID: LIB3146-036-P1-K1-C2.pep
HASGRTPLLRDEEETIQFHQIEDMKTIQDPQEVLHKVVAVITIPDHILQDMKMLVEMAMARSLHTNLMKHHLSARRPSPPGRASR

SEQ ID NO: 97744 - protein, 43 aa, Gossypium hirsutum
  Clone ID: LIB3146-036-P1-K1-D2.pep
LTLNHSQKTRDSFVLNFRSHGNMFTEEHESLTSDHKDLSHASA

SEQ ID NO: 97745 - protein, 57 aa, Gossypium hirsutum
  Clone ID: LIB3146-036-P1-K1-D5.pep
RITLRKGLMADFLVPASRRLLIVGGVGGRWSCCKNTHAQSFCVYSHKINAALFVRVG

SEQ ID NO: 97746 - protein, 65 aa, Gossypium hirsutum
  unsure (1)..(65): unsure at all Xaa locations
  Clone ID: LIB3146-036-P1-K1-E3.pep
VTRTEYSSDSCMERILERDERYVLCXRQLAANENERTGSWTLXHAKLKVRMEVLQTNQSLYMGED

SEQ ID NO: 97747 - protein, 30 aa, Gossypium hirsutum
  Clone ID: LIB3146-036-P1-K1-E7.pep
TFITRINFTNALSDLLVHFLPHPILMVVVS

SEQ ID NO: 97748 - protein, 94 aa, Gossypium hirsutum
  Clone ID: LIB3146-036-P1-K1-F2.pep
RKEVKDQGCVCATLCSTVSQAVLPSKKTADTIHVYTRSVEGNERSCEENHVEKECSSAYDNSSEEDNHRDKGSSSNCSDNIQLTGEDCSLIPSK

SEQ ID NO: 97749 - protein, 55 aa, Gossypium hirsutum
  Clone ID: LIB3146-036-P1-K1-F4.pep
SGGLKSKILIILQSFIQIIHDFLLLTFILLMGNKPKPVRQLKGLYPLYFCLKHQR

SEQ ID NO: 97750 - protein, 40 aa, Gossypium hirsutum
  Clone ID: LIB3146-036-P1-K1-G6.pep
LPLLTDKKVKNKLIGLYIGSLADAFTLTKINVMLLQIHRS

SEQ ID NO: 97751 - protein, 129 aa, Gossypium hirsutum
  Clone ID: LIB3146-036-P1-K1-H1.pep
PTRPAVRTAWYDSKKVVEHIIDGYTKPLRTKGWDKALVEFTAAMLAKGESETKPPLSKRLHEISCPVLIVTGDTDRIVPSWNAERLSRAIPHSKLEVIKNCGHLPHEEKVDEFVRMVEKFLQRAFGGLV

SEQ ID NO: 97752 - protein, 109 aa, Gossypium hirsutum
  Clone ID: LIB3146-036-P1-K1-H3.pep
RLTLEHQQGTSTFAGQQRPLALPSTSGGGGHSREDQEDASNQGSSRKRFRTKFTQEQKEKMLSLAERLGWRIQKHDEEIVQQFCNETGVKRHVLKVWMHNNTHTSCKKP

SEQ ID NO: 97753 - protein, 129 aa, Gossypium hirsutum
  Clone ID: LIB3146-036-P1-K1-H4.pep
KNEIIISAGALGSPQLLMLSGVGPVAHLRSHNIPVVLDQPLVGQGMCDNPMNAVFVPSPIPVEVSLIEVVGITHFGSYIEAASGETFSASVTTTSRNYGMFSPKIGQLSTVPPKQRTPEAIGRAVEYLD

SEQ ID NO: 97754 - protein, 95 aa, Gossypium hirsutum
  unsure (1)..(95): unsure at all Xaa locations
  Clone ID: LIB3146-037-P1-K1-A10.pep
STRFCLRASLPDNNGEFKLEYTPWLVVGLFHPGNKFHCTRHNVASEKIDSLSQLKGIALNTIRSKXLVLLGAIAHVTFLVLYTLMELFDYLIDSI

SEQ ID NO: 97755 - protein, 137 aa, Gossypium hirsutum
  Clone ID: LIB3146-037-P1-K1-A3.pep
PRVRLFRSNDMVQDGQLMYGNLFEASLDAVVHAMEKEGFAEVEVVVSETGWPKGGGEAASVENALAYNENVVRRVVGNVGTPRRPGVGIEIYLFDMFDENRKGGDECERHFGIFGLDGVKAYDLRFNSENKLDVTIN

SEQ ID NO: 97756 - protein, 92 aa, Gossypium hirsutum
  Clone ID: LIB3146-037-P1-K1-A6.pep
SLYHLMWDIYRMFGQWKWISSQTGEDCHRFCTDDRSHLCRCGFMGQYGSLCPQCCSVPQMKHGELDGIVNDFCEPETLGSTGLNLDVSIYMV

SEQ ID NO: 97757 - protein, 73 aa, Gossypium hirsutum
  Clone ID: LIB3146-037-P1-K1-A8.pep
FLSFLSFFTLEICLSCNVFDSYLFMIFLAAMEWLENMAFISNVISLVIYFYAYMNFSLTKSATTLTNFMGLYF

SEQ ID NO: 97758 - protein, 76 aa, Gossypium hirsutum
  Clone ID: LIB3146-037-P1-K1-B10.pep
KMLYGFKNYISYSLNTKLYFICRQILNCNSHSKALIKLTNIRAFSDQCNLLQSSTHFTSGFNLGPYIRQIIILQSI

SEQ ID NO: 97759 - protein, 66 aa, Gossypium hirsutum
  Clone ID: LIB3146-037-P1-K1-B4.pep
MATSKAEGKRRLKEMAEEEEEEEEEDEDNSTTGDDDKKKKGKRGSRTVVGGFCLPACQVENCTADM

SEQ ID NO: 97760 - protein, 141 aa, Gossypium hirsutum
  unsure (1)..(141): unsure at all Xaa locations
  Clone ID: LIB3146-037-P1-K1-B7.pep
ILTILNGLYIVLSPSCKETWTGLSTKALKGIWPYFKITAASAVMLCLEIWYNQGLVLISGLLPNAAIALDSISICMNYWNWDINFVLGFSATASVRVRNELGAGHPKLTKFSVIVVNATSIFISTGFTAXVIICRSLFIKA

SEQ ID NO: 97761 - protein, 108 aa, Gossypium hirsutum
  unsure (1)..(108): unsure at all Xaa locations
  Clone ID: LIB3146-037-P1-K1-C1.pep
SYHGHGDIKPVNELITSSGAVKIGDFSVSHLFEFYLIFXNDNDELRRSAVTPVVTEPECCLGSKYYGKYAYTWXVRSYLGXMVLLIYSFLVETLHDTYEKIVNSPLIL

SEQ ID NO: 97762 - protein, 45 aa, Gossypium hirsutum
  Clone ID: LIB3146-037-P1-K1-C2.pep
QEINDKSNFNPVDVVIFYLCCGKFLDFLLSTTVTWFISGFQRKSI

SEQ ID NO: 97763 - protein, 54 aa, Gossypium hirsutum
  Clone ID: LIB3146-037-P1-K1-C3.pep
KSNLKLMVLRMGLHTMFLPKILNQNRRSSTEQLVGAASSAYLSHVTTHGNLIST

SEQ ID NO: 97764 - protein, 68 aa, Gossypium hirsutum
  Clone ID: LIB3146-037-P1-K1-D1.pep
DMAGVVHLKKTCWIYALLTFDSTFSYSWTTNDGYLSRVYGSNRCRIYLHTRIPTNMIFTFGVRLYELI

SEQ ID NO: 97765 - protein, 76 aa, Gossypium hirsutum
  Clone ID: LIB3146-037-P1-K1-D2.pep
RYFKLAQVHTIIEYITEENKQETLINKHQAYFHTYIYILCIYLKMSAVPSLLSHETLLIVFHQLFWINCLRLFIGV

SEQ ID NO: 97766 - protein, 74 aa, Gossypium hirsutum
  Clone ID: LIB3146-037-P1-K1-D3.pep
VSLVSRVLKNKLKCNSNEGSKLSRHEDCGIEGGTRGRSLSCRHILEFKFGNQPTQYEPKSPPPPKKYLCCHTNW

SEQ ID NO: 97767 - protein, 144 aa, Gossypium hirsutum
  unsure (1)..(144): unsure at all Xaa locations
  Clone ID: LIB3146-037-P1-K1-D7.pep
EFPLAALLLVSTKVSSYDQEEKLEIPVKAPPAPVQTPTPAPSAEVLSPPYEPPAPPPVKVPSPPYEPPVMAPSLPYEPTAPTPPTQPPTPPYIPQNPTPAPXATTPPXYKPPSRTFPPVITXKDCIPLCGPRCXLRSRTKLCLR

SEQ ID NO: 97768 - protein, 48 aa, Gossypium hirsutum
  Clone ID: LIB3146-037-P1-K1-D8.pep
HAFFNSCNPLLPLITLLKVGGNLATVELPNKPLYYPILILVTGKLACI

SEQ ID NO: 97769 - protein, 67 aa, Gossypium hirsutum
  Clone ID: LIB3146-037-P1-K1-E11.pep
ICCLPCRTSEKDSNPIFQHSPGFLVGGLVNSVVFFAMDYGRSVGWCSRLCSSRTGVNDGLLASAHAS

SEQ ID NO: 97770 - protein, 99 aa, Gossypium hirsutum
  Clone ID: LIB3146-037-P1-K1-E2.pep
RTRGIFTYCRQGKVKTAVRILDCVRASGDWHPDVVSYTSLIWGLCNWVGIEEAICYLNKMINEGICPNVATWHVFVQCLFNSLGHLGPIRVLDDILGNG

SEQ ID NO: 97771 - protein, 80 aa, Gossypium hirsutum
  Clone ID: LIB3146-037-P1-K1-F2.pep
AYVERDHRCHQHTQLFGNAWRDCYSNSPTCSENYVLYLEPLYLHKHLGGNLLRLYYSSADSCCTNVNLVKDEPGTTAIVT

SEQ ID NO: 97772 - protein, 61 aa, Gossypium hirsutum
  unsure (1)..(61): unsure at all Xaa locations
  Clone ID: LIB3146-037-P1-K1-G4.pep
TICYVKDNLPLQTLKGHSNXKNFLCLTVYSEYYLCCYXTNEVNLYHMEISKPFTWHIFFSQ

SEQ ID NO: 97773 - protein, 64 aa, Gossypium hirsutum
  Clone ID: LIB3146-037-P1-K1-H2.pep
TLFAFHFFLYSSLLPRQARGFLSNRRSKRLGLPFATLFSRLSAKKETPILMVGFDAAGTPTILY

SEQ ID NO: 97774 - protein, 26 aa, Gossypium hirsutum
  Clone ID: LIB3146-037-P1-K1-H9.pep
EQFTYSMVFVGKVWLVIRQNIKKEES

SEQ ID NO: 97775 - protein, 79 aa, Gossypium hirsutum
  Clone ID: LIB3146-038-P1-K1-B10.pep
GPMLKPEVKSVVDWAILDDIVESGASLLIYEHLQESCVGYLLEESQRVLVVYAFYALIFATNSNTQDMEGCLQSYLERL

SEQ ID NO: 97776 - protein, 57 aa, Gossypium hirsutum
  Clone ID: LIB3146-038-P1-K1-B11.pep
PRVRIFLDSLGGGDRRLPPYIIKLVTRCIGSIITVRVRRRKPCLIELNIRRRQCVLI

SEQ ID NO: 97777 - protein, 63 aa, Gossypium hirsutum
  Clone ID: LIB3146-038-P1-K1-B12.pep
SRVRPRLGLRLSVCRVIVSRIVASEALHIEAYLTQRIRISLIESSVDEQCWRAVVDHIEARSG

SEQ ID NO: 97778 - protein, 75 aa, Gossypium hirsutum
  Clone ID: LIB3146-038-P1-K1-B4.pep
YYSPLIISELDMWPVNWLFKGNYVDMKSVMYVGSVMKFILVVPNLQIPGSNILFSESLQLTLIIWKINYLINISL

SEQ ID NO: 97779 - protein, 105 aa, Gossypium hirsutum
  unsure (1)..(105): unsure at all Xaa locations
  Clone ID: LIB3146-038-P1-K1-B7.pep
VITFIHLVSNHRLNFYIRQQSSHYLRXLHHLMHKDCTDMLNEHEWQLLIHXSLDSLDVEDXRCHTNYAXAYHSQHYDIDMYWEVLNSFSLXNEKICLKCVTGCTT

SEQ ID NO: 97780 - protein, 133 aa, Gossypium hirsutum
  unsure (1)..(133): unsure at all Xaa locations
  Clone ID: LIB3146-038-P1-K1-C4.pep
DAWVNIHDKVPTVPGIFANEKLQFQKYLEETVSFPWSYAHVGVELTLDHTHSPFLKPASDLGCAHNLEAHLHLLDGYHGKRDIALVNKDSNFLKKEYXVPPHWRQDENKGMVKNNDGRWVLPERARVEADPHD

SEQ ID NO: 97781 - protein, 34 aa, Gossypium hirsutum
  Clone ID: LIB3146-038-P1-K1-C6.pep
CIYKAGDDCGHDEWDVQVIAVLGDIFTAVGLNLS

SEQ ID NO: 97782 - protein, 87 aa, Gossypium hirsutum
  unsure (1)..(87): unsure at all Xaa locations
  Clone ID: LIB3146-038-P1-K1-D11.pep
MSQIRHEEQPQHQNSRKQRRRWSPELHRRFVEGLQQLGGSQVATPKQIRELMQVDGLTNDEVRSHXQKYRLYIRRLPIFSSGHGNEL

SEQ ID NO: 97783 - protein, 62 aa, Gossypium hirsutum
  Clone ID: LIB3146-038-P1-K1-D6.pep
VLLAILAMIKLDPLKAYAYPSCHTSFVIEAQPSMSRHEYVSIPLEDIMQFPSARVGPAVPSR

SEQ ID NO: 97784 - protein, 65 aa, Gossypium hirsutum
  unsure (1)..(65): unsure at all Xaa locations
  Clone ID: LIB3146-038-P1-K1-E2.pep
MEERYGHNKVSKLSMLGIFKKVSSMPFFVTFFIIIIINIMPELFIILTQLLNXSINAFQYIQTHV

SEQ ID NO: 97785 - protein, 112 aa, Gossypium hirsutum
  unsure (1)..(112): unsure at all Xaa locations
  Clone ID: LIB3146-038-P1-K1-E7.pep
EMESDWISLTDELRMDLESNRCRAEKVEMELKLEKKCTAELDDALSRAVLGXARMAEHYADLQEKYNDLGPKHRAILEGIAEIKKAVAXAGSKGHGARFAKGLEAELSAIRV

SEQ ID NO: 97786 - protein, 40 aa, Gossypium hirsutum
  Clone ID: LIB3146-038-P1-K1-E8.pep
LYSSRENLGQAQSGTYVVSLPLLWVVQFTLRVECESHVIF

SEQ ID NO: 97787 - protein, 55 aa, Gossypium hirsutum
  Clone ID: LIB3146-038-P1-K1-F10.pep
PNVNSTSNRASKTVTDDFAPAKYKTVSTKCNLSLPQPLQKLTGLMLLLSRWPLQT

SEQ ID NO: 97788 - protein, 147 aa, Gossypium hirsutum
  Clone ID: LIB3146-038-P1-K1-F11.pep
DDIDNRIITEVLGSERHGQVRFQGSFVNPTQYFGSSSYQYMPSGSQTQVEVQRLRDQIAQMQVSTVEQITQLKAEVVSREAEVRRKYEDLQLQLKADAVAREVEAIAREAKAAAREAEQKARRTSTTTSEYDEYVSTVAKSAILNYW

SEQ ID NO: 97789 - protein, 86 aa, Gossypium hirsutum
  Clone ID: LIB3146-038-P1-K1-F12.pep
WLTLCTNQQKNSISSNEDRNYIITHQISKYVNNSLFSSSLNTKGYELTQSKLIKPINTKLSDIMSKNGTKKELNIKAKTPQPNLKV

SEQ ID NO: 97790 - protein, 65 aa, Gossypium hirsutum
  Clone ID: LIB3146-038-P1-K1-F8.pep
HFISLCFLYICKHVLNMYMHGCNPGLPKPVTLNRILAFHFKMHRNYTASFLVGVTHASVEPVIPG

SEQ ID NO: 97791 - protein, 67 aa, Gossypium hirsutum
  Clone ID: LIB3146-038-P1-K1-F9.pep
EYMFYYAGAEAAVADLEDREDGSVKEALTLNNLTEVTRFVEWTRTSLPRFLKAEEVEFQFGDSSTEK

SEQ ID NO: 97792 - protein, 41 aa, Gossypium hirsutum
  Clone ID: LIB3146-038-P1-K1-G11.pep
HGMLVKWILILMKRIGYKGWALKYHYLTIVLPKHCSSCYRC

SEQ ID NO: 97793 - protein, 94 aa, Gossypium hirsutum
  Clone ID: LIB3146-038-P1-K1-G9.pep
VIQSSLILQQWRSKPSSTNQTNSSGLYTKYQEFDENSWGWSWLERWMAARPWETRLMEPSQAPPSKHCLEGKNARSSSPCFVEVGKNNISTRIS

SEQ ID NO: 97794 - protein, 63 aa, Gossypium hirsutum
  Clone ID: LIB3146-038-P1-K1-H12.pep
LILNKLIFGLPLRGRCLTLYILPHNTSSTDEAYYDRLTFLRLLPHVNTSKIILLQFLYKILVP

SEQ ID NO: 97795 - protein, 95 aa, Gossypium hirsutum
  unsure (1)..(95): unsure at all Xaa locations
  Clone ID: LIB3146-039-Q1-K1-A6.pep
IQFTGRGFYKTVNWENTGGTQIKPLLKHPPFARWGFIEKTPTHCPFQQFXTLNGERDSPFTGALYAPGVLFTRTVKTINCPALKPPPIGVLPFFL

SEQ ID NO: 97796 - protein, 60 aa, Gossypium hirsutum
  Clone ID: LIB3146-039-Q1-K1-A7.pep
ELKLHRPQRYSDLDGILMCFNTVCSIFLNIYLHLGKYLFMYILYSILIRTSGVIGGFWRI

SEQ ID NO: 97797 - protein, 89 aa, Gossypium hirsutum
  unsure (1)..(89): unsure at all Xaa locations
  Clone ID: LIB3146-039-Q1-K1-A8.pep
LXTCLRXVYAFMLXFNILTVDNXVVFYSYFTLXXXXNKXYCSGNEQLSYEEYEGLFLXXLTMYIGQLHLFQDIIFHSTVRRDCTXKKFF

SEQ ID NO: 97798 - protein, 130 aa, Gossypium hirsutum
  Clone ID: LIB3146-039-Q1-K1-A9.pep
NVDTDENEVQSSDGKLMLLQNSPFFKNGNVGNLLALVKYDEGLKSELCKHGERVGKLENCLKTLNCWKTDIELYMSELQDSLEPDLVNDLDCLSTKEEITKLIEGRGHSAASTLLCSIAQGHWMDVMQDV

SEQ ID NO: 97799 - protein, 67 aa, Gossypium hirsutum
  Clone ID: LIB3146-039-Q1-K1-B1.pep
GEKQTIELPLEHGLSIMLDIGAFEVKGNRGNGLEIYMFVNWIAEQALIGTLIQLREISIYLTSVPFM

SEQ ID NO: 97800 - protein, 50 aa, Gossypium hirsutum
  unsure (1)..(50): unsure at all Xaa locations
  Clone ID: LIB3146-039-Q1-K1-B11.pep
IALSLFLGLKGDPVPCDRCAGNXGTKCVFCEDGKMKQETGLIDCRVCKGA

SEQ ID NO: 97801 - protein, 75 aa, Gossypium hirsutum
  Clone ID: LIB3146-039-Q1-K1-B4.pep
KKNSLRSWGESLKGELENVNKEHSKLKEKEAETESIAGNLHVKLRKSKSELETFLSEESKTRGACAEMLSTLQQL

SEQ ID NO: 97802 - protein, 116 aa, Gossypium hirsutum
  Clone ID: LIB3146-039-Q1-K1-B6.pep
TLPEEDPQESTSKEQTLTEVPLSLENEAAIEELHQAEEENVNGNGEEEREEPTKAEEDEKEDSTGEGGGEGETSQERSELEYPGTDLENESKESESQDKLLPDCLLLMMCEPKLSM

SEQ ID NO: 97803 - protein, 75 aa, Gossypium hirsutum
  Clone ID: LIB3146-039-Q1-K1-C2.pep
GHTLEAPINPLMCTKNGFSCLLPAGFWFFWFHYLLPAKTLTSLFTLILFFSFLFPFPPKQIVEVVFRTIMLIVFH

SEQ ID NO: 97804 - protein, 125 aa, Gossypium hirsutum
  Clone ID: LIB3146-039-Q1-K1-C3.pep
HASDGSSPGTSFRISDTEIFLHTGVETTWDAYDANDPSSRGRSRSSSIDYDSGDENRKSSVNIKPSSKNKAAQRLKSVLLWPHMKGKKPKRLKKSIEGCSEETPIPLRQRFSKPSSSLPNNKRTL

SEQ ID NO: 97805 - protein, 48 aa, Gossypium hirsutum
  Clone ID: LIB3146-039-Q1-K1-C6.pep
GSPRMQARIFLGKSHLLLPLPLSNFFFKHARMRALEQNYLSCAKSISR

SEQ ID NO: 97806 - protein, 49 aa, Gossypium hirsutum
  Clone ID: LIB3146-039-Q1-K1-C7.pep
LCLYYAYEMARSGWKLVGDPSHYPSNLSVDFDALVVVIMACIGGRLSNV

SEQ ID NO: 97807 - protein, 39 aa, Gossypium hirsutum
  Clone ID: LIB3146-039-Q1-K1-D1.pep
PYYEGRCYDHITTNLAKSVNLVLKSTHYLRATMLVQATY

SEQ ID NO: 97808 - protein, 130 aa, Gossypium hirsutum
  Clone ID: LIB3146-039-Q1-K1-D2.pep
TPTNIISKLSLLVLHFPRLRIIWSRSLHATADIFASLKANQDEPDETKAMRVGVPSEEGIIENDVRAENYNTSAVEFLRRLPGVTDSNYRTIMDGCQSLAELALLPIEKLAELMGGRKAAQTLRDFLDAK

SEQ ID NO: 97809 - protein, 52 aa, Gossypium hirsutum
  Clone ID: LIB3146-039-Q1-K1-E10.pep
SGTTIVKCGCSLPSVYYKFEVSRSFGWVLASSKACLGFITSTGSSPKRFVVL

SEQ ID NO: 97810 - protein, 59 aa, Gossypium hirsutum
  unsure (1)..(59): unsure at all Xaa locations
  Clone ID: LIB3146-039-Q1-K1-E12.pep
HCVGNICXGHLCCXRNHCTGYCSLSCIGYRSKLCLAVFRCLLMLFHVVLYNSSLVPLNS

SEQ ID NO: 97811 - protein, 41 aa, Gossypium hirsutum
  Clone ID: LIB3146-039-Q1-K1-E5.pep
SFDDHQLTTPSYCLKCSRFNVLLLFTTTFFNQHSFHLYQRF

SEQ ID NO: 97812 - protein, 48 aa, Gossypium hirsutum
  unsure (1)..(48): unsure at all Xaa locations
  Clone ID: LIB3146-039-Q1-K1-E6.pep
RSEIHYEQTFSQNLVASSEYDFRTSSRXAHSLMSSCSKTKLHEFHIVY

SEQ ID NO: 97813 - protein, 69 aa, Gossypium hirsutum
  Clone ID: LIB3146-039-Q1-K1-E7.pep
LQSNNSWPFEFIISKMQTSPISKFCSSAQVFQPFVTLVHMAHGPLGLVDIVGLTSSSADAWRTRGRTRG

SEQ ID NO: 97814 - protein, 70 aa, Gossypium hirsutum
  Clone ID: LIB3146-039-Q1-K1-E8.pep
SSLSSSFQTKFRYCCSSMMDFFGVHCMWIRLSQERIWMRLKNNHKHFFRRLEKPSEQLYYDTHKDNIDFF

SEQ ID NO: 97815 - protein, 67 aa, Gossypium hirsutum
  Clone ID: LIB3146-039-Q1-K1-F1.pep
HEWFLTSIHFSFHLCSRSFTILHRSSCTSESRSPSTASLQRSTYGQQSMGSPPNNGNCNFSPQGSAE

SEQ ID NO: 97816 - protein, 107 aa, Gossypium hirsutum
  Clone ID: LIB3146-039-Q1-K1-F10.pep
ALKTQAPFAQRRSSLQRRTSLQRLRTPYTSTRHAHLQTDKENSNKYKQRKCCILIYFSSLFSDIKPDFNLVIDAHRENANTKQSKKANIFFEGGSLFFSRIFLFLFF

SEQ ID NO: 97817 - protein, 37 aa, Gossypium hirsutum
  Clone ID: LIB3146-039-Q1-K1-F11.pep
RTRGIGVTSGASTPDKAVEDALVKVFDIKREEALQVA

SEQ ID NO: 97818 - protein, 55 aa, Gossypium hirsutum
  Clone ID: LIB3146-039-Q1-K1-F5.pep
YRKEGCSCSIYYSKKFSMKKMKGNYIINYHQCKLQTKCSCETSFCKQLTPSFAQE

SEQ ID NO: 97819 - protein, 73 aa, Gossypium hirsutum
  Clone ID: LIB3146-039-Q1-K1-F6.pep
QPVRRILARPSTSMQTSGSLAAPSSESVYEETSTSTSFASSTTLSSNTPVAGTLEDNHAQKPSYMNSTESIKA

SEQ ID NO: 97820 - protein, 103 aa, Gossypium hirsutum
  unsure (1)..(103): unsure at all Xaa locations
  Clone ID: LIB3146-039-Q1-K1-F7.pep
AEAAVAAAQAAAKVVRLAGYGRHSMEERAATLIQSYYRGYLARRALRALKGLVRLQALVRGYNVRKQAQNTMRCMQALVRVQASVRARXLQLTQEKLQKRVDD

SEQ ID NO: 97821 - protein, 136 aa, Gossypium hirsutum
  Clone ID: LIB3146-039-Q1-K1-G1.pep
PPVREFKRHVDLIGRLRHPNLVPLRAYFQAKEERLLVYDYFPNGSLFSLIHGTRTCGGGKPLHWTSCLKIAEDLATGLLYIHQNPGLTHGNLKSSNVLLGPDFESCLTDYGLTIFRDPDSVEEPGAATFFYRAPEC

SEQ ID NO: 97822 - protein, 36 aa, Gossypium hirsutum
  Clone ID: LIB3146-039-Q1-K1-G10.pep
FFILHNKAAHHLKYKFYSFYNLPALPFFNIIIHHFN

SEQ ID NO: 97823 - protein, 48 aa, Gossypium hirsutum
  Clone ID: LIB3146-039-Q1-K1-G2.pep
TKRPSWYGGPVGPIKKGLKKTNLGLITSQKKGFGKALSKILPPFWNWL

SEQ ID NO: 97824 - protein, 125 aa, Gossypium hirsutum
  Clone ID: LIB3146-039-Q1-K1-G6.pep
ELYSSKRFSVQSDIYSYGVFLLELISGREAICRDPSNLETTLIMQAKDSKDISSFVDKTLGGKSMRGAKQVVDLALQCVNIRPRRPLMRSIIEELERIQETEIGGLPFEAREEIGDVTLGSELFR

SEQ ID NO: 97825 - protein, 44 aa, Gossypium hirsutum
  Clone ID: LIB3146-039-Q1-K1-G9.pep
VVERCSKARAGLQERHIRHVSVTQLSLGAFISCPITARYLRRKL

SEQ ID NO: 97826 - protein, 97 aa, Gossypium hirsutum
  Clone ID: LIB3146-039-Q1-K1-H1.pep
FCIGYLGSHEAALPVVSIVCGISFVFEVWVFLGVYTFSHSLYICRHKVQQIPQGLELHMQFLALEGVFQCQSSVCSFHPVSRAMVLMVPQESAHPLL

SEQ ID NO: 97827 - protein, 135 aa, Gossypium hirsutum
  Clone ID: LIB3146-039-Q1-K1-H3.pep
FQPPPPPSNTASFDPAWTLPFGPQHDQDDDQHHQVQVFNNEAAQNFVSDKLMNPPFDNPLMGPPTVPKLCEILEGNMVCNIPQTSSVSLENNIDPLVSRLSSCFPPIPAGSNYAHDMQVGASQMEYIDNIITSIP

SEQ ID NO: 97828 - protein, 41 aa, Gossypium hirsutum
  Clone ID: LIB3146-039-Q1-K1-H6.pep
SMHQSLRSYRQSPMSFSRSSVDLRNASSQRSRAFIWFRRHH

SEQ ID NO: 97829 - protein, 48 aa, Gossypium hirsutum
  Clone ID: LIB3146-040-Q1-K1-A10.pep
ISSMETKYCFPKARTIPSFDNAPGTFSQKESPLSLSPFTIASYGRAPP

SEQ ID NO: 97830 - protein, 42 aa, Gossypium hirsutum
  Clone ID: LIB3146-040-Q1-K1-A11.pep
VCSRPPLPIFFGRRDSHQWWGNFKPGASLKDRIDLVFFTHNF

SEQ ID NO: 97831 - protein, 50 aa, Gossypium hirsutum
  Clone ID: LIB3146-040-Q1-K1-A2.pep
CENFTAKFYFRFRFFSPNCILRGGCPIKGEKKSFRKGKRRSQKEDRFFFW

SEQ ID NO: 97832 - protein, 86 aa, Gossypium hirsutum
  Clone ID: LIB3146-040-Q1-K1-A5.pep
PNDPKSYSVFIHRDEVKNGASIQSVLQRYSREEVKKMREKVIEFIPKIIYAKPENGLESIKDAFDVAIDGVLKRNKEHEQPGYKWK

SEQ ID NO: 97833 - protein, 76 aa, Gossypium hirsutum
  Clone ID: LIB3146-040-Q1-K1-B1.pep
EAQDKQGIEEVGHKYFRDLVSRSLLQIMIWLNQLLDNYASRSRVINKFQSTLATDLILLIVMMASQGLWALLKGNV

SEQ ID NO: 97834 - protein, 43 aa, Gossypium hirsutum
  Clone ID: LIB3146-040-Q1-K1-B10.pep
LFRIKLKTFASRRRSGIELSYFKKNCPNYSGTFVNQQILIEHF

SEQ ID NO: 97835 - protein, 109 aa, Gossypium hirsutum
  unsure (1)..(109): unsure at all Xaa locations
  Clone ID: LIB3146-040-Q1-K1-B7.pep
MQFVFLTFIFVALSTMAKGGFFIKHDFHKRCAXAARIRVKYPHRIPVIVEKTKGNDIPNIDKKKYLLPSDLTVRQSVYVILKRIKFNAEKTIFLFFXRQLPPTGAIIST

SEQ ID NO: 97836 - protein, 52 aa, Gossypium hirsutum
  unsure (1)..(52): unsure at all Xaa locations
  Clone ID: LIB3146-040-Q1-K1-B9.pep
VYFFYLISIIFFFFXKQNSKAIKAYNLNCNYGDKPKLNKIYILQTTTENFCQ

SEQ ID NO: 97837 - protein, 69 aa, Gossypium hirsutum
  Clone ID: LIB3146-040-Q1-K1-C12.pep
MKYNSSFFVFAAFVCSPLQLRVRGCSLALGVRCTGWCWRVYGSVRCGAVFCHLVAHGKEPYGYCNASWL

SEQ ID NO: 97838 - protein, 37 aa, Gossypium hirsutum
  Clone ID: LIB3146-040-Q1-K1-C5.pep
PSPENNRRLNPRGVRPSRWEPTRGAIGPIPTYRPLPL

SEQ ID NO: 97839 - protein, 82 aa, Gossypium hirsutum
  unsure (1)..(82): unsure at all Xaa locations
  Clone ID: LIB3146-040-Q1-K1-D2.pep
MYLILSSTNKRSVAAHPWHDLEIGPGSSIXFNLLIEILKCIKVKFEPYKKTGSYQVLSLFFYSIYVYPYNYSIHPSTLFLNL

SEQ ID NO: 97840 - protein, 125 aa, Gossypium hirsutum
  Clone ID: LIB3146-040-Q1-K1-D3.pep
AVGNWSRDNDRNKILLGIGGGHYVPRHMDIVQKDGVWVGHMLPGYSLLMEDPREAKSLTNSAVVGGTWRETIRVAFETTKLAFPGGEVLAHLDHKIFKGWQRNAIIRFFTEQNIKIGKPSDFCPC

SEQ ID NO: 97841 - protein, 82 aa, Gossypium hirsutum
  Clone ID: LIB3146-040-Q1-K1-D4.pep
HPSGEDGVEIRTIYVAYPNREYKEMALLTFNPLTCLSSSPVRSCSTSLPIVVLPIFRLRVNRIDDHCSKCSIGTQFVLSKKR

SEQ ID NO: 97842 - protein, 49 aa, Gossypium hirsutum
  Clone ID: LIB3146-040-Q1-K1-D9.pep
TFLLLSSYSPPIILLTQSITSKVINLNISNNKSIITEDYLLNGTLSTAF

SEQ ID NO: 97843 - protein, 59 aa, Gossypium hirsutum
  Clone ID: LIB3146-040-Q1-K1-E12.pep
EKVQKRKKKVIVCVTLGNLKTAIVSSEKKFYLFPNTFQETNIQAQIVHLFLKHVRGKEF

SEQ ID NO: 97844 - protein, 72 aa, Gossypium hirsutum
  unsure (1)..(72): unsure at all Xaa locations
  Clone ID: LIB3146-040-Q1-K1-F12.pep
LKLAIPLPYFIQHHSKLVCXYFYKINXTHNPLXVLPNSYFYSTNALKXIAYINNGKITFPRTFSVFNYSLPS

SEQ ID NO: 97845 - protein, 40 aa, Gossypium hirsutum
  Clone ID: LIB3146-040-Q1-K1-F2.pep
TAPTYLSCPIKNPGFSSMFFPPTKTPPWHWNSVWSRNFDL

SEQ ID NO: 97846 - protein, 71 aa, Gossypium hirsutum
  Clone ID: LIB3146-040-Q1-K1-F5.pep
PHFSPLVVQHTTSFPYISILQVLKAILITQPQNSDKPEEGFQSPCFEYNSLKRVTELASLDLPLSACFPNI

SEQ ID NO: 97847 - protein, 97 aa, Gossypium hirsutum
  Clone ID: LIB3146-040-Q1-K1-F6.pep
QLHEVVEDLNTKYVEVKLIGEDQKKQILKLSGDYDIQNKEIESIRQANQSFEAELSKLHEELEEWKCMEESLCVELQKGRNEVELWETQATALFDEL

SEQ ID NO: 97848 - protein, 54 aa, Gossypium hirsutum
  Clone ID: LIB3146-040-Q1-K1-F7.pep
LDSRHAFYLLVLNIIVGRGFKYLLLLNVPPQLGFHVCSHKILKKFMQLGGRVGR

SEQ ID NO: 97849 - protein, 53 aa, Gossypium hirsutum
  Clone ID: LIB3146-040-Q1-K1-G10.pep
HASVRYDTFLLKQKPKIRGGECSTNFCSCPIQKYVCQNSVTLTAPSHITFYFN

SEQ ID NO: 97850 - protein, 79 aa, Gossypium hirsutum
  Clone ID: LIB3146-040-Q1-K1-G11.pep
NKGRGGFSLEDFYEFFIIIIIIIIIVIIFRCLHIDRRTRKSLFSICVPMCAVLFLRAFVGHGGGTTPLDSNKRFGFCFP

SEQ ID NO: 97851 - protein, 44 aa, Gossypium hirsutum
  Clone ID: LIB3146-040-Q1-K1-G3.pep
KTGPFSPEIRGSPLILSRNERSRLTLKSYGDKVFNPNFCPDREG

SEQ ID NO: 97852 - protein, 55 aa, Gossypium hirsutum
  Clone ID: LIB3146-040-Q1-K1-G5.pep
TDHTHPFLSIIKQNIKHPTHTHHDTKNTASNSKTELSAPSILATITHILEECFND

SEQ ID NO: 97853 - protein, 105 aa, Gossypium hirsutum
  unsure (1)..(105): unsure at all Xaa locations
  Clone ID: LIB3146-040-Q1-K1-G7.pep
DAWVGKELFEKEQEDLLSDLKDIPKKACDRRINEFVKXARAAKIHAYIIAHLKKEMPAMIGKAKTQQRLIDNLEGEFGKVQRDHHLPPGDFPNVEHFKEILSGYN

SEQ ID NO: 97854 - protein, 86 aa, Gossypium hirsutum
  Clone ID: LIB3146-040-Q1-K1-G8.pep
HASARDDTPSLMLKPKIRSVNVPLLSVFALSHDMFPRIRLSCQLPFLFSSPSSHSHMLFIDAALLDCALNDKSQAVSAISTPNVIF

SEQ ID NO: 97855 - protein, 60 aa, Gossypium hirsutum
  Clone ID: LIB3146-040-Q1-K1-G9.pep
MNSRCLCQEVEDKRRGSWRNYRSLGNILWDGSKTLICITYRPMIRGFSINRRVSYQTEEW

SEQ ID NO: 97856 - protein, 44 aa, Gossypium hirsutum
  unsure (1)..(44): unsure at all Xaa locations
  Clone ID: LIB3146-040-Q1-K1-H1.pep
KMFLTXRNNWHELWSHFSGLIRFSSPPLQSARISNHPFPSDFKN

SEQ ID NO: 97857 - protein, 80 aa, Gossypium hirsutum
  Clone ID: LIB3146-040-Q1-K1-H11.pep
KCGIIVVSRWLRLCSLEIHLIQRNISFTSIVIVSFFMSICSSYIIGIYFFNNISGCLSIPRGSIFCVDGCKLVIIRRTRG

SEQ ID NO: 97858 - protein, 54 aa, Gossypium hirsutum
  Clone ID: LIB3146-040-Q1-K1-H12.pep
HYGREYMRPSSIPIPNRNHCFINMDTKKSLKNIFNQILWRTMITFSFLNEPSVL

SEQ ID NO: 97859 - protein, 40 aa, Gossypium hirsutum
  Clone ID: LIB3146-041-Q1-K1-A11.pep
PTRPPTRPFTKKRFMDSVYIGLLLCAYLQVFIFFCSGIAT

SEQ ID NO: 97860 - protein, 61 aa, Gossypium hirsutum
  Clone ID: LIB3146-041-Q1-K1-A12.pep
SQKLFQHVGIILFSDDLGSIVFCTKISTQDVIFIYYEPYFVIVYRLFKLMISLYKPLIKTV

SEQ ID NO: 97861 - protein, 33 aa, Gossypium hirsutum
  Clone ID: LIB3146-041-Q1-K1-A4.pep
HIVMTNNIFSGLSHFTHFGLNPLTKSCLTYLYP

SEQ ID NO: 97862 - protein, 59 aa, Gossypium hirsutum
  Clone ID: LIB3146-041-Q1-K1-A5.pep
DFLSKQKFIGRGGIILNAKGSPIFITNNHFLPFNFFLFFFCLNPLFFYFFFFFLYIIFF

SEQ ID NO: 97863 - protein, 53 aa, Gossypium hirsutum
  Clone ID: LIB3146-041-Q1-K1-B1.pep
GIFRWIFTAQLSFSFVSPRDWTVVILASVMKPNLTNSQDLTHTKGNVCNAVYL

SEQ ID NO: 97864 - protein, 130 aa, Gossypium hirsutum
  Clone ID: LIB3146-041-Q1-K1-B10.pep
EFDFSQLNRSLLQDRRPSDREKLEAEFKQKIDALVSEIERTAPNLKALDQYKTLQEKERDVTEEFELARKEEKQVADEYNSVKQKRYELFMDAFNHISSNIDRIYKQLTKSGTHPLGGTAYLNFKNEDDP

SEQ ID NO: 97865 - protein, 42 aa, Gossypium hirsutum
  Clone ID: LIB3146-041-Q1-K1-B2.pep
SGDKAIRAGPFVGALAAPIYHQYILRAAAIKALGSLRSNPTN

SEQ ID NO: 97866 - protein, 105 aa, Gossypium hirsutum
  Clone ID: LIB3146-041-Q1-K1-B3.pep
PRVRYYHLYNPLYPLVKPRANCTNLHKFQDENRTEEEREWMGEKYLLHFFEYETEKEKKKYTIWGLTAGVLIRAASLVYQQPPAFLEQNPKFKFPKIVDRNTVMR

SEQ ID NO: 97867 - protein, 106 aa, Gossypium hirsutum
  Clone ID: LIB3146-041-Q1-K1-B8.pep
FLHDTGRQKFLDSSNFQVLLKPIVSQLVIEPPTSVEEQTDVPSLKEVDDLLVVCIGQMAVTAGTDLLWKPLNHEVLMQTRSEKMRARVLGLRIVREFLEKLKERYL

SEQ ID NO: 97868 - protein, 57 aa, Gossypium hirsutum
  unsure (1)..(57): unsure at all Xaa locations
  Clone ID: LIB3146-041-Q1-K1-B9.pep
VGDKVQKGQVFCIIEAMKLMNEIEMKNHCFNXADQSGTIVEILVEDGKAVIVASVCD

SEQ ID NO: 97869 - protein, 134 aa, Gossypium hirsutum
  Clone ID: LIB3146-041-Q1-K1-C5.pep
NSVVDGNFLIFNYVGGCVFDVKIYEFDACEKSIPYVVSEDEESESESESEDDDSNSDDAMNDEGADSTEVEDEEIHPEDYVQHLNPYFVVKTTKSSQRTNELCIPTGIAKDFGVSLEDGEKITFVDPYNRKSIG

SEQ ID NO: 97870 - protein, 92 aa, Gossypium hirsutum
  Clone ID: LIB3146-041-Q1-K1-D6.pep
LDFLHPIHGSAPDIAGQDKANPLATILSAAMLLKYGLGEANAANRIENAVLDTLNRGFRTGDIYSTGNKLVGCKEMGEEVLKSVDSPVPTAI

SEQ ID NO: 97871 - protein, 64 aa, Gossypium hirsutum
  Clone ID: LIB3146-041-Q1-K1-D8.pep
LIHLAHPPSINLHGVLGQILFDACVPKNVEGWDLKSSDSSRKHPYTSRRNSHFNPIKCIRRSRL

SEQ ID NO: 97872 - protein, 60 aa, Gossypium hirsutum
  Clone ID: LIB3146-041-Q1-K1-D9.pep
SLHFLPLHLANKHIPISQSELEFKNSFNLFPSSLLLFCNNINAMSELLLLLLLLLLMASK

SEQ ID NO: 97873 - protein, 88 aa, Gossypium hirsutum
  Clone ID: LIB3146-041-Q1-K1-E8.pep
PSMPVWWRWYYWICPVSWTLYGLLVSQFGDINELLEDGNNETVKQHLRNYYGFRHDYLGFVAAVIISFAVLFGTIFAVAIKMLNFQRR

SEQ ID NO: 97874 - protein, 110 aa, Gossypium hirsutum
  Clone ID: LIB3146-041-Q1-K1-F12.pep
EIRPDAVEKVAIVSSGLSYADEQRDQQLRTIGWHPSEILVPKKPDDLRLLVNLSTFKQSTLNWVPDFLLRQFITVCLMFLRVKIMVYFDFSPSTMLKFKFKSFHFNLTLF

SEQ ID NO: 97875 - protein, 94 aa, Gossypium hirsutum
  Clone ID: LIB3146-041-Q1-K1-F3.pep
ALANIQAAQRRPGSDPVSQAKPHALTGLRPNSTVQADIDEYDDLWGSIAPATPQFAYRPLNVNTAGAHDDDDPWADIAGAATTTNVKASSSCRG

SEQ ID NO: 97876 - protein, 32 aa, Gossypium hirsutum
  Clone ID: LIB3146-041-Q1-K1-F7.pep
KKKKKKKREKVKNIMDSKIIIMGLRHYKLFFS

SEQ ID NO: 97877 - protein, 65 aa, Gossypium hirsutum
  unsure (1)..(65): unsure at all Xaa locations
  Clone ID: LIB3146-041-Q1-K1-H1.pep
TPTRTRHSATSFVGICTNDXIFIVFTYLLAVQSTSSILLSSLPSSSKDGISTSSAPPSVIIIKCF

SEQ ID NO: 97878 - protein, 47 aa, Gossypium hirsutum
  Clone ID: LIB3146-041-Q1-K1-H10.pep
IFRLRYLFCVLIFFSVQFSLSSGSLLVFFRFKLDFQLFGSILTCMIE

SEQ ID NO: 97879 - protein, 46 aa, Gossypium hirsutum
  Clone ID: LIB3146-041-Q1-K1-H12.pep
WSFPPVSLMQDFSFVKRHNWMIYFTIANLRSRYLMVLLRSVTFRGS

SEQ ID NO: 97880 - protein, 57 aa, Gossypium hirsutum
  Clone ID: LIB3146-041-Q1-K1-H5.pep
SSGVISWRYRILGFGSKETCYTHFRYFLSVGLSMNFANFMTALGSSLNKKKVGPCVF

SEQ ID NO: 97881 - protein, 124 aa, Gossypium hirsutum
  unsure (1)..(124): unsure at all Xaa locations
  Clone ID: LIB3146-042-Q1-K1-B1.pep
XXRRMGRXVLNXSEDTKKIQCXXSXTPVATLXXEXIQXCGPXRSYXNXXPEXXGNXNPXYIXIKXFRGPITXXFVHXLMXXKXXSSFLKSKCLSNYHCXTFTACXKWYXVWYGIGMGNGIAKXX

SEQ ID NO: 97882 - protein, 127 aa, Gossypium hirsutum
  Clone ID: LIB3146-042-Q1-K1-B2.pep
DAWVLGALVSGKTVDLLGRKGTMWVLYIFYIVGWLAIAFAKVPWLLDVRRLLLGFSNGIAGYLLPVYLAEITPKNLRGRFTAGVQMMAILGLSTMYIVGPFINWRILALIGIIPSLVQLPLLIYIPE

SEQ ID NO: 97883 - protein, 40 aa, Gossypium hirsutum
  Clone ID: LIB3146-042-Q1-K1-B5.pep
ILMLYVALIPCRSTYDVCLGTLDGVLYICKWKSWCLTQMS

SEQ ID NO: 97884 - protein, 121 aa, Gossypium hirsutum
  unsure (1)..(121): unsure at all Xaa locations
  Clone ID: LIB3146-042-Q1-K1-C4.pep
AYASDDDENGMGDFLNEMAVMMSQTKSNKNGEESFEELQELFEEMFQVDIDSFGSNGQPTTSCSSSSSFASYGESSGSNKRNSADMSSGETMPESGSSFNVQFHGFCVGVEHXTDMRQQRG

SEQ ID NO: 97885 - protein, 106 aa, Gossypium hirsutum
  Clone ID: LIB3146-042-Q1-K1-C6.pep
MSINEILRELNMKFEAASGATMVITDWRRLGLVEDIDFGWKGCVNMIPLPWNMFGYVDLVFLLPPCKLDQSMKGGARVLVSLPRAAIAKFREEMDALKHGDDAAGH

SEQ ID NO: 97886 - protein, 116 aa, Gossypium hirsutum
  unsure (1)..(116): unsure at all Xaa locations
  Clone ID: LIB3146-042-Q1-K1-D3.pep
PTRPAGSENSSITDRVLDRVFSNAGTGFVSVVVGSFARNLVLGFYSSVGEVEGLSGNNGSSDVPKWINVLYDDKSKELIACWHXRLISTSCAVYLDKTMDINTYYEIFAGMTNPKP

SEQ ID NO: 97887 - protein, 127 aa, Gossypium hirsutum
  Clone ID: LIB3146-042-Q1-K1-D6.pep
FKSVKEKEFNELKDGEVKTLKSVEELKFAKDVEEMKSKLTDLESKLGEAEATISKLTEERRLSTQERKTLEEELALLRKKANIKGAKVGYPLLFVWMVALICVYIGYLLAPLTKSKASMSDLYQQMQ

SEQ ID NO: 97888 - protein, 130 aa, Gossypium hirsutum
  Clone ID: LIB3146-042-Q1-K1-D8.pep
GRVGFVATQDADLRKKLQKVPNVPLIFGLRNALFLEQPSKSQRDFVKSSEEKRLHLTEKEYKALEKRTTSVSANADEEDSGDEEGLGHHNPGLQAHDTRNYSGKERDVKDRVRFKRKKAKGPNPLSVKKK

SEQ ID NO: 97889 - protein, 81 aa, Gossypium hirsutum
  Clone ID: LIB3146-042-Q1-K1-E1.pep
FNPSKDQKSVKFQLPEDDLDGSDDDFDDEFDDEFDDEFDDEFDDDFDDEEFGHGHGHGKGNHQMQNKMVAMGGKGPNGMIN

SEQ ID NO: 97890 - protein, 47 aa, Gossypium hirsutum
  Clone ID: LIB3146-042-Q1-K1-E5.pep
TYKTYTFHINANHLINKSLLKMKPPSYTQFQDIHMAWQCGNSSGRVG

SEQ ID NO: 97891 - protein, 98 aa, Gossypium hirsutum
  Clone ID: LIB3146-042-Q1-K1-E6.pep
MELSPPASLNPAIVSTSDLDNLDSQEPSEGPSKQTTPRCPVSELESQANCKEADQPSPVSVIEAPFTDDLSSGSECFESISADLHELRMQLRQLKLES

SEQ ID NO: 97892 - protein, 72 aa, Gossypium hirsutum
  unsure (1)..(72): unsure at all Xaa locations
  Clone ID: LIB3146-042-Q1-K1-F1.pep
KAAPPXFFFFFFFFFFFFFFFFFFFLENIKYRVRKIFSSRAFFHSQNFFCDRYPVESSPRALFLGGGYTPSV

SEQ ID NO: 97893 - protein, 59 aa, Gossypium hirsutum
  Clone ID: LIB3146-042-Q1-K1-F2.pep
HASAFFFFFFFFFFFFFFFWSFFFFFFFFFSFSKGNMEFFFIKNPPLKKTLDKIVWVYL

SEQ ID NO: 97894 - protein, 86 aa, Gossypium hirsutum
  Clone ID: LIB3146-042-Q1-K1-F4.pep
GTSSFYFYFLFSKLLYIYLYISKTHTKKERDLLPILRLTKKGASFRAPTTVHSGRGRWSRQRFAGALIGLRLLQREKKGGRKVLFF

SEQ ID NO: 97895 - protein, 76 aa, Gossypium hirsutum
  Clone ID: LIB3146-042-Q1-K1-F8.pep
MGCTGSKRTRGDENVKKIRKPKPWKHSEPITRTQLKQMRDEFWDTAPHYGGQREMWDALRVAAESELTHAQAIINS

SEQ ID NO: 97896 - protein, 74 aa, Gossypium hirsutum
  Clone ID: LIB3146-042-Q1-K1-G1.pep
WKKQGKKTAPGLNPRLYLVKMKGKVQRNLKQGSLFWMIKLKCDIIDDLLRGYNIPYPKLDFLLIGTFYTNSFVL

SEQ ID NO: 97897 - protein, 116 aa, Gossypium hirsutum
  Clone ID: LIB3146-042-Q1-K1-G3.pep
MEVPVINRISDFETAGTTPLNYPPFNSPHHLLSGIQKIYETHSFFKLGALILALIASLSTIINNLRTLLLDFRDPILYHSNLFFFNQISTLTLISCRTTNQNMKNWRLLSRPGDKV

SEQ ID NO: 97898 - protein, 130 aa, Gossypium hirsutum
  Clone ID: LIB3146-042-Q1-K1-G6.pep
DMSAEQLLTLNRRREVMPAMHLGRAPKFPQSITSISLKLVLGNPLSSKETKFEHEPKLISWRWLSLSSPRGRDLIPEYVILIDSRQALSSNSSAMYSNIGHPPILKYLSVMGNLVFENRQLSFKQSVIWS

SEQ ID NO: 97899 - protein, 74 aa, Gossypium hirsutum
  Clone ID: LIB3146-042-Q1-K1-G8.pep
RDDRQFHLDYPGACTISTEQGLELKKQIGALAYIECSSKTQQNVKAVFDAAIKVVLQPAKKKKQKKRTGICLVL

SEQ ID NO: 97900 - protein, 46 aa, Gossypium hirsutum
  Clone ID: LIB3146-042-Q1-K1-H5.pep
PPSSSSFFLPPLHHPLLPSGRPVLAVATPFFFNQFALIQGNLSDLR

SEQ ID NO: 97901 - protein, 75 aa, Gossypium hirsutum
  Clone ID: LIB3146-042-Q1-K1-H6.pep
LIPNETKSSKMDNTVVVDGADGVGGEKLEVLKSMLTSLVIEVRNTGKGGGLLNDGVGADYVQKEKVVPRGFCSMM

SEQ ID NO: 97902 - protein, 65 aa, Gossypium hirsutum
  Clone ID: LIB3146-043-Q1-K1-A1.pep
FNFVGRLLGPRGNSLKRVEATTGCRVYIRGKGSIKDPDKEEKLRGRPGDEHLNDPLHILIEADLP

SEQ ID NO: 97903 - protein, 71 aa, Gossypium hirsutum
  unsure (1)..(71): unsure at all Xaa locations
  Clone ID: LIB3146-043-Q1-K1-A2.pep
GFWGAYKKAITLHARGSKVWFFKAAAPVCVFFLFFLFFFFFFNKKFFVFFIFGFLLFLFFLFFLXANSSED

SEQ ID NO: 97904 - protein, 70 aa, Gossypium hirsutum
  unsure (1)..(70): unsure at all Xaa locations
  Clone ID: LIB3146-043-Q1-K1-A4.pep
WEYLPGALPQXAPLVSPVLMRIPDSIDHSWTDVCGGGCGFAMAISGCFSCLSLSRWLSSPSFPDFKFYFL

SEQ ID NO: 97905 - protein, 130 aa, Gossypium hirsutum
  Clone ID: LIB3146-043-Q1-K1-A9.pep
AWEKERGVEFLYDGIRLLSMLEEYTILRQEKEQERRRLRDQKKLQGQLIAEQEALYGSKPSPSKPQSVKKGPRYSTGGASNRRVSLGGAMVPAHKPDSLHSAKATPKTRPSKKSDHLNHRQDDGIPAFSA

SEQ ID NO: 97906 - protein, 77 aa, Gossypium hirsutum
  Clone ID: LIB3146-043-Q1-K1-B3.pep
GEAYMSRSKDSLQEARVMRRRDPRVKMSWKNGQYRYFSDASSSVGASANTATESTVGGSRPGCTQLREERDVGHGLT

SEQ ID NO: 97907 - protein, 44 aa, Gossypium hirsutum
  unsure (1)..(44): unsure at all Xaa locations
  Clone ID: LIB3146-043-Q1-K1-C10.pep
AMPKKTYAVNFSFTDPXVDQRIGENTHLPDFVNINRLNTSTTRY

SEQ ID NO: 97908 - protein, 140 aa, Gossypium hirsutum
  unsure (1)..(140): unsure at all Xaa locations
  Clone ID: LIB3146-043-Q1-K1-C3.pep
GRVGDYKRNSGKLPQLVPDQVLKLKQLTVLTLAETKKGLVRGKLDQLRRYFEVQFAAGRDLRPGQLGSMIQTLSNWLATSDNLLVTIQDKIKWADTMSELDKKHRKELEDRVMEVRKAVSVKYDSAILGSIEKLXPPRGE

SEQ ID NO: 97909 - protein, 48 aa, Gossypium hirsutum
  Clone ID: LIB3146-043-Q1-K1-C4.pep
YNPYNVFRPGKKLQTYTRRMQGGKTMCSRLKSLPGQAQPISSQTLLEL

SEQ ID NO: 97910 - protein, 118 aa, Gossypium hirsutum
  Clone ID: LIB3146-043-Q1-K1-C5.pep
KKKKGKIINISSVVGLVGNIGQANYSAAKAGVIGLTKTVAREYASRNINVNAVAPGFIASDMTAKLGEDLEKRILETIPLGRYGQPEEVAGLVEFLAINPASNYITGQVFTIDGGMVM

SEQ ID NO: 97911 - protein, 77 aa, Gossypium hirsutum
  Clone ID: LIB3146-043-Q1-K1-D2.pep
AVKGFLFPSLLTFTLTNSHLKTAANPKAISAKQSQGFDYSLSSYATRPSSFLNLRIFRQLHCLRSPAQLFRSLSHFA

SEQ ID NO: 97912 - protein, 109 aa, Gossypium hirsutum
  unsure (1)..(109): unsure at all Xaa locations
  Clone ID: LIB3146-043-Q1-K1-D5.pep
MLLVEGRLIFFSVYLEYHISEFMLKLYQRLFFASCACKSLLLTTVPLLIISLRVLVIGTIAKMRNVTYAALSTIRVVLCLFFFVMXGFGPIPNILCTEIFPTRVRGIRI

SEQ ID NO: 97913 - protein, 71 aa, Gossypium hirsutum
  Clone ID: LIB3146-043-Q1-K1-E12.pep
ILPADNILYAFTETSADHSAIAMFDSSISPVSFIAMFLILLLCEIEGSSVSCYERVRFGNKSLCPLKSNVR

SEQ ID NO: 97914 - protein, 105 aa, Gossypium hirsutum
  Clone ID: LIB3146-043-Q1-K1-E7.pep
LYVGSLFKQLVFGFVNISNNSSCWSRILCSCSSSKCMDSGICVLGTYAEKQMNRDIEVDVNRLLHMQVVQVVPLPARDNCSHEVYHGKLLGLSHFNTRLFPRFFL

SEQ ID NO: 97915 - protein, 52 aa, Gossypium hirsutum
  Clone ID: LIB3146-043-Q1-K1-E9.pep
YLFFLFLFFFFFFFFYFFFFFFFFFFFFFFFFLMKARSFCFKHVEAQFSPGP

SEQ ID NO: 97916 - protein, 142 aa, Gossypium hirsutum
  Clone ID: LIB3146-043-Q1-K1-F1.pep
CDVCSHWCHAACGIQRNLIKPGPSIKGPSGAMQFHCIGCGHASEMFGFVKDVFLYCAKNWVLETLTKELDCVRKIFRGSDDSKDKELYVKADELCNRLQNKMMSASDACSIIIQFFNYSDGLSDFPTSGACSKELTTTQVDL

SEQ ID NO: 97917 - protein, 49 aa, Gossypium hirsutum
  Clone ID: LIB3146-043-Q1-K1-F10.pep
FRCCVSHLDCVNYCWFIYYEGLTGRPSQWPTYTPVASAYCTQLAEYSKQ

SEQ ID NO: 97918 - protein, 52 aa, Gossypium hirsutum
  Clone ID: LIB3146-043-Q1-K1-F4.pep
MRELNKLVHEAKIKDTDLSKGCPETIRISHSVHDVSDIKMKWPLYTRDCRDE

SEQ ID NO: 97919 - protein, 69 aa, Gossypium hirsutum
  Clone ID: LIB3146-043-Q1-K1-F5.pep
IYFKKKTTGGLFFNHTFPFTGAEEKLCPKLAMNSTSLRRESMWADQKGHPLKSPTVPYPLTCLGHFLTG

SEQ ID NO: 97920 - protein, 136 aa, Gossypium hirsutum
  Clone ID: LIB3146-043-Q1-K1-G10.pep
PAVLVFDQQDSLLTSWLLSTISPSFLSSFTDVRTAHDVWLMANSLFAADSSTKQSQLRHELRSLRKGSLSVRSYVNKITSLCVLLAAYGSHISKAERLTVLLAGLSSDFDSIVSTASLFSSPLRFQRLVDALIECE

SEQ ID NO: 97921 - protein, 55 aa, Gossypium hirsutum
  Clone ID: LIB3146-043-Q1-K1-G11.pep
TPILSSNQLSSSRLTKPSPFLSSFSKIRRKSFLPGQTCCQRENHHKHEMLKLGIS

SEQ ID NO: 97922 - protein, 45 aa, Gossypium hirsutum
  Clone ID: LIB3146-043-Q1-K1-G8.pep
SHSFSSKFNNLQNNLMFIYRTGTYHSLSYRSANLLLAVSIKMVTR

SEQ ID NO: 97923 - protein, 41 aa, Gossypium hirsutum
  Clone ID: LIB3146-043-Q1-K1-G9.pep
DQIREKQSDSFLVSAKLQFCNNFCYTNNIKILYHFFSLPRY

SEQ ID NO: 97924 - protein, 48 aa, Gossypium hirsutum
  Clone ID: LIB3146-043-Q1-K1-H10.pep
TIDQNMKAISSPAAKSKIKLMPWQLHLLSYKNLHRTKHFNLPNQLLSR

SEQ ID NO: 97925 - protein, 61 aa, Gossypium hirsutum
  Clone ID: LIB3146-043-Q1-K1-H12.pep
SVDSMILLQITCRYGFLHSLRLLSFLLWQPCSRFTCEPNAAVNSCCEIASCIPFLMLGLSQ

SEQ ID NO: 97926 - protein, 52 aa, Gossypium hirsutum
  Clone ID: LIB3146-043-Q1-K1-H3.pep
AKYDKDTPDRWHNIAKAVGGKSVEEVKLHYEILVRDLKDIESGRYPYPYPTN

SEQ ID NO: 97927 - protein, 127 aa, Gossypium hirsutum
  unsure (1)..(127): unsure at all Xaa locations
  Clone ID: LIB3146-043-Q1-K1-H5.pep
ATPFAYGSXHVRPNRAMDPGLVYDLTVNDYLNFLCARGYNQSLLSLFSDKPYACPKSYGVMDLNYPSISVSQLNGSMTVSRTVKNVGSARSTYKARVRSPAGVTVSVKPSTLKFEKIGEVKKFELKF

SEQ ID NO: 97928 - protein, 50 aa, Gossypium hirsutum
  Clone ID: LIB3146-043-Q1-K1-H6.pep
RPPQNGIFFYFLSFFFFFFFFFFFFFFFFFFFFFFFFFFFFFFFFFFFFR

SEQ ID NO: 97929 - protein, 75 aa, Gossypium hirsutum
  Clone ID: LIB3146-043-Q1-K1-H9.pep
VTKRCFLLCALYPEDHSIDVEDLVRYALALELYGKVDSVEEVRVQVLEAIDYLKDSCLLLKDTQWYDHLSWSWYF

SEQ ID NO: 97930 - protein, 80 aa, Gossypium hirsutum
  Clone ID: LIB3146-044-Q1-K1-A1.pep
SHIPACPFIILLFLSIHNSQALVDSRCKRYANIAILNCFLLRVLSYSVGQLSTFTLRVWYSEDRLTRIRRCVSHALTLFC

SEQ ID NO: 97931 - protein, 56 aa, Gossypium hirsutum
  Clone ID: LIB3146-044-Q1-K1-A2.pep
ARCRHRPSLQFFAVLVQDCRALGGVHAEGAHGAGWRRRTALGVGCGARKGGNPRVF

SEQ ID NO: 97932 - protein, 52 aa, Gossypium hirsutum
  Clone ID: LIB3146-044-Q1-K1-A3.pep
HNDKFSLTSYFSPQTIKDSPMVKQPPFCLIFISHSYSYSVFTAKQYIHVPFN

SEQ ID NO: 97933 - protein, 43 aa, Gossypium hirsutum
  Clone ID: LIB3146-044-Q1-K1-A4.pep
LNRPICQVNSWPDWFTYRSRKPSRIDKIWISTDAWADAWADAW

SEQ ID NO: 97934 - protein, 84 aa, Gossypium hirsutum
  Clone ID: LIB3146-044-Q1-K1-A6.pep
FKSLIHFYCYYLYAYQELINDFTTQSQRHCVIGFLVNNLQRKKSKQVRLETERSLGGVVAIQLGSLLLIMMCSKQHPRVYVRVG

SEQ ID NO: 97935 - protein, 57 aa, Gossypium hirsutum
  Clone ID: LIB3146-044-Q1-K1-A8.pep
ETWCVAKPGTSDELLQLNINFACNLVDCNATHSGGVCYYPATLINHASYAMNLYYQI

SEQ ID NO: 97936 - protein, 56 aa, Gossypium hirsutum
  Clone ID: LIB3146-044-Q1-K1-B1.pep
HASAHASAHASVHASENIEINLLKFLFFSLVHMKIKCFFCIQNPPLNPPIFKALIA

SEQ ID NO: 97937 - protein, 113 aa, Gossypium hirsutum
  unsure (1)..(113): unsure at all Xaa locations
  Clone ID: LIB3146-044-Q1-K1-C4.pep
IKGRGIERTGSGLFDNYAYLIDTDADLFDGSMEDPYSLRFGPLAPTESETSFMDRLRQQLKHELKQGYMDNIVDIRXEILRKRLALIFSADTTXTITAWYQSHCKWPYPTEEY

SEQ ID NO: 97938 - protein, 72 aa, Gossypium hirsutum
  unsure (1)..(72): unsure at all Xaa locations
  Clone ID: LIB3146-044-Q1-K1-C6.pep
STYFFAERTLNGAVGGNYILLTDISMVTDEYSNKELGLDIDXXITHSVRRVDNNTAFNYLLHAIMCNIHDSC

SEQ ID NO: 97939 - protein, 77 aa, Gossypium hirsutum
  Clone ID: LIB3146-044-Q1-K1-D10.pep
HAYGHACAHSCEKLICLARRRRQSTGKKSNVLPSLPDPKNSRITAGHMEAPTTHLRIYSLLYHDLHDPHYDLDITEA

SEQ ID NO: 97940 - protein, 96 aa, Gossypium hirsutum
  Clone ID: LIB3146-044-Q1-K1-D12.pep
PRVRREFQIPTDWMLDNGIMSKIKLGSVKLAKRYMKRVAMELQVKATLEKDPSMDYMLLQGVRFAFRIHQFAGGFDSETMHAFEELRNLANLLNKK

SEQ ID NO: 97941 - protein, 106 aa, Gossypium hirsutum
  unsure (1)..(106): unsure at all Xaa locations
  Clone ID: LIB3146-044-Q1-K1-D5.pep
STKNIIVDVDAWHDQEKEYEQLYSADAYEVIQTHLAFILGNRLTDXNNVAQIGKLRVGQVYAALVMYGYILKRFDERFQLEKTMRILPDGSYREGSRIDNAVIEDI

SEQ ID NO: 97942 - protein, 39 aa, Gossypium hirsutum
  Clone ID: LIB3146-044-Q1-K1-E1.pep
RIVDPLARVESFVVMPVLSSIVHSYKETFAFHAFAGIIL

SEQ ID NO: 97943 - protein, 85 aa, Gossypium hirsutum
  Clone ID: LIB3146-044-Q1-K1-E10.pep
TFTVFEEVIGEIRTERFLSTSSSIREVFGGYNYGPRLRGAKGLKGDDFTLPTAVYGGHQRQKNGGPITENRPCPEPLNSFLSLFF

SEQ ID NO: 97944 - protein, 58 aa, Gossypium hirsutum
  Clone ID: LIB3146-044-Q1-K1-E6.pep
SYAWGLFFHFVLPLVCFLLASIYKTLENGRGMRQCRIFFRERVVVGHCGHHIVYMSKL

SEQ ID NO: 97945 - protein, 123 aa, Gossypium hirsutum
  Clone ID: LIB3146-044-Q1-K1-E9.pep
PRVRRAETQLTRENFNDIQCNMGTLELEPERNEESVGGWILNESQYDGLGLSAGIDSSKVDAYGVTRLGPIKLSPGVKHILKPSQKVDQDNSRLIHSTIPFASVTECGKMLETLKKSTKIYGF

SEQ ID NO: 97946 - protein, 55 aa, Gossypium hirsutum
  Clone ID: LIB3146-044-Q1-K1-F11.pep
KLNGFCNYWCMWLIGAYITWPNLCLTWTTWNRCFDDILLYMCQLLHLRLWTVFYP

SEQ ID NO: 97947 - protein, 130 aa, Gossypium hirsutum
  unsure (1)..(130): unsure at all Xaa locations
  Clone ID: LIB3146-044-Q1-K1-F12.pep
PRVRPRVRFISSNILKSIAFYSFIVIKKKKKKKKKKKKKKKKKKKGVFDHEGIPFGHTSISSKKNVMEKGXNFRHTLFPXYKSNRPPTPDTIGQGLQYLKASIKAMSIKVIKVPGVKADDVIGTLAARSV

SEQ ID NO: 97948 - protein, 116 aa, Gossypium hirsutum
  Clone ID: LIB3146-044-Q1-K1-F7.pep
AARDARYDKEGVMKFFHMLIRRRYFSDDLPTPNTWSASPVQTTSQRLDENSSDDEQLYKRTSLSGDPYKYNILPPLPAQRNLTPPPTLYPQQPVSVTENYSLPRFSFTGSQEISGS

SEQ ID NO: 97949 - protein, 81 aa, Gossypium hirsutum
  Clone ID: LIB3146-044-Q1-K1-G1.pep
DIGYVVSSNSTTISDFVVFHHLRQIVHLRQFHLRSPNRSRPAVLSPVPIGCRSGVLTADPVACPVRDPNAHPFARVDGRVV

SEQ ID NO: 97950 - protein, 140 aa, Gossypium hirsutum
  Clone ID: LIB3146-044-Q1-K1-G2.pep
GRVGNSSNPYFSSSWRRNFEGGFILDMGVHFIAGLRMIVGCEVTSVSAITSHIDRTLPPPDIISSNFKLENGCSGVFVMVVSSSSPKIIWRVVGSKGTVQVERGKVDGKHGYLVSLYSADGQCKSTFHPFCGVHEELKIF

SEQ ID NO: 97951 - protein, 54 aa, Gossypium hirsutum
  Clone ID: LIB3146-044-Q1-K1-H1.pep
NYNDKMLRTFIFIIQYWGRYEGKGITEGGETKNTNLAVLFYTLMICFLKKKIKK

SEQ ID NO: 97952 - protein, 136 aa, Gossypium hirsutum
  Clone ID: LIB3146-044-Q1-K1-H12.pep
RLRGEVELKHVDFSYPSRPDVPIFRDLNLRARAGKTLALVGPSGCGKSSVIALIQRFYEPSSGRVMIDGKDIRKYHLKSLRKHISIVPQEPCLFATTIYENIAYGHESASEAEIIEAATLANAHKFISSMPDGYKT

SEQ ID NO: 97953 - protein, 83 aa, Gossypium hirsutum
  Clone ID: LIB3146-044-Q1-K1-H4.pep
MFLKLLTFFSGFLLVGIYFSETFTKYFEKYGEITDYVIMKDRHTGRPRGFGFITFADPSVVDTVMQEDHVINGKQVSKSFTFH

SEQ ID NO: 97954 - protein, 90 aa, Gossypium hirsutum
  Clone ID: LIB3146-044-Q1-K1-H6.pep
FIKLFFLLSFFYFFIFFIFFFFIFNFFQTHIFILLLKFRLKKNSHHCSYIRLKNNTTNTNINLNEIQRIAQNHAKCNCLFTSAIALIPVD

SEQ ID NO: 97955 - protein, 74 aa, Gossypium hirsutum
  Clone ID: LIB3146-044-Q1-K1-H8.pep
KFEGFISLSVLERRSASRYYFFQFINVFLGSIITGTAFQQLNHFIHQSTSQIPKTIGVSIPMKATFFITYIMVD

SEQ ID NO: 97956 - protein, 134 aa, Gossypium hirsutum
  unsure (1)..(134): unsure at all Xaa locations
  Clone ID: LIB3146-046-Q1-K1-A1.pep
DSLSKGAFVPNDISIAGSGHASFILLTGPNMGGKSILLRQVCLAVILAQVGADVPAEQFELSPVDRIFVRMGSKDHIMAGQSTFLTELSETALMLSSATQHSLVALDXTGRGTSTSDGQAIAESVLEHFVHKVQ

SEQ ID NO: 97957 - protein, 141 aa, Gossypium hirsutum
  Clone ID: LIB3146-046-Q1-K1-A12.pep
PPSSVVFLCFGSGGSFNGDQVKEIAFALEQSGHRFLWSLRQPPHPSKGPRASPTDYDDASEVLPEGFLDRTHGIGKIIGWAPQVAILGHPATGGFVSHCGWNSTLESIWFGVPIAAWPVYAEQQLNAFELVRELGLAVEIK

SEQ ID NO: 97958 - protein, 135 aa, Gossypium hirsutum
  Clone ID: LIB3146-046-Q1-K1-A2.pep
RLGLSGFEADETLYSNQGVISELVGTRSITFAINLGTCRDHIQRLACGIKNLSEASLLSFEKIKGQIEDHCGSAPFTDITMCLNPREAFFARKRKVSIGESLGKICGELICPYPPGIPVMIPGETITKKALEYLV

SEQ ID NO: 97959 - protein, 56 aa, Gossypium hirsutum
  unsure (1)..(56): unsure at all Xaa locations
  Clone ID: LIB3146-046-Q1-K1-A8.pep
QTLXLFYPLLVHTRTLTRGGAFTEFTTPSRLHSQTTQLVHYSFMIYTILFPYYSLS

SEQ ID NO: 97960 - protein, 78 aa, Gossypium hirsutum
  Clone ID: LIB3146-046-Q1-K1-A9.pep
PRVRKLVKWVIASNIIDKKDFEAADNLEKGKVHGAADFILYKLKEVRKIKQEDISCAMKDAGIGIGQNGWRYLFVYTG

SEQ ID NO: 97961 - protein, 136 aa, Gossypium hirsutum
  Clone ID: LIB3146-046-Q1-K1-B10.pep
GNSSFAISFGLKEKSKRGIFDVEFDTSKDGKYGDLNENHVGIDVGSLVSVKVRNLSSVNLVLNNGEKLHSWIDYEATSKRLEIRLSESSSTRPNEPLLSHSIDLATLWKDEEVFVGLSSSNGNSSQTCFIHLWSFK

SEQ ID NO: 97962 - protein, 116 aa, Gossypium hirsutum
  Clone ID: LIB3146-046-Q1-K1-B5.pep
MLNTKLTAIEYDQGIGQEEKEDSLLQDKTIYQRLIGRLLYLTHTRPDITYAVHCLSQFMQYPKVSHLNAALRVVRYIKNSPGQGILLSSSSSCQLIAFCDSDWASCPMSRKSVTGF

SEQ ID NO: 97963 - protein, 82 aa, Gossypium hirsutum
  Clone ID: LIB3146-046-Q1-K1-C4.pep
EDFSPTSIISTDAGQEEGSKRKRGYDADDISRGAAKAHKFLKEFAELPLETMDLKQALQQVTKLKDDLQKDVNNSEWLQQFF

SEQ ID NO: 97964 - protein, 133 aa, Gossypium hirsutum
  unsure (1)..(133): unsure at all Xaa locations
  Clone ID: LIB3146-046-Q1-K1-C7.pep
DNNRSSANASSNTIWVPSNARGAHRLPPGLANAVSNSYLHLLXRKPNDDSTNASKYPATFTVGYTERXNIDAAIETXNFTMLLSHHDCHSTEWAAFXWSKQASHVSVHMHTQWRSAXRFSHTDMLAAFDYIFI

SEQ ID NO: 97965 - protein, 136 aa, Gossypium hirsutum
  Clone ID: LIB3146-046-Q1-K1-C9.pep
VAASGNEVVKQSLMDLRVDELILQVLSGQTQGSIQSLYDAIRVLLTSDDNRVVASEVYGYARRFAKIGIAKALVETLHGGISSPSLVSASIALKAVAVNDEICKSIADAGGIDVLLKCVDDSGEQRNKTVARTLCS

SEQ ID NO: 97966 - protein, 143 aa, Gossypium hirsutum
  Clone ID: LIB3146-046-Q1-K1-D12.pep
GAALACTGPPNIDPKVAMLIAREVAIACRLGVEVAIVVGGRNFFCGDTWVAATGLDRSTAYQIGMMASVMNSILLQSLLEKMGVQACVQTAFSVQEAEPYSRVRAIRHLEKGRVVIFGGIGAGTGNPLFSTDTAAALRASKIH

SEQ ID NO: 97967 - protein, 135 aa, Gossypium hirsutum
  Clone ID: LIB3146-046-Q1-K1-D2.pep
TIQIYNVRVDEVKSKLIGHSKRITGLAFSHALNVLVSSGADSQLCVWNTDGWEKLKTKFLQIPVGITPTAQSETRVQFHQDQIRLLVVHETQLALYETTKLECFKQWVPRESFAPITHATFSCDSQLVYASFLDA

SEQ ID NO: 97968 - protein, 84 aa, Gossypium hirsutum
  Clone ID: LIB3146-046-Q1-K1-E11.pep
KVYTQLPKLVSKFQEAFNKVGPVMESMMLCDYVLPMIPCQKILDLPTSSDHLLAWCTKDSLLRCARKPCTISIYPQIFLRGTTF

SEQ ID NO: 97969 - protein, 59 aa, Gossypium hirsutum
  Clone ID: LIB3146-046-Q1-K1-E12.pep
LLAHQASKRSLDVGSASIFRQGIIGRTLSECIMGCIIGPTLLRALERFERCYVNLVYTF

SEQ ID NO: 97970 - protein, 42 aa, Gossypium hirsutum
  Clone ID: LIB3146-046-Q1-K1-E4.pep
KKNVVQLFSPANILDSCKLKKKKKNNRFRIQIKKKKKKIKKN

SEQ ID NO: 97971 - protein, 134 aa, Gossypium hirsutum
  Clone ID: LIB3146-046-Q1-K1-E6.pep
AFEVTHGKDLWSYTEANPECRELLNNSMGCKARLTVQATIEGCPEVFDGVESLVDVGGGNGTALSLFVKAFPWIRGINFDLPHVVAVAEKSDGIENVRGDMFMSIPKADAAFLMWVLHDWDDEECIKILKKCRE

SEQ ID NO: 97972 - protein, 56 aa, Gossypium hirsutum
  Clone ID: LIB3146-046-Q1-K1-E8.pep
ENPAQRERPTYLSLIKPFFFYHHILNKDRFSSNLENPTQQPYGIENVPVRHLTTLC

SEQ ID NO: 97973 - protein, 131 aa, Gossypium hirsutum
  unsure (1)..(131): unsure at all Xaa locations
  Clone ID: LIB3146-046-Q1-K1-F1.pep
PRVRLHHLDVVXPIFPNVSGGQALQRLILPTNLDSAGIMQQSICYDKTKSWTISVSWGFAVQVFRGIFSPREIEMPSRTFLNWYKRADYTAYAFNTLPVSRNPCQKPFVFYMSSVRMDSELNKTVSEYERH

SEQ ID NO: 97974 - protein, 98 aa, Gossypium hirsutum
  Clone ID: LIB3146-046-Q1-K1-F2.pep
VHHRLSPSDRFLVLSSDGLYQYFSNEEVVAHVTWFMENVPEGDPAQYLVAELLFRAAKKNGMDFHELLDIPHGDRRKYHDDVSVMVVSLEGRIWRSSG

SEQ ID NO: 97975 - protein, 105 aa, Gossypium hirsutum
  Clone ID: LIB3146-046-Q1-K1-F5.pep
TFGEFALPSSKFPLLLLISSNVDFKGWFARDPSVLHRVGHVLLKVKAVEPKRERRLVFADDLFQLSKVTKQKTVYVVSKAIEKLSGCKLYGLQFLFISVACFLGF

SEQ ID NO: 97976 - protein, 134 aa, Gossypium hirsutum
  unsure (1)..(134): unsure at all Xaa locations
  Clone ID: LIB3146-046-Q1-K1-F9.pep
HASGKKENGDEGDGAPSKAGIFGNMQNLYETVKKAQMVVQVEAVKVQKELAAAEFDGYCEGELIKATLSGNQQPIRIEITEAAMELGAEKLSFLVNEAYKDAHQKSVQAMKERMSDLAQSLXMPQGLGEGLKQQ

SEQ ID NO: 97977 - protein, 36 aa, Gossypium hirsutum
  Clone ID: LIB3146-046-Q1-K1-G10.pep
LINQVLLALHQNSFSHIRNVNMKTGLLVLLFAANIS

SEQ ID NO: 97978 - protein, 49 aa, Gossypium hirsutum
  Clone ID: LIB3146-046-Q1-K1-G11.pep
LMNQELLAPLFNFFSHIRNASMITPLFGTVVMPQILLKFMMNLISYMYW

SEQ ID NO: 97979 - protein, 119 aa, Gossypium hirsutum
  Clone ID: LIB3146-046-Q1-K1-G2.pep
MILHLPCTTLYQTPLLSNPRNLQQLAKTQTSFSPANKLSIARKLVTRGCSNSQGGEGEKKTESRSFLSLEEAGLVEISGLSSHEKFLCRLTISSLNLLRVISEQEGCSIEEMNAGRVCD

SEQ ID NO: 97980 - protein, 132 aa, Gossypium hirsutum
  Clone ID: LIB3146-046-Q1-K1-G5.pep
PTRPQPDPLCITFKGESHGDLHIDFTYYVNTDLVIAFHCDCQVSYRYKYKFLRATTSNLPSSVIKDNRGSKLTIGRGGMLKVQHLVSVARSATSHPHIDSAEHQQPSLIAYIEFFVKSEVDELKLISKTSGF

SEQ ID NO: 97981 - protein, 71 aa, Gossypium hirsutum
  Clone ID: LIB3146-046-Q1-K1-G8.pep
ASCCSCKLKVLSKLVFGKRLIKSFYPCFWGFSRCCLGVNVAISLGSSEGVVSVPEIQPPAVGRVALSEKKL

SEQ ID NO: 97982 - protein, 83 aa, Gossypium hirsutum
  Clone ID: LIB3146-046-Q1-K1-H11.pep
DAFQSFPATFYAFETDSVVGRTVKESVHDESIFSAGEIISDNRYQYLSSENHNSVNNSNAEHSKAATQILSDCSDDRRYTEKI

SEQ ID NO: 97983 - protein, 60 aa, Gossypium hirsutum
  unsure (1)..(60): unsure at all Xaa locations
  Clone ID: LIB3146-046-Q1-K1-H12.pep
CSLSVISIGGISCRVSLLYIQTVSNSWERYSNAYSRHGKGQIYTKPSHPQXLLHRHTASL

SEQ ID NO: 97984 - protein, 70 aa, Gossypium hirsutum
  unsure (1)..(70): unsure at all Xaa locations
  Clone ID: LIB3146-046-Q1-K1-H6.pep
RNGAICLDFFKDQWSPALEXYKVLLSIIXLSTDPNTDDALLPEIAHMYKTIRAHNDSSARSCTQKYALGL

SEQ ID NO: 97985 - protein, 31 aa, Gossypium hirsutum
  Clone ID: LIB3146-047-Q1-K1-A4.pep
LNIFLNQKNLLFIILQMFHPPFNVLTKKGNL

SEQ ID NO: 97986 - protein, 81 aa, Gossypium hirsutum
  Clone ID: LIB3146-047-Q1-K1-A5.pep
AITELASSLDIHEGLQAVKTNTLIPTPPALQEEYDENRLGVEGSEMREDTEELNALLYSDEEEDDFGVGDDDCDDDEIMST

SEQ ID NO: 97987 - protein, 110 aa, Gossypium hirsutum
  unsure (1)..(110): unsure at all Xaa locations
  Clone ID: LIB3146-047-Q1-K1-B11.pep
PTRPKDFNKKLQGTVTELKQELGGIHLVMSSPYDKLMEMIRNPSHFGFEDAETACCGTGFFEMSYLCDNMNPFTCSDANKYVFWDAXHPTEKTNAILADYVVKTTLAEFQ

SEQ ID NO: 97988 - protein, 97 aa, Gossypium hirsutum
  Clone ID: LIB3146-047-Q1-K1-B12.pep
VPPQIKRILVEGKCVYDCKCSPLQFFTSGGGSKAWKGDFDYLDGGGDDEIKFYYDGQGFMSVELTPTNAKIAFYDVSGNVLHSFNSNQLYYTYSTEM

SEQ ID NO: 97989 - protein, 62 aa, Gossypium hirsutum
  Clone ID: LIB3146-047-Q1-K1-B5.pep
PFSCIDINLFRAQIHLNKKCGTALGPFPFIVYPQNLMKWKLGVGNSISFSCIPNLIRFQPNS

SEQ ID NO: 97990 - protein, 46 aa, Gossypium hirsutum
  Clone ID: LIB3146-047-Q1-K1-B6.pep
MNFNFRSLNEDSATSQMEILRCPFLRNINEPTNFSFSSTLPFPLPY

SEQ ID NO: 97991 - protein, 56 aa, Gossypium hirsutum
  Clone ID: LIB3146-047-Q1-K1-B9.pep
ILLSLSTIFNWTVFGIFRDCYLFWILKKKKKKKKKKKKKKKKKKKKRKIFKTKTGE

SEQ ID NO: 97992 - protein, 83 aa, Gossypium hirsutum
  Clone ID: LIB3146-047-Q1-K1-C1.pep
MIIPLYLSRRFMWVTPPFWQTLRCLGTATEVNRSGALEKPTCRTIGYLILQHRKPLPGSSFSEVAVVPQKVCIRLTLFACKTS

SEQ ID NO: 97993 - protein, 92 aa, Gossypium hirsutum
  unsure (1)..(92): unsure at all Xaa locations
  Clone ID: LIB3146-047-Q1-K1-C5.pep
SVTKPTTATCRSSVPSRGASPTVADKPWTPSXMPGFXLDAPPNLTTTLPDRPHTATRSRPRAPSATTFYDEPSAIGRTKQQTFSTSRGRARN

SEQ ID NO: 97994 - protein, 59 aa, Gossypium hirsutum
  Clone ID: LIB3146-047-Q1-K1-C8.pep
YVPLQSFMSSILSVRSDERDLKVLLCYVKCIKKKIYLYFDKYFFKNYIYDSDLFYMFSS

SEQ ID NO: 97995 - protein, 129 aa, Gossypium hirsutum
  Clone ID: LIB3146-047-Q1-K1-C9.pep
HASAHASGNRAPKSPEQRKKIAEAIAAKWADPDYRERVCSGLAKYHGIPSGAERKPKRKPAAGTQSKQSPPKRKASDTNYSSGSETISPIERLRIRRRNKPLYKDPMASSKLEMLKNLRAQRAAEENKE

SEQ ID NO: 97996 - protein, 80 aa, Gossypium hirsutum
  Clone ID: LIB3146-047-Q1-K1-D1.pep
KFQGAMQIVAMAEIVIYINIDDSSENYWLRLLVREWAQFCIFLYIGWTFRSQELAPRFSVMPTLKSKVDLMVPPIYRIVS

SEQ ID NO: 97997 - protein, 99 aa, Gossypium hirsutum
  unsure (1)..(99): unsure at all Xaa locations
  Clone ID: LIB3146-047-Q1-K1-D10.pep
PRATRPRNRKYIARFFMYRGDDEPGDVNTSVATIKTNITSQFDDCCPTGFKCGINYHPPTDISGGDLAQVQTAECMMSNXTSVAEVYCRIDHNLDLMYA

SEQ ID NO: 97998 - protein, 79 aa, Gossypium hirsutum
  Clone ID: LIB3146-047-Q1-K1-D2.pep
NFSLFFLVLFYKQQFIYYMSRLIPYSSPNLSNIRWLSPTTTGPDNLYSELLNFHLLYCHATLLGIVCGAAGTTFHLMNL

SEQ ID NO: 97999 - protein, 138 aa, Gossypium hirsutum
  Clone ID: LIB3146-047-Q1-K1-E1.pep
MHHQLYYPQQQQFSSSSSPGESPGTSRGNGLWSRTGGSPTLAAASSLGLFTGSGSTNSSEASSPVDWSSGSSMAQLDYTNIDWSLDRTSPRPGGIWLGPTSPMKSSHLYYPNTNGLSVKPGMRLTPNVSGVAIAGLQD

SEQ ID NO: 98000 - protein, 72 aa, Gossypium hirsutum
  Clone ID: LIB3146-047-Q1-K1-E10.pep
YERLVAPLARWKVCLSAVIMLIIMSSGRLPVCLVGSDDIFDIGINNDVRGCPTPSGISGLVQRNLEIMLNLL

SEQ ID NO: 98001 - protein, 36 aa, Gossypium hirsutum
  Clone ID: LIB3146-047-Q1-K1-E12.pep
RTLILYSHTFYVCKAGNYPGGGLLLTVYATPFIKCN

SEQ ID NO: 98002 - protein, 67 aa, Gossypium hirsutum
  Clone ID: LIB3146-047-Q1-K1-E4.pep
AMCIYWIIMMQKSGTLGIRQLQRRASISSQRATLLKRFLDKITPEISADALEKSRIFSVKKAMILVI

SEQ ID NO: 98003 - protein, 139 aa, Gossypium hirsutum
  Clone ID: LIB3146-047-Q1-K1-F11.pep
HASATHDVVSHNFCELPVGTVCVADTQFKGRGRSKNAWESPRGCLMFSFTLQMEDGKTVPLVQYVVSLAVTEAIQDVCDRNGFPFINVTIKWPNDLYLNGLKVGGILCTSTYKSKKFNVSCGISFNVGNEKPTTCLNTV

SEQ ID NO: 98004 - protein, 53 aa, Gossypium hirsutum
  unsure (1)..(53): unsure at all Xaa locations
  Clone ID: LIB3146-047-Q1-K1-F9.pep
SYVLHXDYXSGGGTITLSPEPSXTKTLNFLPFNQSLFILKSQPKILFIIASSY

SEQ ID NO: 98005 - protein, 70 aa, Gossypium hirsutum
  Clone ID: LIB3146-047-Q1-K1-G2.pep
GAAQAVRQPFRKNLPNLVLGTPGESIQRFIDIQRGLFHSQIDQLQTVVVPQCKLTGVNPFPQKMAAGLLS

SEQ ID NO: 98006 - protein, 43 aa, Gossypium hirsutum
  Clone ID: LIB3146-047-Q1-K1-G9.pep
GHWNNGLQGPTLYLKGLVNSDHSLFVTLAKKSLRTLAAGIRKT

SEQ ID NO: 98007 - protein, 80 aa, Gossypium hirsutum
  Clone ID: LIB3146-048-Q1-K1-A10.pep
LEANQESQHRSLTATCRVSRRSGGLRGPGPKETDPKLDHGKPPWWAYPPIWRLVVPHGIKSSKARVLFFRTRGRTAWPKA

SEQ ID NO: 98008 - protein, 53 aa, Gossypium hirsutum
  Clone ID: LIB3146-048-Q1-K1-A2.pep
EGYSSINCFMVQKNFRKISWTIVSIEAHKRRKHRFSHLETSNDAKINLNDLTS

SEQ ID NO: 98009 - protein, 84 aa, Gossypium hirsutum
  unsure (1)..(84): unsure at all Xaa locations
  Clone ID: LIB3146-048-Q1-K1-A4.pep
SKQHRKGLGGYIQDIIHPQIQHSTQRTRHTRITKLIYEQTHGDINTFLXNVINNCITYTKHSTNHTHTATNTNPALKMQRKTQN

SEQ ID NO: 98010 - protein, 41 aa, Gossypium hirsutum
  Clone ID: LIB3146-048-Q1-K1-A5.pep
IFYMCNLSVYFSLKTCIIVYYGKKYDFKFIAEAEYNINLYQ

SEQ ID NO: 98011 - protein, 61 aa, Gossypium hirsutum
  unsure (1)..(61): unsure at all Xaa locations
  Clone ID: LIB3146-048-Q1-K1-A7.pep
HGLARHNNRGLCINXHSGRVRLLHWSGKGKPWVRLDTNRPXTLDALWAPYDLLQTPFALES

SEQ ID NO: 98012 - protein, 60 aa, Gossypium hirsutum
  Clone ID: LIB3146-048-Q1-K1-B12.pep
IFFIKGWLQCRFQAVWLVLFGMVYHRFRYVFCGDDTNKPTPFLRVLEGKESLKKSVRKRG

SEQ ID NO: 98013 - protein, 56 aa, Gossypium hirsutum
  Clone ID: LIB3146-048-Q1-K1-B2.pep
ECSSYLSYQTIKLLIYLTLTQLNMTYNVALTNPTLTCDSTLEQHAITIVKLQPALS

SEQ ID NO: 98014 - protein, 53 aa, Gossypium hirsutum
  unsure (1)..(53): unsure at all Xaa locations
  Clone ID: LIB3146-048-Q1-K1-B6.pep
PSLFSILLSLFFTLKFSTLIHGYKDPQYIFFQXVLXSHKISVXCLXSHXPSXA

SEQ ID NO: 98015 - protein, 108 aa, Gossypium hirsutum
  unsure (1)..(108): unsure at all Xaa locations
  Clone ID: LIB3146-048-Q1-K1-B7.pep
IFPKPXFLPLPRFPFYXXPPISSNXAAPLHFSVGSPTAVXSVDIXAVVLGFGLMRKVSLVVKSPVKVGKKSVAEEKVIAALKSHSKAERRRRERINAHLDTLRTLLPY

SEQ ID NO: 98016 - protein, 47 aa, Gossypium hirsutum
  unsure (1)..(47): unsure at all Xaa locations
  Clone ID: LIB3146-048-Q1-K1-B8.pep
QNFVDAXSCCWMGSLDTAAINFHMLLLACFSSLPERRFEKLSGHLNF

SEQ ID NO: 98017 - protein, 77 aa, Gossypium hirsutum
  Clone ID: LIB3146-048-Q1-K1-C11.pep
KYLGVQYMYDISFSSLSEQLLNKGLKQHIIEISLSVASESPLSCTSTIGMFSFRLLIAVLTLWKSVFPGNLMGLKFD

SEQ ID NO: 98018 - protein, 48 aa, Gossypium hirsutum
  Clone ID: LIB3146-048-Q1-K1-C4.pep
GNSPMNWKIKVHALRTCKLSCFSFLSFFTACIFTLTDTAYTVITTPII

SEQ ID NO: 98019 - protein, 76 aa, Gossypium hirsutum
  Clone ID: LIB3146-048-Q1-K1-C5.pep
MLPDNSCSSLPSLEPFTCIDNGNNNNKRKRRPAGTPDPDAEVVSLSPKTLLESDRYVCEICNQGFQRDQNLQMHRR

SEQ ID NO: 98020 - protein, 83 aa, Gossypium hirsutum
  Clone ID: LIB3146-048-Q1-K1-C9.pep
PLHHAKFFIQTFKISVVRPSLTMSSIMAFSASPTAHLPYIINSLADLRRHSRRSLSCAAHFFYSSSFRPDYFSPAPTLRIIDS

SEQ ID NO: 98021 - protein, 94 aa, Gossypium hirsutum
  Clone ID: LIB3146-048-Q1-K1-D10.pep
KYSLNGYLFTQIEIETAVLILMQDRIFLHRQLKSHAQICTRKLPCPRLLRLLTSIMQVHFHLNLLLPKLSLYQRNLILPTTTVYITIYNTLTYL

SEQ ID NO: 98022 - protein, 81 aa, Gossypium hirsutum
  Clone ID: LIB3146-048-Q1-K1-D6.pep
ILFFFKKTYKKMSTNLIPFILHPYLHISKMFGLSSITVQPLPTPRLKDDAFGSPSNFDLNKVNRDQRLNYKVRLAFPFSLF

SEQ ID NO: 98023 - protein, 92 aa, Gossypium hirsutum
  Clone ID: LIB3146-048-Q1-K1-D7.pep
MENDVSSSYLQCRVDFEASSTILENECFKKYGKSGKSFYYSQVASKVRWLSTTSSAAEITNQIGTGITSPLENITRKEEPSPRTVSAMLHDE

SEQ ID NO: 98024 - protein, 130 aa, Gossypium hirsutum
  unsure (1)..(130): unsure at all Xaa locations
  Clone ID: LIB3146-048-Q1-K1-E8.pep
HAFGHAFAHAFATRPTRPRTTYAHASPHASESQSQTKTLAEISQADEISPNMTLYINNVNEKIKIDHWKKSLRAVSSQLGKMLDVLAFKTLRHKGRAWVIVDDVSCGANAXRQMPGFTLYDKELRMQCAE

SEQ ID NO: 98025 - protein, 37 aa, Gossypium hirsutum
  Clone ID: LIB3146-048-Q1-K1-F5.pep
ECGRFLCSSSIGTLYFLLKYYYLIKTLFKQNSKTDSL

SEQ ID NO: 98026 - protein, 62 aa, Gossypium hirsutum
  unsure (1)..(62): unsure at all Xaa locations
  Clone ID: LIB3146-048-Q1-K1-G1.pep
ALFYLLNQFILSPXDRQPPRLFIHNQNPPPQPTLTKTPNNINPNLPPTHQLHQILKHYILTK

SEQ ID NO: 98027 - protein, 47 aa, Gossypium hirsutum
  Clone ID: LIB3146-048-Q1-K1-G2.pep
CFYINQYPHYLSFLTIKISLIIAITYIATTYPLTICSIQLFKSFINN

SEQ ID NO: 98028 - protein, 62 aa, Gossypium hirsutum
  Clone ID: LIB3146-048-Q1-K1-G4.pep
YVGFHGDYFSARLKFTLYKEISELKIFYIKPNIYTIFFPIKVSRYSHLSSMLGVICFDFKCL

SEQ ID NO: 98029 - protein, 129 aa, Gossypium hirsutum
  Clone ID: LIB3146-048-Q1-K1-G5.pep
GTLTSQNQQSVRKRLASATSELSEDLPVPGETSTDVVVPALKKSKGPDSGQEAAEGQAAALSENVGCPQVTDEAYDNVGDETQGSNEELVDVEKEEADTMEENLEKSKEPQVDGTNEVGLQENKNDEIL

SEQ ID NO: 98030 - protein, 139 aa, Gossypium hirsutum
  Clone ID: LIB3146-048-Q1-K1-G7.pep
LWDWELRYNETMRQLKGENAALRRVFAEENRKEKAENYKLRCELRRRTKELKDYKSQNDNNMERRSFLNEIEAPKENVPCRDLIELEKTTSDQIAALKEQLEETSEALKDMESRYSCLTVKQFLTNQEVQDARKESING

SEQ ID NO: 98031 - protein, 115 aa, Gossypium hirsutum
  Clone ID: LIB3146-048-Q1-K1-G8.pep
KMKKDVVVGGKDVKEVDNDCFLVVVKIFDHQGPLSTSFPIENRKNLVALRALKSHLDRTKSLPFVKRISDFHLLLFLAKSQGLGSDVPALAECVNTQTAVPEGYQLLIESMANAA

SEQ ID NO: 98032 - protein, 78 aa, Gossypium hirsutum
  Clone ID: LIB3146-048-Q1-K1-H1.pep
LGQYFKGTLILFFVNRYFQSMFFVKKKKKKKKKKKKKKKKKKKKKKKKKNGLPKKSYRHTPQHESKDCLIYGQPKQPS

SEQ ID NO: 98033 - protein, 41 aa, Gossypium hirsutum
  Clone ID: LIB3146-048-Q1-K1-H5.pep
DVFFLTVMMIFRFWMCIGRRSEFTSMIVAYNNITEVLKNDL

SEQ ID NO: 98034 - protein, 65 aa, Gossypium hirsutum
  Clone ID: LIB3146-048-Q1-K1-H8.pep
TEGAKPFTHKNDNQIVSTSIIIKKKRQDPCRSKYTNLSSPYLRAYTSTLVIPKGNLISGCIQLCD

SEQ ID NO: 98035 - protein, 122 aa, Gossypium hirsutum
  Clone ID: LIB3146-048-Q1-K1-H9.pep
MHQIGANQSPLQNAVCIEIKEDNKEKADEAQSSSTTKEHHKKREGVERFFRSNSTGHSIFRTREEDDKYTLRLLDHVKIKILRGHKAAISCISFRDFTSPLNSKNAASGETSDPLQGDLDKV

SEQ ID NO: 98036 - protein, 116 aa, Gossypium hirsutum
  Clone ID: LIB3146-049-Q1-K1-A12.pep
PTRPCKLEDGGAVLQTSVVDGTRVRGGQQLIRLGFWFFFVLGFELGCYWVLDLVGFGLICLVGFGLWLVWVWGYLGRLFVLGPKLDLYTVFFKKKKNGYDKKHLKNLSDEIIKISF

SEQ ID NO: 98037 - protein, 36 aa, Gossypium hirsutum
  Clone ID: LIB3146-049-Q1-K1-A7.pep
LMIILWVHLDTTHKIWHEYTHCQIISYIALEFKLMF

SEQ ID NO: 98038 - protein, 138 aa, Gossypium hirsutum
  Clone ID: LIB3146-049-Q1-K1-A8.pep
AVDYSEPIFDWLRNSPDDAMKKWESIITGELQQKQRSVLGSVTPSRLPHFKAADMHKTRFCDFRFQLGARYLYCHQGDCKHTIVIRDMRSIHPDDVQNRAAYPIMIFQLKPRVQKCSVCKITRASKVTLDDKWARENP

SEQ ID NO: 98039 - protein, 132 aa, Gossypium hirsutum
  Clone ID: LIB3146-049-Q1-K1-B12.pep
PTRPAKHHNITYADLYQLAGVVAVEVTGGPTIDFVPGRKDSDICPKEGRLPNATKGAPHLKDIFHRMGLSGKDIVALSGGHTLGRAHPERSGFDGPWTNEPLKFDNSYFVELLKGESEGLLKLPTDIALMDD

SEQ ID NO: 98040 - protein, 91 aa, Gossypium hirsutum
  Clone ID: LIB3146-049-Q1-K1-B2.pep
ALQHSLKRRIKKIRQRLMALKFEISEPPAAPENTGIGYRTAVGTARAKIGRWLQELQKLRQARKEGASSIGLITAEMIKVYQFLDHHSKIL

SEQ ID NO: 98041 - protein, 47 aa, Gossypium hirsutum
  Clone ID: LIB3146-049-Q1-K1-B5.pep
AAICEAHQVYAGVYLQKPPCVKGLRMASIKKIRVFVGILELFEFVAL

SEQ ID NO: 98042 - protein, 90 aa, Gossypium hirsutum
  Clone ID: LIB3146-049-Q1-K1-B8.pep
MAQQAVQKNTLYVGGLAEEVNETILHAAFIPFGDIKDVKTPLDQATQKHRSFGFVTFLEKEDAAAAMDNMDGAELYGRVLTVNYALPERI

SEQ ID NO: 98043 - protein, 97 aa, Gossypium hirsutum
  Clone ID: LIB3146-049-Q1-K1-C1.pep
IIIILEAFFFTNSHITFFCYSRTELLSKTKKISSRESEKTADKIKPSTNNTTSSEQQYKNTPPSFKHFLPIKASNRHGRCQFITFLIGHREHNFSSL

SEQ ID NO: 98044 - protein, 136 aa, Gossypium hirsutum
  Clone ID: LIB3146-049-Q1-K1-C11.pep
PTRPAVTVLNLRVKSSTSHSAVPIAFSAGDEFSRSPTTDANSGKLVMFSGEPDFSTGAHAMLNKDCELGRGGFGAVYRTVLQDGRAVAIKKLAVSSLVKSQEEFEREVKKLGKIRHYNLVALEGYYWTPSLQLLIS

SEQ ID NO: 98045 - protein, 80 aa, Gossypium hirsutum
  Clone ID: LIB3146-049-Q1-K1-C7.pep
RLDELPTRRVWPARKSIALGEPVEGPLIDFNSESKVDRVHLHEDKNDDEDEEYGFQALRRAVTEYWGTMKEYYKAAFDAF

SEQ ID NO: 98046 - protein, 43 aa, Gossypium hirsutum
  Clone ID: LIB3146-049-Q1-K1-D1.pep
PLPPMFSSDSLPLSDKLRSMESLRRRLVKPSSIIFPTLLTLML

SEQ ID NO: 98047 - protein, 142 aa, Gossypium hirsutum
  unsure (1)..(142): unsure at all Xaa locations
  Clone ID: LIB3146-049-Q1-K1-D2.pep
PTRPPTRPPTRPPTRPRSHHSFGNLRSTCVHEQQELETVDSSSDISDEKSEEEDGAFLKEPMEEQDNNKARSTPNYIRIVSKXMVGIYISIWVTKRLRRHINNLKVSPVGVGLMGYMGNKGSVFVSMTLFQSRLCFVCSHLT

SEQ ID NO: 98048 - protein, 88 aa, Gossypium hirsutum
  Clone ID: LIB3146-049-Q1-K1-D3.pep
PRVRRFRISMSSGILELKEEVANRLKLEVGACDIKYLDDDNEWVLIACDADLEECIDVSRSSGNNIIRLCIHDTMANLESSCESTGEL

SEQ ID NO: 98049 - protein, 76 aa, Gossypium hirsutum
  unsure (1)..(76): unsure at all Xaa locations
  Clone ID: LIB3146-049-Q1-K1-D8.pep
RLSRTRQYHTCRHRLSHRFLIRLLHASYELPKPIVIVAAIFVADESTAITIIEHLMGRGFFFFPFVLSRKKRNXTL

SEQ ID NO: 98050 - protein, 130 aa, Gossypium hirsutum
  Clone ID: LIB3146-049-Q1-K1-E3.pep
GHKNPPTSASHHGIQPLISPPPPSRVMAPPSIGTPAFYRQLVPQYGLPYSAYGYPGYTHNSYPLNYYNVYGGQHLASQYTTGVYLTYFPLYPQYPKYRALAPSPVAAAPARAEEVKAIVGAASSAQSSAL

SEQ ID NO: 98051 - protein, 89 aa, Gossypium hirsutum
  Clone ID: LIB3146-049-Q1-K1-E4.pep
NQKKLKSQKRNYHKLTRIHFKPNTLNKRVVKQSTIKQIKKIINTMSHNLRIQRIDPPPPHFFYSNNSLFFYFFFFFFIYFFFYFFSDAW

SEQ ID NO: 98052 - protein, 111 aa, Gossypium hirsutum
  Clone ID: LIB3146-049-Q1-K1-E7.pep
MHKDVYQAFPYSDPMQCTINFKQSDDPVMSFDQEDLNIPWSELVLKERIGAGSFGTVHRAEFRGCEVAVKILMEQEFHIERFREFLREVSIMKLLLHPNIGLFMGAVTQPP

SEQ ID NO: 98053 - protein, 53 aa, Gossypium hirsutum
  Clone ID: LIB3146-049-Q1-K1-F10.pep
TENRNPRSRLCPLSHRTMPVPPPLSATYSSTCSNHLHEEKIANKCCNKSAIKP

SEQ ID NO: 98054 - protein, 42 aa, Gossypium hirsutum
  Clone ID: LIB3146-049-Q1-K1-F2.pep
EQAELVKHLGTYVWRITKTLNQRTSSFGDSHMHQSTFKTESK

SEQ ID NO: 98055 - protein, 71 aa, Gossypium hirsutum
  unsure (1)..(71): unsure at all Xaa locations
  Clone ID: LIB3146-049-Q1-K1-F5.pep
WAPCSGARFRVPLGFFSSFXGPRLLCFPXRXXFVLGLRXXPLPRSVPXWVLIVXAALXXXRFLCFXXPXAW

SEQ ID NO: 98056 - protein, 124 aa, Gossypium hirsutum
  Clone ID: LIB3146-049-Q1-K1-F8.pep
PTRPVAAATAAPTTAHGIEVAVEFKPVEHPIEPLDNDQPIQCPLPEPSILNDGRIWKERVSASVRRRADLPVMQDGGTLQSQSESEATVGTKPRPTSNRMILPSLSAPEHNLLKLLEECTASMI

SEQ ID NO: 98057 - protein, 93 aa, Gossypium hirsutum
  Clone ID: LIB3146-049-Q1-K1-F9.pep
NKIKYFLLKLKIYFFFFNLYFFFFIFFFFEPTFLPIDITDYLINNNFTSYHSFFHLIHRQWLAFSLERIYLTTDSLGKSLVKISNHEQNLDQL

SEQ ID NO: 98058 - protein, 67 aa, Gossypium hirsutum
  Clone ID: LIB3146-049-Q1-K1-G12.pep
GLHNFDFDPYTYLKAISVIVWYIRYQEPVWLLMQRFRLTPAFLMLPFSISRTRLKETALLQVLTDFP

SEQ ID NO: 98059 - protein, 84 aa, Gossypium hirsutum
  Clone ID: LIB3146-049-Q1-K1-G2.pep
RHRYEVNPDVIGVLEEAGLKFVGKDETGKRMEVLELPSHPFYVGVQFHPEFKSRPGKPSALFLGLILAARGKLEAYLTRHQNGS

SEQ ID NO: 98060 - protein, 123 aa, Gossypium hirsutum
  unsure (1)..(123): unsure at all Xaa locations
  Clone ID: LIB3146-049-Q1-K1-G8.pep
TGRVGSNXSIPLSTKHGPGGLRSFVFEREDNNSSTTLIAESSSDVIQKENRPKKNAPSAKFSNSQIKSSSQPRKDEMETSSGAQLLEILRRSSSAQTSECTGKRCIVGQTESIFVAFKLGKEI

SEQ ID NO: 98061 - protein, 35 aa, Gossypium hirsutum
  Clone ID: LIB3146-049-Q1-K1-G9.pep
EDCLLWCYRFNCNDVLICRSLKDSSFAFNIVMFNS

SEQ ID NO: 98062 - protein, 109 aa, Gossypium hirsutum
  Clone ID: LIB3146-049-Q1-K1-H1.pep
KSEDRGLKDRLLRRFGSHISSLKLEFSKKKKKGKLPREARQTLLGWWNVHYKWPYPTEADKLALAESTGLDQKQINNWFINQRKRHWKPSESMQFAVMDNLSGQFFSED

SEQ ID NO: 98063 - protein, 85 aa, Gossypium hirsutum
  Clone ID: LIB3146-049-Q1-K1-H10.pep
PLLCFSPQKPRVMEQAKYHHLILVASKWYLSKSASRSSAVNFLPIGPSRSCSCSCPRPRPNLRTHPLPTPIFSRSLSQGTNNIMF

SEQ ID NO: 98064 - protein, 49 aa, Gossypium hirsutum
  Clone ID: LIB3146-049-Q1-K1-H11.pep
RILILRALGHRGSFSSISFVGAYKKNSTIGPFQVLLVKIRMEMPFYPTK

SEQ ID NO: 98065 - protein, 55 aa, Gossypium hirsutum
  Clone ID: LIB3146-049-Q1-K1-H6.pep
PRVRHFCITIRPGQTPQRRVNSKMGGSNTPKNPTPFHSIRNNQTNLLYITTQILL

SEQ ID NO: 98066 - protein, 69 aa, Gossypium hirsutum
  unsure (1)..(69): unsure at all Xaa locations
  Clone ID: LIB3146-049-Q1-K1-H7.pep
CCYSTALVLYFGNNIAEGEMLPXRVXLLGSFLAAPPFFFSPPLFFFFPFLFFFFFFFLNFIFYSKPTRP

SEQ ID NO: 98067 - protein, 95 aa, Gossypium hirsutum
  Clone ID: LIB3146-050-Q1-K1-A4.pep
PTRPPTRPSDLAIEEGQLDQFYKHLPKIFDRFSSADGFLFLEDDTVLNYWNLLQADKTKLWITDKVSMSWSTASTKGSSDWYSKQAELVRKVVST

SEQ ID NO: 98068 - protein, 94 aa, Gossypium hirsutum
  Clone ID: LIB3146-050-Q1-K1-A8.pep
PTRPGQGGAGGGGGSGSTSVTSGGVGSGTTGANGKFSHSGKFSVFHNSETKSSRKSEHKATFEGNFGGKGNVDGSGRSVNGAHSSTKTSAGKAS

SEQ ID NO: 98069 - protein, 57 aa, Gossypium hirsutum
  Clone ID: LIB3146-050-Q1-K1-C12.pep
AVGNVEVIAYTNQLLASVSKLQLRHKLKNRAPQSAMHRPEAVIVSYTVDGLLFLSYS

SEQ ID NO: 98070 - protein, 83 aa, Gossypium hirsutum
  unsure (1)..(83): unsure at all Xaa locations
  Clone ID: LIB3146-050-Q1-K1-C3.pep
KGSLGILQMRYHMAPEVTLYITAHIDXDGRWQQSQKKIIQEYINWISAVDANXPSAAGWWKTAQLYTDQTGTNMSHTEHLGAE

SEQ ID NO: 98071 - protein, 89 aa, Gossypium hirsutum
  unsure (1)..(89): unsure at all Xaa locations
  Clone ID: LIB3146-050-Q1-K1-D1.pep
KXKXXXXXEXSPGTXRRAHXXXXXXAXQXEXXXXXXXXEEEQXPXXREXGXGXXAXXPXXXXXXAXKAKEXTXXRXXEXDPRGQGENXE

SEQ ID NO: 98072 - protein, 67 aa, Gossypium hirsutum
  unsure (1)..(67): unsure at all Xaa locations
  Clone ID: LIB3146-050-Q1-K1-E1.pep
MPAITANDDSDYLSKLVLIRYSGVXGKSNLLSLFTKNELNLNSKSTIXVEFATRSIRVDDKAFKAQI

SEQ ID NO: 98073 - protein, 104 aa, Gossypium hirsutum
  Clone ID: LIB3146-050-Q1-K1-E10.pep
VECCDFSFQCRDLGHGLLVLSMLLENPSKCICSVNVTILCSPCPDFLGNPLTLSIWFESFLAPLGTNLGDAEKYRLKLKRTDRHRQEGTPLSKRPEIVRDLPSL

SEQ ID NO: 98074 - protein, 41 aa, Gossypium hirsutum
  Clone ID: LIB3146-050-Q1-K1-F1.pep
QSKCVKKDRKQNTLYSNRPSKRVNKFKMKKKRNLQENRVYR

SEQ ID NO: 98075 - protein, 57 aa, Gossypium hirsutum
  unsure (1)..(57): unsure at all Xaa locations
  Clone ID: LIB3146-050-Q1-K1-F11.pep
NSSESSANKRCETIGHDLLRLIPWADLDSTSLDINLDKTSTTKEKDRXTRGAFISNL

SEQ ID NO: 98076 - protein, 51 aa, Gossypium hirsutum
  Clone ID: LIB3146-050-Q1-K1-F4.pep
KVLKTNHNHTKRVDSRIHTACAFPHRLDTHPCSNLCQFCTLLLKQAEKHTF

SEQ ID NO: 98077 - protein, 37 aa, Gossypium hirsutum
  Clone ID: LIB3146-050-Q1-K1-F5.pep
LPTGATDGVLACSATNFPHFFGRFRSSLSSLLNLLVD

SEQ ID NO: 98078 - protein, 72 aa, Gossypium hirsutum
  Clone ID: LIB3146-050-Q1-K1-F7.pep
FATQAEGKREGEGEGERGEEGNRHQKSLKNAIEEHMGKRGKQKATEVAKFLLEQDTHKLLPPPFVAHSQGYM

SEQ ID NO: 98079 - protein, 93 aa, Gossypium hirsutum
  unsure (1)..(93): unsure at all Xaa locations
  Clone ID: LIB3146-050-Q1-K1-G4.pep
YAIACSHERGQMFMVPAIEVYKGHIVDIYHRPEDSCLNHCKKXAATKGRSNIRTTQRFLIHHMHYSLDHRIDYIQXDQWEEATPSSIRMCKHP

SEQ ID NO: 98080 - protein, 94 aa, Gossypium hirsutum
  unsure (1)..(94): unsure at all Xaa locations
  Clone ID: LIB3146-050-Q1-K1-G6.pep
PTRSNGHLLTLTQRVQKIXFQVRDELEHLMDDDGDMAEMYLTEKKLRSEGNTPHEINPLTNFSGGTRQVSKSAPVSPIASTSGAPRLQRAFSSI

SEQ ID NO: 98081 - protein, 56 aa, Gossypium hirsutum
  Clone ID: LIB3146-050-Q1-K1-G8.pep
KYPLTEVTQYMLSLSICFNSFSQTLKPEIKTHYFDSDIAGSQQMSSGQKMFTALKL

SEQ ID NO: 98082 - protein, 99 aa, Gossypium hirsutum
  Clone ID: LIB3146-050-Q1-K1-G9.pep
IQDGRVLDVSFSKAFYKLILGQDLSLYDIQSFDPELGRTLLEFQAIIVNQKRHQKSICVENTALKQDLCFRNTRIEDLFLDFTLPGYPDYVLSFECNLK

SEQ ID NO: 98083 - protein, 49 aa, Gossypium hirsutum
  Clone ID: LIB3146-050-Q1-K1-H3.pep
KRVEMGGVAWTEEEDYLLKKCIERYGEGKWHRIPVLAGKFILSSFFFFF

SEQ ID NO: 98084 - protein, 44 aa, Gossypium hirsutum
  Clone ID: LIB3146-050-Q1-K1-H8.pep
PLVLFLNAPINRRELQNFYNPNRHPLTILLYSQNLYTTIIYLIH

SEQ ID NO: 98085 - protein, 68 aa, Gossypium hirsutum
  Clone ID: LIB3146-050-Q1-K1-H9.pep
YLLSASSVQYAEYYTGYSTAYQMVRIVFFPKHWTRGQQFTCKINMLSGITPTLQLSVFNAYLDLIIRT

SEQ ID NO: 98086 - protein, 134 aa, Gossypium hirsutum
  Clone ID: LIB3146-051-Q1-K1-A1.pep
YGRVDGRDIYIGSKKISVRADGTVPTLEGNMMKGKTIGFVYSGATPAGIFSLSDACRTGVPEAVDELKSMRIKAAMLTGDNQAVAIHVQEQLGNRLDVVHAELLPEDKARIIKEFKKEGATAMIGDGVNDAPAL

SEQ ID NO: 98087 - protein, 60 aa, Gossypium hirsutum
  Clone ID: LIB3146-051-Q1-K1-A12.pep
DIWLGFFFLILFGLGLVWFRLKLGWAIWAFYIYYPFNFNNMLKNIWVNYTISHYYGKFSF

SEQ ID NO: 98088 - protein, 132 aa, Gossypium hirsutum
  Clone ID: LIB3146-051-Q1-K1-A5.pep
ALKKAAKVLEDRREKNAVASILILSDGQDKQCEMNSTNQNLPVVSTTRLAQSEIPVHSIGFGTCSQAPNDDAFCKIVNGLVSVVVQDVRLQLGFVSGSAPAEISSVYSLTTRPSYVGSNSVRIGDLHSGEEK

SEQ ID NO: 98089 - protein, 79 aa, Gossypium hirsutum
  Clone ID: LIB3146-051-Q1-K1-B10.pep
KKEFNAALLQLSLKAFLPLVPIKWKGNKTDPHFPALLAWSSSVAPLFGGVLKVEANQQWSQFQEKDNTLHSRDPSLGLY

SEQ ID NO: 98090 - protein, 54 aa, Gossypium hirsutum
  Clone ID: LIB3146-051-Q1-K1-B2.pep
KEKKYKHAKRRDYYLSLRSTLVCICTHLPLTSSINVNNASILISEFRFKRNYLI

SEQ ID NO: 98091 - protein, 70 aa, Gossypium hirsutum
  unsure (1)..(70): unsure at all Xaa locations
  Clone ID: LIB3146-051-Q1-K1-B5.pep
KKNXVSAAFIKQPVLPRRNNTLSIYTKANHKTTTTDNKQITKRPPDNKNQCYSSHPCNQHLLIQCYQNTN

SEQ ID NO: 98092 - protein, 56 aa, Gossypium hirsutum
  Clone ID: LIB3146-051-Q1-K1-C2.pep
TDTEMPDFKYVILKLNLSIYGGYAHTCHFPFPFQKTISLFRYCNAFESRFGILWQI

SEQ ID NO: 98093 - protein, 45 aa, Gossypium hirsutum
  Clone ID: LIB3146-051-Q1-K1-C3.pep
PTRPPTRPVTLFILSFFLFQVEEIYILLFHFPLNSVTYFIVSIFN

SEQ ID NO: 98094 - protein, 54 aa, Gossypium hirsutum
  Clone ID: LIB3146-051-Q1-K1-C7.pep
QTYTHPFIFLMILMTHQQRGSPNQACGSSTGSPLYLHSRSYNVSKINLPHVYTA

SEQ ID NO: 98095 - protein, 55 aa, Gossypium hirsutum
  unsure (1)..(55): unsure at all Xaa locations
  Clone ID: LIB3146-051-Q1-K1-D11.pep
XFFINPQNPTRVAFLKTPPRLSYKAKRIHITHRICCITKTSYVYSNHFDYTISYY

SEQ ID NO: 98096 - protein, 123 aa, Gossypium hirsutum
  unsure (1)..(123): unsure at all Xaa locations
  Clone ID: LIB3146-051-Q1-K1-D2.pep
PTRPPTRPAFPMNFPRGYGAEKKVRAWMEEFQKLPYISPYEDSRHIDPNSELMEKRAVGVLHEFLSLTIHKKTKRNYLRSLREELNIPHKFTRLFTRYPGIFYLSLKCXTTTVALKEGYRREN

SEQ ID NO: 98097 - protein, 108 aa, Gossypium hirsutum
  Clone ID: LIB3146-051-Q1-K1-D6.pep
FSHCFLAVGFVEFRNKETFPVKIPAWKHCNCIRSRCVKLYCECFAAGIYCDNCACQNCLNNPDYDDTVLDTRQQIELRDPLAFASPVVFPSNDSPNVTGHGNLMNAGS

SEQ ID NO: 98098 - protein, 62 aa, Gossypium hirsutum
  unsure (1)..(62): unsure at all Xaa locations
  Clone ID: LIB3146-051-Q1-K1-D9.pep
INMVDLVNPLIEAILLSMMSILFLSYCYTNGKSNEVMVHXKKKKKMIKKNKNKKKIFFWAAP

SEQ ID NO: 98099 - protein, 60 aa, Gossypium hirsutum
  Clone ID: LIB3146-051-Q1-K1-E12.pep
GGFFIVYPISTIQTFPLIQYEPFIINKLLLINILTRLYVIYTNYYNIQPLKAPSPKTLLI

SEQ ID NO: 98100 - protein, 57 aa, Gossypium hirsutum
  Clone ID: LIB3146-051-Q1-K1-E6.pep
MRLCLACAETIYVRVCEERINLLRAALVGAPGTPYHDGLFFFDISLPSDYPYEPPLV

SEQ ID NO: 98101 - protein, 43 aa, Gossypium hirsutum
  unsure (1)..(43): unsure at all Xaa locations
  Clone ID: LIB3146-051-Q1-K1-F11.pep
IPIITLLFSNILPSSEWVFYNITQPIQHXKKHMTHLTSIKHSL

SEQ ID NO: 98102 - protein, 52 aa, Gossypium hirsutum
  Clone ID: LIB3146-051-Q1-K1-F2.pep
TEAYNTLRYTFLKLTPDLPTTSGFALFHTCYNLSSKTTVMVPTVAFYFNSGL

SEQ ID NO: 98103 - protein, 128 aa, Gossypium hirsutum
  unsure (1)..(128): unsure at all Xaa locations
  Clone ID: LIB3146-051-Q1-K1-F4.pep
PRVRGEWSQSSSLKRVKICGYFDAKGMANXNHHSTSLYGSGAMNMQRNPEEEEEDVPGGGGGGGEESVDNPQIGYQESGGGVVTVMNNGMEEASHANLYGQGSDLTAVQGNSSADQLTLSFQGEVYVF

SEQ ID NO: 98104 - protein, 42 aa, Gossypium hirsutum
  Clone ID: LIB3146-051-Q1-K1-F9.pep
LDIAIIQLMFKADHFCKVTFANSVQSSKPFLTFNQKILQLNN

SEQ ID NO: 98105 - protein, 110 aa, Gossypium hirsutum
  Clone ID: LIB3146-051-Q1-K1-G1.pep
AGMHISLEDIRETDPCLYSSCKKILEMDAEFIDSDALGLTFVREVEELGSRRLVELVAGGKNIVVNSKNRQEYVNLLIRDRFVTSISEQVDHFSQGFGHILSNSRLQKFF

SEQ ID NO: 98106 - protein, 28 aa, Gossypium hirsutum
  unsure (1)..(28): unsure at all Xaa locations
  Clone ID: LIB3146-051-Q1-K1-G5.pep
IDIYKNFMVDYLYKLDIYSXMKMLVRQL

SEQ ID NO: 98107 - protein, 101 aa, Gossypium hirsutum
  unsure (1)..(101): unsure at all Xaa locations
  Clone ID: LIB3146-051-Q1-K1-G8.pep
SAVLLIKVLIPTSAGLGLTGDIDHQDDVAPKRPGXANNFVLVKVPTWINGSEDNQYXGVGAPFGPTLESKEKHAIHTRLALTNPPFCCIKPKNQVFKFKSF

SEQ ID NO: 98108 - protein, 45 aa, Gossypium hirsutum
  Clone ID: LIB3146-051-Q1-K1-H1.pep
FGNASGGSPRQPFRGKIIKPKSGRLQVLGPKFGKEKFFYLVQKST

SEQ ID NO: 98109 - protein, 62 aa, Gossypium hirsutum
  Clone ID: LIB3146-051-Q1-K1-H6.pep
PVRTRRLLAITKVKVPHLVLIFGQNPCPPWLGIFSPLIIPFGATVYKESALLFVCRVINIWP

SEQ ID NO: 98110 - protein, 84 aa, Gossypium hirsutum
  Clone ID: LIB3146-051-Q1-K1-H7.pep
CLIVSMYNVIYDGPLTASLVEKITLLAAFEGGLLIFSSNLLNTSLTGMQATVVGPDDSGLINPSTWWLSLSCIGFKLSLCSDAW

SEQ ID NO: 98111 - protein, 38 aa, Gossypium hirsutum
  Clone ID: LIB3146-052-Q1-K1-A1.pep
TTALLLSCAPQLPCACGVTTSRHPWSLLPQLDSAPRVR

SEQ ID NO: 98112 - protein, 92 aa, Gossypium hirsutum
  unsure (1)..(92): unsure at all Xaa locations
  Clone ID: LIB3146-052-Q1-K1-A5.pep
GPLPKECRPHPNTNRDQSCFKSLVQDRKNHNXTAHKKPLPGDKQCTSXLWMHRTTLRPSRKLGTSLRWHIPPIHLRXRRGSXPGKFRXPETC

SEQ ID NO: 98113 - protein, 90 aa, Gossypium hirsutum
  Clone ID: LIB3146-052-Q1-K1-A7.pep
FRAHSCCYCEYTPRLIKKLEDIRVKRVAAGLLHSACIDGTGSLFVFGDKVVGNLGFGEAKNATMPSMINTLPYSEEVACGGYHTCVVTIR

SEQ ID NO: 98114 - protein, 74 aa, Gossypium hirsutum
  Clone ID: LIB3146-052-Q1-K1-B2.pep
ELTTLIPVAAYSRSVNKHSNLAYLPFHSILSTKSSVFPPLLVGCRIYNQYEEEVQQFCLLLLQPTFSAKTNILF

SEQ ID NO: 98115 - protein, 76 aa, Gossypium hirsutum
  Clone ID: LIB3146-052-Q1-K1-B5.pep
MGKKNRKSPFKFLYFSRIFCIRIRVFFFYNVCIGFISPELQKIKKKIKNLLPRIPLFPYFPHFCCCFLPFLLCCVC

SEQ ID NO: 98116 - protein, 45 aa, Gossypium hirsutum
  Clone ID: LIB3146-052-Q1-K1-C6.pep
TSLGRLIRRGNQQPATLNSKAPNATFHHKINQASGRQALNHLRRV

SEQ ID NO: 98117 - protein, 56 aa, Gossypium hirsutum
  Clone ID: LIB3146-052-Q1-K1-C7.pep
AGYAGSTRGTFNLALCKRAKDCTQILPVSTEHLSKCSKDQWGLHRIQFLPIYSSRE

SEQ ID NO: 98118 - protein, 50 aa, Gossypium hirsutum
  Clone ID: LIB3146-052-Q1-K1-C8.pep
EGSIKQIGGTLPKPKKTSLNIACYRMKLFFTLVAYSSVNHSMKFLTAHSD

SEQ ID NO: 98119 - protein, 96 aa, Gossypium hirsutum
  unsure (1)..(96): unsure at all Xaa locations
  Clone ID: LIB3146-052-Q1-K1-D6.pep
GHFARQCTTGAASSLCYKCGEGEHSIHECSSAMVGKRNRESSTPNLRSRLENKDLLGYKSVPHDNGKSRCKRRKNPXEEKGFNTPRKEKKRGGWIA

SEQ ID NO: 98120 - protein, 63 aa, Gossypium hirsutum
  Clone ID: LIB3146-052-Q1-K1-D7.pep
MICIPYRSFREVSRYAILYLYTHLISFKMFLFLCVKSYKVNRYTPYRGYIVCSDIVVRARRDT

SEQ ID NO: 98121 - protein, 74 aa, Gossypium hirsutum
  Clone ID: LIB3146-052-Q1-K1-D8.pep
GCCPVLFNFSLLFNGYIDVKKKNQKKERDQNCCNCRSCRIYNYRFLYIDFDEICRKCEEKKKGDKIMKGREKRL

SEQ ID NO: 98122 - protein, 41 aa, Gossypium hirsutum
  unsure (1)..(41): unsure at all Xaa locations
  Clone ID: LIB3146-052-Q1-K1-E2.pep
TTSRXSAHCCPIWCSSFYLYFTLWGFFTFCYVNARSNVSMW

SEQ ID NO: 98123 - protein, 56 aa, Gossypium hirsutum
  Clone ID: LIB3146-052-Q1-K1-E6.pep
VRGCGPFGAYSSTKPQRITVDSEEVEFEYEGKSGLVTFALKVPEEEQYLWNIVIEL

SEQ ID NO: 98124 - protein, 46 aa, Gossypium hirsutum
  Clone ID: LIB3146-052-Q1-K1-F1.pep
KDIGFHSFSSLFSIILCNRPTLINFYYIPLIMWKNSLFFFNYYYRK

SEQ ID NO: 98125 - protein, 41 aa, Gossypium hirsutum
  Clone ID: LIB3146-052-Q1-K1-G2.pep
YYLETRNMHFNLSPITNYTIDSTYILLPISYQVSIFRELSI

SEQ ID NO: 98126 - protein, 53 aa, Gossypium hirsutum
  Clone ID: LIB3146-052-Q1-K1-H1.pep
PAVTSGGDVSLLRHGTHHNNVGSIVKHQVVGPHPHQMVDIVHPQLFHCRFIPP

SEQ ID NO: 98127 - protein, 57 aa, Gossypium hirsutum
  unsure (1)..(57): unsure at all Xaa locations
  Clone ID: LIB3146-053-Q1-K1-A1.pep
RKMHKDTIVELLLIGKASSFFLSKLFNYCYRXXLLPTQGFQNIILYYTLFWLSSIHC

SEQ ID NO: 98128 - protein, 130 aa, Gossypium hirsutum
  Clone ID: LIB3146-053-Q1-K1-A2.pep
DPRVRTKNFCRSAMANSARLLVLPGFIALSLSCMNVAQGAGTARRLLQATTTTPPIFPNLPPFRGFQFPPYSGPFPEYRLPPFPGISNVPPSAPGFPGSSAPGFPGSSASGFPGSFPSFPAPPTLPNTTP

SEQ ID NO: 98129 - protein, 102 aa, Gossypium hirsutum
  Clone ID: LIB3146-053-Q1-K1-A4.pep
QPLFRQLFHPLFLFPAPFAKAANFTKLLHKIGPNLCDQVAIRTNNKQDNVFNPLFEKRPKQISIRSSLPSYKDLHPLMKHTNVFSIQRKYTILKHILHVPPS

SEQ ID NO: 98130 - protein, 71 aa, Gossypium hirsutum
  Clone ID: LIB3146-053-Q1-K1-A9.pep
QAYLHAFAVWTDTKQPYNCGAIPERNTLNFCIIKTIGDNRKKRKVVLMSTKIAVLELQCPINVNTMRADLN

SEQ ID NO: 98131 - protein, 120 aa, Gossypium hirsutum
  unsure (1)..(120): unsure at all Xaa locations
  Clone ID: LIB3146-053-Q1-K1-B2.pep
ELPGRPIPGKVLPLMVARVTVLTCQWLMGDXKGNSVDLPDGTSYNSGVYVERCKYLEESKCVXICINTCKLPTQSFFKDYMGVPLLMEPNFSDYSCQFKFGVSPPLPEDDNTLKESCLDV

SEQ ID NO: 98132 - protein, 102 aa, Gossypium hirsutum
  Clone ID: LIB3146-053-Q1-K1-B6.pep
RAYYTFSIQRPSKKSKGDLNSFRLQYFFCACTLFSLRTFLKKKRKRTENFPLVKESIRFGFFGKSGGKKASGKGFLRVDLNETKEGFTSLTNFKGELMITRP

SEQ ID NO: 98133 - protein, 57 aa, Gossypium hirsutum
  Clone ID: LIB3146-053-Q1-K1-B8.pep
KKFKFLLLRNLVKRGACGQADFQSVDFALNSWPETPETMPLSFLVNKFCGDYIYELQ

SEQ ID NO: 98134 - protein, 102 aa, Gossypium hirsutum
  unsure (1)..(102): unsure at all Xaa locations
  Clone ID: LIB3146-053-Q1-K1-D1.pep
LKIHIPCPMKQNVNIYKLKMVIGEKVYGVNRLWHLISEASIGKPTLITKCSNRNIKHKYFLFTKKKKEQLPNHKIHYSHISSERVXERVGERVGGRVGGRVG

SEQ ID NO: 98135 - protein, 39 aa, Gossypium hirsutum
  Clone ID: LIB3146-053-Q1-K1-D10.pep
LNTYSITKLHCTSLLSTLQLLICKNQFLTQLKLNPAHNA

SEQ ID NO: 98136 - protein, 145 aa, Gossypium hirsutum
  unsure (1)..(145): unsure at all Xaa locations
  Clone ID: LIB3146-053-Q1-K1-D5.pep
PEXRADDASVRELDSLPRECCLSETVALGVGKPPFEPWVQVNFDVGIYGHLHAASAGVVVIYLEGLLLGSVCFWSEYVLDVVVAEALACVHAIRFARDLGLRRVEFEGDSAVVISKLKSGVIDRSNISGYIWDARQLLLGFKHFK

SEQ ID NO: 98137 - protein, 134 aa, Gossypium hirsutum
  Clone ID: LIB3146-053-Q1-K1-D6.pep
DYAPNHAAYYPFGVDVFLSGRKIDHMARFIELPVISHSEKLPSILVVNVQIPLYPAALFQSETDGEGMSFVLYFKLSDSYSKELPLHSQENFRRLIDDEAEKVKGFPVDTIVPFRERLKILGRIANVEDLHMGA

SEQ ID NO: 98138 - protein, 63 aa, Gossypium hirsutum
  unsure (1)..(63): unsure at all Xaa locations
  Clone ID: LIB3146-053-Q1-K1-E12.pep
LLFLFLVFYLVPPKSNFLALSSSLKRAAIHEIHXARRSTLSTMNILRNPATVSPDACGRPGFS

SEQ ID NO: 98139 - protein, 132 aa, Gossypium hirsutum
  Clone ID: LIB3146-053-Q1-K1-F11.pep
HFLVGQCLTSMILIFAREEKCISTTNNPLYVVNEMKQVVIIQNTNEDSENRLQNELMAEGSALQCKKLVTTETFEERLENKLDAVQTVMQSEEMRWDTYHQYRYESKQADETTMQCENLTRKEINKCSYSIG

SEQ ID NO: 98140 - protein, 88 aa, Gossypium hirsutum
  unsure (1)..(88): unsure at all Xaa locations
  Clone ID: LIB3146-053-Q1-K1-F3.pep
TMCKSMEMGDIFIFLHPILSFYFIQYTFKALLAIVHLQARGNKRGRRFLLFQSXCNMSNHSGTGVTKPFVFHVNGRVGGRVGGRVGGR

SEQ ID NO: 98141 - protein, 113 aa, Gossypium hirsutum
  Clone ID: LIB3146-053-Q1-K1-F7.pep
HASAHASVLTLLHYAVSWLWLAIFRTLSWLPVSPPAKTTPSSSIFLLGAIMAFASGLANTSLKYNSVGFYQMAKIAVTPTIVLAEFVLFRKTISFKKVHRQTPFGSLRLSLIL

SEQ ID NO: 98142 - protein, 52 aa, Gossypium hirsutum
  Clone ID: LIB3146-053-Q1-K1-F8.pep
QHICLSSKKEKKIHEIYITFPDANTKRVKDKAFFPLLSNLPPNLMEKRVNEI

SEQ ID NO: 98143 - protein, 52 aa, Gossypium hirsutum
  Clone ID: LIB3146-053-Q1-K1-G3.pep
LVWGRFWVKVWDLVAPMYTPTKFGTPFYNPSDPASSAVSVEGAGERTHIHSR

SEQ ID NO: 98144 - protein, 102 aa, Gossypium hirsutum
  unsure (1)..(102): unsure at all Xaa locations
  Clone ID: LIB3146-053-Q1-K1-G6.pep
MLLLDFADGFNDLFSNNNKQFWYVALFIVSTGPPWDAFGVGLLKWKMQSADXSMVPLSINCXTSVSANETYVSIEYEASTMFDLQNLVISIPLPALREAPNV

SEQ ID NO: 98145 - protein, 105 aa, Gossypium hirsutum
  unsure (1)..(105): unsure at all Xaa locations
  Clone ID: LIB3146-053-Q1-K1-H11.pep
KPGPTHASADAWVSVEMGLKELASLKVEGAIVNALAQQXXASSVRISLSDIKSPRDTKFMEAFELSPEESEDVLFKEAWLTYIWRRAKSHGIEEDTAKERLKFWI

SEQ ID NO: 98146 - protein, 67 aa, Gossypium hirsutum
  Clone ID: LIB3146-053-Q1-K1-H3.pep
FMTNRLFSRKQFVIDDLHSKKPNFSYAYLNDNLHTIYDAKDPTSIFVLKFTTHFGGGKTTESGLIYD

SEQ ID NO: 98147 - protein, 65 aa, Gossypium hirsutum
  Clone ID: LIB3146-053-Q1-K1-H4.pep
PTRPKALFAEFPQVMQQGFMCVQGGICLSSMGRAVSYERAVAWKVVNDEENAHCICFMFINWSFV

SEQ ID NO: 98148 - protein, 66 aa, Gossypium hirsutum
  Clone ID: LIB3146-053-Q1-K1-H7.pep
INPHFTLYHHSPLPQYASFIPTLIPINLHTLNSKLTVINKLSSNPITAPYNTSKHLYHHKITCLFS

SEQ ID NO: 98149 - protein, 49 aa, Gossypium hirsutum
  Clone ID: LIB3146-054-Q1-K1-A10.pep
HPYLYSSIYVIQDLTYIIHAGDRCKFLHIEIITLLSYMTLHVSATTCLQ

SEQ ID NO: 98150 - protein, 35 aa, Gossypium hirsutum
  Clone ID: LIB3146-054-Q1-K1-B10.pep
PSAVSVVCMALGGSGLAVFWRNRPIPVDDKDDFME

SEQ ID NO: 98151 - protein, 45 aa, Gossypium hirsutum
  unsure (1)..(45): unsure at all Xaa locations
  Clone ID: LIB3146-054-Q1-K1-B12.pep
YFXKIHHLKGVKQKSFAYTLNTACEVEAQPPENLRTMPAQSQTYR

SEQ ID NO: 98152 - protein, 62 aa, Gossypium hirsutum
  Clone ID: LIB3146-054-Q1-K1-B2.pep
FRKRKIVHVNSFALVSGSTNNQSDCKKHMYKCFAFNLNLIHCWLGGQKKRMISIKGSLKNIG

SEQ ID NO: 98153 - protein, 57 aa, Gossypium hirsutum
  Clone ID: LIB3146-054-Q1-K1-B3.pep
LPKHSYVTYSDYIVYNPRYEHSLLGSAKTATLWSYSVFFQHMQKAEYFIGTFAESSI

SEQ ID NO: 98154 - protein, 45 aa, Gossypium hirsutum
  Clone ID: LIB3146-054-Q1-K1-B8.pep
AFLPGSSNKKNTAQAKRCFLSDNYFKSQYISDKMNIGSHSPAIWL

SEQ ID NO: 98155 - protein, 45 aa, Gossypium hirsutum
  Clone ID: LIB3146-054-Q1-K1-C1.pep
KGKNFSTDFCTSHQNWRTVELLIVHGLLPLFLLVQGLKLHMPTRS

SEQ ID NO: 98156 - protein, 78 aa, Gossypium hirsutum
  Clone ID: LIB3146-054-Q1-K1-C12.pep
CLASLAWQQACPRHSLDCPITAHRDYCAARMPRLSNWWLMDVQLALMSTLELALLEVVLVGLQIETLVHVEADILGSG

SEQ ID NO: 98157 - protein, 33 aa, Gossypium hirsutum
  Clone ID: LIB3146-054-Q1-K1-C2.pep
QKKSLTTAFSNSSNTFSSSDHRDTKSTVKLLFN

SEQ ID NO: 98158 - protein, 48 aa, Gossypium hirsutum
  Clone ID: LIB3146-054-Q1-K1-C7.pep
VRIIEIQIKHYIISNLTFINYNQACYQFIHKSFIYFSSSSSSPSTSLV

SEQ ID NO: 98159 - protein, 73 aa, Gossypium hirsutum
  Clone ID: LIB3146-054-Q1-K1-D10.pep
FYIRYITFLEHETAEMLFLIMPTIIQIILFTLAFMGIQCLHDFGFWHDRLSGVVTSLFLPSPFAPAESILPNS

SEQ ID NO: 98160 - protein, 41 aa, Gossypium hirsutum
  Clone ID: LIB3146-054-Q1-K1-D3.pep
RGRVGGRVGTNSVTLYVFPLPLHLISFRDQTFSKCLNHFCV

SEQ ID NO: 98161 - protein, 84 aa, Gossypium hirsutum
  unsure (1)..(84): unsure at all Xaa locations
  Clone ID: LIB3146-054-Q1-K1-D4.pep
LIKPNXISKPNTPNNPIPQNPPKPNEKTLAATSLQRCTPEAAPSHTLLPTSVSYAVTRATYGLRDPRHTFFRSPCTAADDSGSR

SEQ ID NO: 98162 - protein, 47 aa, Gossypium hirsutum
  Clone ID: LIB3146-054-Q1-K1-D6.pep
MIKFLNVCPFLFCFVFHLFSIGGCATISHKMVEKFLNYALLSCNFVI

SEQ ID NO: 98163 - protein, 68 aa, Gossypium hirsutum
  Clone ID: LIB3146-054-Q1-K1-D7.pep
RTHGLTHASFFACSEIPGWYILVSNTNHPKIIVYIHISYNTILIFNSLTHNFYKLLDNYKKIIHRLLN

SEQ ID NO: 98164 - protein, 115 aa, Gossypium hirsutum
  Clone ID: LIB3146-054-Q1-K1-E1.pep
PRVRTPYSEAKLPIKSDVPEGCVIIREHVPITNLFSCLWFNEVDRFTSRDQISFSTVRDKIAAKTGWMVNMFLDCERRNFVVQQYHKEVLAYLAQMAPPVINPPPPPTSSRSFVR

SEQ ID NO: 98165 - protein, 69 aa, Gossypium hirsutum
  unsure (1)..(69): unsure at all Xaa locations
  Clone ID: LIB3146-054-Q1-K1-E11.pep
DDDVFIKRIVAMEGDTAEAHTXRLFVTWIGPTVQIMTEAPSNERAPIEVPXNSCFVVGDNRTDSYYSHV

SEQ ID NO: 98166 - protein, 89 aa, Gossypium hirsutum
  Clone ID: LIB3146-054-Q1-K1-E6.pep
MLSLQRSLASYMTDQDIEKGILYPSINSIRDITAKVGASVVRAAVAEEVAEGYGKVDPEELAYMSKEETVEYVRRNMWYPNYSPLVQKK

SEQ ID NO: 98167 - protein, 60 aa, Gossypium hirsutum
  Clone ID: LIB3146-054-Q1-K1-E9.pep
DDRVFERGGVKLIVDNISYDFVKGATVDYIEELIRSAFLVTTNPSAVGGCSCKSSFMVKE

SEQ ID NO: 98168 - protein, 41 aa, Gossypium hirsutum
  Clone ID: LIB3146-054-Q1-K1-F1.pep
NPSTIMIHKLPYICIGSQINKRYFQGTCTIILSRMIHNSNE

SEQ ID NO: 98169 - protein, 71 aa, Gossypium hirsutum
  Clone ID: LIB3146-054-Q1-K1-F12.pep
GDFETALRFCKERMEKNWVPNFSTMKALVKGLASIFKDEEAKELIKNVKEKFSINADAWDEIENGLPQYRM

SEQ ID NO: 98170 - protein, 84 aa, Gossypium hirsutum
  Clone ID: LIB3146-054-Q1-K1-F3.pep
LECCFTILNINRTISLSTYRYYFDRISITLPKEKLYLVVSTTIPLISWYYTSRVNPYIPSWIILIDTAGLLCEIRTFQNYIFFV

SEQ ID NO: 98171 - protein, 55 aa, Gossypium hirsutum
  Clone ID: LIB3146-054-Q1-K1-F5.pep
SSGLYIFTPFTDSLHNCLFHHLSIYAFSITLVFSSNGFKLEILLARNPIVEHVKA

SEQ ID NO: 98172 - protein, 116 aa, Gossypium hirsutum
  Clone ID: LIB3146-054-Q1-K1-F7.pep
NCFDDTIDEVSTANHPPTPDEEYSGNEGSLSASGCTNSPLHGTISSATNSYFFDRISATWPEEKLLLAARTRSPRISLDYTSGVNPNIPAWGMVIVTAGLRGEIRTYQNFGLPVRI

SEQ ID NO: 98173 - protein, 55 aa, Gossypium hirsutum
  Clone ID: LIB3146-054-Q1-K1-G10.pep
KNKSGDQKYKERWCKHDIILCHIFSVMAYSFVTFFCAFVCFFFTIPDSKFIKYKK

SEQ ID NO: 98174 - protein, 105 aa, Gossypium hirsutum
  Clone ID: LIB3146-054-Q1-K1-G11.pep
GMRLAKFCLHPARDTTSSCRLLDAIVSHCVPVIVSDKSEFPFEDEIDYTKSSIVFSMKEALEPGYLVNQLRQFPKDRWVEMWKRLKQVSHHYEFQYPPEEEDAVY

SEQ ID NO: 98175 - protein, 132 aa, Gossypium hirsutum
  Clone ID: LIB3146-054-Q1-K1-G3.pep
PRVRTHASVLLELLSGKKALDMGDENQPLVADWAWSLVKNEKALDVIEDGMPELGSPDVMEKYVLIAVLCSHPELQCRPSMDQVVKMLETDISVPSIPDRPIPIVARIDEIERSIRSNGSGQFISSGGHQMF

SEQ ID NO: 98176 - protein, 44 aa, Gossypium hirsutum
  unsure (1)..(44): unsure at all Xaa locations
  Clone ID: LIB3146-054-Q1-K1-G4.pep
FFVFFFFXQGNHFIEENKIFIPASVHLNYVCPIHHHYESNLTIS

SEQ ID NO: 98177 - protein, 64 aa, Gossypium hirsutum
  Clone ID: LIB3146-054-Q1-K1-G5.pep
PTRPPTRPRTRGFIFEQPSAWIHILANLPISPLLNNPCMFAFCFTFNFQFSFFFYCCKCFPFLC

SEQ ID NO: 98178 - protein, 36 aa, Gossypium hirsutum
  Clone ID: LIB3146-054-Q1-K1-G9.pep
LDFTVIMYEINAYTFSLCYKKPKKAEKSSLLIRDVI

SEQ ID NO: 98179 - protein, 131 aa, Gossypium hirsutum
  Clone ID: LIB3146-054-Q1-K1-H4.pep
PTRPPTRPRTRGLAYILLANKTNTKHVGQGLLDPEVRTLTFGYIGLNGKKPIIVARSGENHDGQASDNSLLPGLNDDMALNILARSSRSDYPNLSCLNKKFRSLIGSGYLYKLRRQLGIREDWVYLACNMM

SEQ ID NO: 98180 - protein, 89 aa, Gossypium hirsutum
  Clone ID: LIB3146-054-Q1-K1-H7.pep
FSKNTCKSNRSKRGEQEERINPTSLPRFFFLQKKRSHQAPITTITSYIHHQSPKGFTQLSSYAPCKLSSTHLNLVASQVIVSADRSIDK

SEQ ID NO: 98181 - protein, 52 aa, Gossypium hirsutum
  Clone ID: LIB3146-054-Q1-K1-H8.pep
LHWYVTIVVKAFPHYIQMGCSNYQACHLYLVAELVSSFSFLVVSNVMLCVGI

SEQ ID NO: 98182 - protein, 53 aa, Gossypium hirsutum
  Clone ID: LIB3146-054-Q1-K1-H9.pep
NYQPKSPPLAGHTCGKVDGFNFANLGLGQIYKATNYGGACLQLEQVFRGLFES

SEQ ID NO: 98183 - protein, 86 aa, Gossypium hirsutum
  Clone ID: LIB3146-055-Q1-K1-A4.pep
NVQAQICPDPNKYTKPNNPYGPIKLTLAHFLTQISPKMENPSSFSLRSADRAARAPPSQHVASHTAASTHSHRTHLLSSISVMKTT

SEQ ID NO: 98184 - protein, 28 aa, Gossypium hirsutum
  Clone ID: LIB3146-055-Q1-K1-A8.pep
SCSKSMRLILEGRRLSCAWGPISVLHYK

SEQ ID NO: 98185 - protein, 88 aa, Gossypium hirsutum
  Clone ID: LIB3146-055-Q1-K1-B11.pep
WDLVQAFDNNHSDFKGSDELFDSLKANKTSLLLSLEEEEHKTREVEAVSCANQNIQEKLLSQEKFLSDSKHLALIIEDEMEAKQLEMK

SEQ ID NO: 98186 - protein, 59 aa, Gossypium hirsutum
  Clone ID: LIB3146-055-Q1-K1-B2.pep
ILFFFFVGLLGSEGVKNILISVAHQIEIFTMSPYQANLYLSVKVIPNNGIAQKKKKDPN

SEQ ID NO: 98187 - protein, 101 aa, Gossypium hirsutum
  Clone ID: LIB3146-055-Q1-K1-B6.pep
FHIDIPLNYSINLLRAIFTCQKLKTINLFKGVLVDKIPTDVRVCFPCLETARLESFPIVGGNTWSKFSLAAHGSGFSTLKIAFFTQIRSPCRPRLLSRNYI

SEQ ID NO: 98188 - protein, 98 aa, Gossypium hirsutum
  unsure (1)..(98): unsure at all Xaa locations
  Clone ID: LIB3146-055-Q1-K1-C3.pep
KRAKWPLIRKSQASFQCNINTYHQLCQYSLINKWDYIYGITCILHKRKTSXXQLSNLEEKLNRPCEYTVHAGTHIPSGIRGVPQFTASSYFTNHWISX

SEQ ID NO: 98189 - protein, 38 aa, Gossypium hirsutum
  Clone ID: LIB3146-055-Q1-K1-D12.pep
DAQGSPSKPKWGGLRLLNALRRGFNVLHPFKLVAYRLT

SEQ ID NO: 98190 - protein, 70 aa, Gossypium hirsutum
  Clone ID: LIB3146-055-Q1-K1-D4.pep
CNDLVNFKSNHWILVAVLVRFCWCFKLIRHSLAFSLSCRCLLIHACKLSIYKYSLLVCEQYLFLIVTMKI

SEQ ID NO: 98191 - protein, 69 aa, Gossypium hirsutum
  Clone ID: LIB3146-055-Q1-K1-D7.pep
AQSSREKEAKWQCEFVAYQIIQTCDLLGEFDSQLARKLMNTLSMKTIENANHQKRLSTLTRYVKRLKIS

SEQ ID NO: 98192 - protein, 134 aa, Gossypium hirsutum
  unsure (1)..(134): unsure at all Xaa locations
  Clone ID: LIB3146-055-Q1-K1-D9.pep
MEARDVHRESQMTVPETPSADQPCDGVKVDVGPRKSIARIGNRNPEQLMKVHNGGSLLFGNGDCGSRSAYTEICSLAAQHFARIREVLVERSVTSTLNSGFLTPCRDRLVVELGXDLFAXNDEKFMTCLFSCRH

SEQ ID NO: 98193 - protein, 64 aa, Gossypium hirsutum
  Clone ID: LIB3146-055-Q1-K1-E6.pep
LNAAISSSLFIISSQKTKAFPFQFPKFYTVIFRSQAPEYVWNKKEATANSRGSCFFSASKYCKQ

SEQ ID NO: 98194 - protein, 81 aa, Gossypium hirsutum
  Clone ID: LIB3146-055-Q1-K1-E9.pep
QYHFEQVHYKFDLMEETLFLTINLIDRFLERCTVIRKKLQLVGMTAMLLACKYEEVSVPIVDDLVLISDKAYTRKDVLDMV

SEQ ID NO: 98195 - protein, 86 aa, Gossypium hirsutum
  Clone ID: LIB3146-055-Q1-K1-F1.pep
KQPENPETVTLEANGGVEKENANGAVPVSEGEAKETQGLQEVAGKCSVEVEDKGKAVDAEVIENGKVKEGGQADTPQPTGSAPASN

SEQ ID NO: 98196 - protein, 106 aa, Gossypium hirsutum
  Clone ID: LIB3146-055-Q1-K1-F10.pep
DAWVDDNGRVKLADFGVSAAFYKWSSVYRLGSSPFSQYWIAPEVIHSHKDYSFKADIWSFGITALDSTKKFSETFQDMVASCLRKDPANRPSADELLKHPFFESCN

SEQ ID NO: 98197 - protein, 47 aa, Gossypium hirsutum
  Clone ID: LIB3146-055-Q1-K1-F5.pep
TEFGQSGIFGILFFSHVWLNGSFPLRGELTSSGLSPLLTELFHPDAW

SEQ ID NO: 98198 - protein, 129 aa, Gossypium hirsutum
  Clone ID: LIB3146-055-Q1-K1-F6.pep
PPVRPFQAGVMAVRTKGGNEGVFESLYRAREVYRTKLQESTAVYQLASLFVECAIAEAQPLKTEPVPCNPNDPTVASDAHGTSILAETGRMQIVLDAFSDGSSFICLQCGGLVSNHRKDEHYAYWCCNM

SEQ ID NO: 98199 - protein, 84 aa, Gossypium hirsutum
  Clone ID: LIB3146-055-Q1-K1-G11.pep
KPGGPTRPRGTRADLTFVQGFGRTRQGEVFLKVNQLRDKFEYDRENRMREKAFAPINGQDTSSSYNTNSKNQPFDTQRYFSDSD

SEQ ID NO: 98200 - protein, 138 aa, Gossypium hirsutum
  Clone ID: LIB3146-055-Q1-K1-G4.pep
PTRPEREGKFYAINVPLKDGVGDNSFTRLFKIIISKVVEMYQPGAIVLQCGADSLAGDRLGCFNLSIDGHAECVKIVKKFNLPLLVTGGGGYTKENVARCWTVETGVLLDTELPNEIPENEYIKYFAPDCLLNIPNGH

SEQ ID NO: 98201 - protein, 48 aa, Gossypium hirsutum
  unsure (1)..(48): unsure at all Xaa locations
  Clone ID: LIB3146-055-Q1-K1-G5.pep
YYFFFLFLFXFFFFSFFFFFSFFFFFNFFFFFFFFFFFFFFFFFFFKP

SEQ ID NO: 98202 - protein, 144 aa, Gossypium hirsutum
  Clone ID: LIB3146-055-Q1-K1-G6.pep
HASAHASAHASGSTNGTVVFGCGGGHSGELGSSSEALDGILGFGQANSSIISQLAASGKVKKSFAHCLDNIEGGGIFAIGEVVSPKVKRTPMVQNQAHYNIVMKDIEVGGDLLRLPSDIFDSGDQKGTIVDSGTTLAYLPSSIY

SEQ ID NO: 98203 - protein, 129 aa, Gossypium hirsutum
  unsure (1)..(129): unsure at all Xaa locations
  Clone ID: LIB3146-055-Q1-K1-H1.pep
RARPXERERPXXDQXMNLQCRLSNXXNXXSRGSGDKNPLXEIXXAXPRPLXXKXGXXERNCXXTXXKXGXXQGFXXRGXLRXMKXYELKKGXXTRRFQRYXXFEPXQNTIYVNYXXNRXRRNWASKGIL

SEQ ID NO: 98204 - protein, 70 aa, Gossypium hirsutum
  Clone ID: LIB3146-055-Q1-K1-H11.pep
FKDHLKWKSSHLSPLSNINPFQTYLSRTKHFSKISSSSSSRDKTSKSDSMRDARKEYKEKIIQNTVYLSR

SEQ ID NO: 98205 - protein, 59 aa, Gossypium hirsutum
  Clone ID: LIB3146-055-Q1-K1-H8.pep
TNNKLSFYSFQGKEHISRSSTRFTVYLTAASLSVPLQGSPHSSSCSFTFQLSSFTTLRV

SEQ ID NO: 98206 - protein, 85 aa, Gossypium hirsutum
  Clone ID: LIB3146-055-Q1-K1-H9.pep
WNKIASGQHDCSTCVDSPEGTLDIYVCVGTMDMYNFDYAHELALALVVSEAPNINDVLQPNDLYGEGGSLTKRPVNYLMWRGLII

SEQ ID NO: 98207 - protein, 53 aa, Gossypium hirsutum
  Clone ID: LIB3146-056-Q1-K1-A2.pep
QPAAAAALFVQQQQAMGEAWAGRVGNYLPGHLNLLASLSGAPGGSGRRDEDPH

SEQ ID NO: 98208 - protein, 88 aa, Gossypium hirsutum
  Clone ID: LIB3146-056-Q1-K1-A4.pep
KRKGLQARIFQPGPIRFYYPKFFFRISSQTQSLIRSFPFLFPISSYFLKEKTDSSKCRSPPPRLHQWPPAPLPVRLSARLAAAHQRCF

SEQ ID NO: 98209 - protein, 83 aa, Gossypium hirsutum
  Clone ID: LIB3146-056-Q1-K1-A5.pep
LDIINLREYSVAFSFRSMLMKQPHLSYLPRALLHRRRLPWCWRQRHVSSLPSRSISPHTQPVDEFSSVCARLCLRLSYPHLQQ

SEQ ID NO: 98210 - protein, 52 aa, Gossypium hirsutum
  Clone ID: LIB3146-056-Q1-K1-B2.pep
PRVRGGNHLYFLSFFFYLQKSWWVNSIHFADKKKKKESIHGRKSFIWRNFHF

SEQ ID NO: 98211 - protein, 51 aa, Gossypium hirsutum
  Clone ID: LIB3146-056-Q1-K1-B4.pep
SSTVSESNQIYWDSMRMELNIITGFVNFIFSYQINPELGSLFCFSLELSAV

SEQ ID NO: 98212 - protein, 81 aa, Gossypium hirsutum
  Clone ID: LIB3146-056-Q1-K1-B5.pep
QWRLMLASLMLFAYPHWESLRHGLNLGTHCVLQNKIADPIVKVSYVNLFYHIIVNNVISTLNTWHGMHRLQRIARYGFPIR

SEQ ID NO: 98213 - protein, 65 aa, Gossypium hirsutum
  Clone ID: LIB3146-056-Q1-K1-B7.pep
KIQGIAGKHAHSLLFHSPHQGHKALLITRLYFRFAKFEIKHLNCGNGRVFVRVAFIAVADIRDRL

SEQ ID NO: 98214 - protein, 114 aa, Gossypium hirsutum
  Clone ID: LIB3146-056-Q1-K1-B8.pep
DALENKINRTPLSTCEWFRDFSPLRAHHNHHALAQQAYYYVAVKFKELYSSICGQKLFVWQTKGRERRSIDEAFKYIREVLKWDEEKNENMYEIHGDDSFYSTEMSSSPYIRQE

SEQ ID NO: 98215 - protein, 86 aa, Gossypium hirsutum
  Clone ID: LIB3146-056-Q1-K1-C1.pep
NQKIFTNSLTQLTKLRTGKITRYFSERTKIPSLHLNQVWRITNNKKPYTYFMILTIFTRTKNPHNEPDMFSQKAANYNTKPHFHFN

SEQ ID NO: 98216 - protein, 140 aa, Gossypium hirsutum
  Clone ID: LIB3146-056-Q1-K1-C2.pep
PRVRSLRSLAPYVVQWLLDAHSTQILLMVFMGVVSLLLAGFFAYHANLCLTNTTTNETFKWQDYISWQKKLIEARASTAALKANIAGMTTEGKPRESKCKSFFRQSLLQDTEAIVKKNVYDKGFFHNLYEVVFPVSTRAS

SEQ ID NO: 98217 - protein, 126 aa, Gossypium hirsutum
  unsure (1)..(126): unsure at all Xaa locations
  Clone ID: LIB3146-056-Q1-K1-C4.pep
NDALRSIVNAEKRGKAAKLXVELKPISTVISSFLTIMKYRGYIRNFELFDPHGVGKITVEPQGRVNDCQARTYRQDIKVKDIEKYTTFKLPTRQWGYVVISTPDGILDHGEAIRRNVGGQVLGYFH

SEQ ID NO: 98218 - protein, 67 aa, Gossypium hirsutum
  Clone ID: LIB3146-056-Q1-K1-C5.pep
TTQMNATSSLGSRCKSNVMNGTLVRPKALVTTCNSKHWLNRLSAELLGLYQLSDLRHQFRTSSISFL

SEQ ID NO: 98219 - protein, 47 aa, Gossypium hirsutum
  unsure (1)..(47): unsure at all Xaa locations
  Clone ID: LIB3146-056-Q1-K1-C8.pep
ELPGLGPTPXPLVLSSVXXPGFAVDXNGXXTXPQRTRMCCSXSTKFG

SEQ ID NO: 98220 - protein, 53 aa, Gossypium hirsutum
  Clone ID: LIB3146-056-Q1-K1-C9.pep
IACSPYLQLIFSHTTQGKHLHACHIVVHFFLSNAHERIAFYCFEFSPVCPAGI

SEQ ID NO: 98221 - protein, 45 aa, Gossypium hirsutum
  Clone ID: LIB3146-056-Q1-K1-D3.pep
VPLHLASEVLHSFKHLIMSVFVFLKNSVNFSTDFSLELYMTQAME

SEQ ID NO: 98222 - protein, 50 aa, Gossypium hirsutum
  Clone ID: LIB3146-056-Q1-K1-D8.pep
NTPFLFHHLNYNLTSQYQYKQTRKYHYSSIMNINLDTSTNASITLLKLTT

SEQ ID NO: 98223 - protein, 139 aa, Gossypium hirsutum
  Clone ID: LIB3146-056-Q1-K1-D9.pep
HASEKMMNQEFRLGDNAPDVSWADPKNADSSAASQVKAIYVKNLPKDVTQDQLKKLFEHHGKITKVVLPPAKPGQERNRIAFVHFAERTCAMKALNDSEKYELDGQVVECSLAKPLTDQKTPGGSSSQNSRFLPNYPPH

SEQ ID NO: 98224 - protein, 92 aa, Gossypium hirsutum
  Clone ID: LIB3146-056-Q1-K1-E11.pep
HSLPVFSITKHAYISQSFKSKKHQTWSFTDTPEFKPKRQEVKDIWLCLKQRSLSQLLKWIRLALFFNLLFISHEASFPFCSYFVYVLDFDYK

SEQ ID NO: 98225 - protein, 116 aa, Gossypium hirsutum
  unsure (1)..(116): unsure at all Xaa locations
  Clone ID: LIB3146-056-Q1-K1-E3.pep
DSKEKIREVYDALDAVNSELAEERENVASLLRRVESLDLIEGQRLLLQKEXQEVQGKCLREAAKSQIQFKEQAXQMENESREKLXEVCDALETTKSELTEEQERTASLMISVEFLD

SEQ ID NO: 98226 - protein, 70 aa, Gossypium hirsutum
  Clone ID: LIB3146-056-Q1-K1-F10.pep
SHEAQFKPKLKVLMTTVRDNKTAMPVRARQKRQLVKLKKNVTKIPFRNISQPWKFNCNPRVRGRVGGRVG

SEQ ID NO: 98227 - protein, 133 aa, Gossypium hirsutum
  Clone ID: LIB3146-056-Q1-K1-F11.pep
MGSLFSKQFERRKNIKAEKKTLCDLNENCGESYPGSDYRPADRKNWMAGLGVDKVYINKIVWPGTHDSATNKIGIPFITRPFAQCQSLSVYQQLVKGTRVLDIRVNENRRVCHGVLTTYGIDVVIGDIKKFLS

SEQ ID NO: 98228 - protein, 112 aa, Gossypium hirsutum
  Clone ID: LIB3146-056-Q1-K1-G1.pep
RAEIIRDLAWKVGLLHELPCEIKEKFSDSEEQYFKDHSKSLKMYMSQLSLDVNVDMVPPKDPYIKVRVLEDLGSGIILSDKSANFASHSMHFLKRTDAEQYIARGLMEELIS

SEQ ID NO: 98229 - protein, 54 aa, Gossypium hirsutum
  unsure (1)..(54): unsure at all Xaa locations
  Clone ID: LIB3146-056-Q1-K1-G10.pep
FNLYFSPNMIRIIMKNVLQLRSGNGLERIKAILQYICLHXICSPYDLQSLLFEE

SEQ ID NO: 98230 - protein, 58 aa, Gossypium hirsutum
  Clone ID: LIB3146-056-Q1-K1-G11.pep
FCFLESTAYFRFLQPNSLYFVHKNAFQDLSGRLAAGLAFMGVRFPPRCLNYYSPSVIS

SEQ ID NO: 98231 - protein, 99 aa, Gossypium hirsutum
  unsure (1)..(99): unsure at all Xaa locations
  Clone ID: LIB3146-056-Q1-K1-G12.pep
PTRSNCISSAKNFDYYTYLGXETGLNLFTARNNXXSATDDERCLIEANGQYHLREFVNTFPHXLLSMPIPILLPSQIQTFIFFTFNGPIDMIASLPHDQ

SEQ ID NO: 98232 - protein, 97 aa, Gossypium hirsutum
  Clone ID: LIB3146-056-Q1-K1-G6.pep
KVPSCAIELNRLSAGVWLHLPAQLACFCFSLLLGPNMHNAVSVWSLNQTMMLLQFTVSQIWCQYNQFWLLIHPFVRSTQTKLFHVSQSNECIHPRVR

SEQ ID NO: 98233 - protein, 80 aa, Gossypium hirsutum
  Clone ID: LIB3146-056-Q1-K1-H11.pep
NPNNWALFLSYSKIASSDGLILQSTIRAHTDMVNSLQSPIYNSYMIDTSSREQNIFLWHLTKDEKTYEVPRLSLTRHSHF

SEQ ID NO: 98234 - protein, 73 aa, Gossypium hirsutum
  Clone ID: LIB3146-056-Q1-K1-H9.pep
ARKLFTNIRFKRWCFDVEVGFLCKWFGIPMLEISVNWSEIPGSKVNPLSIPNMLWELALMSVGYRTRIWKINS

SEQ ID NO: 98235 - protein, 106 aa, Gossypium hirsutum
  Clone ID: LIB3146-057-Q1-K1-A10.pep
MVVCKCRKATKLYCFVHKVPVCGECICLPEHQICVIHTYSEWVIDGDYDWPSKCCKCQAVLEEGAGSETTRLGCLHVIHTTCLVSHIKSFPLHTAPAGYVCPSCSI

SEQ ID NO: 98236 - protein, 109 aa, Gossypium hirsutum
  Clone ID: LIB3146-057-Q1-K1-A12.pep
HASVVKQLKHSKKLYEGYVPMKYKGYLKKMKKSGEWGDHVTLQAAADRFGAKICLVTSFRDTCYIEIMPKQASPTREIWLSFWSEVHYNSLYASGDVPTRAPRRKHWLF

SEQ ID NO: 98237 - protein, 64 aa, Gossypium hirsutum
  Clone ID: LIB3146-057-Q1-K1-A6.pep
QHFRVLNSHRTLILIPRSSKKSTIGKLDKFSCNYRYRKHSDIASLFLYRYSGSNCSFSCDICTC

SEQ ID NO: 98238 - protein, 121 aa, Gossypium hirsutum
  unsure (1)..(121): unsure at all Xaa locations
  Clone ID: LIB3146-057-Q1-K1-B10.pep
FPIDLVREIARQLLECGAFMPDMDLIHTDLKPENILLVSTETVKVPDNNGAXLSPKDSYFRRLPKSSAINVIHFGCTTYDRPDQNYVVSTRHYLATEVILGLGWTYACDIWMAGCIIVELC

SEQ ID NO: 98239 - protein, 137 aa, Gossypium hirsutum
  Clone ID: LIB3146-057-Q1-K1-B11.pep
LIVANAGDSRCVISRKGQAYNLSKDHKPELELEKDRILKAGGFIQVGRINGSLNLARAIGDAEFKQNKTLPAEKQIVTANPDINAVELCDDDEFLVLACDGIWDCMSSQQLVDYVREQLSSETKLSAICERVFDRCL

SEQ ID NO: 98240 - protein, 45 aa, Gossypium hirsutum
  Clone ID: LIB3146-057-Q1-K1-B12.pep
GGVWFLLSQCSILVGDVRWTRENGLLVMTNMINFMEFAFHVFTKE

SEQ ID NO: 98241 - protein, 83 aa, Gossypium hirsutum
  Clone ID: LIB3146-057-Q1-K1-C11.pep
KRFKKLVIWVPIRGLLSYHFWVPKPGSLKWAPPIARPFFFFFFFFFFFFFFFFFFFFFFFFFFFFFFFFFNPKNHVRALPYKE

SEQ ID NO: 98242 - protein, 92 aa, Gossypium hirsutum
  Clone ID: LIB3146-057-Q1-K1-C12.pep
EELLQVIKSTKPDKYTPEIVEKKDDYVRVEYQSPILGFVDDVEFWFPPGKDSIVEYRSASRIGNFDFDINRKRIKALRVELEKKGWASVETF

SEQ ID NO: 98243 - protein, 128 aa, Gossypium hirsutum
  Clone ID: LIB3146-057-Q1-K1-C4.pep
GTAKVLDPDFKVVESAYPFVIGKLLADPNPDMRKILRELLICNNGSIRWNRLERLIAAISEQASESSEEPPKSEEKGSHPMGWKSFDMHAVVAATEDLLLFILSEKGQMVRVFLLRDIIRAADIFLQD

SEQ ID NO: 98244 - protein, 38 aa, Gossypium hirsutum
  Clone ID: LIB3146-057-Q1-K1-C5.pep
TCYVSCHSSSVAVFVFFFSGVVSKVLSSQHGNVIASQC

SEQ ID NO: 98245 - protein, 142 aa, Gossypium hirsutum
  Clone ID: LIB3146-057-Q1-K1-D5.pep
WRFRYSYWNSSQSYVMTKGWSRFVKEKKLDAGDIVSFQRGVGESGKHRLYIDWRRRPNAPNPTSFAHFQMQNQFNFPQSVRWGGGIYSLPQSYEPLHRLNYSIYPYNHHHQRQQHQQLQQQQHQAITYGNVAQSQYYLRSSS

SEQ ID NO: 98246 - protein, 80 aa, Gossypium hirsutum
  Clone ID: LIB3146-057-Q1-K1-D8.pep
GSAHISCYLFFGCHLLCILPCTAASVWLDLSDLSELNLIQILYLLFWVKFELGRFLIPLTLNLFYVDFILLVKFTHFPMY

SEQ ID NO: 98247 - protein, 39 aa, Gossypium hirsutum
  Clone ID: LIB3146-057-Q1-K1-D9.pep
NLHIILFSVLNGIEPLYLQKQMMETDIVGIQINLVKQSS

SEQ ID NO: 98248 - protein, 62 aa, Gossypium hirsutum
  Clone ID: LIB3146-057-Q1-K1-E1.pep
NSNKMQSLTTDDRIQLQLQSNNKFQQKPKFKWNRTRTLATDLSVPAQIEAISPGPHASAHAS

SEQ ID NO: 98249 - protein, 108 aa, Gossypium hirsutum
  Clone ID: LIB3146-057-Q1-K1-E5.pep
ANRNRSIYKSKNTASRDISKQISSYISELKGINEKTLILKEERGPKHGDRRTRVAIYFDAVFDQQAFRFASGLVVQDVRGEILASKSVIHSDIASPFVAEAHAGLQAT

SEQ ID NO: 98250 - protein, 53 aa, Gossypium hirsutum
  Clone ID: LIB3146-057-Q1-K1-E6.pep
SQSLTNGAPVGFNNKSISLISFFDLHYLLYCFYFSCFIHAQICSQKKKIKKKI

SEQ ID NO: 98251 - protein, 107 aa, Gossypium hirsutum
  Clone ID: LIB3146-057-Q1-K1-E7.pep
EMLNLEGCKISDASLVAIAKNCQLLSDLDVSKCAITDSGIAALARSNQIKLQILSMSGCSKVSDKSMPSLRKLGQTLLGLNLQQCKAISSSTVDLLVEQLWRCDILF

SEQ ID NO: 98252 - protein, 125 aa, Gossypium hirsutum
  Clone ID: LIB3146-057-Q1-K1-E8.pep
KVQDRIILSTLRRFAVKSTNKSRHCFEYLERDETIIAHLAGGIDAFIKVSQGWPLSKSPLKLLSVKSSDHHSRGISLSLICKVEEMANSLDMNIRLNLSTFVDTVEKLLLEQMRLELRSDDASTN

SEQ ID NO: 98253 - protein, 42 aa, Gossypium hirsutum
  Clone ID: LIB3146-057-Q1-K1-F11.pep
TPLALLKSTKIFNCRTKFCYPFNLNSLFSLNSLHSHYFDFTL

SEQ ID NO: 98254 - protein, 77 aa, Gossypium hirsutum
  Clone ID: LIB3146-057-Q1-K1-F3.pep
KFPNPKKKAAKKVLEKSVKTKRLIQVKTPGAFKKAKKVVKKAVSGSKLKRLSQVKTPEGLKRKTFKQPKQDMEVNVS

SEQ ID NO: 98255 - protein, 143 aa, Gossypium hirsutum
  unsure (1)..(143): unsure at all Xaa locations
  Clone ID: LIB3146-057-Q1-K1-F5.pep
VKRVLRYLVGTMDYGLFFSKGQFKLECYSDADWAASVEDRRSTTRYVVFLGSNPVAWSSKKQAVVSRSSSEAEYRSLANCVAELLWLKQLLNEIGLSVCQTPVIWCDNTSTVSMVANPTHHSRMKHVEIDHHFILEKVMARSX

SEQ ID NO: 98256 - protein, 47 aa, Gossypium hirsutum
  unsure (1)..(47): unsure at all Xaa locations
  Clone ID: LIB3146-057-Q1-K1-G10.pep
THLKSHFKEKENKELNIRTNERNNPXATPTAXIYIYPLYQNDTCPDY

SEQ ID NO: 98257 - protein, 78 aa, Gossypium hirsutum
  Clone ID: LIB3146-057-Q1-K1-G2.pep
KFFINCIQNPRKNNGITALQLMMKDGIIRFLLANSINKAQFILCQQCRAHLTPPNICNSQTPIVGSKQEACLVYLTDE

SEQ ID NO: 98258 - protein, 54 aa, Gossypium hirsutum
  Clone ID: LIB3146-057-Q1-K1-G6.pep
FFFSFQFLHPLTSHNSLLWSNCIKNSCNFNNLSINTFLTNKTHFCYRYDFFFFN

SEQ ID NO: 98259 - protein, 61 aa, Gossypium hirsutum
  unsure (1)..(61): unsure at all Xaa locations
  Clone ID: LIB3146-057-Q1-K1-H11.pep
RPDPRVXQTHPKLWFLLCQQMCKLGAWWVSNQATIKCHEWLADSKPRNFGHQSLNRFRKEM

SEQ ID NO: 98260 - protein, 96 aa, Gossypium hirsutum
  Clone ID: LIB3146-057-Q1-K1-H3.pep
TGRSAHGPHNGGPNSAHSVAHTALAIVPISTTSAATAVPGPTTNLHIGMDYWGTPASSNDPAMHAKVPSTPLARGIVTPGSRDNVQSQLWLQDERE

SEQ ID NO: 98261 - protein, 89 aa, Gossypium hirsutum
  unsure (1)..(89): unsure at all Xaa locations
  Clone ID: LIB3146-057-Q1-K1-H4.pep
FLFFMFLFFXFCFXXFXXFXXFXXFXFFXXFFXFFXFXXFXFFXXFFXLINXSPFLICSILXGFKFHYXIISITSKSHIDPXILKXXNX

SEQ ID NO: 98262 - protein, 118 aa, Gossypium hirsutum
  Clone ID: LIB3146-057-Q1-K1-H8.pep
RRVLVAPETWLPAGWSIEDRVRSSGATAGTVDRYYFDPSSGRKFRSKKEVLYYLETGIPPSKRKKGAEASGSEEVGTGNSGGNKQKKPDKKLKTLNFDFINVPQKVDWLLANASEDSW

SEQ ID NO: 98263 - protein, 137 aa, Gossypium hirsutum
  Clone ID: LIB3146-057-Q1-K1-H9.pep
MQHTFTLPKRYQEFPGEVIGLSFCPSSSSHPTKSSSLVVYSARAMCSIDFGKPVDEDDESELVNGALLKFQGSLTNMKWKHWLRESRQSRKNNFDLVVFRDPVLFIGHLSKHSILIIDKPWMEVVKSFDSAPLQRHI

SEQ ID NO: 98264 - protein, 59 aa, Gossypium hirsutum
  Clone ID: LIB3146-058-Q1-K1-A1.pep
KWPPWWGTGSEWMSMNLFLGKSVSGKCSKESSVTSYTVLFNRHRLSRFGVWQMYDYIHT

SEQ ID NO: 98265 - protein, 68 aa, Gossypium hirsutum
  Clone ID: LIB3146-058-Q1-K1-A4.pep
NWYKYSCCIKNLYIGEWFDTLVSQAVLRFYHVWQNLINFPCIYTLILWFNIIKLYFKKKKQKNKRKKK

SEQ ID NO: 98266 - protein, 64 aa, Gossypium hirsutum
  Clone ID: LIB3146-058-Q1-K1-A5.pep
LCLGEGVSDQWAEEDITTVCTVGFNITRGGNRGLMLEIDCVRSCMHTCIQDSTPDRFYTATDTC

SEQ ID NO: 98267 - protein, 44 aa, Gossypium hirsutum
  Clone ID: LIB3146-058-Q1-K1-A6.pep
TLLNWSWPGFFVCRRFMSAGSVLKLGVNIRHMIFFNSMKGIPAL

SEQ ID NO: 98268 - protein, 52 aa, Gossypium hirsutum
  Clone ID: LIB3146-058-Q1-K1-B1.pep
KNGLKNTQHFDSRIEKIVSRESSIEHRAFRQLIYCSGTSRFGLYLKYTWPED

SEQ ID NO: 98269 - protein, 54 aa, Gossypium hirsutum
  Clone ID: LIB3146-058-Q1-K1-B11.pep
TVVVLIVRIEGLVQIETGLNGEGIRGLKSGEFGKVDVPVLIQVDVFHDTLELFI

SEQ ID NO: 98270 - protein, 133 aa, Gossypium hirsutum
  unsure (1)..(133): unsure at all Xaa locations
  Clone ID: LIB3146-058-Q1-K1-B3.pep
KLKQKKAHLILXLKSNGETIAGKGNFAYKLYDKQFPIDAAFQKDXMIDIIGDTKGQGYESVVTRXRVTRLPHXTHRRLPXVPCIESXHPAKISFTVTIARHNGYHHRSEMNNIVYSVGKDDDQTHSVITHYHR

SEQ ID NO: 98271 - protein, 128 aa, Gossypium hirsutum
  unsure (1)..(128): unsure at all Xaa locations
  Clone ID: LIB3146-058-Q1-K1-B4.pep
GLNQKRAHLLFILINVGTIAGKGDFAYKLYDKHIPIDAVFHKDEKIDIIAVTKGKGYESVVTRWGVTRLPHXTHKXLHKVPCIAAXDPAKVSFTXTRTCQNGYHHRTVMNKTVYILGKAADETHSAIT

SEQ ID NO: 98272 - protein, 51 aa, Gossypium hirsutum
  Clone ID: LIB3146-058-Q1-K1-B5.pep
YITTLTDHLGTSTLKSVSYYISTIKLPIFKYPKISDLTLHFIKTFYASKYN

SEQ ID NO: 98273 - protein, 52 aa, Gossypium hirsutum
  Clone ID: LIB3146-058-Q1-K1-B9.pep
IVHIAFSFRWLMTENLFNKLSVYSMLMATCAESVLELSSVPTVCSPLLHLKG

SEQ ID NO: 98274 - protein, 75 aa, Gossypium hirsutum
  unsure (1)..(75): unsure at all Xaa locations
  Clone ID: LIB3146-058-Q1-K1-C11.pep
AASSHTSSQLSPTQMLGYKGNEXEINRPNCIYKVALPDNKVTHDDSSSAIYHNGGAIIINTASNPKSPHDRNLDS

SEQ ID NO: 98275 - protein, 54 aa, Gossypium hirsutum
  Clone ID: LIB3146-058-Q1-K1-C7.pep
EKNIRTIKNIEKTENPIAYRQRQMPQQQASQPGHFSYQMLHMQIKLMMMPHWYS

SEQ ID NO: 98276 - protein, 67 aa, Gossypium hirsutum
  Clone ID: LIB3146-058-Q1-K1-C9.pep
IRYDKVEYYMAFGITIMMAKDGVRSNTRSGVQSGAWVSAARDIIYLAFATWNFIGIKKRNVRVIEAE

SEQ ID NO: 98277 - protein, 44 aa, Gossypium hirsutum
  Clone ID: LIB3146-058-Q1-K1-D10.pep
LHLTNMNFKNRRKNKRMGDELRATYTPAQTLATRKPDKRLAHSQ

SEQ ID NO: 98278 - protein, 69 aa, Gossypium hirsutum
  Clone ID: LIB3146-058-Q1-K1-D6.pep
QVIALQFFYLSTTWPILGAVTFKTSSSPKILTISNLTHTKRPILHLMYWQKIDFIHNLLLIITIRCSFY

SEQ ID NO: 98279 - protein, 107 aa, Gossypium hirsutum
  unsure (1)..(107): unsure at all Xaa locations
  Clone ID: LIB3146-058-Q1-K1-D8.pep
CDGRYPICALKYFIHNARVAXIVTPYCGDIGCSHARCEPASPTPRCAIKCGSANLAWHQATHYSICALRIKLNSADIMGXVDQNGPVEVCLTDYEDFGYYNTGAYRS

SEQ ID NO: 98280 - protein, 95 aa, Gossypium hirsutum
  unsure (1)..(95): unsure at all Xaa locations
  Clone ID: LIB3146-058-Q1-K1-D9.pep
MAPKPRACAGIFSALLAFSFSLLLFCHAIIGGHNYHDALRKSILFFEGQRSSKLPPCLTFKWGPVFCLQDRSTGXVGLTGGFFSHPRHTFNLGFQ

SEQ ID NO: 98281 - protein, 51 aa, Gossypium hirsutum
  Clone ID: LIB3146-058-Q1-K1-E11.pep
ELDVPWTKIRYNRTGCYYLFEKKSNSQIKSIVCPVWGLWSAKYKSLHENKV

SEQ ID NO: 98282 - protein, 57 aa, Gossypium hirsutum
  Clone ID: LIB3146-058-Q1-K1-E12.pep
VNINVDRKCISCQEEYEANEKILKLYCGHSFHIQCIKQWLVHKNTCPVCKTEATAQC

SEQ ID NO: 98283 - protein, 68 aa, Gossypium hirsutum
  Clone ID: LIB3146-058-Q1-K1-E5.pep
QATLGSYTPLFYSSLAARKLLSPSFLLISCAPIAVFSLLNVAWSSMMSSYYVLLDYIRVHVGILVAPE

SEQ ID NO: 98284 - protein, 135 aa, Gossypium hirsutum
  Clone ID: LIB3146-058-Q1-K1-E6.pep
LRSKAALEGSKTVQADLAAAGIQTKEDHNEQNERLSNKQLFIQNIDYALDLFLLYVLTLSIFPGFLYENTGEHKLGTWYSLVLIASYNVWDLISRYLPLVKFLKIESRKGLTIAILSRFLLIPAFYFTAKYGDQG

SEQ ID NO: 98285 - protein, 55 aa, Gossypium hirsutum
  Clone ID: LIB3146-058-Q1-K1-E9.pep
WNSYELEEPAFAADLTPASMAYVAIIDFPMWSSHDLPLSLKSVAKVVERVVVRVG

SEQ ID NO: 98286 - protein, 60 aa, Gossypium hirsutum
  Clone ID: LIB3146-058-Q1-K1-F1.pep
CSYLCCCLFNFKYCEDATSNSFYLNRHVRVRTHAVDAVTFLLVFFAFLTFNLKKKKKKKT

SEQ ID NO: 98287 - protein, 67 aa, Gossypium hirsutum
  Clone ID: LIB3146-058-Q1-K1-F10.pep
KVQLQSKNLMPKWPKIKIVSETLGFLGAPQPTPHVRLPCAQSLVQNPPCRHAHLRTPHTKCQHTSCT

SEQ ID NO: 98288 - protein, 58 aa, Gossypium hirsutum
  Clone ID: LIB3146-058-Q1-K1-F6.pep
FCVHLYKFTIILWILTWIMISGIHGSLISLFQARTTYPVVVYGQLSEYIKINFDRTRG

SEQ ID NO: 98289 - protein, 50 aa, Gossypium hirsutum
  Clone ID: LIB3146-058-Q1-K1-F7.pep
IALIGEGRFCTVFPKIDFLYVDGGAHESKYTPPIDALVTCSDNNDSPPAF

SEQ ID NO: 98290 - protein, 113 aa, Gossypium hirsutum
  unsure (1)..(113): unsure at all Xaa locations
  Clone ID: LIB3146-058-Q1-K1-G1.pep
PSGRKILAQRKHFPSANWLIGXGKYSWASKRFYEKCDTDFITLGDKTPIGSSKXKNLKELNHLVVKNALAETDKLLLETAKFLRGADLVQIANSEXDRLGQFNSPVWMMHNIG

SEQ ID NO: 98291 - protein, 37 aa, Gossypium hirsutum
  Clone ID: LIB3146-058-Q1-K1-G11.pep
QDSHGWEPLSNNLNRFHMVLIKGKQQKRWARMDTLFR

SEQ ID NO: 98292 - protein, 55 aa, Gossypium hirsutum
  Clone ID: LIB3146-058-Q1-K1-G6.pep
SPWACPPLTRFDRHWCTVSHQINDGLGSCMLNQTPRAGVKASIFKNKNERLLSFE

SEQ ID NO: 98293 - protein, 56 aa, Gossypium hirsutum
  Clone ID: LIB3146-058-Q1-K1-G8.pep
RPYRWFLSCIHFIFYEFSYKDFVELMPILVLHLIFHLFKTCIFVKYSKIDGKNNAG

SEQ ID NO: 98294 - protein, 64 aa, Gossypium hirsutum
  Clone ID: LIB3146-058-Q1-K1-G9.pep
QTKNPRNSFSPNFLPPRCHGHPILTTTSSLTLVLSLSRPKLITSPPSFRRQKKYSFYYCCLFVC

SEQ ID NO: 98295 - protein, 46 aa, Gossypium hirsutum
  Clone ID: LIB3146-058-Q1-K1-H11.pep
SLPMWMSFGGNDALTHATDVQRTLEELSSKPELLYLDNYGHIDFLL

SEQ ID NO: 98296 - protein, 59 aa, Gossypium hirsutum
  Clone ID: LIB3146-058-Q1-K1-H12.pep
TLMGAERIQSLHSYISQGFSLLQIERSLMLHPIVIHLSQNLNYRVWNTGFVNFLVCQRF

SEQ ID NO: 98297 - protein, 59 aa, Gossypium hirsutum
  Clone ID: LIB3146-058-Q1-K1-H3.pep
PWTSASFFNDLYDVIEFEDQNTNIEDIIIISKVGSVISRRSGSNQDSFYSTHRGKYRKI

SEQ ID NO: 98298 - protein, 67 aa, Gossypium hirsutum
  Clone ID: LIB3146-058-Q1-K1-H5.pep
HASADAWVGSVLSFMVAIIMPALCFIKIVGRKASRTDIVLSSTVAVIAIICASLGTYSALQGIASNY

SEQ ID NO: 98299 - protein, 48 aa, Gossypium hirsutum
  Clone ID: LIB3146-058-Q1-K1-H6.pep
LLLLESRFGGHSQTFPFWCGIYTHILGVLIGSVSENVISRSKFQMSSI

SEQ ID NO: 98300 - protein, 54 aa, Gossypium hirsutum
  Clone ID: LIB3146-058-Q1-K1-H9.pep
IKGPTHTVLISFFLAYFKIFISKPQFGRRGIFTPTLTSFHPVYSLRITNLSEPL

SEQ ID NO: 98301 - protein, 66 aa, Gossypium hirsutum
  Clone ID: LIB3146-059-Q1-K1-A1.pep
HRWNQHGLGGDNYRGLCRDLHPGPTSLLHWSGKGKPWARLDANRPCPLDAFWAPYDLLQTSSALES

SEQ ID NO: 98302 - protein, 34 aa, Gossypium hirsutum
  Clone ID: LIB3146-059-Q1-K1-A11.pep
STSLFKFGLFKIGFIIKLIIIAKVNQTDVRALPS

SEQ ID NO: 98303 - protein, 41 aa, Gossypium hirsutum
  Clone ID: LIB3146-059-Q1-K1-A2.pep
IHAINKAGDACFTNDVIKFYTSVFSYTKVHKRNLHTLTDKS

SEQ ID NO: 98304 - protein, 53 aa, Gossypium hirsutum
  Clone ID: LIB3146-059-Q1-K1-A5.pep
RPNLLSVTQVRASTLAERLPSGYSSIGRGRKYTGGYSIAKEGGEHLLIKKKNK

SEQ ID NO: 98305 - protein, 42 aa, Gossypium hirsutum
  Clone ID: LIB3146-059-Q1-K1-B3.pep
GGRGTPGYAAPELWMPFPITEKCDVYSFGMLLFEIIGRRKEP

SEQ ID NO: 98306 - protein, 108 aa, Gossypium hirsutum
  Clone ID: LIB3146-059-Q1-K1-B8.pep
RPTRAPTRPAAPLSIMRSVIHTKSVEFMPFTLSFFLTCSAILWLVYGLLLKDFYISLPNIVGVVLGTIQMLLYVVYKKFNNNFAKDHERKQPSPTVNGKNMNHIKASN

SEQ ID NO: 98307 - protein, 55 aa, Gossypium hirsutum
  Clone ID: LIB3146-059-Q1-K1-B9.pep
SNEARLKPNTNKGVLKLKEHSRNQKRYETPLSFSPQLDAIIPSQFLSYCQVCSWF

SEQ ID NO: 98308 - protein, 81 aa, Gossypium hirsutum
  Clone ID: LIB3146-059-Q1-K1-C7.pep
PRVRVAKLSQLELPFKEITRNYRKQLQGRPEVYCSVFVDRSSTQQNGRTRQDHVGIVAFYNTKFIPAIKYLLEELDLSRTT

SEQ ID NO: 98309 - protein, 76 aa, Gossypium hirsutum
  Clone ID: LIB3146-059-Q1-K1-C8.pep
IFILFASLVSRLRCVAFPHVTDSFKREVHFPHSRVCPSIIRVWSASFFADYHLHNHLHWSPRSGNHELEYVTWVIH

SEQ ID NO: 98310 - protein, 52 aa, Gossypium hirsutum
  Clone ID: LIB3146-059-Q1-K1-C9.pep
SIYIYATHHYSRGSMIRNNVIYVMPSMIDPYNILIAHDCHLQYDSMQMMFSD

SEQ ID NO: 98311 - protein, 47 aa, Gossypium hirsutum
  Clone ID: LIB3146-059-Q1-K1-D1.pep
GRVGSNVVYAVGTLCFRLGEIVYFCFLSMLGTKSCKCFPEENCYIVI

SEQ ID NO: 98312 - protein, 55 aa, Gossypium hirsutum
  Clone ID: LIB3146-059-Q1-K1-D12.pep
TSKSMFFILLRITFFSRTSLTVKDFPGLSNLYYTLSQQQVHIENHKKKKKHTGRP

SEQ ID NO: 98313 - protein, 79 aa, Gossypium hirsutum
  Clone ID: LIB3146-059-Q1-K1-D4.pep
TRLGRFLKVTNPALGGKKTALGLGIQWLLPKTQRRKLVWGLPPFLAEVNEFGLKGRNRLDGSHKNPQLWSIRLGLEFQG

SEQ ID NO: 98314 - protein, 107 aa, Gossypium hirsutum
  unsure (1)..(107): unsure at all Xaa locations
  Clone ID: LIB3146-059-Q1-K1-D6.pep
LADAEGARVCGVSRIMAVDVNGKQFEEANRFGITELGNPKDYYQPFKEVIVEMTAVGVNRNVECTGSVHXMICVLESSHDDWGVXVLLDVPKKDNAFKTHPMNLLSE

SEQ ID NO: 98315 - protein, 39 aa, Gossypium hirsutum
  Clone ID: LIB3146-059-Q1-K1-D8.pep
ITRDISCYAYLPKNLIRKENFAHSKDNNNSMTIYVQCLS

SEQ ID NO: 98316 - protein, 112 aa, Gossypium hirsutum
  Clone ID: LIB3146-059-Q1-K1-D9.pep
PTRPRTRGEETLFAWKNRLRSWGYEPVFCSVETKNGLDSLAFYLRDLTTVIVGPSGVGKSSLINVLRSDHRATDSLEGDNLFDPISGSKWFEDQRVGEVSTRSGRGKHTTRH

SEQ ID NO: 98317 - protein, 76 aa, Gossypium hirsutum
  Clone ID: LIB3146-059-Q1-K1-E10.pep
TVKDSLCIPRMVLASAVHNGDEGGHVMRSRGSSWIHACSAWTFTETAPQCPTPGNKATLFIFFFPYRSCKYKESKE

SEQ ID NO: 98318 - protein, 45 aa, Gossypium hirsutum
  Clone ID: LIB3146-059-Q1-K1-E12.pep
QVLRVKPVGSGSRFYMWDFRICYSNPSGVLYPSKNNNIKENVFGR

SEQ ID NO: 98319 - protein, 42 aa, Gossypium hirsutum
  Clone ID: LIB3146-059-Q1-K1-E4.pep
PASRFKYKTPLFFLQISPKDPQEIGGRGIIKTETEPSNIDVS

SEQ ID NO: 98320 - protein, 31 aa, Gossypium hirsutum
  Clone ID: LIB3146-059-Q1-K1-E5.pep
KGDFTPYGDDGRRPCVRHLTIDGGDAWRPGF

SEQ ID NO: 98321 - protein, 36 aa, Gossypium hirsutum
  Clone ID: LIB3146-059-Q1-K1-F3.pep
IKVNLFNYLFHKVPFVDYFLLPILVHCIIHLIMHIF

SEQ ID NO: 98322 - protein, 125 aa, Gossypium hirsutum
  Clone ID: LIB3146-059-Q1-K1-F7.pep
PTRPPTRPNKVRAVRAGIVPPLMRLLKDAGGGMVDEALAILAILASHHEGRAAIGQADPIPVLLEVIRTGSPRNRENAAAILWSLCTSDLEQLKIAKDFGAEEALKDLSDTGTDRAKKKSWEYLG

SEQ ID NO: 98323 - protein, 43 aa, Gossypium hirsutum
  Clone ID: LIB3146-059-Q1-K1-G12.pep
MKVYTGILISPYCNLWEAGHNHGDRNFCYDDLPTPKRILRTRG

SEQ ID NO: 98324 - protein, 49 aa, Gossypium hirsutum
  Clone ID: LIB3146-059-Q1-K1-G4.pep
PFRDPLADPLDPGQIGNGYAPILDWHTLHIGVKFAELLTKNDRRSCEEL

SEQ ID NO: 98325 - protein, 45 aa, Gossypium hirsutum
  Clone ID: LIB3146-059-Q1-K1-G5.pep
QYQTVCQFWPTVQQYPHQRVRCSSPRLRHIRAQIKQDRTRGRTRG

SEQ ID NO: 98326 - protein, 59 aa, Gossypium hirsutum
  Clone ID: LIB3146-059-Q1-K1-G7.pep
MDGGLYERYPQYRRYLKEAVAELLGPETSQNIVIEHSKDGSGIGAALLAATNSKYGRNL

SEQ ID NO: 98327 - protein, 56 aa, Gossypium hirsutum
  Clone ID: LIB3146-059-Q1-K1-G8.pep
HASVHASAHSFVGALGGGGRGTCWPESYQTLCLTTPGPLRDRRCFHGRFTPQVWSK

SEQ ID NO: 98328 - protein, 40 aa, Gossypium hirsutum
  Clone ID: LIB3146-059-Q1-K1-G9.pep
AHASVRGKKKVANSLKPLWKYRILIWSFFQQSSLRIFAVT

SEQ ID NO: 98329 - protein, 72 aa, Gossypium hirsutum
  Clone ID: LIB3146-059-Q1-K1-H10.pep
LESDEKEKIEAAVKEALEWLDDNQNAEKEDYEEKLKEVEAVCNPIITAVYQRSGGAPGAGGSTEEEDSHDEL

SEQ ID NO: 98330 - protein, 44 aa, Gossypium hirsutum
  Clone ID: LIB3146-059-Q1-K1-H2.pep
PTRPVSVFGGLRSAHFVRLINIFVSGGKEFEMPRKYSSSISKYF

SEQ ID NO: 98331 - protein, 58 aa, Gossypium hirsutum
  unsure (1)..(58): unsure at all Xaa locations
  Clone ID: LIB3146-059-Q1-K1-H5.pep
RIYICGSIKAWKIFGIYMVKHIDNPTIDDVLQPGNNLVAAXGYCMYGKLPARLVLKYL

SEQ ID NO: 98332 - protein, 112 aa, Gossypium hirsutum
  Clone ID: LIB3146-059-Q1-K1-H7.pep
MHTFRSRTRSRRFSFQERSSDLPQAHLWYSTHEVVNALKLFLAAGNDLAGSLTYRYDLVDLTRQVLSKLANQVYLDAINAFRRKDVKALNIHSQKFIQLIKDIDVLLASDDN

SEQ ID NO: 98333 - protein, 80 aa, Gossypium hirsutum
  Clone ID: LIB3146-059-Q1-K1-H8.pep
MKVKNLVRIQNKAGERHSMYCLVASKQMVGIFLTIWMRIELRDHVKNIHCFFLVHCLLKYSFSKHSLFTERILHSFAYNF

SEQ ID NO: 98334 - protein, 50 aa, Gossypium hirsutum
  Clone ID: LIB3146-059-Q1-K1-H9.pep
KKKGKDSLAGLDFIFVYCQPSLPAGEDVNYKVFDFPLPFSFFLLVTYHTT

SEQ ID NO: 98335 - protein, 45 aa, Gossypium hirsutum
  Clone ID: LIB3146-060-Q1-K1-A1.pep
NDYGRVNVTHTKIHTKSAERRVVLYVLKKKKKKKKKKKKKKGRPF

SEQ ID NO: 98336 - protein, 38 aa, Gossypium hirsutum
  Clone ID: LIB3146-060-Q1-K1-A10.pep
YVFFLFAPLFFFFFFFFFFFFFFFFFFFFFFFFFFSLA

SEQ ID NO: 98337 - protein, 105 aa, Gossypium hirsutum
  unsure (1)..(105): unsure at all Xaa locations
  Clone ID: LIB3146-060-Q1-K1-A12.pep
DAWVKLIFDFLNTLGAKGNVANANRGIKYHRFKMLFGHLWHRFSDARALPADHDATLYVLADGXFKLNPGIRPIYCCTANVTTVLIAEAGSFESDCGTDSILGSH

SEQ ID NO: 98338 - protein, 51 aa, Gossypium hirsutum
  Clone ID: LIB3146-060-Q1-K1-A5.pep
MIIWITAPHLINQCACMAFRPILLPQFEVRSCILLLTIMFMLCLYYNVNGE

SEQ ID NO: 98339 - protein, 77 aa, Gossypium hirsutum
  Clone ID: LIB3146-060-Q1-K1-B1.pep
LMADLHLTFLPLGVFPCLYIEAVQKWDYACGQKITVFTTYFDSMILLFFLLLCWLFYCGPNLTTENKDYNNITRRET

SEQ ID NO: 98340 - protein, 129 aa, Gossypium hirsutum
  Clone ID: LIB3146-060-Q1-K1-B2.pep
MVNPEGEKQESDLGGHRYEAIVDAEEDGDEDEDEDIDNDGPGEDNEEGDPSDGEDHGNNSNDQNGNSNKEIGGGEADGAGEEENGEEEEGENVDDEPEDEDEDDGDGDDNEGNDDEEEKETVEDEEPEN

SEQ ID NO: 98341 - protein, 48 aa, Gossypium hirsutum
  Clone ID: LIB3146-060-Q1-K1-B7.pep
ITKYLYCQKVYNLMLTKQRDHAYITHTRYQSRLVVHLYINKTMLTDAW

SEQ ID NO: 98342 - protein, 88 aa, Gossypium hirsutum
  Clone ID: LIB3146-060-Q1-K1-B9.pep
HASDDTPELSEETQRIIATIVTQVEHNNYHEEEEQVLSSVLVHHETYFTMQPCMDSNYTCQMWVDEVLNGHDDRCMNSFRMPKYIFHS

SEQ ID NO: 98343 - protein, 119 aa, Gossypium hirsutum
  Clone ID: LIB3146-060-Q1-K1-C1.pep
MNSPPGFTLSPSSPTEFSSHKRGKGRSPGNWQLLASLGELFAHTAGGDFTAHVVKVNTGEDVAGKVVSLSQKGPRGICILSANGAVSNVTLRQPGSSGGILSFEGRFEILSLTGSFTFT

SEQ ID NO: 98344 - protein, 129 aa, Gossypium hirsutum
  Clone ID: LIB3146-060-Q1-K1-C11.pep
VSATTGVANNPEIFDIIGHFADPKPGATLPKTPIVCKPQDSAIELALKIAKINPQRTLFFDDSVRNIQAGKHVGLHTVLVGTSQRPKGADYALESIHNIKQALPELWETDVKSDVSYAGQVAVETSVTA

SEQ ID NO: 98345 - protein, 136 aa, Gossypium hirsutum
  Clone ID: LIB3146-060-Q1-K1-C2.pep
HASAHASGERERKEQESKKNQKVEFVPGGNQPGAVLPAPKVSMPTAVAAGSGLPSGPTAVDNNIVRDGRQNKKSKWDKVDSDRRNPLPAGAQHSLSAAGAHTVILSAANAGTGYTAFAQQKRRETEEKKSSEKRLD

SEQ ID NO: 98346 - protein, 135 aa, Gossypium hirsutum
  Clone ID: LIB3146-060-Q1-K1-D8.pep
LIKRVLDNFVPDEFCPDPVPDVVLEALEAEDPAEAREGFVTSFPYVASPPIYSPPSATSVASIIGEVGSQSQLRRSRSSVLRKSYTSDDELDELNSPLASIFNDGFRSSPVQSKPIWISKGNNYQNAIRYELLRD

SEQ ID NO: 98347 - protein, 65 aa, Gossypium hirsutum
  Clone ID: LIB3146-060-Q1-K1-D9.pep
APSTHDPPSTSQEHPHVVISHGPIASGPTCHYMQSISLWSPCSAGPPIALFSHQCAYTATYRSSG

SEQ ID NO: 98348 - protein, 51 aa, Gossypium hirsutum
  Clone ID: LIB3146-060-Q1-K1-E12.pep
YIHTHAHSHTDIHTLHTHPYVRTLHTHTHTYIHHTHIHTHMYVYISAKIEL

SEQ ID NO: 98349 - protein, 34 aa, Gossypium hirsutum
  Clone ID: LIB3146-060-Q1-K1-E5.pep
FLINPYPKSSLTAYKKKLKVLSVKFYSARVGRSL

SEQ ID NO: 98350 - protein, 139 aa, Gossypium hirsutum
  Clone ID: LIB3146-060-Q1-K1-F1.pep
DFVAAATDLRPNCGVNRLLIDKLSVKTPTGEAKLKVMKEIAKDHNIEWDTSESEKELLKPPEELIEGPRKFVSATSVPVKPATNHCPEPKESMTRGEEGHNRFKDTVAAAEAAEESAKKAIAAAQAAAYLANRESNLFS

SEQ ID NO: 98351 - protein, 49 aa, Gossypium hirsutum
  Clone ID: LIB3146-060-Q1-K1-F3.pep
LRTWPNLSHTKGESGRLFILKKGIQKCVSYSLLTQIYLCKGVCAHKSAL

SEQ ID NO: 98352 - protein, 53 aa, Gossypium hirsutum
  unsure (1)..(53): unsure at all Xaa locations
  Clone ID: LIB3146-060-Q1-K1-F8.pep
RTSKTLHYKRYYFHSVIPYFMCYXCDFTARKSTGGETIXRSKLAYENFMNKHT

SEQ ID NO: 98353 - protein, 64 aa, Gossypium hirsutum
  unsure (1)..(64): unsure at all Xaa locations
  Clone ID: LIB3146-060-Q1-K1-G10.pep
KKKKKKKKKKKKKKKKKKKKKKKKKKKKKKKNKKKKKKKKXKNKKKDLNPKKKKIFALYNTPAC

SEQ ID NO: 98354 - protein, 85 aa, Gossypium hirsutum
  Clone ID: LIB3146-060-Q1-K1-G11.pep
AKEAVGEYGGFAALVEAIEDGSVKGKEFAVLTLLQLCADNIRNRGLLVREGGIPPLVALSQTGSVRAKHKVILADLDCPMFELRT

SEQ ID NO: 98355 - protein, 71 aa, Gossypium hirsutum
  Clone ID: LIB3146-060-Q1-K1-G2.pep
KKISVENDHVWLYPRFSHSSHISLGVKIESSIPLRNMGCTMLMISTSKDGLSILWALTNIGHGGYIYHGKL

SEQ ID NO: 98356 - protein, 95 aa, Gossypium hirsutum
  Clone ID: LIB3146-060-Q1-K1-G3.pep
QVWKGDKSGESSVRSAYNLLQEASLELNSYLVQTETKEFYKNLWNLQLPQKILILIWRISWNYIPSLANLKYKRVTANSRCPRCESEEEDSHHVF

SEQ ID NO: 98357 - protein, 51 aa, Gossypium hirsutum
  Clone ID: LIB3146-060-Q1-K1-G4.pep
QLYEMYKMSHSCIMDEILEKESYIFSKIKLLKLVYYPQYTLLWSQMWNWRN

SEQ ID NO: 98358 - protein, 61 aa, Gossypium hirsutum
  Clone ID: LIB3146-060-Q1-K1-H10.pep
KPPDVGVLKLNFDAAFQHDLQLAVTVVIARDSEGEIVGAETYLFSNVSDASLSKARVCERA

SEQ ID NO: 98359 - protein, 78 aa, Gossypium hirsutum
  Clone ID: LIB3146-060-Q1-K1-H12.pep
KCINPLSQCYIKGTIYIFLSLDSTHFKTKWVSICHLNRILSTATGIFSIPLHGCNSKDLLVWKCQGSGEYAVQSGYWV

SEQ ID NO: 98360 - protein, 53 aa, Gossypium hirsutum
  Clone ID: LIB3146-060-Q1-K1-H2.pep
PRVREDAASYASSELFELDNLSAIGIERYRQELPVYETTHLDTNRAIANGLIV

SEQ ID NO: 98361 - protein, 79 aa, Gossypium hirsutum
  Clone ID: LIB3146-060-Q1-K1-H4.pep
EALKDSTRIRYLDGHLKCLLKAIQEGVNMKGHYMWAFLDDFEWTSGYTLRFGFTYTDYKNNLRRYLKYSAYWFKKFFLN

SEQ ID NO: 98362 - protein, 121 aa, Gossypium hirsutum
  Clone ID: LIB3146-060-Q1-K1-H8.pep
PRVRLDKRRSSDRNQSVSPEIISCKLGSTCTGCSTSDLDEMNRFAEVNTSSNSSGISSCSHEDIGNESTAGSSEGSNVGDDNPSSSQSDSSDDLKSSVEDDHADQNKVFQDGLLKDLEVLD

SEQ ID NO: 98363 - protein, 135 aa, Gossypium hirsutum
  Clone ID: LIB3146-061-Q1-K1-A10.pep
VMHKILRITKEVRKELQSIMWKYVGIVRSTSRLQEAEQKIGKLEAKWETYLFEHGWQQTMVALEACEMRNLFCCAKLVVSSALARNESRGLHYMTDFPHLEESKRLPTVIFPSSHTTGTWSSRQLHQQPIVKSMV

SEQ ID NO: 98364 - protein, 46 aa, Gossypium hirsutum
  Clone ID: LIB3146-061-Q1-K1-A4.pep
FFNVVKHEVISNIKFIKKEFFVLNTTPSNKCYEIRYTQIIIKIIIT

SEQ ID NO: 98365 - protein, 46 aa, Gossypium hirsutum
  unsure (1)..(46): unsure at all Xaa locations
  Clone ID: LIB3146-061-Q1-K1-A8.pep
YRYITGSDPRPSAIIRRMAEGGSNGHGSVRPILLVGRDKETFFKXV

SEQ ID NO: 98366 - protein, 102 aa, Gossypium hirsutum
  Clone ID: LIB3146-061-Q1-K1-B2.pep
KGSFLCNSSHRRRPMAMARFQRLYGQTLGRVSEKKWERIFLKKHSRNVFFFENFNLYRALVQRHFGLTLETPKRRRFEAEPYYLTRIAQDPRVFIWGIYLFT

SEQ ID NO: 98367 - protein, 83 aa, Gossypium hirsutum
  Clone ID: LIB3146-061-Q1-K1-B3.pep
LLLLSLFEALLSASNHKHQCMSSRVLQQEHVSETTCMKREREKTCSYSKSNFRNSSSQFSTISANLLIFVTRTRGRTRGRTRG

SEQ ID NO: 98368 - protein, 103 aa, Gossypium hirsutum
  unsure (1)..(103): unsure at all Xaa locations
  Clone ID: LIB3146-061-Q1-K1-B9.pep
LPKPLTFSSTFSRTSGNFLRPRVSFPVIKASLDVGSDAIRPGGTVETDKLPSDVRKRAMEAVDSFGGRVTVGDVSSKXGLNLNQAKKALQALASDTNGFLEVL

SEQ ID NO: 98369 - protein, 119 aa, Gossypium hirsutum
  Clone ID: LIB3146-061-Q1-K1-C12.pep
PRVRPRVRPLVRRKVLFDSVSECMDLRCRRYVGGGYKTWTKGMTILRRNEWLAEEVYKEICGWRGMGDCMVDELVDKDMRSQHGKWLDFEVDAFALGADIEGQILNVLVDEMISEFLPF

SEQ ID NO: 98370 - protein, 81 aa, Gossypium hirsutum
  Clone ID: LIB3146-061-Q1-K1-C2.pep
ELIWQGIKSDFVTFTFKFPVAIKGPNQNNVKEPDFYKDNNIHTHIQKKERSPSSFLKVIYLYLFIYLFHAKTIKINKKEFT

SEQ ID NO: 98371 - protein, 55 aa, Gossypium hirsutum
  Clone ID: LIB3146-061-Q1-K1-C3.pep
LELYIYVMEELRPMLCRVFVSLQVLSRMNECVLTFDKFCFDLEWKVSSTSLYKIY

SEQ ID NO: 98372 - protein, 61 aa, Gossypium hirsutum
  Clone ID: LIB3146-061-Q1-K1-D4.pep
PLRALYPYPFYNVAGTPAWCHPVPPWSATFTINSNPGPYFSYLTPFIDNYVGVQMNPPAKT

SEQ ID NO: 98373 - protein, 71 aa, Gossypium hirsutum
  unsure (1)..(71): unsure at all Xaa locations
  Clone ID: LIB3146-061-Q1-K1-E1.pep
IGTEQVNLVNFLYFHIFTRQGKKYRTIVVVLQFFFNPSLLLCYQWIHIQMYKYYHQNNCLXKPDESCRRPN

SEQ ID NO: 98374 - protein, 43 aa, Gossypium hirsutum
  Clone ID: LIB3146-061-Q1-K1-E11.pep
NKEFIKFPPYMSNNGALCSVNKNTRVHYDATGDESMTNSGFMS

SEQ ID NO: 98375 - protein, 135 aa, Gossypium hirsutum
  Clone ID: LIB3146-061-Q1-K1-E5.pep
PRVRKKLNRMKSLKGKKRQRFKERFISGNHKYNEAARSIIKPKIGYGLASELRRAGVYVKTVEDKPQAADWALKRQMQHSMSRGIDWLFLVSDDKDFVEMLRRAREADLGTVVVGDWDRGLGRHADLWVSWVEVE

SEQ ID NO: 98376 - protein, 56 aa, Gossypium hirsutum
  Clone ID: LIB3146-061-Q1-K1-E6.pep
FYSPRYTVVKLFGFQGQFEHQITSHETAKTDPSSPFSCVLKVRPENVISMYVYIYT

SEQ ID NO: 98377 - protein, 67 aa, Gossypium hirsutum
  Clone ID: LIB3146-061-Q1-K1-E7.pep
PTRSSTRSATRSSTRPISFYGGDGNANLSFLHNVLLTYSFYNFDLGYCQVITPDILYFSFFWLSLIS

SEQ ID NO: 98378 - protein, 46 aa, Gossypium hirsutum
  Clone ID: LIB3146-061-Q1-K1-F1.pep
RPSLPPTLPVGLFFRREPFFFGLDTHDHLVKMAKALGPGEFKCLIS

SEQ ID NO: 98379 - protein, 62 aa, Gossypium hirsutum
  Clone ID: LIB3146-061-Q1-K1-F12.pep
SKTLDCMHACMTACIYMMCMIACNKPFKSVSLVWQPALKTNIKCLFFISNCFIYYIKITHNT

SEQ ID NO: 98380 - protein, 74 aa, Gossypium hirsutum
  Clone ID: LIB3146-061-Q1-K1-F2.pep
QFLQKKIWLLNLPAKIKFTIWKLSWNYLPTKTNMLSRNLAINTNCPRCEGRAETIDHLFRESLGFCGRVGGRVG

SEQ ID NO: 98381 - protein, 131 aa, Gossypium hirsutum
  Clone ID: LIB3146-061-Q1-K1-F6.pep
PTRPVLGTRGPRRMHCMMHSIRASALDASGVVPGQPELLRHPLEDSFRSISFSKSLDHSVEFSSSRFSEIGTSYDDEDGKMKPLILKNKPPRWHEQLQCWCLNFRGRVTVASVKNFQLIAATQAAAGAPTP

SEQ ID NO: 98382 - protein, 83 aa, Gossypium hirsutum
  unsure (1)..(83): unsure at all Xaa locations
  Clone ID: LIB3146-061-Q1-K1-G10.pep
CNLQLTYLSEDEIISIINHAAAKRFTLFDTVDVYCAHTNELSVGXALKQLPREIIHLSTKFSIARMAPTGMIVKGRTEYVQSC

SEQ ID NO: 98383 - protein, 47 aa, Gossypium hirsutum
  Clone ID: LIB3146-061-Q1-K1-G12.pep
LPAPHYTGGYFTINEHQHLRAIKLTSKDTHWRLWPCTSPHHEQCLQD

SEQ ID NO: 98384 - protein, 101 aa, Gossypium hirsutum
  Clone ID: LIB3146-061-Q1-K1-G2.pep
KHYFYLLFSGPTCPILLPWRAPFKGGAPSRGPNFSSPCLQLLFFFFGPPTLIPLPVFYNRRFGKTLGFPNFIFLYKYPLFAGGLNSKNGPPVSPFPNVSPP

SEQ ID NO: 98385 - protein, 51 aa, Gossypium hirsutum
  unsure (1)..(51): unsure at all Xaa locations
  Clone ID: LIB3146-061-Q1-K1-G4.pep
SAGILVYMALVDLIAADFLSKRMSCNFSLQVVSYFMXLLGAGLMASLAIWA

SEQ ID NO: 98386 - protein, 32 aa, Gossypium hirsutum
  Clone ID: LIB3146-061-Q1-K1-G6.pep
LLACHGCITFLSSIAFRINCSDVMFHNVVMSK

SEQ ID NO: 98387 - protein, 87 aa, Gossypium hirsutum
  Clone ID: LIB3146-061-Q1-K1-G7.pep
VSSPFAAEAYAGLQAIKLGISMGILSVTIMGNSRTVIKKCQTTKPDKSIIGAIIRDIQIKNLAFKKLIFSLLIYQEMFIPINLHKTP

SEQ ID NO: 98388 - protein, 69 aa, Gossypium hirsutum
  Clone ID: LIB3146-061-Q1-K1-H10.pep
PFKISVHNSVIITIEQNIFCKLKPKTHLTPKLLQMTTLKPQAFTHKRKAKMLPNHKITLCFFPRLNTPY

SEQ ID NO: 98389 - protein, 77 aa, Gossypium hirsutum
  Clone ID: LIB3146-061-Q1-K1-H11.pep
HAYTDFTASITLFFFFLPSGLFTICHCLQPPTALSFNVVHALHLRIHLACIGQDILNIALIITVLQIVLLPNHKVGT

SEQ ID NO: 98390 - protein, 28 aa, Gossypium hirsutum
  Clone ID: LIB3146-061-Q1-K1-H5.pep
MSYLQLAFVPSRSFLNELSTSVETVSEF

SEQ ID NO: 98391 - protein, 103 aa, Gossypium hirsutum
  unsure (1)..(103): unsure at all Xaa locations
  Clone ID: LIB3146-061-Q1-K1-H6.pep
ISQRKHVADLWKVFNMFSCKVVGTPMNVNAXDGTDKADGRYFRSLVGGLIYLTQTRPNIVFSVGGISRFMHSPHERQLGAAKRISRYIAETTTFGLCSYFLEL

SEQ ID NO: 98392 - protein, 30 aa, Gossypium hirsutum
  Clone ID: LIB3165-028-P1-K1-E3.pep
PKQLSFKIKIQPEQKAQLNPKWHKMHSKFG

SEQ ID NO: 98393 - protein, 32 aa, Gossypium hirsutum
  Clone ID: LIB3165-028-P1-K1-E5.pep
FPKKTTNCCPLNLRLRLGDRPPLPCRFNFKKS

SEQ ID NO: 98394 - protein, 112 aa, Gossypium hirsutum
  unsure (1)..(112): unsure at all Xaa locations
  Clone ID: LIB3165-028-P1-K1-E7.pep
MICSLLSQAAVSPAYYYRSSPSIYKPKPSNRFSWGFLAPIPSPAIRVFCSKPGEVGGLMASSVQNQGSISYLTQREAAEVDETLMGPLGFSVDXQLMELAGLSVATSIAEDY

SEQ ID NO: 98395 - protein, 106 aa, Gossypium hirsutum
  Clone ID: LIB3165-028-P1-K1-F10.pep
MATATMATAAGAAALLYYTLNRKLQTDRSGNDDNENGSDLSNNPSSGLDRVSHRLVQAPATWVETISTLSETLRFTYSETLGKWPIGDLAFGINFLLKRQGHLHVA

SEQ ID NO: 98396 - protein, 119 aa, Gossypium hirsutum
  Clone ID: LIB3165-028-P1-K1-F3.pep
RHDIPLGENPNHQNVIVSLVYYHRPYQTNHYLRRGVIFAGVLLLLSATILFFYPSDPILKLARIRLNHVGVISSPKLTIDLSFSLTISVRNRDFFSLDYEKLVVSVGYRGKELGVVNSE

SEQ ID NO: 98397 - protein, 133 aa, Gossypium hirsutum
  Clone ID: LIB3165-028-P1-K1-G1.pep
RPKDEGYDGASADLWSCGVMLFVLLAGYLPFDDSNIMNLYKKISAAEFTCPPWLSFSAMKLITQILDPNPITRITIPEILQDEWFKKDYKPPMFEEKDDTNLDDVEAVFRDSEEHHVTEKREEQPTPMNAFEL

SEQ ID NO: 98398 - protein, 102 aa, Gossypium hirsutum
  Clone ID: LIB3165-028-P1-K1-H12.pep
MFGKDFFTEYGEASQYEIKEVVGTGSYGVVASAIDTHTGEKVAIKKIANIFEHTSEATRILREIKLLRLLRHPDIVQIKHIMLPPCQREFKDIFVVFELMES

SEQ ID NO: 98399 - protein, 116 aa, Gossypium hirsutum
  Clone ID: LIB3165-028-P1-K1-H3.pep
ERLKIDALKRELPLCMQLLTNAVEASRQQLHACRANQGSRPVLEEFIPLKNSSSENSDKSQNISDKANWMTSAQLWSQAGNETKPPQSSVASPKEADIGFNVSPKLGLDTKQRNGG

SEQ ID NO: 98400 - protein, 88 aa, Gossypium hirsutum
  Clone ID: LIB3165-028-P1-K1-H7.pep
MGKGGKSHEETKSGEDENMAAWLVGLNTLKIQPFKLPPLGPHDARVRMKAVGICGSDVHYLKTMRCADFGVKEPMVIGLECAGIIKEV

SEQ ID NO: 98401 - protein, 131 aa, Gossypium hirsutum
  Clone ID: LIB3165-028-P1-K1-H8.pep
TRPGRETVHQLYGTRVAILAGDFMFAQSSWYLANLENLEVIKLISQVIKDFASGEIKQASSLFDCDVKLEDYLLKSYYKTASLIAASTKGAAIFSGADRSVTEQMYEYGKNLGLSFQVVDDILDFTQSAEQ

SEQ ID NO: 98402 - protein, 49 aa, Gossypium hirsutum
  Clone ID: LIB3165-030-P1-K1-A3.pep
ISASSPIMPILISLLMSLAMTDHSRSTYRLRQDGLGRSHSSKDPRLCFR

SEQ ID NO: 98403 - protein, 31 aa, Gossypium hirsutum
  Clone ID: LIB3165-030-P1-K1-B12.pep
PLVLSELYPIVLDISPGCGAYTVCSKTCLNK

SEQ ID NO: 98404 - protein, 89 aa, Gossypium hirsutum
  unsure (1)..(89): unsure at all Xaa locations
  Clone ID: LIB3165-030-P1-K1-C5.pep
VTGFQQTAPKIQTAETTSLEKASADTADDVKSNIHDKCGISTDQXRRVGSDXQPEGCRTLNDYNIQNEYTLHLGRGLKGGMQILATTLT

SEQ ID NO: 98405 - protein, 118 aa, Gossypium hirsutum
  unsure (1)..(118): unsure at all Xaa locations
  Clone ID: LIB3165-030-P1-K1-D10.pep
HASVHAFVLSFSHTSGRGCSSFSGKTLKIYHYTPQIQRTGRVSMMKTTKPLCCCSPWHGPNRVLYLQPLCGEPPSYLTGELPGDYSXTLLDSXAGPKTFARNRELXIMHCIWAMLGAF

SEQ ID NO: 98406 - protein, 86 aa, Gossypium hirsutum
  Clone ID: LIB3165-030-P1-K1-D6.pep
MCLSHSVHESYGSSELMSNLGVRKKISHGQGCRSSKKSSFFGWFLYGNKLGNMYYKSVVLEVTYITQSSWGLYSQEKIEIGFADEW

SEQ ID NO: 98407 - protein, 43 aa, Gossypium hirsutum
  Clone ID: LIB3165-030-P1-K1-D8.pep
LLHYLDQVIEMESKLYGFFVAITPKNKNPPFNVFSVEYIKKIT

SEQ ID NO: 98408 - protein, 40 aa, Gossypium hirsutum
  unsure (1)..(40): unsure at all Xaa locations
  Clone ID: LIB3165-030-P1-K1-E3.pep
IFFLQNKQXTGRYLINMDRHHKPFLLVTCLHLTTTYHPQI

SEQ ID NO: 98409 - protein, 82 aa, Gossypium hirsutum
  unsure (1)..(82): unsure at all Xaa locations
  Clone ID: LIB3165-030-P1-K1-E5.pep
LLWTVKIADVNGDILRAAPVTKDEKGSTRYKGGLGRRILVCSSFSSHVFSFRRPIMXSLVRNKSVLFDGKRGRVASPRPFLS

SEQ ID NO: 98410 - protein, 119 aa, Gossypium hirsutum
  Clone ID: LIB3165-030-P1-K1-E8.pep
PGSIVHRYFELEKSPVFSWLLNFGGFKERLLADDLFLTKVGIECGVGIFTKSAAELEKRREKFRKELDFVFADVVMALVADFMLVWLPAPTVSLRPPIALSAGPISKFFYNCPDNAFQV

SEQ ID NO: 98411 - protein, 119 aa, Gossypium hirsutum
  Clone ID: LIB3165-030-P1-K1-F1.pep
TTQNRKKFILGETHRFNAAVHVPPWPSFDDDQIAEVHSPLNYNAPCNHFNNNSNPFYLQEALGMLRRYLPSNELDIESDSELSFHPDSPVDACSCDHFRMFEFKVRRCGRGRAHDWTDC

SEQ ID NO: 98412 - protein, 81 aa, Gossypium hirsutum
  Clone ID: LIB3165-030-P1-K1-F11.pep
LRSSYVARVILASLVASTHSRPQSLWSVCIDRVNLALAWIQTEGFTHALSGHEWHIGHRCCSSPSLVASAHIKQLVSGRVG

SEQ ID NO: 98413 - protein, 76 aa, Gossypium hirsutum
  Clone ID: LIB3165-030-P1-K1-F8.pep
KQINNNKGKWRLHSPERKRRGLVNYYGTVICWIVNCLSNAYRTLVRCVRLYFFENSYDGMLCESHDMANKLDRCLK

SEQ ID NO: 98414 - protein, 61 aa, Gossypium hirsutum
  Clone ID: LIB3165-030-P1-K1-G10.pep
ININSKFILLNRTKSNRKSSCNECTKPPKIPYFEPDKLTLHSIYNDQTPIFMTTYLHIEYQ

SEQ ID NO: 98415 - protein, 62 aa, Gossypium hirsutum
  Clone ID: LIB3165-030-P1-K1-G11.pep
FLYAMNAMLVLYISHEIQISSSIDVLDYRCTSIIYRFLQYMGWMRMRTVAWCADVSMSNLFR

SEQ ID NO: 98416 - protein, 47 aa, Gossypium hirsutum
  Clone ID: LIB3165-030-P1-K1-G2.pep
TKWRSYGTEFEDANSLKTQKENIIQLIHKGGIHFDRAQYRFFCIITG

SEQ ID NO: 98417 - protein, 109 aa, Gossypium hirsutum
  Clone ID: LIB3165-030-P1-K1-H2.pep
TKAAATASWDLPKLSTLTYSLKSSIPIYKSRLSFFTTPQKPTPYRSLDVSCSLSHASCNPRSVDTYGTPKNATSHDFISRYADDEPRQGADILVEALDREGVKDVFAYP

SEQ ID NO: 98418 - protein, 89 aa, Gossypium hirsutum
  unsure (1)..(89): unsure at all Xaa locations
  Clone ID: LIB3165-030-P1-K1-H3.pep
HRQALPQAFYIQGQAPLRDWGFAQRFSLTYTFKTSIPIYKKGLFFFTNPXKATPDPSMDNSCSFFQAGCXPRSSATSGAPKNGPSQDFI

SEQ ID NO: 98419 - protein, 104 aa, Gossypium hirsutum
  Clone ID: LIB3165-031-P1-K1-A12.pep
PEVNPIGARAVRLYLREVGDLQSKARRISYEKKKRKRPPTQQIPTLPMPPPPPPGASLTIKRSVSDHQLNRSRLYHCRHHHHQVQVKLYICITKTKQNKTPYAS

SEQ ID NO: 98420 - protein, 84 aa, Gossypium hirsutum
  Clone ID: LIB3165-031-P1-K1-A4.pep
MEVVKESEPNTTTMRKALLVINCIILSIGNCAGPLMMRLYFIHGGKRVWFSSWLETGGWPIILFPIACAHFYRSRTQPSSENKL

SEQ ID NO: 98421 - protein, 58 aa, Gossypium hirsutum
  Clone ID: LIB3165-031-P1-K1-C5.pep
AHLPNIKMAAVTHGIYECYIATNGAQATKLSFQQLQGYIKPHLTYLYSWRHCGFLTSM

SEQ ID NO: 98422 - protein, 129 aa, Gossypium hirsutum
  Clone ID: LIB3165-031-P1-K1-C6.pep
PTRPIFRPFQPWWILKNTVCLFLIWCITILFLRAILSNSRGKKPHLPPTPRALPVIGHMHLLGPIPHQALNKLSDRFGPLVYFYIGSKPCLLVSSQETAKEVFKNHETTFLNRPKMANLDYLTYGTADM

SEQ ID NO: 98423 - protein, 62 aa, Gossypium hirsutum
  Clone ID: LIB3165-031-P1-K1-C9.pep
RIKSDFFFQAPLHACLSRCSKVGVGLPGAETSRFRPVGPRWPVRRRSGAWSIACEAIAILLY

SEQ ID NO: 98424 - protein, 111 aa, Gossypium hirsutum
  Clone ID: LIB3165-031-P1-K1-E9.pep
KWKSLKAPFKGIANDVKGRAGCYKQDWITGLRSGLGILAPTTYIFFASALPVIAFGEQLSRDTDGSLSTVETLASTALCGILHSIFGGQPLLILGVAEPTVIMYTYFDNFA

SEQ ID NO: 98425 - protein, 118 aa, Gossypium hirsutum
  Clone ID: LIB3165-031-P1-K1-F3.pep
PRVRPRVRPRVRASSSLVPVFFITIPFLFFPFLLLSIFSSSSPYSSSSNPSCCHHESPPSMAFPTNSTIKTLLFSSSSQILPCIFKKISLKPKKNQCLILEFSKLYSSLVDERQRRLL

SEQ ID NO: 98426 - protein, 66 aa, Gossypium hirsutum
  unsure (1)..(66): unsure at all Xaa locations
  Clone ID: LIB3165-031-P1-K1-F4.pep
GPXTDRVGSDPRVAMQIQITIYTVCASSLLCLSQGIDIICTRLKGHTPSITCQLWGEEPSSCTAKN

SEQ ID NO: 98427 - protein, 41 aa, Gossypium hirsutum
  Clone ID: LIB3165-031-P1-K1-H11.pep
LTSFSFYIFIYWLFYLHLSHFFKSIYNFTDSLSPLYIHKFS

SEQ ID NO: 98428 - protein, 71 aa, Gossypium hirsutum
  Clone ID: LIB3165-032-P1-K1-A6.pep
HASVSIYQHIKESGISPDVVTYSTLMKAFIRAKKFDKVPEIYKEMESYGCTPDRKARQMLQTALMVLERRH

SEQ ID NO: 98429 - protein, 50 aa, Gossypium hirsutum
  Clone ID: LIB3165-032-P1-K1-A9.pep
ETPSMLNLCVMVCVEAVGYDSQKSLISSLPIIINRLSPRPALNSIDPPRW

SEQ ID NO: 98430 - protein, 129 aa, Gossypium hirsutum
  Clone ID: LIB3165-032-P1-K1-B2.pep
GVTNNLATVRKLLDHYRHPALLLVDGVSSICALDFRMDEWGVDVALTGSQKALSLPTGLGIVCASPKALEAFKSAKSVRVFFDWNDYLKFYKLGTFWPYTPSIQLLYGLKAALDLIFEERLGNVIARHT

SEQ ID NO: 98431 - protein, 124 aa, Gossypium hirsutum
  Clone ID: LIB3165-032-P1-K1-B3.pep
GLGLLAFSEIETILQLLGSAAIVQLVSKKFLYAENRKQTLKQVDEFLNTKVAPTELVDDVKQIGAALLPTTTTSKALPAPTEAKPEPKVEAVAEAPPQTNSVPETVPKAVGITGFSRPLSPYAF

SEQ ID NO: 98432 - protein, 42 aa, Gossypium hirsutum
  Clone ID: LIB3165-032-P1-K1-B7.pep
DRPEPGDPRVKICDLIRSIKINMFGRAPKAYSYYRLGVRTFR

SEQ ID NO: 98433 - protein, 37 aa, Gossypium hirsutum
  Clone ID: LIB3165-032-P1-K1-C1.pep
FLFFFFFFIFFFFFFFFFFFFFFFFFFFFFFFFFFFK

SEQ ID NO: 98434 - protein, 108 aa, Gossypium hirsutum
  Clone ID: LIB3165-032-P1-K1-C4.pep
KLTAQLAHKLQIVSAGFETLAGPFTEPLSTARLAPLRIVRCSIVPPRQHTRTTAISIIWRRSDRCMLLRPKGRRIPRDRLKPWRRWKHILAPSRSTWEDFKRRFMVLF

SEQ ID NO: 98435 - protein, 59 aa, Gossypium hirsutum
  Clone ID: LIB3165-032-P1-K1-C6.pep
LKLTIDPHVVGSTSKVTPYTIYKSCIPFLSTVPSLLVLLNTSLIQIIHLFQYHSKPCVR

SEQ ID NO: 98436 - protein, 135 aa, Gossypium hirsutum
  unsure (1)..(135): unsure at all Xaa locations
  Clone ID: LIB3165-032-P1-K1-E3.pep
ADHTRPRTRGCDQGIFGIKDKKGQXALHMAGKGQCPAVVDELLFANHSILNERDKKGNTALHIATRKSRAQIVSLLLTYRSTDVNAINNQHETAMDLADKLQYGESAFEIKEALTEAGAKHARSVGQVDEAMELK

SEQ ID NO: 98437 - protein, 55 aa, Gossypium hirsutum
  Clone ID: LIB3165-032-P1-K1-F1.pep
QKIISPRFFSSTSTPSIVGSTCILATPINFTPTVFILNITFPTIADDIFLLLYIF

SEQ ID NO: 98438 - protein, 68 aa, Gossypium hirsutum
  Clone ID: LIB3165-032-P1-K1-F4.pep
CSRPHLTSTKPGMNAMRVFTCAWHCTNVAHDHTWCMKSSLQLNGGEKSLSVCLLKKFLPKWKSTHPLT

SEQ ID NO: 98439 - protein, 81 aa, Gossypium hirsutum
  Clone ID: LIB3165-032-P1-K1-F5.pep
METLWDPSTSPRWVPKKNVLLGAAIDKPVMDHKPMAQPFPRCPTCNRAWRGLRICCLWSDGKTGCRTCSEDVHDYGRNCCY

SEQ ID NO: 98440 - protein, 50 aa, Gossypium hirsutum
  Clone ID: LIB3165-032-P1-K1-F7.pep
SCVVDLAHGPEPCASTYPVADSSSEPDRSFSFITWNQKRNHRNPKRKKNP

SEQ ID NO: 98441 - protein, 80 aa, Gossypium hirsutum
  Clone ID: LIB3165-032-P1-K1-G11.pep
MLDKTATVSALPFSSDLLSLTPLDNGKRKRKPPGTPDPEAEVVSLSPQTLLESDRYVCEICNQGFQRDQNLQMHKRRHKV

SEQ ID NO: 98442 - protein, 62 aa, Gossypium hirsutum
  Clone ID: LIB3165-032-P1-K1-G12.pep
CSPCRRDAVMSTPGLGRHSVLRNFKGWGWRIDHHSTCGALPASGPYRSMSRLQGGEAVKQKI

SEQ ID NO: 98443 - protein, 76 aa, Gossypium hirsutum
  Clone ID: LIB3165-032-P1-K1-G3.pep
SHRIEAVTKSATAGETIVSISLEQISQVMTILASIDLDSFRCINCYELKHMQSVGLMRDKRSVDSVDISRLVESER

SEQ ID NO: 98444 - protein, 51 aa, Gossypium hirsutum
  Clone ID: LIB3165-032-P1-K1-G4.pep
LGCRRIANMIRIVVRAISRMDRRRKECLRMDRSRLFAWECITLSSNGRHHI

SEQ ID NO: 98445 - protein, 76 aa, Gossypium hirsutum
  Clone ID: LIB3165-032-P1-K1-H11.pep
CRFTHNPTNPTRFANRARVGLQTCKEGSIMLVRNWPYLEITVPINLLDYSVLRAFHIVHTSSFFFFFKNFVECLVN

SEQ ID NO: 98446 - protein, 58 aa, Gossypium hirsutum
  Clone ID: LIB3165-032-P1-K1-H5.pep
LKMGLKMRVLHIMQKNLNHKRYLNGSVSNISIITSMLFIFGDLRKKVAETKMKFLSYS

SEQ ID NO: 98447 - protein, 122 aa, Gossypium hirsutum
  Clone ID: LIB3165-032-P1-K1-H9.pep
MSSISPSSRNGNPSKPVSVRRVSNNMPGLGHEEEDVMLLHDKSYSCSNGGVLQGSALVPRGHCSDGNDKDSGRERLKRHREEVAGRVLVPDKWGKEELLKDWMDYSSFDSLLAPTGLASARK

SEQ ID NO: 98448 - protein, 102 aa, Gossypium hirsutum
  unsure (1)..(102): unsure at all Xaa locations
  Clone ID: LIB3165-033-P1-K1-A3.pep
DGFYIVPAFIDKLVVHISRSFMTLPNIKDPLILGIXRGKGQGKSFHRELVLAKKGINPIMMSARELESANAGEPDKLFRTRLLEDTHILKNDKLSAMFNNDL

SEQ ID NO: 98449 - protein, 69 aa, Gossypium hirsutum
  Clone ID: LIB3165-033-P1-K1-A4.pep
GMWKLERPLDSLHTKLSSMLARHGSMRNVFYNQRSCKSSQSRWCLFSCQHLWNGRQPLGATTGDYFWCC

SEQ ID NO: 98450 - protein, 77 aa, Gossypium hirsutum
  Clone ID: LIB3165-033-P1-K1-B12.pep
GTGTDACNYSLRKIDTSVAGILGVAYSNRSVASDFIGSNIYRFLSTYAGSRYTILDHAYDALVVDAGRAWMEAPDGH

SEQ ID NO: 98451 - protein, 71 aa, Gossypium hirsutum
  Clone ID: LIB3165-033-P1-K1-B7.pep
NMGEAPEIQLQVPSEDEKLNEDSVEQQTNGNQSTTITQQRTYKWWLLMTIYTFFLLSGQSVATLLGRLYYD

SEQ ID NO: 98452 - protein, 108 aa, Gossypium hirsutum
  Clone ID: LIB3165-033-P1-K1-D10.pep
MVALERSLEAAMNARIIGSGSETMVLAHGFGGDQSVWDKVLPCLTKHYQVVLFDWTFSGAVKDPNLFDPLKYSSYDAFADDLIALLDELHLESSLVFVGHSMSGMIGC

SEQ ID NO: 98453 - protein, 111 aa, Gossypium hirsutum
  Clone ID: LIB3165-033-P1-K1-D5.pep
MGGNGKHRWIFSFYQRSNSSSSPKQSKNLPPHEFLCPISGSLMFDPVVIPSGQSFDRISIQVCRDLGFTPTLQDGSTPDFSTIIPNLAIKTTILAWCRDHHAQDPAPPDYS

SEQ ID NO: 98454 - protein, 51 aa, Gossypium hirsutum
  Clone ID: LIB3165-033-P1-K1-G5.pep
KTLLNHHQWQQKSLLDLIAGPTKQSSSFRIGQPADDGLNCFESPSYDASPV

SEQ ID NO: 98455 - protein, 57 aa, Gossypium hirsutum
  Clone ID: LIB3165-033-P1-K1-H12.pep
AWFRAKFRVKLVQKLVLAIQVLVQNLELTIELSCHRRCSSHSSLQIALKIAWSKIWP

SEQ ID NO: 98456 - protein, 99 aa, Gossypium hirsutum
  unsure (1)..(99): unsure at all Xaa locations
  Clone ID: LIB3165-033-P1-K1-H2.pep
SWLPTVKASTPDRRELEAIYNVEAMMPNPQDPERFIVCLATVVNRPPXERLELLRIRDTAERIRRGIIYRRAESPRCGVQYVSCNYLSIHLAQYSTLLI

SEQ ID NO: 98457 - protein, 36 aa, Gossypium hirsutum
  Clone ID: LIB3165-034-P1-K1-C6.pep
LTSSLAFLYRNFPLIPFLSSFCYVFRFRLLLSIRME

SEQ ID NO: 98458 - protein, 44 aa, Gossypium hirsutum
  Clone ID: LIB3165-034-P1-K1-D10.pep
SSIQRPMFLLNSESTLSGDSQMMPSKECRLRDMSIIMHVSSTRQ

SEQ ID NO: 98459 - protein, 80 aa, Gossypium hirsutum
  Clone ID: LIB3165-034-P1-K1-D3.pep
PQPFPLHTVFQHAPIHETLRRHRSIQQSSLVCFLWHDQVHTLYNPPLVVHNFESVSSLSLHRHSVIKKKNEKKEYLNMNT

SEQ ID NO: 98460 - protein, 116 aa, Gossypium hirsutum
  unsure (1)..(116): unsure at all Xaa locations
  Clone ID: LIB3165-034-P1-K1-H6.pep
HAYRSFCITCSXIVPSNADNRQCACLHGSSSATQFAHREPASVLRHQAPPMVAPPSHGTQDLASVFPTSLMEGPTTDPSLLFARRMCGRECXMHCTVWPXXLGKEKKFETXLIPRP

SEQ ID NO: 98461 - protein, 82 aa, Gossypium hirsutum
  Clone ID: LIB3165-034-P1-K2-C6.pep
LQQWRCDRVLKVGLSCTLVLTLSSLCRAFAWKDASWAVRLGYVRVLIIVDVILRDSALRISIDSLHKLVLFCAVGIAIPAVY

SEQ ID NO: 98462 - protein, 52 aa, Gossypium hirsutum
  Clone ID: LIB3165-034-P1-K2-D10.pep
LIHSNSISRHLSQKAHYPSIVGGCQAGDGDYLIPPLSYTHPQHFNKLSPLKI

SEQ ID NO: 98463 - protein, 44 aa, Gossypium hirsutum
  Clone ID: LIB3165-034-P1-K2-D2.pep
SFPFPTAFPLLTNRALRMNSPPLFLNPCLSPNLLALLYPTSQLN

SEQ ID NO: 98464 - protein, 78 aa, Gossypium hirsutum
  Clone ID: LIB3165-034-P1-K2-D3.pep
SCTIFCMNLSGAIVPWKNTVWFVAFGTTLCAPSHNPPLVVDNLSLVSFVSLHRHSVLKKKNVTKEYLNMDTSSVRMRG

SEQ ID NO: 98465 - protein, 60 aa, Gossypium hirsutum
  Clone ID: LIB3165-034-P1-K2-H10.pep
YFSTRSADRYAILEWPGRLVMIMCVVPVGRIQHAASELSKSVSLNDRMERRLCVIELDEW

SEQ ID NO: 98466 - protein, 76 aa, Gossypium hirsutum
  Clone ID: LIB3165-034-P1-K3-C6.pep
IAPAMHLTSSDLGRFELYLGFNIVKRVQRFCMERMHHASAVGYVCVLIIVAVMLRDSALRFDIDSLLKLALLCVWV

SEQ ID NO: 98467 - protein, 56 aa, Gossypium hirsutum
  Clone ID: LIB3165-034-P1-K3-D3.pep
CFLWNDQVHSLHNPTLVVHNLEPVSSVTLHKHTVIKKKNEKKKNVNMDTSTVRTRG

SEQ ID NO: 98468 - protein, 79 aa, Gossypium hirsutum
  Clone ID: LIB3165-034-P1-K3-H10.pep
PLVRVVYTQGAVHRISQRCRLVQLGCRLLMPAYWHYSRYDNRPAWPFEERRALCRPSAELDRTVRGTAMSPAQRVTCGQ

SEQ ID NO: 98469 - protein, 60 aa, Gossypium hirsutum
  unsure (1)..(60): unsure at all Xaa locations
  Clone ID: LIB3165-034-P1-K4-A2.pep
WISLMKWVKKPAILFWRHCGWDIKWLIEKVFVGIKVRDKEKELPLDYLTRXFIISDRPVE

SEQ ID NO: 98470 - protein, 95 aa, Gossypium hirsutum
  unsure (1)..(95): unsure at all Xaa locations
  Clone ID: LIB3165-034-P1-K4-C6.pep
TKRPFLCERKLHMAYSILINSTKPKPTAHNRASLGRESVEKLSAKTLRMTSTNXELREQRASRKAEELSFHANGLQRLETVKTKEQLKRTLYNRS

SEQ ID NO: 98471 - protein, 64 aa, Gossypium hirsutum
  Clone ID: LIB3165-034-P1-K5-C6.pep
QNELKKGINVKSQYQIPKHDLNFNEHANIANRTALVPSFHAKPLQTPETVKTKVQLKPTLFTRS

SEQ ID NO: 98472 - protein, 107 aa, Gossypium hirsutum
  unsure (1)..(107): unsure at all Xaa locations
  Clone ID: LIB3165-034-P1-K5-H10.pep
HSSDLITHNLPSMASFNDADFYSADATFXSLPNGTTHVMIKSLPGHSKIAYLSADLVLKYIALYDERAGXPHSALHVDXESDSGWTETSREDFNNARVAANTDCIQH

SEQ ID NO: 98473 - protein, 155 aa, Gossypium hirsutum
  unsure (1)..(155): unsure at all Xaa locations
  Clone ID: LIB3165-034-P1-K6-A11.pep
PCAHPRLXPAPRLTPWXXLLFNAAXXKXXPXXXFXXVTXXEGXNPTTHYPSXXARAMXAAXSAXMLCQXXWPPPTLGNXXKXSRTXLXXTSXPILPXPCPVGLSGRVDYXXLRFQXMGSLRLGXIRXLEGRGIPWPPRXIPLEXYXHVPYXXDAT

SEQ ID NO: 98474 - protein, 53 aa, Gossypium hirsutum
  Clone ID: LIB3165-034-P1-K6-C6.pep
IDATSVVGLTLFAYSFKLSSSSAFLHRNFTLMPFRSSFCYVLRTRLPPFIRME

SEQ ID NO: 98475 - protein, 91 aa, Gossypium hirsutum
  unsure (1)..(91): unsure at all Xaa locations
  Clone ID: LIB3165-034-P1-K6-H10.pep
HATEAITHKVPTIVSVNGADFNSADATFXSRPNGTTHVMINSLPVHFKSAGLSADCGLKYIALYEEXACQSHSALHGDYEADSGLTVIARE

SEQ ID NO: 98476 - protein, 120 aa, Gossypium hirsutum
  Clone ID: LIB3165-036-P1-K1-A10.pep
MAAHYINLRVICLYVSLSFIFTKQVQADNYIIHMDHSAMPKAFAGRQSWYLATLSSLSANLRANTNSTIPTAELLYSYNHVIQGFSASLTLAQLEALKNSRGYVSSIRDKTVKLDTTYSF

SEQ ID NO: 98477 - protein, 122 aa, Gossypium hirsutum
  unsure (1)..(122): unsure at all Xaa locations
  Clone ID: LIB3165-036-P1-K1-A8.pep
PRFRISHLSSETGDYNPCELSTWLESMLXNLTLPPLLILLALLGRLQRQLDDSFLVPAESSTLTTLDFDNINRKHQKSGPQIFEEAFCSDYDPKATPGKAIYSQKTQPPTHDSLFSSTPTNV

SEQ ID NO: 98478 - protein, 107 aa, Gossypium hirsutum
  unsure (1)..(107): unsure at all Xaa locations
  Clone ID: LIB3165-036-P1-K1-A9.pep
LIVGGKPKXRWYLREHGWPSSTIFEXPPESDEERAKLIDTLQDWKTQRYKEIIKSGTVEPRPGVLRLMDEAKAAGKMLAVCSAATKSSVVLCLENLIGMERFKGLDC

SEQ ID NO: 98479 - protein, 131 aa, Gossypium hirsutum
  Clone ID: LIB3165-036-P1-K1-B3.pep
GPLLKSGQLFIDQADSIGVRSAKPYFATPGATVHGHYGETLYEGDTLGTSIYAKSRSGDITQGLTKVEQVLEERSIDSISVNLEKRIEGWNECITRILGIPWGFAMGAELTIVQSLLSLVNKIQKVYRSQG

SEQ ID NO: 98480 - protein, 80 aa, Gossypium hirsutum
  Clone ID: LIB3165-036-P1-K1-C2.pep
ATTRPSTPQMLPSIFHCFGSFINEDWFIVPKDEYIYLVIYYSENCWNEQLASDFPSNFLSFFMLEPFFSKKAGISCKWED

SEQ ID NO: 98481 - protein, 64 aa, Gossypium hirsutum
  unsure (1)..(64): unsure at all Xaa locations
  Clone ID: LIB3165-036-P1-K1-C4.pep
DPHRKRCALFINYLDAGVFLMXGTTQWGRFNHIVNPTXTNTSHDPTNVQLPGIYNTKQIHIFPI

SEQ ID NO: 98482 - protein, 105 aa, Gossypium hirsutum
  Clone ID: LIB3165-036-P1-K1-C6.pep
VAILSISSVESGRPPFACDPRNGLTRSLRFCRTNLPIHVRVRDLLGRLTLPEKIRLLVNNAIDVPRLGIRGYEWWSEALHGVSNVGPGTKFGGSFPGATKLPQVI

SEQ ID NO: 98483 - protein, 43 aa, Gossypium hirsutum
  unsure (1)..(43): unsure at all Xaa locations
  Clone ID: LIB3165-036-P1-K1-C8.pep
NELSQSSFKRIGVSSXLGGDKCYDSDRHISLGXWRKXMGMLSE

SEQ ID NO: 98484 - protein, 79 aa, Gossypium hirsutum
  Clone ID: LIB3165-036-P1-K1-D1.pep
YWFNHPFLIPNTQFQLKDRVQLPLNRLWFLLRCDRSGFWVYLQELEGGGYLLGREGGWILNYLGLDLGGGILLWRFWFF

SEQ ID NO: 98485 - protein, 123 aa, Gossypium hirsutum
  unsure (1)..(123): unsure at all Xaa locations
  Clone ID: LIB3165-036-P1-K1-E10.pep
XIXXKQXFPGXPEXSLDVSKLQDNRDVGHAILESYSRILESLAFNVMSRIEDVLHADSLAQTSSPQKSETSPSSSDEDALRVSSSDTPTLSDFMGWGIASRRRSSTDLEIYFKGDNDKKLAKP

SEQ ID NO: 98486 - protein, 126 aa, Gossypium hirsutum
  Clone ID: LIB3165-036-P1-K1-E11.pep
PTLPATGFFTRSGGTSNSNSLPNPRLQPTSRGPKMNANTNSSTPTPTQTRNQPATAAPTPFNTKDNREDHTYDQANEAAKKPLKEQGNEKGASTSAAAPEAEQVTTDAKTDASADQSEHRLIHGKT

SEQ ID NO: 98487 - protein, 96 aa, Gossypium hirsutum
  Clone ID: LIB3165-036-P1-K1-E6.pep
LHLKTERFYDNRERKGPVRITHSQLLSTQPVSYMGGEPTTFTTLDVGHPRAGSVIPNLIFNRKQRELLIHHHGMYTFQKFYGVRNPTLVVGKATPL

SEQ ID NO: 98488 - protein, 110 aa, Gossypium hirsutum
  Clone ID: LIB3165-036-P1-K1-E8.pep
HANFPKYRGVICGGNIHKGSHIPKWHKNDTYISAATSGASFCGSKTEIGIYGIAHHNATANLSEKRIARNPVNAGPNRNNAKLTHAATTSAPEVSEKVEADRFRPIAQRT

SEQ ID NO: 98489 - protein, 125 aa, Gossypium hirsutum
  Clone ID: LIB3165-036-P1-K1-F11.pep
WCTADCGWITGHRYVTYGPMLNGATVLLYEGAPSYPDPGRCWDIVDKYKVTIFYTAPTLVRSLMRDGDEYVTRYSRKSLRVLGSVGEPINPSAWRWFFNVVGGSRCPISDTWWQTETGGFMITPL

SEQ ID NO: 98490 - protein, 127 aa, Gossypium hirsutum
  unsure (1)..(127): unsure at all Xaa locations
  Clone ID: LIB3165-036-P1-K1-F8.pep
NLLLTANLMSVKXADFGVAREESVTEMMTAETGTYRWMAPELYSTVTLRRGEKKHYNNKVDVYSFGIVLWELLTNRMPFEGMSNLQAAYAAAFKQERPSLPKDISPDLAFIIQSCWVEDPNMRPSFS

SEQ ID NO: 98491 - protein, 120 aa, Gossypium hirsutum
  unsure (1)..(120): unsure at all Xaa locations
  Clone ID: LIB3165-036-P1-K1-H9.pep
TRKKRRRKERRXXXTXPXXXXKXXXKPKXETQXXPKXXXRXXXXXPXSXPPXXDKXXXTPQAXXAXXXXXXNPXXXPPXXXADXAGXTXXKEXKQXAKREKQQXKKXEXPXKPNAPRSAP

SEQ ID NO: 98492 - protein, 76 aa, Gossypium hirsutum
  unsure (1)..(76): unsure at all Xaa locations
  Clone ID: LIB3165-037-P1-K1-A12.pep
MXCRXVFKVALGLGIPAHPIHXIGXXETNXKTCEGVXXFDPXIVRKEKPVXQSQGSXGCQLTNIAHVLGPCPLCLP

SEQ ID NO: 98493 - protein, 140 aa, Gossypium hirsutum
  unsure (1)..(140): unsure at all Xaa locations
  Clone ID: LIB3165-037-P1-K1-A6.pep
RPTRAAHAVRPRRPFYLLPXFHGAACSSGCQSXTSIPSLSTXXLHLXXSFXLRYPLRRQRDPTADXXSLKGRXLKGTXXPSQAISISQTAAQRNLFXRRGDGQPQTPFPSPGLNQIRXLLAALREPPXGKDQLAPSPSTY

SEQ ID NO: 98494 - protein, 95 aa, Gossypium hirsutum
  unsure (1)..(95): unsure at all Xaa locations
  Clone ID: LIB3165-037-P1-K1-B9.pep
PAIILLAEKGFPSCIWETQVFPTHFSTIQTNTSGYQWLIRXTAQGSLISXXSLKNNRNVGAHTLLTXXLVMXRYLAWTLPHSLXWKXXGPCSPIX

SEQ ID NO: 98495 - protein, 63 aa, Gossypium hirsutum
  Clone ID: LIB3165-037-P1-K1-C10.pep
HYFLSHPICWKTISIFVWRSAVRFPRVLKVLFVWFALGLLTHSLCYNIAAALHLLLVVGLPHL

SEQ ID NO: 98496 - protein, 64 aa, Gossypium hirsutum
  Clone ID: LIB3165-037-P1-K1-C11.pep
HASEFAFILATATPSNVGGFATGHINIPDMVKTGIPLKTAGIVILSLLMPTLGVYVFGLNGGVQ

SEQ ID NO: 98497 - protein, 134 aa, Gossypium hirsutum
  unsure (1)..(134): unsure at all Xaa locations
  Clone ID: LIB3165-037-P1-K1-D11.pep
VPSPLKXLSFFFFXLLLNLEGGNGPPYHQTPSLEVSSSAANTRKITPPTPSTSRFSLPFTFKSQFNALVVGGRPLLGGFNHSSVPRAVATPNSVLSEQAFEGLSLHQEDDDVYDSEGEVGSGFESESTLDDELD

SEQ ID NO: 98498 - protein, 128 aa, Gossypium hirsutum
  Clone ID: LIB3165-037-P1-K1-D7.pep
MTPFSFLPCASSTTSPDAFLLRYPHLRLLKCRHYEPQLPKIENLMLRPFQVPTRPYLPILSLRNPRRTHPCANISSFAEAEGGKEQNDEAIHLGTRQEDAKPNEEYLPGMAQAFNISSRTASAIAIFI

SEQ ID NO: 98499 - protein, 47 aa, Gossypium hirsutum
  Clone ID: LIB3165-037-P1-K1-F7.pep
RRYVTSNFFFHADKSARAMVLCLCEALADAPVATAVDTEAATEATGA

SEQ ID NO: 98500 - protein, 96 aa, Gossypium hirsutum
  Clone ID: LIB3165-037-P1-K1-G12.pep
NIRQFFTTYFTPSKLTSIIYQTLSLNRLLTVSMPKTISCQCLKLTALLNMFQLHHHHYHSSTDAPPTAINRSYQMLKLNCADSPLPFIPVYYKHPT

SEQ ID NO: 98501 - protein, 95 aa, Gossypium hirsutum
  unsure (1)..(95): unsure at all Xaa locations
  Clone ID: LIB3165-037-P1-K1-H7.pep
WLTENSCDNPLLTDMCXXCRTSQNGSHVTKSTHAKRSQASXCKFEVTFLFTLSLVKVVTILQEKRDTPPPSEKSAKQRNXFATYLPTHIASHRAA

SEQ ID NO: 98502 - protein, 55 aa, Gossypium hirsutum
  unsure (1)..(55): unsure at all Xaa locations
  Clone ID: LIB3165-038-Q1-K1-A9.pep
NVILLYCFRKHITFWRGYSXLITESSTYLIGCVRNYVWMNSEQLINSYTLFGMYS

SEQ ID NO: 98503 - protein, 136 aa, Gossypium hirsutum
  Clone ID: LIB3165-038-Q1-K1-E10.pep
PTRPPTRPPTRPLWLQDHIDEKDLMASTARLMEKPSHEQQQQQQVLKCPRCDSSNTKFCYYNNYSLSQPRHFCKACKRYWTRGGTLRNVPVGGGCRKNKRVKRPAASATGGASPTSGANIANTPSQPQMDVSFNLK

SEQ ID NO: 98504 - protein, 123 aa, Gossypium hirsutum
  unsure (1)..(123): unsure at all Xaa locations
  Clone ID: LIB3165-038-Q1-K1-E12.pep
PRVRFEESFVLLWIVSDNGGXKCVWKHSNNQWHYDYGLLVSEIANKYTLVKNLDKAVNLKDGTTQLQLETLLQGGLXYGGAYLKYLHPQDAAWKPTEFDNEFSYSIMFGPDKCGATNKVHFIL

SEQ ID NO: 98505 - protein, 128 aa, Gossypium hirsutum
  unsure (1)..(128): unsure at all Xaa locations
  Clone ID: LIB3165-038-Q1-K1-E7.pep
ITKNYVTLSNIKDPIMSDMGGRKSQGKSLECELVFAKMGIKPIMTSAGXLASGNAIKPAKXITLLYRADADIINKGKMRNLFITXLHARANRVARTTPYTXNNQMVNTTLINMACYLTNVNIPCMYNK

SEQ ID NO: 98506 - protein, 50 aa, Gossypium hirsutum
  Clone ID: LIB3165-038-Q1-K1-G11.pep
KIGKTGRFPHVVMRTISGYVQISCLRNSNARQIPVLAERTSVSVSTGAGW

SEQ ID NO: 98507 - protein, 123 aa, Gossypium hirsutum
  Clone ID: LIB3165-038-Q1-K1-G12.pep
SCVFFNSFFFSGNIYNIPLFHINFILIYIENCTIRNWDQFETNQKLFGVKSTFNEELYTTKLERGPQTRELEKEAMRIAREIEGEETRDLHLAEERGLNLHDNFDIDEEMRYSSVYKGRGLDD

SEQ ID NO: 98508 - protein, 107 aa, Gossypium hirsutum
  unsure (1)..(107): unsure at all Xaa locations
  Clone ID: LIB3165-038-Q1-K1-G3.pep
LPVLYHCCSDMLRIWLKIVCTDGYTEDHVWPYLLHETGDVITRSDVGRIYQDRIRLCXLLDDQLVLTLNLFRTVYIPRSMFSPTNTYWEMKMKHTVIPESFYALTNR

SEQ ID NO: 98509 - protein, 118 aa, Gossypium hirsutum
  Clone ID: LIB3165-038-Q1-K1-G4.pep
VSYGGGSTAGGIQSWHMDDLLGLTGLNQSFGYMDNELSKADSGKCGDSDGSPFLRPAEEEVFDDEYMGQVPESHWAVPQVPSPPTASGLYWPKDSHNQSDSAVFVPDISWSSVENPFH

SEQ ID NO: 98510 - protein, 37 aa, Gossypium hirsutum
  unsure (1)..(37): unsure at all Xaa locations
  Clone ID: LIB3165-038-Q1-K1-H10.pep
RPRVRGRVGRNCKPKLVXLAYIHSSKKNTFLIPKLKP

SEQ ID NO: 98511 - protein, 53 aa, Gossypium hirsutum
  Clone ID: LIB3165-038-Q1-K1-H11.pep
PRVRFGTTQVTDFFLFHYWIYLFSIETRKLISNFGAYPYQFLFNYFFYNTPSP

SEQ ID NO: 98512 - protein, 73 aa, Gossypium hirsutum
  Clone ID: LIB3165-039-Q1-K1-B12.pep
PLISLVIYPDIHPPSQAPSQARISAVLSVFIILLIIILSEFLSLLPALRPVPRVLTQLDKQHFDARSYARSSS

SEQ ID NO: 98513 - protein, 83 aa, Gossypium hirsutum
  Clone ID: LIB3165-039-Q1-K1-B8.pep
GLGPTKADEKPRVVVLGSGWAGSRLMKGLDPKLYDIVCVSPKNHMEYTPLLASTCVGTLEFRYVAEPIYRIQPSICSAPGSYF

SEQ ID NO: 98514 - protein, 67 aa, Gossypium hirsutum
  Clone ID: LIB3165-039-Q1-K1-C12.pep
WEGENKVNKKIVVDVGSDKKMGLGCWGFKKGLVEIVDDGTEGEGGDGHGGGRESLAEGETRIAICTA

SEQ ID NO: 98515 - protein, 128 aa, Gossypium hirsutum
  Clone ID: LIB3165-039-Q1-K1-D8.pep
MALANPLSPPSSCTKGPGPVIPATPLLSFLVRVQETALQTYGKSNFDPKHYVDLPLKSNLSTTVEAFDKLPKTEDGSVSVKDFEAFIGKYFTDAGDDVVYAEPVDFVPEPHGFLPKVESPEVRGWALE

SEQ ID NO: 98516 - protein, 90 aa, Gossypium hirsutum
  Clone ID: LIB3165-039-Q1-K1-D9.pep
PTLTEPWTATSIAHSLRILAAIAGSRADDSADYEMSVENALKLVVVFENASFDDILDAMNSTEDSIEDDQKAVDQAVAEYDMLLMLSLMQ

SEQ ID NO: 98517 - protein, 137 aa, Gossypium hirsutum
  Clone ID: LIB3165-039-Q1-K1-E4.pep
LKVFKEQGLVLTALLGLSAFFSMAETAITTLWPWKVRELADKDSEDGVFKMLSSDVTRFLTTILIGTTVVNIGATALVTDAATAIFGEAGVTAATGVMTVAILLLTEITPKSIAVHNPTEVARFVVRPVAWLSVILY

SEQ ID NO: 98518 - protein, 75 aa, Gossypium hirsutum
  Clone ID: LIB3165-039-Q1-K1-F5.pep
QWSTSLPRKTRRVFVYQPKLQKAPTLVPGGVLVNVQENRPKSGTRPLELLIVGAEKLAPWINPTLRAANTWRPWV

SEQ ID NO: 98519 - protein, 127 aa, Gossypium hirsutum
  Clone ID: LIB3165-039-Q1-K1-G1.pep
MAAAICSASSSPTSHCNVFLGIDVGTGSARAGLFDEEGKLLGSASSPIQIWKEGDCIEQSSTDIWHAVCSAVKAACSLANIDGEQVKGIGFAATCSLVAVDADGSPVTGSWSGDSRRNIIVWMDHRA

SEQ ID NO: 98520 - protein, 93 aa, Gossypium hirsutum
  unsure (1)..(93): unsure at all Xaa locations
  Clone ID: LIB3165-039-Q1-K1-H11.pep
WEKKKEDRXGVXIGILRKENVKVDDVVKIVEKXXGXXIEFXGDXRXRVYDEEVRKWIGEVGVNGVGKKXVXWREGGKYFEKXKMIIEKVLEYG

SEQ ID NO: 98521 - protein, 125 aa, Gossypium hirsutum
  Clone ID: LIB3165-039-Q1-K1-H4.pep
MVGALSVVDSHTGPCLCSTSMNLKTGGELVSQMKRKQGVGRAGWLELGSSFVDSCHDWRLSSKMIPGVVNKKSSRKARTLVVVNELGGQYEETFGDVKTQLVNYFTYKAVRTVLTQLYEMNPPKY

SEQ ID NO: 98522 - protein, 140 aa, Gossypium hirsutum
  Clone ID: LIB3165-040-Q1-K1-B10.pep
PIPGSGMQLTYIAHVWDLSSMLTLAVEKPEAACCNIFNCVSDRAVTLDGMAKLCAAAAGLPVEIVHYDPKAIGIDAKKAFPFRNMHFYAEPRAAKDILGWKSTTNLPEDLKERFEEYVKIGRDKKPMQFEMDDKILGSLK

SEQ ID NO: 98523 - protein, 67 aa, Gossypium hirsutum
  Clone ID: LIB3165-040-Q1-K1-B2.pep
GFFCQKTRLQKTKPKPPPRFHGPFKEGKQSRAPRKNPKRHRIPPDSWSSSLLRFLGTINNTFKTKRS

SEQ ID NO: 98524 - protein, 141 aa, Gossypium hirsutum
  Clone ID: LIB3165-040-Q1-K1-D2.pep
PSSPGETLCAAVSASAWVEPHGKCTIAFSLAWSSPKIKFLKGSSYHRRYTKFYGTSERAALNLAHDALTNYKRWEDEIEKWQSPILNDQRLPEWYKFTLFNELYFLVAGGTVWIDSSLPSTNVKNDQDSPEDAQRVDVKVT

SEQ ID NO: 98525 - protein, 72 aa, Gossypium hirsutum
  unsure (1)..(72): unsure at all Xaa locations
  Clone ID: LIB3165-040-Q1-K1-D5.pep
PRVRDSGKEALRSDFRMGKVRIRVSTLETGKVYKNTYPLVMLGNSRVQKMGEXEVAVRFVRAASNTRIFLQR

SEQ ID NO: 98526 - protein, 65 aa, Gossypium hirsutum
  Clone ID: LIB3165-040-Q1-K1-D8.pep
MASVGMVPASGSRESKTARGEKLPEEINDMKIPNDIHTEATFLDENETQTRHIIATTIGGTNGQP

SEQ ID NO: 98527 - protein, 73 aa, Gossypium hirsutum
  Clone ID: LIB3165-040-Q1-K1-E10.pep
GGQSCHLNMCDQHQDMLIRPVMTGLAPGFCGDCRALLLMGAWPLHRRRCIGGALKRRPFLGVVDSAIKLVRTP

SEQ ID NO: 98528 - protein, 136 aa, Gossypium hirsutum
  Clone ID: LIB3165-040-Q1-K1-E11.pep
FSVAKALNMICSGYVWIAADWLPSYLDSKDAVDSNTMNILQGVIALRHYTPDTDLKKSFMSKWNTLKYKGSAGHAGFNSYALYAYDSAWLAAHALDGFLNEGGNLSFSYDPKLHDTNGSMLHLASLRVFNGGEQLL

SEQ ID NO: 98529 - protein, 67 aa, Gossypium hirsutum
  Clone ID: LIB3165-040-Q1-K1-E12.pep
SNTTNIYHGVIALRHHTPDTDLRKSWMTTWISIIYYQDELVSQVSILYTLNSFNTFKGVCTWRGGGG

SEQ ID NO: 98530 - protein, 88 aa, Gossypium hirsutum
  Clone ID: LIB3165-040-Q1-K1-F5.pep
GSKFKQHIRMSPLAFVLTLSCYRRWPSRFSTPYSHNLLVLFSSTATTITPPNGNESPSSGPAPPPIRVALTESTGRAVFATRRIGAGD

SEQ ID NO: 98531 - protein, 49 aa, Gossypium hirsutum
  Clone ID: LIB3165-040-Q1-K1-G11.pep
LKLPEPLRVFLLQRSELRRAQLRPSAETSSQVNGLPTLKTAHPDSRTSG

SEQ ID NO: 98532 - protein, 140 aa, Gossypium hirsutum
  Clone ID: LIB3165-040-Q1-K1-G8.pep
HGIVHRAMMGESWTGQFAVKNKMGERFSAVATNTPFYDDDGSLVGIICVSTDTRPFQDMKVALSAEKQADGDSAFSWSKNAVSAKLGLDPQQPLQAAIASKITNLASKVSNKVKSKIRTGENCSDREGGSGDSHYSDHGL

SEQ ID NO: 98533 - protein, 36 aa, Gossypium hirsutum
  Clone ID: LIB3165-040-Q1-K1-G9.pep
RRLLLIARICPMFTPNRNMPCSIFLNLPLLNWTLYN

SEQ ID NO: 98534 - protein, 134 aa, Gossypium hirsutum
  unsure (1)..(134): unsure at all Xaa locations
  Clone ID: LIB3165-040-Q1-K1-H12.pep
LHHDCRSRILHLDVKPENGLLDESYRAIVADFGLSKLIGKDESGVITTLRGTRGYLAPEWLLQHGVSEKSDIYSYGMVLXEMIGGQRNVSLIENGIDRSQRKWNFFPKILRKKLKEGKLIEAIDQRLVEAGGGG

SEQ ID NO: 98535 - protein, 83 aa, Gossypium hirsutum
  unsure (1)..(83): unsure at all Xaa locations
  Clone ID: LIB3165-040-Q1-K1-H9.pep
NGFSGGNYHFFRSDGPALGASTEIAPDEGLLLRAWPHPHAIQLVQNERMETVLXHQVIKEAVQHQQAFYEKPDNTIVTNNTHN

SEQ ID NO: 98536 - protein, 60 aa, Gossypium hirsutum
  Clone ID: LIB3165-041-Q1-K1-A1.pep
KKKPYLSTIYYFPIHPISPKFCCDCSGFVSLKKRLPLVIDGLHHLLFEEMGKGKLLFFLL

SEQ ID NO: 98537 - protein, 69 aa, Gossypium hirsutum
  unsure (1)..(69): unsure at all Xaa locations
  Clone ID: LIB3165-041-Q1-K1-A12.pep
VNPAHDQHWWVGNQTLGVLGFTMIARANIEGSKSKVAMNDWXXQASYTCANLFDSSSLKIRRYKGLIGH

SEQ ID NO: 98538 - protein, 54 aa, Gossypium hirsutum
  Clone ID: LIB3165-041-Q1-K1-A5.pep
TMAGWLTYTTQSLNSTWSISTPAKTHLRFHQKEVVFYRRSNKRSGSGSGSNNGP

SEQ ID NO: 98539 - protein, 57 aa, Gossypium hirsutum
  Clone ID: LIB3165-041-Q1-K1-B4.pep
TKAAVSISVAGSITGGLSSFSKVGIHTPHRVLGLKRVASFNFFSGSGLALKCPSFNN

SEQ ID NO: 98540 - protein, 140 aa, Gossypium hirsutum
  Clone ID: LIB3165-041-Q1-K1-B8.pep
MALFKPAFLNHLKMLAHPRHRSPPSFIALRCLSFSTPEEAAAERRRRKRRLRVEPTLSFAQRSQQQAQQVAPPKPIQNPNAPKGPEPVTALTGNRLNLHNKILKLIRENDLDEAALYTRHSVYCNCRPTIYTVNAVLNAQ

SEQ ID NO: 98541 - protein, 103 aa, Gossypium hirsutum
  Clone ID: LIB3165-041-Q1-K1-C2.pep
MLTLTSASSALTLFPECKTQRRRFTISAAADDKFPSFLPKQMEEIKDPFARKLATRIERLPVNASFSEKSIMSSCVKPLIQSSQNPVVLLHGFDSSCLEWRYT

SEQ ID NO: 98542 - protein, 31 aa, Gossypium hirsutum
  Clone ID: LIB3165-041-Q1-K1-C4.pep
FRQPGHLVLIALPNVNIQTTEIMAIINWKRG

SEQ ID NO: 98543 - protein, 94 aa, Gossypium hirsutum
  Clone ID: LIB3165-041-Q1-K1-D11.pep
MDHERAPILRSKDQKKIEMPLALVSEESNIILIPAELKCFSVSTSRQENITLESKERQKSASQLSGLIIFYLVVMLVEIVGGMKANSLAVLTDA

SEQ ID NO: 98544 - protein, 80 aa, Gossypium hirsutum
  unsure (1)..(80): unsure at all Xaa locations
  Clone ID: LIB3165-041-Q1-K1-D2.pep
MASTTMDVSCPSFTGKAGNFSPXTPEIQGTGRVFMMKTTEPVTSGSPWDSPDRVKDLGPLSGEPPSYLTSEFPADYGCDT

SEQ ID NO: 98545 - protein, 56 aa, Gossypium hirsutum
  Clone ID: LIB3165-041-Q1-K1-D5.pep
FIMASSTLSPAAPWQLFSRKRGMFLPSQAFFGKTTRTHFVKNQKGIRVTFQAPYIP

SEQ ID NO: 98546 - protein, 138 aa, Gossypium hirsutum
  unsure (1)..(138): unsure at all Xaa locations
  Clone ID: LIB3165-041-Q1-K1-E1.pep
VDYGEQHSKTCGHSRFGRIYEQGHYPQWDENHPIHFVGHSTGAQVVRVLQQMLADKAFEGYENTSENWVLSITALSGAFNGTTRTYLDGMXLCRLGVIIYDWLDIPLLKAYYNFGFDHFNLSWRKVGLWGLGDCLLGN

SEQ ID NO: 98547 - protein, 59 aa, Gossypium hirsutum
  Clone ID: LIB3165-041-Q1-K1-E12.pep
ELTTICFISTVSFLYSFISTHCLSFFINCSVPKNRTLFLTLFILLHLETIFLLKSTFFF

SEQ ID NO: 98548 - protein, 95 aa, Gossypium hirsutum
  Clone ID: LIB3165-041-Q1-K1-F12.pep
PLVRDGKINHFPHYKIYLRRCFITITTTLQLLQSLLCHTPFQISFRSTLSSLLLCYHQYHNHLNAIFIAAAFTPSSYFMWTVSFNISHSISSSIF

SEQ ID NO: 98549 - protein, 45 aa, Gossypium hirsutum
  Clone ID: LIB3165-041-Q1-K1-F2.pep
QEGWPPIVPPCTSTEHLTCHIETELSWGRETTTHFRLTHGLRHGA

SEQ ID NO: 98550 - protein, 136 aa, Gossypium hirsutum
  Clone ID: LIB3165-041-Q1-K1-G2.pep
FMERESSYFLSREHNNRSMLVKANVENLPVAGAETVSEVACMGNEVGRLSSFSGNANAIIEESCQQIPRTSTRVTVGEDDCDSIEESCNEIESASESVPEILDNDLQFFESIGIKMDGRCSSSVIGSAEPNGQSNN

SEQ ID NO: 98551 - protein, 91 aa, Gossypium hirsutum
  Clone ID: LIB3165-041-Q1-K1-G4.pep
GIGPIGGHVSLPLVLKSLNFLQAFLEVAILLYSLWMWDQWNHPVPIFPPPSAPSPDSSLPVLFNSRPGVGGARAAKYSMISCPLGLIMESA

SEQ ID NO: 98552 - protein, 72 aa, Gossypium hirsutum
  Clone ID: LIB3165-041-Q1-K1-G7.pep
TQKHKKMAARVLTLAKLNAKRLIINSTKMSSPTKHNPKDLLLSLHAQPPQRPNHVKTSRQLKHYLLHSLTSQ

SEQ ID NO: 98553 - protein, 79 aa, Gossypium hirsutum
  Clone ID: LIB3165-041-Q1-K1-G8.pep
MVAFGKKLKESQIQEWQGYYINYKLLKKKVNRYAQQLEIGAQDHHYVLKDFSRMLDSQIEKIVLFLLEQQGQLANRLCD

SEQ ID NO: 98554 - protein, 47 aa, Gossypium hirsutum
  Clone ID: LIB3165-041-Q1-K1-H1.pep
LLATTKHHTKEEKPTDNIRSVSDTSYHNSEQDFGFMILSELSEEYQQ

SEQ ID NO: 98555 - protein, 47 aa, Gossypium hirsutum
  Clone ID: LIB3165-041-Q1-K1-H12.pep
RRGLKRLLFLVQITVGEGVLEFEKAARRRGQCLEKRNLERERIGSVF

SEQ ID NO: 98556 - protein, 118 aa, Gossypium hirsutum
  unsure (1)..(118): unsure at all Xaa locations
  Clone ID: LIB3165-041-Q1-K1-H3.pep
SSIWENKKNYCGECLLFWMYIQISPFLFWEFRLFLYCYLQLNQLLLLSYGVLQTLRSCIEKEASLFLQNELNNTXSKKLVSFAPRCSGSTNSSDSKDQTKTPFGYTRKGCLLIGLESL

SEQ ID NO: 98557 - protein, 52 aa, Gossypium hirsutum
  Clone ID: LIB3165-041-Q1-K1-H4.pep
WELGFLDKFVQSVFVLTLLPPVFSRQSWNKTPCLIGISANNKGVGVVLQLLL

SEQ ID NO: 98558 - protein, 138 aa, Gossypium hirsutum
  Clone ID: LIB3165-041-Q1-K1-H9.pep
MAIPEVNRQQARGRPTASSTRPPVRARIRLRQLLRVTSVACGIQFGWALQLSLLTPYVQELGIPHQWASIIWLCGPLSGLLVQPLVGHMSDRCTSRLGRRRPFIVAGAVSIIVAVLIIGHSADIGWLFGDTEASRPRA

SEQ ID NO: 98559 - protein, 69 aa, Gossypium hirsutum
  unsure (1)..(69): unsure at all Xaa locations
  Clone ID: LIB3165-042-Q1-K1-A5.pep
XXFXXXXTKHYHLHYTPKPNNNIHQVPCQPWLLTSSSSYIYNLLAPIKSTAESRVQQQKHTQSPMMAKE

SEQ ID NO: 98560 - protein, 89 aa, Gossypium hirsutum
  Clone ID: LIB3165-042-Q1-K1-B10.pep
KFIQFPIFFQYPQLKIHQIISQIALNKLELNHFKIQIPIYNLQNLKFQEKALRFHQARDFHQEVPKNQEDFDSDRCIEREREKLEFFKH

SEQ ID NO: 98561 - protein, 75 aa, Gossypium hirsutum
  Clone ID: LIB3165-042-Q1-K1-D1.pep
VYDARRVRKATTGMTGYVAVNRTYKRRLLILGRRVSLLLGTTNNYVYYMFTPQWGTRSSDYTVMRRVYRTILIAL

SEQ ID NO: 98562 - protein, 61 aa, Gossypium hirsutum
  Clone ID: LIB3165-042-Q1-K1-D10.pep
SSFWKNDAVLWSWIITYVLTIDAHACCTRLFNLVEVTVPSLSFSAAAPISWTNFIDSDSRL

SEQ ID NO: 98563 - protein, 99 aa, Gossypium hirsutum
  Clone ID: LIB3165-042-Q1-K1-E4.pep
FPSKASLFSSLFQLPIFAKQTKKSKNGRCKEGNDQRREYLTEDRGPADTEEGTSESCYSGGDCPFFCFYFHCKQSQSIFFSFVLIYNNVNRFFDDFVRG

SEQ ID NO: 98564 - protein, 75 aa, Gossypium hirsutum
  unsure (1)..(75): unsure at all Xaa locations
  Clone ID: LIB3165-042-Q1-K1-E6.pep
TIAXSLLYICICNIKTITKTSIKPISLFSLYNISLGFSFHFHFYYGPIFFFVLSFPCSVKGSSFDIRINLKNHFF

SEQ ID NO: 98565 - protein, 112 aa, Gossypium hirsutum
  Clone ID: LIB3165-042-Q1-K1-E9.pep
MNGYKDDSYSCYFHPKQQVIGVCPLCLNDRLLLLASKQPRHSSSSSSSSTRGGHGFIQGFSLKKPPINKLPKIFALGSLLNRLEFKHWKPGNSDDDVLDVSTSQEDSFISIK

SEQ ID NO: 98566 - protein, 114 aa, Gossypium hirsutum
  Clone ID: LIB3165-042-Q1-K1-F8.pep
MKFFSELGSCYRPSTSHRDEDKASLRTTRHAERTITKSGGGSASSPSRHWRPVLQAIREDGKVTEKRIPNKNKSKGKYTSKPYRVSHDENSYYSRNNNSEPMVIPAFSPTPFMF

SEQ ID NO: 98567 - protein, 128 aa, Gossypium hirsutum
  Clone ID: LIB3165-042-Q1-K1-G10.pep
HASAHASAHASAHASAHASATTLGLSSTSSSFINGGAGDPRSLSSIFSFRPLTKLTTAKSSSFTSSRASWQELVGVLLFSAVPFTAVKAIANSPLGEALQRQLLKRKKEALANSSKFQALAQKARNES

SEQ ID NO: 98568 - protein, 82 aa, Gossypium hirsutum
  unsure (1)..(82): unsure at all Xaa locations
  Clone ID: LIB3165-042-Q1-K1-H8.pep
QWLTNRSHRRRRDTAFTEQANMDAHSTDLKSDYAHPATMKANNDITTIVSPGDRMQSMPEXPPTGKKKTQTLSYYTGSYTHA

SEQ ID NO: 98569 - protein, 136 aa, Gossypium hirsutum
  Clone ID: LIB3165-043-Q1-K1-A10.pep
MSGFEADNHGVSISVAVDNKTLADFEVLKKPKRNKFAFACAILASLASILLGYDIGVMSGAILYIKDDLKISDVQVEILVGILNLYCLIGAYVAGRTSDWIGRRYTIVVAASIFFVGALLMGFATNYTFLMVGRFV

SEQ ID NO: 98570 - protein, 40 aa, Gossypium hirsutum
  unsure (1)..(40): unsure at all Xaa locations
  Clone ID: LIB3165-043-Q1-K1-A6.pep
SELLEHISLLKTEGTAPDKTCRTASEVPIDTMLIXLKAPN

SEQ ID NO: 98571 - protein, 77 aa, Gossypium hirsutum
  Clone ID: LIB3165-043-Q1-K1-B10.pep
PRIRSPVRFGARHTYLRLGPMECKSDSDCLSSTIKMISLTPYLYFPTTSAFTFIAKKLSICPKPATMPGCCSYSRYG

SEQ ID NO: 98572 - protein, 60 aa, Gossypium hirsutum
  Clone ID: LIB3165-043-Q1-K1-B7.pep
YIRNRSCVLSLWQIICYSLSGRLTCVHGSSNSCKFFPNSMSKSLSAFWSQGQLIRFRNRL

SEQ ID NO: 98573 - protein, 130 aa, Gossypium hirsutum
  Clone ID: LIB3165-043-Q1-K1-B9.pep
MATAFHHHYNFTPTPILRRRRSPPSPSPITLHLNAPLSTTFNFPTKQCSSSSSSRITCKATEMSSVSEESAASGGGAGDNWVPVVPLAALPKGERRVIIQDGETILLLWYKDEVFAIENRSPAEGAYTEG

SEQ ID NO: 98574 - protein, 79 aa, Gossypium hirsutum
  Clone ID: LIB3165-043-Q1-K1-C4.pep
CPWVLSPKWVEVIPHFGHFLFPNFLILAPICNPHLWGKMLKNFFAFGSQDYEAQGMKGINPVVKILSLLIRDCLPMKNI

SEQ ID NO: 98575 - protein, 50 aa, Gossypium hirsutum
  Clone ID: LIB3165-043-Q1-K1-D1.pep
SKPIGLFIRGSIIFRSDSNGENLKRYSGAGPYDRVPMGKKEKGGGDYSSD

SEQ ID NO: 98576 - protein, 81 aa, Gossypium hirsutum
  Clone ID: LIB3165-043-Q1-K1-D2.pep
KTLKSLFLFLLFLSNKYYPFFVSLVRFAFVPFHHLASLSVMEQPRAHYGEIIAPCAIYNGASVLLCMWKGLIFSPLILLSI

SEQ ID NO: 98577 - protein, 82 aa, Gossypium hirsutum
  Clone ID: LIB3165-043-Q1-K1-D5.pep
FNTNNYKAKFSIPWAYGISANFNRRSQLNTLFTLTKSFMDYTSKKPSQRGLFESLYRVNMRRNSSTLPYHRRASSGTAGYGV

SEQ ID NO: 98578 - protein, 137 aa, Gossypium hirsutum
  Clone ID: LIB3165-043-Q1-K1-E12.pep
MAAALSYCKPSPFIGQFPSNFGKPVSLRSIEISTQASRITALFWGSKKSVKHQPVDSSLGDFTLTGSETEELKENPTKGKKVSVSIISSILDVSSHEWDSCALDATGPEKFNPFLSHGFLSSLEETGCAVKETGWMP

SEQ ID NO: 98579 - protein, 133 aa, Gossypium hirsutum
  unsure (1)..(133): unsure at all Xaa locations
  Clone ID: LIB3165-043-Q1-K1-F10.pep
PRVRGLDPRVKIYGSYDQLLDDPSVDAVYMPLPTTLHVHWAVMAAQKGKHVLIEKPTALDVGELDTILEACQSNGLQFMDGSMWLHHPRTVKMKEMLFDSKLLGDVNYIYSTSTTSASPEFFENDIRXKRKPG

SEQ ID NO: 98580 - protein, 114 aa, Gossypium hirsutum
  Clone ID: LIB3165-043-Q1-K1-F2.pep
MVLAFKPPLTYFSPFSSPHLPPRSTPSWPLHHSNSTYNPNTCLSPLPIYAHSKWPTNTHSFAIWYRYSSSEEEDDNHSFDEAVSLFNQREYYKCHDLLEALWNKAEDPTRTLIH

SEQ ID NO: 98581 - protein, 58 aa, Gossypium hirsutum
  Clone ID: LIB3165-043-Q1-K1-F5.pep
GRPTPSFNLGIKVCGVLPFLFCSPFNKGKKTSINSLPLKETYLIGRCSTTWILTLILF

SEQ ID NO: 98582 - protein, 78 aa, Gossypium hirsutum
  Clone ID: LIB3165-043-Q1-K1-F8.pep
NPISSSDCDEGDRDPDGVLTKRRRPGGHAWEPLVGVLICYCSSVFQKPLGFLVSSVIGPFSGYFWVSSLGLKFCKWVW

SEQ ID NO: 98583 - protein, 74 aa, Gossypium hirsutum
  Clone ID: LIB3165-043-Q1-K1-G1.pep
KVDYLLRSKWVPCLEFELEEGFVHRKYLSLPTYYDGRFWTMWKLAIFGCTDFAQVLKGLGGCQKEYPNAFIKII

SEQ ID NO: 98584 - protein, 48 aa, Gossypium hirsutum
  Clone ID: LIB3165-043-Q1-K1-G2.pep
FQLCSPPKAGSTRYHPSPLETPLPPIDVLSSGRLSDQIRTLGRPEFGR

SEQ ID NO: 98585 - protein, 50 aa, Gossypium hirsutum
  Clone ID: LIB3165-043-Q1-K1-G4.pep
SFSFSKNLRYFLSPFPPILYLSLSARGWELVKKGLLFQGQQCDYAWDGTG

SEQ ID NO: 98586 - protein, 141 aa, Gossypium hirsutum
  Clone ID: LIB3165-043-Q1-K1-H10.pep
FCLTGCGNSFNLRCISQWDQIMLGYQIFFFIITALLKFDKVTDFAGSTNFVIIAVLTLIIKGSWHFRQVVLTSLVVIWGLRLAIFLLMRILQWGEDRRFDEMRSNLGKLAVFWIFQAVWVWTVSLPCNRVNASDRDPIGSA

SEQ ID NO: 98587 - protein, 85 aa, Gossypium hirsutum
  Clone ID: LIB3165-043-Q1-K1-H6.pep
VPLYPPMVSRPFRWGLSPKKDWLKGRKLRVFGPGCPRRKKLCFRRCRHKLCSPVFKWNFEGFNSQRTRFARVLLPDAWAGPAVPV

SEQ ID NO: 98588 - protein, 65 aa, Gossypium hirsutum
  Clone ID: LIB3165-044-Q1-K1-A6.pep
PSPNFFCPVLPSQLLLWISSDSITFSFLSAATTASSSSLINGLLLLLHPLAGCQSSVFNFGQQCF

SEQ ID NO: 98589 - protein, 81 aa, Gossypium hirsutum
  unsure (1)..(81): unsure at all Xaa locations
  Clone ID: LIB3165-044-Q1-K1-A9.pep
MISSVTIATRNXCSPVQANMVAPLTGLKSACALPATMKANNDITYLASYGGRVLRMQVWPTLGKKKLETLSYLPDLTPVQL

SEQ ID NO: 98590 - protein, 41 aa, Gossypium hirsutum
  unsure (1)..(41): unsure at all Xaa locations
  Clone ID: LIB3165-044-Q1-K1-B2.pep
ATRXQQRPLLHLAPYLKPSFVKLCLSMPTPNPTTTGPACAI

SEQ ID NO: 98591 - protein, 63 aa, Gossypium hirsutum
  Clone ID: LIB3165-044-Q1-K1-B5.pep
MKIKEANAGALTNFEVLGFLRSRGASKDPTRVIVPIAPSEFKVYDYLVESAACNQTKEHVKEF

SEQ ID NO: 98592 - protein, 138 aa, Gossypium hirsutum
  Clone ID: LIB3165-044-Q1-K1-C3.pep
TLSVRPDRLTPGSPIPRPPVRLPNQTHPSLKPAKIEPWRAAAILHTRRPLAARAGSRADDSAPFEMSVENALNLLGVSERASFDDILRAKNSIVASIKDNQEAIAQVEAAYDMLLMRSLTQRRAGKVVDRSIRFADVK

SEQ ID NO: 98593 - protein, 46 aa, Gossypium hirsutum
  Clone ID: LIB3165-044-Q1-K1-D12.pep
EPTLHFLLSMDNLYALASSCLYQFTSHSNTTSSFCIPYYSSVIRLN

SEQ ID NO: 98594 - protein, 138 aa, Gossypium hirsutum
  Clone ID: LIB3165-044-Q1-K1-D8.pep
GSIDRPMRLAEIFVAAEHALKQTISNPDLLKTLSSIQDIEQKYMDLTKGAADNYHRSWWKRHGVVLDGEIAAVCFKRGNFDLAAKSYEKVCALYAGEGWQDLLAEVLPNLAECQKILNDQAGYLTSIVRLLSLDKGLF

SEQ ID NO: 98595 - protein, 136 aa, Gossypium hirsutum
  Clone ID: LIB3165-044-Q1-K1-E1.pep
PRVRPRVRHTREVVYEHLIVDGFIQGYKKWIFHGECTSSGTSSTINPTYPDTDYHQYVRQDDMEGMLRDAFNLHSHGEQSFPPDFIASDDCNIGGNVFGETGTSAPYEEPNEEAGKFYNLLNEMNEELYRGSKYSK

SEQ ID NO: 98596 - protein, 142 aa, Gossypium hirsutum
  Clone ID: LIB3165-044-Q1-K1-E11.pep
HASAHASEFIFYLRRSQFLDVFNSTPDETAFFRLMLNREGVTDSIVMIQPTLLQYSFDGPPVPVLLDIRSISPDVILLFDSYFCVVIHYGSKIAQWRKLGYDKDPNHGNLRKLFEAPELDAGQLVAGRVPPPKLIKCDQHSS

SEQ ID NO: 98597 - protein, 60 aa, Gossypium hirsutum
  Clone ID: LIB3165-044-Q1-K1-E3.pep
MAWLTRFLTAVAFFAVGVIFSPETFGSKSDDTISPILSTSIKLAHLLCFATGWGTAPLGH

SEQ ID NO: 98598 - protein, 76 aa, Gossypium hirsutum
  Clone ID: LIB3165-044-Q1-K1-F3.pep
DSRSSRVVVRTQSIDLGSSEIGLVCSGSVVTATFSAESGQVSGYKSANTTTLSSWYSRGVFELGFGSGSRNQGQGI

SEQ ID NO: 98599 - protein, 133 aa, Gossypium hirsutum
  Clone ID: LIB3165-044-Q1-K1-F6.pep
PPASSSTTVTSTTPLLPQNHPWWRRHFHMNNSLSSELSGAVGDLGTFIPIVLTLTLVSHLDLSTTLIFTALYNITTGLPFHIPMPVQPMKSIAAVAVSETPHLTTSQIATAGASTAAVLFFLGATGLMSNPLP

SEQ ID NO: 98600 - protein, 123 aa, Gossypium hirsutum
  Clone ID: LIB3165-044-Q1-K1-F7.pep
METTNGTSINNHKFTIPAVNDVEQQQASMELEPTDDFNYSKRSQWLRAAVLGANDGLVSTAALMMGVGAVKQDIKAMILTGFAGLVAGACSMAISEFVSVYSQLDIEVAQLKRDKLRDENSET

SEQ ID NO: 98601 - protein, 70 aa, Gossypium hirsutum
  Clone ID: LIB3165-044-Q1-K1-G7.pep
VRVVVVIQGCWKNRDIFKTREVVHHVVLSMESSVRGGNAMLLDLGGGQCYYRWLLLYVAGIRESLTGRVG

SEQ ID NO: 98602 - protein, 61 aa, Gossypium hirsutum
  Clone ID: LIB3165-044-Q1-K1-H2.pep
KDMEFSELLSVDGSCWDEGLIVGLVLHNGGAHILNMSLAYTMGCDHRNYFFAVPGGISMFQ

SEQ ID NO: 98603 - protein, 113 aa, Gossypium hirsutum
  Clone ID: LIB3165-044-Q1-K1-H3.pep
MAISLNTNLHHPSLSCGTKVYSGLKLQSPCLFATGRPNLTADFYTRVNKSLQCGTRSCKATRSRVGMMPIGTPRVPYRVPGEGTWQWVDLWNALYREAVIFIGQHIDEEFSNQ

SEQ ID NO: 98604 - protein, 86 aa, Gossypium hirsutum
  Clone ID: LIB3165-044-Q1-K1-H9.pep
MNPAAAANQKEEFKLKDTKPQLGERWPHGGTRRGSGWISSERATSTYDLVEQMFYLYVRVVKAKDLPTNPVTGTNDPYVEVKLGNY

SEQ ID NO: 98605 - protein, 96 aa, Gossypium hirsutum
  unsure (1)..(96): unsure at all Xaa locations
  Clone ID: LIB3165-045-Q1-K1-A4.pep
PLGLSPLSFPPPVTSLYEIIGDCXRCRVSFFFFSFLWFSFFDLHAAFLKWFRDELKELEIGSIDTCFSYSFRLPHSTTQNNLSTLCLWSKNQLFTT

SEQ ID NO: 98606 - protein, 141 aa, Gossypium hirsutum
  Clone ID: LIB3165-045-Q1-K1-D12.pep
SRLLPCGLHVIGEPPSAMEAVATLVNIAALDRPEDGISSLPSILAETVGRNIEDVYRGSDKGILKDVELLRQITEASRGAISAFVQKTTNKNGQVVDVADKLSSILGFGINEPWIQYLSNTKFYRADREKLRVLFEFLSEC

SEQ ID NO: 98607 - protein, 78 aa, Gossypium hirsutum
  Clone ID: LIB3165-045-Q1-K1-D2.pep
SKIELMVPQPVEGGFKFGPGQLVEGIFWNHWIPNFVKEALDWEPILWLGVEWVYLGNSYLLFWKIINFSVYLMGFSLI

SEQ ID NO: 98608 - protein, 146 aa, Gossypium hirsutum
  Clone ID: LIB3165-045-Q1-K1-E12.pep
RTRRENPSFSFTLLDSIYRSIDEPGGSKGEEKLIFCKEATMAKKHTSNRSSKEEEMASLQRACMIEKWMEKKAVDDKVVFNRRNPMAGSQRNSRNDFDPMLLNSSSTSSDSSGGFSSSESDSFYGAKSRSSSSSSSRYTTHRPKPI

SEQ ID NO: 98609 - protein, 56 aa, Gossypium hirsutum
  unsure (1)..(56): unsure at all Xaa locations
  Clone ID: LIB3165-045-Q1-K1-E3.pep
TLKXXKSKYMGQHGXIVFYLIPIQIPNPDFSPKIPKPNFKLQQATSPQLKPRPSPG

SEQ ID NO: 98610 - protein, 57 aa, Gossypium hirsutum
  Clone ID: LIB3165-045-Q1-K1-E4.pep
LSGSPQFAALTFHFCHTACIHIHSFMVISVARKWGLPESEFFPPIDPPSTFPIVCIG

SEQ ID NO: 98611 - protein, 141 aa, Gossypium hirsutum
  unsure (1)..(141): unsure at all Xaa locations
  Clone ID: LIB3165-045-Q1-K1-E9.pep
QPLDVEDDTXFFPTLXRTLKGFSSRILXEGNIRHLGFSXXLFXLCFXVKPGERKGYYXXFGFLGRNDPLGKESHCLLPSLFTSRKISAGFSFEKKYPSXXFHLSLXXLGSSRERFRNHFEKKKKLPSFFFCESSSTPLMGA

SEQ ID NO: 98612 - protein, 53 aa, Gossypium hirsutum
  Clone ID: LIB3165-045-Q1-K1-G2.pep
PIRRPGPWATLTLAVAVIHFLTALKAGPPEVKVGAPAKVEAFQSQRLTLKASL

SEQ ID NO: 98613 - protein, 60 aa, Gossypium hirsutum
  Clone ID: LIB3165-045-Q1-K1-H2.pep
AWENCFNWTSVCTIRAGVSQSSRLNFYLVGKFIWPPFEGSTKPIWHSLHLLVIHSKGGGQ

SEQ ID NO: 98614 - protein, 80 aa, Gossypium hirsutum
  Clone ID: LIB3165-045-Q1-K1-H5.pep
PRVRRIIRGSLLFISQPLFPLPDFSESTSRPNSAPRSAYLPSNTEGSRTVPSARWDGRVTKLGSAGLTRINGTAMVSCIN

SEQ ID NO: 98615 - protein, 77 aa, Gossypium hirsutum
  Clone ID: LIB3165-046-Q1-K1-A10.pep
VIYNIHYYYLLLALTTPMMWIFSIATALPAQANMVLPFIILKPPISFPNIKNATNNISLLTSNYFTFQLYTMSTLPL

SEQ ID NO: 98616 - protein, 72 aa, Gossypium hirsutum
  unsure (1)..(72): unsure at all Xaa locations
  Clone ID: LIB3165-046-Q1-K1-A4.pep
FFGIIITTTKKSFRIFTLLCLQIKLNEKIKKFQTFYSISVSANTWVFLFELYEMKFSYTVLXGGVLLVYLSQ

SEQ ID NO: 98617 - protein, 51 aa, Gossypium hirsutum
  Clone ID: LIB3165-046-Q1-K1-B4.pep
MEPPKGFLATLWNFICFLPYFIGLLLLSTIKGIIFCSPICLIMTIGNSSVI

SEQ ID NO: 98618 - protein, 123 aa, Gossypium hirsutum
  unsure (1)..(123): unsure at all Xaa locations
  Clone ID: LIB3165-046-Q1-K1-C3.pep
GKGQRKSFQRVLVPDKMGFNRSMTSAGELXKGERLMRPAKLXKRRYRDTDDVFNKGTWFARFINDLDADADRIAGTYSIQRDDNHRGNVTLINICVNRTKVQIARMYNMDDNPLVAIILSGDD

SEQ ID NO: 98619 - protein, 98 aa, Gossypium hirsutum
  Clone ID: LIB3165-046-Q1-K1-C9.pep
MPTFTAIALDRLIEPGPSRSVNNSGPNSKPPIPNPKPIPSTKMKRSSSTSVTSKVNRPQISPALYATPEATPLPDSPSSFPPSPYIINHKRRGPRLLK

SEQ ID NO: 98620 - protein, 65 aa, Gossypium hirsutum
  unsure (1)..(65): unsure at all Xaa locations
  Clone ID: LIB3165-046-Q1-K1-D2.pep
SXSYSKTYYFPTQCFFNRLEVTEFSGLLSNSFVTFAKNFLYASFFHLTTTQLIPKDCFIPSIFFI

SEQ ID NO: 98621 - protein, 61 aa, Gossypium hirsutum
  Clone ID: LIB3165-046-Q1-K1-E3.pep
SVKTLGVEKDSYFNAATMVLSDAIINKEKKNYVAPNDGETLKVGSKKSILTLQPPSFQPDS

SEQ ID NO: 98622 - protein, 98 aa, Gossypium hirsutum
  Clone ID: LIB3165-046-Q1-K1-F10.pep
RRKPGATHAGETKTRSNTQQQARRAGAGPKSGAAAKATGNRPAPAQANKEAPATGHKAATASPGTRKANNDSTGAASNGGRAQSKQGGPPPGKKKAET

SEQ ID NO: 98623 - protein, 130 aa, Gossypium hirsutum
  unsure (1)..(130): unsure at all Xaa locations
  Clone ID: LIB3165-046-Q1-K1-F9.pep
PRVRLSSSLHPPTSPLKPRLNSLSTPLQNAVVTKRQLIINTTTSFSIIFGVQQNPVPQCLAQPSNPSKPSVLNIANTKAWFQFYGDGFAIRVPPEFEDIMEPEDFNAGASLYGDKAXPRPFAARFASTDG

SEQ ID NO: 98624 - protein, 127 aa, Gossypium hirsutum
  unsure (1)..(127): unsure at all Xaa locations
  Clone ID: LIB3165-046-Q1-K1-G10.pep
AIKTAGLTSFPDYLVLHMRKFVMEAGWVPKKLDVYIDVPDVIDISHIRSKGLQPGEELLPEAAPEGAAESSQPVADEAIVAQLASMGFNQLHCQKAAINTXNAGVEEAMNWLLSHMDDPDIDAPILH

SEQ ID NO: 98625 - protein, 94 aa, Gossypium hirsutum
  Clone ID: LIB3165-046-Q1-K1-G12.pep
KKRKIKKRDKLNQKKRKAKIESVRKGARKRVGFLIIIPFSFRGSFRNPDIGMGINSVMVMKGIGKGIREERVCGEVKRKKKIGFCIPAKSGRVG

SEQ ID NO: 98626 - protein, 97 aa, Gossypium hirsutum
  Clone ID: LIB3165-046-Q1-K1-G6.pep
LPGYKLSSSSSSSSWTYSSINLIPSWLLTAYASKEQSPPWMLLNNTYQASLQQWLVDLCLGAIPPELIFNNPPLPPPKKKELPFFLLSHHGFLFLTL

SEQ ID NO: 98627 - protein, 43 aa, Gossypium hirsutum
  Clone ID: LIB3165-046-Q1-K1-H5.pep
FILKFLFVLISKQMQCLLDSNRKTHSYAGAPLRSTTGGQNQER

SEQ ID NO: 98628 - protein, 68 aa, Gossypium hirsutum
  Clone ID: LIB3165-046-Q1-K1-H7.pep
TMSYDQWRGGHSKDNGSFCLPTSRSVYSKRHSPSSSWIGEGSITATKLGTGMRSFKTTLTCSNTQNVL

SEQ ID NO: 98629 - protein, 77 aa, Gossypium hirsutum
  Clone ID: LIB3165-047-Q1-K1-A3.pep
TKPETQNDPKKAQTPETLEVSGKHQQLARIGLPTNSPMHGLLHARLPSFLCTAAPKERATNFVSLRQNRGWKGIVRL

SEQ ID NO: 98630 - protein, 86 aa, Gossypium hirsutum
  Clone ID: LIB3165-047-Q1-K1-C12.pep
MAIARTGVYTDDYLEYSSTFPAELQRLLNTLRELDERLQSMINQTRQQTKYRSGIAANRGNGNRYMNNGHDDEETDEKMRKDIEAG

SEQ ID NO: 98631 - protein, 136 aa, Gossypium hirsutum
  Clone ID: LIB3165-047-Q1-K1-C9.pep
SVLGFLYGMGMMRERNKAKAFLNHYFAAEGGNAQSKMALAYTYSRQDMHEKAVKLYAELAETAVNSFLISKDSPVIEPIRIHNGAEENKEALKKSRGEDDEDFQILEYQAQKGNAGAMYKMGLFYYFGLRGLRRDH

SEQ ID NO: 98632 - protein, 125 aa, Gossypium hirsutum
  Clone ID: LIB3165-047-Q1-K1-D3.pep
MMEKKPTLDSDWRSFRAKLVATEKVSSPSSWIDPDTLVDQPPQPVTIGDKWAHTIREPEKGCLLIATKKLDGVHIFERTVILLLKAGSIGPLGIILNQSSLKSIKEIRSTTIRDVSEVFSHVPLF

SEQ ID NO: 98633 - protein, 133 aa, Gossypium hirsutum
  unsure (1)..(133): unsure at all Xaa locations
  Clone ID: LIB3165-047-Q1-K1-D4.pep
LLKPWAAIICGFVAAWVLIGFNMLAAEFKYDDPLEAAQLHGGCGAWGLLFTGLFATKAYVNEVYPGLSGRPYGMFMGGGGKLLGAQIIQXVITGWVTATMGPLFYVLKKMNLLRISREDETAGMDLTRHGGFA

SEQ ID NO: 98634 - protein, 90 aa, Gossypium hirsutum
  unsure (1)..(90): unsure at all Xaa locations
  Clone ID: LIB3165-047-Q1-K1-D7.pep
REMINPSMSACHWFITVFXGAFPFALALLIWDVLLFEGYCHYDLIKLSSEKLIHAMRNFQEDSMNPDIXLPMAYSFKGSRFLAEFYIECY

SEQ ID NO: 98635 - protein, 55 aa, Gossypium hirsutum
  Clone ID: LIB3165-047-Q1-K1-E11.pep
GLTKSWETDRNPYRLDVACGGKFTCFERDCLRQDFNDIRSALIGWIAPYIYTEHS

SEQ ID NO: 98636 - protein, 81 aa, Gossypium hirsutum
  Clone ID: LIB3165-047-Q1-K1-F1.pep
KFVLEELILAHMCDLLTDVPGQANWVLDNVLRPDSQAEVALGSTKRIGAALKIHAISRIALSAVEFVLRPKGTSYPTPDAW

SEQ ID NO: 98637 - protein, 72 aa, Gossypium hirsutum
  Clone ID: LIB3165-047-Q1-K1-G2.pep
VQNQITQNQDTTVMMRKRAKTDSRLSSLVSPCEIVLKILTKDVTNDQITYPLSYFLLLPTSATYFEVYISQK

SEQ ID NO: 98638 - protein, 72 aa, Gossypium hirsutum
  Clone ID: LIB3165-047-Q1-K1-G9.pep
AYQGRPVGNEQLSEVRSSSDRWTLPPLEQFLRWAVGFKEKITFIEAIRVVSALSKVAVIPSVSVPKFKPISH

SEQ ID NO: 98639 - protein, 141 aa, Gossypium hirsutum
  unsure (1)..(141): unsure at all Xaa locations
  Clone ID: LIB3165-047-Q1-K1-H10.pep
MKASNPVVMVQAYRLLVAEMYVHGWDYPLHLGVTEAGEGEDGRMKSAIGIGTLLQDGLGDTIRVSLTEPPEEEIDPCRRMADLGMKAAELQQGVAPFEEKHRHYFDFQRRSGQLPTQKEGEEVDFISVLHRDGSXLMSCSL

SEQ ID NO: 98640 - protein, 144 aa, Gossypium hirsutum
  Clone ID: LIB3165-048-Q1-K1-A11.pep
PTRPETILTMMVSCMDVSEPVAVRIEGFRLAQHLVADEQRCIKMTSLCSGPLIKAIIGGMRVWRLGSGKGVNDLVSLLDEACRLALITRWPGEHHNHFWEQGIDKVLLDLLLENFDKQASEHTLTPQARISIAQQGLDTNFLIA

SEQ ID NO: 98641 - protein, 126 aa, Gossypium hirsutum
  Clone ID: LIB3165-048-Q1-K1-A2.pep
STLARTSLLHLSPLRSTSSTRDNATESVAIEGRNINFSVNTRQGKMVPILKDCSIRIPSGQLWMLLGPNGCGKSTLLKILAGLLTPTNGALYVRRPKSYVFQNPDHQVVMPTVEADVAFGLWRINL

SEQ ID NO: 98642 - protein, 57 aa, Gossypium hirsutum
  Clone ID: LIB3165-048-Q1-K1-B4.pep
PTRPIITGKGALAQLNIETGIRISDIEPLVLFNVAFFFFAAINPGTGKFVTDEAEED

SEQ ID NO: 98643 - protein, 107 aa, Gossypium hirsutum
  Clone ID: LIB3165-048-Q1-K1-B8.pep
MLKLQTPRGFKATPVGQDNSTVDYSSTASVFPAEACDTLGGEACDVEMFPEVKLKPDQTQSNKGKTGSEQVDREYLEYNSPKTVFIGEACDDLGGEFCEPEYQKGVQ

SEQ ID NO: 98644 - protein, 77 aa, Gossypium hirsutum
  Clone ID: LIB3165-048-Q1-K1-C3.pep
IRRPARNWLTWGPLYRLPAFWTWTNPDFQQPSSTWHITLLCGLLRLNSTSAYGTGGVQTRRLTLASGEKTVRIIPVG

SEQ ID NO: 98645 - protein, 142 aa, Gossypium hirsutum
  Clone ID: LIB3165-048-Q1-K1-D2.pep
SSGWPSVVAVVGNWFGKKKRGLIMGIWNAHTSIGNITGSLIASTLLSYGWGWSFVVPGLLIAFMGILVCLLLPVSPESVGADRQEEEEDDAVDSPKKKKEGVTEPLLRSHTEMKENAVGFIEAWRIPGVAPFAFCLFLAKLV

SEQ ID NO: 98646 - protein, 144 aa, Gossypium hirsutum
  Clone ID: LIB3165-048-Q1-K1-G4.pep
PTRPDDRITRSIATAKFSPRNASSKYDFVKVKVWLGDNADHYYVLSRFLLSRMLTVTKIPNHVAVKISLELKKLLIDNSLLDISQSDLEANLFKLMEWRGYGQEYISRYKMMTRFHHQRVPLVILVCGTACVGKSTIATQLAQR

SEQ ID NO: 98647 - protein, 102 aa, Gossypium hirsutum
  unsure (1)..(102): unsure at all Xaa locations
  Clone ID: LIB3165-048-Q1-K1-H4.pep
MMSAREFECENAGXPTKGIRQRYRVVNNIIKKGIMFSLFINELDAGAGPMGXTTHYTVDNQMVNTTLMNITDNHTNVQFTRVYNTEENPIVTIIVTWNHFST

SEQ ID NO: 98648 - protein, 96 aa, Gossypium hirsutum
  unsure (1)..(96): unsure at all Xaa locations
  Clone ID: LIB3165-048-Q1-K1-H5.pep
MAVSSTFSGAKLERLLINSCSSPSASSLRACSLSHQQMKAFSKPNRGRKALAQRTGGVRCEVAQSDAINEGEKLDPSKASALSALXQLKTSAADRY

SEQ ID NO: 98649 - protein, 113 aa, Gossypium hirsutum
  Clone ID: LIB3165-048-Q1-K1-H8.pep
STLLNEKLLQLAVADYEFRQSIYRKELEEVIRWSKNKGMSDMGFGRDKTTYCYFAIASSIPLPYDSEVRMIITKSAVVITVADDFYDTEASFDELTTLTQAIRRWDAEGLNGH

SEQ ID NO: 98650 - protein, 44 aa, Gossypium hirsutum
  Clone ID: LIB3165-049-Q1-K1-A1.pep
LFSMMCFSRLLDLILFLFRARASLLVTAILECFLIWYYILLLLI

SEQ ID NO: 98651 - protein, 141 aa, Gossypium hirsutum
  Clone ID: LIB3165-049-Q1-K1-A12.pep
HASAQLEIVYGVFGYMQVLSACFMSFAHGGNDVSNAIGPLAGALSILQGGASSAEIVIPNDVLAWGGFGIVAGLLIWGYRVIATIGKKITELTPTRGFAAEFAAASVVLFASKLALPISATHTLVGAVMGVGFARGLNSVR

SEQ ID NO: 98652 - protein, 49 aa, Gossypium hirsutum
  Clone ID: LIB3165-049-Q1-K1-C1.pep
SHSFYRILPNSGIRRRAPALFFEPKAAFGRPIRPENIVGGEVGLGRTFV

SEQ ID NO: 98653 - protein, 47 aa, Gossypium hirsutum
  Clone ID: LIB3165-049-Q1-K1-C7.pep
CYYLCYQKRSFLNGNLSSKGRNIIYIGHKQRISPLCVLIECCFPFVF

SEQ ID NO: 98654 - protein, 123 aa, Gossypium hirsutum
  Clone ID: LIB3165-049-Q1-K1-D7.pep
MAIFGEGVSILPISAVIFLLLRAYRLRRLRLPPGNLGLPFVGETLQLISAYKTENPEPFIDERAKRHGSVFTTHVFGEPTVYSADPETNRFILQNEGKLFECTYPRSISNLLGKHSLLWMKGN

SEQ ID NO: 98655 - protein, 65 aa, Gossypium hirsutum
  Clone ID: LIB3165-049-Q1-K1-E5.pep
RQYQRVKRKFPGIELSDPFRSSCVIYCCARAPKDGSLPQPTPPITNHPFLLLLSDNCEKKAPPLR

SEQ ID NO: 98656 - protein, 53 aa, Gossypium hirsutum
  Clone ID: LIB3165-049-Q1-K1-H12.pep
TAAAYGISLFIVGSLIRQVTTNTLISRALFIRYGRIHDVDMKRDYAFVEFNDP

SEQ ID NO: 98657 - protein, 48 aa, Gossypium hirsutum
  Clone ID: LIB3165-049-Q1-K1-H8.pep
PLILTSNTVSFSKPNLYIEAYLMGVGSSKYLMPTQLLYYPSLCHENLL

SEQ ID NO: 98658 - protein, 50 aa, Gossypium hirsutum
  unsure (1)..(50): unsure at all Xaa locations
  Clone ID: LIB3165-050-Q1-K1-A2.pep
HYVXGXXMCRGVHTSIESNKMISRLTKLCCSLLNQLYVLVIINPLPSSSY

SEQ ID NO: 98659 - protein, 57 aa, Gossypium hirsutum
  Clone ID: LIB3165-050-Q1-K1-A6.pep
FEMVGKRNNSSRKFFWFRKKIENKAEGLKPKSFNGQAVKLNCVVVEDQNTQLERMVL

SEQ ID NO: 98660 - protein, 51 aa, Gossypium hirsutum
  Clone ID: LIB3165-050-Q1-K1-A7.pep
PAFISFICHCSDRRNVVVGVPHGCFIKGGLKPVESNAIATSRSGKSANGSV

SEQ ID NO: 98661 - protein, 52 aa, Gossypium hirsutum
  Clone ID: LIB3165-050-Q1-K1-B7.pep
GYPQTLSVLLNQKHPSLLLVTGLKSDNMSLAMRNANNHIACIAAMAVYINYY

SEQ ID NO: 98662 - protein, 111 aa, Gossypium hirsutum
  unsure (1)..(111): unsure at all Xaa locations
  Clone ID: LIB3165-050-Q1-K1-C8.pep
MENFFSHAIMKLAVLLFAMILFVQLNSLIHGRCRENPERAAATQLATVGLNKRDLKRIPVAVYRTGGTSFTATDCPICLGEFLDXEKVRVLPKCNHGFHVKCIDKWLMSKS

SEQ ID NO: 98663 - protein, 136 aa, Gossypium hirsutum
  unsure (1)..(136): unsure at all Xaa locations
  Clone ID: LIB3165-050-Q1-K1-E4.pep
MAFFMMSSSTIATVNCSSASQANIVAAFTCLKFASAFPVTMKANDDITFLAINGGRVQCMHVQPSLGTKKNETLSFLYDLTLIQLAKDEEDHHRSQWKPCSGLELEEGVGHRQYSSLPTPYDXHYCTMWKLTMSMC

SEQ ID NO: 98664 - protein, 66 aa, Gossypium hirsutum
  Clone ID: LIB3165-050-Q1-K1-E9.pep
KTMAAARAINQAKSTGFQPHFTKKAIFATNSTDLAPPSVFTAKNSLTYTKETVSNEQNIRVRTLTL

SEQ ID NO: 98665 - protein, 41 aa, Gossypium hirsutum
  Clone ID: LIB3165-050-Q1-K1-F2.pep
VISIKQDFFQPVHPNPDRKVGSRAYNTFTTAGKKPYHEISI

SEQ ID NO: 98666 - protein, 63 aa, Gossypium hirsutum
  Clone ID: LIB3165-050-Q1-K1-F3.pep
KIPFSLIKSKIKASVYKNEKECCIVKKQKIEHRMNRSVYRWSSLILRKMAEEINKSEIRSSPS

SEQ ID NO: 98667 - protein, 67 aa, Gossypium hirsutum
  Clone ID: LIB3165-050-Q1-K1-F4.pep
MASSMISSAAIATASPAQANMVATFTALMSASALRVTTKANNDNTCLIGCGRSLQCMAEGTGTIKNR

SEQ ID NO: 98668 - protein, 48 aa, Gossypium hirsutum
  Clone ID: LIB3165-050-Q1-K1-F5.pep
RRLCTRSLGVHAVLSVSLCRQPWYVVLFVRVLAQSKVGFKAGKKRFSC

SEQ ID NO: 98669 - protein, 59 aa, Gossypium hirsutum
  Clone ID: LIB3165-050-Q1-K1-F9.pep
TTRPVSYCIHYLYPLLAMASSMISSATIATACPAQGNMGCSFSGLKADSAFPVMRKANY

SEQ ID NO: 98670 - protein, 51 aa, Gossypium hirsutum
  Clone ID: LIB3165-050-Q1-K1-G4.pep
LYRGFCRFASSSSASTSDRLSLCKRHIFVTTNVLEWMLLSAWGAWLKKRLT

SEQ ID NO: 98671 - protein, 39 aa, Gossypium hirsutum
  Clone ID: LIB3165-050-Q1-K1-H1.pep
KECCIVDYAGEPLPLLAAQTVEDAEVYNTYYKFGGSDGW

SEQ ID NO: 98672 - protein, 73 aa, Gossypium hirsutum
  Clone ID: LIB3165-050-Q1-K1-H5.pep
IPAPTPRPLCLTYLLVLVNVFVGTPPSGWCCSLLYGLTNQQAVLSLYTVIKANVLGINLNIPTVIKLILSAYL

SEQ ID NO: 98673 - protein, 61 aa, Gossypium hirsutum
  Clone ID: LIB3165-051-Q1-K1-A1.pep
CSKSETSELGSINTRLSQVLEVSLKEQVSLAPTGSKPKALKTLWRPDSHGPDVTPDGDRTS

SEQ ID NO: 98674 - protein, 101 aa, Gossypium hirsutum
  Clone ID: LIB3165-051-Q1-K1-A12.pep
RERRSERVNWRRERERHCGSLSLSKVKTFSLQPQKHATCFLSLSHRFNFFEKKRSLQIETLTFDLSHTFPSIEVARLQFDFSMLKQNPSFLSEFPKFSTKP

SEQ ID NO: 98675 - protein, 63 aa, Gossypium hirsutum
  unsure (1)..(63): unsure at all Xaa locations
  Clone ID: LIB3165-051-Q1-K1-A8.pep
PQANMKADYTGLESHSALPITRNANNNITNIASNGGRVQCMQXYSSALGKNKIETLSYLPYLT

SEQ ID NO: 98676 - protein, 56 aa, Gossypium hirsutum
  Clone ID: LIB3165-051-Q1-K1-B11.pep
VPFNFFLSFILRAKNIASNPTPPFFSTPKKQNKKKKIQSLSIFYKIYNLIIFSLFL

SEQ ID NO: 98677 - protein, 80 aa, Gossypium hirsutum
  Clone ID: LIB3165-051-Q1-K1-B6.pep
SLSTSGSDLAPASFLILSLTIDTGNRSFPVQANMVDPYTGLKLDSALPVTTRGITDLISIASDYGREQCMQKQPPIGKKK

SEQ ID NO: 98678 - protein, 60 aa, Gossypium hirsutum
  Clone ID: LIB3165-051-Q1-K1-C10.pep
FLLYCSRSLLRALQWHAIAHHPRVSDVVVHAVGQAQAALISVKSESMSACRTIDCANGSL

SEQ ID NO: 98679 - protein, 29 aa, Gossypium hirsutum
  Clone ID: LIB3165-051-Q1-K1-C12.pep
GKLSFISTKCIVTCVIVRSIHTILFHVLK

SEQ ID NO: 98680 - protein, 46 aa, Gossypium hirsutum
  Clone ID: LIB3165-051-Q1-K1-C2.pep
VIKFFEQFGYSFITAYTGCNRYIITHGKSIGHPNKHNMSILSHRQG

SEQ ID NO: 98681 - protein, 81 aa, Gossypium hirsutum
  Clone ID: LIB3165-051-Q1-K1-C3.pep
LVLFILIFDTSFEPAGRSFDCCFYQIPHWVWLSWIPQLLLSLHRTEAPYCILELLKIATVYPQALYYWLLTYFFELLDVSN

SEQ ID NO: 98682 - protein, 51 aa, Gossypium hirsutum
  Clone ID: LIB3165-051-Q1-K1-D5.pep
IIHNDPPSLTQIVNPFPLRRDFTQYRESIPSDYDCQYTTPKLLPILKIMHP

SEQ ID NO: 98683 - protein, 134 aa, Gossypium hirsutum
  unsure (1)..(134): unsure at all Xaa locations
  Clone ID: LIB3165-051-Q1-K1-D6.pep
LIQSFLFHKILPILASPPLDHPLHGIKTPMPCLFTEKAELGFDLFNTKMIFFFSSLFVYQLQQMNCSIRTYWVFYKNDDNSIYNIKXSPKGFSSSFFFCLIHFRNERKIWVFFSRNQKKMVRGKNYKREKRRKI

SEQ ID NO: 98684 - protein, 81 aa, Gossypium hirsutum
  Clone ID: LIB3165-051-Q1-K1-D7.pep
AFSSPSFAGYVVKFSPSTPEILRTGRFSMKKTTKPVPYGIPWYGPYLFLYLGPLTGEPLYHMTREFSCDNGLDTSILLTDP

SEQ ID NO: 98685 - protein, 111 aa, Gossypium hirsutum
  unsure (1)..(111): unsure at all Xaa locations
  Clone ID: LIB3165-051-Q1-K1-D9.pep
MPIRNIPAGRAEEATDPDALKAALAEFISTWRLMXSGEGSRMALXNSATDNGATTPXGLVADGLAHGSSLFTPGSEGPNMLSGXHVNPDDTFSAFDGRNITLVRGIMYWIG

SEQ ID NO: 98686 - protein, 31 aa, Gossypium hirsutum
  Clone ID: LIB3165-051-Q1-K1-F10.pep
INYTLLGGFQIASMEPPITHYNTKGYLAFIL

SEQ ID NO: 98687 - protein, 136 aa, Gossypium hirsutum
  Clone ID: LIB3165-051-Q1-K1-F4.pep
ATDASPQLRSVPPPSDFHPEISLSQSPTHDGLHFWQFMIAGSIAGTLEHMAMFPLDTLKTRMQALGASCSVQPVSVRQALGSILKLEGPPGLYRGIAAMGLGAGPAHAVYFSVYELSKQVLSRGDPNNSMVHAASG

SEQ ID NO: 98688 - protein, 100 aa, Gossypium hirsutum
  unsure (1)..(100): unsure at all Xaa locations
  Clone ID: LIB3165-051-Q1-K1-F6.pep
MVSASFLMTLPATDMAQRVEGHTLRQPSTSAERRRLVAPSGLTXVHSSYAXSMCKTAIATACPGRGIWAMDDYNATCRKRSASSGLKHTLAYRQAYKTAL

SEQ ID NO: 98689 - protein, 53 aa, Gossypium hirsutum
  Clone ID: LIB3165-051-Q1-K1-G2.pep
MTEPSTATTTLSQDKIEKPQNELHQASLQEEGRESSNITTTKATLKTTEPTKL

SEQ ID NO: 98690 - protein, 57 aa, Gossypium hirsutum
  Clone ID: LIB3165-051-Q1-K1-G8.pep
ALELRVLGMDEVIMNNQQWGVDHPLSCTLNFAHICETPGFIFTLQHLICSNATYNGV

SEQ ID NO: 98691 - protein, 120 aa, Gossypium hirsutum
  Clone ID: LIB3165-051-Q1-K1-H10.pep
PTRPFSQDLLLTAPKPQSQSSDLPEGSQWRYSEFLNAVKKGKVERVRFSKDGSVLQLSAVDGRRASVIVPNDPDLIDILAMNGVDISVSEGESANRLFNFIGNLLFPFLAFARLFFLFPS

SEQ ID NO: 98692 - protein, 88 aa, Gossypium hirsutum
  Clone ID: LIB3165-051-Q1-K1-H7.pep
MSNLRTVCRPHMVFTSLMCSSRHHYLHQARSRTRVAFRNPDFRSSSFSPWLHLSRDLRRKEPWFRVNQRRTVVRASNWSDQKSPYETL

SEQ ID NO: 98693 - protein, 55 aa, Gossypium hirsutum
  Clone ID: LIB3165-052-Q1-K1-A10.pep
GGRHCGRRKTLGASPSGASVGAYLVGISKYLNENFHGNLGGRIRVNGSCTCVIPS

SEQ ID NO: 98694 - protein, 122 aa, Gossypium hirsutum
  Clone ID: LIB3165-052-Q1-K1-B5.pep
MRGCTCFSFPSSPPIFSFYSNSNNRFSSSSSLLFSSASHNCSVKLSPLLFAKSTRFRTNCKAKDPEVVDCVGTGLDVECLVSQNEKQDLEIEDVEKAESNILLEWAVLVSPFFFWGTAMVAM

SEQ ID NO: 98695 - protein, 48 aa, Gossypium hirsutum
  Clone ID: LIB3165-052-Q1-K1-C5.pep
WDTGSPTVRPNLWTRIVNVSHASANSIGHVGECQNLISRRQLRPSWLI

SEQ ID NO: 98696 - protein, 88 aa, Gossypium hirsutum
  unsure (1)..(88): unsure at all Xaa locations
  Clone ID: LIB3165-052-Q1-K1-E1.pep
ITGGGADRFIPALTPLTXAYKPFRMIGWNRHVETIFAAFLRTVPEDKYRRVCLRTQYNGTIALDWVYGDHRRXSCDSTILILLPALTG

SEQ ID NO: 98697 - protein, 137 aa, Gossypium hirsutum
  Clone ID: LIB3165-052-Q1-K1-E2.pep
SPLIFALTFNQVRILLLSLYIFSRRAPKNSKKSCIPEPSGSLPLIGHLHLLGGKKPTCKKLATMADKHGPLYSLKLGTHRVLVVSSWEIAKDCFTDNDRTLATRASIAAGRHMGYNNAVMALAPYGEYWRNIRKIAT

SEQ ID NO: 98698 - protein, 123 aa, Gossypium hirsutum
  unsure (1)..(123): unsure at all Xaa locations
  Clone ID: LIB3165-052-Q1-K1-E5.pep
ANNFGTLNYAVRPFTRKRTLGRDAQNLLDYFKKMQAXNPGFFYAIQLDDDNQMANAFWADARSRTAYTHFGDAVKLDTSYRVNHYRVPFAPFSGMNHHGQTILFGCAVLLDDSEASFVWLFKT

SEQ ID NO: 98699 - protein, 125 aa, Gossypium hirsutum
  unsure (1)..(125): unsure at all Xaa locations
  Clone ID: LIB3165-052-Q1-K1-E6.pep
DSLVSLPTSHCHSPLFTSKPRSSSATTTTTSVSFSLPPPPQPPEPNIRRPKSINPSPKPKISSNPLKNFSTTTPTPTTTNNNFSHVPSPGETTRTTQSLVSKLRLSSKLXPPXPPXXLHDTRKAT

SEQ ID NO: 98700 - protein, 80 aa, Gossypium hirsutum
  Clone ID: LIB3165-052-Q1-K1-E7.pep
PAVAFPCQHDLKLTNLICGGPSTTIRPPNPKSLSISLRDYYTTTPTTTTTNNKVLNVPTYAETTRTSQSLVYKHGLSSKL

SEQ ID NO: 98701 - protein, 143 aa, Gossypium hirsutum
  Clone ID: LIB3165-052-Q1-K1-F8.pep
PTRPEEGSSSPLAMEMRDIGDLPKNAANYTALTPLWFLERAATVHPARKAVVHGSRTFTWLQTYQRCRRLASALSNLSVGFGSTVAVIAPNVPAAYEAHFGIPMSGAVINPVNIRLNASTVAFLLGHSQSAVVIVDQEFFTLA

SEQ ID NO: 98702 - protein, 80 aa, Gossypium hirsutum
  Clone ID: LIB3165-052-Q1-K1-G12.pep
TMSRAIMRPKSWFIMMGRVKLSFKRSAFSIFAARKGLAKDKVVSVNIHIDLRVVDTVRASVRLSRSLLWEVLEGTVVVFV

SEQ ID NO: 98703 - protein, 72 aa, Gossypium hirsutum
  unsure (1)..(72): unsure at all Xaa locations
  Clone ID: LIB3165-052-Q1-K1-G5.pep
RGPGRPSLPQTGKGNYVLGSKWEPNPENHGEEGFXNCKFSSLPSYXNGHMCNMFELPMFGXTDSFQMLEDLV

SEQ ID NO: 98704 - protein, 84 aa, Gossypium hirsutum
  Clone ID: LIB3165-052-Q1-K1-H8.pep
MGENYNELKKSTASQTVLTDVVLGWVILYIDDPEDRSAVSLVCRRWYELDALTRKHVTVALCYTTSPERLLRPFPHLESLKSKG

SEQ ID NO: 98705 - protein, 48 aa, Gossypium hirsutum
  unsure (1)..(48): unsure at all Xaa locations
  Clone ID: LIB3165-053-Q1-K1-A11.pep
ESDQARLCWDCDAVVHGAYFLEARHVRLLFCHAXYYLTPWIVTGFKLG

SEQ ID NO: 98706 - protein, 77 aa, Gossypium hirsutum
  unsure (1)..(77): unsure at all Xaa locations
  Clone ID: LIB3165-053-Q1-K1-A12.pep
VSFLSGFYFARLAFCRYRVKPSTLLILVEPTYHLDLPXSDMLEEAIMEYIGTVTICSHDRYFIWQIVNRVLGVKDGH

SEQ ID NO: 98707 - protein, 139 aa, Gossypium hirsutum
  unsure (1)..(139): unsure at all Xaa locations
  Clone ID: LIB3165-053-Q1-K1-A5.pep
ELILHPTPAVRHVLICAIGIHFFQQAIGLESVVLYSPRIFEKAGITSSDHKLLATMAVGFSKTTFILVATFLLDKIGRRPLLLISSGGMVVILATLGLSLTVIGHSDKKQTWAVGLCITMVLSSVAXFFSIGMGPITWV

SEQ ID NO: 98708 - protein, 95 aa, Gossypium hirsutum
  Clone ID: LIB3165-053-Q1-K1-A7.pep
LVFRRQIISQTGGVSLGRGTLSSLPLPAKSEEVLSEWERVYLPIDPGAVLLDIAFDPDDLNHGFLLGTRHTILETKDGGNTWTQRSILFAEDDDF

SEQ ID NO: 98709 - protein, 69 aa, Gossypium hirsutum
  Clone ID: LIB3165-053-Q1-K1-B7.pep
AHTRTVEGFAGGDIVDETIDYIVDGIGWVEAVDMDKLLRCKIHGNIDGTETEHPHERGRSEQCKKFNKH

SEQ ID NO: 98710 - protein, 89 aa, Gossypium hirsutum
  Clone ID: LIB3165-053-Q1-K1-C3.pep
RNKLLVETIVCLLPSDKGVRWSCSFLLKLLKVAILVGVDDSAREDLMNRIILKLHEASVKDLLIPARSSQTTIYDVGMVHSICESVYDQ

SEQ ID NO: 98711 - protein, 59 aa, Gossypium hirsutum
  Clone ID: LIB3165-053-Q1-K1-C7.pep
NDLHQVNAFLLPQFNVFNPRKPELLFPLFPYSVCLKANVPVSNKLIESSSIIFSSIMLL

SEQ ID NO: 98712 - protein, 39 aa, Gossypium hirsutum
  Clone ID: LIB3165-053-Q1-K1-D10.pep
CLAISTEPSEKNYIASCRNSNFGIGVICFIIKRKLYCFV

SEQ ID NO: 98713 - protein, 47 aa, Gossypium hirsutum
  Clone ID: LIB3165-053-Q1-K1-D7.pep
SLLRVRKEAFVVTYIDTILWEMVYEMTTPAITIEAEKSKRTCGVTRG

SEQ ID NO: 98714 - protein, 64 aa, Gossypium hirsutum
  Clone ID: LIB3165-053-Q1-K1-E10.pep
WSEHGQYAWRTGLVIHHSCISIFQPSKTVKSSERENRGIGGAQNFEGMAVEKPTSQASTLGRPG

SEQ ID NO: 98715 - protein, 79 aa, Gossypium hirsutum
  Clone ID: LIB3165-053-Q1-K1-E6.pep
LKIGVPRVKFQFSFLLAWILAGQGASHTQSQTPTLQYGSIVTGNGKDHPTVSSHPSTANGLGRSCNICDLCRQINSEPD

SEQ ID NO: 98716 - protein, 52 aa, Gossypium hirsutum
  Clone ID: LIB3165-053-Q1-K1-E8.pep
EQNIHSIYIVCCHRTEATIITMYINGKTQNQNNGQLSSFCKTNFKITIVKYG

SEQ ID NO: 98717 - protein, 80 aa, Gossypium hirsutum
  unsure (1)..(80): unsure at all Xaa locations
  Clone ID: LIB3165-053-Q1-K1-F7.pep
DVTEVAPAVTYEIXYAFVKNITRRMTPQPLYILADIXIKCFQFEGVXHIIEAILXSDAAGNYDXSVKINLDASPFYVLTT

SEQ ID NO: 98718 - protein, 108 aa, Gossypium hirsutum
  unsure (1)..(108): unsure at all Xaa locations
  Clone ID: LIB3165-053-Q1-K1-G4.pep
MAKTGPQSLYSLLSFPSNTPFFFPRLFKMADGHDIQPLVCDNXTGMVNAGFAGDDSPRAVFPNFRGSFTFSXVIVGLDQTDAYFGDESHLHRGTLTLKYPIVHGLVSN

SEQ ID NO: 98719 - protein, 141 aa, Gossypium hirsutum
  unsure (1)..(141): unsure at all Xaa locations
  Clone ID: LIB3165-053-Q1-K1-H12.pep
QKDPFDFLPKGFLERTKGRGLVVPSWAPQAQVLSHSSTGGFLTHCGWNSTLESIVNGVPLIAWPLYAEQKXMNAAMLTQDIKVALRTEPNENGLVCRDEIAKAVKGLTEGEEGKGVRNRMKDLKEAAAKALFENGSFTKAL

SEQ ID NO: 98720 - protein, 74 aa, Gossypium hirsutum
  Clone ID: LIB3165-053-Q1-K1-H2.pep
EKQRHPYALIPFGIGPRACVGRKFSLQEIKLSLIHLYRKYTFQHSSTMENPLELEYGIVLNFKHGVKLTVTKRT

SEQ ID NO: 98721 - protein, 49 aa, Gossypium hirsutum
  Clone ID: LIB3165-053-Q1-K1-H7.pep
ILIFSAFSNRESVAYGACLPLEFEARGVLKVTTGETGLWQPIVHSDLAF

SEQ ID NO: 98722 - protein, 63 aa, Gossypium hirsutum
  Clone ID: LIB3165-053-Q1-K1-H8.pep
HASSLSSYPLNYLFFIFSFYIWPGNFTLNSFLLLPSFIFLLLLQSLPFLNLNQESQILYLIHT

SEQ ID NO: 98723 - protein, 29 aa, Gossypium hirsutum
  Clone ID: LIB3165-055-P1-K1-A2.pep
TAINYDSSVKLQSGFMVLVQCHQGQPYQR

SEQ ID NO: 98724 - protein, 47 aa, Gossypium hirsutum
  Clone ID: LIB3165-055-P1-K1-A3.pep
MKMSSSATMGASKRRLSSRGLGGVLREKRAKLYIIRRCVIMLLCWHD

SEQ ID NO: 98725 - protein, 60 aa, Gossypium hirsutum
  Clone ID: LIB3165-055-P1-K1-A7.pep
KFFADVAKREMALDAKVEISGTAKMLWWEHRFKVHVECHVTVDPVVLDVIAQDHESQLEL

SEQ ID NO: 98726 - protein, 60 aa, Gossypium hirsutum
  Clone ID: LIB3165-055-P1-K1-B11.pep
FCLKWKEGPPFVCVPPNGPFLSGFSPFFPFSGQQVSQPTPDLNQNYLNSTAVPLRSVRAE

SEQ ID NO: 98727 - protein, 54 aa, Gossypium hirsutum
  Clone ID: LIB3165-055-P1-K1-B3.pep
LSYSSLNISTGSAPMYWGIAYHSQSSYPLCAQDERSRHYKCSRFSLPWIRWIRM

SEQ ID NO: 98728 - protein, 117 aa, Gossypium hirsutum
  Clone ID: LIB3165-055-P1-K1-B7.pep
LPGLPSEFDAVVSSATLSSTSLPFQRLVDALIECENRQVQAAKEVVYAANIKWKTRHRLWMFHHVGDVRWCVAVVGAFGLGFSVRSTQGSVTLLNGAISATLMKTHLRCNFNRPDAW

SEQ ID NO: 98729 - protein, 89 aa, Gossypium hirsutum
  Clone ID: LIB3165-055-P1-K1-C2.pep
RGRIRVKSSGYGRCVLCKADACGWYRKRRQACSVEYIISIAKKGFGSCRNSRREVIVVSQINGRDKGLGICLWQWQWKGWFDLWSINSI

SEQ ID NO: 98730 - protein, 87 aa, Gossypium hirsutum
  unsure (1)..(87): unsure at all Xaa locations
  Clone ID: LIB3165-055-P1-K1-E1.pep
YSQYESLLIINTNPXPKTAADRTLLDMAKIQTLKSAFELTDQAAIDRNXCNPYPMTQSAYQAAEIIASGKGDRLSYIGAEDSFLDAH

SEQ ID NO: 98731 - protein, 74 aa, Gossypium hirsutum
  Clone ID: LIB3165-055-P1-K1-E3.pep
LIETALKVFEGLFPFWASSFRISRKRYSISFVHLNCLDIPSLFPLPILDRNGKPNFRVSYRFGKNDSHPTEMTR

SEQ ID NO: 98732 - protein, 86 aa, Gossypium hirsutum
  Clone ID: LIB3165-055-P1-K1-E7.pep
PFTWLPNGRLHRVCVPCVTVYARVVSELINRVVRSYFRESHYGIFTTCLIVLSYDEFLGIAISSSPSLLSGFVYQTEQACSSFVSN

SEQ ID NO: 98733 - protein, 104 aa, Gossypium hirsutum
  Clone ID: LIB3165-055-P1-K1-E8.pep
MEVQKPQHGQYIEINVDVGQGQRRIGGSKFCGEAPCGFSDAGTSSKDAEERSASMRKLLIAVVLCVIFMSVEVVGGIKANSLAILTDAARLLSDVAAFAISLFS

SEQ ID NO: 98734 - protein, 59 aa, Gossypium hirsutum
  Clone ID: LIB3165-055-P1-K1-E9.pep
MSGGAEEGVTLEHTPTWIVAAICTVIVAISLAMERLLHVVGNVLKRKQQKPLFEALLKV

SEQ ID NO: 98735 - protein, 110 aa, Gossypium hirsutum
  Clone ID: LIB3165-055-P1-K1-F12.pep
MFYDRLSLSCKAKLQKLENPDPRFLKYGSPHPAVVSHTHILSSPETKITTLPNGLRVATESTLSSRTATVGVWIDAGSRFETEETNGTAHFLEHMIFKGTERRSARDLEE

SEQ ID NO: 98736 - protein, 98 aa, Gossypium hirsutum
  Clone ID: LIB3165-055-P1-K1-G7.pep
MSTCSQDLAPLLGVNGTGAADYICGKFSDASYAVDNTYLLFSAYLVFSMQLGFAMLCAGSVRAKNTMNIMLTNVLDAATGGLFYYLFGFAFAFGSPSN

SEQ ID NO: 98737 - protein, 70 aa, Gossypium hirsutum
  Clone ID: LIB3165-056-P1-K1-A12.pep
PTRPPTRPLIVTVMIYAGGHVSGAHMNPAVTLAFAVVRHFLWKQVSFYGAVQLTGAIYVSFTLRVSFDSI

SEQ ID NO: 98738 - protein, 69 aa, Gossypium hirsutum
  Clone ID: LIB3165-056-P1-K1-A8.pep
GKAPKEAVTSPSNGRHVIEPLSSREQLEQCAGNQRVRDWYPRVKTSKPFLLTTPRIRFADLKCLHCSFD

SEQ ID NO: 98739 - protein, 58 aa, Gossypium hirsutum
  Clone ID: LIB3165-056-P1-K1-D3.pep
FRLLRSKTPSSFSRLTYTIVEIYVPFEVFTKGSLKYEEKDGIDYSVFTFYLSCGERVL

SEQ ID NO: 98740 - protein, 78 aa, Gossypium hirsutum
  unsure (1)..(78): unsure at all Xaa locations
  Clone ID: LIB3165-056-P1-K1-E12.pep
HAFAHVSAHAFVKIHCDGCERVSATVICCAYEAALCAKCYFEFYAPNKLGSKHHRFXFNAFLTMFSSCDICQDKAAII

SEQ ID NO: 98741 - protein, 70 aa, Gossypium hirsutum
  Clone ID: LIB3165-056-P1-K1-G1.pep
FVSGLPSVAVGRRVPVPSFFPGSLSPLALFALSFGLPPSLRLVFSLFLFRSLGSFPRSLGRSRGSPRFFR

SEQ ID NO: 98742 - protein, 42 aa, Gossypium hirsutum
  Clone ID: LIB3165-056-P1-K1-G12.pep
PLRTRKLHVYNPTNIKLVIYIFYGKTLQLLTLEPKKKEFNSF

SEQ ID NO: 98743 - protein, 46 aa, Gossypium hirsutum
  Clone ID: LIB3165-056-P1-K1-G9.pep
SQTQPLDTGKRKGCWISIFLRLSHLLYYLDICQENLCRSFIHSLLL

SEQ ID NO: 98744 - protein, 67 aa, Gossypium hirsutum
  unsure (1)..(67): unsure at all Xaa locations
  Clone ID: LIB3165-056-P1-K1-H12.pep
CGGGVCRSGLPLSRRCRALGRSQRSGVCYRRSAPSRPSXWLVKGNLFLKPPLGCRCCAGKIGFSWVA

SEQ ID NO: 98745 - protein, 99 aa, Gossypium hirsutum
  Clone ID: LIB3165-057-P1-K1-A1.pep
LRIIGNTPPQHRLPIPRFSLSAIPFFALVLNVLILGRLLAQLSNNGGDSNIARSIQEKPKLLLLTKLPLFWVLLCLSCRHINRRYCLCWNPFCLQVPFW

SEQ ID NO: 98746 - protein, 52 aa, Gossypium hirsutum
  unsure (1)..(52): unsure at all Xaa locations
  Clone ID: LIB3165-057-P1-K1-A8.pep
VNGLVVEGVIKLFNVIKGKIVGCVNXCAHADSIIPPGCAVNVLKKKVKDDWF

SEQ ID NO: 98747 - protein, 52 aa, Gossypium hirsutum
  Clone ID: LIB3165-057-P1-K1-B12.pep
STIFYSMFFFLLLREKSGLFCLSTECNQVDSETNIIHVFHCWLGCNHLFYEC

SEQ ID NO: 98748 - protein, 131 aa, Gossypium hirsutum
  unsure (1)..(131): unsure at all Xaa locations
  Clone ID: LIB3165-057-P1-K1-C11.pep
ASFRVLSPRLLCALPLSSSVCSLSSGRPRSLFSGFVFSGVAPSCLARPFPXLLLVRLGLRSRFRASSWLGGGWVPAFVAAWCPLCRCWSRGALLWPFSPPSAASFWASLCCLAFLXFGSLRRVGRPGFRPV

SEQ ID NO: 98749 - protein, 110 aa, Gossypium hirsutum
  unsure (1)..(110): unsure at all Xaa locations
  Clone ID: LIB3165-057-P1-K1-C12.pep
GKEKGGDPRRRPRDRRKQDAEPATRPXGGEAKEGGGRAXTRTEAXRDEQDEQDEEHQGHAPAEQGDRRKGRTPDGEEQDGTQGEAGRTKRRGEKGRTAGEKDRRRGGGAD

SEQ ID NO: 98750 - protein, 91 aa, Gossypium hirsutum
  unsure (1)..(91): unsure at all Xaa locations
  Clone ID: LIB3165-057-P1-K1-D1.pep
MGRLTDEARLRSFNLETYEXLYTVYAMALSSTLFSTNINHXRIVLGSFLXDYTYRVDIISSDSDILFLKTYPKFVFDHPYALINLIFQPIS

SEQ ID NO: 98751 - protein, 51 aa, Gossypium hirsutum
  Clone ID: LIB3165-057-P1-K1-D2.pep
FLLHPTNLAIEKAFLSPATHLGPPPLYFSMRKKQFFISIHQSLCVGRPVFF

SEQ ID NO: 98752 - protein, 52 aa, Gossypium hirsutum
  Clone ID: LIB3165-057-P1-K1-F12.pep
RGRVGLVVFLTMLMIETCTIMLITVGRYYSNILPSSAFISLYNIHHIFSFFI

SEQ ID NO: 98753 - protein, 81 aa, Gossypium hirsutum
  unsure (1)..(81): unsure at all Xaa locations
  Clone ID: LIB3165-057-P1-K1-F5.pep
APVGFSFWVPAGVSSCLSSPPGCGSPFPCLWVPAASFARGLCRPCACVXCPRLCSAARSPRRVPLRLFFLRLWAPPLPFLP

SEQ ID NO: 98754 - protein, 57 aa, Gossypium hirsutum
  unsure (1)..(57): unsure at all Xaa locations
  Clone ID: LIB3165-057-P1-K1-G12.pep
VPSPSAGRQETIRSNRRSSXSSAPAADGFGNGAPVPSLKSQSFFRGYGSKITTSERV

SEQ ID NO: 98755 - protein, 106 aa, Gossypium hirsutum
  unsure (1)..(106): unsure at all Xaa locations
  Clone ID: LIB3165-057-P1-K1-H11.pep
SGGFFYALARAQEEKKVKEAGDVRFIMAQIQFLQKNVDESLMSYQELVKEDPTDFRPYFCQGIIYSLLDRNAXAKEQFVKYKELSPNKFVVDGYLMTSLSRMKTVL

SEQ ID NO: 98756 - protein, 64 aa, Gossypium hirsutum
  Clone ID: LIB3165-058-P1-K1-A2.pep
SPICFMARELAEGGLNLFSTQSSSYPNRSCAPPHKCPILKRLCYYFYDSRILCLINLSTFVLCW

SEQ ID NO: 98757 - protein, 66 aa, Gossypium hirsutum
  unsure (1)..(66): unsure at all Xaa locations
  Clone ID: LIB3165-058-P1-K1-A8.pep
EMDRWKGFFYDISDDQQDISFGKGMVHTLFQAPTIDGTYYAGMSSYYYINHXLKLYNLYNIMDGLY

SEQ ID NO: 98758 - protein, 117 aa, Gossypium hirsutum
  Clone ID: LIB3165-058-P1-K1-C4.pep
TKKEIKLLTMAAINPAVAAPYSMGVHRNTATQSHKVMAAANPAVKYGRAASILSTPTQTQSPLLRRNSVPSRSSDTRIMAANPEVLSSPSSSNFNGGSDFYAVPVSEPLRSGFKAGR

SEQ ID NO: 98759 - protein, 86 aa, Gossypium hirsutum
  unsure (1)..(86): unsure at all Xaa locations
  Clone ID: LIB3165-058-P1-K1-C8.pep
MTNMPGTTIVEPLDLAGLQIPYHFRGPMFLELMHDPVTVCTGQTYDRASIESWVATGNTTCPVTRAPLSDCTFMPNHTLXRLIQDW

SEQ ID NO: 98760 - protein, 104 aa, Gossypium hirsutum
  unsure (1)..(104): unsure at all Xaa locations
  Clone ID: LIB3165-058-P1-K1-D12.pep
PSFPLSWFAPSLAGGCXVRAFGAWVFGSRASLWVAVVGCFLGVAVGLSAFRCAGVLVFPGSFGGVPXAPGAPSSCPAXXALSVCRLGVLGXLGGGRRVGARGFR

SEQ ID NO: 98761 - protein, 52 aa, Gossypium hirsutum
  Clone ID: LIB3165-058-P1-K1-E8.pep
ERNWKTEEYRSFLEWSGRAYDSSREILWFRRNDAREGKRRSELRASMSKKIS

SEQ ID NO: 98762 - protein, 56 aa, Gossypium hirsutum
  Clone ID: LIB3165-058-P1-K1-F10.pep
GATHAFGLYLSHGFISSPPSLPLSASYRALGVLVPTLALMGKKVSSRFNSTSHVPT

SEQ ID NO: 98763 - protein, 46 aa, Gossypium hirsutum
  Clone ID: LIB3165-058-P1-K1-H7.pep
QRVLQAVFNIFSLYPFHGIYFKQGPKWVRCDLRLSSTLTHRRISIL

SEQ ID NO: 98764 - protein, 100 aa, Gossypium hirsutum
  unsure (1)..(100): unsure at all Xaa locations
  Clone ID: LIB3165-058-P1-K1-H9.pep
QNNVKTRPKGGLVTMPFIFSNEICEKLAVVGFNTNMISYLTTQLHMPLTKAANTLTNFGGTASLTPLLGAFIFDLYAGRFWTITXALSLYTKIGMTCLTL

SEQ ID NO: 98765 - protein, 65 aa, Gossypium hirsutum
  unsure (1)..(65): unsure at all Xaa locations
  Clone ID: LIB3165-059-P1-K1-A11.pep
RASSSANALYFSCSSIPIVSLAFSLSICFSTVXDGLMYAFSLVWVLHVSPCATFGFTVHALDLLG

SEQ ID NO: 98766 - protein, 32 aa, Gossypium hirsutum
  Clone ID: LIB3165-059-P1-K1-A9.pep
IGCIRVAAARSETDIVTNYWKTKKRQLVLVRA

SEQ ID NO: 98767 - protein, 65 aa, Gossypium hirsutum
  Clone ID: LIB3165-059-P1-K1-B10.pep
HLINKSDKSKPKHYYTLIQARIDKLTTHNESKLVAAEDGGDDGGCGDKERLEGKKRIRNFFFSHR

SEQ ID NO: 98768 - protein, 61 aa, Gossypium hirsutum
  unsure (1)..(61): unsure at all Xaa locations
  Clone ID: LIB3165-059-P1-K1-B4.pep
MAASMISSATIATASPALAFLVAPFSGLLSASAFPVSRLAYYDFTSLACFGGRXQCMLVWP

SEQ ID NO: 98769 - protein, 99 aa, Gossypium hirsutum
  unsure (1)..(99): unsure at all Xaa locations
  Clone ID: LIB3165-059-P1-K1-D11.pep
PTRPAKRFLDYGFHGPTKSWPVPGTLMIEPTEIDCMAELDRFXDALISIRVVIALIXKDKLISTTXVLNGAPHPPSLLMGDAWTXPYSRVFAAFPASWL

SEQ ID NO: 98770 - protein, 85 aa, Gossypium hirsutum
  Clone ID: LIB3165-059-P1-K1-E10.pep
DIEGGARNNVESDHGTILKAKVAEYWHEIEERYTEKKVVANERERERARRERVGKIIGRREEDEEGKEKNGKGESDEKNEEPRFL

SEQ ID NO: 98771 - protein, 82 aa, Gossypium hirsutum
  unsure (1)..(82): unsure at all Xaa locations
  Clone ID: LIB3165-059-P1-K1-E12.pep
QASSASRSTDSTVLYFTDDSAAISMGSGGLSVESAGLSSVGGGGVSDLSSAASVGGGGGSEGISDSSYKGTSTSAMWACSXK

SEQ ID NO: 98772 - protein, 93 aa, Gossypium hirsutum
  unsure (1)..(93): unsure at all Xaa locations
  Clone ID: LIB3165-059-P1-K1-E7.pep
YSYLYFFTHXYFTNVYILTCLLSYNFLYLYIYTYIYYFCNFIHLFIYIXIIILNESFNFIPLYALIFNPTNKGLKSQLSVHVYTILHFYLFLS

SEQ ID NO: 98773 - protein, 58 aa, Gossypium hirsutum
  unsure (1)..(58): unsure at all Xaa locations
  Clone ID: LIB3165-059-P1-K1-E9.pep
LASAHASVFXFGGIFSYDAVFIVDSPDMVXAYWPXCHPLRRCGSLRRCSLSLCCRSIS

SEQ ID NO: 98774 - protein, 60 aa, Gossypium hirsutum
  Clone ID: LIB3165-059-P1-K1-F10.pep
SLNIYFDAKAGDPSDPQGFILIIDCKLLLLSFLLRLIGFISPGLLCGSCSFFHPSFCSSP

SEQ ID NO: 98775 - protein, 44 aa, Gossypium hirsutum
  Clone ID: LIB3165-059-P1-K1-G10.pep
SFFSSPALGPLTTSLPSSPILVLPPFLLLSPPRELLVGEPLLPC

SEQ ID NO: 98776 - protein, 58 aa, Gossypium hirsutum
  unsure (1)..(58): unsure at all Xaa locations
  Clone ID: LIB3165-059-P1-K1-G6.pep
KKKKWXMISQSSTDRFRCSVTLFKNIMYDXQISMNNVNQIILVFFLMEHSCYDSTFKD

SEQ ID NO: 98777 - protein, 54 aa, Gossypium hirsutum
  Clone ID: LIB3165-059-P1-K1-G9.pep
LAVIALASSMISSATIATEYRSSPAQAYMVAPFSGLLSASAFPVTRYAFFDFSS

SEQ ID NO: 98778 - protein, 73 aa, Gossypium hirsutum
  Clone ID: LIB3165-059-P1-K1-H11.pep
KEHKRILQNSSLCLKTKVIQYQYKEIYVSCMPNTIKKNKRDYSFFPVEKAKRYEYRPPYSAKSAEARERMGTR

SEQ ID NO: 98779 - protein, 68 aa, Gossypium hirsutum
  unsure (1)..(68): unsure at all Xaa locations
  Clone ID: LIB3165-059-P1-K1-H4.pep
THASEPRIVAQQILFVVGKVLKPVIDAGVPIAQKAGEEALXEAFPAISEASNKALEAFQGTGLDTEPV

SEQ ID NO: 98780 - protein, 50 aa, Gossypium hirsutum
  Clone ID: LIB3165-060-Q1-K1-A7.pep
TSHGPLFGKNDPRHHISDAVGDVVSILPIDPAESRKSCRIYMLVFDKILT

SEQ ID NO: 98781 - protein, 84 aa, Gossypium hirsutum
  Clone ID: LIB3165-060-Q1-K1-B5.pep
LCFPSLLKPPLSKPFSKTHRPFLDLQTQPPSLDHPHCLHQSRISRPRRRNRRTVKPSGELYLLAAANTRLTGSNSGLGRSLPKR

SEQ ID NO: 98782 - protein, 131 aa, Gossypium hirsutum
  Clone ID: LIB3165-060-Q1-K1-C8.pep
GLLFWDEVELIASTFAYSIVQAFASFEEQWEEICSDIKDGTLSSRITLPRMRKAVLDIISPNPCLASQIEAICRDSKASNWYGIVPRLWPNAKYVYSIMTGSMQPYLKKLRHYAVSLPLVSADYGSTEGWI

SEQ ID NO: 98783 - protein, 61 aa, Gossypium hirsutum
  Clone ID: LIB3165-060-Q1-K1-D1.pep
GQRVIPWADDLTMLHSHKDERQISMHHPCDQNLCCPASIRILIAKLQTMWGAITSQRQISF

SEQ ID NO: 98784 - protein, 101 aa, Gossypium hirsutum
  unsure (1)..(101): unsure at all Xaa locations
  Clone ID: LIB3165-060-Q1-K1-D4.pep
VEVEEMASKFGDSCKLATSDLFCRPHSAFLCCNCDSTTHAANHLASPHPRVCLCQVCEQAPAHVTCKADAAALCVACDQHXHSANPLARQHVRLPIIPFYD

SEQ ID NO: 98785 - protein, 93 aa, Gossypium hirsutum
  Clone ID: LIB3165-060-Q1-K1-E2.pep
PRVRGHPGTKYGISFPVLARSSFGIRGAHVPTSLSALVCCGWYGIESWIGGEAIYLFLPNSIKQSSFSQPLPWLGTSPLEFACFIAFWLVQLV

SEQ ID NO: 98786 - protein, 127 aa, Gossypium hirsutum
  Clone ID: LIB3165-060-Q1-K1-F11.pep
LLLVTLSFAVVATADGACQDDGPELPACNNPFKLVKVKIWVDGVEGEDLSGITASFGASLPEEANKSSKLPAVFSNPLNGCSNSSSKLTGSVALSIRGDCDFVTKAKVAQSGGASALLVINDNEELY

SEQ ID NO: 98787 - protein, 71 aa, Gossypium hirsutum
  Clone ID: LIB3165-060-Q1-K1-F2.pep
SQCGNDRDNQKLGCVRHCIHANRWRIFFVTRHVAYRWLFTSITPHALPRKGWPICDCLQISKAGQPGIRAV

SEQ ID NO: 98788 - protein, 63 aa, Gossypium hirsutum
  Clone ID: LIB3165-060-Q1-K1-F8.pep
LFPPSNCRFISAQWCSQSWRNLSSLESLLIRFQRSKEKKSMAYSHSKVFIFFCFFFYFKCEKN

SEQ ID NO: 98789 - protein, 100 aa, Gossypium hirsutum
  unsure (1)..(100): unsure at all Xaa locations
  Clone ID: LIB3165-060-Q1-K1-F9.pep
FLSIAQHCNSRAPSFTLTLHMGLASATTISSSSSSLLSSSLCPARRGFLLPCHHHFCFLSTFSKCNLNWKRSSGKKRGERVKCSAXGVGVEDEACELVNG

SEQ ID NO: 98790 - protein, 63 aa, Gossypium hirsutum
  Clone ID: LIB3165-060-Q1-K1-G3.pep
MVKVACYFAMAYAASIFWQTMDKVHVWIGLHQDEKKERLEREAGVRRLMEELLQHAKQNDRLP

SEQ ID NO: 98791 - protein, 95 aa, Gossypium hirsutum
  unsure (1)..(95): unsure at all Xaa locations
  Clone ID: LIB3149-003-P1-K1-C6.pep
VSILEFYLGRFPFAVGRQGDWASLMCAICMSQPPEAPPTAFNEFRHFISCCLQRDPARRWSAAYMRQYAFIVRGQPHXGDHNLHQLLPPPPPLSS

SEQ ID NO: 98792 - protein, 120 aa, Gossypium hirsutum
  unsure (1)..(120): unsure at all Xaa locations
  Clone ID: LIB3149-003-P1-K1-D11.pep
RASDDFQEIVSEERTFXRKGNMDAPVGNKICELYDLYVDGLDEDAGPHIRKFYVELAQLWPDGMMNNHEIKHAICRAKERLRARYNRRKDQEKMRREKMLTLGPEESVRVDSCLSAQSQH

SEQ ID NO: 98793 - protein, 60 aa, Gossypium hirsutum
  Clone ID: LIB3149-003-P1-K1-G6.pep
KSVLSSSCCCGYRVTLPSHDQCSVVLMLWYFRSLWIIDASLCQPSNLEKILMLILVLSIT

SEQ ID NO: 98794 - protein, 117 aa, Gossypium hirsutum
  unsure (1)..(117): unsure at all Xaa locations
  Clone ID: LIB3149-006-Q1-K1-E6.pep
SKSFTFKKGDRXVKFVGTTSPSGFSSLQPALRGPAIGFRGKVLLAFEENGSSKIGVRFDRSIPEGNDLGGLCEVDHGFFCAASSLRLEPSGGDDVDKLAVNELFEAAANESKCSPLI

SEQ ID NO: 98795 - protein, 67 aa, Gossypium hirsutum
  Clone ID: LIB3149-008-Q1-K1-G7.pep
YIYKFFMSADRTVTYTDKTNSMCCLEGPLDRYIQFKFNPFTLQHTKGTEDVQIFFFYFLPNQLFWFQ

SEQ ID NO: 98796 - protein, 31 aa, Gossypium hirsutum
  Clone ID: LIB3149-008-Q1-K1-H3.pep
NMTSKWAKLNVLGAENLHFRAIKYSRVTPYK

SEQ ID NO: 98797 - protein, 77 aa, Gossypium hirsutum
  unsure (1)..(77): unsure at all Xaa locations
  Clone ID: LIB3149-013-Q1-K1-E2.pep
PINRFLPRPFQRRIVKXENCHDQSSKLASLVSFENPPGKCKYSLEQSYIERTKRRDRSKNKQHSKPKSHHNLQAKLQ

SEQ ID NO: 98798 - protein, 53 aa, Gossypium hirsutum
  unsure (1)..(53): unsure at all Xaa locations
  Clone ID: LIB3149-013-Q1-K1-E6.pep
KLQDILPVXFLYNSPXNEFGDFLIEKQFQNQAPAAGPEFDIKHAVAAAVTLKG

SEQ ID NO: 98799 - protein, 48 aa, Gossypium hirsutum
  Clone ID: LIB3149-013-Q1-K1-E7.pep
HTLKLATKSKLLCLMHSRHLCRTIRLFTACKPVRRVSLKSRVTMSAVR

SEQ ID NO: 98800 - protein, 73 aa, Gossypium hirsutum
  unsure (1)..(73): unsure at all Xaa locations
  Clone ID: LIB3149-013-Q1-K1-E8.pep
ALAHIARRAFFKRPFCDDFLRFRFEKFEVGIWSSXKHENLGXVVDFLIGDMKQNLLFCWVIITCFLLLSVKLA

SEQ ID NO: 98801 - protein, 42 aa, Gossypium hirsutum
  Clone ID: LIB3149-013-Q1-K1-H4.pep
PMTLHYMCTYRPITPPPFPKTRRGKFGEKIISNFRTPGTHPV

SEQ ID NO: 98802 - protein, 46 aa, Gossypium hirsutum
  Clone ID: LIB3149-014-Q1-K1-B1.pep
LLIHIFSTSYNYHRLHFLYGGESFLIPRYESYRTRKIPLCPLLHCS

SEQ ID NO: 98803 - protein, 119 aa, Gossypium hirsutum
  unsure (1)..(119): unsure at all Xaa locations
  Clone ID: LIB3149-014-Q1-K1-D12.pep
TRPATFVESVMGSQCPKELEPADPRTKVDLHLXRRDENYSEPNRRQSVFQGVGRTLXSSSPSPTPSESTAAAGNIITAPAPSMGLVVDTSXPTTSIQLRLSDGTRMISRFNHHHTIRDI

SEQ ID NO: 98804 - protein, 62 aa, Gossypium hirsutum
  unsure (1)..(62): unsure at all Xaa locations
  Clone ID: LIB3149-014-Q1-K1-F8.pep
HAFNIXIPSFAQGSERNCDESHQLVIGVPFSAHSVSSREAIIFGDLIXSNENQEIWXXKLXS

SEQ ID NO: 98805 - protein, 67 aa, Gossypium hirsutum
  unsure (1)..(67): unsure at all Xaa locations
  Clone ID: LIB3149-014-Q1-K1-G11.pep
RPQKXHCILDKRXIRIEKTXXQXNGRGDFFLPPNPFSLLCIISFSXWVIHHCYKNIERTGQPWISPP

SEQ ID NO: 98806 - protein, 90 aa, Gossypium hirsutum
  unsure (1)..(90): unsure at all Xaa locations
  Clone ID: LIB3149-014-Q1-K1-G9.pep
QPAXYNQEYRTRNISGLGNYSVGQGTFTDSAMGNINNLQQLTSLKIHVNSGGDLGGDIGMKTGTCQPLKQLNSENXGTRGAGIKIRTRGS

SEQ ID NO: 98807 - protein, 79 aa, Gossypium hirsutum
  Clone ID: LIB3149-015-Q1-K1-A1.pep
NTNHREGCYIQSNYGSSCLIEVSLLMMSHLITRVSRSLDHGNSPVDLLMRSHLIRRVSVSCSIDDGNSPVFINCDPRLS

SEQ ID NO: 98808 - protein, 71 aa, Gossypium hirsutum
  Clone ID: LIB3149-015-Q1-K1-A3.pep
KPVHSRRLGAPHISSRRRYNSPFSPYCETNKCPTLTSKTVGKLTNDDRYKIKNESKQQIADRVIHSAAKAR

SEQ ID NO: 98809 - protein, 64 aa, Gossypium hirsutum
  Clone ID: LIB3149-015-Q1-K1-A9.pep
SNHQPKYPQPEHKESEARALATAGRRSCLCLAPAPHEPLPTHVAVLTPGTTPYARPRTCEPAGD

SEQ ID NO: 98810 - protein, 128 aa, Gossypium hirsutum
  Clone ID: LIB3149-015-Q1-K1-C10.pep
KTRLAHGGIHKEVHDLLLDYGLEIIAEILIEGLSRVKRCTDEGRALMSLDLQVLINGLQHFVSLNVKPKLQIVETFIKAYYLPETEYVHWARAHPEYSKNQIVGLINLVASMKGWKRKARFEVLEKIE

SEQ ID NO: 98811 - protein, 36 aa, Gossypium hirsutum
  Clone ID: LIB3149-015-Q1-K1-C8.pep
RSYFDIACIHALKIQIPPDILSITKMHHFDLHRTRG

SEQ ID NO: 98812 - protein, 115 aa, Gossypium hirsutum
  Clone ID: LIB3149-015-Q1-K1-C9.pep
SRTKLEKEYEEEVLVLQNGRLDRDAGVKFDVYINDEDDETPTEPEDSEFAGSFTNLPHNHHKTGMKLNTNLTLPLTDLLEDLNVEGDESILVTLVPKEGKGLVSIGNIKIDYIRD

SEQ ID NO: 98813 - protein, 119 aa, Gossypium hirsutum
  Clone ID: LIB3149-015-Q1-K1-D7.pep
MLQTGVTLLVINLSNQTNFIMNAQNSINLKLAANEQNISRDSFTHSLKKTFSWVGTKASDDALLREEYHLTPKDGYLRSRTMVLNGIPLELTSTGDIPSLNPVRVNVKSPITISPLSIA

SEQ ID NO: 98814 - protein, 50 aa, Gossypium hirsutum
  Clone ID: LIB3149-015-Q1-K1-E10.pep
PSRIQFRMDFFRALDTFGLKIISQQMERPRTNGVTAPKCIKQIKEHRMFG

SEQ ID NO: 98815 - protein, 75 aa, Gossypium hirsutum
  Clone ID: LIB3149-015-Q1-K1-G11.pep
NIFLLFWFSKVKRSSIVLNVLLQCHKLKVKLEEIHREYQNLMTIRNQYFTLLKHIQVSKEVKVEKVGEEFVVKVS

SEQ ID NO: 98816 - protein, 47 aa, Gossypium hirsutum
  Clone ID: LIB3149-015-Q1-K1-G5.pep
TGMSFTLIRTPISHSKSTQSINYFEIPFISLSIIILTTFFNAFGSQN

SEQ ID NO: 98817 - protein, 84 aa, Gossypium hirsutum
  Clone ID: LIB3149-015-Q1-K1-G8.pep
NAPQYNAASGGGLPMWIPQPRAIGGPQMHPMREAPPAMQKAPVQQCITMNRPPHKSPTVGMNPNNMPVPTAADSQYTAASRPRP

SEQ ID NO: 98818 - protein, 88 aa, Gossypium hirsutum
  Clone ID: LIB3149-015-Q1-K1-H3.pep
VNHIFYIPHCSFIIQDLFHHNFSQFTLTLFFHNYPNPTTSSITPPLCPFCLITIFRLSLSNIKYFYHDFCEDGISPKVKKPTKSRNFI

SEQ ID NO: 98819 - protein, 44 aa, Gossypium hirsutum
  Clone ID: LIB3149-015-Q1-K1-H6.pep
GTEVPGQASRIFGMEFSKCKISLHFTVLRLWVFWFMALGPACWL

SEQ ID NO: 98820 - protein, 66 aa, Gossypium hirsutum
  Clone ID: LIB3149-016-Q1-K1-A1.pep
DYEFASRSKTTEELASKYIGIYTFTGGKAVYYRNLLVIPGTSFMGEDRLHFINGILHLEAELTIRR

SEQ ID NO: 98821 - protein, 52 aa, Gossypium hirsutum
  Clone ID: LIB3149-016-Q1-K1-A2.pep
KQLQISNLLKLGQMKVALNHDIYNSCNLPYMQDSNYDRGTNIQCMGYITMAS

SEQ ID NO: 98822 - protein, 111 aa, Gossypium hirsutum
  unsure (1)..(111): unsure at all Xaa locations
  Clone ID: LIB3149-016-Q1-K1-A5.pep
LLHSNPNLSVTGLLPSEGPNHISTAVVXTILYAAPEYIQTGLLTIKSDVCIYGVFLYDLITVTHPLYLNRPXKLIKALXWLPPHISNIXNFKLIIYPNFDVKYFISIPLYK

SEQ ID NO: 98823 - protein, 60 aa, Gossypium hirsutum
  Clone ID: LIB3149-016-Q1-K1-A8.pep
RMLKKDEYLPKVQLMASFPPVQINLKALMLFSHYYCLLICLAQSTCKHLKHLKQKCNLLV

SEQ ID NO: 98824 - protein, 121 aa, Gossypium hirsutum
  Clone ID: LIB3149-016-Q1-K1-B10.pep
KFRGVRQRPWGKWAAEIRDPLRRVRLWLGTYDTAEEAAMVYDNAAIQLRGPDALTNFTTPQQKSLQDKNSQKPLSSSEYNSVEESHTTTTNICSPTSVLRCPSLSTDEVDSPQSVKRISRN

SEQ ID NO: 98825 - protein, 89 aa, Gossypium hirsutum
  Clone ID: LIB3149-016-Q1-K1-C12.pep
VFDIKLITTTLALNTKFIPKLCSNNVSLSSNYNSWHSSITCDTSNSAYLKSLQEESLPLNRCIALYNFLRWPTANIPISLRSSGVNRGR

SEQ ID NO: 98826 - protein, 58 aa, Gossypium hirsutum
  unsure (1)..(58): unsure at all Xaa locations
  Clone ID: LIB3149-016-Q1-K1-C3.pep
MGPSGLVKTSGSAKVGDHPDYTESGXSSMCRGSTSSDVSNESSYSSLSSRINRPNKTN

SEQ ID NO: 98827 - protein, 95 aa, Gossypium hirsutum
  unsure (1)..(95): unsure at all Xaa locations
  Clone ID: LIB3149-016-Q1-K1-D7.pep
MHPSDLEILEQIHSDVFXIRYESEFFQNVVNGRDIVSWAAVDHSRPNGQSDELIGFVTARIVTAKDSEIADLLRYDPSKGHQTLVYILTLGVVDA

SEQ ID NO: 98828 - protein, 116 aa, Gossypium hirsutum
  unsure (1)..(116): unsure at all Xaa locations
  Clone ID: LIB3149-016-Q1-K1-E1.pep
MKGKFLKACITKWRKMGNRVIPCGSCEYCYEWAKWPNTKNEESSIPRDVPKGHLVVYVGENYKRFVXIKLTLLKHPLFKALLDQAQDEYDXTTDPKLCIPCDESLFLEVVRCASSP

SEQ ID NO: 98829 - protein, 125 aa, Gossypium hirsutum
  Clone ID: LIB3149-016-Q1-K1-E10.pep
TNLLAAVIIALTFGQIGDSTVERPNFFTQLSQDNWSSVLFAMAGGVVLSLGNLSTQYAWAFVGLSVVEVISSSMTVVIGTTLNYFLDGKINKAEILFPGVGCFLVAVCLASAVHSSNAADYKTKL

SEQ ID NO: 98830 - protein, 34 aa, Gossypium hirsutum
  Clone ID: LIB3149-016-Q1-K1-E11.pep
PLFFFFFIFFFLFFFFFFFFFFFFFFFFFFFFFF

SEQ ID NO: 98831 - protein, 56 aa, Gossypium hirsutum
  Clone ID: LIB3149-016-Q1-K1-E7.pep
QFYLHNTKFIELATTLTNGRNIPIVGLPLLLFHSKYHLYLIINFINLPYLNFYLSF

SEQ ID NO: 98832 - protein, 76 aa, Gossypium hirsutum
  Clone ID: LIB3149-016-Q1-K1-F2.pep
AETQRVCSRIESDSKRWMGLKKAVAVKFFWNNLGSHGLGPTSPLFHVGTIWTRHVKNGCYVLLYDIDISTYYQLIL

SEQ ID NO: 98833 - protein, 58 aa, Gossypium hirsutum
  unsure (1)..(58): unsure at all Xaa locations
  Clone ID: LIB3149-016-Q1-K1-F7.pep
TGIVSIEAGSSFAWGKMVGSRXNAIIIDRFVACAPSGRIYMEFGLTAQATIAAAIELC

SEQ ID NO: 98834 - protein, 114 aa, Gossypium hirsutum
  unsure (1)..(114): unsure at all Xaa locations
  Clone ID: LIB3149-016-Q1-K1-G5.pep
EGGPHASDRLYRKIDXHTNXKDIYGRIMTVFYDPGRXNTYICLIHYVDGENRFFLHTRWAIIGDTIVSGTXFPIKMXNSLLFTNIPLCSYIHFILITLFIFGSINYIHTISCLQ

SEQ ID NO: 98835 - protein, 64 aa, Gossypium hirsutum
  Clone ID: LIB3149-016-Q1-K1-H10.pep
SLSLSHLGEVNMMSRLGPHFFNNPLYFILHFHRRSLSLWNKQPPFREPYHISKFQLFHLLSFLS

SEQ ID NO: 98836 - protein, 72 aa, Gossypium hirsutum
  Clone ID: LIB3149-016-Q1-K1-H7.pep
EKGVITFDSLKKNSALLGLQDLSDDDLRCMVKEGDFDGDGALNQMEFCVLMFRLSPELMEASGFFLEEAFAT

SEQ ID NO: 98837 - protein, 84 aa, Gossypium hirsutum
  unsure (1)..(84): unsure at all Xaa locations
  Clone ID: LIB3149-016-Q1-K1-H8.pep
PTTRTEKXLSPXTFLIKIQHSSIYKIFLKIIMSPTNQIIIFLYYFSLNHIYFPILIYNLTPYFNSINKPNLIKIFFLHSFTYFI

SEQ ID NO: 98838 - protein, 97 aa, Gossypium hirsutum
  Clone ID: LIB3149-017-Q1-K1-A5.pep
FCDCCDGSDEYDGSILCPNTCIMGGNVEYKTEDYVSTTSHLHSTKLKEMKIGIKLEDLIQTLAGLKMITVAEVALGCVLVVKWIFHKRVKSKKRHHR

SEQ ID NO: 98839 - protein, 52 aa, Gossypium hirsutum
  Clone ID: LIB3149-017-Q1-K1-A6.pep
MVQSHLALLPCVELVHLPAAMTIETSQLFRSSHSRDVDGYDACLRTPACIRK

SEQ ID NO: 98840 - protein, 52 aa, Gossypium hirsutum
  unsure (1)..(52): unsure at all Xaa locations
  Clone ID: LIB3149-017-Q1-K1-B1.pep
GCRMLKKLPLNSNSAKGKRLVIVGREEWWNDLXWEDEFTRIAFLPSFKSRDL

SEQ ID NO: 98841 - protein, 66 aa, Gossypium hirsutum
  Clone ID: LIB3149-017-Q1-K1-B11.pep
VIMGSRGCGAEKRGNDGRLGSVTDYCVHHCVCPVIVVRHPDEKDGGNGQPVVIDKEARVEEKGGKC

SEQ ID NO: 98842 - protein, 61 aa, Gossypium hirsutum
  Clone ID: LIB3149-017-Q1-K1-B12.pep
ESIVFTYAAFLFRPGRFISHVRLTINADLSLLVCLTAYVGTHYSDATHDKKRPPAFHRFLF

SEQ ID NO: 98843 - protein, 61 aa, Gossypium hirsutum
  Clone ID: LIB3149-017-Q1-K1-B7.pep
FAAPLRVPLAALPGHQLGSPYLVRAPLLLYPAGYIRTLLLGVLVAFALFVFSVPLLFIFVL

SEQ ID NO: 98844 - protein, 107 aa, Gossypium hirsutum
  unsure (1)..(107): unsure at all Xaa locations
  Clone ID: LIB3149-017-Q1-K1-C11.pep
VITLLKSMDANDGSEHAPGTELKASDEHLKGHGPFMAGERSTAVELWLGPKLCHIGITLXHFKKSTDAECLTNAHNYMKAIVRRKSFAKTTADKEHLIAEWAPNANA

SEQ ID NO: 98845 - protein, 112 aa, Gossypium hirsutum
  Clone ID: LIB3149-017-Q1-K1-D1.pep
APSSRMAMTRRVHPLVSLNPYQGNWMIKVRLTSKGNMRTYKNARGEGCVFNVELTDEDGTQIQATMFNEAARKFYEKFQLGKVYYISRGTLKVANKQFKTVQNDYEMTLNEN

SEQ ID NO: 98846 - protein, 61 aa, Gossypium hirsutum
  Clone ID: LIB3149-017-Q1-K1-D8.pep
ILFFLNPPPLFFFFFFFFFFFFFFFFFFFFFFFFFFFFFFFFVEMYFALSKKCLLGIHLHL

SEQ ID NO: 98847 - protein, 128 aa, Gossypium hirsutum
  Clone ID: LIB3149-017-Q1-K1-E12.pep
MEADQKGKSDISFAGTFASSAFAACFAEICTIPLDTAKVRLQLQKKALGGDAAALPKYRGLLGTVGTIAREEGLAALWKGVIPGLHRQCLFGGLRIGMYEPVKNFYVGKDHVGDVPLTKKILAALTTG

SEQ ID NO: 98848 - protein, 38 aa, Gossypium hirsutum
  Clone ID: LIB3149-017-Q1-K1-G1.pep
TIIQMFNQSSNTATNLHYLNLNHITLLITFIVILHCAY

SEQ ID NO: 98849 - protein, 60 aa, Gossypium hirsutum
  Clone ID: LIB3149-017-Q1-K1-G12.pep
YYITTRIKEIHDNSLENQLGLLNLCGKLLEDWLQWCSQGNFLAFPWWLPLFPFISLFTSS

SEQ ID NO: 98850 - protein, 55 aa, Gossypium hirsutum
  Clone ID: LIB3149-017-Q1-K1-G2.pep
KSASISYISIECTTPAELLASVSPTFFSMNTSVSTVLDCKDAFSNFTPSSTPTSM

SEQ ID NO: 98851 - protein, 73 aa, Gossypium hirsutum
  unsure (1)..(73): unsure at all Xaa locations
  Clone ID: LIB3149-017-Q1-K1-G7.pep
PHXXHKXSGLIPNPTAHTNXXNXRXTLMFLDNIYYKNILYNMVFFIVVHQLSYYKMTIPYMNKITNIQDYFFN

SEQ ID NO: 98852 - protein, 94 aa, Gossypium hirsutum
  Clone ID: LIB3149-017-Q1-K1-G8.pep
TPPPAPPNPPTPPVPPSPSAPPVPPNPPTPPGPPSPPTPPVPPSPPNPPVPPSPPKPPPPSPPTPPKGVTPPRTPPPPNGMPFEPMPAKPPAPP

SEQ ID NO: 98853 - protein, 72 aa, Gossypium hirsutum
  unsure (1)..(72): unsure at all Xaa locations
  Clone ID: LIB3149-017-Q1-K1-G9.pep
ARVNNPQWLIVVGGCTHVGCIPLPNARDYGGWFXPCHGSHYDVCGRIRKGTAPYNLXVPTYTFLDESKLLIL

SEQ ID NO: 98854 - protein, 49 aa, Gossypium hirsutum
  Clone ID: LIB3149-017-Q1-K1-H10.pep
SYQKQVTATKWPLHKLYLIFLPVSFFNSPLSPFFFFFFLKFKFYFFFFF

SEQ ID NO: 98855 - protein, 46 aa, Gossypium hirsutum
  Clone ID: LIB3149-017-Q1-K1-H12.pep
SVISSVQAERPKDASAFKHTRKHHSDVLYAASSTIFLIGERVDAAV

SEQ ID NO: 98856 - protein, 123 aa, Gossypium hirsutum
  Clone ID: LIB3149-018-Q1-K1-A12.pep
MIRFENGISQVNERVCLVRKAPSFSGPLMLPTRASANSLSAPIKSSGGFRDSLDDKSKANLVQIKGRFSVTSENLYLVKDIPLSSVSRRSSQTSPLRKSASVGDWIPEYKQAVRALDLLLNMV

SEQ ID NO: 98857 - protein, 73 aa, Gossypium hirsutum
  Clone ID: LIB3149-018-Q1-K1-A3.pep
IAYLAEGFHRKSSSSVIQRYIFSSLWSHSDLFFTFGGIWVFRVIRFSRLFKDYFNLVLVGQASSSRTRGAGSG

SEQ ID NO: 98858 - protein, 56 aa, Gossypium hirsutum
  Clone ID: LIB3149-018-Q1-K1-A4.pep
ARIINIARHFIFFQSSVKALSSTRVVLVSVHSYRSVSSQKSSSPVRVNESVSVRVV

SEQ ID NO: 98859 - protein, 66 aa, Gossypium hirsutum
  Clone ID: LIB3149-018-Q1-K1-A7.pep
IFHISLFTSPKQVIHIKPTSTLFFNLNCPPLLYKYSTISFHPLRNKYSFFFPLTPPPIFFSFPHYF

SEQ ID NO: 98860 - protein, 77 aa, Gossypium hirsutum
  Clone ID: LIB3149-018-Q1-K1-B6.pep
VSTDMSAKQPATDLYVRLNTGLVASSMEWVPRPSNGGRYTSSRLHFASNLISKFAVFAPNDNRITELFNVGDYKQPL

SEQ ID NO: 98861 - protein, 48 aa, Gossypium hirsutum
  Clone ID: LIB3149-018-Q1-K1-C11.pep
AQIASCVSYAFRCSCPLGRLKLCSILYDIYPECLPPILSSLYIQCIHN

SEQ ID NO: 98862 - protein, 79 aa, Gossypium hirsutum
  Clone ID: LIB3149-018-Q1-K1-C3.pep
ITNQIGHWLVHFAGPNFPKKASYWQLLDLKIKKPYFLLSHIAEVSKMQVEVSGLKKRKRGKCIHTYLDGVYGRSSRPMA

SEQ ID NO: 98863 - protein, 137 aa, Gossypium hirsutum
  Clone ID: LIB3149-018-Q1-K1-C6.pep
LEQSFLSGNLSHKSSGFCDERGKYKGKEEVVDEEEDLSMVSDASSGPPHLNVDNGYFNDDNHYQYTLPKGATLNKNGGTKRHRKKEHQRQREVHQELPSLLDDTASSPLIKNNFAHTNNHASVEESVLHYPPGFSAT

SEQ ID NO: 98864 - protein, 31 aa, Gossypium hirsutum
  Clone ID: LIB3149-018-Q1-K1-D10.pep
CTSCVCFGCEICRFTDCRCETCIDFIRNAEA

SEQ ID NO: 98865 - protein, 44 aa, Gossypium hirsutum
  Clone ID: LIB3149-018-Q1-K1-E1.pep
VLSPSCRFIKNILFLSFLIAVHTPTFGVLYGTPIRHSNMNQRNI

SEQ ID NO: 98866 - protein, 113 aa, Gossypium hirsutum
  Clone ID: LIB3149-018-Q1-K1-E4.pep
ASTACAVVSVIASSAVSGTVASAVSSIGGSSATAVGSSTTSLVSTSAEAAGSASAASAGSASFASAAAASSAVAASRTSSDVASCSSHNSCSFLLIKSSINRYNNSSSHRNRE

SEQ ID NO: 98867 - protein, 120 aa, Gossypium hirsutum
  Clone ID: LIB3149-018-Q1-K1-F1.pep
KCGIGIPFLWLQDRPNKKTNDSNSYMNIFASLFLENVELEFPEEFRSHFLWLQDRPNKKTNNSNSYMNIFASLFLENVELEFPEEFRSHFLWLQDRPNKKTNNSNSYMNIFASLFLENVE

SEQ ID NO: 98868 - protein, 94 aa, Gossypium hirsutum
  unsure (1)..(94): unsure at all Xaa locations
  Clone ID: LIB3149-018-Q1-K1-F11.pep
MTSPSFNIWLLYHNEHGSHQDGNKLHGAGNINPYQCPSKXHLHFRLPHYHIPCMFFYKKCCRTCLCVPPTYYRNKQFKTLYNICKTNEGGPKCL

SEQ ID NO: 98869 - protein, 112 aa, Gossypium hirsutum
  Clone ID: LIB3149-018-Q1-K1-F7.pep
MENLWRAATRQDPNPEDYKGVDFWTNPERAGWLTKQGDYIKTWRRRWFVLKRGKLLWFKDPGSVARTSAPRGVVSVDLCLTVKGAEDIVKKAFAFELSTRDSTMYFVADTEK

SEQ ID NO: 98870 - protein, 37 aa, Gossypium hirsutum
  Clone ID: LIB3149-018-Q1-K1-G2.pep
RWASALSLGDSIDEISRRMHGKVGLERIDRLLGLLAY

SEQ ID NO: 98871 - protein, 139 aa, Gossypium hirsutum
  Clone ID: LIB3149-018-Q1-K1-G3.pep
KISKSYPLAITKVEESGEHTILGTGELYLDSIMKDLRELYSEVEVKVADPVVSFCETVVESSSMKCFAETPNKKNKITMIAEPLERGLAEDIENGVVSVDWSRKQLGDFFKTKYDWDLLAARSIWAFGPDKQGPNILLD

SEQ ID NO: 98872 - protein, 137 aa, Gossypium hirsutum
  unsure (1)..(137): unsure at all Xaa locations
  Clone ID: LIB3149-018-Q1-K1-G5.pep
FQPTLNPSLRTMFLKALRGLNATIAILVDEDADLTSNNLVCRLRSAFNYLWIPYDTVDTFLPIGSKQRQWYEANICWKVENVIAHEGLQRVERVESKSRWVQRMRNAEFRGVSXGDETVSEVKTMLDEHAAGWGLKK

SEQ ID NO: 98873 - protein, 63 aa, Gossypium hirsutum
  Clone ID: LIB3149-018-Q1-K1-G8.pep
EMKRVVNLENVEKGFGLNNGDHMDRLRLRTTKIDGLVYFVENGVERGCSLSVHSHGGRCHLFL

SEQ ID NO: 98874 - protein, 62 aa, Gossypium hirsutum
  Clone ID: LIB3149-019-Q1-K1-A11.pep
SNRKILFFKHTRIHDLQIVITATVLKSRKITKKNPLNSISIKWIIKEITFIINSPCIVFKGK

SEQ ID NO: 98875 - protein, 119 aa, Gossypium hirsutum
  Clone ID: LIB3149-019-Q1-K1-A2.pep
LKYTKQFIFLPKPKTTQESYSYYNNNPFTPSCDTSNIVTPYTQPYTALPSSYTSKNKTTCSGDDITTSTDLYSPTGNNLRPKLKKKNRIPLKIDIDTKKTGTPDGFYIYKVGIRVTCED

SEQ ID NO: 98876 - protein, 61 aa, Gossypium hirsutum
  Clone ID: LIB3149-019-Q1-K1-A4.pep
CRFFISLECCLVFVVIDEGGQCTVAYKLIVVPCNASEGCWVVIKVENLTWVFGRLGINKKG

SEQ ID NO: 98877 - protein, 129 aa, Gossypium hirsutum
  Clone ID: LIB3149-019-Q1-K1-A6.pep
ASSHLSTLFNLTLSSKNPNSHLTFTYDPFTLSCVTSNNDVFIGNGTLPAFISNSKNETTFKGVVITTSSDLDADTVNNLRPDLKKKNGIPLKIEMDTKVTVKVDGLKSKKVGIRVTCDDIKGTVPKGKS

SEQ ID NO: 98878 - protein, 85 aa, Gossypium hirsutum
  unsure (1)..(85): unsure at all Xaa locations
  Clone ID: LIB3149-019-Q1-K1-B4.pep
AYADEKPYDWXELYLLPDPNAARAGDCIDGAHTEIEENEAPPPDRFLPDNPCLINDTEAXKQEDXHDDEDRERKAPKTHTPNRET

SEQ ID NO: 98879 - protein, 75 aa, Gossypium hirsutum
  unsure (1)..(75): unsure at all Xaa locations
  Clone ID: LIB3149-019-Q1-K1-B5.pep
PPPRASHSLSCSSSHFPGLVASGSFYLFRLIFYPSXGYPSSFSSYAFISLKTIFSRHLCIKKDTQVCKYPVMHHL

SEQ ID NO: 98880 - protein, 90 aa, Gossypium hirsutum
  unsure (1)..(90): unsure at all Xaa locations
  Clone ID: LIB3149-019-Q1-K1-C5.pep
MPRLGKTLTGETTTLSAESAHTIGDVQAKMHYNDGISPDLPRLIFAGEQHEDGLTLSVYNIKKESTLHLVXRIRGGMHIFAKTLTGKTIT

SEQ ID NO: 98881 - protein, 38 aa, Gossypium hirsutum
  Clone ID: LIB3149-019-Q1-K1-C6.pep
IRPKITLHFLSLKPTRIKAGKLHLLTRPLPYKLIVHTP

SEQ ID NO: 98882 - protein, 58 aa, Gossypium hirsutum
  unsure (1)..(58): unsure at all Xaa locations
  Clone ID: LIB3149-019-Q1-K1-D10.pep
GYILRRFFXRLFTTXQEXGRAGLTGERSETXGXTGNRKCMRSHNHNQEGSKPNPFNLC

SEQ ID NO: 98883 - protein, 123 aa, Gossypium hirsutum
  unsure (1)..(123): unsure at all Xaa locations
  Clone ID: LIB3149-019-Q1-K1-D11.pep
LIFEAIPWMMITLAEINNHSWFVTHLPRLLTYTAHXLHYYRSDNLTFSMQSINEIMKTAEEARIPPPSLVPVKGSGWGQHDDDKVVDMLLEVNEDVEQHVYDKLAMEVHASVEYTIYSAHVIF

SEQ ID NO: 98884 - protein, 105 aa, Gossypium hirsutum
  unsure (1)..(105): unsure at all Xaa locations
  Clone ID: LIB3149-019-Q1-K1-D5.pep
LELETANSFSILEKNDDLPGGQVNTSGAERFPLPEVLXQPGFINIEAARLNQTTYNSIMKSDLNIKKDLYGHIDLSRGTTKLPCVAHRISTEITAIVPITMNINV

SEQ ID NO: 98885 - protein, 48 aa, Gossypium hirsutum
  Clone ID: LIB3149-019-Q1-K1-D6.pep
IRNVSGRGTYLTSDMNNHGPYLEYQTPAQQGNTDRSSLHQFFKRWALL

SEQ ID NO: 98886 - protein, 131 aa, Gossypium hirsutum
  Clone ID: LIB3149-019-Q1-K1-E12.pep
EQVIDGLDKTVKAMKKGELALITIQPEYAFGSSESQQELAVVPANSTVYYEVEMVSFVKEKESWDMNAQEKIEAAGKKKEEGNALFKAGKYERALKRYEKAFRFIEYDSSFSDEEKQQAKLLKVTCNLNNA

SEQ ID NO: 98887 - protein, 60 aa, Gossypium hirsutum
  Clone ID: LIB3149-019-Q1-K1-E3.pep
RDHLKGPFPLNYGLIGPGFLKPIKCHKGWLTFYSYPHSNLMTYISIRSDNESTKSLYLNS

SEQ ID NO: 98888 - protein, 51 aa, Gossypium hirsutum
  Clone ID: LIB3149-019-Q1-K1-E4.pep
KLKFGDFKIKRYCCVKAKESSDLIHRPTHCLIFFFFFFFFLNSILKFLIAT

SEQ ID NO: 98889 - protein, 67 aa, Gossypium hirsutum
  Clone ID: LIB3149-019-Q1-K1-E6.pep
DVFLVQCFICISLHPDRRIGRFPPVVRTAVPVDGRFEHIVLSCNATSDHAIIWIERESQRALDLMVE

SEQ ID NO: 98890 - protein, 56 aa, Gossypium hirsutum
  Clone ID: LIB3149-019-Q1-K1-E7.pep
DTSCTDISRIVVTPSASSFDEHLRVGIGVIAWRGRAMSAVAHYLRETQYILYLDPD

SEQ ID NO: 98891 - protein, 35 aa, Gossypium hirsutum
  Clone ID: LIB3149-019-Q1-K1-F5.pep
QEGRELRRRLPHPRFNAQPVLVMIPPGEQTMGRGD

SEQ ID NO: 98892 - protein, 38 aa, Gossypium hirsutum
  unsure (1)..(38): unsure at all Xaa locations
  Clone ID: LIB3149-019-Q1-K1-F8.pep
CSSLQLNWLLGHQQYSLLKSRSRLHEKRVSFRFPDVSX

SEQ ID NO: 98893 - protein, 60 aa, Gossypium hirsutum
  Clone ID: LIB3149-019-Q1-K1-G2.pep
AFEEPLKEQMDGLYQICWDLTLNGVNRSLLSKNCGMIWIHAWYVTKPKRKGTTGRMENGP

SEQ ID NO: 98894 - protein, 46 aa, Gossypium hirsutum
  Clone ID: LIB3149-019-Q1-K1-H1.pep
HGIYTYIYFIFRGRIVHGRDITVQDQTTRNLLFRELWESRGYLFLT

SEQ ID NO: 98895 - protein, 138 aa, Gossypium hirsutum
  Clone ID: LIB3149-019-Q1-K1-H3.pep
DYMEYILTFTLAPGGQNCSANANITVSGPDNQGIFSFRQNYGKQAWQSCGLYLGLSGQDETVNLVFESQAVESDDNSTCWPVIDSLLVKAVENLVQGKDNLLLNGGFEFGPDFLSNSTEGILLDSASSPVQSPLSQWS

SEQ ID NO: 98896 - protein, 39 aa, Gossypium hirsutum
  Clone ID: LIB3149-019-Q1-K1-H5.pep
PQLCLLPLLLFGIKDKFLGWSGQGSIIIRVGRSIRAWLK

SEQ ID NO: 98897 - protein, 37 aa, Gossypium hirsutum
  Clone ID: LIB3149-019-Q1-K1-H6.pep
RARPTRALGLDLSPLFDFSHRRVPATGELFYSVTETQ

SEQ ID NO: 98898 - protein, 72 aa, Gossypium hirsutum
  Clone ID: LIB3149-019-Q1-K1-H8.pep
ATVSFAPSHLHESQVEQEAYEKIEEKAPKDEAHIQVHSEICGLCFSYWITVLFRSFESRAIHQWMGFRFLNR

SEQ ID NO: 98899 - protein, 137 aa, Gossypium hirsutum
  Clone ID: LIB3149-020-Q1-K1-A12.pep
IQGRGSYEDRTEMLRLIVDLVEASICADNPEWSVDEQVAKDIQLIDAIAEKQALIFSEECKLFPADVQIQSIYPLPDVSELESKLTEQSKILSNLQQKVDDLASKHAYNPDEEYTEVESKLRAQLESFLETARSFNM

SEQ ID NO: 98900 - protein, 74 aa, Gossypium hirsutum
  Clone ID: LIB3149-020-Q1-K1-A2.pep
AWFYLFDLFGIYIRCLSLCKFRLYIWKCDVCSIFGRADNANQPYVIEVCHGGPISGPLEAEFILKRTKGVYGFF

SEQ ID NO: 98901 - protein, 45 aa, Gossypium hirsutum
  Clone ID: LIB3149-020-Q1-K1-A3.pep
KLAPNESAMLACLIYTNPKFKHINYTIHAIGSYSQFIKYPSRSIV

SEQ ID NO: 98902 - protein, 94 aa, Gossypium hirsutum
  unsure (1)..(94): unsure at all Xaa locations
  Clone ID: LIB3149-020-Q1-K1-A5.pep
RDFFVCFALVLXLFLLIILRSVSCKMSNFFIYLNICSSYTDFESTYGYLMSKSTMNKDLIMTLVLDSIGQNTIQWFINESILLLLSKGPELITX

SEQ ID NO: 98903 - protein, 82 aa, Gossypium hirsutum
  Clone ID: LIB3149-020-Q1-K1-B2.pep
HSAPHHHHRHSFRSTSLFSGACLVGGAARETQVRHCSTPRRVNGFSGLVTGAGGFIGSHCSLALKKRGDGDLGLDDFNDYYD

SEQ ID NO: 98904 - protein, 44 aa, Gossypium hirsutum
  Clone ID: LIB3149-020-Q1-K1-B5.pep
ITFHNGQHGLSEGGHSISDRQPKQITIKISKIWISKSNTSQHLL

SEQ ID NO: 98905 - protein, 65 aa, Gossypium hirsutum
  unsure (1)..(65): unsure at all Xaa locations
  Clone ID: LIB3149-020-Q1-K1-C2.pep
FSSLYHYHXYNLRKTSLIIAAWVLISTARNTHITILTLSLINHLLNFLTIISKQNNAFINLSRPN

SEQ ID NO: 98906 - protein, 99 aa, Gossypium hirsutum
  unsure (1)..(99): unsure at all Xaa locations
  Clone ID: LIB3149-020-Q1-K1-C4.pep
XXGAVYYXLAHPNKFLVHKFFIHLSSTRVLYISTNHPHPSFLFPSTKSLLPFSLFSLFKFFPFSPSLLILYISLSLYLLASPLFLFFLLKHLFQLPFYF

SEQ ID NO: 98907 - protein, 48 aa, Gossypium hirsutum
  Clone ID: LIB3149-020-Q1-K1-C7.pep
RGNRKWQITMTFSLLFVTRATGMDKAGFSLNDAPRTSFPNIVGRPRHT

SEQ ID NO: 98908 - protein, 41 aa, Gossypium hirsutum
  Clone ID: LIB3149-020-Q1-K1-D1.pep
YAQGDRYTRKVTSALSSGLVPVLFGHVRCLFATCSRFGAPA

SEQ ID NO: 98909 - protein, 41 aa, Gossypium hirsutum
  Clone ID: LIB3149-020-Q1-K1-D2.pep
RVAKSIGAAHLIFRMIRCGISGFGASLSDIDMVDDSGICHP

SEQ ID NO: 98910 - protein, 58 aa, Gossypium hirsutum
  Clone ID: LIB3149-020-Q1-K1-D3.pep
PSKNNAFTQKTLPYPTSISTAHIPLKPALAIFNRPSPNTLKNNSAAPITNATHPEAAH

SEQ ID NO: 98911 - protein, 90 aa, Gossypium hirsutum
  Clone ID: LIB3149-020-Q1-K1-D9.pep
GVYEKDFIFFFSFFVYFFFLFSFFCLVFFFFFFWLVWVRRIWAITSTRSSNDNFNHSRYNNDHEIKVIKLDDKFSLKRFSIESLRCHSFL

SEQ ID NO: 98912 - protein, 46 aa, Gossypium hirsutum
  Clone ID: LIB3149-020-Q1-K1-E12.pep
ISSLVLRTRVRRLPDPEINTIPCTQAINSSINERTSGHQHVRTLHH

SEQ ID NO: 98913 - protein, 88 aa, Gossypium hirsutum
  unsure (1)..(88): unsure at all Xaa locations
  Clone ID: LIB3149-020-Q1-K1-E2.pep
DRGVAVDKQQHNQYGTFQGVAKYTFLRALQFHHHNPHTQQQQHQHQQQQQHHVPTIGFPPPPSIAAPQXYPQAYQTVPGYDVAEGTPV

SEQ ID NO: 98914 - protein, 35 aa, Gossypium hirsutum
  Clone ID: LIB3149-020-Q1-K1-E3.pep
TLHIIHPFKRNSCQPQSEREFKTNEKLIRYHPYFF

SEQ ID NO: 98915 - protein, 74 aa, Gossypium hirsutum
  Clone ID: LIB3149-020-Q1-K1-E6.pep
KLMRGGGFLGSKFTFFCFQWISFFLCEGKLFSLAVVLKFWDWENFGVFEIFRFWKISFFPNWHISKKFRTICLF

SEQ ID NO: 98916 - protein, 34 aa, Gossypium hirsutum
  Clone ID: LIB3149-020-Q1-K1-F2.pep
LVLETLSEKRKKESMTCFIVNLQGCYDMINKYSC

SEQ ID NO: 98917 - protein, 47 aa, Gossypium hirsutum
  Clone ID: LIB3149-020-Q1-K1-F4.pep
FCMINTIHHTFFVSTLSHYMQLLSVKPSLWEMLVHKQLPYVCQIVLR

SEQ ID NO: 98918 - protein, 52 aa, Gossypium hirsutum
  Clone ID: LIB3149-020-Q1-K1-F5.pep
SFQYMITFLLFTAKDNHMTTEHIKSIASFKTKYHILVLPHSVILPINYPPKR

SEQ ID NO: 98919 - protein, 118 aa, Gossypium hirsutum
  Clone ID: LIB3149-020-Q1-K1-F6.pep
KTNPQTEFHFVMSHAKQVVGAHAMKMDGTYILMTMTASKEGTCYPIAPLALPHSLHACGLVFSADELNMEGFHTFRGGFWNYFIMGMDAPLSYAIHSETDDDTEKFKNQGDYYSTNAK

SEQ ID NO: 98920 - protein, 71 aa, Gossypium hirsutum
  Clone ID: LIB3149-020-Q1-K1-F8.pep
RHYLLPEIILDRHHHSLCLLNPRGHMRIKGMTRIILSKLIIMGTHRLRVYKMVLLLIMGTDHGRLLHHMDH

SEQ ID NO: 98921 - protein, 69 aa, Gossypium hirsutum
  Clone ID: LIB3149-020-Q1-K1-G11.pep
YKVCFHFMKQFVVLINNHTFVLKALSQSASLNVSTSLARREDQDAFIKSGKFLVWHRASHGHAQRESGI

SEQ ID NO: 98922 - protein, 47 aa, Gossypium hirsutum
  Clone ID: LIB3149-020-Q1-K1-G5.pep
SEWINSISIYYPAIIFVTGRKKINTMYTVLHSRFIAKKQTLLNLIKL

SEQ ID NO: 98923 - protein, 106 aa, Gossypium hirsutum
  unsure (1)..(106): unsure at all Xaa locations
  Clone ID: LIB3149-020-Q1-K1-H4.pep
TLQYYISHFNFLQQNRNSGEASYSNYDIFTNLHATNHTTIQTDEDATDQALSATVTSTXIITASSPKRSHELITLYKYXHSSKLXIYPIFHQVYLERILLIPEIDA

SEQ ID NO: 98924 - protein, 55 aa, Gossypium hirsutum
  Clone ID: LIB3149-020-Q1-K1-H5.pep
IKSLAQRSFLYGMVSTAHRLARASANFVHVSAPDRASLVASPPDVWFGMGRVAFF

SEQ ID NO: 98925 - protein, 86 aa, Gossypium hirsutum
  Clone ID: LIB3149-020-Q1-K1-H8.pep
GIVYILQPELKDCFTFTGNDSAYNKYIYVVQMIKQIITIICKKKKKISEVSFSCLRGSTKPHQPKMNFPQIFHLFQTFLCIRKSFL

SEQ ID NO: 98926 - protein, 63 aa, Gossypium hirsutum
  Clone ID: LIB3149-021-Q1-K1-A3.pep
LSDIDWIGVLSAYKRFWPVTHGSSRSITPCVCPWYLTTLRLISLYLIYEFASTRPCTVLMRGL

SEQ ID NO: 98927 - protein, 125 aa, Gossypium hirsutum
  unsure (1)..(125): unsure at all Xaa locations
  Clone ID: LIB3149-021-Q1-K1-B1.pep
GGEGSVGKLIFQTLSFYYQRXHGIGRVIVQICNTHKPLMNIDHGRVDSNQISQALRKEPLTVQLPATQTRSFCYVSDMDDGLIRLMERDNTGPINIGNSGQSTKLELAESFNNLINPEVNILMVE

SEQ ID NO: 98928 - protein, 96 aa, Gossypium hirsutum
  Clone ID: LIB3149-021-Q1-K1-B8.pep
EDSKSALEKVLRHEDLQGAPLLILANKQDLSEALSAEELAQYLDLKKLDERVYMFEAASAFDGMGIKEGVEWSVEVMERSKRTETLRIRAGITGPN

SEQ ID NO: 98929 - protein, 52 aa, Gossypium hirsutum
  Clone ID: LIB3149-021-Q1-K1-C11.pep
HPKSPKPTFNRSSKTTKLLKCRKINHLSTSFLTFFFFRRSDEALFSIPSSIS

SEQ ID NO: 98930 - protein, 66 aa, Gossypium hirsutum
  unsure (1)..(66): unsure at all Xaa locations
  Clone ID: LIB3149-021-Q1-K1-D10.pep
SQTTAPICDPSGDXDVFXRVTGGEVGAASSIAPKIGSSGLSPKKIVKNIFKETAKXWKVLHVTDKL

SEQ ID NO: 98931 - protein, 87 aa, Gossypium hirsutum
  Clone ID: LIB3149-021-Q1-K1-E2.pep
RCLASLQKRRELKAAGIDTRQRKRKRKGIDYNAEIPFEKRPPPGFYDVADEDRPVEQPKFPTTIEELEGKRRVDIEAQLRKQDIAKK

SEQ ID NO: 98932 - protein, 88 aa, Gossypium hirsutum
  unsure (1)..(88): unsure at all Xaa locations
  Clone ID: LIB3149-021-Q1-K1-E8.pep
CSAHLIYITLNKNISKILGSFFQRSPLLLAHTALSVFLERAKFNQACGFKMNKFWGLKRREYEAIXDCIADMSESVYRLSRSPQELTY

SEQ ID NO: 98933 - protein, 28 aa, Gossypium hirsutum
  Clone ID: LIB3149-021-Q1-K1-F1.pep
TGPEVLSGELVCPSFVVLGVSFFPWVLP

SEQ ID NO: 98934 - protein, 77 aa, Gossypium hirsutum
  unsure (1)..(77): unsure at all Xaa locations
  Clone ID: LIB3149-021-Q1-K1-F9.pep
AEETGVMYYTASHRHLLGPNYQRLRANAAKXAHHNDHQKGFMNFIAHXDQDRNFFPSRYNNGASMQRNPLSHLLFAP

SEQ ID NO: 98935 - protein, 70 aa, Gossypium hirsutum
  Clone ID: LIB3149-021-Q1-K1-G10.pep
KPFGIKPPTELARNYMGTPEAVSAQTAMHEEKHQLVGKGGEISTHKVPAVAPASKPVAEEPHEAVPEAAF

SEQ ID NO: 98936 - protein, 130 aa, Gossypium hirsutum
  unsure (1)..(130): unsure at all Xaa locations
  Clone ID: LIB3149-021-Q1-K1-G12.pep
GRPEMVAGGYHSHSGSGCRLNGVDINTQLSYEALNQRAAPKVEHPMTSVXGQWRTMHXRWTKPQTTMLAQEPQPSSCTRLHFNKPPIQALLHGLHTHSYSMNIRLXEIDTEKKMLLKLHKKKMTDGLTLT

SEQ ID NO: 98937 - protein, 71 aa, Gossypium hirsutum
  Clone ID: LIB3149-021-Q1-K1-G6.pep
TRWRWIHSCFKIFISLRKATTNESLFFKLSCPLPYNLYVRPCLLTNILQKIQIIKCNYLIQHITLKPGPFF

SEQ ID NO: 98938 - protein, 107 aa, Gossypium hirsutum
  Clone ID: LIB3149-021-Q1-K1-G8.pep
LNGASFNFSDNHGLCGIPGLPKCGPHLSAGAKVGIAFAVFLSLVLLVICSICWWKRRQNILRAQQIAAASRSAPYAKARTQSSHDIQMSRNPSRGRTASENGPSLLS

SEQ ID NO: 98939 - protein, 57 aa, Gossypium hirsutum
  Clone ID: LIB3149-021-Q1-K1-H4.pep
QTHTSAIMTPSIQVPGLQFNNHLFTTTRPVKPLVFLNQTPFFPSPFLPLTHSRKALP

SEQ ID NO: 98940 - protein, 49 aa, Gossypium hirsutum
  unsure (1)..(49): unsure at all Xaa locations
  Clone ID: LIB3149-022-Q1-K1-A1.pep
PGQAXEQGNNFLSIGYQFYTKELNYDERLFLKIANSQFQKLNKDAHLSM

SEQ ID NO: 98941 - protein, 51 aa, Gossypium hirsutum
  Clone ID: LIB3149-022-Q1-K1-B3.pep
LCWLLARMGLYFRATIPPGQRGVVMKDLFFYREPDETKHLEEEEAISTPEY

SEQ ID NO: 98942 - protein, 61 aa, Gossypium hirsutum
  Clone ID: LIB3149-022-Q1-K1-B5.pep
PDFLRSHLSFLSLSLLFVFRAGSCRSCLLSFHSPSSIMIIMHGRSCLQLRALKKYYISDSL

SEQ ID NO: 98943 - protein, 69 aa, Gossypium hirsutum
  unsure (1)..(69): unsure at all Xaa locations
  Clone ID: LIB3149-022-Q1-K1-C11.pep
DGSYFFNHLFKSTFVKEYNWVNRICNTCSYRISFDRYRTSFRRVVLWVIKLASGFGLXLWVKKFGLKXG

SEQ ID NO: 98944 - protein, 50 aa, Gossypium hirsutum
  unsure (1)..(50): unsure at all Xaa locations
  Clone ID: LIB3149-022-Q1-K1-C4.pep
QMDRISKEERIYISGMIKKIKATGCKVLVIQKSIGXDASTDLSMHYKAMA

SEQ ID NO: 98945 - protein, 128 aa, Gossypium hirsutum
  unsure (1)..(128): unsure at all Xaa locations
  Clone ID: LIB3149-022-Q1-K1-C8.pep
LAKNQTSSTXNTNKRKILYYYIIIFFSLFFGYKAEILILVMFYERKYTHKEYKKSRGDFFLPGILLVFYASFSFQFGSFIIFVLKKINKKTVTEEPYRASKPWISPPFLLKIEVEEGFRAEIPLGAKD

SEQ ID NO: 98946 - protein, 77 aa, Gossypium hirsutum
  Clone ID: LIB3149-022-Q1-K1-D11.pep
LCTTFTPYGSLDKWLFGAGVLPWTRRFKVINDVAKALSFLHSKQLAHKNMKTSSVFLDVSFRACLSDFGMVLSTTDS

SEQ ID NO: 98947 - protein, 129 aa, Gossypium hirsutum
  unsure (1)..(129): unsure at all Xaa locations
  Clone ID: LIB3149-022-Q1-K1-D12.pep
KGIDLATTLERIEKNFGITGPRVAGNPIIFGSDNFLELAKVHREKIXGQNWSFYKALNCPATVRKSGGIDTRQNNCAANNYTKSGKKXWNLXHLQXMRDQKGEVQYFXIGVQLDGSAKVDPLHYSIPDT

SEQ ID NO: 98948 - protein, 83 aa, Gossypium hirsutum
  unsure (1)..(83): unsure at all Xaa locations
  Clone ID: LIB3149-022-Q1-K1-D4.pep
GSDPRRPAMSLVMLNLRISIETXAVXXSSPGRVVFTFFHGGGFCLPLHFXRGSQPVLEPLXQYLSLTSSKCVDRQRTHDVCXX

SEQ ID NO: 98949 - protein, 76 aa, Gossypium hirsutum
  unsure (1)..(76): unsure at all Xaa locations
  Clone ID: LIB3149-022-Q1-K1-E2.pep
EWXGPDPTPTRGGVYPLAQHLTPYFFETSTVNSHTPCRAVFTFFMAGSLLHTHILEGLSTSTRASNTYTEPHSSRM

SEQ ID NO: 98950 - protein, 110 aa, Gossypium hirsutum
  unsure (1)..(110): unsure at all Xaa locations
  Clone ID: LIB3149-022-Q1-K1-E3.pep
KKKKVASKEKFVVLCKXIKDVLRDKVEKVVVLDRADDSSRRLXTAEHCWTANMXSIMKAYALMNHTIHCYMSSTYTLDFYPDNFIIEDLIRRADPYHSDRSVQDLELLIF

SEQ ID NO: 98951 - protein, 42 aa, Gossypium hirsutum
  Clone ID: LIB3149-022-Q1-K1-E5.pep
DPTTRWIVFSINRLGACHGFTISSSVRMDALSRNLQHIVYIN

SEQ ID NO: 98952 - protein, 134 aa, Gossypium hirsutum
  Clone ID: LIB3149-022-Q1-K1-E8.pep
VLQIVSGDCDTKKTPGQDNDVMGEVLKTHEAIQSLDKSVAMLEMQLAASRSSQEMDNGEASKVVSTLTRDGPPRKKVFMVIGINTAFSSRRRRDSVRETWMPQGEKLIKLEREKGIIIRFMIGHRLTISRKRKL

SEQ ID NO: 98953 - protein, 144 aa, Gossypium hirsutum
  unsure (1)..(144): unsure at all Xaa locations
  Clone ID: LIB3149-022-Q1-K1-F3.pep
SPAAFTRATVVIAVKYSIVERPEKIDEIIYPEIASFLMLIKDQDRHVRRAAVLALSTFAHNKPNLIKGLLPELLPLLYDQTTVKKELIRTVDLGPFKHIVDDGLELRKAAFECVDTLLDSCLDQXNPSSFIVPXLKSGLDDHYD

SEQ ID NO: 98954 - protein, 107 aa, Gossypium hirsutum
  Clone ID: LIB3149-022-Q1-K1-F9.pep
FKVGRYNPEERQERISKYRAKRNQRNFNKTIKYACRKTLADSRPRIRGRFARNDEAIEIPKAACSTRDEEEDDLWVLHEVEDDETLARGDFMNSFCQNQFQYHHGYF

SEQ ID NO: 98955 - protein, 34 aa, Gossypium hirsutum
  Clone ID: LIB3149-022-Q1-K1-H7.pep
RCFTKQTPVTQPLLEEHLERHKVARQMNPQAPDL

SEQ ID NO: 98956 - protein, 70 aa, Gossypium hirsutum
  Clone ID: LIB3149-023-Q1-K1-A10.pep
LGLKSLYTLIAEGMADLEYLQPSIAVVLGFIGCKMILDFFGLHISTEASLGLVATSLSAGVLLSLAKKAD

SEQ ID NO: 98957 - protein, 54 aa, Gossypium hirsutum
  Clone ID: LIB3149-023-Q1-K1-A5.pep
VEKSTRQGSERQTLYAYACPRIKHQGINFYLLKTNIIVIRSCMIIAFNQVLTTC

SEQ ID NO: 98958 - protein, 61 aa, Gossypium hirsutum
  Clone ID: LIB3149-023-Q1-K1-A6.pep
VEKSASQGSNMQTMKAYACPRIKRQGINFYVFDTNIIVIRSCMLITITPVLTTCCMSQALP

SEQ ID NO: 98959 - protein, 70 aa, Gossypium hirsutum
  Clone ID: LIB3149-023-Q1-K1-A8.pep
VNNLLSLRFIHPDAPEGSRGWFFEFRKPPPLNWPKEYIGESDLLFCDTCHWPRDHHAKNNHAPACTEYCT

SEQ ID NO: 98960 - protein, 75 aa, Gossypium hirsutum
  Clone ID: LIB3149-023-Q1-K1-B11.pep
FRTYIILFRFLIRNICLGAGIKINESANYSHRFEMKFSGRTQLKPISIHKDYNSANIIINLLSDDHISKLRILDK

SEQ ID NO: 98961 - protein, 69 aa, Gossypium hirsutum
  Clone ID: LIB3149-023-Q1-K1-B12.pep
FIYFFSIGAKMQSNFSYRGLYDTFTAQTQSIRNKKLDLLLLFFGGVCRLLRRLEAWDWETWIFQLCLRP

SEQ ID NO: 98962 - protein, 43 aa, Gossypium hirsutum
  Clone ID: LIB3149-023-Q1-K1-B3.pep
HNSSAIKMTMTAVCVQTEKVAVFKVCHDDSSERVASKYEIIEH

SEQ ID NO: 98963 - protein, 41 aa, Gossypium hirsutum
  unsure (1)..(41): unsure at all Xaa locations
  Clone ID: LIB3149-023-Q1-K1-B6.pep
RRGSSHIKSPKITSLAGILQHFFCENPEXPQPKRPGKPYHF

SEQ ID NO: 98964 - protein, 57 aa, Gossypium hirsutum
  Clone ID: LIB3149-023-Q1-K1-C10.pep
MWALPIQVLAAIFCSFVTVTHVYSQTYNPPLHILDIPFNQPFIMFQNIYPLLSTLST

SEQ ID NO: 98965 - protein, 59 aa, Gossypium hirsutum
  Clone ID: LIB3149-023-Q1-K1-C3.pep
LYNATYRLRGGAEQLLLYNPNIDTTNLFQNRRIQRIKWLPSHSTRYLLVKKLRNPTLKG

SEQ ID NO: 98966 - protein, 54 aa, Gossypium hirsutum
  Clone ID: LIB3149-023-Q1-K1-C7.pep
VHLFLLNSPFYLNWIGFGAQLASYQCRPVVFFNDCRKCVFLCTTNEAINNYFLS

SEQ ID NO: 98967 - protein, 48 aa, Gossypium hirsutum
  Clone ID: LIB3149-023-Q1-K1-D12.pep
MLDEEKLFVALDRVLSRVASPNENLQSEPALNELVVSASPVKFVVELL

SEQ ID NO: 98968 - protein, 54 aa, Gossypium hirsutum
  Clone ID: LIB3149-023-Q1-K1-D2.pep
LKIVIGAKFDVPAPFIISLYLVCKQIIELMYFDNNLSTKPFGFGTNEKTLKDIF

SEQ ID NO: 98969 - protein, 107 aa, Gossypium hirsutum
  Clone ID: LIB3149-023-Q1-K1-D6.pep
MQPCNGGRMPPGQEKFIVIGDLKGWGYANSDIRAYLAALSLVQDYYPVRLEKLFVVHAPFIFMTAWKGVYPFIDPKTRTEMIFVDYISLKSTLLEEIHESQLPGTLG

SEQ ID NO: 98970 - protein, 46 aa, Gossypium hirsutum
  Clone ID: LIB3149-023-Q1-K1-D8.pep
AEFNFGRLLWININKFGLKYKEKKILLGIIILVMFYLFLKYEGWFC

SEQ ID NO: 98971 - protein, 89 aa, Gossypium hirsutum
  Clone ID: LIB3149-023-Q1-K1-D9.pep
CTTTTENRVLGKKSVVVLAASSTSLSLFLRSSSFVLLFIQSCKRWPSVRISLPSSVILELDWCLPVMLMTMLHAQIIPFLFFEPLPLLL

SEQ ID NO: 98972 - protein, 29 aa, Gossypium hirsutum
  Clone ID: LIB3149-023-Q1-K1-E11.pep
CLVTTWFSQSLRCNSQASSLNLGYTIYRL

SEQ ID NO: 98973 - protein, 48 aa, Gossypium hirsutum
  Clone ID: LIB3149-023-Q1-K1-E7.pep
EKGHVYPRPFRDLVITLSYVISLISSISISLYLVKNLSVAVMLFVSVV

SEQ ID NO: 98974 - protein, 96 aa, Gossypium hirsutum
  Clone ID: LIB3149-023-Q1-K1-F2.pep
IASAALFFFFFFLLISFFGFWERLPLKKITSKPISNTNATAYSPRSLKYILKPRSKTQPVLKKRPMMDLYMLRNSLSGVRDTYPSTPDLQYSMDHQ

SEQ ID NO: 98975 - protein, 82 aa, Gossypium hirsutum
  Clone ID: LIB3149-023-Q1-K1-F3.pep
GKAVKVNHSLKHTGSGEQDATYEIKLTDASLREAVAKTTGLCINSGSWTGIPGYCRFTIALEESEFEQALACLVKFKSIVDN

SEQ ID NO: 98976 - protein, 46 aa, Gossypium hirsutum
  Clone ID: LIB3149-023-Q1-K1-F8.pep
VVGDVFIVVCRFAVVIGQDGSKARRPLDYLIPLIYKAVCSCQCIPP

SEQ ID NO: 98977 - protein, 73 aa, Gossypium hirsutum
  unsure (1)..(73): unsure at all Xaa locations
  Clone ID: LIB3149-023-Q1-K1-G11.pep
VSHQGEYGAYPALRLASELPGYSQRRLYDGSXHIFAGSCAIKGQCFLLLVYEPLAPEVRPFVFNCNCIVFLFF

SEQ ID NO: 98978 - protein, 101 aa, Gossypium hirsutum
  Clone ID: LIB3149-023-Q1-K1-G3.pep
IMVKIGTGFNVETKTPMVQIFRERIESPTTSCWTWCGYVFGTIQHFSHAPQVLLAHTRRFQSRLDPSSPFWSQPNTVMCLMWAGCAYLALVHLVWTLWFTK

SEQ ID NO: 98979 - protein, 76 aa, Gossypium hirsutum
  Clone ID: LIB3149-023-Q1-K1-G4.pep
WLSDRFAFRYLWCPNTPLMVMRSICLQIFMSTQFLMFLTCILLRVSMEILLKSQTRCTDFLRFRLRFLKMCWMLKK

SEQ ID NO: 98980 - protein, 83 aa, Gossypium hirsutum
  Clone ID: LIB3149-023-Q1-K1-G7.pep
MSRLEALFCRKSRNFLLFHLLESALKKLLHCSLIFTQKALLGVKVLFKALLGVKVLFNWGKELALSLKVLFNWGKKLGPNLAG

SEQ ID NO: 98981 - protein, 121 aa, Gossypium hirsutum
  Clone ID: LIB3149-023-Q1-K1-G8.pep
GALKITDGQIENNNVAAETYRMPFLMLGLDLPEPPLFKDVMEKNIIPQVPLFNILKKFDGEMVTTTVRAPARMRYRVTILPQYFILHMRRFTKNNFFRKKNPTLVNFPKKNLELKDYIPLP

SEQ ID NO: 98982 - protein, 39 aa, Gossypium hirsutum
  Clone ID: LIB3149-024-Q1-K1-A10.pep
KNLQLSEWDMEPSKMTLYRFGNTLSSFLWYELSYSEADG

SEQ ID NO: 98983 - protein, 40 aa, Gossypium hirsutum
  Clone ID: LIB3149-024-Q1-K1-A12.pep
ATLNKLQARKMTVKLDIYMKVTHALAIAGIMSGGWICYQL

SEQ ID NO: 98984 - protein, 75 aa, Gossypium hirsutum
  Clone ID: LIB3149-024-Q1-K1-A3.pep
VRSSRSDAPPIGNTRSTETEKKLMASRPADYSRWSRYFLFHTEKNLMQELELRTKNFPWGYYSSLADYNLTLFFF

SEQ ID NO: 98985 - protein, 59 aa, Gossypium hirsutum
  Clone ID: LIB3149-024-Q1-K1-A9.pep
NRPPVTNVHDDHGRLPSEFICWVSIMDDSVNCDEDVRMWILDVSTLFLRFSCNSFPQEN

SEQ ID NO: 98986 - protein, 66 aa, Gossypium hirsutum
  Clone ID: LIB3149-024-Q1-K1-B4.pep
HHFYSFTLPFYSPVIFTILSSPISILTTISPFYSLNLFIKLADSFSNLMNFPTLFQIYYFILYFPL

SEQ ID NO: 98987 - protein, 62 aa, Gossypium hirsutum
  unsure (1)..(62): unsure at all Xaa locations
  Clone ID: LIB3149-024-Q1-K1-B6.pep
LNKVFFITNILGETEVRKVDMFERVYIVRSENDKDHILLVCDQIXLVSPSAALINHTCRVKN

SEQ ID NO: 98988 - protein, 38 aa, Gossypium hirsutum
  unsure (1)..(38): unsure at all Xaa locations
  Clone ID: LIB3149-024-Q1-K1-C1.pep
TXWGTWYTPMIMRGLHNQRTNEMHFHEMNTSPMSRTLS

SEQ ID NO: 98989 - protein, 67 aa, Gossypium hirsutum
  Clone ID: LIB3149-024-Q1-K1-C10.pep
REGWKPSGRFLALKPNRPFKFVKWGSPEKNKIPQCCCPLPTIQLPLDDSCSPIFAPPPLFLTVTYLK

SEQ ID NO: 98990 - protein, 64 aa, Gossypium hirsutum
  Clone ID: LIB3149-024-Q1-K1-C3.pep
WLISSFVFSHRRVRSFPSHRWLWLSQIMMYYAFVKICGIDLSCAVIPEHPRPRQTQIFLLFPTL

SEQ ID NO: 98991 - protein, 107 aa, Gossypium hirsutum
  unsure (1)..(107): unsure at all Xaa locations
  Clone ID: LIB3149-024-Q1-K1-C7.pep
HWTKFPSFSPLLSQVEVDGGKSLDLSNYPYIFMRWKEQYFVNVGTDCGLTIAGFYYVCFSCSDGSISGFYYDPNSRFLYFFXPFQKLELKSTNEGRSGYSFSSYELQ

SEQ ID NO: 98992 - protein, 49 aa, Gossypium hirsutum
  Clone ID: LIB3149-024-Q1-K1-D12.pep
LKSISGNILQIVNNIPFIIGHIKLNGINIIFIQFPTPKRNLRELVRKQP

SEQ ID NO: 98993 - protein, 125 aa, Gossypium hirsutum
  Clone ID: LIB3149-024-Q1-K1-D5.pep
LGDNNNSSCQINISSKAEDKKKNKKKKRGGSKRKMTAEQTSAFKSVTEWVYLDRHHHPNSSSTAGLSSWVVDDFGVQKSLGRGTEKMVFELHSHSKHRDGFLSSSKLVERAHGNGVKDLALTDHD

SEQ ID NO: 98994 - protein, 68 aa, Gossypium hirsutum
  Clone ID: LIB3149-024-Q1-K1-D6.pep
HACVAGKDDGVHDTCTGTFDVNSSLSSGPNSKLLVSREDPIEIRIGPMKSPILIGPLIKPQVHAMFCM

SEQ ID NO: 98995 - protein, 122 aa, Gossypium hirsutum
  unsure (1)..(122): unsure at all Xaa locations
  Clone ID: LIB3149-024-Q1-K1-D7.pep
ALEKATVSYGTDLVRFTQKNCLRIYPKGTRFNSSNYMPQIGWMHGAQMIAFNMHGYGRSLWLMQGMFRANGCCGYVKKPDLLMNVDANSERANLPVQKRLMVEVYMGHGWHXDFKHTHYDTY

SEQ ID NO: 98996 - protein, 34 aa, Gossypium hirsutum
  Clone ID: LIB3149-024-Q1-K1-E1.pep
VVLGLGFKFGSCNLDLWPVNNIYWAFILGLIFGC

SEQ ID NO: 98997 - protein, 66 aa, Gossypium hirsutum
  Clone ID: LIB3149-024-Q1-K1-E11.pep
GRLNDIVGSAYYVAPEVLHRSYSLEADIWSIGVITYILLCGSRPFWARTESGIFRSVLRSDPNFDD

SEQ ID NO: 98998 - protein, 131 aa, Gossypium hirsutum
  Clone ID: LIB3149-024-Q1-K1-E4.pep
HFRAIVVVGDLQGQVGVGVGKAKEVIAAVQKSAVNARRNLITIPMTKYLTFPHRSEGDYGAAKVMLRPAAPGTGVIAGGAVRIVLEMAGVENALGKQIGSKNALNNARATVVAVQKMKQFQEVAQERGIPM

SEQ ID NO: 98999 - protein, 49 aa, Gossypium hirsutum
  Clone ID: LIB3149-024-Q1-K1-E5.pep
AVQKDTDFFNSDPRKHSRKKGTVLYPTGTTNNLYYRTTQIVCMHNAQRI

SEQ ID NO: 99000 - protein, 46 aa, Gossypium hirsutum
  unsure (1)..(46): unsure at all Xaa locations
  Clone ID: LIB3149-024-Q1-K1-G4.pep
XKVNHNPKFDFGEHSLFKNQYPYLNFENAVCMRINWRFHFSFELSL

SEQ ID NO: 99001 - protein, 33 aa, Gossypium hirsutum
  Clone ID: LIB3149-024-Q1-K1-G6.pep
SHLIKCVNLYGIFFTFFQLCIYLVNINKVKFCY

SEQ ID NO: 99002 - protein, 40 aa, Gossypium hirsutum
  unsure (1)..(40): unsure at all Xaa locations
  Clone ID: LIB3149-024-Q1-K1-G7.pep
FHDVQCLLLIMLVDAVLFFHFYKIQGLVFVFNRMNVXFPP

SEQ ID NO: 99003 - protein, 46 aa, Gossypium hirsutum
  Clone ID: LIB3149-024-Q1-K1-H5.pep
FRRKICQMYFPNSRRASRITYAYIIEYGWHSHASGLSVPVCLHRPT

SEQ ID NO: 99004 - protein, 85 aa, Gossypium hirsutum
  unsure (1)..(85): unsure at all Xaa locations
  Clone ID: LIB3149-024-Q1-K1-H8.pep
GDNTSRHGPCRVYVGNGNSLPVLCSGQSALITKTXPLYMKSLLYTPXITKNLLSVSKFTRNNQVMFKIFPSQCQVRDLKTNEGLL

SEQ ID NO: 99005 - protein, 30 aa, Gossypium hirsutum
  Clone ID: LIB3149-025-Q1-K1-A11.pep
RKPWHSLIPPINLVIISQKHNRKAFFKPNN

SEQ ID NO: 99006 - protein, 84 aa, Gossypium hirsutum
  Clone ID: LIB3149-025-Q1-K1-A12.pep
GVFTPLNRRGNKDYLVMRSMTIYRISQRSIHSVLALLERRNLLTKCSMIWKHVKTTYVYRHSERDLIGRNHMMNLGYETMIANA

SEQ ID NO: 99007 - protein, 71 aa, Gossypium hirsutum
  unsure (1)..(71): unsure at all Xaa locations
  Clone ID: LIB3149-025-Q1-K1-A2.pep
KIEFFLFCFVFFFFFFFFIFFFEKRNNKFKHGRNPLFGSEDPYLNQNVRFDIFXXXKKKIFFYFDPSQIRP

SEQ ID NO: 99008 - protein, 75 aa, Gossypium hirsutum
  Clone ID: LIB3149-025-Q1-K1-A6.pep
HFLFSKGTAQTCARIISNNDVLNPTEKKLPSIFLDKTSVHKIQSLTPNIADPYREMAPDFPILNLKIIKHAEHYH

SEQ ID NO: 99009 - protein, 52 aa, Gossypium hirsutum
  unsure (1)..(52): unsure at all Xaa locations
  Clone ID: LIB3149-025-Q1-K1-A8.pep
CCLKLHVYTAALVLTMWGGAALVLYISGPFVLLRVFKRKCNKYFXACSDAWV

SEQ ID NO: 99010 - protein, 56 aa, Gossypium hirsutum
  unsure (1)..(56): unsure at all Xaa locations
  Clone ID: LIB3149-025-Q1-K1-B12.pep
RECHTNPHVRLXFKGGERKNKRVKKNPDPRWGKKFQFMGGEPPTNDKIHIEAFSTF

SEQ ID NO: 99011 - protein, 27 aa, Gossypium hirsutum
  Clone ID: LIB3149-025-Q1-K1-B3.pep
VGKKDRCGLLRYGERRLNFFFHRRMVI

SEQ ID NO: 99012 - protein, 65 aa, Gossypium hirsutum
  Clone ID: LIB3149-025-Q1-K1-B9.pep
RRTTISSVTDGSQARSSLLLPTDFPLNSDLDEVKGNQQPNRRVSPLFFFLSLFFDVNDKEIDKNR

SEQ ID NO: 99013 - protein, 87 aa, Gossypium hirsutum
  unsure (1)..(87): unsure at all Xaa locations
  Clone ID: LIB3149-025-Q1-K1-C12.pep
RLFYIFFPPFYYTTVCGIIGKYCNNKYDPGGWTTIYYEKPFGKDYDYAQQXTSQIGQLIDEPQIYXRIDHYLTNELXQNLMALGFAN

SEQ ID NO: 99014 - protein, 63 aa, Gossypium hirsutum
  Clone ID: LIB3149-025-Q1-K1-C8.pep
LKLWCVAEYGLLMLLLKIVVFSHILDLAVYAGGWNAMDISVSFVHKNISILFRLLANGEWHGR

SEQ ID NO: 99015 - protein, 49 aa, Gossypium hirsutum
  Clone ID: LIB3149-025-Q1-K1-D11.pep
IKRGPGGNTGWDRGHQIIHYCGHIPQHYDTGLHTLRTTDHRALCEISNK

SEQ ID NO: 99016 - protein, 76 aa, Gossypium hirsutum
  Clone ID: LIB3149-025-Q1-K1-D5.pep
DMFYSISLTKGIRGLAELTHFFDRRVIDGITNGVGITSFFVGESVKYLGGSRISFYLLLYLVYVFIFLVISYFILF

SEQ ID NO: 99017 - protein, 103 aa, Gossypium hirsutum
  unsure (1)..(103): unsure at all Xaa locations
  Clone ID: LIB3149-025-Q1-K1-D7.pep
GGDGVIGLVNFIDXYDPLLERARXALVERTGVFIVERDINDSALFGKLFKVVAFTHVMHLAAQAGVKYAMENPGSYVHSNIAGLVSLLESCKVANSQTAIVWA

SEQ ID NO: 99018 - protein, 90 aa, Gossypium hirsutum
  unsure (1)..(90): unsure at all Xaa locations
  Clone ID: LIB3149-025-Q1-K1-E10.pep
VGELMILCCLMNTNTDGYSWTITTAYHTYXNNSNINQRSFLXIKTHNSFDNXLNKQRFTEQGGALSFEAKLNNIYLRTTTKIVILDHAMN

SEQ ID NO: 99019 - protein, 57 aa, Gossypium hirsutum
  Clone ID: LIB3149-025-Q1-K1-E11.pep
RNKAGRMQAVYVRTEKGGLFEGKPHVRISRTYKRFSGIMLQLLQKLNITAVGKREKL

SEQ ID NO: 99020 - protein, 81 aa, Gossypium hirsutum
  unsure (1)..(81): unsure at all Xaa locations
  Clone ID: LIB3149-025-Q1-K1-E4.pep
HTYDHAYGGSTLDSHHGFDREYRIDRDVELDFHVDDSELTLXNVCLYEQYSGRDLFFRGVRCDKHVITITQTDEILDYSHV

SEQ ID NO: 99021 - protein, 112 aa, Gossypium hirsutum
  unsure (1)..(112): unsure at all Xaa locations
  Clone ID: LIB3149-025-Q1-K1-E9.pep
GGELMITCCIMNTNTDGKPWTNTTAYYTYXNDFNINQXALYGSXTLDSFDNLLNKQRFTEXQGDALSLGAELDNTYLRTPTNNVSLDHEKNRTLVLHKDRGNNAAVRNXWDK

SEQ ID NO: 99022 - protein, 93 aa, Gossypium hirsutum
  unsure (1)..(93): unsure at all Xaa locations
  Clone ID: LIB3149-025-Q1-K1-F10.pep
IACFWSPFDPFSTMCSLLRHWPRGSPSSRIRPPDHTVMSGFFNAMRYSFVFPVPPLSTVAPFFALGCXGSQASALQKCVFVVKQGGQTLPGRV

SEQ ID NO: 99023 - protein, 97 aa, Gossypium hirsutum
  unsure (1)..(97): unsure at all Xaa locations
  Clone ID: LIB3149-025-Q1-K1-F12.pep
MTKCYPTVSEDYQNTAQKANRKLIGLIAEKKRGALMLRLARDSSGTFDVKTNTERAFXTMKQPAEVAHAAYNRLDIVVRLLLPIKEQNPILSYADFY

SEQ ID NO: 99024 - protein, 60 aa, Gossypium hirsutum
  Clone ID: LIB3149-025-Q1-K1-F2.pep
PNCFCFVLYCRVVCCLVLVLASDVPRSYDLLTFLWFFTIVETLKYVKFTLFPLVFKKKKK

SEQ ID NO: 99025 - protein, 114 aa, Gossypium hirsutum
  unsure (1)..(114): unsure at all Xaa locations
  Clone ID: LIB3149-025-Q1-K1-F7.pep
GMPHKKYHFRFGRDWNRTKRAISFNVNKQVSNQIIRKRIHVKLXHVQHERYTEEVKLGKISNDQIKAKAKAKERVISTHRQSDGPKPIYMIVDAIIXTVTSIAYDDDNDLNGGY

SEQ ID NO: 99026 - protein, 70 aa, Gossypium hirsutum
  unsure (1)..(70): unsure at all Xaa locations
  Clone ID: LIB3149-025-Q1-K1-G11.pep
DISLSLGKQILDEHYSIGLSIKKTHRVEYGSQGDQKHAMNGVVTVSEVGAERFGMSXCGTHGFALSSIKG

SEQ ID NO: 99027 - protein, 46 aa, Gossypium hirsutum
  Clone ID: LIB3149-025-Q1-K1-G2.pep
LGFGSLGKKSHYLFLQASFDVQAALIYHQFLSTSALFDLNLFFEGS

SEQ ID NO: 99028 - protein, 54 aa, Gossypium hirsutum
  Clone ID: LIB3149-025-Q1-K1-G4.pep
MTGFILICRRTYKNIFKLKNIAEIILQYYLHKTLTYKVNFRKIYILILLWLNKL

SEQ ID NO: 99029 - protein, 114 aa, Gossypium hirsutum
  Clone ID: LIB3149-025-Q1-K1-G7.pep
SGQSKLTYSFMRHHTSSIARPKFNILAALTQPTDWKNTAVTKLNLLAAQPPLHSCHDSEQARTVQPSQQRHNLNQWSHTPCVSSLSSTIILGTLIQTATLTIYLAPYRFTFFPY

SEQ ID NO: 99030 - protein, 120 aa, Gossypium hirsutum
  Clone ID: LIB3149-025-Q1-K1-H10.pep
KTLCECAVCLNEFQEDEKLRMIPNCNHVFHIDCIDVWLQNNANCPLCRTRISSSTINAPSLAPQDPIINGGDESYVVIELSDNNNHSSSDESISGSPMELKDVEKRGRKLHKGTSMGDEW

SEQ ID NO: 99031 - protein, 138 aa, Gossypium hirsutum
  unsure (1)..(138): unsure at all Xaa locations
  Clone ID: LIB3149-025-Q1-K1-H4.pep
PPHIQPLTPVSEVSEPPESPSAYLDTTAEAAGEAAQVEAEEEMEEEEEIEPPPAAVPFSGLFACADRLDWVLMIVGSLAAAAHGTALVVYLHYFAKIIXVLGLGPQEQGQDRMDEQFERFKEVANTMKRAVLLVLHIR

SEQ ID NO: 99032 - protein, 74 aa, Gossypium hirsutum
  Clone ID: LIB3149-025-Q1-K1-H6.pep
VPPKGQKLHIICKSKNTFGKTTLGRVTIQIDKVVTEGVYSGLFSLNHDSNKDGSSRTLEIEIIWSNMISNEDRI

SEQ ID NO: 99033 - protein, 76 aa, Gossypium hirsutum
  unsure (1)..(76): unsure at all Xaa locations
  Clone ID: LIB3149-025-Q1-K1-H7.pep
SFDIVMILMLCLSSVVAMHCVLLSWFILNHLLYCTSVAFFCVCIVPVQKPRSPLFXFVFAKNINFLSVWAXAYASV

SEQ ID NO: 99034 - protein, 91 aa, Gossypium hirsutum
  Clone ID: LIB3149-026-Q1-K1-A12.pep
TTQTNRKKKGLLKGQPLSKTGCFSNTYPSGSMVCYYYSPPIMILQKGKSLINFLSGSFSINGVLQEYLHTVLVVRVTILFALKTFCMNFLF

SEQ ID NO: 99035 - protein, 92 aa, Gossypium hirsutum
  Clone ID: LIB3149-026-Q1-K1-A3.pep
MSSRRSRSRQSGASRITDDQIIDLVSKLQQLIPELRGRRPDKVSASKVLQETCNYIRSLHREVDGLSDRLSQLLASTDTDSDQAAIIRSLLM

SEQ ID NO: 99036 - protein, 108 aa, Gossypium hirsutum
  Clone ID: LIB3149-026-Q1-K1-B3.pep
PIIAAVRPPRHHHIGDPRCTKMGSFSPPFSCLSETCSQRPKDKGSVPLLLDHAERRRKLRRRGHGADLALRVNEAEVCHSGANGVRGEEHRALDVSTGHVRRATLGRY

SEQ ID NO: 99037 - protein, 59 aa, Gossypium hirsutum
  Clone ID: LIB3149-026-Q1-K1-B5.pep
RENNPSRTDVLYICHHHIIIPSMHQNKFFYTSLTNLIQNISSNNTKTYAQSHLGFYTHI

SEQ ID NO: 99038 - protein, 57 aa, Gossypium hirsutum
  Clone ID: LIB3149-026-Q1-K1-B7.pep
VVVCVRMTVWILEIGRPSANCTLGFMLVLCTQCQPYIYSLKDGSAPIIPPTPYCESV

SEQ ID NO: 99039 - protein, 53 aa, Gossypium hirsutum
  Clone ID: LIB3149-026-Q1-K1-C4.pep
NTKIVLNDTYQKIKTYRKLNITKMFLFKVKRLNPKCNCSLTYIYCLSRITRKE

SEQ ID NO: 99040 - protein, 83 aa, Gossypium hirsutum
  Clone ID: LIB3149-026-Q1-K1-D1.pep
TCRHGINYRAKMLVILSSYICYTSNFNYCRNTFPSITFRASGVKTAPNQNPANYYGSWMTKLELKQYKISKSKTPVIEMLKLS

SEQ ID NO: 99041 - protein, 75 aa, Gossypium hirsutum
  Clone ID: LIB3149-026-Q1-K1-D6.pep
PLGFEAWSMGHLLRKFHRSFNNNGIEHLTIENVPEASCKVRGLQASWTRSLPHLQHLRRQASSSHQPSKAAFPVI

SEQ ID NO: 99042 - protein, 32 aa, Gossypium hirsutum
  Clone ID: LIB3149-026-Q1-K1-F4.pep
PVDYWFIVVSYDSSYLLSFIDFGICTFLVKWH

SEQ ID NO: 99043 - protein, 55 aa, Gossypium hirsutum
  Clone ID: LIB3149-026-Q1-K1-G1.pep
GIAELKKKSSKPKRPSIKALFEDESAAAASQPVQGSFINLLPPQIEEAPENRSRK

SEQ ID NO: 99044 - protein, 88 aa, Gossypium hirsutum
  unsure (1)..(88): unsure at all Xaa locations
  Clone ID: LIB3149-026-Q1-K1-G5.pep
FQDEDDPLLLLYFYKDSCTHAKYIFKXLVKLLYKLHKSSAFSWLKIIFHFCAFNICNALMLMYSTRKSLSVIETVMIFVLIEISCSFK

SEQ ID NO: 99045 - protein, 142 aa, Gossypium hirsutum
  Clone ID: LIB3149-026-Q1-K1-H2.pep
AKQETDGDKELESEPKSCRIRRQLFSSSGLGEPVGDGEDSGAVMQTLVMGGGEENGGGKICGGGGSGGGVGGVGSGFFESDSTDVYYQKMVEANPGNPLLLGNYAKFLKEIRGDYSRAEEFCGRAILANPDDGEIVALYADL

SEQ ID NO: 99046 - protein, 88 aa, Gossypium hirsutum
  unsure (1)..(88): unsure at all Xaa locations
  Clone ID: LIB3149-026-Q1-K1-H6.pep
VVLQITEVEAYRPNDSACHGRFGVTARTAPVFGPGGHAYVYLCYGLHTMLNVVAAKKXAGAAVLIRASLRCGGWKTIPDRGGKKTEKP

SEQ ID NO: 99047 - protein, 69 aa, Gossypium hirsutum
  Clone ID: LIB3149-026-Q1-K1-H7.pep
SNIERDIRIQYRDQSDFEYIAQQFGVFEEWKDGVPRTAYKGVVVFRYHPPRRVFLVGPDSLQQLGIENA

SEQ ID NO: 99048 - protein, 64 aa, Gossypium hirsutum
  Clone ID: LIB3149-027-Q1-K1-E1.pep
LDLSATSSSVTTTMETHYASPLSWTFAGRIGLSSTSSEAPSEYPWALHWAFFILPISLPLSTMA

SEQ ID NO: 99049 - protein, 68 aa, Gossypium hirsutum
  Clone ID: LIB3149-027-Q1-K1-F9.pep
PVCLSFCVSPLLLLRFAPVLRLLSCGCVLVASFSVSRVGLSFFRPVRPCFSVSVPGVVCRPALVVPVS

SEQ ID NO: 99050 - protein, 82 aa, Gossypium hirsutum
  Clone ID: LIB3149-027-Q1-K1-G4.pep
SLQDHFPRHNHSHRGNRHLHVHPQISMLVLGSAILPDCLAASWFISLSLDCFCFWISFSYLLQQRLQRQEALHLRPPRFLLL

SEQ ID NO: 99051 - protein, 51 aa, Gossypium hirsutum
  Clone ID: LIB3149-027-Q1-K1-G9.pep
KSYDVALERSYSAGTFKLSSLFFYFFFFFFFFFFFFFFELINVMTNLHRIK

SEQ ID NO: 99052 - protein, 39 aa, Gossypium hirsutum
  Clone ID: LIB3149-028-Q1-K1-A12.pep
ILLDEESFKECAVLINSKISNSIPNYCYNKKNQPFFIKI

SEQ ID NO: 99053 - protein, 137 aa, Gossypium hirsutum
  Clone ID: LIB3149-028-Q1-K1-C5.pep
GGMTTEEYRCHFSIWALAKAPLLIGCDVRSMDNVTFELVANKEVIDVNQDKLGVQGKKVKKEGDLEVWAGPLANNMVAVVLWNRGSSSANITAYWSDIGLKPSTVVDSRDLWAHSTETGVEDEISAEVDSHACKMYT

SEQ ID NO: 99054 - protein, 73 aa, Gossypium hirsutum
  Clone ID: LIB3149-028-Q1-K1-D11.pep
MIPLQFLGSALNPLAPRDLSVSGRIRFSKYKNFNFSYTWTTSLPFLCIFSFLANLDFSVMFTFPPYSNRAGFV

SEQ ID NO: 99055 - protein, 82 aa, Gossypium hirsutum
  unsure (1)..(82): unsure at all Xaa locations
  Clone ID: LIB3149-028-Q1-K1-D2.pep
SGRVAFAFLLSPLLARPFGAGLFALASASXXCFGSPPLVLGSSWFFPVPPLFXVGRSLGCSCRFLKPLALFARVRALGSSGS

SEQ ID NO: 99056 - protein, 48 aa, Gossypium hirsutum
  unsure (1)..(48): unsure at all Xaa locations
  Clone ID: LIB3149-028-Q1-K1-D5.pep
GSFKTAPPLFFFFFFFFFFFFFFFXXGFFFFFFFFFFFFFFFFFFFFF

SEQ ID NO: 99057 - protein, 101 aa, Gossypium hirsutum
  Clone ID: LIB3149-028-Q1-K1-E10.pep
NNEMGVREREREATQDESKALNLVEKENCQSEMHITMRILDAYLDIFNWGPTTMQDGTCLRLHQICNLLARHGFNFWALLLKPTSTLSFLLARNIYMRRIL

SEQ ID NO: 99058 - protein, 69 aa, Gossypium hirsutum
  Clone ID: LIB3149-028-Q1-K1-E12.pep
FPRRNSCTKYQHEMLLYLWGHHQKVAVEITAILISQLPRIICGCRCCPIPKPSSLFNSDLYLQGHLLVV

SEQ ID NO: 99059 - protein, 120 aa, Gossypium hirsutum
  Clone ID: LIB3149-028-Q1-K1-E2.pep
RALPVLKKAYGDSMHKVLHVGPDTCSVVSKLLKEDDTQAWGVEPYDLDDADAGCKSLVHKGIVRVADIKFPLPYRAKSFSLVIVSDALDYLSPRYLNRTLSELARVSSDGVIIIFWYLGQ

SEQ ID NO: 99060 - protein, 37 aa, Gossypium hirsutum
  Clone ID: LIB3149-028-Q1-K1-E5.pep
KKRTNVYIFKYLFFFARYYKLTDLNNDETDNAGDPVR

SEQ ID NO: 99061 - protein, 52 aa, Gossypium hirsutum
  Clone ID: LIB3149-028-Q1-K1-F10.pep
SKSSLRYSVGHSSFISKAMGIDRSLALMRHEPTRESSRSELQGQRQRTISRE

SEQ ID NO: 99062 - protein, 41 aa, Gossypium hirsutum
  Clone ID: LIB3149-028-Q1-K1-F11.pep
RKLSLLLPLFSSLKSMINWKLSIWLPSVNLPMFSSPHLPLF

SEQ ID NO: 99063 - protein, 42 aa, Gossypium hirsutum
  Clone ID: LIB3149-028-Q1-K1-F12.pep
NDLNSCAHNHCSQFETATAMAFISWFTSLPSFLLNFWSLASR

SEQ ID NO: 99064 - protein, 128 aa, Gossypium hirsutum
  unsure (1)..(128): unsure at all Xaa locations
  Clone ID: LIB3149-028-Q1-K1-G11.pep
QRNYSSGYYQLYFDTDNVLCLVYKGPEFSSVYWPSPWLLRWEAGRSTFNNTKIAVLDSLGNFSSTDNFTFLSADYGLNISRMLKMDLDGNLRLYSLSEDTKAWVVSWQAFXSPCKVHGCCGPNXICIY

SEQ ID NO: 99065 - protein, 95 aa, Gossypium hirsutum
  Clone ID: LIB3149-029-Q1-K1-B1.pep
TNPITRYTHDPAKLPKTCLHPNPISSSPTKPKLEESGDLGFLGKPSRRSIAVSPRVTPLQFPSFQQPSISAESQCAVSTWFVTTIVEPPSPPNFS

SEQ ID NO: 99066 - protein, 35 aa, Gossypium hirsutum
  Clone ID: LIB3149-029-Q1-K1-B12.pep
DRIISPCITRLVDIQKIHPSLSIITYLKYHSNHIE

SEQ ID NO: 99067 - protein, 63 aa, Gossypium hirsutum
  Clone ID: LIB3149-029-Q1-K1-C1.pep
SILFRIIFSVLLVCIDNNMFWCTISYLPLFLLYNYWLNFICNSKYIILCFILFFRKKNINLII

SEQ ID NO: 99068 - protein, 61 aa, Gossypium hirsutum
  Clone ID: LIB3149-029-Q1-K1-C10.pep
MSPLRAFLFLYPCPIRPSFESLHFLFFMCESVSVHFNALMPAPQGKSRIGSTIVGLVCAYP

SEQ ID NO: 99069 - protein, 40 aa, Gossypium hirsutum
  Clone ID: LIB3149-029-Q1-K1-C2.pep
FIKSYIYVFLPLKGHSFFRSCYRREYSFVNLIFQHLWMNA

SEQ ID NO: 99070 - protein, 103 aa, Gossypium hirsutum
  Clone ID: LIB3149-029-Q1-K1-C9.pep
EKTLIFCIKTLTKLVHRLSQEELLAQLPSFLPVLFCAFSNQSAEVRKTVVFCLVDIYVMLGKAFRPYLQDLNGTQLRLVTLYANRISQARTGTCVEAINLPAV

SEQ ID NO: 99071 - protein, 77 aa, Gossypium hirsutum
  Clone ID: LIB3149-029-Q1-K1-D12.pep
FCYVIVWIMFVVLLLFFLILFFYFLLFFLFMFIFILFFYFFFFIIFFFLLFIFLFFYSLSYDFIVMLFFFCFIFIVF

SEQ ID NO: 99072 - protein, 122 aa, Gossypium hirsutum
  Clone ID: LIB3149-029-Q1-K1-D6.pep
MEKSGKEDTQTKQTTKPVKHLIKKIIKKFHASSGKEETNSFSTKKKLQKVIKLFHRKIHPENSIAQRESKMNTAPYSDNDYTGGDNMRFPQGSRSKAGLGNNKKKTISKLPQYGLTGCTAAT

SEQ ID NO: 99073 - protein, 62 aa, Gossypium hirsutum
  Clone ID: LIB3149-029-Q1-K1-D7.pep
HAKRTIDYRTYVTDGPSLTLYDMGSGSCSRLLQPPLAGIPDASACELPVRLFQNKAICLRRY

SEQ ID NO: 99074 - protein, 53 aa, Gossypium hirsutum
  Clone ID: LIB3149-029-Q1-K1-E2.pep
NRKVLFFFFFYKVLKFGFIHNEKEFWTHASPPNCNKSKCRLVFLVKKKLFFYF

SEQ ID NO: 99075 - protein, 118 aa, Gossypium hirsutum
  unsure (1)..(118): unsure at all Xaa locations
  Clone ID: LIB3149-029-Q1-K1-F2.pep
LSLWFCISVPLTLLGGYFGTRAEPIQYPVRTNQIPREIPARKYPSWLLVLGAGTLPFGTLFIELFFILSSIWLGRFYYVFGFLLIVLLLLIIXCAEVSVVLTYMHLCVEDWRWWWNAF

SEQ ID NO: 99076 - protein, 49 aa, Gossypium hirsutum
  Clone ID: LIB3149-029-Q1-K1-F4.pep
PICGMLYYGIVQLHLVRAFSAPFSRSSSSNAIPHLSFIQFRGAWVGRDS

SEQ ID NO: 99077 - protein, 49 aa, Gossypium hirsutum
  Clone ID: LIB3149-029-Q1-K1-G1.pep
LAAAWNILTPVLQWIDQNNIAPELYELGGRGPVGSYYLWAKHGVWWADD

SEQ ID NO: 99078 - protein, 35 aa, Gossypium hirsutum
  unsure (1)..(35): unsure at all Xaa locations
  Clone ID: LIB3149-029-Q1-K1-G10.pep
LARVPLFFGAFSPGSFAFFGVRWLLLCAFFRXRGS

SEQ ID NO: 99079 - protein, 73 aa, Gossypium hirsutum
  Clone ID: LIB3149-029-Q1-K1-G6.pep
CLPPSDRLQAAVRRFVLCWFGSGAARAGNGASALYQYFMTTRRVCVNSSIPCLPSSPPKPERFQPAWKPWYGS

SEQ ID NO: 99080 - protein, 62 aa, Gossypium hirsutum
  Clone ID: LIB3149-029-Q1-K1-H11.pep
IRDEGSPGTRSIGISMIGLRPRYSLAFGSVFLSGCKGGLLSIAGSPAKLIIMYLKDEFHTFG

SEQ ID NO: 99081 - protein, 52 aa, Gossypium hirsutum
  Clone ID: LIB3149-029-Q1-K1-H5.pep
LCHHFGDFLMDVTMEHAICHLQCQCYPMWLRIRLSMHRFQFVYQLVLNSSLH

SEQ ID NO: 99082 - protein, 79 aa, Gossypium hirsutum
  unsure (1)..(79): unsure at all Xaa locations
  Clone ID: LIB3149-030-Q1-K1-A9.pep
LEIRKDGLIGLDRLWGGSGGQSACASASACASSSSMLKCKCKWVGCGWGWGAXACVGCQLLLNTCDTGITIYILLSKQH

SEQ ID NO: 99083 - protein, 64 aa, Gossypium hirsutum
  Clone ID: LIB3149-030-Q1-K1-C1.pep
YTFCSYIGFLNANNKMIFVGMFTFTSEVRLVVGIAQPVTWNPYRIILFSFTLVWLQLKLSYTHC

SEQ ID NO: 99084 - protein, 57 aa, Gossypium hirsutum
  Clone ID: LIB3149-030-Q1-K1-C3.pep
EIKSSENYRELSGGDDTAWRKTRKAGEKPVAIRLKKRKSPETGESFQPKQIQKNDGR

SEQ ID NO: 99085 - protein, 91 aa, Gossypium hirsutum
  unsure (1)..(91): unsure at all Xaa locations
  Clone ID: LIB3149-030-Q1-K1-D8.pep
KENGGLGFQIFSQFNIALLAKQGWCIFNYLNSLLARVLKAKYFSNSNFLSAELENLPSFTXKSIWAAKGLLRSGLWWRIGRGNKISIWNDC

SEQ ID NO: 99086 - protein, 107 aa, Gossypium hirsutum
  unsure (1)..(107): unsure at all Xaa locations
  Clone ID: LIB3149-030-Q1-K1-E1.pep
SSVRVIESVDVNVHILILSGRMNNTFYNAQGYAVGSSLVLDDTPYLPATVLEKGNAKXSLFXLPTDDKVADKADTDANTTVVTPXGIIDWYMGSDIIPDSIETFNAT

SEQ ID NO: 99087 - protein, 61 aa, Gossypium hirsutum
  Clone ID: LIB3149-030-Q1-K1-E2.pep
VEAGSMPTARPKDMHLDHNTNMNTHLNYLQSPWRKETLNESLLCSPMMTRLLTILTLMRTP

SEQ ID NO: 99088 - protein, 38 aa, Gossypium hirsutum
  Clone ID: LIB3149-030-Q1-K1-F10.pep
FNESIFVKTILYHNLISSNNETCYVLCYYFLLKIIRLD

SEQ ID NO: 99089 - protein, 54 aa, Gossypium hirsutum
  Clone ID: LIB3149-030-Q1-K1-F9.pep
TLKTALYVFNVLCIHLVHDTLEPSSNFKSVVCGGSQKESLCLDYYKTTRGLSGI

SEQ ID NO: 99090 - protein, 62 aa, Gossypium hirsutum
  Clone ID: LIB3149-030-Q1-K1-H1.pep
DFRYLSLSSRYIHLNHPWLHSRQRYFNPNINSYGFICLEFLMEQWSSCPYYIQCVSVKLLTP

SEQ ID NO: 99091 - protein, 47 aa, Gossypium hirsutum
  Clone ID: LIB3149-031-Q1-K1-A2.pep
THTVGALKVSGLEKRTCSRLRCSGRPKYNSSDLCVSPVGQVPGKRAL

SEQ ID NO: 99092 - protein, 54 aa, Gossypium hirsutum
  Clone ID: LIB3149-031-Q1-K1-A4.pep
NGFTCPLFSTQHPVILPGECIVVPVLHITAYLCLCQCQTPLPADLLWRGPYRCS

SEQ ID NO: 99093 - protein, 115 aa, Gossypium hirsutum
  Clone ID: LIB3149-031-Q1-K1-A9.pep
KRPLFPVPLTNEAKMKKVCLFLAILVLVFCNSMATSIETNSTVFVITDFDDLEFLMDSHFGRILQSNGSVSRMSLNAGQAVANCGRGRPYDSCLPNPNRPVTPQNCGSYNRACGR

SEQ ID NO: 99094 - protein, 97 aa, Gossypium hirsutum
  unsure (1)..(97): unsure at all Xaa locations
  Clone ID: LIB3149-031-Q1-K1-B5.pep
MGSKRTASLALSFALNILSFYPVSARGFCPFLNPKPLPNPMPNPTPSPYSSGKRPSRXLLDIGSLPVSSHCLLNVSIVTPSVQPCCSIIQGPADFEA

SEQ ID NO: 99095 - protein, 63 aa, Gossypium hirsutum
  Clone ID: LIB3149-031-Q1-K1-B7.pep
DGSCVGSNKPPLLLRRFNATWLRPSLPNVVSTSPYMIITFTILKYLKCDGRREGIAAAGRRFN

SEQ ID NO: 99096 - protein, 72 aa, Gossypium hirsutum
  Clone ID: LIB3149-031-Q1-K1-C1.pep
MDQDIDRVKGPWGPEEDESLRKLVQLHGPRNWSLISRPIPGRSGKSCMLRWCNQLSPEVAHRPFTAEEDEII

SEQ ID NO: 99097 - protein, 47 aa, Gossypium hirsutum
  Clone ID: LIB3149-031-Q1-K1-C11.pep
GKAKFSQGWYEFTVENNLGEGDVCVFELLRSREFVLKVTVFRVMDGA

SEQ ID NO: 99098 - protein, 42 aa, Gossypium hirsutum
  Clone ID: LIB3149-031-Q1-K1-C6.pep
RKIAYYQRVASKCLSQACMRIHSINVEDLGMSQRTCWMANVQ

SEQ ID NO: 99099 - protein, 64 aa, Gossypium hirsutum
  Clone ID: LIB3149-031-Q1-K1-D10.pep
CIQSQQRCSWSTAASAFSLPETLDDHWQPLHRTHSTDTVSYMSPTRPVPTCVAVADHKLRSPFT

SEQ ID NO: 99100 - protein, 71 aa, Gossypium hirsutum
  Clone ID: LIB3149-031-Q1-K1-D11.pep
VAQITILTVMFYFTAQLLRSTAGLLFTEGVDMVVSTVIHPRSWIYRTSSSRTVFSDHHHIYIGLHSLFNHS

SEQ ID NO: 99101 - protein, 39 aa, Gossypium hirsutum
  Clone ID: LIB3149-031-Q1-K1-D12.pep
DVSGRETICAHERGSAYHGSQFLWGTCLTVSHHGGVASV

SEQ ID NO: 99102 - protein, 69 aa, Gossypium hirsutum
  Clone ID: LIB3149-031-Q1-K1-D5.pep
GVELVTDQKLKTPAKLETIHVMDQMKELGVLVGKGGFYGNVFRITPPLCFTKEDADFLVDAMDYTMEKM

SEQ ID NO: 99103 - protein, 80 aa, Gossypium hirsutum
  unsure (1)..(80): unsure at all Xaa locations
  Clone ID: LIB3149-031-Q1-K1-D6.pep
GQITILTGMFYWIAQLLGSTAACYLXLKAVTGAATXVSIHGLGAAVRALQGVVLVMIITSASVYTVCSTTPDRLYGSRHT

SEQ ID NO: 99104 - protein, 40 aa, Gossypium hirsutum
  Clone ID: LIB3149-031-Q1-K1-D9.pep
SLECFIDWYYSAIIALDFDICFNMFAFLSAYLCKILCYSI

SEQ ID NO: 99105 - protein, 53 aa, Gossypium hirsutum
  Clone ID: LIB3149-031-Q1-K1-E5.pep
LFREDGITNQSFSCVELSSLSGKNFTLNSILAKWLRICSARQVYEKLLEAAQP

SEQ ID NO: 99106 - protein, 50 aa, Gossypium hirsutum
  Clone ID: LIB3149-031-Q1-K1-G10.pep
KRIGRSGNVRDMNTEFTDYRLPTRYSDQEAMGRDHLHIYLQSIVSGIRSN

SEQ ID NO: 99107 - protein, 79 aa, Gossypium hirsutum
  Clone ID: LIB3149-031-Q1-K1-G5.pep
GHPHICECLGYELEMAFLYAAGAAGYTSIIPERWKPVAFDIAGHSHQIFHVFVVLAALAHCVATLVIMDFRRESATCAY

SEQ ID NO: 99108 - protein, 61 aa, Gossypium hirsutum
  Clone ID: LIB3149-031-Q1-K1-G9.pep
IKKRPKSYISVIVFTREWLLLQALKQFSVRSLFPLKSINHLVELPLDPSLPYLANLVISTC

SEQ ID NO: 99109 - protein, 52 aa, Gossypium hirsutum
  Clone ID: LIB3149-032-Q1-K1-A8.pep
LHLFHRHNLINLTQIIKEQDTLTGSTHPLQNTPHCDSSINIVNDPVNYLHLH

SEQ ID NO: 99110 - protein, 109 aa, Gossypium hirsutum
  Clone ID: LIB3149-032-Q1-K1-C1.pep
MARTNKYTSINFNHVLEKNLTPSSSSGYNKNPQFNHQTQSYFASYSYVGNVKTHGRMLVLTRPSPKPISTPPVVSPTPPKHPLPQPRSVLVPDQPPSSDQISLRPGSGT

SEQ ID NO: 99111 - protein, 55 aa, Gossypium hirsutum
  Clone ID: LIB3149-032-Q1-K1-C7.pep
KMTFRLRAALMEDLRLQHEHRIHNTFYHANQMQSTEPLLTTNITGKTMAPPTLIN

SEQ ID NO: 99112 - protein, 63 aa, Gossypium hirsutum
  Clone ID: LIB3149-032-Q1-K1-D11.pep
KILYCCSYITVTKQPVTKRLQNQRRGPNSSNRWAKVRSTRKDKLDNLLLQEQALTAAILFTLH

SEQ ID NO: 99113 - protein, 63 aa, Gossypium hirsutum
  Clone ID: LIB3149-032-Q1-K1-D6.pep
AYNARTFGQTFSTGSSSKEKNSNKPNSEWKPSQRPEAVSDEFGQRQNNPNKQPRRYSEMSFSK

SEQ ID NO: 99114 - protein, 81 aa, Gossypium hirsutum
  Clone ID: LIB3149-032-Q1-K1-D8.pep
MEIEEKQAEVIDHFVKQVSAQKGSALGSVFVEATSHPSLFAFSEILAVPTVAELEGTDNSVHLEMLRLFAHGTWSDYKRNS

SEQ ID NO: 99115 - protein, 47 aa, Gossypium hirsutum
  Clone ID: LIB3149-032-Q1-K1-F11.pep
KNPPHFIFFFFFFYYFFFFFIFFFFFFFFFFFFFFFYFFFFIFFFFF

SEQ ID NO: 99116 - protein, 78 aa, Gossypium hirsutum
  Clone ID: LIB3149-032-Q1-K1-F12.pep
IQIVIFESFLQVWRNCMDDYTTPVSIWYPRAPEGFISLGCVAVPGFEEPEPDLVQCVAEVILEETTFEEQKIWSAPES

SEQ ID NO: 99117 - protein, 95 aa, Gossypium hirsutum
  Clone ID: LIB3149-032-Q1-K1-F3.pep
GRLQVQLGVNMPAQANQKLSRDEADSAEVELFEVYDVVIYMGIIDILQEYNAKKKAEHACKSVKFDPLSISVVEPELYAQRFINFLKQKVFPEQP

SEQ ID NO: 99118 - protein, 96 aa, Gossypium hirsutum
  Clone ID: LIB3149-032-Q1-K1-F4.pep
PNRNNSWERSYVQHNAGCDGNSWGRKAGGNHDVGSRKLDYKSSSSGGAWHSGSRKREGSHHYTPGYKSSRFQQDDNQVNHYWRNTKSNKRVSFVRE

SEQ ID NO: 99119 - protein, 122 aa, Gossypium hirsutum
  Clone ID: LIB3149-032-Q1-K1-H11.pep
PGVAPRFLTRTKKSPACIRAAGPTHVSRDIMEETSPSYRPSHTAPTKHFCYRSAGLRTRLPPPHGISIERKVVFRVAARSLPWRFKPVLSRASHPEERPLTAFDQHRRPFVVGIGGTTRAAS

SEQ ID NO: 99120 - protein, 56 aa, Gossypium hirsutum
  Clone ID: LIB3149-032-Q1-K1-H12.pep
ICTFPTQGVPWGPGGLFERKGPYFGWADGCLSFRGRRLFIISLRKQSDNSVDLLEF

SEQ ID NO: 99121 - protein, 49 aa, Gossypium hirsutum
  Clone ID: LIB3149-032-Q1-K1-H3.pep
TPTQNKILIFGRPFFFFFFFFFFFFFFFFFFFFFFFFFFFFFFFFFFFF

SEQ ID NO: 99122 - protein, 75 aa, Gossypium hirsutum
  Clone ID: LIB3149-032-Q1-K1-H8.pep
RIIYNYQKRQKLGRTYISNKEKKKGQDGLKDKIFKGGRIQRPNSSLGAPKCNSLSLRCTKSKLGWTLFLTYLMGK

SEQ ID NO: 99123 - protein, 54 aa, Gossypium hirsutum
  Clone ID: LIB3149-033-Q1-K1-A11.pep
TPWLKNPRGGLLYYVKVIGIRVGRWIVDILPRAIALNPFTVAGPIIDSGPGFTR

SEQ ID NO: 99124 - protein, 60 aa, Gossypium hirsutum
  Clone ID: LIB3149-033-Q1-K1-C7.pep
QHETGSLFVLYIYMCVYANKMCIFPFKFWVGKKMIFSTYIKKRKFLETKKTITIYEQLQD

SEQ ID NO: 99125 - protein, 117 aa, Gossypium hirsutum
  Clone ID: LIB3149-033-Q1-K1-C8.pep
SHHFMHWGEALIKDAKLVVSTESIKYGLNILQGIQSESKSLKKSLKDVVTENEFEKKLLADVIPPSDIGVSFDDIGALENVKYTLKELVMLPLQRPELFCKGQLTKSCKGILIFGPS

SEQ ID NO: 99126 - protein, 52 aa, Gossypium hirsutum
  Clone ID: LIB3149-033-Q1-K1-D7.pep
NAPGAIPIMHTVVEVSLGYAEKMMKPFVLIISRNEKSFWFFYLGSFSFIGGI

SEQ ID NO: 99127 - protein, 89 aa, Gossypium hirsutum
  unsure (1)..(89): unsure at all Xaa locations
  Clone ID: LIB3149-033-Q1-K1-E12.pep
PAACLRRATSYIVYPETNIQATGRQRTDWENREPSQLTTQSAHTTFASWQXPNXARSDHPSQQLTSLHGEWETPRTLSLSTKRVGCTRN

SEQ ID NO: 99128 - protein, 52 aa, Gossypium hirsutum
  Clone ID: LIB3149-033-Q1-K1-E5.pep
SNVFVIIFGLLQVRFMFPCYGTISQSLLFIIHAFCAGGDRISGCSNVWHLVS

SEQ ID NO: 99129 - protein, 56 aa, Gossypium hirsutum
  Clone ID: LIB3149-033-Q1-K1-E6.pep
KKINLCKHGEYKFDPLKRAPLFFFFFFYFFFFFYFFFLFFFFFFFFFFFFFFFFFF

SEQ ID NO: 99130 - protein, 32 aa, Gossypium hirsutum
  Clone ID: LIB3149-033-Q1-K1-E7.pep
FGKINNSKFDRIYLQEWKNIISCDILLELHSK

SEQ ID NO: 99131 - protein, 60 aa, Gossypium hirsutum
  Clone ID: LIB3149-033-Q1-K1-G12.pep
SCEESGGFIYPYQTHNTGVFYNHINELKILIADCHFLSMESLNHIQNLFVYILLIRTYLN

SEQ ID NO: 99132 - protein, 127 aa, Gossypium hirsutum
  unsure (1)..(127): unsure at all Xaa locations
  Clone ID: LIB3149-033-Q1-K1-G8.pep
DYHSFILAAFIYEPLGFGTTGGXHMQMKGGAGFLAHVRAKTSCGDGVINRGPLAWGLCFKREMSPSQDYCDDYYKYMYSCAPGAQYYGRGALPIYWNYNYGAAGEGIKSDLLHHPXFFEHNPTIVFQ

SEQ ID NO: 99133 - protein, 38 aa, Gossypium hirsutum
  Clone ID: LIB3149-033-Q1-K1-H12.pep
NIRGWLGDGTFVGATVAYLFNGKPVVFFYLKIKGLKRP

SEQ ID NO: 99134 - protein, 100 aa, Gossypium hirsutum
  Clone ID: LIB3149-033-Q1-K1-H9.pep
YFLSSGNFVYLTPTVLSFYVTFVIVVHISRLRVIAELRHGDIFHSANIVSSIEFDRDDEMFAIAGVSRRIKVFEFSAIVNEPADVHCPIVEMSTRSKLNC

SEQ ID NO: 99135 - protein, 60 aa, Gossypium hirsutum
  Clone ID: LIB3149-034-Q1-K1-A2.pep
SILLLIKKMKISFLLCFNASPGHCFLWHACRFFLISPFVLCSNYSKLSFCKLMSWEIKEN

SEQ ID NO: 99136 - protein, 66 aa, Gossypium hirsutum
  Clone ID: LIB3149-034-Q1-K1-A5.pep
EMLIVMKSLDKNSALVRIIGRTALSGICFVPCPDCFCCIKVHLYEVYYNSSVQVLCLLLQYCMWIV

SEQ ID NO: 99137 - protein, 126 aa, Gossypium hirsutum
  unsure (1)..(126): unsure at all Xaa locations
  Clone ID: LIB3149-034-Q1-K1-A8.pep
PKKKKKKKKKKKKKKKKKKKKKKKKKKKKKKKKKRGGDCERRKRKSKGRRKKKEKKKGGGNKKGKRXSKSGGRRIRKKFKGCQQKKKNRGRGCFKKKEWGGKKKIMGDKIVKGFGEKMRQYEKGGE

SEQ ID NO: 99138 - protein, 76 aa, Gossypium hirsutum
  Clone ID: LIB3149-034-Q1-K1-B6.pep
SDRGRLPRQAFSGLFALNSHSPGWGSKLLRFGFWVLGSIYMAGECRRLKKTLVLKLVIRLWELFCGALNYMDTPLV

SEQ ID NO: 99139 - protein, 78 aa, Gossypium hirsutum
  Clone ID: LIB3149-034-Q1-K1-B8.pep
TFRLSLPFIVNSFFLSSFKRKSQTDQIRVESQPKRNCKTFASERWHSNGHKDSSSQCIHHLHNTGVTCRLCLAVPPLF

SEQ ID NO: 99140 - protein, 88 aa, Gossypium hirsutum
  unsure (1)..(88): unsure at all Xaa locations
  Clone ID: LIB3149-034-Q1-K1-C12.pep
PKPNAEDESATDREESDVSGSDGDDTSWITWICNLHGNEFFREADDDYIQHDFNXLCGLSRQVTYYDYALDLILDVESSHGKLTDSFS

SEQ ID NO: 99141 - protein, 65 aa, Gossypium hirsutum
  Clone ID: LIB3149-034-Q1-K1-D1.pep
SPIKCGFLLPCFVSNELSNSESCFCFFSLPLNGDLQTQSCGILFLFVGYYYDVTFIRKNSFYVNR

SEQ ID NO: 99142 - protein, 49 aa, Gossypium hirsutum
  unsure (1)..(49): unsure at all Xaa locations
  Clone ID: LIB3149-034-Q1-K1-D4.pep
KSLMFVVYIVYVCLFFFKFLQFVVERERNQLIKLIKECMKCTXKKININ

SEQ ID NO: 99143 - protein, 48 aa, Gossypium hirsutum
  Clone ID: LIB3149-034-Q1-K1-E10.pep
DRDLHSGPPKEPFLLLLDMCYLYCNYTSSIFFFYFFFNFFFFFFFFLR

SEQ ID NO: 99144 - protein, 99 aa, Gossypium hirsutum
  Clone ID: LIB3149-034-Q1-K1-E4.pep
VASISLSFLTLDYLFTTILCFKSIAYWSKFPSLHCSQTKIQKRRKKNVTSSRIRNPNETILESISFLSAPPSGNYLSLLFSFCFFFFLMCLIIELLFNA

SEQ ID NO: 99145 - protein, 46 aa, Gossypium hirsutum
  Clone ID: LIB3149-034-Q1-K1-E5.pep
AKVHIKTKASIIPGFLPHGYNQQSKSMTPNKDANCQPFAKEDFRVD

SEQ ID NO: 99146 - protein, 68 aa, Gossypium hirsutum
  unsure (1)..(68): unsure at all Xaa locations
  Clone ID: LIB3149-034-Q1-K1-E6.pep
GGVGRQLLQHIVSCRSLYAXQGFHLLVVGVSDIKSLIIASYVXQKELDDYISAEVCMVKSYGSSLSKI

SEQ ID NO: 99147 - protein, 92 aa, Gossypium hirsutum
  Clone ID: LIB3149-034-Q1-K1-E7.pep
IIIPLASAAPSAVEAFTMARAYDEERGDGVSTLVVGRANTFYAANATVFASDGNVAFDGGHSRTTILALFSLATPKGNLTDERLNASNISEH

SEQ ID NO: 99148 - protein, 56 aa, Gossypium hirsutum
  Clone ID: LIB3149-034-Q1-K1-F3.pep
QGYDISFLITNYHCEELQKQKLIDFIVQFMEVRTFLTVSVYLCLLIIYSGSLFNLK

SEQ ID NO: 99149 - protein, 49 aa, Gossypium hirsutum
  unsure (1)..(49): unsure at all Xaa locations
  Clone ID: LIB3149-034-Q1-K1-F4.pep
RDFLFTRGIWAVRGGPPXGSSLLDNPYIPYQCMDSYLSSTGLGSASMGK

SEQ ID NO: 99150 - protein, 142 aa, Gossypium hirsutum
  unsure (1)..(142): unsure at all Xaa locations
  Clone ID: LIB3149-034-Q1-K1-G11.pep
IIMALAKDPICSLQTSAFNNGNFDEGGDDHLKKLGGGVNNFPMTSSSSFSSPRSIDSDSFVFRPPHEEVHSLINFKGSSMYDNFIHQYHHGTNYGSLLSFEQNEKAPRSGTYLKRASHKDNYSMXDPRLVEDFSCFETASNF

SEQ ID NO: 99151 - protein, 93 aa, Gossypium hirsutum
  unsure (1)..(93): unsure at all Xaa locations
  Clone ID: LIB3149-034-Q1-K1-G12.pep
PTRPPTRPLSAIYSLFLVKDLSAWKLRPNIGLVAILYSAIVATTFRISLCSWCLWKVGPLYVSMFKPLAIIFAXXMGIVFLGDDLSLGKYLSF

SEQ ID NO: 99152 - protein, 90 aa, Gossypium hirsutum
  Clone ID: LIB3149-034-Q1-K1-G2.pep
FDHQQRVLLKRTDTEEAATPRVWKVKLVISPDKLAEIMAQEARTEALIESVRAVAKCGDGVSSSSVAKSDQWCVSCGGKGSLRNHAQDRS

SEQ ID NO: 99153 - protein, 144 aa, Gossypium hirsutum
  Clone ID: LIB3149-034-Q1-K1-G6.pep
SNIDLTPIEFPSLQQAIQNKLPDKSDHSNSEPEASSVESTVTVGNCENSQKSHVDEPCPMISFEESETAPVHINVTRQPSPPPVLAEVQDLVHTISPQVKETDCRIDNPSTEALVPSESPLQLHISTTMMESFMKLAKSNTNRE

SEQ ID NO: 99154 - protein, 115 aa, Gossypium hirsutum
  Clone ID: LIB3149-034-Q1-K1-G7.pep
GVHVTSTPLDLSYSQLTVATGTMRKFYQSRKSQRALTVVMLGSQIPLYGGGASLGSLNGEPTQPVPLTLNFIVRSRAYVLGKLVKPKFYKKIECSVTMNPMKMSWAISLKNKCIY

SEQ ID NO: 99155 - protein, 55 aa, Gossypium hirsutum
  Clone ID: LIB3149-034-Q1-K1-H11.pep
YLFFFFFFFFFFFGTKIKSLAFSKFIVSLQHEKLQTRRKYDYEFFIASLDGSAEV

SEQ ID NO: 99156 - protein, 103 aa, Gossypium hirsutum
  Clone ID: LIB3149-034-Q1-K1-H2.pep
NTPKSQRGIQDTTRPLLVYSRKKAPVQDQSSSPPIQPEAIAEPTTETTKNLDEFPIAIRKGIRACTKHPLYLFLSYKNLSHNHKAFLTSLNSISIPKTVSEAL

SEQ ID NO: 99157 - protein, 105 aa, Gossypium hirsutum
  unsure (1)..(105): unsure at all Xaa locations
  Clone ID: LIB3149-034-Q1-K1-H6.pep
VLTCSIVRASKRILKELMDLHKDPTTYLVAGPISNDMFHWQXATIMGPSDSPYAGGVLLVTIHLPPDYPYKPPKVALMTKVFHPNINSNGSICLDILKEQWSPCT

SEQ ID NO: 99158 - protein, 95 aa, Gossypium hirsutum
  Clone ID: LIB3149-035-Q1-K1-B10.pep
EKAAENVYIKKTEKEKLEKLARKGPKPEEKPAVGSGGSVTDAKPSSSTSTSRASSTEKVSTDKYQNYAVFTGVVTFASALGWYMISADKKKEAQD

SEQ ID NO: 99159 - protein, 141 aa, Gossypium hirsutum
  Clone ID: LIB3149-035-Q1-K1-B5.pep
ESEAPNSIGVHSKDPSNPEHMVKIAVSNNTSGSLFSKTATSSRSSHSSATQKSHVTEAGNLMISVQVLRKGTNDFAEENELGRGGFGTVYKGVLGDGTELAVKRMEAWVISNKALDEFQSEIACLSKVRHRHLVSLLGYFI

SEQ ID NO: 99160 - protein, 85 aa, Gossypium hirsutum
  Clone ID: LIB3149-035-Q1-K1-B9.pep
GKRSSSWLLITYLDEDLRISKGDGGLFVLARQGSPLLEQYPYSIYEGDVPYILLLSTFPLIANCNFCCCIIFFVNVYVSFIYFIF

SEQ ID NO: 99161 - protein, 42 aa, Gossypium hirsutum
  Clone ID: LIB3149-035-Q1-K1-D3.pep
YREADIIFKTGNLHYLRWLWSQKLTRFFHTTKPDGLGEPGNP

SEQ ID NO: 99162 - protein, 79 aa, Gossypium hirsutum
  unsure (1)..(79): unsure at all Xaa locations
  Clone ID: LIB3149-035-Q1-K1-E3.pep
VDTYSNLYTIITVDQPALGLEAIFSIRVPDQKFGKDELHYLHXYAWIISSIGLTANPIINLSGXVTNVLALGTDLLFDT

SEQ ID NO: 99163 - protein, 92 aa, Gossypium hirsutum
  Clone ID: LIB3149-035-Q1-K1-E8.pep
ISSRDRYDILQPILAEKMFCKGNHPKRRKGGGFGPKNLLDNDHVLTYWSPKENKNQHWIEIKVPNGEERMKFNVVRIQEPIGLGQKIIKHEI

SEQ ID NO: 99164 - protein, 137 aa, Gossypium hirsutum
  Clone ID: LIB3149-035-Q1-K1-F12.pep
GSLAAQTQQPLRWHKAYFDAPEGDEPLALDMESMGKGQIWINGQSIGRYWTAYAHGDCSGCSYSGTFRPTKCQLGCGQPTQKWYHVPRSWLKPTQNLLVLFEELGGDPLKISLVKRSMSTVCAEMSEYHPNIKNWQI

SEQ ID NO: 99165 - protein, 40 aa, Gossypium hirsutum
  Clone ID: LIB3149-035-Q1-K1-F6.pep
LLICLILIIFLYNYKFCYLFYNHIRISDIQNNVDLFYFFI

SEQ ID NO: 99166 - protein, 50 aa, Gossypium hirsutum
  Clone ID: LIB3149-035-Q1-K1-G12.pep
ISISMISGRITGRCPNTTRAESSRCVYFQVYVFSSLFVIIKLYLRPKKKK

SEQ ID NO: 99167 - protein, 27 aa, Gossypium hirsutum
  Clone ID: LIB3149-035-Q1-K1-G4.pep
LSQPGFCLYHGNYDYRYNLCFMIFSYL

SEQ ID NO: 99168 - protein, 81 aa, Gossypium hirsutum
  Clone ID: LIB3149-035-Q1-K1-G9.pep
ILVPDVDYKIISGDHPTMTAPLLQMYALTKPPSEIKCNMMWKVIPTLSFTLTTCALMRPVISIFLKWIFLVTMEITRMLSL

SEQ ID NO: 99169 - protein, 128 aa, Gossypium hirsutum
  unsure (1)..(128): unsure at all Xaa locations
  Clone ID: LIB3149-035-Q1-K1-H2.pep
FKKILANRHSAQRSRVRKLQYISXLERSVTTLQTEVSTLSPRVAFLDHXRVVLTVENSALKQRIAALAQDKIFKDAHQETLKKEIERLTQVYQQQQSLKNMNDNHSLPPPQQQQPLLAPPPNEGQLIS

SEQ ID NO: 99170 - protein, 86 aa, Gossypium hirsutum
  Clone ID: LIB3149-035-Q1-K1-H8.pep
FFLLPELGQDKAYISETVFMFVFLSFFLWTFHPFVVKVKKFYTVQIWCRVLAYLVVSQTLRIFTFYSTQLPGPNYHCRPVYLFSGG

SEQ ID NO: 99171 - protein, 58 aa, Gossypium hirsutum
  Clone ID: LIB3149-036-Q1-K1-A8.pep
VKGKKKGKEKDANAFHPPAQTFLFPQRTNMIFFKVLLFPLYKNLHKTYVLILCILFCC

SEQ ID NO: 99172 - protein, 112 aa, Gossypium hirsutum
  Clone ID: LIB3149-036-Q1-K1-B1.pep
PIGGLSHCLKITIVTLFSAYKFLTCLFNTGFSLKKSLALDCISWFSLNMNLIVKGKHKTWKILVIFLHSNEFMGCNQNLNRARVFQGFCMMIPTVTLDVMKITLACGRKCIN

SEQ ID NO: 99173 - protein, 60 aa, Gossypium hirsutum
  unsure (1)..(60): unsure at all Xaa locations
  Clone ID: LIB3149-036-Q1-K1-B4.pep
YFQFEIEMVFVFHLQITFWVLSMGWLRILFWGCADVDKKSCRLCRLCALLSYLECWFXRX

SEQ ID NO: 99174 - protein, 126 aa, Gossypium hirsutum
  Clone ID: LIB3149-036-Q1-K1-B7.pep
MSDPVQTSLADLPSDPLLGPGAFIDVNGERKPAEPTKARNGSIPNGSQPETPSRGSVNSSSSADSKVKPRVLAPETWLPPGWLIEDRVRTSGATAGLVDKYYVDPTSGRKFRSKIEVLYFLENGSP

SEQ ID NO: 99175 - protein, 119 aa, Gossypium hirsutum
  Clone ID: LIB3149-036-Q1-K1-C11.pep
KERNLSCPFLTWFPLIFLLEIHNIICFIFVIGPNRPRPKQLKTVQLQAQRPYRPKTKPNPKTKKRKNPSDNRGAPQLPPPSTPPASAQSPQDSEMALSTRAVSSRLSAKTALRSPRKTK

SEQ ID NO: 99176 - protein, 70 aa, Gossypium hirsutum
  Clone ID: LIB3149-036-Q1-K1-C8.pep
SILWSVCKLAPDECSSVAVGAGLAAKLLLVIQSGCNPLLKQKSSELLKLCSLNYTDTIFISKCKLTRTIL

SEQ ID NO: 99177 - protein, 90 aa, Gossypium hirsutum
  Clone ID: LIB3149-036-Q1-K1-D12.pep
HPHHAKVTPKFCKQFARVGDVINKALLEYKEEVTNGSFPGPSHTPYKMNPKDVNGFSKELQRLGLDDAASAANEAAVEPEKMNMVNTGSN

SEQ ID NO: 99178 - protein, 126 aa, Gossypium hirsutum
  Clone ID: LIB3149-036-Q1-K1-D3.pep
RHKTMISSSWGAPAAFTKGCNLQHVADGLYGRHLFVYSWPDGELKQTMDLGNTGLVPLEIRFLHDPSKDTGYVGCALSSNMVRFFKTQDGSWNHEVAISVQPLKVQNWILPEMPGLITDFLISLDD

SEQ ID NO: 99179 - protein, 97 aa, Gossypium hirsutum
  Clone ID: LIB3149-036-Q1-K1-D6.pep
GANLETFAETKTGEAKFGSNISHLGHYSDVAEKSMERFVSVISSFRFSSPGSRASGLRAPLKDARNTCNNRSSAAVDFSQFAYVPKNKNAKLASPRF

SEQ ID NO: 99180 - protein, 47 aa, Gossypium hirsutum
  Clone ID: LIB3149-036-Q1-K1-D7.pep
LFFKLLYPWYWPSSCWNFIGSCMKAVFYSLLRVIHSRWGKLREAKTA

SEQ ID NO: 99181 - protein, 50 aa, Gossypium hirsutum
  Clone ID: LIB3149-036-Q1-K1-F10.pep
KMMGYSVRSICHLGCVVDGKDDRSGHFSYHDRCRKLYLCISDLVGISYWL

SEQ ID NO: 99182 - protein, 109 aa, Gossypium hirsutum
  unsure (1)..(109): unsure at all Xaa locations
  Clone ID: LIB3149-036-Q1-K1-F4.pep
DCNQQSYPIFDPSESSTHSAGTCYSRQCSLLRQSVCRGGKCLYQMSYGDGSYTIRDYMTETVSFGNSSDIKGAAMGCGHTNXCLFVATTALVGLDGGSLSLTSHIIATS

SEQ ID NO: 99183 - protein, 112 aa, Gossypium hirsutum
  Clone ID: LIB3149-036-Q1-K1-F5.pep
MGGKSSMAMAAVFVVLASTLTTYASTTYTVGDSTGWQVPTSNSNLYDDWADNKTFVVGDDLLFNFITGEHDVAEVTEPGYDACTNTDTISTDNKGPVKITLKKTCDHYFICT

SEQ ID NO: 99184 - protein, 141 aa, Gossypium hirsutum
  Clone ID: LIB3149-036-Q1-K1-F8.pep
PVDHASALTCEVKKPGPDWQEVTEVVGAVTDEVKDALVKNIRRRMTPQPLKIRADIEMKCFQFDGVLHIKEAMRKAEAAGNDDCPVKIKLVAPPLYVLTTQTLDKEQGITILSKAIAACTEAIEHHKGKLVVKEQPIAVSE

SEQ ID NO: 99185 - protein, 109 aa, Gossypium hirsutum
  Clone ID: LIB3149-036-Q1-K1-H1.pep
RSKPTRGRKLIASILKTILSSETMDIPDGVDIKANANMIDVEGARGKLIRNFKHLNLDFNVINDEESGKLNLKIDARFGSTKTTAGMRTALSHTDNLISGVTNGYRYKM

SEQ ID NO: 99186 - protein, 77 aa, Gossypium hirsutum
  Clone ID: LIB3149-036-Q1-K1-H11.pep
RKAFLSKATHPHINLTFSSLLTSLTLSPSTIPSHYILYFLPIHLFNLLTYILINTIKHPLIILTHQNLFLINKLNLN

SEQ ID NO: 99187 - protein, 75 aa, Gossypium hirsutum
  unsure (1)..(75): unsure at all Xaa locations
  Clone ID: LIB3149-036-Q1-K1-H12.pep
HASATFSSKFLGTQNSLXLWERASNIGPSNGSRTQCWFKFGKNGVDAEGAGIYGSQKRDDFDKDDVEQYFNYIGM

SEQ ID NO: 99188 - protein, 34 aa, Gossypium hirsutum
  Clone ID: LIB3149-036-Q1-K1-H5.pep
IMISFNECSVESKEPCATSVSCGSKLNLYRKLSC

SEQ ID NO: 99189 - protein, 53 aa, Gossypium hirsutum
  Clone ID: LIB3149-036-Q1-K1-H6.pep
LQLTPRVECGVHVVTLGKIFNSITALIHVICTESLLHEKSGTKILQYVSPIFL

SEQ ID NO: 99190 - protein, 129 aa, Gossypium hirsutum
  Clone ID: LIB3149-036-Q1-K1-H7.pep
TYNDIMCLYTYFGQHEKVPDVVREMKENNVSPDNFSYRICINSLGVRSDLEGIEEILTEMEDQPHIKMDWNTYAVVASFYIKAGLTEKAIDALKKSEQKLDNKDGTGYNHLISLYTSLGNKAEVLRLWG

SEQ ID NO: 99191 - protein, 130 aa, Gossypium hirsutum
  unsure (1)..(130): unsure at all Xaa locations
  Clone ID: LIB3149-037-Q1-K1-A3.pep
PGWPTDHFIYKGELLKLNLGDGXRATSPSKSKNVWGKVTMQSKPSXGDCAGTVTAYYIVSDGPNYNGXTWEFLEITTGEPYLIQTKEHVNGVSDREQRMNLRGEPTTDSDSYSILWNQSQVVFTRVRDPI

SEQ ID NO: 99192 - protein, 73 aa, Gossypium hirsutum
  unsure (1)..(73): unsure at all Xaa locations
  Clone ID: LIB3149-037-Q1-K1-A5.pep
GXXRVRRHAVRNGWRVLGEDFSCVMDNRGSQIRSKIGNSTVHGTRCSQFGMRFKANLNWSEAYLFRDSKLVIG

SEQ ID NO: 99193 - protein, 45 aa, Gossypium hirsutum
  unsure (1)..(45): unsure at all Xaa locations
  Clone ID: LIB3149-037-Q1-K1-A8.pep
LVLHYNRLDGTLPYFGGNIPSLSCNIAHIHALPLNLELQNMXLFT

SEQ ID NO: 99194 - protein, 59 aa, Gossypium hirsutum
  Clone ID: LIB3149-037-Q1-K1-B2.pep
KEINHHLLFFILNPDLTLGVTISIMLLLKDKKNHSLKISNHNQISSLYKTNLKPNPTTI

SEQ ID NO: 99195 - protein, 48 aa, Gossypium hirsutum
  Clone ID: LIB3149-037-Q1-K1-B4.pep
LVLGYLNNLVIVMAFLIQANTEEELPEYLLGTCRLNHLDASKSITVKV

SEQ ID NO: 99196 - protein, 48 aa, Gossypium hirsutum
  Clone ID: LIB3149-037-Q1-K1-B5.pep
NTPTKPSIRIKIYYKKKKNNYFFLTKNFLNYTQLVQKQIQRLKKLKNS

SEQ ID NO: 99197 - protein, 55 aa, Gossypium hirsutum
  Clone ID: LIB3149-037-Q1-K1-C6.pep
ILKFNHIFSLVSQHSRRDISKFLFETYIFLKIFFLQSAFIISPFFIQCLLDISIR

SEQ ID NO: 99198 - protein, 87 aa, Gossypium hirsutum
  unsure (1)..(87): unsure at all Xaa locations
  Clone ID: LIB3149-037-Q1-K1-C7.pep
MHHKGLLSILPPEVEICLYRDEIGSIXGSHLRTDSXKGELEIEPRDALFXGWKATLVIGYGLPLQDCLFENIDDRRFLNISFGCPLL

SEQ ID NO: 99199 - protein, 75 aa, Gossypium hirsutum
  Clone ID: LIB3149-037-Q1-K1-D1.pep
KKNKKLEARGSKIWFFKRGAPFFFFFFFFFFFFFFFFFFFFFFFFFFFFFFFFLSSFFFFFFFKLIFNQKHQNTN

SEQ ID NO: 99200 - protein, 32 aa, Gossypium hirsutum
  Clone ID: LIB3149-037-Q1-K1-D10.pep
TKPPPQAYCELNGAHAPQTNNGSSDSMGYFLC

SEQ ID NO: 99201 - protein, 130 aa, Gossypium hirsutum
  Clone ID: LIB3149-037-Q1-K1-D12.pep
LSPSPQQQSLCQHPPFSLSGNPASPIMNRRSRSLARHPLPRSEPFLKFLKPVALARLRDSRISARSHRSTSLFQISPSFQPSNGGQAFSTAMDGFPCFVPTPTVYGPRCPQKKKLIATKGMLFLGSTQSA

SEQ ID NO: 99202 - protein, 58 aa, Gossypium hirsutum
  unsure (1)..(58): unsure at all Xaa locations
  Clone ID: LIB3149-037-Q1-K1-D4.pep
STTKPSGTISSTTQTIKKVKNKLPKLSTLQTIKTHTQHFKPFLLLKAXEPHTHHCKFH

SEQ ID NO: 99203 - protein, 88 aa, Gossypium hirsutum
  Clone ID: LIB3149-037-Q1-K1-D6.pep
RLLQKIMGFKTTIKNYIISMVDLMEFYPYTVNFRHKRPQMSDVLIVLSEKRTTTMSFDNALGFQRGYHGHSVKLFTVLNGLSRAHGIS

SEQ ID NO: 99204 - protein, 67 aa, Gossypium hirsutum
  Clone ID: LIB3149-037-Q1-K1-D7.pep
AKDIFHNIFFYKPMTTTHIFKPFPLIITANQKPPMTTTILKKKINIIELKTIIQSKNLKILTFIINF

SEQ ID NO: 99205 - protein, 110 aa, Gossypium hirsutum
  Clone ID: LIB3149-037-Q1-K1-D9.pep
ERQRIEAPPLPSMETMPPPPTYEEVNGVYASQTNNGSTDSMGYFLGEVMHTYNGESDVELSLSVGDFVVVRKVTNNGWAEGECKGKAGWFPFGYIERRERVLASKVAEVF

SEQ ID NO: 99206 - protein, 50 aa, Gossypium hirsutum
  Clone ID: LIB3149-037-Q1-K1-E12.pep
LLTQLHPHRQLRPSQMHHQFPRRIYPQLFQTPSTPTNIQTYITSSPSQSI

SEQ ID NO: 99207 - protein, 46 aa, Gossypium hirsutum
  Clone ID: LIB3149-037-Q1-K1-F1.pep
SKYNLPRISILLTKMKKPMVDKLIFLKKSRKLKKVKLLKHYHHGVL

SEQ ID NO: 99208 - protein, 51 aa, Gossypium hirsutum
  Clone ID: LIB3149-037-Q1-K1-F11.pep
LPVVLKRWNWKNPAFTQFNAFEKNPLFASWGIYKKAPTDRLSQNLPNLNGK

SEQ ID NO: 99209 - protein, 51 aa, Gossypium hirsutum
  unsure (1)..(51): unsure at all Xaa locations
  Clone ID: LIB3149-037-Q1-K1-F3.pep
KMVVGICNGNNLMPKDGYXTASGYAITDCEGAXRRTQTTLRDLNSSRDEKL

SEQ ID NO: 99210 - protein, 59 aa, Gossypium hirsutum
  Clone ID: LIB3149-037-Q1-K1-F4.pep
KTLNLSLLILLLKLSSYHIGLAHISLQTHHLQPPFFYQKTIFLKITLEKLFMKSEIPTT

SEQ ID NO: 99211 - protein, 66 aa, Gossypium hirsutum
  Clone ID: LIB3149-037-Q1-K1-F5.pep
KVLFTEEVLFFGGRGRGSGAEIRPTWLAPGIGFHLVEPNSFPECVNVQDQIKRLAFECTPIMGCCF

SEQ ID NO: 99212 - protein, 130 aa, Gossypium hirsutum
  Clone ID: LIB3149-037-Q1-K1-G11.pep
LQHLAFLCKSEVNSMGRMAAGVLQLLKLENSLGKDAIYKLSNLGIEGFDKIFSSDKLNRGNSAGSIGQSPLSKVIIEDQRSTIALLEEAVLDSQAKCATLVTELSNAESSEENLTAIKELRQKLDTMQIL

SEQ ID NO: 99213 - protein, 62 aa, Gossypium hirsutum
  unsure (1)..(62): unsure at all Xaa locations
  Clone ID: LIB3149-037-Q1-K1-G8.pep
THASDPXLPHYNTSLFYRKRETEGAAFQXDGTPPKQHYPITDTDEDHSLLWTMLDLHIKGSN

SEQ ID NO: 99214 - protein, 36 aa, Gossypium hirsutum
  Clone ID: LIB3149-037-Q1-K1-H12.pep
LLGSPHFGATILLIHFDLKYNLILYLYCFPNRVLDN

SEQ ID NO: 99215 - protein, 113 aa, Gossypium hirsutum
  Clone ID: LIB3149-038-Q1-K1-A2.pep
QQIIDMAKAEVVIVMTMMMVITVVDGLGGMMRINDVNNNKKVQELERTSGDDYNMRSLWPVHKSLGNGGPSTEYICSYVDGAKKHVVCGIKDYIKINGMRGGVINTFELAVLN

SEQ ID NO: 99216 - protein, 137 aa, Gossypium hirsutum
  Clone ID: LIB3149-038-Q1-K1-A7.pep
AGLLQPLPVPERPWESLSMGFIIGLPKSDGFASILVVVDRFSKYATFIPATKECPAEEAARLFLRHVVKYWGVPLSIISDRDGRFTGRFWTELFKSMGSELNFSTSMHPQTDGQTERVNALLETYLRHYVSATQRNW

SEQ ID NO: 99217 - protein, 91 aa, Gossypium hirsutum
  unsure (1)..(91): unsure at all Xaa locations
  Clone ID: LIB3149-038-Q1-K1-A8.pep
ITTFXFYPKGNKTGPVVXKNRAVPHYGSFINXKCRTSRDAKRHLTSTAGILSRFDALMKEFGAASADQKKIFFSKNEKEIEKLKGSTARHG

SEQ ID NO: 99218 - protein, 70 aa, Gossypium hirsutum
  Clone ID: LIB3149-038-Q1-K1-B4.pep
KKKKKKKKKKKKKKKKKKKKKKKKKKKKQKQKKNKKKKKKKKKNRAPPFKKTNFTTPSFQHKIFFYVQPK

SEQ ID NO: 99219 - protein, 112 aa, Gossypium hirsutum
  unsure (1)..(112): unsure at all Xaa locations
  Clone ID: LIB3149-038-Q1-K1-D6.pep
KTGRPTRTDEYKIIILFFFYVQGHHKMGRLFIHYFQNTQTLIFLIDSNHRDRLVEARDELHIMFNKDKLLHALLLTYANKQDLANALYAAKITHILALHSLRQHYXYIHNTC

SEQ ID NO: 99220 - protein, 54 aa, Gossypium hirsutum
  unsure (1)..(54): unsure at all Xaa locations
  Clone ID: LIB3149-038-Q1-K1-E10.pep
LEEAAERAIYESTHKHSKLYNLSRRIPEWTLNVVAQIKLIIXEHVHLMGALVLC

SEQ ID NO: 99221 - protein, 52 aa, Gossypium hirsutum
  Clone ID: LIB3149-038-Q1-K1-E4.pep
VVLFITIICRRDKKTFVSSFLVWFDFLRMANEEEKNNDFYAVLGLNNECTQT

SEQ ID NO: 99222 - protein, 69 aa, Gossypium hirsutum
  Clone ID: LIB3149-038-Q1-K1-E7.pep
NHSLRLIMPYIIVITIQIFATLSLLAYCILIAETHSIFTNTDFVDLHNHLYQFLNSITYLPLKLLTISQ

SEQ ID NO: 99223 - protein, 59 aa, Gossypium hirsutum
  Clone ID: LIB3149-038-Q1-K1-F12.pep
LAVTLAILRYAIADPTPMYRLCRRRQRVTFAPSGLAACRVSIIERCAIQWLPVVAYRIW

SEQ ID NO: 99224 - protein, 138 aa, Gossypium hirsutum
  Clone ID: LIB3149-038-Q1-K1-F3.pep
QDPRTGFNSASAALDFLEDEKCANTHVTIGGQKLILSTWSQKVQLKFLKHFLGNDGFVKHMMENENFHSVFDFLPERKNAWGNVLYVPEREEVTISLFQPMVARHNDCSLLPLLTRDKQLAKKKTMSPNSHLSKARTQ

SEQ ID NO: 99225 - protein, 45 aa, Gossypium hirsutum
  Clone ID: LIB3149-038-Q1-K1-F4.pep
DLKTLVLRVRCFPCLRTLFLIWLPVNLDHHVCMINAFVATLRDRG

SEQ ID NO: 99226 - protein, 102 aa, Gossypium hirsutum
  Clone ID: LIB3149-038-Q1-K1-H3.pep
EFSVSRLDLEYGHDNRVSDSYYPSGCSIPFFLIEYNYNSGGFPYKKDEECLSFLLSISSIVNAFLYSVTDFPHVSIISAATPVARANKSYIESYTAEYNDIR

SEQ ID NO: 99227 - protein, 54 aa, Gossypium hirsutum
  Clone ID: LIB3149-038-Q1-K1-H4.pep
TISIHHIKTFLYTRFSILHYNKLERTSCKYSLEVHEVNKNDFATILRILEFDSK

SEQ ID NO: 99228 - protein, 57 aa, Gossypium hirsutum
  Clone ID: LIB3149-038-Q1-K1-H6.pep
FVETLYISNKLLKSQKTDSNYKIYPKLKLLLFALLPSFFNYLSYVYIAKRKNLFVIN

SEQ ID NO: 99229 - protein, 83 aa, Gossypium hirsutum
  Clone ID: LIB3149-038-Q1-K1-H8.pep
FIPFFQSKMICTGIIILTLAGLDSIKAHRILELTTRMYWINKNSNLFLHNRDYRSNFILLETLSRCFRDTCILFLILKRETCG

SEQ ID NO: 99230 - protein, 59 aa, Gossypium hirsutum
  Clone ID: LIB3149-039-Q1-K1-A10.pep
GYYKERFLQKKERKKKKKKKKKKKKKKKKKKKKKKKKKKKKKKKKKKKKKKKKKRGGPF

SEQ ID NO: 99231 - protein, 96 aa, Gossypium hirsutum
  Clone ID: LIB3149-039-Q1-K1-A12.pep
MSSYENAAGGKLKLQGKALVVQAAGINMKKNPLKQIQHDDQITQNDPSDADSAGETTEVSVDPTEEDINNAERSSGEKAAPHYDDHLTPAHRRYIE

SEQ ID NO: 99232 - protein, 31 aa, Gossypium hirsutum
  Clone ID: LIB3149-039-Q1-K1-A6.pep
PPSAQAVKGYIFPLEEQHAKQSHLLIKSSNN

SEQ ID NO: 99233 - protein, 46 aa, Gossypium hirsutum
  Clone ID: LIB3149-039-Q1-K1-A7.pep
ETMPFKSIRMEAQDHFKQGGGVSMYKIDGNKLDDLVCVRHSVNSKG

SEQ ID NO: 99234 - protein, 66 aa, Gossypium hirsutum
  Clone ID: LIB3149-039-Q1-K1-B5.pep
FLILNPTTRILEPFQPYYTLKKKVITSNGGAAIITNSFKKPNFLLFWKNHQLQKLFQINHLFSSIN

SEQ ID NO: 99235 - protein, 54 aa, Gossypium hirsutum
  Clone ID: LIB3149-039-Q1-K1-B9.pep
IGILKAPAHLLFILIKIFSLCVMLVFYFVIPMFILCFFLQEVECLLMTELAHKG

SEQ ID NO: 99236 - protein, 79 aa, Gossypium hirsutum
  Clone ID: LIB3149-039-Q1-K1-D4.pep
ACEEHYLNFIHGLFFSQSQKIIGGDQNMLILQHSTNNCSTKTQIKAHTVVGSKLITQGVLLKPKNGLFFFSNAPVQPPP

SEQ ID NO: 99237 - protein, 56 aa, Gossypium hirsutum
  Clone ID: LIB3149-039-Q1-K1-D7.pep
RRFGFVYIKGGGYREALGQRSEQLRGMKKTPCVISLEQGNVWGFNWVFVEMFLSNW

SEQ ID NO: 99238 - protein, 53 aa, Gossypium hirsutum
  Clone ID: LIB3149-039-Q1-K1-E1.pep
VGSTASFGCCIQGRRIFVLINTECGNDSISSGNSHEGIASSTLAKAVGCARSR

SEQ ID NO: 99239 - protein, 53 aa, Gossypium hirsutum
  Clone ID: LIB3149-039-Q1-K1-F5.pep
RIEILYCYPMLMYTSVGLFRALYFFKSKSAGGTTRSIKARRVSPSVGMIRRVL

SEQ ID NO: 99240 - protein, 116 aa, Gossypium hirsutum
  unsure (1)..(116): unsure at all Xaa locations
  Clone ID: LIB3149-039-Q1-K1-G1.pep
IIMDTKSRSGAHECSADSGKDPTKVDRQAPYISRQAIKSNLAKGHDQRXILQGSYTNGVPEHLCVFVDSYGTGKITDKEILQNVKENFHFRPSMITINLDLKRGGNGRFFETAAYG

SEQ ID NO: 99241 - protein, 56 aa, Gossypium hirsutum
  Clone ID: LIB3149-039-Q1-K1-G10.pep
SNQVLTVVHNYLVMYQSFYVPRYEHGNFIGPTILSNVNVTHGFVQEEICDPIHPVH

SEQ ID NO: 99242 - protein, 26 aa, Gossypium hirsutum
  Clone ID: LIB3149-039-Q1-K1-G11.pep
FLLVKCYYMTIMFEIKYYSNSRLFLF

SEQ ID NO: 99243 - protein, 68 aa, Gossypium hirsutum
  Clone ID: LIB3149-039-Q1-K1-G2.pep
PYILLACFVADDGGFVLIISPCFFFFFCYCLCCHSLLIMCVCVFYNYYSFFFYPHSNFNANGTFFPLP

SEQ ID NO: 99244 - protein, 132 aa, Gossypium hirsutum
  unsure (1)..(132): unsure at all Xaa locations
  Clone ID: LIB3149-039-Q1-K1-G9.pep
MSLSTVVFVGGLTPWEEKVVERAKALRVQPGTEPDTDIGPVISKQAKELICRLIQSSVDSGAKLVVDGRNILVPGYEHGNFIGPTILSNVKVSMECYKRKLXGPVLLCMEADNIEEAIDIVNRNKYGNGASI

SEQ ID NO: 99245 - protein, 37 aa, Gossypium hirsutum
  Clone ID: LIB3149-039-Q1-K1-H10.pep
LNNLFFFFIAFFFFVFFIFFVFFFYFFFFFFFSFFFF

SEQ ID NO: 99246 - protein, 67 aa, Gossypium hirsutum
  Clone ID: LIB3149-039-Q1-K1-H11.pep
KKIIFFFFFFFFFFFFFFFFFFFFFFFFFFFFFFFFFFKLRNCFYFNVISIRKTIPDVLNMKNIRMI

SEQ ID NO: 99247 - protein, 65 aa, Gossypium hirsutum
  unsure (1)..(65): unsure at all Xaa locations
  Clone ID: LIB3149-039-Q1-K1-H12.pep
IHKTSRNVPFLKQSRPTKSXGDNKKKKYPYPSNHLPLNCSVPIISTKAILLISLISSFYLLFAVR

SEQ ID NO: 99248 - protein, 94 aa, Gossypium hirsutum
  unsure (1)..(94): unsure at all Xaa locations
  Clone ID: LIB3149-039-Q1-K1-H2.pep
PKYKILCAVLHHVDCENTVVTQLNIVAEHIPFSRCGNIEKARTDLAFQHMCTLYVECDTPCIGAYNAPGVLGTRTVTPILLRALXRAPFAFFPF

SEQ ID NO: 99249 - protein, 66 aa, Gossypium hirsutum
  unsure (1)..(66): unsure at all Xaa locations
  Clone ID: LIB3149-039-Q1-K1-H3.pep
GRPTRPVERLFVAKEKFPISFSGQIPEAKRDANVQMELASLLNLGEGKXTFMGFDIPTGGKDLTYS

SEQ ID NO: 99250 - protein, 58 aa, Gossypium hirsutum
  Clone ID: LIB3149-039-Q1-K1-H6.pep
KVYCFQYSGSKFWPFKKARPFNWSYGTVFSSIHLHCNLFLCFLSLTSIPPLFFFCGLL

SEQ ID NO: 99251 - protein, 134 aa, Gossypium hirsutum
  Clone ID: LIB3149-039-Q1-K1-H9.pep
EEPKKSSKKGSSKKVATESPESKSKDKSESGKNLTPAKSSKKSSGSTSKQDASDGGGTSGSKSKGSASKKPKVEKENSKDGSTKEKLAVKKQTNKSSAKVSAKSQGKSKSGKKPEPSREEIHEVVVDILKKVDF

SEQ ID NO: 99252 - protein, 96 aa, Gossypium hirsutum
  Clone ID: LIB3149-040-Q1-K1-A10.pep
MMRRSAYASKKTGQPNSTNPISCSPSDIFRTASSKASSKEMERIDNLFYSFANRSSGMIGPERIETLCSDMGSDHTDVMILMLAWKMKARKQGYFT

SEQ ID NO: 99253 - protein, 135 aa, Gossypium hirsutum
  unsure (1)..(135): unsure at all Xaa locations
  Clone ID: LIB3149-040-Q1-K1-A12.pep
AEVLIELKPYVELAEKLGRLAVQLVAGVSGVKNVKVSXASSRAPDDLDTRLLRAMITKGLIEPISSVYVNLVNADYTAKQKXLRITEERIVIDGSPECPLESIQVQIANVESKFAGAISELGEIKVEGQVKDGIP

SEQ ID NO: 99254 - protein, 135 aa, Gossypium hirsutum
  Clone ID: LIB3149-040-Q1-K1-A5.pep
GMGTVLEIIVFAESASQFGEVVVDPITKQLLHYTEKPETFVSDLINCGVYVFTPDIFTAIQEVSTHREDQANLRHLTSFETLQSPTRALPQDFVRLDQDILSPFAGKKQLYTYETMDFWEQIKTPGMSLKCSGLY

SEQ ID NO: 99255 - protein, 39 aa, Gossypium hirsutum
  unsure (1)..(39): unsure at all Xaa locations
  Clone ID: LIB3149-040-Q1-K1-B10.pep
VREHAYYLQYXNGRPDYLKNVWKVINWKYASEVYEKECA

SEQ ID NO: 99256 - protein, 24 aa, Gossypium hirsutum
  unsure (1)..(24): unsure at all Xaa locations
  Clone ID: LIB3149-040-Q1-K1-B11.pep
QILSPGYIEVLLNFILXYIQTYEL

SEQ ID NO: 99257 - protein, 54 aa, Gossypium hirsutum
  Clone ID: LIB3149-040-Q1-K1-B5.pep
LCKAECAARGLSWGMSGFSQSRGCGSLASQLFLGHTLEEVQRWRKEQVSLVPIK

SEQ ID NO: 99258 - protein, 71 aa, Gossypium hirsutum
  Clone ID: LIB3149-040-Q1-K1-C12.pep
LHHFLNDKQPFFHIEPIYRVYVNLDNADYTVKQKRLRITDERLVFDGSPECSLDSIQVHIVNVESKFVSAI

SEQ ID NO: 99259 - protein, 58 aa, Gossypium hirsutum
  Clone ID: LIB3149-040-Q1-K1-C6.pep
NLNQPLAPLTSIASYQPLAPPAPPPMSAPPTRPHAVAGDGGARRSGDRTVTSPVAGNC

SEQ ID NO: 99260 - protein, 52 aa, Gossypium hirsutum
  Clone ID: LIB3149-040-Q1-K1-D10.pep
DVPNLTHNTPVKKLNAFEVFSKALYTIPTTIDDNTVLEQPNIPSHFPSYLHI

SEQ ID NO: 99261 - protein, 63 aa, Gossypium hirsutum
  Clone ID: LIB3149-040-Q1-K1-E10.pep
KRPTTRPRHTLIFPFRFILLLRRRETNSGFIRPMDPSYNHPHVPSRFVDCERRFGNIDRYRGG

SEQ ID NO: 99262 - protein, 53 aa, Gossypium hirsutum
  unsure (1)..(53): unsure at all Xaa locations
  Clone ID: LIB3149-040-Q1-K1-F11.pep
KGDAXELLQFSCFSIKGRFGIHLKLKNMSQLVSFPMEMNFFSLFHAVIRIQFG

SEQ ID NO: 99263 - protein, 54 aa, Gossypium hirsutum
  Clone ID: LIB3149-040-Q1-K1-F12.pep
TEARIDEPKVHSSTSLMWPSRGAHDAEGRATCDAWEHPWLRRLRVLAARVFIFL

SEQ ID NO: 99264 - protein, 60 aa, Gossypium hirsutum
  Clone ID: LIB3149-040-Q1-K1-G3.pep
KKLRRYVTMLNMADNETRLKERNRLEYANRKKFLKFDIQMIISTYNFTIHSSSNLLVIPI

SEQ ID NO: 99265 - protein, 67 aa, Gossypium hirsutum
  unsure (1)..(67): unsure at all Xaa locations
  Clone ID: LIB3149-040-Q1-K1-H10.pep
EISSYFFFSSPLVRHPTTYVPKRXKDKGRSLEHTVLKLFGKAPIFGATIHFIAFWLGLRINVLSWCV

SEQ ID NO: 99266 - protein, 63 aa, Gossypium hirsutum
  Clone ID: LIB3149-040-Q1-K1-H12.pep
FRLVISMANHLQTLFLPNHNHIIRSFTQSEYSAIHATLKIYKPLYQFRASDSMNEHSTYPDSQ

SEQ ID NO: 99267 - protein, 37 aa, Gossypium hirsutum
  unsure (1)..(37): unsure at all Xaa locations
  Clone ID: LIB3149-040-Q1-K1-H7.pep
SLIRSLIVGLCVRVGLFYVGVDLCFNLRSPCFXSVGV

SEQ ID NO: 99268 - protein, 111 aa, Gossypium hirsutum
  unsure (1)..(111): unsure at all Xaa locations
  Clone ID: LIB3149-040-Q1-K1-H9.pep
MGDENNPKKPDVGIFPYPAQGHINPILQFAKRLLSKGVKCRLVTTVFLSNFSFSDPSSTSIDIHTIFEGFDQGRYXQACSSDAYLATFWFVGPNSLTALIKKLTEIHPCDA

SEQ ID NO: 99269 - protein, 24 aa, Gossypium hirsutum
  Clone ID: LIB3149-041-Q1-K1-A1.pep
KDQSIPSTVVSVELIFYRGHSVTP

SEQ ID NO: 99270 - protein, 41 aa, Gossypium hirsutum
  Clone ID: LIB3149-041-Q1-K1-B5.pep
CMIYMIWTLSYREARLRVENLLYILHSIIKMHFSVSYNGLV

SEQ ID NO: 99271 - protein, 36 aa, Gossypium hirsutum
  unsure (1)..(36): unsure at all Xaa locations
  Clone ID: LIB3149-041-Q1-K1-C4.pep
ESLERLHVCALSSHLNKSIWIRCHIRADVNVAXLCD

SEQ ID NO: 99272 - protein, 32 aa, Gossypium hirsutum
  Clone ID: LIB3149-041-Q1-K1-C6.pep
PLSHCYSVMVCSCTEVDIIHHHHQCIELWRMY

SEQ ID NO: 99273 - protein, 49 aa, Gossypium hirsutum
  unsure (1)..(49): unsure at all Xaa locations
  Clone ID: LIB3149-041-Q1-K1-E4.pep
VSVSITLAIISLSVFGCHRQYQCVLARQVGTSASPALHLSRRSTVXRSA

SEQ ID NO: 99274 - protein, 41 aa, Gossypium hirsutum
  Clone ID: LIB3149-041-Q1-K1-E9.pep
CFDRCTTLQMLSSTTALESDQTQYEKICVKKARKSLSSQIF

SEQ ID NO: 99275 - protein, 48 aa, Gossypium hirsutum
  Clone ID: LIB3149-041-Q1-K1-F12.pep
IISSLRCSSIYFNLFVLHAARSRIYTLHFIHNTSWLLIPTVRYLSSSR

SEQ ID NO: 99276 - protein, 73 aa, Gossypium hirsutum
  unsure (1)..(73): unsure at all Xaa locations
  Clone ID: LIB3149-041-Q1-K1-F6.pep
AYMAESWPPWTCCCLCVDSSLFGCCGRAXNLNTISINSVYPFLRISRLYTLLLRTHHSVIYQCKLLSHSKWGN

SEQ ID NO: 99277 - protein, 38 aa, Gossypium hirsutum
  Clone ID: LIB3149-041-Q1-K1-G3.pep
AKPWLVTSYNHKLYLLIAKLRVSYNHRRLYLVKRGLRF

SEQ ID NO: 99278 - protein, 61 aa, Gossypium hirsutum
  Clone ID: LIB3149-042-Q1-K1-A2.pep
MQRKTTGACQIITLKDPPTEKHRIDLYKTYLAYYQTPEITIIPFGAQIITKKDYPHHVLLN

SEQ ID NO: 99279 - protein, 53 aa, Gossypium hirsutum
  Clone ID: LIB3149-042-Q1-K1-A3.pep
LLSYLTRACKHRRWQHQLVQLLSLEGQFMSPRPLYHIAFAKHKNVRKVEPCIT

SEQ ID NO: 99280 - protein, 46 aa, Gossypium hirsutum
  Clone ID: LIB3149-042-Q1-K1-A6.pep
SMQTPSLHTKLLNSLSTNKLERLSLVLVQGVQSSTTVRFIISIIIG

SEQ ID NO: 99281 - protein, 51 aa, Gossypium hirsutum
  Clone ID: LIB3149-042-Q1-K1-A8.pep
KTLSVKKLWLPKLISFYNIFFFPNVVKKKKSPPIALFKNLAHFILNRTLSL

SEQ ID NO: 99282 - protein, 74 aa, Gossypium hirsutum
  Clone ID: LIB3149-042-Q1-K1-B11.pep
NQVHGSLRGTCKPFFAAVFLQVGYVSMDILSKTALNLGMSNYVLVVYRHAIATLVMAPFAALFDKKVRPKMTMT

SEQ ID NO: 99283 - protein, 37 aa, Gossypium hirsutum
  Clone ID: LIB3149-042-Q1-K1-C2.pep
HKKRIICISLYIHTSIQRIKLLEFRPLDCIFFFFSSL

SEQ ID NO: 99284 - protein, 82 aa, Gossypium hirsutum
  unsure (1)..(82): unsure at all Xaa locations
  Clone ID: LIB3149-042-Q1-K1-D9.pep
VSGSXSXSGVGSVRALAXVLXXXXLXGLWGFLXXGXXXAVGFGXXXXXALPLXVLXRXXXXGXAVXXGALLPWFXSFXFLCX

SEQ ID NO: 99285 - protein, 84 aa, Gossypium hirsutum
  unsure (1)..(84): unsure at all Xaa locations
  Clone ID: LIB3149-042-Q1-K1-E1.pep
KYKQGESNAIDMKVKDDLXRLRTITNHRGLRHYWGLHVRGYHTMTTGCRGMTAGVCMKRGTCSYMMPSREIIALGYKHSAQHQM

SEQ ID NO: 99286 - protein, 88 aa, Gossypium hirsutum
  Clone ID: LIB3149-042-Q1-K1-E11.pep
TGTGGPGQPTRPRNTAEHSRTSQRGPTPASNPTAKKPGDEKKTDGAKAHNEKKPKSREKPQKEGGAADGDKNRKRANKRAETDKTYIT

SEQ ID NO: 99287 - protein, 81 aa, Gossypium hirsutum
  Clone ID: LIB3149-042-Q1-K1-E2.pep
LKRDSVTINNHRGLTHYCNLHFHAYNTMTNDCIGMTLTISMKRLTFHIYCQAERLFLWFINILLNIRCDILLLVDLTISHM

SEQ ID NO: 99288 - protein, 63 aa, Gossypium hirsutum
  Clone ID: LIB3149-042-Q1-K1-E3.pep
HHMLWKYNRDSCTRSRIVFCSSTQKMSKVVFIVTSKSKLIILLKIPSIYTIINRSLYISMRFT

SEQ ID NO: 99289 - protein, 80 aa, Gossypium hirsutum
  Clone ID: LIB3149-042-Q1-K1-E8.pep
RIGRLLDFTQDVRAAMEASGKSLTCFMAATSSLEAAQNIECITSARKVMDFSYQDVDEHACLVEQAMHAISRSDLCNPRN

SEQ ID NO: 99290 - protein, 88 aa, Gossypium hirsutum
  unsure (1)..(88): unsure at all Xaa locations
  Clone ID: LIB3149-042-Q1-K1-G11.pep
QGPDRKARANPRARPNSGGRTNXGGKHGYGRXTTPHYGGISNRDNTPIGYGGGSGRNDSNLSSSTRDIWGNGSLSNAKCHQPWRILGD

SEQ ID NO: 99291 - protein, 68 aa, Gossypium hirsutum
  Clone ID: LIB3149-042-Q1-K1-G3.pep
LVVSALKLPDKNSNFAQVSEFWLSASAFIQSLQPEPQHCFELLNLLFGIFLWGEKTNTSEPDWGPFDT

SEQ ID NO: 99292 - protein, 62 aa, Gossypium hirsutum
  Clone ID: LIB3149-042-Q1-K1-H4.pep
FDIESVSVYRACIRHIHTDDEVLSKIYICFSSLVSQKYEGLKTWNYTQNGPTFDPNDITGKW

SEQ ID NO: 99293 - protein, 73 aa, Gossypium hirsutum
  Clone ID: LIB3149-042-Q1-K1-H6.pep
HKRAKTDNVNINNKAEELTAHELDNLMTIVANHQQFKISDWFLNKQKDHNDGKNSQVASNALNMKMRKDLERV

SEQ ID NO: 99294 - protein, 51 aa, Gossypium hirsutum
  Clone ID: LIB3149-042-Q1-K1-H9.pep
LYIYICYKMQCLNIPYPTFFKIHCHKKIEIIRQNKRLEVEIRSPTKANGTY

SEQ ID NO: 99295 - protein, 50 aa, Gossypium hirsutum
  Clone ID: LIB3149-043-Q1-K1-A11.pep
KVLKITSNYGIDISMAAHKEHAPRIYANVHRKISPEMNDEFFCHFRPEEV

SEQ ID NO: 99296 - protein, 79 aa, Gossypium hirsutum
  unsure (1)..(79): unsure at all Xaa locations
  Clone ID: LIB3149-043-Q1-K1-A4.pep
SFFHFFYSXTXTNTVRSYLKKGPTIHKNLYIFIKNPPSILLQISTSNTSNHIHSNFHFILINIFTPXNLKYIFPSFHNY

SEQ ID NO: 99297 - protein, 42 aa, Gossypium hirsutum
  Clone ID: LIB3149-043-Q1-K1-A7.pep
HNNLIKHNQIQLQNLIQGKSLFKNLPSEFHISWSVIPSQTQS

SEQ ID NO: 99298 - protein, 70 aa, Gossypium hirsutum
  Clone ID: LIB3149-043-Q1-K1-A8.pep
YAHSFYPFISFFFYSEMPKSRNGTNYNRSCQAHKNLINKPKKHLHTSTKGMDPNFLRNQMYARKHNKNNV

SEQ ID NO: 99299 - protein, 59 aa, Gossypium hirsutum
  Clone ID: LIB3149-043-Q1-K1-B10.pep
LSWGLGFRDNYRLMILHRYLYSMIEPWMLFLALNVFMNVFIAYRIAMDSQCSSFPLWNP

SEQ ID NO: 99300 - protein, 91 aa, Gossypium hirsutum
  Clone ID: LIB3149-043-Q1-K1-B3.pep
KIRNQSLKIFLKDTINFQNFKNLEKISLSKSIDLVRHTQSLFPKGKNSRRLKTKFQPPLVASVWRSSKFMRKPTIGELIERSSHKICMDAD

SEQ ID NO: 99301 - protein, 45 aa, Gossypium hirsutum
  unsure (1)..(45): unsure at all Xaa locations
  Clone ID: LIB3149-043-Q1-K1-B6.pep
KPAAYPSKTIKHNIFHNFHFSLSXYLFLTQSLKILNNSILKKIKK

SEQ ID NO: 99302 - protein, 105 aa, Gossypium hirsutum
  unsure (1)..(105): unsure at all Xaa locations
  Clone ID: LIB3149-043-Q1-K1-B7.pep
GAPEYCHANFTKYFTSSFWSAERFSGTFKGRKPCYFNTGVMVIDLVKWRRVGYTKRIERWMEIQKXDRIYELGSLPPFLLVFAGRVAPIEHRWNQHGLGGDNVRG

SEQ ID NO: 99303 - protein, 119 aa, Gossypium hirsutum
  Clone ID: LIB3149-043-Q1-K1-C3.pep
PYAHWLEILILGIPSFLGPAIAPGHMITFWLWIALRQIEAIETHSGYDFPWAPTRFIPFYGGADYHDYHHYVGEQSQSNFASVFTYCDYIYGTDKGYRYHKKVLRKLKEQSKANGAQNG

SEQ ID NO: 99304 - protein, 126 aa, Gossypium hirsutum
  Clone ID: LIB3149-043-Q1-K1-C6.pep
YTYFGCSQETIPEFVKNPIIPKYPDIMIAKLGPGQEIELEAHAVKGIGKTHAKWSPVATAWYRMLPEVVLLEDIEDDLAEELKSKCPVNVFDIEDLGKSRRRATVARPRACTLCRECIRSDDWEKR

SEQ ID NO: 99305 - protein, 29 aa, Gossypium hirsutum
  unsure (1)..(29): unsure at all Xaa locations
  Clone ID: LIB3149-043-Q1-K1-C7.pep
FXXFFFFFFFFFFFFFFFFFFFFFFFFXN

SEQ ID NO: 99306 - protein, 58 aa, Gossypium hirsutum
  unsure (1)..(58): unsure at all Xaa locations
  Clone ID: LIB3149-043-Q1-K1-D10.pep
ERDVITQQNMYAHLLPHSFASPSMPGLXCSPTLPSPPPMRRMLIPSMPTINIPPMGTY

SEQ ID NO: 99307 - protein, 76 aa, Gossypium hirsutum
  Clone ID: LIB3149-043-Q1-K1-D12.pep
ILLTTAFSKFETHFLLEWPSFNSGRDYQNFLPITFIHLFITSFLTIALSSLLFKHNLIHYFIFFITYFLMFNFLFS

SEQ ID NO: 99308 - protein, 114 aa, Gossypium hirsutum
  Clone ID: LIB3149-043-Q1-K1-D2.pep
ALTNGFQSSAAVTIGHFSGCATTVACNEVGVKTEIKYAAPVPVKAPIPAPPVKPPTTPVPPYKAPTPAPPTKGPTPYKPPTKAPTPPYKPPTKASTPPFKPPAPAPPTKASTSP

SEQ ID NO: 99309 - protein, 128 aa, Gossypium hirsutum
  Clone ID: LIB3149-043-Q1-K1-D4.pep
EYDDIAMKYLSYVLFFLVACVCVYSLMYERHKSWYSWILSSLTSCVYMFGFIMMCPQLFINYKLKSVAHLPWRQMTYKFLNTIIDDLFAFVIKMPTLHRLSVFRDDLIFLIYLYQRWVYPVDKKRINE

SEQ ID NO: 99310 - protein, 105 aa, Gossypium hirsutum
  Clone ID: LIB3149-043-Q1-K1-D5.pep
INSSTKEAIELPVSSSGVEWSAEIVYSCVDGEQHRDRDAELEVGEDLISHNTHDERMNEVELWQQLEHELYDKAEDDEGDVVNQIRKEEAAAIAKVGGEGQSDTS

SEQ ID NO: 99311 - protein, 120 aa, Gossypium hirsutum
  Clone ID: LIB3149-043-Q1-K1-E1.pep
ENNKLPHDFDRRGKWVNASHFCKLLVEPLDIADYYRTGMHRERGHYIEHGRERRYEVFDKWWRSVPEEENKRSKFASLTQDSCFWARVEEAKECLDNVRSEKDATKRQQLWHKIDNFEAY

SEQ ID NO: 99312 - protein, 33 aa, Gossypium hirsutum
  Clone ID: LIB3149-043-Q1-K1-G3.pep
HAITNLSDLLIQENRTEELRILLTQLMPYFALI

SEQ ID NO: 99313 - protein, 34 aa, Gossypium hirsutum
  Clone ID: LIB3149-043-Q1-K1-G4.pep
FMFLGFTICVLRCDRSYNYVGWYDGLVFFLLNLC

SEQ ID NO: 99314 - protein, 119 aa, Gossypium hirsutum
  Clone ID: LIB3149-043-Q1-K1-H12.pep
LYSGEPLGDTKLPLVYGGDCGDRYCHMGSLNSSKVEGKIVVCDRGGNARVEKGGAVKLAGGLGMILENTADNGEELISDAHLIPATMVGEAAGNKILEYIKTTQFPTATISFRGTVIGP

SEQ ID NO: 99315 - protein, 124 aa, Gossypium hirsutum
  Clone ID: LIB3149-043-Q1-K1-H4.pep
YCSPVEKVIHPIHDQSFYLTMEHKRKLKEEFGVEPWTFEQNLGEAVFIPAGCPHQVRNLKSCTKVAVDFVSPQSIKECLRLTEEFRQLPKNHRAREDKLEINKMIIYGVERAIRELSDLISTPN

SEQ ID NO: 99316 - protein, 75 aa, Gossypium hirsutum
  unsure (1)..(75): unsure at all Xaa locations
  Clone ID: LIB3149-044-Q1-K1-A5.pep
AGQPFIPDPKFCLSAAVFVYGATVPAPGRNRIRTMPIYXEDGNNPNTSFSFYQGSXMQFGSDGFAADILDTGVGL

SEQ ID NO: 99317 - protein, 65 aa, Gossypium hirsutum
  unsure (1)..(65): unsure at all Xaa locations
  Clone ID: LIB3149-044-Q1-K1-C4.pep
YYRREIKLNERGSKIGYFREGGIDDRIFNVEFFLNKKIYFVWCDAIFICSRPLGLXXVVIIKVKK

SEQ ID NO: 99318 - protein, 47 aa, Gossypium hirsutum
  unsure (1)..(47): unsure at all Xaa locations
  Clone ID: LIB3149-044-Q1-K1-C8.pep
GPTTRPHLNSAFFLYVXLTTQXXGXLKIYLGLRKTHTFLILTKPYHL

SEQ ID NO: 99319 - protein, 136 aa, Gossypium hirsutum
  Clone ID: LIB3149-044-Q1-K1-D8.pep
RRFAFVTMKTVEDANAAIEKLNGTQIGGREIKVNITEKPLAQVDLSLLQAEDSQFIDSPHKVYVGNLAKTVTSETLKKFFSEKGKVMSAKVSRVPGSSKSRGFGFVSFSLDEEVEAAINSFNNAMLEGEEIRVNKA

SEQ ID NO: 99320 - protein, 41 aa, Gossypium hirsutum
  Clone ID: LIB3149-044-Q1-K1-D9.pep
CRGDPMMILIDVLSVQLHLYFGRHRKFQSDVPTIYIYIYFY

SEQ ID NO: 99321 - protein, 82 aa, Gossypium hirsutum
  unsure (1)..(82): unsure at all Xaa locations
  Clone ID: LIB3149-044-Q1-K1-E12.pep
PIYNISPGCLNIKNPAHTNLNNLISLFISSFTSSFKYYYTFNLYLNHFQTNLLPSPIIHFIFSSYPPFISSXNSYHNQLSLS

SEQ ID NO: 99322 - protein, 89 aa, Gossypium hirsutum
  unsure (1)..(89): unsure at all Xaa locations
  Clone ID: LIB3149-044-Q1-K1-E2.pep
FIMFNTSFRFSHNTPAAWDSYYYIIIFERFFPHNSSRLTVPAGTIFSCITSKTFXCYTSLKNNLYPSSQTALMVHLSTYYANTPLNNKP

SEQ ID NO: 99323 - protein, 83 aa, Gossypium hirsutum
  Clone ID: LIB3149-044-Q1-K1-F11.pep
VLVQNATRIQTLNQNFFRKSAAPEPNVFFLLYFIPSYLISFTHFFMSNSFLFLFFLFLKKKITTLPDRCLDTPAILLLCPDAW

SEQ ID NO: 99324 - protein, 40 aa, Gossypium hirsutum
  Clone ID: LIB3149-044-Q1-K1-G11.pep
NLMTYELGDGWYMILFMYGIVYSVHFHSFKGLNLKHKSQT

SEQ ID NO: 99325 - protein, 45 aa, Gossypium hirsutum
  Clone ID: LIB3149-044-Q1-K1-G5.pep
WQKHRLKLKQNEGMCLSLLCDSKALLVNHDKLSEDYVLSLVVDSL

SEQ ID NO: 99326 - protein, 34 aa, Gossypium hirsutum
  unsure (1)..(34): unsure at all Xaa locations
  Clone ID: LIB3149-044-Q1-K1-G7.pep
FLVIKPHPQXKALRIYKRARGSKTKKPYYLIIKH

SEQ ID NO: 99327 - protein, 88 aa, Gossypium hirsutum
  Clone ID: LIB3149-046-Q1-K1-A10.pep
SSLPTLLILIFANTLTGNTINLEVQRLNPTYYVKPKILYYHGIPPNQHLLMFASKQLNDLRTLNHYNIQNHSTLHLIMRLLAYLQIFT

SEQ ID NO: 99328 - protein, 59 aa, Gossypium hirsutum
  Clone ID: LIB3149-046-Q1-K1-A11.pep
LCSYLFNVIIVTFRLPEGIPPNQQRLIFAGKQLEKGRPLDDHNLHTEASLHLALLLRDL

SEQ ID NO: 99329 - protein, 60 aa, Gossypium hirsutum
  unsure (1)..(60): unsure at all Xaa locations
  Clone ID: LIB3149-046-Q1-K1-A6.pep
SIFFCHLPRXSNTDPVQISVLSCVDTSALPIMESEQQSIEHSHGVPLVLHIIFCLKNRLY

SEQ ID NO: 99330 - protein, 46 aa, Gossypium hirsutum
  Clone ID: LIB3149-046-Q1-K1-A7.pep
RVLQKSRPINYYHFDLYMMIIIIDSFIFFFLINTNSKLTFKHSILE

SEQ ID NO: 99331 - protein, 36 aa, Gossypium hirsutum
  Clone ID: LIB3149-046-Q1-K1-B10.pep
RIIRGNERKEYRQRGTGYYYQITKAVLSYCLNTNWQ

SEQ ID NO: 99332 - protein, 97 aa, Gossypium hirsutum
  unsure (1)..(97): unsure at all Xaa locations
  Clone ID: LIB3149-046-Q1-K1-B7.pep
RQXKIFFAVFVTVVWEVYMGCFACTMEINKLIQRMKGVESAXPDLKSSXVTLKGVFEPPKLVXFVYRRTCKTAVIDKLYADTPNTEEEKAKDANYDQ

SEQ ID NO: 99333 - protein, 80 aa, Gossypium hirsutum
  Clone ID: LIB3149-046-Q1-K1-C11.pep
FWGPLKKIFPFNARVVKFCFFKRPPPFFFFFLFFFFFFFFFFFFFFFFFFFFFFFFFFFFFFFFINSLSLTPPIIQQRKL

SEQ ID NO: 99334 - protein, 55 aa, Gossypium hirsutum
  unsure (1)..(55): unsure at all Xaa locations
  Clone ID: LIB3149-046-Q1-K1-C8.pep
STSPYLLKDCISHWXSPWYVPRAPHSFDLGMLVINRVLKQRXGFADAWAVXVFSG

SEQ ID NO: 99335 - protein, 77 aa, Gossypium hirsutum
  Clone ID: LIB3149-046-Q1-K1-E9.pep
AQGLELAEPGYFDTETRHAQWVKARATAGTMLDHDAAAFAFGKSQAHSQPAEPLDPDRKHGTVGAVACDLHGHVAAA

SEQ ID NO: 99336 - protein, 123 aa, Gossypium hirsutum
  Clone ID: LIB3149-046-Q1-K1-F11.pep
KSIDYRGSNLPSGGTNDGALWIDLPGDNNGRDNVKKGNLESAELYVHVKPAVGGTFTDIVMWIFCPFNGPANLKIGLMNIQMNKLGQHVSDWEHFTLRISNFTGELWQVYFSQHSGGEWVDAF

SEQ ID NO: 99337 - protein, 102 aa, Gossypium hirsutum
  unsure (1)..(102): unsure at all Xaa locations
  Clone ID: LIB3149-046-Q1-K1-F12.pep
NLLFLNFSKKGQICXHETIPKALALNYQIIFLNKHYCLQKXIEQLHIQYPYNLISLTKFNVPLSHIIISNDYYIFLPIKFKPSPLIQLHTIQYPTLPITTST

SEQ ID NO: 99338 - protein, 95 aa, Gossypium hirsutum
  unsure (1)..(95): unsure at all Xaa locations
  Clone ID: LIB3149-046-Q1-K1-F3.pep
CQVNIIGPPRYYKVYNSKTPALPTGIIQETFFSSYAPEXLITNGPALSSNPTHTERRIIITTYRDTNNYKSSLYAHCHSYKNQRANSLSKGARAN

SEQ ID NO: 99339 - protein, 136 aa, Gossypium hirsutum
  Clone ID: LIB3149-046-Q1-K1-F5.pep
KSMAKSDGKVKVMGRWQCPFAMRARIALNIKSVNYELVEARPWDGQSQVLHESKSNPVMVHGDKSICESLNIVEYIDEIWPYAPSIVPSDPLERVTARFWAGYLKDQWFPSLKAIGTAEGEDTRKAAIRQVEKGLV

SEQ ID NO: 99340 - protein, 105 aa, Gossypium hirsutum
  unsure (1)..(105): unsure at all Xaa locations
  Clone ID: LIB3149-046-Q1-K1-F7.pep
ICGKTGKIKRPYNTLNLIEEGQXHNIANAIAFMSVNITTAQFIKLDSYDNVSIXRNTSTLNLLNHPTFELIITSNIALTTAEYFTYESTNHVLVILSYMITMLIL

SEQ ID NO: 99341 - protein, 53 aa, Gossypium hirsutum
  Clone ID: LIB3149-046-Q1-K1-F9.pep
DLTQLKIMILFRTRPLRQSGQIAVGPENINMLECITLMNLIVQINKQNSGTPI

SEQ ID NO: 99342 - protein, 114 aa, Gossypium hirsutum
  Clone ID: LIB3149-046-Q1-K1-G5.pep
MRHRGLESKPLSALCCLESNRGKLVQQGLIDALVTYILNSERSLAAMAMAILEQVLGIERAKEALIKNPNGVKAVVKMVFRVSDHEGSESAVNSLMMVCRESLEAREKAIAAGV

SEQ ID NO: 99343 - protein, 75 aa, Gossypium hirsutum
  Clone ID: LIB3149-046-Q1-K1-G9.pep
ASIIYLKKKKKKKKKKKKKKKKKKKKKKKKKKKKDQSIKKKKKKKKKLKKNKTKLDGGKKNHNTEKTKNTEIKKT

SEQ ID NO: 99344 - protein, 70 aa, Gossypium hirsutum
  unsure (1)..(70): unsure at all Xaa locations
  Clone ID: LIB3149-046-Q1-K1-H2.pep
LKVYLSLPYVRGLTCDYSSEELVILIVCDXMGAFSRYQTTFPIXTCTHAYILYPIIVELVYVLDYIFRMA

SEQ ID NO: 99345 - protein, 102 aa, Gossypium hirsutum
  Clone ID: LIB3149-046-Q1-K1-H6.pep
TEHLLTHQDDVARLMKMERRSGMDIHSKRWFPYLDRFKCGSESLNSREVIEAVAPVLMEERKERLKRVVRNRSYSVCLVVEGLCDFGNVSATFRSADALGLQ

SEQ ID NO: 99346 - protein, 111 aa, Gossypium hirsutum
  Clone ID: LIB3149-047-Q1-K1-A2.pep
MNSSNGNGSMSTASSSGAWNGRDQFPAGLRVLVVDDDQTCLMVFEKMLKTCLYQVTKCNKAETALSVLREHKNEFDIVISDVHMPDMDGFELLKHINSEMDLPVILISADA

SEQ ID NO: 99347 - protein, 60 aa, Gossypium hirsutum
  Clone ID: LIB3149-047-Q1-K1-A7.pep
TGWMLWNSWRVFYYIGLYGGELPCLGWLLLTVFSDDLMYVIGTLCILRYIIKMLKVCVEV

SEQ ID NO: 99348 - protein, 69 aa, Gossypium hirsutum
  Clone ID: LIB3149-047-Q1-K1-A9.pep
TTSKSMTAYLFFFDVQKNVCFSIPLHRNNFLHHPLKYHPTHCPSKHLHKIVYMTSIISSSLSSAFQLIT

SEQ ID NO: 99349 - protein, 94 aa, Gossypium hirsutum
  Clone ID: LIB3149-047-Q1-K1-B10.pep
LSGIANSMETVLKGLKDGLSALHVPYAYGFAIILLTVLVKAATFPLTRKQVESAMAMRSLQPQIKAIQQRYAGDQERIQLETARLYKLAGINPL

SEQ ID NO: 99350 - protein, 59 aa, Gossypium hirsutum
  Clone ID: LIB3149-047-Q1-K1-B11.pep
SSAPYMLSSGLVLMFMGTFEVDIVFVSISNTIYLRNVMKRRRLQKSFRVSSVFMLTNRW

SEQ ID NO: 99351 - protein, 62 aa, Gossypium hirsutum
  Clone ID: LIB3149-047-Q1-K1-B4.pep
KGPPLLLLTFFSFLFVLNRVLHLFFHSLIIFVLYFGQILFFFRKTYFVSKLMKRYQINVQCL

SEQ ID NO: 99352 - protein, 125 aa, Gossypium hirsutum
  unsure (1)..(125): unsure at all Xaa locations
  Clone ID: LIB3149-047-Q1-K1-B8.pep
KIYLYFDLFLSKFGSDPVHGHLFNGEEASNXQMVLLLVDMSKQTCNITDATHIPCNAILVANKELVSQNKLFVTNAQFCYNYRIHDLIIECDSXYLNYPCLIIHVDGNSFIQLNLLLIKSKFNLT

SEQ ID NO: 99353 - protein, 70 aa, Gossypium hirsutum
  unsure (1)..(70): unsure at all Xaa locations
  Clone ID: LIB3149-047-Q1-K1-C10.pep
LCFSFQGNIDFPFRDFLLQVFRVFPINRTPRHTQVPKISFKVPSNLWXWILFLDLPPXMNVFIAYRIAIN

SEQ ID NO: 99354 - protein, 58 aa, Gossypium hirsutum
  Clone ID: LIB3149-047-Q1-K1-C12.pep
HSGFYKYKFNPIIIFLQFFMIFQSQNRGTRNHSDLVSQNSLYLEIYKSIAYTISSMRK

SEQ ID NO: 99355 - protein, 60 aa, Gossypium hirsutum
  unsure (1)..(60): unsure at all Xaa locations
  Clone ID: LIB3149-047-Q1-K1-C6.pep
SKRELYNXLTFKTLSSPNLIPFQHIPLSPTFLISKKPPPITLPNNYTTLITNNTPPFISH

SEQ ID NO: 99356 - protein, 76 aa, Gossypium hirsutum
  Clone ID: LIB3149-047-Q1-K1-C7.pep
AKQAPSWPSLSCNLLPFLSRRMDFMPGPSLNNIPTHSSGASPHHLELHPIPLIPPGLPANIPRPIMLHNTMRIAIR

SEQ ID NO: 99357 - protein, 49 aa, Gossypium hirsutum
  unsure (1)..(49): unsure at all Xaa locations
  Clone ID: LIB3149-047-Q1-K1-D10.pep
MKVSLKYAKMWANEKKCYLYGIXGSREEDTYLGFLTFXIEMEDNKIRIG

SEQ ID NO: 99358 - protein, 69 aa, Gossypium hirsutum
  Clone ID: LIB3149-047-Q1-K1-D2.pep
MEYSYNQQPITIRRTDTFYFPDYYNVHSMELMELLTMRNVSTLLHTGFHESLDHMFHSYVEIQNHAPVY

SEQ ID NO: 99359 - protein, 86 aa, Gossypium hirsutum
  Clone ID: LIB3149-047-Q1-K1-D4.pep
NKNSIRTEKENNIPPSKMFLFAYYLFDFGIKILLTPFTKIQLAVIAEIRESKLPNTTVFFPLFPCIYCYYLCSWSRSVACVGVGDR

SEQ ID NO: 99360 - protein, 140 aa, Gossypium hirsutum
  Clone ID: LIB3149-047-Q1-K1-D6.pep
DGQSGKPCSNSSIRSRSSGQNGDSYAGNSPDLLPPTNRLSGQTAVKDDSWSNRVKKRELLLEDVVGGTSLSSNAKGKRSERDREGKGHGREVLSRNGTNKIGRPVSNVKGGRKSKAKPKQKTTQLSVSVNGLLEKMPEQP

SEQ ID NO: 99361 - protein, 68 aa, Gossypium hirsutum
  unsure (1)..(68): unsure at all Xaa locations
  Clone ID: LIB3149-047-Q1-K1-E11.pep
NYRFFGFYGKHTTLYRRNEXDEEXXDAAVPSRGTLPEAKIKQEMXEQLEKARTAMGLHPRHFRXRXPA

SEQ ID NO: 99362 - protein, 55 aa, Gossypium hirsutum
  Clone ID: LIB3149-047-Q1-K1-E12.pep
TSSPMVRFDLNHVSSILFIAMGTRKLHCCSEARSKLLQACFLPMLLDLHFLLRCI

SEQ ID NO: 99363 - protein, 38 aa, Gossypium hirsutum
  Clone ID: LIB3149-047-Q1-K1-E3.pep
HGTIWFSSMEILILQSTVSTSTSHPHNTEHQIEMISHS

SEQ ID NO: 99364 - protein, 36 aa, Gossypium hirsutum
  Clone ID: LIB3149-047-Q1-K1-E5.pep
VALFRNSLIPPSLGKASYISSESVCFKSRFLSKGIP

SEQ ID NO: 99365 - protein, 125 aa, Gossypium hirsutum
  unsure (1)..(125): unsure at all Xaa locations
  Clone ID: LIB3149-047-Q1-K1-E7.pep
TALASSVGLXCNFPYVNIEEAFSKIGGDHNTQCAQIFNVFEDSYKSPLIIIILDDIERLLEYVTIEPRFSNLISHTLLFLLKRLPPNGKKLLVINTTNYVSFLNSIYTYYTFYFTYHLPSFNTYN

SEQ ID NO: 99366 - protein, 39 aa, Gossypium hirsutum
  Clone ID: LIB3149-047-Q1-K1-E9.pep
SLQNLLQHNFLVIISISNYNFKHVHYTPRPLFDSILITL

SEQ ID NO: 99367 - protein, 54 aa, Gossypium hirsutum
  unsure (1)..(54): unsure at all Xaa locations
  Clone ID: LIB3149-047-Q1-K1-F10.pep
FSLHLPSQVASLIGGVWIXVLYILITDELNLNLSIILIKTNQMKRKRCILLGTD

SEQ ID NO: 99368 - protein, 80 aa, Gossypium hirsutum
  Clone ID: LIB3149-047-Q1-K1-F6.pep
LPSSHLNPFYTTQPSSFLKDLFKQDENLLSPPNHYYPKDQLYHHSIPLLHHLTSFHLPIPINTIIPTITFISTTSSLTII

SEQ ID NO: 99369 - protein, 76 aa, Gossypium hirsutum
  unsure (1)..(76): unsure at all Xaa locations
  Clone ID: LIB3149-047-Q1-K1-G10.pep
SFLSPFSVDPNKRGVFINTLTVLTITLQVXSSNTIDIVTAKIQNNECIPPDQHRLIFSRXQLVYWRTLADYNIHKE

SEQ ID NO: 99370 - protein, 128 aa, Gossypium hirsutum
  Clone ID: LIB3149-047-Q1-K1-G3.pep
SKTSKVGSKTLCPVCQAEEETVSHLFKDCLFSQQVLKGLGGTVSSHNSEPNWKKWLDMEFNSLNNEECKIRVIAYWAIWYNRNKIYHEGAREQVNEVVSFVKAYCTEIAAMEVTMRDVQVAGSYDWSP

SEQ ID NO: 99371 - protein, 49 aa, Gossypium hirsutum
  Clone ID: LIB3149-047-Q1-K1-H11.pep
LSIKFMVVNGCREGIDIIPSRMTLSIILNNCDQSCQNYKFFQFAIKIRT

SEQ ID NO: 99372 - protein, 78 aa, Gossypium hirsutum
  Clone ID: LIB3149-047-Q1-K1-H2.pep
KYTVHKPFFIRHKIPKFSLKFDHVFISIDLSYTQNLKLKLHPQLKSFFFTKTVTYKIPYKNDFDLHDIIYIFRTNTIA

SEQ ID NO: 99373 - protein, 74 aa, Gossypium hirsutum
  Clone ID: LIB3149-047-Q1-K1-H5.pep
IVNFKFKKNRPSYFMLIKLQITIFSSYLLYLHTLSSPYILPSTKISSSIISPNKIPTILISSTINISSSYHIPT

SEQ ID NO: 99374 - protein, 139 aa, Gossypium hirsutum
  Clone ID: LIB3149-047-Q1-K1-H7.pep
EKDEISAIKAGLRKVKIFRESVSTRGAKKACREDEGSEGRCSARSDDGEYPLDTDSLDDSEEGESDEVKDDSVVRKSFSYGTLADANYAGGSVYSSMRVSEGDEDWVYYSNRKSDVGCSNVEDSAKLVSEPSLLQSSKR

SEQ ID NO: 99375 - protein, 61 aa, Gossypium hirsutum
  Clone ID: LIB3149-048-Q1-K1-A11.pep
RRCLYLFVWSQSLNPAALSLLWPSFTSYLLANLWVLVTNCPNNFFIFNIHSYNHFNKSLKR

SEQ ID NO: 99376 - protein, 128 aa, Gossypium hirsutum
  Clone ID: LIB3149-048-Q1-K1-A5.pep
QAYGEPWYWDNRYAHESAPFDWYQKYRALASLIHLYVPHRHERILVVGCGNSVFSEDMVNDGYEDVVNVDISSVVIEAMQTKYSNCQQLKYIKLDVRDMSPFQAGSFAAVIDKGTLDSILCGNNSRQN

SEQ ID NO: 99377 - protein, 56 aa, Gossypium hirsutum
  Clone ID: LIB3149-048-Q1-K1-A8.pep
MQHCVNLLASTHFHTLRVTNAPHAVKIPDAMNPLYETKTNSHISPLVRSSLAIPKV

SEQ ID NO: 99378 - protein, 68 aa, Gossypium hirsutum
  unsure (1)..(68): unsure at all Xaa locations
  Clone ID: LIB3149-048-Q1-K1-B11.pep
GSPDSSSIDRSVVTLRSYNGDVCQNLKATYLTLGLPGSQPAERNXELCLLSSAQLDEKPTFPLHTSSD

SEQ ID NO: 99379 - protein, 90 aa, Gossypium hirsutum
  Clone ID: LIB3149-048-Q1-K1-B12.pep
FVSAGVESQADGGLKTTANLEDIDLPDESDSDEEKVEIAQKDVPSAVFGGIRKREDGDDIQDGDDASAAKEKGGKSLLGALERIKRQKQA

SEQ ID NO: 99380 - protein, 82 aa, Gossypium hirsutum
  unsure (1)..(82): unsure at all Xaa locations
  Clone ID: LIB3149-048-Q1-K1-B9.pep
PLQVRGLLEKWQLISLHYKHELQYLITTSSXKNHYHSPDRQVITIRAQRLTCPEAHFQPSHIYMETSNIHETTYPAIIIVQR

SEQ ID NO: 99381 - protein, 107 aa, Gossypium hirsutum
  unsure (1)..(107): unsure at all Xaa locations
  Clone ID: LIB3149-048-Q1-K1-C12.pep
GHISFKWAFHSFFITISATQDTRQIYNRVCYSNFNDIIHSIIDMYANMITIXTXRSYEKLLSDLHEWVKYAPRIAPSVHDIHSSIIPSTQKIFYKINMMLAVLETNI

SEQ ID NO: 99382 - protein, 70 aa, Gossypium hirsutum
  Clone ID: LIB3149-048-Q1-K1-C9.pep
DIYDPSLHTLLYLMAAVLFCCLRVIDSQGVLIFKTFKTMTFLNLFSSIYIPLFASVYISNRPASIGLTKF

SEQ ID NO: 99383 - protein, 129 aa, Gossypium hirsutum
  unsure (1)..(129): unsure at all Xaa locations
  Clone ID: LIB3149-048-Q1-K1-D12.pep
LRWAGLGLIQSTQQPCPEILEQRGSYLEAGTPFIFYNADTNHSVLRLSTAVNINFTPIKTKLCRTTSVXKIDNYNDSPDKWCMTTDGARGNPVSNTLTSWFKIKNVGIMGYKSKNCPSVCESCTTLCRK

SEQ ID NO: 99384 - protein, 78 aa, Gossypium hirsutum
  Clone ID: LIB3149-048-Q1-K1-D7.pep
NHGTPGRSKLRPNKCYERPDKPAAGAKFFNWHYNIPSFADGYTHIFNQVARRAEQWMQGTMHSWSAFSIQHWPHSETH

SEQ ID NO: 99385 - protein, 36 aa, Gossypium hirsutum
  Clone ID: LIB3149-048-Q1-K1-E10.pep
DSPSFFFSPTFLRMEFVATHWHWAFLYKVLLKKKQQ

SEQ ID NO: 99386 - protein, 57 aa, Gossypium hirsutum
  Clone ID: LIB3149-048-Q1-K1-E7.pep
AAMALLIDSYRGPIKAMTVLVKLLLVQDSATVLRITTSPVLLHYYFISMTIKAEQYT

SEQ ID NO: 99387 - protein, 114 aa, Gossypium hirsutum
  unsure (1)..(114): unsure at all Xaa locations
  Clone ID: LIB3149-048-Q1-K1-F12.pep
ASNFTPGMIYINLAFNRSGQCRCQMTAAYGHSXRDDPDFTSEIVKHLNPKSYNTTYYHGHNVMTVRIYQFVVFYILYLLGGNIFSHPCIACHVYILVRDFCLLIQLIIFSSIID

SEQ ID NO: 99388 - protein, 58 aa, Gossypium hirsutum
  unsure (1)..(58): unsure at all Xaa locations
  Clone ID: LIB3149-048-Q1-K1-F6.pep
DAGMIKMFSSKPMVADTLFESPPLGRVAVMDIXKPXAVGVIKNVEKKDPSSTKSTNLC

SEQ ID NO: 99389 - protein, 98 aa, Gossypium hirsutum
  Clone ID: LIB3149-048-Q1-K1-F7.pep
SRCLVYELIPNGSVESHLHGVDKESAPLDWDARIKIALGAARGLAYLHEDSSPRVIHRDFKSSNILLEHDFTPKVSDFGLARTAMDEEGRHISAPCHG

SEQ ID NO: 99390 - protein, 65 aa, Gossypium hirsutum
  Clone ID: LIB3149-048-Q1-K1-G6.pep
QVFEATMEYTNLHSQSKVEEQYVKYTSLLTQTGHRVSTVDEWKPDLLPNIGSRYHKNPVHTFLKS

SEQ ID NO: 99391 - protein, 75 aa, Gossypium hirsutum
  Clone ID: LIB3149-048-Q1-K1-G9.pep
LKLAKEVVKKGCKGRKKGRVTKWVFQKVMPEKNGVVNWKKGYNIEEIKMRQERVDKSAQSRGPFPFFFFFFFFNF

SEQ ID NO: 99392 - protein, 55 aa, Gossypium hirsutum
  Clone ID: LIB3149-048-Q1-K1-H4.pep
VLPSMKILHMEQRETSFIYRNSDLLYNQHSLMNMPYQKQSKHPAPGLSVLGCQLK

SEQ ID NO: 99393 - protein, 126 aa, Gossypium hirsutum
  Clone ID: LIB3149-048-Q1-K1-H7.pep
QKGVVDGVEANFPTAFHGFCMRHLSESFRKEFNNTMLVNLLWEAAHALTVIEFEAKILEIEEISQDAAYWIRRIPPRLWATAYFEGTRFGHLTANIVESLNSWILEASGLPIIQMMECIRRQLMTW

SEQ ID NO: 99394 - protein, 53 aa, Gossypium hirsutum
  unsure (1)..(53): unsure at all Xaa locations
  Clone ID: LIB3149-049-Q1-K1-A2.pep
KIHPVAFLFKGSNTFIKXHGILLLSSVSVDGSTIIIIKFQFFRNTTCLNNSKQ

SEQ ID NO: 99395 - protein, 124 aa, Gossypium hirsutum
  Clone ID: LIB3149-049-Q1-K1-A5.pep
AIDAFPTLVDFVMEILSKLVSKQIWRMPKLWVGFLKCVVQTQPHSFPVLLQLPPPQLESTLNKYGSLRSSLAAYASQPTIKGSLPRATLAVLGLANESHMQQQQPHMSNLHSSDTSSVQGATST

SEQ ID NO: 99396 - protein, 69 aa, Gossypium hirsutum
  Clone ID: LIB3149-049-Q1-K1-B3.pep
VIIIRLYLFLVERILYSLLCSSNTFGGGHNHMNNAKDLVVHLTHWVKTLARVTSGGDNVKVWCLFLVLP

SEQ ID NO: 99397 - protein, 132 aa, Gossypium hirsutum
  Clone ID: LIB3149-049-Q1-K1-B7.pep
AAPDYVATGHLTARSDVYSFGVVLLEMLTGKRAVDKNRPSREHNLVDWAKPYLTSKRKFFQIMDVRIKGQYTPEAALKAAYLAVQCLSTEPKVRPKMTAVVKALEQLQDSGVDKGVHHNAAAHSSRPNSKYA

SEQ ID NO: 99398 - protein, 112 aa, Gossypium hirsutum
  unsure (1)..(112): unsure at all Xaa locations
  Clone ID: LIB3149-049-Q1-K1-C11.pep
THSYSKNLLRFKDCISNFSEFDDXRVLGNFYRQXTTFNQLIKYHNMHSYLXDCIIRLLLFSKNVYYXLFIXRNKNNSTYISIFRLXQLFPFPYYLIQLELNLYSNSYIFFFH

SEQ ID NO: 99399 - protein, 71 aa, Gossypium hirsutum
  Clone ID: LIB3149-049-Q1-K1-C2.pep
YQALFHIHSDPLQFNTSFRMLNLSLLCVSPTRGAISQFRSHNGLVSAEKSGCSIVRSMQQRYGHVNCSLDR

SEQ ID NO: 99400 - protein, 75 aa, Gossypium hirsutum
  Clone ID: LIB3149-049-Q1-K1-D1.pep
FMMLQSIIISRDVCFIKLRVSFVVMFELNQQFFVVKVNIVKVEQFMSYVYIIYVFKNEACCPFPLNVPQCIEKSC

SEQ ID NO: 99401 - protein, 95 aa, Gossypium hirsutum
  Clone ID: LIB3149-049-Q1-K1-D11.pep
MEGSVGYDNDLNLKATELRLGLPGTEPVSIVRRNKRSLQQVADDDCGVNGCKSDDQNETGPPPSKAQIVGWPPIRSYRKNHIQTKKNESEGGGIY

SEQ ID NO: 99402 - protein, 107 aa, Gossypium hirsutum
  unsure (1)..(107): unsure at all Xaa locations
  Clone ID: LIB3149-049-Q1-K1-D12.pep
MLIQCRLITLNLNLNATGLILGLPRTXPFYIVILIKTSLQHVDYYYCGVNLCKSDYQNETGSPPTKTHIDGLPPDPLLSXNNIQTNKIDSVDAGILYKYAINGTPYL

SEQ ID NO: 99403 - protein, 60 aa, Gossypium hirsutum
  Clone ID: LIB3149-049-Q1-K1-D3.pep
KQHGVLFSYQIYSILCTTTHKFNFFIILLLIIIDYIYITHITSLPLLPSYLSSLNEHIFY

SEQ ID NO: 99404 - protein, 86 aa, Gossypium hirsutum
  Clone ID: LIB3149-049-Q1-K1-D8.pep
SDALQEAMLAVASSIRRLAEAMDQSKSTINPSELLQAVLEIDGLEEAKQMYAFEYLNADPIKARAFMTYNVRMRKMYLFRQFWWWK

SEQ ID NO: 99405 - protein, 62 aa, Gossypium hirsutum
  Clone ID: LIB3149-049-Q1-K1-E2.pep
MINDIRFVLSTCNIDHIPEGFRNSALVIHFHLHTLTKQDTSCLILNDYMVIIALACDRVRSF

SEQ ID NO: 99406 - protein, 63 aa, Gossypium hirsutum
  Clone ID: LIB3149-049-Q1-K1-E3.pep
CLSFISSKTFLIPPTHISGKVIDRGLDNDESLHTILSVHSLTALHSSTTELDCCNPTRDFQNS

SEQ ID NO: 99407 - protein, 70 aa, Gossypium hirsutum
  unsure (1)..(70): unsure at all Xaa locations
  Clone ID: LIB3149-049-Q1-K1-E7.pep
LMYMVLFSIDIGCTELLSFRVERYIDRHGYTLLFLGYVIGFCRRSHMLFRPAPVFVFGLVSGRGWXLMRV

SEQ ID NO: 99408 - protein, 37 aa, Gossypium hirsutum
  Clone ID: LIB3149-049-Q1-K1-F12.pep
VNFFFMMKHNLPLINAFSQPIHSGTIALTMMSRASLL

SEQ ID NO: 99409 - protein, 51 aa, Gossypium hirsutum
  Clone ID: LIB3149-049-Q1-K1-F3.pep
IKILFSDKPNQKHKHKESKEHFENSRTITFFEMIQENSTYILLRKEQKCKI

SEQ ID NO: 99410 - protein, 54 aa, Gossypium hirsutum
  Clone ID: LIB3149-049-Q1-K1-F9.pep
AFWVPELLPLPKEKRNFPGKSYIEQVVPLKFGSSNKHHSQRSKYGGRHSGLGNR

SEQ ID NO: 99411 - protein, 87 aa, Gossypium hirsutum
  Clone ID: LIB3149-049-Q1-K1-G12.pep
LLQIPLLCRLIQIDALVNLIHALYIQYVTYLYTCSKWIVQLDHMTIATDDHIKTPIVLLPCTLIQMHAMPYVTIPILCYTAGPGDTF

SEQ ID NO: 99412 - protein, 51 aa, Gossypium hirsutum
  Clone ID: LIB3149-049-Q1-K1-G8.pep
CYIGARILQQPSFTNTICSLLETLQDHNILISCSGYWGSTMKNKNPEWYIH

SEQ ID NO: 99413 - protein, 58 aa, Gossypium hirsutum
  Clone ID: LIB3149-049-Q1-K1-G9.pep
FSGHLYFYLSNINLIVTDAMQVERFSAYKKCVYNSRISFIYCLTRSVSHHICLFDCGA

SEQ ID NO: 99414 - protein, 66 aa, Gossypium hirsutum
  Clone ID: LIB3149-049-Q1-K1-H2.pep
LCVLLWINVHPLFVQSSIRVYAKGTLVCVSECAEISGPWKFPSVLHIEVLFLNREGRYRNSNPMAS

SEQ ID NO: 99415 - protein, 57 aa, Gossypium hirsutum
  Clone ID: LIB3149-049-Q1-K1-H8.pep
QNHQSPLYQSIPTIENRLHRLLPIGLNVRAFNYILSPHLTQDTPFHSTWYYPHKCAH

SEQ ID NO: 99416 - protein, 98 aa, Gossypium hirsutum
  unsure (1)..(98): unsure at all Xaa locations
  Clone ID: LIB3149-050-Q1-K1-A10.pep
PNRPTPPKIWIVYSTGISKEVFKTGSATQXPTHAQKYFLRLINLNRHHFTSSLFHITTDTVHAIPMEQYRIDLQKNSTHPSETNFFPIIPSIFPMAFN

SEQ ID NO: 99417 - protein, 94 aa, Gossypium hirsutum
  unsure (1)..(94): unsure at all Xaa locations
  Clone ID: LIB3149-050-Q1-K1-A12.pep
KLRDQVVLFGMGDQTRXGGSEIYAKLGELRKFIKEAGYVTDTSFALQDTDEEQKEHNLWNHSERLALAFGLINTPNGSTIKVFKNLRVCGDCHS

SEQ ID NO: 99418 - protein, 123 aa, Gossypium hirsutum
  unsure (1)..(123): unsure at all Xaa locations
  Clone ID: LIB3149-050-Q1-K1-A4.pep
EYINSLRSHTLFFDPSSMMANCDPMHGKWVACFLMYRGDVVPKDVNAAVATIKTNRTVQFVDWGPTGFKCGINYHPPSCCPGGDLAKAQRACCMISNNTXLAEVFARIGHKFDLMYFKRAFVH

SEQ ID NO: 99419 - protein, 80 aa, Gossypium hirsutum
  Clone ID: LIB3149-050-Q1-K1-B10.pep
LASFNPLICSSNFDTQASFFRLQMTALVELSFQLALPNITDNTYSSNLFNHDACHMSRSCTLRQHLRPHHVELAANPWLL

SEQ ID NO: 99420 - protein, 43 aa, Gossypium hirsutum
  Clone ID: LIB3149-050-Q1-K1-B2.pep
HVYDFIQQDDFLNQLRPVLVLPPPGRSFGHCEKSMILTWMYCN

SEQ ID NO: 99421 - protein, 70 aa, Gossypium hirsutum
  Clone ID: LIB3149-050-Q1-K1-C11.pep
TGRSRSPPRSSLPPPLGALGPTLKFPLSHTEFSPTTNNHPFSNIYTSNPFPYYTYSHPYLIHTKLLYSSI

SEQ ID NO: 99422 - protein, 94 aa, Gossypium hirsutum
  Clone ID: LIB3149-050-Q1-K1-C12.pep
KNLHANGIEVFLGVVFTHSAEGGALQGLDDLSYYHNSVEDLEARNALNCNYPVVQQFILDSLRQWVTEFHIDGFCFINASCLLRGVRGERLSRP

SEQ ID NO: 99423 - protein, 91 aa, Gossypium hirsutum
  Clone ID: LIB3149-050-Q1-K1-C6.pep
CPDSGATHHVCQNASDLQGSAPYTGNSSFLMGNGVSTKISFVWSTTIPTKAKLLHLSNVLCVPSIRKNLLSVSNFATDNNVFFEFHPSYCV

SEQ ID NO: 99424 - protein, 92 aa, Gossypium hirsutum
  unsure (1)..(92): unsure at all Xaa locations
  Clone ID: LIB3149-050-Q1-K1-C9.pep
FLYILKTKSDGAGSGFXWLAFVDLFGFVKLSLASAIMLCLEFWYLMMLIVITGHLSNPLVPVDAISICMNINGWDAMIAIGFNAAISVRVSN

SEQ ID NO: 99425 - protein, 36 aa, Gossypium hirsutum
  Clone ID: LIB3149-050-Q1-K1-D12.pep
ISCKGRLGRSIETKSGRLASHYALIKHHLVQEKMKK

SEQ ID NO: 99426 - protein, 37 aa, Gossypium hirsutum
  Clone ID: LIB3149-050-Q1-K1-D2.pep
SFPSPRDRLHVCFGQMGLNFAYPAFQFLINRDSFLFA

SEQ ID NO: 99427 - protein, 129 aa, Gossypium hirsutum
  unsure (1)..(129): unsure at all Xaa locations
  Clone ID: LIB3149-050-Q1-K1-D4.pep
YFGFKKPATDDPVKTNKIPRQIPEQAWYMNPAFSILIGGILQFGAVFIELFFILTSIWLHQFYYIXGFLFIVFVILIITCAEITVVLCYFQLCSEDYLWWWRSYLTSGSSAFYLFHYAAFYFFTKLEIT

SEQ ID NO: 99428 - protein, 32 aa, Gossypium hirsutum
  unsure (1)..(32): unsure at all Xaa locations
  Clone ID: LIB3149-050-Q1-K1-E11.pep
LAYFTENPXTVTPSDLDRAPVSHREEVEERWR

SEQ ID NO: 99429 - protein, 132 aa, Gossypium hirsutum
  Clone ID: LIB3149-050-Q1-K1-E7.pep
KHPYKYKSPPPPPPVYKYKSAPPPPPSGPKHPYKYKSPPPPPPSPPKHPYKYKSPPPPPPSPPKHPYKYKSPPPPPSPPKHPYKYKSPPPPPPSPPKHPYKYKSPPPPSPPKHPYKYKSPPPPPPSPPKHPY

SEQ ID NO: 99430 - protein, 45 aa, Gossypium hirsutum
  Clone ID: LIB3149-050-Q1-K1-F2.pep
SIHLNKLLICINLFKNEALILNTLKQKKYFNYQSFIIILSNKACY

SEQ ID NO: 99431 - protein, 130 aa, Gossypium hirsutum
  Clone ID: LIB3149-050-Q1-K1-F3.pep
MAAKPGSAPVTYSPNLGQKTRPPIFKDNDLDWVRPDGRGFHQCRPAFFRTGAVNSASGSAYAELGSTKVILSVFGPRESKKAMMYSDTGRLNCNFSYTTFATPVRGQGSDHKEFSSMLHKALEGAIMLET

SEQ ID NO: 99432 - protein, 66 aa, Gossypium hirsutum
  Clone ID: LIB3149-050-Q1-K1-F5.pep
WFHPLSAFYFNQIMTNIYEVLYPCLACHKARYYTHQLQAMAPATFLCLNHNPKSLHPMTNILRILE

SEQ ID NO: 99433 - protein, 70 aa, Gossypium hirsutum
  unsure (1)..(70): unsure at all Xaa locations
  Clone ID: LIB3149-050-Q1-K1-G7.pep
PGRATRTQGIQPXKGKFFNRRYISXKGPFIIYGTWGPKLFKTFRNIPRFQVANVXILNLLKLSPFVHSLL

SEQ ID NO: 99434 - protein, 51 aa, Gossypium hirsutum
  Clone ID: LIB3149-050-Q1-K1-G9.pep
PRSISKDLKMGILPRKALIFFLQQFQKTSSYLTYLIGTSLLIHWIYAGRNS

SEQ ID NO: 99435 - protein, 54 aa, Gossypium hirsutum
  unsure (1)..(54): unsure at all Xaa locations
  Clone ID: LIB3149-050-Q1-K1-H1.pep
VLKSMKILHMEQRETXFIYRNFDLLYNXHFXMNMCHPKLSKNPALDISVFGCKI

SEQ ID NO: 99436 - protein, 45 aa, Gossypium hirsutum
  Clone ID: LIB3149-050-Q1-K1-H3.pep
QVYARTRIFFFIRLIHDLYLASNNPGGRDRTLISFVLYYYHEHFI

SEQ ID NO: 99437 - protein, 92 aa, Gossypium hirsutum
  unsure (1)..(92): unsure at all Xaa locations
  Clone ID: LIB3149-050-Q1-K1-H9.pep
LDQKKKTTRSKESVNNKCSSHGQSQEVKAVTLLHKAMEYETTRRRRSSTDGGPSTSTSFFVWSYFXDLQKQYTPRPGFIPQDFESSAIYTIK

SEQ ID NO: 99438 - protein, 75 aa, Gossypium hirsutum
  Clone ID: LIB3149-051-Q1-K1-A1.pep
VLNLKFFFWFLHVVFFGFVFFFFFFFFFTSVKIDIYLKITGIGSYLRFRNMKTAHLEHSTGQGLWQPLISFHCFP

SEQ ID NO: 99439 - protein, 51 aa, Gossypium hirsutum
  unsure (1)..(51): unsure at all Xaa locations
  Clone ID: LIB3149-051-Q1-K1-A2.pep
LLXKFFKKKKNSYRSKKKQAGRPHSFNYHTSSIPPPKIHITLLSFHTILNS

SEQ ID NO: 99440 - protein, 42 aa, Gossypium hirsutum
  Clone ID: LIB3149-051-Q1-K1-B1.pep
VINYFMYMDARDLPIIHKNSRFSPSRLSFLSDTLLDEIIKDS

SEQ ID NO: 99441 - protein, 41 aa, Gossypium hirsutum
  unsure (1)..(41): unsure at all Xaa locations
  Clone ID: LIB3149-051-Q1-K1-B2.pep
TIAFLTSTVIFFPLLQIFYIXXCXNXLPFSXXFTDRXNIPG

SEQ ID NO: 99442 - protein, 48 aa, Gossypium hirsutum
  unsure (1)..(48): unsure at all Xaa locations
  Clone ID: LIB3149-051-Q1-K1-B4.pep
LLIHYRFKPSXYPSRAYLRGKGKYXLALTGFPDEFYDTEWDLIIIFST

SEQ ID NO: 99443 - protein, 50 aa, Gossypium hirsutum
  Clone ID: LIB3149-051-Q1-K1-C11.pep
FYSIRKKSNFSGIMDCCSQLQHSKSEMKSHLALAMLGVSEFEDDNHLYCR

SEQ ID NO: 99444 - protein, 91 aa, Gossypium hirsutum
  Clone ID: LIB3149-051-Q1-K1-C3.pep
KNFLKTKKKKTRHFYARRPKKSKLTYTSIQPYNSFITSPKLNSLTLFLQPFNFKNPFFTQFNSLPKNPLFSNYLNNKKSPTNRPSQHISNL

SEQ ID NO: 99445 - protein, 56 aa, Gossypium hirsutum
  unsure (1)..(56): unsure at all Xaa locations
  Clone ID: LIB3149-051-Q1-K1-D4.pep
TFXQFFLXNNILFCNFNWRTSFLFHLLFSFSFFPQHCFNIXXYTXQFHLNIVTFVF

SEQ ID NO: 99446 - protein, 98 aa, Gossypium hirsutum
  unsure (1)..(98): unsure at all Xaa locations
  Clone ID: LIB3149-051-Q1-K1-D5.pep
IAGSTHTFXSYLPHFFSITSITTGVYLSWRVTLNLFFFNNNILFCNFNCRTSFLFHLIFSFSFFHLHCFNIVLCSLQFHLNIVTFVFQKKKKNCRLSK

SEQ ID NO: 99447 - protein, 83 aa, Gossypium hirsutum
  unsure (1)..(83): unsure at all Xaa locations
  Clone ID: LIB3149-051-Q1-K1-D7.pep
HRRGNNSHQCLQTNLHKLKTYXPNLLLFQNKLSSFXASYSISNQLATTTQVQGXYIPIYFENPLTELLXITNVINSFKAYHTL

SEQ ID NO: 99448 - protein, 37 aa, Gossypium hirsutum
  Clone ID: LIB3149-051-Q1-K1-D9.pep
NLKFPKDQIVKWSTFRASIVEIKAPLVGFLLCVFIIG

SEQ ID NO: 99449 - protein, 68 aa, Gossypium hirsutum
  Clone ID: LIB3149-051-Q1-K1-E3.pep
LGACIFLPVAPVVKSRPALFNLGLFFFFFFFLHFFFFFFFFFFFFFFFFFFFFFFFFEKGKREYFYSK

SEQ ID NO: 99450 - protein, 44 aa, Gossypium hirsutum
  Clone ID: LIB3149-051-Q1-K1-F5.pep
FFISPFISRTVISRAGETIKSKTFNNATSMNIKTAHHLSFCRIA

SEQ ID NO: 99451 - protein, 103 aa, Gossypium hirsutum
  unsure (1)..(103): unsure at all Xaa locations
  Clone ID: LIB3149-051-Q1-K1-F9.pep
PYSSCFRKEACSHGGDTQGRGPNHQFQKVQQLSITIPNGHESCDIHQEMIKNSNAYYHILKLPYQHLMLASGALNDATANKYDFXTLIPASQTYTELVSCSNC

SEQ ID NO: 99452 - protein, 56 aa, Gossypium hirsutum
  Clone ID: LIB3149-051-Q1-K1-G3.pep
LGEEIRGPPEKIEENTRRTLTKSTRKWISIKIKDLRLISSKVFMSFYEFFCFLSFF

SEQ ID NO: 99453 - protein, 104 aa, Gossypium hirsutum
  Clone ID: LIB3149-051-Q1-K1-G6.pep
KDIIKVNSEALLVVSCATELFLRFLAERTAQVAAEKKKKTVKLDHLRTAVKRHRPTSDFLLDSLPIPAESTQSVARFATDRDRSRSVGDKSAPAGTRRIDHFFS

SEQ ID NO: 99454 - protein, 69 aa, Gossypium hirsutum
  Clone ID: LIB3149-051-Q1-K1-H11.pep
TAREVMNMVTRAKRKRRTRMVGGRKRVKSQRLCPVNNPWISKYIDFPKVSILFVYLLLIESFLSQLNPS

SEQ ID NO: 99455 - protein, 104 aa, Gossypium hirsutum
  Clone ID: LIB3149-051-Q1-K1-H7.pep
KKGNHAILTAIEVFQVIVAESETSSEEVRALQSLKKSLGLPNRFGWNGDPCVPKEHPWSGADCHFDKSGRKWFIDGLGLDNQGLRGSLTNEISKLHHLQSINLS

SEQ ID NO: 99456 - protein, 71 aa, Gossypium hirsutum
  Clone ID: LIB3149-053-Q1-K1-A5.pep
NEEENAKEGGRLFGFQTCFRWRARRCFLYRVSLNSIDWPMNYNEIDCGKTSAVAKFNFHDQHSPCFGWINS

SEQ ID NO: 99457 - protein, 43 aa, Gossypium hirsutum
  Clone ID: LIB3149-053-Q1-K1-A6.pep
SKDPYTGEGDVQLALCLHYCCYQLIPLENNDRFVIDKALYSLI

SEQ ID NO: 99458 - protein, 78 aa, Gossypium hirsutum
  unsure (1)..(78): unsure at all Xaa locations
  Clone ID: LIB3149-053-Q1-K1-A7.pep
KAPHDPRVREYLMYXFFFKIKTNXTGMVFFLLIPTLYFIHSTYIILYIELDKISCYSLNIIKIQFHHYYIHSYDSIKN

SEQ ID NO: 99459 - protein, 78 aa, Gossypium hirsutum
  Clone ID: LIB3149-053-Q1-K1-B11.pep
GADALGMINFETGFFFFHPQKTIKGTGFSYFPHHSHSKSKIIFMSPENHIFLFQLTPQSYNHFFSHILWRDHYVSKRN

SEQ ID NO: 99460 - protein, 76 aa, Gossypium hirsutum
  unsure (1)..(76): unsure at all Xaa locations
  Clone ID: LIB3149-053-Q1-K1-B4.pep
TKNTTIPTKNXQVFSTAXDNQSSCSFNVLQCLRXMASNNMLLCAFYLVCIFPASPGFLNIEVTFHIYPHGFVTPSA

SEQ ID NO: 99461 - protein, 24 aa, Gossypium hirsutum
  Clone ID: LIB3149-053-Q1-K1-B6.pep
HMYSMNVLYKVSDRKFTQPPYVCI

SEQ ID NO: 99462 - protein, 59 aa, Gossypium hirsutum
  unsure (1)..(59): unsure at all Xaa locations
  Clone ID: LIB3149-053-Q1-K1-C10.pep
GXPADPRVRKKKYIKKKKYIHFYTTKDDKIGVCLGLTNSRSPIYNQVPEKLDFFLAVTL

SEQ ID NO: 99463 - protein, 72 aa, Gossypium hirsutum
  Clone ID: LIB3149-053-Q1-K1-C11.pep
HIGFSLIFGVKRVELFSQFANTIILYVYGKLIYTLKRGCGVEILIRSLLTQFFFVHTLVKNEKFLGIIVCIE

SEQ ID NO: 99464 - protein, 120 aa, Gossypium hirsutum
  Clone ID: LIB3149-053-Q1-K1-C7.pep
LDISGVQTYVINSARVLFLNERPQPKSGKLGVSHLCEICGRTLLDPFRFCSLGCKLVGIKRNIGNASFNIEEEGIIISKEEEEEEMREGSQRDINPSTPPPPPSNARRRKGIPHRAPFGS

SEQ ID NO: 99465 - protein, 91 aa, Gossypium hirsutum
  Clone ID: LIB3149-053-Q1-K1-C9.pep
AEEIPFQLGLSKMDLRKMLKSSLSGVDKSITAMYKKLQKNLTSEELLPSLWDKCKKEFLDKYDSFAQLVAKIYPTETIPSVSEMRDLLASM

SEQ ID NO: 99466 - protein, 131 aa, Gossypium hirsutum
  Clone ID: LIB3149-053-Q1-K1-D1.pep
FTEAKEILVGGKTDAWKMASSESDSLNRWAEKSRFRIGDSLVWKYDGGKDSVLQVTKEAYASCNTSNSIAEYKDGNTKVKLDRSGPFYFSGAKGHCEQGQKLHVVVLSQKHRYTGISPAPSPAEIEGPAIA

SEQ ID NO: 99467 - protein, 78 aa, Gossypium hirsutum
  Clone ID: LIB3149-053-Q1-K1-D4.pep
GFRLAFVHHSFDPQCLVFERFARTSRVNSALPLLPQFYVREWLLLGMLWFEKPVMHGHCSIMLPPCKVSSQISQNAWL

SEQ ID NO: 99468 - protein, 56 aa, Gossypium hirsutum
  Clone ID: LIB3149-053-Q1-K1-D8.pep
LAKETWGKRKDAEKASFEEAEKKREAEELYDVPLYFTAADEDNSSHADWNESLSPY

SEQ ID NO: 99469 - protein, 33 aa, Gossypium hirsutum
  Clone ID: LIB3149-053-Q1-K1-E8.pep
VHKLVKSCLLRQRYYDPQRILPEVETFTVFFVS

SEQ ID NO: 99470 - protein, 51 aa, Gossypium hirsutum
  Clone ID: LIB3149-053-Q1-K1-F1.pep
EECVERGVIWNSAVVWGKDVYLRAEILLNRHRALYERLGGKLKHVRWNRRP

SEQ ID NO: 99471 - protein, 54 aa, Gossypium hirsutum
  unsure (1)..(54): unsure at all Xaa locations
  Clone ID: LIB3149-053-Q1-K1-F11.pep
LFKPTNLEEGLILALQIEDIISTGSSKTVSITGNSNYSKTLFPQXXKKXKKFFF

SEQ ID NO: 99472 - protein, 106 aa, Gossypium hirsutum
  Clone ID: LIB3149-053-Q1-K1-F2.pep
EIGCTIKKFPLLTPREYVLAWRLWEGKDRTFYCFIKECEHPSAPRRKKYVRVGYFRSGWQIRKVPGRDASEIRMFHQEDAGLNVEMAKLAFAKGIWSYVCKMDNAL

SEQ ID NO: 99473 - protein, 59 aa, Gossypium hirsutum
  Clone ID: LIB3149-053-Q1-K1-F4.pep
IASDYYSVSILTHTKMRGRGYFITSPNFNSPAVSLQLHNSQNPVCTQLNRFDTHPPFDS

SEQ ID NO: 99474 - protein, 119 aa, Gossypium hirsutum
  unsure (1)..(119): unsure at all Xaa locations
  Clone ID: LIB3149-053-Q1-K1-F5.pep
HYADVPHKSLTDENAGXNWGPFKRNGFKFPGGGTMFPQSSNSFIDXLASVIPITDRFVITTFDSCCGVANWGAYILNRNVLAISFAPLDNHXAQVQFALEPGVPSVIGVLGSNNVSYPT

SEQ ID NO: 99475 - protein, 114 aa, Gossypium hirsutum
  Clone ID: LIB3149-053-Q1-K1-G7.pep
MMWETPNSHESSQHGQALDPHEPQGYPEDYDSTCSTPYVSAPSSPGRAPGPGSINGGFFYSAPASPMHFAMTSVASIVSSTRPSSPDNLVPLGFEFEFSGRFGSSGLGQTGSMS

SEQ ID NO: 99476 - protein, 76 aa, Gossypium hirsutum
  Clone ID: LIB3149-053-Q1-K1-H1.pep
DSNIFVCIRMHPAEYFWYFMILERTMLHFTLKRNLMIELMAPTPFSLNEVGAYSTCCKTVTLCSAKNYCALIVKPS

SEQ ID NO: 99477 - protein, 65 aa, Gossypium hirsutum
  unsure (1)..(65): unsure at all Xaa locations
  Clone ID: LIB3149-053-Q1-K1-H10.pep
KNITTFKERVVNFESLKSPPPFFFFNYFFFFIXFNFFFFFFFFFFFFFFFFFFFFFFNRRNNHEA

SEQ ID NO: 99478 - protein, 128 aa, Gossypium hirsutum
  Clone ID: LIB3149-053-Q1-K1-H12.pep
AECHIPFQIDSSTNDEETCLEGGVYSVDGDGTVPVLSAGFMCAKAWHGKTKFNPSGIRTYLMEYRHSPPTTLLEGRGTLSCAHVDIMRNFALIEDVIRIAAGASGEELGGNRVHSNIFKWSEKINLQL

SEQ ID NO: 99479 - protein, 40 aa, Gossypium hirsutum
  Clone ID: LIB3149-053-Q1-K1-H2.pep
NMRGWGDIKFSHTSHKTSTLSLFKPSSPLKPHPNTSLFSS

SEQ ID NO: 99480 - protein, 78 aa, Gossypium hirsutum
  Clone ID: LIB3149-053-Q1-K1-H3.pep
KRILSKASSREPRAFINSHLLQPNKSSHPLSLSWGVRVWLSLSIRLHGFPCLLKKILVFFIATTALLVARVIHLSLFV

SEQ ID NO: 99481 - protein, 124 aa, Gossypium hirsutum
  Clone ID: LIB3149-054-Q1-K1-A2.pep
MLFPSMWKGLVAIFMAGILAGSVSVKAQMVADIVTDEFFDGILNQADASCEGRNFYSRAAFLEALSSFTQFGTADDTRREVAAFFAHVTHETGHFCYIEEINGATRDYCDETNTQYPCNPDKGY

SEQ ID NO: 99482 - protein, 75 aa, Gossypium hirsutum
  Clone ID: LIB3149-054-Q1-K1-A5.pep
NLICEVAVEEDLPFFFKDTPFDLCSFKVMSMVDNSNGDKSDDEREKKEILQCMECFNRLFVVAYYSVQLYYEKYI

SEQ ID NO: 99483 - protein, 48 aa, Gossypium hirsutum
  Clone ID: LIB3149-054-Q1-K1-A6.pep
MMNTGTLTLPVATDLSRSLKFSCLNWKSLVTQHVLYFLYFLDNTCVVL

SEQ ID NO: 99484 - protein, 109 aa, Gossypium hirsutum
  unsure (1)..(109): unsure at all Xaa locations
  Clone ID: LIB3149-054-Q1-K1-A8.pep
HHSIQLQLSIFSFQSTCTEKEATKKSTEIHEKPVFVASRLKEEAIAQLRLAMAEKAYAEEARKQARRQVELAXHELAKAKRIMQQAQAESAKAQALKNHAVKQINSTIF

SEQ ID NO: 99485 - protein, 38 aa, Gossypium hirsutum
  Clone ID: LIB3149-054-Q1-K1-B2.pep
LSQLYPCSKVIIKKKNQLFSGLKVAINMAGLQVVTQVK

SEQ ID NO: 99486 - protein, 117 aa, Gossypium hirsutum
  unsure (1)..(117): unsure at all Xaa locations
  Clone ID: LIB3149-054-Q1-K1-B4.pep
HAFVSIYHCFLWIKTKKNQTVLLFDWNYDDLTSVCLWQIETKIMSLGLDNAHETTLLDMXKTRXLVQHXPSQHPTYVELSIGKEKYKAFDLRRHLFSNQDWKDYYAKVGAFIYFLDA

SEQ ID NO: 99487 - protein, 59 aa, Gossypium hirsutum
  Clone ID: LIB3149-054-Q1-K1-C11.pep
ALDNVGMWNLRSEFWARQYLGQQFYLRVYTTSTSLRDEYPIPKNALLCGRASGRHTRPL

SEQ ID NO: 99488 - protein, 35 aa, Gossypium hirsutum
  Clone ID: LIB3149-054-Q1-K1-C12.pep
YLRVYTTSTSLRDKYPIPNNALLCSMASCLHTRPL

SEQ ID NO: 99489 - protein, 58 aa, Gossypium hirsutum
  Clone ID: LIB3149-054-Q1-K1-C4.pep
LKLYSLICVFVYFSFRSLFSRGGGRGGGGKLILFFVGFILVKPLRGTRGPFSSFFLGF

SEQ ID NO: 99490 - protein, 96 aa, Gossypium hirsutum
  Clone ID: LIB3149-054-Q1-K1-E4.pep
RGSPWGSIDPVLHFARARVKNMFLMHRDSDPHCTPKIISRAFFSHRRLPLFTDRSLTKTRPYAQIPRLNRDRETERVRERERERARQPERERERRF

SEQ ID NO: 99491 - protein, 31 aa, Gossypium hirsutum
  Clone ID: LIB3149-054-Q1-K1-F4.pep
PTLYKLFQRPHCPDILIHFLRSLTHSSIPSL

SEQ ID NO: 99492 - protein, 142 aa, Gossypium hirsutum
  Clone ID: LIB3149-054-Q1-K1-F8.pep
KTRPTHAYDDFINPIFFTFYKHNLDVLDINTGSTDGTHTMLVFFNPPPGHLAPQKQIVAFDKMHFPAWSQRPVGINIHVFKFLSVADNSWVLRIPTCVHNIHIGCANHSLYLHPVTLGVNKSYTFSMQNKGYIFINAKFNNY

SEQ ID NO: 99493 - protein, 69 aa, Gossypium hirsutum
  Clone ID: LIB3149-054-Q1-K1-F9.pep
TNCIYQRVVFCLYLVITLNPRLVTCFTCLNQPTLKKGLFLTFQINVIINTSSSKTVCITRNSNFYKTLF

SEQ ID NO: 99494 - protein, 34 aa, Gossypium hirsutum
  Clone ID: LIB3149-054-Q1-K1-G10.pep
LHKNQFYMLISNSFGKKCAWCCRGNCDTKCTELI

SEQ ID NO: 99495 - protein, 57 aa, Gossypium hirsutum
  Clone ID: LIB3149-054-Q1-K1-G4.pep
VLWKAIQGILFKFNKPSGGGEVGDVHTVINDGAHAMLECYKPPTDHSAPQKQLEDSV

SEQ ID NO: 99496 - protein, 50 aa, Gossypium hirsutum
  Clone ID: LIB3149-054-Q1-K1-G6.pep
HVLSDFLRGSTTVCVDTRLSDFRVFSIPFHEVRTCYCNSNSVVYLNLLHL

SEQ ID NO: 99497 - protein, 63 aa, Gossypium hirsutum
  Clone ID: LIB3149-054-Q1-K1-G8.pep
ITCPIPEMSNMCVCYSNGCITASRLAYDMLAMFYDGMILRICPSSQIPVPSYKVQMDSSQDNS

SEQ ID NO: 99498 - protein, 57 aa, Gossypium hirsutum
  Clone ID: LIB3149-054-Q1-K1-H3.pep
VHRSLTPAGKVRGQTPKVVSLDKKKKPRGRSYKRIQYFRSFFTADVGCCKKSGPNSS

SEQ ID NO: 99499 - protein, 112 aa, Gossypium hirsutum
  unsure (1)..(112): unsure at all Xaa locations
  Clone ID: LIB3149-054-Q1-K1-H4.pep
HAGKXXXLFCTLIFSVVVLGTTIKMLRSILEVLMESTPREIDATKLETGLLQMGDVVAIHELHIWAITVGKVLLACHVKIRPEADADIVLDNVIEYIRREYNISHVTIQIER

SEQ ID NO: 99500 - protein, 38 aa, Gossypium hirsutum
  Clone ID: LIB3149-055-Q1-K1-A10.pep
LRPLTRNASQRENKTRSLITPWVPHPVMPSGVLPQVAL

SEQ ID NO: 99501 - protein, 59 aa, Gossypium hirsutum
  Clone ID: LIB3149-055-Q1-K1-A12.pep
LLRAEPLCWVVKSNDGSGRILSEGITAWFPSSHNDSLSSIAQQRLCPVIPALPLSATRG

SEQ ID NO: 99502 - protein, 41 aa, Gossypium hirsutum
  unsure (1)..(41): unsure at all Xaa locations
  Clone ID: LIB3149-055-Q1-K1-B1.pep
VRSPLVLHFIVSNKHLISXNXYYSSIVXYIMEQLSHGVIYI

SEQ ID NO: 99503 - protein, 78 aa, Gossypium hirsutum
  unsure (1)..(78): unsure at all Xaa locations
  Clone ID: LIB3149-055-Q1-K1-B9.pep
SLMPKLGRSXWXYYLKMETPSWLLIVWPMNFTGRGDGRKWVPSSETIGTVMRHFEQGKMLMGPSFVRFKEAVTVWEEG

SEQ ID NO: 99504 - protein, 48 aa, Gossypium hirsutum
  Clone ID: LIB3149-055-Q1-K1-E2.pep
RIKVAGKAGALGDCVTVTRDKTHITGTSDSNFTKRYLKYHTKNYLKKH

SEQ ID NO: 99505 - protein, 119 aa, Gossypium hirsutum
  unsure (1)..(119): unsure at all Xaa locations
  Clone ID: LIB3149-055-Q1-K1-F2.pep
DHASADIFNGQSLVRNRQRDTSFCFAGAPRGAVKNDFRGLLLNQCMNASGLCRVVDCAGTRCSNGTSAILETILDSRFCLQPRGDSFTRRSIXDCMVTGSILVFFWHRTAYXQYQWFTE

SEQ ID NO: 99506 - protein, 56 aa, Gossypium hirsutum
  unsure (1)..(56): unsure at all Xaa locations
  Clone ID: LIB3149-055-Q1-K1-G10.pep
XQSILNSSXVIVMRCNMLSFSEXSLKWCSYVLIMAEATWKRLXVDCLIWTKGSCRR

SEQ ID NO: 99507 - protein, 65 aa, Gossypium hirsutum
  Clone ID: LIB3149-055-Q1-K1-G3.pep
AIPRPKARMSTEPTSIEGSVTPPTSVASENSGLSSIKQGARREESPLRQVGYYIIMGLRYDMVDC

SEQ ID NO: 99508 - protein, 81 aa, Gossypium hirsutum
  unsure (1)..(81): unsure at all Xaa locations
  Clone ID: LIB3149-055-Q1-K1-G8.pep
YACARCRSLSXPTFSTLKSAINKPTLKPKPASSLRGSRTSPTFSRSVSQLGCLQSLLPLHSAVSSARLTSCLGIDSRSSRS

SEQ ID NO: 99509 - protein, 58 aa, Gossypium hirsutum
  unsure (1)..(58): unsure at all Xaa locations
  Clone ID: LIB3149-055-Q1-K1-H10.pep
ISVQGRSRTHCGEIALWNVQAGSSXKLHYPYYVDDNVELVAFPDVNDYLYVIIKSNRS

SEQ ID NO: 99510 - protein, 67 aa, Gossypium hirsutum
  unsure (1)..(67): unsure at all Xaa locations
  Clone ID: LIB3149-055-Q1-K1-H7.pep
IITXEEWRDFLLLYPHEATMENIYHHWEXGGIAGAASRTATAPLDRLKVVLQVQTTNADILPAVRKI

SEQ ID NO: 99511 - protein, 45 aa, Gossypium hirsutum
  unsure (1)..(45): unsure at all Xaa locations
  Clone ID: LIB3149-056-Q1-K1-A12.pep
AATVASSCRLLCYMILRRNSSFPMHVVVGCSALXGISKLNCDFII

SEQ ID NO: 99512 - protein, 47 aa, Gossypium hirsutum
  Clone ID: LIB3149-056-Q1-K1-A4.pep
TKYEVTSVTDVNDMRIICAPSSSYGAGLLGTHVRPGRSLDRQTDSRV

SEQ ID NO: 99513 - protein, 82 aa, Gossypium hirsutum
  unsure (1)..(82): unsure at all Xaa locations
  Clone ID: LIB3149-056-Q1-K1-B7.pep
FTRSYGTPSRQFQTQIPRQPFTLRLFSTSSNDRTTSGASTNGNHSGNNPSSDSSYFGDVKTDQPQXRPRNPTXPSTPNSKPM

SEQ ID NO: 99514 - protein, 66 aa, Gossypium hirsutum
  unsure (1)..(66): unsure at all Xaa locations
  Clone ID: LIB3149-056-Q1-K1-B9.pep
HTLSAFLGTLSYLTXAVSPFDSIAVFXCYRMFPLLDGQDYWNALYTGCNVIPIKGTVLVPFVILDC

SEQ ID NO: 99515 - protein, 45 aa, Gossypium hirsutum
  unsure (1)..(45): unsure at all Xaa locations
  Clone ID: LIB3149-056-Q1-K1-D7.pep
SFIKYNTQTRNXITLVYSLILVYIYMYILYYVGFIYSLGSVFLLP

SEQ ID NO: 99516 - protein, 78 aa, Gossypium hirsutum
  Clone ID: LIB3149-056-Q1-K1-D9.pep
VSKGCFCLPLFLFQLLFFLPSGLMISQLGFRKLTTKAINTGCRHSCSCPFRTSIYILVDAACPAHSHDHFLNCMNFLS

SEQ ID NO: 99517 - protein, 51 aa, Gossypium hirsutum
  unsure (1)..(51): unsure at all Xaa locations
  Clone ID: LIB3149-056-Q1-K1-E5.pep
TAMASIVNETSDSYSTYXELIPYTNAIDRWDIKCIDQIPVSSYQLQSSYML

SEQ ID NO: 99518 - protein, 52 aa, Gossypium hirsutum
  unsure (1)..(52): unsure at all Xaa locations
  Clone ID: LIB3149-056-Q1-K1-F12.pep
NKKGFYNLVITSYLSHHLKTKNRQNGWXSXVFISPPNCMHIYLSNSNLTVHF

SEQ ID NO: 99519 - protein, 40 aa, Gossypium hirsutum
  Clone ID: LIB3149-056-Q1-K1-F7.pep
ILDKQNSFSDHNGRRHTYVYRVASIVESNAAALGWVSGFL

SEQ ID NO: 99520 - protein, 50 aa, Gossypium hirsutum
  Clone ID: LIB3149-056-Q1-K1-G10.pep
ELACLLRNYITYMTRLVPVPIASSLIQFFHALNDECRADHPSPQELPSRS

SEQ ID NO: 99521 - protein, 71 aa, Gossypium hirsutum
  Clone ID: LIB3149-056-Q1-K1-G11.pep
SGDTRRSCSGLSLSGEVGKEFGARRTCCTEGYENRADRRGIEGNDLISMLRELHCTKMFFMGLYYGTYFNL

SEQ ID NO: 99522 - protein, 34 aa, Gossypium hirsutum
  unsure (1)..(34): unsure at all Xaa locations
  Clone ID: LIB3149-056-Q1-K1-G5.pep
LTLDGPTPTTYSIXSDPDIERXGTPDSPAVAFAR

SEQ ID NO: 99523 - protein, 52 aa, Gossypium hirsutum
  unsure (1)..(52): unsure at all Xaa locations
  Clone ID: LIB3149-056-Q1-K1-G7.pep
LCSIKRSHIYVRLLVATSAQFDLMYIYIYILQMPILTNKTXICLNSTXXIXA

SEQ ID NO: 99524 - protein, 142 aa, Gossypium hirsutum
  unsure (1)..(142): unsure at all Xaa locations
  Clone ID: LIB3149-056-Q1-K1-G9.pep
KMVGQEXTKSGSAFAFPRDSPLAIDMSTAILALAENGDLQRIHDKWLMXSTCSLESTEIETNQLNLSSFWGLFLNCGVACIIALFIYFLQILQQLPPAPESASIPGQDSSHSRRLRRXLSLMDEKEEQSSKMVLDDWKRYSN

SEQ ID NO: 99525 - protein, 55 aa, Gossypium hirsutum
  Clone ID: LIB3149-056-Q1-K1-H10.pep
SSTEEEVKLAGYILQVDESVGSEAGKECPNADVGWNFMATFDGLCGVDYYLQRCE

SEQ ID NO: 99526 - protein, 99 aa, Gossypium hirsutum
  unsure (1)..(99): unsure at all Xaa locations
  Clone ID: LIB3149-056-Q1-K1-H7.pep
LKCXISVXTAPKSASHPSNKASMDSQYEFTFTASYSYQQAQHPYIWTLCSACGIKYQFXLDCLNRLLDCKRCGSSFIAXDLXPYGHSWSQFSNQKEIPN

SEQ ID NO: 99527 - protein, 62 aa, Gossypium hirsutum
  unsure (1)..(62): unsure at all Xaa locations
  Clone ID: LIB3149-056-Q1-K1-H9.pep
LEDAYGGSVEISNLETWGGLMEPGHDYFERGNLDIXSGRGRCLDAPVCSMNXTSMGGSAMED

SEQ ID NO: 99528 - protein, 32 aa, Gossypium hirsutum
  Clone ID: LIB3149-057-Q1-K1-A12.pep
IHLLFKKPLDTVALEVAQDQKKEAQVNGYSEG

SEQ ID NO: 99529 - protein, 56 aa, Gossypium hirsutum
  Clone ID: LIB3149-057-Q1-K1-A4.pep
KSVPTFTLYAKHKNYKSTQLTEKYIIVFHELIQTYTWKFLVLFIFNIYQIIFVLTF

SEQ ID NO: 99530 - protein, 41 aa, Gossypium hirsutum
  Clone ID: LIB3149-057-Q1-K1-B2.pep
RVTLQNGKSSYGRILLRLGGERGISDIFVKLQCGYLLLKLH

SEQ ID NO: 99531 - protein, 85 aa, Gossypium hirsutum
  unsure (1)..(85): unsure at all Xaa locations
  Clone ID: LIB3149-057-Q1-K1-C1.pep
RYRVCEARDELYKMLNEDELRGADLLVFVDNQDRRTAVNAGVITDMLEHHSIRXRHVDIQSTCATCGEGLYXGTDWISNNIVRDA

SEQ ID NO: 99532 - protein, 56 aa, Gossypium hirsutum
  Clone ID: LIB3149-057-Q1-K1-C11.pep
VLIRIWFTLASEYKNLWGGGIGGLVDGISSMTMANDYIYIYENNNGEIKYNNYISH

SEQ ID NO: 99533 - protein, 90 aa, Gossypium hirsutum
  unsure (1)..(90): unsure at all Xaa locations
  Clone ID: LIB3149-057-Q1-K1-C12.pep
KKHILLISVYIFLXSIDHDTWNFYLLFQYIFAIIDLTISKDHNKVRLYTRLHIWICIIRKEISSMWRVRILPGVRVISGFEAKKPFCRCS

SEQ ID NO: 99534 - protein, 48 aa, Gossypium hirsutum
  Clone ID: LIB3149-057-Q1-K1-C4.pep
IKQLKLTGSMPYFKFPTIKNIADILNNFYKYSDCYTIFFKKKKKVRSL

SEQ ID NO: 99535 - protein, 76 aa, Gossypium hirsutum
  Clone ID: LIB3149-057-Q1-K1-C6.pep
KKKIKNLIFLSFNQKQKKRRPRHLKKPILQTRAGKEKPTLFSSPTPNTLTSLLKPHHYKNQALSKPNPFAQHPQYP

SEQ ID NO: 99536 - protein, 66 aa, Gossypium hirsutum
  unsure (1)..(66): unsure at all Xaa locations
  Clone ID: LIB3149-057-Q1-K1-C8.pep
CSLYQLSWVKIWFFQLRCCMYKGREWHLFFIVIEXGILDGRVFMFGSLVLVGPFFFILNFYFFFFF

SEQ ID NO: 99537 - protein, 67 aa, Gossypium hirsutum
  Clone ID: LIB3149-057-Q1-K1-D11.pep
IFQRPMLIFLYMINGLEGKDCTGNFTFFLKMNTIAKIKCFIGEYWFPLLNYLNSLANARVTDKLHNH

SEQ ID NO: 99538 - protein, 82 aa, Gossypium hirsutum
  Clone ID: LIB3149-057-Q1-K1-D4.pep
TSHLNSRGGWLLKAIPPPFQTNLFTAKTLFTPNLIASQITIHSIDRKLTNMQIPISLINTSIILMPKEPPIEEFHNAHQIIY

SEQ ID NO: 99539 - protein, 40 aa, Gossypium hirsutum
  Clone ID: LIB3149-057-Q1-K1-E10.pep
CQSLRVLYKGRHPLHSPPEQGPLTALTACGYPLPSLPALR

SEQ ID NO: 99540 - protein, 63 aa, Gossypium hirsutum
  Clone ID: LIB3149-057-Q1-K1-E5.pep
NLRVNNNFRSHLFVRGFVPHFFTRRLLRWPCLVLVQMVCVFLMPVYIPFHFDFYIQCFPDTIT

SEQ ID NO: 99541 - protein, 78 aa, Gossypium hirsutum
  unsure (1)..(78): unsure at all Xaa locations
  Clone ID: LIB3149-057-Q1-K1-E7.pep
SKISLDSVVSLCLSFHLRLCFGLKKLEFNVTINESKRESRCSCDESESDNSAARFXSRRGYYNKFEELVEISPAWVGP

SEQ ID NO: 99542 - protein, 125 aa, Gossypium hirsutum
  Clone ID: LIB3149-057-Q1-K1-F7.pep
KEARIIIVQIFQGLVYLNKRAQKIIHYDLKPGNVLFDELGVAKVTDFGLSKIVEDDVGSQGMELTSQGAGTYWYLPPECFELSRTPLISSKVDVWSAGVLLYQMLFGKRPFGHDQTQERILREDT

SEQ ID NO: 99543 - protein, 51 aa, Gossypium hirsutum
  Clone ID: LIB3149-057-Q1-K1-G1.pep
NFDVIASWSNVIVILGDSVKERTGFHSHVVVILRAVKGMDVEQYTPSGVAG

SEQ ID NO: 99544 - protein, 91 aa, Gossypium hirsutum
  Clone ID: LIB3149-057-Q1-K1-G5.pep
FLILPMTSTGCSPGGFSLAAMEFGLGDGCWGLFRVDEKFKRCFDWGVLIWVWLNFEEKDGVGALSFFVFLAEEEGGGRKEGGLNRRLGRPR

SEQ ID NO: 99545 - protein, 56 aa, Gossypium hirsutum
  Clone ID: LIB3149-057-Q1-K1-G6.pep
FVVIDASIVDFKITPNFYHRSELMDSITGTNIWSTALFHRSANSERDFFPNIGSFI

SEQ ID NO: 99546 - protein, 45 aa, Gossypium hirsutum
  unsure (1)..(45): unsure at all Xaa locations
  Clone ID: LIB3149-057-Q1-K1-G7.pep
RPTRTXQTYKKKPLCGKKXSTXARPRSYKPAHHITVPTNDSMMSA

SEQ ID NO: 99547 - protein, 55 aa, Gossypium hirsutum
  Clone ID: LIB3149-057-Q1-K1-G8.pep
LHYFTLMVQISNYFNVNYLCNYYYTSYRSLASSQLYLFNIFQLIKEKSIHRLYYY

SEQ ID NO: 99548 - protein, 43 aa, Gossypium hirsutum
  Clone ID: LIB3149-059-Q1-K1-B10.pep
KFHTIYAIKDKQNIKTINMKTIITNDLNAYTFIVDSTYLSSIA

SEQ ID NO: 99549 - protein, 70 aa, Gossypium hirsutum
  unsure (1)..(70): unsure at all Xaa locations
  Clone ID: LIB3149-059-Q1-K1-B8.pep
QRSGTIXPLYDSPXXNLHPPASLSLHTHPYTXNKLPSSIKVKLYHYLSKNLLLKTSPIHSSTLHITQMNI

SEQ ID NO: 99550 - protein, 70 aa, Gossypium hirsutum
  unsure (1)..(70): unsure at all Xaa locations
  Clone ID: LIB3149-059-Q1-K1-C12.pep
KPXXXNRATVLLKLPTHFIHXLKPSXKXILLXXSIFNXNFITIXFTNKTISSXSSXSSXTFYLIILNITP

SEQ ID NO: 99551 - protein, 131 aa, Gossypium hirsutum
  unsure (1)..(131): unsure at all Xaa locations
  Clone ID: LIB3149-059-Q1-K1-D12.pep
SVSTSGSVGSPSSRSELAVATPASENTFLRLNHLDIHGDDAGSQGAVGSKKKKRGQRAVGGDKSGRGLRQFSMKVCEKVESKGRTTYNEVADELVAEFTDPGNNIASPDQRQYDEKNXSRRXYDAPDVLMA

SEQ ID NO: 99552 - protein, 53 aa, Gossypium hirsutum
  Clone ID: LIB3149-059-Q1-K1-D3.pep
AFGGKEWEGLISFVVVAPRWRSCWKRLKPKIRNTNHRLYGGCSKHFQIFIIFQ

SEQ ID NO: 99553 - protein, 123 aa, Gossypium hirsutum
  Clone ID: LIB3149-059-Q1-K1-E11.pep
RAVEEEWASMQRELKIQAERAQRLRKRKKAESMRVLDMERRQKQRLDEMRETQKKDEENMNLKEQLRMEVRKELSKLEISCIDMASLLRSLGIPVDGGSYPLSNEIHAAYKRALLRFHPDRAS

SEQ ID NO: 99554 - protein, 76 aa, Gossypium hirsutum
  Clone ID: LIB3149-059-Q1-K1-E8.pep
NENPLNYHSEKLAIAFGLLKTKAGDTFRITKNLRVCRDCHHASKLISKVFDREIVVRDRNRFHHFKDGECSCKDYW

SEQ ID NO: 99555 - protein, 40 aa, Gossypium hirsutum
  unsure (1)..(40): unsure at all Xaa locations
  Clone ID: LIB3149-059-Q1-K1-F8.pep
KQQHTTQTHTHXYYSNFNYIIHSIINIHTTLITIHNSPSY

SEQ ID NO: 99556 - protein, 119 aa, Gossypium hirsutum
  unsure (1)..(119): unsure at all Xaa locations
  Clone ID: LIB3149-059-Q1-K1-G1.pep
KKVFSEMGSSLIYKVGTMIEXRRAALVADEIAKEAEFFSFGTNDLTQMTFGYSRDDVGKFLPIYLSKGIIQNDPFEVLDQKGVGQLIKMATEKGRQARPSLKVGICGEHGGEPSSVAFF

SEQ ID NO: 99557 - protein, 50 aa, Gossypium hirsutum
  Clone ID: LIB3149-059-Q1-K1-G5.pep
TFFLIRVLSTVKKALTSLSSPSPSLKRNILCPHFSKLHKVKGESIMITKH

SEQ ID NO: 99558 - protein, 64 aa, Gossypium hirsutum
  Clone ID: LIB3149-060-Q1-K1-A3.pep
NELCTVLIDLMFSNINKNTVRESFMCYIHLSTNSAKRYVIHNITFIVLILSPLSTIETFYCCMT

SEQ ID NO: 99559 - protein, 137 aa, Gossypium hirsutum
  Clone ID: LIB3149-060-Q1-K1-A4.pep
REYKVDATVGKPRVNFRETMTQRAEFDYLHKKQSGGQGQYGRVCGYVEPLPPGSPIKFEFENMIVGQAIPSNFIPAIEKGFKEAANSGSLIGHPVENIRVVITDGASHAVDSSELAFKLASIYAFRQCYSAARPVIL

SEQ ID NO: 99560 - protein, 54 aa, Gossypium hirsutum
  Clone ID: LIB3149-060-Q1-K1-B10.pep
TLNISNVGVTKTRDSLKFSTSNNKLNIITLSFKAKYSLYIRRYPIHPSYQLGLG

SEQ ID NO: 99561 - protein, 93 aa, Gossypium hirsutum
  Clone ID: LIB3149-060-Q1-K1-D8.pep
DLQDVLIAVGVTILHRKPMSGDPGAPLLGSSAFPIFIIYSVELPVKCDPSKKHMILSRRQLNAEALASSTGAKAVSNSWVLSSISACKLSLGE

SEQ ID NO: 99562 - protein, 111 aa, Gossypium hirsutum
  unsure (1)..(111): unsure at all Xaa locations
  Clone ID: LIB3149-060-Q1-K1-D9.pep
SVRLDQKSFSSFFFFLPKIHFPKIVFIKFNPPSHXPPMISFRSKKKNPPKNDYQSKSNNQSFQLLLFHTIFNNNTTLFSNTYMFKPSFLLNTKHTFHPIQHIRTPFKIHFF

SEQ ID NO: 99563 - protein, 51 aa, Gossypium hirsutum
  Clone ID: LIB3149-060-Q1-K1-E1.pep
LLYAIPSRIQITFQHVQFHFTAPPLTDPVTSTEIANFDSHTVNRSLQLERQ

SEQ ID NO: 99564 - protein, 47 aa, Gossypium hirsutum
  Clone ID: LIB3149-060-Q1-K1-E10.pep
PTAAKSHHNPIDFVSTITSSKKVFFFLLKHPHFHSLHHISVPYLSYI

SEQ ID NO: 99565 - protein, 50 aa, Gossypium hirsutum
  Clone ID: LIB3149-060-Q1-K1-E4.pep
KYYHLLSTLFIIPHPKLYTQMCTFKPFYPNLLNPYKTTTFTQNPLTKQST

SEQ ID NO: 99566 - protein, 121 aa, Gossypium hirsutum
  Clone ID: LIB3149-060-Q1-K1-E5.pep
LNGGDFPYVSCDGGRLFEAKDVVFECGPNCGCRPECVNRSSQQGLKYQLEVYRTKEKGWAVRSLDFISSGAPVCEYVGILRKNDELEDISENDYIFEIDCWHTMKGIGGRERRLCDVSLSM

SEQ ID NO: 99567 - protein, 84 aa, Gossypium hirsutum
  Clone ID: LIB3149-060-Q1-K1-F1.pep
NESPMKQRISKITKTRNARENLGFLSHENSLPPVACVCLACGYPKLKKNDRKRLMGRKLTFNRRQDAGRCGGRGRGSGSGSGLL

SEQ ID NO: 99568 - protein, 133 aa, Gossypium hirsutum
  Clone ID: LIB3149-060-Q1-K1-F12.pep
PRVRADRVVTVSHGYSWELKTAEGGWGLHRIINENDWKLRGIVNGIDTKEWNPQYDIHLKSDGYTNYSLETLQTGKPKCKAALQKELGLPVREDVPLLGFIGRLDQQKGVDLIAEAIPWMIGQDVQLVMLGTG

SEQ ID NO: 99569 - protein, 55 aa, Gossypium hirsutum
  Clone ID: LIB3149-060-Q1-K1-F3.pep
SVRIAATWAFRCPRRREKSGEAYHLEGERAREREGESLTRKRNHTTGWLVFTKIY

SEQ ID NO: 99570 - protein, 37 aa, Gossypium hirsutum
  unsure (1)..(37): unsure at all Xaa locations
  Clone ID: LIB3149-060-Q1-K1-F4.pep
FYLFFFFFFFFFFFFFIFFFFFFFXXFDSLYFFFYYY

SEQ ID NO: 99571 - protein, 65 aa, Gossypium hirsutum
  Clone ID: LIB3149-060-Q1-K1-F6.pep
TFNGYDVCQSVCYLMDMLKFYVFITCACASTAKVKLTFSCMIALKAITLPFLFLATIPELDLKRS

SEQ ID NO: 99572 - protein, 57 aa, Gossypium hirsutum
  Clone ID: LIB3149-060-Q1-K1-G10.pep
RNASNRISCFLTRATLPLLIVHNTGRLPPPIILISYLLTLLKIQLLVTSSTQNILFD

SEQ ID NO: 99573 - protein, 65 aa, Gossypium hirsutum
  Clone ID: LIB3149-060-Q1-K1-G12.pep
RSKDLVAVSEFRISYMHLLIMSHSISIGNGLVYQCRQSGWFLICTPQHHIQLLCALQVGSTVSFL

SEQ ID NO: 99574 - protein, 52 aa, Gossypium hirsutum
  Clone ID: LIB3149-060-Q1-K1-G4.pep
FVKEYMEYYAYPEIIFIICLKNLIGIFIIQNTFFFFFWNFKPKNLLNQFFYF

SEQ ID NO: 99575 - protein, 65 aa, Gossypium hirsutum
  Clone ID: LIB3149-060-Q1-K1-H1.pep
SRARMGTSIKHGEQQTIAALDAGLSIDDQAHSSVIMGIIDVCVLCSSIVYFTCDTVFWNGGCSFE

SEQ ID NO: 99576 - protein, 64 aa, Gossypium hirsutum
  Clone ID: LIB3149-060-Q1-K1-H3.pep
TNLAQVHAAENAKSFDEIELETMLRKKFARRDEEYDSMLGVVRETPPELILPDNIIPDKAPKAA

SEQ ID NO: 99577 - protein, 40 aa, Gossypium hirsutum
  Clone ID: LIB3149-061-Q1-K1-A7.pep
NGPPLVFFFIFIIFYFFFYFFIFIYFFFFSIFVFFFFFFF

SEQ ID NO: 99578 - protein, 134 aa, Gossypium hirsutum
  unsure (1)..(134): unsure at all Xaa locations
  Clone ID: LIB3149-061-Q1-K1-B5.pep
PTNFYFNFTFLTQSQNLRNLVTGLTALLLSSPESLAVSRTTPSRKKKRRQNAARSFHMVENTAIEYEADETFHQYLITVKPSQNNAKKYVILLXYPMNFTLAGPTHTTDFSDQYEEFTNLNTKTIGVYKDRGTC

SEQ ID NO: 99579 - protein, 52 aa, Gossypium hirsutum
  Clone ID: LIB3149-061-Q1-K1-C1.pep
KSHMSKRGNDVRPLILETPAVFTVFHVEKRHDISLKLIGFYETVYYFACMRY

SEQ ID NO: 99580 - protein, 51 aa, Gossypium hirsutum
  Clone ID: LIB3149-061-Q1-K1-C12.pep
HRRIIFCQVGTISSPLKGCVPMQDSYSQVTLCRKIQNPMLNFKGKTLKLCP

SEQ ID NO: 99581 - protein, 101 aa, Gossypium hirsutum
  Clone ID: LIB3149-061-Q1-K1-E9.pep
LYPTTKEVWRHLNFSWVLNNSNPDFWTWLTLVFNQGTNEQCRIFCCGLWLIWTNRNKLIYEGKSSTSQDISKQVTSYISELDGIEDKVLILEAKTRPIQNM

SEQ ID NO: 99582 - protein, 53 aa, Gossypium hirsutum
  Clone ID: LIB3149-061-Q1-K1-F9.pep
MMNTNMHYHLISCMFLLKNCGQFSVIITDSSVLFGREFSAIYDGNESSDLIYL

SEQ ID NO: 99583 - protein, 103 aa, Gossypium hirsutum
  Clone ID: LIB3149-061-Q1-K1-H12.pep
SVKTNIMREVPSCLSSLAFQVLKSSGLLQSPKNGVSSLIDAALAPPEASGVYFFGGKGRTVDSSVLSHNTKLAKELWDISDNLFMEASLAFKETASSESDNWL

SEQ ID NO: 99584 - protein, 34 aa, Gossypium hirsutum
  Clone ID: LIB3149-062-Q1-K1-A1.pep
CFMNHNKVSQINIIYITQQFHVTKHYTYSPTLQQ

SEQ ID NO: 99585 - protein, 62 aa, Gossypium hirsutum
  unsure (1)..(62): unsure at all Xaa locations
  Clone ID: LIB3149-062-Q1-K1-A10.pep
EKTHINRWFLYHVYSHKTTTTVHQIYXTPDIDNRKIKRFVKETDDINMKSYKYALILNKLNA

SEQ ID NO: 99586 - protein, 59 aa, Gossypium hirsutum
  unsure (1)..(59): unsure at all Xaa locations
  Clone ID: LIB3149-062-Q1-K1-A2.pep
HSKPLVQEWRQISSRRRLDANPXLLQSLSLISEVINYMPTSYYYYYKFDSPKFSIQCLR

SEQ ID NO: 99587 - protein, 91 aa, Gossypium hirsutum
  Clone ID: LIB3149-062-Q1-K1-B10.pep
ALSASINSDEQIRASRDNKLDHEIPSTLRFQRRIRNLLAHCKVQTEPTRGGDTHGMRREDACGADPETTVVLEATGSCCSAGDLGLPPKIP

SEQ ID NO: 99588 - protein, 82 aa, Gossypium hirsutum
  unsure (1)..(82): unsure at all Xaa locations
  Clone ID: LIB3149-062-Q1-K1-B2.pep
LETSLEQRSTKTIKDSGVRTDSLSCISYSVFAVMHLVLLCHLHHPLYLHFHXXTIIFIITVVINVIIPRVIWITMISSIFST

SEQ ID NO: 99589 - protein, 66 aa, Gossypium hirsutum
  Clone ID: LIB3149-062-Q1-K1-C12.pep
IHIYMPNMLCALFKSLQNNLKVQTKYSLQYHNFLYMVFFNMKPEFIPNLTQQKQNKKQSKRPHIRI

SEQ ID NO: 99590 - protein, 78 aa, Gossypium hirsutum
  Clone ID: LIB3149-062-Q1-K1-C6.pep
ALQPLELRSKFTLPSDLTTVKLACFRTEKDLEGEERVSWNRKNLMVIMMIIKVQQELPLHGRELRTKTKVVKKPLVIR

SEQ ID NO: 99591 - protein, 58 aa, Gossypium hirsutum
  Clone ID: LIB3149-062-Q1-K1-C8.pep
ALLHHSFFISFFIVAIKGGQVESDPVHGPFRCRVLDSLCIIVYIGFLNFHNLFSFSFC

SEQ ID NO: 99592 - protein, 52 aa, Gossypium hirsutum
  Clone ID: LIB3149-062-Q1-K1-D11.pep
VHVRAPTITLLFFYRKPNSIHVRFTTTTIGKTITLPILILIGVHPLFAFCRY

SEQ ID NO: 99593 - protein, 66 aa, Gossypium hirsutum
  Clone ID: LIB3149-062-Q1-K1-D5.pep
LNHTIRNVQRDNHVSPIDSTELVHTVHQVFPNLRRHAFDLLSAATCKIDNATRSTSDTPIFTEGSA

SEQ ID NO: 99594 - protein, 53 aa, Gossypium hirsutum
  unsure (1)..(53): unsure at all Xaa locations
  Clone ID: LIB3149-062-Q1-K1-E1.pep
DGTSMMNDHEDRPLGPEKILGADKQHWGGRLKGNXXXRLNKPPSTGRGDQGKT

SEQ ID NO: 99595 - protein, 82 aa, Gossypium hirsutum
  unsure (1)..(82): unsure at all Xaa locations
  Clone ID: LIB3149-062-Q1-K1-E5.pep
TAYLALLFALNILLSSXLSAGGSCPYPNPKPKPKPQPKPNPTPCPSTSGKCPRDALKLRXCADLLRGSLNDTIGTRTDQPCC

SEQ ID NO: 99596 - protein, 47 aa, Gossypium hirsutum
  Clone ID: LIB3149-062-Q1-K1-E9.pep
VSIITTKKKKKKKKKKKDKQLKKKKNNINVLCNYNIFINKKMGVLFK

SEQ ID NO: 99597 - protein, 86 aa, Gossypium hirsutum
  unsure (1)..(86): unsure at all Xaa locations
  Clone ID: LIB3149-062-Q1-K1-F6.pep
RKKNMIPNIDQEIIWQFKYQTSSPLFHIHSLLLANHLIVSLTERSSFSVSAIPQVGSQYSVAVEAPKNAVLSPSKKNSGRLGPPRX

SEQ ID NO: 99598 - protein, 91 aa, Gossypium hirsutum
  Clone ID: LIB3149-062-Q1-K1-G11.pep
MTVDASGDHHLQHPILGRIPTRSPCKGSIAECLAGEEFELDSESIRRILATTRYISYGALQRNTVPCSRRGASYYNCKPGAQANSYNRGCS

SEQ ID NO: 99599 - protein, 58 aa, Gossypium hirsutum
  Clone ID: LIB3149-062-Q1-K1-G12.pep
SYPFDLKKKKKKKKTKKPKPKKKTKKKNKTKKKIKKTIKKKNKKPKIKKETNKRGGPF

SEQ ID NO: 99600 - protein, 138 aa, Gossypium hirsutum
  unsure (1)..(138): unsure at all Xaa locations
  Clone ID: LIB3149-062-Q1-K1-G5.pep
DLVRGDSAILPPEFIEETKDRCFMASWCPQEEVLNHSAVAGFXTHSGWNSTVESISSGVAMVSWPFFAEQQTNCWFACNEWGIGMEIDNDVKREKVEKLVRELMEGRKGEEMRENVMEWKRKAERAACLDGPSLLNLD

SEQ ID NO: 99601 - protein, 141 aa, Gossypium hirsutum
  unsure (1)..(141): unsure at all Xaa locations
  Clone ID: LIB3149-062-Q1-K1-G7.pep
QDRGDSGRGMKGKLNNLMIQLRKNCNHPDLLEAAFDGSYFYPXVEQIVEQCGKFQLLERLLTRLFERKHKVLIFSQWTKVLDIMDYYFSEKGFNVCRIDGSVKLEERRRQIQEFNDVNSDYRIFILSTRAGGLGINLTAAD

SEQ ID NO: 99602 - protein, 52 aa, Gossypium hirsutum
  Clone ID: LIB3149-062-Q1-K1-H4.pep
MPIQREKSVQFRFRGTPSFFVSRLHHPYTNSSSSYCGFYSLTKPALWTSLVR

SEQ ID NO: 99603 - protein, 102 aa, Gossypium hirsutum
  Clone ID: LIB3149-062-Q1-K1-H5.pep
ADGYNGFLEQRAGNNVGQNWFRGGQTNCVSGQNVCAHGYNCAGRMLGYMDGSGQVVLSLDHLLMGRMMLGHLMELMAVLVPLILGQMLPLDRMLLLGPLILC

SEQ ID NO: 99604 - protein, 45 aa, Gossypium hirsutum
  Clone ID: LIB3149-063-Q1-K1-A6.pep
KCNPKIMNDTRHAIGIPRAELAQVEPQVLLLQKPSVVIKIKKKPP

SEQ ID NO: 99605 - protein, 41 aa, Gossypium hirsutum
  Clone ID: LIB3149-063-Q1-K1-A8.pep
TTGGRDVKIKLCYNYGTLILFYNNLKPTTKIKNPILYIFFA

SEQ ID NO: 99606 - protein, 96 aa, Gossypium hirsutum
  Clone ID: LIB3149-063-Q1-K1-B12.pep
ATEQLDAAQEANTEMEAELRRLKVQLDQWRKAAEAATAMLSSGNKGKHSDKTKSVDNNYNPGNGSPNSEDMDDDSPKKKNGNMLKKIGVLWKKGQK

SEQ ID NO: 99607 - protein, 128 aa, Gossypium hirsutum
  Clone ID: LIB3149-063-Q1-K1-B6.pep
NEIDQVAEISPAEVDLLEEALNHFYDPMMEPLFSPLHNQIEAEQAPWMFDHVGNCYNVEFGHGTNENDPYISNFLESILKNSDDYHGDDTGSQKNSESETHTTLTIGKDGGFCSKPDSEVAQVLLGTD

SEQ ID NO: 99608 - protein, 72 aa, Gossypium hirsutum
  Clone ID: LIB3149-063-Q1-K1-B9.pep
FLFLSLWIFCLFYLLPSFLCAFLFFYLHLKTKKGRGVLTFANRPLESSSPLSKSKVKMRFQGLRLVIFEPRF

SEQ ID NO: 99609 - protein, 79 aa, Gossypium hirsutum
  Clone ID: LIB3149-063-Q1-K1-C4.pep
INLYHIMFVSRLFYLDNKFQTLQVKKHTRKSQSKQKSEKPRINKTIQAKTKGSYQSYDLKESYKKPNSNALLRCDRLKY

SEQ ID NO: 99610 - protein, 43 aa, Gossypium hirsutum
  Clone ID: LIB3149-063-Q1-K1-C6.pep
RSSIWVHCLLCQAMYRFIIVWGHRLLMNAPRYLGWLWLKKTWV

SEQ ID NO: 99611 - protein, 84 aa, Gossypium hirsutum
  Clone ID: LIB3149-063-Q1-K1-D10.pep
FISGVLLLFFLFLISSSHLGARSLANKQGKEEVELTQTADMEDNELMNQLLGVEACDAGDDECLKRRIISEAHLDYIYTQHHKP

SEQ ID NO: 99612 - protein, 60 aa, Gossypium hirsutum
  Clone ID: LIB3149-063-Q1-K1-D4.pep
KRPIFFNQSQPYNNHNHNTITSPHLIHLLHSPLYLLLKTSNTPLFLHLTNKHPPSIYNPI

SEQ ID NO: 99613 - protein, 77 aa, Gossypium hirsutum
  unsure (1)..(77): unsure at all Xaa locations
  Clone ID: LIB3149-063-Q1-K1-D9.pep
MTSKFVYTPLSPGRRTGHFITKKELFPHSSNINGKTTTRVHFVTNLIRXEVAHFAPYEKRITELFKVGNDNQNSQRI

SEQ ID NO: 99614 - protein, 46 aa, Gossypium hirsutum
  unsure (1)..(46): unsure at all Xaa locations
  Clone ID: LIB3149-063-Q1-K1-E10.pep
ACMRXRCFFIVSPKYKSLAVAXQRRDWXNPAVTQLNRLTAHPPLTS

SEQ ID NO: 99615 - protein, 56 aa, Gossypium hirsutum
  Clone ID: LIB3149-063-Q1-K1-E12.pep
IWTTSKFAPSLKRAFKIKVKLGILVLLISYSIREAIKASSAHSQNYRVIPLDSASR

SEQ ID NO: 99616 - protein, 115 aa, Gossypium hirsutum
  Clone ID: LIB3149-063-Q1-K1-E2.pep
IVILKSENILFVLDGKRVDGSPVVKLCDFDRAVPLRSSLHTCCIAHLGIPPPDVCVGTPRWMAPEVLGAMHKRSPYGLEVDIWSFGCLLYELLTLEVPYSGLSELHIHELIQMGE

SEQ ID NO: 99617 - protein, 103 aa, Gossypium hirsutum
  unsure (1)..(103): unsure at all Xaa locations
  Clone ID: LIB3149-063-Q1-K1-F12.pep
ADRRVRYTHIEIKNYDLSTSFYDLGWGESYHLAPIWKRQTLKQSITQPEHLLALQLGLKPVHNVLDLKYRICRPLKKISLFNNTIVNGINNHEFXIPLGKELN

SEQ ID NO: 99618 - protein, 62 aa, Gossypium hirsutum
  Clone ID: LIB3149-063-Q1-K1-F4.pep
ELHYSGSHSLLLFHTTTHSTGRMLQTAAHPSSPRMLLIKLFPSLSNETPYRNLSFLLYYQKQ

SEQ ID NO: 99619 - protein, 72 aa, Gossypium hirsutum
  Clone ID: LIB3149-063-Q1-K1-F7.pep
PYSPSINIFFVAPGKSKKTPRTFIKSQPIYLKLLVKLYRLLQIRTGSKFNTLIFKFLLIIKTNTTIFNSYLS

SEQ ID NO: 99620 - protein, 37 aa, Gossypium hirsutum
  Clone ID: LIB3149-063-Q1-K1-F9.pep
GFRQFIRRVLSGRFVCLRKKILIKMEMYSTRAVGPFF

SEQ ID NO: 99621 - protein, 37 aa, Gossypium hirsutum
  Clone ID: LIB3149-063-Q1-K1-H6.pep
SANKLIWVNIWMILGCPLLGQFDLLGSAQLDHFFIIN

SEQ ID NO: 99622 - protein, 36 aa, Gossypium hirsutum
  Clone ID: LIB3149-064-Q1-K1-A4.pep
NLGEHNNPIYPLLNLPGPFLLLNDPIPTDWHYNYTH

SEQ ID NO: 99623 - protein, 36 aa, Gossypium hirsutum
  Clone ID: LIB3149-064-Q1-K1-A9.pep
MTARMQIFFFYLAANTITVEVHSITSNLQFLTLDTL

SEQ ID NO: 99624 - protein, 60 aa, Gossypium hirsutum
  Clone ID: LIB3149-064-Q1-K1-B1.pep
RFWRRSDEATMSGTTSVAGSDTYEVDRKAGEFIAKFREQIRLQRTTSIDTLKGFNVNFLE

SEQ ID NO: 99625 - protein, 47 aa, Gossypium hirsutum
  Clone ID: LIB3149-064-Q1-K1-B11.pep
SHPSIYPHTFYFASQFRSIHNQIGFVFYLMQKKFSCYNDMTNISYLD

SEQ ID NO: 99626 - protein, 96 aa, Gossypium hirsutum
  unsure (1)..(96): unsure at all Xaa locations
  Clone ID: LIB3149-064-Q1-K1-D8.pep
EXPGRPKHPENGSARGCENCASQGVAYELMCSVGWHSKGSLNTDPPDDTQIGKNSKSAPEGPPSTQDYIHLSYNACAKEEAVYCYKPKDKCFTTYK

SEQ ID NO: 99627 - protein, 61 aa, Gossypium hirsutum
  Clone ID: LIB3149-064-Q1-K1-E2.pep
LISILISLCQHCRNASDDQLSAQRVEQYLSPVPVGAPADKIKGTGNLLKTAESRGKQTGIS

SEQ ID NO: 99628 - protein, 88 aa, Gossypium hirsutum
  unsure (1)..(88): unsure at all Xaa locations
  Clone ID: LIB3149-064-Q1-K1-E4.pep
PSERFPFHMFPGLLGARGRNXSNEFFNKKLGRPRTIWFKDGLRLTYFWITGTLGQXMAQGIDLSDDGSSKVAGTQAPSQXGSLCAADS

SEQ ID NO: 99629 - protein, 55 aa, Gossypium hirsutum
  Clone ID: LIB3149-064-Q1-K1-E9.pep
FPSSCSNLYFNFKFTPVLLKPQIHIPTHIASLFLFAQNGNKNDLTKHPNKMPHGE

SEQ ID NO: 99630 - protein, 75 aa, Gossypium hirsutum
  Clone ID: LIB3149-064-Q1-K1-F3.pep
GFFEHSPPVEVSGLGQCEVGIWGPHCAKMLESDHGLRMTLIFILVTRGPMCLTQTVPIYVPHAMAKTNPRVRGRV

SEQ ID NO: 99631 - protein, 70 aa, Gossypium hirsutum
  Clone ID: LIB3149-064-Q1-K1-F8.pep
ILRQMEKGECVASKLKLGYALVFTVMVFLIMASYILIMTQFIVDDPSEKSPRKLERPGPQKKNEKEMYFF

SEQ ID NO: 99632 - protein, 141 aa, Gossypium hirsutum
  Clone ID: LIB3149-064-Q1-K1-G10.pep
CWAFSTIAFVEGINKIATGELISLSEQELVDCDRSYDAGCDGGLMDYAFQFIIDNGGIDSEQDYPYLGADNNQCDPTRKNAKVVSIDGYEDVVQYDEKALKKAVSHQPVSVAIEASGRAFQLYESGVFSGECGSALDHGVI

SEQ ID NO: 99633 - protein, 91 aa, Gossypium hirsutum
  unsure (1)..(91): unsure at all Xaa locations
  Clone ID: LIB3149-064-Q1-K1-G6.pep
RXGXAGPSLPNDLTIPYYGQSFYLNHLTFQPWPIFRKNWDFSRPKSFLKKNQNPFLHYWEVKTLKFYLRNLKGFLISPGWGFSSNTSSRII

SEQ ID NO: 99634 - protein, 69 aa, Gossypium hirsutum
  Clone ID: LIB3149-064-Q1-K1-H11.pep
IFFFTYFLFAFFYKTDTKYIGLFIFFIMLGTYTSFITVSLTYFQLSSDNHDWIVMSFLCLFSTRLFIFT

SEQ ID NO: 99635 - protein, 115 aa, Gossypium hirsutum
  Clone ID: LIB3149-064-Q1-K1-H12.pep
RPRVALGDMGSLNGTLLNSCPIHHPDPGSRLWGDPVELASGDTITVGTTSNIYVHISSHNERLVPFGVGMTSDPMSLRRGGKKLPMEDVCYYHWPLPGINQFGVFGICDGQPPQW

SEQ ID NO: 99636 - protein, 78 aa, Gossypium hirsutum
  unsure (1)..(78): unsure at all Xaa locations
  Clone ID: LIB3149-064-Q1-K1-H6.pep
KSTLGRRSREGTLGGCGARERARVSTLAESGLCFWAFWASKFGLSFFLXWVSIFFLRPGQIWACTFTSSPFVHFKFLF

SEQ ID NO: 99637 - protein, 99 aa, Gossypium hirsutum
  Clone ID: LIB3196-001-P1-M1-A1.pep
KLYLQPGALLEQPVSIPDDDLVQATLQQLQKPPSTARPRLLQDTVQQLMLHHGRLSLVTGQSGQGKTAFLASLVSALQAPDGAKVAPLVFFHFSGARPD

SEQ ID NO: 99638 - protein, 52 aa, Gossypium hirsutum
  Clone ID: LIB3196-001-P1-M1-A10.pep
LQLLKFIENISAYYQSDQAIKLATMIILAGLIRNLIYEQGINLDASLAGRLT

SEQ ID NO: 99639 - protein, 65 aa, Gossypium hirsutum
  Clone ID: LIB3196-001-P1-M1-A11.pep
KEKQCRSGVSKLWPVSQCSLPPVFENTCDRDQCPTKPKILTTWLFMGSLPTQMYISYLSKSVTDF

SEQ ID NO: 99640 - protein, 43 aa, Gossypium hirsutum
  Clone ID: LIB3196-001-P1-M1-A12.pep
IIESRFLFTNHFYTFYSIKSIELIFNHFFFLLYIFYSQIRSNL

SEQ ID NO: 99641 - protein, 47 aa, Gossypium hirsutum
  Clone ID: LIB3196-001-P1-M1-A2.pep
SNGFGFASLTPLLKKQHSLVSISLELVHASLQVYNINTISNTDYIYS

SEQ ID NO: 99642 - protein, 34 aa, Gossypium hirsutum
  Clone ID: LIB3196-001-P1-M1-A3.pep
SHAFAKSSVAAQSHLSHAKIGPKRKNGCETANPR

SEQ ID NO: 99643 - protein, 56 aa, Gossypium hirsutum
  Clone ID: LIB3196-001-P1-M1-A5.pep
ETGFGFFRNYRRIHFSLTRCARTATTNLYNDESVLIFCFAINLLTGLGICRGWGVG

SEQ ID NO: 99644 - protein, 63 aa, Gossypium hirsutum
  Clone ID: LIB3196-001-P1-M1-A6.pep
TISPLQFGSRHTMLLLLPQSNHVLFFFFWPLGLGACSLCQIHSHSSWLLFVLGLRITTSWKPF

SEQ ID NO: 99645 - protein, 102 aa, Gossypium hirsutum
  unsure (1)..(102): unsure at all Xaa locations
  Clone ID: LIB3196-001-P1-M1-A9.pep
MRHSKRTYCPDWDDKDWDYGKWRSSSXHQRRESSHNIAWENKRFKYTHSKMCDSHYLESRCINEKDYHSRRYIDEYRNDYNQXCEPGHRHRDHEXSRIQNHS

SEQ ID NO: 99646 - protein, 48 aa, Gossypium hirsutum
  Clone ID: LIB3196-001-P1-M1-B1.pep
ESGCACLYRSSIPDSTHSFTLFHNRLRSGHTFLDGARMYYYQSMWVQF

SEQ ID NO: 99647 - protein, 130 aa, Gossypium hirsutum
  unsure (1)..(130): unsure at all Xaa locations
  Clone ID: LIB3196-001-P1-M1-B10.pep
MAPWAEARXSALNPLRAVWLTLTAAFLLTLLLQLLPPGLLPGCAIFQDLIRYGKTKCGEPPRPAACRAFDVPKRYFSHFYIISVLWNGFLLWCLSQSLFLGAPFPSWLHGLLRILXAAQFQGGELALSAF

SEQ ID NO: 99648 - protein, 82 aa, Gossypium hirsutum
  unsure (1)..(82): unsure at all Xaa locations
  Clone ID: LIB3196-001-P1-M1-B3.pep
ISDSSAEGASVPERPDQGIDRHTCESIRENDXFLYHLKSYMTNYFGAAERLACQEKDHMLAWRVTPEGKAQNLEEWEGTTSY

SEQ ID NO: 99649 - protein, 60 aa, Gossypium hirsutum
  Clone ID: LIB3196-001-P1-M1-B5.pep
ISSSSSSSSSSSSSSSWSSSSSSCSSSSSSSSSSPSPAKPGPQALPKPASPKKPPPGERR

SEQ ID NO: 99650 - protein, 104 aa, Gossypium hirsutum
  Clone ID: LIB3196-001-P1-M1-B6.pep
FFWTDSNLDRIEVAKLDGTQRRVLFETDLVNPRGIVTDSVRGNLYWTDWNRDNPKIETSYMDGTNRRILVQDDLGLPNGLTFDAFSSQLCWVDASTNRAECLNP

SEQ ID NO: 99651 - protein, 133 aa, Gossypium hirsutum
  Clone ID: LIB3196-001-P1-M1-B7.pep
PVPQEGNIKPRIFRLRQEGAIINRCGFNSEGIVAVAKRLGAQHGKRKLETSSSSSPSNEEAKHGGKAGPGILGVNLGKNKTSEDAAADYVQGVHTLSQYADYLVINVSSPNTPGLRMLQGRKQLKDLVKRVQA

SEQ ID NO: 99652 - protein, 130 aa, Gossypium hirsutum
  Clone ID: LIB3196-001-P1-M1-B9.pep
MVFRIMSGGSADYNREHGGPEGMDPDGVIESNWNEIVDNFDDMNLKESLLRGIYAYGFEKPSAIQQRAIIPCIKGYDVIAQAQSGTGKTATFAISILQQLEIEFKETQALVLAPTRELAQQIQKVILALG

SEQ ID NO: 99653 - protein, 122 aa, Gossypium hirsutum
  Clone ID: LIB3196-001-P1-M1-C1.pep
RSRRRDQRPNSGSDKMGGLPRRSVKETQRLLAEPVPGIKAEPDESNARYFHVVIAGPQDSPFEGGTFKLELFLPEEYPMAAPKVRFMTKIYHPNVDKLGRICLDILKDKWSPTLQIRTVLLS

SEQ ID NO: 99654 - protein, 126 aa, Gossypium hirsutum
  Clone ID: LIB3196-001-P1-M1-C2.pep
SIPLRSSWVMTCAYAPGGNFVACGGLDNICSIYSPKTREGNVRVSRELPGHTGYLSCCRFLDDNQIITSSGDTTCALWDIETGQQTVGFAGHSGDVMSLSLAPDGRTFVSGACDASIKLWDVRDFM

SEQ ID NO: 99655 - protein, 47 aa, Gossypium hirsutum
  Clone ID: LIB3196-001-P1-M1-C3.pep
MDVAESPERDPRSPEDEEQPQGLSDDDILRDSGSDQDLDGAGVRASD

SEQ ID NO: 99656 - protein, 62 aa, Gossypium hirsutum
  Clone ID: LIB3196-001-P1-M1-C4.pep
IFIYLMGFSHFPGNAGTLFLSWLKNSMLNSSPLYSPFPPKAWWLGLGYVGFKQPPKLPSLPL

SEQ ID NO: 99657 - protein, 96 aa, Gossypium hirsutum
  Clone ID: LIB3196-001-P1-M1-C7.pep
PPLFFHFTFFLPLYFLSLIPSFPRLFLFLPLYLLLPLFPVFPNFHLPNTDFVPIMGSECRRRWELTGGPSSLSPPSKELKCKSTVGDKASLTFYPL

SEQ ID NO: 99658 - protein, 60 aa, Gossypium hirsutum
  unsure (1)..(60): unsure at all Xaa locations
  Clone ID: LIB3196-001-P1-M1-C8.pep
KRNLDWYPVTCLFLQLGMYPKASNVTNCGLKLINGFVFLMLXKSRENCPGLQLLKSDLKQ

SEQ ID NO: 99659 - protein, 133 aa, Gossypium hirsutum
  Clone ID: LIB3196-001-P1-M1-D12.pep
ALDAVPVNGDRNGNSEAAAENMSASSLVSGYSMVELESEEYQFLWGFALLGIFQGQHPALCKQVIPLASAKAKHDGDTPAEDTTSPGLKFYEIVLPVFQFLLTQKFFSAGFLTVNICEELLLVFSYSIYMDNS

SEQ ID NO: 99660 - protein, 46 aa, Gossypium hirsutum
  Clone ID: LIB3196-001-P1-M1-D6.pep
MTTAARPTFEPARGGRGKGEGDLSQLSKQYLRRDLPSHTKVKFRPT

SEQ ID NO: 99661 - protein, 132 aa, Gossypium hirsutum
  unsure (1)..(132): unsure at all Xaa locations
  Clone ID: LIB3196-001-P1-M1-D7.pep
AVFMDLMNRVFRQYLDQFVVVFIDDILITSHNESEHAEHLRLVLQILPDNQLYAKFSKCEFWLREVSFLGHVVSASGIRVDSNKISAILDWKPPRNVSKVRSFLGLTGYYRXFVKGFSMIATPMAKLLQKDA

SEQ ID NO: 99662 - protein, 60 aa, Gossypium hirsutum
  Clone ID: LIB3196-001-P1-M1-E10.pep
SYFNFFNALNYFYLSSETCILQEHDIVTNNQIHQIWKTVSMLARKENGLLIPFDTSYHAN

SEQ ID NO: 99663 - protein, 140 aa, Gossypium hirsutum
  Clone ID: LIB3196-001-P1-M1-E11.pep
LRSHSLAKKAQDEGRLSDVVPCRVPGKDTVTKDNGIRPSSLEQMAKLKPAFIKPYGTVTAANSSFLTDGASAMLIMAEEKALAMGYKPKAYLRDFMYVSQDPKDQLLLGPTYATPKVLEKAGLTMNDIDAFEFHEAFSGQ

SEQ ID NO: 99664 - protein, 50 aa, Gossypium hirsutum
  unsure (1)..(50): unsure at all Xaa locations
  Clone ID: LIB3196-001-P1-M1-E12.pep
NQIQNLILGTEIPGIFFFFFFXXFFFFLGXFFFFIWTVITHLPFLAYCNL

SEQ ID NO: 99665 - protein, 110 aa, Gossypium hirsutum
  Clone ID: LIB3196-001-P1-M1-E3.pep
MWGFASNAIASIGLKNSKESSRACSEFSDDDVCSNGSRDEGLECPICWESFNIVENVPYVLWCGHTLCQNCILGLQPAVLKLPTSQFEIPLIVSCPWCHLLSLRLLYKGN

SEQ ID NO: 99666 - protein, 49 aa, Gossypium hirsutum
  Clone ID: LIB3196-001-P1-M1-E5.pep
VCTKKQAGTRPEFPGSARQHITPGGAVPRGATQQWQWGAPKALCSNSLG

SEQ ID NO: 99667 - protein, 52 aa, Gossypium hirsutum
  Clone ID: LIB3196-001-P1-M1-E6.pep
GSWHDCLTHAHVICVTPEMELEPSVPSTRAKNRRIVSWREFGVQLSQQGIDR

SEQ ID NO: 99668 - protein, 120 aa, Gossypium hirsutum
  unsure (1)..(120): unsure at all Xaa locations
  Clone ID: LIB3196-001-P1-M1-F1.pep
MREWISVHVGRAGVQMGNACWELYCLEHGIQPDGQMPSDKTIGGGDDSFTTFFCETGAGKHVPRAVFVDLEPTDIDEILNGPYRQLFHPEQLITGKEDAANNXSRGHYTIGKEIIDPVLD

SEQ ID NO: 99669 - protein, 37 aa, Gossypium hirsutum
  Clone ID: LIB3196-001-P1-M1-F12.pep
DLFPFNFKLLSFSQAGYVLEPWAGHSPPLGATTTAPR

SEQ ID NO: 99670 - protein, 45 aa, Gossypium hirsutum
  Clone ID: LIB3196-001-P1-M1-F2.pep
RSFKIFPNSVQKTKYVIFETHRNSHKQLLFLLLKFHPFTLWKLMN

SEQ ID NO: 99671 - protein, 67 aa, Gossypium hirsutum
  Clone ID: LIB3196-001-P1-M1-F3.pep
SPLTFGPLKFFWKGLWPLLKFFKGVQSLFLVGLGFLGGVNGVPLAQFKNRHLLFDGVHGCGGGWPAH

SEQ ID NO: 99672 - protein, 48 aa, Gossypium hirsutum
  Clone ID: LIB3196-001-P1-M1-F8.pep
SQVRLTLTYYGDLKSSTVCYIYKTLLCILQLDAKGFILKLICQIVSFE

SEQ ID NO: 99673 - protein, 40 aa, Gossypium hirsutum
  Clone ID: LIB3196-001-P1-M1-G11.pep
YASDVRCFLAKDTPAAWHLASVYPHTHLHSCRSSSAGGGS

SEQ ID NO: 99674 - protein, 69 aa, Gossypium hirsutum
  Clone ID: LIB3196-001-P1-M1-G3.pep
MFFSCYVGRETRVECAFVSLDRGGPHYSSCPGPMKPQVAIKVNRGFAPKTTHWISIKSTHIAFLDKGER

SEQ ID NO: 99675 - protein, 66 aa, Gossypium hirsutum
  unsure (1)..(66): unsure at all Xaa locations
  Clone ID: LIB3196-001-P1-M1-G5.pep
MSLRLQSCSASYGGGFGGGSCQLRGGRGIFSXATSFVSGGSAXGYRSSMTCGSNRGTLGGFRGRYE

SEQ ID NO: 99676 - protein, 99 aa, Gossypium hirsutum
  unsure (1)..(99): unsure at all Xaa locations
  Clone ID: LIB3196-001-P1-M1-G7.pep
IRFHLVIYHMNHFPSNSCRKSHVFMCNEDQYLTVGTVGGVAKETXRDCASLRSPDCCPESSAPWRLDWFFFLSSRKLKGQTGENTHTTWQVKILKIEIA

SEQ ID NO: 99677 - protein, 80 aa, Gossypium hirsutum
  Clone ID: LIB3196-001-P1-M1-H9.pep
LLCVVATIRFLVPAAIFAHLEGAWSFLDAFYFCFISLSTIGLGDYMPGEAPGQPYRALYKVLVTDYLFLGLMAMVLVLQT

SEQ ID NO: 99678 - protein, 95 aa, Gossypium hirsutum
  Clone ID: LIB3196-002-P1-M1-A1.pep
NMHKLMLIIHMNLPRSKNDHLTSFPNFRFFSHSRYKSRFSGSKTSYFIYLINVIFKTILNSNFYKIKILPINFCIFPLPPLGSPIQLHPLFLCFR

SEQ ID NO: 99679 - protein, 77 aa, Gossypium hirsutum
  Clone ID: LIB3196-002-P1-M1-A12.pep
AEKTGAQELLRVLRAQPVQVGEGIEPHGFWEALGGEACYRTCLLLEAEKIDAPTSRLFDCYNKIGRFVIKAVSGELM

SEQ ID NO: 99680 - protein, 84 aa, Gossypium hirsutum
  Clone ID: LIB3196-002-P1-M1-A4.pep
IPLNVSQWLMVLKISWRVILMDERLKFVARNYLEPGKECVQPATKSCSFSACTDGISWPFVLLIMPLVIWVYSTDTNFSDMFWS

SEQ ID NO: 99681 - protein, 135 aa, Gossypium hirsutum
  Clone ID: LIB3196-002-P1-M1-A5.pep
MAHIHQVAKTLNWELFYEKKPSVDEELVREFYVNLTSSELTEVPVRRIKVPLTSNAINEFFELLNFENDEYSPLMSNMEPENLQEILKELTVPGSKWTVSKQEIHTCRREYLTPLTIVCFYFIRFTLIPSLYGTT

SEQ ID NO: 99682 - protein, 41 aa, Gossypium hirsutum
  Clone ID: LIB3196-002-P1-M1-A6.pep
KSGWCRSRISRISFKPLYLFFNLVEILGAVIPLWTLYKGTF

SEQ ID NO: 99683 - protein, 67 aa, Gossypium hirsutum
  unsure (1)..(67): unsure at all Xaa locations
  Clone ID: LIB3196-002-P1-M1-A9.pep
MDYSGSGSGSGSGSGVCSGLVTXEMEQDYQPVDESDAFHDNLRSLDRSLPSDSQDLGQHGLEEDFMI

SEQ ID NO: 99684 - protein, 92 aa, Gossypium hirsutum
  Clone ID: LIB3196-002-P1-M1-B1.pep
MARPPSTLPMPLSSLLCFSLPSPRAVLDRITPTWRGWLLPSRSLWVEPYPKAPCPAGLVLCFIHLSIVSKSSSFFLKTEGFWSVFSVGASLL

SEQ ID NO: 99685 - protein, 106 aa, Gossypium hirsutum
  Clone ID: LIB3196-002-P1-M1-B10.pep
GNHIIISNRRLYMKGLWKGKSHNLLKSTSSSKQDISYKNANLICMCHFFQVLSDVACDFLRFPFASHQVGFPKKRNKEIRLKDRTTQPQLLRLAAPKTDSSLTRTC

SEQ ID NO: 99686 - protein, 121 aa, Gossypium hirsutum
  Clone ID: LIB3196-002-P1-M1-B3.pep
LKASQCCCCLSHLLASGLLLLLLAELSGPLAVLLQAAEAAQGPGPPDPRPRTLPPLPPGPTAAQQPGRGLAEAAGPQGSEGGNGSSPVAGLEADDHGGKAVEGSLGGGLAESPNPGDKPMT

SEQ ID NO: 99687 - protein, 140 aa, Gossypium hirsutum
  Clone ID: LIB3196-002-P1-M1-B8.pep
IPEVKQDTVSEPVTRASLAALQSDVQPVGHDYVEEVRNDEGKVIRFHCKLCECSFNDPNAKEMHLKGRRHRLQYKKKVNPDLQVEVKPSIRARKIQEEKMRKQMQKEEYWRRREEEERWRMEMRRYEEDMYWRRMEEEQH

SEQ ID NO: 99688 - protein, 66 aa, Gossypium hirsutum
  Clone ID: LIB3196-002-P1-M1-B9.pep
EFEKQDELKRSAMRARAALLTSPKAKKSPLMSEFQSQISSNPELAAIFESIQKDSSSTNLESMDTS

SEQ ID NO: 99689 - protein, 71 aa, Gossypium hirsutum
  Clone ID: LIB3196-002-P1-M1-C1.pep
KISQKHYPFSVQSCHFKPYFCRVYSANINSLYWPFGSTEDPRQGNATDHLRIMVKDFCIFIFPILKSLFDQ

SEQ ID NO: 99690 - protein, 64 aa, Gossypium hirsutum
  unsure (1)..(64): unsure at all Xaa locations
  Clone ID: LIB3196-002-P1-M1-C6.pep
KRRKRRKMRKMKRMRRRRKMKKMXMKKKMMMMNKLVLAQXFFLVYKAFNPPVHNSLLLKKKIEM

SEQ ID NO: 99691 - protein, 31 aa, Gossypium hirsutum
  Clone ID: LIB3196-002-P1-M1-C7.pep
ITKTSKHHPRNTTSMAEYHLHQIAKFEPWAR

SEQ ID NO: 99692 - protein, 99 aa, Gossypium hirsutum
  Clone ID: LIB3196-002-P1-M1-C8.pep
AAEQGQCWGAPGPETTTPVPLRTFSRAPFTWPTWLSSHTPVSTTGTQQPREVWRGPGDPWLMQGQVSRPPTWRASTLRSMTRLLSTQSFFSVFGLLTSI

SEQ ID NO: 99693 - protein, 43 aa, Gossypium hirsutum
  Clone ID: LIB3196-002-P1-M1-D11.pep
MSYLGVNQAFSLLRRSYCACAIVCVGVTVGISGMVDAGGRSLL

SEQ ID NO: 99694 - protein, 127 aa, Gossypium hirsutum
  unsure (1)..(127): unsure at all Xaa locations
  Clone ID: LIB3196-002-P1-M1-E10.pep
IRKEDMAVHVRRDHVVEDSYREVHRKSPEEMKNRLYIVFEGEEGQDAGGLLREWYMIISREMFNPMYALFRTSPGDRVTYTINPSFHCNPNHLSYFKVCLTHLWPKLVYDNPTSRSCYFTXSFYKHN

SEQ ID NO: 99695 - protein, 62 aa, Gossypium hirsutum
  Clone ID: LIB3196-002-P1-M1-E11.pep
SMTDLNMPNDFLLCCHAHRVASPRSPLKYGHRSTHSLCSMTLFSHSHMLSTEGGAPQGPDLS

SEQ ID NO: 99696 - protein, 64 aa, Gossypium hirsutum
  Clone ID: LIB3196-002-P1-M1-E3.pep
DIIMFIHPFYFIQIIILFYFFLHLIFNSYFIYFSFFLFYNLFFINFILFFFLMIFFFFYIFYFS

SEQ ID NO: 99697 - protein, 35 aa, Gossypium hirsutum
  unsure (1)..(35): unsure at all Xaa locations
  Clone ID: LIB3196-002-P1-M1-E6.pep
IRKGLTLNLENETLIHDEEGQEKYGRFQKAIXLIN

SEQ ID NO: 99698 - protein, 82 aa, Gossypium hirsutum
  Clone ID: LIB3196-002-P1-M1-E8.pep
GNPRLWYAALLSFTSAFYILSGICIGLLYTYYTKPDGCTQNKFFITINLILCVDASIISNHPQNQVHQPCFRLLQPYLITLY

SEQ ID NO: 99699 - protein, 63 aa, Gossypium hirsutum
  Clone ID: LIB3196-002-P1-M1-E9.pep
RITDILFRLGCFSSVRGKLPSLHGQTFPPKSLRLVTPHPCLLQVSNRAVLLHCSLGFYRLLHP

SEQ ID NO: 99700 - protein, 83 aa, Gossypium hirsutum
  Clone ID: LIB3196-002-P1-M1-F11.pep
ALILLKTSRACCGAPVAPGIIRVRQEGPVNDLVEPWSQFRSALGFLIPMNTRGYLSHGGEGPSGTWAGPGPRRHVELVLSLRL

SEQ ID NO: 99701 - protein, 56 aa, Gossypium hirsutum
  Clone ID: LIB3196-002-P1-M1-F7.pep
MRGMKLTLACPGPLADSSVTLSPVDSLDSPRPFRGPPASPGGFPLEGPYAAATATA

SEQ ID NO: 99702 - protein, 81 aa, Gossypium hirsutum
  Clone ID: LIB3196-002-P1-M1-F8.pep
EKGIMQKVAGERYVCKFVCEPGALFSLAFPDNQRPALKAEFDRPVSEEDTVPLSHLDESPAYLPELAGPAQPFGPKGGYSY

SEQ ID NO: 99703 - protein, 43 aa, Gossypium hirsutum
  unsure (1)..(43): unsure at all Xaa locations
  Clone ID: LIB3196-002-P1-M1-G1.pep
INIQNLNDRLAFXLEKGPPLEEGNPHLEGKIPYLHLKQNPTWP

SEQ ID NO: 99704 - protein, 85 aa, Gossypium hirsutum
  Clone ID: LIB3196-002-P1-M1-G11.pep
LLPFKLVKMKLQDYENQYLMKTIILMTISLGSFELVMLGSRNPFPSNLSHSTSGEGFPTNRKQRSSETSPVLITDEIRFRRDHFS

SEQ ID NO: 99705 - protein, 64 aa, Gossypium hirsutum
  Clone ID: LIB3196-002-P1-M1-G12.pep
IGTGPLHFYCQCCQHGLNAVLVFLVLDTHPERVYTAFIKALNIHYLSGSILQNLYPCWPETGEN

SEQ ID NO: 99706 - protein, 119 aa, Gossypium hirsutum
  Clone ID: LIB3196-002-P1-M1-G4.pep
MDERRFRVADQDGDWMATREELAGFLHPEEFPHMRDIVIAETLEDLDRNKDGYVQVEEYIADLYSAEPGEEEPAWVQTERQHFPDFRDLNKDWHLDGSESGHWVLSSYQDQPLVEGNSP

SEQ ID NO: 99707 - protein, 112 aa, Gossypium hirsutum
  Clone ID: LIB3196-002-P1-M1-G6.pep
RTGGSEARRPHWSQPGTGQPQEHRRAHVPPPANRVMAAAAALRDPAQEEFRLTGCSLQAPVDPKFHPPGSVHLQAIALAPPCTCRSPHRIPPVSETGIPSESVSVSRRQVRV

SEQ ID NO: 99708 - protein, 79 aa, Gossypium hirsutum
  unsure (1)..(79): unsure at all Xaa locations
  Clone ID: LIB3196-002-P1-M1-H10.pep
CRIFVCGGHGTIGWGLETIGKGNLPEQPPVAVXPCVLRNYLARCLKWGGRYERQNLAQILKALEARTVVHIDRCSLEGI

SEQ ID NO: 99709 - protein, 125 aa, Gossypium hirsutum
  Clone ID: LIB3196-002-P1-M1-H11.pep
SAFSLWVSRPSTGRESSRECWGHQTVSGSNQNVLLLLPPTQRLFTFTISLDIQCEQLNDARWAELLPLLQQCQVVRLDDCGLTEARCGDISSALRVNPALTELSLRTNELGDAGVHCMLQGLQSP

SEQ ID NO: 99710 - protein, 139 aa, Gossypium hirsutum
  Clone ID: LIB3196-002-P1-M1-H12.pep
IGTRGSHNTICFHVCVQRAEAATELVTSHTVTVPPCLSETPQAEVGPTGCPHLSGPHSAQGSLEKGLPRDKEAKEPLWIRPDAPSRCTWQLGRPASESTHHHTVPEKSPKILPDILKKIGDTPMIRINKIGKMFGLKCE

SEQ ID NO: 99711 - protein, 137 aa, Gossypium hirsutum
  unsure (1)..(137): unsure at all Xaa locations
  Clone ID: LIB3196-002-P1-M1-H2.pep
VKLPAGFSMFVRRHHKQGCXQTCTDLTGRPSLGTEPPGPQEESLAVPPVLTHRAPQPGPSRSEKPGKTQSEISTFLRQRPAGTVGAGGEAAGPSQSPGPPHGPAASEWGEPPGRDLAGQQAAGASSVPLLAGCVCQG

SEQ ID NO: 99712 - protein, 102 aa, Gossypium hirsutum
  Clone ID: LIB3196-002-P1-M1-H4.pep
IYIYKISIFYTHPAPAKTVFIGGLNIACLSGSILQNLDPCWSETAENRASLNRPSQLVGPGQDHTSPRLSWKSTCLTAFTKIYRTKGGNKPCSNGARTVHLF

SEQ ID NO: 99713 - protein, 152 aa, Gossypium hirsutum
  unsure (1)..(152): unsure at all Xaa locations
  Clone ID: LIB3196-002-P1-M1-H5.pep
HGTTKTQTACRYRIPGIERNMKVLLAAALIAGCVFFLLVPGPSAADEKKKGPKVTVKVYFDLRIGDEDVGRVIFGLFGKTVPKTVDNFVALATGEKGFGYKNSKFHRVIKDFMIQGGYFTRGDGTRGKSIYGERFPDXENFKLKHYWPGWVS

SEQ ID NO: 99714 - protein, 52 aa, Gossypium hirsutum
  Clone ID: LIB3196-002-P1-M1-H6.pep
NWQKKIYQALKVQYAQLIKKAQTKFPPPHLHQYTLLSLLIGKTKQIKTKQIE

SEQ ID NO: 99715 - protein, 136 aa, Gossypium hirsutum
  Clone ID: LIB3196-002-P1-M1-H7.pep
DVSNREEATEKPWLKSLVSRKDHVLDIMLEAVNNLRDSMPKLQIRAPEAQPTLFSINQSCLPGFYTPAELKPFWERPPQDPNAPGADGKAFQKSKWTPLETQEKEEGYKKHCFNAFASDRIFLQRSLGPDTRPPEL

SEQ ID NO: 99716 - protein, 100 aa, Gossypium hirsutum
  Clone ID: LIB3196-002-P1-M1-H8.pep
MSEQFIYGATHFLSTRIIIYIYNTVCASNQRVKLLLQIHHASKQINSYTHYKVITDCIVRIHNEQGLLSFWRGNLANFIRYLLTQALNFAFKDKYKHIFL

SEQ ID NO: 99717 - protein, 116 aa, Gossypium hirsutum
  Clone ID: LIB3196-003-P1-M1-A1.pep
CIVCPFVDIEVAGAEFDSTKHNTVIVADNGLNPVWPVKPFHLHISDPAFAFVRYVVSDEYMFSDQNILAKATFPVKGLHTGYRAVPLNINYRVDLTLASLLVKIDILPDKQENGDL

SEQ ID NO: 99718 - protein, 64 aa, Gossypium hirsutum
  Clone ID: LIB3196-003-P1-M1-A12.pep
KALNAEANKLDFSNILLMCSKSRQQNLLALQTKMFQQTLHLMVFEGFSSAFCLFSTAQLPTPDT

SEQ ID NO: 99719 - protein, 128 aa, Gossypium hirsutum
  unsure (1)..(128): unsure at all Xaa locations
  Clone ID: LIB3196-003-P1-M1-A4.pep
ISQARTAQLSSLAAARAHPSARAPAVSPWCSPAGQTNSPPDPVPTLPVLRTLAAPSXSLEQNDASTPRPGLCLGSECFCHRPLPVXPPGSLVFEDFANLTPFVKEELRFAIQNKHLCHRMSSALESVT

SEQ ID NO: 99720 - protein, 40 aa, Gossypium hirsutum
  Clone ID: LIB3196-003-P1-M1-A5.pep
KVLELGVEASFCYRPCKVSLEFSRDIRVDTGKILCVSGPP

SEQ ID NO: 99721 - protein, 118 aa, Gossypium hirsutum
  Clone ID: LIB3196-003-P1-M1-A7.pep
MELGKKTDGYSGADISIIVRDALMQPVRKVQSATHFKKVRGPSRADPNHLVDDLLTPCSPGDPGAIEMTWMDVPGDKLLEPVVSMSDMLRSLSNTKPTVNEHDLLKLKKFTEDFGQEG

SEQ ID NO: 99722 - protein, 89 aa, Gossypium hirsutum
  Clone ID: LIB3196-003-P1-M1-A9.pep
DLGKVPRAAGEETPGSSGFAQRLRTGRRAGRGHDLPAAVALLAGALTCGAEEPAELRKRDWAGAAARPGARTTDKEPRLRTSSGCSSLL

SEQ ID NO: 99723 - protein, 128 aa, Gossypium hirsutum
  Clone ID: LIB3196-003-P1-M1-B1.pep
GRAVIMFGVPYVYTQSRILKARLEYLRDQFQIRENDFLTFDAMRHAAQCVGRAIRGKTDYGLMVFADKRFARGDKRGKLPRWIQEHLTDANLNLTVDEGVQVAKYFLRQMAQPFHREDQLGLSLLSLE

SEQ ID NO: 99724 - protein, 100 aa, Gossypium hirsutum
  Clone ID: LIB3196-003-P1-M1-B10.pep
IPRSLCASWKFSFAACFSFKESPEVSALILRVPGDCGHSLSTHFQSYNCGFPRSGVALQIHGQRLEACIAFRYIKILNPTCFEALGLLGKYTHPCLSDCT

SEQ ID NO: 99725 - protein, 64 aa, Gossypium hirsutum
  Clone ID: LIB3196-003-P1-M1-B11.pep
LWSLFVHPLSIIQLWLSQVWCGLLNVLVSIWRHAYDFCFFNIENSFFFDVLGLLVQFTYSCLAN

SEQ ID NO: 99726 - protein, 129 aa, Gossypium hirsutum
  Clone ID: LIB3196-003-P1-M1-B4.pep
MASPFSGALQLTDLDDFIGPSQECIKPVKVEKRPGSGVAKIRIEDDGSYFQVNQDGGTRRLEKAKVSLNDCLACSGCITSAETVLITQQSHEELKKVLDANKMAAPSQQRLVVVSVSPQSRASLAARFQ

SEQ ID NO: 99727 - protein, 113 aa, Gossypium hirsutum
  Clone ID: LIB3196-003-P1-M1-B7.pep
VKDARARCPVAGAPGRRCSRRGAREKPLPRRCQPATQPMANPGLGLLLVLGLPFVLARWGRVWGQRLASSAYDSSTVVPSPTSSSSNGNLSQEAITAIIVVFSILAILLLAVG

SEQ ID NO: 99728 - protein, 108 aa, Gossypium hirsutum
  Clone ID: LIB3196-003-P1-M1-B8.pep
MCDFTEDQTAEFKEAFQLFDRTGDGKILYSQCGDVMRALGQNPTNAEVLKVLGNPKSDEMNVKVLDFEHFLPMLQTVAKNKDQGTYEDYVERLRVFDKEGNGTVMGAE

SEQ ID NO: 99729 - protein, 87 aa, Gossypium hirsutum
  Clone ID: LIB3196-003-P1-M1-B9.pep
MQKVTLGLLVFLVGLPVLDANDPEDKNSPFYYDWHSLQVGGLICAGVLCAMGIIIVMSGKCKCKFGQKPSHHPGETPPLITPGSAHN

SEQ ID NO: 99730 - protein, 111 aa, Gossypium hirsutum
  Clone ID: LIB3196-003-P1-M1-C1.pep
MTTQQIVLQGPGPWGFRLVGGKDFEQPLAISRVTPGSKAALANLCIGDVITAIDGESTSNMTHLEAQNRIKGCTDNMTLTVARSEHKVWSPLVTEEGGKRHPYKMNLASEP

SEQ ID NO: 99731 - protein, 45 aa, Gossypium hirsutum
  Clone ID: LIB3196-003-P1-M1-C10.pep
KGPPLFFFFFFFFFFFFFFFFFFFFFFFFFFFFFFFFFFFFFFFF

SEQ ID NO: 99732 - protein, 54 aa, Gossypium hirsutum
  Clone ID: LIB3196-003-P1-M1-C12.pep
LLSSEENYYSTSYSQSDSQCGSPPRGWSEELDERGHTLYTSDYTNEKVHSFFLI

SEQ ID NO: 99733 - protein, 71 aa, Gossypium hirsutum
  Clone ID: LIB3196-003-P1-M1-C3.pep
TLNTKQREMLLNVKSEAKIAFLQSYPEDVFIIETWDSLTHQRPTTVSPVPFTQYRQPNKQLGRGDLSLLMS

SEQ ID NO: 99734 - protein, 127 aa, Gossypium hirsutum
  Clone ID: LIB3196-003-P1-M1-C4.pep
WDFICPDFYEAVCGTDGKTYGNRCELCAENAKTGSQIGVKSEGECKSSNPEQDVCSAFRPFVKDGRLGCTRENDPVLGPDGKTHGNKCAMCAELFLKETENAKRQGETRIRRNAEKDFCKEYEKQVR

SEQ ID NO: 99735 - protein, 54 aa, Gossypium hirsutum
  Clone ID: LIB3196-003-P1-M1-C6.pep
IECRKRYRRFLRMKESERKPGTPKAAGPFIKVWPLFFFLIFFFFFFFFFFFFFF

SEQ ID NO: 99736 - protein, 80 aa, Gossypium hirsutum
  Clone ID: LIB3196-003-P1-M1-C8.pep
MQRLVAWDPACLPLPPPPAFKSMEVANFYYEADCLAAAYGGKAAPAAPPAARPGPRPPAGELGSIGDHERAIDFSPYLEP

SEQ ID NO: 99737 - protein, 127 aa, Gossypium hirsutum
  unsure (1)..(127): unsure at all Xaa locations
  Clone ID: LIB3196-003-P1-M1-D12.pep
MDSKHQCVKLNDGHFMPVLGFGTYAPAEVPKNKAIEATKLAIEAGFRHIDSAHLXNNEEYVGLAIRSKIVHGSVQREDIFYTSKLWCNSHRPEFVRPALERSLKNLQLDYVDLYLIHFPVSLKPGEE

SEQ ID NO: 99738 - protein, 128 aa, Gossypium hirsutum
  Clone ID: LIB3196-003-P1-M1-D5.pep
WQRSILFQMNCGFDPQNARRNCAGPSWSGAVLLEWGPGVRENPQAPCPSSSICTRLSLGPSPLYGEECHGQGELSFIQCGEESQSRAAPKLCPLIIVPSSLLECPERQICHKLGLLIMLHPIEMGPQV

SEQ ID NO: 99739 - protein, 90 aa, Gossypium hirsutum
  Clone ID: LIB3196-003-P1-M1-D6.pep
ANINVYYKCMYTIGTHYFYHTLVLYLIYLSYNINLIIINTLIIYLNNNQIHTCITNVCIIFITLVFYFFHTLGTLFGLFTYFVLSIFFIL

SEQ ID NO: 99740 - protein, 62 aa, Gossypium hirsutum
  Clone ID: LIB3196-003-P1-M1-D8.pep
PMKEHRSLESLLTQLLITPPQYVSTSVEGLLIFLKTLLPIRNSSKFYVFYSIKIYVSQHKVV

SEQ ID NO: 99741 - protein, 120 aa, Gossypium hirsutum
  Clone ID: LIB3196-003-P1-M1-E1.pep
REGLQAQQFAASLHSSNVEKKLESLPSMVAGVWSDNGAAQLEATTQFRKLLSIERSPPIEEVIQSGVVPRFVEFLGREDFPQLQFEAAWALTNIASGTSDNTKVVIDLGAVPIFVKLLAS

SEQ ID NO: 99742 - protein, 120 aa, Gossypium hirsutum
  Clone ID: LIB3196-003-P1-M1-E10.pep
LVSLNGDHYPFTSKLDFDCTNNMVEYEACIMGIRAAIDRKIKVLEVFRDSALVIYQLKGEWETRDLKLIDYQKLVLELVKEFDDITFYYLSRDEYQMADALATLASMIKVNKQDVKPIWL

SEQ ID NO: 99743 - protein, 59 aa, Gossypium hirsutum
  Clone ID: LIB3196-003-P1-M1-E3.pep
IVNGERKRMYLTYIYIYKYQELLKHDFHYIWLHFLITTYFSFTSCLFWTRHDDQFVQHS

SEQ ID NO: 99744 - protein, 59 aa, Gossypium hirsutum
  Clone ID: LIB3196-003-P1-M1-E5.pep
MSAQVPYMLESTMPLRFIHHYPLPQMGRAMAPLHTQQKLDKHLFLPHNYIIHSRVWQTK

SEQ ID NO: 99745 - protein, 62 aa, Gossypium hirsutum
  Clone ID: LIB3196-003-P1-M1-E6.pep
RWIAKEERLIFFFEEEEEGGRGNKKRKKMPTVWFSLKRSLHCKSEPSDVHDPETRKQLSTIL

SEQ ID NO: 99746 - protein, 44 aa, Gossypium hirsutum
  unsure (1)..(44): unsure at all Xaa locations
  Clone ID: LIB3196-003-P1-M1-E7.pep
IFSFFFETGSCPGXSTASQSQLTAASTSWAQVILLPQPPEQLGL

SEQ ID NO: 99747 - protein, 90 aa, Gossypium hirsutum
  Clone ID: LIB3196-003-P1-M1-E8.pep
LAVLYQKLTTLLTLSVAPLLYVHEIEFLPKTKPLPQYSTVRLYRQTYSRPSHFLRIYSFFQLCLNYNYNRKLIVEKVMDGMISSLVPRES

SEQ ID NO: 99748 - protein, 119 aa, Gossypium hirsutum
  Clone ID: LIB3196-003-P1-M1-E9.pep
MAAVGAGGSTAAAGPGALSAGALEPGTASAAHRRLKYISLAVLVVQNASLILSIRYARTLPGDRFFATTAVVMAEVLKGLTCLLLLFAQKRGNVKHLVLFLHEAVLVQYVDTLKLAVPS

SEQ ID NO: 99749 - protein, 121 aa, Gossypium hirsutum
  Clone ID: LIB3196-003-P1-M1-F1.pep
VRTLDLTQNKLVEIPMEISELVNMQRLILASNHIEQLPSTMGNLQSLKAMILDGNRITSLPDELGELVKLEKLSISGNMLMSLPNTIGSLRNLSLLNVSNNKLKYLPESIGICSSLEELQA

SEQ ID NO: 99750 - protein, 127 aa, Gossypium hirsutum
  Clone ID: LIB3196-003-P1-M1-F11.pep
MPQPERRFFRRGWVTFDRSVNIKEICWNLQNIRLRECELSPGVNRDLTRRVRNINGITQHKQIVRNDIKLAAKLIHTLDDRTQLWASEPGTPPLPTSLPSQNPILKNITDYLIEEVSAEEEELLGSS

SEQ ID NO: 99751 - protein, 81 aa, Gossypium hirsutum
  Clone ID: LIB3196-003-P1-M1-F2.pep
NLVIISETLYRIIYSKNIKCLEGRQYTKTLIVIIPEGWQSGFVFCFCTFTTRKRLHFLENMFGDLGEHSLCGGGKEEGRDA

SEQ ID NO: 99752 - protein, 128 aa, Gossypium hirsutum
  Clone ID: LIB3196-003-P1-M1-F4.pep
MDKMQLLEIITTEKTSRDTSASAVAVGLKQGKVIIVVKDGPGFYTTRCLAPMMSEVIRILQEGVDPKKLDSLTTSFGFPVGAATLVDEVGVDVAKHVAEDLGKVFGERFGGGNPELLTQMVSKGFLGR

SEQ ID NO: 99753 - protein, 57 aa, Gossypium hirsutum
  Clone ID: LIB3196-003-P1-M1-F5.pep
SADYDDFVNAIRSARSAFCLTPMGMMQFNDILQNLKRSKQTKELWQRVSLEMATFSP

SEQ ID NO: 99754 - protein, 29 aa, Gossypium hirsutum
  Clone ID: LIB3196-003-P1-M1-F6.pep
TRSSFKLNFLVDIKLLNSLNYLIIIKNSE

SEQ ID NO: 99755 - protein, 43 aa, Gossypium hirsutum
  Clone ID: LIB3196-003-P1-M1-G1.pep
NLLLNLIYLHSFNMSLKRALEALKYAIEMVQDQIGNIKNFSNT

SEQ ID NO: 99756 - protein, 60 aa, Gossypium hirsutum
  Clone ID: LIB3196-003-P1-M1-G11.pep
PFFLIIIIIFLVICNYVWMELGSHIIKMKSHFLTAEGSTLYLLVKKITQNEGKCIKVSSE

SEQ ID NO: 99757 - protein, 68 aa, Gossypium hirsutum
  Clone ID: LIB3196-003-P1-M1-G2.pep
DYLLTSHLEEPLTKEQHKDRRKTSSIRVHETADSTEFILIILCYFDFNHVCNGFYYLVIYNGSLIIFN

SEQ ID NO: 99758 - protein, 128 aa, Gossypium hirsutum
  Clone ID: LIB3196-003-P1-M1-H1.pep
SRRSCQEDQKPVMDDQRDLISNNEQLPMLGRRPGTPESKCSRGALYTGFSILVTLLLAGQATTAYFLYQQQGRLDKLTVTTQSLQLENLRMKLPKPPKPVSKMRMATPLLMQALPMGAQGPMQNATKY

SEQ ID NO: 99759 - protein, 127 aa, Gossypium hirsutum
  Clone ID: LIB3196-003-P1-M1-H10.pep
ISGLELITLPHGHQLRLDIIERHSTMAIGIAVYILGCTGTLEDRAATLSKVIQVAVELKDSMGDLYSFSALMKALEMPQITRLEKTWTALRHQYTQTAILYEKQLKPFSKILHEGRESTCVPPNNVS

SEQ ID NO: 99760 - protein, 91 aa, Gossypium hirsutum
  Clone ID: LIB3196-003-P1-M1-H11.pep
AWDELLSAPGHCRERRWRLPSKPDRLDPAAAGNDAGAPTATAPDGEGEPHSRPCDARLGSTDKELKAGAAATGSAPTAPGTPRQREPRVEV

SEQ ID NO: 99761 - protein, 64 aa, Gossypium hirsutum
  Clone ID: LIB3196-003-P1-M1-H12.pep
MDPSLLRERELFKKRALSTPVVEKRSASSESSSSSSKKKKTKVEHGGSSGSKQKSDHSNGSFNL

SEQ ID NO: 99762 - protein, 39 aa, Gossypium hirsutum
  Clone ID: LIB3196-003-P1-M1-H3.pep
EVLNRILPISKSMDKNWTWMEFLESLVVRAFWSFRGKMN

SEQ ID NO: 99763 - protein, 110 aa, Gossypium hirsutum
  Clone ID: LIB3196-003-P1-M1-H5.pep
MASSAAGCVVIVGSGVIGRSWAMLFASGGFQVKLYDIEQQQIRNALENIRKEMKLLEQAGALKGSLSAEEQLSLISGCPNIQEAVEGAMHIQVNPPYYIPLVELVPHPET

SEQ ID NO: 99764 - protein, 41 aa, Gossypium hirsutum
  Clone ID: LIB3196-003-P1-M1-H6.pep
LYETDFWLKVSKGLLVKKQIPQPTRVDRKETKKLPTPKVQT

SEQ ID NO: 99765 - protein, 97 aa, Gossypium hirsutum
  Clone ID: LIB3196-003-P1-M1-H9.pep
LPHCQDKPRRRRVRRGGWDTLPSSTFLFHHGQEQPWPAPYPTRNTEESIKEMASYASWLTTSCPRPSYTGSGQAHKAWGGAAFYIFPFFFKKQMKMR

SEQ ID NO: 99766 - protein, 46 aa, Gossypium hirsutum
  Clone ID: LIB3196-004-P1-M1-A10.pep
NATKTGSNSKSKSARLRLKHGMFQMKVIKILLVLFFIEWNKMLTFL

SEQ ID NO: 99767 - protein, 58 aa, Gossypium hirsutum
  Clone ID: LIB3196-004-P1-M1-A11.pep
IEAVRHGSYKAMKLLLLYGAELGVRNAASVTPVQLARDWQRGIREALQAHVAHPRTRC

SEQ ID NO: 99768 - protein, 72 aa, Gossypium hirsutum
  Clone ID: LIB3196-004-P1-M1-A12.pep
KWLWPEHRLFRLVLCAKCEGAPPPVSTSPLPAPREQGWVREREKSKDRSAHWESSVLCGYSSLKYISLTTFL

SEQ ID NO: 99769 - protein, 60 aa, Gossypium hirsutum
  Clone ID: LIB3196-004-P1-M1-A2.pep
GGSAEGDGMQPGAPVAHASQALTPHHACAQLLLQRHSSQQAAWTRQLRKDASRTRLFYNI

SEQ ID NO: 99770 - protein, 52 aa, Gossypium hirsutum
  Clone ID: LIB3196-004-P1-M1-A3.pep
IRVSLASLAQLLAPQEKSSAAMHGNHLLFKASILSLSIITTLSRTMIIYPAR

SEQ ID NO: 99771 - protein, 124 aa, Gossypium hirsutum
  Clone ID: LIB3196-004-P1-M1-A5.pep
VRPTCILGVTQKTIWTQGPSPRKAKEGSSKQVSVHRSQRGGTAVPTSQKVKEAGRDFTYLIVVLFGISITGGLFYTIFKELFSSSSPSKIYGRALEKCRSHPEVIAVFGEPVKGYGEVTRRGRR

SEQ ID NO: 99772 - protein, 71 aa, Gossypium hirsutum
  Clone ID: LIB3196-004-P1-M1-A8.pep
VTGKTRTYDIKAYIYAVASYTKEHGGCGLCKSQTYEQEMCTVHDRLNFSLLLSNAGPLERKKDHSADQVTQ

SEQ ID NO: 99773 - protein, 114 aa, Gossypium hirsutum
  unsure (1)..(114): unsure at all Xaa locations
  Clone ID: LIB3196-004-P1-M1-B1.pep
MVPDAKGIPWTSRTGGKQFVDYDRNIVVKNEGNSSGDISASQHSILTMDKAISDLEIKLMASRAEHETIQKDPTMSEGVKNIESILKRKYFMVIGINTAFSSXKRRDSVRATWM

SEQ ID NO: 99774 - protein, 125 aa, Gossypium hirsutum
  unsure (1)..(125): unsure at all Xaa locations
  Clone ID: LIB3196-004-P1-M1-B11.pep
MELEGTTENIAAQALEHIHSNEVIMTIGFSRTVEAFLQEAARKRKFHVIVAECAPFCQNQPFPPIXGHEMAVNLSKAGIETTVMTDAAIFAVMSRVNKVIIGTKTILANGALRAVTGTHTLALQQ

SEQ ID NO: 99775 - protein, 128 aa, Gossypium hirsutum
  Clone ID: LIB3196-004-P1-M1-B3.pep
SRNERHSYQVYRQPIPVQELVLEDLQDGDVRMGGSFRGAFSNSEKAKNIFRIRFHDPSPGQSHTLQANDVFHKQQWFNCIRAAIAPFRSAGSPPELQGLPELHEECEGNHPSARKLPAQRRASTVSVL

SEQ ID NO: 99776 - protein, 56 aa, Gossypium hirsutum [sequence omitted]

SEQ ID NO: 99777 - protein, 85 aa, Gossypium hirsutum
  Clone ID: LIB3196-004-P1-M1-B7.pep
VLCDLLNFLKSATFKIPDTLNFRKQTNSDCVVPKYPFFFFKRIGTNATLLFIFLSFLMLPKPKVALFSFVFCYFAVFVCGFFSLI

SEQ ID NO: 99778 - protein, 65 aa, Gossypium hirsutum
  Clone ID: LIB3196-004-P1-M1-C10.pep
LSCAFSSWFLPCLLQLLYVLFCSCTLPLLSIFFLSGYICLSLDIDPMLHLSSLSLTPSPSPFPSP

SEQ ID NO: 99779 - protein, 75 aa, Gossypium hirsutum
  Clone ID: LIB3196-004-P1-M1-C11.pep
LRAAGELGLTRKPCLRAAGGAGAHQEALTPSCGGSWGSPGSPDAELRGNWGSPGSPDSELRGNWGSPRSPDSELR

SEQ ID NO: 99780 - protein, 120 aa, Gossypium hirsutum
  Clone ID: LIB3196-004-P1-M1-C12.pep
MAAEDELLLPRLPELFETGKQLLDEVEVATEPAGSRIVQEKVFKGLDLLEKAAEMLSQLDLFSRNEDLEEIASTDLKYLLVPAFQGALTMKQVNPSKRLDHLQRAREHFMNYLTQCHCYH

SEQ ID NO: 99781 - protein, 123 aa, Gossypium hirsutum
  unsure (1)..(123): unsure at all Xaa locations
  Clone ID: LIB3196-004-P1-M1-C5.pep
IKDPGATRPGVWRWLPEGPAPKPSPLHCLESALRGILPLRPLRFTCVACPSPSPGSSSSFSGSEGEDPRPEPELWRPLLQERDRLPNCXPPVPLSPCPGGTPAGSSGSSPGEDPRRTEPRYCS

SEQ ID NO: 99782 - protein, 61 aa, Gossypium hirsutum
  Clone ID: LIB3196-004-P1-M1-D12.pep
INCNTPYLNPTSGQGSRHYRAKTLTFTENQPIISLKFKTFQFHANYKGLRGPKHTLKVVQD

SEQ ID NO: 99783 - protein, 49 aa, Gossypium hirsutum
  unsure (1)..(49): unsure at all Xaa locations
  Clone ID: LIB3196-004-P1-M1-D2.pep
TXXTKKQAXXCRGFPGSPHPCIPNTLVRGLKGQINETHRPMSLLGTFRP

SEQ ID NO: 99784 - protein, 125 aa, Gossypium hirsutum
  Clone ID: LIB3196-004-P1-M1-D3.pep
TDDTFCEACKSTVGVDFKIKTVELRGKKIRLQIWDTAGQERFNSITSAYYRSAKGIILVYDITKKETFDDLPKWMKMIDKYASEDAELLLVGNKLDCETDREITRQQGEKFAQQITGMRFCEASA

SEQ ID NO: 99785 - protein, 125 aa, Gossypium hirsutum
  unsure (1)..(125): unsure at all Xaa locations
  Clone ID: LIB3196-004-P1-M1-E1.pep
ILDETGEERERGVTMDVGMTKFETTTKVITLMDAPGHKDFIANMITGAVQADVAVLVVDASRGEFEAGFETGGQTREHGLLVRSLGVXXLAVAVNKMDQVNWQQERFQEITGKXXHFLKQAGFKE

SEQ ID NO: 99786 - protein, 58 aa, Gossypium hirsutum
  Clone ID: LIB3196-004-P1-M1-E11.pep
KKIKIIFKNSTKFFSKFYKKNYKDNFYEKNIKITKIIYIILKNYIKMLIINFIRKHKI

SEQ ID NO: 99787 - protein, 67 aa, Gossypium hirsutum
  Clone ID: LIB3196-004-P1-M1-E12.pep
RTRGQRMKLAKELELQRMQFFMKTQLEISQLKHGRRSGGIGKSSDHHTKINNSNNNNDNNNISGNSN

SEQ ID NO: 99788 - protein, 134 aa, Gossypium hirsutum
  unsure (1)..(134): unsure at all Xaa locations
  Clone ID: LIB3196-004-P1-M1-E2.pep
LLSGNSRDGRGPVTTAIIQRGTLRKGCVLVAGNCWAKVRLMFDENGKTIHEAHPSMPVGITGWRDLPSAGEEILEVESEPRAREVVDWRKYEQEQEKGKEDVKIIEEKRKEHQEAYQKAXEKYSNVQWKKRSLY

SEQ ID NO: 99789 - protein, 52 aa, Gossypium hirsutum
  Clone ID: LIB3196-004-P1-M1-E3.pep
KKMYKSNNKCACYTSFNFVDLIITFSFFFLNIIFIFLYWMEIHDINDMVSLQ

SEQ ID NO: 99790 - protein, 121 aa, Gossypium hirsutum
  unsure (1)..(121): unsure at all Xaa locations
  Clone ID: LIB3196-004-P1-M1-E4.pep
FPGWAARLRHQELFRLRGIKAQVALRLAELARRRRQRQARREAEADKPRRLGRLKYQAPDIDVQLSSELTDSLRTLKVLIAGXRRALCPMMTPSLLPVPPRGYGRHQCCPWAGPVGPMPRG

SEQ ID NO: 99791 - protein, 52 aa, Gossypium hirsutum
  Clone ID: LIB3196-004-P1-M1-E9.pep
LEGHSIEARVNNRTCISVLKFVGEGWQIPYFKLCNCHFKKVNSIHLLTRNIA

SEQ ID NO: 99792 - protein, 42 aa, Gossypium hirsutum
  Clone ID: LIB3196-004-P1-M1-F10.pep
GLVWGCGHKLKERVRIGIELKSCLTRKRVNHYLRTIGLRFRI

SEQ ID NO: 99793 - protein, 124 aa, Gossypium hirsutum
  unsure (1)..(124): unsure at all Xaa locations
  Clone ID: LIB3196-004-P1-M1-F2.pep
SSISDLQMVNISLRVLSRPNAQELPSMYQRLGLDYEERVLPSIVNEVLKSVVAKFNASQLITQRAQVSLLIRRELTERAKDFSLILDDVAITELSFSREYTAAVEAKQVAXHEAQRAQFLVEKA

SEQ ID NO: 99794 - protein, 45 aa, Gossypium hirsutum
  Clone ID: LIB3196-004-P1-M1-F3.pep
GLGLSPKLVCTYQFNPYLQFGLQNTSFNRRNNFFDISWFSKHMMN

SEQ ID NO: 99795 - protein, 120 aa, Gossypium hirsutum
  Clone ID: LIB3196-004-P1-M1-F5.pep
LNVSLEPLWEELSNCIGMTEAQLAQSSLCPTVSNINVGEHLQGASSSSPLPPGTQRLLPFIEAFFVLCEKLHANHSIMQQDHVNVTAQEVKESAECSVTLPSKCGGDYQKKLDGSVTFAG

SEQ ID NO: 99796 - protein, 49 aa, Gossypium hirsutum
  Clone ID: LIB3196-004-P1-M1-F9.pep
YMIFLGDGGFENSLATGHTCPKLQGIIYNEEKVFRSNLKRGGLPPTTFN

SEQ ID NO: 99797 - protein, 53 aa, Gossypium hirsutum
  Clone ID: LIB3196-004-P1-M1-G10.pep
FPGSQHPQRRISTRLCRDAGGGGSSGENPASGCGVHECLKALVCGVPSPSFFS

SEQ ID NO: 99798 - protein, 111 aa, Gossypium hirsutum
  unsure (1)..(111): unsure at all Xaa locations
  Clone ID: LIB3196-004-P1-M1-G3.pep
SQIDASAAVTLQNHXGLDLLTAEKGGLCTFLGEECCFYTNQSGIVCDATQCLQEKASEIRQKLSNSYTNLWSWATWLLPFLGPMTDILLLLAFGTYIFNLLVKFVSSSIQA

SEQ ID NO: 99799 - protein, 123 aa, Gossypium hirsutum
  unsure (1)..(123): unsure at all Xaa locations
  Clone ID: LIB3196-004-P1-M1-G6.pep
VVPLPKGANVSWEPGFDGGYLQRFSVWYTPLAKRPDRMHHDWVSLAVPVGAAHLLVPGLQPHTQYQFSVLAQNKLGSGPFSEIVLSAPEGLPTTPAAPRLPPTEISPPLSPPRGLVAVRTPRX

SEQ ID NO: 99800 - protein, 124 aa, Gossypium hirsutum
  Clone ID: LIB3196-004-P1-M1-G7.pep
MDEADRRLLRRCRLRLVEELQVDQLWDALLSRELFKPHMIEDIQRAGSGSRRDQARQLITDLETRGSQALPSFISCLVDTGQDMLASFLRTNRQAVKLSKPTLENLTPVVLRPEIRKPEVLNRK

SEQ ID NO: 99801 - protein, 79 aa, Gossypium hirsutum
  Clone ID: LIB3196-004-P1-M1-G8.pep
GEAPVSLFTMQLLVMGLIFCFDLDKPGFHLGSNSSFSFLQRKGRNCSRIKYEVLIPRLISKTLPPHHGMWNRHLILQTK

SEQ ID NO: 99802 - protein, 93 aa, Gossypium hirsutum
  Clone ID: LIB3196-004-P1-M1-H3.pep
LYDKYTQILLVAVGQGRNKNVLPIALTIVNDNFTNLQWFVISNDNIYIIFDIRKGLIAAIRHSGMPWRSIYYIRHIALTSTKIIRVQTGGDKL

SEQ ID NO: 99803 - protein, 53 aa, Gossypium hirsutum
  unsure (1)..(53): unsure at all Xaa locations
  Clone ID: LIB3196-004-P1-M1-H5.pep
FSDPAGNMSENEEEEXSQQEGTGDYEVEEIPFGLEPQSPGFEPQSPEFEPQSP

SEQ ID NO: 99804 - protein, 71 aa, Gossypium hirsutum
  Clone ID: LIB3196-004-P1-M1-H6.pep
IFFCKSHKIIRNVIDLELATGQKQACVLKGNEIWSNIKSVELMDSSSPKQLLESITQVLRCEFGKLILFIY

SEQ ID NO: 99805 - protein, 66 aa, Gossypium hirsutum
  Clone ID: LIB3196-004-P1-M1-H8.pep
FKAYRRMYVGYLQILLFPWILESAGDSGDPLLPLCMLRDNCIYLGFKHWGLLLFLRPLLSMFPGSS

SEQ ID NO: 99806 - protein, 102 aa, Gossypium hirsutum
  Clone ID: LIB3196-004-P1-M1-H9.pep
NIHKGFGKIRLSQLYYFLLKTLTFFLITLFMPSNMDINVNVFLGLCFSFLILNYLSTSLQIVYLEFHLWPKCNCLIAQYAICNIIMLVKLFPGLLNYCDYIC

SEQ ID NO: 99807 - protein, 132 aa, Gossypium hirsutum
  Clone ID: LIB3196-005-P1-M1-A1.pep
AAAAAAGIMAELQEVQITEEKPLLPGQTPEAAKIHSVETPYGSVTFTVYGTPKPKRPAILTYHDVGLNYKSCFQPLFQFGDMQEIIQNFVRVHVDAPGMEEGAPVFPLGYQYPSLDQLADMIPCVLQYLNFS

SEQ ID NO: 99808 - protein, 67 aa, Gossypium hirsutum
  Clone ID: LIB3196-005-P1-M1-A2.pep
AQRQSARPGPPRFLFPVKARRGLRSSKQGQPGSRGAGLRHAAQAPGRGAYRRRTRTVERHKDQLLLM

SEQ ID NO: 99809 - protein, 94 aa, Gossypium hirsutum
  Clone ID: LIB3196-005-P1-M1-A4.pep
MDGSLLVQNALLFRTVYPHVRCWLNAGLFTSTIDGDTDRLPEFIVQTGSYMFVDENTFSNDALKVTFLITRLTGPALQWVIPYIKKDSPLLSDY

SEQ ID NO: 99810 - protein, 78 aa, Gossypium hirsutum
  Clone ID: LIB3196-005-P1-M1-A5.pep
MGRAMVVRLGLGLLLMALLLPTQIYSTVTTLAPLSSNSSQNTSTTPNAANTTTKAVGGALQSTASLFVVSLSLLHLYC

SEQ ID NO: 99811 - protein, 112 aa, Gossypium hirsutum
  unsure (1)..(112): unsure at all Xaa locations
  Clone ID: LIB3196-005-P1-M1-A6.pep
MAFIAKSFYDLSAISLDGEKVDFNTFRGRAVLIENVASLXGTTTRDFTQLNELQCRFPRRLVVLGFPCNQFGHHENCQNEEILNSLKYVRPGGGYQSTITLVQKCEVNGQNE

SEQ ID NO: 99812 - protein, 135 aa, Gossypium hirsutum
  unsure (1)..(135): unsure at all Xaa locations
  Clone ID: LIB3196-005-P1-M1-B1.pep
CGVVLWGRXDGFVNPGARFCLPEAAAVRRPPGEATVIMSDQEAKPSTEDLGDKKEGEYIKLKVIGQDSSEIHFKVKMTTHLKKLKESYCQRQGVPMNSLRFLFEGQRIADNHTPKELGMEEEDVIEVYQEQTGGH

SEQ ID NO: 99813 - protein, 132 aa, Gossypium hirsutum
  unsure (1)..(132): unsure at all Xaa locations
  Clone ID: LIB3196-005-P1-M1-B11.pep
MRTQTLAGWVLRDGTDRTLVTCMMTASLHWVPRARSRSHRWPRTHRKKNQDKTHPIPKSAMELLIEKLNQMRKKAXRLHQTTVRLNKLHADLKIHARDEHRRKKLKIDXWHKDWEKEARLIRNLKGILAKNG

SEQ ID NO: 99814 - protein, 72 aa, Gossypium hirsutum
  Clone ID: LIB3196-005-P1-M1-B2.pep
MSAIFNFQSLLTVILLLICTCAYIRSLAPSLLDRNKTGLLGIFWKCARIGERKSPYVAVCCIVMAFSILFIQ

SEQ ID NO: 99815 - protein, 41 aa, Gossypium hirsutum
  Clone ID: LIB3196-005-P1-M1-C1.pep
APAPNNVNAAMNVIANLQQQNQRILFDVANSRLGISREACN

SEQ ID NO: 99816 - protein, 95 aa, Gossypium hirsutum
  Clone ID: LIB3196-005-P1-M1-C11.pep
CVIQARMEEGELACSSKVELIGLAQCLGSYPVNAQSLGLEDENGARSGFNLPRVGDVICSWSSQGTWGSLIPTPFFPSQGLPGGYQKDRLRVYRD

SEQ ID NO: 99817 - protein, 132 aa, Gossypium hirsutum
  Clone ID: LIB3196-005-P1-M1-C4.pep
INNLRVNVENQIKIKIYINQVCEDVFSGPLNSAVQLAGLRLLTNMTVTNDHQHMLHNYITDLFQVLLTGNGNTKVQVLKLLLNLSENPAMTEGLLHAQVDSSFLSLYDSHVAKEILLRVLTLFQNINNCLKI

SEQ ID NO: 99818 - protein, 66 aa, Gossypium hirsutum
  Clone ID: LIB3196-005-P1-M1-C6.pep
MSFKGLSHYRGTLWLFYVKNQLSWILQIKPGVFNEYRTMWFKSYRMTFSCLNRIKSFRYRWARLYS

SEQ ID NO: 99819 - protein, 63 aa, Gossypium hirsutum
  Clone ID: LIB3196-005-P1-M1-C7.pep
CREKKASKLSTYVLSSCLFCIYFFHAYFIFIYICDKGKERYRLPGVVWPSRCRKSSSPMLQSF

SEQ ID NO: 99820 - protein, 80 aa, Gossypium hirsutum
  Clone ID: LIB3196-005-P1-M1-D12.pep
IFKPYILYIWKHLYFNIISHIARCMRMLMQLFQKLVQFLQNNSYQSSLHTIIEFPRTRPSNNTPCCDQATQYCNQVARCG

SEQ ID NO: 99821 - protein, 135 aa, Gossypium hirsutum
  Clone ID: LIB3196-005-P1-M1-D4.pep
CQCQPCQIILNQVCYCGSTCRDVLCGTDVGKSDGFGDFSCLKICGKDLKCGNHTCSQVCHPQPCQPCPRLPPLVRCCPCGQTPLSQLLELGSSGRKTCMDPVPSCGKVCGKPLPCGSLDFIHTCEKLCHEGDCGP

SEQ ID NO: 99822 - protein, 41 aa, Gossypium hirsutum
  Clone ID: LIB3196-005-P1-M1-D5.pep
ITLSTHTFTMQTIPTKSIHIRTSTYLINIFKPLIIKPSFIH

SEQ ID NO: 99823 - protein, 45 aa, Gossypium hirsutum
  Clone ID: LIB3196-005-P1-M1-D7.pep
SALKNMLSLCLYSFNLIYLIAAVKDKVFIFNAWCWINDFFLNYGF

SEQ ID NO: 99824 - protein, 83 aa, Gossypium hirsutum
  Clone ID: LIB3196-005-P1-M1-E1.pep
IPLLQWPHARCSDHPDLATVPPNLARGGHDHLGHTLFGRSARQGPNALQALLRRVRPGLPLPRRGARWETIWGSGWGCRWRHP

SEQ ID NO: 99825 - protein, 116 aa, Gossypium hirsutum
  Clone ID: LIB3196-005-P1-M1-E2.pep
ISDNEREDKGAHGPRPDTVGQRGGSRPSPGPIRCRHRSKVSSNQHTPSHPEQRGSASPMAGSGAKRSRDGELETSLNIQGCTTEGDLLFAQKCKELQGFIPPLTDLLNGLKMGRFE

SEQ ID NO: 99826 - protein, 120 aa, Gossypium hirsutum
  Clone ID: LIB3196-005-P1-M1-E3.pep
VAMGIAGSDVSKQAADMILLDDNFASIVTGVEEGRLIFDNLKKSIAYTLTSNIPEITLFLIFIIANIPLPLGTVTILCIDLGTDMVPAISLAYEQAESDIMKRQPRNPKTDKLVNERLIS

SEQ ID NO: 99827 - protein, 66 aa, Gossypium hirsutum
  Clone ID: LIB3196-005-P1-M1-E4.pep
KIANTIQILLASLWFSKIIMLSFLLYRMLLFIIFIQDTLFLALLFGPTAQFLHGMKWTRNLHLIFH

SEQ ID NO: 99828 - protein, 85 aa, Gossypium hirsutum
  unsure (1)..(85): unsure at all Xaa locations
  Clone ID: LIB3196-005-P1-M1-E8.pep
LFFLVLSRXLPXSLLLALLVPASLPLXCLALXLXFCPSFLGVFCVCALRVRPRVCPRVRSPRPPLAWVAPGVPGRCLRALLRSLL

SEQ ID NO: 99829 - protein, 49 aa, Gossypium hirsutum
  Clone ID: LIB3196-005-P1-M1-F1.pep
MSGRGAGGFPLPPLSPGGGAVAAVLGAPTTCGKPGNAATNGGSVLILSC

SEQ ID NO: 99830 - protein, 58 aa, Gossypium hirsutum
  Clone ID: LIB3196-005-P1-M1-F12.pep
GLVRGCGHKLKERVRIEIELKSFLTRKRVNIIRVIQELVCWAQGGLLGVNRGGRLFMA

SEQ ID NO: 99831 - protein, 46 aa, Gossypium hirsutum
  Clone ID: LIB3196-005-P1-M1-F2.pep
PKVIHPPRPSQGCSDYRRESKLLTNLCWRLHFFFLNEKSDLSDLDQ

SEQ ID NO: 99832 - protein, 58 aa, Gossypium hirsutum
  Clone ID: LIB3196-005-P1-M1-F4.pep
WMKCYMAVYTAIIVARLQIYVRQLSCNYMSGTPPPIGVIGWMDSSSPIWCERLDGDGV

SEQ ID NO: 99833 - protein, 35 aa, Gossypium hirsutum
  Clone ID: LIB3196-005-P1-M1-F6.pep
FTTIMAMLGAVYHIIQLKLLNTNHYQPPLTKNHTL

SEQ ID NO: 99834 - protein, 90 aa, Gossypium hirsutum
  unsure (1)..(90): unsure at all Xaa locations
  Clone ID: LIB3196-005-P1-M1-F8.pep
DGSNILYCEKEILKFWKGVKDGLALPLLIDLSFKIGLPIAGCDMRLSADLKLQILDSLFCTDVAWMAXCVSAEMRYVAFDNDLWMKKVQE

SEQ ID NO: 99835 - protein, 99 aa, Gossypium hirsutum
  Clone ID: LIB3196-005-P1-M1-G10.pep
DTLQAKDLRVLLKWFYFRFSPFAFYHFTINFVMLLNSPLLFCFIFTLVPFKCSALEGRENLLFNPPCHLCISNKSSPFPFISDSPQMFVLTSISSLFAF

SEQ ID NO: 99836 - protein, 125 aa, Gossypium hirsutum
  Clone ID: LIB3196-005-P1-M1-G11.pep
RVFIIYNYKLVRAKIPFQRKMGAKEKTRGCQLPRAPTAIAAASPTLVLSAEEAVARGGGEIMLFGDREAGDGMRNSVSLNNHDHYDQPDEWDKNYNKDDRDQGDDTLTGRYASSDDTCRHSTGNR

SEQ ID NO: 99837 - protein, 49 aa, Gossypium hirsutum
  Clone ID: LIB3196-005-P1-M1-G4.pep
KLIKLLYYEDHELLVNKVERSKIRVFCSECQIVLGIRCNGCGLLGCQLV

SEQ ID NO: 99838 - protein, 53 aa, Gossypium hirsutum
  Clone ID: LIB3196-005-P1-M1-G9.pep
WRSLLDMSTMVTTEGLTAMVSLSNWGKFKLTKFSQMDKSQFCQRDNLDPPIFY

SEQ ID NO: 99839 - protein, 113 aa, Gossypium hirsutum
  unsure (1)..(113): unsure at all Xaa locations
  Clone ID: LIB3196-005-P1-M1-H1.pep
SPTRSPTRAWLDKNTGGVCLSMSSKALTITGIDDRRYWNHISTEESRYRTVAYLQQTWWFEVDGELEFQFPAGTYSLFFRLHLGKSSKRLGRRVCNTEHXHGWDIKPVQXQLT

SEQ ID NO: 99840 - protein, 65 aa, Gossypium hirsutum
  Clone ID: LIB3196-005-P1-M1-H11.pep
WLPECLTLLCSADTLSPSCRWETDPQKTFTQDDSAGQHTVKPKLTLRLLWQQGPCAKDLGQLRGP

SEQ ID NO: 99841 - protein, 55 aa, Gossypium hirsutum
  Clone ID: LIB3196-005-P1-M1-H2.pep
YAFLIGLKIMHSLYLCFVVYTTATLTFERQQVKTIFFFIAKIADGYQRAFSFPLV

SEQ ID NO: 99842 - protein, 130 aa, Gossypium hirsutum
  Clone ID: LIB3196-005-P1-M1-H4.pep
VPSLSLGADMGSKVADLLYWKDTRTSGVVFTGLMVSLLCLLHFSIVSVAAHVALLLLCGTISLRVYRKVLQAVHRGDGANPFQAYLDVDLTLTREQTERLSQQIASRVVSAATQLRHFFLVEDLVDSLKL

SEQ ID NO: 99843 - protein, 99 aa, Gossypium hirsutum
  Clone ID: LIB3196-005-P1-M1-H5.pep
KIDCMKSDLILVTFACRRILTLLIDRYIERISCRMCNLAYVTWVVAQNLQVLQHLLLLPLYIKFLELIAPNILNFFLLQLRRGLDGTGSMIICACQLLV

SEQ ID NO: 99844 - protein, 33 aa, Gossypium hirsutum
  Clone ID: LIB3196-005-P1-M1-H6.pep
TLALGKQNLITKVKKNGFAHRLYSLCEPLKYTC

SEQ ID NO: 99845 - protein, 70 aa, Gossypium hirsutum
  Clone ID: LIB3196-006-P1-M1-A10.pep
LRKHLLKIFTNLLFRNGDPKIHFFCNGKIQVITRHARVSTRVDNIRLFTKPCATLKHNLIPINISKSNLI

SEQ ID NO: 99846 - protein, 86 aa, Gossypium hirsutum
  unsure (1)..(86): unsure at all Xaa locations
  Clone ID: LIB3196-006-P1-M1-A11.pep
ESVSQFNLYSLYITSLRQFFLSSKAGRSQWHDSGSLQXPPPGFEQFSCVSLPNSWDSRCTPPCPVNFFGFLVETGFRHVGQTGLEH

SEQ ID NO: 99847 - protein, 55 aa, Gossypium hirsutum
  Clone ID: LIB3196-006-P1-M1-A12.pep
LAFAFIRLILYHSSPPKILLPLTLSQVIVTSSPPLVEMDKTNYLIILKGPYVFCL

SEQ ID NO: 99848 - protein, 58 aa, Gossypium hirsutum
  Clone ID: LIB3196-006-P1-M1-A3.pep
MFHWRKQVILKDLVCIKFKCPCRYGLNSTCCKAAEQRNHTSFICATIRFFYCEQTLYL

SEQ ID NO: 99849 - protein, 97 aa, Gossypium hirsutum
  Clone ID: LIB3196-006-P1-M1-A4.pep
TCWSMGRQIIQIQQKMFIRTLWSLKVPSKVGISLCRITSNYLLTLSNIKARRMRFDAICPLYGRQDESVNQIFRECNRVEQVLQQMEVTPAPIHKNQ

SEQ ID NO: 99850 - protein, 78 aa, Gossypium hirsutum
  Clone ID: LIB3196-006-P1-M1-A8.pep
CFTGGNKLFSNICTVLNLNVNVKWFKFYMLKSCRAEEPNQVYLCYQEVFLLGTGLLSLVTLYRMISMSTLVFVYVFFF

SEQ ID NO: 99851 - protein, 35 aa, Gossypium hirsutum
  Clone ID: LIB3196-006-P1-M1-B10.pep
VVLHSSVIFYIINILKIQTLYFMFHLYRSYMSSLA

SEQ ID NO: 99852 - protein, 125 aa, Gossypium hirsutum
  Clone ID: LIB3196-006-P1-M1-B11.pep
NNTDPEPGRCRRTDGKKWRCSRDAVAGQKYCERHMNRGRHRSRKPVEGQPGHSVTATAATTSKLMPNVSSSSASAVGPVGGSGEPNSLTSARQKYENLQLGGTSNLSAAASLNRSILNKDTVGEK

SEQ ID NO: 99853 - protein, 91 aa, Gossypium hirsutum
  unsure (1)..(91): unsure at all Xaa locations
  Clone ID: LIB3196-006-P1-M1-B2.pep
IRRLGPVPDPHYPDDDQVMLKKDVDAEYMNKCGAXAKINALIDEINFMKMXYDAMLAQMQTHVSDTSXVLFIVNNRKLDLVSIIHDVKAYY

SEQ ID NO: 99854 - protein, 128 aa, Gossypium hirsutum
  Clone ID: LIB3196-006-P1-M1-B4.pep
IGSSGSLSTSSSSSPPGTPSPADAKAPPAACYAGAAPPPSQVKSKAKKTVDKHSDEYKIRRERNNIAVRKSRDKAKMRNLETQHKVLELTAENERLQKKVEQLSRELSTLRNLFKQLPEPLLAFSGHC

SEQ ID NO: 99855 - protein, 126 aa, Gossypium hirsutum
  Clone ID: LIB3196-006-P1-M1-B6.pep
EDAFWMLAVLLENVLVNDCYTTNLSGCHVEQRVFKDLLAKKCPRIAAHLEALEFDVSLVATEWFLCLFSKSLPSETTLRVWDVLFYEGAKVLFHVALAIFKMKEHELLLTHQVGDIINILQRTTHH

SEQ ID NO: 99856 - protein, 64 aa, Gossypium hirsutum
  Clone ID: LIB3196-006-P1-M1-B7.pep
CLSLAQLREGNDSRGRPLYPSIQPASFTTGPLSRRRNRGLRIGAHPGNCGGAPACFCVPSCYIV

SEQ ID NO: 99857 - protein, 62 aa, Gossypium hirsutum
  Clone ID: LIB3196-006-P1-M1-B9.pep
GRVGTRHSRFGILVLITDVNGHFSAFKTLLLSCPKLSPQLSPLVVVVAQKSFLFVTIDLSFI

SEQ ID NO: 99858 - protein, 46 aa, Gossypium hirsutum
  Clone ID: LIB3196-006-P1-M1-C10.pep
PTLQNVAQASPGASTIVTVPTGAAPGPEEHTATIEVAAVAEDHERK

SEQ ID NO: 99859 - protein, 130 aa, Gossypium hirsutum
  Clone ID: LIB3196-006-P1-M1-C12.pep
SPRVLFAGSYVSDPSNTANVSTSGLEVYPSRTQLPGLLPQPVLAGVVGGVCFLGVAVLVSILAACLMNRRRAARRRRKRLRQDPPLIFSPTGTSAAPSALGSGSPDSVAKLKLQGSPVPSLRHSLLWGDP

SEQ ID NO: 99860 - protein, 43 aa, Gossypium hirsutum
  Clone ID: LIB3196-006-P1-M1-C6.pep
IASAGLVFFFFFFFFFFFFFFFFFFFFFFFFFFFGKGKKEKVF

SEQ ID NO: 99861 - protein, 93 aa, Gossypium hirsutum
  Clone ID: LIB3196-006-P1-M1-C7.pep
DPVSVVGETVVLLISKLGILPREEHSARAPYSLYHGCKFHVCSLCISIFIYIIKFYASILVFISRYFMHKLLVIQKCFRDFSLYLALYSFRKY

SEQ ID NO: 99862 - protein, 125 aa, Gossypium hirsutum
  Clone ID: LIB3196-006-P1-M1-C9.pep
PTRPISLLHHMIKTQPSFSPDRSTHHVLLSQSCKAPDSSLSAVNQILNLMINNGLKPNQVTTDIAIRSLCEVGRIDHAVELVKELSLKQSPPDNYTFNLLVKNLCKCRTLSTVYSFIDHMKSSFG

SEQ ID NO: 99863 - protein, 131 aa, Gossypium hirsutum
  Clone ID: LIB3196-006-P1-M1-D10.pep
CTKHKTILEARSGLGPIKAYPRLGPPTPGEPEAPAQDRTFHCEICNVKVNSEVQLKQHISSRRHRDGVAGKPNPLLSRHKKSRGAGELAGTLTFSKELPKSLAGGLLPSPLAVAAVMAAAAGSPLSLRPAP

SEQ ID NO: 99864 - protein, 95 aa, Gossypium hirsutum
  unsure (1)..(95): unsure at all Xaa locations
  Clone ID: LIB3196-006-P1-M1-D5.pep
FVSFSFKYRYVMGNNPADLLAVDPRTGIITLKNKVTREQYNMLGGKYQGTILSXDDALQRTCTGTINIDIQNVDGDDRTNTQASTEVTNTGREES

SEQ ID NO: 99865 - protein, 81 aa, Gossypium hirsutum
  Clone ID: LIB3196-006-P1-M1-D7.pep
IRSGRVPNTVFPRQNPWPARGSRRPNPRVPGGIEGAWEGALFLGHYLKKRDNPAFPPALLFLCRGPRNSATEGQSPQYVKT

SEQ ID NO: 99866 - protein, 97 aa, Gossypium hirsutum
  unsure (1)..(97): unsure at all Xaa locations
  Clone ID: LIB3196-006-P1-M1-E11.pep
KTKKTSTGATHFSLVYGIETILPVEVDIPSLRVLLELKLDEAEWIQARYDQLNLIEEKRLKAIRHGQIYQKQMMRAXKKVHPSEFHEVDLISKKILP

SEQ ID NO: 99867 - protein, 127 aa, Gossypium hirsutum
  Clone ID: LIB3196-006-P1-M1-E6.pep
KAFFSTQAGKQNPPFPSFKAAKYAIITEKDPEKLAEIFEQCSHLPTFLRHRPIYHLSIRKLARANRLDLVDRLLETQKLHSQDTPALKSEGFWIRLIMLYSNAGMVPQALQTLDDLSRNRYCNISEK

SEQ ID NO: 99868 - protein, 130 aa, Gossypium hirsutum
  Clone ID: LIB3196-006-P1-M1-E7.pep
MFAVMFGDVGHGLLMFLFALAMVLAENQPAVKAAQNEIWQTFFRGRYLLLLMGLFSIYTGFIYNECFSRATSIFPSGWSVAAMANQSGWSDAFLAQHAMLTLDPNVTGVFLGPYPFGIDPVWSLAANHLS

SEQ ID NO: 99869 - protein, 57 aa, Gossypium hirsutum
  Clone ID: LIB3196-006-P1-M1-F1.pep
INPYTHHGSTPQTSKNYFLWYQDRLQIANPHSISINTLPYEIHYSLLLLEIVKIGEG

SEQ ID NO: 99870 - protein, 115 aa, Gossypium hirsutum
  Clone ID: LIB3196-006-P1-M1-F10.pep
MTLFPVLLFLVAGLLPSFPANEDKDPAFTALLTTQTQVQREIVNKHNELRRAVSPPASNMLKMEWNKEAAANAQKWANQCNYRHSNPRDRKTSLKCGENLYMSSAPNSWSQAIQS

SEQ ID NO: 99871 - protein, 132 aa, Gossypium hirsutum
  Clone ID: LIB3196-006-P1-M1-F2.pep
STIGLIAKSVEIPTTNLHSNVIPSCEPQSLVENLTQKLNNVNNQLFMTDVKENFKTSIESHTVLAPLTLKTENGDSQMMALNSCTTSINSDLQISEDNVIQNFEKTLEIIKTAMNSQILEVKSGSQGAGETS

SEQ ID NO: 99872 - protein, 48 aa, Gossypium hirsutum
  Clone ID: LIB3196-006-P1-M1-F4.pep
YFWFPWVRYPGLAIAILLFDRCACLFLVIIVSLGLIFIINIYYLLRIT

SEQ ID NO: 99873 - protein, 71 aa, Gossypium hirsutum
  Clone ID: LIB3196-006-P1-M1-F8.pep
LLVSQLYIFVENTDCARNSAETIVSTGERGSTPSTVLCFCMEDAPPVHCPVLLYGGCSPRPLSCASVWRMH

SEQ ID NO: 99874 - protein, 52 aa, Gossypium hirsutum
  Clone ID: LIB3196-006-P1-M1-G2.pep
HIKVFQRLLVNNPSTLSKQSKLYDFPPLEDGAWPNSTFFTTYHLAIVAGTHK

SEQ ID NO: 99875 - protein, 66 aa, Gossypium hirsutum
  Clone ID: LIB3196-006-P1-M1-G3.pep
LTTKTLIFHFSFEIYICVCMFNCIYHHFIFYFAVGQERLSQRLFSVTLFKDFAINPLVFLLYSNYF

SEQ ID NO: 99876 - protein, 71 aa, Gossypium hirsutum
  Clone ID: LIB3196-006-P1-M1-G4.pep
MLCIWYIYIYIKYMEEEKTGTTEACDPGGTGGRPQGSHPCKQEQGLFWHCSFVLKLDLYICKAIYGPPAPS

SEQ ID NO: 99877 - protein, 61 aa, Gossypium hirsutum
  Clone ID: LIB3196-006-P1-M1-G6.pep
YMFYFPTSEQLTKIHIINCFWLNPLEANYKGTAALGVKATFWSHIHSMVASQYLRRSEFKT

SEQ ID NO: 99878 - protein, 56 aa, Gossypium hirsutum
  Clone ID: LIB3196-006-P1-M1-H11.pep
NLLSIEMLILCFIDFVRELSDSGVSKSKSSTLSKPLFGTLQLNLIMACIGLTLDVN

SEQ ID NO: 99879 - protein, 107 aa, Gossypium hirsutum
  Clone ID: LIB3196-006-P1-M1-H4.pep
AKVASKNVIPALELVEPIKKHEVPAKSDVYCEVCEFLVKEVTKLIDNNKTEKEILDTFDKMCSKLPKSLSEECQEVVDTYGSSILSILLQEVSPELVCSMLRLCSCT

SEQ ID NO: 99880 - protein, 47 aa, Gossypium hirsutum
  Clone ID: LIB3196-006-P1-M1-H5.pep
VLIFIQFLMIFQSQNKGTRNHSDLVSQNLLYLMIYNSIVYIISSIRN

SEQ ID NO: 99881 - protein, 125 aa, Gossypium hirsutum
  Clone ID: LIB3196-006-P1-M1-H7.pep
LFGQSSNSNTVPQDINLNAGLMDDDNNCQDTEQSNLYKPSGSQNERISAFTGPEAFLLSSGSGGYVMGDNDRRPVCPYEGRRASCKRKTLEGNVGQSSSSGSSSYFHRGENSGCRGLPVSYSTGS

SEQ ID NO: 99882 - protein, 95 aa, Gossypium hirsutum
  unsure (1)..(95): unsure at all Xaa locations
  Clone ID: LIB3196-007-P1-M1-A10.pep
MKVTIILLLLAQVSWAGPFQQRGLFDFMLKDEASGIGPELPDDRDYEPPLGPMCPFRCQCHLRVVQCSDLGLDKVPKDLSPXDTTLLDLQNNIIT

SEQ ID NO: 99883 - protein, 130 aa, Gossypium hirsutum
  Clone ID: LIB3196-007-P1-M1-A4.pep
LTREQDRAHQTSETVTGSGTQTQAGATHTVEHDSSHQTGSTSSQTHGSTNGQNSGTEIHGQGRSQTSQAVTGHAQIQAGTHTLTPTQTREQDSGHQTESTSTQTQGSTNDQNRGTEIQGQGGSQTSQAVA

SEQ ID NO: 99884 - protein, 89 aa, Gossypium hirsutum
  unsure (1)..(89): unsure at all Xaa locations
  Clone ID: LIB3196-007-P1-M1-A6.pep
MQAEDLGSRGGALQLFLCLASRNYMNDSLRTDVFVRFQPESIACACIYLAARTLEIPLPNRPHWFLLFGATEEEIQEICLKILXAYARK

SEQ ID NO: 99885 - protein, 62 aa, Gossypium hirsutum
  Clone ID: LIB3196-007-P1-M1-A7.pep
KFRLKISTFENSGLVWMGGVFSSGEVKNSGGYEISYYSSEIGYCNGEIRNGGGVCVWIQMQL

SEQ ID NO: 99886 - protein, 84 aa, Gossypium hirsutum
  Clone ID: LIB3196-007-P1-M1-B1.pep
WVVMLNYHHSYVPSPHPIFFFFFLISKEIQETSLEWCCTCYERGSSTVCGIYMVPGLHRVPRCCSLGPHLVQRIWGPYLYSFIS

SEQ ID NO: 99887 - protein, 128 aa, Gossypium hirsutum
  unsure (1)..(128): unsure at all Xaa locations
  Clone ID: LIB3196-007-P1-M1-B6.pep
HYITSGYAEARWCRAAVSGITPTQARVPTMHITKAHTMKPAARLTPVRAAAASPIEEXARPRQVRCQRCKACGQGQCGGCHYCTDLTKLGRPGLMNQKRVLRQCLAPILRYSVTXPLCGEVDQKGETQ

SEQ ID NO: 99888 - protein, 59 aa, Gossypium hirsutum
  Clone ID: LIB3196-007-P1-M1-B7.pep
SVDHISSREFVSCPTGYSNVEVLKVSEVVMVKFQTRIRDGVIPEIPARQQPASLYLLVL

SEQ ID NO: 99889 - protein, 48 aa, Gossypium hirsutum
  Clone ID: LIB3196-007-P1-M1-B8.pep
GIAYYFHTVLISYKAYSLPFLSFSIFRLAQGWRSSEAVSDYQTIAFGI

SEQ ID NO: 99890 - protein, 41 aa, Gossypium hirsutum
  Clone ID: LIB3196-007-P1-M1-B9.pep
GYYKQHLFTFHMNKSELHRDHISQFITLLNDLKNVEVDIDD

SEQ ID NO: 99891 - protein, 137 aa, Gossypium hirsutum
  unsure (1)..(137): unsure at all Xaa locations
  Clone ID: LIB3196-007-P1-M1-C1.pep
MAEQEQRKIPLVPENLLKKRKAYQALKATQAKQALLAKKEQRKGKGLRFKRLESFLHDSWRQKRDKVRLRRLEVKPHALELPDKHSLAFVVRIERIDGVSLLVQRTIARLRLKKIFSGVFVKVTXQNLKMLRIVEPY

SEQ ID NO: 99892 - protein, 109 aa, Gossypium hirsutum
  Clone ID: LIB3196-007-P1-M1-C3.pep
PSWPPAMLAARRLLGGSLPSRVSVRFSGDTTAPKKTSFGSLKDEDRIFTNLYGRHDWRLKGALSRGDWYKTKEILLKGPDWILGEIKTSGLRGRGGAGFPTGLKWSFMN

SEQ ID NO: 99893 - protein, 38 aa, Gossypium hirsutum
  Clone ID: LIB3196-007-P1-M1-C5.pep
SRLCLSYGLHLTEGFVQAFEEHRFISLTWVRFNQASAE

SEQ ID NO: 99894 - protein, 67 aa, Gossypium hirsutum
  Clone ID: LIB3196-007-P1-M1-D10.pep
FHRPCNFELYPWNFKYYVLRPWVLFESYKECQYFCFSRQSAWLNSGCKFLPPFCWYGFNVSSICKVF

SEQ ID NO: 99895 - protein, 80 aa, Gossypium hirsutum
  Clone ID: LIB3196-007-P1-M1-D11.pep
RYFRYQMYNILLPKVKGKIYTRFSLPLPYYMFPSEFKWLMCQSSQARHLVIVFIMRGVDYGTNAYEHLLFLGWSRLTFIS

SEQ ID NO: 99896 - protein, 54 aa, Gossypium hirsutum
  Clone ID: LIB3196-007-P1-M1-D12.pep
GQKEADCLVMQERVSSKLDVIHSAVWEDVINLETLHVFPIDRDPPSSVDKVVFR

SEQ ID NO: 99897 - protein, 122 aa, Gossypium hirsutum
  Clone ID: LIB3196-007-P1-M1-D3.pep
GHLYSPLQRRRMRLREGETCQGCTVHSRKVRVQIQACLMPIPLIAMPGRLPGGAGGRGVGRRGCNRGCREGRCREGRAGGGLRTLPHTDPAAAAVRGDREMSTARPAPDTPSPPRPGQLWAE

SEQ ID NO: 99898 - protein, 83 aa, Gossypium hirsutum
  Clone ID: LIB3196-007-P1-M1-D5.pep
WIMGLVLAMACFVSPAPLPVSSCGLGSSTSLCTTGAVVVYVEPSHMFALASASGLSRHNIGLSVHLIPSLSVSTVALSFALFR

SEQ ID NO: 99899 - protein, 41 aa, Gossypium hirsutum
  Clone ID: LIB3196-007-P1-M1-D7.pep
KCNYFLKSIQLLDDYPKCFILGAVNVGSTQMHQIHLSLGGK

SEQ ID NO: 99900 - protein, 93 aa, Gossypium hirsutum
  unsure (1)..(93): unsure at all Xaa locations
  Clone ID: LIB3196-007-P1-M1-D9.pep
WSFRYSNSFYYSNTSRRGESRSDLSLXGGYEEIDGYEDFTAQFVCPLSAEDTDIVGLXRHIAQXHAAETKYGACTGCANRDSMDIVSRITMRH

SEQ ID NO: 99901 - protein, 102 aa, Gossypium hirsutum
  Clone ID: LIB3196-007-P1-M1-E1.pep
ATPTNYVERWSALVPRPGFPGLALPFGGLYVALGYLTTNHGEVPYALRGLAYRLIIGETFSYRCDALFCIHAERLLHSLLLVDYFQLAALDGLFWLTTELHR

SEQ ID NO: 99902 - protein, 132 aa, Gossypium hirsutum
  Clone ID: LIB3196-007-P1-M1-E10.pep
HTPQPLHTERSNFCNLFPYPPEAAITPSAKLLAGRAPNLDFRCAALRVSNQYRDCRCLLGTGTGPLVLPPNLPKAPGKKPLIREQPPSRPLATGPVLAKAPRNGAKSTFLTGAGPCAESGREAAWLLSPVEN

SEQ ID NO: 99903 - protein, 87 aa, Gossypium hirsutum
  Clone ID: LIB3196-007-P1-M1-E12.pep
PVKEFWFNGYRCMICQNGYLVTHHSWYATSAIGFKSLNCGTIRRDSKGTVMPIEILCAAIRSSKSGSHPGNCGGAPACFCVPTCYIV

SEQ ID NO: 99904 - protein, 115 aa, Gossypium hirsutum
  unsure (1)..(115): unsure at all Xaa locations
  Clone ID: LIB3196-007-P1-M1-E2.pep
ATLAGDRTRQLDXSHVEYLRRVDHALDIEGSNEMYPNELARLIEMTYPQNKPTXITXIIVMMGAENMREXLPHLLTAHRGAPXAETRVSYPIHACTTIASCRLRTALFGAIKAEG

SEQ ID NO: 99905 - protein, 134 aa, Gossypium hirsutum
  Clone ID: LIB3196-007-P1-M1-E4.pep
MSFGLGTSLSAMDTSDLFASCRKGDVGRVRYLLEQRDVEVNVRDKWDSTPLYYACLCGHEELVLYLLANGARCEANTFDGERCLYGALSDPIRRALRDYKQVTASCRRRDYYDDFLQRLLEQGIHSDVVFVVHG

SEQ ID NO: 99906 - protein, 71 aa, Gossypium hirsutum
  Clone ID: LIB3196-007-P1-M1-E5.pep
RCIRAHTVSTLSTGDTLSFSLCVCRGASVSVDVLMQILRHGAEYNPPPPLPTNIHSSWSWWHRFGKRPLCS

SEQ ID NO: 99907 - protein, 62 aa, Gossypium hirsutum
  Clone ID: LIB3196-007-P1-M1-E8.pep
NWLILSYCRYHIHYAAVLYIFFLEISYLCISVFVTLTHCYVRNVTGEIDQPLLRCCHISWNE

SEQ ID NO: 99908 - protein, 64 aa, Gossypium hirsutum
  Clone ID: LIB3196-007-P1-M1-F12.pep
AIHRERALSKIQSYILMLTAKCLFYSVTKIKLNLLTGPTPGLYKQYNVPTLSDHITFSFQQLNL

SEQ ID NO: 99909 - protein, 39 aa, Gossypium hirsutum
  Clone ID: LIB3196-007-P1-M1-F7.pep
MTNDSQPPNSRSLLCNAGAGAAAGVIAATFVCPLDVIKT

SEQ ID NO: 99910 - protein, 63 aa, Gossypium hirsutum
  Clone ID: LIB3196-007-P1-M1-F8.pep
GSSAGKRYSPQFVKAAKLLHWNGHFKPWGRTASYTDVWEKWYIPDPTGKFNLIRRYTEISNIK

SEQ ID NO: 99911 - protein, 45 aa, Gossypium hirsutum
  Clone ID: LIB3196-007-P1-M1-G12.pep
EEYDDEGDEEMGKLCCGHSFHIQCIKQWLLQKNACPVCKTEASPR

SEQ ID NO: 99912 - protein, 106 aa, Gossypium hirsutum
  Clone ID: LIB3196-007-P1-M1-G5.pep
HASDSITGMCITAIRCETAKSKKPKSEESTPLGRVTARMASPVIKLGRVVDEMAMSTFMDQDDVGPFWAELDHVGPMGLWAPHEEITQELGNIGPGYVNHMAKAIL

SEQ ID NO: 99913 - protein, 65 aa, Gossypium hirsutum
  Clone ID: LIB3196-007-P1-M1-G8.pep
QLVDIFLDDITLTVCFHRWSTNLGIERSYTVPIYRLMIENHAREGISFSNIHDILLFYFTRPALI

SEQ ID NO: 99914 - protein, 111 aa, Gossypium hirsutum
  Clone ID: LIB3196-007-P1-M1-G9.pep
SGSLQGLREGDALLPTRALAGPRSRLSYLYWPLGLLTRSVRFRYGQTARRRYAEGRPRLLSTGEPESMQEEESARRAIERAECSGSISWDHCAAGACSAGVKAGRLLPSRT

SEQ ID NO: 99915 - protein, 85 aa, Gossypium hirsutum
  Clone ID: LIB3196-007-P1-M1-H1.pep
MAASAAFSEHFEKLHEIFRGLHEDLQGVPERLLGTAGTEEKKKLIRDFDEKQQEANETLAEMEEELRYAPLAFRNPMMSKLRNYR

SEQ ID NO: 99916 - protein, 56 aa, Gossypium hirsutum
  Clone ID: LIB3196-007-P1-M1-H12.pep
NIFPQYLTQFFSHTLAQDYRTIKLCLYYLHSTDIILLTNGLFIRSVFHNFVFDQKW

SEQ ID NO: 99917 - protein, 122 aa, Gossypium hirsutum
  Clone ID: LIB3196-007-P1-M1-H3.pep
IKLEEDLVPEPATGDDSDAATFKPTLPDLSPDEPSEALGFPMLEKEEEAQRPPSPTEAPTEASPEPAPDPAPVAEEAAPSAAEEGAVADPGSDGSPGKSPSKKKKKFRTPAFLKMSKKKSDS

SEQ ID NO: 99918 - protein, 81 aa, Gossypium hirsutum
  Clone ID: LIB3196-007-P1-M1-H7.pep
WVIYNPSPSAFQMRFNPIILFLFRFNLSFCFCFILIHIKALRFGQGIIYLFDPKYYARISRQPLDISNCIFHTLILVLLSI

SEQ ID NO: 99919 - protein, 130 aa, Gossypium hirsutum
  Clone ID: LIB3196-007-P1-M1-H8.pep
MVRVGGPGRPWLHCFWGKSCSPSFLHPGWALGLPANQDPLRWLPRTCALASISQVKLIHDQTSPNPKYRGFFHGVREIVREQGLKGAYQGLTGTVLKHGSNQAIRSLVMTYLRNWYRGDNPNKPMNPLIT

SEQ ID NO: 99920 - protein, 55 aa, Gossypium hirsutum
  Clone ID: LIB3196-007-P1-M1-H9.pep
ALAAEGARGIQAKVFETVLRFVLASTCCTKSKNKYRLTNGYLLLYFYWPGISNGP

SEQ ID NO: 99921 - protein, 94 aa, Gossypium hirsutum
  Clone ID: LIB3196-008-P1-M1-A1.pep
AGERRGGDQCATDDEEKSRDGHTALSSRAPACENSRRGRQEAASVGTRCTSQAQWWGPAHAISSATYFFYLPYQKPIPVNRCVCETQVPGQSPV

SEQ ID NO: 99922 - protein, 74 aa, Gossypium hirsutum
  Clone ID: LIB3196-008-P1-M1-A12.pep
MTSSQDSNPPNILFQCPVLSLQDVVKGLFVCCLFLEYVALSQRFIPELINFLLGILYIATSNKASQEHLGSTRN

SEQ ID NO: 99923 - protein, 129 aa, Gossypium hirsutum
  unsure (1)..(129): unsure at all Xaa locations
  Clone ID: LIB3196-008-P1-M1-A4.pep
IRKASNEAKRYTRRPLVVVYYSVDFSFDYRAATQFWRSKVLEVAKDFPEYTFAIADEEDYAGEVKDLGLSESXEDVNAAILDESGKKFAMEPEEFDSDTLREFVTAFKKGKLKPVIKSQPVPKNNKGPV

SEQ ID NO: 99924 - protein, 104 aa, Gossypium hirsutum
  Clone ID: LIB3196-008-P1-M1-A5.pep
RGSSKSGKLKGDDLQAIKKELTQIKQKVDSLLENLEKIEKEQSKQAVEMKNDKSEEEQSSSSVKKDETNVKMESEGGADDSAEEGDLLDDDDNEDRGDDQLELI

SEQ ID NO: 99925 - protein, 80 aa, Gossypium hirsutum
  Clone ID: LIB3196-008-P1-M1-A8.pep
MFLNKPMAAVSPPLDPPLLFARISGILVAALVLSWALLFKSKLLPHSSLPSQEALIYAVLHPLLMVMGFILISGEPILIH

SEQ ID NO: 99926 - protein, 39 aa, Gossypium hirsutum
  Clone ID: LIB3196-008-P1-M1-A9.pep
LYTCGSLARVIVSEQASVFLKRIVLERLKIAFRMRYILA

SEQ ID NO: 99927 - protein, 106 aa, Gossypium hirsutum
  Clone ID: LIB3196-008-P1-M1-B1.pep
IAQNTKNLMTQLAGPKTQTVSAEAETLASPSTVPPFYQPRASSAPTPLEGRLCLSFAPKRKPLSLTLLPTCKQTKKGNRNNTTRNRDVFGYIAKRTKCNFFFTHAS

SEQ ID NO: 99928 - protein, 82 aa, Gossypium hirsutum
  Clone ID: LIB3196-008-P1-M1-B10.pep
RYTPKKNSVKQFGPFQMSAAETELGKSDGSGHKGRKKPPLNPISTTKPHEIPLKSGESEKSDLHGFSTSRMSFKFPFCHPSL

SEQ ID NO: 99929 - protein, 56 aa, Gossypium hirsutum
  Clone ID: LIB3196-008-P1-M1-B5.pep
SKKKKILVDSNNSVCLTRNWKFFPIFLVESSFALPYSSIMVNEFLKIIQLRQRKMV

SEQ ID NO: 99930 - protein, 73 aa, Gossypium hirsutum
  Clone ID: LIB3196-008-P1-M1-C10.pep
WPPFFFFFVFWFFFLPGYITLFGKLFCRGSLPKLGSLYKTYRFLEMMRPWKPRPGPDLAGTNLAGGSEVPGDR

SEQ ID NO: 99931 - protein, 39 aa, Gossypium hirsutum
  Clone ID: LIB3196-008-P1-M1-C3.pep
DTWAVRVGEFNRFLVSFQCKNVDRHHWRKHVMPYCVTSL

SEQ ID NO: 99932 - protein, 46 aa, Gossypium hirsutum
  Clone ID: LIB3196-008-P1-M1-C5.pep
CDLALSKCMAAIEPNTSPSHYKPVKNACSSCLPAILLRWETQKKNE

SEQ ID NO: 99933 - protein, 112 aa, Gossypium hirsutum
  Clone ID: LIB3196-008-P1-M1-C6.pep
CSYICHSQLTLKRYEQQRDNLAQQSFNMEQANYTIQSLKDTKTTVDAMKLGVKEMKKAYKQVKIDQIEDLQDQLEDMMEDANEIQEALSRSYGTPELDEDDLEAELDALGDE

SEQ ID NO: 99934 - protein, 93 aa, Gossypium hirsutum
  Clone ID: LIB3196-008-P1-M1-C9.pep
ECETSATCWVGSRPHLPSGSLDRAGGRWACVLGGSCSSHPSGCLCLRLPSLKRVSRRTGTAAPRQRVSGLQLLPRLRSLATPQPLRHQDWPLP

SEQ ID NO: 99935 - protein, 50 aa, Gossypium hirsutum
  Clone ID: LIB3196-008-P1-M1-D3.pep
SEWLKINHTKIYQMIKNYWNVYIRVRGWLSLLHSVCLYKLKNDIKFGWME

SEQ ID NO: 99936 - protein, 40 aa, Gossypium hirsutum
  Clone ID: LIB3196-008-P1-M1-D4.pep
LGARMVDAIAGSIYCMTHTYSLGRTIVEILRALEAYTVYD

SEQ ID NO: 99937 - protein, 76 aa, Gossypium hirsutum
  Clone ID: LIB3196-008-P1-M1-D5.pep
KPSGLCVEVGVPKETRGKVMGLLAKQLSGSWEGKANQTHVLNSSDWTKIYSPREIIRTSSKVRQARFSIYPTVHRT

SEQ ID NO: 99938 - protein, 74 aa, Gossypium hirsutum
  Clone ID: LIB3196-008-P1-M1-D7.pep
TPTRFDRKKRETVSLHPRLQINKAKQKKKSNSPLYISHNLRILRVGRLMVSIYILFSNVHCFYSCLPESFIFLD

SEQ ID NO: 99939 - protein, 42 aa, Gossypium hirsutum
  Clone ID: LIB3196-008-P1-M1-D8.pep
RLKEREHSSLKCLNFSNDNLKSVKCLDWNSPYWSLHSKIIAH

SEQ ID NO: 99940 - protein, 118 aa, Gossypium hirsutum
  unsure (1)..(118): unsure at all Xaa locations
  Clone ID: LIB3196-008-P1-M1-E2.pep
GFSRPSFSPLGAHVLFVKKKGDTMRMCIDYCQLNKVAIMNKYPLPPIDDLFDXLKGAAVFLKIDLRLSYYQLRVKDSNILKTTFRTRYGHHEFLVMPFGLTNAPAIFMDLMNRIFILY

SEQ ID NO: 99941 - protein, 58 aa, Gossypium hirsutum
  Clone ID: LIB3196-008-P1-M1-E3.pep
NKGSSPVEGLKFFLPSMEPLNLEYTFPSCGRRFGSLFKSTHHQMFSLFKHESLHVYVT

SEQ ID NO: 99942 - protein, 128 aa, Gossypium hirsutum
  unsure (1)..(128): unsure at all Xaa locations
  Clone ID: LIB3196-008-P1-M1-E4.pep
AAGTLRTYPENXRAFKAIIAAQYYMDKVRVLSKPPHFHDEHTNLTAVYVPKFSDMQAPAFDGDDGFCVYESHAIDYYRSNDELRGHTPEAAHQVVHWVSFADYNIVPPVRTXVFPTLGIMHHNKHATE

SEQ ID NO: 99943 - protein, 73 aa, Gossypium hirsutum
  Clone ID: LIB3196-008-P1-M1-E5.pep
LDSIILVCVYVELIIIGFSILFFWDLFQERREGDGQNKNGGVKLLWRVFQFAFQVYTFAGGHDDRAEKLTQEL

SEQ ID NO: 99944 - protein, 75 aa, Gossypium hirsutum
  Clone ID: LIB3196-008-P1-M1-E6.pep
FSCVSHTQGRRFVYAGSNSGVVQAPLAFCGKHGTCEDCVLARDPYCAWSPPTATCVALYQTESPSRGLIQEMSGD

SEQ ID NO: 99945 - protein, 36 aa, Gossypium hirsutum
  Clone ID: LIB3196-008-P1-M1-E7.pep
INKVFWTNYKEVSKFCQKLKKMLCELSVNRLMRFLM

SEQ ID NO: 99946 - protein, 48 aa, Gossypium hirsutum
  Clone ID: LIB3196-008-P1-M1-F12.pep
KYATFIYIVPQVFSFFFSFFFFWRGRWYYNLLFIRADHTFGSKRKTSK

SEQ ID NO: 99947 - protein, 94 aa, Gossypium hirsutum
  Clone ID: LIB3196-008-P1-M1-F3.pep
AGSLRMSHLPQMGFLKYPHHNHNQSSIITCGLRGGTKKPLWKSRVLSTEAIQAVHSLKLANSNSKLHHVLSTRLSRLLKADLLDTLAELQKQNE

SEQ ID NO: 99948 - protein, 78 aa, Gossypium hirsutum
  Clone ID: LIB3196-008-P1-M1-F6.pep
KSHSLLSFRQRADSQSVRSQRSEWGTHFMGPTPPKEKKATQPKTKKPKTHTTPDFFENSWLVVKKVNLKCFSKCFENP

SEQ ID NO: 99949 - protein, 63 aa, Gossypium hirsutum
  Clone ID: LIB3196-008-P1-M1-F9.pep
ERGPNCQKLGPGHTLLLETCKQVYLLPAGNHKWIPVGHGNHLHIYASSTINLRGGRTHFLKTV

SEQ ID NO: 99950 - protein, 104 aa, Gossypium hirsutum
  Clone ID: LIB3196-008-P1-M1-G11.pep
GIHHDAVIFLAEQLPGAQRCQHYKFRYHQQGEGQEEPPLNPHGAARAEVYLRKCTFDMFNFLASQHRVLPEGATCDEEEDEVQLKSTRRATSLELPMAMRFRHL

SEQ ID NO: 99951 - protein, 114 aa, Gossypium hirsutum
  Clone ID: LIB3196-008-P1-M1-G12.pep
TIEQDGTKKHAGARPQFPGWAQLSTLSHVARLTVWLLYRLIMKLIMIYTPAITLERSNIKYSMRFIDRKIIMHDTRRLRCALTASEHILGLPVEQHMYLSSRIDRNLVIPPYTP

SEQ ID NO: 99952 - protein, 57 aa, Gossypium hirsutum
  Clone ID: LIB3196-008-P1-M1-G2.pep
WPIQIEYYIHHMSQHLRLNYQGSKQKIQVPIHATIKTFKLTIPKASSDSVIDASDVP

SEQ ID NO: 99953 - protein, 112 aa, Gossypium hirsutum
  Clone ID: LIB3196-008-P1-M1-G6.pep
SLPGGKKGNLVCLIKFILGELNTKVPPNLDHVYILRPIGRTSLIPGAILPLKDPHSGLLEIEHPDAIKRTYALYADDCFVTMGITFGNIYLLQPVMHLYDHALTHETEKLLA

SEQ ID NO: 99954 - protein, 57 aa, Gossypium hirsutum
  Clone ID: LIB3196-008-P1-M1-G8.pep
CAKYLLPDFISRYSQLMVEMGLKSMSVNSRNIPKIPHRPFFSSYHTTSHVFVMISEQ

SEQ ID NO: 99955 - protein, 75 aa, Gossypium hirsutum
  Clone ID: LIB3196-008-P1-M1-G9.pep
NIWSQVLGQPLGGPSETRGSQLAGQEHSGVARIPERGWSVCLNFQDNEWCNVLSQARCWLPLRIISDLRDSTMWV

SEQ ID NO: 99956 - protein, 79 aa, Gossypium hirsutum
  Clone ID: LIB3196-008-P1-M1-H1.pep
HPRTRGNAKARSCPAPISPMGPIPSVIASRLLFALLNVKQHYVTKRNSRLKLRLKHQMQGQQRCLKLMLLTLRCWTILF

SEQ ID NO: 99957 - protein, 49 aa, Gossypium hirsutum
  Clone ID: LIB3196-008-P1-M1-H2.pep
MGERKGVNKYYPPDFNPEKHGSLNRYHNSHPLRERARKLSQGILIIRFE

SEQ ID NO: 99958 - protein, 54 aa, Gossypium hirsutum
  Clone ID: LIB3196-008-P1-M1-H4.pep
TSGSVQHHQLRPFHRQSFNTSLVCVVQPYKCSPQTIIREGKKERAVHTIIRFKS

SEQ ID NO: 99959 - protein, 84 aa, Gossypium hirsutum
  Clone ID: LIB3196-008-P1-M1-H5.pep
TPTPAALGRGCLGGEAMLGSGVGALPGPQLLFVQAASTGLGFRGQGQPSRLCEQSPSCFREWGGLHSMKPSQGSQARPLEGRAE

SEQ ID NO: 99960 - protein, 87 aa, Gossypium hirsutum
  Clone ID: LIB3196-008-P1-M1-H6.pep
PPCFLPLSTFALDEFKRKYSNEDTLSVALPYFWEHFDKDGWSLWYSEYRFPEELTQTFMSCNLITGKRAGLRRGRRTKSSKCCDSKS

SEQ ID NO: 99961 - protein, 65 aa, Gossypium hirsutum
  Clone ID: LIB3196-008-P1-M1-H8.pep
PSDLYAEGCEALVVKKLQEIMMHVIWAGLAFADIQLLGMLCACIGLRRTSRDPAYELLITGGTYA

SEQ ID NO: 99962 - protein, 81 aa, Gossypium hirsutum
  Clone ID: LIB3196-008-P1-M1-H9.pep
LGLPIYEELIMSILSGSGLPFDDTCKEQEFDIWIRVSRKIGLLDILVKDNFKYTLPRMIIRVGRIGDIGEGYEGVSAFPIV

SEQ ID NO: 99963 - protein, 63 aa, Gossypium hirsutum
  Clone ID: LIB3196-009-P1-M1-A10.pep
QPSMALSPSARNRTSCPLQLIRTSVSSAEKRHTSRRVKCSSNSHDSRIGVSSSLVGYHVGSWW

SEQ ID NO: 99964 - protein, 99 aa, Gossypium hirsutum
  unsure (1)..(99): unsure at all Xaa locations
  Clone ID: LIB3196-009-P1-M1-A2.pep
SRPRGENDAQPQKKPFKILRYFSLIPRLXRLFMYSKTVESMTWHHERRTDDGLLRHTADSLAWKSFDNIFTSFASDPRSVRLGLASDGFNPYKIMSTAY

SEQ ID NO: 99965 - protein, 74 aa, Gossypium hirsutum
  Clone ID: LIB3196-009-P1-M1-A3.pep
VKTTCDSSAICKLLGKGCRFTVLTKRFTAKTSFCLPTEGSLSPATWDYLLDMTRALTPVGPALMLFYLLIVPVL

SEQ ID NO: 99966 - protein, 111 aa, Gossypium hirsutum
  unsure (1)..(111): unsure at all Xaa locations
  Clone ID: LIB3196-009-P1-M1-A4.pep
IAYFWNLREVPVEADDASDCEINYEGLDNLLLLKELQYLSLQRSPHLDHWCLTRLYPLADSLQELXLARCPRVYERWLGWLQHLQNLHKLDISDXHAVCNPGLTQILAEEM

SEQ ID NO: 99967 - protein, 84 aa, Gossypium hirsutum
  Clone ID: LIB3196-009-P1-M1-A5.pep
ASLNSAPLTFPQSHEGMCPQESVYCENKCGARMMRRLLAQHATSECPKRTQPCTYCTKEFVFDTIQVRPFLSCGCRAGDRESGY

SEQ ID NO: 99968 - protein, 46 aa, Gossypium hirsutum
  Clone ID: LIB3196-009-P1-M1-A7.pep
VSSAEQRAKVEAQPSQATGREAPSGQTPQLEVLTDAELRAKSVASV

SEQ ID NO: 99969 - protein, 44 aa, Gossypium hirsutum
  Clone ID: LIB3196-009-P1-M1-A8.pep
EGEIDRAVHKNQREIRRSLRYTKDEQEDDTSTTTEEMAENQENS

SEQ ID NO: 99970 - protein, 75 aa, Gossypium hirsutum
  Clone ID: LIB3196-009-P1-M1-A9.pep
MGVGGAFHLLLVCLSPALLSAVRINGDGQEVLYLAEGDNERLGCPYGLDPEDYGPNGLDIEWMQRNSDTSHHREN

SEQ ID NO: 99971 - protein, 134 aa, Gossypium hirsutum
  unsure (1)..(134): unsure at all Xaa locations
  Clone ID: LIB3196-009-P1-M1-B1.pep
MPREPLSPSNSRTPSPKSLPSYLNGVMPPTQSFAPDPKYVSSKALQRQNSEGSANKVPCILPIIENGKKVSSTHYYLLPERPPYLDKYEKFFREAEETTASAQIQPLPADCGISSATEKPDSKTXVDLGXHVKR

SEQ ID NO: 99972 - protein, 99 aa, Gossypium hirsutum
  Clone ID: LIB3196-009-P1-M1-B11.pep
MSPSGDGAINGGCCCSCSPGENGGYDGANNFGISASQDETCMHCPRSEPSSCSSSELGFDSVLLTNSEMLPRIFVASAKGFSIVAGLQGGLAIFSILAR

SEQ ID NO: 99973 - protein, 70 aa, Gossypium hirsutum
  Clone ID: LIB3196-009-P1-M1-B2.pep
EQICMITLFSLDIRHNSNTMYIYKRPYVHFPTIFLRQNCDHMCIIKIVFNPLPMKIFWKKTCCVYSVSER

SEQ ID NO: 99974 - protein, 70 aa, Gossypium hirsutum
  Clone ID: LIB3196-009-P1-M1-B5.pep
ATRKCCTLICSPGQLFLKMCAASDVLCSYHCCCPAAPGQVYRPLSCLTVSLSDMTHASTQVPVTPRLEQG

SEQ ID NO: 99975 - protein, 118 aa, Gossypium hirsutum
  Clone ID: LIB3196-009-P1-M1-B7.pep
MPQEELQRESGPLQGKGKPRAWARAWAAALENSSPKNLERSAGQRSPAKEGPLDLYPKLTDTIQANPVPTHLSLVNSAQASPMPVDSVEADPTAVGSVLAGPVPVDPGLVDLASTSSE

SEQ ID NO: 99976 - protein, 113 aa, Gossypium hirsutum
  unsure (1)..(113): unsure at all Xaa locations
  Clone ID: LIB3196-009-P1-M1-C1.pep
ARAFPGGLAEDINXGQVSARQELKQLARYLTLKYQWDVAWARKIXCFGPDCTGPNILTDITKGVHYANEIKDSVVAGLQXASKEGALCXVNMRNVLFDLHHVTLHADAIHPGG

SEQ ID NO: 99977 - protein, 98 aa, Gossypium hirsutum
  Clone ID: LIB3196-009-P1-M1-C10.pep
QGPAGPPGPPGLSGPTLFTGPHRQTISVPRPPGLTGPTGPPETMVTFSGVRLWSTPQVMLGQGHEVPEGSLMLQDHQDELYFRVPNRLLKGHLKLPTS

SEQ ID NO: 99978 - protein, 134 aa, Gossypium hirsutum
  Clone ID: LIB3196-009-P1-M1-C2.pep
IGRGRCESSKMAAAAVVEFQRAQSLLSTDREASIDILHSIVKRDIQENDEEAVQVKEQSILELGSLLAKTGQAAELGGLLKYVRPFLNSISKAKAARLVRSLLDLFLDMEAATGQEVELCLECIEWAKSEKRTF

SEQ ID NO: 99979 - protein, 57 aa, Gossypium hirsutum
  Clone ID: LIB3196-009-P1-M1-C4.pep
YNANVPDVVLHVITYQCHCLRQGLTRKHISESSIDANVLNVVLLAHTYKNYISMPMY

SEQ ID NO: 99980 - protein, 60 aa, Gossypium hirsutum
  Clone ID: LIB3196-009-P1-M1-C6.pep
IAYDVLDMRRIVEPGCLDAFPNLKDFISRFEGLKKISAYMKSSRFHRGLLFGTTATWNST

SEQ ID NO: 99981 - protein, 103 aa, Gossypium hirsutum
  Clone ID: LIB3196-009-P1-M1-C8.pep
MLGSLVQVVFLKKKKQEGGVNFINMFAKCIEIWPLKNTFSVLSCLYLKIEKYFRILLILSPVFTSFWKTCVTMGLEKGQQKAFRVKIRSLAVSNPVLFSQHFF

SEQ ID NO: 99982 - protein, 84 aa, Gossypium hirsutum
  Clone ID: LIB3196-009-P1-M1-D11.pep
YSACATSIERNMPGRPKKNRRMAKDEPKKLKPGHLSRKGLLMTYTQCGQHGHNKRSCKNSKQVQCCSLVINIEYIFYLIFFYFV

SEQ ID NO: 99983 - protein, 54 aa, Gossypium hirsutum
  Clone ID: LIB3196-009-P1-M1-D2.pep
SQFWSLKSDGRIYSKLKPNLVLDVKGGTQYDQNHIILNTVSKEKFTQVWEAMVL

SEQ ID NO: 99984 - protein, 132 aa, Gossypium hirsutum
  unsure (1)..(132): unsure at all Xaa locations
  Clone ID: LIB3196-009-P1-M1-D5.pep
MKPSHTEDFIEDIVKLINGRYKGQSGIIYCFSQKDSEQVTVSLQNLGIHAGAYHANLEPEDKTTVHRKWSANEIQVVVATVAFGMGIDKPDVRLVIHHSMSKSMENYYQKSGQSXRDDMKADCISYYGYGDI

SEQ ID NO: 99985 - protein, 50 aa, Gossypium hirsutum
  Clone ID: LIB3196-009-P1-M1-D7.pep
MKELLQEQLEQLQREYSKLKASCQESARIEDMRKRHVEVSQAPLPPAPGE

SEQ ID NO: 99986 - protein, 125 aa, Gossypium hirsutum
  unsure (1)..(125): unsure at all Xaa locations
  Clone ID: LIB3196-009-P1-M1-D8.pep
IWESGPRGTFVVLPERTGVFXVVSIMFSINMFDHPNTNVFQNRFSTQYRCFSVSMLAGPNDMSHVEKGGKIIMXLPKXLDQLTRLNITYPMLYKLTNKNSDRMTHCGVLEYAADEGICYLPHWMM

SEQ ID NO: 99987 - protein, 67 aa, Gossypium hirsutum
  Clone ID: LIB3196-009-P1-M1-E1.pep
EGFSYLKNNTDFLGKKKRNKTKIQAREDCPSNQNGEKVRHEHREDKCEHEKDRGEGVKTDVRIRRQV

SEQ ID NO: 99988 - protein, 92 aa, Gossypium hirsutum
  Clone ID: LIB3196-009-P1-M1-E11.pep
INGLPVQAKSLLQHTQDLFTHINEGLSIEFPLSTSSETFFTCYHQICILGVYFKLSELNWYSFQSCVSVISKPGAYLDRPPEFVPRGLNNKI

SEQ ID NO: 99989 - protein, 88 aa, Gossypium hirsutum
  Clone ID: LIB3196-009-P1-M1-E2.pep
WHFDCPLQCSDLKIDIHFPNVYEILLVEVGESNGAVVLPPPHVLTSSCDGVILTLSHCLPSFPRRLDLALPLRIIFHIFSFFSHLYLR

SEQ ID NO: 99990 - protein, 83 aa, Gossypium hirsutum
  Clone ID: LIB3196-009-P1-M1-E5.pep
FKCRVCGEKGHNRRTCPRSMLSNEGRSSRRRHRCKVCRKSGHNRRTCPQVIGVRDILTAGSRIYTCKLCRKEGHNARTCPSSS

SEQ ID NO: 99991 - protein, 65 aa, Gossypium hirsutum
  Clone ID: LIB3196-009-P1-M1-E7.pep
VIWVSLLSHVYSGEDTEESLQPGTTNGWHKQKMPLQKPICLANRPRQGSPKRQEWLFSNICPTTA

SEQ ID NO: 99992 - protein, 94 aa, Gossypium hirsutum
  Clone ID: LIB3196-009-P1-M1-F10.pep
HRSPHPPPRNLVLELEGKEECAKYLKAAAGAREVAGAAGASGGPEGLMVPGNGAETQLLPPPALPTGGPGLRRSTREGQRHPGPVVSGRGGPWL

SEQ ID NO: 99993 - protein, 41 aa, Gossypium hirsutum
  Clone ID: LIB3196-009-P1-M1-F3.pep
PNAELVFYFSNEHKKFRAFLCCKFSSSCLIEQSGARYTHPK

SEQ ID NO: 99994 - protein, 50 aa, Gossypium hirsutum
  Clone ID: LIB3196-009-P1-M1-F4.pep
NLVTLFLGDRSTPLNYAKSTLRQGLFLLYISTSNHELIPRILTQALRTHN

SEQ ID NO: 99995 - protein, 51 aa, Gossypium hirsutum
  Clone ID: LIB3196-009-P1-M1-F5.pep
LFFWEQYLYFTSLTLTIFLKHLLVFFNYKFTTYFFQIEPLSNGQYVEQTTT

SEQ ID NO: 99996 - protein, 57 aa, Gossypium hirsutum
  Clone ID: LIB3196-009-P1-M1-F7.pep
NLLNAQFRSISKWSKPIPSPRVGDCIQAVCGQNGQSFLPRAYVSGAPPHGLDGSARG

SEQ ID NO: 99997 - protein, 56 aa, Gossypium hirsutum
  Clone ID: LIB3196-009-P1-M1-F8.pep
TMHVSKFFSCSQKRVSSELEQPLQLLHVVCLHGGSQLRHKRHLSGGFISYASCLHH

SEQ ID NO: 99998 - protein, 107 aa, Gossypium hirsutum
  Clone ID: LIB3196-009-P1-M1-G1.pep
GITGRARCVWLECPIPDAPVVTNVTVKARVWNSTFIEDYRDFDRVRVNGWATLFLRTSIPTINMENKTTWFSVDIDSELVEELPAEIELWLVLVAVGAGLLLLGLII

SEQ ID NO: 99999 - protein, 79 aa, Gossypium hirsutum
  Clone ID: LIB3196-009-P1-M1-G11.pep
SSGFYTVEDTRYVTRMYRVYGKKNIKLEPVPLKGASLDPRFGFLLDRGLDIYVWRGAQATLSSTTKARLFAEKINKNER

SEQ ID NO: 100000 - protein, 51 aa, Gossypium hirsutum
  Clone ID: LIB3196-009-P1-M1-G12.pep
NSTISPTVVHLFSGQLKGIGLGMRSVRWLFKRYSQSVQAPLSKSLTKLHDE

SEQ ID NO: 100001 - protein, 109 aa, Gossypium hirsutum
  Clone ID: LIB3196-009-P1-M1-G2.pep
KSIKKKKNQIFGFLMRLRMKGTPYKMRWRAKELSLALIILVCTTIFILTWDRSPTLTSTLPSKNQLQVSPDIKTVPVDPKTHVKEDISTLTRSETVNNKEGQHVDKTRS

SEQ ID NO: 100002 - protein, 53 aa, Gossypium hirsutum
  Clone ID: LIB3196-009-P1-M1-G4.pep
QFETKTFSPNFNHFEKKNKYHAIILVKPLINHSSVSFILVNRLPIISLSPPFT

SEQ ID NO: 100003 - protein, 71 aa, Gossypium hirsutum
  unsure (1)..(71): unsure at all Xaa locations
  Clone ID: LIB3196-009-P1-M1-G5.pep
MVFFFRGLNQEFSSSQMDILRCPSLRNINXPTNFSFYFALPFPMPARGANGSIFEDGPIFNMAFRLFHELT

SEQ ID NO: 100004 - protein, 52 aa, Gossypium hirsutum
  Clone ID: LIB3196-009-P1-M1-G6.pep
KQDEFYAAMTLQVFEIPCPTYIQTCYVNMNLQGSSKYIKKLGENQVYPNSCY

SEQ ID NO: 100005 - protein, 47 aa, Gossypium hirsutum
  Clone ID: LIB3196-009-P1-M1-G7.pep
GGKKLKKRSDNVTYSITYKLEFICLGCLFCVIFWIMSCVLGFYLYRS

SEQ ID NO: 100006 - protein, 117 aa, Gossypium hirsutum
  Clone ID: LIB3196-009-P1-M1-G8.pep
CRERLHELVKEELASEEEWKGAMERSFTRMDKEVIKWNESVDGANCRCELQSPECDAVGSTAVVAIVTPDKVVVANCGDSRAVLCRNGRPVALSSDHKPDRPDELNRIQEAGGSGIF

SEQ ID NO: 100007 - protein, 113 aa, Gossypium hirsutum
  Clone ID: LIB3196-009-P1-M1-H11.pep
GVLAQAPLHKVKSRVRVRRASISEPSDTDPEPRTLKPSPAGWFVQQHRELELMSSFRERFGRNWLQYRSHLEAFGNPLTGTPSSADLSTPVASFQGPDTTPRPSPLQEGGRGP

SEQ ID NO: 100008 - protein, 89 aa, Gossypium hirsutum
  Clone ID: LIB3196-009-P1-M1-H3.pep
FTEISCNHAALGECIHYLKQGLVLPYRKKAVFWKILPGRTGTSTGLTSPPWAENQRSEQEIYTRLTSRSYPFGLVYTSRHETGGRGHKN

SEQ ID NO: 100009 - protein, 71 aa, Gossypium hirsutum
  Clone ID: LIB3196-009-P1-M1-H4.pep
NGLTIELGKLENPSHGFPHANFGLHEKDESILALFSLFISFNYQMTKMPLRPFFKILSYSCPFLSKRNIMV

SEQ ID NO: 100010 - protein, 64 aa, Gossypium hirsutum
  Clone ID: LIB3196-009-P1-M1-H5.pep
RCPKEDCHQLKCTKRTDIGRKKVPQQAPKNNHEFPTAHCLFHVDAGSAFTKMSHSPHTYLRYNR

SEQ ID NO: 100011 - protein, 51 aa, Gossypium hirsutum
  Clone ID: LIB3196-010-P1-M1-A5.pep
CRVVTRFWNISKFSNQDCTEGSLKRLVLQKSLVTPLKINRFWLLFLSASLS

SEQ ID NO: 100012 - protein, 131 aa, Gossypium hirsutum
  Clone ID: LIB3196-010-P1-M1-B2.pep
KFIKKSYLDRLMLANRPPFSAAKSLINSHSQGAFSSLGDPSPQENPFLEGFAPSERFTENTNVKDTTERNAFEENIIMENTTMPEGTICEKTNYNPSSEADSDGTAFNLGPAVKRTNQTQWEYNNMGTDLY

SEQ ID NO: 100013 - protein, 50 aa, Gossypium hirsutum
  Clone ID: LIB3196-010-P1-M1-B4.pep
KNYRVRLVVSEKATGLQKGLMGKDTHTHPYPHTPTHPHAHTPTNQSATDQ

SEQ ID NO: 100014 - protein, 61 aa, Gossypium hirsutum
  Clone ID: LIB3196-010-P1-M1-B5.pep
FGVNLRVFVSLKTVKRHSRSDQTGEENKGLYFNVNQLYIGKKPASSFAFSIGVKHSIFYNK

SEQ ID NO: 100015 - protein, 152 aa, Gossypium hirsutum
  unsure (1)..(152): unsure at all Xaa locations
  Clone ID: LIB3196-010-P1-M1-B6.pep
GRTITQLHKKQAGRARTSRHPAPAFSDPWGGSPAKPSTNGTTATGGFDTEPDEFSDYNRLSTELPSYASIAGEXVTDAXEVPARSPGAFDMSGVRGSLAEAVGSPPPAATPTPTPPTRKTPESFLGPNAALVDLDSLVSRPGPTPSGAKASN

SEQ ID NO: 100016 - protein, 68 aa, Gossypium hirsutum
  Clone ID: LIB3196-010-P1-M1-B9.pep
KSPRKRCLTHMQLSYSSINHQKTSNSCMGKFLNINLIMKIWVEMERASYRDLKNAKNIKNGAWEYLLI

SEQ ID NO: 100017 - protein, 130 aa, Gossypium hirsutum
  Clone ID: LIB3196-010-P1-M1-C1.pep
MGLTVSALFSRIFGKKQMRILMVGLDAAGKTTILYKLKLGEIVTTIPTIGFNVETVEYKNICFTVWDVGGQDKIRPLWRHYFQNTQGLIFVVDSNDRERVQESADELQKMLQEDELRDAVLLVFANKQDM

SEQ ID NO: 100018 - protein, 115 aa, Gossypium hirsutum
  Clone ID: LIB3196-010-P1-M1-C10.pep
LKVQLEHVQTRLREIQPCLAESRAAREKESFNLKRAQEDISRLRRKLEKQRKVEVYADADEILQEEIKEYKARLTCPCCNTRKKDAVLTKCFHVFCFECVRGRFEARQRKCPKCN

SEQ ID NO: 100019 - protein, 125 aa, Gossypium hirsutum
  Clone ID: LIB3196-010-P1-M1-C4.pep
KFYESIKFSLSLGEDTRLNFSNHLVNYLENVGINVFPHNETLGKGEKLPPIYSRAISASNLSILILSKDYASSISCLVELSSIMDRKRESTDKHIVLPIFYHVDPSDVRHIGGSFKTSFKKHELE

SEQ ID NO: 100020 - protein, 44 aa, Gossypium hirsutum
  Clone ID: LIB3196-010-P1-M1-C7.pep
RYSLVLRHVQVDFAVFRVIFYMCSSYLMSFFYIFVYFISFIILF

SEQ ID NO: 100021 - protein, 37 aa, Gossypium hirsutum
  Clone ID: LIB3196-010-P1-M1-C8.pep
GRVGLGSYVEPLLLFIIFLILTGINFETMSIYLKRVL

SEQ ID NO: 100022 - protein, 74 aa, Gossypium hirsutum
  Clone ID: LIB3196-010-P1-M1-D10.pep
MSFRGGGRGGFNRGGGGGGFNRGGSSNHFRGGSGGGGGGNFRGGGRGGFGRGGGRGGFNKGQDQGPAERVVLLG

SEQ ID NO: 100023 - protein, 47 aa, Gossypium hirsutum
  Clone ID: LIB3196-010-P1-M1-D11.pep
EPQSLETRVTTLVLQTSYSSLRSKKLCGCTEAEEVTARRKNPVGRRE

SEQ ID NO: 100024 - protein, 128 aa, Gossypium hirsutum
  Clone ID: LIB3196-010-P1-M1-D2.pep
ETGAIVQVYGIKANTGEKVEISTPDGNETQDAYEELYVHLSADTFEKVDGAVALIELLVSSISGNLGAGSVPAISGNDVNVLSQIPDTAVSCVTDAALNQQVPQLTIASPQGQFQYQNSWFPTSSMPL

SEQ ID NO: 100025 - protein, 30 aa, Gossypium hirsutum
  Clone ID: LIB3196-010-P1-M1-D3.pep
NTSTSWRSLEATLLYNIIFSMFIIIVFLKI

SEQ ID NO: 100026 - protein, 80 aa, Gossypium hirsutum
  Clone ID: LIB3196-010-P1-M1-D9.pep
IVYINLNKLCLTVYQLHALQPNSTKNFRPAGGAVLHSPGAMFEWGSQRLEVSHVHKVECVIPWLNDALVYFTVSLQLLQQ

SEQ ID NO: 100027 - protein, 135 aa, Gossypium hirsutum
  Clone ID: LIB3196-010-P1-M1-E1.pep
CFPKNRVIGSGCNLDSARFRYLMGERLGVHPLSCHGWVLGEHGDSSVPVWSGMNVAGVSLKTLHPDLGTDKDKEQWKEVHKQVVESAYEVIKLKGYTSWAIGLSVADLAESIMKNLRRVHPVSTMIKGLYGIKDD

SEQ ID NO: 100028 - protein, 102 aa, Gossypium hirsutum
  Clone ID: LIB3196-010-P1-M1-E10.pep
MAAARPILGRVLPGSSILFLCDMQEKFRHNIAYFPQIVSVAARMLRVARLLEVPVLLTEQYPQGLGPTVPELGAEGLQPLTKTCFSMVPALQQELDSRPQLR

SEQ ID NO: 100029 - protein, 78 aa, Gossypium hirsutum
  Clone ID: LIB3196-010-P1-M1-E12.pep
DKSCTAHYICQRGQGGLSEHSFSGTVRTQNKTRHHQNAVRGRVNRVKKREKVKNRLLFLKARLKGRTVGMAANRDMQL

SEQ ID NO: 100030 - protein, 74 aa, Gossypium hirsutum
  Clone ID: LIB3196-010-P1-M1-E2.pep
QEGTQSARDPAGQQGGIPYNRVIGSGRNRDSARFRYLMGERLGVHPLSCHGWVLVEHGDSSAPVMSEMNVAAVF

SEQ ID NO: 100031 - protein, 53 aa, Gossypium hirsutum
  Clone ID: LIB3196-010-P1-M1-E6.pep
YDASAQCDYHAGITGHSIENFITFKKLVEKFIIMGIDKLDGSFNAENSLPNHD

SEQ ID NO: 100032 - protein, 129 aa, Gossypium hirsutum
  unsure (1)..(129): unsure at all Xaa locations
  Clone ID: LIB3196-010-P1-M1-E7.pep
AAQYTPEPPPIQQHFTNVEASESEEVRRFRQQFTQLAGPDMEVGATDLMNILNKVLSKHKDLKTDGFSLDTCRSIVSVMDSDTTGKLGFEEFKYLWNNIKKWQCVYKQYDRDHSGCLGSSQLRXALQAA

SEQ ID NO: 100033 - protein, 32 aa, Gossypium hirsutum
  Clone ID: LIB3196-010-P1-M1-E8.pep
SFPFFQVSSIYYSTLYVYVYTLLSPILKPFKI

SEQ ID NO: 100034 - protein, 49 aa, Gossypium hirsutum
  Clone ID: LIB3196-010-P1-M1-F1.pep
LPTHTEHILCSSYVYHYLCWFDLLIKGVALDVQNPINDLCQNTIGAVTQ

SEQ ID NO: 100035 - protein, 67 aa, Gossypium hirsutum
  Clone ID: LIB3196-010-P1-M1-F5.pep
NSSAAESMGNTTPVSFTSLQPTTTKLSASTSTYGIQESNGFHISYHHSKFPLGKMRGQCFLIGTYYC

SEQ ID NO: 100036 - protein, 67 aa, Gossypium hirsutum
  Clone ID: LIB3196-010-P1-M1-F8.pep
EAKKEEVSLLDCLSTKLFMDPILDMHTSIATLKAYYLSMNNKLSLSPFKIFISFENIYVAEALLGNR

SEQ ID NO: 100037 - protein, 68 aa, Gossypium hirsutum
  unsure (1)..(68): unsure at all Xaa locations
  Clone ID: LIB3196-010-P1-M1-G10.pep
MAAALSGLAVRLSRSAAARSYGVFCKGLTRTLLIFFDLAWRLRINFPYLYIVASMMLNVRLQVHXEIH

SEQ ID NO: 100038 - protein, 75 aa, Gossypium hirsutum
  Clone ID: LIB3196-010-P1-M1-G2.pep
RECLPAYSSYKRGRLLHWPNSIDKCQQACTIYEPVYLLLVTNIKLRLRLRLHIFFFFVLPIQTSYSSNNEHIIIF

SEQ ID NO: 100039 - protein, 115 aa, Gossypium hirsutum
  Clone ID: LIB3196-010-P1-M1-G5.pep
ANLWLLRPYPTPYFQGFRLHLKSKLGVYNFLSSPNAFFFFFFFCFSAPCPFLLYLFSVRALKWRPWNLEFGSPLSTLSCHLSLKNEYEEKYTAISVQGSKKGAARKGRLGIRKGT

SEQ ID NO: 100040 - protein, 128 aa, Gossypium hirsutum
  Clone ID: LIB3196-010-P1-M1-G8.pep
REFLIRVSYMEIYNEEINDLFAVENQKLQIHENLERGIFVAGLREEIVNNAEQVMKLLESGEVNRHFGETNMNARSSRSHTIFRVVIESKGKDTGSFGDYSISDAIRVSVLNLVDLAGSERIAKTGTG

SEQ ID NO: 100041 - protein, 42 aa, Gossypium hirsutum
  Clone ID: LIB3196-010-P1-M1-H1.pep
NYTANFDLSTRRSVRLINHHIYLFNLFLQCIMTFMDITGIND

SEQ ID NO: 100042 - protein, 53 aa, Gossypium hirsutum
  Clone ID: LIB3196-010-P1-M1-H11.pep
IKGAESIDQALVQRTACSITRRLSIDKIQKYKVEEFRGTTKTELGRAVFWLEN

SEQ ID NO: 100043 - protein, 44 aa, Gossypium hirsutum
  Clone ID: LIB3196-010-P1-M1-H2.pep
RGSSQTFSSCNQLREAVYYPITTRLMVLINDFFVAMNSPSIPIF

SEQ ID NO: 100044 - protein, 61 aa, Gossypium hirsutum
  Clone ID: LIB3196-010-P1-M1-H7.pep
SSDGLRPAIMDPDDLTISKVFIVMHTGKEKTIEFVSRLPNAFTVITIYARDHDPLHLNRPY

SEQ ID NO: 100045 - protein, 128 aa, Gossypium hirsutum
  Clone ID: LIB3196-011-P1-M1-A10.pep
MEIDNAPEERARGITINAAHVEYSTAARHYAHTDCPGHADYVKNMITGTAPLDGCILVVAANDGPMPQTREHLLLARQIGVEHVVVYVNKADAVQDSEMVELVELEIRELLTEFGYKGEETPVIVGSA

SEQ ID NO: 100046 - protein, 100 aa, Gossypium hirsutum
  Clone ID: LIB3196-011-P1-M1-A12.pep
GSWLPLPFSSLSVQPPPASGLRKLTDYVPILFTSSPRPLWRPHPQARREEKGRLSPAFVTCLFCRPECPVPGNGKPIAHQLPTSQCPSARNSPFCASGLK

SEQ ID NO: 100047 - protein, 75 aa, Gossypium hirsutum
  Clone ID: LIB3196-011-P1-M1-A5.pep
KKLKHSLSLLGFQPNFGAHRQSTASPPWLHYRRWSESCKIGLFSPRFPCFEGLASLPSKNGKKKVSHCPFIFSSG

SEQ ID NO: 100048 - protein, 125 aa, Gossypium hirsutum
  unsure (1)..(125): unsure at all Xaa locations
  Clone ID: LIB3196-011-P1-M1-A9.pep
HTRKETLEYIHSDLXGPSRVPSKGGANYMXTFINNFSTKVWAFFLKQKNDVFSAFKSCKIMIEKQMGNQIKYLRTDNGLEFCYNEFNRLYKLEGVIIHFTVRHTSQQNSVAERIIRTIMYKVPCM

SEQ ID NO: 100049 - protein, 128 aa, Gossypium hirsutum
  Clone ID: LIB3196-011-P1-M1-B10.pep
MELRLLKHLKHENVIGLLDVFTPATSIEDFSEVYLVTTLMGADLNNIVKCQALSDEHVQFLVYQLLRGLKYIHSAGIIHRDLKPSNVAVNEDCELKILDFGLARQADEEMTGYVATRWYRAPEIMLNW

SEQ ID NO: 100050 - protein, 43 aa, Gossypium hirsutum
  Clone ID: LIB3196-011-P1-M1-B11.pep
KKVDPSSFSSFGFDNSVLLNLYYCSIGTLAFIVIIVSFKNDSL

SEQ ID NO: 100051 - protein, 37 aa, Gossypium hirsutum
  Clone ID: LIB3196-011-P1-M1-B12.pep
HAILALMSVWVGLQSVRSSILICHPIDAIGNVNILWC

SEQ ID NO: 100052 - protein, 55 aa, Gossypium hirsutum
  unsure (1)..(55): unsure at all Xaa locations
  Clone ID: LIB3196-011-P1-M1-B2.pep
RRKGALDLIPNLAMETWFFLVVNLGLLFFYGTRXFGLFKKKGIPGPNTFAFLGKF

SEQ ID NO: 100053 - protein, 63 aa, Gossypium hirsutum
  Clone ID: LIB3196-011-P1-M1-B3.pep
IPQRQVHLSNHSIAMVSKEYGSPRTKSARNYRLLIPSPAMSIPLGILEYFPLSPFGTVLVKLV

SEQ ID NO: 100054 - protein, 71 aa, Gossypium hirsutum
  Clone ID: LIB3196-011-P1-M1-B7.pep
MNQPQRMAPVGTDKELSDLLDFSMMFPLPVTNGKGRPASLAGAQFGGSGFEDRPSSGSWGSGDQNSSSFDP

SEQ ID NO: 100055 - protein, 38 aa, Gossypium hirsutum
  Clone ID: LIB3196-011-P1-M1-B8.pep
NVNLQHPKLPVTQTIPVFVKKFYPSNLLFPHPSRRLGS

SEQ ID NO: 100056 - protein, 117 aa, Gossypium hirsutum
  unsure (1)..(117): unsure at all Xaa locations
  Clone ID: LIB3196-011-P1-M1-C10.pep
ALMLCYADNGLFTQAEAIWEEMLNISSFMPAIPLVSKFLDAYGNMGQFHRVQKILDHVILEKVNLVPXVYPVAISCFGKHGQVDLMENTLKEMVSKGLSIDSATGNAFVRYYNIFCF

SEQ ID NO: 100057 - protein, 34 aa, Gossypium hirsutum
  Clone ID: LIB3196-011-P1-M1-C2.pep
SGTCGQARRLTEWVDLGLNENPVKLAFIPTWENY

SEQ ID NO: 100058 - protein, 32 aa, Gossypium hirsutum
  Clone ID: LIB3196-011-P1-M1-C4.pep
ILRPKYVNIAYAIYWMTYQDFRPNALKPYPTG

SEQ ID NO: 100059 - protein, 71 aa, Gossypium hirsutum
  unsure (1)..(71): unsure at all Xaa locations
  Clone ID: LIB3196-011-P1-M1-C6.pep
FVSRLPLVLSMKDGIWHVVDRFTMLGQFIPVRIDNXLDMLNEIYDIHIVKLXHGVPTFIGXDRDPRFTLQV

SEQ ID NO: 100060 - protein, 96 aa, Gossypium hirsutum
  Clone ID: LIB3196-011-P1-M1-C7.pep
PPRGVSLSSSPPFFFFLPFYFCSGVHCVGVFSISGGLAFPVPPPLVVCLASSLCCFSPLYPFFFFHFGGPVFIYSPFVFPGFPLFGSLFYLGPPGF

SEQ ID NO: 100061 - protein, 66 aa, Gossypium hirsutum
  Clone ID: LIB3196-011-P1-M1-D12.pep
KLAQKKKKYRFLFNCFSKSLVFTFFLSYQETHVLNLKDGRETTYYYYHLMFILKNLSPTDMVWICV

SEQ ID NO: 100062 - protein, 53 aa, Gossypium hirsutum
  Clone ID: LIB3196-011-P1-M1-D3.pep
RQNYSLFLSFSFSSLPITFPLAFQTTLKLSTKSLKWFSFSSLEYIKSFYGSLP

SEQ ID NO: 100063 - protein, 47 aa, Gossypium hirsutum
  Clone ID: LIB3196-011-P1-M1-D4.pep
PLCTYTKDQLSRRPVARSSTERIFICKGSIKFNTYVTYPNIGMFFEY

SEQ ID NO: 100064 - protein, 69 aa, Gossypium hirsutum
  Clone ID: LIB3196-011-P1-M1-D6.pep
FSSYSIFLNQAYFSSLTFMYIHVKSNLTKDVYLVHLLSEFLFVRGQFNSTLTYHIPKLICFPSPIVRVG

SEQ ID NO: 100065 - protein, 77 aa, Gossypium hirsutum
  Clone ID: LIB3196-011-P1-M1-D8.pep
WPSLLPMGAGQSGKVMAERHRAPWGPNSYFGDLWDRAEGPLCGGRSLGLGVPTVCADLSPGHAQVPQVRMLGRSRSL

SEQ ID NO: 100066 - protein, 86 aa, Gossypium hirsutum
  Clone ID: LIB3196-011-P1-M1-D9.pep
SMTMHVCLRRGVGPLKEHVCLHSKNGPAHELTATLIGVCPTDAICADVDETNEPMRAFAYCTLYHREELQHMTLIRPELSQAGYTF

SEQ ID NO: 100067 - protein, 53 aa, Gossypium hirsutum
  Clone ID: LIB3196-011-P1-M1-E10.pep
LYKYGISHLWSAEFQLLAEIKREVIVNIFALDFVCIFALDFVCILDLASFFPS

SEQ ID NO: 100068 - protein, 56 aa, Gossypium hirsutum
  Clone ID: LIB3196-011-P1-M1-E11.pep
LIIFLFKYILAFKVIIILIFFFLKTVDKVRKSNFVLFVFKFEVVFFQLLNPKQNRT

SEQ ID NO: 100069 - protein, 77 aa, Gossypium hirsutum
  Clone ID: LIB3196-011-P1-M1-E3.pep
MSEKGRPLPKFGEWDVNDPASAEGFTVIFNKARDEKKTGGKPESPSGGDPHLKPGADPSKTQPKKWLCCMHAPPAES

SEQ ID NO: 100070 - protein, 120 aa, Gossypium hirsutum
  Clone ID: LIB3196-011-P1-M1-E8.pep
KTTFRTRYGHYEYLAMPFGLTNARATFMDLMNQIFRLYLDQFVVVFIDDILIYSRDETEHAEHLRSVLQILRDKQLYAKFSKCEFWLREVGFLGHIVSASGIRVDLSKISAILDWKPPRN

SEQ ID NO: 100071 - protein, 121 aa, Gossypium hirsutum
  Clone ID: LIB3196-011-P1-M1-E9.pep
LPGFKPAKHMVFSGLYPADGSDFDALNHAIERLTCNDASVSITKESSTALGLGFRCGFLGLLHMDVFHQRLEQEHEAHVISTVPTVPYIFEYSDGSKVEVQNPAALSSDPKKRVTACWEPT

SEQ ID NO: 100072 - protein, 149 aa, Gossypium hirsutum
  Clone ID: LIB3196-011-P1-M1-F1.pep
DTIEHVCTKKHDCVPEPFGTGKRVSTMTLFFLFSSAYSRGLVRREAYKSEIAHRHNDLGEEHFIGLVLVAFSQYLQQCPFEDHVKLAKEVTEFAKACADEESGANCDKSIHTLFGDKLCTTDSLRDTNRDMADCCEKPEPDRNECFLMH

SEQ ID NO: 100073 - protein, 100 aa, Gossypium hirsutum
  Clone ID: LIB3196-011-P1-M1-F2.pep
MSTLSHDLITFAHSLATSPQGCLLCGPHSPAHPSRPSMLQDGLAPDLGTLQMGHRRKAGLDCLLIPNLHGAFLLLSQATTEGRGWLASCPSTHTLTQNKC

SEQ ID NO: 100074 - protein, 51 aa, Gossypium hirsutum
  Clone ID: LIB3196-011-P1-M1-F6.pep
KPTISILYIPKKKRFFLFKSIITPGLHGLQTSVAKMKGKPLPLNSSKSKTN

SEQ ID NO: 100075 - protein, 88 aa, Gossypium hirsutum
  unsure (1)..(88): unsure at all Xaa locations
  Clone ID: LIB3196-011-P1-M1-F7.pep
MDLCIPLLLPSRELIYFSXVLSKVXDGGRLPLPYDTLFLTDMYITHYGSVLKPHMEVREKIYMDLIIELRSKLETMRVAATFQKICMD

SEQ ID NO: 100076 - protein, 32 aa, Gossypium hirsutum
  Clone ID: LIB3196-011-P1-M1-F8.pep
FQKCKRLPFRNWILLIKKMCFSYPICIKTMHM

SEQ ID NO: 100077 - protein, 56 aa, Gossypium hirsutum
  Clone ID: LIB3196-011-P1-M1-G11.pep
PVYLVALLSTWCPSPGTTHATQLHISRSSLVHMMCTQHHTCDLATYHLYHPIFLKV

SEQ ID NO: 100078 - protein, 43 aa, Gossypium hirsutum
  Clone ID: LIB3196-011-P1-M1-G12.pep
KLMDPFIDSFSCSKRQAIRDREFSVYITQKFYWRNKMALDSLL

SEQ ID NO: 100079 - protein, 59 aa, Gossypium hirsutum
  Clone ID: LIB3196-011-P1-M1-G3.pep
LTIKYLGPIEESSNGKIIAQSLHPQHTVGMSGPQSTRIQTCVSHPGFRAGASRRSSFPS

SEQ ID NO: 100080 - protein, 110 aa, Gossypium hirsutum
  Clone ID: LIB3196-011-P1-M1-G6.pep
SCINQPQFRAVLGEVKLCEKMAQFDAKKFAETQPKKDTPRKEKGSREEKQKPQAERKEEKKAAAPAPEEEMDECEQALAAEPKAKDPFAHLPKSTFVLDEFKRKYSNEDT

SEQ ID NO: 100081 - protein, 103 aa, Gossypium hirsutum
  Clone ID: LIB3196-011-P1-M1-G9.pep
LFFWIRYWDHLTGNGVLRTVEKCAKISVYFDAPFDQQNAGSLLGMIVRGQGGEFLVSKQVIHANITTVWGDSKFRPTNMAWVQFRILGLGPKGSVWIEVPRVG

SEQ ID NO: 100082 - protein, 117 aa, Gossypium hirsutum
  unsure (1)..(117): unsure at all Xaa locations
  Clone ID: LIB3196-011-P1-M1-H12.pep
QSLYHQLRVNETDVYKTVFRTRYSHYEFLVMSFGLTNAPTTFMDLMNRVFXPYLDQFIVVFIDEILVYSRTNDEHDAHLQVVLQLLKEKNCMLXFSECEFWLQEVTILXHVVSAEGN

SEQ ID NO: 100083 - protein, 65 aa, Gossypium hirsutum
  Clone ID: LIB3196-011-P1-M1-H2.pep
FNQGGVYFIVFDKSFRTFSIFFNFKYFFWGIQFKFQKILFSSNKRFGKILGITTIKIRVSVCKIF

SEQ ID NO: 100084 - protein, 63 aa, Gossypium hirsutum
  Clone ID: LIB3196-011-P1-M1-H5.pep
RSLCVYIAIMILVVAVSFYASASPISSWLCHTSKSRILRCSQVLPLENMHSQWIVFHIIVKIN

SEQ ID NO: 100085 - protein, 43 aa, Gossypium hirsutum
  Clone ID: LIB3196-011-P1-M1-H8.pep
NFKISFGGIQFIFQESYFLPISDFGTIYRNSSYENKGFRSYNL

SEQ ID NO: 100086 - protein, 99 aa, Gossypium hirsutum
  Clone ID: LIB3196-012-P1-M1-A10.pep
MVQDLSICKLSFEQRRVRNLIVIHGTSIHPGEDLSQFIFMMQESHLSPHTCASCSISLLRLTDQSGISSTNAPDILGVRSKHATLILATSAVFEKEKYL

SEQ ID NO: 100087 - protein, 63 aa, Gossypium hirsutum
  Clone ID: LIB3196-012-P1-M1-A11.pep
FLTQCFCVGEKFMVSWNVSGQRGGYLGADISQIRGEDVSGLACLWSGRGLSYGWNVAGWRRHL

SEQ ID NO: 100088 - protein, 47 aa, Gossypium hirsutum
  Clone ID: LIB3196-012-P1-M1-A12.pep
NIRFQILLGKLSLFISRAIVVVVGFQEQHLLNDYFKLKSKVSRGVKL

SEQ ID NO: 100089 - protein, 70 aa, Gossypium hirsutum
  Clone ID: LIB3196-012-P1-M1-A5.pep
LFRFLLKRHFKIAEKLFNFCPMNLVLRSILESFQFMNRLIKLLYQRRSRIICLTLLNTSHSCTKPPLGCL

SEQ ID NO: 100090 - protein, 52 aa, Gossypium hirsutum
  Clone ID: LIB3196-012-P1-M1-A6.pep
LIFKGCEPISVHSSHCPRFLVYGYRQNAVEFKPIASSIPGMAQKKKIRLCGR

SEQ ID NO: 100091 - protein, 99 aa, Gossypium hirsutum
  unsure (1)..(99): unsure at all Xaa locations
  Clone ID: LIB3196-012-P1-M1-A7.pep
MGNQSCYNYLYRMKALDAIRXSEIPFHSEGRHPRSLMGKIFRSYLLDLRNTSTPFKGVRKALIDTLLGGFXTARYGTGVFGQNEVLPYQEALSEPATGV

SEQ ID NO: 100092 - protein, 44 aa, Gossypium hirsutum
  Clone ID: LIB3196-012-P1-M1-B1.pep
RLVFGHSIFREKTWSLNKNEGKIDAKLLIYRELLVIKIVQFIAN

SEQ ID NO: 100093 - protein, 114 aa, Gossypium hirsutum
  unsure (1)..(114): unsure at all Xaa locations
  Clone ID: LIB3196-012-P1-M1-B5.pep
DSNAKSYLCYIMDTXGHENFSDEMTAALKLADRAVLXIVDAAEGVMVNTERAIRHAIQERLPIVVVINKVDRLITELKXPPKDAYYILRHTLEVFXNHISVRSTTAGKWFCYLI

SEQ ID NO: 100094 - protein, 117 aa, Gossypium hirsutum
  unsure (1)..(117): unsure at all Xaa locations
  Clone ID: LIB3196-012-P1-M1-B7.pep
VSLLVGRYLVSPSSFNSRNPLQVLVMRECISIHVGQAGVQIGNACWELYCLEHGIQPDGQMPSDKTIGGGDDSFNTFFSETGAGKHVPRAVFVDLKPTVIDEVRTGPYRXSFPPEQL

SEQ ID NO: 100095 - protein, 47 aa, Gossypium hirsutum
  Clone ID: LIB3196-012-P1-M1-C6.pep
NNLREIRFHLVSDKALLPLIVYYNNYTLNAFYCRLFDSCVYIRIFFF

SEQ ID NO: 100096 - protein, 90 aa, Gossypium hirsutum
  unsure (1)..(90): unsure at all Xaa locations
  Clone ID: LIB3196-012-P1-M1-D10.pep
PTRPRTRGCACHKLLTAGSDHAEMLLHEERXNLGGISIEELHRLVYAQVLSSFPLTWQIAPIYLISCMKHGMILFQILLSKLPGQDKLVI

SEQ ID NO: 100097 - protein, 81 aa, Gossypium hirsutum
  unsure (1)..(81): unsure at all Xaa locations
  Clone ID: LIB3196-012-P1-M1-D11.pep
LVYEILEKPATXCIIGICSGIWFYIQIINIGYQHVGLSYXTSIEGDHWRVITSAFSHIRRLNLDCNMRALWSLGGIEQLDH

SEQ ID NO: 100098 - protein, 34 aa, Gossypium hirsutum
  Clone ID: LIB3196-012-P1-M1-D12.pep
DDQYEHSDGEVALTCWLGLGGFAEPKFNDLTYLL

SEQ ID NO: 100099 - protein, 39 aa, Gossypium hirsutum
  Clone ID: LIB3196-012-P1-M1-D2.pep
AHAYVLSSFLEPSLDFPPWVGVLSSRQIVHLLYCLGYYF

SEQ ID NO: 100100 - protein, 43 aa, Gossypium hirsutum
  Clone ID: LIB3196-012-P1-M1-D5.pep
QLIECHSFQDWHLSELHYFFIGSTVLHYVCVPQFTCSSTDGHS

SEQ ID NO: 100101 - protein, 55 aa, Gossypium hirsutum
  Clone ID: LIB3196-012-P1-M1-D6.pep
AGWCRAAVSGMGPIASLIATSLLYADMIDRSSVSKAGLGASAEAQPFVAVAREAP

SEQ ID NO: 100102 - protein, 50 aa, Gossypium hirsutum
  Clone ID: LIB3196-012-P1-M1-D8.pep
IIDKSKLLFKFLFELVLRVNRAPNQLKKLLKYFFGSKIIILFEDIFIILF

SEQ ID NO: 100103 - protein, 75 aa, Gossypium hirsutum
  Clone ID: LIB3196-012-P1-M1-E10.pep
SSDYVTKQRSHSQMHIEAIQRYQLFRKKKKKKKSFFIAMSIDKETGDLILPELGSQGGFYGKSKTVRETEKCSEV

SEQ ID NO: 100104 - protein, 83 aa, Gossypium hirsutum
  Clone ID: LIB3196-012-P1-M1-E12.pep
MPSQMEHAMETMMFTFHKFAGDKGYLTKEDLRVLMEKEFPGFLENQKDPLAVVKIMKDLDQCRDGIVGFQSFFSLIAGLTIAC

SEQ ID NO: 100105 - protein, 40 aa, Gossypium hirsutum
  unsure (1)..(40): unsure at all Xaa locations
  Clone ID: LIB3196-012-P1-M1-E4.pep
IPILFDIMQQFIYGRWLPHDLLNSPSRTQQEKXITPALPR

SEQ ID NO: 100106 - protein, 130 aa, Gossypium hirsutum
  unsure (1)..(130): unsure at all Xaa locations
  Clone ID: LIB3196-012-P1-M1-E5.pep
MMFPQSKHSGSSHLPQXLKFTTSDSCDRIKDEFQLLQAQYHSLKLECDKLASEKSEMQRHYVMYYEMSYGLNIEMHKQAEIVKRLNGICAQVLPYLSQEHQQQVLGAIERAKQVTAPGLNSFIRQQRQVH

SEQ ID NO: 100107 - protein, 125 aa, Gossypium hirsutum
  unsure (1)..(125): unsure at all Xaa locations
  Clone ID: LIB3196-012-P1-M1-F10.pep
LKEKNFAQLTVSGSRSDGKXCPPFKIVILDEADSMTSAAQAALRRTMEKESKTTRFCLICNYVSRIIEPLTSRCSKFRFKPLSDKIQQQRLLDIAEKENVKISDEVIPAEKIDGVFAACQSGSFD

SEQ ID NO: 100108 - protein, 53 aa, Gossypium hirsutum
  Clone ID: LIB3196-012-P1-M1-F11.pep
LKLRSHCQGGKQYLSYIKQKVIQFMTFSCSIPSASKCKVFELCFHQAFYQIIL

SEQ ID NO: 100109 - protein, 46 aa, Gossypium hirsutum
  Clone ID: LIB3196-012-P1-M1-F7.pep
HKHLFIVKLKFNCHQIRILISVRNAVNYAIRNIFVYILSDISHVEL

SEQ ID NO: 100110 - protein, 56 aa, Gossypium hirsutum
  Clone ID: LIB3196-012-P1-M1-G1.pep
VCTLKHAGAGPQFPGCDLLHRDLNRGVSPINARASSSYPSDPQKPMSPSRVHSIPN

SEQ ID NO: 100111 - protein, 67 aa, Gossypium hirsutum
  Clone ID: LIB3196-012-P1-M1-G10.pep
ECCYFSIHLRFLSQATLPSVLSQIITIGPCVVNWENTILHFYPSWPSRNFTVSSSDLTNGEGTKIQP

SEQ ID NO: 100112 - protein, 38 aa, Gossypium hirsutum
  Clone ID: LIB3196-012-P1-M1-G12.pep
VRESFCIKDVLYFNWGGTMIVYACQNSELYTKGQFYYM

SEQ ID NO: 100113 - protein, 136 aa, Gossypium hirsutum
  unsure (1)..(136): unsure at all Xaa locations
  Clone ID: LIB3196-012-P1-M1-G2.pep
WLLEKIIKQAKHIFLRSRAAXTIDSLASRIEDPQIQAHWSNINDVYESSVKVLITSQGYEQICKSIQLQLNIGVEQIRAAHLDGRVITLSYQEQELQDFLLSQMSQHQVHAVQQLAKVMGWLVLSFSNHVGLGPIE

SEQ ID NO: 100114 - protein, 34 aa, Gossypium hirsutum
  Clone ID: LIB3196-012-P1-M1-G3.pep
VSAHFVTYYNLVTKKITYNCATIVTFYSWAQKKT

SEQ ID NO: 100115 - protein, 88 aa, Gossypium hirsutum
  Clone ID: LIB3196-012-P1-M1-H10.pep
FFNSLNQFQVTDHRYPAFLSNFETDRRGWPWQKKPYEKTGTDKQGVVSDGTRASLSSLAPLGDQEKCMKGNYGLICMGFYLQLTGLKD

SEQ ID NO: 100116 - protein, 122 aa, Gossypium hirsutum
  unsure (1)..(122): unsure at all Xaa locations
  Clone ID: LIB3196-012-P1-M1-H12.pep
EDSYRKQVEVDAQQCMLEIXDTAGTEQFTAMRDLYMKNGQGFALVYSITAQSTFNDLQDLREQILRVKDTDDVPMILVGNKCDLEDERVVGKEQGQNLARQWNNCAFLESSAKSKINVNEIF

SEQ ID NO: 100117 - protein, 62 aa, Gossypium hirsutum
  Clone ID: LIB3196-012-P1-M1-H2.pep
SRRIENQSVEKSQRNRKSAMGESNSSVDEDLALKKFFAEVSEFERDNEVVRTLSCFKLKPSR

SEQ ID NO: 100118 - protein, 125 aa, Gossypium hirsutum
  Clone ID: LIB3196-013-P1-M1-A1.pep
VAHIGAWHPARVAFSVARAGQKGYHHRTEINKKIYKIGQGYLIKDGKLIKNNASTDYDLSDKSINPLGGFVHYGEVTNDFVMLKGCVVGTKKRVLTLRKSLLVQTKRRALEKIDLKFIDTTFKFG

SEQ ID NO: 100119 - protein, 57 aa, Gossypium hirsutum
  Clone ID: LIB3196-013-P1-M1-A12.pep
GHLEYWSFLFNRKRWYDMRAPQVASLVLAPSGFWFNSLFAWCVWLNTLKMEVVYSRY

SEQ ID NO: 100120 - protein, 49 aa, Gossypium hirsutum
  Clone ID: LIB3196-013-P1-M1-A7.pep
KYLPKHCCISHIFLSSNHNPHKRVCQYALMIPSKNVMRSRVTNLNSSTN

SEQ ID NO: 100121 - protein, 69 aa, Gossypium hirsutum
  Clone ID: LIB3196-013-P1-M1-B3.pep
TGPEAMALTSRLKRDSHITNCLFLYVRLSGVPKDSSAHSFSCMTTYVAKCCLVRMNSKQDELVGWIVSS

SEQ ID NO: 100122 - protein, 53 aa, Gossypium hirsutum
  Clone ID: LIB3196-013-P1-M1-B4.pep
NFPSVPCHKGKNLTACIMEPFLGPFLTWTSVTPSCNKLKRAMLSSLEVPHLNK

SEQ ID NO: 100123 - protein, 76 aa, Gossypium hirsutum
  Clone ID: LIB3196-013-P1-M1-B5.pep
WHPARIIHRVISDCIQHRSSRSPDVSCEGNSRIAWRGLISGSKVFCCQCDYQKIIDGWAQWRSCHLPKKCAISFCS

SEQ ID NO: 100124 - protein, 108 aa, Gossypium hirsutum
  unsure (1)..(108): unsure at all Xaa locations
  Clone ID: LIB3196-013-P1-M1-B6.pep
MPPTVRTTVXVSAGPVMPRPPMASVVRLPSGSVIAPMPPIIHPPRXINVVPMPPSDPPIMAPRPPPMIVPTAFEPAPPVAPVPAPAPMPTVHAPPSMEDEPTCKKLKT

SEQ ID NO: 100125 - protein, 57 aa, Gossypium hirsutum
  Clone ID: LIB3196-013-P1-M1-B9.pep
SDWNYKNSFKIIYQCIRQTQFQNDKEKLLDQTMWPINTGTISSPRVPTGPKVTVFQD

SEQ ID NO: 100126 - protein, 85 aa, Gossypium hirsutum
  Clone ID: LIB3196-013-P1-M1-C1.pep
LMISIVKQCPLEVFDNGNVHAPFCSKFESSFSGFQLKTTFGHKAPFAGFRRGLSFSFFLFSFFSSLFFHFHFEFEFDFDFSVSSF

SEQ ID NO: 100127 - protein, 60 aa, Gossypium hirsutum
  unsure (1)..(60): unsure at all Xaa locations
  Clone ID: LIB3196-013-P1-M1-C10.pep
MIIILNLNRLEHESGFFFNMKYFEDDVHNGNWDEVEKYLXVDDNWYSMKIFFDIRKHVTP

SEQ ID NO: 100128 - protein, 57 aa, Gossypium hirsutum
  Clone ID: LIB3196-013-P1-M1-C11.pep
THVSSYHKIFIIFGLTNKYSLFFKFTSVLLSNSFDPSSLKINYLLVQELNDVPVCFS

SEQ ID NO: 100129 - protein, 39 aa, Gossypium hirsutum
  Clone ID: LIB3196-013-P1-M1-C6.pep
SHFIKITTVPILQVSFPPIMVTKVISIVRILHCLKVETA

SEQ ID NO: 100130 - protein, 48 aa, Gossypium hirsutum
  Clone ID: LIB3196-013-P1-M1-C7.pep
KRALAVFSLLPHYIFDFLTIGTTFSYQFRRILYSKNVCCFLILGRNIP

SEQ ID NO: 100131 - protein, 70 aa, Gossypium hirsutum
  Clone ID: LIB3196-013-P1-M1-C8.pep
ILGARGRAWVVLAVSLADLIAVYTDLLLLCTYQADTCTVAPLASLDPFMELTFFLVMGPWVWLGSTVSYF

SEQ ID NO: 100132 - protein, 53 aa, Gossypium hirsutum
  Clone ID: LIB3196-013-P1-M1-D1.pep
RVCDESIQPEAPVRIKAYPELPPVHRADSRRHPQRTDKGTQRSVGAVLLRELP

SEQ ID NO: 100133 - protein, 114 aa, Gossypium hirsutum
  Clone ID: LIB3196-013-P1-M1-D10.pep
VENAQSPAPPAPPALDREPPAPERPPEVDLASAPGLQFPLLEPFTTPAPAATGPFVPYLIPAPFGLSPPRLCPFLAAAPGPPAFSAAVWKKSQGAGSSPRRPQGGSGAPSGACM

SEQ ID NO: 100134 - protein, 82 aa, Gossypium hirsutum
  Clone ID: LIB3196-013-P1-M1-D12.pep
VVLSIVSKRIDMIRIYNEIIQKKVSTILKVFVLCQNIESFFVVFRHKYIFNHLLINVMEIKLSNIIQTMCHIYKFVMIFDDA

SEQ ID NO: 100135 - protein, 42 aa, Gossypium hirsutum
  Clone ID: LIB3196-013-P1-M1-D5.pep
FRIRLLQHTHFPPLAFFPILIPKVFLHYSAGYSSLYHGFRLM

SEQ ID NO: 100136 - protein, 68 aa, Gossypium hirsutum
  unsure (1)..(68): unsure at all Xaa locations
  Clone ID: LIB3196-013-P1-M1-D6.pep
LRGRVGSPKIFNLLLHVSKRPFQFLNLEPVAFSFPELFEHAQEFLHPGNDLHFLLNAYFANTLAKXVF

SEQ ID NO: 100137 - protein, 125 aa, Gossypium hirsutum
  Clone ID: LIB3196-013-P1-M1-E11.pep
IASTQGNFDGNFESLDLAEFAKKQPWWRKLFGQESGPSAEKYSVATQLFIGGVTGWCTGFIFQKVGKLAATAVGGGFFLLQLANHTGYIKVDWQRVEKDMKKAKEQLKIRKSNQMPTEVRSKAEE

SEQ ID NO: 100138 - protein, 54 aa, Gossypium hirsutum
  Clone ID: LIB3196-013-P1-M1-E12.pep
QFYYNPEETWSTRKLLLITTLTSSSQDSLQITRGERTLFKGVVETSLNREKMKP

SEQ ID NO: 100139 - protein, 75 aa, Gossypium hirsutum
  Clone ID: LIB3196-013-P1-M1-E3.pep
ELRRLYKFPYLEEKFFSRDVLGLLRPLFLYFRISLSSFPKITLNMIFRFFLMSHNKDLSLSFLFLFQDRVLLGCH

SEQ ID NO: 100140 - protein, 53 aa, Gossypium hirsutum
  Clone ID: LIB3196-013-P1-M1-E5.pep
VSGYSHSGDPSFSKSPLRLGYSFRNLPLLLKGVPVRPTRSLEVPLDGARVSFF

SEQ ID NO: 100141 - protein, 47 aa, Gossypium hirsutum
  Clone ID: LIB3196-013-P1-M1-E9.pep
LPSHGHKKARRKSYTCGSILFILNIRSNPGPYNHESLSEMNTGRFTI

SEQ ID NO: 100142 - protein, 92 aa, Gossypium hirsutum
  Clone ID: LIB3196-013-P1-M1-F1.pep
MAKDDSTVRCFQGLLIFGNVIIGCCGIALTAECIFFVSDQHSLYPLLEATDNDDIYGAAWIGIFVGICLFCLSVLGIVGIMKSSRKILLAYF

SEQ ID NO: 100143 - protein, 53 aa, Gossypium hirsutum
  Clone ID: LIB3196-013-P1-M1-F11.pep
NDKGQTSLNVRLGKYLSFKTSVKGQPLWKNSRKVSLYGEHVIKDCLFGKSLEW

SEQ ID NO: 100144 - protein, 119 aa, Gossypium hirsutum
  Clone ID: LIB3196-013-P1-M1-F12.pep
ARSVRDKLRGNARYYIWDDPYLWKHCSDQIIRRCVPETEVTSIFNFCHAEACGGHFGPKRTAHKVLECGLYWPTIFRDAYNFCKSCDRCQHAGNITKQNQMPLSPIHVCEIFDVWGIDF

SEQ ID NO: 100145 - protein, 108 aa, Gossypium hirsutum
  Clone ID: LIB3196-013-P1-M1-F4.pep
AVPGQGRIFPAAAQLSIHVHVSLVKMALCSPVSVMPLSSCGPREAAWAVCLQLANTGWQVVVLGQKVSGLVIGCPAVHRWTLGKPGPWIPRPLCLEPYLACAWNIAHF

SEQ ID NO: 100146 - protein, 57 aa, Gossypium hirsutum
  Clone ID: LIB3196-013-P1-M1-F5.pep
ISTASSPWKIRSSCGRNPQCRSPQGFSQSGNRHIRQVERGAWLFTLLFNAVRKQSVF

SEQ ID NO: 100147 - protein, 79 aa, Gossypium hirsutum
  Clone ID: LIB3196-013-P1-M1-F6.pep
MTDAAVSFAKDFLAGGVAAAISKTAVAPIERVKLLLQVQHASKQITADKQYKGIIDCVVRISKEQGVLSFWRGNLGNVI

SEQ ID NO: 100148 - protein, 111 aa, Gossypium hirsutum
  Clone ID: LIB3196-013-P1-M1-F7.pep
ILLSKDKYCCDLIIMSIVLTGNCTGMKPPATLHKLISSLIPVSDAVLLPKPGPESSASMVSDHYHSKRPSWERKQTPEVDPLLAFYWEQIFSNLDVVRILLVDCHHKRHLC

SEQ ID NO: 100149 - protein, 102 aa, Gossypium hirsutum
  Clone ID: LIB3196-013-P1-M1-F8.pep
LQLSGTNVKKEIISKDKKSDKNYLDKGVKTSTLSLTSPCIVKAAIPDRFTSAIAKAPSSLGSFKSISKSLGLKYSSNCRTLMATYKIKLVGPKGEVTEFEAP

SEQ ID NO: 100150 - protein, 127 aa, Gossypium hirsutum
  Clone ID: LIB3196-013-P1-M1-G10.pep
ISLLQEFDVQEQDIETLHGSVHVTLCGTPKGNRPVILTYHDIGMNHKTCYNPLFNYEDMQEITQHFAVCHVDAPGQQDGAASFPAGYMYPSMDQLAEMLPGVLQQFGLKSIIGMGTGAGAYILTRFA

SEQ ID NO: 100151 - protein, 67 aa, Gossypium hirsutum
  Clone ID: LIB3196-013-P1-M1-G12.pep
HNSERWNTLQLRPGIPGSADALSGGDICLMLEKLCLRTLCNGQDQDLSGRTNATFLRQERQILFFIK

SEQ ID NO: 100152 - protein, 123 aa, Gossypium hirsutum
  Clone ID: LIB3196-013-P1-M1-G2.pep
KFYECKQCGKALSSLTSFQTHIRMHSGERPYECKICGKGFCSANSFQRHEKIHSGDKPYKCTQCGKAFPHSSSLRYHERTHTGEKPYECRQCGKAFRSASHLRVHSRTHTGEKPYECKECGKA

SEQ ID NO: 100153 - protein, 82 aa, Gossypium hirsutum
  Clone ID: LIB3196-013-P1-M1-G3.pep
ILRRAFGRKRSEKGAKIGVFRIYMGRPHANVIHTGRSHTHVPTCVDIASYFPNTQKKSIFRVFEHSKVYKYILEEDLRRHAE

SEQ ID NO: 100154 - protein, 124 aa, Gossypium hirsutum
  Clone ID: LIB3196-013-P1-M1-G4.pep
SRLVQLLVKAHQDAQRHVAAGTQQPYTDGVRMEEIVEGCTGALHILARDPMNRMEIFRLNTIPLFVQLLYSSVENIQRVAAGVLCELAQDKEAADAIDAEGALVPLMELLHSRNEGTAPYPAAV

SEQ ID NO: 100155 - protein, 50 aa, Gossypium hirsutum
  Clone ID: LIB3196-013-P1-M1-G6.pep
IKCEILVIAILKLRHMCSLCTCSWTLFTRVPVNVCPKIHRLLINQYSFQV

SEQ ID NO: 100156 - protein, 123 aa, Gossypium hirsutum
  Clone ID: LIB3196-013-P1-M1-G7.pep
IVNFRLYQLLNLHYPPKLEGQAQAEAKASEGTYALDSESSMEKLAALSASLARVVVPATEEEAEVDEFPTDGEEDRRKELEAQEKHKKLFEGLKFFLNREVPREALAFIIRSFGGESVWDKSL

SEQ ID NO: 100157 - protein, 35 aa, Gossypium hirsutum
  Clone ID: LIB3196-013-P1-M1-H4.pep
KHIYVSSLHVCLSHNHVVYLPLLLYIWHILIWPQL

SEQ ID NO: 100158 - protein, 63 aa, Gossypium hirsutum
  Clone ID: LIB3196-013-P1-M1-H5.pep
VTAFRPNRQSLSVCAGVGWAAIPLALWFLHDPGKPPVGLRWPTGGRNQNGILLQFRFIVLCAH

SEQ ID NO: 100159 - protein, 97 aa, Gossypium hirsutum
  unsure (1)..(97): unsure at all Xaa locations
  Clone ID: LIB3196-013-P1-M1-H6.pep
IMGKKVEVKRAEPRDSKSQAPGQPGAXQWGSRVVPNTANGWAGQPPPTWQQGYCPQGMWVPAGQAIGGYXPPPASRGVPPTPPXSTFYMVSTPPGGF

SEQ ID NO: 100160 - protein, 64 aa, Gossypium hirsutum
  Clone ID: LIB3196-013-P1-M1-H8.pep
ILFYPIDLNGDIKKKGTNKLNTNSSFFFLDSVWNINKKGVILFFCSRIEAFYAIFPSLFIFYAI

SEQ ID NO: 100161 - protein, 49 aa, Gossypium hirsutum
  Clone ID: LIB3196-013-P1-M1-H9.pep
IQHVAKNTAFGTRSCFVSQFWLQDLDFLSLNFLICKMDYEGINEDLNED

SEQ ID NO: 100162 - protein, 120 aa, Gossypium hirsutum
  Clone ID: LIB3196-014-P1-M1-A10.pep
IQVSTAVVEPYNSILTTHTTLEHSDCAFMVDNEAIYDICRRNLDIERPTYTNLNRLIGQIVSSITASLRFDGALNVDLTEFQTNLGPYPRIHFPLATYAPGIFAEKAYHEQLSVAKINNA

SEQ ID NO: 100163 - protein, 126 aa, Gossypium hirsutum
  unsure (1)..(126): unsure at all Xaa locations
  Clone ID: LIB3196-014-P1-M1-A11.pep
SEFVSICLICQQVKAKHQVPSGLLQPVTISEWKWERVIMGFVSRFPXSLKKKDAIWVIVDRLTKFAHFIPVRMDFSLNRLAELYVSEIVRLHEVPVSTILDKDPRFTSXFWNKLQKTLGTKLHFST

SEQ ID NO: 100164 - protein, 66 aa, Gossypium hirsutum
  Clone ID: LIB3196-014-P1-M1-A12.pep
PNTKIYCLLLFWHCFLLFPFLCHVCRSMEGQRAREFPLSCKGVDPQAEWPLMHMVNGCGAREARKP

SEQ ID NO: 100165 - protein, 50 aa, Gossypium hirsutum
  Clone ID: LIB3196-014-P1-M1-A5.pep
STQLALPVGLALAVSLQNGVKTRIISHTPNLVDLASCKSVLLVLLNAVTF

SEQ ID NO: 100166 - protein, 69 aa, Gossypium hirsutum
  Clone ID: LIB3196-014-P1-M1-A7.pep
NICTHLSKLTHSTYQSSNKSKRKKSVKLHLLSTLTTIFVHSDLKYVLKTNKHTEKTNRHQSLKISPLAY

SEQ ID NO: 100167 - protein, 94 aa, Gossypium hirsutum
  unsure (1)..(94): unsure at all Xaa locations
  Clone ID: LIB3196-014-P1-M1-A8.pep
LKAWSAQKARAAAILEADSKDEPLITMDTPEEENANAVYLQNITILSALISKXLGDSLKKALNGGEMVNMNLDWREVLTYPDERGEDYIFTKNN

SEQ ID NO: 100168 - protein, 44 aa, Gossypium hirsutum
  Clone ID: LIB3196-014-P1-M1-A9.pep
FFFRGMHGNQGLGLYCHSPRMLTASAFSPCHTFNLDGWGGSGMK

SEQ ID NO: 100169 - protein, 33 aa, Gossypium hirsutum
  Clone ID: LIB3196-014-P1-M1-B1.pep
TPLLRLCWCFEVLPFILDQVHSAKYYTLLKPRF

SEQ ID NO: 100170 - protein, 43 aa, Gossypium hirsutum
  Clone ID: LIB3196-014-P1-M1-B10.pep
TLNVKLIIFLGGKMGQFIGYICRSNNIKITYTNQSLSEKLILK

SEQ ID NO: 100171 - protein, 74 aa, Gossypium hirsutum
  Clone ID: LIB3196-014-P1-M1-B12.pep
QILQVNPHHAAKKNNCNGIISLSYKCTKSSNLSKQLFTSKQQLNQHLLLLISIFLAHPPHKTSQSPREFPFNLH

SEQ ID NO: 100172 - protein, 78 aa, Gossypium hirsutum
  Clone ID: LIB3196-014-P1-M1-B2.pep
ATAENDPERAEFWFENTIRVFDELSCSLTECVKCAVFLLKDLAYQWWNPLTPVVPKEHFTWKFFQTKFCKKYISQRFL

SEQ ID NO: 100173 - protein, 88 aa, Gossypium hirsutum
  unsure (1)..(88): unsure at all Xaa locations
  Clone ID: LIB3196-014-P1-M1-B4.pep
QEERHQLHCQQMCLXRFKQEQQHCHQAXFQECEQHFHQQEHRPEKKQHCVTECIEKDQENPWRVEREKESQKVETDNGEHDQRHIPFH

SEQ ID NO: 100174 - protein, 61 aa, Gossypium hirsutum
  Clone ID: LIB3196-014-P1-M1-B5.pep
TQLVPGICFSLNSRLTRLSSILSTSDYIGKKSLWESQCSKSHGALSAQKPRKQLGCTVTSE

SEQ ID NO: 100175 - protein, 118 aa, Gossypium hirsutum
  Clone ID: LIB3196-014-P1-M1-B6.pep
SSQFQPAKVSRLIAILGLRKLLKRDLIASNVQEKWGVRVSVSLRAGLALARARSLRLPPSPLCSSRGWELPLDPAPLLSLFSIYCLLFVLSNLERVRVWSARGSDALVCAALFIRSPD

SEQ ID NO: 100176 - protein, 52 aa, Gossypium hirsutum
  Clone ID: LIB3196-014-P1-M1-B8.pep
VASPINSSLVYALKIDVHPGHFIESKILHCKDTIPVLSYAPFLGHSSQGQYL

SEQ ID NO: 100177 - protein, 109 aa, Gossypium hirsutum
  unsure (1)..(109): unsure at all Xaa locations
  Clone ID: LIB3196-014-P1-M1-C1.pep
AARSAHHPSSPSAPRSPADPTDWGGQTSPRRTGFSFSTQEPRPQTQNLGTPGPALSHPRGPSHPLDLGTSSPNASQIHWTPYRAMYQYRPQNEDXLELREGDRVDVLQQ

SEQ ID NO: 100178 - protein, 57 aa, Gossypium hirsutum
  Clone ID: LIB3196-014-P1-M1-C10.pep
LKNLLKLAGKNLYGEFIYVLAKPDYHLFLICIWGVLFSSFLPSFRRGNPVRSGCLPA

SEQ ID NO: 100179 - protein, 40 aa, Gossypium hirsutum
  Clone ID: LIB3196-014-P1-M1-C11.pep
CKHQHCRLSYIIAFVEQGQNGVPMFYLCKIIVCCTKLLRR

SEQ ID NO: 100180 - protein, 43 aa, Gossypium hirsutum
  unsure (1)..(43): unsure at all Xaa locations
  Clone ID: LIB3196-014-P1-M1-C12.pep
HYXTSMYKKAGCSRARYPKIRTCQPTRARFLSFTRNMPSCFVK

SEQ ID NO: 100181 - protein, 83 aa, Gossypium hirsutum
  Clone ID: LIB3196-014-P1-M1-C4.pep
DRPGTPGIGERPCHAVADLLTVSETANEPPQDEGNCFNSPRNLAMEATYINHNFSQQCLRMGKERYNFPNPNPVGEVDIKMNE

SEQ ID NO: 100182 - protein, 86 aa, Gossypium hirsutum
  Clone ID: LIB3196-014-P1-M1-D10.pep
KKEYIKLRHTAQLISQSNHLWNCYSGQESSVPKSLPIVPFPITISSHPYNKKYPDLHGNHFLLSFKSSSLGRARWAPRKIQFRASS

SEQ ID NO: 100183 - protein, 94 aa, Gossypium hirsutum
  unsure (1)..(94): unsure at all Xaa locations
  Clone ID: LIB3196-014-P1-M1-D2.pep
MYNINQSTDTKEAAAIEARRNREKERQNRFFNVRNRVMGVDVQALNNQVGDRKRREAAERSKEAAYGTSQVQYDVVVQMLXKEEADRTRQFSKK

SEQ ID NO: 100184 - protein, 60 aa, Gossypium hirsutum
  Clone ID: LIB3196-014-P1-M1-D5.pep
CIIDEQNTNMQQSKVSNNWYKGMMQSIKEKYGLFRSKVHGVAHGPQITYRFSPHKCSHTH

SEQ ID NO: 100185 - protein, 44 aa, Gossypium hirsutum
  Clone ID: LIB3196-014-P1-M1-E1.pep
HCISYYNRMNSSSKYIYSCSLNTYWSTRSCIILWNIWSLKQSPI

SEQ ID NO: 100186 - protein, 92 aa, Gossypium hirsutum
  Clone ID: LIB3196-014-P1-M1-E3.pep
PHANVPAHVDFAPYFPNTWKYPIFRVFEYSKIYKYPLEEYIRGQLEKIKENTRRTPLESTRKQISIKIEDLLLISFEVLLSFFMSCSYGRVG

SEQ ID NO: 100187 - protein, 53 aa, Gossypium hirsutum
  Clone ID: LIB3196-014-P1-M1-E5.pep
IFQNMKLLLLHSFFYGKLDSLSWNCIFYPTSNSISTIFCGFSKSNYGCCPKLF

SEQ ID NO: 100188 - protein, 109 aa, Gossypium hirsutum
  unsure (1)..(109): unsure at all Xaa locations
  Clone ID: LIB3196-014-P1-M1-E7.pep
GNYKSFGDTKFVPNLPKEKLEQVILGSEAAQQHPEEVRGLWQTCGELMFSLEPRLRHLGLGKEGITTYFSGNCTMEDAKLAQDFLDSQNLSAYNTRLFKXEVDGEGKPH

SEQ ID NO: 100189 - protein, 64 aa, Gossypium hirsutum
  Clone ID: LIB3196-014-P1-M1-E8.pep
IYGSYLVHLVLIPTINSDSKAALVYTIYYAPSLACSDFVSDFLAYHWTQETFTARNCCGIGHQI

SEQ ID NO: 100190 - protein, 37 aa, Gossypium hirsutum
  Clone ID: LIB3196-014-P1-M1-E9.pep
LFLKQGELCISHKCGRVGPTPKTAPRHQPASSYNLVL

SEQ ID NO: 100191 - protein, 65 aa, Gossypium hirsutum
  Clone ID: LIB3196-014-P1-M1-F1.pep
RIISNTLQTSSVEIIILIVSHRSMIRCGDHTLKSVVLSTNVRVTIASRSICPTMVIRSQIIFLRT

SEQ ID NO: 100192 - protein, 135 aa, Gossypium hirsutum
  unsure (1)..(135): unsure at all Xaa locations
  Clone ID: LIB3196-014-P1-M1-F12.pep
EIVLTFEKINKSRNARAQCVGWHSKKRRWDEKACQMISDIKNEVKCRCNYTSTVMSFSILMSPKSMTDKVLDYITCIGLSVSILSLVLCLIIEATVWSRVVVTEISYMRHVCIVNIAVSLLTANVXVIIGSNFNP

SEQ ID NO: 100193 - protein, 72 aa, Gossypium hirsutum
  Clone ID: LIB3196-014-P1-M1-F2.pep
EIFCEISFHCLSFCFGHLYLVCMKLKIKAFLKILLHAHFCGWAGGRRQIRFEHILVILMQNYTIFPVNNTNF

SEQ ID NO: 100194 - protein, 106 aa, Gossypium hirsutum
  unsure (1)..(106): unsure at all Xaa locations
  Clone ID: LIB3196-014-P1-M1-F3.pep
GCSPHKMTTVNRAPDANIXTDADDAGETIHGHLSMGVHQCGMGPPGQNDLDRYLNGLLTFIQLQESTHDRYYDKLNLTSRSLVPGXDASAYPTNGMERHRLVGLNR

SEQ ID NO: 100195 - protein, 67 aa, Gossypium hirsutum
  unsure (1)..(67): unsure at all Xaa locations
  Clone ID: LIB3196-014-P1-M1-F6.pep
MQIFTKXTVSGKTITLEVEPSDTIENDKANIQYKEGISPDQQSFLFAGKHLKDGRTLFDYNIQNEIT

SEQ ID NO: 100196 - protein, 67 aa, Gossypium hirsutum
  Clone ID: LIB3196-014-P1-M1-F7.pep
IVPPSKGLPQTIFIDTTLLRPHLGISIDNGNRSKPKNRLERFISPCKTRRGKNLKSFKSFVVVFKKK

SEQ ID NO: 100197 - protein, 126 aa, Gossypium hirsutum
  Clone ID: LIB3196-014-P1-M1-G1.pep
MAAGGRGGGGKHSSKSDADSGFLGLRPTSVDPALRRRRRGPRNKKRGWRRLAQEPLGLEVDQFLEDVRLQERTSGGLLSEAPNEKLFFVDTGSKEKGLTKKRTKGQKKSLLLKKPLRVDLILENTS

SEQ ID NO: 100198 - protein, 127 aa, Gossypium hirsutum
  Clone ID: LIB3196-014-P1-M1-G10.pep
APTARGPVVLQGINYASGGGGILNHTGNIFGGRINFDAQLDNFENTRQDIISTIGVSATLELLQSSLFSVTMGSNDFINNYFTPIVSAEEQKLVPPQVFVASMIARFKLQLTKLYTSSARKIFVVNV

SEQ ID NO: 100199 - protein, 108 aa, Gossypium hirsutum
  Clone ID: LIB3196-014-P1-M1-G3.pep
GESSSELWSAGPGLKVPPDLSEATQRAEPPKGQSSPIPVARAARKPKDMQCARSWPLRSATGSQQASAGSVPCHGPRELLGTLLCGRGRSCGRTRGMNAHRISRPACW

SEQ ID NO: 100200 - protein, 52 aa, Gossypium hirsutum
  unsure (1)..(52): unsure at all Xaa locations
  Clone ID: LIB3196-014-P1-M1-G6.pep
NRFSRYSLLGRLPEPNWARXLELCARFLEGNELNPDWXDYLQFLITQAAIPP

SEQ ID NO: 100201 - protein, 123 aa, Gossypium hirsutum
  unsure (1)..(123): unsure at all Xaa locations
  Clone ID: LIB3196-014-P1-M1-G8.pep
SVTLGILIAGQVSEAHLNPAVTFGMCFLIREPWIKLTAYTLAQTLGAFLGAGIVSGMHYDAIWRFVDNQICVXGPNGTTGIYATYPFGHLDIINGFFDQFISTGSLIECELAIVDPYNNPVPR

SEQ ID NO: 100202 - protein, 114 aa, Gossypium hirsutum
  unsure (1)..(114): unsure at all Xaa locations
  Clone ID: LIB3196-014-P1-M1-G9.pep
MVPCSLCPGAHLNPAPTXAMSLLARVPRIKLPESSLAQTLGAFLPAGIALGSHHDAIWGFADNQLFDSGPNGTAGIFATYPSGHLNMINGFFDQFIGTASLIVRPLAIVDPYNN

SEQ ID NO: 100203 - protein, 102 aa, Gossypium hirsutum
  Clone ID: LIB3196-014-P1-M1-H1.pep
LSSRLFCSQLGCLNLRFSFSRRAWPGSSPCRPEVDLKDLLSKAASKKAVTPHTRDRRRSRTRGVNRLNSLLKQLKQFIFKIFSQANNLRHSRLKIHISSYET

SEQ ID NO: 100204 - protein, 56 aa, Gossypium hirsutum
  Clone ID: LIB3196-014-P1-M1-H11.pep
TKAFAIQNTFYFWNQTKKLTAKCFSTSILNCNSIAKLAFYKELSIQHFSIATVMHS

SEQ ID NO: 100205 - protein, 90 aa, Gossypium hirsutum
  Clone ID: LIB3196-014-P1-M1-H12.pep
MIALSLLKLRKLDDAIEDCTNAVKLDDTYIKAYLRRAQCYMDTEQYEEAVRDYEKVYQTEKTKEHKQLLKNAQLELKKSKRKDYYKILGV

SEQ ID NO: 100206 - protein, 43 aa, Gossypium hirsutum
  Clone ID: LIB3196-014-P1-M1-H4.pep
MSVTYDDSVGVEVSSDSFWEVGNYKRTVKRIDDGHRLCSDLMY

SEQ ID NO: 100207 - protein, 116 aa, Gossypium hirsutum
  unsure (1)..(116): unsure at all Xaa locations
  Clone ID: LIB3196-014-P1-M1-H7.pep
GLVGYYQWFVKGNLLIALPLTELLQKNVTFXWSNKCXRVLNXLKAMLTEALVLTQTKSGKEFFVFNDASLNGLGCVLMQDGKVIAYVSRKLKPHENNYPTHDLELAVVVFALNPRV

SEQ ID NO: 100208 - protein, 42 aa, Gossypium hirsutum
  Clone ID: LIB3196-015-P1-M1-A1.pep
AVGASLKTEPHTHNRLPNSVCKHGSNPGNRGGAPTRTSVPNS

SEQ ID NO: 100209 - protein, 78 aa, Gossypium hirsutum
  Clone ID: LIB3196-015-P1-M1-A3.pep
QSSNSIGIEISRLISRCISELQSLEASQGISDTESILNHDDESMRVVTHIYTGRRRDRLFETPKRILRFQSGISIIMS

SEQ ID NO: 100210 - protein, 75 aa, Gossypium hirsutum
  Clone ID: LIB3196-015-P1-M1-A4.pep
LWRCCCCLHCTQTRVAQDCPSSSSSVQRCELSLFQSLPTMTSKKLVNSVAGCADDALAGLVACNPNLQLLQGHRV

SEQ ID NO: 100211 - protein, 110 aa, Gossypium hirsutum
  Clone ID: LIB3196-015-P1-M1-A7.pep
FSFSRNLNHHSNRRFSSPKQQPTHSSLGDDFSALRSPLGFDFNKAKGNLWRIYKVRPSFFFFLFYFCFRIQKQQIQKNGAEKNKISRDLNRKSPFDFGGPLGISICVKIY

SEQ ID NO: 100212 - protein, 43 aa, Gossypium hirsutum
  Clone ID: LIB3196-015-P1-M1-A8.pep
MVARTPPKQRKLVVAPLDPVLLRETVKKVEKCMARLQELQYTV

SEQ ID NO: 100213 - protein, 110 aa, Gossypium hirsutum
  unsure (1)..(110): unsure at all Xaa locations
  Clone ID: LIB3196-015-P1-M1-B11.pep
IPTGEAVCVYTAKDPDKENQKISYRILRDPAGWLAMDPDSGQVTVAGTLDREDERFVRNNIYEVMVLAVDNGSPPTTGTGTLLLTLIDVNDHGPVPEPREITIXCNQSPE

SEQ ID NO: 100214 - protein, 66 aa, Gossypium hirsutum
  Clone ID: LIB3196-015-P1-M1-B12.pep
KMGRIMRGLQLNKIRGISCLYFILFYFLGYFKFLDLGSFRNFSISHIIRQEVEIINKIEQFTGRVG

SEQ ID NO: 100215 - protein, 69 aa, Gossypium hirsutum
  Clone ID: LIB3196-015-P1-M1-B2.pep
LLIKQRQMFSCDQSAAKASDSRSLLKSQAIAITSAKRNACHTNPHRSKAKHEKGVGFLFSFLLPFSFPL

SEQ ID NO: 100216 - protein, 71 aa, Gossypium hirsutum
  Clone ID: LIB3196-015-P1-M1-B4.pep
KLIKVCNHPSAHRFTHESPLLFYMGPLHHLKYIDFFLLAFNFLLFSAKELLYVCIYIVVHFVAERFQEYNH

SEQ ID NO: 100217 - protein, 57 aa, Gossypium hirsutum
  Clone ID: LIB3196-015-P1-M1-B6.pep
DSLQLEDRRETIEDFEWEEVDGRVDERDVLSVFVDGDDYINSTSLSIVALIAPEDAA

SEQ ID NO: 100218 - protein, 82 aa, Gossypium hirsutum
  Clone ID: LIB3196-015-P1-M1-B7.pep
MQNQLSGNLLRKFKNSNGWQKLWVVFTNFCLFFYKSHQDNHPLASLPLLGYSLTIPSESENIHKDYVFKLHFKSHVYYFRAE

SEQ ID NO: 100219 - protein, 47 aa, Gossypium hirsutum
  Clone ID: LIB3196-015-P1-M1-B8.pep
KFYNFYKLVLLSIVIKNHLAKVVSLTINMYTPPLNIKIHNFSTWFNP

SEQ ID NO: 100220 - protein, 94 aa, Gossypium hirsutum
  Clone ID: LIB3196-015-P1-M1-B9.pep
YTHFFSHFHFQSSLFRFFVPLLPIARLQSLGSDGFDLKWIEGFNIGSVIEAKIGEAKDIGVVVSFDKYNDVLGFITHSQLMHLLGYIIEGCCHH

SEQ ID NO: 100221 - protein, 43 aa, Gossypium hirsutum
  Clone ID: LIB3196-015-P1-M1-C1.pep
LDLWIPLLGFTLIRQNLVTLFLGTQSTPLNYDKSTLRQGLFLL

SEQ ID NO: 100222 - protein, 69 aa, Gossypium hirsutum
  Clone ID: LIB3196-015-P1-M1-C10.pep
GHAWDEPMLSFTTHLTTKITSVMRESRTLCANLWSKPLLSDMCDNTLFQALNGSGHTSYHSRRIYRGGA

SEQ ID NO: 100223 - protein, 54 aa, Gossypium hirsutum
  Clone ID: LIB3196-015-P1-M1-C6.pep
CRPFPRVLKSRGGVVGIKVDKGLVTLAGTIGETTTQGWMVCLSAGPVKKDWLTF

SEQ ID NO: 100224 - protein, 69 aa, Gossypium hirsutum
  Clone ID: LIB3196-015-P1-M1-C7.pep
RLLEEAKDAAILGQPGMLDQTGALKLHLDEQKAMELPTARADGALRINKDAGPRAEDKRGIDHMAMTQT

SEQ ID NO: 100225 - protein, 49 aa, Gossypium hirsutum
  Clone ID: LIB3196-015-P1-M1-C9.pep
TIKYSQNHAYCNTPNLAQTLWLNLTCHIKVKNPFFILVFYKPTFVELTE

SEQ ID NO: 100226 - protein, 69 aa, Gossypium hirsutum
  unsure (1)..(69): unsure at all Xaa locations
  Clone ID: LIB3196-015-P1-M1-D11.pep
CMTHKAESRHXVAPKIDKNVDRYCEAAHLQIQALAHLITSDHNSNFLCDQMLLRVEHHGHISLDIPLLG

SEQ ID NO: 100227 - protein, 45 aa, Gossypium hirsutum
  Clone ID: LIB3196-015-P1-M1-D12.pep
MKIYLNELNLNIFRSRTKEIRFGSGKNESCRLAARFHFVPSEVSL

SEQ ID NO: 100228 - protein, 107 aa, Gossypium hirsutum
  Clone ID: LIB3196-015-P1-M1-D2.pep
ILEHILIVNRRLNHQISIMQSHTHILTQLCGRIRMKTYVGHIIESFPPNSRLYNVLDTITDRTGAIISKFRTSFGYKIQYMCPPSNLENSTVTQDSSVCTKTIFKAR

SEQ ID NO: 100229 - protein, 86 aa, Gossypium hirsutum
  Clone ID: LIB3196-015-P1-M1-D3.pep
AGLPIMDVECIGDLTKLVGTDTSLKQEFRSSGSPSFGLPHNVTLWCSTATPLQWETSMSWSRSLGLTCGSCFLVCRCGRVCGNITS

SEQ ID NO: 100230 - protein, 42 aa, Gossypium hirsutum
  Clone ID: LIB3196-015-P1-M1-D9.pep
NLVAQPLLMPRTFAIINSTHVQARAHRIMSGGHLHIPPNPLV

SEQ ID NO: 100231 - protein, 121 aa, Gossypium hirsutum
  Clone ID: LIB3196-015-P1-M1-E2.pep
LLRNYEVIPPIRNQNTNDPPLPQDVQIQNRTIRDFVVPVVDDLQSGVVRPAIQVGNFELKPVMFQMLNSNGQYVGLPHEDAREHLKSFLLICVSFSQQGVPDDALKMQLFPYSLQERAHAS

SEQ ID NO: 100232 - protein, 111 aa, Gossypium hirsutum
  Clone ID: LIB3196-015-P1-M1-E4.pep
MEINAVNQTNTPTFYSKTQQNPLMGSALHEAFPTFQTTRGTTRKRTVYLKSQNKDSLREEEEEEEEDDDDDDDERIEVKRKIVALQKIVPGGEALGVDKLFEETAGYILTL

SEQ ID NO: 100233 - protein, 50 aa, Gossypium hirsutum
  Clone ID: LIB3196-015-P1-M1-E5.pep
HLYKHQTAALLVYLHISDINSTLIYLFSRHIALEFNNSLNLHNFLVSTYQ

SEQ ID NO: 100234 - protein, 48 aa, Gossypium hirsutum
  Clone ID: LIB3196-015-P1-M1-E7.pep
MLRELFHCKNKHLKYNMTTKINEIHFNSLGNKLGPLNLDGKLLGNRFQ

SEQ ID NO: 100235 - protein, 127 aa, Gossypium hirsutum
  Clone ID: LIB3196-015-P1-M1-E9.pep
MEALRLYQHAVEYFLHAIKYEAHSDKAKESIRAKCVQYLDRAEKLKDYLRSKEKHGKKPVKENQSEGKGSDSDSEGDNPEKKKLQEQLMGAVVMEKPNIRWNDVAGLEGAKEALKEAVILPIKFPHL

SEQ ID NO: 100236 - protein, 40 aa, Gossypium hirsutum
  Clone ID: LIB3196-015-P1-M1-F12.pep
IVYYVNNVCRFCRNTKHGLFYKKKGPMTRITHGAICEYAL

SEQ ID NO: 100237 - protein, 128 aa, Gossypium hirsutum
  Clone ID: LIB3196-015-P1-M1-F2.pep
EPAREPRPGGGFGLGGRGLTCLSKTPFFVVRGEVQKAVNTARGLYQRWCELLQESAAVGREELDWTTNELRNGLRSIEWDLEDLEETIGIVEANPGKFKLPAGDLQERKVFVERMREAVQEMKDHMVS

SEQ ID NO: 100238 - protein, 109 aa, Gossypium hirsutum
  unsure (1)..(109): unsure at all Xaa locations
  Clone ID: LIB3196-015-P1-M1-F3.pep
MEFNNPKGSKKPGGGALSGLLKNGXHGGLGLYGVANSLYNIDGGDPALVFNMILGIKDKVYSQGTHLMIPWVERAIIYDVRARPHLVESTFGSRDLHMGKIGVRVLTRP

SEQ ID NO: 100239 - protein, 107 aa, Gossypium hirsutum
  Clone ID: LIB3196-015-P1-M1-F6.pep
MAAGGLSRSERKAAERVRRLREEQQRERLRQVSRILRKAAAERSAEEGRLLAESADLVTELQGRSRRREGLKRRQEEVCDDPEELRGKVRELASAVRNAKYLVVYTG

SEQ ID NO: 100240 - protein, 104 aa, Gossypium hirsutum
  Clone ID: LIB3196-015-P1-M1-F7.pep
CTIGVDFKIRTIELDGKTIKLQIWDTAGQERFRTITSSYYRGAHGIIVVYDVTDQESFNNVKQWLQEIDRYASENVNKLLVGNKCDLTTKKVVDYTTAKEFADS

SEQ ID NO: 100241 - protein, 52 aa, Gossypium hirsutum
  Clone ID: LIB3196-015-P1-M1-F9.pep
EFAGAKLEDSEVRSVASNQSEMEFSSLQDMPKELDPSAGLPLDWLLAFVFFD

SEQ ID NO: 100242 - protein, 38 aa, Gossypium hirsutum
  Clone ID: LIB3196-015-P1-M1-G11.pep
LFRNTYEVNLICGGNTGLFFYLLGADTLLMDLAPKSKD

SEQ ID NO: 100243 - protein, 83 aa, Gossypium hirsutum
  Clone ID: LIB3196-015-P1-M1-G12.pep
MSGGGVIRGPAGNNDCRIYVGNLPPDIRTKDIEDVFYKYGAIRDIDLKNRRGGPPFAFVEFEDPRDAEDAVYGRDGYDYDGYR

SEQ ID NO: 100244 - protein, 121 aa, Gossypium hirsutum
  Clone ID: LIB3196-015-P1-M1-G2.pep
DAWAPTHRLLLKQWLKEEELILNRISFKETQIDSVRKEITQLYIFFFLFHSISLLLLFNSSSRDSPVGACHRSWIPSLCSLLCSMGIIWAVRYKTDVEGHLEKLLEREKEDGKLLGKCVEE

SEQ ID NO: 100245 - protein, 48 aa, Gossypium hirsutum
  Clone ID: LIB3196-015-P1-M1-G3.pep
KLLNFNKKYKKYLKFIKNYKFFIKIIKNPTRPPTRPPTRPPTRPPTRP

SEQ ID NO: 100246 - protein, 46 aa, Gossypium hirsutum
  Clone ID: LIB3196-015-P1-M1-G5.pep
CNLHQCVLRHNALISRQEEHKYNYLSLWSQYTIGQSLDNLAYVSRQ

SEQ ID NO: 100247 - protein, 83 aa, Gossypium hirsutum
  Clone ID: LIB3196-015-P1-M1-G8.pep
LHRLAHLCAAALSRHHSQPAIVPPLHLLQTATAFSRSCSRPPCLARRPSFRHFPACHHILSITAAACCTDSCSLPTLLLGKRK

SEQ ID NO: 100248 - protein, 109 aa, Gossypium hirsutum
  Clone ID: LIB3196-015-P1-M1-H10.pep
RGFFHLLKEHVAFFPWFFPFSRLWLQLYQADTRRKILSYERQYRTSAERMAELRLQEDLHILKDAQVVGMTTTGEKLWRNLPVASKFTSGARLSKDKVRGTFLVGRGKY

SEQ ID NO: 100249 - protein, 56 aa, Gossypium hirsutum
  Clone ID: LIB3196-015-P1-M1-H2.pep
EGLFIKTNLIIFSRACKCLEKVVFLYLKISKLQNEIQCFVMKMRRVNRRTKLFLIS

SEQ ID NO: 100250 - protein, 97 aa, Gossypium hirsutum
  Clone ID: LIB3196-015-P1-M1-H4.pep
VFTFFFFFFGRLNPSRVMAAALPRTLGELQLYRILQKANLLSYFDAFIQQGGDDVQQLCEAGEEEFLEIMALVGMASKPLHVRRLQKALRDWVTNPG

SEQ ID NO: 100251 - protein, 88 aa, Gossypium hirsutum
  Clone ID: LIB3196-015-P1-M1-H6.pep
HASAMVKIREVATGEVVRIIGALTPVSDVNATEVIIISETSTTKVLATSTSMTTFTALTHDFLKNLGSFRSQMMRGSGQKMPLLVLKG

SEQ ID NO: 100252 - protein, 53 aa, Gossypium hirsutum
  Clone ID: LIB3196-015-P1-M1-H7.pep
MESLPLSSCFHFLSGVEPVQVQETVENHLKSLLIKHFDPRKADSIFTEEGEVR

SEQ ID NO: 100253 - protein, 48 aa, Gossypium hirsutum
  Clone ID: LIB3196-015-P1-M1-H8.pep
EITPRKSIDLSQKPDSSSRLKISPQFPFRSFGFSLCFVFIIFLRCFPF

SEQ ID NO: 100254 - protein, 89 aa, Gossypium hirsutum
  Clone ID: LIB3196-016-P1-M1-A10.pep
MATLRSHDHQVDQLTNDKARVEVERDNLTEDIMRLREKLQEEMLQREEAENTLQSFRQDVDNASLARLDLERKVESLQEEIAFLKELHE

SEQ ID NO: 100255 - protein, 78 aa, Gossypium hirsutum
  Clone ID: LIB3196-016-P1-M1-A2.pep
MLVLLAGIFVVHIATVIMLFVCTIANVWVVSNAGNASVGLWNNCTNTLCNGTLSYAHEDALKTVQAFMILSIIFSAIS

SEQ ID NO: 100256 - protein, 74 aa, Gossypium hirsutum
  unsure (1)..(74): unsure at all Xaa locations
  Clone ID: LIB3196-016-P1-M1-A6.pep
MKTLETQPLAPDCCPSDQDPAPAHPSPHASPMDKNADPELMPPPLEREDPPRLSPDPVAGSAVPXELGEGDPVS

SEQ ID NO: 100257 - protein, 82 aa, Gossypium hirsutum
  Clone ID: LIB3196-016-P1-M1-A7.pep
AISRPSSAAPVGQSMAPAPPASTVPAISNPASAGFIASREDVLTRAAALGRGAATTGFKRFLALTEAAKDRKDGPFRKLFNA

SEQ ID NO: 100258 - protein, 99 aa, Gossypium hirsutum
  unsure (1)..(99): unsure at all Xaa locations
  Clone ID: LIB3196-016-P1-M1-A8.pep
DVNCPYRARVANYQRDGPMCMQDNQGGAPNYYPNSFGAPEQQPSVLEHSTQYSGEVRRFNTASDDNVTQVRAFYVNVLNEEQRKRLCENIAXHLKDAQI

SEQ ID NO: 100259 - protein, 68 aa, Gossypium hirsutum
  Clone ID: LIB3196-016-P1-M1-A9.pep
QVFSRCSGFLKLKMQSTYGAPVAFVDFQDTACSTGAINSLQGTILYSSPAGDGMRLEYAKSRMGLRRK

SEQ ID NO: 100260 - protein, 95 aa, Gossypium hirsutum
  Clone ID: LIB3196-016-P1-M1-B10.pep
WNAGRPHARSGIADEPRDASDHCTLYLPRSRNLNNQQLRTPFGLNDPKPINQPSNLEAKKMDADYGIPRKRSDVKKLLSQYQPQLSPCLEGTTVK

SEQ ID NO: 100261 - protein, 56 aa, Gossypium hirsutum
  Clone ID: LIB3196-016-P1-M1-B12.pep
NILVYQLQKCPRLVKLPKYPRFIELLFTLDLQNYCFTLDLQNYHFTLDCEITEIPL

SEQ ID NO: 100262 - protein, 122 aa, Gossypium hirsutum
  Clone ID: LIB3196-016-P1-M1-B2.pep
LAKLGHASDRIIALDGDTKNSTFSEIFKKEHPDRFIECYIAEQNMVSIAVGCATRNRTVPFCSTFAAFFTRAFDQIRMAAISESNINLCGSHCGVSIGEDGPSQMALEDLAMFRSVPTSTVF

SEQ ID NO: 100263 - protein, 141 aa, Gossypium hirsutum
  Clone ID: LIB3196-016-P1-M1-B3.pep
MFPLLDMTEIYFSLLDEIVDTLGEGAFGKVVECIDHKAGGRHVAVKIVKNVDRYCEAARSEIQVLEHLNTTDPNSTFRCVQMLEWFEHHGHICIVFELLGLSTYDFIKENGFLPFRLDHIRKMAYQICKSVNFLHSNKLTH

SEQ ID NO: 100264 - protein, 92 aa, Gossypium hirsutum
  Clone ID: LIB3196-016-P1-M1-B9.pep
LGLDSQTLLPVGITNTHEFWPHQFVLEKGTIGNSQRWGVVCGMDANERTVKVQGRTIAVNQINGFDGKPVEETASAYELVEHPDYSYCFGDI

SEQ ID NO: 100265 - protein, 35 aa, Gossypium hirsutum
  Clone ID: LIB3196-016-P1-M1-C1.pep
KHKNYKKKVRINSLGAKIMEYQLIEPSYGIFSCWN

SEQ ID NO: 100266 - protein, 72 aa, Gossypium hirsutum
  Clone ID: LIB3196-016-P1-M1-C2.pep
CISCPEAFSTYREPLSPTPYFRLMWQKLVNLQASIQVFQQEVSPKPGISHEWESQYILAYVNHYCRHRRGGS

SEQ ID NO: 100267 - protein, 134 aa, Gossypium hirsutum
  Clone ID: LIB3196-016-P1-M1-C3.pep
PIRAAWEGWFPTSNDDYGLLLEDDIEEYPYYYLWIKYALLAYHYDPQISLTELSSISLYTPRIVEVVKERPKWNPTDFFKRIHPNTPYLHQLPCNWGAVFFPKHWREFYVYMNMRVTKDAKSNPVQIPKSRTNG

SEQ ID NO: 100268 - protein, 91 aa, Gossypium hirsutum
  Clone ID: LIB3196-016-P1-M1-C4.pep
ITYTYTFTFITLAIRPYHIYIHFHIHHIEHSALSHTYTFTFITLAIRPYHIHTLSHSSHWPFGLITYTFSFTFIVTKLSRYTSHSRLISSP

SEQ ID NO: 100269 - protein, 118 aa, Gossypium hirsutum
  Clone ID: LIB3196-016-P1-M1-C5.pep
WELGEFHAFIVSDLRELQDQAGQSILLLRIQNPWGRRCWQGLWREGGEGWSQVDAAVTSEFLSQLQEGEFWVEEEEFLTEFDEITIGYPITEAGHLQSLYTEKLLCHTRALPGAWVKG

SEQ ID NO: 100270 - protein, 37 aa, Gossypium hirsutum
  Clone ID: LIB3196-016-P1-M1-C7.pep
MDVRLVRLSSTDKQTSFWTVGEGSQGTKHSTCKGMEA

SEQ ID NO: 100271 - protein, 75 aa, Gossypium hirsutum
  Clone ID: LIB3196-016-P1-M1-C9.pep
IRYAFCLVFYYFYVSVIGGSSIIEPMPQFLIFLVILKCAVDEFMSFVMLYDEIRKSDVGFTCFVFGFLMKLSNLG

SEQ ID NO: 100272 - protein, 36 aa, Gossypium hirsutum
  Clone ID: LIB3196-016-P1-M1-D1.pep
DKSFLYEHTSFVHSSFYKHMNNSISKLTISISFLSR

SEQ ID NO: 100273 - protein, 133 aa, Gossypium hirsutum
  Clone ID: LIB3196-016-P1-M1-D2.pep
APGVFGQTAFGQASVFGQSASSAASGFSFSQPGFTSVPAFGQPASSTPTSTSGSVFGAASSTSSSSSFSFGQSSANTGGGLFGQSNPPAFGQSPGFGQGGSVFGGTSAATTTAASSGFSFCQASSFGSSNTGS

SEQ ID NO: 100274 - protein, 77 aa, Gossypium hirsutum
  unsure (1)..(77): unsure at all Xaa locations
  Clone ID: LIB3196-016-P1-M1-D3.pep
MKKLMVVLSLIAAAWAEEQNKLVHGGPCDKISHPYQAALYTSGHLLCGGVLIHPLWVLTTGHCKKPNLXVLLGKHNL

SEQ ID NO: 100275 - protein, 55 aa, Gossypium hirsutum
  Clone ID: LIB3196-016-P1-M1-D6.pep
LFLIYSNSNQSIQGKLGVLRSVDFQNKIYLHGVEYSIILYSQINQIFPLDKNESP

SEQ ID NO: 100276 - protein, 129 aa, Gossypium hirsutum
  Clone ID: LIB3196-016-P1-M1-D7.pep
SEYDLTTRIAHFLDRHLVFPLLEFLSVKEIYNEKELLQGKLDLLSDTNMVDFAMDVYKNLYSDDIPHALREKRTTVVAQLKQLQAETEPIVKMFEDPETTRQMQSTKDGRMLFDYLADKHGFKQEYLNT

SEQ ID NO: 100277 - protein, 95 aa, Gossypium hirsutum
  Clone ID: LIB3196-016-P1-M1-D8.pep
ANLRRLACDYVLDGDILYKRRKDQVLLRCIDAVEAKLILEEVHEGVCGMHANGFAMARQIMRFGYYWSTLEGDCINYAKKCHKCQIYGDKIHVPP

SEQ ID NO: 100278 - protein, 59 aa, Gossypium hirsutum
  Clone ID: LIB3196-016-P1-M1-D9.pep
SPTTFQTTFKLCLNHIHFNLKAVPVSCYLIKVLVSLPSSLSGSIRERRTGTSWRTIFHI

SEQ ID NO: 100279 - protein, 71 aa, Gossypium hirsutum
  Clone ID: LIB3196-016-P1-M1-E10.pep
SQKKRVKGWEMMHGLHCGFRSAREKEGLIFLYIQMYISLCIYIYTSMYIKLPQFKNTEYLRYLNTGDLSGH

SEQ ID NO: 100280 - protein, 111 aa, Gossypium hirsutum
  unsure (1)..(111): unsure at all Xaa locations
  Clone ID: LIB3196-016-P1-M1-E12.pep
KGRRSRVANAILKKNKFGGMTLPNFKSYYTSIVIKTAYYXIEDSHTDQXKQNXRREIDPHKYSQLKFDKGAKTXNGEKIAFSKKCWINXTTICKKMNLDRDVTRYTKVNLK

SEQ ID NO: 100281 - protein, 73 aa, Gossypium hirsutum
  Clone ID: LIB3196-016-P1-M1-E3.pep
VAMMHQERKFNLTVIDDPSMKELVLRYNGGINMYVLLPENDLCEIENKLTFENLMEWTNPRRMTSKYVEVFFA

SEQ ID NO: 100282 - protein, 142 aa, Gossypium hirsutum
  Clone ID: LIB3196-016-P1-M1-E5.pep
ISDSLLSSTESSPQASPEPLVLHEETPPTTSSDSEEEQEEEEEIDVVSVEKRQAPGKRSESGSPSAGGHSKPPHRPLVLKRCHVCTHQHNYAAPPSTRKDYPAAKRVKLDSVRVLRQISNNRKCTSPRSSDTEENDKRRTHN

SEQ ID NO: 100283 - protein, 130 aa, Gossypium hirsutum
  Clone ID: LIB3196-016-P1-M1-E6.pep
MAPARLFALLLIFVGGVAESIRETEVIDPQDLLEGRYFFGALPDDEDVVGPGQESDDFELSGSGDLDDLEDSTISPEVIHPLVPLDNHIPGKAGSGSQVPTETKKLEENEVIAKRISPIETSEDVSNKVC

SEQ ID NO: 100284 - protein, 109 aa, Gossypium hirsutum
  Clone ID: LIB3196-016-P1-M1-E8.pep
MESGRELSKTVATFILQKILLDDTGLAYICQTYERFSHVAMILGKMVLQLSKEPSARLLKHVVRCYLRLSDNPKAREALTQCLPDQLKDTTFAQVLKDDTTTKRWLAQL

SEQ ID NO: 100285 - protein, 122 aa, Gossypium hirsutum
  Clone ID: LIB3196-016-P1-M1-E9.pep
AWERYKKLLRNCPHHGIPHCIQLETFYNGLNAHTRMVVDAFANGALLSKSYNEAYEIIERIASNNYQWSTNRAVSGIRVAGIHEVDALTSLASQVSSISSMLKNLTTNGSNSFAAQPPNQIE

SEQ ID NO: 100286 - protein, 135 aa, Gossypium hirsutum
  unsure (1)..(135): unsure at all Xaa locations
  Clone ID: LIB3196-016-P1-M1-F1.pep
TVYHCEVESGVYLLTPQPASCPEVSSCRGSLRKTGCCYSCEEDSCQVRINTTVLWHQGCKTEVNITFCEGSCPGESRYSAEAQAMQHQCTCCQERRVHEETVPLRCPDGSTXLHTYNHVDECGCTPFCVLPHGSI

SEQ ID NO: 100287 - protein, 121 aa, Gossypium hirsutum
  unsure (1)..(121): unsure at all Xaa locations
  Clone ID: LIB3196-016-P1-M1-F11.pep
YLELGTSMLKLTILLYLLSGSAGSVDQNMWSLLVPGEKNRITSYGLIENDFVIGHDLLKEEGALVGSXRTEKECGKLDNDRVTLLLWYEPGNTLYIMQNGSCSIGDHRNLYEKYESKVEER

SEQ ID NO: 100288 - protein, 127 aa, Gossypium hirsutum
  Clone ID: LIB3196-016-P1-M1-F12.pep
NRCWQIHERRMKEQYLMAISDKDQQLSHVQNLIRELRSYSYQAQPLKAQYQRQASPETSASPDGSQNLIYETELLTNQLNDSLKEIHQTELRIQQLNSKFSQLLEEKNTLSIQLCDTSQSLRENQQH

SEQ ID NO: 100289 - protein, 85 aa, Gossypium hirsutum
  unsure (1)..(85): unsure at all Xaa locations
  Clone ID: LIB3196-016-P1-M1-F2.pep
MKNYKAIGKIXEGTFSEVMKMQSLRDGNYYACKQMKQRFESIEQVNNLREIQALRRLNPHPNILTLHEVVFDRKSGSLALICELM

SEQ ID NO: 100290 - protein, 61 aa, Gossypium hirsutum
  unsure (1)..(61): unsure at all Xaa locations
  Clone ID: LIB3196-016-P1-M1-F5.pep
MDILRGNDETIGFEDILNDPSQSEVMGEPHFMVEYKLGXYCSSVLFMETEGCILFIVVFVL

SEQ ID NO: 100291 - protein, 121 aa, Gossypium hirsutum
  Clone ID: LIB3196-016-P1-M1-F8.pep
INKFAVALLDDSVRVYNASSTIVPSLKHRLQRNVAALAWKPLSASVLAVACQSCILIWTLDPTSLYTRPSSGCAQVLSHPGHTPVTSLAWAPSGGRLLSASPVDAAIRVWDVSTKTCVPLS

SEQ ID NO: 100292 - protein, 77 aa, Gossypium hirsutum
  Clone ID: LIB3196-016-P1-M1-G10.pep
YLLKSSLYKNLIRSSTLATQSVQGIIIALNPFSETQNVDNQWRIRTPSSDALQSYCASTVETETSAEQYRVAIFTAT

SEQ ID NO: 100293 - protein, 69 aa, Gossypium hirsutum
  Clone ID: LIB3196-016-P1-M1-G11.pep
MSDCYTELEKAVIVLVENFYKYVSKYSLVKNKISKSSFREMLQKELNHMLSDTGNRKAADKLIQNLDAN

SEQ ID NO: 100294 - protein, 82 aa, Gossypium hirsutum
  Clone ID: LIB3196-016-P1-M1-G12.pep
LEESKTGQGSGRSPRSGSAVPATVNGSRKSPRGRIFSPFFFAFYIFIFNIYALLNKGKIVGMNRFKRKKGEIGVTFDFCSSF

SEQ ID NO: 100295 - protein, 62 aa, Gossypium hirsutum
  Clone ID: LIB3196-016-P1-M1-G8.pep
PKFSLYTFPKIINKLNSFFHIKLWCSGANQLKTAKNSAVILQQLQSKLCPRLPEGADKMVLN

SEQ ID NO: 100296 - protein, 76 aa, Gossypium hirsutum
  Clone ID: LIB3196-016-P1-M1-H1.pep
YETLVISLAKSEDTHPASSQLQKCFKRDFRSGTQNQFLKNMALNKKKKNWIILSVILQSFTSQIHVSMFLVFQGSN

SEQ ID NO: 100297 - protein, 108 aa, Gossypium hirsutum
  unsure (1)..(108): unsure at all Xaa locations
  Clone ID: LIB3196-016-P1-M1-H10.pep
RSAIDHEQMAFGLNKRKLIHLAVFKELVKLCDPAVKDWTHTNRKQNVTMXDGLQRSGXNTNMFKVSDYYHRQSCKTCXICQTXFTATTFNQLKQIATNTRITFYWNYT

SEQ ID NO: 100298 - protein, 85 aa, Gossypium hirsutum
  unsure (1)..(85): unsure at all Xaa locations
  Clone ID: LIB3196-016-P1-M1-H11.pep
ILWKGAGSKPSALCRAPLIGFPRAHAQPMTLPSPARRIRNVLPLLQXNVIDRIYIDCYLLSRHGTLLSQKRQKHHRCVSNNMNKS

SEQ ID NO: 100299 - protein, 141 aa, Gossypium hirsutum
  Clone ID: LIB3196-016-P1-M1-H4.pep
VALRAGKKSFLRALSRSFVCRGCQLAPERGAERRDTAPSGVSRFCPPRKSCHDWIGPPDKYSNLRPVHFYIPENESPSEQKLRKLRQETQEWNQQFWANQNLTFSKEKEEFIHLRLKTKGLGLRTESSQKATLNAEEMADF

SEQ ID NO: 100300 - protein, 61 aa, Gossypium hirsutum
  Clone ID: LIB3196-016-P1-M1-H7.pep
SFVLNSEESLGTSRKANQKPKRWSRKSIKHSLFWYCTFFLSILILNLTFFLLLNLNFIKKK

SEQ ID NO: 100301 - protein, 59 aa, Gossypium hirsutum
  Clone ID: LIB3196-016-P1-M1-H9.pep
MAGMLPGVECARRRRFHQSGGSFDSSSVAVIGLTRRSSFCLYTSNNETHHSSVSSQVIL

SEQ ID NO: 100302 - protein, 117 aa, Gossypium hirsutum
  Clone ID: LIB3196-017-P1-M1-A11.pep
ITTVLVESYTLPDGRIIKVGGERFEAPEALFQPHLINVEGVGVAELLFNTIQAADIDTRSEFYKHIVLSGGSTMYPGLPSRLERELKQLYLERVLKGDVEKLSKFKIRIEDPPRRKH

SEQ ID NO: 100303 - protein, 110 aa, Gossypium hirsutum
  Clone ID: LIB3196-017-P1-M1-A12.pep
WRLQALRLEREEYVLLKALALANSDSVHIEDAEAVEQLREALHEALLEYEAGRAGPGGGAERRRAGRLLLTLPLLRQTAGKVLAHFYGVKLEGKVPMHKLFLEMLEAMMD

SEQ ID NO: 100304 - protein, 66 aa, Gossypium hirsutum
  Clone ID: LIB3196-017-P1-M1-A3.pep
VNTRTRLEQVPSRQDCQIQTTKIQHSQLMLNFREALSNFHYYVCKMWPPHWQGQHSIGVPIFFFFL

SEQ ID NO: 100305 - protein, 100 aa, Gossypium hirsutum
  Clone ID: LIB3196-017-P1-M1-A4.pep
MSVFSPWDLPFPYASNHSNLQCFLRCITPVVPTRLLPKKCNEDSNCGNLETNEKERDEEGYSLSEVWESYSEWSAYGVDVPIVVNNGDCVVQYYSPSLSA

SEQ ID NO: 100306 - protein, 84 aa, Gossypium hirsutum
  Clone ID: LIB3196-017-P1-M1-A5.pep
EPLYQNRNSARNINIQIPGEQYFPRRQEHQATSAVAGLALRGVPTMGAGSVSSPGPAGCGHQLVRLSGEPTPSGHVGVTVFPAF

SEQ ID NO: 100307 - protein, 105 aa, Gossypium hirsutum
  Clone ID: LIB3196-017-P1-M1-A6.pep
CLDRGLNLRSDLGPNPGASDPCRDAKAAVVTGMELKDMSSEQVDEILANYQEIVFARTSPQQKLIIVEGCQRHDAAAAATEDGANDSTALKKANIAVAMGIACSD

SEQ ID NO: 100308 - protein, 98 aa, Gossypium hirsutum
  Clone ID: LIB3196-017-P1-M1-A8.pep
MARLIRNSLMKALILIFFASVATATGDAPFIVAHKKASLTRLKSGSERVSVSIDIYNQGFSTAYDVSLLDDSWPQDMFDIVSGNTSRSWERLDAGGLL

SEQ ID NO: 100309 - protein, 104 aa, Gossypium hirsutum
  Clone ID: LIB3196-017-P1-M1-B1.pep
RITVLPNASSDDKACTFVGTAAYVPPEVLNSSPATFGNDLWALGCILYQMLSGTSPFKDTSEWLIFQRIIARDIRLPDYFSEEARDLIEKLLVRFTFTHVVFGF

SEQ ID NO: 100310 - protein, 122 aa, Gossypium hirsutum
  Clone ID: LIB3196-017-P1-M1-B12.pep
SLTLLQADTVRGAVLGSRGAWAVEFFASWCGHCIAFAPTWKALAEDVKAWRPALNLAALDCAEETNSAVCRDFNIPGFPTVRFFKAFSKNGSGAVFPVAGADMQTLRERLIDALESHHDTWP

SEQ ID NO: 100311 - protein, 89 aa, Gossypium hirsutum
  Clone ID: LIB3196-017-P1-M1-B2.pep
MDTRCSILNYLKLIKKRASGELMTVARWMREFIANHPDYKQDSVITDEMNYSLILKCNQIANELCECPELLGSAFMKVKYGGSKTDSCN

SEQ ID NO: 100312 - protein, 83 aa, Gossypium hirsutum
  Clone ID: LIB3196-017-P1-M1-B3.pep
GEIGKVICKERWPIPEHPDSRDICPVRLTSLCVCFQNKRVSINKDELKSTSKAVETVHNLCCNENKGASELVAELSTLYQCIR

SEQ ID NO: 100313 - protein, 83 aa, Gossypium hirsutum
  Clone ID: LIB3196-017-P1-M1-B4.pep
CAMVLSFMACITKRFLDYDLYTLFPQISKTRYLLLPSFVKVEAQSSLPTHSSHYGSHSTSLIIITLQSFFPFFFILFLVLNFW

SEQ ID NO: 100314 - protein, 57 aa, Gossypium hirsutum
  Clone ID: LIB3196-017-P1-M1-B8.pep
FKGKRCHFLYGTFGCISVCGLMDPYTDKLNEGKIEIGSLSWPYTKKKKKKLRKIKKI

SEQ ID NO: 100315 - protein, 32 aa, Gossypium hirsutum
  Clone ID: LIB3196-017-P1-M1-B9.pep
ALNYIDFFIVVYRTLLLRIFVNLECLISKFFC

SEQ ID NO: 100316 - protein, 119 aa, Gossypium hirsutum
  Clone ID: LIB3196-017-P1-M1-C12.pep
MLPAATASLLGPLLTAWALLPFAQGQTPNYTRPVFLCGGDVKGESGYVASEGFPNLYPPNKECIWTITVPEGQTVSLSFRVFDLELHPACRYDALEVFAGSGTSGQRLGRFCGTFRPAP

SEQ ID NO: 100317 - protein, 76 aa, Gossypium hirsutum
  Clone ID: LIB3196-017-P1-M1-C5.pep
ILPNPHGTLYKDNFHGRRLLLMNPFFRWASMAFFFFFLSHPKFICRPFLPQRRLLHLPALTLLISLEMPFFSSSLA

SEQ ID NO: 100318 - protein, 52 aa, Gossypium hirsutum
  unsure (1)..(52): unsure at all Xaa locations
  Clone ID: LIB3196-017-P1-M1-C7.pep
DSPVQLFVDTDVYSRNRCFRLALSYKAGKNSFLLPTGRFKCKDIGEXDMFMT

SEQ ID NO: 100319 - protein, 100 aa, Gossypium hirsutum
  Clone ID: LIB3196-017-P1-M1-D11.pep
HHQISLSFLIVVRSLFMISMENRGFNVRFMVLLGLCCLLISCAAVPAISEGNLKSNKELLPSSARNLLTQDVKKSSEAEEMFGEYLGHEFNEERMLMETT

SEQ ID NO: 100320 - protein, 68 aa, Gossypium hirsutum
  Clone ID: LIB3196-017-P1-M1-D3.pep
GHNDRSTLHSKADLPQQSLCVLKFSNIDVIYITLLIHKLSWGLRKLTIMFALRFAGSGRWTYLYINKD

SEQ ID NO: 100321 - protein, 94 aa, Gossypium hirsutum
  Clone ID: LIB3196-017-P1-M1-D4.pep
LKKQAYKSHFSSSLLVFAYNNILFSYFVRCLCTYCDYFVRYLFYFDLYLLLPHRESAVPTVLSYPHSLPIYFYLTLRLLWCLAFYILFIQHLFI

SEQ ID NO: 100322 - protein, 121 aa, Gossypium hirsutum
  Clone ID: LIB3196-017-P1-M1-E1.pep
MVLLKEYRVILPVSVDEYQVGQLYSVAEASKNETGGGEGVEVLVNEPYEKDGEKGQYTHKIYHLQSKVPTFVRMLAPEGALNIHEKAWNAYPYCRTVITNEYMKEDFLIKIETWHKPDLGT

SEQ ID NO: 100323 - protein, 114 aa, Gossypium hirsutum
  Clone ID: LIB3196-017-P1-M1-E10.pep
IVRDVIKQAQNEKSFFKRKTVLFIDEIHRFNKSQQVNAALLSRCRVIVLEKLPVEAMVTILMRAINSLGIHVLDSSRPTDPLSHSSNSSSEPAMFIEDKAVDTLAYLSDGDARA

SEQ ID NO: 100324 - protein, 68 aa, Gossypium hirsutum
  Clone ID: LIB3196-017-P1-M1-E12.pep
TLIFQNVLNRLRHSKLTLHVRKMATVNKGCNRLSTILYPESLLYVEKSERLDAFTREYLPTQPSQVWT

SEQ ID NO: 100325 - protein, 104 aa, Gossypium hirsutum
  Clone ID: LIB3196-017-P1-M1-E3.pep
MAVSRKDWSALSSLARQWTLEDEEEQERERRRRHRNLSSTTDDEAPRLSQNGDRQTSASERLPSVEEAEVPKPLPPAFKDEGEDIQSILRTRHERRQRRQVVEA

SEQ ID NO: 100326 - protein, 122 aa, Gossypium hirsutum
  Clone ID: LIB3196-017-P1-M1-E6.pep
ISGGRGGSQRGASDTAIRTETRTPARAYAIRAREEASSPDVITGTFTLFDTSVIALIDPGSTHSYVCETLASSKTLPVESTEFVIRVSNPLGQYVLVDKVCKRCPLIIRESCFPADLMLLPF

SEQ ID NO: 100327 - protein, 66 aa, Gossypium hirsutum
  Clone ID: LIB3196-017-P1-M1-E7.pep
VHIFQGPLWLLLNGLVGSPWKAVAAMKSRNNKHFNYSGGTSLFLALPIEIQQNTLHITHQATRKGA

SEQ ID NO: 100328 - protein, 77 aa, Gossypium hirsutum
  Clone ID: LIB3196-017-P1-M1-E9.pep
PSMRIMHTSFSIYLPFYCFSNVKKFQESPLSTRACRTRSPLHDCSAYGNKNISVNQRASLEKDVSLQLRWFSFGRVG

SEQ ID NO: 100329 - protein, 130 aa, Gossypium hirsutum
  Clone ID: LIB3196-017-P1-M1-F2.pep
KKKKNPERKRRQRQSKACGACGEVGNTGRAWGRNWAERRHSPPPALLIVPNPRSVLFSPPQHRSPERLDTGTGCVEESEGMIMTAPPAHFYTPVLTSCLWQKTALPLWLISAKSSAHPNSKGNGTDPRSP

SEQ ID NO: 100330 - protein, 77 aa, Gossypium hirsutum
  Clone ID: LIB3196-017-P1-M1-F4.pep
LVKLRCEWLRCCLGNTIGQACALSCWTPFGQIGALGSQMDQPPFIERGLTCTVPYIEPIMHEPCFITLQIQLTYKNT

SEQ ID NO: 100331 - protein, 71 aa, Gossypium hirsutum
  Clone ID: LIB3196-017-P1-M1-F6.pep
IQPSSSNVHLFLNWPLNCLVVLCMSKEYNSFFCSAYISCTNVPHYLAFCQSRILILEVDVFFMDNMDLLTV

SEQ ID NO: 100332 - protein, 98 aa, Gossypium hirsutum
  Clone ID: LIB3196-017-P1-M1-F9.pep
MEEAGSQERQRQQRPEQPQPSGSSRRSFCRASVPAPILPAPSVVVWADLNSQVKSSWVIMAEGGFDPCECVCSHEHAMGRLINLVLELTKKVQRHGQS

SEQ ID NO: 100333 - protein, 38 aa, Gossypium hirsutum
  Clone ID: LIB3196-017-P1-M1-G10.pep
MASASGAMAKHEQILVLDPPTDLKFKGPFTDVVTTNLK

SEQ ID NO: 100334 - protein, 31 aa, Gossypium hirsutum
  Clone ID: LIB3196-017-P1-M1-G3.pep
SYRVKLLVIFFFKLGSKFLQISCFIQVIYYR

SEQ ID NO: 100335 - protein, 118 aa, Gossypium hirsutum
  Clone ID: LIB3196-017-P1-M1-G4.pep
HHRLIIILPSLPLFAYLSEGLTPSKHREGHSQKIMEDWITKFQNEIFFFPLLFSKIDSPHFFFPNPLFPTPIPFIFSPNFPKSAALLLFFPNHFFPTPIPFVTSFVRPPNLRLMSPLP

SEQ ID NO: 100336 - protein, 34 aa, Gossypium hirsutum
  Clone ID: LIB3196-017-P1-M1-G5.pep
LLCYNANIFFFVQLSMVIKQGGSSVFCHLKRLVI

SEQ ID NO: 100337 - protein, 93 aa, Gossypium hirsutum
  Clone ID: LIB3196-017-P1-M1-G7.pep
ASTPAGEKVNKRVLLLLTARRHGRSGSAARRRPVARARGGSRNARGRRVVSPRCPQGPAGNASMRARASTPGSARPAPSAAWPPAPHRPLRRD

SEQ ID NO: 100338 - protein, 87 aa, Gossypium hirsutum
  Clone ID: LIB3196-017-P1-M1-G8.pep
WNEQRVVSIYAPRRYNVALISPAVGLVFHRIGDKTKLDPCECQLNDLCCNKRLNFSKSWYWECHDCYRGLVVCFFGPLVNMFLDVSK

SEQ ID NO: 100339 - protein, 122 aa, Gossypium hirsutum
  Clone ID: LIB3196-017-P1-M1-H12.pep
MPGSGLRASVGTGRPLARGDLPAALQRPQEQFFLDPLLVCRSLGAALTETGRERTQVRSRQGTPRRAVRPCTVSLPRTQAKAPRRTDSGPRVPSDLIRPSVSRKQTPLTSTERRAWRLLSFP

SEQ ID NO: 100340 - protein, 65 aa, Gossypium hirsutum
  Clone ID: LIB3196-017-P1-M1-H4.pep
FVGFNEYLHNYLNISRLCPESYTRNCLKWLFLEKGSLARQTGVNGRMTSHCRYFCVFRNITALLI

SEQ ID NO: 100341 - protein, 126 aa, Gossypium hirsutum
  Clone ID: LIB3196-017-P1-M1-H6.pep
ARVRPNGVCRHGAWCAMGNCYSLHKDHETALKNFQRAVQLNSKFAYAHTLCGHEYVALEDFENGIKCYQNALRIDSRHYNAWYGLGMIYLRQEKFEFSEHHFGMAFQINPRSSVIMSYLGTALHAL

SEQ ID NO: 100342 - protein, 30 aa, Gossypium hirsutum
  Clone ID: LIB3196-017-P1-M1-H9.pep
TGKLPYTHEDCLISFHECNNKIKSNQISLN

SEQ ID NO: 100343 - protein, 91 aa, Gossypium hirsutum
  Clone ID: LIB3196-018-P1-M1-A11.pep
MVGIFSRFSVGRSAHRRSKSAFVETNVMPQNADVVDAATATAHGIEVAVEFKPVECPTEPLDNDRPIQCPLPEPLILNDGRIWKERVSANV

SEQ ID NO: 100344 - protein, 104 aa, Gossypium hirsutum
  Clone ID: LIB3196-018-P1-M1-A12.pep
AIDTVNQVFHVLTDWQNYYAMKHWFLRNTFRDAVVQVLNIEDPDSYGKATLSHLTLPVEFRVSFPSNDSAPAINNRTQYVSIFSHSHYLLPEIFKNLEKGVVLD

SEQ ID NO: 100345 - protein, 60 aa, Gossypium hirsutum
  Clone ID: LIB3196-018-P1-M1-A3.pep
MIMISQVLPLGNLWSHLLDTHILGKYKHSNISRTLGIWIQVAYGTQIMESHHKIPVKIGS

SEQ ID NO: 100346 - protein, 38 aa, Gossypium hirsutum
  Clone ID: LIB3196-018-P1-M1-A7.pep
SQRYNHDITFESHTRFNLLIILAKILTNEMCQSATLAF

SEQ ID NO: 100347 - protein, 121 aa, Gossypium hirsutum
  Clone ID: LIB3196-018-P1-M1-A9.pep
RVCLCEACAAQEHRGHELVPLEQERALQEAEQPKVLSAVEDRMDELGAGIAQSRRTVALIKSAAVAERERVSRLFAEAAAALQGFQTQVLAFIEEGEAAMLGRSQGDLRGQEEQRSPLSRA

SEQ ID NO: 100348 - protein, 121 aa, Gossypium hirsutum
  unsure (1)..(121): unsure at all Xaa locations
  Clone ID: LIB3196-018-P1-M1-B2.pep
AASDRQKSYVDLKRHEIEYSVKDFVFLKVSPXKKILRFGRKGKLSSRFIGPYCILKRVGLVTYQLELPSELDRIHDVFHVSMLRRYHSNPMHIVPVGEIEIRSDLAFKVEPVKILKHDVKV

SEQ ID NO: 100349 - protein, 65 aa, Gossypium hirsutum
  Clone ID: LIB3196-018-P1-M1-B6.pep
HCLVVNNLDYDTFRLAEASTMSGETEIGSTPEPLYGECGESRIQATGSRSCRPMQDSTGDLNGYV

SEQ ID NO: 100350 - protein, 56 aa, Gossypium hirsutum
  Clone ID: LIB3196-018-P1-M1-B7.pep
AKALFENKLRLAGGQVYRLSPWGKGIILHLGGIKRFLYFCNRISIVFTLKYDMKSI

SEQ ID NO: 100351 - protein, 47 aa, Gossypium hirsutum
  Clone ID: LIB3196-018-P1-M1-B8.pep
HIMYSLYRTLIVFFSVMCLFCNKQKYLYLTYDYLYYYNILIKWHQLD

SEQ ID NO: 100352 - protein, 73 aa, Gossypium hirsutum
  Clone ID: LIB3196-018-P1-M1-B9.pep
MALKGQQVCLPSEPRVAPDMKQPAPHPPGELPLVLQVTATLSSSGLTPSRQHQASRPTVRHTVPGGQGTPSKD

SEQ ID NO: 100353 - protein, 127 aa, Gossypium hirsutum
  unsure (1)..(127): unsure at all Xaa locations
  Clone ID: LIB3196-018-P1-M1-C1.pep
CERRFEKPIEEKGEGGEFSVDRPIIDRPIRGRGGLGRGRGGRGRGMGRGDGFDSRGKREFDXRHSGSDRSGLKHXDKRGGSGSHNWGTVKDELTDLDQSNVTEETPAGEEHYPVADTENKENEVEEV

SEQ ID NO: 100354 - protein, 38 aa, Gossypium hirsutum
  Clone ID: LIB3196-018-P1-M1-C10.pep
ISVSEVLSFAFGIEVKSSSHIVSSFVILKQTSIHELHS

SEQ ID NO: 100355 - protein, 49 aa, Gossypium hirsutum
  Clone ID: LIB3196-018-P1-M1-C2.pep
KVGKGGEWCDSYSLGAQNLPSSLKELQGSGLPNCPLPPVLPPLTLAYIN

SEQ ID NO: 100356 - protein, 119 aa, Gossypium hirsutum
  Clone ID: LIB3196-018-P1-M1-C4.pep
MVDYSVWDHIEVSDDEDETHPNIDTASLFRWRHQARVERMEQFQKEKEELDRGCRECKRKVAECQRKLKELEVAEGGKAELERLQAEAQQLRKEERSWEQKLEEMRKKEKSMPWNVDTL

SEQ ID NO: 100357 - protein, 98 aa, Gossypium hirsutum
  unsure (1)..(98): unsure at all Xaa locations
  Clone ID: LIB3196-018-P1-M1-C8.pep
ESLVVGCGKLVWDARAIASHYVRSLKGFWFDVFVILPVPQAVFWLVVPKLIMEEQIKIIMTILLLIFLFQFLPKVXHIICLMRRVQKGYPVNIFWHQF

SEQ ID NO: 100358 - protein, 123 aa, Gossypium hirsutum
  Clone ID: LIB3196-018-P1-M1-C9.pep
ICGRAADANMQIFVKTLTGKTITLEVEPSDTIENVKAKIQDKEGIPPDQQRLIFAGKQLEDGRTLSDYNIQKESTLHLVLRLRGGIIEPSLRQLAQKYNCDKMICRKCYARLHPRAVNCRKKK

SEQ ID NO: 100359 - protein, 97 aa, Gossypium hirsutum
  Clone ID: LIB3196-018-P1-M1-D10.pep
MTLEHPRSEGLEVLESSAGVGGVFRIIYVLLFQKTFFFFFHYFRYENELALRQSVEADINGLRRVLDELTLSKTDLEMQIESLNEELAYMNKNPEGV

SEQ ID NO: 100360 - protein, 47 aa, Gossypium hirsutum
  Clone ID: LIB3196-018-P1-M1-D12.pep
MCTHTHAPLVLRLFSSTLICPYALYAFYHSYLLLYPRITFLRTCLDA

SEQ ID NO: 100361 - protein, 80 aa, Gossypium hirsutum
  Clone ID: LIB3196-018-P1-M1-D2.pep
MPKRKASSVERAAKVEPKRKSARLATKPPAQVEAKPLKAATNDKSLDKKVQTKGKRGAKGKQAEVAFRETKEDLPAENRE

SEQ ID NO: 100362 - protein, 117 aa, Gossypium hirsutum
  Clone ID: LIB3196-018-P1-M1-D4.pep
PTRPKNSHVPYRNSKLAQVLQSSLGGQAKTLMFVQLNPDVESYAETISTLKFAERVSGVELGAARTNREGRDIRELMEQVSSLKETITKKDQEIERLQLLKGNGNSTKRGMSSLRYE

SEQ ID NO: 100363 - protein, 53 aa, Gossypium hirsutum
  Clone ID: LIB3196-018-P1-M1-D8.pep
KISTLTNRRPLLHFTRLGPFHKLSTQKIKFSYETFTHAHSHIINTENNIKIIF

SEQ ID NO: 100364 - protein, 83 aa, Gossypium hirsutum
  Clone ID: LIB3196-018-P1-M1-D9.pep
FPELIGNIGKVILVFTLICTITLRVQLSHTDLELHRRREQIVQRTLREAQLAALQYEEVKIRTKQIHRDSVLDFVKGSSLNDT

SEQ ID NO: 100365 - protein, 34 aa, Gossypium hirsutum
  Clone ID: LIB3196-018-P1-M1-E11.pep
MPEVEETSMPMTMVFQNQVVELILQQCADIFPPH

SEQ ID NO: 100366 - protein, 73 aa, Gossypium hirsutum
  Clone ID: LIB3196-018-P1-M1-E12.pep
AVFLQASECVLSYIHPKISLGPQVTLSPLGISGAISSSDLLIPAQSASPHDCDPGYCGAVPACFFVPTCSIVS

SEQ ID NO: 100367 - protein, 104 aa, Gossypium hirsutum
  Clone ID: LIB3196-018-P1-M1-E3.pep
KELKLFFHTNQLHMYVALLHISDSESILKVASNVYISINPNIQLFSNKDHKVLRMSYMYLIRNIDITFIHKFQKLQRSPHSHLIDPTHTPNFFLRFTLGAKVLS

SEQ ID NO: 100368 - protein, 121 aa, Gossypium hirsutum
  Clone ID: LIB3196-018-P1-M1-E5.pep
ELGQKLVTRMRAMANRFIAVHLRFEPDMLAFSGCYFGGGDKERNELGEIRKRWETLTDVDADEKRRRGRCPLTPHEVGLMLRALGFANDSYIYVASGEIYGGEETLRPLRDLFPNFYTKEM

SEQ ID NO: 100369 - protein, 50 aa, Gossypium hirsutum
  Clone ID: LIB3196-018-P1-M1-E7.pep
RILVSNFTFLISKKLNLKNRVKFFNYCLKISFVLLSLKRRFRLVCLTSIF

SEQ ID NO: 100370 - protein, 92 aa, Gossypium hirsutum
  Clone ID: LIB3196-018-P1-M1-E9.pep
MAKSSNPEGKPGVRIVVAGDRGTGKSSLIVTAAAETFPTNVLRLLPPTRLPGDFYPDRVPITIIDTSANPEDRGKLAEELKRADAVVLTYAC

SEQ ID NO: 100371 - protein, 118 aa, Gossypium hirsutum
  Clone ID: LIB3196-018-P1-M1-F10.pep
RVRSLADVDAILARTVGDVRRAEQLLQDARRARSRAEGEKQKAETVQAALEEAQRAQGVAQGAIRGAVADTRDTEQTLYQVQERMTGAEQALRSAGERARQLDALLEALKLKWAGNSL

SEQ ID NO: 100372 - protein, 78 aa, Gossypium hirsutum
  unsure (1)..(78): unsure at all Xaa locations
  Clone ID: LIB3196-018-P1-M1-F11.pep
MGPSMFLLLCVLGLSQAATPKIFNGTECGRNXSQPWQVGLFEGSSLRCGGVLIDSRWVLTAAHCIGSRYWVRLGEHRL

SEQ ID NO: 100373 - protein, 74 aa, Gossypium hirsutum
  Clone ID: LIB3196-018-P1-M1-F12.pep
EYFAVMCIVLDAVTAAWARGWQKALGAETLEERLSQVNLGKRKIFPKSFFSRTPSDTRVSHLPSSLPPALLLAF

SEQ ID NO: 100374 - protein, 89 aa, Gossypium hirsutum
  Clone ID: LIB3196-018-P1-M1-F3.pep
EATLFKGLLIQNQVLLSKDCFKYFDLNEGQSCSAIFKNLLTGALELIFFSSVINFPAPTPPRFYNPEILRVGSPSKAQNLKQIRPVSSS

SEQ ID NO: 100375 - protein, 45 aa, Gossypium hirsutum
  Clone ID: LIB3196-018-P1-M1-F4.pep
CSLLNLAIMSRPDLGGYNFHPKVNIVTHQALCCDITTNMLFCSHL

SEQ ID NO: 100376 - protein, 102 aa, Gossypium hirsutum
  Clone ID: LIB3196-018-P1-M1-F5.pep
VLILHRCVQWPQGSGKSNTEPLVTSSNGAREPGRTSVPRLRLQFAGFALFSTKASISYLRAHTYYRLRCHGPQAGGRVEHSPVPSGAGSGVSGRSREHSPRK

SEQ ID NO: 100377 - protein, 55 aa, Gossypium hirsutum
  Clone ID: LIB3196-018-P1-M1-F9.pep
VSIRNHMQIVHKLVKEVISVLWCKMFRSLGTLISDTDEKKINSYAPSRKFQNGRT

SEQ ID NO: 100378 - protein, 113 aa, Gossypium hirsutum
  unsure (1)..(113): unsure at all Xaa locations
  Clone ID: LIB3196-018-P1-M1-G10.pep
MFGLLTSIQSDNGPAFNSQITQAVSQALGIQXNLYIFYCPQSSGKVEWTNGLLKTHLTKLSHQLKKDXTILLPLSFLRIQACPRNATGYSPFELLCGHSFLLSPSLIPDTRTT

SEQ ID NO: 100379 - protein, 76 aa, Gossypium hirsutum
  unsure (1)..(76): unsure at all Xaa locations
  Clone ID: LIB3196-018-P1-M1-G12.pep
MTTRSVSSSSYRRMFGGPGTASRPSSSRSYVTTXTRTYSLGSALRPSTSRSLYASSPGGVYATRSSWVRLRSSVPG

SEQ ID NO: 100380 - protein, 118 aa, Gossypium hirsutum
  Clone ID: LIB3196-018-P1-M1-G2.pep
GRVGARGLHYLHSGAKHIIIHRDVKTTNILLDEKWVAKVSDFGLSRIGPTNMSKAHVSTVVKGSFGYLDPEYYRRQQLTEKSDVYSFGVVLCEILCARPPISRTVEKAHISLTAWAQQ

SEQ ID NO: 100381 - protein, 125 aa, Gossypium hirsutum
  Clone ID: LIB3196-018-P1-M1-G4.pep
WPLQRWGQLVRMAIRAQHSKAAQTQTGEANRGWTGQESLSDSDPEMWELLQREKDRQCRGLELIASENFCSRAALEALGSCLNNKYSEGYPGKRYYGGAEVVDEIELLCQRRALEAFDLDPAQWG

SEQ ID NO: 100382 - protein, 127 aa, Gossypium hirsutum
  Clone ID: LIB3196-018-P1-M1-G5.pep
VDIGVKYSEKQERNFDDATMKAGQCVIGLQMGTNKCASQSGMTAYGTRRHLYDPKNHILPPMDHSTISLQMGTNKCASQVGMTAPGTRRHIYDTKLGTDKCDNFSMFLQMGYTQGANQSGQVFGLGR

SEQ ID NO: 100383 - protein, 101 aa, Gossypium hirsutum
  Clone ID: LIB3196-018-P1-M1-G7.pep
VVAAGATATSRIRSQRCSPDASLPVGGSEREAACGFVAAACPPPGRAEPRATRSLATARSRYPLAATVFGRERRAPWLLEPIQKVMTYQQPFSNRRTVPIG

SEQ ID NO: 100384 - protein, 86 aa, Gossypium hirsutum
  Clone ID: LIB3196-018-P1-M1-G9.pep
IRLMQILLIKLVYSSCESTPIFIPQKDRSVLILGSQIRLTLSFPINLVEFFLSKLIVLGCWNFGKNQVAGIWGFIHRFSSWTDSAC

SEQ ID NO: 100385 - protein, 118 aa, Gossypium hirsutum
  Clone ID: LIB3196-018-P1-M1-H1.pep
PRVRKNLWRMDCNEDDMCQIDKDDSMVSKVRLCSASMIDNVNQSSNPTCGTSHDGKGKFDDDPEVVAVGFPTACVEGGDDFSYTGGPSFSEDDDELTESKIRAFLDEKALELKKLQTP

SEQ ID NO: 100386 - protein, 44 aa, Gossypium hirsutum
  Clone ID: LIB3196-018-P1-M1-H11.pep
KVKKNKNDLKVKSITNLDIWLFGFALNLDNHVTRFIQEDFSKII

SEQ ID NO: 100387 - protein, 97 aa, Gossypium hirsutum
  Clone ID: LIB3196-018-P1-M1-H2.pep
AEGQTSTGIENYSPAAERGRSTAAGCRLPAGRKGAGVGSGQREGLGLLVPSWSCCGAAGGRVGLGCFTGLFYKRGRKKNKSLRRGRRGFFVNFFGVF

SEQ ID NO: 100388 - protein, 54 aa, Gossypium hirsutum
  Clone ID: LIB3196-018-P1-M1-H3.pep
NKARAHLWSQILHRIRAKVISPLQAVRYSWWIVKIKAFHISINTRVHSVPQQSL

SEQ ID NO: 100389 - protein, 111 aa, Gossypium hirsutum
  Clone ID: LIB3196-018-P1-M1-H8.pep
PSSLPTPLGHTSGSLSTHEIELSEDYTCIISHGPNPKTTRIFGDCILECHNDELTNFDKTAEQVPRFGKNTEPSTAYPSDEFLSFCYSCKKKFEKEDDIYMYRGEKAFCST

SEQ ID NO: 100390 - protein, 121 aa, Gossypium hirsutum
  Clone ID: LIB3196-019-P1-M1-A1.pep
KISLFNMMTFKTMATFMPPPPLATFLAFHPQDNNIIAIGMDDSTIQIYNVRVDEVKSKLKGHSKRITGLAFSHVLSVLVSSGADSQLCVWNTDGWEKQRSRFLQVPSGRTPTALSDTRVQF

SEQ ID NO: 100391 - protein, 103 aa, Gossypium hirsutum
  Clone ID: LIB3196-019-P1-M1-A2.pep
LPTDRMGLMTSLKGAVEHRLLCPALLPIGFSSPFSWLLSSSPSSPIPCQCHLGSLHTYPSAPQAAEDEMGNRPRGLMQELTLPRPGCQARASVSEDSGYQGAR

SEQ ID NO: 100392 - protein, 58 aa, Gossypium hirsutum
  Clone ID: LIB3196-019-P1-M1-A4.pep
GISVSMRVVLDVCLTSQCLSSTPLCGFLDAISGLFYHLLEGSKPAIRFNRASLNSLPT

SEQ ID NO: 100393 - protein, 111 aa, Gossypium hirsutum
  Clone ID: LIB3196-019-P1-M1-A7.pep
IPDPAPAQTECSPAPPDSDADKLKEKEPQTQGESTSLSLALSLGQSTDSLSSYPADPQAGGDNPEVHGQVEVKTEKRPNLVDRQAFTVEYLPSMLHSNCPKGLLPKFSSWS

SEQ ID NO: 100394 - protein, 116 aa, Gossypium hirsutum
  unsure (1)..(116): unsure at all Xaa locations
  Clone ID: LIB3196-019-P1-M1-A8.pep
APDPEPEPKAETELHSRDSSYHPDLGGDTISQARQATDIIQSLTSSAHYHLSTPVILARIHLSTPLLPARIHRHTPLLPAQVHQWHLRHMIFHLCFAHPYIPMTRYVITIIXRNVN

SEQ ID NO: 100395 - protein, 66 aa, Gossypium hirsutum
  Clone ID: LIB3196-019-P1-M1-A9.pep
TGANIFAGLTRVGRVIVPLWDFPLGFICSPGALTHEPLPSIAVTEGIISLHIKRRASSSVLALHFS

SEQ ID NO: 100396 - protein, 58 aa, Gossypium hirsutum
  Clone ID: LIB3196-019-P1-M1-B11.pep
SHNMGTIHMSEICTELKNLRSLVRVCEIQATLREQRILFLRQQIKELEKLKNQNSFMV

SEQ ID NO: 100397 - protein, 115 aa, Gossypium hirsutum
  Clone ID: LIB3196-019-P1-M1-B5.pep
MSSHLVEPPPPLHNNNNNCEESGQSLPQPAGLNSSWVELPMSNSNGNDNGNGKNGGLEHVPSSSSIHNGDMEKILLDAQHESGQSSSRGSSHCDSPSPQEDGQIMFDVEMHTSRD

SEQ ID NO: 100398 - protein, 113 aa, Gossypium hirsutum
  Clone ID: LIB3196-019-P1-M1-B7.pep
MPAVFVLFRKSIAFRSNELLRKLRAAGVGDRPVVWISHSMGGLLVKKMLLEASKKPEMSAVINNTRGIIFYSVPHHGSHLAEYSVNIRYLLFPSLEVKELSKDSPALKTLQDD

SEQ ID NO: 100399 - protein, 117 aa, Gossypium hirsutum
  unsure (1)..(117): unsure at all Xaa locations
  Clone ID: LIB3196-019-P1-M1-B8.pep
EQGREIQYAVATLFFSISKHFIGDPSHLKDRNXELLSNLKYKKITDFKWYKYIFMTRVMQRSDNQQPFWKXKFLVGFPTFLGEKVRNQIRENYRGILYXKLTYGELISFTQKERLKI

SEQ ID NO: 100400 - protein, 123 aa, Gossypium hirsutum
  Clone ID: LIB3196-019-P1-M1-C10.pep
MADSSQPAPQLSYPQEEGGPFKTPIKETLPISSTPSKSVLPRTPESWRLTPPAKVGGLDFSPVQTPQGASGPLPDPLELMDLSTTPLKSVPPFESPQRLLSSEPLDLASVPFGNSSPSNIEVP

SEQ ID NO: 100401 - protein, 75 aa, Gossypium hirsutum
  Clone ID: LIB3196-019-P1-M1-C11.pep
FSILFSQCSSFLVSFCYFFSFFLFLFLFIFRLKYKERRKRLTWLPGSSSQCLLRRNRGMSTRHDRRRKEWVKKKP

SEQ ID NO: 100402 - protein, 113 aa, Gossypium hirsutum
  Clone ID: LIB3196-019-P1-M1-C12.pep
ATNETFAARNQKFSDLVVKCLIKLTKVLQSTIYDVDLDRILQSVHVYLQELGMEEIRRRAGADDKPLRMVKTVLHELVKLRGAAIKGHLSLVPIDMKPQPIILAYIDLNLETL

SEQ ID NO: 100403 - protein, 77 aa, Gossypium hirsutum
  Clone ID: LIB3196-019-P1-M1-C5.pep
FCTCCTLSQLCVSVLLHDLIDCDLVDNSDTNATLHERLNLSSCGLSDMVRLNSLLAYTVLLDINSPELSVKLYKLPN

SEQ ID NO: 100404 - protein, 111 aa, Gossypium hirsutum
  Clone ID: LIB3196-019-P1-M1-C8.pep
DEYTALVPLFTCDCEVAQQNSSHLHQQRLFQFLMGLNETYAAVRSQILLMQPLPSVNRAYSMIVQEEGQRSLSSVLPHASEPIDLLSTVSGNHKKFNGTCDFCKVKGHKKE

SEQ ID NO: 100405 - protein, 77 aa, Gossypium hirsutum
  Clone ID: LIB3196-019-P1-M1-C9.pep
QGKVGARGTGPTSRVCPASATRAYVRGWDIIVYERLLYTWGNDAKQYWSLWTGEEHLDCFTVFKNYFFNCEIMGREM

SEQ ID NO: 100406 - protein, 95 aa, Gossypium hirsutum
  unsure (1)..(95): unsure at all Xaa locations
  Clone ID: LIB3196-019-P1-M1-D10.pep
MTTCRHLFTSSSSMQGYCGIRRGIGGGSSRIYPVLAGEYCRAPSTYCGGLSVSSFRFSXSGGACGLGGGYSGGFSSSSSSGCGFKGGYGAGFCSG

SEQ ID NO: 100407 - protein, 88 aa, Gossypium hirsutum
  unsure (1)..(88): unsure at all Xaa locations
  Clone ID: LIB3196-019-P1-M1-D11.pep
ISEPGPMTMYNVCGSAKCVVVVICGRPVVVQPFVXSVDALVAARLTETDGQGVSHGLFGDSRFTGQLAWTWMKTGDQLAMNVXDPHYD

SEQ ID NO: 100408 - protein, 58 aa, Gossypium hirsutum
  Clone ID: LIB3196-019-P1-M1-D4.pep
LCYSPYTDMESVHCQVYLVHEPRIFVTMLTRTCDETRGSNPENRGGATRGTSFPSCGS

SEQ ID NO: 100409 - protein, 125 aa, Gossypium hirsutum
  Clone ID: LIB3196-019-P1-M1-E12.pep
RGVGRGAGGGEAGACRPPVRQDPDSGPDYEALPAGATVTTHMVAGAVAGILEHCVMYPIDCVKTRMQSLQPDPAARYRNVLEALWRIIRTEGLWRPMRGLNVTATGAGPAHALYFACYEKLKKTL

SEQ ID NO: 100410 - protein, 85 aa, Gossypium hirsutum
  unsure (1)..(85): unsure at all Xaa locations
  Clone ID: LIB3196-019-P1-M1-E3.pep
MGLSVANLISRLFAKKETPILMVGLEAAGNTTILYKLKLGVNATTIPTTGFYVVTVKYNNINVTVWDVDGHDKIRPXWMHYIQNT

SEQ ID NO: 100411 - protein, 64 aa, Gossypium hirsutum
  Clone ID: LIB3196-019-P1-M1-E4.pep
ACSLGKDGVGLRYIIKYSKNILREYEALEKFRNSHYSYLCSIRRSFYSPQGQLLFLTACFLTEL

SEQ ID NO: 100412 - protein, 105 aa, Gossypium hirsutum
  Clone ID: LIB3196-019-P1-M1-E5.pep
MSQPVGPSLPLNNSSCIFYKLIVASILQDKKLRIPNKFVKKFGNELSSVATLTVPGGCQWLVELREDNKRIWLDNGWNSFVEYYSICIGYFVVFKYEGNSHFGVH

SEQ ID NO: 100413 - protein, 51 aa, Gossypium hirsutum
  Clone ID: LIB3196-019-P1-M1-E7.pep
ATLASSFWLLYDLLCIVKFPFFLYNCPSAYNRKKKKKNNLEEKNLGFLSVT

SEQ ID NO: 100414 - protein, 110 aa, Gossypium hirsutum
  Clone ID: LIB3196-019-P1-M1-E8.pep
MNIFKGFPTIFLFICFVLIIADCFMVEADTCKPSGKLRGKKPPPGQCDSNCCEDGKFYTTYKCSPPVSSHTKGKLTINSFAAGGEGGGPSECDNRYHSDDEPVVALSTGW

SEQ ID NO: 100415 - protein, 105 aa, Gossypium hirsutum
  Clone ID: LIB3196-019-P1-M1-F10.pep
DLHSRLILLKYEPLHFGMLGFVKSTCVLKLDSTHHQALNKHGLLIPAIASVSAISLPLRLAIENDNFSTQAILLSKSANEACRLSKSANEACFDDGLLFFIQNPV

SEQ ID NO: 100416 - protein, 43 aa, Gossypium hirsutum
  Clone ID: LIB3196-019-P1-M1-F11.pep
VASVSSKESSPSSLRTLISMELTSYYKITWRRFSMLLPRRESL

SEQ ID NO: 100417 - protein, 51 aa, Gossypium hirsutum
  Clone ID: LIB3196-019-P1-M1-F12.pep
MTVPFPPPFMAHFIVYLSLLSMTVPVSDLNKKQNKTKNQNKNSFRLNLALI

SEQ ID NO: 100418 - protein, 101 aa, Gossypium hirsutum
  Clone ID: LIB3196-019-P1-M1-F2.pep
MVISESMDILFRIRGGLDLAFQLATPNEIFLKKALKHVLSDLSTKLSSNALVFRICHSSVYIWPSSDVNTIPGELTDASACKNILRFIQFEPEEDIKRKFM

SEQ ID NO: 100419 - protein, 52 aa, Gossypium hirsutum
  Clone ID: LIB3196-019-P1-M1-F3.pep
QKKVSLWVIYAFYIGLKICIKNTMWAAFALYRHSVLRIDTDSNPLLLTLKTI

SEQ ID NO: 100420 - protein, 37 aa, Gossypium hirsutum
  Clone ID: LIB3196-019-P1-M1-F5.pep
FIFNQMNNIYLLIDLPWTTVIGTERLIDNFSFSPVQI

SEQ ID NO: 100421 - protein, 98 aa, Gossypium hirsutum
  unsure (1)..(98): unsure at all Xaa locations
  Clone ID: LIB3196-019-P1-M1-F8.pep
DAWAQLSTGDIFVVPACHPITFFAXQIKNLRLVEFGLYIRQDNMRILVAGKTNNVRQCNRHAKELSSGVEXSRLLDEVFNNNPIESNLVNGQNRRGFP

SEQ ID NO: 100422 - protein, 126 aa, Gossypium hirsutum
  Clone ID: LIB3196-019-P1-M1-G1.pep
ENRCQSLTEDLEFRKNMYEEEINETRRKHETRLVEVDSGRQIEYEYKLAQALHEMREQHDAQVRLYKEELEQTYHAKLENARLSSEMNTSTVNSAREELMESRMRIESLSSQLSNLQKESRACLER

SEQ ID NO: 100423 - protein, 49 aa, Gossypium hirsutum
  Clone ID: LIB3196-019-P1-M1-G10.pep
VYKHFQSLCSYQSTKLHLPPKYHTYLNLPIPISFHSYLLMNILSLSYII

SEQ ID NO: 100424 - protein, 52 aa, Gossypium hirsutum
  Clone ID: LIB3196-019-P1-M1-G11.pep
EIPGPMPPLIREMLENPEMFEDDSSQPGPHPNASSEDEVPGGQGKGGLKSPA

SEQ ID NO: 100425 - protein, 103 aa, Gossypium hirsutum
  Clone ID: LIB3196-019-P1-M1-G12.pep
ATTPGLFEIFICFCSVTFIVYPLVIILCVFLCARRKKTHHIGLFLDCQEVRIFTLLKSMCLIFGKMNLFSDYCKPLFFLSFSISIGEAPYRLYLLESLNPPMN

SEQ ID NO: 100426 - protein, 101 aa, Gossypium hirsutum
  Clone ID: LIB3196-019-P1-M1-G2.pep
EVTALEQDSVVPKEKTDEHNLENGVEGIPDELILKRVNSRKEMKSYQLGKQLSCKWTTGAGPRIGYLRDYPLELQFQALEHVKLSPRSASYSKLYFFFWVY

SEQ ID NO: 100427 - protein, 100 aa, Gossypium hirsutum
  unsure (1)..(100): unsure at all Xaa locations
  Clone ID: LIB3196-019-P1-M1-G3.pep
MAFMEKPPAGKVLLDDTVPLTAAIEASQSLQSHTEYIIRVQRGISVENSWQIVRRYSDFDLLNNSLQIAGLSLPLPPKKLIGNMDREFIAXRQKGLQNYL

SEQ ID NO: 100428 - protein, 77 aa, Gossypium hirsutum
  Clone ID: LIB3196-019-P1-M1-G4.pep
PWSMGLPSEMDAIQTRELFDNKLVAKPDTGSPRCSLGSLTGTIASTPKVLALTAFNLYVHTNPRARASLLYLTSELT

SEQ ID NO: 100429 - protein, 46 aa, Gossypium hirsutum
  Clone ID: LIB3196-019-P1-M1-G7.pep
TCHSLLPTPPFFKKDLKSCYTPRTLTSGQVISIQDTEKHFIKMYPN

SEQ ID NO: 100430 - protein, 46 aa, Gossypium hirsutum
  Clone ID: LIB3196-019-P1-M1-G8.pep
IRLSWSHPWSKLNYDLISSINFGSIITFYKSVNYLFFFFSLFFLIF

SEQ ID NO: 100431 - protein, 48 aa, Gossypium hirsutum
  Clone ID: LIB3196-019-P1-M1-H11.pep
WGLKSTQTNLFKGFTIAMSRHLHLWEVKFKKDTFFPRRISLKPSTIAK

SEQ ID NO: 100432 - protein, 83 aa, Gossypium hirsutum
  Clone ID: LIB3196-019-P1-M1-H12.pep
MIYKCICVVSDINFIFIRNTGEFMMSRYREVAEIVLRYLEHRDRLVRLSITSLLPRIAHFLRDRFVTNYLTVSCFCSIYDHIT

SEQ ID NO: 100433 - protein, 59 aa, Gossypium hirsutum
  Clone ID: LIB3196-019-P1-M1-H2.pep
LIIINIFEPFLILQWKLSNQCAANCCKILIYNTVPQKYIMGLKFTKLTKNVMKHWMLFC

SEQ ID NO: 100434 - protein, 71 aa, Gossypium hirsutum
  Clone ID: LIB3196-020-P1-M1-A1.pep
DTTRHIRPIAFTIVEQESANASDVSCTNLISNVMPQDRRCIIFNRAASIRVAIDYNASFCVRPFNRHNHRV

SEQ ID NO: 100435 - protein, 51 aa, Gossypium hirsutum
  Clone ID: LIB3196-020-P1-M1-A10.pep
KGITKDGERKEVRKLINILYPDAKPKEGQNFCFKHDHVCRSLSVTSFLSLD

SEQ ID NO: 100436 - protein, 61 aa, Gossypium hirsutum
  Clone ID: LIB3196-020-P1-M1-A11.pep
TMPNDARKVLLEILLAQVVRMLQNLFFMLCEIAIMHERCRRTYTPSRIWGAFFFVLLDEGL

SEQ ID NO: 100437 - protein, 48 aa, Gossypium hirsutum
  Clone ID: LIB3196-020-P1-M1-A4.pep
LQMHVQCMNIYNQIQAWKLNSFGIAIYTIGFKIIQNILKPIHAIGSSS

SEQ ID NO: 100438 - protein, 50 aa, Gossypium hirsutum
  Clone ID: LIB3196-020-P1-M1-A7.pep
PPGRHRCLDLGNGSGKQLRFLQLNQERYRGNSRKCGRGPSRLFCTNLFYS

SEQ ID NO: 100439 - protein, 134 aa, Gossypium hirsutum
  Clone ID: LIB3196-020-P1-M1-A9.pep
SKICSEDIECSGLTIPKAVQYLSSQDEKYQAIGAYYIQHTCFQDESAKQQVYQLGGICKLVDLLRSPNQNVQQAAAGALRNLVFRSTTNKLETRRQNGIREAVTLLRRTGNAEIQKQLTGLLWNLSSTDELKEE

SEQ ID NO: 100440 - protein, 117 aa, Gossypium hirsutum
  unsure (1)..(117): unsure at all Xaa locations
  Clone ID: LIB3196-020-P1-M1-B1.pep
RPRVRLSENKIDGVDLSGQTQEKVQLIPYNSKVASDRQKSYAYLKLKDIEFHIGDKVFLKVSPWKKIIXSIVNAHYSPRFIRPYEIIARVGLVDYRISLPIELEMIHNVCHVSMLPS

SEQ ID NO: 100441 - protein, 125 aa, Gossypium hirsutum
  unsure (1)..(125): unsure at all Xaa locations
  Clone ID: LIB3196-020-P1-M1-B11.pep
SALQAKSVAVKTTRFASFPDYLVIQIKKFTFGLDWVPKKLDVSIEMPEELDISQLRGTGLQPGEEELPDIAPPLVTPDEPKAPMLDESVIIQLVEMGFPMDACRKAVYYTGNSXAEAAMNWVMSH

SEQ ID NO: 100442 - protein, 128 aa, Gossypium hirsutum
  Clone ID: LIB3196-020-P1-M1-B3.pep
CAEQQPPASSDVVLPAIMSYTGFVQGSETTLQSTYSDTSAQPTCDYGYGTWNSGTNRGYEGYGYGYGYGQDNTTNYGYGMATSHSWEMPSSDTNANTSASGSASADSVLSRINQRLDMVPHLETDMMQ

SEQ ID NO: 100443 - protein, 47 aa, Gossypium hirsutum
  Clone ID: LIB3196-020-P1-M1-B4.pep
SKGLCMVVMGFRLQVWIQAEETRVRIEIISISYPTIRNLITEPQTNI

SEQ ID NO: 100444 - protein, 62 aa, Gossypium hirsutum
  Clone ID: LIB3196-020-P1-M1-B5.pep
NMNEYSIRVPGVLRTYPSRTLFFFQLKVLFLKGNYFVAITVKVPRKRCPQSTNREGQAKAID

SEQ ID NO: 100445 - protein, 88 aa, Gossypium hirsutum
  Clone ID: LIB3196-020-P1-M1-C10.pep
RPSAMLHLGHTELCTASQACLQVLVHACSCSPSSASLPCISKSYSTCKSQLKYIFPAQLVPVRVNDRAQSGLCMSPTVYIEVSDRLRM

SEQ ID NO: 100446 - protein, 74 aa, Gossypium hirsutum
  Clone ID: LIB3196-020-P1-M1-C11.pep
NNIKINFTISNLWSQNHCSNLTENGLLHSMVRIGRNLGMVLSLFENLPNATTSLAQMDKWSISRCLENYNDSGA

SEQ ID NO: 100447 - protein, 78 aa, Gossypium hirsutum
  unsure (1)..(78): unsure at all Xaa locations
  Clone ID: LIB3196-020-P1-M1-C12.pep
ITLSSPPLHSKXVVFSLLNHASSRSHPCPCSPTRLLTLKLLYIFVCPWTTAKVNPTLGDNYSSVLFYPTLLDLFAVSF

SEQ ID NO: 100448 - protein, 65 aa, Gossypium hirsutum
  Clone ID: LIB3196-020-P1-M1-C6.pep
KGLFIVEVQGLTCKWPKKLGTKIAIIPFNFSTFGATCSTFLTSCFLPLLTFQHKIHISNYENILK

SEQ ID NO: 100449 - protein, 95 aa, Gossypium hirsutum
  Clone ID: LIB3196-020-P1-M1-C7.pep
MAKTCISNCINDTRVPLPVRPTYVNLYKWPESDAEFVRSLSSDWRSNGGRAHPTVVDSISCRQIYLRSYTFHRNNQTETENTKCFGRSSVNKKEK

SEQ ID NO: 100450 - protein, 121 aa, Gossypium hirsutum
  Clone ID: LIB3196-020-P1-M1-D1.pep
ITAAALATGACIVGILCLPLILLLVYKQRQAASNRRAQELVRMDSNTQGIENPGFEASSPAQGILEAKVRHPLSYVAQRQPSESGRHLLSEPGTPLSPPGPGDVFFPSLDPVPDSSNFEVI

SEQ ID NO: 100451 - protein, 54 aa, Gossypium hirsutum
  Clone ID: LIB3196-020-P1-M1-D10.pep
LCIAAHLIFFFFQRAPLDYGICISNTNAILKSSYYGPSTLSTRTLEGDFVLTKL

SEQ ID NO: 100452 - protein, 89 aa, Gossypium hirsutum
  Clone ID: LIB3196-020-P1-M1-D2.pep
MHSFYTRADTMIGEIAAAVSFIFKFLRTKGLTSERQLQTFSQSLQELLAEHYKHHWFPEKPCKGSGYRCIRINHKMDPLIGQAAQRIGL

SEQ ID NO: 100453 - protein, 64 aa, Gossypium hirsutum
  Clone ID: LIB3196-020-P1-M1-D3.pep
NTRDFIALWSAYLSVLRESAWEGTHAHRGKHRNPMTSPSPGMELPGLGWSRAGFPECSFGSHVV

SEQ ID NO: 100454 - protein, 121 aa, Gossypium hirsutum
  Clone ID: LIB3196-020-P1-M1-D8.pep
CRRQDVRHGNPIRQCRGFNSNANKNAVESVQYGVAGSAAFLECQPRSPQATVKWLFQRDPGDRRREIRAEDRFLRTEQGLLLRALQLSDRGLYSCTATENNFKHVVTRVQLHVLGREAVHA

SEQ ID NO: 100455 - protein, 103 aa, Gossypium hirsutum
  Clone ID: LIB3196-020-P1-M1-E10.pep
MPGSEALVLFTFPLQATMPQYQTWEEFSRAAEKLYLADPMKARVVLKYRHSDGNLCVKVTDDLVCLVYKTEQAQDVKKIEKFHSQLMRLMVAKESRNVTMGTE

SEQ ID NO: 100456 - protein, 106 aa, Gossypium hirsutum
  unsure (1)..(106): unsure at all Xaa locations
  Clone ID: LIB3196-020-P1-M1-E11.pep
MAGSGAGDPLDAKRGEATFAQRIDQTREKLTSXQLYCMRRAQLAQWQKVLPHRWTRNIVTGLGIVALVLAIYGYTIYSISQERFLDELEDEAKAARARALARASRS

SEQ ID NO: 100457 - protein, 89 aa, Gossypium hirsutum
  Clone ID: LIB3196-020-P1-M1-E4.pep
PTRPLEVESSDTIDNVKANIQDKEGIPPDQQRLIFSGKQLEYGRTLADYNIQREYTLHLELRLRGGMHIFVKTVTGKTITLEVDSSDTI

SEQ ID NO: 100458 - protein, 100 aa, Gossypium hirsutum
  unsure (1)..(100): unsure at all Xaa locations
  Clone ID: LIB3196-020-P1-M1-E8.pep
MAANIITQSSLLQPKPALSAKTLQIPSLHRLSGLPPPSRVGFFLEKKTGIVGKAPLKSAVSDSTSSVLENMKNSKNPIVVIDNYDSFTYNLCQYIGEXGC

SEQ ID NO: 100459 - protein, 97 aa, Gossypium hirsutum
  Clone ID: LIB3196-020-P1-M1-E9.pep
LARERERERKKMNVLASECSNGCESGWTRYLEQAFLSGDISHKSSGFCDERGKYKGKEEVVDEEEDLAMDSDASYGPSHLNVDNGYFNDDNHFQYTV

SEQ ID NO: 100460 - protein, 39 aa, Gossypium hirsutum
  Clone ID: LIB3196-020-P1-M1-F10.pep
FYHFRLPKILTHLSYEHSHTRKFPKYRLFDISAFRLLPI

SEQ ID NO: 100461 - protein, 107 aa, Gossypium hirsutum
  unsure (1)..(107): unsure at all Xaa locations
  Clone ID: LIB3196-020-P1-M1-F11.pep
RAALYILGDKAYIKGVRPDPLQHGELVPIEVFEARQVKASLKNLLKACVQGCPAAEPNPASFLRSLEDSXWLIQIHKLLQVSVLVEELLDSRSSVLVGLEDDWNITT

SEQ ID NO: 100462 - protein, 40 aa, Gossypium hirsutum
  Clone ID: LIB3196-020-P1-M1-F12.pep
AVNYKIQDRGFIDDSNTVPPQLRYLMPNHSFTCLDPSIRK

SEQ ID NO: 100463 - protein, 107 aa, Gossypium hirsutum
  Clone ID: LIB3196-020-P1-M1-F2.pep
VLWAFCVYLEAVSVMPQLRMMQNAKMIEPFTAHYVFALGMARFLACAHWIIQVYETGGRYLFLVGYGYLWFPMAILAEIVQTFILVDFCYYYIKSFMQGQLIIRMPV

SEQ ID NO: 100464 - protein, 127 aa, Gossypium hirsutum
  Clone ID: LIB3196-020-P1-M1-F7.pep
SLKRYRFGKDTVGERYKHKEKHRCHMSCPHLSPSKSLINREEQWVHREPSESSPLALGLQTPLQIDCSESSPSLSLGGFTPNSEPASSDEHTNLFTSAIGSCRVSNPNSSGRKKLTDSPGLFSAQDT

SEQ ID NO: 100465 - protein, 47 aa, Gossypium hirsutum
  Clone ID: LIB3196-020-P1-M1-G10.pep
ALDVKMHPSNGHQYTHESLYEKQRKQTVICVLLFLPVRGSIFISPYP

SEQ ID NO: 100466 - protein, 82 aa, Gossypium hirsutum
  unsure (1)..(82): unsure at all Xaa locations
  Clone ID: LIB3196-020-P1-M1-G12.pep
PADEKCMVLSEVIHSLGRSMSTTSDNPGHSLWRFADKGLNCVLVVDIKQTSXGQRTKYKIELPARLRIWKKVADVYQIFLVG

SEQ ID NO: 100467 - protein, 57 aa, Gossypium hirsutum
  Clone ID: LIB3196-020-P1-M1-G3.pep
YFHTIYVYVCTFLYTIYMVRDGATRFESVVNECLTRVLIITSFKCICIYFGTISDAW

SEQ ID NO: 100468 - protein, 111 aa, Gossypium hirsutum
  Clone ID: LIB3196-020-P1-M1-G7.pep
KMRESDDIAVDTNSSTPLLEESEVKDKKEVSGMEQWRGEIVKSIVYAGLEAVFTCFFLISSVSATNLSSVEVLALGIANLVADGISSSLGDFLSSSTKEGLAIKEMAVTQW

SEQ ID NO: 100469 - protein, 58 aa, Gossypium hirsutum
  Clone ID: LIB3196-020-P1-M1-H1.pep
LNTSPDVHQGFCLLHSRFNGSCSFLFLYPMLRLELCRLTRSYTYKSVTVVSVLLQRFF

SEQ ID NO: 100470 - protein, 73 aa, Gossypium hirsutum
  Clone ID: LIB3196-020-P1-M1-H12.pep
LTHVKKLKKPLKKGLPPSGLRPHGRTGSFYGLACLVFTRLTSRHLRHPIRRLGFQKPFLLFADSEGSTLSHKS

SEQ ID NO: 100471 - protein, 119 aa, Gossypium hirsutum
  unsure (1)..(119): unsure at all Xaa locations
  Clone ID: LIB3196-020-P1-M1-H3.pep
HAFIITTHRIVSRNERGLIYKQFDRSPVLTVPQTRAVVIIWVVITCKETSSNTKAHAKICQIAXRFSNHLGLPVDVLANFFCISPEEAMRFKHNKHEVLVFNPMPCPCRVHTQFPRWET

SEQ ID NO: 100472 - protein, 134 aa, Gossypium hirsutum
  unsure (1)..(134): unsure at all Xaa locations
  Clone ID: LIB3196-020-P1-M1-H5.pep
KNAPGELKLKLERVMKNPDKAVPIPEKMSEWAPRPTPXEFVRDVMGSRAGAGNGELHVYRHMRRREYQPQDYMDAMDAKQKXGCXFQMRLQKNKIAVXEQTAKRRKKRQTLKEKKLLAKKMELEQKKQEGSRGG

SEQ ID NO: 100473 - protein, 73 aa, Gossypium hirsutum
  Clone ID: LIB3196-020-P1-M1-H6.pep
NEKPDLFRREPKEPAFLSRQEKHRRRLVDISSIWRWNGQIYFLLFLGFCNTWLMIKGLFSVRLYYWAGGTLLT

SEQ ID NO: 100474 - protein, 54 aa, Gossypium hirsutum
  Clone ID: LIB3196-020-P1-M1-H7.pep
AVVHLVIESAHFIAHTADCTLHKIAITSTQLILRLYGIMVSVDYDRITQVTSSF

SEQ ID NO: 100475 - protein, 62 aa, Gossypium hirsutum
  Clone ID: LIB3196-020-P1-M1-H9.pep
IFLFYVILILVTATVKVNLPFGKPRVLQKNVDNCLLYHMEYVSRFGKAMTMRMWSSYTVPQL

SEQ ID NO: 100476 - protein, 55 aa, Gossypium hirsutum
  Clone ID: LIB3196-021-P1-M1-A1.pep
ECCICLSAYDDGVELRELRCGHHFHCACVDKWLRINATCPLCKYNILKSSSHEEV

SEQ ID NO: 100477 - protein, 55 aa, Gossypium hirsutum
  Clone ID: LIB3196-021-P1-M1-A12.pep
RASNFRGYTCANGSSLIPSIWHDFTITQSYMNVALDDMQIHFIAKSYICCMCMIY

SEQ ID NO: 100478 - protein, 59 aa, Gossypium hirsutum
  Clone ID: LIB3196-021-P1-M1-A2.pep
HAFARRLQTSSADIFLAYNLRISCPDIFPEYSLRTSCPDIFPISCIFDHILTHLNHLIT

SEQ ID NO: 100479 - protein, 126 aa, Gossypium hirsutum
  Clone ID: LIB3196-021-P1-M1-A3.pep
CKCGSLELAVRVFNQVKERNIVTYNTIISAHGIYGLGEHVFQFFEEMKEARIKPNKVTFIALLTACNHCGLLDRSWSMYHAMMYDYNIPLGMEHYSCIVDLLGRAGHLDDAYDLIKKMPAEPDMNI

SEQ ID NO: 100480 - protein, 129 aa, Gossypium hirsutum
  Clone ID: LIB3196-021-P1-M1-A4.pep
SFRTDNNTTLFKNINSAYLDAITIADENETPPSDDCLETVIRGLRSDRLFFKPGETSSIMEEATKPSEEEEEEEEEEEDGVPFKESVVLSMESRDPYVDFRESMEEMVEAQGLNDWEELEQLLGWYLKA

SEQ ID NO: 100481 - protein, 66 aa, Gossypium hirsutum
  Clone ID: LIB3196-021-P1-M1-A7.pep
PRVRPRVRLDSFFALIIYCNPKHLSRVCNPPRLLAINIGKRYLKLLQISTFTSLKLWKLMFDTFEL

SEQ ID NO: 100482 - protein, 91 aa, Gossypium hirsutum
  Clone ID: LIB3196-021-P1-M1-A8.pep
TRTRGRTRGERLEDQRLIDDICKHNDAVLHLLVPKSAKVRAKPGAKNFELSIMAPKSKGKRDNDVGETNGGVQYEADRKFVPRKPSERDVI

SEQ ID NO: 100483 - protein, 55 aa, Gossypium hirsutum
  Clone ID: LIB3196-021-P1-M1-A9.pep
LVDQPQLWPRLSVSHLLIFHSFQFLAPRAIFPLLILFLGYSHTKKEYPRDKGTQK

SEQ ID NO: 100484 - protein, 75 aa, Gossypium hirsutum
  Clone ID: LIB3196-021-P1-M1-B12.pep
VCIIMIWDQYLNPYRLIAEPALLIECDIYVQYLAISTHKTFQILYKICLVKKKYQLHSMVISLVVVRLFTRHASY

SEQ ID NO: 100485 - protein, 88 aa, Gossypium hirsutum
  Clone ID: LIB3196-021-P1-M1-B2.pep
LGVSRPRKELKDPDQLYTTLKNLLAQIKSHPIAWPFMEPVKKSEAPDYYEVIRFPIGEDPPFHLLPPSSIPIPAPALTGPCSPMGPTP

SEQ ID NO: 100486 - protein, 129 aa, Gossypium hirsutum
  Clone ID: LIB3196-021-P1-M1-B3.pep
IVVVFIDDILIYSRDETEHAKHLILVLQILRDKQLYAEFNKCEFWLREVSFLGHVVSVSGIRVDPSKISAILDWKPPRNATEVRSFLGLAGYYQRFVKGFSMIATPMTKLLQKDVEFECSKKCQKSFDR

SEQ ID NO: 100487 - protein, 94 aa, Gossypium hirsutum
  Clone ID: LIB3196-021-P1-M1-C1.pep
WIPPSISAISLFYELSENDLNFIKQSKDGAGFLINLIDSPGHVDFSSEVTAALRVTDGALVVVDCVSSVCVQTETVLRQAIAERIKPVLMMNKM

SEQ ID NO: 100488 - protein, 116 aa, Gossypium hirsutum
  unsure (1)..(116): unsure at all Xaa locations
  Clone ID: LIB3196-021-P1-M1-C5.pep
SSGLHCLIFLPTDDTWDWLLANIHVRNVQFFFHEALTHLMHLHLIHSDLTLTTLRQLCDXHIVFKMLIPHTRYTLHINMLARELVIVTLHDADKFTGIEVERFSEIVPTNMLQLDY

SEQ ID NO: 100489 - protein, 71 aa, Gossypium hirsutum
  Clone ID: LIB3196-021-P1-M1-C7.pep
RTLGFKVHVPNSYQARVPTDRSAFGHHNVVKSKDHGTMFLSTHQMTICTAGTCPLHQTRISKVRTSVLLHP

SEQ ID NO: 100490 - protein, 63 aa, Gossypium hirsutum
  Clone ID: LIB3196-021-P1-M1-C8.pep
ILSTIEKYYIHENNTHRHTFLVCRDKINLGEINEGFKACINATFFKVLSAPAYIMMCKKVTAK

SEQ ID NO: 100491 - protein, 118 aa, Gossypium hirsutum
  Clone ID: LIB3196-021-P1-M1-D1.pep
EINCKVPRRFYFLFFFKDDKCTDVNIFLVPMAMFLRAGRSWLFSIPMRFYLSWTFQTSSVPWLWAGAAPAHPHSLYVLRQSLEDLPPAVPWMAAPANSTWHLLLFPPGSALHILSRQA

SEQ ID NO: 100492 - protein, 95 aa, Gossypium hirsutum
  Clone ID: LIB3196-021-P1-M1-D11.pep
NDVIPNFAFGCINSISGNSIPPQGLLGMGRGPMSLLSQSGSLYKSVFSYCLPSFKSNYFSGSLILGPAGQPKNIRTTPLLKSPHRPFLYYVNLTE

SEQ ID NO: 100493 - protein, 100 aa, Gossypium hirsutum
  unsure (1)..(100): unsure at all Xaa locations
  Clone ID: LIB3196-021-P1-M1-D12.pep
IFFIFSSQIEFCSPLVLRCSTNGVFTVNSAYSSLMENILHLIEGKWRLSWHFDGPLPVRQFLWLVIRERLLTNAEHYIRGMSDNASCKXCGTADESIIHV

SEQ ID NO: 100494 - protein, 49 aa, Gossypium hirsutum
  Clone ID: LIB3196-021-P1-M1-D3.pep
ISLIVLDRMQSIFRSSCSGFRHICARSYLFVDRAFSITLSVSVSLKECF

SEQ ID NO: 100495 - protein, 46 aa, Gossypium hirsutum
  Clone ID: LIB3196-021-P1-M1-D4.pep
ATHGTVHRVSTWTHVTYNIHLMNSKSTHEFRLDNFCSMPLCILCYV

SEQ ID NO: 100496 - protein, 134 aa, Gossypium hirsutum
  Clone ID: LIB3196-021-P1-M1-D5.pep
MWIREVTGYVLVAMNEFSTLPLPNLRVVRGTQVYDGKFAIFVMLNYNTNSSHALRQLRLTQLTEILSGGVYIEKNDKLCHMDTIDWKDIVRDQDAEIVVKDNGRSCPLCHEVCKGRCWGPGPEDCQTLTHTICA

SEQ ID NO: 100497 - protein, 121 aa, Gossypium hirsutum
  Clone ID: LIB3196-021-P1-M1-D6.pep
SACPLAPLFALLNNWVEIRLDARKFVCEYRRPVAERAQDIGIWFHILAGITHLAVTSNAFLLAFSSDFLPRAYYQWTSAHDLRGFVNFTLARAPPSFSAAHNRTCRYRAFRDDDGHYSQTY

SEQ ID NO: 100498 - protein, 130 aa, Gossypium hirsutum
  Clone ID: LIB3196-021-P1-M1-D8.pep
LWIPGTAKPGRWTYTLNNTHHSLQALKVAVTSRASNSAVPPATVEAFVERDSLHFPQPVMIYANVRQGFYPILNATVTATVEPETGDPVTLRLLDDGAGADVIKNDGIYSRYFFSFAVNGRYSLKVHVNH

SEQ ID NO: 100499 - protein, 60 aa, Gossypium hirsutum
  Clone ID: LIB3196-021-P1-M1-D9.pep
SFKRLKSPLQIISMAALGYKMAPPIKSLFNFFYRALKRAFLEKSPKKIPRSSNLKFDRKK

SEQ ID NO: 100500 - protein, 50 aa, Gossypium hirsutum
  Clone ID: LIB3196-021-P1-M1-E1.pep
GHFCHLVNKRIKRENKSKIVSIFLPHCRNFQGAIEIGVVPGTSSIPNSIS

SEQ ID NO: 100501 - protein, 36 aa, Gossypium hirsutum
  Clone ID: LIB3196-021-P1-M1-E10.pep
IHKLAFKYEVLSVFLFSLYIFYKIKLNNNNINNTHR

SEQ ID NO: 100502 - protein, 69 aa, Gossypium hirsutum
  Clone ID: LIB3196-021-P1-M1-E12.pep
MATRTPSLELPLPWAHCSPRLCFSYPSPLHGSILVNMDDNIIEHYSNEDTFILNMESMVEGFKVTLMEI

SEQ ID NO: 100503 - protein, 64 aa, Gossypium hirsutum
  Clone ID: LIB3196-021-P1-M1-E3.pep
MSKQLLLGSQRRCQLVNDSRQGGSQQSCKILDIKKCKQSIVLTIASSAAQCPVLTCCSMYVSSF

SEQ ID NO: 100504 - protein, 125 aa, Gossypium hirsutum
  Clone ID: LIB3196-021-P1-M1-E5.pep
VNGKGSLKGQPGDIYHQTWARYFVKFLDAYAEHKLQFWAVTAENEPSAGLLSGYPFQCLGFTPEHQRDFIARDLSPTLANSTHHNVRLLMLDDQRLLLPHWAKVVLTDPEAAKYVHGIAVHWYLD

SEQ ID NO: 100505 - protein, 107 aa, Gossypium hirsutum
  Clone ID: LIB3196-021-P1-M1-E8.pep
IAGPDYCDLENVQELFTVQDQHDLLTLGWIHTHPTQTAFLSTVDLNTHCCYQLMSPAAIAIVCSPKHKDTGIFRLTNAGMLEVSARKKKGLHPHTKEPTLLSICKHV

SEQ ID NO: 100506 - protein, 133 aa, Gossypium hirsutum
  Clone ID: LIB3196-021-P1-M1-F1.pep
CFYVDSDMVNEFKLELVEKLFAEDTEAKNPFSTQDTDLDLEMLAPYIPMDDDFQLRSFDQLSPLESSSASPESASPQSTVTVFQQTQIQEPTANATTTTATTDELKTVTKDRMEDIKILIASPSSTHIHKETT

SEQ ID NO: 100507 - protein, 106 aa, Gossypium hirsutum
  Clone ID: LIB3196-021-P1-M1-F10.pep
YCADVYTINVSKGKNYLLRIINAALNMEHFFMVANHTMTVVETDGEYTKPFKTTFLMLTPGQTYNVLIKADLSIGKNMAMAPHMPAKNVPFLMKTSCGILRYASPT

SEQ ID NO: 100508 - protein, 70 aa, Gossypium hirsutum
  Clone ID: LIB3196-021-P1-M1-F11.pep
SAPLNFSEVATYQNKKIWHMNHLHLANAILLAPIKGHQLQWTFLILRTGLKADGDKGGKVREMVIWQWPQ

SEQ ID NO: 100509 - protein, 71 aa, Gossypium hirsutum
  Clone ID: LIB3196-021-P1-M1-F12.pep
VLRTYQYQLETLAHPFTTLTFLMNTWNINGYSEILHISAIYVDEATSYLTIHMDSFSSYSRACSHKLLVRT

SEQ ID NO: 100510 - protein, 55 aa, Gossypium hirsutum
  Clone ID: LIB3196-021-P1-M1-F2.pep
PSPNLNPINLARLMCKQRNPSLLPQPRTPPYGYLHTCHVHPLYAVPTDTNKKCSR

SEQ ID NO: 100511 - protein, 134 aa, Gossypium hirsutum
  Clone ID: LIB3196-021-P1-M1-F6.pep
IASLSQVFLHLSTLDRSVIWSKSILNARCKICRKKGDAENMVLCDGCDRGHHTYCVRPKLKTVPEGDWFCPECRPKQRPRRLSSRQRPSLESDEDVEDSMGGEDDEVDGDEKEGQSEEEEYEVEQDEDDSQEEE

SEQ ID NO: 100512 - protein, 61 aa, Gossypium hirsutum
  unsure (1)..(61): unsure at all Xaa locations
  Clone ID: LIB3196-021-P1-M1-F7.pep
MATFVQLSTKPNMPIVGLGTCTSTVHKLKEAAKVDTDAWARHIDXAYAYENEHDVADAMHE

SEQ ID NO: 100513 - protein, 89 aa, Gossypium hirsutum
  Clone ID: LIB3196-021-P1-M1-G10.pep
IKIEQFTKQVKVNRSFAPGRKPGRRGGESVGLLKYQAPFGSNPRHAHHHCHTLTTRIILRKPSGYVYLKKMIKFENVCLVEVLLVIVLF

SEQ ID NO: 100514 - protein, 95 aa, Gossypium hirsutum
  Clone ID: LIB3196-021-P1-M1-G11.pep
DPPSLAPAPPSSPSDGHFLVPDATMAEEQPQVELFVKAGSDGAKIGNCPFSQRLFMVLWLKGVTFNVTTVDTKRRTETVQKLCPGGQLPFLLYGT

SEQ ID NO: 100515 - protein, 97 aa, Gossypium hirsutum
  Clone ID: LIB3196-021-P1-M1-G4.pep
PSFQVFVNHLQMALWATSCSSSEKLFLASSAATRRRMGSRRRDLVHVGMTDQAETETISIAYKEGDRERPKWADETPFSRLVEALISFKPFYSLLKL

SEQ ID NO: 100516 - protein, 129 aa, Gossypium hirsutum
  unsure (1)..(129): unsure at all Xaa locations
  Clone ID: LIB3196-021-P1-M1-G5.pep
MRLLLLLLVAASAMVRSEASANLGGVPSKRLKMQYATGPLLKFQICVSXGYRRVFEEYMRVISQRYPDIRIEGENYLPQPIYRHIASFLSVFKLVLIGLIIVGKDPFAFFGMQAANIWQWGQENKVYAC

SEQ ID NO: 100517 - protein, 57 aa, Gossypium hirsutum
  Clone ID: LIB3196-021-P1-M1-G6.pep
MPVKKKRKSPGVAAAVAEDGGLKKCKISSYCRSQPPARLISGEEHFSSKKCLAWFYE

SEQ ID NO: 100518 - protein, 90 aa, Gossypium hirsutum
  unsure (1)..(90): unsure at all Xaa locations
  Clone ID: LIB3196-021-P1-M1-G9.pep
GRVGDKGTSGLLVVAKDEHSHAHLSEQFKQHTIQRVYISLTCGVPSASAGRVDIPIGRDSNNRIRMVAVPXLSHHGRARHAASRYKVIEV

SEQ ID NO: 100519 - protein, 58 aa, Gossypium hirsutum
  Clone ID: LIB3196-021-P1-M1-H1.pep
HASAHIDCVLSEISSNCYTGLIIKRIKSFFLASFKCLKLKIDIYLLFRLNLQKRYFNI

SEQ ID NO: 100520 - protein, 131 aa, Gossypium hirsutum
  Clone ID: LIB3196-021-P1-M1-H11.pep
YLASVKAMHEASKKLNECLQEVYEPDWPGRDEANKIAENNDLLWMDYHQKLVDQALLTMDTYLGQFPDIKSRIAKRGRKLVDYDSARHHYESLQTAKKKDEAKIAKAEEELIKAQKVFEEMNVDLQEELAS

SEQ ID NO: 100521 - protein, 72 aa, Gossypium hirsutum
  Clone ID: LIB3196-021-P1-M1-H3.pep
LYASVVEDMILKATEQLVNDILRQALAVGYQTASHNRIPKEITVSNIHQAICNIPFLDFLTNKHMGILNEDQ

SEQ ID NO: 100522 - protein, 121 aa, Gossypium hirsutum
  Clone ID: LIB3196-022-P1-M1-A10.pep
RTRGFEIFSVGGDVSDANVVKFSNDGRLMLLTTMDGHIHVLDSFRGTHLSTYNVKPVPSNCTLEASFSPEGMFVISGSGDGRAYAWSVRSGKEVASWMMNSEPSVINWNWMNTDTEPPVIK

SEQ ID NO: 100523 - protein, 63 aa, Gossypium hirsutum
  Clone ID: LIB3196-022-P1-M1-A12.pep
SSSKSSSRQLSESFKSKEFVSSDESSSGENKSKKKRRRSEDSEEEELASTPPSSEDSASGSDE

SEQ ID NO: 100524 - protein, 57 aa, Gossypium hirsutum
  Clone ID: LIB3196-022-P1-M1-A3.pep
RGRVGLFHICIVSFFLRNSRNVQHNVHGGITYNSNTNRYNGVLYLVQTKNACLFPNP

SEQ ID NO: 100525 - protein, 50 aa, Gossypium hirsutum
  Clone ID: LIB3196-022-P1-M1-B1.pep
ILHNLSPYLLPHYILQFLLSMFRYYCKCEFMLSNQLTKGHDLHRCENSSV

SEQ ID NO: 100526 - protein, 129 aa, Gossypium hirsutum
  Clone ID: LIB3196-022-P1-M1-B2.pep
MAEGTAEAPLENGGGGDSGAGALERGVAPIKPQYLTTKEQFDQFLEAKGQEKPCRETEVGDSAGNDLAEPEAKRIRLEDGQTEDGQTEEAAEPREQSQTQKRARGQNKGRPHVKPTHYDKNRLCPSLIQ

SEQ ID NO: 100527 - protein, 45 aa, Gossypium hirsutum
  Clone ID: LIB3196-022-P1-M1-B5.pep
FLINGNKKFYDKLVCILVRYTDHLCIYTFLVLYIIWYSSLTFFLM

SEQ ID NO: 100528 - protein, 97 aa, Gossypium hirsutum
  Clone ID: LIB3196-022-P1-M1-B6.pep
CLVVFFLFPHSVLVDDDGIKVVKVTFNKQDSLVILTIMATLKIRNSNFYPVAVTSLSSQIQYMNTVVGTYVTTNVSLIPPRSEQLVCCSFRNLAPQA

SEQ ID NO: 100529 - protein, 130 aa, Gossypium hirsutum
  Clone ID: LIB3196-022-P1-M1-B7.pep
QIRILEDKGTSTELVRENQKLKQHLEEEKQKKHSFLSQRETLLAEAKMLKRELERERLVTTALRGELQQISGSQVHGKSDSPNVYTEKKEIAVLRERLSELERKLTFEQQRSDLWERLYVEAKDQSGKQE

SEQ ID NO: 100530 - protein, 123 aa, Gossypium hirsutum
  Clone ID: LIB3196-022-P1-M1-B8.pep
QVQGSVQCVKFHVAEKRSKLKLELGPAFKKLKFDKMGEDVASAWKEGEQKMFSNIVKSNPSSQQKCFWDEICKHFRNKSREELVCYYYNVFLLQRRAYQNRVTPSNIDSDDEPESALVAKGIG

SEQ ID NO: 100531 - protein, 93 aa, Gossypium hirsutum
  Clone ID: LIB3196-022-P1-M1-B9.pep
KVMQRRGNNIRFLPKWPDCEQGGGRAGAHRPRCLPAPRLPSSSEVPLASLSAPQHHDTGTQERAAGAGRPLRLTSGPSECFPGGAWGLPETSR

SEQ ID NO: 100532 - protein, 43 aa, Gossypium hirsutum
  Clone ID: LIB3196-022-P1-M1-C1.pep
ANPTWCHLCLNPYLPCCHNNVGRKLTYYTIKNNLNCFFFKYLN

SEQ ID NO: 100533 - protein, 88 aa, Gossypium hirsutum
  unsure (1)..(88): unsure at all Xaa locations
  Clone ID: LIB3196-022-P1-M1-C10.pep
MHLSRLALFPFVALFIDKCRMIAASDVLELTDDNFDSRVSDTGSGGLMLVELLTPWCVHCKILAPEYXAAATYIKGMVPLAKVECTVN

SEQ ID NO: 100534 - protein, 42 aa, Gossypium hirsutum
  Clone ID: LIB3196-022-P1-M1-C11.pep
LERASAVPSIRSHYRPAQGSSTHRCATECLGLLLELLFSLHP

SEQ ID NO: 100535 - protein, 52 aa, Gossypium hirsutum
  Clone ID: LIB3196-022-P1-M1-C12.pep
THTSSQTFLIKYIFNIIIEFIEIFPFQYLYESRTYLSHLAHLHILSRLDFAR

SEQ ID NO: 100536 - protein, 79 aa, Gossypium hirsutum
  Clone ID: LIB3196-022-P1-M1-C2.pep
KYGPCDRDFAYPHFVCIEDFSFNFVKNKANRGACDTSCQRRPRAFSPTAPGSADAVTHFVNRQKCYTILNSKNSGHVFG

SEQ ID NO: 100537 - protein, 112 aa, Gossypium hirsutum
  Clone ID: LIB3196-022-P1-M1-C3.pep
MDEDVLTTLKILIIGESGVGKSSLLLRFTDDTFDPELAATIGVDFKVKTISVDGNKAKLAIWDTAGQERFRTLTPSYYRGAQGVILAHDVTRRDTFAKLDNWLNELETYCTR

SEQ ID NO: 100538 - protein, 121 aa, Gossypium hirsutum
  Clone ID: LIB3196-022-P1-M1-C5.pep
NFISENQENNEVTAIDETSKRQAKKKAKEERESEIRAAEERQLEKDVPRTTDEFEKLVRSSPNSSFVWIKYMAFMLNSANIEKARAIAERALRTINIREETEKLNIWVAYFNLENQYGNPP

SEQ ID NO: 100539 - protein, 43 aa, Gossypium hirsutum
  Clone ID: LIB3196-022-P1-M1-D10.pep
TPSTYRMLHSHFYDIIYHNACTSCSDIWKHASYPITLTLPQSS

SEQ ID NO: 100540 - protein, 121 aa, Gossypium hirsutum
  Clone ID: LIB3196-022-P1-M1-D12.pep
PRVRRQLLIEIVLRSRLTALMVDGDTTCWVLEQELLRSYGVQTLGVDNGRDAIDLIASDAAFNLIIIEKILPVLNGLEVTRQICEIGMRCKMLAVTAYSGESERQAFLATSVDVFIEKPLD

SEQ ID NO: 100541 - protein, 57 aa, Gossypium hirsutum
  Clone ID: LIB3196-022-P1-M1-D2.pep
YPFKRYLVYQHFSWIENFVFNFLKFGPPSMHVSGHVKEEERMCVILYLRMLIQLQFI

SEQ ID NO: 100542 - protein, 52 aa, Gossypium hirsutum
  Clone ID: LIB3196-022-P1-M1-D3.pep
CMPQADLSRWYYRWAICCVYDEDAFNSCYCSWTEYNAVFEEHAGVGHARRNQ

SEQ ID NO: 100543 - protein, 31 aa, Gossypium hirsutum
  Clone ID: LIB3196-022-P1-M1-D8.pep
DKLNIITFNLFQKHINGKITILPLIFTFFAI

SEQ ID NO: 100544 - protein, 126 aa, Gossypium hirsutum
  unsure (1)..(126): unsure at all Xaa locations
  Clone ID: LIB3196-022-P1-M1-E11.pep
MAARCRGLRAPEMASQRGTPNSAAWALADACSMGLTAAADTRYTADAVTADGTYYLEHVTITEASDDDYEYEEIPDDNCSIPDRVEHLRXALDIAQEHATHTEILERETGVAXKHAVPEVIAYFLC

SEQ ID NO: 100545 - protein, 128 aa, Gossypium hirsutum
  Clone ID: LIB3196-022-P1-M1-E12.pep
LGSLCGGSAVSREFAERLCLAAVMSRHSRLQRQVLSLYRDLLRAGRGKPGAEARVRAEFRQHAGLPRSDVLRIEYLYRRGRRQLQLLRSGHATAMGAFVRPRAPTEEPGGVGSQPDDGDGPRNPHDST

SEQ ID NO: 100546 - protein, 105 aa, Gossypium hirsutum
  Clone ID: LIB3196-022-P1-M1-E3.pep
MGRSGNLKNAIVAFLVPLPSILFYLFFLDHFHSNSSSLSSLWSWCFHHPLLLANVFFFFNVNVLFWIIGHIQSSNWMIDLYWTVIPVLLIHYYATHPSAQFDGLR

SEQ ID NO: 100547 - protein, 67 aa, Gossypium hirsutum
  Clone ID: LIB3196-022-P1-M1-E4.pep
IFLGVKYIQLIKLLYINQKQDPYPGLTTFYTCSYAYGSNKRTLLFFFPSPETSFQGIGGVYKNSNRN

SEQ ID NO: 100548 - protein, 126 aa, Gossypium hirsutum
  Clone ID: LIB3196-022-P1-M1-E8.pep
SKMLDAEDIVGTARPDEKAIMTYVSSFYHAFSGAQKAETAANRICKVLAVNQENEQLMEDYEKLASDLLEWIRRTIPWLENRVPENTMHAMQQKLEDFRDYRRLHKPPKVQEKCQLEINFNTLQTK

SEQ ID NO: 100549 - protein, 148 aa, Gossypium hirsutum
  Clone ID: LIB3196-022-P1-M1-E9.pep
QSQSCMRLCSESPIRWPGCPLRMEILLDAPQSHTVLRAAEDQLSSTMHHFSLAHRHLYSGTSEDVCLNARTRSDSHCKLCADTEQLIALCSLGRCGILDVCAEMWLGSWILRTTKSALSQSRESAVSSRPRIPGRGHPRASAFPLVSW

SEQ ID NO: 100550 - protein, 127 aa, Gossypium hirsutum
  Clone ID: LIB3196-022-P1-M1-F1.pep
SLKLKGIFICFSMLKAALSGSYVNFGVFRLYGDDALDNALHTFIKLLLSIPHSDLLDYPKLSQSYYSLLEVLTQDHMNFIASLEPRVIMYILSSISEGLTALDTMVCTGCCSCLDHIVTYLFKQLSR

SEQ ID NO: 100551 - protein, 56 aa, Gossypium hirsutum
  Clone ID: LIB3196-022-P1-M1-F10.pep
VLKINNRVSFLVWVYTKQRLRLSLGISIFTTLINQTTINLTIYHHTRMLVSLFLYI

SEQ ID NO: 100552 - protein, 122 aa, Gossypium hirsutum
  Clone ID: LIB3196-022-P1-M1-F2.pep
PKSAVVALKWGIRQPRSKSMLMRCDAKRDGDFNVSTRRSPTTPLSWSGGGGAASPSAADGFEETSKQVLRSPLAAPSRSKVCFHILPHFFSQLSGANLSLYHTLAGIDGNVPVRNVKLRGRV

SEQ ID NO: 100553 - protein, 127 aa, Gossypium hirsutum
  unsure (1)..(127): unsure at all Xaa locations
  Clone ID: LIB3196-022-P1-M1-F3.pep
RSMVQNLVHNFRSLFVGENPKNRAFLKTVLTQFIGKFFGXRGFLRKQIYKHFPKVIYENRHFNGVAELLEILGSIINGFALPXKAEHKQFLMKGLIPMHTAKGLALFHAQLAYCVVQFLEKDTTLTE

SEQ ID NO: 100554 - protein, 114 aa, Gossypium hirsutum
  Clone ID: LIB3196-022-P1-M1-F5.pep
MASLSLAPVNIFKAGADEERAETARLTSFIGAIAIGDLVKSTLGPKGMDKILLSSGRDASLMVTNDGATILKNIGVDNPAAKVLVDMSRVQDDEVGDGTTSVTVLAAELLREAE

SEQ ID NO: 100555 - protein, 85 aa, Gossypium hirsutum
  Clone ID: LIB3196-022-P1-M1-F6.pep
HASCLKTQGSARVSVGVGGGWSPTSWAPSLLLPSSPCWSTGATGNLPNHWKLSLGLSSPDWTSSTENVYGVSMKPWGEAAQGPVA

SEQ ID NO: 100556 - protein, 103 aa, Gossypium hirsutum
  Clone ID: LIB3196-022-P1-M1-G1.pep
MAALTTLFKYIDENQDRYIKKLAKWVAIQSVSAWPEKRGEIRRMMEVAAADVKQLGGSVELVDIGKQKLPDGSEIPLPPILLGKLGSDPQKKTVCIYGHLDVQ

SEQ ID NO: 100557 - protein, 46 aa, Gossypium hirsutum
  Clone ID: LIB3196-022-P1-M1-G10.pep
GYGILPLIKAFNNQFISNHMHILIQSLKCDLSLNSKFKVPLKTFWD

SEQ ID NO: 100558 - protein, 117 aa, Gossypium hirsutum
  Clone ID: LIB3196-022-P1-M1-G11.pep
AAPSQAVGSDRLELLRFPRAPTRAPSQAVGSDHLCPGLCPRIRCPVGRDDSARSPGWAPCSHHPGGPASFLAGGGACDCQLQSPVGSSLGGHGRTGKGEAWDHPRGSLMPRDLSHIC

SEQ ID NO: 100559 - protein, 109 aa, Gossypium hirsutum
  Clone ID: LIB3196-022-P1-M1-G4.pep
FQVEASACPRCHPAAGASASSVTASAGMASHSQLRLSIDGQAQASTCELSWNRLLYNFSILVDNAIQVPRVKECQWSPHQPVGPPTTLGAAAAVHVPQRICSLDVRCSA

SEQ ID NO: 100560 - protein, 62 aa, Gossypium hirsutum
  Clone ID: LIB3196-022-P1-M1-G8.pep
ACIDTATPRAHFWTSSLSIACKSMQAEIVQFLFVELRLARFQLTRAQVSSIELNLASFQLVN

SEQ ID NO: 100561 - protein, 68 aa, Gossypium hirsutum
  Clone ID: LIB3196-022-P1-M1-H1.pep
ELLEEKDSHHFYLIESDILKHQCKSDIIPLTNSVFTNPILFHYNTFKFHFCKLMQHISQESHGITLFW

SEQ ID NO: 100562 - protein, 60 aa, Gossypium hirsutum
  Clone ID: LIB3196-022-P1-M1-H11.pep
PTRPHYLGKELVQNLLVLRFANLFFLPLWNLDNIDNVQIVFREDSGTEGLGGYFDEYSCV

SEQ ID NO: 100563 - protein, 65 aa, Gossypium hirsutum
  Clone ID: LIB3196-022-P1-M1-H12.pep
ATCSPCEAVFSTVKWTHPTSLILRGTHFHLVTSLKLRCVFQSVASHSRCQPAGIRDGVVENPGTP

SEQ ID NO: 100564 - protein, 123 aa, Gossypium hirsutum
  Clone ID: LIB3196-022-P1-M1-H3.pep
AAAQRPHRGHARAVERLPQPAPRSPAASRPPPPLQWATCSAGSASASPPPWRTATPPGRPTRSPSPRSQGRAAAARARRRSPSSPRSPRSEPVAGPTAAPRRTRTPRRRAPSMAVISLKQQSN

SEQ ID NO: 100565 - protein, 43 aa, Gossypium hirsutum
  Clone ID: LIB3196-022-P1-M1-H4.pep
IPDPKKSASRPGSRAGSRAGSRASSRRGSDASDFDLLETQSAC

SEQ ID NO: 100566 - protein, 91 aa, Gossypium hirsutum
  Clone ID: LIB3196-022-P1-M1-H6.pep
QERGRASAPTPAVPRAQPGRARPPPSSTRLSGRGSSLAAGGASQAMGAAGCGAWDGRPGARSGSVGPSGLVAGAPLAVTLTPGCAWDVPSH

SEQ ID NO: 100567 - protein, 116 aa, Gossypium hirsutum
  Clone ID: LIB3196-022-P1-M1-H7.pep
MADYLISGGTSYVPDDGLTAQQLFNCGDGLTYNDFLILPGYIDFTADQVDLTSALTKKITLKTPLVSSPMDTVTEAGMAIAMALTGGIGFIHHNCTPEFQANEVRKVKKYEQGFIT

SEQ ID NO: 100568 - protein, 50 aa, Gossypium hirsutum
  Clone ID: LIB3196-022-P1-M1-H9.pep
SFLQILVSFCAQSYLVRDFWCFWHYRFFFGLEFVKNPNYPFMLCVPMVKT

SEQ ID NO: 100569 - protein, 65 aa, Gossypium hirsutum
  Clone ID: LIB3196-023-P1-M1-A1.pep
PCVRQMPVCLPVWTFLEAIFHANGHPQHPYTFINFNGILHGLNMSITYLCIVFCMLTSSHWFSTC

SEQ ID NO: 100570 - protein, 50 aa, Gossypium hirsutum
  Clone ID: LIB3196-023-P1-M1-A10.pep
SVSPFGPILAHRGPLFPKHVKTSHKLTYHLAMLDLKFTLRLESIRILTSP

SEQ ID NO: 100571 - protein, 56 aa, Gossypium hirsutum
  Clone ID: LIB3196-023-P1-M1-A12.pep
CRLFLWKLDSERNPYIYGMTPNYLWSIYSEISKGGTVNPETVLALFHKNPNISFCT

SEQ ID NO: 100572 - protein, 59 aa, Gossypium hirsutum
  Clone ID: LIB3196-023-P1-M1-A5.pep
SLFYESNWLTGEIWHQVNWRTNGSGTPFQVLQPHEALRRNKGTPSLYKPWGISSSSINP

SEQ ID NO: 100573 - protein, 62 aa, Gossypium hirsutum
  Clone ID: LIB3196-023-P1-M1-A7.pep
VVCFLVYLMQFILHNAFCLVQPRACSGLAASIVVFPSFLFLFSHIHEEQRLLQTANINLKHQ

SEQ ID NO: 100574 - protein, 50 aa, Gossypium hirsutum
  Clone ID: LIB3196-023-P1-M1-B1.pep
FFIYLEQTNLEIIITTRRLPYSGKFSSLHFNYFSLRAMYVLKCGKCIGLV

SEQ ID NO: 100575 - protein, 56 aa, Gossypium hirsutum
  Clone ID: LIB3196-023-P1-M1-B11.pep
STFVHICSITYKHFNHFRAYWLIKLNRPSGLVFNSFHFIYFIKISCFYNLTNQTKT

SEQ ID NO: 100576 - protein, 76 aa, Gossypium hirsutum
  Clone ID: LIB3196-023-P1-M1-B3.pep
MRLPWATSAPGLAWGPLVLGLFGLLAASQPQVPPYGSENQTCRDQEKEYYEPRHRICCSRCPPGTYVSAKCSRSRD

SEQ ID NO: 100577 - protein, 65 aa, Gossypium hirsutum
  Clone ID: LIB3196-023-P1-M1-B4.pep
NFYTLVFTLKICTASFFDFFGRFFSFALSSSYTNTTLMLKFEFSLAFCLKAICYFLIPCPDIDNF

SEQ ID NO: 100578 - protein, 38 aa, Gossypium hirsutum
  Clone ID: LIB3196-023-P1-M1-C5.pep
YTRTKTFSTLLSPKRGSTGNYFMMNLNNSVLHQNPYTK

SEQ ID NO: 100579 - protein, 130 aa, Gossypium hirsutum
  Clone ID: LIB3196-023-P1-M1-C6.pep
QDRVDAQDETAAEFTLRLNLTAARLGQLEGLLQAHGDEGCGACGGVQEELGRLRDGVERCSCPLLPPRGPGAGPGVGGPSRGPLDGFSVFGGSSGSALQALQGELSEVILTFSSLNDSLNELQTTVEGQG

SEQ ID NO: 100580 - protein, 114 aa, Gossypium hirsutum
  Clone ID: LIB3196-023-P1-M1-C8.pep
FRTATKNFRGMWAFPNILLLSIVMIFSLDLSIQQINRSSIYQYVWSWTINNDFSFEFGYFIDSLTSIMSILITTVGIFVLIYSDNYMSHDEGYLRFFAYMSLFNTSMLGLVTSC

SEQ ID NO: 100581 - protein, 51 aa, Gossypium hirsutum
  Clone ID: LIB3196-023-P1-M1-C9.pep
YLPFDPQRKQISSECLVETQALNLRVYTSGGGCHTISFLFPVAFLNLMLSC

SEQ ID NO: 100582 - protein, 125 aa, Gossypium hirsutum
  Clone ID: LIB3196-023-P1-M1-D10.pep
ALKAKNIKQTELVADLREAILRVARHFQCADPKNCSVELTPDYSMESHQRDHENYVACSRGHRRRAKALLDFERHDDDELGFRKNDIITIVSQKDEHCWVGELNGLRGVVPAKFVEVLDERSKEY

SEQ ID NO: 100583 - protein, 63 aa, Gossypium hirsutum
  Clone ID: LIB3196-023-P1-M1-D12.pep
VCYSCHMTINMWVCFHTMCVTPQTRPRRYGQIRRVTLKFLRKPMPLSTSFFVFQKIVFAKLIK

SEQ ID NO: 100584 - protein, 63 aa, Gossypium hirsutum
  Clone ID: LIB3196-023-P1-M1-D2.pep
FFYFFIFLYFFFFLYFFFFLYLQMASNAPYPYPYKIFLQNIISNSLTHYTITHKRVQISRTRG

SEQ ID NO: 100585 - protein, 64 aa, Gossypium hirsutum
  unsure (1)..(64): unsure at all Xaa locations
  Clone ID: LIB3196-023-P1-M1-D7.pep
IQNSEHFKIENALRXIHSQSKCTKLPKSTPSYDNRGQRRSFMLVSTNFFMVFKKSRIYDLLWYC

SEQ ID NO: 100586 - protein, 124 aa, Gossypium hirsutum
  Clone ID: LIB3196-023-P1-M1-E5.pep
AGLSQTLWQTQHTWCSQSANMPAAAMLPRVGVQLVSHAQPRGEACPPPHTDLPRSLCPWYQNVPACLIHKGEADVIERKVCYLHFWRKGAHQAMQGHRRRRHWSGQEAELGASMGKQLSFVSPW

SEQ ID NO: 100587 - protein, 98 aa, Gossypium hirsutum
  unsure (1)..(98): unsure at all Xaa locations
  Clone ID: LIB3196-023-P1-M1-E6.pep
LPLLLPGRGAAYADPDFSLQGKPPGPFLAHRDAGLQAPGPFPAPDGDKGDLLLQAVQQSXLADHLLTAXWGADPVPAQAPGEGHEGLTLTGARAGGVG

SEQ ID NO: 100588 - protein, 72 aa, Gossypium hirsutum
  Clone ID: LIB3196-023-P1-M1-E9.pep
RSFSKIFNTQCSVSINLILILILFLNFLFDNNEYLFSINIYLPFFGLSVPLIFTIFYSSFLLSYILIILVRS

SEQ ID NO: 100589 - protein, 104 aa, Gossypium hirsutum
  Clone ID: LIB3196-023-P1-M1-F11.pep
MRRRRQLGTGRVAHHRRGGRRSSLIVPGAVTTVGPRLARPSPSQSSPTPTTAGGSETRLRRRQQQLQHHLHPPAMEDLDQSPLVSSSDSPPRPQPAFKYQFVRE

SEQ ID NO: 100590 - protein, 55 aa, Gossypium hirsutum
  Clone ID: LIB3196-023-P1-M1-F8.pep
VTPDSAILGVLQSNIQHVLVYENPALQEKALACIPVQELKRKSQEKLSRVRKLDK

SEQ ID NO: 100591 - protein, 129 aa, Gossypium hirsutum
  Clone ID: LIB3196-023-P1-M1-G11.pep
ENLLPSDGDFWIGLRRREEKQSNSTACEDLYAWTDGSISQFRNWYVDEPSCGSEVCVVMYHQPSAPAGIGGPYMFQWNDDRCNMKNNFICKYSDEKPAVPSREPESEETEPTTPVLLEETQEEDAKKTF

SEQ ID NO: 100592 - protein, 58 aa, Gossypium hirsutum
  unsure (1)..(58): unsure at all Xaa locations
  Clone ID: LIB3196-023-P1-M1-G12.pep
QFDFXPSQNSGFETTNSTRKILFFIIFLRSTISQNDFVKISFKNFDVRALNLAKRTKL

SEQ ID NO: 100593 - protein, 124 aa, Gossypium hirsutum
  Clone ID: LIB3196-023-P1-M1-G5.pep
MASAAVESFVTKQLDLLELERDAEVEERRSWQENISLKELQSRGVCLLKLQVSSQRTGLYGRLLVTFEPRRCGSVAALPSNSFTSGDIVGLYDAANEGSQLATGILTRVTQKSVTVAFDESHDF

SEQ ID NO: 100594 - protein, 46 aa, Gossypium hirsutum
  Clone ID: LIB3196-023-P1-M1-G8.pep
WINVFLYKLHSFPSGELEIRATQLAHSAPSPCDTLHCLGNLQSPHK

SEQ ID NO: 100595 - protein, 107 aa, Gossypium hirsutum
  unsure (1)..(107): unsure at all Xaa locations
  Clone ID: LIB3196-023-P1-M1-G9.pep
ILSTPQGSKYSMVELQDPNSNRIAQWLEVAPEQGIVDLSFQLAPEAMLGTYTVAVAEGKTFGTFSVEEYVLPKFKVEVVEPKELSTVQESFLVKNWXRYTYGRPMLG

SEQ ID NO: 100596 - protein, 89 aa, Gossypium hirsutum
  Clone ID: LIB3196-023-P1-M1-H3.pep
TPQALLFFYSFWQIMNAWVPLVFEGLKYWMPSQLYTRLPTSQPFCLCLHFESSQAPTKPLNGATSFLYAHSSNLREEKGEKRAVCHNGH

SEQ ID NO: 100597 - protein, 57 aa, Gossypium hirsutum
  Clone ID: LIB3196-023-P1-M1-H5.pep
THTLTQVFYPLFKMANSFFPPHPKTCEQLLMKSSKQPLGLYHFQLHSEVKIPITFET

SEQ ID NO: 100598 - protein, 105 aa, Gossypium hirsutum
  Clone ID: LIB3196-023-P1-M1-H9.pep
RHHRTSWYAKARWCPSPIPRILPTPSGAHNNWRLDNDRNHSSFLYHKKKSCSGGNSGKRCTCNFCSGCGGCMMFPHVLVVDMTSPDALVLGVLTIMLTSRELLSY

SEQ ID NO: 100599 - protein, 119 aa, Gossypium hirsutum
  Clone ID: LIB3196-024-P1-M1-A11.pep
QMLEREISFLEEELKSVEGLQPASRFCKEVTDFVMANSDPLIPTSRKNRKSCRFWKWLCGIPCFNLSWICCCCYSACSCHLKCLQCCDCDLCNCSSCICSLCKCRCCSCGSSEHSSCKC

SEQ ID NO: 100600 - protein, 116 aa, Gossypium hirsutum
  Clone ID: LIB3196-024-P1-M1-A12.pep
YYMCVGNNFHRNKCMREEMAIIPSKKLRNNIAGCVNHLMKRMQRGPLRGVSIKLQEKERERRDDYVPKVSAPDQEIIEVDPDTEEMLKLLDFGSPSHLPITQPTVGMNFKMPLGAV

SEQ ID NO: 100601 - protein, 58 aa, Gossypium hirsutum
  Clone ID: LIB3196-024-P1-M1-A3.pep
VSGKITYCGHEFHEFIPQRTSAYISQHDLHHGEMTVRETLDFSGRCLGVGTRYELLAE

SEQ ID NO: 100602 - protein, 44 aa, Gossypium hirsutum
  Clone ID: LIB3196-024-P1-M1-A5.pep
LLLYYYNILEIKKVFFIEKKINLVMYPVLFSYTIRKRQVKKNRP

SEQ ID NO: 100603 - protein, 45 aa, Gossypium hirsutum
  Clone ID: LIB3196-024-P1-M1-A7.pep
LQPEVYLQTLLISYLLCRILTLDIGMSGGSQEAFGNATRARTSPR

SEQ ID NO: 100604 - protein, 108 aa, Gossypium hirsutum
  Clone ID: LIB3196-024-P1-M1-A9.pep
PLPFPNQPGQLQLGDHVPDMPRCSEHLQRPSQMFSWAFQRARCEKDVLLPAPSRALTGHRLQTSWLACQAESGGRVLTDAVLSALEAGKEGATKDTEGRRGVGPSHPP

SEQ ID NO: 100605 - protein, 50 aa, Gossypium hirsutum
  Clone ID: LIB3196-024-P1-M1-B11.pep
KYDGQRGRCICCIGVKLCMAPVPVSTRKVVVWECAPVFLVLHIGQFFGGP

SEQ ID NO: 100606 - protein, 117 aa, Gossypium hirsutum
  unsure (1)..(117): unsure at all Xaa locations
  Clone ID: LIB3196-024-P1-M1-B2.pep
SSLEMREAAATEIRRAITGRIPESLRNCVNKEFFVTSAPWSVIDQQAIHPELNGATYRYPPGIVGVAPRGLPAAMEGIIPGGIPVTHNLPTVAHSXQAPSSNQPTKHGDNREHPNEQ

SEQ ID NO: 100607 - protein, 48 aa, Gossypium hirsutum
  Clone ID: LIB3196-024-P1-M1-B5.pep
LNQPHFTPSAEKSKKRWGRLKPPHAIGCQTRLGALLHPSHHLDPTNPG

SEQ ID NO: 100608 - protein, 97 aa, Gossypium hirsutum
  Clone ID: LIB3196-024-P1-M1-B8.pep
PRVRLKPFQANPHFFKAMAESRDRLGRAVDIAEVFARRRSGPLGILSDESMDLLGSPVRQSVTRRSMGVVGVTTSTARGVGLRRGGSFGTPRIGIRR

SEQ ID NO: 100609 - protein, 51 aa, Gossypium hirsutum
  Clone ID: LIB3196-024-P1-M1-B9.pep
MGTPKPRILPWLVSQLDLGQLEGVAWVNESRTRFRIPWKHGLRQDAQEEDF

SEQ ID NO: 100610 - protein, 53 aa, Gossypium hirsutum
  Clone ID: LIB3196-024-P1-M1-C7.pep
KQPQARDLILLKFSLLSVYMLSPTGQTSIHEDKPILIRDSGGERQCTNTPFLL

SEQ ID NO: 100611 - protein, 73 aa, Gossypium hirsutum
  Clone ID: LIB3196-024-P1-M1-C8.pep
HMIIFKSYHASIHHKCKSLITWLPVSHKHNLFVCILTNDSSYTKFISHEFCVHTYTTRNIVTYLIVCILTTFP

SEQ ID NO: 100612 - protein, 114 aa, Gossypium hirsutum
  Clone ID: LIB3196-024-P1-M1-D10.pep
SEGLSLAFRHMASSLLGHCSQVSCESLLHEVIVCVGYFTVNHPDNQVIVQSGRHPTVLQKLCQLPFQYFSDPRLIKILFPSLIAACYNNHQNKIILEQEMSCVLLATFIQDLAQ

SEQ ID NO: 100613 - protein, 81 aa, Gossypium hirsutum
  Clone ID: LIB3196-024-P1-M1-D11.pep
DMVRGLLPLLNPEVPDQFYRLWLSLFLHAVVVHCLVSVVFQMTILRDLEKLAGWHRIDIIFILSSITGNLASAIFLPYRSE

SEQ ID NO: 100614 - protein, 47 aa, Gossypium hirsutum
  unsure (1)..(47): unsure at all Xaa locations
  Clone ID: LIB3196-024-P1-M1-D3.pep
RSNVFPHMSEIYTYKAYGPIKLVRPNSAQHGLLWPQXMSSLMVASTI

SEQ ID NO: 100615 - protein, 135 aa, Gossypium hirsutum
  Clone ID: LIB3196-024-P1-M1-D5.pep
MRVAWTPRVTAAGLLPSWTVRYSKALSPLARLVGLIMKRLGSVQRKMPCVFVTEVKEEPSAKREHQPFKGLATETISHKALDADIYSAIPTEKVDGTCCYVTTYKDQPYLWARLDRKPNKQAEKRFKNFLHSKEN

SEQ ID NO: 100616 - protein, 100 aa, Gossypium hirsutum
  Clone ID: LIB3196-024-P1-M1-D7.pep
FSSRFDFFGGGVPSLPFFLPLLREMRLCATFPSSHRSIPSLVLAFAPHSSSTSSNSTITLASQERGRVRTLSIQMVWPLPLQPSGAEPASACLFLYTDPQ

SEQ ID NO: 100617 - protein, 122 aa, Gossypium hirsutum
  unsure (1)..(122): unsure at all Xaa locations
  Clone ID: LIB3196-024-P1-M1-E5.pep
IEAVTRVFPQVNVTKMGSWGHFNCSYSCSFLLAPEDPMFPVIGSLFLRELVKEFGTDHIYGADTFNEMQPPSSAPSYLAAATTGVYEAMIAVDTEAVWLLQGWLFQHQPQFWGPAQIXAALG

SEQ ID NO: 100618 - protein, 49 aa, Gossypium hirsutum
  Clone ID: LIB3196-024-P1-M1-E9.pep
IRLNCLDLSFPHYGLRFELPTTHFLSFYLQDSNVFFCLQKKKSKFKQLA

SEQ ID NO: 100619 - protein, 132 aa, Gossypium hirsutum
  Clone ID: LIB3196-024-P1-M1-F11.pep
GSPWGKWCISLQAEFLNSPLSRLQGVDQRPGCVLSLAPPRTGMANRGPAYGLSREVQQKIEKQYDADLEQILIQWITTQCRKDVGRPQPGRENFQNWLKDGTVLCELINALYPEGQAPVKKIQASTMAFKQM

SEQ ID NO: 100620 - protein, 81 aa, Gossypium hirsutum
  unsure (1)..(81): unsure at all Xaa locations
  Clone ID: LIB3196-024-P1-M1-F2.pep
QKRMMLAYDKEVHPREFHEGDLVLKKILPIQKDFRRKXMPNWEESYVVKKAFFGGALILAEIDEKTXSNPVNSNLVKKYYT

SEQ ID NO: 100621 - protein, 104 aa, Gossypium hirsutum
  Clone ID: LIB3196-024-P1-M1-F3.pep
IDNLCFAGLISMIDPPRAAVPDAVGKCRSAGIKVIMVTGDHPITAKAIAKGVGIISEGNETVEDIAARLNIPVSQVNPRDAKACVVHGSDLKDMTSEQLDDILK

SEQ ID NO: 100622 - protein, 40 aa, Gossypium hirsutum
  Clone ID: LIB3196-024-P1-M1-F5.pep
SLISVGTNTLFYRLNLFKVIKVNLAAIELTNYAFIWRRSI

SEQ ID NO: 100623 - protein, 42 aa, Gossypium hirsutum
  Clone ID: LIB3196-024-P1-M1-F7.pep
NQTYIIVTESLFIVYINWLIHFKKHIKTSENLFYCRHDVYNI

SEQ ID NO: 100624 - protein, 42 aa, Gossypium hirsutum
  Clone ID: LIB3196-024-P1-M1-F9.pep
NNGHSINSYLKGKFLVIQLVKVFFNLGTYFQLYHLTFRDFFI

SEQ ID NO: 100625 - protein, 65 aa, Gossypium hirsutum
  Clone ID: LIB3196-024-P1-M1-G1.pep
IFLANLGSTNIGKLNYINKPYVPYLFSISHSTRSAHSLNHSFQAHNLYLSNYFKVLIGIRANQLK

SEQ ID NO: 100626 - protein, 107 aa, Gossypium hirsutum
  Clone ID: LIB3196-024-P1-M1-G10.pep
SILFCTEKNQNSERLRNMSHVTQLVSGSLDSAPRLSDPEPELFSFTPSLNSYLDLCPPVPLLLRPPPAVMLSLCLETLWTGQGDPGAVAGLVKSQALQGKGLQAELA

SEQ ID NO: 100627 - protein, 129 aa, Gossypium hirsutum
  Clone ID: LIB3196-024-P1-M1-G4.pep
SLNQLMQNPAISQMMRSLLSSPQYLNQVLSLSPQLQNMLGSNSQPRETMQNSQFLRQLTSPEMMQQLLTLQQTLFSQLSRPQSTQEPAQTGGGAGTLNMGLEALMTMFSGLGTGSLSVPNRLDVPSEQL

SEQ ID NO: 100628 - protein, 119 aa, Gossypium hirsutum
  unsure (1)..(119): unsure at all Xaa locations
  Clone ID: LIB3196-024-P1-M1-G6.pep
GGHRPHEGPGGGMGNSSGHRPHEGPGSGMGSGHRPHEGPGSSMGGGGGHRPHEGPGGGISGGSGHRPHEGPGGGMHGLWRHLSHESPGXSMAGSGGHRPHEGPGHGGPHGHRPYDVPGH

SEQ ID NO: 100629 - protein, 79 aa, Gossypium hirsutum
  Clone ID: LIB3196-024-P1-M1-G7.pep
FFYLVFHLMLCYSHGLDDLKKKINISIFYWLVWQFIAGINTMYLEIPMGQAGLRLGSKKIPCLGPFSVRFQKAHFVVKK

SEQ ID NO: 100630 - protein, 80 aa, Gossypium hirsutum
  Clone ID: LIB3196-024-P1-M1-H10.pep
INSPQAPLWLQSPLLRLLVLPWPPVSPALPGRAEMPSLFFSSVPVPLSSCCSPSGQQLSSLRHASVLFMLPYYYRYLSLP

SEQ ID NO: 100631 - protein, 70 aa, Gossypium hirsutum
  Clone ID: LIB3196-024-P1-M1-H12.pep
DDKGHQWLHSVPLLSGGSLCPKLLGGNAIPSSHCLCLIRIRAISLLPSPTRERRHGASLLFCANCSIVSL

SEQ ID NO: 100632 - protein, 106 aa, Gossypium hirsutum
  Clone ID: LIB3196-024-P1-M1-H2.pep
AMEDTSSAKEVTLQGTPANYFPRSFHEVVGAILRCLGLETGFQQNPNPCPKKEDDSKANHNQPISPKENADPPSSTDNSDPSTTVIDPPADPPPSPTVRYVALLAS

SEQ ID NO: 100633 - protein, 41 aa, Gossypium hirsutum
  Clone ID: LIB3196-024-P1-M1-H4.pep
SLVRKIYGFNLYCLFKNICMVICLQRKLCILIYICTFVCYK

SEQ ID NO: 100634 - protein, 66 aa, Gossypium hirsutum
  Clone ID: LIB3196-024-P1-M1-H5.pep
FKMLPNRSLCKRVKGRPPTMRIQNDMDIRKQVDPKHCTIYKAVGHNRSKCPNRNVYFGQSSRSKSN

SEQ ID NO: 100635 - protein, 66 aa, Gossypium hirsutum
  Clone ID: LIB3196-024-P1-M1-H7.pep
LQQPSNVQTIKVAHTEARKRIVLNDKGDNRQEETQVRRRVNKVKPSERKEMELRLTQQSSANTKTP

SEQ ID NO: 100636 - protein, 98 aa, Gossypium hirsutum
  Clone ID: LIB3196-024-P1-M1-H8.pep
MVGKRALIVLAHSERTSFNYAMKEAAVAALKKKGWEVAESDLYAMNFNPIISRKDITGKLKDPANFQYAAESTLAYKEGRLSPDIVAEQKKLEAADLV

SEQ ID NO: 100637 - protein, 89 aa, Gossypium hirsutum
  Clone ID: LIB3196-025-P1-M1-A1.pep
VPSCQTSFLPCLPPFLFPSSFLPSICFSLSLLPCLLLFSFILLYRILACSFYSLTTWVVMELPWGFGGSPVLTKSCCQCDVHSGIDKMQ

SEQ ID NO: 100638 - protein, 65 aa, Gossypium hirsutum
  Clone ID: LIB3196-025-P1-M1-A7.pep
RRNYPLSIHSSHHPFLPTSSPGFKWIDCIEIAERCLLKHPPAWRLKQWLLKLNLNPIHCPQSRNS

SEQ ID NO: 100639 - protein, 49 aa, Gossypium hirsutum
  Clone ID: LIB3196-025-P1-M1-B2.pep
LLATCACVVHTMEREAQYAQSRWCSNSSLLDHSAVASKPFQRSLCPLCP

SEQ ID NO: 100640 - protein, 103 aa, Gossypium hirsutum
  Clone ID: LIB3196-025-P1-M1-B4.pep
VPIPNSHLDPRVRLNYNWGLVWSRWLKTPYILIFNSPTHRASIIHPTSRRTVFEATCGRSATTQITDFLKQAFILTLLYHPSMSHFSIISNHNSSRGGVFTHQ

SEQ ID NO: 100641 - protein, 60 aa, Gossypium hirsutum
  Clone ID: LIB3196-025-P1-M1-B5.pep
LLNSLKSLKTILNPKPLFYHSLLFCFKSLLFIFIGACYTSNIHTRDHNNYFVGNKISRKK

SEQ ID NO: 100642 - protein, 118 aa, Gossypium hirsutum
  Clone ID: LIB3196-025-P1-M1-B6.pep
MSEVKSRKKSGPKGAPAAEPGKRSEGGKTPEDRGGGGGGWADPRTGLSLLSLGTCLGLAWFVFQQSEKFAKVENQYQLLKLETNEFQQLQSKISLISEKLESTESILQEATSSMSLMT

SEQ ID NO: 100643 - protein, 71 aa, Gossypium hirsutum
  Clone ID: LIB3196-025-P1-M1-B8.pep
RRGPSGPLIGPRNSQYAREVQVVNWLMVSPSQWSRALEGTVRLSCKKDSPGLGQMDSHDHTGVGHTGSIVA

SEQ ID NO: 100644 - protein, 71 aa, Gossypium hirsutum
  Clone ID: LIB3196-025-P1-M1-C10.pep
GCVPRRLLPKQPRHDGFLLRKWRWQGPTCLLGLSGVGERLYGGPSCADGTVSPHSCADEPMGSTATNNAAY

SEQ ID NO: 100645 - protein, 101 aa, Gossypium hirsutum
  Clone ID: LIB3196-025-P1-M1-C11.pep
MATCAEILRGEVPEIDGQVFDYVTGVLHSGSADFESVDDLVEAVGELLQEVSGDSKDDAGIRAVCQRMYNTLRLAEPQSQGNNQVLLDAPIQLSKITENFD

SEQ ID NO: 100646 - protein, 89 aa, Gossypium hirsutum
  Clone ID: LIB3196-025-P1-M1-C2.pep
SVFVGQWCTYNSSASKMGNLSFKGHWLGTRVCDSTIWDIRPCDTWLVSPVCLKLTGLTVTQAQTRPGTQASEAILSVAQHYTRAYGSGT

SEQ ID NO: 100647 - protein, 64 aa, Gossypium hirsutum
  Clone ID: LIB3196-025-P1-M1-C4.pep
FAVDSTINVYLKGLTGGKKLYQTFLHETFKDEPSTVKLMMMEEETQSTKMEHTVNKAVGRTHPV

SEQ ID NO: 100648 - protein, 77 aa, Gossypium hirsutum
  Clone ID: LIB3196-025-P1-M1-C5.pep
MWPLVAALLLGSACCGSAQLLFNKTKSVEFTFCNDTVVIPCFVTNMEAQNTTEVYVKWKFKGRDIYTFDGALNKVTG

SEQ ID NO: 100649 - protein, 77 aa, Gossypium hirsutum
  Clone ID: LIB3196-025-P1-M1-C7.pep
MKLLPTRAQPQWTREGTGWEGRDRRQLSRTGAGVAVRGSQARLMPLSLFGRWQDPIFSLATPLRAGEEGSHSRKSLC

SEQ ID NO: 100650 - protein, 121 aa, Gossypium hirsutum
  unsure (1)..(121): unsure at all Xaa locations
  Clone ID: LIB3196-025-P1-M1-C8.pep
MPWVCTQARSPDGMNXPPTEAEESFEFVVVSLTGQTWHFEASTAEERELWVQSVQAQILASLQGCRSAKDKTRLGNQNTALAVQAVRTVRGNSFCIDCDAPNPDWASLNLGALMCIECSGI

SEQ ID NO: 100651 - protein, 44 aa, Gossypium hirsutum
  Clone ID: LIB3196-025-P1-M1-C9.pep
SVDDDYECMLDSNRGIISRQRIKMYTPNGIFLSLKNDFSCSRND

SEQ ID NO: 100652 - protein, 45 aa, Gossypium hirsutum
  Clone ID: LIB3196-025-P1-M1-D4.pep
WQGVLGLFSGKGVFKGTPSHYQNGLSLTKKNKTQQNPGGHFLFEL

SEQ ID NO: 100653 - protein, 119 aa, Gossypium hirsutum
  Clone ID: LIB3196-025-P1-M1-D5.pep
MAASSSREAMNKQLLDFIHSMEQEGLVDYRFAKVHMLKESSGPFFFASLLPTFCHDSTATLRDLTVALGQPLLNYHDLGELCFKIKGGAACLGVCRMAHACGQLHQAVQNRATKESLIT

SEQ ID NO: 100654 - protein, 42 aa, Gossypium hirsutum
  Clone ID: LIB3196-025-P1-M1-D8.pep
LASGINLFPFQSYHSLSVAFTPLYRLIPIFLDRGSRSYPSIH

SEQ ID NO: 100655 - protein, 90 aa, Gossypium hirsutum
  Clone ID: LIB3196-025-P1-M1-D9.pep
GEVYADAHIHHLLQMASHLQSAVLVTLGVLVLCQSQECPPHQCVASWNRCVTVNKLGLRARISPPSTLRGHRHHPGNWGGAPACSSVQTS

SEQ ID NO: 100656 - protein, 87 aa, Gossypium hirsutum
  Clone ID: LIB3196-025-P1-M1-E1.pep
NPRGKKISPRPNLRTSKENNILIPFPLDSAHNGRALPDCLKHDKVKSNDWSNNENQSMKLKEPDSLNLEIMKDFQDIIPKIQTPTCK

SEQ ID NO: 100657 - protein, 78 aa, Gossypium hirsutum
  Clone ID: LIB3196-025-P1-M1-E10.pep
MEKDHHHHYVLEITLSSAQGLKEPSGQLRRMQTYALAWIDPSLKLRTCIDRSGGGNPTWNDRFLFKSSSDFLSKETCG

SEQ ID NO: 100658 - protein, 81 aa, Gossypium hirsutum
  Clone ID: LIB3196-025-P1-M1-E12.pep
APPRSFPIIIECIRLMCVSIWCRLYFSRCGFVLQWRFCPAGCSGQWLGVDSDCFCVCSPLIGLMGIMKQLTPLRSVCESQA

SEQ ID NO: 100659 - protein, 47 aa, Gossypium hirsutum
  Clone ID: LIB3196-025-P1-M1-E2.pep
FSHSPRIRIRFQLHFGESLIPRDLSFNAACGVHHREHCPITLCHLKE

SEQ ID NO: 100660 - protein, 75 aa, Gossypium hirsutum
  unsure (1)..(75): unsure at all Xaa locations
  Clone ID: LIB3196-025-P1-M1-E4.pep
SLEIFPPGPYHLVVDVLHLTLSTEITTDIILEXRILEPFPTQRSDSIRPALNSPVERPSSDHEEGETSAQTERVP

SEQ ID NO: 100661 - protein, 69 aa, Gossypium hirsutum
  Clone ID: LIB3196-025-P1-M1-E7.pep
NESYVTGSTDEENRYVIDRTFIGFVPNSLRIILLRSSIKSMFWLKSSRTVFSDKKQHRSRCDEPHHHSK

SEQ ID NO: 100662 - protein, 97 aa, Gossypium hirsutum
  unsure (1)..(97): unsure at all Xaa locations
  Clone ID: LIB3196-025-P1-M1-F1.pep
MLIWEFNWRDFDLEGDPDAPDYMEVLMRTGIDFDXNKEMGIESLSYAXLMMARGLWXNDSLRTVTIHTDYNXGYLVNILTCRDLAAKLHQFLTIVKV

SEQ ID NO: 100663 - protein, 111 aa, Gossypium hirsutum
  Clone ID: LIB3196-025-P1-M1-F10.pep
NFHGPTVSTCPWLREEGYTQLSTLEGWEVAQYEIKSMGLGFRRHRFPATSGLSASINPPKPQYHYYKGHVKIYNSPRYRTLFSICNYYKRQRTSELLRSEISLLFNTASSN

SEQ ID NO: 100664 - protein, 50 aa, Gossypium hirsutum
  Clone ID: LIB3196-025-P1-M1-F11.pep
HYITSWYARARWYPSPISGIKAKRSVLHGSGLIVQADKTVLPRQVISDRR

SEQ ID NO: 100665 - protein, 54 aa, Gossypium hirsutum
  unsure (1)..(54): unsure at all Xaa locations
  Clone ID: LIB3196-025-P1-M1-F4.pep
MSAYRFIKCVTVXNHANCRTCTLISYTSYTFPTDYVQTVLDNFSTNVAMDRSTV

SEQ ID NO: 100666 - protein, 74 aa, Gossypium hirsutum
  Clone ID: LIB3196-025-P1-M1-F7.pep
NQNEMFSGGFGRSTAILPLQKAPDIVEELQDVTVQCGQEVSLHPSSSVGRSNGRTLYFCRRRCWGDSSVIMLLR

SEQ ID NO: 100667 - protein, 43 aa, Gossypium hirsutum
  unsure (1)..(43): unsure at all Xaa locations
  Clone ID: LIB3196-025-P1-M1-F8.pep
LFKNYNYSIDKKIDKVSLLYQVYLICFFFLFEVYMPAXPFCFF

SEQ ID NO: 100668 - protein, 73 aa, Gossypium hirsutum
  Clone ID: LIB3196-025-P1-M1-G12.pep
LTLTPSRAFFLIFVKTPSFISLPLNPLSPKAFPLVYNFGVTKLDSNLKLQYFLQIFFLKLCGNDIEKIIKDNF

SEQ ID NO: 100669 - protein, 69 aa, Gossypium hirsutum
  Clone ID: LIB3196-025-P1-M1-G4.pep
TTLVTMSIKGAHLIFPVDCRLRVGITMGPTYIIFVKFELESINLLLKLENIKFAVTNLIFFKLNYLLDI

SEQ ID NO: 100670 - protein, 62 aa, Gossypium hirsutum
  Clone ID: LIB3196-025-P1-M1-G6.pep
ILNFELIHRDLGFGFKIYGSGFVFGVTSLGSQVWIQRFKAQCVAQIFFSKLCVDDMEIIIDD

SEQ ID NO: 100671 - protein, 106 aa, Gossypium hirsutum
  Clone ID: LIB3196-025-P1-M1-G9.pep
MLKAPRARTSPGEDEDDLLPPEQKAEREKERRVANNARERLRVRDINEAFKELGRMCQLHLNSEKPQTKLLILHQAVSVILNLEQQVRERNLNPKAACLKRREEEK

SEQ ID NO: 100672 - protein, 42 aa, Gossypium hirsutum
  Clone ID: LIB3196-025-P1-M1-H11.pep
IFTNPFYENRDPKVHFPILVTIESLHNQTSNYSHNFTLKFGL

SEQ ID NO: 100673 - protein, 71 aa, Gossypium hirsutum
  Clone ID: LIB3196-025-P1-M1-H12.pep
HAFGGVGRTLKVGLIFIKMVFSQIMTTDHFFCYMTKWMKVGEYYLYIKLGLNLLKIIIKINRVLEINHNIF

SEQ ID NO: 100674 - protein, 116 aa, Gossypium hirsutum
  Clone ID: LIB3196-025-P1-M1-H4.pep
HRCRHHVTPRAAELGQRTPGRLDGPHLCPALAGCPGLPGAPGAAASSVATAFQTQGAAPGDRGAEGRGRRDRGFTTTQEQAPGGGQAQSGSYKGAAGIPILLPCSALTSDLQSGPG

SEQ ID NO: 100675 - protein, 117 aa, Gossypium hirsutum
  Clone ID: LIB3196-025-P1-M1-H8.pep
LGRAVELSPGRCRSTPPVALPARSASAAAMGVQVETISPGDGRTFPKRGQTCVVHYTGMLEDGKKFDSSRDRNKPFKFMLGKQEVIRGWEEGVAQMSVGQRAKLTISPDYAYGATGH

SEQ ID NO: 100676 - protein, 74 aa, Gossypium hirsutum
  Clone ID: LIB3196-027-P1-M1-A10.pep
CETILYNKQTVLCGSEIMNYNKMVHDYYIGIRINEQVIYQYMNTHIAEIYRSHTDITKHTCGTTPALPIHTELL

SEQ ID NO: 100677 - protein, 35 aa, Gossypium hirsutum
  Clone ID: LIB3196-027-P1-M1-A3.pep
NFDNFTRGKILMILSLVKFLEKSIQCVTTQHAHYD

SEQ ID NO: 100678 - protein, 33 aa, Gossypium hirsutum
  Clone ID: LIB3196-027-P1-M1-A5.pep
FEFNLIHFSISMNMRFNFNTIYILIHFNNHKTQ

SEQ ID NO: 100679 - protein, 63 aa, Gossypium hirsutum
  Clone ID: LIB3196-027-P1-M1-B10.pep
QIYVDKSLQTFQLCRPVQLARFIEYNDYPPLPNKTIHNPAQTQWLYGFCVHTGEALVSSHTFS

SEQ ID NO: 100680 - protein, 76 aa, Gossypium hirsutum
  Clone ID: LIB3196-027-P1-M1-B12.pep
GYSDSSKSSYNAYVPDEVLHIIDYRYHCPRWGLTRTHIRCRCPRHGLTRKLQIDANILDVVLHKSHIEILCHDIYT

SEQ ID NO: 100681 - protein, 107 aa, Gossypium hirsutum
  Clone ID: LIB3196-027-P1-M1-B3.pep
EDHHSKQPREIGLLSQKEMSSEEAKRSINGALKAVKPKTDDPKLSPESTTSPPKKVIIKSADMKEEQQKEAVNIPISVTSLFSSFPQIFHFSARFGFDFVPGFCSLL

SEQ ID NO: 100682 - protein, 113 aa, Gossypium hirsutum
  unsure (1)..(113): unsure at all Xaa locations
  Clone ID: LIB3196-027-P1-M1-B4.pep
ACNNKDTKLCDLRIDDRVFSDGRAQQGTHMAGETSNSKDHIWDASSCTRIKTMDGHMIXHIDALARSSTMISCGSRDKSNLQRDIREHDDHPRQLSENKSQVCRLKWSYDNRE

SEQ ID NO: 100683 - protein, 57 aa, Gossypium hirsutum
  Clone ID: LIB3196-027-P1-M1-B8.pep
FMSIIIYDKYCYLFACKLTKLYAYSLYFPSFFIVSPSKFRDRKDVRDHFTLSTDQLG

SEQ ID NO: 100684 - protein, 123 aa, Gossypium hirsutum
  Clone ID: LIB3196-027-P1-M1-C10.pep
VFDYLHATAFQGTPLAQAVEGPSENVRKLSRADLTEYFSTHYKAPRMVLAAAGGVEHQQLLDLAQKHLGDIPWTYAEDTVPALTPCRFTGSEIRHRDDALPFAHVAIAVEGPGWASPDNVALQ

SEQ ID NO: 100685 - protein, 58 aa, Gossypium hirsutum
  Clone ID: LIB3196-027-P1-M1-C3.pep
TSDISVPRMAHILSIKIPSHTFCISSKDYNLLEYFANHATHGLYHVLSQTNTGNPIRI

SEQ ID NO: 100686 - protein, 120 aa, Gossypium hirsutum
  unsure (1)..(120): unsure at all Xaa locations
  Clone ID: LIB3196-027-P1-M1-C4.pep
AFFLKQKSDMFFSFKFWKIMIEKXMEKQIKYLRTNNGLKFCYDEFNRLCKSEGIERHLTVCHTAQQNGVAERMNKTIMEKVRCMXNVNLPKSLWAEATSTSCFLINRSPSVAIEKKTPHE

SEQ ID NO: 100687 - protein, 125 aa, Gossypium hirsutum
  Clone ID: LIB3196-027-P1-M1-C6.pep
NPHFIFDVHVHEVVDASLSVIAQTFMDACTRTEHKLSRDSPSNKLLYAKEISTYKKMVEDYYKGIRQMVQVSDQDMNTHLAEISRAHTDSLNTLVALHQLYQYTQKYYDEIINALEEDPAAQKMQ

SEQ ID NO: 100688 - protein, 126 aa, Gossypium hirsutum
  Clone ID: LIB3196-027-P1-M1-C8.pep
MSRQWWLPISKRRPPTPGAALLAGPVRKQVVEPRTTPAGSRTRIPSSESCEQLSLVPGAAAARGPWQPQVSEPWATLPVPRLRARVDRSLSGCTLGIPDLDSAGEMPLGHIMRLDLEKIALEYIVP

SEQ ID NO: 100689 - protein, 125 aa, Gossypium hirsutum
  Clone ID: LIB3196-027-P1-M1-C9.pep
CKNSAMRTEPTTESNRKADSRPVDVSPDGGSPPSCVPQALNFSPEESDTVFSKSTTTEAAREETKPGGDAAPSEALLVDIKLDPLAVTPDAASQPLVDPPLIDFCNTPEANVAVGSESRPLIDLM

SEQ ID NO: 100690 - protein, 39 aa, Gossypium hirsutum
  Clone ID: LIB3196-027-P1-M1-D1.pep
FNTFLLVLNPQPVTTIKLIPSLLTFSLISLLRNHFALST

SEQ ID NO: 100691 - protein, 75 aa, Gossypium hirsutum
  Clone ID: LIB3196-027-P1-M1-D10.pep
PRNEIPHNRTNIVLKTVYWCIFKKKSREKDQKATRASLGRTETEIIPFSQNAVQHWETKLRSISNFGATFQSIET

SEQ ID NO: 100692 - protein, 123 aa, Gossypium hirsutum
  Clone ID: LIB3196-027-P1-M1-D12.pep
SRIGSGRRAFGSGYRRDDDYRGGGDRYEDRYDRRDDRSWSSRDDYSRDDYRRDDRGPPQRPKLNLKPRSTPKEDDSSASTSQSSRAASIFGGAKPVDTAAREREVEERLQKEQEKLQRQLDEP

SEQ ID NO: 100693 - protein, 67 aa, Gossypium hirsutum
  Clone ID: LIB3196-027-P1-M1-D2.pep
GRTNFSIFKVNQILRELSREWPGSSYDLLSKNCNHFCDDFCERLGVQKLPGKLKCHIVGLNSFRYIY

SEQ ID NO: 100694 - protein, 50 aa, Gossypium hirsutum
  Clone ID: LIB3196-027-P1-M1-D3.pep
SHMMIQRCWPRSRTLISSARLFRHSLLIQNQLVRNALKDAHRSAYSLRLA

SEQ ID NO: 100695 - protein, 26 aa, Gossypium hirsutum
  Clone ID: LIB3196-027-P1-M1-D4.pep
SRMYASLWKNMTMNSMGYMATVSSNT

SEQ ID NO: 100696 - protein, 105 aa, Gossypium hirsutum
  Clone ID: LIB3196-027-P1-M1-D5.pep
MSEPIRVLVTGAAGQIAYSLLYSIGNGSVFGKDQPIILVLLDITPMMGVLDGVLMELQDCALPLLKDVIATDKEEVAFKDLDVAILVGSMPRREGMERKDLLKAN

SEQ ID NO: 100697 - protein, 53 aa, Gossypium hirsutum
  Clone ID: LIB3196-027-P1-M1-D6.pep
LKLTMGSLYNNIHYAKGTIRLMHKRWGYIPRLSKVNGRTSTNSTNTILGTISK

SEQ ID NO: 100698 - protein, 125 aa, Gossypium hirsutum
  Clone ID: LIB3196-027-P1-M1-E10.pep
MANFSGLDQKFLAGQLLPPFIASFPSGTEEAISRHFHPSLATSPPPLIHKGARRRLPGHVGGREGPTAAARPETRRPEPAPHTRAPAGRPRPGMSAATHSPMMQVASGNGDRDPLPPGWEIKIDP

SEQ ID NO: 100699 - protein, 69 aa, Gossypium hirsutum
  Clone ID: LIB3196-027-P1-M1-E12.pep
AHTLTTLDVKISSMEGFESTATKLLEEKSPYEGIHLYMGSILKRISPSITFTRELPSRLWMERNWFKFL

SEQ ID NO: 100700 - protein, 56 aa, Gossypium hirsutum
  Clone ID: LIB3196-027-P1-M1-E2.pep
TSLKLTIENYSRLCRVLKLTMKILSLKQGTRLCGRATCPCDQLDMVVLMAYMTHTA

SEQ ID NO: 100701 - protein, 126 aa, Gossypium hirsutum
  Clone ID: LIB3196-027-P1-M1-E7.pep
MAVSGASAAFAFPSRCPLRSSCGARPPVPVMATLRVQPEAQAKVDVFREDLCTKTENLLGSYFPKKISELDAFLKEPALNEANLSNLKAPLDIPVPDPVKEKEKEERKKQQEKEDKDEKKKGEDED

SEQ ID NO: 100702 - protein, 104 aa, Gossypium hirsutum
  Clone ID: LIB3196-027-P1-M1-E8.pep
LRAALCKCLLVQKGIVPWRCVCPWHPERGNCPVWVALGRGVRPPTKVSSFPPVFFFFFLYIFFVEFYFIFNSLFSSRHNGTAYLRNGVIVSSLSSGYHRAVGSV

SEQ ID NO: 100703 - protein, 58 aa, Gossypium hirsutum
  Clone ID: LIB3196-027-P1-M1-E9.pep
ICPSTQISHILDRQLPRLPQLLSSESVNLRIAAGETIALLFELARDLEVRGTRMGGAW

SEQ ID NO: 100704 - protein, 73 aa, Gossypium hirsutum
  Clone ID: LIB3196-027-P1-M1-F10.pep
VQDLKHYPYLHSTLSFHLSLSTLSSPYAFPHAPPPIPSYVQPTTYPTKASLYISTFFLVFCMVRTLLLASSST

SEQ ID NO: 100705 - protein, 83 aa, Gossypium hirsutum
  Clone ID: LIB3196-027-P1-M1-F2.pep
PVSKVKKEFPMVLQYYICKCSTPVISQSGINFVSRFCPTNPGTNKNPTCKSIHTGVFISIGAISGPNEGGDSGHWPTRCPDSA

SEQ ID NO: 100706 - protein, 126 aa, Gossypium hirsutum
  Clone ID: LIB3196-027-P1-M1-F4.pep
MLVLTVSAPAEVRRRVLRPVRSWMDRETLALADRHFRGLGGGVPGVGQAPGRVAFVSEPGAFSYADFVRGFLLPNLPCVFSSAFTQGWGSRRRWVTPAGRPDFDHLLRTYGDVVVPVANCGVQEYN

SEQ ID NO: 100707 - protein, 33 aa, Gossypium hirsutum
  Clone ID: LIB3196-027-P1-M1-F5.pep
FFFSFAFTGEKPYHCDWDGCGWKFARSDELTRH

SEQ ID NO: 100708 - protein, 95 aa, Gossypium hirsutum
  unsure (1)..(95): unsure at all Xaa locations
  Clone ID: LIB3196-027-P1-M1-G10.pep
MGQRGWDTPYSVPHSPPVPRCGELLAVRKAFPRLRPPXTAPGPQTAGWAGMSGEALWPAHLAAGPQLLAGLCGISKDESSCSPFSPCCPCTSCSV

SEQ ID NO: 100709 - protein, 127 aa, Gossypium hirsutum
  Clone ID: LIB3196-027-P1-M1-G2.pep
IQHLLKDSPASPAPSDHLPAQGSGFRWKNLSQSPEQQRKVLTLEKEDNQTFGFEIQTYGLHHREEQRVEMVTFVCRVHESSPAQLAGLTPGDTIASVNGLNVEGIRHREIVDIIKASGNVLRLETLY

SEQ ID NO: 100710 - protein, 72 aa, Gossypium hirsutum
  Clone ID: LIB3196-027-P1-M1-G5.pep
IRERIAQRQVIKMDLRNQNEAHNLILIADDRDRAIRQYDVPFFNELNLGIRRSEIEALQFELKPMMFQMLQP

SEQ ID NO: 100711 - protein, 43 aa, Gossypium hirsutum
  Clone ID: LIB3196-027-P1-M1-G6.pep
FCGDTHTHIYLKHQIGHFKYLKFILCQLYLNESVRKYKKQETN

SEQ ID NO: 100712 - protein, 75 aa, Gossypium hirsutum
  Clone ID: LIB3196-027-P1-M1-H11.pep
ENCVMIMFYQHRNRLIHSFNIKIYRPVNSWPPLPSEKAKPVRNRNEPHIRPVYRNRLASQLGGKGKSKPVLLLSD

SEQ ID NO: 100713 - protein, 111 aa, Gossypium hirsutum
  Clone ID: LIB3196-027-P1-M1-H12.pep
MASHRHSGPSSYKVGTMAEKFDCHYCRDPLQGKKYVQKDGHHCCLKCFDKFCANTCVECRKPIGADSKEVHYKNRFWHDTCFRCAKCLHPLANETFVAKDNKILCNKCTTR

SEQ ID NO: 100714 - protein, 30 aa, Gossypium hirsutum
  Clone ID: LIB3196-027-P1-M1-H2.pep
DASPRVPGGSPRTPNRSVSSNVASVSPIPA

SEQ ID NO: 100715 - protein, 113 aa, Gossypium hirsutum
  Clone ID: LIB3196-027-P1-M1-H5.pep
QIPTFLNRGCFNKHVGKVFLVQGHLSPCTFGGTKIVVLLISMPIPWLLIIVVIHFFFFFFFFLPSKLNQITPFFFFNPSLHFYNNTLKSSRYTEIDNYFIFFFSLFIEAKQTH

SEQ ID NO: 100716 - protein, 124 aa, Gossypium hirsutum
  Clone ID: LIB3196-027-P1-M1-H8.pep
RTPPVALNSSRMSCFSRPSMSPTPLDRCRSPGMLEPLGSSRTPMSVLQQAGGSMMDGPGPRIPDHQRTSVPENHAQSRIALALTAISLGTARPPPSMSAAGLAARMSQVPAPVPLMSLRTAPAA

SEQ ID NO: 100717 - protein, 123 aa, Gossypium hirsutum
  Clone ID: LIB3196-027-P1-M1-H9.pep
MQYIQDRIPSWTGAGFVRVPEGAYLEFFIDDIPYSMEYDILIRYEPQLPDHWEKAVITVQRPGKIPPSSRCGNTIPDDDNQVVSLSPGSRYVVLPRPVCFEKGTNYTVRLELPQYTSSDSDVE

SEQ ID NO: 100718 - protein, 115 aa, Gossypium hirsutum
  Clone ID: LIB3196-028-P1-M1-A10.pep
IALKEHSMSNIASVKSPYEAENSGEELDQRYSKAKPMCNTCGKVFSEASSLRRHMRIHKGVKPYVCHLCGKAFTQCNQLKTHVRTHTGEKPYKCELCDKGFAQKCQLVFHSRMHH

SEQ ID NO: 100719 - protein, 103 aa, Gossypium hirsutum
  Clone ID: LIB3196-028-P1-M1-A12.pep
CLPQGAPQQFPYPPNYGTNPGTPPASTSPFSQLAANPEASLANRNSMVSRGMTGNMGGQFGTGINPQIQQNVFQYPGAGMVPQGEASFAPSLSPGSSMVPMPI

SEQ ID NO: 100720 - protein, 86 aa, Gossypium hirsutum
  Clone ID: LIB3196-028-P1-M1-A6.pep
PELELPVSENWRPIYELNCVSPLQSHHLNHQFLSYVTREGYGLYPPVPGCHSRPHHIGCCPEYLAGMVDHPRPLSSHPKLTRCSRE

SEQ ID NO: 100721 - protein, 52 aa, Gossypium hirsutum
  unsure (1)..(52): unsure at all Xaa locations
  Clone ID: LIB3196-028-P1-M1-A8.pep
IRWPGKEVLGISLTGIPGDLRHQLGLQQHLXLLRLHHTRGCHTHPQALRLRA

SEQ ID NO: 100722 - protein, 97 aa, Gossypium hirsutum
  Clone ID: LIB3196-028-P1-M1-B10.pep
SRTRGELSSFLVAMGDISLRKTGVDEKRAKVHTESKTLLEYTRKAIARLTYLKRTLAQLEDDVAPCDAQMEKWETNSGGMASKERQCMQQYNNYKAL

SEQ ID NO: 100723 - protein, 77 aa, Gossypium hirsutum
  unsure (1)..(77): unsure at all Xaa locations
  Clone ID: LIB3196-028-P1-M1-B5.pep
FILSVGEEDEGSINEAAXAVVEAIYFHGEGTFDTSKSDGQFKKTASNNKLRTYLPDFRFTPFKQAVKETCAWFTDNY

SEQ ID NO: 100724 - protein, 41 aa, Gossypium hirsutum
  Clone ID: LIB3196-028-P1-M1-B9.pep
SSVLLVKLVAEINLKEKFLLEIVEKMMEVKNHNSDELIIYF

SEQ ID NO: 100725 - protein, 90 aa, Gossypium hirsutum
  Clone ID: LIB3196-028-P1-M1-C1.pep
STNEKLFFFFSSCPCTYVTIICSQPSCFSKKEQMPTLRFIMLTLSLHLTWISSFLYKHQWVPSFWAPDCSSTVWPNEGDFNYTILSLWGL

SEQ ID NO: 100726 - protein, 102 aa, Gossypium hirsutum
  Clone ID: LIB3196-028-P1-M1-C12.pep
VTGKNFLDCPDELMEKSFDVNFKAHLWTYKAFLPAMIANDHGHLVCISSSAGLVGVNGLADYCASKFAAFGLAESVFVETFVQNQKGIKTTIVCPFFYKNWN

SEQ ID NO: 100727 - protein, 129 aa, Gossypium hirsutum
  Clone ID: LIB3196-028-P1-M1-C3.pep
VRTHTGERPYYCTEPGCGRAFASATNYKNHVRIHTGEKPYVCTVPGCDKRFTEYSSLYKHHVVHTHSKPYNCNHCGKTYKQISTLAMHKRTAHNDTEPIEEEQEAFFEPPPGQGEDVLKGSQITYVTGV

SEQ ID NO: 100728 - protein, 87 aa, Gossypium hirsutum
  Clone ID: LIB3196-028-P1-M1-C8.pep
DHPHGEIDQRYEVVEHKAKTETHKNIRPLHFLLIKSCSAPLSFLCHQTLPVVVTQRQLCLEKATGKMGLILARAWCTENHVIIFKTK

SEQ ID NO: 100729 - protein, 69 aa, Gossypium hirsutum
  Clone ID: LIB3196-028-P1-M1-D10.pep
SLALVRAPCESTLMLGNQCSLIGKRIPGPLFCRGCHEATTHLREVTCSPLAVCTWKGALSGKLLTGTDP

SEQ ID NO: 100730 - protein, 126 aa, Gossypium hirsutum
  Clone ID: LIB3196-028-P1-M1-D8.pep
VFPKPVTALECTFSRSDPTSYAGYIEDLKKFLKPYTLEEQKNLTVCPDGALFEQKGPVYVACQFPISLLQACSGMNDPDFGYSQGNPCILVKMNRIIGLKPEGVPRIDCVFENEDIPNVAGYPHNG

SEQ ID NO: 100731 - protein, 121 aa, Gossypium hirsutum
  Clone ID: LIB3196-028-P1-M1-E10.pep
PRVRKSPVTTPQLQTASFTADTCHVVDHVSSRYPKASIYAVGWSLGGNILVNYLGREHHRCSLSGAVSLCNPFNLVIADENLRKGFNNIYDRALRGGLSRTFDKHASLFEEMHDEYNVQAG

SEQ ID NO: 100732 - protein, 67 aa, Gossypium hirsutum
  unsure (1)..(67): unsure at all Xaa locations
  Clone ID: LIB3196-028-P1-M1-E3.pep
HQERFKVGYLDTVSNTYLRKLCVYKKPHTPLLLDSQNEYFGTVTNESRKFGRGATCLSSXLFVFWCR

SEQ ID NO: 100733 - protein, 38 aa, Gossypium hirsutum
  Clone ID: LIB3196-028-P1-M1-E4.pep
LTKIVDNGFLFLETTKLIVIGGWRNGTSSILTNTSSFI

SEQ ID NO: 100734 - protein, 76 aa, Gossypium hirsutum
  Clone ID: LIB3196-028-P1-M1-E6.pep
IRVGAVQSGQGGRGNAALHVKLTNPGRCPFPLALPWPPAAPHLMFFPPPQDEEPHGPSPCPGNQAAFQTSGAEVDS

SEQ ID NO: 100735 - protein, 68 aa, Gossypium hirsutum
  Clone ID: LIB3196-028-P1-M1-E8.pep
SLLFGIRISCDSLVHCTFSIIVSIKLYYNCLVIILLDFKFFEGWNLSWCLSTARYRDVHVDHIKLGLI

SEQ ID NO: 100736 - protein, 86 aa, Gossypium hirsutum
  Clone ID: LIB3196-028-P1-M1-E9.pep
CFDELQRIHFRSDKGHCVDLPDTGLCKESIPRWYYNPFSEHCARFTYGGCYGNKNNFEEEQQCLESCGGISKKDVFGLRRENPIPN

SEQ ID NO: 100737 - protein, 78 aa, Gossypium hirsutum
  Clone ID: LIB3196-028-P1-M1-F10.pep
LSHLEVWRKKIKSPLTRVLKNSGKHSCMVFFHITLFFFLPSCVLAAQYFINPISHIFFWFPCTIKTKNIFFKKLLPLL

SEQ ID NO: 100738 - protein, 43 aa, Gossypium hirsutum
  Clone ID: LIB3196-028-P1-M1-F2.pep
AIFLLSFPFLFPIVSHILARVGGRQRSYHTNKLLMGIHDFLAF

SEQ ID NO: 100739 - protein, 91 aa, Gossypium hirsutum
  Clone ID: LIB3196-028-P1-M1-F5.pep
LVLFPFLIEPFGGLEVKFQLSSSKCVEPSGMHSCMVFFHMTFFFFFPSCSLASQSLIHPFSHLSLCSPCTITPVNCFLKTLAPAVTESQID

SEQ ID NO: 100740 - protein, 95 aa, Gossypium hirsutum
  unsure (1)..(95): unsure at all Xaa locations
  Clone ID: LIB3196-028-P1-M1-G10.pep
DHACGDNNALDEAIYGSDEFRMYAYKIKRCTRMRSHDWTECPYAHRGEKAXRRDLLKIPYTGIACPAFRNGKCQKGDACEFAHSVLEYWLHPMKY

SEQ ID NO: 100741 - protein, 107 aa, Gossypium hirsutum
  Clone ID: LIB3196-028-P1-M1-G3.pep
SQAAHPHQSPSLVRQQTFPHYEASSATTSPFFKPPAQHLNGSAAFNGIDDGRLASADKHTEVPTGTCPVDPFEAQWAALENKSKQRTNPSPTNPFSSDLQKTFEIEL

SEQ ID NO: 100742 - protein, 116 aa, Gossypium hirsutum
  Clone ID: LIB3196-028-P1-M1-G4.pep
MYLLVVLLSSKVSLFLVSLLVITLSVAEGASWCVASSDASNQALQTALDYACASGADCTPLQSDGLGFLANTIQAHASYAFNSYYQRTAIAPGSCDFAGTATVAKTDPSYGSCMYP

SEQ ID NO: 100743 - protein, 130 aa, Gossypium hirsutum
  Clone ID: LIB3196-028-P1-M1-G5.pep
MECARAGFPRAHRHKLCCLRQELVDAFVEHRYLLFMKLAALQLMQQKASQLETPSSLENGGPSSLESKSEDPPGPEAGSEEEGSSASGLAKVKELAETIAADDGTADPRSREVIRNACKAVGSISSTAFD

SEQ ID NO: 100744 - protein, 104 aa, Gossypium hirsutum
  unsure (1)..(104): unsure at all Xaa locations
  Clone ID: LIB3196-028-P1-M1-G6.pep
KAGSPPCAVPGLPCGPTRSPNTGGGKLCWLGQQLLEEFVEDIYLLFMKLRKLMTHLENGSRLLNXNLCKXGDPYSLDSKSDDPTRPAAGSEEVGSIALGLPKVK

SEQ ID NO: 100745 - protein, 64 aa, Gossypium hirsutum
  Clone ID: LIB3196-028-P1-M1-H10.pep
VTSTPGVEKISCPKVHTELCYSKQLIGAKHVNPPQCYPSLGRKKALLFVSQCRDKEMRNYRIFG

SEQ ID NO: 100746 - protein, 60 aa, Gossypium hirsutum
  Clone ID: LIB3196-028-P1-M1-H11.pep
GLKFNMRFGWGHRSKPYQLDTLRQFQFDISKLFPISHQSKNTRISLKFLIQFLWLNIVFI

SEQ ID NO: 100747 - protein, 83 aa, Gossypium hirsutum
  Clone ID: LIB3196-028-P1-M1-H7.pep
KFTSSLFFLFFNSRKHKTQCSNLITYDLISCIEFEFALMCRTFSILSPPFSLQILLKLSHTSPTLHSFAPPFSTTRWFNVESN

SEQ ID NO: 100748 - protein, 66 aa, Gossypium hirsutum
  Clone ID: LIB3196-028-P1-M1-H8.pep
CHVHSLSLVASGKFNSSRPVEPAHNSHCLSNSMLPIIIYFYKSLESTRSAPDLNSMYLVKEVIYRI

SEQ ID NO: 100749 - protein, 126 aa, Gossypium hirsutum
  Clone ID: LIB3196-029-P1-M1-A10.pep
LRFYDGICKWEEGSPTPVLHVGWATFLVQSLGRFEGQVRQKVRIVSREAEAAEAEEPWGEEAREGRRRGPRRESKPEEPPPPKKPALDKGLGASQGAVSGPPRKPPGTVPGTARGPEGGSTAQVPA

SEQ ID NO: 100750 - protein, 59 aa, Gossypium hirsutum
  Clone ID: LIB3196-029-P1-M1-A11.pep
SLIPKEKQKLLNMFIFSSVKCSHCQGITNALIHNTAGLRKEPRVDSFPFSVAVTNWLLL

SEQ ID NO: 100751 - protein, 108 aa, Gossypium hirsutum
  Clone ID: LIB3196-029-P1-M1-A4.pep
IFFIRRRLLYNRFDLELFTPGDVERECNEELCNYEEAREIFVDEDKTIAFWQKYSAKGPTTKSDGNREKIDVMGLLTGLIAAGVFLVIFGLLGYYLCITKCNRLQHPQ

SEQ ID NO: 100752 - protein, 85 aa, Gossypium hirsutum
  unsure (1)..(85): unsure at all Xaa locations
  Clone ID: LIB3196-029-P1-M1-A5.pep
MRIRSLTLLSFLLLAAQVLLVEGXKKKVKNGLHSKVVSEQKDTLGNTQIKQKNRPGNKSKFVTKDQANCRWAATEQEEGISLKVE

SEQ ID NO: 100753 - protein, 126 aa, Gossypium hirsutum
  Clone ID: LIB3196-029-P1-M1-B10.pep
ILYLTKVGISPDKLRFRQHMENEMAHYACDCWDAESKTSYGWIEIVGCADRSCYDLSCHARATKVPLVAEKPLKEPKTVSVVQFEPNKGAIGKAYKKDAKLVMEYLAICDECYITEMEMLLNEKGE

SEQ ID NO: 100754 - protein, 55 aa, Gossypium hirsutum
  Clone ID: LIB3196-029-P1-M1-B12.pep
KSFTLSISDTFTTMHTYLDLQTEYIIPYVRNIYKRPLVLAICEPCLKYNLMHRVA

SEQ ID NO: 100755 - protein, 82 aa, Gossypium hirsutum
  unsure (1)..(82): unsure at all Xaa locations
  Clone ID: LIB3196-029-P1-M1-B2.pep
GHQSGLPGGGFKVIGLGEPFSSMWIRENLVSLXRAGIFNPQARRIFTLNKFNLPILQRLELNAQRGCLLNQTCLVPKWNLNL

SEQ ID NO: 100756 - protein, 130 aa, Gossypium hirsutum
  unsure (1)..(130): unsure at all Xaa locations
  Clone ID: LIB3196-029-P1-M1-B3.pep
IDKPQAVPVDVHIWQIAQRDYSWHPTTSQAKGPSPQSNKELGNFFRSLWGPHAGWAQXRCCSVLTCTNPTVLRSHQQSAERVPKGWKSRWGTLDKXEFPQAPSPPFPTSLSPSPPSLMLGRGLPVTTSRA

SEQ ID NO: 100757 - protein, 31 aa, Gossypium hirsutum
  Clone ID: LIB3196-029-P1-M1-B5.pep
AIPILCRDHYMYGKVPKVNTLSILPRAMRRD

SEQ ID NO: 100758 - protein, 122 aa, Gossypium hirsutum
  Clone ID: LIB3196-029-P1-M1-B7.pep
ESDKLDGLPNVISAISAQKYVQKGYDAYLAYVLDTKAFELKIQSVLVVCEFPDVFPEELPSLPSDREVEFSIDLISGTTPISIAPYKMALTKLKELKVQLQELIEKSFARPNFSTWGALVLF

SEQ ID NO: 100759 - protein, 127 aa, Gossypium hirsutum
  Clone ID: LIB3196-029-P1-M1-B8.pep
GNRITPSYVAFTPEGERLIGDAAKNQLTSNPENTVFDAKRLIGRTWNDPSVQQDIKFLPFKVVEKKTKPYIQVDIGGGQTKTFAPEEISAMVLTKMKETAEAYLGKKVTHAVVTVPAYFNDAQRQAT

SEQ ID NO: 100760 - protein, 69 aa, Gossypium hirsutum
  Clone ID: LIB3196-029-P1-M1-B9.pep
VYLDTVSETKNYSCYTLVYPHSFTHVVYSRTHYQFPNSQVISWGSSTSIVWLHPVYLNSANTVGEDPRD

SEQ ID NO: 100761 - protein, 60 aa, Gossypium hirsutum
  Clone ID: LIB3196-029-P1-M1-C11.pep
AQLRFNGWHLKGHMYLGCSCKRELSNVYVFEDLWIVFMEENTLGRFMHNLCIFKMTNQVF

SEQ ID NO: 100762 - protein, 121 aa, Gossypium hirsutum
  Clone ID: LIB3196-029-P1-M1-C4.pep
SMHELTVEKLESACMGPCPGSVSFASLGPPSVLPLSCDLAGGSAWGAVLFMCCLVLPGCSGCMMGDRTLAWEPGGLASVGGSTAPGVMGPVCPLQTPSSSVCKVMWPEMISEGPYCSWRQK

SEQ ID NO: 100763 - protein, 127 aa, Gossypium hirsutum
  Clone ID: LIB3196-029-P1-M1-C5.pep
AMICCTVFSRWRHGGSWVQWKSPSLGVQDLGSSPTRPTSLCGPGEALLRASVPSLPRHPPMALLGRNLRPTEVKHLIFEARGQVELLATQPRPPLLGPARPPGPPSPHHRQTCPCCSGSSCTVHAWP

SEQ ID NO: 100764 - protein, 50 aa, Gossypium hirsutum
  Clone ID: LIB3196-029-P1-M1-C7.pep
RNQWVSDMTLVKDALDLSLNSAPQAPFSLVQLTEFYFSSHELNSARLSLV

SEQ ID NO: 100765 - protein, 127 aa, Gossypium hirsutum
  Clone ID: LIB3196-029-P1-M1-C9.pep
SQNMGLPQNRIIFSPVAPKEEHVRRGQLADVCLDTPLCNGHTTGMDVLWAGTPMVTMPGETLASRVAASQLTCLGCLELIAKNRQEYEDIAVKLGTDLEYLKKIRGKVWKQRISSPLFNTKQYTMEL

SEQ ID NO: 100766 - protein, 53 aa, Gossypium hirsutum
  Clone ID: LIB3196-029-P1-M1-D1.pep
DLFGIEGRGGRRRMTESSEELEGVDLLLVLCCPLAWMKGRSRSYRCFLQFSEL

SEQ ID NO: 100767 - protein, 120 aa, Gossypium hirsutum
  Clone ID: LIB3196-029-P1-M1-D11.pep
RLRSCNPYPRPSLRDEAYQWWLSVKEGTQPDQLTWDMLKTTYQNKYVGASYIEARRQEFLNVTQGDCSVVEYEAEFIRLSRYARGMVAIEYERCVRFEDGLRDSLRVLIAPQRERDFSAL

SEQ ID NO: 100768 - protein, 48 aa, Gossypium hirsutum
  Clone ID: LIB3196-029-P1-M1-D12.pep
VKQGHNLIWPKSLTHNHQSSLLFNHHLSKITKYTTKPLITILLHIHSH

SEQ ID NO: 100769 - protein, 61 aa, Gossypium hirsutum
  Clone ID: LIB3196-029-P1-M1-D2.pep
TPKLKSFLIPSNAQIKKNYSENTFEKFFQNNILPRIMNLIYLCLKTRNFIVMLLKYTYLSN

SEQ ID NO: 100770 - protein, 85 aa, Gossypium hirsutum
  Clone ID: LIB3196-029-P1-M1-D4.pep
GVSKGPGTVLTGKQPDPGEQRGIGRPPGPGAMLLAELTQSLPAVIFTQGVSSLGFLILLLPPRIHSPQSSQRSCQHVPLHTLQQP

SEQ ID NO: 100771 - protein, 120 aa, Gossypium hirsutum
  Clone ID: LIB3196-029-P1-M1-D6.pep
VNNNNLPGLASILPHQLSNSPKIAPIGKDQSKTNNTNPIFTNSGAMQGASYQHSRSFSEQKVSASPGPISAFGESTSSSSGIGTLTGPQFLWGSPTPYSERANSAWPTPSVTHPFSSSGQ

SEQ ID NO: 100772 - protein, 116 aa, Gossypium hirsutum
  Clone ID: LIB3196-029-P1-M1-D7.pep
MEATRYQRRIDELLAGSFTEEDEHTILEELNAITQEHIELTEAASEPLSEKIPQNVPDKARPRHAELVAASLCGLLLRYSRWCPKDCGPQRVRVIASPCPGSLEPSTHSAEHEPQP

SEQ ID NO: 100773 - protein, 47 aa, Gossypium hirsutum
  Clone ID: LIB3196-029-P1-M1-D8.pep
RNNYSNIFLHKLYLKKKVGYDIFVRINVFFCSMYDKCMDKFSFWSLN

SEQ ID NO: 100774 - protein, 128 aa, Gossypium hirsutum
  Clone ID: LIB3196-029-P1-M1-E2.pep
HIQRLKAQRPTWPCRRAGSEGLAGAIVSKGPFRRLWRSQSSLEAGEQPVQRQRKWKAVWGNSAVRGTPKAGGESRGWLRGPASSHRQWESHRVCVPGGACPDRPRSSRGRPQGGELGHSPETPSEGAD

SEQ ID NO: 100775 - protein, 127 aa, Gossypium hirsutum
  Clone ID: LIB3196-029-P1-M1-E3.pep
GEERGASIMAEQDVENDLLDYDEEEEPQAPQESTPAPPKKDIKGSYVSIHSSGFRDFLLKPELLRAIVDCGFEHPSEVQHECIPQAILGMDVLCQAKSGMGKTAVFVLATLQQIEPVNGQVTVLVMC

SEQ ID NO: 100776 - protein, 70 aa, Gossypium hirsutum
  Clone ID: LIB3196-029-P1-M1-E4.pep
IRRTWRQKQRHLLLRVHNSSRTLIFNQLETEWDHGVNNYEKMILIIHGHELYSTLFGRKRQANWVRRMSL

SEQ ID NO: 100777 - protein, 96 aa, Gossypium hirsutum
  Clone ID: LIB3196-029-P1-M1-E7.pep
ARDPTVGYAKARVQWRQEISLYKGRKTGSQYGKPVRHGALQSHKRKAQAGSKGPEPPHRQWEPHRACVPVFFIFLFFLLILIFSFYFILFFFSDAW

SEQ ID NO: 100778 - protein, 60 aa, Gossypium hirsutum
  Clone ID: LIB3196-029-P1-M1-E9.pep
IDQLYIYTAKTYVIILLIHNTTQILRKHTNKNIMYYAVPLGNQAPNLSISKHPIGICSRH

SEQ ID NO: 100779 - protein, 121 aa, Gossypium hirsutum
  Clone ID: LIB3196-029-P1-M1-F1.pep
HASDNFDQLLALRREQNPRFINELISMFTNDAEAYIAEITNALSLTEVDFSTIISKLHQLKGSTSGIGGHRMYQACCELRVAADDGDKDRCDELFLRVKEEFNTLKQCLDSISQMRSNIIS

SEQ ID NO: 100780 - protein, 63 aa, Gossypium hirsutum
  Clone ID: LIB3196-029-P1-M1-F10.pep
SSSHTNSYVRWFFSFPLTIQAKYITDAEERYDNLLKTLDPQLSSKYQRRCEEATKEGGKVSGH

SEQ ID NO: 100781 - protein, 63 aa, Gossypium hirsutum
  Clone ID: LIB3196-029-P1-M1-F2.pep
KTHLIVGILASYFTGPCLFPGTHVFFFSRSLSPSCYCRSILLRVDAVILIKADLESEVAIKQL

SEQ ID NO: 100782 - protein, 105 aa, Gossypium hirsutum
  Clone ID: LIB3196-029-P1-M1-F5.pep
WKGFNEGLWEIQNNPHASYSAPPPVSSSDSEAPEANPAGGSEADEDDEDRGVMAVTAVTATAASDRMESDSDSDKSSDNSGLKRKTPALKMSVSKRARKASSDLN

SEQ ID NO: 100783 - protein, 57 aa, Gossypium hirsutum
  Clone ID: LIB3196-029-P1-M1-F6.pep
YSNMLYRFCSLGATGYPIWHKCVVGYAILVCLRAVYNVRRMKLPNISKNVSPLLSEA

SEQ ID NO: 100784 - protein, 86 aa, Gossypium hirsutum
  Clone ID: LIB3196-029-P1-M1-F9.pep
IGDDPSTSFKLNTNLRFFRKKKGNKVIESDHSKIEVFWDLSTAKYDTGPEPVDGFYVLVMVDSEIGLVLGDMAEETIHQQISSGFL

SEQ ID NO: 100785 - protein, 59 aa, Gossypium hirsutum
  Clone ID: LIB3196-029-P1-M1-G10.pep
RHYLTRGNAEARWCPAPISPIGPSRPTKPVYIVAYDLEGALIVDVTVIAKMTCLVTRSA

SEQ ID NO: 100786 - protein, 56 aa, Gossypium hirsutum
  Clone ID: LIB3196-029-P1-M1-G11.pep
KCRVSAPELRQGEKIKVQALRPSIICTSCCDVVKILGRSSTFTAHHQTPTHALTSS

SEQ ID NO: 100787 - protein, 104 aa, Gossypium hirsutum
  Clone ID: LIB3196-029-P1-M1-G12.pep
MSAGVSLLTMLFLELFMLFACFHECLSSPVDQLKSYILTQRGADAFLPEITPSAAPQPFLPLLAPSPLSPFTNSTIPKLSRLCMLNFTASQSLMTMTSTDCWAA

SEQ ID NO: 100788 - protein, 109 aa, Gossypium hirsutum
  unsure (1)..(109): unsure at all Xaa locations
  Clone ID: LIB3196-029-P1-M1-G3.pep
FDGASNALWHGIGAVLVSPEGNHYPFTARLNFFCTNNIAKYEACIMGLCAAIERNIEILKVYGDSALVIYQILXDWQVKDSKLVKYSDLVARLIKEFKEITFNYFPREE

SEQ ID NO: 100789 - protein, 118 aa, Gossypium hirsutum
  Clone ID: LIB3196-029-P1-M1-G4.pep
PGPASPPRVPPREPLSPQGSRTPSPLVPPGSSPLPPRLSSSPGKTMPTTQSFASDPKYATPQVIQAPGPRAGPCILPIVRDGKKVSSTHYYLLPERPSYLERYQRFLREAQSPEEPAP

SEQ ID NO: 100790 - protein, 41 aa, Gossypium hirsutum
  unsure (1)..(41): unsure at all Xaa locations
  Clone ID: LIB3196-029-P1-M1-G5.pep
IPSWGSGADLWGSDSDTXFEKPRMDDGLLEVVGVTGVVHMG

SEQ ID NO: 100791 - protein, 120 aa, Gossypium hirsutum
  unsure (1)..(120): unsure at all Xaa locations
  Clone ID: LIB3196-029-P1-M1-G6.pep
DMQLICEAYHLMKDVLGMAQDEMAQAFEDWNKTELDSFLIEITANILKFQDTDGKHLLXKIRDSAVQKGTXKWTDIFALEYGVPVTLIGEAVFARCLSSLKDERIQASXKLKGPQKFQFD

SEQ ID NO: 100792 - protein, 38 aa, Gossypium hirsutum
  Clone ID: LIB3196-029-P1-M1-G8.pep
WSHGRVARPCDSQDQEIAHVSGSVGIRSRDTQLCPSLC

SEQ ID NO: 100793 - protein, 64 aa, Gossypium hirsutum
  Clone ID: LIB3196-029-P1-M1-G9.pep
EVKTWNWIEFLQIKTFYDLNCTLYLIISRLFNPNSLIHVQCNWNFMAIFNHSSLHYCIENFFSK

SEQ ID NO: 100794 - protein, 73 aa, Gossypium hirsutum
  Clone ID: LIB3196-029-P1-M1-H11.pep
STQLGEVEGPIAYAVVGQWALCSIQASAPVSIFVEGSRKVSLMPPHLPSGCPSGSVGRAPDIGGVVQACFLSQ

SEQ ID NO: 100795 - protein, 87 aa, Gossypium hirsutum
  unsure (1)..(87): unsure at all Xaa locations
  Clone ID: LIB3196-029-P1-M1-H12.pep
MQSHKGQGPPHGISSEVQASGGGGTDGGWHSPETVLTRGLGSLSALQLSTVGGRLGGVXXHXSLTTPCGSQGGRVRPFLSHQAILVL

SEQ ID NO: 100796 - protein, 121 aa, Gossypium hirsutum
  Clone ID: LIB3196-029-P1-M1-H2.pep
GWSSFANISCDAYYELIYEFYTTFSFNVSALQTIETQSIICFRLLGKDFQMSVSNFNIAMGFVDPDNIQSDSYHTALLDILSDFNAQDAYRVLTNSNQLYNPKTTKDLLVHEPTLRYIHRF

SEQ ID NO: 100797 - protein, 71 aa, Gossypium hirsutum
  Clone ID: LIB3196-029-P1-M1-H3.pep
NKVRKNTRLPPRNNRDLLSRPSISITTSCYPLPSICVRDPVSDWFESLAQCLHWNVRKKQAHFEEEEEGEG

SEQ ID NO: 100798 - protein, 95 aa, Gossypium hirsutum
  unsure (1)..(95): unsure at all Xaa locations
  Clone ID: LIB3196-029-P1-M1-H5.pep
CLHVLRVEKLKPVPVAPENQGDFFSVDYYLVLHNGPXEVSHLHLWIGEQXSRHEQGACAVLAVHLNTLVXERTVQHREAQANESDLFMSYFPQGL

SEQ ID NO: 100799 - protein, 44 aa, Gossypium hirsutum
  Clone ID: LIB3196-029-P1-M1-H6.pep
SYYGYDDGYAVRGRGGGRGGLGAPPPPRWRGAPPTKSTAVYLQM

SEQ ID NO: 100800 - protein, 48 aa, Gossypium hirsutum
  Clone ID: LIB3196-029-P1-M1-H8.pep
HSFGPLDYESLQQELALKETVWKKVSPESNEDISTTVVYRMESLGEKS

SEQ ID NO: 100801 - protein, 37 aa, Gossypium hirsutum
  Clone ID: LIB3196-029-P1-M1-H9.pep
QMTKMPLLTKLPKFSMHAIFVQKLKNWASCSLGPFKY

SEQ ID NO: 100802 - protein, 47 aa, Gossypium hirsutum
  Clone ID: LIB3196-030-P1-M1-A1.pep
AYSGHVCFLHSYQFSSQYEPIWVFTRLSHMTVSMCMCPSPGHNTHMS

SEQ ID NO: 100803 - protein, 118 aa, Gossypium hirsutum
  Clone ID: LIB3196-030-P1-M1-A11.pep
PTRPEIRVMASALSKEMGMMEAQLNRWKETAHEAISLHEEAQALKALLSDKTNLQKRLAEECAEQIAEIKSLNDMIEKLQKEKLELQIFLDMYGQEGYDDRDVMEIRESKNRAHSQAE

SEQ ID NO: 100804 - protein, 55 aa, Gossypium hirsutum
  Clone ID: LIB3196-030-P1-M1-A4.pep
ATFPNMGGKDRCVYKGGFHYNVFALFTSLFCVASFLEYLTGPELAFLNYVSRLWP

SEQ ID NO: 100805 - protein, 49 aa, Gossypium hirsutum
  unsure (1)..(49): unsure at all Xaa locations
  Clone ID: LIB3196-030-P1-M1-A8.pep
MLSKNTQTYXTFTISQSVLVTNLKPATIKVYDYYLPDEQATIQYSDPCE

SEQ ID NO: 100806 - protein, 107 aa, Gossypium hirsutum
  Clone ID: LIB3196-030-P1-M1-B1.pep
MFSRAGVAGLSAWTLQPQWIQVRNMATLKDITRRLKSIKNIQKITKSMKMVAAAKYARAERELKPARIYGLGSLALYEKADIKVPEDKKKHLLIGVSSDRGLCGAIH

SEQ ID NO: 100807 - protein, 73 aa, Gossypium hirsutum
  Clone ID: LIB3196-030-P1-M1-B11.pep
MAGAAPTTAFGQAVIGPPGSGKTTYCLGMSEFLRALGRRVAVVNLDPANEGLPYECAVDVGELVGLGDVMDAL

SEQ ID NO: 100808 - protein, 45 aa, Gossypium hirsutum
  Clone ID: LIB3196-030-P1-M1-B12.pep
TQIQFQIKSHQNFTYRRIPSILSILKLRLKSGSTVSISSQQKHSS

SEQ ID NO: 100809 - protein, 114 aa, Gossypium hirsutum
  Clone ID: LIB3196-030-P1-M1-B5.pep
LEPRHRNKNIMMIIIIIVTIISFTLPTTGPSCAIQASSISAPQPVVSLLAEAEGECRQAFRCSVLGARQYPPAYSKDIWVDPPLIPPPMLQEPFIQIPDIAARYQRAFLFQLVI

SEQ ID NO: 100810 - protein, 76 aa, Gossypium hirsutum
  unsure (1)..(76): unsure at all Xaa locations
  Clone ID: LIB3196-030-P1-M1-C11.pep
MTEQAISFAKDFLAGGIAAAISKTAVAPIERVKLLLQVQHASKQIAADKQYKGIVDCIVRIPKEXGVLSFWRGNLA

SEQ ID NO: 100811 - protein, 44 aa, Gossypium hirsutum
  Clone ID: LIB3196-030-P1-M1-C2.pep
MAAGWLTTWSQNSVTFQEVAVDFSQEEWALLDPAQKNLYKDVML

SEQ ID NO: 100812 - protein, 64 aa, Gossypium hirsutum
  Clone ID: LIB3196-030-P1-M1-C3.pep
FLFVNLYYKVFNHQFIPFVAFELYITLIWILYFYIGGNEEGIDNPSISLFFLIPYLFKVREEEI

SEQ ID NO: 100813 - protein, 124 aa, Gossypium hirsutum
  unsure (1)..(124): unsure at all Xaa locations
  Clone ID: LIB3196-030-P1-M1-C5.pep
IGMKGTQLSSGASKSPPAAEPGGPQEQAGREEAFNMDSAYSEQAAVLLQKSRPSQGGTSAWGKCSLPKFTIPKGRLGVTRIGDLSLQDMRKVPSLALIELTALCDVLGLDLKRSKAXKWKAAET

SEQ ID NO: 100814 - protein, 93 aa, Gossypium hirsutum
  unsure (1)..(93): unsure at all Xaa locations
  Clone ID: LIB3196-030-P1-M1-C7.pep
HYRTSGNEKARWCPAAISGISTSTTIRSHSSCRRGFSAGSDRLPGVRRSGLSSASGSRSRGMGCLGRACGRAGCGNPNLYGLXGSKRISIGGG

SEQ ID NO: 100815 - protein, 72 aa, Gossypium hirsutum
  Clone ID: LIB3196-030-P1-M1-D1.pep
YYLTQLHNTKTNTNKKGLGSWASFTFLPFFFLISQKGSHLLDIKSAVERKEGKKPTNKCGIYFTKLCIFPLN

SEQ ID NO: 100816 - protein, 123 aa, Gossypium hirsutum
  Clone ID: LIB3196-030-P1-M1-D10.pep
CEAGSHTFQRMYGCDLGPDGRLLRGYSQYAYDGRDYIALNGDLRSWTAADMAAQNTQRKWEAAGVAERFRTYVEGRCVEWLRRYLENGKETLQRADPPKTHVTHHPVSDHEATLRCWALGFYP

SEQ ID NO: 100817 - protein, 122 aa, Gossypium hirsutum
  Clone ID: LIB3196-030-P1-M1-D12.pep
CTALFLVVLFFSNSLSHSLLPSFLLVTHSRRNSDSEDEDSGSARSATVFSRAQKAERRLDGSCQRPSLLLELATKRAVKSPDSHAARRSSSASDEPRCPCLHEPACWGSGLRHPSARFCCSI

SEQ ID NO: 100818 - protein, 127 aa, Gossypium hirsutum
  Clone ID: LIB3196-030-P1-M1-D3.pep
FPSVGKSTFLSLMTSTASEAASYEFTTLTCIPGVIEYKGANIQLLDLPGIIEGAAQGKGRGRQVIAVARTADVVIMMLDATKGEVQRSLLEKELESVGIRLNKHKPNIYFKPKKGGGISFNSTVTLT

SEQ ID NO: 100819 - protein, 44 aa, Gossypium hirsutum
  Clone ID: LIB3196-030-P1-M1-D6.pep
PTRPQVYRSNINIVKFTTKHFGSIFKDRTQGIAKLVKTIIKLII

SEQ ID NO: 100820 - protein, 125 aa, Gossypium hirsutum
  Clone ID: LIB3196-030-P1-M1-D7.pep
MPVFDFPPEFYEHAKALWEDEGVRACYERSNEYQLIDCAQYFLDKIDVIKQADYVPSDQDLLRCRVLTSGIFETKFQVDKVNFHMFDVGGQRDERRKWIQCFNDVTAIIFVVASSSYNMVIREDN

SEQ ID NO: 100821 - protein, 49 aa, Gossypium hirsutum
  Clone ID: LIB3196-030-P1-M1-D9.pep
LMFMIDILDAVFNTQHEQLDYPVCVRHKTYKAVWTEKAPYNLPRTNKTI

SEQ ID NO: 100822 - protein, 84 aa, Gossypium hirsutum
  unsure (1)..(84): unsure at all Xaa locations
  Clone ID: LIB3196-030-P1-M1-E1.pep
MPLASPIQHHEVTRGVAPSMALRDGVCRIPPSAEFTTQCTDSQAPQMKRAPKCCYLAAVVQCPHHCPVLGCXSGCRCCCYCVFD

SEQ ID NO: 100823 - protein, 54 aa, Gossypium hirsutum
  Clone ID: LIB3196-030-P1-M1-E11.pep
LNSSKFFKNSHYAPKILKKKSLVRPPTLTPQIPHCLTTSYYTPPIDEPTTIIST

SEQ ID NO: 100824 - protein, 61 aa, Gossypium hirsutum
  Clone ID: LIB3196-030-P1-M1-E2.pep
VTDETDLLCCVSMTIPLSAFCPPENCRNHSFTDNLSLFIFILFSLLLLYYSFSGFLGGQKG

SEQ ID NO: 100825 - protein, 118 aa, Gossypium hirsutum
  Clone ID: LIB3196-030-P1-M1-E5.pep
CSSEEERKKLLQCSCCGKLVHPACLVPPITDLVPEKWSCYSCKEKTDEYMQARRAYIEELLKRYEQALQRKSKILDIIRSLDLPNNPLDDIIDQLGSPDKVAEMTGRRGMLVRASSGK

SEQ ID NO: 100826 - protein, 118 aa, Gossypium hirsutum
  Clone ID: LIB3196-030-P1-M1-E6.pep
GKPITLEEAEPIISRLSSLIYKAEDAHYDIATTIVTMKSHIQALEERANAATVQSTVFGQLVAEAFPKSLHCLLLKLSADWLKRPPLQDLANERRNSPRLVDNNLYHFCIFSDNVLAT

SEQ ID NO: 100827 - protein, 109 aa, Gossypium hirsutum
  Clone ID: LIB3196-030-P1-M1-E8.pep
DESEHAEHLRIVLKTLCEKQLFAKFSKCEFWLREVGFLGLVVLVEGIRVDPSKISTAVEWKPLRNVFEVRRFLGLAGYYRRFAKGFSMIATPMARLLQKDVKFEWSEKC

SEQ ID NO: 100828 - protein, 123 aa, Gossypium hirsutum
  Clone ID: LIB3196-030-P1-M1-E9.pep
MPKPFSQFWQPLLRGLHSQNFTQALLERMLSELPALGISGIRPTYILRWTVELIVANTKTGRNARRFSAGQWEARRGWRLFNCSASLDWPRMVESCLGSPCWASPQLLRIIFKAMGQGLPDEE

SEQ ID NO: 100829 - protein, 48 aa, Gossypium hirsutum
  Clone ID: LIB3196-030-P1-M1-F1.pep
ARPRTLPRSWLLRLLDPSTFQFMFDPWLQPIHEIEECLILTKIHNLEY

SEQ ID NO: 100830 - protein, 48 aa, Gossypium hirsutum
  Clone ID: LIB3196-030-P1-M1-F12.pep
SVKNMSPYSNDFPQAQIIWLSWLLNSYPNYSSCFLELLHFWEHHFIDR

SEQ ID NO: 100831 - protein, 59 aa, Gossypium hirsutum
  Clone ID: LIB3196-030-P1-M1-F8.pep
MVQWKRLCRQHYLWALGCYMLLAIVALKLSLRLKCDSDHLGLESREFQSQYCRNILFNS

SEQ ID NO: 100832 - protein, 88 aa, Gossypium hirsutum
  Clone ID: LIB3196-030-P1-M1-G1.pep
KVSSLPSSPIRDSQAPLKLLATTVSEHDLLPNPTQVPHNSTVMPNSCCLLDSHLFHLLLTFLALSMSGDLTILIFKNICNLLCIHLLD

SEQ ID NO: 100833 - protein, 117 aa, Gossypium hirsutum
  Clone ID: LIB3196-030-P1-M1-G10.pep
FTDLNILLNLVSIGTLFVFYMVSNAVIYRRYVMVGTTKPWPTLSFLCLFSLTSTIFTLVWHFTPPGKPKPFLLGACVVIAISILQVFHCMVPQARKPAFWGVPFMPWLPSISIFLNV

SEQ ID NO: 100834 - protein, 82 aa, Gossypium hirsutum
  Clone ID: LIB3196-030-P1-M1-G11.pep
VPAKPFCHSMTSTLNITFHPSTCKTFTFSFLVFLLNTFSSLFIYIHHEQKCIQIPDLVIFSICGTHPHKDILAISHSTKSIF

SEQ ID NO: 100835 - protein, 74 aa, Gossypium hirsutum
  Clone ID: LIB3196-030-P1-M1-G4.pep
EELLRGPSAAQLHPPDVSPLPGWGLTPSAKALVRPLPGPKRCSFTEARGERRPSSPRLPMSDALPRKHLWPLGG

SEQ ID NO: 100836 - protein, 99 aa, Gossypium hirsutum
  Clone ID: LIB3196-030-P1-M1-G6.pep
GVVHEDLRLLLETHLPSKKKKVLLGVGDPKIGAAIQEELGYNCQTGGVIAEILRGVRLHFHNLVKGLTDLSACKAQLGLGHSYSRAKVKFNVNRVDNMI

SEQ ID NO: 100837 - protein, 99 aa, Gossypium hirsutum
  Clone ID: LIB3196-030-P1-M1-G7.pep
MASNVKPVLGYAIFYVKDVAKSVDFYAKAFGYNVRRLDESHRWGELESGQTTIAFTPKHQHETDELTGEVQVPKSDVHRPPLELCFIYYDVDAAFTRAV

SEQ ID NO: 100838 - protein, 63 aa, Gossypium hirsutum
  Clone ID: LIB3196-030-P1-M1-G8.pep
PLLNLIISLTLGILVIFQLQIFRPIDMDSLDPDVDKPIKYLKSEKKMRFRFVFKFFNAILCCS

SEQ ID NO: 100839 - protein, 55 aa, Gossypium hirsutum
  Clone ID: LIB3196-030-P1-M1-H2.pep
LDTELRRLFRERYLLDPKGVVGVRYEAGTIQIWLGGNTLQKGACDPAICDTHYYF

SEQ ID NO: 100840 - protein, 56 aa, Gossypium hirsutum
  Clone ID: LIB3196-030-P1-M1-H3.pep
QPCFTLSRVSISATFPPEICSSSLPLRRPQVITSLSTFFVTSCVTFFFSSNSTIMA

SEQ ID NO: 100841 - protein, 86 aa, Gossypium hirsutum
  Clone ID: LIB3196-030-P1-M1-H4.pep
RVLYMVGTHGSVSARVVTTGHSDLPTLSIGDTRPYHTPIGQVMCHTWSRHMPVCLPMWTKTRLFTKPFYHPHLHQPTQHQPKPIQA

SEQ ID NO: 100842 - protein, 118 aa, Gossypium hirsutum
  unsure (1)..(118): unsure at all Xaa locations
  Clone ID: LIB3196-030-P1-M1-H5.pep
LVISKIDLYSGYHQLKVKEVDVHKTAFRTRYGHYEFLVMPFGLTNALATFIDLMNQFFXPYLDYFILVFINDILVYSKTEDDHDEHFKVVLQMLREKKLYAKLRKCEFWLREVTFLGH

SEQ ID NO: 100843 - protein, 69 aa, Gossypium hirsutum
  Clone ID: LIB3196-030-P1-M1-H7.pep
IRSCKHMRLYKNSNRSSVCQSIFQFGLQMKSKCQAFRLCVRFLVRCSCKRVPLVSKPLMFCCSNRPMSY

SEQ ID NO: 100844 - protein, 68 aa, Gossypium hirsutum
  unsure (1)..(68): unsure at all Xaa locations
  Clone ID: LIB3196-030-P1-M1-H8.pep
MALLTAFSSSVAVTDKDIFELSTFLDSSKAPQHDRNELPEQRGVGGGLDXPFDQSGLGAEESLSLLDD

SEQ ID NO: 100845 - protein, 66 aa, Gossypium hirsutum
  Clone ID: LIB3196-030-P1-M1-H9.pep
RHTSICATRCQFSYQESHNSVTSPLTNFTQFLNGTRPCEPPICQPVWSKNLPETAANHENSTQNYP

SEQ ID NO: 100846 - protein, 77 aa, Gossypium hirsutum
  Clone ID: LIB3196-031-P1-M1-A11.pep
YFLIFLYYFNKKPATAPAFLKSAVPLISHILTYLLDHVPPSSPHDLLFFLTRIAMIYFSFSLTFIILACGLILILLV

SEQ ID NO: 100847 - protein, 95 aa, Gossypium hirsutum
  Clone ID: LIB3196-031-P1-M1-A3.pep
SITKISNIKIPMARTILQGKWIRNTSVPGPDNIPLRMNAPLKTISSKEALVAAKGFVYVCCLDSLLSLYPPQEFSLCSREGGEREAGRVVGFWPF

SEQ ID NO: 100848 - protein, 124 aa, Gossypium hirsutum
  unsure (1)..(124): unsure at all Xaa locations
  Clone ID: LIB3196-031-P1-M1-A4.pep
KRHVPGAQVALQHNLGLGGAVVVTLYKMGFPEAASSFRTHQIEAGPTNSASDGFKANLVFKEIEKKLDEEGEQFVKKIVGICAFKVKDGPGGKEATWVVDVKNGKXSVLPNSDKKADCTITMAD

SEQ ID NO: 100849 - protein, 27 aa, Gossypium hirsutum
  Clone ID: LIB3196-031-P1-M1-B1.pep
SIYLFFKYKKPKNLFFMFNRNILYLDY

SEQ ID NO: 100850 - protein, 73 aa, Gossypium hirsutum
  Clone ID: LIB3196-031-P1-M1-B12.pep
FATTATEISTISYNRLLDISDSKYNGKHHKLTYHNRPSIHMALEILPLPKLVTRSQSSRSTCPSLRSAASRYT

SEQ ID NO: 100851 - protein, 80 aa, Gossypium hirsutum
  Clone ID: LIB3196-031-P1-M1-B2.pep
GKCLTVLNSVRHFPENDPLLFAFPFFLSFPFSLLLPFRTLHYTPSHGGVLPREISVSTFDFPYGPNLLEQAVLKATPGFH

SEQ ID NO: 100852 - protein, 67 aa, Gossypium hirsutum
  Clone ID: LIB3196-031-P1-M1-B5.pep
HWSNTHQFNNLTIVQRLDHSPSKLPPRKFNFVTQETLLVAYRNNAHIYTPNLNKFILYQTHKTFSYP

SEQ ID NO: 100853 - protein, 60 aa, Gossypium hirsutum
  Clone ID: LIB3196-031-P1-M1-B7.pep
CMVYMARDMGVCPDRVTHCFRCENQAQAVWQDVGSEKIFLRLRRVLNSDIGFLYLGMTEF

SEQ ID NO: 100854 - protein, 94 aa, Gossypium hirsutum
  Clone ID: LIB3196-031-P1-M1-B8.pep
MAQRLLLRRFLASVISRNPSQGRWPPLTSRALQTPQCSPGGLTVTLNPARTIYTTRISLTTFNIQDGPDFQDRVVNSETPVVVDFHAQWCGPCK

SEQ ID NO: 100855 - protein, 118 aa, Gossypium hirsutum
  Clone ID: LIB3196-031-P1-M1-C10.pep
AESGPQRALSSPTAAAGLVTITPREEPQLPQPAPVTITATMSSEAETQQPPAAPPAAPALSAADTKPGTTGSGAGSGGPGGLTSAAPAGGDKKVIATKVLGTVKWFNVRNGYGFINRN

SEQ ID NO: 100856 - protein, 58 aa, Gossypium hirsutum
  Clone ID: LIB3196-031-P1-M1-C2.pep
VSECAKIKPLKIFQGIHLLSPFCLIQVATHCSLIPIMLISLFKKVETWRLLNTLSDAW

SEQ ID NO: 100857 - protein, 39 aa, Gossypium hirsutum
  Clone ID: LIB3196-031-P1-M1-C3.pep
FIYLFNSAQISVSKLICLNLNIFNNFFNLIDCVLFITSI

SEQ ID NO: 100858 - protein, 55 aa, Gossypium hirsutum
  Clone ID: LIB3196-031-P1-M1-C4.pep
KMNLLAYHSSITINVFLSNHFRLYASVWGFLLKDYDQAVCSVCSLFHLNFIIRFE

SEQ ID NO: 100859 - protein, 59 aa, Gossypium hirsutum
  Clone ID: LIB3196-031-P1-M1-C6.pep
HKKKMNLIKIYTKNCFFMFLLLLSIKSRREHLRSYLVTLVSHTSLNFLSLPTSNILILR

SEQ ID NO: 100860 - protein, 88 aa, Gossypium hirsutum
  Clone ID: LIB3196-031-P1-M1-C8.pep
GRVGLQMGILISVDLVLHRPVHGPGRARIFSPFTRPGPGPKYGPEILPRPGPKKKYGARARPGPFLIKIKIKIIFLIKLKLIVIKINW

SEQ ID NO: 100861 - protein, 68 aa, Gossypium hirsutum
  Clone ID: LIB3196-031-P1-M1-D1.pep
VYLFMYNLLSFKLTPSPFLFSYSAAYLAQRPTEVRDIDYTINQSIRYSLIYIFKYGMYRELDLRFVYY

SEQ ID NO: 100862 - protein, 110 aa, Gossypium hirsutum
  Clone ID: LIB3196-031-P1-M1-D10.pep
MAAAAAAATTGAAGRRGSGPGRRRHLVPGAGGEAGEGAPGGAGDYGNGLESEELEPEELLLEPEPEPEPEEEPPRPRAPPGAPGPGPGSGAPGSQEEEEEPGLVEGDPGD

SEQ ID NO: 100863 - protein, 128 aa, Gossypium hirsutum
  unsure (1)..(128): unsure at all Xaa locations
  Clone ID: LIB3196-031-P1-M1-D12.pep
FLHAQEEVKRIQSIPLVIGQFLEAVDQNTAIVGSTTGSNYYVRILSTIDRELLKPNXSVALHKHSNALVDVLPPEADSSIMMLTSDQKPDVMYADIGGMDIQXPEVREAVELPLTHFELYKQIGIDPP

SEQ ID NO: 100864 - protein, 122 aa, Gossypium hirsutum
  Clone ID: LIB3196-031-P1-M1-D8.pep
KANGGPEPPLPREATQPGHSHDASQGWLTGPALAPYVRPRLASVSPLLPGLGSDRAVISLYRNGESGALQNQSHSQPTCPGTSRQGPRRDVSHGTAVRTFSLSSGKKRKLCTKTPSGADAFT

SEQ ID NO: 100865 - protein, 101 aa, Gossypium hirsutum
  Clone ID: LIB3196-031-P1-M1-E10.pep
MALSDADVQKQIKHMMAFIEQEANEKAEEIDAKAEEEFNIEKGRLVQTQRLKIMEYYEKKEKQIEQQKKIQMSNLMNQARLKVLRARDDLITDLLNEANRD

SEQ ID NO: 100866 - protein, 134 aa, Gossypium hirsutum
  Clone ID: LIB3196-031-P1-M1-E3.pep
IASPPPSAAAPCTPAPLLCQELATTSTMPYQYPALTPEQKKELSDIAHRIVAPGKGILAADESTGSIAKRLQSIGTENTEENRRFYRQLLLTADDRVNPCIGGVILFHETLYQKADDGRPFPQVIKSKGGVVGI

SEQ ID NO: 100867 - protein, 123 aa, Gossypium hirsutum
  Clone ID: LIB3196-031-P1-M1-E4.pep
RLAADVEDVKCRIHEYEKGKTEFSPEEDPHVIADCIKYVIRELPSCPVPASCCNALLEAYRTLGGDRVNTMREAVSDAFPEPNRRLLQRILMMMRAVASNKTLNRMSSSAVAACMAPLILRPL

SEQ ID NO: 100868 - protein, 70 aa, Gossypium hirsutum
  Clone ID: LIB3196-031-P1-M1-E5.pep
RVFQSFQEVPTFSTSSQPNPTQPYFQIFIIGEKKMVEIGLMITCLFFLRFLGLTGARQKSIEYPKPYYTT

SEQ ID NO: 100869 - protein, 121 aa, Gossypium hirsutum
  Clone ID: LIB3196-031-P1-M1-F1.pep
PTRPVNPLCVVVDDSIFLTLLAANLSKTSHVLSLFPGLREKGAQYLETVVKANCFSMDRVEVPEKRKPCLTLQDTRGKKVDMLIGEPYYYANEGMLPWQNLRFWKDRTLLDPVLSEDALIM

SEQ ID NO: 100870 - protein, 132 aa, Gossypium hirsutum
  Clone ID: LIB3196-031-P1-M1-F10.pep
ILYIADRKAREAVEMRAQVERKMAQKEKEKHEEKLREMAQKARERRAGIKTHVEKEDGEARERDEIRHDRRKERQHDRNLSRAAPDKRSKLQRNENRDISEVIALGVPNPRTSNEVQYDQRLFNQSKGMDSG

SEQ ID NO: 100871 - protein, 48 aa, Gossypium hirsutum
  Clone ID: LIB3196-031-P1-M1-F11.pep
KVLKGTFNSFCRWFFYHIFNLKQNSHSSILFLLGIGSLRVANKTKCVK

SEQ ID NO: 100872 - protein, 101 aa, Gossypium hirsutum
  unsure (1)..(101): unsure at all Xaa locations
  Clone ID: LIB3196-031-P1-M1-F12.pep
AGVRVIDYVVDRVSPTASMIDYFNPKHVDIGWVIKPFMAMNRPNVTITGRADQIYTREMTDPDAPRSHXPTILKWVDWTVYDIPVRTNPTQWIGNAGIHYS

SEQ ID NO: 100873 - protein, 127 aa, Gossypium hirsutum
  Clone ID: LIB3196-031-P1-M1-F3.pep
QSEDFEEIFLSKDVFGNSSAFPSCESPFHFVLQRSPSFGHRTPIFSSPATSPGRHQKQDKESYNEVESLKKAQVVEEEEQFSPVSVLDPPFEDDDDRHVNVDDNDGNDSFDLECSYAVVQRTKQQLL

SEQ ID NO: 100874 - protein, 80 aa, Gossypium hirsutum
  Clone ID: LIB3196-031-P1-M1-F8.pep
SSSIGLAPYLLAYERRRIEISSFTLDWSSATICSPFGWTCGSKGFHSTVYVSIFSYNLSGRAWNLDMKSSHPKNRDFRGA

SEQ ID NO: 100875 - protein, 48 aa, Gossypium hirsutum
  Clone ID: LIB3196-031-P1-M1-G3.pep
WRIQPLSLPSPYGPGYPQPPSQPRPYPPGPPFSPVISPPDPDLPNPAP

SEQ ID NO: 100876 - protein, 76 aa, Gossypium hirsutum
  unsure (1)..(76): unsure at all Xaa locations
  Clone ID: LIB3196-031-P1-M1-G5.pep
NFYGKNIYESSFRKNLRILXXSSLALGKNNLVTLTQTDSSNFTYKKIVKVRIMLFXCVIHIKDEEWRGGGGKLGNI

SEQ ID NO: 100877 - protein, 73 aa, Gossypium hirsutum
  Clone ID: LIB3196-031-P1-M1-G9.pep
YLPLCTQECFVDLLYAMCFNYAWLTLLFIYMQLTKLYDYSLSFPFSYSAAKIVSGIKGCRRHRSHYHLKLWYS

SEQ ID NO: 100878 - protein, 125 aa, Gossypium hirsutum
  Clone ID: LIB3196-031-P1-M1-H1.pep
SAHFIPIRTDYSLDKLVELYVSQIVRLHGVPRFTSRFWKKWKEELGTKLHFSTAFHPQTDGQSERIIQILEDMLRCCILEFSALWERYLPLVEFAYNNSFQSSINMAPYEALYDRKCRTPLFWTE

SEQ ID NO: 100879 - protein, 74 aa, Gossypium hirsutum
  Clone ID: LIB3196-031-P1-M1-H10.pep
KLYRYFLSTYTTMTGISCMSQQHILIQLTIEFFNDNNKITHTMHQMIFTTLTLEKKGHYVLYNKSINFISSQFS

SEQ ID NO: 100880 - protein, 80 aa, Gossypium hirsutum
  Clone ID: LIB3196-031-P1-M1-H12.pep
QNLAPRTMYDYAKPYLTRNESSIARLAIATNTFELKPNTIQMIQQFVQFDGLQDEDPNAHLANLLEFCDTFKINGVSDDA

SEQ ID NO: 100881 - protein, 42 aa, Gossypium hirsutum
  Clone ID: LIB3196-031-P1-M1-H2.pep
LHSTGKYFHHIYHLLTFFFIFHSHPCTFVFEKYIYIIWKNIM

SEQ ID NO: 100882 - protein, 73 aa, Gossypium hirsutum
  Clone ID: LIB3196-031-P1-M1-H3.pep
MNLRNWFLGVYISKNRSLIPHIVHLRHKLTPGQNDQFAPNLSHFLQFSPKARIIKCTKCLGYPSLGEYFSCIY

SEQ ID NO: 100883 - protein, 67 aa, Gossypium hirsutum
  Clone ID: LIB3196-031-P1-M1-H4.pep
LGLSILLCMEGTGGHSRLGAHRTLFLTVMEDGRRKMDCLINTAVSSEAISVFINHLFCVSGSYLICI

SEQ ID NO: 100884 - protein, 47 aa, Gossypium hirsutum
  Clone ID: LIB3196-031-P1-M1-H5.pep
FYSGDKTMIMKRDYKGLNATSPPPAFHYCGEKAALDIVFPDWTFWGW

SEQ ID NO: 100885 - protein, 89 aa, Gossypium hirsutum
  unsure (1)..(89): unsure at all Xaa locations
  Clone ID: LIB3196-031-P1-M1-H7.pep
FRLGGGGCSSNGFGRPXGLTVCPPGDIQKATVNQILLTTLNLQIDPTIQRVPTEEREQIKTLNNNFNCFIYNVRLMXHQNTVLETKCTL

SEQ ID NO: 100886 - protein, 68 aa, Gossypium hirsutum
  Clone ID: LIB3196-032-P1-M1-A1.pep
MGDHYLQNTEPMTHQMVKGDTGATGGGSLLILCGLILAGTSIGLTIVTALLVILRPALAPALIAAGFL

SEQ ID NO: 100887 - protein, 109 aa, Gossypium hirsutum
  Clone ID: LIB3196-032-P1-M1-A11.pep
SDDNFSTIVAAVEEGRAIYNNMKQFIRYLISSNVGEVVCIFLTAALGFPEALIPVQLLWVNLVTDGLPATALGFNPPDLDIMNKPPRNPKEPLISGWLFFRYLAIGCYV

SEQ ID NO: 100888 - protein, 121 aa, Gossypium hirsutum
  Clone ID: LIB3196-032-P1-M1-A3.pep
MAVVAAAAGWLLRLRAAGAEGHWRRFRGVGLARGFLHPSATVEDAAQRRQVAHFTFQPDPEPREYGQTQKMNLFQSVTSALDNSLAKDPTAVIFGEDVAFGGVFRCTVGLRDKYGKDRVFN

SEQ ID NO: 100889 - protein, 49 aa, Gossypium hirsutum
  Clone ID: LIB3196-032-P1-M1-A4.pep
LRIIKLMFILLRISSQQLDNLLTYELTHLPKFIYHLTISLCQSNRLNKS

SEQ ID NO: 100890 - protein, 51 aa, Gossypium hirsutum
  Clone ID: LIB3196-032-P1-M1-A8.pep
RQRKLPSSTSKDQSSFPRKHPKIPSDEGVMSPSSSSPLRAGGPYTLDPNPA

SEQ ID NO: 100891 - protein, 45 aa, Gossypium hirsutum
  Clone ID: LIB3196-032-P1-M1-B1.pep
LDIVTIVMKYIWNYIMHMTQCEKNMCLYLNQIIFYLKFKVGRYDN

SEQ ID NO: 100892 - protein, 53 aa, Gossypium hirsutum
  Clone ID: LIB3196-032-P1-M1-B11.pep
INDLRHFDPEFTEEPVPNSIGKSPDSILVTASVKEAAEAFLGFSYAPPTDSFL

SEQ ID NO: 100893 - protein, 78 aa, Gossypium hirsutum
  Clone ID: LIB3196-032-P1-M1-C1.pep
EKKNQTKQALSVCVSLKLPNDQFKILKTLNCGFMLSDHIYMMARFRKVFYYSKKKKQEGGGRAGKIKAVLITVRLFRT

SEQ ID NO: 100894 - protein, 91 aa, Gossypium hirsutum
  Clone ID: LIB3196-032-P1-M1-C10.pep
LPLHHSHFGCHAPPLQGRLYSDHYGMYHTSPSLGGLTRPVVLWSQQDVCKWLKKHCPHNYLVYVEAFSQHAITGRALLRLNAEKLQRMGLA

SEQ ID NO: 100895 - protein, 100 aa, Gossypium hirsutum
  Clone ID: LIB3196-032-P1-M1-C11.pep
ALAWHVDTLWLFNQSPIDAHFGYHKLFFSRSIISTPFVNMGGVVPIKNSSVLESLDIKRVCQKFTKICKNLFTWTPWGSQALAHNKGHQHIPDNCPRGLR

SEQ ID NO: 100896 - protein, 88 aa, Gossypium hirsutum
  Clone ID: LIB3196-032-P1-M1-C3.pep
TTPPFYPFCLGFDLNLGAPPHHHRTWCRPRAERTRREAGGKYYSFFLFSFETGFLFLFSVWYIFFPFPLLPLEFEIDEGGRSSSDVIR

SEQ ID NO: 100897 - protein, 58 aa, Gossypium hirsutum
  Clone ID: LIB3196-032-P1-M1-C5.pep
YVGMRARPCEGALTADHYGMHHTMRLHVGQNPPLSLCIQNDVCNVVKEALVSQLPCLR

SEQ ID NO: 100898 - protein, 57 aa, Gossypium hirsutum
  Clone ID: LIB3196-032-P1-M1-C6.pep
RTRGLLLPHSKQNMYIVKKTICLYLFFFSFFNLNWTKLGGGGVIIFLLSVSELNVTQ

SEQ ID NO: 100899 - protein, 57 aa, Gossypium hirsutum
  Clone ID: LIB3196-032-P1-M1-C9.pep
KLISQIFLFCQRTLKAFGDSQTYNEPQIKQNQIALLQRNKSMKVERRCQLRDSNFKD

SEQ ID NO: 100900 - protein, 44 aa, Gossypium hirsutum
  Clone ID: LIB3196-032-P1-M1-D2.pep
HRNCWEYYFENLFASRGGRNHDLFSRSQGLNFINLFQILTRLHQ

SEQ ID NO: 100901 - protein, 69 aa, Gossypium hirsutum
  Clone ID: LIB3196-032-P1-M1-E10.pep
DKQSILEPLPAFLHALFFFRSSCSSSGRSRRCSSSSSSSSSSSSSSSSSSSRSRSRSPSPRRRSDRRRR

SEQ ID NO: 100902 - protein, 75 aa, Gossypium hirsutum
  Clone ID: LIB3196-032-P1-M1-E4.pep
IINFRNLCNSSHPLRVTMADKQKALIQAPPNTLNLNLNMLKLENKETFFISLSGLSLVLMGLLMAFQSVAEAIIF

SEQ ID NO: 100903 - protein, 39 aa, Gossypium hirsutum
  Clone ID: LIB3196-032-P1-M1-E6.pep
NCLYRFMNPNFFFLKVLGRKVTFLFHEKFKNKNKINILF

SEQ ID NO: 100904 - protein, 57 aa, Gossypium hirsutum
  Clone ID: LIB3196-032-P1-M1-E8.pep
VKRMKWKGRKKSTYHPLHSQMIKKRNLKKNISSYAEDRTIEKQRYSLSLSQSLPRKS

SEQ ID NO: 100905 - protein, 100 aa, Gossypium hirsutum
  unsure (1)..(100): unsure at all Xaa locations
  Clone ID: LIB3196-032-P1-M1-F2.pep
MWWLWASLCCLLALGDARSRPSFHPLSDELVNYVNKQNTTWQAGHNFYNVDVSYLKRLCGTFLGGPKPXPQRVMFTEDLKLPEKLDAREQWPQCPTIKEI

SEQ ID NO: 100906 - protein, 36 aa, Gossypium hirsutum
  Clone ID: LIB3196-032-P1-M1-F3.pep
TSRTIKLKIDDLFNLTKTSLIYLTVMVYFHSHSCSE

SEQ ID NO: 100907 - protein, 49 aa, Gossypium hirsutum
  Clone ID: LIB3196-032-P1-M1-F4.pep
YKPSTCVLHGYIYMYIIFLLLLQRYVNHKFLVEFFFIGSISNYLIYIYI

SEQ ID NO: 100908 - protein, 78 aa, Gossypium hirsutum
  Clone ID: LIB3196-032-P1-M1-F7.pep
YFELLGSHVETETHEFSFSLPLLPIADYKESFNTISNIEEIAYNAISFTWDINDEAKVGGEVWAPYVQPFENGRSLMI

SEQ ID NO: 100909 - protein, 74 aa, Gossypium hirsutum
  Clone ID: LIB3196-032-P1-M1-F9.pep
GVGGYCSHSHDIQVTDHKQHVAQELQGVPRAPQRSLLLVPPMAQEQCVLTCSTAYHQFSQWHQLITHQLLRFIS

SEQ ID NO: 100910 - protein, 63 aa, Gossypium hirsutum
  Clone ID: LIB3196-032-P1-M1-G10.pep
VFLFATMAASLQISGVKTAPSHSFPKQTSFHCRSAFSSQLHFGSFRSTDSCRRLRHCCKSRVF

SEQ ID NO: 100911 - protein, 116 aa, Gossypium hirsutum
  Clone ID: LIB3196-032-P1-M1-G12.pep
NGDWRGKGKLKAEAVLQAATLAASGQPFEVVYYPRATTPEFCVKASSVKAAMRVPWCCGMRFKMAFETEDSSRISWFMGTVSSVQVVDPIRWPNSPWRLLQVTWDEPDLLQNVKTW

SEQ ID NO: 100912 - protein, 54 aa, Gossypium hirsutum
  Clone ID: LIB3196-032-P1-M1-G2.pep
FSLCKKTIFEMDFFQHIQLRLKIRAYSNQCRGIQFQTQRGSIRPSKSRHWFEEA

SEQ ID NO: 100913 - protein, 81 aa, Gossypium hirsutum
  Clone ID: LIB3196-032-P1-M1-G4.pep
DRLSGIKETPLADLMPLFDNVLLQEGYAGMNIPSKVTLACRMEPLIISAYPKYFATLDIAPFAFFLERKTRTKLTMPILLQ

SEQ ID NO: 100914 - protein, 44 aa, Gossypium hirsutum
  Clone ID: LIB3196-032-P1-M1-G8.pep
EGLILYRSTISLYIDRGISNISIYRTTGYNVCLTVSKYTITMLG

SEQ ID NO: 100915 - protein, 67 aa, Gossypium hirsutum
  Clone ID: LIB3196-032-P1-M1-H11.pep
NKIFIVGINGRVIFHMIVQMPSRFLNRDGIKKSLENVSPGEKQAIHKTCDKGVCLFFFSFQYKGIFL

SEQ ID NO: 100916 - protein, 38 aa, Gossypium hirsutum
  Clone ID: LIB3196-032-P1-M1-H12.pep
PSTYIKPLFFLSKNHITIQFIFITPRLNKDSSHIKYPT

SEQ ID NO: 100917 - protein, 76 aa, Gossypium hirsutum
  Clone ID: LIB3196-032-P1-M1-H4.pep
PTEPTVEGSHVSPVPQQCHRRESQNLRGHLLADLATPQSPLLSQPPCESGFLLHEACPWGSNSVIPKTPSAMIMSR

SEQ ID NO: 100918 - protein, 69 aa, Gossypium hirsutum
  Clone ID: LIB3196-032-P1-M1-H9.pep
ICWVSSLQVRSKSFFLELNNLNMIFFYYPLSYGIRFGRFKLFPCASPILLKQPLKKIQKSEKVEKNFYG

SEQ ID NO: 100919 - protein, 68 aa, Gossypium hirsutum
  Clone ID: LIB3196-033-P1-M1-A6.pep
INVSNSERLPLSAGCLGPCSPNLRLGKKSKLTFCERENGFLLESDREKFSVGSQSFAARRHCCYVFQL

SEQ ID NO: 100920 - protein, 51 aa, Gossypium hirsutum
  Clone ID: LIB3196-033-P1-M1-A9.pep
CYKACGLILNLATLYTTLQRLNEGKLFGARCIVTGYAFNWLYNFFGIFPSC

SEQ ID NO: 100921 - protein, 73 aa, Gossypium hirsutum
  Clone ID: LIB3196-033-P1-M1-B1.pep
REPRWERRISPPPRGLKELMPDGTLQWDFREGIRIIRTWHLKPKLLQLQVLVVLGQIGQRVRNVEDVTWANAE

SEQ ID NO: 100922 - protein, 52 aa, Gossypium hirsutum
  Clone ID: LIB3196-033-P1-M1-B11.pep
NEVGASNEIICSHSFIMSYISVPVCRPSGKNLYALVSPQVFGHGTQSLIVSV

SEQ ID NO: 100923 - protein, 125 aa, Gossypium hirsutum
  Clone ID: LIB3196-033-P1-M1-B2.pep
AENRSAFSYHCKTPDCKGWCFFEDDVNEFTCPVCFHVNCLLCKAIHEQMNCKEYQEDLALRAQNDVAARQTTEMLKVMLLQGEAMRCPQCQIVVQKKDGCDWIRCTVCHTEICWVTKGPRWGPGG

SEQ ID NO: 100924 - protein, 93 aa, Gossypium hirsutum
  Clone ID: LIB3196-033-P1-M1-B4.pep
PPQLLPTPSLPRSCADHSITIDVRSPSLYQGIAFLQSSSSPNNSKLHWKRFSTTAMSSLTTTITSSLDVVVVEPNLYHHQSILLQSYHYLGRL

SEQ ID NO: 100925 - protein, 49 aa, Gossypium hirsutum
  Clone ID: LIB3196-033-P1-M1-C12.pep
KRGAIHENQAAITYLRHHARTGNTKSDTLLILYKVPASELKSEFTHLNI

SEQ ID NO: 100926 - protein, 90 aa, Gossypium hirsutum
  Clone ID: LIB3196-033-P1-M1-C2.pep
AVEEQQHKVVTSVGADNVSYNNYTNCPHTFNTQQTLYFIPHNSKRYMHRYIDVVQVIVGVATARAETNAEILDHNMRDVVQTDRDDTIDM

SEQ ID NO: 100927 - protein, 93 aa, Gossypium hirsutum
  Clone ID: LIB3196-033-P1-M1-C3.pep
KKRKDRKALTQLHLHLSNEILQDVMKEKIVAGLWKWLEQICMSKTLTSKLHMKQHLCAHRLEEGASVHEHLTVFKEILSNLEAMEVQYDKEDL

SEQ ID NO: 100928 - protein, 62 aa, Gossypium hirsutum
  Clone ID: LIB3196-033-P1-M1-C7.pep
HASVDAWAYMFISICESILQIITSYQTHQDVLYIKDSVSFKKIRFDVIRKVTIYKEKRKQTR

SEQ ID NO: 100929 - protein, 120 aa, Gossypium hirsutum
  Clone ID: LIB3196-033-P1-M1-D1.pep
RRPPFPLSSAISSVEVADDASTRINQSSPRAAVEASEPYGKKGSDEVNRKLSMTASGTHDDSSDDDSEEERPIQPFSSTRDQYNKRSSLRVSLPYFGSRNSDSDEDLPKTSLKAHSNTGF

SEQ ID NO: 100930 - protein, 83 aa, Gossypium hirsutum
  Clone ID: LIB3196-033-P1-M1-D2.pep
MSQDTEVDMKEVELNELEPEKQPMNAASGAAMAVVGAEKNGLVKIKVAEDEAEAVAAAKFTGLSKEELLKVAGSPGWVRTRWV

SEQ ID NO: 100931 - protein, 117 aa, Gossypium hirsutum
  unsure (1)..(117): unsure at all Xaa locations
  Clone ID: LIB3196-033-P1-M1-D8.pep
CAFLILYIYRHTYMYPFFFIFINIYTHTCTYSLYLKSIFFLYIFYSLXIHVYIYFYIFSNTYMHIIYIYVSTYVFLIFTYIPTFIYFLFHNFIHIYKYLHTYIYFYVHRFFHIFPRV

SEQ ID NO: 100932 - protein, 38 aa, Gossypium hirsutum
  Clone ID: LIB3196-033-P1-M1-E1.pep
PTRPVFNDVIQIYIYIKKTLHIEKKGHNLIIFLVSNSM

SEQ ID NO: 100933 - protein, 40 aa, Gossypium hirsutum
  Clone ID: LIB3196-033-P1-M1-E10.pep
HPPSSLAINHLQIEHPLINFIYHKNNPLLLIYLKFDTNKT

SEQ ID NO: 100934 - protein, 48 aa, Gossypium hirsutum
  Clone ID: LIB3196-033-P1-M1-E12.pep
THNKKKFRILKLKVDGNLQTIQHRGRMVMVAIVQGLLFLPILLYILLN

SEQ ID NO: 100935 - protein, 56 aa, Gossypium hirsutum
  Clone ID: LIB3196-033-P1-M1-E2.pep
QTLQNGPIRVFMRNLFTKVVYLRFIFFHKILENNLFSLMAKPYTFNHFTKLSPHLK

SEQ ID NO: 100936 - protein, 41 aa, Gossypium hirsutum
  Clone ID: LIB3196-033-P1-M1-E3.pep
MDKQNTQMNASHPETNLPVGYPPQYPPTAFQDRSDTDSSAD

SEQ ID NO: 100937 - protein, 48 aa, Gossypium hirsutum
  Clone ID: LIB3196-033-P1-M1-E5.pep
KRGVNVKIVFPFGHQIWSEEPMGGTVCQTKNMLISDIITINSSSVTLT

SEQ ID NO: 100938 - protein, 75 aa, Gossypium hirsutum
  Clone ID: LIB3196-033-P1-M1-E6.pep
NYISCTVFILYCSLYHNLQVFWLFLLICKELINYSLFVHGADILKDFNIVETIFPTCACFYENIHSEYLTFEYVL

SEQ ID NO: 100939 - protein, 110 aa, Gossypium hirsutum
  Clone ID: LIB3196-033-P1-M1-F10.pep
QRTLLMMSLYVMRTHRLNHHPSIVQFIRWLHTLTSLNALLDLSSSVFSALITLMLLFIRFVSTFTSHRHHHLANHPTMTMFKDFLFLFLFPLLSLFILFKYFLFYFPLIL

SEQ ID NO: 100940 - protein, 83 aa, Gossypium hirsutum
  Clone ID: LIB3196-033-P1-M1-F11.pep
LFPSCDKGGGGGYSSRRTSGRDKYGPPVRTEYRLIVENLSSRCSWQDLKDFMRQAGEVTYADAHKERTNEGVIEFRSYSDMKR

SEQ ID NO: 100941 - protein, 64 aa, Gossypium hirsutum
  Clone ID: LIB3196-033-P1-M1-F12.pep
IKHHLYTARPQLKRILYRIKFLVVVPYTSKLNFDNKNHSDRRQSASIRYKTGTEDTILYTVKML

SEQ ID NO: 100942 - protein, 114 aa, Gossypium hirsutum
  Clone ID: LIB3196-033-P1-M1-F2.pep
PRVRKHTKRKNYLRPKILKTLTKPFPSSTPINPITPIESQPETKPLDVVVFEPPSDETDKVEEFRVSETPGVLNGENSGGFGKFSPYSVMKFGFYFVGIFLFQTLIAVWVMGNW

SEQ ID NO: 100943 - protein, 92 aa, Gossypium hirsutum
  Clone ID: LIB3196-033-P1-M1-F4.pep
AESRSKEIAHFRHSSGVQDSSSSTRIVLSNQNSACSASSLSVALNSVAPGFQILSTGGLFDLIWSVTGGIVGAGVVFVGNGGCGTAVLVRMY

SEQ ID NO: 100944 - protein, 116 aa, Gossypium hirsutum
  Clone ID: LIB3196-033-P1-M1-G1.pep
TKALDQKTPFEAWFGFKPSLAHLKVFGCICYAHVPAVKRDKLSERARPGILVGYSTVKKGYRILDPSTKKVSVSKDVVFDEKSCWNWEKHEPEKVSEGLAADQAKPDQNVPEMDID

SEQ ID NO: 100945 - protein, 112 aa, Gossypium hirsutum
  Clone ID: LIB3196-033-P1-M1-G10.pep
SVTLSSCEKISAEFFSSFSSSNSPLVKSKKQSTENSSLETPPFELKKSSKATCWFWLWLFFVNSPLTLDFNALASMQSSIFLIKMKNMKKKKKKKKKKNESRKLIGKRLRIG

SEQ ID NO: 100946 - protein, 67 aa, Gossypium hirsutum
  Clone ID: LIB3196-033-P1-M1-G2.pep
CMNHLLESVKFSHSEIIHLCPGILQRKAPQQPGRLGSLTKWFSVKVRGGCFHWESEFKEQGRHSNGL

SEQ ID NO: 100947 - protein, 94 aa, Gossypium hirsutum
  Clone ID: LIB3196-033-P1-M1-G4.pep
RAKRRAATIGTKDRSKANLEGAQIYPWKRHQKGAAAIRGPCFFPRACSKMAFFQGAPKHNYRPGLSRTGGGKTPALPQLMRLGGNPLLSSRAIN

SEQ ID NO: 100948 - protein, 48 aa, Gossypium hirsutum
  Clone ID: LIB3196-033-P1-M1-G7.pep
PFFIGFPSHKLLSMAQRRPLPPLIMDLTIAVRPPGHQHPSSRKVDFMF

SEQ ID NO: 100949 - protein, 70 aa, Gossypium hirsutum
  unsure (1)..(70): unsure at all Xaa locations
  Clone ID: LIB3196-033-P1-M1-G9.pep
AHAACSKRPSFPKKPLLAGNPNRFCLFPIQYQKVWEWSKKAEPSFXTEKEAILLSNLGNWETLTAVSINL

SEQ ID NO: 100950 - protein, 65 aa, Gossypium hirsutum
  unsure (1)..(65): unsure at all Xaa locations
  Clone ID: LIB3196-033-P1-M1-H1.pep
FRQDHHSFKCLHWFTGKDTILTCINYVRLCIIXAKRITLAFAHHSDSEKIYLVAEPMMNAHVLAH

SEQ ID NO: 100951 - protein, 106 aa, Gossypium hirsutum
  unsure (1)..(106): unsure at all Xaa locations
  Clone ID: LIB3196-033-P1-M1-H10.pep
PVISVGSSLYPGPGLGHGHSLGLHPYTALQPHLPCSPQYLTHPAHPAHPMPHMPRPAVFPVPSSAYPQVRPVFCWGXVRRGKILGIHRGLGWXVLWEYNWAVQKSW

SEQ ID NO: 100952 - protein, 125 aa, Gossypium hirsutum
  unsure (1)..(125): unsure at all Xaa locations
  Clone ID: LIB3196-033-P1-M1-H12.pep
CKFAELKEKIDRRSGKKLEDGPKFLKSGDAAIVDMVPGKPMCVESFSDYPPLGRFAVRDMRQTVAVGVIKAVDKKAAGAGKVTKSAQKAQKAKXILSLIPATPLLISGGRTVSELFVSIGHLSLV

SEQ ID NO: 100953 - protein, 48 aa, Gossypium hirsutum
  Clone ID: LIB3196-033-P1-M1-H2.pep
EKNENVMKKKRGFILVFLAELKEGIGAKNFRPFECLIRLVYCVKVVKF

SEQ ID NO: 100954 - protein, 117 aa, Gossypium hirsutum
  Clone ID: LIB3196-033-P1-M1-H3.pep
GKTANLSANLAGRVEGNVFDIIHGLEDLGSNLGFSGASDVDRCVVSSGVVKDITHFVGVSDFIPFAYDVPGFPVVKESTKTGSFWEKEEVPPGEHIPSWLPAFPDPETYENSLSVEN

SEQ ID NO: 100955 - protein, 111 aa, Gossypium hirsutum
  Clone ID: LIB3196-033-P1-M1-H6.pep
MPEYHKFLIGKGGGKIRKVRDSTGARVIFPAAEDKDQDLITIIGKEDAVREAQKELEALIQNLDNVVEDSMLVDPKHHRHFVIRRGQVLREIAEEYGGVMVSFPRSGTQSD

SEQ ID NO: 100956 - protein, 107 aa, Gossypium hirsutum
  Clone ID: LIB3196-034-P1-M1-A12.pep
LSCLQTVNCYADYTIFTVRHPKLFILTRRIQYLGLKPNLSVVPGVRSSAIAYPGRPGLTRNRFLPPWITPSWAPQSRTSREQTLAAKGWSAGPATSQMPLDQRPRRD

SEQ ID NO: 100957 - protein, 55 aa, Gossypium hirsutum
  Clone ID: LIB3196-034-P1-M1-A3.pep
WAHFSNLKKNRAFIGILPFLKTIILLHFYFFLQKRIFINIFEILFHFFNLYSLKV

SEQ ID NO: 100958 - protein, 116 aa, Gossypium hirsutum
  Clone ID: LIB3196-034-P1-M1-A9.pep
FTASLIHINVEYGDGQLELNMERLRMAVDELLMKLAKMFSKPKLQIVFLINNCDMTIAVLKEAGPEGGKIQQHFEEMLKSNTGLFVEELLMEHFSDLIKFVKTRASEDPNGSNERP

SEQ ID NO: 100959 - protein, 33 aa, Gossypium hirsutum
  Clone ID: LIB3196-034-P1-M1-B3.pep
FLPLITAKQINKIHILPYMSPRGPTKTLETSRD

SEQ ID NO: 100960 - protein, 124 aa, Gossypium hirsutum
  unsure (1)..(124): unsure at all Xaa locations
  Clone ID: LIB3196-034-P1-M1-B6.pep
CSVILTGEYISKDGVPYCESDYHAQFGIKCETCDRYISGRVLEAGGXKHYHPTCARCVRCHQMFTEGEEMYLTGSEVWHPICKQAARAEKKLKHRRTSETSISPPGSSIGSPNRVICDIYENLD

SEQ ID NO: 100961 - protein, 46 aa, Gossypium hirsutum
  Clone ID: LIB3196-034-P1-M1-C11.pep
IAYENRYRVWFLTDIKAITENIALKKNYFLTLKSENNKENLLKSCI

SEQ ID NO: 100962 - protein, 105 aa, Gossypium hirsutum
  Clone ID: LIB3196-034-P1-M1-C12.pep
ISSMVIRDLTLRSAASFGSFHLIRLLYDEYMFYLVEHRVAEATGETPIAVMGEFNDLASLSLTLLDKDDMGDEQRGSEAGPDAHSLGEPLVKRERSDPNHSLQGI

SEQ ID NO: 100963 - protein, 57 aa, Gossypium hirsutum
  Clone ID: LIB3196-034-P1-M1-C3.pep
PTIITQRTKRNENKIKMGVYRLLNLLTLFLNLVPTRVVAVLNIHVPSLVLTATWVKV

SEQ ID NO: 100964 - protein, 54 aa, Gossypium hirsutum
  Clone ID: LIB3196-034-P1-M1-C9.pep
LPCYWFESLPQCTCSLRVCFHTMYLIRNLQHWFLIIPCVTMLLLCGAASTTDIF

SEQ ID NO: 100965 - protein, 117 aa, Gossypium hirsutum
  Clone ID: LIB3196-034-P1-M1-D12.pep
KFSLMSLESNFTTSSSLCVYFLHSTESSIIALESLFLLFEDNFSLMSLESNFTTSSSLCVHFLHSTESSIIALESLFLLFEDNFSLMSLESNFTTSSSQCVHFLHSTESSIIALESL

SEQ ID NO: 100966 - protein, 118 aa, Gossypium hirsutum
  unsure (1)..(118): unsure at all Xaa locations
  Clone ID: LIB3196-034-P1-M1-D4.pep
TTRPGGHCPIAPSTDTGICVQAPAEKGLTSFAIDFHKCGVSASVPKTADGPKERVKLLIQNRDEMIITGRLSEPYKGIXDRLTRPMXDEGVDPLWRRNTXNXIRYHPTHTLNMDFKDY

SEQ ID NO: 100967 - protein, 61 aa, Gossypium hirsutum
  Clone ID: LIB3196-034-P1-M1-D7.pep
NTMLSLINLSTFYLTNTGCLLSPTWISTPELCALCIMKSLHSGLRSQPLSSKKPLHVDSID

SEQ ID NO: 100968 - protein, 103 aa, Gossypium hirsutum
  unsure (1)..(103): unsure at all Xaa locations
  Clone ID: LIB3196-034-P1-M1-E10.pep
MVLIKEFRVVLPCSVQEYQVGQLYSVAEAIKNDTGGGEGIEVLKNEPYEKDGEKGQYTHKIYHLKSKVPAFVRMIAPKGSLVFHEKAXNAYPYCRTIVTNEYM

SEQ ID NO: 100969 - protein, 122 aa, Gossypium hirsutum
  Clone ID: LIB3196-034-P1-M1-E11.pep
LSNAMARALHRHIMMERERKRQEEEEVDKMMEQKMKEEQERRKKKEMEERMSLEETKEQILKLEEKLLALQEEKHQLFLQLKKVLHEEEKRRRKEQSDLTTLTSAAYQQSLTVHTGTHLLSM

SEQ ID NO: 100970 - protein, 106 aa, Gossypium hirsutum
  unsure (1)..(106): unsure at all Xaa locations
  Clone ID: LIB3196-034-P1-M1-E2.pep
MALIKEFRVVLPCAVQEYQVGQIYSGAEAIKNETGGGEGNEGLKNEPYEKDGETGQYTHKTYHLXSKGPAFVRMIAPEGCLVFHEKACNAYPYCXTIVTNEYMKDE

SEQ ID NO: 100971 - protein, 73 aa, Gossypium hirsutum
  Clone ID: LIB3196-034-P1-M1-E3.pep
LQKPSPNLLSSCFIDLTKRKILFSSCSGYFLQSKVDPFSFGMCKFLILKQTQIFNLLIWKFLKEMFGLYVMKC

SEQ ID NO: 100972 - protein, 84 aa, Gossypium hirsutum
  unsure (1)..(84): unsure at all Xaa locations
  Clone ID: LIB3196-034-P1-M1-E5.pep
YLRDTIEQACTQKQSGTGTEFSGSLQRHVHGTSLLSFSGCLVDLFHEXCAHIDLXHNHKQNPPXGETEQPQPRDQSRCQLQNLN

SEQ ID NO: 100973 - protein, 125 aa, Gossypium hirsutum
  unsure (1)..(125): unsure at all Xaa locations
  Clone ID: LIB3196-034-P1-M1-E8.pep
WARGQGRSAGXASVGSSTWGGTPGPGQTGTRQGTQNRGVPSCHLTHRNSFSSRHRGSSGRAFSGLCRSLEGWRAGRQAVLGEXQQDVTRRAKRPREXGPGTLRSKEAAGARPAGAVPTRHCGPGS

SEQ ID NO: 100974 - protein, 58 aa, Gossypium hirsutum
  Clone ID: LIB3196-034-P1-M1-E9.pep
GNLLFNHHIVQYAFKQFNSSFYHIAYPISNHFKINSNQITLFSVIFNLILYLNNQSNS

SEQ ID NO: 100975 - protein, 124 aa, Gossypium hirsutum
  unsure (1)..(124): unsure at all Xaa locations
  Clone ID: LIB3196-034-P1-M1-F1.pep
MVCAPPTAYIDFARQKLDPKIAVAAQNCYKVTNGAFTGEISPGMIKDCGATWVVLGHSERRHVFGESDELIGQKVAHALAEGLGVIACIGEKLDEREAGITEKVXFEQTKVIADNVKDWSKVVL

SEQ ID NO: 100976 - protein, 82 aa, Gossypium hirsutum
  Clone ID: LIB3196-034-P1-M1-F12.pep
SPRKTTLQKFCSLIHYNFNKINTKSVKKKETCILAKCFWRLFECDQMWFWLTSFHFGLYQLLRVKSDHDIANNCKWSLGLTL

SEQ ID NO: 100977 - protein, 79 aa, Gossypium hirsutum
  Clone ID: LIB3196-034-P1-M1-F2.pep
PNKVFDLCVVCGDKASGRHYGAVTCEGCKGFFKRSIRKNLVYSCRGSKDCIINKHHRNRCQYCRLQRCIAFGMKQDCMY

SEQ ID NO: 100978 - protein, 64 aa, Gossypium hirsutum
  Clone ID: LIB3196-034-P1-M1-F8.pep
KTKSKQSTCYRIRIYFPIHIKLQKVDSKAVAVMETYLRLSANTHTVYKAKHIFCFNNSSCCIYL

SEQ ID NO: 100979 - protein, 51 aa, Gossypium hirsutum
  Clone ID: LIB3196-034-P1-M1-F9.pep
MEDTKSEAHITSAAAFVEGGIQDACDDACSICLEAFCESDPSTVTCCKHEF

SEQ ID NO: 100980 - protein, 123 aa, Gossypium hirsutum
  Clone ID: LIB3196-034-P1-M1-G10.pep
GASGPRSGALGQGIQGPWGGEGWPGAAMSVQVVAPGSAGLGPERLSPEELVRQTRQVVQGLEALRAEHRGLAGHLAEALAGQGPATGLEMLEEKQQVVSHSLEAIELGLGEAQVLLALSAHVG

SEQ ID NO: 100981 - protein, 105 aa, Gossypium hirsutum
  Clone ID: LIB3196-034-P1-M1-G4.pep
CLRSNLAATDVTFLLCCVPFTALLYPLPAWVLGDFMCKFVNYIQQVSVQATCATLTAMSVDRWYVTVFPLRALHRRTPRLALAVSLSIWVGSAAVSAPVLALHRL

SEQ ID NO: 100982 - protein, 107 aa, Gossypium hirsutum
  Clone ID: LIB3196-034-P1-M1-G8.pep
RRSLVENSGAHVECSRCSASLQNCKETTPSAEPPTATAVSTRPSQSSRCFGDRAMTHQDKAERTTDGMSQSDKTLSTDSNRVFFFTSARQLEKQDEPRVKSLRPHGV

SEQ ID NO: 100983 - protein, 71 aa, Gossypium hirsutum
  Clone ID: LIB3196-034-P1-M1-H10.pep
GMETKLETWVIWGFILYSAQLPFFLGVFPGKEGWMNLEVSKRHSRCVASRQLISKHQLSLYTSTLHGLHQI

SEQ ID NO: 100984 - protein, 92 aa, Gossypium hirsutum
  unsure (1)..(92): unsure at all Xaa locations
  Clone ID: LIB3196-034-P1-M1-H8.pep
DFLDPDPAAAHTGLLRKKETVILDSLVEENXHSGLAPNDASVTAGVFMSSRGHSTLPRTLMAPRMISEGDLGGIAQITSSLFLGRGSVASNR

SEQ ID NO: 100985 - protein, 60 aa, Gossypium hirsutum
  Clone ID: LIB3196-034-P1-M1-H9.pep
MSSTEQGGWAGGRSWAHRALRASNPVGPLFRDIRTPDNGIPLLAGTSLMHDSSCHRKDAF

SEQ ID NO: 100986 - protein, 112 aa, Gossypium hirsutum
  unsure (1)..(112): unsure at all Xaa locations
  Clone ID: LIB3196-035-P1-M1-A1.pep
IPDVDANLGXGWVVGVGPKVDTDVPEVNIEGPDAKLKGPTFKMPDSNIKAPKISIPGVDLDLKGPKGNGEYDVSIPNEEGTLKGPQLDLKGPNLDFQSPNAKLSGPSLKMPS

SEQ ID NO: 100987 - protein, 43 aa, Gossypium hirsutum
  unsure (1)..(43): unsure at all Xaa locations
  Clone ID: LIB3196-035-P1-M1-A10.pep
LDLINDILVIQSIRSFXIRLKTCLXXSTSCLFVLQFYHVILLS

SEQ ID NO: 100988 - protein, 80 aa, Gossypium hirsutum
  Clone ID: LIB3196-035-P1-M1-A3.pep
MAKSSFKIEHDFEKRRAEAARIRVKYPDRIPVIVEKTKGNDIPNIDKKKYLVPADLTVGQFEKKKRKRIKLSAGKAIFLF

SEQ ID NO: 100989 - protein, 121 aa, Gossypium hirsutum
  unsure (1)..(121): unsure at all Xaa locations
  Clone ID: LIB3196-035-P1-M1-A4.pep
MLSRCRSRLLHVLGLSFLLQTRRPILFCPPRLMKPLVVFVLGGPGAGKGTQCARIVEKYGYTHLSARELLRDERKNPDSQYGELIEKYIKEGKXVPVEITIXXLKREMDQTMAANAQENKF

SEQ ID NO: 100990 - protein, 74 aa, Gossypium hirsutum
  unsure (1)..(74): unsure at all Xaa locations
  Clone ID: LIB3196-035-P1-M1-A5.pep
HPRTRGNAKARWCPAPVSRIRPTLPPSXXKRKRLVPWIEAPVKTASLSRSLSRGYLQYTSRHDLLQPKLRNLDT

SEQ ID NO: 100991 - protein, 102 aa, Gossypium hirsutum
  unsure (1)..(102): unsure at all Xaa locations
  Clone ID: LIB3196-035-P1-M1-A7.pep
SCEEXPQSYLRIFSREILEAVFNTRSEQLDELFGGRQSHRRRSGQGMFRKASQXQIKALSQKATSPKGKSSEGFAFYLLSQTPRFFNQNRRFYXACPYNFQQ

SEQ ID NO: 100992 - protein, 58 aa, Gossypium hirsutum
  unsure (1)..(58): unsure at all Xaa locations
  Clone ID: LIB3196-035-P1-M1-B11.pep
SXQNKWNFFLSLDFLCTREWSIGDHVMTIKILPNYLIFCRNKSKLTKNLRLKVKMIKK

SEQ ID NO: 100993 - protein, 120 aa, Gossypium hirsutum
  unsure (1)..(120): unsure at all Xaa locations
  Clone ID: LIB3196-035-P1-M1-B2.pep
KQSAGVGRSQSLEEARLGWRACPREAKGGVRDERTPRRGGRQSSPQPGAARNPPPPFTQRGPGTPLPARAAQPAQACGLRSSYCCPGGFLGPGSRGGRPAVFKGEYSSAPXXPQAGAISH

SEQ ID NO: 100994 - protein, 116 aa, Gossypium hirsutum
  unsure (1)..(116): unsure at all Xaa locations
  Clone ID: LIB3196-035-P1-M1-B3.pep
SRRGFPVLPACQSARLTCSLRTQGRTGQGRAGQGPLHPRGAAQPQAGTAVSPASQRLAAVVSRGLGMCPELLPGKSSTASRPIPPRTQMGTAGSGMSVQGWSRHSTXXLKRIRQIS

SEQ ID NO: 100995 - protein, 48 aa, Gossypium hirsutum
  unsure (1)..(48): unsure at all Xaa locations
  Clone ID: LIB3196-035-P1-M1-B4.pep
SMQKIFMIFPFIDIFPHFFGLPFFLRPMLQTLSTASSLWXPSXNXGSL

SEQ ID NO: 100996 - protein, 91 aa, Gossypium hirsutum
  unsure (1)..(91): unsure at all Xaa locations
  Clone ID: LIB3196-035-P1-M1-B5.pep
DFLXKQTKEIKLCKTTIIPSFPSPIIFKFFIILILSPKPHNLKYHIKSIPNFTRHKLHHHFIIERSPLNPHRKFFFFYKHTQTLFCIFLFM

SEQ ID NO: 100997 - protein, 54 aa, Gossypium hirsutum
  unsure (1)..(54): unsure at all Xaa locations
  Clone ID: LIB3196-035-P1-M1-B6.pep
MRAEEPSVPGAQRAPGPELRLSSQLLPELCTFVVRVLFYXRPVYLAGYLGVNIT

SEQ ID NO: 100998 - protein, 49 aa, Gossypium hirsutum
  Clone ID: LIB3196-035-P1-M1-B7.pep
SIVCRDGSDDLKLLHPITVRLHLAAVDQLMFLQNNLRGCIEVKAAYLYQ

SEQ ID NO: 100999 - protein, 63 aa, Gossypium hirsutum
  Clone ID: LIB3196-035-P1-M1-B9.pep
TGKPSAASRIFILGCILILGSRPAWSQKVFLALVALKKVMLTQSCPLYVSKPDPAQVKVFEFE

SEQ ID NO: 101000 - protein, 78 aa, Gossypium hirsutum
  unsure (1)..(78): unsure at all Xaa locations
  Clone ID: LIB3196-035-P1-M1-C10.pep
MELITDFGEDTXSHQRPCLLKSLKREGANKLRYPPNSQSKVDWGKFFLLRRFNKEKLGLLVLTFLGIVAAVLVKAGYY

SEQ ID NO: 101001 - protein, 130 aa, Gossypium hirsutum
  unsure (1)..(130): unsure at all Xaa locations
  Clone ID: LIB3196-035-P1-M1-C12.pep
AVVENYPDFISSVREFADADPAHRKIFVHGLSWDTTAETLTAEFSKYGEIEECKAVTDWVSGKSKGYAFILFKHRSGARRALKQPQKKIGIRTTSCQLAAQGPVSAPPPNGTXVSEYTQRKIFVSNVSPE

SEQ ID NO: 101002 - protein, 38 aa, Gossypium hirsutum
  Clone ID: LIB3196-035-P1-M1-C4.pep
KFTDLNFEFWNSRYEFLGDYDAEWQHIPKSLNKQFKTI

SEQ ID NO: 101003 - protein, 131 aa, Gossypium hirsutum
  unsure (1)..(131): unsure at all Xaa locations
  Clone ID: LIB3196-035-P1-M1-C5.pep
GNXXGVTNGTDKAALVEVQVIEPPESDKSKKETYVFTSKVIQVEADIVVETFPLRPVAKPTDSVNGMSSEVGKLDENLYKTENGKLNVSQENGSFKLDGMNSSEVSVLTDDGKEVXNNVGLLLEKNSNLTD

SEQ ID NO: 101004 - protein, 64 aa, Gossypium hirsutum
  Clone ID: LIB3196-035-P1-M1-C6.pep
PPPSLSLCHFTPSQFSFFQQFLESLGSWRSTTLRFVLCAASLWYVLIQPWHQILGSSSLVVSGP

SEQ ID NO: 101005 - protein, 83 aa, Gossypium hirsutum
  unsure (1)..(83): unsure at all Xaa locations
  Clone ID: LIB3196-035-P1-M1-C7.pep
SWVWFFCGTEASGIGFCCYQASAAGSQEPRNSPEAQPRRGLRGKSRCIFLFSTCNRNPSGGEPLPRGGRPGRAISVFRRERXP

SEQ ID NO: 101006 - protein, 61 aa, Gossypium hirsutum
  Clone ID: LIB3196-035-P1-M1-C8.pep
MGTTVRAALVLAYLAIASAASEGGLKATGQRQLRPEHFQEIGYATPPFPPLFRSLLMDHPD

SEQ ID NO: 101007 - protein, 89 aa, Gossypium hirsutum
  unsure (1)..(89): unsure at all Xaa locations
  Clone ID: LIB3196-035-P1-M1-C9.pep
KXENYNXEHDGILSAISYCTSAFTFTDPQESPSQQDLKRLKLMDVVSLLKSPKKPLHEQLFSPLIVHRVCQSLQATSSTFQNLHRLCLA

SEQ ID NO: 101008 - protein, 52 aa, Gossypium hirsutum
  Clone ID: LIB3196-035-P1-M1-D10.pep
FDRSNCPQNLCTKKHQQCHDLIDVFINFLLMFPTQSTRVLLITQSASNIYKT

SEQ ID NO: 101009 - protein, 41 aa, Gossypium hirsutum
  unsure (1)..(41): unsure at all Xaa locations
  Clone ID: LIB3196-035-P1-M1-D12.pep
XXIWEGGXANGVYQREVSCIGWFYNHRHHYHSKFIRSKVLK

SEQ ID NO: 101010 - protein, 44 aa, Gossypium hirsutum
  Clone ID: LIB3196-035-P1-M1-D6.pep
HIFIQFSLITHKSVNYIFTPNISHFHNLVFIPQNTKYTKFGHTL

SEQ ID NO: 101011 - protein, 60 aa, Gossypium hirsutum
  Clone ID: LIB3196-035-P1-M1-D7.pep
GKDLWKEFSVLEREDSCASMYSRSIQGHHVCLLVKKGENSVSVDGKCSDSTLLSNLLEEM

SEQ ID NO: 101012 - protein, 106 aa, Gossypium hirsutum
  Clone ID: LIB3196-035-P1-M1-D8.pep
WDDLRNKVKLEGEQRDDLVSTSSQNSHLVSKATRLWESILSRKSQHEVLASGPIEDLIAHREHKYRISGSALLSAMDQRSQVPPTDVLSVQSGDLNGQEQNEGFHT

SEQ ID NO: 101013 - protein, 84 aa, Gossypium hirsutum
  Clone ID: LIB3196-035-P1-M1-E1.pep
VINKILRGQGQDWNCTEAMRMNDWNRNTLKILITEIALHTSMVDKTISLLYFLVLSGLHCLLVQSLMILPHIQIDDLSEHHPAP

SEQ ID NO: 101014 - protein, 106 aa, Gossypium hirsutum
  unsure (1)..(106): unsure at all Xaa locations
  Clone ID: LIB3196-035-P1-M1-E5.pep
QEFRFWIKTEASCPLGLPKQRTQLFLRSPVVLCKRPSRTVNQLADRPHASSPQQQGPASGRAPIRQPSPVPPKEIQEPQRKLPHPFHSQRRRPSDPTHKPPAXXLK

SEQ ID NO: 101015 - protein, 88 aa, Gossypium hirsutum
  Clone ID: LIB3196-035-P1-M1-E6.pep
KRDSNMTKKSVVMEPKTKNSYAIRKTNYLQENKATSMNFLLKACWNIVLENGKNWTLPNDMATTIIISLFFLTHQTNATSSIDQINVP

SEQ ID NO: 101016 - protein, 101 aa, Gossypium hirsutum
  Clone ID: LIB3196-035-P1-M1-E9.pep
IGGAPGERVAPTRAAAAPGVAMTSELDIFVGNTTLIDEDVYRLWLDGYSVTDAVALRVRSGILEQTGATAAVLQSDTMDHYRTFHMLERLVHAPPKLLHQL

SEQ ID NO: 101017 - protein, 47 aa, Gossypium hirsutum
  Clone ID: LIB3196-035-P1-M1-F10.pep
KRHNAFSRLGFVLVEGDFFTRLGSSSTARIEVAVFVFKVDSNLERCS

SEQ ID NO: 101018 - protein, 111 aa, Gossypium hirsutum
  unsure (1)..(111): unsure at all Xaa locations
  Clone ID: LIB3196-035-P1-M1-F11.pep
XXIYWGGDNNQNHQTGFCLMSMLELQKPIIDTPCQPVKKAAASTIIAVFLITVLMVSVGWLDICFFSGVSSYQNIVVGSKSTTARHKPEFPLECSTENHTQTCRKDYPTTT

SEQ ID NO: 101019 - protein, 57 aa, Gossypium hirsutum
  Clone ID: LIB3196-035-P1-M1-F12.pep
SPANPPQVPTMSQVNPNQLNKPPVDKIRKYGAKEFCAKIGTMGTYIPLLAKNTPIYC

SEQ ID NO: 101020 - protein, 82 aa, Gossypium hirsutum
  unsure (1)..(82): unsure at all Xaa locations
  Clone ID: LIB3196-035-P1-M1-F4.pep
MKDEEHPLESKADAGASETYPHRAVPMRENGYARPKNRPWKGAAASTSTTEALGHAMRVLGRMDMLTAKXLEDIVPSSHISD

SEQ ID NO: 101021 - protein, 78 aa, Gossypium hirsutum
  unsure (1)..(78): unsure at all Xaa locations
  Clone ID: LIB3196-035-P1-M1-F7.pep
XXXREVXGFKKNGDLMLRTYDNLRLVSRDPESHEIDYFGIQGRRTYVCNYTESLMLLDRVIDGAMTENCANYADKAYR

SEQ ID NO: 101022 - protein, 84 aa, Gossypium hirsutum
  Clone ID: LIB3196-035-P1-M1-F8.pep
MPTPECMAGCGSGAGRAGPGGAQPRRGPCWGRAAARPADSGMGCTMSAQDKAAAERSYMIDKKPREDGKKTAPEVKLLLLGAGE

SEQ ID NO: 101023 - protein, 95 aa, Gossypium hirsutum
  unsure (1)..(95): unsure at all Xaa locations
  Clone ID: LIB3196-035-P1-M1-F9.pep
GIAEGVITTGHAITATHKTECGPXMHDWRGGXAPYFNIIASSTGXAAKAAGKVLXALNGKLTWKGRRVYTVNVSPVRCTAKLEKGAYHDENKTAL

SEQ ID NO: 101024 - protein, 77 aa, Gossypium hirsutum
  unsure (1)..(77): unsure at all Xaa locations
  Clone ID: LIB3196-035-P1-M1-G1.pep
THASQDSLFIYLFQYVNXXILLGGENISLFFTLSKHSILWIFNTFINKYQSLLPLFFLIPFSLILFIPIHTIKFFIT

SEQ ID NO: 101025 - protein, 91 aa, Gossypium hirsutum
  unsure (1)..(91): unsure at all Xaa locations
  Clone ID: LIB3196-035-P1-M1-G12.pep
AGVTGIXXDSFFNGGIGSSGLVGTSMGAGGGALSGAGISGGGIGLSSLGGTATIGHMRSSSDHHFNQTIGSASPSTARSRITKYSTVQYSK

SEQ ID NO: 101026 - protein, 74 aa, Gossypium hirsutum
  Clone ID: LIB3196-035-P1-M1-G7.pep
ELNQGSMITPFHPNLSLPMSGLLGIGLGACINLQGCSRTVKKNPQVDGFDTGERGVCNTEIEEGHNTAWHGIGT

SEQ ID NO: 101027 - protein, 122 aa, Gossypium hirsutum
  unsure (1)..(122): unsure at all Xaa locations
  Clone ID: LIB3196-035-P1-M1-H1.pep
LFNPPTLFLFKKXRQLFAKCCFCWCILRPSPAPAFWSLPSGSSLVSSRLSVPPSALLSSCCITSVSFTHHQGRIPRSYLRPLSPQLGILKALSLEGLWASSFLHPSCALHLPLVQASLFFSF

SEQ ID NO: 101028 - protein, 93 aa, Gossypium hirsutum
  Clone ID: LIB3196-035-P1-M1-H10.pep
LVLKVVCFIKILKRWTCIVFTISMGYLYSMFIVPVDYLYFVFIVSVDYLYSMFTVLTDYLCSMYTTLMNLPCGCHEVFHPWSYTYLPSWCTIS

SEQ ID NO: 101029 - protein, 66 aa, Gossypium hirsutum
  Clone ID: LIB3196-035-P1-M1-H12.pep
VIFQSCEENFQAYSQPDPIITLFSLCVPALYSGQQKYFLNGIFNELSLNIYKPAYIFLNSVHYIII

SEQ ID NO: 101030 - protein, 56 aa, Gossypium hirsutum
  unsure (1)..(56): unsure at all Xaa locations
  Clone ID: LIB3196-035-P1-M1-H3.pep
CLSEEAIIXXXLPTGIPIVYELDKNLKPIKPMQFLGDEETVRKAMEAVAAQGKAKK

SEQ ID NO: 101031 - protein, 72 aa, Gossypium hirsutum
  Clone ID: LIB3196-035-P1-M1-H4.pep
NKNGNNQYPLKNKNKNVNRCGKYNMCRWKWNRNKTGREGDNGNSNSHNGVEVRLVLRGAIKNKSGVACRFTS

SEQ ID NO: 101032 - protein, 115 aa, Gossypium hirsutum
  unsure (1)..(115): unsure at all Xaa locations
  Clone ID: LIB3196-035-P1-M1-H5.pep
IXXLFKGERERLLRPKRFSAIRSRPIRHRRPLCAAVGCAKRSPFCPFRSPHSRSKPQAHKKPRASRRKPKEPSDSDFPDSTKVRPIIFFPSFYPLVFKNRFESKNKIKKKKRNRE

SEQ ID NO: 101033 - protein, 74 aa, Gossypium hirsutum
  unsure (1)..(74): unsure at all Xaa locations
  Clone ID: LIB3196-035-P1-M1-H7.pep
PTDKPMEVTSPPSIYSPXXSGQPRYTLASLGDSLSQQFLKPFSLCTCYLNFRTFVINNARVTQKAGSQFPDLSL

SEQ ID NO: 101034 - protein, 73 aa, Gossypium hirsutum
  Clone ID: LIB3196-035-P1-M1-H8.pep
NYHLKTALYSHSLELIYMRKYTRIFFLFQITLGLFIAKINKNTMALDFLLYICCQLRDICYVLFLLQTCMSTV

SEQ ID NO: 101035 - protein, 130 aa, Gossypium hirsutum
  unsure (1)..(130): unsure at all Xaa locations
  Clone ID: LIB3196-035-P1-M1-H9.pep
PSVKEILVVWNKGIPPKVSDLNSAVPVRIRVEDLNSLNNRFKVDPLIKTRAVLELDDDIMMPCDDVERGFMLWRQHPDRIVGFYPRYVDRSRLEYNGEKYARKNKGYNMILXXAAFMDSQVAFERYWSEQ

SEQ ID NO: 101036 - protein, 121 aa, Gossypium hirsutum
  Clone ID: LIB3196-036-P1-M1-A10.pep
MATECTNSSRLRPASLDISRTVSEGTTLPWILANCTKLTRKMAQQTSPDTLTVPEVDNPHCPNPWLNEDLVKSLRENLLQHEKSKTARKSVSPKLSPVISPRNSPRLLRRMLLSSNIPKQR

SEQ ID NO: 101037 - protein, 59 aa, Gossypium hirsutum
  Clone ID: LIB3196-036-P1-M1-A12.pep
NIVYQFRKAQNEIDQYLKIVPLITLVDNSRVRERLEVIEKDQHEYTLDEEDRRVQDVIL

SEQ ID NO: 101038 - protein, 111 aa, Gossypium hirsutum
  unsure (1)..(111): unsure at all Xaa locations
  Clone ID: LIB3196-036-P1-M1-A6.pep
MDCGSVGGQRTQRLPGHRRLLFLPAGLSGRPGGSETSARRCLSALCDGLGALRPRAPATRGCVSRASPLLLLLLVPSPRLGXASPRRELXGDWERXSRLGIAGPPGGRSGA

SEQ ID NO: 101039 - protein, 66 aa, Gossypium hirsutum
  Clone ID: LIB3196-036-P1-M1-A7.pep
RTRGLVSFYITIIDIDSMVERFIFFFYHTIEFYRMVERFIFFFYHTIEFYRILLILVHSFYLRREI

SEQ ID NO: 101040 - protein, 49 aa, Gossypium hirsutum
  Clone ID: LIB3196-036-P1-M1-A9.pep
TLLKRKGWVFARTIIIFQTIIGCSSIQFRHYYTEVTQPLLFKGYVSCLY

SEQ ID NO: 101041 - protein, 69 aa, Gossypium hirsutum
  Clone ID: LIB3196-036-P1-M1-B2.pep
KDILPSFLYLFFFFFFPMASACVNNLTVVSTETNLHSTPPYSPYVSSPEIQDTAAGGDFEFRLEEDPVT

SEQ ID NO: 101042 - protein, 79 aa, Gossypium hirsutum
  Clone ID: LIB3196-036-P1-M1-B3.pep
MAKLGGYSAPLALILFLAKASITCADVESEVNLDSCEPQIREHAHLKHCQKYMEEEWGCQCSDNIFGGYIDSCCQQLEK

SEQ ID NO: 101043 - protein, 63 aa, Gossypium hirsutum
  Clone ID: LIB3196-036-P1-M1-B4.pep
FLSYLNNVQLFFFKYFFSSPSSEKSNCMYDKQLYILFHSCLLKLCFYLQSLFLFSMHFVLYFD

SEQ ID NO: 101044 - protein, 48 aa, Gossypium hirsutum
  Clone ID: LIB3196-036-P1-M1-B5.pep
KSTKNTQIAQNLIRQDRGLHVDQDRVVKSWETCNTPNPRPTPESNTRC

SEQ ID NO: 101045 - protein, 31 aa, Gossypium hirsutum
  Clone ID: LIB3196-036-P1-M1-C2.pep
RPKYYRPFLVFFTICCFQINNDFCVGNKAMA

SEQ ID NO: 101046 - protein, 64 aa, Gossypium hirsutum
  Clone ID: LIB3196-036-P1-M1-C5.pep
HHRTSLYKKGGWCSAPGFPGARHETLPASIEHGGDILEIDIPTLSGCLYALIFEKALPFLQRGG

SEQ ID NO: 101047 - protein, 92 aa, Gossypium hirsutum
  Clone ID: LIB3196-036-P1-M1-C8.pep
SQQYCSVCGIIKSGFSPKMDGISTLSTSWRAHMAVPEDVEEEFKFMNVKRAMLVCRVVAGRVGSEGDETNKEDGGFDSVIGRGGGNMAHHTK

SEQ ID NO: 101048 - protein, 58 aa, Gossypium hirsutum
  Clone ID: LIB3196-036-P1-M1-D2.pep
LVDVPKNAGKPVNRGIRHIVMEKGIWYMCGIIKARVIEGVPYLRYGISFIISSPTIGE

SEQ ID NO: 101049 - protein, 130 aa, Gossypium hirsutum
  Clone ID: LIB3196-036-P1-M1-D6.pep
MPSCHCPTLPHCCLSTKKKPSSIWDLELHMSGEDLALTHRCHGAEMLFPRPQSHSQPQSPASLWTGITAPSFFQFLQHQTSLCSCTSAPQTCTVPADLTCPMAFMAPSRPQTLLCVPSWPQACCSQQVWA

SEQ ID NO: 101050 - protein, 119 aa, Gossypium hirsutum
  unsure (1)..(119): unsure at all Xaa locations
  Clone ID: LIB3196-036-P1-M1-D9.pep
TKTQLVKFSLDADSGWRISSKKCIHRDLAARNCLXGENNVLKISDFGMSRQEDGGVYSSSDLKQIPIKWTAPEALNYGRYRSESDARSFGILLWETFSLGGLSIALMESLYYLCLSEDL

SEQ ID NO: 101051 - protein, 132 aa, Gossypium hirsutum
  Clone ID: LIB3196-036-P1-M1-E1.pep
DNSLCKEKVLQIELEAPMPSLGAPELLLHRIVRYLAVASSMKNKDGKPGYSYVQPIILKLLITWLADCPNAVQCFLDSRPHLTYLLELVSSTSSTVCVRGLAAVLLGECVIYNKSSENGKDGFTIADAISQN

SEQ ID NO: 101052 - protein, 130 aa, Gossypium hirsutum
  Clone ID: LIB3196-036-P1-M1-E10.pep
NFGSKEDFDSLLQSAKKKSIRVILDLTPNYRGENLWFSTQVDSVATKVKDALEFWLQAGVDGFQVRDIENLKDASSFLAEWENITKGFSEDRLLIAGTNSSDLQQIVSLLESNKDLLLTSSYLSDSSFTG

SEQ ID NO: 101053 - protein, 75 aa, Gossypium hirsutum
  Clone ID: LIB3196-036-P1-M1-E12.pep
NVGTCSGYYRSSSPYVKPWQAGVYSNSEFWGFSKDNILHTLYVIELHGSDLGQYRINQHLNMLQQNVDYSDKMHT

SEQ ID NO: 101054 - protein, 65 aa, Gossypium hirsutum
  Clone ID: LIB3196-036-P1-M1-E3.pep
NFIIFVLYFDISAYSNSRFLMLITMSILIKLIPNQHNEEVINFIQYFLINNFLVFVPLIKIRTII

SEQ ID NO: 101055 - protein, 98 aa, Gossypium hirsutum
  Clone ID: LIB3196-036-P1-M1-E7.pep
MADSERLSAPGCWAACTNFSRTRKGILLFAEIILCLVILICFSASTPGYSSLSVVEMILAAIFFVVYMCDLHTKIPFINWPWSDFFRTLIAAILYLIT

SEQ ID NO: 101056 - protein, 136 aa, Gossypium hirsutum
  Clone ID: LIB3196-036-P1-M1-E8.pep
SRLQPALPPEAQSVPELEEVARVLAEIPRPLKRRGSMEQAPAVALPPTHKKQYQQIISRLFHRHGGPGPGGPEPELSTITEGSEARAGPPAPAPPAPIPPPAPSQSSPPEQLQSMEMRSVLRKAGSPRKARRARLN

SEQ ID NO: 101057 - protein, 132 aa, Gossypium hirsutum
  Clone ID: LIB3196-036-P1-M1-F10.pep
MTAAAPASPEQIIVHALSPEHLLNTSDNVTVQCHTPRVIIQTVATEDITSSISQAELTVDSDIQSSDFPEPPDALEADTFPDEIHHPKMTVEPSFNDAHVSKFSDQNSTELMNSVMVRTEEEISDTDLKQEE

SEQ ID NO: 101058 - protein, 104 aa, Gossypium hirsutum
  unsure (1)..(104): unsure at all Xaa locations
  Clone ID: LIB3196-036-P1-M1-F2.pep
SDHGLLSIQTGTPKTAVSSGLIAFFSSLDVLTSXPSVSILVIFMLMAVALLVRRYYITASSIGTSSDWRLRPHYWTGYIVTIPLWFLGTLGISIFCPAEGRTRG

SEQ ID NO: 101059 - protein, 118 aa, Gossypium hirsutum
  Clone ID: LIB3196-036-P1-M1-F6.pep
MFEKESAIRRETEGEFRLLGGREGSRFANGRLFGFDDDDQVASLGRKVSFSMEDSRIEIPSRLEPGEVSLTTLPDDESGTDEDYDYDDQECSRKEPEIICRHLDHVNMLGLNKTTLRL

SEQ ID NO: 101060 - protein, 134 aa, Gossypium hirsutum
  Clone ID: LIB3196-036-P1-M1-F7.pep
GVSGDGQSLEGACGDGQSLEGVSGDGQSLEGVSGDGQSLEGVSGDGQSLEGVSGAGHSAGLAAGQGPGADELGLSRGKPYACGECGEAFAWLSHLMEHHSSHGGRKRYACQGCWKTFHFSLALAEHQKTHEKEK

SEQ ID NO: 101061 - protein, 45 aa, Gossypium hirsutum
  Clone ID: LIB3196-036-P1-M1-G11.pep
LREGKFDKEKWFSDKNLRLFLQQISGRNTPFFSPLVTNCYCEAFF

SEQ ID NO: 101062 - protein, 89 aa, Gossypium hirsutum
  Clone ID: LIB3196-036-P1-M1-G12.pep
METPEAAAPAGSLFPSFLLLACGTLVAALLGAAHRLGLFYQLLHKVDKASVRHGGENVAAVLRAHGVRFIFTLVGGHISPLLVACEKLG

SEQ ID NO: 101063 - protein, 137 aa, Gossypium hirsutum
  unsure (1)..(137): unsure at all Xaa locations
  Clone ID: LIB3196-036-P1-M1-G2.pep
CPSHFRETLTRVLFKYFEVPSVLLAPSHLMALLTLGINSAMVLDCGYRESLVLPIYEGIPVLNCWGALPLGGKALHKELETQLLEQCTVDTSAAKEQSLPSVMGSVPEGVLEDIXKVRTCFVSDLKRGLKIQAAKFN

SEQ ID NO: 101064 - protein, 30 aa, Gossypium hirsutum
  Clone ID: LIB3196-036-P1-M1-G5.pep
MSFPFFHSEFLLYGLYSHLKVIPLGLVTFE

SEQ ID NO: 101065 - protein, 54 aa, Gossypium hirsutum
  Clone ID: LIB3196-036-P1-M1-G7.pep
ISSRNFHTIMQSYHRPQNNHKIIISISDFVVTKPLFQLGPKSGYYSMRKITLKI

SEQ ID NO: 101066 - protein, 49 aa, Gossypium hirsutum
  Clone ID: LIB3196-036-P1-M1-H2.pep
LSKLRNQREKNWGIAFWEKSIDLRQYLRTNPPRLYLLLWLRIGRCIHST

SEQ ID NO: 101067 - protein, 85 aa, Gossypium hirsutum
  unsure (1)..(85): unsure at all Xaa locations
  Clone ID: LIB3196-036-P1-M1-H5.pep
SHGYSRPDNNSVTAHIRLVFKGPRSMEENTGKGIESIFHXMLKNHSGSLTTDLNSLRLMEISKVNAAEIINNRQKTQKTILSALA

SEQ ID NO: 101068 - protein, 129 aa, Gossypium hirsutum
  Clone ID: LIB3196-036-P1-M1-H7.pep
RYLTNQKNSNSKNDRRNRKFKEAERLFSKSSVTSAAAVSALAGVQDQLIEKREPGSGTESDTSPDFHNQENEPSQEDPEDLDGSVQGVKPQKAASSTSSGSHHSSHKKRKNKNRHRIDLKLNKKPRADY

SEQ ID NO: 101069 - protein, 135 aa, Gossypium hirsutum
  Clone ID: LIB3196-036-P1-M1-H9.pep
IVEGLMTTVHAITATQKTVDGPSGKLWRDGRGALQNIIPASTGAAKAVGKVIPELNGKLTGMAFRVPTANVSVVDLTCRLEKPAKYDDIKKVVKQASEGPLKGILGYTEHQVVSSDFNSDTHSSTFDAGAGIALN

SEQ ID NO: 101070 - protein, 48 aa, Gossypium hirsutum
  Clone ID: LIB3196-037-P1-M1-A1.pep
LLPHSNPLIQPDVNHIAHIINSVKRTKESKSLTCNKEYHKIVFSPAFF

SEQ ID NO: 101071 - protein, 65 aa, Gossypium hirsutum
  Clone ID: LIB3196-037-P1-M1-A12.pep
ILKINCLSCLSNELSLLTPRFRLRRWSRVRGVTVILSHFHSKIVTGCNNPKAPNAQLLLADISNI

SEQ ID NO: 101072 - protein, 80 aa, Gossypium hirsutum
  Clone ID: LIB3196-037-P1-M1-A2.pep
HLFCIASLFFSLPFFCFTSKERWFSPKSLPKHGTKHYRTYHTNFHKILSHQFASKLKFFAFNHKVPNTSLPGPKHTGRVG

SEQ ID NO: 101073 - protein, 125 aa, Gossypium hirsutum
  unsure (1)..(125): unsure at all Xaa locations
  Clone ID: LIB3196-037-P1-M1-A4.pep
CGAQVRFGTCFRGEDPSLTDDITSSSLVXSEDRDLFLTMNVTPEVKSRGMKFAEEQLLKHGWTQGKGLGRKENGITQALRVTLKQDTHGVGHDPAKEFTNHWWNELFNKTAANLVVETGQDGVQI

SEQ ID NO: 101074 - protein, 119 aa, Gossypium hirsutum
  unsure (1)..(119): unsure at all Xaa locations
  Clone ID: LIB3196-037-P1-M1-A5.pep
GVVYVEVRNNPHVFANYXVVPIPLNQPEEDFIPDVVVSLEAQLLLERERDFIVKAQPILHCMRHQPNSSLDADEFCHKYHQKTVASTYLAGHETIPGCNLFSGHVHVYHDAANSGIYHT

SEQ ID NO: 101075 - protein, 107 aa, Gossypium hirsutum
  Clone ID: LIB3196-037-P1-M1-A6.pep
MKPPPPSLNSLPLFLFLLLSAVISAATTTTNATSKLPPAPSPTTETPSSSSSSSSTLDPKQIEALESLNIPTARDPCIQPSPHNATVCDSSKPFRHLVSLHLSNCSS

SEQ ID NO: 101076 - protein, 56 aa, Gossypium hirsutum
  Clone ID: LIB3196-037-P1-M1-A7.pep
FTYAANQRHYNLTTARFKTPDPAIATSRKDLQELPPVLFSYVLQYMKKQQYSDLSY

SEQ ID NO: 101077 - protein, 126 aa, Gossypium hirsutum
  Clone ID: LIB3196-037-P1-M1-B12.pep
DESETAVKPLASALLQMMEGNGNGHEHCSDCENEEDNSYNRGGLSPANDTGAKKKKKKQKKKKEKGSETDSTQDQPVKMNSLPAERIQEIQKAIELFSVGQGPAKTMEEASKRSYQFWDTQARPQA

SEQ ID NO: 101078 - protein, 90 aa, Gossypium hirsutum
  Clone ID: LIB3196-037-P1-M1-B2.pep
VKEVIPSTLWIKELAKDLKQQPTSLRRRKNLPVNVSNGDKKEQMADKCHFCKKGHYQKDFQKYKAWFKKKGKFYVFVCFELNLIEVHNNT

SEQ ID NO: 101079 - protein, 110 aa, Gossypium hirsutum
  Clone ID: LIB3196-037-P1-M1-B5.pep
MDTDTTQLKLALLAVSLLFLPFLQATDFKYCDNGGNYVVKVNGIDISPNPVVSGKPATFSISASTGQAISGGKAVIDVSYFGFHIHQETHPLCEETSCPIAVGNFVLSHN

SEQ ID NO: 101080 - protein, 44 aa, Gossypium hirsutum
  Clone ID: LIB3196-037-P1-M1-B6.pep
LGAFTISLMMIRNKISKNIKKFFFLKNHNLFLKLTTLIVLLTIM

SEQ ID NO: 101081 - protein, 54 aa, Gossypium hirsutum
  unsure (1)..(54): unsure at all Xaa locations
  Clone ID: LIB3196-037-P1-M1-B9.pep
KYTEMTSXTQIFGEIFEPFEHIAFFLAHFFYGLSVSTLNCYSRTCFDYTCRDHT

SEQ ID NO: 101082 - protein, 60 aa, Gossypium hirsutum
  Clone ID: LIB3196-037-P1-M1-C10.pep
KMDGANNYLISYSTCYYSGVPLIFFSLLHTLTWTHLSSQQHDGANKVVLTYLAILSIGVS

SEQ ID NO: 101083 - protein, 127 aa, Gossypium hirsutum
  Clone ID: LIB3196-037-P1-M1-C12.pep
AILTPNDGRCHLEDNMYKRSNEFDYPSVGQLAHKLAENNIQPIFAVTRKMVKTYEKLTEIIPKSAVGELSDDSSNVVQLIKNAYNKLSSRVLLDHNALPDTLKVTYDSFCSNGVTLKDQSRGDCDGV

SEQ ID NO: 101084 - protein, 75 aa, Gossypium hirsutum
  Clone ID: LIB3196-037-P1-M1-C5.pep
PRVRPRVRARVRSKRQIQSYPHCGLATSSEQSASFFTICQPIHMRYTNIHIYRVQFIIKNSYHSTYTGMLYICQS

SEQ ID NO: 101085 - protein, 98 aa, Gossypium hirsutum
  Clone ID: LIB3196-037-P1-M1-C6.pep
IAAQLLQLTNLEHDVYERLTNLQEGIIPKKKAATDDDLHRINELIQGNMQRCKLVMDQISEARDSMLKVLDHKDRVLKLLNKNGTVKKVSKLKRKEKV

SEQ ID NO: 101086 - protein, 57 aa, Gossypium hirsutum
  Clone ID: LIB3196-037-P1-M1-C9.pep
QPPISTKSPFYDQFNNFCKNGPFGRFIDSVKVVPLIINMHNLPINLKIPACHSWVNF

SEQ ID NO: 101087 - protein, 62 aa, Gossypium hirsutum
  Clone ID: LIB3196-037-P1-M1-D11.pep
MDMKRRIHLELRNRTPAAVRELVLDNCKSNDGKIEGLTAEFVNLEFLSLINVGLISVSNLPK

SEQ ID NO: 101088 - protein, 45 aa, Gossypium hirsutum
  Clone ID: LIB3196-037-P1-M1-D12.pep
ESQFRFLWCEIYVTLSIILFFQFSFYQILEAVSLVSTSEETAVAV

SEQ ID NO: 101089 - protein, 36 aa, Gossypium hirsutum
  Clone ID: LIB3196-037-P1-M1-D4.pep
NQFLLNLLDKIIKQQNQSLKFILFHHKLPTLINDSF

SEQ ID NO: 101090 - protein, 93 aa, Gossypium hirsutum
  Clone ID: LIB3196-037-P1-M1-D5.pep
MASLLKTLVTGCSCPLLSNLGSCKGLHVKKDFLRTFHTHQELWCKAPVKPGIPYKQLTVGVPKEIFQNEKRVALSPAGVQTLVKQGFNVVVES

SEQ ID NO: 101091 - protein, 112 aa, Gossypium hirsutum
  unsure (1)..(112): unsure at all Xaa locations
  Clone ID: LIB3196-037-P1-M1-D6.pep
DAVKDTYLDLENALQIFELKIKLXRLGKGKKKLLXYYNXMMSLWQELDQCYNDEXECTEDSVKAMKKEENERTYLFLAGLNKEFDEVRSRILGKNRFQHSVRFFFEVRREET

SEQ ID NO: 101092 - protein, 40 aa, Gossypium hirsutum
  Clone ID: LIB3196-037-P1-M1-D7.pep
RSWQNELMYQRVILMLGSLSFSYYNDMIESVSDRHDSIII

SEQ ID NO: 101093 - protein, 127 aa, Gossypium hirsutum
  Clone ID: LIB3196-037-P1-M1-E1.pep
IIHGNHSSIKALLNVFSNLFPTLISISWLFYLFVLQSIFCLMFHITNLVTMEKHAFSSGSVPGLSLLFLIKSLPFNCYVSEICPIPLRLSLLRSGFPFSVVSGCSRFLCFLNESALLSSGQVGSGFC

SEQ ID NO: 101094 - protein, 123 aa, Gossypium hirsutum
  Clone ID: LIB3196-037-P1-M1-E11.pep
MDNAEIRVHTVEDYQAIVDAEWNILYDKLEKIHHSGAKVVLSKLPIGDVATQYFADRDMFCAGRVPEEDLKRTMMACGGLNQTSVNALSADVLGRCQVFEETQIGSERYNFFTGLPKAKTCTF

SEQ ID NO: 101095 - protein, 89 aa, Gossypium hirsutum
  Clone ID: LIB3196-037-P1-M1-E12.pep
SGTQYLIESIRSTIVTPSVSLTRDRRIPELFQSYGMPTISDSARLVNRVFDPLSQFNITFNSFTKQFNYLPPFNQHSIHNSIQIHFFTF

SEQ ID NO: 101096 - protein, 98 aa, Gossypium hirsutum
  Clone ID: LIB3196-037-P1-M1-E2.pep
IINPAMMAAAQAALQSSWGMMGMLASQQNQSGPSGNNQSQGNMQREPNQAFGSGNNSYSGSNSGAAIGWGSASNAGSGSGFNGGFGSSMDSKSSGWGM

SEQ ID NO: 101097 - protein, 100 aa, Gossypium hirsutum
  Clone ID: LIB3196-037-P1-M1-E5.pep
VSFKLLWLPIDPGHAFLHHTKNLLQFLKHHRGEMVWCRRQEDGDGSRGRRYQQCLAWSLTVKGQVPSALLLSKASLKTDWHLATAEQTPNGPSTPGHGLL

SEQ ID NO: 101098 - protein, 127 aa, Gossypium hirsutum
  Clone ID: LIB3196-037-P1-M1-E6.pep
IPAVLQSSRLYSLSGMVTVPSSILGTQTYVCNVNHKPSNTKVDKRVEIKTCGGGSKPPTCPPCPAPELLGGPSVFLFPPKPKDTLMISRTPEVTCVVVDVSQEDPDVKFNWYVNGAEVHHAQTKPRE

SEQ ID NO: 101099 - protein, 72 aa, Gossypium hirsutum
  Clone ID: LIB3196-037-P1-M1-E8.pep
NKQAHLLGQCECLERLLQEKPPSFPTILTSNCCNSISADSRKEPIFSGGSCFLPKDRQGNNMLKEVHFYSFI

SEQ ID NO: 101100 - protein, 95 aa, Gossypium hirsutum
  Clone ID: LIB3196-037-P1-M1-F1.pep
SLGIRMGRIMVFKRTTIWIPPYVHGTQVTLNEENLSYMFDETTPVKDFEKLPYYVTHNDNITKELEQKRETSSHVKRRRMLQFDTHVCRFFPHLQ

SEQ ID NO: 101101 - protein, 94 aa, Gossypium hirsutum
  Clone ID: LIB3196-037-P1-M1-F11.pep
KRKQKHKLTPRPNPNYPDSYFTLLLPRYARVSTVSNPPPQHHLLYTPINSFYINHPHNSINYLILSIHNYIKHISKFTYCISNTTSTFLKTIKP

SEQ ID NO: 101102 - protein, 64 aa, Gossypium hirsutum
  Clone ID: LIB3196-037-P1-M1-F12.pep
THKVLSGLPVQAESPATTITLMSLDLNYQSRLNSDPNSDYPSGINPFYTYSSGGLYQDRITRSS

SEQ ID NO: 101103 - protein, 93 aa, Gossypium hirsutum
  Clone ID: LIB3196-037-P1-M1-F2.pep
MDAIKKKMQMLKLDKENALDRAEQAEADKKAAEDRSKQLEDELVSLQKKLKGTEDELDKYSEALKDAQEKLELAEKKATDAEADVASLNRRIQ

SEQ ID NO: 101104 - protein, 122 aa, Gossypium hirsutum
  unsure (1)..(122): unsure at all Xaa locations
  Clone ID: LIB3196-037-P1-M1-F4.pep
GLYEWLVKPFGLTNAPSTFMRLMNYVLRSFIGXLVYSKSLEDHIQHLRAVLEVLRKEVLYANLKKCSFCTNEVVFLGFVVSARGLEVDQEKVKAINEWPCPTNISQVRSFHGLASFYRTHAS

SEQ ID NO: 101105 - protein, 129 aa, Gossypium hirsutum
  Clone ID: LIB3196-037-P1-M1-F6.pep
IWSAAGNAFCQAAQLHLQLQSKHDAATCFVDAGNAFKKADPQEAINCLMRAIEIYTDMGRFTIAAKHHICIAEIYETELVDIEKAIAHYEQSADYYKGEESNSSANKCLLKVAGYAALLEQYQKAIDIY

SEQ ID NO: 101106 - protein, 82 aa, Gossypium hirsutum
  Clone ID: LIB3196-037-P1-M1-F9.pep
RRTAADDRSVTDPLAEFPSPLPFLSHFFFFLPFQMNFFKKFLTFYRGPKRTVLVPPTFNLKLHCFGLGLSRHRPTPVRSACF

SEQ ID NO: 101107 - protein, 121 aa, Gossypium hirsutum
  Clone ID: LIB3196-037-P1-M1-G11.pep
LSHVGYDLGGGRIYKPLRTRDELDQFLDKMDDPDYWRTVQDPMTGQDLRLTDEQVALVRRLQSGQFGDMGFNPYEPAVDFFSGDVMIHPVTNRPADKRSFIPSLVEKEKVSRMVHAIKMGW

SEQ ID NO: 101108 - protein, 52 aa, Gossypium hirsutum
  Clone ID: LIB3196-037-P1-M1-G2.pep
SPMRPTRTRTHDIFRGCRINILILLPTLERNFKQYIVVKCYIISIFLLLVDV

SEQ ID NO: 101109 - protein, 64 aa, Gossypium hirsutum
  Clone ID: LIB3196-037-P1-M1-G5.pep
IFFKWGHFSHLVIKRIKKGEIKSKLVSILFTLAKFLKETIARVSSTFKVDRKYIVAPFFCFLHF

SEQ ID NO: 101110 - protein, 61 aa, Gossypium hirsutum
  Clone ID: LIB3196-037-P1-M1-G6.pep
LNPKRNPFERTNLFLFISPYHDHISTLLLNPLSVHPPIDSGYIASEAWIGSGILGRGTKVL

SEQ ID NO: 101111 - protein, 63 aa, Gossypium hirsutum
  Clone ID: LIB3196-037-P1-M1-G7.pep
TFCHAGSISFVQTHVLFAKTKIGLDVKPDFQHVSPKKRNILYNHDTITTSRKLFFLVFRYLAG

SEQ ID NO: 101112 - protein, 46 aa, Gossypium hirsutum
  Clone ID: LIB3196-037-P1-M1-H10.pep
SLMFEMFSLCHSRNHFVTLCTPNSFLASAWVAPGILGRGLKAHQRS

SEQ ID NO: 101113 - protein, 45 aa, Gossypium hirsutum
  Clone ID: LIB3196-037-P1-M1-H12.pep
LPGGPPPFFFFFFLSWPLSFCFFKINTIWGQYLLIKTMSYSLQRC

SEQ ID NO: 101114 - protein, 53 aa, Gossypium hirsutum
  Clone ID: LIB3196-037-P1-M1-H2.pep
KILIFGTKTSSNQLGTNFGRNEGANSSSCEIDSRPHFLNFCRTKIIVLANQAF

SEQ ID NO: 101115 - protein, 119 aa, Gossypium hirsutum
  Clone ID: LIB3196-037-P1-M1-H3.pep
KYTEEEQEDIQTTTEEMAENHENSLPPAIAADPVNQNHAPRTMYDYAKPNLTGTESSIVRPAIATNNFKLKPNMIQMIQQFVQFDGLQDEDPNTHLANFLEFCDTFKINGISNDAIHLL

SEQ ID NO: 101116 - protein, 109 aa, Gossypium hirsutum
  unsure (1)..(109): unsure at all Xaa locations
  Clone ID: LIB3196-037-P1-M1-H4.pep
MVNFTVDQIRAIMDKKANIRNMSVIAHVDHGKSTLTDSLVCKAGIIASARAGETRFTDTRKDEQERCITIKSTAISLFYELSENDLNFIKQSKXDGAGFLINLIDSPGH

SEQ ID NO: 101117 - protein, 122 aa, Gossypium hirsutum
  unsure (1)..(122): unsure at all Xaa locations
  Clone ID: LIB3196-037-P1-M1-H5.pep
PNGHGGRAEHEVPLLQNIYRIACFAAQYVLITLFLSKLPTDSKNEKALGRIINSWELSRCGHSFLSNLHLTNGELVMQEMGIYYMVFQTYYEFQEDVXDYTKNGKHMAQYIYKYTSYPDHIL

SEQ ID NO: 101118 - protein, 61 aa, Gossypium hirsutum
  Clone ID: LIB3196-038-P1-M1-A1.pep
GPQGELPPGLTLGPIESHVLDPESHLGSNPRASTWSCATSKHLPAYSVSPFSTCGVRGKLQ

SEQ ID NO: 101119 - protein, 70 aa, Gossypium hirsutum
  Clone ID: LIB3196-038-P1-M1-A11.pep
SQPIPVSALSAGRCVPQMRKRRERRDGQTSDPLKRSHFPETWFWVLKTRFPRLGPCTQLVFNECVWRGEF

SEQ ID NO: 101120 - protein, 77 aa, Gossypium hirsutum
  Clone ID: LIB3196-038-P1-M1-A2.pep
MFQAAERPQEWAMEGPRDGLKKERLLDDRHDSGLDSMKDEEYEQMVKELQEIRLEPHEVPRGAEPWKQQLTEDGGLG

SEQ ID NO: 101121 - protein, 87 aa, Gossypium hirsutum
  Clone ID: LIB3196-038-P1-M1-A6.pep
DLKIESDVQEPTEPEDDLDIMLGNKKKKKKNVKFPDEDEILEKDEALEDEDSKKDDGISFSNQTGPAWAGSERDYTYEELLNRVFNI

SEQ ID NO: 101122 - protein, 44 aa, Gossypium hirsutum
  Clone ID: LIB3196-038-P1-M1-B1.pep
KVKKKEFKFKYLQNENFIFGWMQFHRFWVRPFSIGRHKVPPRVR

SEQ ID NO: 101123 - protein, 99 aa, Gossypium hirsutum
  Clone ID: LIB3196-038-P1-M1-B11.pep
HPHPKQNNPLKQAALVTGRKLVKTLALLVRWHHTPLPVGSRKTGDSVSSVFGYTFSVFPTLQQRKTIVLGFFLFFALKVLTFLSNFSLPSNNLTNTYYY

SEQ ID NO: 101124 - protein, 62 aa, Gossypium hirsutum
  Clone ID: LIB3196-038-P1-M1-B2.pep
SVTWLCATHGHTTRPSGLFNFAAGLSHTIIGCYTVWDMTTYLISNCTQVGTRDLTRPCDPYF

SEQ ID NO: 101125 - protein, 68 aa, Gossypium hirsutum
  Clone ID: LIB3196-038-P1-M1-B3.pep
MDGPGFMASLVAGGVAGVSVDLILFPLDTIKTRLQSPQGFNKAGGFRGIYAGVPSAAVGSLPNAAAFL

SEQ ID NO: 101126 - protein, 65 aa, Gossypium hirsutum
  Clone ID: LIB3196-038-P1-M1-B5.pep
SSIFCRGYMAPEYALWGYLTFKANVYSFGIVALEIVTGKNNTKYRPEEDYVCLQDWVRYDPCFKL

SEQ ID NO: 101127 - protein, 59 aa, Gossypium hirsutum
  Clone ID: LIB3196-038-P1-M1-B7.pep
DQNLNSENAKIHVTEEVQTTKLFKRKFKQTDREPKFKKNKRAHAIIMVSQDILKMNVDF

SEQ ID NO: 101128 - protein, 84 aa, Gossypium hirsutum
  Clone ID: LIB3196-038-P1-M1-B8.pep
HKCSKCSNSYGTEWDLKRHTEDCGKTFRCTCGCPYASRTALQSHIYRTGHEIPAEHRDPPSKKRKMENCMQNQKLSNKTIESLN

SEQ ID NO: 101129 - protein, 56 aa, Gossypium hirsutum
  Clone ID: LIB3196-038-P1-M1-C12.pep
LLFIFHQFQNYFLINLIRLETYSVAEAFKIVIFKENRLHLRKMLYLIKLSFRCNSK

SEQ ID NO: 101130 - protein, 92 aa, Gossypium hirsutum
  Clone ID: LIB3196-038-P1-M1-C4.pep
MALHVPKAPGFAQMLKEGAKHFSGLEEAVYRNIQACKELAQTTRTAYGPNGMNKMVINHLEKLFVTNDAATILRELEVQHPAAKMIGMASHM

SEQ ID NO: 101131 - protein, 80 aa, Gossypium hirsutum
  Clone ID: LIB3196-038-P1-M1-C5.pep
PTRPFLMKLLFYLTYLLKALPIKKIKSRWNIRLIQNLQQSRLLKPVQKFRKELFLHHNTLSPKTELEEKLNLQRSIPRLI

SEQ ID NO: 101132 - protein, 45 aa, Gossypium hirsutum
  Clone ID: LIB3196-038-P1-M1-C7.pep
LKWLCNNTPIISLIHAMDSPIRFDSNPVDLCSLICRIACNSIQLH

SEQ ID NO: 101133 - protein, 42 aa, Gossypium hirsutum
  Clone ID: LIB3196-038-P1-M1-C8.pep
ASPPKTEDCVGCKRCESAFPTDILSVRVYLWHETTRSMGLAY

SEQ ID NO: 101134 - protein, 92 aa, Gossypium hirsutum
  Clone ID: LIB3196-038-P1-M1-C9.pep
DAMDRDDNQASKKLRLRSTSRSRSLSRPPGEVIPGEGLKDSAQKIKAIKLAKKSVLKRNKNARRGEADRVIPTLKPKHLFSGKRSIGKTQRR

SEQ ID NO: 101135 - protein, 57 aa, Gossypium hirsutum
  Clone ID: LIB3196-038-P1-M1-D11.pep
PGAYAIVQFSLTTDLQIKKKKEKKILPAVCKGLESQLASFIQVSSLQCALKSGAEQG

SEQ ID NO: 101136 - protein, 77 aa, Gossypium hirsutum
  Clone ID: LIB3196-038-P1-M1-D2.pep
MAVEALHCGLNPRGIDHPAHAEGIKLQIEGEGVESQSIKNKNFQKVPDQKGTPRRLQAESETAKVRNIPVNYGDLKA

SEQ ID NO: 101137 - protein, 70 aa, Gossypium hirsutum
  Clone ID: LIB3196-038-P1-M1-D3.pep
MKKVEKSVNEVMEWMNNVMNAQAKKSLDQDPVVRAQEIKIKIKELNNTCEPVVSHPRPKIESPKLERTPN

SEQ ID NO: 101138 - protein, 67 aa, Gossypium hirsutum
  unsure (1)..(67): unsure at all Xaa locations
  Clone ID: LIB3196-038-P1-M1-D8.pep
MATEFIKSCCGGCFYGETEKHNFSVERDFKATVPHSQNATISVPXPLTSVSVKPQVGCTEDYLLSKL

SEQ ID NO: 101139 - protein, 55 aa, Gossypium hirsutum
  Clone ID: LIB3196-038-P1-M1-D9.pep
TIFSKLQRSHACVNRPCASHGFKHTHVSRPWQNRAYILTCPHGHMTRPCARLCEN

SEQ ID NO: 101140 - protein, 78 aa, Gossypium hirsutum
  Clone ID: LIB3196-038-P1-M1-E1.pep
VHAVNLYKISFGSVIVFLLFIFNRWCLTILPKLQCNQRHNHSAPQPENPGLKQSSHVSLPSSWDHRCVPPPLGLFWRI

SEQ ID NO: 101141 - protein, 62 aa, Gossypium hirsutum
  Clone ID: LIB3196-038-P1-M1-E11.pep
GFARAFIYDVMIFVDFLVAEVYRLSCCFSLKLISHLVLQWISKQVCLCFEFGLGLFHFAFAV

SEQ ID NO: 101142 - protein, 70 aa, Gossypium hirsutum
  Clone ID: LIB3196-038-P1-M1-E2.pep
PQPLKVLELLSLKMSTINTELQRGGGLSRPQSWKVPGVRIRTKVWVILKPASFYEISLLAQFHLHLLPEN

SEQ ID NO: 101143 - protein, 108 aa, Gossypium hirsutum
  Clone ID: LIB3196-038-P1-M1-E5.pep
LLKSGLRLKTPIGQKPTEIKALASSAVLALRQNPLECLGVAPPTCPTVSPGRSLPGQAQDLPAAQPGHHPAPMHPGTARLLFTSTYMRMASETLPPWSAEARPGLPRG

SEQ ID NO: 101144 - protein, 83 aa, Gossypium hirsutum
  Clone ID: LIB3196-038-P1-M1-E9.pep
NMSKRGKKRLQTKHYLVKFKSKFKRKELSRNQTVELSEEEVCKSQPNLSSNWYLLTGKAFLDLLSASKMHLSTNPVRSKTPEY

SEQ ID NO: 101145 - protein, 103 aa, Gossypium hirsutum
  Clone ID: LIB3196-038-P1-M1-F1.pep
GPCFTLLIHASVLPKIHRNLVLPSTFLFHSPHLSVLPFYLHRFTLLPFCFTSLWRYNWTLNTNQKAASFSRFLFLSIGETMFCPLEPVRKIQPYFLFKNMFSQ

SEQ ID NO: 101146 - protein, 92 aa, Gossypium hirsutum
  Clone ID: LIB3196-038-P1-M1-F10.pep
MDHWYFLGFLLLILLQLCLVSAEINGSVLEMKRGTSSVPFDPTRVTQLSWHPRAFLYKGFLSSEECDHLITLAKDKLEKSMVAGYESGDSIE

SEQ ID NO: 101147 - protein, 52 aa, Gossypium hirsutum
  Clone ID: LIB3196-038-P1-M1-F6.pep
DYKYTEKDENVLTREWLNPIYILTELLCQNLLCQPQTSGGKGRGKKPDRRLP

SEQ ID NO: 101148 - protein, 104 aa, Gossypium hirsutum
  Clone ID: LIB3196-038-P1-M1-F7.pep
PTRPGVLKILDPRLSSVPLHEVMHVFYVAMLCVEEQAVERPTMREVVQILTEVPKPPSSKQQQGDSAITESSPISQPTTLESPRDATTKEPKDQHTPPPDLLSI

SEQ ID NO: 101149 - protein, 117 aa, Gossypium hirsutum
  Clone ID: LIB3196-038-P1-M1-F8.pep
PVQALQKGRTGNLTAGSLESTEPIYVYKAQGAGVTPPPTPSGSRTKQRLPGQKPFKRSLRGSDALSETSSASHIEDLEKVERLSGGPEQITLEASSTEGHPGAPSPQHASRSEAFQK

SEQ ID NO: 101150 - protein, 97 aa, Gossypium hirsutum
  unsure (1)..(97): unsure at all Xaa locations
  Clone ID: LIB3196-038-P1-M1-G11.pep
MGPGPRLLLPLLLCVGLGALVSSSGAGGFRMRGPSVTAKVFSDVRIGDRDDGRIVIXGLFGKVVPKTVENFGALATGEKGYGFKGSLRHCVTKGFHD

SEQ ID NO: 101151 - protein, 97 aa, Gossypium hirsutum
  Clone ID: LIB3196-038-P1-M1-G2.pep
CLRSHFEQWGTLTDWVVMRDPNTKRSRGFGFVTYATVEEVDAAMNARPHKVDGRVVEPKRAVSREDSQRPGAHLTVKKIFVGGVLEDTAEHHLRDYF

SEQ ID NO: 101152 - protein, 71 aa, Gossypium hirsutum
  Clone ID: LIB3196-038-P1-M1-G3.pep
SQILLQNGSLVPTDYTSHTNSRYFYKKLWNLQIPPKIKTMIKTMVWRFSWNSIPTLVNLNYRRIAMNTLCP

SEQ ID NO: 101153 - protein, 135 aa, Gossypium hirsutum
  unsure (1)..(135): unsure at all Xaa locations
  Clone ID: LIB3196-038-P1-M1-G6.pep
STMEAQTTLTTNDIVISKLTQILSYLRQGTRNKKLKKKDKGKLEEKKPPEADMNIFEDIGDYVPSTTKTPRDKERERYRERERDRERDRDRDRERERERDRERERERDPEREEEKKRHSYFEKPKXDDEPMDVDK

SEQ ID NO: 101154 - protein, 87 aa, Gossypium hirsutum
  Clone ID: LIB3196-038-P1-M1-H11.pep
SLASWSWKNEVIFKICDEVHTRKIFNIPLVGCSIPDLLAWCHDTSREYSVKSGYRALLTKVTQHTDSNLSKNDNEKNSIHLFGTFKS

SEQ ID NO: 101155 - protein, 47 aa, Gossypium hirsutum
  Clone ID: LIB3196-038-P1-M1-H12.pep
ISSLTLPGALGSPSSLDKMSYQKKQPTPQPPVGCVKTSGGGSGSGGC

SEQ ID NO: 101156 - protein, 104 aa, Gossypium hirsutum
  Clone ID: LIB3196-038-P1-M1-H2.pep
DLRMKAEDYEVVKVIGRGAFGEVQLVRHKSTRKVYAMKLLSKFEMIKRSDSAFFWEERDIMAFANSPWVVQLFYAFQDDRYLYMVMEYMPGGDLVNLMSNYDVP

SEQ ID NO: 101157 - protein, 68 aa, Gossypium hirsutum
  Clone ID: LIB3196-038-P1-M1-H4.pep
FSFKEITNPSFEALPLAGAATTSTHYPRSPSSFTMHPCTTSKPHSPYLSIRWQKGVNFGLSMAVYGRA

SEQ ID NO: 101158 - protein, 54 aa, Gossypium hirsutum
  Clone ID: LIB3196-038-P1-M1-H8.pep
NRTRSEMMNTYPLLLFDLHAIWCRFIFQMTVELNFQSFESSAINPLIYGFLAFG

SEQ ID NO: 101159 - protein, 96 aa, Gossypium hirsutum
  Clone ID: LIB3196-039-P1-M1-A1.pep
HKKNYLTHDLELADIVFALKIWRHYLFGEKCHVYSNHKSLKYLITRKDLNLRQRRWLELLKDYELVIDYHPGKANVVASQHIPNWSIKHHCRLQII

SEQ ID NO: 101160 - protein, 66 aa, Gossypium hirsutum
  Clone ID: LIB3196-039-P1-M1-A2.pep
SLLRMFDEDQRLDITGFGCTKKFRLTILKSLTNPISDHGSTCDLSFPIPLLIWLLPMLSLHTLVVS

SEQ ID NO: 101161 - protein, 91 aa, Gossypium hirsutum
  Clone ID: LIB3196-039-P1-M1-A4.pep
MAGAGPAPGLPGAGGPVVPGPGAGIPGKSGEERLKEMEAEMALFEQEVLGAPVPGIPTAVPAVPTVPTVPTVEAMHVPAAPVIRPIIATNT

SEQ ID NO: 101162 - protein, 39 aa, Gossypium hirsutum
  Clone ID: LIB3196-039-P1-M1-A7.pep
SYAINAKWRKIKLMCLIHFFTDFLYVEHGYYRADLVKSF

SEQ ID NO: 101163 - protein, 45 aa, Gossypium hirsutum
  Clone ID: LIB3196-039-P1-M1-A8.pep
HRAFPKLFSSQAPPSLLLKSLIYFLLKVPVIQTQNLCISKPVMLN

SEQ ID NO: 101164 - protein, 71 aa, Gossypium hirsutum
  Clone ID: LIB3196-039-P1-M1-B10.pep
AEVADRSEIEVFINDSKQLCSSFRSYVFRFTYRESDKAVHILATKELKRRETTYLMNEVPSFIVKEVDADR

SEQ ID NO: 101165 - protein, 86 aa, Gossypium hirsutum
  Clone ID: LIB3196-039-P1-M1-B2.pep
MYRHSISSQRSWPLWTTIFTFLGVAAILGVTIGLLVHFLAVEKTYYYQGDFHISGVTYNDNCENVASQASTNLSKDIETKMLNAFQ

SEQ ID NO: 101166 - protein, 125 aa, Gossypium hirsutum
  Clone ID: LIB3196-039-P1-M1-B3.pep
VDADQVVRADMGELYDMDIKGRPLAYTPFCDNNKDMDGYRFWRQGFWREHLRGRPYHISALYVVDLVKFRETAAGDNLRVFYESLSKDPNSLANLDQDLPNYAQHTVPIFSLPQRWLWCESWWGN

SEQ ID NO: 101167 - protein, 128 aa, Gossypium hirsutum
  Clone ID: LIB3196-039-P1-M1-B4.pep
SLVEFRNLENFKQGRWSNSYKLPYSWIGTGHVVYNGAFYYNRAFTRNIIKYDLKQRYVAAWAMLHDVAYEEATPWRWQGHSDVDFAVDENGLWLIYPALDDEGFSQEVIVLSKLNAADLSTQKETTWR

SEQ ID NO: 101168 - protein, 81 aa, Gossypium hirsutum
  Clone ID: LIB3196-039-P1-M1-B5.pep
MATLPQIAVLEAGIFVKTQYIPRLAEISHLFCLKYIWSCSEESSRGAVEIAKQHFPGVECKWGDQGLNDIVQDSSLIGTAV

SEQ ID NO: 101169 - protein, 93 aa, Gossypium hirsutum
  Clone ID: LIB3196-039-P1-M1-B7.pep
IWIRLLSSPATFSPRSGFYVTFSPLPQSPESFLTTPFCVLTLVPERVPVWICVCVWVLRSPPSCTTPAIMNRFCTDLVHGYGVEGRSCERGEP

SEQ ID NO: 101170 - protein, 50 aa, Gossypium hirsutum
  Clone ID: LIB3196-039-P1-M1-C1.pep
ITGDLDWSSSSVSDSDERGSMQSLGSDEGYSSASIKRIKLQDSHKACLGL

SEQ ID NO: 101171 - protein, 115 aa, Gossypium hirsutum
  unsure (1)..(115): unsure at all Xaa locations
  Clone ID: LIB3196-039-P1-M1-C11.pep
PTRPIRNNTLSGNVPPVLKRLHAGFQYENNIGLCGVGFPNLKDCADSSXDYRSRPEPFKPNGLNQKNIRESADLPTECSKANCSSPSGSAKIGVVSGIVGVALVLTVAALFTFAW

SEQ ID NO: 101172 - protein, 56 aa, Gossypium hirsutum
  Clone ID: LIB3196-039-P1-M1-C12.pep
RDERSLNQHHKTNQLYNTYSDDCAMSSLPLGLYLYKLYYAIININIYKTLKSTILI

SEQ ID NO: 101173 - protein, 87 aa, Gossypium hirsutum
  unsure (1)..(87): unsure at all Xaa locations
  Clone ID: LIB3196-039-P1-M1-C2.pep
TLSNKLVRRSTLVPRRNFRDGNRALVDHDGXKGLAKVHIEEAGWSYVGGWTGQRGSKLETKRTLPKKSFAQITANVTKPNIHGLVMI

SEQ ID NO: 101174 - protein, 127 aa, Gossypium hirsutum
  Clone ID: LIB3196-039-P1-M1-C6.pep
IRRQLAHLVLLPLNCPSPPPVAMEEEIAALVIDNGSGMCKAGFAGDDAPRAVFPSIVGRPRHQGVMVGMGQKDSYVGDEAQSKRGILTLKYPIEHGIVTNWDDMEKIWHHTFYNELRVAPEEHPVLL

SEQ ID NO: 101175 - protein, 42 aa, Gossypium hirsutum
  Clone ID: LIB3196-039-P1-M1-C8.pep
IFFIFYPKFFIIIKYCKLFRSSISTKSLSLNLPLLRLNKTDR

SEQ ID NO: 101176 - protein, 52 aa, Gossypium hirsutum
  Clone ID: LIB3196-039-P1-M1-D11.pep
KSYQSASKEFQDSFNRSNASMRYSSRDHEKQPVSSTAQATPIASVGSVTAQN

SEQ ID NO: 101177 - protein, 28 aa, Gossypium hirsutum
  Clone ID: LIB3196-039-P1-M1-D12.pep
MFYSVAKLARKQRSSEIQITLSNFHFGY

SEQ ID NO: 101178 - protein, 31 aa, Gossypium hirsutum
  Clone ID: LIB3196-039-P1-M1-D2.pep
HSFIENQISCINNKKSIFQHPKIKINAMHAI

SEQ ID NO: 101179 - protein, 35 aa, Gossypium hirsutum
  unsure (1)..(35): unsure at all Xaa locations
  Clone ID: LIB3196-039-P1-M1-D4.pep
IITYRFFLIYMIKKIYRKHNVSYPWLHWCMVLYNX

SEQ ID NO: 101180 - protein, 62 aa, Gossypium hirsutum
  Clone ID: LIB3196-039-P1-M1-D5.pep
AEHIQTSTDSLTEERYILGISSMTVQQGSCWKSKHVHSCLRPQSPPLHMILPWAVPEHRSGA

SEQ ID NO: 101181 - protein, 58 aa, Gossypium hirsutum
  Clone ID: LIB3196-039-P1-M1-D6.pep
RRTSGPRCPSASLTPEGHSEHPHVSPPPRQLIPLLVQACRGEWGIVRGKKTQTTIQIL

SEQ ID NO: 101182 - protein, 109 aa, Gossypium hirsutum
  Clone ID: LIB3196-039-P1-M1-D8.pep
MKFISASLLLMLLVSSLSPVQGVLEVYYTHLRCRCVQESSVFIPRRFIDRIQISPRGNGCPRKEIIVWKKNKSVVCVDPQAEWIQRIMEMLRKKSSSTPPVPVFKRKIP

SEQ ID NO: 101183 - protein, 71 aa, Gossypium hirsutum
  Clone ID: LIB3196-039-P1-M1-E10.pep
SIKKTQSLIIIWYLIIIFFLFFFLKKIVIFLFKFNKINALNMLKIIIKHLYAHQINEHICFQLFHLIIGQS

SEQ ID NO: 101184 - protein, 72 aa, Gossypium hirsutum
  Clone ID: LIB3196-039-P1-M1-E6.pep
RPKFKSLKRRKRKQIERKLMCVYSPRSTSGEGQTSTSTDRHNWPFRQLDQGSSVHWDGHVMKMASSTCPGHS

SEQ ID NO: 101185 - protein, 121 aa, Gossypium hirsutum
  Clone ID: LIB3196-039-P1-M1-F1.pep
IEKTGEHFRLVYDTKGRFAVHRITVEEAKYKLCKVRKITMGMKGIPHLVTHDARTIRYPDPLIKVNDTVQIDLGTGKIINFIKFETGNVCMVIGGANLGRVGVITNRERHPGSFDVVHVKD

SEQ ID NO: 101186 - protein, 47 aa, Gossypium hirsutum
  Clone ID: LIB3196-039-P1-M1-F2.pep
MATRSCREKAQKLNEQHQLILSKLLREEDNKYCADCEAKVHARYGKY

SEQ ID NO: 101187 - protein, 91 aa, Gossypium hirsutum
  Clone ID: LIB3196-039-P1-M1-F4.pep
IMCKSFEDGLNEDIKLLIGILEIKEFVVLVERICKAEELGKEKTKADFKARDSRKRSSGKTFHSTSKKFRDDSTRSKDTTGFSRRDRDRPL

SEQ ID NO: 101188 - protein, 128 aa, Gossypium hirsutum
  Clone ID: LIB3196-039-P1-M1-F5.pep
IFLYLITGNLEKLRKMMKIAEIRKDMSGHYQNALYLGDVSERVRILKNCGQKSLAYLTAATHGLDEEAESLKETFDPEKETIPDIDPNAKLLQPPAPIMPLDTNWPLLTVSKGFFEGTIGSKGKGGAL

SEQ ID NO: 101189 - protein, 119 aa, Gossypium hirsutum
  Clone ID: LIB3196-039-P1-M1-F9.pep
ISSPEPQEGTDTTEAPFQGDQRSLEFLLPPEPDYSLLLTFIYNGRVVGEAQVQSLDCRLVAEPSGSESSMEQVLFPKPGPLEPTQRLLSQLERGILVASNPRGLFVQRLCPIPIFWDAP

SEQ ID NO: 101190 - protein, 59 aa, Gossypium hirsutum
  Clone ID: LIB3196-039-P1-M1-G1.pep
IRFGNHLTPLTSTFKLKAINHSPYPTLLSILMTLTHLLRVSSFLAEFQPQNPKSNLSDE

SEQ ID NO: 101191 - protein, 43 aa, Gossypium hirsutum
  Clone ID: LIB3196-039-P1-M1-G12.pep
CCFTKTFYIADEPRKNFLLLCSLQQGRDIRTAPEPLSNLIWDY

SEQ ID NO: 101192 - protein, 118 aa, Gossypium hirsutum
  Clone ID: LIB3196-039-P1-M1-G2.pep
GDITLKCPVMLVVGDQAPHEDAVVECNSKLDPTQTSFLKMADSGGQPQLTQPGKLTEAFKYFLQGMGYMASSCMTRLSRSRTASLTSAASIDGNRSRSRTLSQSSESGTLSSGPPGHT

SEQ ID NO: 101193 - protein, 67 aa, Gossypium hirsutum
  Clone ID: LIB3196-039-P1-M1-G3.pep
VCTSLDFRLPFSKREVPVASGSGFIVSEDGLIVTNAHVVTNKHRVKVELKNGATYEAKIKDVGEKTD

SEQ ID NO: 101194 - protein, 100 aa, Gossypium hirsutum
  unsure (1)..(100): unsure at all Xaa locations
  Clone ID: LIB3196-039-P1-M1-G6.pep
MPKRKVSSAEGAAKEEPKRRSARLSAKPPAKVEAKPKKAAAKDKSSDKKVQTKGKRGAKGIQAEVANQETKEDLPAENGETKTEESPASDEAXEKEAKSD

SEQ ID NO: 101195 - protein, 80 aa, Gossypium hirsutum
  Clone ID: LIB3196-039-P1-M1-G7.pep
EKRINRSLISVFFSFQYVFFMYLIQYLHGFSRLQSNLGFLIASFLQRKKKINKRKKKFVLVLLSFSFALVSLSCLQVQPA

SEQ ID NO: 101196 - protein, 121 aa, Gossypium hirsutum
  unsure (1)..(121): unsure at all Xaa locations
  Clone ID: LIB3196-039-P1-M1-G9.pep
ESKIFGVDLIKNSEQKVKIISESLKAASDRQKSYADLKXRDIEYQVGDKVFLKVSPWKKILRFGRKGKLSPRFIGLYEISERVGPVAYRLLLPPELERIHNVFHVSMLRRYRSDPSHVINP

SEQ ID NO: 101197 - protein, 83 aa, Gossypium hirsutum
  Clone ID: LIB3196-039-P1-M1-H1.pep
ENCCQVPDPGNVIIFPLVTISTWTESVFLHTNTYTQLQKEKKSKQLPNPKNCCQRWRKGEEAWKDTHLAGLVQIYGFLEPERH

SEQ ID NO: 101198 - protein, 54 aa, Gossypium hirsutum
  Clone ID: LIB3196-039-P1-M1-H12.pep
HIINYFHICELMLASQQLCWFYDSHFINEECGLENMKCPNEERASVRSRKIDCT

SEQ ID NO: 101199 - protein, 88 aa, Gossypium hirsutum
  Clone ID: LIB3196-039-P1-M1-H2.pep
ALSNPLSIQCNPAYSECSTRNRVFQHFTTFPHLATFFLNLCHIFILCSNKSQHISNNIKIMHYFTCLLTSMQNIAILQFTPLSSLFPV

SEQ ID NO: 101200 - protein, 71 aa, Gossypium hirsutum
  Clone ID: LIB3196-039-P1-M1-H6.pep
YSDWAVSGKIFQSLLTSRVRLRCRSRVRGVTFFLFVFFLQFLISLLPMLLILFFHSPNMFHYIVLIRVFLL

SEQ ID NO: 101201 - protein, 67 aa, Gossypium hirsutum
  unsure (1)..(67): unsure at all Xaa locations
  Clone ID: LIB3196-039-P1-M1-H7.pep
PEYTGSNTYEEAAAYIQCQFEDLNRRKDTKEIYTHFTCATDTXNVQFVFDAVTDVIIKNNLKECGLY

SEQ ID NO: 101202 - protein, 104 aa, Gossypium hirsutum
  unsure (1)..(104): unsure at all Xaa locations
  Clone ID: LIB3196-039-P1-M1-H8.pep
ARSRGIDLXKIDMGRPLADQGPFDCVLHKLYGEDWRSQLEDFRSQNPNAVIIDSPAAIERLHNRISMLHVVSELKIENQSETFEIPKQIVIYDRETLLDNQSWE

SEQ ID NO: 101203 - protein, 99 aa, Gossypium hirsutum
  Clone ID: LIB3196-040-P1-M1-A10.pep
CIVPACGCVLYIGGTAHAAGSRCCLAPTERKERAETSVMGVRMPPLGWLPASTLPMCTLRGGAHLRVAPVHTTSGHTAEWAVCSASLWASLQDPSCQGL

SEQ ID NO: 101204 - protein, 46 aa, Gossypium hirsutum
  Clone ID: LIB3196-040-P1-M1-A11.pep
SIENLMCQVLGSIERSEPMIIITSLAKGKPAYQSGAAACSTDCTEG

SEQ ID NO: 101205 - protein, 56 aa, Gossypium hirsutum
  Clone ID: LIB3196-040-P1-M1-A3.pep
NSARGGGTQNPWWEEAYSHIVSSCGTNKGSSWFLGHLHSFGASVLFIKILDIILVT

SEQ ID NO: 101206 - protein, 45 aa, Gossypium hirsutum
  Clone ID: LIB3196-040-P1-M1-A5.pep
HFLFILFISQIHHLMATTFDFFFDFLCLNGRLCLKKLAYLHIKYP

SEQ ID NO: 101207 - protein, 136 aa, Gossypium hirsutum
  Clone ID: LIB3196-040-P1-M1-A6.pep
IRHLLCSQEAATMRECISIHVGQAGVQIGNACWELYCLEHGIQPDGQMPSDKTIGGGDDSFNTFFSETGAGKHVPRAVFVDLEPTVIDEVRTGTYRQLFHPEQLITSKEDAANNYARGHYTIGKEIIDLVLDRIRK

SEQ ID NO: 101208 - protein, 86 aa, Gossypium hirsutum
  Clone ID: LIB3196-040-P1-M1-A9.pep
VGPGMIQLLQSCTLHKSTLSLCFALDPFRTHHTACHHAYPVRAEGDPACHPAQVPQCGEEKLRPNRNEAAPRPSCCLSWSHTRTAV

SEQ ID NO: 101209 - protein, 56 aa, Gossypium hirsutum
  Clone ID: LIB3196-040-P1-M1-B1.pep
VATSEGRPLGTHLPTAAQARVQAHLLVLRPQMKPSPHHMASDHFLPSGKFCGCAAF

SEQ ID NO: 101210 - protein, 113 aa, Gossypium hirsutum
  unsure (1)..(113): unsure at all Xaa locations
  Clone ID: LIB3196-040-P1-M1-B11.pep
TRLCTKARWFPAGISGIPPPLFLSFGVPSSSPGIHXQHFMPPPSRLPSHFAVPSPGGIPTCLXLNSTFFPPPNASMGPSPDTYIKASVPYYHHWSREFGPSPSTVSEAQFEDI

SEQ ID NO: 101211 - protein, 53 aa, Gossypium hirsutum
  Clone ID: LIB3196-040-P1-M1-B2.pep
QTSKQLNMLCRKTYDKGYRVYDVDLEGRDYKESTLTDSNASAKPYSICCSEEF

SEQ ID NO: 101212 - protein, 132 aa, Gossypium hirsutum
  Clone ID: LIB3196-040-P1-M1-B8.pep
IHTSVSITASRSCRASKMQFEMHDNVKGKAMSYPVTSQPQCATTSCYQTQLSDWHTGLTDCCNDMPVCLCGTFAPLCLACRISDDFGECCCAPYLPGGLHSIRTGMRERYHIQGSVGHDWAALTFCLPCALC

SEQ ID NO: 101213 - protein, 54 aa, Gossypium hirsutum
  Clone ID: LIB3196-040-P1-M1-B9.pep
LVHLLALAKQFKEAILVLVERVWEEASTGLVNHVWDGSSSAPCNLLQAEFNLTS

SEQ ID NO: 101214 - protein, 59 aa, Gossypium hirsutum
  unsure (1)..(59): unsure at all Xaa locations
  Clone ID: LIB3196-040-P1-M1-C12.pep
AAPRFEDHRPQYLVVDILKTLKSITFWVNRWSNYRDHHTGRDFPSRANKRAGGGRXWLL

SEQ ID NO: 101215 - protein, 74 aa, Gossypium hirsutum
  Clone ID: LIB3196-040-P1-M1-C3.pep
GLGILTPPQRKGCVDDTMMTGRTRLQLTARISKGESSTCESIRVHPGSCAAVIPPRLLPTVGTDLGGAGIQGWA

SEQ ID NO: 101216 - protein, 82 aa, Gossypium hirsutum
  Clone ID: LIB3196-040-P1-M1-C9.pep
PSPADPGILSLLSAPLGSGGFTLLHAAAAAGRGSVVRLLLEAGADPTVQDSRAQPPYTVAADKSTRNEFRRFMEKNPDAYDY

SEQ ID NO: 101217 - protein, 124 aa, Gossypium hirsutum
  Clone ID: LIB3196-040-P1-M1-D1.pep
QLTREIYTNPVLENFDGSFRGSAQGIEGSIRSPHLMDILNSITIYTDAHRGEYYWSGHQIMASPVGFSGPEFTFPLYGTMGNAAPQQRIVAQLGQGVYRTLSSTLYRRPFNIGINNQQLSVLDG

SEQ ID NO: 101218 - protein, 97 aa, Gossypium hirsutum
  Clone ID: LIB3196-040-P1-M1-D4.pep
LIFSHGSLKDLSLVVSLSLATKMSLVGSIKESQVCFPRLYNYLSLSLFLSLSLSLWLSLTISVSLSIFLYLSVYICVPDSGSLHALCFGMELYLDIL

SEQ ID NO: 101219 - protein, 51 aa, Gossypium hirsutum
  Clone ID: LIB3196-040-P1-M1-D6.pep
HKEIKSKRRKISYMQCKICLLQYFYIQIKTLKTVFTVHHYITKVSKMICIN

SEQ ID NO: 101220 - protein, 123 aa, Gossypium hirsutum
  Clone ID: LIB3196-040-P1-M1-E10.pep
RTSLPHYQNLNDFEWCFSGGDECRFATAHNTPRFGNAGRSNAPTTPTQSVCGDGYFRPYSNFPNYMTNTQSFKAKLRSYSAPKQRPESGGAKKRLSLNEIMAARNSISGVRMNKSYYQIHHQF

SEQ ID NO: 101221 - protein, 51 aa, Gossypium hirsutum
  Clone ID: LIB3196-040-P1-M1-E11.pep
VSTQSTSHYINRISRSSNKLMSLLELLISRPHSAYRIGVRGSQIANTPRVR

SEQ ID NO: 101222 - protein, 122 aa, Gossypium hirsutum
  unsure (1)..(122): unsure at all Xaa locations
  Clone ID: LIB3196-040-P1-M1-E2.pep
AFNFLGRAYFGSNPVDTKLGTDGPSLIAKWVLFQLAPVLSLGLPKYIEDLLIHTFPLPSFLVKKDYKRLYDFFYESAGSVLDEAEKXGISREEACHNXLFATCFNTFGGMKIFFPNILKWIG

SEQ ID NO: 101223 - protein, 52 aa, Gossypium hirsutum
  Clone ID: LIB3196-040-P1-M1-E3.pep
EESFLVHTALFAKQLTDGPCYSARCFIIKTGSASFYWFTQIYIRPFNSYIVP

SEQ ID NO: 101224 - protein, 85 aa, Gossypium hirsutum
  Clone ID: LIB3196-040-P1-M1-E4.pep
QSVGMVVGMSRIRSNQRAWYLSSLHGSPPLSRIPTWCQASIHFVNSTKYMVFKTLKQNVDFQLQCGTSDSTIMSGPGLGCYNTPY

SEQ ID NO: 101225 - protein, 60 aa, Gossypium hirsutum
  Clone ID: LIB3196-040-P1-M1-E5.pep
FYYICTYKYLYSVIFNYFILILLYYISFLYFIIIIASIIIIIIIIIIYKFLLQMIFFLCF

SEQ ID NO: 101226 - protein, 122 aa, Gossypium hirsutum
  Clone ID: LIB3196-040-P1-M1-E6.pep
TNANVNNVKLCLALASAPEMDSKLFSQLKVVRKIGNLLELVYAKVMEDFLEPTLGLFKAFLLRSSGNGFVYTKEPTLLLDGSFESSGSFKQQQCIRDIMDFGSNVGVLLEVSASHEPNIADV

SEQ ID NO: 101227 - protein, 59 aa, Gossypium hirsutum
  Clone ID: LIB3196-040-P1-M1-E7.pep
IFLSFYFHYKSILNRKINKKKKEENLPRTPCGRPSEFSSPLLMSISREKKGPFFHISFF

SEQ ID NO: 101228 - protein, 125 aa, Gossypium hirsutum
  Clone ID: LIB3196-040-P1-M1-E8.pep
MDYVDIVQGRRIGVWNVPYISNIYLIKGSALRGELQSPDLFHHSKLDPDMAFCANVRQQDVFMFLTNRHTLGHLLSLDSYRTAHLHNDLWEVFSNPEDWKEKYIHQNYTKALAVKLVETPLPDVY

SEQ ID NO: 101229 - protein, 79 aa, Gossypium hirsutum
  Clone ID: LIB3196-040-P1-M1-E9.pep
WSFRSLCMSNKLTSKEPQMHLYGSLTKSSSGRWVTCIRGYPVSEQDMRTQFCICFSQVVCKRPQARTHLYPFLKCPNHF

SEQ ID NO: 101230 - protein, 76 aa, Gossypium hirsutum
  Clone ID: LIB3196-040-P1-M1-F1.pep
DAWAKLFFFFVIIVSLLKALKMDENKFVVSLMIIFLGFSYLLNSSAAVPVTRCSMPNNKKLLPSSPSAQDVVVQVF

SEQ ID NO: 101231 - protein, 119 aa, Gossypium hirsutum
  unsure (1)..(119): unsure at all Xaa locations
  Clone ID: LIB3196-040-P1-M1-F2.pep
ITEPPPPVRQEPSPKPNNKTPAILHTYRGLRNRRAAVYVGSFSWKAMIXWTTDQQLIQVIRSIGVYDVVELKFAENRANGQSKGYAEVVVASENSVHKLLELLPGKVLNGEKVDVKPAT

SEQ ID NO: 101232 - protein, 60 aa, Gossypium hirsutum
  Clone ID: LIB3196-040-P1-M1-F3.pep
MNYINCIFKLGLNAMINRFCSALSVRFQQLQLEIALSVRIGIASAICDTKCAILRWLGIM

SEQ ID NO: 101233 - protein, 66 aa, Gossypium hirsutum
  Clone ID: LIB3196-040-P1-M1-F6.pep
LYLLYTDFLCIKQPFFCFYQTKYFCMKSSYNGLNFLNILFKIFNINILIINIYYNYKYINKKCFVV

SEQ ID NO: 101234 - protein, 129 aa, Gossypium hirsutum
  Clone ID: LIB3196-040-P1-M1-F7.pep
AQKPRKPVSARPSLRPGYPRGNITMSETPRAETFVFLDLEATGLPSMDPEIAELSLFAVHRSSLENLERDESGAPVLPRVLDKLTLCMCPERPFTAKASEITGLSSEGLARCRKAGFDGAVVRMLQAFL

SEQ ID NO: 101235 - protein, 122 aa, Gossypium hirsutum
  Clone ID: LIB3196-040-P1-M1-G11.pep
SAGSAGGVVEAAISYTGDVSDPSRTKYSLQYYMGLAEELVRAGTHILCIKDMAGLLKPTACTMLVSSLRDRFPDLPLHIHTHDTSGAGVAAMLACAQAGADVVDVAADSMSGMTSQPSMGAL

SEQ ID NO: 101236 - protein, 79 aa, Gossypium hirsutum
  Clone ID: LIB3196-040-P1-M1-G3.pep
KFRYLPKAIKAWNNPSPRVECVLAELKGVTCENREAVLDAFLDDGFLVPTFEQLAALQIEYEGVPYKPENVDLNDVLVP

SEQ ID NO: 101237 - protein, 133 aa, Gossypium hirsutum
  Clone ID: LIB3196-040-P1-M1-G5.pep
WYDWPEPLKNRHLAALEKIYEEKKDFIDLFIAKQFLFQRQWKKIRNYAQTKGVSIMGDMPIYVGYHSADVWANKKHFLLNRHGYPMLVSGVPPDAFSDTGQLWGSPLYDWKAMEKDGFLWWISRIRRAQNLYD

SEQ ID NO: 101238 - protein, 45 aa, Gossypium hirsutum
  Clone ID: LIB3196-040-P1-M1-G6.pep
NLNQNLYHSFIKSYSTKTKYKNWKSQTDNPFPLRLSKTSVYQVHQ

SEQ ID NO: 101239 - protein, 124 aa, Gossypium hirsutum
  Clone ID: LIB3196-040-P1-M1-G7.pep
SLEKLFLQKINELPTEETEIMIVQAKGRGRGRKEAGTAKPGVSTVPNTTQASTPPQTQTPQPNPPPVQATPHPFPAVTPDLIVQTPVMTVVPPQPLQTPPPVPPQPQPPPASASQAVQSHPPII

SEQ ID NO: 101240 - protein, 124 aa, Gossypium hirsutum
  Clone ID: LIB3196-040-P1-M1-H1.pep
MVTSLTFTIPSLGLRLPTRSYPCLKPQRRFVRKAASNVITATYELKAPPYPLNALEPHMSRETLEYHWGKHHRTYVENLNKQVVGTDLEGLSLEDIIIVTYNRGDILPAFNNAAQAWNHDFFWE

SEQ ID NO: 101241 - protein, 121 aa, Gossypium hirsutum
  Clone ID: LIB3196-040-P1-M1-H2.pep
PAWCRRAALLPGMRRVLAAGRGLWPGGAPGSPALLALWGERRWGWGLVTFAQRSGLSPSPCPGPRRCLRDCGLPRELGPPCFLTRRAPATESAGGARGSARQAGNPLAHHRMVAAIIVTRR

SEQ ID NO: 101242 - protein, 118 aa, Gossypium hirsutum
  Clone ID: LIB3196-040-P1-M1-H6.pep
VFSAFGPVQKIAMFDKNGGLQALIQYPDVQTAVLAKGTLEGHCIYDGGFCKLHLSYSRHTDLSIKVNNDRSRDYTIPNPAMVNPQPSTLRQQPVQAMGGPAAHQYNGAAYALGYNNLP

SEQ ID NO: 101243 - protein, 109 aa, Gossypium hirsutum
  Clone ID: LIB3196-040-P1-M1-H8.pep
RELGEDVTDIHRRSFSGVIQKHSAIKTSSSSSTSSSGSSSSSTSFSLSSSGFCDLQLLKRSNSANSEIENSIEGAIAHCKQSQKLGVCSLSASKISVCGDQERPELCSI

SEQ ID NO: 101244 - protein, 109 aa, Gossypium hirsutum
  unsure (1)..(109): unsure at all Xaa locations
  Clone ID: LIB3196-040-P1-M1-H9.pep
MTTTFLQTSSSTFGGGSTRGGSLLAGGGGFGGGSLYGGGGSRNISASSARFVSSGSGGGYGGGMRVCGFGGGAGSAFGGGFGGGIGGGFGGGFGGGDGGXLSGNXKITM

SEQ ID NO: 101245 - protein, 129 aa, Gossypium hirsutum
  Clone ID: LIB3196-041-P1-M1-A10.pep
LTSNLLLIGMEGNVTPAHYDEQQNFFAQIKGYKRCILFPPDQFECLYPYPVHHPCDRQSQVDFDNPDYERFPNFQNVVGYETVVGPGDVLYIPMYWWHHIESLLNGGITITVNFWYKGAPTPKRIEYPL

SEQ ID NO: 101246 - protein, 46 aa, Gossypium hirsutum
  Clone ID: LIB3196-041-P1-M1-A12.pep
SFCFFHMKIDSSRFDYIIYSLFNSIPTIFSDFSNPHHCCCQHLFLR

SEQ ID NO: 101247 - protein, 131 aa, Gossypium hirsutum
  Clone ID: LIB3196-041-P1-M1-A3.pep
DAWVGNNLEAQETLSSKNVMDARDTRCNAEIGSQVICRPDLDKSSGESIDKNSCLDFSFNSEGLRQVPLDLGSAGKPSILLFPNENFSAKNSASHSDASQCDKICNQDRLSATLAYHGNEDKQANNACSGH

SEQ ID NO: 101248 - protein, 129 aa, Gossypium hirsutum
  unsure (1)..(129): unsure at all Xaa locations
  Clone ID: LIB3196-041-P1-M1-A4.pep
SALATALDVGLSNWSFLYVTVSLYTMTKSSAVLFILIFSLIFKLEELRAALVLVVLLIAGGLFMFTYKSTQFNVEGFALVLGASFIGGIRWTLTQMLLQKAELGLQNPIXTMFHLQPLMFLGLFPLFAV

SEQ ID NO: 101249 - protein, 94 aa, Gossypium hirsutum
  Clone ID: LIB3196-041-P1-M1-A6.pep
GRVGLKRNEFLELKQGNKTVAEYEREFVRLNQYTTEWVHTEPEMCKHFEEGLNEEIKLLIGILEIQEFVALADRAKKAEELNNERKKARERPES

SEQ ID NO: 101250 - protein, 70 aa, Gossypium hirsutum
  unsure (1)..(70): unsure at all Xaa locations
  Clone ID: LIB3196-041-P1-M1-A8.pep
MAEPRQEFDVMEDHAVTYRLGDRKHQEGYTMLQDQEGDTDAGLKEYPLQTHAEDXSEEPGSKTLDAKSTP

SEQ ID NO: 101251 - protein, 51 aa, Gossypium hirsutum
  Clone ID: LIB3196-041-P1-M1-A9.pep
IASRAPLFFLFFFSFILFFFFFLYFFFFFFFFFFLAGFRETKSKAIYNKQA

SEQ ID NO: 101252 - protein, 67 aa, Gossypium hirsutum
  Clone ID: LIB3196-041-P1-M1-B1.pep
MMGLMTSVLNLMGPPATMMMLALSWAALGLINAWEWGYHTLYSIEGMDGQSGIITGASSGIGERIGY

SEQ ID NO: 101253 - protein, 57 aa, Gossypium hirsutum
  Clone ID: LIB3196-041-P1-M1-B12.pep
WGQDPCQSDSGGPLVCDETLQGILSWGVYPCGSAQHPAVYTQICKYMSWINKVIRSN

SEQ ID NO: 101254 - protein, 107 aa, Gossypium hirsutum
  unsure (1)..(107): unsure at all Xaa locations
  Clone ID: LIB3196-041-P1-M1-B4.pep
SVASRHAALNLGCDLYALDRIWKDMRTYLNVDDVXPNKANALTSVTQLLCSQVYNIAGELIXAFDLSPYILRAPIAMQAEAYCYYTHACGVLIETQKLDEQTSGCHN

SEQ ID NO: 101255 - protein, 60 aa, Gossypium hirsutum
  Clone ID: LIB3196-041-P1-M1-B9.pep
PRVRPRVRPLQPYAENREHFYSLSSPPNGHSLFGKSFISPILPSPSSHLPSFLSSLNSNQ

SEQ ID NO: 101256 - protein, 125 aa, Gossypium hirsutum
  unsure (1)..(125): unsure at all Xaa locations
  Clone ID: LIB3196-041-P1-M1-C11.pep
YAXFLKELCTNKPKLTGSEKISVGENVFAVLQRKMPAKCKDRGMFAIPCKIGHLGIKKAMCDLGASINIMPYSIYESLNTGFLKKTGVIIQLADRSVVHPEGVLEDVLVKVNSLIFPADFYVIKM

SEQ ID NO: 101257 - protein, 108 aa, Gossypium hirsutum
  Clone ID: LIB3196-041-P1-M1-C3.pep
VQIHRGTLHRAGGPGGHLRWPKAVAVLLRWAAPAQGPHRLTAPESQGSGPKAPQASCTQDICLNRQHFWRLQLGLVHTQYTGAAKGPSEGTQHRASRPLPPQLSRAQA

SEQ ID NO: 101258 - protein, 69 aa, Gossypium hirsutum
  Clone ID: LIB3196-041-P1-M1-C4.pep
HYCIIINSIRGWFGESDDDFDIGYVEFCSAIEHLVRYIKKAVEYEVVAEKEVGSINALSCIVTTSHMWI

SEQ ID NO: 101259 - protein, 133 aa, Gossypium hirsutum
  Clone ID: LIB3196-041-P1-M1-C5.pep
CDCVSLHCGLNEHIHHLINDFTVKQMRQGAFLVNTARGGLVDEKALAQALKEGRIRGAALDVHESEPFSFSQGPLNDAPNLICTPHAAWYSEHASIEMREEAAREIRIAITCRIPDSLKNCVIKDHLTAATHW

SEQ ID NO: 101260 - protein, 68 aa, Gossypium hirsutum
  Clone ID: LIB3196-041-P1-M1-C6.pep
KLRKPRHQEGEIFDTEKEKYEITEQRKIDQKAVDSQILPKIKAVPQLQGYLRSVFALTNGIYPHKLVF

SEQ ID NO: 101261 - protein, 78 aa, Gossypium hirsutum
  Clone ID: LIB3196-041-P1-M1-C8.pep
THMVKRHTRVSGCVDIRIRDTRPCLSPCLYLCNFLTWSHEQVTRPCAGPSTLRSNITHPCAKPCAKPCYNSTFNPLKT

SEQ ID NO: 101262 - protein, 131 aa, Gossypium hirsutum
  unsure (1)..(131): unsure at all Xaa locations
  Clone ID: LIB3196-041-P1-M1-C9.pep
MAFTNIPGITLLNVSKLNILKLAPGGHVGRFCIWTESAFRKLDELYGTWRKAASLKSNYNLPMHKMINTDLSRILKSPEIQRALRAPRKKIHRRVLKXNPLKYLRIMLKLNPYAKTMRRNTILRQARNHKL

SEQ ID NO: 101263 - protein, 124 aa, Gossypium hirsutum
  Clone ID: LIB3196-041-P1-M1-D10.pep
GPMKAIIFSQWTGMLNLVEHSLRHHGISYRRLDGTMTLTARDRNVKDFNTDPEVTVMLMSLKAGNLGLNMVAACHVILLDLWWNPTTEDQAIDRAHRIGQTPPVTVTRITIKDTVEDRILSLQD

SEQ ID NO: 101264 - protein, 125 aa, Gossypium hirsutum
  Clone ID: LIB3196-041-P1-M1-D12.pep
PTRPQGFFRISQFIWDPADPLFFLFKDQPFVSVFSHREFFADEEMSKGLLTSQTDPPTSIYKRWFIKNTQEKHFELLIHRQRWLRTNSSLSNANGFFRSNTPSESYQYLSNLFLSNGRLLDQMTK

SEQ ID NO: 101265 - protein, 64 aa, Gossypium hirsutum
  Clone ID: LIB3196-041-P1-M1-D6.pep
FILLSFFEHELCLCNVFICSVGCLEVTEQNLHTHLHVVQYLPLSISLFPFFQLCLTCCLCSVPL

SEQ ID NO: 101266 - protein, 129 aa, Gossypium hirsutum
  Clone ID: LIB3196-041-P1-M1-D8.pep
KQGVLGAEVLVGRVHESSSHHGQIKSFSGCSNKVETPVALQTLRLRFEIQFSSLQTACPWANYLISFSVLTCAAIKERSMVSLSPRLLLPPALESSMLQLPLRVSSLHSWRGSGGAASVRSPHGALGCL

SEQ ID NO: 101267 - protein, 114 aa, Gossypium hirsutum
  Clone ID: LIB3196-041-P1-M1-D9.pep
MKEDRSINPNWTTFSTMATMYIKMGLSEKAEECLRNVESRITGRDRIPYHYLITLYGTVGNKEEVYRIWKVYKSIFPSVPNLGYHAMISSLVRASDIEGAEKIYEEGLSVKTSY

SEQ ID NO: 101268 - protein, 108 aa, Gossypium hirsutum
  unsure (1)..(108): unsure at all Xaa locations
  Clone ID: LIB3196-041-P1-M1-E10.pep
MDSCIAAGRGATLGLRRIFQAIRTLFPAPAYLSCKVHAVPVQAYSTGPYNPCAFQPSTKPVIMHKRLPSAQERTFLSPEFIPRMGRTDPLKVQILRXDVLETRKDLHM

SEQ ID NO: 101269 - protein, 57 aa, Gossypium hirsutum
  Clone ID: LIB3196-041-P1-M1-E4.pep
THISSYYKIFRIFGLANKYSLFFKFTPVLLSDSSDPSSLKINYLFIQDSNDVLVCFY

SEQ ID NO: 101270 - protein, 118 aa, Gossypium hirsutum
  Clone ID: LIB3196-041-P1-M1-E5.pep
APSHLPFPAEDLSDPAERDNYELLCPDNTRKPVDKFKECHLARVPSHAVVARSVNGKEDAIWELLRQAQEKFGKDKSPEFQLFGSPRGQKDLLFKDSAIGFSRVPLRIDSGLYLGSGY

SEQ ID NO: 101271 - protein, 52 aa, Gossypium hirsutum
  Clone ID: LIB3196-041-P1-M1-F11.pep
PTRPLTKFIISQNLQIHCLQYFFYKKLGSISFNSIFFYLLIRFLQFMVIFQS

SEQ ID NO: 101272 - protein, 55 aa, Gossypium hirsutum
  Clone ID: LIB3196-041-P1-M1-F12.pep
SVFSRFYSMTKYNWYNKHIEKRKNESTSPTKKLWVPSGKVSESWLHIIIVSPGEI

SEQ ID NO: 101273 - protein, 57 aa, Gossypium hirsutum
  Clone ID: LIB3196-041-P1-M1-F3.pep
AQQRSPISLSFASATGSRSRYISDLPIAGSRCTGWRTVRFSILGWPYTCASTVHMEP

SEQ ID NO: 101274 - protein, 126 aa, Gossypium hirsutum
  Clone ID: LIB3196-041-P1-M1-F4.pep
VNKDLVSRINYAGATAVGLSGMDGRLLVARPSPNAAQLGFVGEVARVDPTVLQTIVDNGSIPVIASVAADEYGQPYNINADTVAGEVAAALGAEKLILLTDVAGILRNREDPGSLVKEIDIKGVKK

SEQ ID NO: 101275 - protein, 69 aa, Gossypium hirsutum
  Clone ID: LIB3196-041-P1-M1-F5.pep
CYSVLNTIDTSGAFDVKIMKRGTDGCTAFSFMPSVFNQLFLRSYHGKDQGFSQEYPKLQKQVILFTPNN

SEQ ID NO: 101276 - protein, 72 aa, Gossypium hirsutum
  Clone ID: LIB3196-041-P1-M1-F6.pep
QVLGYCNRNLGTPKLFMPKGKLSLETESSNIVILLPNDSCNLTTLDISQTPTEKKRPRISPHDYPHKLFSAG

SEQ ID NO: 101277 - protein, 61 aa, Gossypium hirsutum
  Clone ID: LIB3196-041-P1-M1-F9.pep
KTDVEMLFGANVDDENLLIHCVENFSPPHLPLPLKDWTRGLGRELISGTCRRASFAYSKVS

SEQ ID NO: 101278 - protein, 71 aa, Gossypium hirsutum
  Clone ID: LIB3196-041-P1-M1-G10.pep
LWKAPSSQVLPTHMLSASNQRLRPLLFIRSRQQGFPGIQSNQNRRCNLGLNNSWLGHFKCGSKTDPTDTEN

SEQ ID NO: 101279 - protein, 128 aa, Gossypium hirsutum
  Clone ID: LIB3196-041-P1-M1-G4.pep
MLGLVGRVATASASGALRGLTPSASLPPAQLLLRAAPTAVHPVRDYAAQTSPSPKAGAATGRIVAVIGAVVDVQFDEGLPPILNALEVQGRETRLVLEVAQHLGESTVRTIAMDGTEGLVRGQKVLDS

SEQ ID NO: 101280 - protein, 38 aa, Gossypium hirsutum
  Clone ID: LIB3196-041-P1-M1-H1.pep
KKSTHIARGELSLGHAEVFPISVLIHVFKNQLILREMS

SEQ ID NO: 101281 - protein, 73 aa, Gossypium hirsutum
  Clone ID: LIB3196-041-P1-M1-H10.pep
MGTAGPRCCLLLQQQPHYNLDVMEKQFHLLVEKMAPRMLVLRTLELSSFKSGFVSSGSSSEAGSISSQSERSY

SEQ ID NO: 101282 - protein, 126 aa, Gossypium hirsutum
  Clone ID: LIB3196-041-P1-M1-H11.pep
IRCTTRLFMRKISTTSLDLIVCRIYSKTQMVFPYKLVLNTSVYKFPIRIKVYTLCNSSNLVSCLCTTFRLHWSTNKIKPYLHFTSQSIFIAAMDMYYFTIYHLWLNALLRSHFCPTRPRTRGRTRG

SEQ ID NO: 101283 - protein, 49 aa, Gossypium hirsutum
  Clone ID: LIB3196-041-P1-M1-H2.pep
LWVRYLREIRLLTILLNLYLFHLLLGLEVFFRFYPSGRWVNVKVQSNNC

SEQ ID NO: 101284 - protein, 70 aa, Gossypium hirsutum
  Clone ID: LIB3196-041-P1-M1-H5.pep
ARFKSLGIRAGEIKRFLQNRSEGATFHLRSAFHADVVTEMTSGCLCVSSFQRFQCKGYVIHILECAFQTK

SEQ ID NO: 101285 - protein, 91 aa, Gossypium hirsutum
  unsure (1)..(91): unsure at all Xaa locations
  Clone ID: LIB3196-041-P1-M1-H7.pep
PDARSIAVVKLLCDLSAMDRISDDIGAYRYVKLVAKNXRFAVKRTTQNLNAQVLNIACISIDDLDLSSYIIRAHFRMDSEAYTADTQLAGT

SEQ ID NO: 101286 - protein, 128 aa, Gossypium hirsutum
  Clone ID: LIB3196-042-P1-M1-A3.pep
MPDFRDISKWNNRVVSNLLYYQTNYLVVAAMMISVVGFLSPFNMILGGIVVVLVFTGFVWAAHNKDALRRLKKRYPTTFVMVVMLASYFLISMFGGVMVFVFGITYALLLMFIHASLRLRNLKNKLEN

SEQ ID NO: 101287 - protein, 76 aa, Gossypium hirsutum
  Clone ID: LIB3196-042-P1-M1-A7.pep
LYLHHLVFDFLPWFQKKVWTMRRRPSTKLINFISLLAIVSSFLWLAKLLFLSVLLLGPFERPSLLLLFRIFLRTRG

SEQ ID NO: 101288 - protein, 113 aa, Gossypium hirsutum
  Clone ID: LIB3196-042-P1-M1-B1.pep
GGAGMRQVHRTGFQRFPAWLHLGTPGAILPVSSLWRNIISSKWRCLFAPTSFVKMTWEWGAQACRGPDLVPTLLGPTCGTQHKSLHLSGAISSFRVEAGTDKLFLILTCLFSQ

SEQ ID NO: 101289 - protein, 50 aa, Gossypium hirsutum
  Clone ID: LIB3196-042-P1-M1-B10.pep
KTCTFLEYLLNPRPEAKNCILHLIPLKTLRSMYHFPGSLMWKLRLKGPPP

SEQ ID NO: 101290 - protein, 61 aa, Gossypium hirsutum
  Clone ID: LIB3196-042-P1-M1-B12.pep
SHGSTNNLGDEGQKMILCCQGSKSEERTMLLILSSTLLKTAHSFELTFLFLAGSLLYGGKE

SEQ ID NO: 101291 - protein, 113 aa, Gossypium hirsutum
  Clone ID: LIB3196-042-P1-M1-B2.pep
LYRDWDEFQLFIMDIKEINNLLDTIQYFIHKGKSSPFMNKVFRICLHNKSRQICPLEIFNKINDMICNQQNQFRKTFSEYFLQSYVFTNFIGNSIPTIKFRLDHELFDITSIE

SEQ ID NO: 101292 - protein, 103 aa, Gossypium hirsutum
  Clone ID: LIB3196-042-P1-M1-B3.pep
RNPGVVIYVNWRPCCVPRVVAEYLNGSVREESIHCKSVEEISTLVQKLANQSGLDVIRIRKPFHTDNPSIQGQWHPFTNKPTTFRELCPREVQDPAPAQVQAQ

SEQ ID NO: 101293 - protein, 76 aa, Gossypium hirsutum
  unsure (1)..(76): unsure at all Xaa locations
  Clone ID: LIB3196-042-P1-M1-B7.pep
ASQRPPTPTACHKLAXSFWCQHTHKTKWHMQPTTSPRNTIKKCSPLSKAEVWTKHMRPIWSHILASTTTLPHSRTK

SEQ ID NO: 101294 - protein, 127 aa, Gossypium hirsutum
  unsure (1)..(127): unsure at all Xaa locations
  Clone ID: LIB3196-042-P1-M1-B8.pep
IHASQPSMTVDGVTDPYNSERFCLGLLSNVNRNAAVELTRRHIGRGVRLYYIGGEVFAECLSDSAIFVQSANCNQRYGWHPVTVCXIPPGCKLKIFNNQEFSDLLAQAVYQGFVAGYQLTRMCTIRM

SEQ ID NO: 101295 - protein, 128 aa, Gossypium hirsutum
  unsure (1)..(128): unsure at all Xaa locations
  Clone ID: LIB3196-042-P1-M1-C1.pep
QDSINLFLGVFHPTEGKPHLWELPTDFYLHHKNTMRLLPTRRSYTYWWTPEVIKHXLPLPYDEVICAVNLKKLIVKKFHTYEEEIDIHNEFFRPYELSSFDDTFCLAMTSSARDXMPKTVGIDPSPFT

SEQ ID NO: 101296 - protein, 61 aa, Gossypium hirsutum
  Clone ID: LIB3196-042-P1-M1-C11.pep
AIRGLFPCWLHKFCHNLRISVAWPRGEIQTYLSIGKPARFSSSRVNSSHHFCLGISPHLLD

SEQ ID NO: 101297 - protein, 48 aa, Gossypium hirsutum
  Clone ID: LIB3196-042-P1-M1-C12.pep
PIKENTTLTLFLKVALERKEFEGVFLVNLLSNDFRLCLKFTIYNTLFP

SEQ ID NO: 101298 - protein, 53 aa, Gossypium hirsutum
  Clone ID: LIB3196-042-P1-M1-C3.pep
HPLLDPIIGSEPQDVTFVVGATPINYTSYNHLHIQLSIIHICIVLYNHFWGLI

SEQ ID NO: 101299 - protein, 83 aa, Gossypium hirsutum
  Clone ID: LIB3196-042-P1-M1-C5.pep
SRNSPGSCVHFVVANHTWRTRSQEPTDSCSPECKTWVTGSLALPKICLCPHTLLAWGTPITHVPRPWLERAMQGRQAPPCSLL

SEQ ID NO: 101300 - protein, 55 aa, Gossypium hirsutum
  Clone ID: LIB3196-042-P1-M1-C8.pep
VDALTTKRGKEGGWVVERLLNQLLIELDGADQRCGVFVIGATNRPEVMDRADLRP

SEQ ID NO: 101301 - protein, 108 aa, Gossypium hirsutum
  unsure (1)..(108): unsure at all Xaa locations
  Clone ID: LIB3196-042-P1-M1-C9.pep
GTLCALAGLTLACTIIGLMLATPMFMIFSPVLVPAAIAIAMAETGFLWSRAFGLTGVEKASYTLNRLWYTTGTEHLDLDHSERRGQDIXDYVVQKTNEDGQNTENKAH

SEQ ID NO: 101302 - protein, 120 aa, Gossypium hirsutum
  unsure (1)..(120): unsure at all Xaa locations
  Clone ID: LIB3196-042-P1-M1-D1.pep
MASLLAKDAYLQSLAKKICSHSGPEQQARTRAGKTRGSVAAGPPKKKRKKTQKKFRQRXEKAAEHKAKSLGEKSPAASGARRPEAAKEEAAGASSSAGNPADGLATEPESVFALDVLRQR

SEQ ID NO: 101303 - protein, 43 aa, Gossypium hirsutum
  Clone ID: LIB3196-042-P1-M1-D10.pep
ILSVSIILVYQINNVVLTCIIEASSIITNQVDILTTKNKMSMK

SEQ ID NO: 101304 - protein, 67 aa, Gossypium hirsutum
  Clone ID: LIB3196-042-P1-M1-D11.pep
APHAGPHLLARARAPECDLPRPTVSVTPLGHSLCPSPRPIVSMGRRWVPIAPSWGGRGSNREYWGGA

SEQ ID NO: 101305 - protein, 50 aa, Gossypium hirsutum
  Clone ID: LIB3196-042-P1-M1-D2.pep
REAHKEPISGSFKEHLTGSSEEPLTGSSQRAYKQNAYKSVGVATTYAYDN

SEQ ID NO: 101306 - protein, 70 aa, Gossypium hirsutum
  Clone ID: LIB3196-042-P1-M1-D4.pep
VKLHCKMGSQEPESLSQSCTVSHECGHGFFCCVKHVFHSVCLVDNTNTGDIFAPDPLKETTVQMIPGSPA

SEQ ID NO: 101307 - protein, 112 aa, Gossypium hirsutum
  unsure (1)..(112): unsure at all Xaa locations
  Clone ID: LIB3196-042-P1-M1-D5.pep
MTPPERLLLLRVRGTPLHLLLLGLLLVLLPGAHGLPGVGLTPSAAQTARQHPKMHLAHSTLKPAAHLIGDPSKQXNSLLWRANTDRAFLQDGFSLSNNSLLVPTSGIYFVYS

SEQ ID NO: 101308 - protein, 58 aa, Gossypium hirsutum
  Clone ID: LIB3196-042-P1-M1-D7.pep
WVLYLAKTIFLLTPSLKIFFLNFSKPLVCPLCVNTSRYFATLPPRMYCWIHQIDSCPT

SEQ ID NO: 101309 - protein, 55 aa, Gossypium hirsutum
  Clone ID: LIB3196-042-P1-M1-D9.pep
TQTFSGSEVWTQVCLQARPLSGLLGVMNSLRRPFHVLLSRMHVVVSDNNTRLVKI

SEQ ID NO: 101310 - protein, 53 aa, Gossypium hirsutum
  Clone ID: LIB3196-042-P1-M1-E1.pep
SFQSYILLQPYILMTNISRNSSRAGQKRILLNPSLLHSCHSLLHHIFYSTMNE

SEQ ID NO: 101311 - protein, 54 aa, Gossypium hirsutum
  Clone ID: LIB3196-042-P1-M1-E10.pep
SIFAIFFEKKIYRHYLDFLKQIKMTILNNDVCQEKIVNNLCAIILANVIFEIRS

SEQ ID NO: 101312 - protein, 122 aa, Gossypium hirsutum
  unsure (1)..(122): unsure at all Xaa locations
  Clone ID: LIB3196-042-P1-M1-E7.pep
YASKLSIDEEVXFENLMQLVEHYTSDADGLCTRLIKPKVMEGTVAAQDEFYRSGWALNMKELKLLQTIGKGEFGDVMLGDYRGNKVAVKCIKNDSTAQAFLAEASVMTQLRHINLVQLLGVI

SEQ ID NO: 101313 - protein, 123 aa, Gossypium hirsutum
  unsure (1)..(123): unsure at all Xaa locations
  Clone ID: LIB3196-042-P1-M1-E8.pep
PACGPLPTPRGLHRLPPASGRDPXTGSCPGKGMPMAVTAQYHPWSLHPAHLEQTRTFPGGIPSLAGKGGSSGSRRTSPSHPDGGRSQGKAAIERHTRPCVGSHFNGEDVLASGARLSALGKPL

SEQ ID NO: 101314 - protein, 50 aa, Gossypium hirsutum
  unsure (1)..(50): unsure at all Xaa locations
  Clone ID: LIB3196-042-P1-M1-E9.pep
MESWSKDSXGGRGQNPSPVPEGSVSHPNYSVAEAWREVRDPGTGSPGLDS

SEQ ID NO: 101315 - protein, 120 aa, Gossypium hirsutum
  unsure (1)..(120): unsure at all Xaa locations
  Clone ID: LIB3196-042-P1-M1-F1.pep
IASLPPPLNQRGTDSPRLVQKRVHKPERERAWRPSRHLNPATSAAARAPLHPDYSAVHPLRPKEERLRGVRPCSTLAFTEQGAEEPXCPRCLRNLSPGRFAPYPWGSPWRLFRSLQGNVP

SEQ ID NO: 101316 - protein, 44 aa, Gossypium hirsutum
  Clone ID: LIB3196-042-P1-M1-F10.pep
FRCSKYSTPSAIKIRLLHFMRFRLFSQFSIKSLKIIHQNCHTFI

SEQ ID NO: 101317 - protein, 62 aa, Gossypium hirsutum
  Clone ID: LIB3196-042-P1-M1-F12.pep
INSLFTNPNHSYHFRRQNGVEAERRSGIFPLNCAQNNLKWLEETAFLAKPSMTGMDFLLKDL

SEQ ID NO: 101318 - protein, 101 aa, Gossypium hirsutum
  unsure (1)..(101): unsure at all Xaa locations
  Clone ID: LIB3196-042-P1-M1-F2.pep
NPPCSGSSIATASPERRKGINPAPPSTPAAPCRFXACTAAEAAAVRVPGSPSAAVVTRVRGLGGAPDAPHPPLKIPGGRGNSQRDHNLSANLFYSDDRLNV

SEQ ID NO: 101319 - protein, 92 aa, Gossypium hirsutum
  unsure (1)..(92): unsure at all Xaa locations
  Clone ID: LIB3196-042-P1-M1-F3.pep
MSCRQNQQQCQPPPKCPSPKCPPKSPAQCLPPASSGCAPSSRGCGSSSEGGCCLSHHRRHHRCRRQRSNSCDKGSGQQGGGSSCSHGSXGCC

SEQ ID NO: 101320 - protein, 59 aa, Gossypium hirsutum
  Clone ID: LIB3196-042-P1-M1-F4.pep
MEQDCTHWTCNLCGNVGMADGSDGYFYCLRCGSQADDIIDTGVADEDFIEKGTQGGGAL

SEQ ID NO: 101321 - protein, 126 aa, Gossypium hirsutum
  Clone ID: LIB3196-042-P1-M1-F5.pep
WPQPAPGGEGHGGKIALQLKATLENITNLRPVGEDFRWYLKMKCGNCGEISDKWQYIRLMDSVALKGGRGSASMVQKCKLCARENSIEILSSTIKPYNAEDNENFKTIVEFECRGLEPVDFQPQAG

SEQ ID NO: 101322 - protein, 56 aa, Gossypium hirsutum
  Clone ID: LIB3196-042-P1-M1-F6.pep
YAPYSLVTYPMCCNKAPTQPKKVLQLIMMFWKEIRCMFLVELKEFKDNLGSLTFQV

SEQ ID NO: 101323 - protein, 85 aa, Gossypium hirsutum
  Clone ID: LIB3196-042-P1-M1-F8.pep
TLTICLVRLQTPDNSPYGKMASKQIDLYIYINIYSITFSVSNFGFCKVHFYYCYIMWKTYADLFKGEKVSTLCYLKTCLFFLSLF

SEQ ID NO: 101324 - protein, 49 aa, Gossypium hirsutum
  Clone ID: LIB3196-042-P1-M1-G11.pep
LTQFNTSNSIYADFVSTQAFGRMSLTFSHINFYSLKLIQHYIRHLQPII

SEQ ID NO: 101325 - protein, 104 aa, Gossypium hirsutum
  Clone ID: LIB3196-042-P1-M1-G4.pep
PYSHYKISQTSGVLCFNHIHTTRFHRHQVSFVLTIFTLQVMFNCLLKMIPVRNKVFKFSCRYLYPKHLLFHFNTKCRMHIFGSRKCYLCACNHLILGQAQWLMH

SEQ ID NO: 101326 - protein, 62 aa, Gossypium hirsutum
  Clone ID: LIB3196-042-P1-M1-G6.pep
FVQKSTLVPLPNSPGLALSGVYACYSSERGLESFSLITIVPFAVRETTFTPFFFLWGLSLKL

SEQ ID NO: 101327 - protein, 96 aa, Gossypium hirsutum
  Clone ID: LIB3196-042-P1-M1-G7.pep
GQRLLAYVDPLAEEGWKQKPNLNAIRSLEAVIRVHSKYWGCMQRLASCPDSWVPRVPGADKEEVEAVTALASLSVGILAEDRPSEQLVEEEEPMNL

SEQ ID NO: 101328 - protein, 36 aa, Gossypium hirsutum
  Clone ID: LIB3196-042-P1-M1-H11.pep
CFCDRMQIIVNIVECLQLKFSVRDCARDCDIHYAQK

SEQ ID NO: 101329 - protein, 61 aa, Gossypium hirsutum
  Clone ID: LIB3196-042-P1-M1-H12.pep
ISIFFPLLNYKLSFILIAKGMLSISSRRLNMKCKYEDRVGWFSFPLSFCFTHKDSVSQHNL

SEQ ID NO: 101330 - protein, 44 aa, Gossypium hirsutum
  Clone ID: LIB3196-042-P1-M1-H2.pep
SAIGPLRTPLNLPHSLITLNLGPLIYNPKAFLKLHLTFIISGRL

SEQ ID NO: 101331 - protein, 107 aa, Gossypium hirsutum
  unsure (1)..(107): unsure at all Xaa locations
  Clone ID: LIB3196-042-P1-M1-H3.pep
VVGEACVCTPHWGPRCVCPSCGHQPYQVLLSRQVFALIVFSCIYGEGYSNTHKSKQMYCVFNHNEXDACRYGSGIGVLAFLASGFFLVIDAYFPQISNATGPKYLGI

SEQ ID NO: 101332 - protein, 60 aa, Gossypium hirsutum
  Clone ID: LIB3196-042-P1-M1-H4.pep
CRGFTSSISFGSGFRGGYGRNSVPCLPYCSAGSYPGGDGLPVDTHTGAPQNLNDQLDSYL

SEQ ID NO: 101333 - protein, 44 aa, Gossypium hirsutum
  Clone ID: LIB3196-042-P1-M1-H6.pep
FSFICFTPLLKSSQDGGSFSIMEDTTFIWCFCDRMQPIVNIVEC

SEQ ID NO: 101334 - protein, 73 aa, Gossypium hirsutum
  Clone ID: LIB3196-042-P1-M1-H7.pep
MTTKGESSGSYRMRFCGPGTASRSSSNRSYTATCTRTYRLGRALRPITKRRLYASCSGGVYATRSLCCAPDRA

SEQ ID NO: 101335 - protein, 131 aa, Gossypium hirsutum
  Clone ID: LIB3196-043-P1-M1-A10.pep
ACERAKRTLSSSTQASIEIDSLYEGIDFYTSITRARFEELNADLFRGTLDPVEKALRDAKLDKSQIHDIVLVGGSTRIPKIQKLLQDFFNGKELNKSINPDEAVAYGAAVQAAILSGDKSENVQDLLLLDV

SEQ ID NO: 101336 - protein, 35 aa, Gossypium hirsutum
  Clone ID: LIB3196-043-P1-M1-A3.pep
RRHCITSLYEKAGWYPAAISGLQFTKPFTLQMAWH

SEQ ID NO: 101337 - protein, 72 aa, Gossypium hirsutum
  Clone ID: LIB3196-043-P1-M1-A4.pep
HRPMCLIENTNGRLMANPEALKILSAITQPVVVVAIVGLYRTGKSYLMNKLAGKKKGFSLGSTVQSHTKGIW

SEQ ID NO: 101338 - protein, 48 aa, Gossypium hirsutum
  Clone ID: LIB3196-043-P1-M1-A7.pep
IFNYNFYDVLEPAFSYRNITQDLILGNSGKMGFSMKIFALCKPFYECT

SEQ ID NO: 101339 - protein, 106 aa, Gossypium hirsutum
  Clone ID: LIB3196-043-P1-M1-A8.pep
MAPSLTSNSFLLTTTPRSRVNLKYQRLAVFAKGSGPFSPFQFGKAKDNPEDGQAEDTGNSSPFRFDFGKLPDVKTLVPLVSNPSSGLSFGNVRRKDPSTVFVAGAT

SEQ ID NO: 101340 - protein, 63 aa, Gossypium hirsutum
  unsure (1)..(63): unsure at all Xaa locations
  Clone ID: LIB3196-043-P1-M1-A9.pep
ALLLHKGILAVSLSLRLLQSHLKAQVVAGCGILFLCITPFRIGPGATFGXSGGPLYQMGQSVL

SEQ ID NO: 101341 - protein, 87 aa, Gossypium hirsutum
  Clone ID: LIB3196-043-P1-M1-B1.pep
LDGWVSILDYIPVHLFGCKTIFLYSLCLCNTSVNYHVCIWCALIVSCVKVLVLCCVFFCIYLQINSATDLPSRAPFCKYIVTRLNSH

SEQ ID NO: 101342 - protein, 130 aa, Gossypium hirsutum
  Clone ID: LIB3196-043-P1-M1-B12.pep
MAAGMVASRRLRDLLSRRLTASNYSGLSISLRLTGSSAQEEAPDHSYESLRVTSAQKHVLHVQLNRPNKRNAMNKAFWREMVECFNKISRDADCRAVVISGAGKMFTAGIDLMDLASDILQPKGDDVARI

SEQ ID NO: 101343 - protein, 131 aa, Gossypium hirsutum
  Clone ID: LIB3196-043-P1-M1-B2.pep
PTRPGHIMLSDFDLSLRCAVSPTLVKSSNSTLESKHSLYCAQPACIEPTCVVQPDCIQPACFGPRFFSSKPKKEKKNKVKIETGHQVSPLPELIAEPTNARSMSFVGTHEYLAPEIIKGEGHGSAVDWWTF

SEQ ID NO: 101344 - protein, 111 aa, Gossypium hirsutum
  Clone ID: LIB3196-043-P1-M1-B3.pep
PLAELKHCAGRSTALLRADRQGRLSLLKLPLPPGVLSQGDGDFVYKPMTGAAAFFSETPCLERRNLERQSGHSSLAAKAFLRFGSSQNNTQSWPCHPQNSKTSRIFRTGKS

SEQ ID NO: 101345 - protein, 51 aa, Gossypium hirsutum
  Clone ID: LIB3196-043-P1-M1-B6.pep
KPNKQPTKQTNKTKTKKQIITMCCNESYVNMVSFSFSLSKHCSVLTLFVMM

SEQ ID NO: 101346 - protein, 64 aa, Gossypium hirsutum
  unsure (1)..(64): unsure at all Xaa locations
  Clone ID: LIB3196-043-P1-M1-B8.pep
YIYSSLEAKQKEKSEGFEESEKWLVLLHRRVKSFWKYHSGQEVALVPTXFIGGNHEASNYLCEL

SEQ ID NO: 101347 - protein, 44 aa, Gossypium hirsutum
  Clone ID: LIB3196-043-P1-M1-C1.pep
DKISAPLLMPQRLPSPLPAHPSVDSSVLLQALKPIPPLNLETKD

SEQ ID NO: 101348 - protein, 39 aa, Gossypium hirsutum
  Clone ID: LIB3196-043-P1-M1-C10.pep
SRNQLIKSIQNKFNYRFKQFCSSIHLVRTCSRVNSFFPH

SEQ ID NO: 101349 - protein, 112 aa, Gossypium hirsutum
  unsure (1)..(112): unsure at all Xaa locations
  Clone ID: LIB3196-043-P1-M1-C11.pep
ETPCYCNQNGLFYDACPINFQEDFYEGVSXVVNFIKTHKCSFVPGCNXTHECVALVTEXDNTYIMAXVTLCNLSSHCSSQXEEELDEHEDERSSRQFTIVRAQLSTGDLFVV

SEQ ID NO: 101350 - protein, 136 aa, Gossypium hirsutum
  Clone ID: LIB3196-043-P1-M1-C3.pep
DGGHLTHGYMSDVKRISATSIFFESMPYKLNPKTGLIDYDQLALTARLFRPRLIIAGTSAYARLIDYARMREVCDEVKAHLLADMAHISGLVAAKVIPSPFKHADIVTTTTHKTLRGARSGLIFYRKGVKAVDPKT

SEQ ID NO: 101351 - protein, 69 aa, Gossypium hirsutum
  Clone ID: LIB3196-043-P1-M1-C5.pep
VLLEWFIISETNHVRIDFESIAFYRNILTLGVISSWIVIRNNLKELRSYIGKLQMVLLLNSYCLLIFLN

SEQ ID NO: 101352 - protein, 113 aa, Gossypium hirsutum
  Clone ID: LIB3196-043-P1-M1-C7.pep
MEDLEETLFEEFENYSYALDYYSLESDLEEKVQLGVVHWVSLVLYCLSFVLGIPGNAIVIWFTGFKWKKTVSTLWFLNLAIADFIFLLFLPLYISYVVMNFHWPFGIWLCKAN

SEQ ID NO: 101353 - protein, 67 aa, Gossypium hirsutum
  Clone ID: LIB3196-043-P1-M1-C9.pep
KYLSLKIKNIQVFKNNEKFKNKNNNCSDLVRIRFQLLITFFWILHLFLVFASISLNLVINGRKLCHP

SEQ ID NO: 101354 - protein, 76 aa, Gossypium hirsutum
  Clone ID: LIB3196-043-P1-M1-D10.pep
ALSHIYTFTFITSAIRPYHTYTLSHSSHRPFGLITHIHFHIHHIDHLALSHITLSQSTQRPIGLNPHKHFHIHHVG

SEQ ID NO: 101355 - protein, 80 aa, Gossypium hirsutum
  unsure (1)..(80): unsure at all Xaa locations
  Clone ID: LIB3196-043-P1-M1-D12.pep
PNFSTLLFPGHPRGSILATVPERGTVGVPLITGMAASEALAPLPSYXFTPDRDKYFWQDLSSKPPSLSWPIFPRLLGSIM

SEQ ID NO: 101356 - protein, 59 aa, Gossypium hirsutum
  Clone ID: LIB3196-043-P1-M1-D3.pep
KNYLSIGNHQKLTKSQMRTKHTAFQLSKFVPSDVQTIHATTKLKAVNVRKNIVRKRFLI

SEQ ID NO: 101357 - protein, 76 aa, Gossypium hirsutum
  Clone ID: LIB3196-043-P1-M1-D4.pep
FIYLFICYGICMIDLFYYSFLLIFLFALSCLLSHYAYKYHILKKKKIFLIETIFSVWKFEKTCPKVLGVDFSRSTK

SEQ ID NO: 101358 - protein, 125 aa, Gossypium hirsutum
  Clone ID: LIB3196-043-P1-M1-D5.pep
EILVLDFAEALPLGLGVLAIGFEGILNDRMKGFYRSTYEHNGEKKNMAVTQFEPADARRSFPCWDEPSFKATFKITLDVPSELMALSNMPVIEEKVNGPLETVSYQESPIMSTYLVAYVVGLFDY

SEQ ID NO: 101359 - protein, 134 aa, Gossypium hirsutum
  Clone ID: LIB3196-043-P1-M1-D6.pep
ITSSAKVDMTFEEEAQLLQLKVKCLNNLAASQLKLDHYRAALRSCSLVLEHQPDNIKALFRKGKVLAQQGEYSEAIPILRAALKLEPFNKTIHAELSKLVKKHAAQRSTETGLYRKMLGNPSRLSAKCPGKGAW

SEQ ID NO: 101360 - protein, 133 aa, Gossypium hirsutum
  unsure (1)..(133): unsure at all Xaa locations
  Clone ID: LIB3196-043-P1-M1-D9.pep
SGIEKLKIYQMNNLTLHLEDLEKQEKTYPRASRAEDKKKKKIRVELKEIELXKNHTKVKECWSRFSEXNKLDKLLARLIKGKRXKIQINTIRNDKGDITTEPTKIQXIIRDYYKHXYAHQLENLEEIDKFLET

SEQ ID NO: 101361 - protein, 67 aa, Gossypium hirsutum
  Clone ID: LIB3196-043-P1-M1-E1.pep
CPRRRLTQAIMMQLMHVPDTSYTSLRLNADAMSQTWYYTGSHITLCHGMNMRFVSLGSYWIFRLSQS

SEQ ID NO: 101362 - protein, 46 aa, Gossypium hirsutum
  Clone ID: LIB3196-043-P1-M1-E12.pep
CLTATKKPPCWHGALTPDGAATVPGCLGQWDMAAPGRTSKETFPDL

SEQ ID NO: 101363 - protein, 52 aa, Gossypium hirsutum
  Clone ID: LIB3196-043-P1-M1-E6.pep
IPALLSTDLAHFSENPILYLLLPLIFVNKCSFGCKVELEVLKGLMQEPPAHA

SEQ ID NO: 101364 - protein, 132 aa, Gossypium hirsutum
  Clone ID: LIB3196-043-P1-M1-E8.pep
IIHLHSNDIFQVGECRRVQQLALSPSAGLLVVLCGRGPSVRLFALAELENIEVAGAKIPESRGCQALAAGSILQARTPVLCVAVKRQVLCYQLGPGPGPWQRRIRELQAPATVQSLELLGDRLCVGAAGGFA

SEQ ID NO: 101365 - protein, 109 aa, Gossypium hirsutum
  Clone ID: LIB3196-043-P1-M1-F4.pep
PDPYVLVRVRILVASGIKIGVLLRRATVRREREGKEEEEEEVRARLIRVDRDRRALRQAMFRQRWFSLIISFGSSTLLDSSPIYYLEISNHIKSYLFFLKICINVYIKI

SEQ ID NO: 101366 - protein, 95 aa, Gossypium hirsutum
  Clone ID: LIB3196-043-P1-M1-F7.pep
RRKVLLGEVKPERLITMTPEEMASEQRQREINEIKEKALFDCERGVAPKATTDQFKCGRCGQRKTTYYQMQTRSADEPMTTYVTCVNCNNHWKFC

SEQ ID NO: 101367 - protein, 134 aa, Gossypium hirsutum
  Clone ID: LIB3196-043-P1-M1-F8.pep
IEYRVPELNVQNGVLKSLSFLFEYIGEMGKDYIYAVTPVLEDALMDRDLVHRQTASAVVQHMSLGVYGFGCEDSLNHLLNYVWPNVFETSPHVIQADMGALEGLRVAIGPCRMLQHCLQGLFHPARKVRDVYWK

SEQ ID NO: 101368 - protein, 38 aa, Gossypium hirsutum
  Clone ID: LIB3196-043-P1-M1-G10.pep
KQGLAFILGFDLSRDQGNMGYFIFNGNTTMKGKYLGEI

SEQ ID NO: 101369 - protein, 110 aa, Gossypium hirsutum
  unsure (1)..(110): unsure at all Xaa locations
  Clone ID: LIB3196-043-P1-M1-G12.pep
GDSKAEAVALYQTKVQQLQISIDQHGDNLKNTKKXIRKLNKMIQKLRAXIENIKKQWPNLXAFVADAKQRGENALKNSHNKGIELETALQQAKEELAPMLREYQKLISVK

SEQ ID NO: 101370 - protein, 93 aa, Gossypium hirsutum
  Clone ID: LIB3196-043-P1-M1-G7.pep
QAHFLKSNRPYLQAHTSTPASASPMAVSSVKSPSPSTLVLPRELKLLSRKKEVKLQISEWRTKRSPLTMISNFLFNPHCRDTRINHHFGSQVL

SEQ ID NO: 101371 - protein, 128 aa, Gossypium hirsutum
  Clone ID: LIB3196-043-P1-M1-G9.pep
ISYASTATSSDSSTPSSGASTATSSDSSTTSSGASTATSSDSSTTSSGASTATSSDSSTTSGGTSTATSSDSSTTSGGTSTATSSESSTTSGGTSTATSSESSTTFGGTSTATSSESSTNSSGASTAT

SEQ ID NO: 101372 - protein, 44 aa, Gossypium hirsutum
  Clone ID: LIB3196-043-P1-M1-H3.pep
RMKGFCFFRPFFVEFCNVSEFIFQFMIFGKIFSSLLNMQVNCIR

SEQ ID NO: 101373 - protein, 126 aa, Gossypium hirsutum
  Clone ID: LIB3196-043-P1-M1-H4.pep
FEETKELKDALEKEILKAKEQSCVRKRSISAMTPLVKEEAASLPNCVEIPTDGTDAWEIDSRQLKIEHKIASGSYCDLYRGTYYSQEVAIKVLKPERVTRELLREFSQEGFIIKKIPPKKDGQFIG

SEQ ID NO: 101374 - protein, 112 aa, Gossypium hirsutum
  Clone ID: LIB3196-044-P1-M1-A1.pep
IPPHLHTHPPIPPLTFRPTPPFIPPSPTPNTPHSRSHLHTHPALPPHFHTHSSPSHLHTHPPLSPYLHAHPLLPPTYVSPAHPLPHLFCARGCGGTGWLFQKQTLVVVTGIV

SEQ ID NO: 101375 - protein, 49 aa, Gossypium hirsutum
  Clone ID: LIB3196-044-P1-M1-A10.pep
PCRSKPSRLTYSGIPSYSSLISDPIINQLSAKYNFLTVILLTNPIKTPL

SEQ ID NO: 101376 - protein, 74 aa, Gossypium hirsutum
  unsure (1)..(74): unsure at all Xaa locations
  Clone ID: LIB3196-044-P1-M1-A3.pep
RQELSKCEPNGHCATMCLAEGKXLNMGTGDPKKPLGKLXDKEWLGKLXLMEHKKKYPVALVNFSELSKKCSQRR

SEQ ID NO: 101377 - protein, 115 aa, Gossypium hirsutum
  unsure (1)..(115): unsure at all Xaa locations
  Clone ID: LIB3196-044-P1-M1-A9.pep
LRPLPLGFSLSGFVGPRSRVFLCPFCGCLGACGCCSWLPFSGSLGSSCPFLXGSPGPGRRRVFGVFFFSVALPRALAAGCFAGPLVLFARGLVLSLPLSGLSLCLRLLRXCPRVP

SEQ ID NO: 101378 - protein, 91 aa, Gossypium hirsutum
  Clone ID: LIB3196-044-P1-M1-B11.pep
NNLPIDTLIFITKALLFTQSSLLDQFLLQLSPLQRVLLLLSFTTSSLGASTAASKDSEVSLVPTVCTVVPLIPTETGSATVSLGVPPTRPR

SEQ ID NO: 101379 - protein, 114 aa, Gossypium hirsutum
  Clone ID: LIB3196-044-P1-M1-B3.pep
EEKIRVAYDKKSRRLKRLDERGAEATKVDSTRNIIRSLSTKLRIAIQVVDKISVTINKIRDDELWPLLNELIDGLSRMWKCMLKCHRNQYEVIREAKALSSIGSGKMLSDDHLT

SEQ ID NO: 101380 - protein, 124 aa, Gossypium hirsutum
  Clone ID: LIB3196-044-P1-M1-B4.pep
YRITDIRSTLTYKNGIHIVQFNPAKIICAEQSYQRVERPPYKGGPWLAFGNLAGKQFPILIRNFPQMIRVAYSAYTVYTNNMVYVVYLFSFWESGILIHSRQMPTCHPSIKTLGTESPMSFLGR

SEQ ID NO: 101381 - protein, 43 aa, Gossypium hirsutum
  Clone ID: LIB3196-044-P1-M1-B9.pep
CSILGKSSNLLSFVLNTLGIMCSLSVAVHISYICVIYLTFMFG

SEQ ID NO: 101382 - protein, 68 aa, Gossypium hirsutum
  Clone ID: LIB3196-044-P1-M1-C2.pep
MAPPSASPQLPREPALQQALSKINEVPRRGSLLQGDQMASAAIIEAQILGREGPGGGRCQSVNTALRD

SEQ ID NO: 101383 - protein, 49 aa, Gossypium hirsutum
  Clone ID: LIB3196-044-P1-M1-C3.pep
GQRVPYLAGGHQITIGETVMSLGNHVFSLCLSRQEGRSQRVIRVYMRAS

SEQ ID NO: 101384 - protein, 94 aa, Gossypium hirsutum
  Clone ID: LIB3196-044-P1-M1-C9.pep
FLRCSEHITKPHARAHGRVSHTAKTHTRVSTCVHKIKLFLSLISHQNLFSTYINVPTHMHQPIQDIKTKSKPILCMIHYYICSSTHLPFFGPVG

SEQ ID NO: 101385 - protein, 124 aa, Gossypium hirsutum
  Clone ID: LIB3196-044-P1-M1-D1.pep
MPSPLGPRLPGGPLLQCFPGEASCVESSVPALAFSQPPPSLQQAALFALPVRKACPRRSACPCCWLITICRALTLCFPFLLPLFPSVWLFPSGNWVWKALGSSSEKMGVGPAYSGRRGRTGTPP

SEQ ID NO: 101386 - protein, 73 aa, Gossypium hirsutum
  Clone ID: LIB3196-044-P1-M1-D10.pep
YVIHRADQDTFERKRMRWQLCAGPRHDLLLIVYRLQTLSGHFVLHLMFHSLRPWLRPAYLARRLALVFKTNRF

SEQ ID NO: 101387 - protein, 76 aa, Gossypium hirsutum
  Clone ID: LIB3196-044-P1-M1-D2.pep
NTSHQELLIYRPHNLDQFGAKVIMDRPYQFWVNSHINDFLGSSSLRFVFFLSQTTDPLIEPYKIVNLSYLDSLITH

SEQ ID NO: 101388 - protein, 96 aa, Gossypium hirsutum
  Clone ID: LIB3196-044-P1-M1-D4.pep
MQIPRAALLPLLLLLLLAAPASAQLSRAGRSAPLATGCPERCEPARCPPQPEHCEGGRARDACGCCEVCGAPEGAACGLHEGPCGEGLQCVVPFGV

SEQ ID NO: 101389 - protein, 95 aa, Gossypium hirsutum
  Clone ID: LIB3196-044-P1-M1-D7.pep
VKAHPRCPNVSSKCFCTILKDKDVFKPSPDTIIPHKIHANSSVSSSPKSMLKCPPLSRHPIQGSSMFHSEKGPSELGTPGRLIGGGFGKKGFARV

SEQ ID NO: 101390 - protein, 71 aa, Gossypium hirsutum
  Clone ID: LIB3196-044-P1-M1-D9.pep
GLCLYPSHAGSRRSINTCCGCSSLLILFQEAFPALLPPFPWSEDFFHLCHLLFSPCVSLWTLRCILTPPTD

SEQ ID NO: 101391 - protein, 46 aa, Gossypium hirsutum
  Clone ID: LIB3196-044-P1-M1-E11.pep
HYNKYVYIHIHKLINQNSTSHSYAHIYCRTYFSYLLTFFIYILHDL

SEQ ID NO: 101392 - protein, 76 aa, Gossypium hirsutum
  Clone ID: LIB3196-044-P1-M1-E2.pep
RGGHLAQLAPNRMELSFFKMAGIPNRLKRIGRGKRRLPWKQFFKSFFFLNPPILPKKRDPYFPTIYPTKKIPGPSF

SEQ ID NO: 101393 - protein, 57 aa, Gossypium hirsutum
  Clone ID: LIB3196-044-P1-M1-E3.pep
TIKKRAGVHRTFTKPKLTVAPLAQGAKQVVGQPTFETNVKAGFIFLSIATPTKHRKA

SEQ ID NO: 101394 - protein, 71 aa, Gossypium hirsutum
  Clone ID: LIB3196-044-P1-M1-F7.pep
ICGLSSCSEKEGKGTIASAFLDLLLLLLLPSLSLSYSEAPLWSFIYSVLEKMARREEIQPLVWGNGNWNGG

SEQ ID NO: 101395 - protein, 92 aa, Gossypium hirsutum
  unsure (1)..(92): unsure at all Xaa locations
  Clone ID: LIB3196-044-P1-M1-F8.pep
SWLVVGPLFWFFAPCPLPVVLLPRFCGLPFAWCVGFLVALFRPLLLWLLXFFFXSLALFRPPFSSFLVCLGAWVVPGVLVVCLLAXLLGLFL

SEQ ID NO: 101396 - protein, 100 aa, Gossypium hirsutum
  unsure (1)..(100): unsure at all Xaa locations
  Clone ID: LIB3196-044-P1-M1-G1.pep
VEIRAQLAELEASKMQTTEARLVCNAVDERTNIXASEVIVLEEKALILXSNELKLGEAYWRTQRLKYFISSIPKKIANLEKERXDILSTPVALQEEKKVL

SEQ ID NO: 101397 - protein, 116 aa, Gossypium hirsutum
  Clone ID: LIB3196-044-P1-M1-G5.pep
MGTRDDEYDYLFKVVLIGDSGVGKSNLLSRFTRNEFNLESKSTIGVEFATRSIQVDGKTIKAQIWDTVGQERYRAITFAYYRGALGALLVYDIAKHLTYENVERWLKELLDHADSN

SEQ ID NO: 101398 - protein, 95 aa, Gossypium hirsutum
  Clone ID: LIB3196-044-P1-M1-G6.pep
AFSVFGQVERAVVIVDDRGRPSRKGIVEFSGKPAARKALDRCSEGSFLLTTFTRPVTVEPMDQIDDEKGLPKKLFIKNQQIHKEREQPPRFVQPG

SEQ ID NO: 101399 - protein, 121 aa, Gossypium hirsutum
  Clone ID: LIB3196-044-P1-M1-G7.pep
IRKYLRSVGDGETVEFDVVEGEKGAEAANVTGPDGVPVEGSRYAADRRRYRRGYYGRRRGPPRNAGEIGEMKDGVPEGAQLQGPVHRNPTYRPRYRSRGPSRPRPAPAVGEAEDKENQQAF

SEQ ID NO: 101400 - protein, 117 aa, Gossypium hirsutum
  Clone ID: LIB3196-044-P1-M1-G8.pep
MQVMAPRTLLLLLLGALALTETWAVSHSMRYFSTAVSRPGRREPWYLEVGYVDDTQFVWFDSDTESPRMEPRAPWVEQEGPEYLDPDTQRAKGQRQTERGSLRALLRYYNQSEGGSH

SEQ ID NO: 101401 - protein, 122 aa, Gossypium hirsutum
  Clone ID: LIB3196-044-P1-M1-H10.pep
LEETLTTSNGCSSSMNLSSRNLVYHDEVDFDSHRATADARNDNSPKFSQPELRKLDIPDASTLGNDYICCASIPGSSFKNIQQSSSMSFVIDPNARNLPILPNKVESYSNTLPSDLLAAAIQ

SEQ ID NO: 101402 - protein, 61 aa, Gossypium hirsutum
  Clone ID: LIB3196-044-P1-M1-H4.pep
TQKKESVSALLFPIPSRVLVRYVRNHFTLQIPTFLLTHLAFTFTCLAMLDSECFLHIYLLF

SEQ ID NO: 101403 - protein, 43 aa, Gossypium hirsutum
  Clone ID: LIB3196-044-P1-M1-H7.pep
FALSQRNGKGHRGLYETIYGPGLEVEIALLLTFCWLEQSQVLA

SEQ ID NO: 101404 - protein, 46 aa, Gossypium hirsutum
  Clone ID: LIB3196-044-P1-M1-H8.pep
VWGVTYDVMIEYQSRELLYILTKCYNQNDKPRSNIKRSHYLKVAER

SEQ ID NO: 101405 - protein, 52 aa, Gossypium hirsutum
  Clone ID: LIB3196-045-P1-M1-A1.pep
MKFQYKEDHPFEYRKKEGEKIRKKYPDRVPVIVEKAPKARVPDLDKRKVLVP

SEQ ID NO: 101406 - protein, 90 aa, Gossypium hirsutum
  unsure (1)..(90): unsure at all Xaa locations
  Clone ID: LIB3196-045-P1-M1-A11.pep
RTIGIMLDTKGPEGRSGDLRXPITLTTGQEFTFTIRRGVGTPDCVRVNYEEIVNEVEKGDTLFVDGGMMSLEGKSNTEDSEKCEVVDGGE

SEQ ID NO: 101407 - protein, 44 aa, Gossypium hirsutum
  Clone ID: LIB3196-045-P1-M1-A12.pep
HSFCYQKWPLLSLHKDIKNVKNYPSGIRKLPWKFTHSEIPHSHL

SEQ ID NO: 101408 - protein, 88 aa, Gossypium hirsutum
  Clone ID: LIB3196-045-P1-M1-A2.pep
ESFCIQLDYRFWIRERLTILSLMEMEKKNKLIILKSPLVFPMIMILNLCARIIKQPFQVSRNSNRDRIATLNWILSYTSTRDRMTTIN

SEQ ID NO: 101409 - protein, 138 aa, Gossypium hirsutum
  Clone ID: LIB3196-045-P1-M1-A8.pep
MRLQALARTYWPESLVEKDHVTKPTAMAQGRVAHLIEWKGWSKPSDSPAALESAFSSYSDLSEGEQEARFAAGVAEQFAIAEAKLRAWSSVDGEDSTDDSYDEDFAGGMDTDMAVQLPLGPHLQDLFNGHRFSRAVRQ

SEQ ID NO: 101410 - protein, 50 aa, Gossypium hirsutum
  Clone ID: LIB3196-045-P1-M1-A9.pep
MDFDARQICEGAKVRLGVVSFTPYSLPSLVMFVFFSLFIRNGLILIVRNK

SEQ ID NO: 101411 - protein, 42 aa, Gossypium hirsutum
  Clone ID: LIB3196-045-P1-M1-B2.pep
MTKYVYCIKNRAASIYLLVLNRWFNKAVSYGVLNVLLIIHLS

SEQ ID NO: 101412 - protein, 69 aa, Gossypium hirsutum
  Clone ID: LIB3196-045-P1-M1-B3.pep
RCFRLALRWGILYKKRMVLTLNSELADLDFMHSAIVSYITLGPLHHGDSFYDGQLEKMQLNHLQWWVSP

SEQ ID NO: 101413 - protein, 121 aa, Gossypium hirsutum
  Clone ID: LIB3196-045-P1-M1-B4.pep
WCHCRQEPEESLGRFLEGLGAVFPHEPWLQLCRERGGTFWSCEVTHRQAPAAPSAPGEDQVMLIFYDQRQVLLSQLHPPTVLPDRQAGATPASTGGLAVVFDTVARSEVLFRSDRFDEGPV

SEQ ID NO: 101414 - protein, 53 aa, Gossypium hirsutum
  Clone ID: LIB3196-045-P1-M1-B6.pep
LEGTLERAQAPPRYPRCGPIVRTLVRFIQRCKILILSCGKGEKKDGLYFSSAY

SEQ ID NO: 101415 - protein, 97 aa, Gossypium hirsutum
  Clone ID: LIB3196-045-P1-M1-B7.pep
WDHPTLAHKIWHISCGCGVHSRVRILLYNYVNPVGEKRRMGLFNARLVAGEDSRDPLPLDPGPLEVLRRYGGPTTKPLQTGSGGPEPAPQWVPGADP

SEQ ID NO: 101416 - protein, 96 aa, Gossypium hirsutum
  Clone ID: LIB3196-045-P1-M1-B8.pep
KSHPKCLGLRVTPPQKSKLTPQLSLRVTETPTQPLESEKVKVDSPKEVLTAKVTKNSNLANHPMAQPIKQLAEATVDQPPLCIAYPTMDTDFPRVR

SEQ ID NO: 101417 - protein, 76 aa, Gossypium hirsutum
  Clone ID: LIB3196-045-P1-M1-C1.pep
MMGLGNGRRSMKSPPLVLAALVACIIVLGFNYWIASSRSVDLQVFCFVYYVYFMFMFWLFCYGVPGVCCSLPARAF

SEQ ID NO: 101418 - protein, 109 aa, Gossypium hirsutum
  Clone ID: LIB3196-045-P1-M1-C6.pep
LQAEADSTSEGLEDAVHSRGARPPAAGPGEDGDEDEEDTAPESALDTSLDKSFSEDAVTDSSGSGTLPRARGRASKGTGKRRKKRPSRSQEEVPPDSDDNKTKKLCVIQ

SEQ ID NO: 101419 - protein, 83 aa, Gossypium hirsutum
  Clone ID: LIB3196-045-P1-M1-C7.pep
QSEFIEVQIVIVLSVSVTSFFIPLIVVHVNLDLIVLSLSSERLLSNIWGFHNAYLPLPNFISFLRYVSKFYFFQTYKSFLLLP

SEQ ID NO: 101420 - protein, 118 aa, Gossypium hirsutum
  unsure (1)..(118): unsure at all Xaa locations
  Clone ID: LIB3196-045-P1-M1-C8.pep
LEWEKKIELVFDCHNYSESKKVKLAAIEFSDYMXSXWDQLVTSRRXNCERPISPWGEMKPVMRKRFIPSSYHRDLYQRLQNLTQGNRSVEDYYKEMEIAMIRADIEEDREATMASPRV

SEQ ID NO: 101421 - protein, 125 aa, Gossypium hirsutum
  Clone ID: LIB3196-045-P1-M1-D3.pep
MEEKKFDEALKLRGRSFMNNWEVYKLLAHVRPPVSKSGSHTVAVMNVGAPAAGMNAAVRSTVRIGLIQGNRVLVVHDGFEGLAKGQIEEAGWSYVGGWTGQGGSKLGTKRTLPKKSFEQISANIT

SEQ ID NO: 101422 - protein, 124 aa, Gossypium hirsutum
  Clone ID: LIB3196-045-P1-M1-D4.pep
NISWKKTIVTRFLKLVPDLLAIVQRKKKEGEEEQAINRQTALYTLKLLCKNFGAENPDPFVPVLSTAVKLIAPERKEEKNVLGSALLCVAEVTSTLQALAVPQLPSLMPSLLTTMKNTSELVSS

SEQ ID NO: 101423 - protein, 122 aa, Gossypium hirsutum
  Clone ID: LIB3196-045-P1-M1-D6.pep
RTFSSRLILEKHVQVRHGLQLGAQSPGRGTTLARGSSARAQGPGRKRRQSSDSCSEEPDSTTPPAKSPRGGPGSGGHGPLRYRSSGSTEQSLMVGLRVEDGAQQCLDCGLCFASPGSLSRHR

SEQ ID NO: 101424 - protein, 120 aa, Gossypium hirsutum
  Clone ID: LIB3196-045-P1-M1-D7.pep
HASAESYVQRGDQASIIGGAINFVKELEHCVQLLSAKKETKERPNGSSSGCSSPFGEFFTFPQYSTSSTRGDNNSIPMNESMVGTRSAIADIEVTMVESHANLKIRSKKGPAQLLKLVSG

SEQ ID NO: 101425 - protein, 62 aa, Gossypium hirsutum
  Clone ID: LIB3196-045-P1-M1-E10.pep
SHQSDSLDWRTDNLTRGDHGPGRVRFGPGPYKFLGPSTRLGPGPARNIGLKFCPSPARNIYS

SEQ ID NO: 101426 - protein, 127 aa, Gossypium hirsutum
  Clone ID: LIB3196-045-P1-M1-E11.pep
WQCESTYVVNHLGSTCPKPSGARMVDGWEKSRHWQLAAMSQTLPIKVFCLICLSFIQLFFKLQPTHKIRKFHKTFQISGCSLKMEGSGHTVFIVPLGHSGPEPTAAFFVDLAQMLWSLQFLPSTVIP

SEQ ID NO: 101427 - protein, 56 aa, Gossypium hirsutum
  Clone ID: LIB3196-045-P1-M1-E4.pep
KLRSIKNCVCGLSLDLEEEEKLFFLLFYAQLQNLQDSALSVCGEYCGLNIWVKGTL

SEQ ID NO: 101428 - protein, 122 aa, Gossypium hirsutum
  Clone ID: LIB3196-045-P1-M1-E5.pep
CVQGPPPGGLTGSFANPRGVWSTHLKPCPALVATHTPPAIKGISLSGKAPSGPLETGPGLSMSWPASCSGSQGPKGSQATQASSHLELAVLPANAKAPQNTPSQAGVGVHEGPASALHLGEP

SEQ ID NO: 101429 - protein, 51 aa, Gossypium hirsutum
  Clone ID: LIB3196-045-P1-M1-E9.pep
QICEHFHISSPPPPREPSRMKMFKKFYLSILCFYFSFILRLLFIFLSPYFY

SEQ ID NO: 101430 - protein, 102 aa, Gossypium hirsutum
  Clone ID: LIB3196-045-P1-M1-F10.pep
EKRKNPIGRINLANCTSHQIEPANREFCARRNTFELITVRPQREDDRETLVSQCRDTLCVTKNWLSADTKEERDLWMQKLNQVLVDIRLWQPDACYKPIGKP

SEQ ID NO: 101431 - protein, 108 aa, Gossypium hirsutum
  unsure (1)..(108): unsure at all Xaa locations
  Clone ID: LIB3196-045-P1-M1-F4.pep
MATVQQLEGRWRLVDSKGFDEYMKELGVGIALRKMGAMAKPDCIITCDGKNLTIKTESTLKTTQFSCTLXEKFEETTADGRKTQTVCSFTDGALVQHHEWDGKESTIT

SEQ ID NO: 101432 - protein, 83 aa, Gossypium hirsutum
  Clone ID: LIB3196-045-P1-M1-F5.pep
RTRSKQFFNSWYFMVSVSNFYPIPILPHLPFFLPPVASFLMDFHARNFRRDGTKDDIGTLSSSQQHLVELAALVLYRVFCSHA

SEQ ID NO: 101433 - protein, 102 aa, Gossypium hirsutum
  Clone ID: LIB3196-045-P1-M1-G2.pep
YYYPELLYNVQAKRNLCFVVPYLSLLLYLFEACMPHLNLCLGTFRPWASRTTTFLSSSKLSYLRCVIINHGKMIHLQVKIVNQGPEMSQTLWQLDGIHGKPE

SEQ ID NO: 101434 - protein, 41 aa, Gossypium hirsutum
  Clone ID: LIB3196-045-P1-M1-G3.pep
GHLCLRFRHRKNCIKKTKFIHIRGHDFCQPHIFTIKDYTLK

SEQ ID NO: 101435 - protein, 68 aa, Gossypium hirsutum
  Clone ID: LIB3196-045-P1-M1-G5.pep
FLKMKTNMESPAILFIRCDRITSQFDRFNKLFDLLKHCFRSTRIQKMDSGVGYARGRISTLDTPKIGT

SEQ ID NO: 101436 - protein, 126 aa, Gossypium hirsutum
  Clone ID: LIB3196-045-P1-M1-G6.pep
MGAAAAEADRTLFVGNLETKVTEELLFELFHQAGPVIKVKIPKDKDGKPKQFAFVNFKHEVSVPYAMNLLNGIKLYGRPIKIQFRSGSSHASQDVSLSYPQHHVGNSSPTFTSPSSRYERTMDNMT

SEQ ID NO: 101437 - protein, 94 aa, Gossypium hirsutum
  Clone ID: LIB3196-045-P1-M1-G8.pep
SSGPGNRTRRRGGGPHGFRGEGKAMGGHPPGTPFPGARSPLKEAQRDTFSGILSVGAASWGASPAQRRRLGKESWQRERTTCRAMALLPGPWTQ

SEQ ID NO: 101438 - protein, 65 aa, Gossypium hirsutum
  Clone ID: LIB3196-045-P1-M1-H2.pep
SRKKIIKNERNIKFIKKYKNYHTKKKHFIIFLLILLIFIFYHFCATCHVVLQHAMVLTEKKTRGY

SEQ ID NO: 101439 - protein, 105 aa, Gossypium hirsutum
  Clone ID: LIB3196-045-P1-M1-H5.pep
FCSRLAVLKDDFAVALSHADHVVVTAVYSVREAGPRNVCGKDLATSIISSTSEYIPSLDDVVDKLALEICKDPLREIVILTLGAGDVNTVGPKLLHELQKRLCIA

SEQ ID NO: 101440 - protein, 34 aa, Gossypium hirsutum
  Clone ID: LIB3196-045-P1-M1-H6.pep
RKVNNRIFHRNHVEIDKKVNGLHIKQLLKIKCLY

SEQ ID NO: 101441 - protein, 102 aa, Gossypium hirsutum
  Clone ID: LIB3196-046-P1-M1-A10.pep
MGSTGAGRAPPELPERNCGYREVQYWDQRYQGAADSAPYDWVGDLYSFRAPLEPELRPEDRILVLGCGNSALSYEAVLGGFPDVTRVDYSSVTVAGMQARYV

SEQ ID NO: 101442 - protein, 56 aa, Gossypium hirsutum
  Clone ID: LIB3196-046-P1-M1-A2.pep
IYPVIATLKAQVISLLDIFLFKKKIKNGGWKEIHFKIIVDCTPVLSSLVEVQSIEI

SEQ ID NO: 101443 - protein, 120 aa, Gossypium hirsutum
  Clone ID: LIB3196-046-P1-M1-A4.pep
GDSRLSPDVGHLVLTTLCPALHALVADGLKPFRKDLITGQRRSSPWSVVEASVKPGSSTRSLGTLYSQVSRLAPLSSSRSRFHAFILGLLNTKQLELWFSSLQEDAGPVFLLYPATGIFF

SEQ ID NO: 101444 - protein, 138 aa, Gossypium hirsutum
  Clone ID: LIB3196-046-P1-M1-A6.pep
SNPEETREPGSPPSVQQAGLGSPERPPETSPGSPRLQQGAGLESPQVQPEPGPGSPQRQQDLHLESPQRQPESRPESPRCQPKSSEEASKCSQDQGVLASELAQSKEELTPGVPQHQLPPGPGSPEPYPGQQAPGPEP

SEQ ID NO: 101445 - protein, 70 aa, Gossypium hirsutum
  Clone ID: LIB3196-046-P1-M1-B10.pep
MQNVGPHFETWNAGVLGPVTLNGLNEGRRDLSWQKWSYKIGLKGEALNLHSLSGRSSVEWAEGSLVAQKQ

SEQ ID NO: 101446 - protein, 70 aa, Gossypium hirsutum
  unsure (1)..(70): unsure at all Xaa locations
  Clone ID: LIB3196-046-P1-M1-B11.pep
LRNRPNSSALLITESSFQIFDRENAQTXKTELCTQSHADLALDEAAEAYLVGLIEDTNQCATHAKRVTIT

SEQ ID NO: 101447 - protein, 69 aa, Gossypium hirsutum
  Clone ID: LIB3196-046-P1-M1-B3.pep
PTRPPTRPLSQKTFYIIFFSHASSAILLFSSITFLPPSLISSSFSFFPLLLPNCFPNVSSDCLGLNTEF

SEQ ID NO: 101448 - protein, 131 aa, Gossypium hirsutum
  Clone ID: LIB3196-046-P1-M1-C1.pep
MHLHQPTQIPRSNSARPRSPRLPVASREPAGRRTPTPSSLRPSARAPSPFRDPCPAGSAANLPAMETPSQRRATRSGAQASSTPLSPTRITRLQEKEDLQELNDRLAVYIDRVRSLETENARLRLRITESE

SEQ ID NO: 101449 - protein, 50 aa, Gossypium hirsutum
  Clone ID: LIB3196-046-P1-M1-C10.pep
LALIALSLQTCPKASMPKTTIHISEYSHSYSMPTISNCSKVSIIARFSEI

SEQ ID NO: 101450 - protein, 91 aa, Gossypium hirsutum
  unsure (1)..(91): unsure at all Xaa locations
  Clone ID: LIB3196-046-P1-M1-C4.pep
HQDNIEEIVLAVSQHPHVYTLAFTGEIFGPDFNTRREQLHKLCGVRQSRLTXQGQGMFAKDSQELSAALSYVADIPREKSCERSAFNLLSQ

SEQ ID NO: 101451 - protein, 84 aa, Gossypium hirsutum
  Clone ID: LIB3196-046-P1-M1-C5.pep
WWSNHVGFAKEMQSPRFQAVLRVTSGRRKKAPDVKSFSHELNSKGVRPFPLKKSRVLGHMEVTFSFLIEQEQAIFKERNKLSVI

SEQ ID NO: 101452 - protein, 84 aa, Gossypium hirsutum
  Clone ID: LIB3196-046-P1-M1-C9.pep
PRVRFVGKAPLKVMTFGGTVISSVISAANAFSGTFLKAYFGVVTKSCKHPQMNILNFGGKDRFQRVNQGPLNILLRKRSVDLNS

SEQ ID NO: 101453 - protein, 92 aa, Gossypium hirsutum
  Clone ID: LIB3196-046-P1-M1-D1.pep
DCLKEKKALPRDFHQVFLSSLGTLTAVAMSVQILVPSRDVLRYPNGIWEKTWEISLNDFFTFLIFTETGIQLLLNKYLLNEPRINLVLCFRK

SEQ ID NO: 101454 - protein, 76 aa, Gossypium hirsutum
  Clone ID: LIB3196-046-P1-M1-D11.pep
HWVALTISFVLPNHFLVFKNFLILLKPAFDFDPLFYLSGAQDYLPFLAFCLVTNHSYLVAMYLGKGRMIFLAPLSV

SEQ ID NO: 101455 - protein, 42 aa, Gossypium hirsutum
  Clone ID: LIB3196-046-P1-M1-D12.pep
SLKIYLSFEMHFESLDFEFESSSYDRFSEDCASKIQELLVLD

SEQ ID NO: 101456 - protein, 74 aa, Gossypium hirsutum
  Clone ID: LIB3196-046-P1-M1-D2.pep
TSLPFLSHYFYFCHLFQIPTFLECFLGRGLEILPKVFSLQALIHTSLPCLTAVLQENGTCTLSPTKCMLHVDAF

SEQ ID NO: 101457 - protein, 136 aa, Gossypium hirsutum
  Clone ID: LIB3196-046-P1-M1-D5.pep
MWLTPFPLLPLGHACSFTMPGSLPLNAEACWPKDVGIVALEIYFPSQYVDQAELEKYDGVDAGKYTIGLGQAKMGFCTDREDINSLCMTVVQNLMERNNLSYDCIGRLEVGTETIIDKSKSVKTNLMQLFEESGNT

SEQ ID NO: 101458 - protein, 108 aa, Gossypium hirsutum
  Clone ID: LIB3196-046-P1-M1-D6.pep
ASTIVFPAEMQVPLVSPAIPSVVIMSQESVAISCRKAQINSCNPKQCAQPRALSALPKRKCRHGRVLQHMSLLSKLGCKPSSYCNTHHLSQTRFVSFNIFFKNACRPH

SEQ ID NO: 101459 - protein, 52 aa, Gossypium hirsutum
  Clone ID: LIB3196-046-P1-M1-E10.pep
VTVLHESQNSCRRGRLDHTRSSSRMMFGSMSHDMIFTPPRKSFLAFLVGTDR

SEQ ID NO: 101460 - protein, 83 aa, Gossypium hirsutum
  Clone ID: LIB3196-046-P1-M1-E12.pep
EAGPHVLWLKAATPPQKARQCAAPPHLLGIGLRFTEAKCHSLALFFVRHFLLSLREGKASIRRTYFPRAINFSPLQRPGNYLT

SEQ ID NO: 101461 - protein, 102 aa, Gossypium hirsutum
  Clone ID: LIB3196-046-P1-M1-E2.pep
FIALGQRRPPFGPRVGRAGGVGSARGLPASNHPRSGWAPGPEAGPTGPPASVRVDPFPSPCTSLSPLQIVGRLQQHLDVHPNRRRHSAPGAGATGPTPTAQR

SEQ ID NO: 101462 - protein, 134 aa, Gossypium hirsutum
  Clone ID: LIB3196-046-P1-M1-E4.pep
MGRVIRGQRKGAGSVFRAHVKHRKGAARLRAVDFAERHGYIKGIVKDIIHDPGRGAPLAKVVFRDPYRFKKRTELFIAAEGIHTGQFVYCGKKAQLNIGNVLPVGTMPEGTIVCCLEEKPGDRGKLARASGNYA

SEQ ID NO: 101463 - protein, 70 aa, Gossypium hirsutum
  Clone ID: LIB3196-046-P1-M1-E7.pep
IDGVTYSADLKGFISRFSVGKAKNQPKLNCRTTKMSQELVVLATLKVEQLNHYPCPLSQRSIFSLERIKP

SEQ ID NO: 101464 - protein, 127 aa, Gossypium hirsutum
  Clone ID: LIB3196-046-P1-M1-E9.pep
RPDATKNARNDFLKEVKIMSRLKDPNIIRLLGVCVQDDPLCMITDYMENGDLNQFLSAHQLEDKAAEGAPGDGQAAQGPTISYPMLLHVAAQIASGMRYLATLNFVHCDLATRNCLVGENFTIKIAD

SEQ ID NO: 101465 - protein, 130 aa, Gossypium hirsutum
  Clone ID: LIB3196-046-P1-M1-F1.pep
MEPKQQRRLSPFPLPLPFSGCLPGPPTLHSPGPAMSQKQEEENPAEETGEEKQDTQEKEGILPERAEEAKLKAKYPSLGQKPGGSDFLMKRLQKGQKYFDSGDYNMAKAKMKNKQLPSAGPDKNLVTGDH

SEQ ID NO: 101466 - protein, 71 aa, Gossypium hirsutum
  Clone ID: LIB3196-046-P1-M1-F11.pep
NRYRQLRNFTQILKAKSSNRILFLYTNSQKKKTLEAIGQQHTPSGIIPCFSFIAYFFYPTSKNKYKYPQSI

SEQ ID NO: 101467 - protein, 130 aa, Gossypium hirsutum
  Clone ID: LIB3196-046-P1-M1-F5.pep
MHLAHLVSSCSLLLLLGALPGWAASDDPIEKVIEGINRGLSNAEREVGKALDGINSGITHAGREVEKVFNGLSNMGSHTGKELDKGVQGLNHGMDKAGKEADKAVQGFHTGVHQAGKEAEKLGQGVNHAA

SEQ ID NO: 101468 - protein, 123 aa, Gossypium hirsutum
  unsure (1)..(123): unsure at all Xaa locations
  Clone ID: LIB3196-046-P1-M1-F6.pep
MGNDSLSKVISVGTIXIKMHDGIIRTLSNVRHMINLKKNLISFGNLDQKGCKINIESSVIKVSRGAFILMKGKNIDSLYVLEGSTMTRKIGRPSSVKESKLTHLKWRQLGHRREKSITVSFKR

SEQ ID NO: 101469 - protein, 108 aa, Gossypium hirsutum
  unsure (1)..(108): unsure at all Xaa locations
  Clone ID: LIB3196-046-P1-M1-G1.pep
YIPVPSCTHMAYLNFTFRIHITLPVKHLEYDSDTRNKCTEVPKHSLGYLTKSVLKCLISQNHMLLSTXLLKELREYLNTTXDTQHQDPSMYHILNELNTHMTILVTCH

SEQ ID NO: 101470 - protein, 53 aa, Gossypium hirsutum
  Clone ID: LIB3196-046-P1-M1-G10.pep
PLATFGHELLMNTIISFQLKIMREYHTYLSSIKLNPNLPFNLIQIEPKRSKFM

SEQ ID NO: 101471 - protein, 52 aa, Gossypium hirsutum
  Clone ID: LIB3196-046-P1-M1-G11.pep
KYLIYYLFEIALYIIYCNLFYILFILNCFILFTSNFFITYFVSFSSFVNIGI

SEQ ID NO: 101472 - protein, 111 aa, Gossypium hirsutum
  Clone ID: LIB3196-046-P1-M1-G3.pep
IAAPSSCRRPCAGIQSASPGAKFKNVTAAAGWSRKRNETRPPGLLPGAAGPSARRATRNRPFSRHFRRGWETEARSAGPAAPRKRRAAWPPAWTAGTGLAPGSTCSWFQNI

SEQ ID NO: 101473 - protein, 52 aa, Gossypium hirsutum
  Clone ID: LIB3196-046-P1-M1-G8.pep
EEVSPGKLYYGLLELTNLSCSFTVNAQTLFFIIFPKMRKAGWGHGGQNSGLT

SEQ ID NO: 101474 - protein, 50 aa, Gossypium hirsutum
  Clone ID: LIB3196-046-P1-M1-H10.pep
DMVKYDRLILNGLLVHVNTRVDLHVKLPNFLYSGRPRWVLMGKYICLISY

SEQ ID NO: 101475 - protein, 41 aa, Gossypium hirsutum
  Clone ID: LIB3196-046-P1-M1-H2.pep
MPGKKARKNAQPSPTRAQAELEVECATQLRRFGDKLNFRQK

SEQ ID NO: 101476 - protein, 42 aa, Gossypium hirsutum
  Clone ID: LIB3196-046-P1-M1-H3.pep
MSNYVNDMWPGSPQEKDSPTASRSGGSSRLSSRSRSRSFSRS

SEQ ID NO: 101477 - protein, 46 aa, Gossypium hirsutum
  Clone ID: LIB3196-046-P1-M1-H9.pep
HIAFQVMMGTKRGRDLLNEEIIDIEKGEKDATIKREKGVDKRSKRK

SEQ ID NO: 101478 - protein, 38 aa, Gossypium hirsutum
  Clone ID: LIB3196-047-P1-M1-A11.pep
IAQQWNQYYQNQGQWPPYYGNYDYGSYSGNTQGGTSTQ

SEQ ID NO: 101479 - protein, 124 aa, Gossypium hirsutum
  Clone ID: LIB3196-047-P1-M1-A12.pep
NKLPHKLKDLGSFTIPFLIRSLNVNNALLDLGVSINAMLYKMFKQLVLGKPKQTRISIQLADRTIRFPRGIIEDVLVKIDKFIFPVDFIVLDIDEDSDVPLILGQSFLATARTIIDVGIGELIL

SEQ ID NO: 101480 - protein, 45 aa, Gossypium hirsutum
  Clone ID: LIB3196-047-P1-M1-A3.pep
KHLICRRSPTLKDLCDSSIEYNRDSLNLILDLFFMHYVYNQVYYV

SEQ ID NO: 101481 - protein, 128 aa, Gossypium hirsutum
  Clone ID: LIB3196-047-P1-M1-A9.pep
VPKSTLCFEIKRKQNAPAPPKTPKRFSASPSPHIAQYKIFHLPPPRLGPERKRDGSGRASPPTVFSSTSHLGQISPNQLTSELTKHTHDDVIVEQATHLRGPCPSPWVSRRIRGPGTSRAFCVQTLLL

SEQ ID NO: 101482 - protein, 129 aa, Gossypium hirsutum
  Clone ID: LIB3196-047-P1-M1-B12.pep
LQFHWDRFRTFARLDKKTDESLTKYFHGFVAMCRQVCRLPPAAGDEPPDPNLFIEPITEERASRTLYRIELLRRLREQVLCHPLLEDRLALCQPPGPELPKWWEPVRHDGELLRGAARHGVSQTDCNIM

SEQ ID NO: 101483 - protein, 79 aa, Gossypium hirsutum
  unsure (1)..(79): unsure at all Xaa locations
  Clone ID: LIB3196-047-P1-M1-B3.pep
FLTLSLRLQSSSASYGGGFGGSSCHLGGGPGALTCSTRFVFGEQVXGFRRGVNRWFCGRACXGFXVASGEGLEGGFVGG

SEQ ID NO: 101484 - protein, 84 aa, Gossypium hirsutum
  Clone ID: LIB3196-047-P1-M1-C1.pep
TILQVCTKKQACSGSEFPGLPEREPQTREQDRAHQTSETVTGSGTQTQAGATQTVEQDSSHQTGRTSSQTQEATNDQNRGIEIH

SEQ ID NO: 101485 - protein, 81 aa, Gossypium hirsutum
  Clone ID: LIB3196-047-P1-M1-C10.pep
LKYVVISETGLKISDTLSFSYLSCPWHRVSCFSQSSLDGVSFQYSMTPAESAAARPAVALALAFAQRSAARSCDSELRLGF

SEQ ID NO: 101486 - protein, 59 aa, Gossypium hirsutum
  unsure (1)..(59): unsure at all Xaa locations
  Clone ID: LIB3196-047-P1-M1-C3.pep
CRKSTNVLFLHRKKMFLVALDVGAVSLILMDQARRNCIIFVVQKXSNRINSRPCRMNWH

SEQ ID NO: 101487 - protein, 84 aa, Gossypium hirsutum
  unsure (1)..(84): unsure at all Xaa locations
  Clone ID: LIB3196-047-P1-M1-C4.pep
RIGPIAYRLLLPPELEKIHNVFHVWMFRRYRSDPSHVIPLSEIKIXSDINIEEKSIQILAREVKESXNKKISLVKVMSHRHGIE

SEQ ID NO: 101488 - protein, 111 aa, Gossypium hirsutum
  unsure (1)..(111): unsure at all Xaa locations
  Clone ID: LIB3196-047-P1-M1-C7.pep
MCPRQRPIAIKGYRPYLKTIEDLGNKIIAATIENAHPILQIDNARLXVDDFMTKYXHELALRHTVEADVNGLRRLVDELTLARTDLEMQIXGLKEELAYLRKNHLEVLLAL

SEQ ID NO: 101489 - protein, 85 aa, Gossypium hirsutum
  Clone ID: LIB3196-047-P1-M1-D4.pep
FKGDKIGIKKPGPLERPAQVHSAIQFILVLHVGGYTLSRFPPKGRRIISHVIKLPSNPFLCLEVCVTCSRKIESPRKSPCCYSIF

SEQ ID NO: 101490 - protein, 68 aa, Gossypium hirsutum
  Clone ID: LIB3196-047-P1-M1-D6.pep
SLRIYKDINYRELKFHPPPPNNFSGSAPAHPLTDYVISTVIPFFFDHIDLRLLKYDLIASFMMEPLTK

SEQ ID NO: 101491 - protein, 45 aa, Gossypium hirsutum
  Clone ID: LIB3196-047-P1-M1-E10.pep
PFVLCPLLCPCLTRAWGTTPRVGPYVGHLAPRPAPLALSAWDEPE

SEQ ID NO: 101492 - protein, 60 aa, Gossypium hirsutum
  Clone ID: LIB3196-047-P1-M1-E3.pep
ERSLSGFIMMPDSSSADGDKNHHDSNRWKWKIFNSEFAFTIGEMTTLNLPRGLAHGNMQT

SEQ ID NO: 101493 - protein, 88 aa, Gossypium hirsutum
  unsure (1)..(88): unsure at all Xaa locations
  Clone ID: LIB3196-047-P1-M1-E6.pep
FPVTIXAADRQYTVARKLRRRRPCPSLLYAFHTGHWDFPPFVALFLVNVRARLYLYHREMLAQEWKDPGIMERRVQECELSLLVSRFR

SEQ ID NO: 101494 - protein, 57 aa, Gossypium hirsutum
  Clone ID: LIB3196-047-P1-M1-E7.pep
KKIKVLIISYEPLYSRRVKTMAFFLLDTQLLNTCLKSKQIFVQSLQFRQVTCWLFYL

SEQ ID NO: 101495 - protein, 120 aa, Gossypium hirsutum
  unsure (1)..(120): unsure at all Xaa locations
  Clone ID: LIB3196-047-P1-M1-E9.pep
MTVASPQQGWDSTAGXRCWGEGEIEAVTQVSEFKTXVLSFQGPATLPDGSSATKAPXRRDAGPGPSLKETGIVLKSTPWAEGRAGTSQLCRPYKQEPSSPPLAPGLPAFLAAPGTTFCPE

SEQ ID NO: 101496 - protein, 133 aa, Gossypium hirsutum
  Clone ID: LIB3196-047-P1-M1-F1.pep
IFAEVNADRITWLYDGTTGRQTKNSVDTRTIGRYISTKAVGSNARMDVTDKYKYPEGSDQERRVFQKALGKLKPNASFGATSSMGLEAEERESSIIGKFKVTGMLAVGKEVNLVLLLKNLSSDTKTVTVNMTG

SEQ ID NO: 101497 - protein, 52 aa, Gossypium hirsutum
  Clone ID: LIB3196-047-P1-M1-F3.pep
NLTSHHLQMIPSYESLCFRGPKIQKSSSKDIKSLQARKYVAEFFQLQNPTRP

SEQ ID NO: 101498 - protein, 139 aa, Gossypium hirsutum
  unsure (1)..(139): unsure at all Xaa locations
  Clone ID: LIB3196-047-P1-M1-F9.pep
YESVQGKLLLPRPHSSGDHDIERGWILVTKEQHRQLKSLQEKVSKKEFLRLAQTLRHYGYLRFDACVADFPEKDCPVVVSAGNSELSLQLRLPGQQLREGSFRVTRMRCWRVTFSXVPLPNGSTSSPGRGPGEVRLELA

SEQ ID NO: 101499 - protein, 57 aa, Gossypium hirsutum
  Clone ID: LIB3196-047-P1-M1-G11.pep
WAFAGGCSSFPSPARVLVGNSAQKESSGAPRGLGNRRTLAQGAVQGPRGVFTDPSCS

SEQ ID NO: 101500 - protein, 74 aa, Gossypium hirsutum
  Clone ID: LIB3196-047-P1-M1-G12.pep
MAKSLRSKWKRKMPAEKRKKNAPKELSRLKSILKLEGDVLMKDVQEIATVVVPKRKHCQEKMQCEVKDEKDDMK

SEQ ID NO: 101501 - protein, 79 aa, Gossypium hirsutum
  Clone ID: LIB3196-047-P1-M1-G3.pep
PSFRPRRRHRLSCCIATHVTQYRQPSPSTFTGFTAVTCTPSTSTSSAHYRITLLCIRLIALVFGNRYFMKNSIYYSVVS

SEQ ID NO: 101502 - protein, 128 aa, Gossypium hirsutum
  Clone ID: LIB3196-047-P1-M1-G5.pep
ISGLGSLGPDAAAPGGPGLGAELGPGLSWAPLVFGYVTEDGDTALHLAVIHQHEPFLDFLLGFSAGTEYMDLQNDLGQTALHLAAILGEASTVEKLYGAGARLCVAERMGHTALHLACRVGAHACARA

SEQ ID NO: 101503 - protein, 104 aa, Gossypium hirsutum
  Clone ID: LIB3196-047-P1-M1-G6.pep
DRRFSSVLSRDMDLIDILWRQDIDLGVSREVFDFSQRRKEYELEKQKKLEKERQEQLQKEQEKAFFAQLQLDEETGEFLPIQPAQHIQSETSGSANYSQVCHIP

SEQ ID NO: 101504 - protein, 40 aa, Gossypium hirsutum
  Clone ID: LIB3196-047-P1-M1-G7.pep
ESNFELLLNNGMSENLGLGNEVSCCVYLWISGFIGTRVSF

SEQ ID NO: 101505 - protein, 78 aa, Gossypium hirsutum
  Clone ID: LIB3196-047-P1-M1-G8.pep
FSHIPAVANESLISNRNLRLNWEINSFTTLACRNYAGDCKQKFTTLVHKKVWDYKKPFHHAFVWLSKHFLVQKYNHHI

SEQ ID NO: 101506 - protein, 53 aa, Gossypium hirsutum
  Clone ID: LIB3196-047-P1-M1-H11.pep
PAMLSALHCVRGLIRPMNARYYLEMILVSQAIFTICRKLLIYLTMVQALMEGE

SEQ ID NO: 101507 - protein, 34 aa, Gossypium hirsutum
  Clone ID: LIB3196-047-P1-M1-H2.pep
VILAFKMIITHILNLFPHGAKVEGLIFYMHPSSP

SEQ ID NO: 101508 - protein, 77 aa, Gossypium hirsutum
  Clone ID: LIB3196-047-P1-M1-H3.pep
NTYLSFFSHIHANVLESNPNQSQYQFIHIFKFPANHYTIQFHTCIHSSIKSNSHSIQISLLTSISFDFSPHIFRLLT

SEQ ID NO: 101509 - protein, 125 aa, Gossypium hirsutum
  Clone ID: LIB3196-047-P1-M1-H5.pep
SLMSYPAKTEARSQGGKAVRPHTTAPEMDFSASLTPKTVRCTLKPALSIASAINGCKSWTPCSKSSNSAMEPSSSQPLLVPTGFPKGQENISPPIIAISLFSRHGEHHPDCVYVPNYNSFFANEI

SEQ ID NO: 101510 - protein, 115 aa, Gossypium hirsutum
  unsure (1)..(115): unsure at all Xaa locations
  Clone ID: LIB3196-047-P1-M1-H7.pep
GNDTLNHRTIMKYTINQHLSNLKKSQKKWFDPLILISRTERSMNRDPNAYRYKWSNGSKNFQEHLEHFVSEQKSRFQRVFDRLRINQYSIDWSEVIDKXNLSKSLSFFLSKVLLF

SEQ ID NO: 101511 - protein, 88 aa, Gossypium hirsutum
  unsure (1)..(88): unsure at all Xaa locations
  Clone ID: LIB3196-047-P1-M1-H8.pep
STCLSLPKCWDYSCEPSCPAECACFQSLPVLMLKVTTTQTLQLALLFVLIVSHKGSLMQAVLLSRQPTNRRXQHTSGAIIREHFCNEM

SEQ ID NO: 101512 - protein, 110 aa, Gossypium hirsutum
  Clone ID: LIB3196-048-P1-M1-A11.pep
MSLSLSFTHPILSRHVYSAVFPPPRFLFLSPLIPTTSRFPILYRAPQRATALSATAVTASIFRDTAASASVFAGAYALVFTFDILTQKELIQQNVSRKLVHILSGLLFAF

SEQ ID NO: 101513 - protein, 128 aa, Gossypium hirsutum
  Clone ID: LIB3196-048-P1-M1-A3.pep
GGPAGRWLHHAGSCAGVSGLLRSRGPGGRAGASRPLSVSARARSSSEDKITVHFINRDGETLTTKGKVGDSLLDVVAENNLDIDGFGACEGTLACSTCHLIFEDHIYEKLDAITDEENDMLDLAYGLT

SEQ ID NO: 101514 - protein, 42 aa, Gossypium hirsutum
  Clone ID: LIB3196-048-P1-M1-A5.pep
NFSSCQIIVVKFIKLCYFQNIMLKTYYHMCSIMSMCYFHILL

SEQ ID NO: 101515 - protein, 105 aa, Gossypium hirsutum
  Clone ID: LIB3196-048-P1-M1-A7.pep
PTRGRARGLILAILPGVNLRDEASRGMGGGSVGGFGTTHILDFDLYQPGYWLNMEGWMAMGGAQLLILGIWAGITRHSLRLKGWLVVVWGSPVVFLGIFHFSPYK

SEQ ID NO: 101516 - protein, 129 aa, Gossypium hirsutum
  Clone ID: LIB3196-048-P1-M1-B12.pep
GFRKVVHIEQGGLVKPERDDTEFQHPCFLRGQEQLLENIKRKVTSVSTLKSEDIKIRQDSVTKLLTDVQLMKGKQECMDSKLLAMKHENEALWREVASLRQKHAQQQKVVNKLIQFLISLVQSNRILGV

SEQ ID NO: 101517 - protein, 117 aa, Gossypium hirsutum
  Clone ID: LIB3196-048-P1-M1-B5.pep
SLELSPSTCKTGIASHCDNGKDGDVALIDVGTGLEYFTLGYVSPSLKIDLSGCKASCVSSCHYIVMFYDNSSRDCFLFNDVGSFQRSKHRSNLVAFVMSRNENGGEGAKGTRAFPYV

SEQ ID NO: 101518 - protein, 49 aa, Gossypium hirsutum
  Clone ID: LIB3196-048-P1-M1-B7.pep
WDVVSVKLDNSASGASVVAIDNKIEQAMDLVKNHLMLLEREVKSEDNPS

SEQ ID NO: 101519 - protein, 59 aa, Gossypium hirsutum
  Clone ID: LIB3196-048-P1-M1-B8.pep
LLKKKRTFAEFHNNCNNERPHNFKGNERARKKRKPLLIQTSMKAKIQNHHKQVKPSKTK

SEQ ID NO: 101520 - protein, 68 aa, Gossypium hirsutum
  Clone ID: LIB3196-048-P1-M1-C1.pep
VPLLSSPLSHSPMCQKAEFKRDSPLCLSLSPPPLLSPSLLPVPFLDTSSPPTARQNCSQNAIAGQSSH

SEQ ID NO: 101521 - protein, 130 aa, Gossypium hirsutum
  Clone ID: LIB3196-048-P1-M1-C4.pep
MFFAPWCGHCKRLAPEYEAAATRLKGIVPLAKVDCTANTNTCNKYGVSGYPTLKIFRDGEEAGAYDGPRTADGIVSHLKKQAGPASVPLRTEEEFKKFISDKDASVVGFFDDLFSEAHSEFLKAASNLRD

SEQ ID NO: 101522 - protein, 129 aa, Gossypium hirsutum
  Clone ID: LIB3196-048-P1-M1-C9.pep
MEDETRPGGYHCSQCDRVLMSMQGLRSHERSHLALAMFTREDKYSCQYCSFVSAFRHNLDRHMQTHHGHHKPFRCKLCSFKSSYNSRLKTHILKAHAGEHAYKCSWCSFSTMTISQLKEHSLKVHGKAL

SEQ ID NO: 101523 - protein, 45 aa, Gossypium hirsutum
  Clone ID: LIB3196-048-P1-M1-D11.pep
HDLHLGRILTHPHASSPQHQTSTKNDASMVKCHFHHIARFRPWAR

SEQ ID NO: 101524 - protein, 52 aa, Gossypium hirsutum
  Clone ID: LIB3196-048-P1-M1-D12.pep
VSCDFYLMGNESCVNYFFIRYILIFVQEICIICSIGNIRIYIFFLYIEFNLF

SEQ ID NO: 101525 - protein, 44 aa, Gossypium hirsutum
  Clone ID: LIB3196-048-P1-M1-D3.pep
ILKKINYLFWGVGFGFFFTLLNKFFFTLPFFPPSTSLCKSIIGN

SEQ ID NO: 101526 - protein, 129 aa, Gossypium hirsutum
  Clone ID: LIB3196-048-P1-M1-D5.pep
MLAGLEVLSDDPDLVKVVESLTCGKIFAVEILDKADIPLVVLYDTSGEDDININATCLKAICDKSLEVHLQVDAMYTNVKVTNICSDGTLYCQVPCKGLNKLNDLLHKIEDYFHCKHMTSECFVSLPFC

SEQ ID NO: 101527 - protein, 89 aa, Gossypium hirsutum
  unsure (1)..(89): unsure at all Xaa locations
  Clone ID: LIB3196-048-P1-M1-D8.pep
GWSPPWKHSVHSGVTQNTKAFTMEFGLNWVFLVLIXKGVQGGGSLGESEGGWVHPGGSLELSWGAFGLTLSFFGLSGVRQVPGKGLQGS

SEQ ID NO: 101528 - protein, 62 aa, Gossypium hirsutum
  unsure (1)..(62): unsure at all Xaa locations
  Clone ID: LIB3196-048-P1-M1-D9.pep
TQNSCWRDCFIQIKESSHSPLGTRTDFPRIWKKNQPQYVSFPDVRKVPKHPNNLGRGXGRKS

SEQ ID NO: 101529 - protein, 104 aa, Gossypium hirsutum
  Clone ID: LIB3196-048-P1-M1-E2.pep
PRGLVNCGNSCYANAVLQCLTFTPPLTAYFLHGIHSKACAKKDWCFTCEFEKLILKAKDGKSPLSPMGILSQLQNIGSQLANGKEEDAHEFLRYAIDAMQSICL

SEQ ID NO: 101530 - protein, 52 aa, Gossypium hirsutum
  Clone ID: LIB3196-048-P1-M1-E7.pep
GCSLFSFSLCSLFRLLYFFLLQCRLGDSVGYISLCHDFFIGLFPFEMLKKNV

SEQ ID NO: 101531 - protein, 42 aa, Gossypium hirsutum
  Clone ID: LIB3196-048-P1-M1-E8.pep
TFLNSTPELNYHVLSLTQFHIIYENHEELIPLWGLASGGMIC

SEQ ID NO: 101532 - protein, 76 aa, Gossypium hirsutum
  Clone ID: LIB3196-048-P1-M1-E9.pep
LWRVVTVFIFLHFHRHFRLFRRTFSRRFCGSCLGFRALITFLFFVFVVFFTTGFFLYFLTAFFFLSFFLFLVAIFR

SEQ ID NO: 101533 - protein, 60 aa, Gossypium hirsutum
  Clone ID: LIB3196-048-P1-M1-F1.pep
VGSPFLFVCRCHSHLTMQILCMTLTCKTIILGVESPVPIVNRKGKIPDKVSISSKQGKLI

SEQ ID NO: 101534 - protein, 93 aa, Gossypium hirsutum
  Clone ID: LIB3196-048-P1-M1-F11.pep
MIKAVMVMNTQGKSRLAKFYEYLSVEKQQELIRGVFSVLCSRAENVSNFIDAESIFGLDSRLVYKHFATLYFVFVFDSSENELAVLDLIQVFV

SEQ ID NO: 101535 - protein, 60 aa, Gossypium hirsutum
  Clone ID: LIB3196-048-P1-M1-F4.pep
IFSTPTSPSYSPTSPSYSPTSPNYTPTSPNYSPTSSSYSSTSPSYSPTSPSYSPSSPRYT

SEQ ID NO: 101536 - protein, 50 aa, Gossypium hirsutum
  Clone ID: LIB3196-048-P1-M1-F5.pep
RSSTGILSVPQKRRQWCCCCCCCCCCCCCCCCCCCYHRGNSSQAGKGEPP

SEQ ID NO: 101537 - protein, 49 aa, Gossypium hirsutum
  Clone ID: LIB3196-048-P1-M1-F9.pep
AFKAYYVYFSLFYRLSKLAQTRGSSGDVITLLIISLVLLALCIYGIWNV

SEQ ID NO: 101538 - protein, 129 aa, Gossypium hirsutum
  Clone ID: LIB3196-048-P1-M1-G11.pep
IAPASAFGSSLLGSGGSAFAPPLRAQDDLTLRRRPPKAWNESDLDVAYEKKPSQTASYERLDVFARPASPSLQLLPWRESSLDGLGGTGKDNLTSATLPRNYKVSPLASDRRSDAGSYRRSLGSAGPSG

SEQ ID NO: 101539 - protein, 63 aa, Gossypium hirsutum
  Clone ID: LIB3196-048-P1-M1-G12.pep
SGMMTKIINTYYVSTTVKKSSLAFSSSNIPLRWLGCCFCDLSRRRTFNLCRSSLCYFFSSEIL

SEQ ID NO: 101540 - protein, 38 aa, Gossypium hirsutum
  Clone ID: LIB3196-048-P1-M1-G3.pep
KYFLSSVIVSCLSFNMFCESCVFSLITYTMPIFPYIYL

SEQ ID NO: 101541 - protein, 28 aa, Gossypium hirsutum
  Clone ID: LIB3196-048-P1-M1-G7.pep
TYPLKYVPPLTLLRRRFRVTSIINKSNN

SEQ ID NO: 101542 - protein, 89 aa, Gossypium hirsutum
  Clone ID: LIB3196-048-P1-M1-G8.pep
LQKTRCTTPLLNTNRSILIHLTPLGPISFTWPIRSNHIHMAHQAQSHSYGPSGPITLYGPSSPTTSHLTVRFTQASPRAHRAHRGPEQP

SEQ ID NO: 101543 - protein, 124 aa, Gossypium hirsutum
  Clone ID: LIB3196-048-P1-M1-H11.pep
MDRLRGGRWTLGRVCNSGPTVPTPAAVAAMTGLALLYSGVFVAFWACALAVGICYTIFDLGFRFDVAWFLTETSPFMWSNLGIGLAISLSVVGAAWGIYITGSSIIGGGVKAPRIKTKNLVSII

SEQ ID NO: 101544 - protein, 75 aa, Gossypium hirsutum
  Clone ID: LIB3196-049-P1-M1-A10.pep
SHTADLKDLISLTSYGLDPNQHKYRCTLNSLIFIPPKRNKKETERLTHSGAKQATGVTHRRTRRKLKMERIFNIL

SEQ ID NO: 101545 - protein, 102 aa, Gossypium hirsutum
  Clone ID: LIB3196-049-P1-M1-A11.pep
PTFTNDQRLPNLFLVIKSNINLQLKHNPSFRIFLEYCVTKLGLCYKCYYLLLLLLGKKGVGCGWQQVQDEEEKREKSRKMKEVKYCHGKMLVGLPTRMSWKF

SEQ ID NO: 101546 - protein, 59 aa, Gossypium hirsutum
  Clone ID: LIB3196-049-P1-M1-A2.pep
QLPGLTYLTYQFIHDQWGNLLPWHWTSQDNMATVKTMLLPKYMHIAVHTKLYSLASVPR

SEQ ID NO: 101547 - protein, 68 aa, Gossypium hirsutum
  Clone ID: LIB3196-049-P1-M1-A6.pep
CKHPREKRHWDLKPLDLRSKYEFMRLGYFVKNPNTYKWRHYSILSQLFISIPQWAMVKVLQALINTSP

SEQ ID NO: 101548 - protein, 118 aa, Gossypium hirsutum
  unsure (1)..(118): unsure at all Xaa locations
  Clone ID: LIB3196-049-P1-M1-B4.pep
GTAPKFGIRPTRTNCCNTKHGGHLQALTTYCDNHPAVLINVHXSERAVPMENTLLLKRTLTDILAAPTGEPQKEGSSDIYANGMLNVSAVDNSTLKENKIAITNDKGSSEQGRQLTYG

SEQ ID NO: 101549 - protein, 62 aa, Gossypium hirsutum
  Clone ID: LIB3196-049-P1-M1-B5.pep
TPEEPSSAEDIKAKNAAKYSKRWFSFKVEAKIINYVNGFWMTDWGLLKISGRAGSLFKKINS

SEQ ID NO: 101550 - protein, 63 aa, Gossypium hirsutum
  Clone ID: LIB3196-049-P1-M1-B7.pep
SNQMLHYSSVCCINSSIVIYYLTDHIISQRSSLYSLYIQVFLLPRYKVLNVLFISNSSVPSLA

SEQ ID NO: 101551 - protein, 135 aa, Gossypium hirsutum
  Clone ID: LIB3196-049-P1-M1-B8.pep
KLTTYEYIVQHRPPQEAKGVHRELESCPPKMRPIQEMEFYMRTFSHVRPEPPGQARPAAVNANPSQFLATSGQAEPPPPSSPDTVALPPRIRPQKKRKRRVYKVRTSETSDRASGPRAPGRRSSSSTDSADASPV

SEQ ID NO: 101552 - protein, 60 aa, Gossypium hirsutum
  Clone ID: LIB3196-049-P1-M1-C1.pep
CQCPNWLIAMVGRNEYSAHTLYLMTYTKRMGSEVLSCGYHVECMWVHPLKSGGLLCLRAL

SEQ ID NO: 101553 - protein, 78 aa, Gossypium hirsutum
  unsure (1)..(78): unsure at all Xaa locations
  Clone ID: LIB3196-049-P1-M1-C11.pep
FQGEACRPLAPSTTSALHLQTSAXTRLYIHSPKSLEISSFPLKSHFPSKFFVLHPKPKEIKLWEAVKKNQICLILIKL

SEQ ID NO: 101554 - protein, 47 aa, Gossypium hirsutum
  Clone ID: LIB3196-049-P1-M1-C12.pep
NTESKTIMKLKKNCEYLEVFLKAYYTVRQDTVVVFIKRAISIKAVDS

SEQ ID NO: 101555 - protein, 60 aa, Gossypium hirsutum
  Clone ID: LIB3196-049-P1-M1-C2.pep
MKYFNLYCFFHGKGPNSYPGSAGAAVGAHDAYRDAKEKRSKSQDADLPGSSGAPENLTFK

SEQ ID NO: 101556 - protein, 96 aa, Gossypium hirsutum
  Clone ID: LIB3196-049-P1-M1-C3.pep
MAKLENSSSMAVSLIQAFQQTDGVQSKKKRNLPGMPDPEAEVISLSPKSLLATNRFICEICNKGFQREQNLQLHRRGHNLPWKLRQRTDGNETRKK

SEQ ID NO: 101557 - protein, 61 aa, Gossypium hirsutum
  Clone ID: LIB3196-049-P1-M1-C4.pep
RTRGPVSRVHVGIDRKTGMCRGFGYVNFVKKEDAERAVLKLNGYGYDSLILRVEWADPRTN

SEQ ID NO: 101558 - protein, 62 aa, Gossypium hirsutum
  Clone ID: LIB3196-049-P1-M1-C7.pep
KKNSKKSSVGGFRVSLGASSDLRSQAPTRARATARATTHDGRRVKNPRTSEQSGGKLLPFNI

SEQ ID NO: 101559 - protein, 114 aa, Gossypium hirsutum
  Clone ID: LIB3196-049-P1-M1-D1.pep
ATADILGTAEPGSPSAAAAAGLAGAAGAGGGRCAVPVEAVSAGASERRERARLTLPQAEPCLAMDQDYERRLLRQIVIQNENTMPRVTEMRRTLTPASSPVSLPSKHGDRFIPL

SEQ ID NO: 101560 - protein, 89 aa, Gossypium hirsutum
  Clone ID: LIB3196-049-P1-M1-D10.pep
MSRRNAPKLELKLNLSPPRARVNPGVESPSRSATISPTSPPSSCVSSEMNQDVDAANVRYSSSPEATSMVLVGCPRCLMYVMLSEDDPK

SEQ ID NO: 101561 - protein, 82 aa, Gossypium hirsutum
  Clone ID: LIB3196-049-P1-M1-D11.pep
CFIAGGCATFLCQPLDVLKTRLMNSKGEYQGVFHCAVETAKLGPLAFYKGLVPAGIRLIPHTVLTFVFLEQLRKNFGIKVPS

SEQ ID NO: 101562 - protein, 62 aa, Gossypium hirsutum
  Clone ID: LIB3196-049-P1-M1-D3.pep
SISHAICHVCRMSCPYLNQTITVKAFISPTYVHNQIRQPYTLSQSLAHKGKTVIFHIIKVFS

SEQ ID NO: 101563 - protein, 74 aa, Gossypium hirsutum
  Clone ID: LIB3196-049-P1-M1-D4.pep
LPFHDFLSSPSTLASCFIGPRKSCLSSYNFSKENIPVIKKQACFSMKITSSGKAVTSSEPLGNLTSYSYHHYLL

SEQ ID NO: 101564 - protein, 132 aa, Gossypium hirsutum
  Clone ID: LIB3196-049-P1-M1-D6.pep
RLYAVGGYDGTSDLATVESYDPVTNTWQPEVSMGTRRSCLGVAALHGLLYSAGGYDGASCLNSAERYDPLTGTWTSVAAMSTRRRYVRVATLDGNLYAVGGYDSSSHLATVEKYEPQVNAWSSVASMLSRRS

SEQ ID NO: 101565 - protein, 37 aa, Gossypium hirsutum
  Clone ID: LIB3196-049-P1-M1-D7.pep
PQNLPPRNVSRIERILHAQLLATCVIIFESNAFLGTH

SEQ ID NO: 101566 - protein, 84 aa, Gossypium hirsutum
  Clone ID: LIB3196-049-P1-M1-D9.pep
RASGVYRSLLNLSPCFGVAFNLLQFRNPTLNRIEIGVTLLVLNRFWCLSSFIHSTDYPRFYPTIISFYKTEPSFINFHFSYFYT

SEQ ID NO: 101567 - protein, 46 aa, Gossypium hirsutum
  Clone ID: LIB3196-049-P1-M1-E11.pep
IVFNRNLIKTVATLNVIHVYSILTCQYLFYMSCHQIFKNYKKILKI

SEQ ID NO: 101568 - protein, 51 aa, Gossypium hirsutum
  Clone ID: LIB3196-049-P1-M1-E12.pep
SFLNHVSTLKVLMLCKSIIHETSATPSKIDFQIYSLLVPFEFWKEFVVDCV

SEQ ID NO: 101569 - protein, 127 aa, Gossypium hirsutum
  Clone ID: LIB3196-049-P1-M1-E4.pep
SQSLLLKEGITQTGSPICTDESLEEQLDDPFEPEEPEERWESSEGFDVLVDNKSEDLDYGNDSEYQKDPEEEQTDYFFSYDYEDSVQHETRYPDLEFSYDRDAYDAYEGSDNEYIFNNPRNPFAHPG

SEQ ID NO: 101570 - protein, 134 aa, Gossypium hirsutum
  Clone ID: LIB3196-049-P1-M1-E5.pep
HYPASPTPCGCQVPSLVLCCPWAWGTRAMLGHEHSWERPRKTGHKRSPGASDGLAARFPQPSRPTTCVCNVHACLLPPGLNPSSLKNTTPRTCSCTLKGACPGQAQWLKSAIPALWEAEAGGSPEVRRSRPAWH

SEQ ID NO: 101571 - protein, 128 aa, Gossypium hirsutum
  Clone ID: LIB3196-049-P1-M1-E6.pep
EEEEKESSKEEKIVTATKKGVAVLDQGIPDDIKAHYHVLQKGDDIYDAMLNQTNVGQNNNKFFVIQLLESDDSKTYMVHNRWGRVGVKGQIKLHGPFTSRQAAIDEFQTKFFNKTKNYWYNRKDFVCH

SEQ ID NO: 101572 - protein, 59 aa, Gossypium hirsutum
  Clone ID: LIB3196-049-P1-M1-F1.pep
RLEYLIPKKTSLRHRLPMGDQGFIDFIAHLLEVNPKKRPSASEALKHPWLSYPYEPISA

SEQ ID NO: 101573 - protein, 51 aa, Gossypium hirsutum
  Clone ID: LIB3196-049-P1-M1-F10.pep
EIVGMFDTHLIPNLFLLDLLFILQKSFSYKWFKSNKIYNNNFGFLCINFAI

SEQ ID NO: 101574 - protein, 73 aa, Gossypium hirsutum
  Clone ID: LIB3196-049-P1-M1-F11.pep
MNDLERVKKEDPFLVKYQPSELRIASEFLTTWLPFLSRDLCRRCTQILSRRIRSLDPGDAELANNDLNAIHST

SEQ ID NO: 101575 - protein, 102 aa, Gossypium hirsutum
  Clone ID: LIB3196-049-P1-M1-F4.pep
HAFADAWGRHLELAAILVQKDPIRAAAWDPISTRLVLCTGSSHLYMWTPSGAYCVSNPLPQFSITDLKWNSDGSCLLLKDKESFCCAAVPLLPESSDYCSDE

SEQ ID NO: 101576 - protein, 69 aa, Gossypium hirsutum
  Clone ID: LIB3196-049-P1-M1-F8.pep
MERETPPLVSALRKEGVDRGRGPILTSAQSRQKSFKVLSERLIETSEGRKLKAHPSNPPSPPTSTLTPA

SEQ ID NO: 101577 - protein, 133 aa, Gossypium hirsutum
  Clone ID: LIB3196-049-P1-M1-G1.pep
MSRAESASMTERRVPFSLLRGPSWDPFRDWYPHSRLFDQAFGLPRLPEEWSQWLGGSSWPGYVRPLPPAAIESPAVAAPAYSRALSRQLSSGVSEIRHTADRWRVSLDVNHFAPDELTVKTKDGVVEITGESP

SEQ ID NO: 101578 - protein, 37 aa, Gossypium hirsutum
  Clone ID: LIB3196-049-P1-M1-G2.pep
PIDLLLYSPFDIKSTIIQISFLLVMFFTLFIQLIKIL

SEQ ID NO: 101579 - protein, 48 aa, Gossypium hirsutum
  Clone ID: LIB3196-049-P1-M1-G7.pep
LRNLKNKLENKMEGIGLKRTPMGIVLDALEQQEEGINRLTDYISKVKE

SEQ ID NO: 101580 - protein, 95 aa, Gossypium hirsutum
  Clone ID: LIB3196-049-P1-M1-G8.pep
HTEMERQRSKQVCLLMWVLVAAFFSHNRVIAATFTGLGEQKNYYPGPDPHAGTTPSGSHGTPPSSGGGSPACHGTPSHGGGYHPIPTPSTPSGGN

SEQ ID NO: 101581 - protein, 101 aa, Gossypium hirsutum
  unsure (1)..(101): unsure at all Xaa locations
  Clone ID: LIB3196-049-P1-M1-G9.pep
LDGLQDEDPNTHLANFLEVYDTFKINGISDDVIHLRLFPFSLRNKAKXWLNYLPRGFITTWDQITDKFLLRYFPSAKTAKLRNDISSFVQMDLETLYDAWE

SEQ ID NO: 101582 - protein, 121 aa, Gossypium hirsutum
  unsure (1)..(121): unsure at all Xaa locations
  Clone ID: LIB3196-049-P1-M1-H1.pep
MRMQHLIAREAEAGIYHLQLFEELRRLAPITSDPTEATAVGAVEASFKCCSGAIIVLTKSGRSAHQVARYRPRAPIIAVTRNPQTARQAHLYRGIFPVLCKDPVQEAWAEDVDXRVNFAMN

SEQ ID NO: 101583 - protein, 126 aa, Gossypium hirsutum
  Clone ID: LIB3196-049-P1-M1-H10.pep
GRVGDNCKPDRFTYNILIHGVCKAGVIDEAVRLVKQMEIFGYSPNMCTYTILIDGYCNARRVDDAFKLIETMKKRNVFPNEATVRSLIHGVFRCVAPRKAFELLIMFLEKEPMMQRLACDTLLLCL

SEQ ID NO: 101584 - protein, 83 aa, Gossypium hirsutum
  Clone ID: LIB3196-049-P1-M1-H12.pep
ILYVTSYPFSLPLSPSFPRLSIVLSGMSFSISSTTPSCSLPCLKSSFPLGTMFLSLVAFSSRDWLHLPPSINYRMPETAVFIS

SEQ ID NO: 101585 - protein, 62 aa, Gossypium hirsutum
  Clone ID: LIB3196-049-P1-M1-H2.pep
NVTLIFEVAISLLFFLLFKDGLRRILCQVGLQEGPDGENSSLVDRLMLSDSKLWKGESFNYF

SEQ ID NO: 101586 - protein, 86 aa, Gossypium hirsutum
  Clone ID: LIB3196-049-P1-M1-H4.pep
KKREDAISCSANQIQMGNSIAHKTRYALTFLCFILLVLFTLFLFTKRTLEPYLSFYQPSFHIHSSNAAFIDGNQTLDTAHENREMC

SEQ ID NO: 101587 - protein, 93 aa, Gossypium hirsutum
  Clone ID: LIB3196-049-P1-M1-H5.pep
CGKQRKLLHGVRTTHLGHGLRVGARNHDKLVRSIVFEGGHLAQPNWLNQTGPVIGEIKSPSQEPDRNGKCSRRYNYGILEFYLYIAGYVSLEF

SEQ ID NO: 101588 - protein, 53 aa, Gossypium hirsutum
  Clone ID: LIB3196-049-P1-M1-H9.pep
EKIFFLCKFMKAISRKSKNDFYEDILCLCYIKGENKYNISNFYLGLKFIQLFS

SEQ ID NO: 101589 - protein, 129 aa, Gossypium hirsutum
  Clone ID: LIB3196-050-P1-M1-A11.pep
RTRGEDPIGRVLKKTQLADGLILEKTSSPLGVLLIVFESRPDALVQIASLAIRSGNGLLLKGGKEAKRSNAILHKVITEAIPDIVGGKVIGLVTSRDEIPDLLKVGGRIGSWIPRGSNKLVSQIKSSTK

SEQ ID NO: 101590 - protein, 61 aa, Gossypium hirsutum
  Clone ID: LIB3196-050-P1-M1-A12.pep
KSPSLLFFKSWYKREKISCSQVNNLYYVYYFWFFDCQFSIDRRGNVIYFLGYRLLFTSAMS

SEQ ID NO: 101591 - protein, 139 aa, Gossypium hirsutum
  Clone ID: LIB3196-050-P1-M1-A3.pep
PAVKVARGWSGLALGVRRAVLQLPGLTQVRWSRYSPEFKDPLIDKEYYRKPVEELTEEEKYDRELKKTQLIKAAPAGKTSSVFEDPVISKFTNMMMKGGNKVLARSLVTQTLEAVKRKQFEKYHSASAEEQATIERNPY

SEQ ID NO: 101592 - protein, 67 aa, Gossypium hirsutum
  Clone ID: LIB3196-050-P1-M1-A6.pep
FNEGVTMKSLYNLIVWKLLKLYLKIPLPRQIQRKLGISKVFYFKKCGGYIAVHSEISKLSYRLRTRG

SEQ ID NO: 101593 - protein, 112 aa, Gossypium hirsutum
  Clone ID: LIB3196-050-P1-M1-A8.pep
GKHRKTGRDVAVKVIDKLRFPTKQESQLRNEVAILQSLRHPGIVNLECMFETPEKVFVVMEKLHGDMLEMILSSEKGRLPERLTKFLITQILVALRHLHFKNIVHCDLKPGN

SEQ ID NO: 101594 - protein, 69 aa, Gossypium hirsutum
  Clone ID: LIB3196-050-P1-M1-B1.pep
VFYVSIRPKEMIVHYPKLPFISFSLLEIFWPFGSRCSHLKALQNRPFTPDMAASGPLFIIGKFSAIVAS

SEQ ID NO: 101595 - protein, 97 aa, Gossypium hirsutum
  Clone ID: LIB3196-050-P1-M1-B11.pep
HVPPQCLAPFKAHTPFDGPSPHQVVLGGVVRGAPCRVAGGLCRAFPWQPPLSHSPHGASPFYFSFSHSETHPLKLCSDIAINHKNVRHRSASTSRTP

SEQ ID NO: 101596 - protein, 72 aa, Gossypium hirsutum
  Clone ID: LIB3196-050-P1-M1-B12.pep
HNAVINGFVPRILLSGFATLSVSGGYATNICSGVPVTISVSGNSVTISVLAAMLQILWCVVNGVVQLSPHMA

SEQ ID NO: 101597 - protein, 132 aa, Gossypium hirsutum
  Clone ID: LIB3196-050-P1-M1-B2.pep
MCDENGSKGYAFVHFETQEAADKAIEKMNGMLLNDRKVFVGRFKSRKEREAELGAKAKEFTNVYIKNFGEEVDDESLKELFSQFGKTLSVKVMRDPSGKSKGFGFVSYEKHEDANKAVEEMNGKEISGKIIF

SEQ ID NO: 101598 - protein, 98 aa, Gossypium hirsutum
  Clone ID: LIB3196-050-P1-M1-B4.pep
NMFNLRYIYFYKPEIEKEDWNPKLLANQVDSVSLPNKLRYLCWDYFPFKSLSSFNSKNLIVLKLRDGKMEKLWNEDDHMERAFIFLHLNFFMEKQFII

SEQ ID NO: 101599 - protein, 83 aa, Gossypium hirsutum
  Clone ID: LIB3196-050-P1-M1-B5.pep
KRKHRSLKPGNFHILGVETEQFLLVTKNLHEIPFHLLTVTEHNTPPLGSLPAPPDSAAFQFSGDLETNNWRLRPEQLTPGSCA

SEQ ID NO: 101600 - protein, 115 aa, Gossypium hirsutum
  Clone ID: LIB3196-050-P1-M1-B7.pep
MGSGMGTLLISKIREEYPDRIMNTFSVVPSPKVSDTVVEPYNATLSVHQLVENTDETYCIDNEALYDICFRTLKLTTPTYGDLNHLVSATMSGVTTCLRFPGQLNADLRKLAVNM

SEQ ID NO: 101601 - protein, 68 aa, Gossypium hirsutum
  unsure (1)..(68): unsure at all Xaa locations
  Clone ID: LIB3196-050-P1-M1-C11.pep
VERCLXNFXSPQELNLSYLEIHXSEFQVFLFFDNXFRRLKFSLLSLGFFFLPNFGKLIKPHFSYLRQI

SEQ ID NO: 101602 - protein, 109 aa, Gossypium hirsutum
  unsure (1)..(109): unsure at all Xaa locations
  Clone ID: LIB3196-050-P1-M1-C12.pep
MFRGLSSWLGLQQPAAGGGQPNADAPPEQPSETVAESAEEELQQTGDQELLHQAKDFGNYLFNFASAATKKITESVAETAQTIKKSVEEGKIDGIIDKTIIGDXQKEQK

SEQ ID NO: 101603 - protein, 134 aa, Gossypium hirsutum
  Clone ID: LIB3196-050-P1-M1-C5.pep
VNADIVETYKAACDKYLMNRGSRGKRKNKQYFESDSLPVGPSGVYMQSPVSLDKALKNPSELEGMQNSHLRDAAALAQFWCWLEEEIHKNVKLTEVDLADKLLEFRSKQDGFLDTSFDTISGSGANGAIIHYTP

SEQ ID NO: 101604 - protein, 134 aa, Gossypium hirsutum
  Clone ID: LIB3196-050-P1-M1-D1.pep
SKYVETLEELRNFKAAGNPFTDEFFQIFQSVYRQQIAMLEKLHQRKNKLDKKLKCIHTWRKVSSMIFVATFATVLICSVVAAAMAAPPVAAALAAATSIPLGSMGKWIDSLWRNYENVLKGQKEVITSMQAGTY

SEQ ID NO: 101605 - protein, 52 aa, Gossypium hirsutum
  Clone ID: LIB3196-050-P1-M1-D6.pep
LLVQYLYSTFIKSRFFYFNNNNFKLIQPTFFITISFICQHFVCYKEIVIHLS

SEQ ID NO: 101606 - protein, 123 aa, Gossypium hirsutum
  unsure (1)..(123): unsure at all Xaa locations
  Clone ID: LIB3196-050-P1-M1-D7.pep
MKNTHENARLKKEIITLQKDLRDRTDVIGTSDEMASALSQKTDELNTPVKDLSHKYAEIKNVKEKLVXENSKQTCEILAVQNLLQKQHVPLAQVEALKKSLNGTIENLTEELKNMQRRDEKEQ

SEQ ID NO: 101607 - protein, 69 aa, Gossypium hirsutum
  unsure (1)..(69): unsure at all Xaa locations
  Clone ID: LIB3196-050-P1-M1-E7.pep
SNKYQHSLAFGATTSLHVLVVVVPQAQLFFISLSCLYSXVSHLHTQGEKPTDPVGLDPTIYNTKNSTFT

SEQ ID NO: 101608 - protein, 82 aa, Gossypium hirsutum
  Clone ID: LIB3196-050-P1-M1-E8.pep
GKSAPLFRSGSKGKELSVSRVFSAWLCGISYASFLKRAFLSPQNAFPLPIPPSSACPLERLRSLKSQVTEGIDGLQNLICKC

SEQ ID NO: 101609 - protein, 87 aa, Gossypium hirsutum
  Clone ID: LIB3196-050-P1-M1-F11.pep
LCGIVNIRSDAAVAGALSAAHLGYTERDQKQAIRHTGVWPQQLGNTYSAAGTQSYFGVKKRARGAGELVGRCEKSLACMGIKQKRCG

SEQ ID NO: 101610 - protein, 55 aa, Gossypium hirsutum
  Clone ID: LIB3196-050-P1-M1-F4.pep
DINGPIDTWCSHPKNHSNLRVHTKGHSATTRYIHQLIIYSVNHEALTSALNNIDR

SEQ ID NO: 101611 - protein, 57 aa, Gossypium hirsutum
  Clone ID: LIB3196-050-P1-M1-F8.pep
MSWLFGINKGPKGEGAGPPLPLPPAQPGAEGGGDRVLGDRPAPKDKWSNFHPTGLER

SEQ ID NO: 101612 - protein, 78 aa, Gossypium hirsutum
  Clone ID: LIB3196-050-P1-M1-F9.pep
SSLLFLSSHFSFLPSTFKIYFLFTFPFSPPILPLFHPTKHTFKVLLQSEKLEGMHLVIPLACLFLCCSSTCVKMQMDM

SEQ ID NO: 101613 - protein, 50 aa, Gossypium hirsutum
  Clone ID: LIB3196-050-P1-M1-G11.pep
TATIKCAFFFSQSCNAFKTTLKSNLTCQILSFSSSWIRELIAGYERKANV

SEQ ID NO: 101614 - protein, 39 aa, Gossypium hirsutum
  Clone ID: LIB3196-050-P1-M1-G12.pep
LDQHLKSVKLLTIVIVLLTIPTLYYKFQSLVSYNEMYLG

SEQ ID NO: 101615 - protein, 89 aa, Gossypium hirsutum
  Clone ID: LIB3196-050-P1-M1-G6.pep
VGVCMDAQLPVTQEGSGAGPRGGATVGTGKPFLIIHLERPHSQKLTPSAGMLGGSYQLSGINGSSRRGTHSSGWNGGAGHACKVGYGGW

SEQ ID NO: 101616 - protein, 74 aa, Gossypium hirsutum
  Clone ID: LIB3196-050-P1-M1-G7.pep
MKFYNTVKYVYKRLCSGNASYPILVSNTGKGCYISHQILISFHFGHPVNSMLLFTHFSHSTLNKFSFLVNHLTF

SEQ ID NO: 101617 - protein, 138 aa, Gossypium hirsutum
  unsure (1)..(138): unsure at all Xaa locations
  Clone ID: LIB3196-050-P1-M1-H1.pep
IPPGFPFPGPPNFPPQSMFGFPPHLPPPLLPPPGFGFAQNPMVPWPPVVHLPGQPQRMMGPLSQASRYIGPQNFYQVKDVRRPERRHSDPWGRQDQQQLDRPFNRGKGDRXQRFNXDSHHLKRERHEKEWEQESERHR

SEQ ID NO: 101618 - protein, 53 aa, Gossypium hirsutum
  unsure (1)..(53): unsure at all Xaa locations
  Clone ID: LIB3196-050-P1-M1-H10.pep
SVVLSMDNNRNLDLHSIIGGVRAQYEEICXSTPDADYWCHTTYYELLVTTGRH

SEQ ID NO: 101619 - protein, 62 aa, Gossypium hirsutum
  Clone ID: LIB3196-050-P1-M1-H12.pep
MARSLTWRCCPWCLTEDEKAAAPVDQEINKILFEANKHDRAELKLLLLGPVESGKSTFIKQM

SEQ ID NO: 101620 - protein, 51 aa, Gossypium hirsutum
  Clone ID: LIB3196-050-P1-M1-H2.pep
RPPAPRIETYDLVELDSSQQSLLWDRLMLDQHFSMANPTPFCLLARQPLTQ

SEQ ID NO: 101621 - protein, 137 aa, Gossypium hirsutum
  Clone ID: LIB3196-050-P1-M1-H3.pep
IQGPDGKMHGNTCSMCEVFFQQEERAKAKAKREAAKEICSEFRDQVRNGTLTCTREHNPVRDPDGKMHGNKCAMCASVFKLEEEEKKNNKEEKGKVEAEKVKREAVQELGSEYWQYLRNGRLPCTRENDPIEGLDGK

SEQ ID NO: 101622 - protein, 62 aa, Gossypium hirsutum
  Clone ID: LIB3196-050-P1-M1-H4.pep
NIILEIKIEWWKIGRTNDVKPSGVGRIFCEFGKMEGKIRYFQSFGKIASQTHRILTLFPRVR

SEQ ID NO: 101623 - protein, 91 aa, Gossypium hirsutum
  Clone ID: LIB3196-050-P1-M1-H5.pep
GASCPGEAESSEGKKINETPVPRLTISGCVSGSPARPTWLGPTPGSSRPKPYPPASHCSNSSCIAIRSQWAAAPRPRRSWAGLIAQRRPRD

SEQ ID NO: 101624 - protein, 133 aa, Gossypium hirsutum
  Clone ID: LIB3196-050-P1-M1-H9.pep
WEPMGDGKKIISLADNHILLWDLQESSSQAVLASSASLGGKGQLKFTSGRWSPHHNCTQVATANDTTLRGWDTRSMSQIYCIENAHGQLVRDLDFNPNKQYYLASCGDDCKVKFWDTRNVTEPVKTLEEHSHW

SEQ ID NO: 101625 - protein, 66 aa, Gossypium hirsutum
  Clone ID: LIB3196-052-P1-M1-A1.pep
TQCRNATGLRYRVGGNNQTLFSSSGHGLLTLTETRRCLFGRKITDRRYINCIALRKMISMSSKVVQ

SEQ ID NO: 101626 - protein, 68 aa, Gossypium hirsutum
  unsure (1)..(68): unsure at all Xaa locations
  Clone ID: LIB3196-052-P1-M1-A3.pep
VKARMWFSPVKSGSRCNARIMRSPLWEKSASDVALRSGTVVSGASGVLRDNGNRGPVPACFFVHXCYI

SEQ ID NO: 101627 - protein, 134 aa, Gossypium hirsutum
  Clone ID: LIB3196-052-P1-M1-A5.pep
RRKRAICKQSFPIHNAAKTQCWARSVRLPQIPSPRHRSTLRDSPPVGSAPPARGLGWEPGATWTPELPASGRPRPQAWARVRRGSWEPDDATAGGGAEGEPRTQLGSSVQSGERVSVGPDLTWTDMWERGASCY

SEQ ID NO: 101628 - protein, 49 aa, Gossypium hirsutum
  Clone ID: LIB3196-052-P1-M1-B10.pep
TSTTSIACWRHVSTHSMAGLYILGREVRVGLARKFRVPVRQASRSSFPY

SEQ ID NO: 101629 - protein, 101 aa, Gossypium hirsutum
  unsure (1)..(101): unsure at all Xaa locations
  Clone ID: LIB3196-052-P1-M1-B11.pep
IGSRSVPWQHIGGGFRKAQRTIMYRLTNSMXMHGLNNGQKLMTVRIVKHAYXIIHLLTWENPLSGLFNSIIISGSRQVFTRIGRSLTVRRQFVDMSPLYFV

SEQ ID NO: 101630 - protein, 68 aa, Gossypium hirsutum
  Clone ID: LIB3196-052-P1-M1-B12.pep
QHAGARPQTWSWLFHSCTIRHAGAPAGWRWDPSTALAILFKLLSHKLGLSAPAWLTNTHTLHVGQETL

SEQ ID NO: 101631 - protein, 105 aa, Gossypium hirsutum
  unsure (1)..(105): unsure at all Xaa locations
  Clone ID: LIB3196-052-P1-M1-B2.pep
YKDSCSYTLDKILLQTPDTATYVPISGCNCNNIRXDPSANIPXLKGWNVTPNDGYASGTTLLXALDSILPPTGAYDKALRLAFQDVYKIGGIGTVPVGRVETDFL

SEQ ID NO: 101632 - protein, 82 aa, Gossypium hirsutum
  Clone ID: LIB3196-052-P1-M1-B6.pep
AKYLPHNARRYAAGRFRKAQCPIVERLTNFMMMHGPNNGMKLMTVRIVKHAFEIIHLLTGENPLQVLVYAIINSGSREDSTP

SEQ ID NO: 101633 - protein, 39 aa, Gossypium hirsutum
  Clone ID: LIB3196-052-P1-M1-B9.pep
TLVKQCLFKIGVSNITDDLADTKYCLNHVMRAKMSIICG

SEQ ID NO: 101634 - protein, 107 aa, Gossypium hirsutum
  Clone ID: LIB3196-052-P1-M1-C1.pep
TQAALKVLAQKAREAQPPVARTQRSRGADSAVGTLPATCPQSTPVQAKGTNKLRKPKLPEGQQATKAPGSSYDSEDSSNSSSWSEEDAEGPQVAKSVHTLVGPTPFR

SEQ ID NO: 101635 - protein, 101 aa, Gossypium hirsutum
  Clone ID: LIB3196-052-P1-M1-C10.pep
INPPRARFTSNNTWQSFSRWARSRESICMAAYGPARVISASLSAISERGTASVIKPGRQAMCFFKWYIAVGKKGFLGMVSWDTLFVCSGTFNCKPIAKISS

SEQ ID NO: 101636 - protein, 130 aa, Gossypium hirsutum
  Clone ID: LIB3196-052-P1-M1-C12.pep
GKHDGSHEGTVYFKCRHPTGGSFIRPNKVNFGTDFLTAIKNRYVLEDGPEEDRKEQIVTLGNKPVETVGFDSLMKQQSQLSKLQEVSLRNCAVSCAGEKGGVAEACPNIRRVDLSKNLLSSWDEVIHIAD

SEQ ID NO: 101637 - protein, 40 aa, Gossypium hirsutum
  Clone ID: LIB3196-052-P1-M1-C3.pep
IRGETLSLDLEIQVLLSTCFTIGNCKSKKKIYFIGIDLLY

SEQ ID NO: 101638 - protein, 83 aa, Gossypium hirsutum
  Clone ID: LIB3196-052-P1-M1-C7.pep
SALTSSNKHKQKRCRSRIPIIPMTNLHVKGHKARGGQPSVSRTHPSCPDHRALGTLSTTSPHSTPRHAKKTYTLRKPILPEVK

SEQ ID NO: 101639 - protein, 94 aa, Gossypium hirsutum
  Clone ID: LIB3196-052-P1-M1-D10.pep
PGFGQALRSPPDWQPLVPFLFPLAFGGVCCSENIRTGKRGGVTCILGGHYSKLLYPSSSPFFHGGIVVLNSSPMRAAEELLTGGRQRPRHCPLH

SEQ ID NO: 101640 - protein, 129 aa, Gossypium hirsutum
  Clone ID: LIB3196-052-P1-M1-D12.pep
MRILDIVPPTFSALCPANPTCIYKYGDESSNSLPGHSVALCLAVAFKSKATNDEIFSILKDVPNPNQDDDDDEGFSFNPLKIEVFVQTLLHLAAKSFSHSFSALAKFHEVFKTLAESDEGKLHVLRVMF

SEQ ID NO: 101641 - protein, 39 aa, Gossypium hirsutum
  Clone ID: LIB3196-052-P1-M1-D4.pep
SNLLFNYKPYYSDINKFVNIYLHEQMRCLKQYVTHVIKT

SEQ ID NO: 101642 - protein, 78 aa, Gossypium hirsutum
  Clone ID: LIB3196-052-P1-M1-D6.pep
MPKRGKKGAVAEDGDELKTEPEPKKSKTPAKKNDKEAAGEGPALYEDPPDQKTSPSGKPATLKICSWNVDGLRAWIKK

SEQ ID NO: 101643 - protein, 58 aa, Gossypium hirsutum
  Clone ID: LIB3196-052-P1-M1-D7.pep
YTESWRALMHRSRIRDSSQSPRQDRDVCGPPRKTDFHPELLSIIRLTQTTSSSIQSPA

SEQ ID NO: 101644 - protein, 86 aa, Gossypium hirsutum
  Clone ID: LIB3196-052-P1-M1-D8.pep
NFWVTGLCLASQSLLNTHRWAREHWTDQERLEHLVSLVAVLDKEHSPSPQVFLTLPSSSGLTLCAVELVILNCALLMVLSCSVPII

SEQ ID NO: 101645 - protein, 75 aa, Gossypium hirsutum
  Clone ID: LIB3196-052-P1-M1-E3.pep
GSIRNSTISILITFSHFHNQEIYAIIILVQFKYIYYLCSCTIYIQLTLDYKMWRLVNLVDLLSFPSVQVQIRYFL

SEQ ID NO: 101646 - protein, 131 aa, Gossypium hirsutum
  Clone ID: LIB3196-052-P1-M1-E5.pep
MPRRELSAQPCLAQAPAAMAVEGGMKCVKFLLYVLLLAFCACAVGLIAVGVGAQLVLSQTIIQGATPGSLLPVVIIAVGVFLFLVAFVGCCGACKENYCLMITFAIFLSLIMFLEVAAAIAGYFFTDKVMS

SEQ ID NO: 101647 - protein, 41 aa, Gossypium hirsutum
  Clone ID: LIB3196-052-P1-M1-E8.pep
KNIGNKFPNSSLSRQLQMMGASSFDPVKLKLFLSPSCWAPT

SEQ ID NO: 101648 - protein, 78 aa, Gossypium hirsutum
  Clone ID: LIB3196-052-P1-M1-E9.pep
LPKNAERPVCFPLSLDPPITPPCKYQLGMHRVQSGLVFKKSKHQSWGPMICLLGSQASLVNVCYLRILKTERTTNKVS

SEQ ID NO: 101649 - protein, 84 aa, Gossypium hirsutum
  Clone ID: LIB3196-052-P1-M1-F1.pep
VFVSSPFLHSKSLRSRGQTGVTTSSEQNTLSFLRKHIGIGKNPEPHTRRLEPHPGSGNYLGNCSLISTFWFPPYKMGVLKRHDS

SEQ ID NO: 101650 - protein, 133 aa, Gossypium hirsutum
  Clone ID: LIB3196-052-P1-M1-F11.pep
TAMKAAFQSQYKSHFVAASLSNQKAGSSAAGASGWTSAGSLNSVPTNSAQQGHNSPDSPVASATKGIPGFGNTGNISGAPVTYPSAGAQGVNNTASGNNSREGTGGGNGKRERYENRCSSRHIHGETGNRHSD

SEQ ID NO: 101651 - protein, 134 aa, Gossypium hirsutum
  unsure (1)..(134): unsure at all Xaa locations
  Clone ID: LIB3196-052-P1-M1-F12.pep
SQALWGWQMSKQAGWVHPSLPFPSPTLPSTPHPLSASTVHSCSWVPPRLQRHLLLATVSPGTTQLTEGRAGRTLGQTQASCPXEPRPSMDAVDATMEKLRAQCLSRGASGIQGLARFFRQLDRDGSRSLDADEF

SEQ ID NO: 101652 - protein, 87 aa, Gossypium hirsutum
  Clone ID: LIB3196-052-P1-M1-F5.pep
AHFFPPVGEGHQINTGQQGFDGRVRNKKFTRFCPCDNSMPVRRQVLKKKRDNFHTTKEFPLIMSPFHIMNPGNPTNRKLVSGDPLRH

SEQ ID NO: 101653 - protein, 82 aa, Gossypium hirsutum
  unsure (1)..(82): unsure at all Xaa locations
  Clone ID: LIB3196-052-P1-M1-F6.pep
IKVGERRYGESXEFLTEGQSQRGAEGLQSMLRPRVGVEECGNRMMAWKGHHLRLKETRGAGEAPHTPSSSPTGCDLKPSHLL

SEQ ID NO: 101654 - protein, 60 aa, Gossypium hirsutum
  Clone ID: LIB3196-052-P1-M1-F8.pep
GLAHVWRATWRGVSNYYMDNGCCTVRSCEIIFKHTSALLDIKYCRPRSDPMILIAILLMA

SEQ ID NO: 101655 - protein, 71 aa, Gossypium hirsutum
  Clone ID: LIB3196-052-P1-M1-G2.pep
NPPPFFDVHSWSSPIKCQGKGHWCYQIKIIIFKQSLSTFILNKNLMCHFSFSFFLLIFILLLENYGILDGL

SEQ ID NO: 101656 - protein, 116 aa, Gossypium hirsutum
  Clone ID: LIB3196-052-P1-M1-G5.pep
RFLPEFFDGRSASKGPSLYIYYRNSIIKLFRENPSRKITFTDVRKTLVGDVGSIRRVFDFLDHWGLINYSASSALSKPSKDTGSNIKSSDSPSVESTSSAAPTCKHSSNFRRICGA

SEQ ID NO: 101657 - protein, 78 aa, Gossypium hirsutum
  Clone ID: LIB3196-052-P1-M1-H1.pep
CFLFSKILFHIDTHKVCLSCPYFMSFAGLEQECSCRTTYRVFKYLIVSNQISNISEVISIPFTLTNIPLLQPGWSISL

SEQ ID NO: 101658 - protein, 60 aa, Gossypium hirsutum
  Clone ID: LIB3196-052-P1-M1-H11.pep
SFLLLTMPLSRPWPGRNHFSSQASFFFPPGEMSDLDSITYKDPCSVYNSMTLVGSLLGSR

SEQ ID NO: 101659 - protein, 121 aa, Gossypium hirsutum
  Clone ID: LIB3196-052-P1-M1-H5.pep
MTDLEQSYSVRLNDGHFMPVLGFGTYAPDHTPKSQAAEATKVAIDVGFRHIDSAYLYQNEEEVGQAIWEKIADGTVKREDIFYTTKLWATFLRPELVRPALESSLKKLGLDYVDLFIIHVP

SEQ ID NO: 101660 - protein, 128 aa, Gossypium hirsutum
  Clone ID: LIB3196-052-P1-M1-H7.pep
RFFSKVRNVSSNIQYDSTRSSFVQVTDSRQLKGSSDQSRDRFDSISNEDSEYHTLINQREIQQLKERSILWDPSFLQTERTEIESDRFPKCLSGYSSMSRLFTEREKRMNNHLLPEEIEEFLGNPTRS

SEQ ID NO: 101661 - protein, 58 aa, Gossypium hirsutum
  Clone ID: LIB3196-053-P1-M1-A3.pep
MRRPEAMLLLLTLALLGGPTWAGKMYGPGGGKYFTTTEDYDHEITGLRVSVGLLLVKR

SEQ ID NO: 101662 - protein, 137 aa, Gossypium hirsutum
  Clone ID: LIB3196-053-P1-M1-A6.pep
MRQWLEKVVEQHLACRVFQESAMSSLYPSLEDLKVDQAIQAQARASPKMPALPVQAAAISPPPVLYPNLAELENYMGLSLSSQEVQQSLLQIPEGDSTAVSGPAPGQMVAPVSGYSLGVRRAEIKPVVREIHLCKDE

SEQ ID NO: 101663 - protein, 138 aa, Gossypium hirsutum
  unsure (1)..(138): unsure at all Xaa locations
  Clone ID: LIB3196-053-P1-M1-B11.pep
IYYKRCRAARSYEAVXLQLPPCIITQSRPCPSCHKSRIQPWPVTSPPPLSIPTIDTCCRPQELLPQLLLQQQPLLLLLQLPLHITGGIGAPCVALQPQSPLLERATVTGMRVSCPKLQQPRGILCTTWPGMSGSSMPI

SEQ ID NO: 101664 - protein, 72 aa, Gossypium hirsutum
  unsure (1)..(72): unsure at all Xaa locations
  Clone ID: LIB3196-053-P1-M1-B4.pep
FITGGEQMDAACAGNNENHSSESDVGLHGLEHKEVGHEGPCKLHGSFLVHLPPQALXXVLLQSLPHDCSPGR

SEQ ID NO: 101665 - protein, 118 aa, Gossypium hirsutum
  Clone ID: LIB3196-053-P1-M1-B8.pep
MAPPAPGPASGGSGEVDELFDVKNAFYIGSYQQCINEAQRVKLSSPERDVEKDVFLYRAYLAQRKFGVVLDEIKPSSAPELQAVRMFADYLAHESRRDSIVAELDREMSRSVDVTNTT

SEQ ID NO: 101666 - protein, 33 aa, Gossypium hirsutum
  Clone ID: LIB3196-053-P1-M1-C10.pep
LIELNFYTFCNLVIFTQLSTQTSKFLNEILIRP

SEQ ID NO: 101667 - protein, 43 aa, Gossypium hirsutum
  Clone ID: LIB3196-053-P1-M1-C11.pep
IITLCCIVLFHRILFVEVLKSFYSKVFKIRQYSVFCIFEKVVP

SEQ ID NO: 101668 - protein, 118 aa, Gossypium hirsutum
  Clone ID: LIB3196-053-P1-M1-C12.pep
MEKLCNFNHQFVIVHLLLFSSLLSFTNPTPSPTQDEQSQIISRFQEYLRINTSQPSPNYKKSTQFILSLAESLSLETQVIEFVQGKPLVILKWPGSDLFLPSILLNSHTDVIPSERSK

SEQ ID NO: 101669 - protein, 47 aa, Gossypium hirsutum
  Clone ID: LIB3196-053-P1-M1-C5.pep
IFSTTPTRWVLSHLREKTKGQRYEDLPMVPQRPRDSSGHLNDSRAQA

SEQ ID NO: 101670 - protein, 88 aa, Gossypium hirsutum
  Clone ID: LIB3196-053-P1-M1-D10.pep
HASGTNSSRFCIMVLQEGAVPPLVALSQSGTPRAKEKVHTASAGFSLFSTSPPLTPKIYIYIINFWSLQAQALLSYFRSQRHGNARRG

SEQ ID NO: 101671 - protein, 45 aa, Gossypium hirsutum
  unsure (1)..(45): unsure at all Xaa locations
  Clone ID: LIB3196-053-P1-M1-D11.pep
GGDVMLVCMRKSCYYISDLLENISFWFKVYLSSXQYSEMVQVTGV

SEQ ID NO: 101672 - protein, 76 aa, Gossypium hirsutum
  unsure (1)..(76): unsure at all Xaa locations
  Clone ID: LIB3196-053-P1-M1-D5.pep
SSNLSLHTGGGTGLWFSTXRLLHHYRYCPIPLPLEPNRRYIPFIIVFLSILHHLLELRKFIIFIINFWSYQASCIF

SEQ ID NO: 101673 - protein, 124 aa, Gossypium hirsutum
  Clone ID: LIB3196-053-P1-M1-E11.pep
MSRIPLGKVLLRNVIRHTDAHNKIQEESDMWKIRELEKQMEDAYRGTKRKMLPSSSSRMRSDGFDEESQRDYWRPKNEISGTLEDDFLKAKSWNKKLYDYEANMPDRWGHSGYKELYPEEFETD

SEQ ID NO: 101674 - protein, 72 aa, Gossypium hirsutum
  Clone ID: LIB3196-053-P1-M1-E2.pep
HWQLDTSGHLAWQVGPPPNTVFPCLHLQQDFLCKFCSKTISINTALLLSCSQIRFGKRCLGTVISLFKDSLI

SEQ ID NO: 101675 - protein, 42 aa, Gossypium hirsutum
  Clone ID: LIB3196-053-P1-M1-E3.pep
AALRSHAPTAKASSASSSSAQRRRLLRTTRLASPRRANEIRH

SEQ ID NO: 101676 - protein, 41 aa, Gossypium hirsutum
  Clone ID: LIB3196-053-P1-M1-E5.pep
INNIPADIVFVLKDRPHNIFKRDGSDVIYPARISLREALVA

SEQ ID NO: 101677 - protein, 78 aa, Gossypium hirsutum
  Clone ID: LIB3196-053-P1-M1-E6.pep
GLQNVAHATMDRDREHGLRVELNRIQVKRSMTKRALSVPDDSKSVCMHMCIYMTSVAPISLLILHLLLQDTFVHISAD

SEQ ID NO: 101678 - protein, 45 aa, Gossypium hirsutum
  Clone ID: LIB3196-053-P1-M1-E9.pep
NTKIINYRNQLQSYILQTNQTPFQVISKRSYFIQHKPLTHLAKSP

SEQ ID NO: 101679 - protein, 89 aa, Gossypium hirsutum
  unsure (1)..(89): unsure at all Xaa locations
  Clone ID: LIB3196-053-P1-M1-F1.pep
SVVILHVLRTTATLCERPVVRLIVVLHILRTQMWLFMSVLIWALFYLPNMSRLNFLLYGYPKLLDNNSSELPVKLIELPILNSYEXPVI

SEQ ID NO: 101680 - protein, 118 aa, Gossypium hirsutum
  Clone ID: LIB3196-053-P1-M1-F11.pep
LRAGARAERLASAKQAPWGDGRQQKASLAGVLGVWGGEVLRDRAEDGAPRWVGAVGGWARGRCCSPGSGRGDPRESQLQSRERSARDLLQEPPGGGREGAQTCARRDAESPSPSSGAL

SEQ ID NO: 101681 - protein, 133 aa, Gossypium hirsutum
  Clone ID: LIB3196-053-P1-M1-F5.pep
IAWSSSGHQPTGSSWAEGMTDLGPQPPWAWFLHLHLRVMGRRASRAGTGEERDADAVCFLDARPSGLVFKACVFGGLLIRWDHSPQAVPCGCSGTKLSDCLAAPVTSGAHSHRALPSLLPMPLVLVLCLAPLL

SEQ ID NO: 101682 - protein, 56 aa, Gossypium hirsutum
  Clone ID: LIB3196-053-P1-M1-F7.pep
IPILLKLMESTPEYHKLLHKLHSGSYTTIVGLSRCLTTRSTIQTTHHSVLTKASQD

SEQ ID NO: 101683 - protein, 78 aa, Gossypium hirsutum
  Clone ID: LIB3196-053-P1-M1-F9.pep
NKILKIILNNYLNINYPNIIKIEFNRINLFFLYFNPCVLHDCTFGTNFSLCRTLAHFISKFTLLALNFTFASNLVPMR

SEQ ID NO: 101684 - protein, 136 aa, Gossypium hirsutum
  unsure (1)..(136): unsure at all Xaa locations
  Clone ID: LIB3196-053-P1-M1-G1.pep
NKCDAKAALLATAREYLGDIARSCCITHVNSLVLRVQGNTMSTLGHYSTINQWLAGTAVGAIXGVMWWPTELAKRRLKIEDRSPXRTYKGXMDCLEQIYAHQGMRGVNTGMLXTLMPETPIFCVXSITYDALTLAL

SEQ ID NO: 101685 - protein, 68 aa, Gossypium hirsutum
  Clone ID: LIB3196-053-P1-M1-G10.pep
TRLNYETVRNRICQSTLQDCLFGRALCRVGYTSWTFKACRPHGREGPFYTLSYPNVCFVKLLTTKWNL

SEQ ID NO: 101686 - protein, 80 aa, Gossypium hirsutum
  unsure (1)..(80): unsure at all Xaa locations
  Clone ID: LIB3196-053-P1-M1-G4.pep
CRMLRMVLAYGELLLTVSAEILFQWTNIVAWQQMPTFCGIAANLQETLVGFSFYFLCFFPXLLNQQGWKEGREVTNYSFQ

SEQ ID NO: 101687 - protein, 76 aa, Gossypium hirsutum
  unsure (1)..(76): unsure at all Xaa locations
  Clone ID: LIB3196-053-P1-M1-G8.pep
WSNYHIRTYNFKFHDYLALLASSTQLSHFIQFGHFSNLSLNWSNFPIDIFHMSFLSYYISCNNIKIYFNSSLNLWX

SEQ ID NO: 101688 - protein, 82 aa, Gossypium hirsutum
  Clone ID: LIB3196-053-P1-M1-G9.pep
EKSPEAPTIKRYNLIPPTPILPLYLQQWPFCALHKIISPLQDIYSLISRKGLCDYRKWPQSLHVLLTCYLLLPISMASLKPI

SEQ ID NO: 101689 - protein, 106 aa, Gossypium hirsutum
  Clone ID: LIB3196-053-P1-M1-H1.pep
ETEDTSSCLMVVVVVMVVTLGSHRISLESYINKPSSSSSIPSLVRELQRMKGYVRERALKTSFSLLRYESFLQFPPFLFFSFLFFSFLAVYVYVCVFACVCRLFLS

SEQ ID NO: 101690 - protein, 55 aa, Gossypium hirsutum
  unsure (1)..(55): unsure at all Xaa locations
  Clone ID: LIB3196-053-P1-M1-H2.pep
PRXRSNSRAKXCFAKRRQTDKFCDSSFLSQIPSKAILVIKLIRFLLNRIEVADSK

SEQ ID NO: 101691 - protein, 59 aa, Gossypium hirsutum
  Clone ID: LIB3196-053-P1-M1-H5.pep
NGNQFPHWLNLYNCLAVLRVILVARCTSFLNEMLLLYCLNALALGLCEMHMCHSECWLI

SEQ ID NO: 101692 - protein, 94 aa, Gossypium hirsutum
  Clone ID: LIB3196-053-P1-M1-H7.pep
TQQVVCSRLSSRQPSSSRSCWRDIQERASPLSCFCLCSYPKDRLLLHRQGRVARAALTARWGLESGSPWRPDSDLTSTKQSYLNSWENHFCPKR

SEQ ID NO: 101693 - protein, 130 aa, Gossypium hirsutum
  unsure (1)..(130): unsure at all Xaa locations
  Clone ID: LIB3196-054-P1-M1-A1.pep
MAAMALVAGGLCRGLGSHPAAPGRDAVVFVWLLLSTWFTAPARAIQVTVSDPYHVVILLQPVTLPCTYQMTLTPTYPIDIWKYKSFXHDRIDDALFPASVDNQLNAQLVAGNPGYNPYVECQDSVRTVRV

SEQ ID NO: 101694 - protein, 64 aa, Gossypium hirsutum
  Clone ID: LIB3196-054-P1-M1-A2.pep
SLNCWLVPYPVIFPFLLLRIVTCVWLDSSFCLKYLWPYSYKTHIHAQSLHLTLSNIVASFEVNI

SEQ ID NO: 101695 - protein, 73 aa, Gossypium hirsutum
  unsure (1)..(73): unsure at all Xaa locations
  Clone ID: LIB3196-054-P1-M1-A7.pep
GGDPAGPYPNFSFARPIAKKPTFLRLRGXFEYEIQSWKYSIPLFFTTQGFDTFRSREISTGASAIREQLADLK

SEQ ID NO: 101696 - protein, 119 aa, Gossypium hirsutum
  Clone ID: LIB3196-054-P1-M1-A8.pep
HSFRPAYRKVFLHEATVRLMAGASPTRTHQLLEHSLRRRTTQSAKHGEVDAWPGQRERATAILLACRHLPLSFLSSPGQRAVLLAEAARTLEKVGDRRSCNDCQQMIVKLGGGTAIAAS

SEQ ID NO: 101697 - protein, 69 aa, Gossypium hirsutum
  Clone ID: LIB3196-054-P1-M1-A9.pep
SICSKKLQVYLDENTTVRAPDLTQDESNQCHSEDTKRALRDWVRENVTGHGSKSMTIVHKMSHRGQLIK

SEQ ID NO: 101698 - protein, 130 aa, Gossypium hirsutum
  Clone ID: LIB3196-054-P1-M1-B10.pep
MRAVPLAVPLGQTEVFQALQRLHMTIFSQSVSPCGKFLAAGNNYGQIAIFSLSAALSSEAKEESKKPVVTFQAHDGPVYSMVSTDRHLLSAGDGEVKAWLWAEMLKKGCKELWHRQPPYKTSLGVPEINA

SEQ ID NO: 101699 - protein, 104 aa, Gossypium hirsutum
  Clone ID: LIB3196-054-P1-M1-B11.pep
RFGAVNLNSSLNMLPVRPQTNTLIGGPMPMSMPNVVTGPMGMAPLGNTPMMNQSMMGMNMNIWMSAAGMGLTGTMGMGMPNIDMTSGTVQPKQDAFANFANFSK

SEQ ID NO: 101700 - protein, 39 aa, Gossypium hirsutum
  Clone ID: LIB3196-054-P1-M1-B3.pep
FSIVMFLYSQKKLTQFYLKFFFPSFTSAFSHPNFRSKSL

SEQ ID NO: 101701 - protein, 112 aa, Gossypium hirsutum
  Clone ID: LIB3196-054-P1-M1-B9.pep
MARGPGPLGRPRPDTVAMPKRGKRLKFRAHDACSGRVTVADYANSDPAVVRSGRVKKAVANAVQQEVKSLCGLEASQVPAEEALSGAGEPCDIIDSSDEMDAQEESIHERTV

SEQ ID NO: 101702 - protein, 48 aa, Gossypium hirsutum
  Clone ID: LIB3196-054-P1-M1-C10.pep
NFIIHNYKFNPQKSTNFLICPYSFGFFFQLHHQSFNFYQIDQIWMEKN

SEQ ID NO: 101703 - protein, 81 aa, Gossypium hirsutum
  Clone ID: LIB3196-054-P1-M1-C12.pep
FLIVFFFFYYFLLTKLILLYALMLLSDFFFYRDSSSFSDKNYWIIFIKLGFFVLRLAFSLGSLILKWNNLRRTRAFRVFYG

SEQ ID NO: 101704 - protein, 81 aa, Gossypium hirsutum
  Clone ID: LIB3196-054-P1-M1-C6.pep
MAGGSDAAETLSCARCSNPASLQCPKCVELKLPREGAAFCTQDCFKASWSSHKSVHLKAKLSSLGTDGAGGQNSDLASEGW

SEQ ID NO: 101705 - protein, 106 aa, Gossypium hirsutum
  Clone ID: LIB3196-054-P1-M1-D12.pep
ETLPGSLSARPGSWVLWPCLPASHWTLSFQVRLQVQSMEKPQYRGTLHCFKSIIKQESVLGLYKGLGSPLMGLTFINALVFGVQGNTLRALGHDSPLNQFLASAAA

SEQ ID NO: 101706 - protein, 130 aa, Gossypium hirsutum
  Clone ID: LIB3196-054-P1-M1-D5.pep
GDWLRVQRGQQEVGSSGVPCTLGSLGCSHSRGPSRARPLLGTSAAVPRCSLREVQDDRVARRGNHSMAGDRRYTGPRTQHRDHSVGLAHTPLATCAHHTHPRTSPSCLVGGSFSLAGTRPLCLSHRQSQR

SEQ ID NO: 101707 - protein, 45 aa, Gossypium hirsutum
  Clone ID: LIB3196-054-P1-M1-E3.pep
NCHKFCTVGLRLFIKQLYKVCYKVFMLDFRKVFFGMNFSNCGFYV

SEQ ID NO: 101708 - protein, 39 aa, Gossypium hirsutum
  Clone ID: LIB3196-054-P1-M1-E5.pep
GIKLLKIKLLGLKFKFMKSTRILYNWNNFNKACVKGKAS

SEQ ID NO: 101709 - protein, 104 aa, Gossypium hirsutum
  Clone ID: LIB3196-054-P1-M1-E6.pep
LRPGYCHVSFNTLSFLNSIPLKQNSYDFKAMTNIFLTHRKSRKNNVFTTKMAFQLYVTLHTDLTPEIHRLVKILSELYIKTSEGQQLVNGPFSLKFAWHFAVLS

SEQ ID NO: 101710 - protein, 133 aa, Gossypium hirsutum
  Clone ID: LIB3196-054-P1-M1-E8.pep
SAIDADDPNALNGMLRYRILSQAPSTPSPNMFTINNETGDIITVAAGLDREKVQQYTLIIQATDMEGNPTYGLSNTATAIITVTDVNDNPPEFTAMTFYGEVPENRVDVIVANLTVTDKDQPHTPAWNAVYRI

SEQ ID NO: 101711 - protein, 46 aa, Gossypium hirsutum
  Clone ID: LIB3196-054-P1-M1-E9.pep
IAEITDKLGLHSLRHRNWYIQATCATSGDGLYEGLDWLSNQLRNQK

SEQ ID NO: 101712 - protein, 48 aa, Gossypium hirsutum
  Clone ID: LIB3196-054-P1-M1-F10.pep
YQHCVFHYVSKHANGVARLLAIEGLKRNVETYLARAIPSFAHKVVEVD

SEQ ID NO: 101713 - protein, 48 aa, Gossypium hirsutum
  Clone ID: LIB3196-054-P1-M1-F11.pep
PYISPPTSKQKVVPSPHWPSHGTDSPQSSFLNSQSRTPLANLNFSSPV

SEQ ID NO: 101714 - protein, 69 aa, Gossypium hirsutum
  Clone ID: LIB3196-054-P1-M1-F12.pep
MEYLGNFSLDPLASITSFELSAGPISWLPPPPGANQVEKGPANALQLFWPMICKAVCYIYIYLFIYVTG

SEQ ID NO: 101715 - protein, 130 aa, Gossypium hirsutum
  Clone ID: LIB3196-054-P1-M1-F4.pep
MNNPLKRMKEEDILDLLEQCEIDDEKLMGKTTKTRGPKPLCSMPESTEIMKRPKYYSSDSSYDSSSSSSESDENEKEEYQNKKREKQVTYNLKPCNHYKFIQQPSSIRRSVSCPRSISAQSPSSGDTRPF

SEQ ID NO: 101716 - protein, 38 aa, Gossypium hirsutum
  Clone ID: LIB3196-054-P1-M1-F6.pep
NVLIGPPKNSRKKFLDGYMSLVPGSFSELYFQVLDLKI

SEQ ID NO: 101717 - protein, 68 aa, Gossypium hirsutum
  Clone ID: LIB3196-054-P1-M1-F7.pep
EFGKNLLIIFFLFSYKLTKLKAYSPFPFSLSVVRSTWGWRSSEAASHYQVTTFGVMMHMLVISSEWHV

SEQ ID NO: 101718 - protein, 133 aa, Gossypium hirsutum
  Clone ID: LIB3196-054-P1-M1-G1.pep
ITGSGRQEAQKTDAEYRKLFDLALQGLQLLSQWSAHVMEVYSWKLVHPTDKYSNKDCPDSAEEYERATRYNYTSEEKFALVEVIAMIKGLQVLMGRMESVFNHAIRHTVYAALQDFSQVTLREPLRQAIKKKK

SEQ ID NO: 101719 - protein, 48 aa, Gossypium hirsutum
  Clone ID: LIB3196-054-P1-M1-G10.pep
LMMLYSILSMGLLIILDCYNNFHLWSYTGYLKPYTLLAWRGSSMVLDH

SEQ ID NO: 101720 - protein, 51 aa, Gossypium hirsutum
  Clone ID: LIB3196-054-P1-M1-G2.pep
VRRLLKAIVQPWSYMLSHIESMPCPRHGLTQHLKSMPSSQTRSYTNLISHT

SEQ ID NO: 101721 - protein, 48 aa, Gossypium hirsutum
  Clone ID: LIB3196-054-P1-M1-G4.pep
LWLYGLHELQIGGWLIGGLTLWCVAPFSIQLSVHVVLLPRRRTSISSY

SEQ ID NO: 101722 - protein, 47 aa, Gossypium hirsutum
  Clone ID: LIB3196-054-P1-M1-G5.pep
ILKMRIQIEVIKIILGIFKHFFNFKFLYISLSYENYIISINMYECFE

SEQ ID NO: 101723 - protein, 53 aa, Gossypium hirsutum
  Clone ID: LIB3196-054-P1-M1-G9.pep
HFIVSKVLAALRSVDSSENYIVIREMCFCFCFCFIFLKVGYYWFYAPWNITAL

SEQ ID NO: 101724 - protein, 82 aa, Gossypium hirsutum
  Clone ID: LIB3196-054-P1-M1-H1.pep
MSGVVSMSPMSVPSSVNPANASSVPTIGKAVRVVTSSFVDAAIGFAAHTVSHGSPATVVRSPARFAAGSSTAHLAGGACFFT

SEQ ID NO: 101725 - protein, 79 aa, Gossypium hirsutum
  Clone ID: LIB3196-054-P1-M1-H10.pep
ILRGENRIAELRLRLLETRPVAGAASQEQSRPARWSPRQPGTQEAAQGNTVPRCPGGPNKKAFCSSMAMSSCLNAPHGQ

SEQ ID NO: 101726 - protein, 131 aa, Gossypium hirsutum
  Clone ID: LIB3196-054-P1-M1-H3.pep
IKIDEKNFVVVMVTKPKAVSTPAPATTQQSAPASTTAITSSTATTVAQAPTPVPALAPTSTPASITPASATASSEPAPASATKQEKPAEKPAETPVATMLPLNLKVEEVMTLAPRSLTPSIGYLTIKAVST

SEQ ID NO: 101727 - protein, 62 aa, Gossypium hirsutum
  Clone ID: LIB3196-054-P1-M1-H5.pep
NSLYEWEKDVQIPYAVVLMMMPLPSLSPGLFSYSVPQTCGRGQDSTFTACSIYELFQMLLVV

SEQ ID NO: 101728 - protein, 44 aa, Gossypium hirsutum
  Clone ID: LIB3196-054-P1-M1-H6.pep
RYHMATFSSLSLMPHVISFLVVFKATSSVVCVSHFQRGILLGSS

SEQ ID NO: 101729 - protein, 75 aa, Gossypium hirsutum
  Clone ID: LIB3196-054-P1-M1-H8.pep
SSLLRSVVCPIAHPVGFISNSRMAIRHSVLPPWYHVRVSALKDCKSLFSITFFSHLEHMILGLSYICFGFKEGKG

SEQ ID NO: 101730 - protein, 45 aa, Gossypium hirsutum
  Clone ID: LIB3196-054-P1-M1-H9.pep
WYISDGVFNYTKSIKNCISNKLEFFYVSCKKRVTAVHRHNSHFRP

SEQ ID NO: 101731 - protein, 97 aa, Gossypium hirsutum
  Clone ID: LIB3196-055-P1-M1-A1.pep
PMPPEENMGSEQNKGTSLPPLVTNLSADRRGIFGTAADINCCSKGYRALRAREEHAVKAQAAMGESFIVNTKREDAADLTEKTALELSQGGSSSTEG

SEQ ID NO: 101732 - protein, 78 aa, Gossypium hirsutum
  Clone ID: LIB3196-055-P1-M1-A11.pep
WNVPISYWSFILRLLGRFYRHYAFIRQFPPCPLAPVKCLYCYLFRVNWLGLLSLKSFMVFGNHSCQVALDNQQTHHLF

SEQ ID NO: 101733 - protein, 94 aa, Gossypium hirsutum
  Clone ID: LIB3196-055-P1-M1-A3.pep
PGFFAAPSHGPSITFLARIFYPISSCVLASNLPFFGSLLIAFTVYRYLYVVPISLMISCLSPSPSPRAHPPGPTPSVSRIKPQAPIRPHCLASH

SEQ ID NO: 101734 - protein, 126 aa, Gossypium hirsutum
  Clone ID: LIB3196-055-P1-M1-A5.pep
TARERFRNAGKSNLQSGQMSGPHPAKPQKANRMVAEQQPVGCECCPLSVPFCESAPSTPSWATSSQRRNSSTPLSPSGMPLLAPLPQQAAGICTWNHRAGCMQRQRACSSAWGRASCPSQQVPAQV

SEQ ID NO: 101735 - protein, 80 aa, Gossypium hirsutum
  unsure (1)..(80): unsure at all Xaa locations
  Clone ID: LIB3196-055-P1-M1-A7.pep
KRAQRLTIFLAKRRGDPQQFIQAAGSRCRIQPDDAVYQATQESEGLIPWNGKEDILIDXFRGLALIEFIQEPGTRQFGDQ

SEQ ID NO: 101736 - protein, 100 aa, Gossypium hirsutum
  unsure (1)..(100): unsure at all Xaa locations
  Clone ID: LIB3196-055-P1-M1-A9.pep
TNRSTRGLLSTFLQKNDSYPLGTVVDFAKDANGFTILKVRNLAYHAKALVNDPKSSLLADRNPADRTDLPIIPVRDAHGGSXKDQADKRAAYLDNHPNAF

SEQ ID NO: 101737 - protein, 62 aa, Gossypium hirsutum
  Clone ID: LIB3196-055-P1-M1-B1.pep
DNVTEKVNLLNNAGAMEHFHMKLFRAQRNPYIAGLSLLMPFLVRHLVTLIWEQSTLLASNEA

SEQ ID NO: 101738 - protein, 38 aa, Gossypium hirsutum
  Clone ID: LIB3196-055-P1-M1-B10.pep
ASYSFDSLSTRGSKLAYACIDPHTAIKVVSKVNLRHLR

SEQ ID NO: 101739 - protein, 58 aa, Gossypium hirsutum
  Clone ID: LIB3196-055-P1-M1-B12.pep
PISLISYILCVGLAVKCTALILVQNSELVAKNTCITDVRSNLNSTVKCSGSFSAKLVD

SEQ ID NO: 101740 - protein, 104 aa, Gossypium hirsutum
  Clone ID: LIB3196-055-P1-M1-B2.pep
PVVLIPQIRELTGRSHRMGNIGSSRRDVRVSLGWEDLYVVVFHGLSIVQIGITFSVTLRYIVYYAVGSTAPCHLFYTIQRPKGVKSPQSYCMMAPSQFYMCHHV

SEQ ID NO: 101741 - protein, 93 aa, Gossypium hirsutum
  unsure (1)..(93): unsure at all Xaa locations
  Clone ID: LIB3196-055-P1-M1-B5.pep
THASRGDPIGGGRNMDHHALHFDVNVIRESSKMRVQPFNEYRKRFGMKPYTSFQELKGQKEMAPEIEELQGDIDTXSFYPGLLIEKLPIKLYV

SEQ ID NO: 101742 - protein, 60 aa, Gossypium hirsutum
  Clone ID: LIB3196-055-P1-M1-B6.pep
LKDGRAAFYQALSIWFELGSELKCPWSLVCAPQVYYFHVLRRSPLNVSVDIHKKNLEVIK

SEQ ID NO: 101743 - protein, 34 aa, Gossypium hirsutum
  Clone ID: LIB3196-055-P1-M1-B7.pep
KASDCKLCSIRKTTLFIVFFEMNYPLEISVFFKL

SEQ ID NO: 101744 - protein, 47 aa, Gossypium hirsutum
  Clone ID: LIB3196-055-P1-M1-C1.pep
VYYDKNVVIWGNDASTQYPDKNYASVITLSVEKTFSELAKDDAWLMQ

SEQ ID NO: 101745 - protein, 59 aa, Gossypium hirsutum
  Clone ID: LIB3196-055-P1-M1-C10.pep
YTQWIRFNIFKYFPILIDYIKYSLINLTNKTLLFNKTKVNKKKNNIHALNSQIVHNIIF

SEQ ID NO: 101746 - protein, 82 aa, Gossypium hirsutum
  Clone ID: LIB3196-055-P1-M1-C11.pep
PRVRLLSNSGGGFETSLTHMEGLNMYGNGADNGLMIRKRAMVVVNASSHSKHAKTWALTHEENRVGKVTYTQCFYNNPKDSL

SEQ ID NO: 101747 - protein, 124 aa, Gossypium hirsutum
  Clone ID: LIB3196-055-P1-M1-C12.pep
IFDLGGQYLRVGKAVTPPMPLLTPATPGGLPPAAAVAAAAATAKITAQEAVAGAAVLGTLGTPGLVSPALTLAQPLGTLPQAVMAAQAPGVITGVTPARPPIPVTIPSVGVVNPILASPPTLGL

SEQ ID NO: 101748 - protein, 112 aa, Gossypium hirsutum
  unsure (1)..(112): unsure at all Xaa locations
  Clone ID: LIB3196-055-P1-M1-C5.pep
DSRDQVHASEAARKLLGRENQPLIYSIIRTGLIPKFEFFLSRTDCSPSQLVSAWALTNIGSGTSXQTKAVVXDGGAIPAFISLVAYPHAHISEQASGALGNIRSDGSVIRDL

SEQ ID NO: 101749 - protein, 64 aa, Gossypium hirsutum
  Clone ID: LIB3196-055-P1-M1-C8.pep
GGASRHRPNIPDATNASGNWRIRGEIIRHFVFSLSIFFALFVISIIKKFNVFNYLMLFKHILFF

SEQ ID NO: 101750 - protein, 120 aa, Gossypium hirsutum
  unsure (1)..(120): unsure at all Xaa locations
  Clone ID: LIB3196-055-P1-M1-D1.pep
GLCKVAWRHEHLLNMICRQVILPELNAEEIKSNLGNFSGGNTNFAKDKQHKLWMDLLXRSEKKLRERLEGISFYACRSLVFNSATTCFEPGNWSPFGMAQMEQWVASNNDQVHDQLKIVA

SEQ ID NO: 101751 - protein, 73 aa, Gossypium hirsutum
  Clone ID: LIB3196-055-P1-M1-D10.pep
FLQQGQAHFMNDDDRAIDIEVLSRWHKLKLDYDGKSESCLKTYNAGELFKACIICIARCIHCTCCLKDCLLGR

SEQ ID NO: 101752 - protein, 49 aa, Gossypium hirsutum
  Clone ID: LIB3196-055-P1-M1-D11.pep
ADCNLYTYLNCNFMLNRNQMQMLQYIAFIAPSVAPLDILGVPSDSNHRR

SEQ ID NO: 101753 - protein, 125 aa, Gossypium hirsutum
  Clone ID: LIB3196-055-P1-M1-D12.pep
VCHSVTMCIFTCTGQHSFVHLGQLDWYTWVPNAPCTMRLPPPTTKDATLETVMATLPNFHQASLQMSITWQLGRRQPIMVAVGQHEEEYFSAPEPKAVLKKFREELAALDKEIENRNAKLDMPYE

SEQ ID NO: 101754 - protein, 82 aa, Gossypium hirsutum
  unsure (1)..(82): unsure at all Xaa locations
  Clone ID: LIB3196-055-P1-M1-D3.pep
GPAPVATADRSKGHIPIPSGKTYFSLGTILFRNTTISLKWDGEPXDLSLNITWYLQSADWDNGIYNFKAAKVRMSGEQLKEK

SEQ ID NO: 101755 - protein, 77 aa, Gossypium hirsutum
  Clone ID: LIB3196-055-P1-M1-D4.pep
MWFSLARTGPGPRSPLLRRAHSQARRRLWGPAFRNKISVYSFLFFLKSVFLLKTPNYSFLFFLKSVFLLRTPNACGL

SEQ ID NO: 101756 - protein, 46 aa, Gossypium hirsutum
  Clone ID: LIB3196-055-P1-M1-D6.pep
ELTIHSRFKPVVLYSKPLTALSPSRLSIGRLTLFRVKIRPTCSLQM

SEQ ID NO: 101757 - protein, 72 aa, Gossypium hirsutum
  Clone ID: LIB3196-055-P1-M1-D8.pep
NSKTVLFCSDFSSNSLSVPAFLRKRRYIPIFLRRFWGSATKVIKYPKTEPFCKEVLWSLFKIAAIAGQRTRG

SEQ ID NO: 101758 - protein, 73 aa, Gossypium hirsutum
  unsure (1)..(73): unsure at all Xaa locations
  Clone ID: LIB3196-055-P1-M1-D9.pep
NQRVVVINFFRIQVKPYKCFVYNTFFELKSTLLIQKTNISCFVSILITFFRKYVTILKGWDCRVWFSRFXRGY

SEQ ID NO: 101759 - protein, 41 aa, Gossypium hirsutum
  Clone ID: LIB3196-055-P1-M1-E1.pep
PCVRLQLTKELFISFWLTSEIFEFERGLIHYADRVLMDPNH

SEQ ID NO: 101760 - protein, 74 aa, Gossypium hirsutum
  Clone ID: LIB3196-055-P1-M1-E3.pep
NGWLNGKYILDEQGPRNLVHSRTPPSFRCKKCNTFRVTNGCIHDMRPSLPLDRCLYESTLCDDCRLTCFSSHLL

SEQ ID NO: 101761 - protein, 55 aa, Gossypium hirsutum
  Clone ID: LIB3196-055-P1-M1-E4.pep
SDWRLTWIDETGATIIMATYALIRQISRKFVKREPVLKCCCFVQNESLFPSPCLD

SEQ ID NO: 101762 - protein, 71 aa, Gossypium hirsutum
  Clone ID: LIB3196-055-P1-M1-E5.pep
RITGAGEAAGPGIPGCDLLGGMVLGVDAMWLSIAPYGQLGPKGGMTIATEVLKSKPNSSHWHTGIRQKIRS

SEQ ID NO: 101763 - protein, 49 aa, Gossypium hirsutum
  Clone ID: LIB3196-055-P1-M1-E6.pep
LTSLNFLISYQIKNCILPNHHHYMGSTLEKLAKVNFYLHSQILKHRTKG

SEQ ID NO: 101764 - protein, 38 aa, Gossypium hirsutum
  Clone ID: LIB3196-055-P1-M1-F1.pep
KEQQTQSLINQRITAHIDQAAGLQHFGADFNQHSMAQR

SEQ ID NO: 101765 - protein, 45 aa, Gossypium hirsutum
  Clone ID: LIB3196-055-P1-M1-F10.pep
QMAKLNYLFQPNLGICHITNKRNYTNIVKSRIFVWMLKSMPETSI

SEQ ID NO: 101766 - protein, 79 aa, Gossypium hirsutum
  Clone ID: LIB3196-055-P1-M1-F2.pep
PRVIPRVTSAASAPPCSKRKFLLKKPPKVSKTLSGVLAEYREGKRITLPCTIKIIDSILLGKLLDAYFHQNRWVGAADP

SEQ ID NO: 101767 - protein, 139 aa, Gossypium hirsutum
  unsure (1)..(139): unsure at all Xaa locations
  Clone ID: LIB3196-055-P1-M1-F3.pep
KLERRSARVPRRNFRDGAHASGLDPYPGQGFLVLQKQXPGLHPLPXMPSLXAKDRERLELSXGQHLQPDMSNADTLEAGRRHAXRVAALGNDPLSRLVMLNVTPNQHQYSNMHLDIHLHQXDAIHANSDSVQIIIHLMG

SEQ ID NO: 101768 - protein, 93 aa, Gossypium hirsutum
  Clone ID: LIB3196-055-P1-M1-F4.pep
KLPHCSGSHRIFSVLVFKGTLSAPVPFPHPFCSTGLGALVALSTGHLAVRQWPCTTCLFDGRCISHLSPLLAIWPGLGTTPKPHLSDPLPTAC

SEQ ID NO: 101769 - protein, 108 aa, Gossypium hirsutum
  Clone ID: LIB3196-055-P1-M1-F5.pep
ATVLVERAPTIKDTRKLAPNGGNKRGGKKPAPKTKAIAGNAHTEKKPKAAKKLPKEGAPAAGDMNKKRGYKSVETYKTYMYKVLEQVHPDIVIYSTDLGIMNSFNSDF

SEQ ID NO: 101770 - protein, 48 aa, Gossypium hirsutum
  Clone ID: LIB3196-055-P1-M1-F6.pep
TIAVHVVPIFRQVSQIVDHLQSMSTTSASESASIRVLKFVINSVLSGK

SEQ ID NO: 101771 - protein, 47 aa, Gossypium hirsutum
  Clone ID: LIB3196-055-P1-M1-F7.pep
EVPRFSWLSRAGLRTLMRAASSLECSNPPKKMTPYLRPMPKSWYPLE

SEQ ID NO: 101772 - protein, 55 aa, Gossypium hirsutum
  Clone ID: LIB3196-055-P1-M1-F9.pep
YSLNPHHSVKSRIDPTLLFPIERSLMYSPDNQSRPYHHGLTRKYLFFMDCNIAQG

SEQ ID NO: 101773 - protein, 114 aa, Gossypium hirsutum
  Clone ID: LIB3196-055-P1-M1-G1.pep
REDCGVKHVLTDLHCIHGGKAYVNGTQKLRVGFLKPKFKDGGRGANDSTSSMPEMMKSQWIRTKRTHVPKGGIKANANYIAMDYDYALLELKTPHKRKFIKSGVSNHSQRVTGG

SEQ ID NO: 101774 - protein, 63 aa, Gossypium hirsutum
  Clone ID: LIB3196-055-P1-M1-G4.pep
GSSPAAGLPLPLDKDWSRRMWAPPGRAAGPSGADWNAFSCCSHHLMPYRSKNHFSLVYDFERL

SEQ ID NO: 101775 - protein, 83 aa, Gossypium hirsutum
  Clone ID: LIB3196-055-P1-M1-G7.pep
KVGIWDDIISLLSSATAEFGPSMGIKGGNAARIPEHTCHKVIETNTCELQKCIHECSKEPAGVGDCTDYNVCYCTFYCKDPPL

SEQ ID NO: 101776 - protein, 51 aa, Gossypium hirsutum
  Clone ID: LIB3196-055-P1-M1-G8.pep
QELMIRHAVFEKLEKTKVECGKYFFFVSRNNQQHMVNLLVKRYIGKKTVLL

SEQ ID NO: 101777 - protein, 51 aa, Gossypium hirsutum
  Clone ID: LIB3196-055-P1-M1-G9.pep
AGLARTIPYVGKLKKANVVRGHYLDLVRQDILLHLEKQLLEQETATLTELL

SEQ ID NO: 101778 - protein, 106 aa, Gossypium hirsutum
  Clone ID: LIB3196-055-P1-M1-H1.pep
MDGRVQLMKALLARPLRPAARRWRNPIPFPETFDGDTDRLPEFIVQTGCYMFVDENTFYNDALKVTFLITRLTVPALQWVIPYIKKESPLLSDYRGFLAEMNRVFG

SEQ ID NO: 101779 - protein, 55 aa, Gossypium hirsutum
  Clone ID: LIB3196-055-P1-M1-H10.pep
SSCMCFRSQSMMNKLLFYLRQLCLENKKKKKKTSFINPKTKPKAPFFKESLSKSL

SEQ ID NO: 101780 - protein, 82 aa, Gossypium hirsutum
  Clone ID: LIB3196-055-P1-M1-H12.pep
QMIARMLRAPFLSLSKFQVPLASLPVLLGSHGRCGTQVIENNCDPTGISSNKISVYGFRMFFTATAKDLSAKKCVPCNTKDL

SEQ ID NO: 101781 - protein, 113 aa, Gossypium hirsutum
  unsure (1)..(113): unsure at all Xaa locations
  Clone ID: LIB3196-055-P1-M1-H2.pep
MSARRATHARVQLLKALLARPLXPAARPWRNTTTFPATLVGETDRLPEFIVQTDCYMFKNWNTFSNDALKLNFFMTRFTVNTVKWLPPXIKNGGRLLIDYRGFLAGMNRVFVL

SEQ ID NO: 101782 - protein, 121 aa, Gossypium hirsutum
  unsure (1)..(121): unsure at all Xaa locations
  Clone ID: LIB3196-055-P1-M1-H3.pep
YTQMYGIDYLETFAPVAKMNTVRVLLSLAANRGWKLQQFNIKNAFLHGDLEEEVYMDVPPGFSPNTGQAVCRLKKALYGLKQSPRAWFGRFTKVMLKLGYKXSQGDHTLFVKHSSSGGVTA

SEQ ID NO: 101783 - protein, 61 aa, Gossypium hirsutum
  Clone ID: LIB3196-055-P1-M1-H4.pep
ALFKVCQPQIAYLKPIIPYQTHNLSSIRVCVRCQRICSCFQTISNRLHLVIVSLIQSYLLI

SEQ ID NO: 101784 - protein, 58 aa, Gossypium hirsutum
  Clone ID: LIB3196-055-P1-M1-H5.pep
CGKNIDRSCKRRAFTYYMSFKGRFWTWLKLGLSVLDELQIIKRQCIDHLPSPPSSSCG

SEQ ID NO: 101785 - protein, 77 aa, Gossypium hirsutum
  unsure (1)..(77): unsure at all Xaa locations
  Clone ID: LIB3196-055-P1-M1-H8.pep
ASLSPRGVFSCSFLWVRCLGRCSWSLLLPCGRRPXRSRAWPVSRFLFPAVFFAFPWLPFFXFVRFLRRGRPPRVRVV

SEQ ID NO: 101786 - protein, 112 aa, Gossypium hirsutum
  Clone ID: LIB3196-056-P1-M1-A12.pep
CQVPEADSVSFLQELLALRLALEEGCGPGPGPPRELSFTKSSQAVRAVRDVLAVACANQWEQLRGPGGNEDGPQKLDSEADAEPQDPDSTNLLESEAPRDYFLKFAYIVDLD

SEQ ID NO: 101787 - protein, 85 aa, Gossypium hirsutum
  Clone ID: LIB3196-056-P1-M1-A4.pep
RECQHQISDYVTPTLTPGQAHPTAIRSPPKRTPMGFALQTWPDHSEAGAAMTQTVYSELSTHRGSTSQLGRPVCDGPILSSKSTS

SEQ ID NO: 101788 - protein, 33 aa, Gossypium hirsutum
  Clone ID: LIB3196-056-P1-M1-A7.pep
MMPPINGGVEDIPKLLVVNRTEQNRQRVKSAYN

SEQ ID NO: 101789 - protein, 62 aa, Gossypium hirsutum
  Clone ID: LIB3196-056-P1-M1-B10.pep
PLLIWKPSFSIGAQGCSDTLGRSCLFGLWELLKSGQPRAMAVESYLQRVCLCSPCRIRGRRL

SEQ ID NO: 101790 - protein, 47 aa, Gossypium hirsutum
  Clone ID: LIB3196-056-P1-M1-B11.pep
PASELIKASIEPTLYRLVFTPDTVLHYLQVSGFIFLFYNIICFPFVV

SEQ ID NO: 101791 - protein, 115 aa, Gossypium hirsutum
  Clone ID: LIB3196-056-P1-M1-B12.pep
KQHVFFKDINWSTLARQKAMFIPSTEAHDTSYFMSRYIWNAEDEQVRGSSDFDDLTDTCSSGSLSNVQDEDGDECGSLTDFSAPALAVKYSFSNFSYKNLSQLAFINYDLVVKNA

SEQ ID NO: 101792 - protein, 52 aa, Gossypium hirsutum
  Clone ID: LIB3196-056-P1-M1-B2.pep
RKEQSIPRTIRSFRFDNPVMLNINYCSLGTHTFIVIIVSFKSDSLLIFKTYH

SEQ ID NO: 101793 - protein, 62 aa, Gossypium hirsutum
  Clone ID: LIB3196-056-P1-M1-B3.pep
HMPSNQYSRERIGHRSDLRHLGHSWLIGRLKNGASEHRLLWILISYLSESHASLKTKQGHCQ

SEQ ID NO: 101794 - protein, 60 aa, Gossypium hirsutum
  Clone ID: LIB3196-056-P1-M1-B4.pep
RTRQLTRGRTVRSASSSSLQTDVLLRIGSILAVWGNSGCIHHHRILYDRYCPKVFRYPTV

SEQ ID NO: 101795 - protein, 45 aa, Gossypium hirsutum
  Clone ID: LIB3196-056-P1-M1-B5.pep
SVRSPIYMMSMPMTIMVMIYIYMYMLSIYRIDFPNVTFPRLRKAA

SEQ ID NO: 101796 - protein, 84 aa, Gossypium hirsutum
  Clone ID: LIB3196-056-P1-M1-B9.pep
ERNFWTFYLEQKLMDFESTRGRHMPSNLYSRGRIGQRTDLRHLGHSWLIGRLRNGASEHRLLWILISYLSESHASLKTKQGHCL

SEQ ID NO: 101797 - protein, 77 aa, Gossypium hirsutum
  Clone ID: LIB3196-056-P1-M1-C1.pep
PTIGEIFLNIFLRTKINGLYKHKGTSYTIHSVQSGKDWTEDSSQTPGPLLTHRKAQKWCFRASSPVDPNFLLVRTPC

SEQ ID NO: 101798 - protein, 100 aa, Gossypium hirsutum
  Clone ID: LIB3196-056-P1-M1-C2.pep
SPPAAPASAAECSTAPSAPPESGLGVHRRRPPWRLGRPAGSPGRSRRSGLDPRWPAGSGEPAQTPREPPPPPQRQTTALKILSSRSGIPGTPARCQPAFT

SEQ ID NO: 101799 - protein, 69 aa, Gossypium hirsutum
  Clone ID: LIB3196-056-P1-M1-C7.pep
WLPPYETVSGALVSFLKHHRRSSLLGPTFTGKNPSFTRQCILSSLEEDQFSGLMSNLHTVIKTNFESLH

SEQ ID NO: 101800 - protein, 82 aa, Gossypium hirsutum
  Clone ID: LIB3196-056-P1-M1-C8.pep
MAESEDPSLRIVLVGKTGSGKSGTANTILGKKIFESRIAAQAVTKTCQKASREWQGRHLFVVDTPGLFDTKERLETTCREIS

SEQ ID NO: 101801 - protein, 94 aa, Gossypium hirsutum
  Clone ID: LIB3196-056-P1-M1-C9.pep
MLNIADGGFTELHSLWQNEERSATVTKKTNEIWHRRHDYWLLAAIINHGYARGQDIQNDPRYAILNEPFKGEMNRGIFLEINDKFLAQRFKLLE

SEQ ID NO: 101802 - protein, 52 aa, Gossypium hirsutum
  Clone ID: LIB3196-056-P1-M1-D1.pep
ISQFGWPSSCKPSALNTRVGSDLQPSPGFGCTVRPATHTTTSHWFPFGPTRP

SEQ ID NO: 101803 - protein, 37 aa, Gossypium hirsutum
  Clone ID: LIB3196-056-P1-M1-D4.pep
SFSHDPYSSGFNLTIITLISIRIILSSHGSGLKRIQA

SEQ ID NO: 101804 - protein, 39 aa, Gossypium hirsutum
  Clone ID: LIB3196-056-P1-M1-E4.pep
NKKIHRLRLSSPRKFIRERFPLINLGLNVVSLETDNHIN

SEQ ID NO: 101805 - protein, 115 aa, Gossypium hirsutum
  Clone ID: LIB3196-056-P1-M1-E7.pep
WVTERDPVSKNNKIKNIYFVTDRTRLENMMQVYWLGGLSSAPCPASTPWKNPTGGTGNLATRHTHPGPRPLPPSDRGRQNRKRGPICDACRRVLFELRNGLCMAITLSFRPLLQL

SEQ ID NO: 101806 - protein, 49 aa, Gossypium hirsutum
  Clone ID: LIB3196-056-P1-M1-E8.pep
NARHTTYYYIHISIFFKKIKFEKIFDLMRYINTYQFQYVLLLIKKSIHP

SEQ ID NO: 101807 - protein, 130 aa, Gossypium hirsutum
  Clone ID: LIB3196-056-P1-M1-F10.pep
EMPLDGPPAEPKKKKRMTKLKRPILSPNSDGDRQGSLNIKPQVQTGYGTCAGYRPIFRRSVNPGCGNCVWCRPFLRRSENLFDVSPGPRLSDWSIPMPLGEFPVLKLAQHDNSDQSIAYSHAGTSEPPPK

SEQ ID NO: 101808 - protein, 88 aa, Gossypium hirsutum
  Clone ID: LIB3196-056-P1-M1-F11.pep
KKSKENTSPTPLGLNFDGGDEAPTTRSQPVKGSSCYWFSEGTSMGNSVPDWEYIPELCLLTVFEKIDETISRVQFGAVSKYWHSLFNT

SEQ ID NO: 101809 - protein, 124 aa, Gossypium hirsutum
  Clone ID: LIB3196-056-P1-M1-F3.pep
MPKARVSSLQEVAMFLQASVLERDSEQQRLQDELELTRRALEERLHSPGATSTAEQGSRGEQGMHLGEVSGVEAEPSPAGMEEKQSWRQRLEHLQQAVARLEIDRSRLQRHNVQLRSTLEQVER

SEQ ID NO: 101810 - protein, 125 aa, Gossypium hirsutum
  Clone ID: LIB3196-056-P1-M1-F5.pep
SKFFLTDNLVFDSLCDLITHYQQVPLRCNEFEMRLSEPVPQTNAHESKEWYHASLTRAQAEHMLMRVPRDGAFLVRKRNEPNSYAISFRAEGKIKHCRVQQEGQTVMLGNSEFDSLVDLISYYEK

SEQ ID NO: 101811 - protein, 126 aa, Gossypium hirsutum
  unsure (1)..(126): unsure at all Xaa locations
  Clone ID: LIB3196-056-P1-M1-F9.pep
MSDILHKVRIQKMVVXAPPLDXPGHTTVLPDDMNNNAGTPVTAGDXWSQPIHLGPVLSGAGGSPGPVGTGPSSLVAAAASVAAVAGGDLGWMADTVAIITDASFLSGLSASLLXERRSDSPLDPAG

SEQ ID NO: 101812 - protein, 126 aa, Gossypium hirsutum
  Clone ID: LIB3196-056-P1-M1-G1.pep
ADASNHQTTWSPSRVKAAGAVPRLCTRSPYATLGLHWQRAPSFWTPTAPPDTALMSIFQEGGGLGSREWRGCPCHAGPGRWSLTLPPWAFGLKQIPEWECQGLPHPVLSTACPLVLAPQFCYGGSC

SEQ ID NO: 101813 - protein, 119 aa, Gossypium hirsutum
  unsure (1)..(119): unsure at all Xaa locations
  Clone ID: LIB3196-056-P1-M1-G11.pep
TRGNEKARWYPAAISGIPHTLLLNLNRRVGVRYGCHVVETVNELKKHMRWADPCPXPPEVDHTVRQKWRTFVREREQDDGISTIRSTLPGSMVNGDYVIKGNNHGFETDEEEDGQNGGF

SEQ ID NO: 101814 - protein, 46 aa, Gossypium hirsutum
  Clone ID: LIB3196-056-P1-M1-G2.pep
YYPLCVRVTISTITYFLYLTHFITHVHYDLNHFQVVWPHFTYLFMV

SEQ ID NO: 101815 - protein, 64 aa, Gossypium hirsutum
  Clone ID: LIB3196-056-P1-M1-G3.pep
SLSAIHRRKSETPSFISAMEAVILLCQLAFMWFSLFLALSLLFSIKYCPTLCVYCLAISLAYQV

SEQ ID NO: 101816 - protein, 41 aa, Gossypium hirsutum
  Clone ID: LIB3196-056-P1-M1-G5.pep
INFFNYFFYIIFIFIIIFNYLILFYFFDNYGLELLEIQMIG

SEQ ID NO: 101817 - protein, 68 aa, Gossypium hirsutum
  Clone ID: LIB3196-056-P1-M1-G6.pep
NRDLFFPVSLGFGTWSVLSKLILYSIMPSRIIHKLWKNKRIWQNCKLEDRFQEKCFNPCSKVHSLLCC

SEQ ID NO: 101818 - protein, 70 aa, Gossypium hirsutum
  Clone ID: LIB3196-056-P1-M1-G8.pep
HLKRQFLKIFGQLMGHPLTKIFQLFSCFKMPDDYLMFYIYFFTNFTHDPLRGSEFTGCGLTVSISHFQMV

SEQ ID NO: 101819 - protein, 82 aa, Gossypium hirsutum
  Clone ID: LIB3196-056-P1-M1-G9.pep
KEIGIAFCECLVSIYPSLTPRKRRRIALSRPPYALRSPEVWKSVFPFKSLQCCRIDVPFATFLSVLFMPFLMFRWFYDSPCS

SEQ ID NO: 101820 - protein, 65 aa, Gossypium hirsutum
  unsure (1)..(65): unsure at all Xaa locations
  Clone ID: LIB3196-056-P1-M1-H1.pep
MRPQMDVRGILHGCHRGWDVDRAARXYTVTVGMTLYMKRDVAYEKYSHALVEYGPDESECVVELT

SEQ ID NO: 101821 - protein, 52 aa, Gossypium hirsutum
  Clone ID: LIB3196-056-P1-M1-H11.pep
IHHPLPSIRTGRPGTAAARHPRSNFLPEEATEEAGARGGAKEEVEKNSLVKN

SEQ ID NO: 101822 - protein, 119 aa, Gossypium hirsutum
  unsure (1)..(119): unsure at all Xaa locations
  Clone ID: LIB3196-056-P1-M1-H3.pep
EGGPSTRLRKRTRKPLKQPETKPKEKKQAGKKKVKNALNSKTLSGQNSAKVRDEEVEYQCDMEGXTKSYGSKQALILHKRNICPVKGCGKKLYSQKKLVQHRRVHXDDRPFKCPWKGCK

SEQ ID NO: 101823 - protein, 116 aa, Gossypium hirsutum
  Clone ID: LIB3196-056-P1-M1-H5.pep
LWLSFRANSVLLFKSTSCSKSTSRRKAVQNKLLLAEIFSFSEVLLKSTSEKEKLKFLTFPYPKALLGWVHPLLFTFNLCLNQNSWHNSVGIIFYYFNISIRMFRCKKLNSSIFFKY

SEQ ID NO: 101824 - protein, 109 aa, Gossypium hirsutum
  Clone ID: LIB3196-056-P1-M1-H9.pep
GNKARAEGRGPATPLHLDLTQLNRLSLENSPDALDHALETSHLPFYADPYTLPATFYRRVTDVRGLEEFLSAMQSSPGPVPLSPLPLVPVSVPAFDPGSSSFGPLGPYL

SEQ ID NO: 101825 - protein, 120 aa, Gossypium hirsutum
  Clone ID: LIB3196-057-P1-M1-A10.pep
IPFVVPVASPSGDARRLTVSSLHESGLKVNQPASFAVSLNGAKGAIDAKVHRPSRALEECYVTEIDQHKYAVRFIPRENGVYLIDVKFNGTHIPGSPFKIRVGEPGHGGDPRLVSAYGAG

SEQ ID NO: 101826 - protein, 54 aa, Gossypium hirsutum
  Clone ID: LIB3196-057-P1-M1-A2.pep
GNLIQINWPWFYTFGPGKTLTLPNLLALKQIPFWPVGLIPKRPEPFAFPNICPA

SEQ ID NO: 101827 - protein, 54 aa, Gossypium hirsutum
  Clone ID: LIB3196-057-P1-M1-A3.pep
IMLISLSRVRTTYSRVINWNIFLIKTPIVALTRSLDSPIRFDSNPVDLCHPIFA

SEQ ID NO: 101828 - protein, 45 aa, Gossypium hirsutum
  Clone ID: LIB3196-057-P1-M1-A4.pep
NKSGKTVAKELVSLSSLSHEDSLMFQVAIKRENLVAEIQKRLSES

SEQ ID NO: 101829 - protein, 136 aa, Gossypium hirsutum
  Clone ID: LIB3196-057-P1-M1-A6.pep
MLTNHSSSRRTVKLHLYLSVTFYTGVTGTIFKETKKEVELAPGASDRVTMPVAYKEYRPHLVDQGAMLLNVSGHVKESGQVLAKQHTFRLRTPDLSLTLLGAAVVGQECEVQIVFKNPLPVTLTNVVFRLEGSGLQ

SEQ ID NO: 101830 - protein, 62 aa, Gossypium hirsutum
  Clone ID: LIB3196-057-P1-M1-A8.pep
SPSFQRISFLLGQPKSNQLPVVLHLVTWKNLAVPKLIGFEHNPLLASWLITKKAGTIRLSKH

SEQ ID NO: 101831 - protein, 50 aa, Gossypium hirsutum
  Clone ID: LIB3196-057-P1-M1-A9.pep
ISHLRDEYLIPVHNYVCLFLVLIFLRYSFKFHVLISVKQQYLFKSRSSMI

SEQ ID NO: 101832 - protein, 123 aa, Gossypium hirsutum
  unsure (1)..(123): unsure at all Xaa locations
  Clone ID: LIB3196-057-P1-M1-B1.pep
IDEVDSLKEALPYNGALVKRNDHYQHTLQKARNMTKVPLDSQKDXPDDRGFTDDFLRSRGGSRPGDQRTGPAMGSLFRDGPSLRGSNXDFRDPTEDDRAQRPRLQLKPRTVATPLNQVANPNS

SEQ ID NO: 101833 - protein, 116 aa, Gossypium hirsutum
  Clone ID: LIB3196-057-P1-M1-B11.pep
MAEKPKLHYLNARGRMEPIRWLLAAAGVEFEEKFLESAEDLDKLRNDGSLLFQQVPMVEIDGMKLVQTRAILNYIASKYNLYGKDIKERALIDMYTEGIVDLTEMVLLLITCQPEE

SEQ ID NO: 101834 - protein, 132 aa, Gossypium hirsutum
  Clone ID: LIB3196-057-P1-M1-B4.pep
MKQTMLESLSTEKNSLVFQLERLEQQMNSTSGSSSNGSSINMSGIDNGEGTRLRNVPVLFNDTETNLAGMYGKVRKAASSIDQFSIRLGIFLRRYPIARVFVIIYMALLHLWVMIVLLTYTPEMHHDQPYGK

SEQ ID NO: 101835 - protein, 68 aa, Gossypium hirsutum
  Clone ID: LIB3196-057-P1-M1-B8.pep
CNRPCSRVLTRTITYWYLKWSAYLCILTTGMGVCNMPTLLDLFGLTMVEGRTMRKVPVLCFDTEAYLA

SEQ ID NO: 101836 - protein, 71 aa, Gossypium hirsutum
  unsure (1)..(71): unsure at all Xaa locations
  Clone ID: LIB3196-057-P1-M1-C11.pep
KLSPKPFTIXRPSKEGANTYHSLLLALPPGNLNISNETKRSGILFSNLKGKSRWCFFKTYINSAPQPVYHS

SEQ ID NO: 101837 - protein, 76 aa, Gossypium hirsutum
  Clone ID: LIB3196-057-P1-M1-C3.pep
LNTPLNPSNHQSMVHAMFIFFFLSTNSSSHCHKSSPLLLELRPLFFYIFILLVSSSQNSSIHHSLGFMFLIHLLNH

SEQ ID NO: 101838 - protein, 130 aa, Gossypium hirsutum
  Clone ID: LIB3196-057-P1-M1-C5.pep
SLFLIVLKLQISACKIKLKVQKMVGLGSISTPMCTTSPLPSKPNPRNNFPGKLSHPLLGFHKVHSLSLSTHFSPQKNKLTQTHFTLKASSVGTADYTEEPATKVKFRTSLSVPDCSTSLSLLGTGYREKV

SEQ ID NO: 101839 - protein, 74 aa, Gossypium hirsutum
  Clone ID: LIB3196-057-P1-M1-C9.pep
NSKPGPFRSSIPVLALLTHPRCRDSPDPQVPMLLISAVVIVPRITWVDAPTTYRLTYNARASTTILRYTDAIAF

SEQ ID NO: 101840 - protein, 66 aa, Gossypium hirsutum
  Clone ID: LIB3196-057-P1-M1-D10.pep
TQRQYNLLFNFLFPRIFFMTDWGATVPLRFFTVIVNFKPLNHLGIGQAAGLDKSNIGPRDTAWRDT

SEQ ID NO: 101841 - protein, 129 aa, Gossypium hirsutum
  Clone ID: LIB3196-057-P1-M1-D12.pep
FQALEEALSIQTPPSSPPTAFGSPEGAGALLRKQELVTQNELLKQQVKIFEEDFQRERSDRERMNEEKEELKKQVEKLQAQVTLSNAQLKAFKDEEKAREANRQQKRKAKASGERYHVEPHPEHLCGAY

SEQ ID NO: 101842 - protein, 133 aa, Gossypium hirsutum
  Clone ID: LIB3196-057-P1-M1-D3.pep
TFLRAFVTELLSLFFFQGPLNIDVAPGAPQEKNGVHRKSDPEELREPQQSFSEAQQQLCNTRQEVNELRKLLEEERDQRVAAENALSLAEEQIRRLEHSEWDSSRTPIIGSCGTQEQALLIDLTSNSCRMTRS

SEQ ID NO: 101843 - protein, 55 aa, Gossypium hirsutum
  Clone ID: LIB3196-057-P1-M1-D4.pep
CFNLKVTNGAEAVSTEAKMTAFPDWPWLLHTLCDPCPMTLWLTLPEAMTTAAFCH

SEQ ID NO: 101844 - protein, 129 aa, Gossypium hirsutum
  Clone ID: LIB3196-057-P1-M1-D6.pep
MASPGRLLCVLGLLLCGAASLRLSRPHGDTAKKPIIGILMQKCRNKVMKNYGRYYIAASYVKYLESAGARVVPVRLDLTEKDYEILFKSINGILFPGGSVDLRRSDYAKVAKIFYDLSIQSFHDGDYFP

SEQ ID NO: 101845 - protein, 71 aa, Gossypium hirsutum
  Clone ID: LIB3196-057-P1-M1-E12.pep
MSMGLEITGTWLAVLGCMRTIVCCSLSMWRVTVFIGSNMMTSQTMCEGLWLNCVVQSTVLMQCKVYDSLLA

SEQ ID NO: 101846 - protein, 57 aa, Gossypium hirsutum
  Clone ID: LIB3196-057-P1-M1-E5.pep
LQHKKRTEKMADARVSVREVVVCNDRCGCPSPCPGGGSCRFIYTPPFFPSFSPYMLD

SEQ ID NO: 101847 - protein, 84 aa, Gossypium hirsutum
  Clone ID: LIB3196-057-P1-M1-E6.pep
MALLRDNVTPRENELWTSLGDSWTRPGLELPPEEGPPYRPEFFSGWEPPVTDPQGRAWEDPVEKQLQHERRRRQQSAPQVAVNG

SEQ ID NO: 101848 - protein, 128 aa, Gossypium hirsutum
  Clone ID: LIB3196-057-P1-M1-E7.pep
YTATSDESKLWHQRLGHANFKSMARMVREDLAENFINSVDHDDVCEVCQLGKQARLPFPSNQAWRASEKLQLVHTDVCGPMKTESLSGNRYFILFIDDLSRYCWIYFLKQKSEVATVFWKFKTAAETE

SEQ ID NO: 101849 - protein, 93 aa, Gossypium hirsutum
  Clone ID: LIB3196-057-P1-M1-E8.pep
MLPRVGCPALPLPPPPLLPLLLLLLGASGGGGGGAHAEVLFRCPPCTPERLAVCGPPPVAPPAAVAAVAGGARMPCAELVREPGCGCCSACAR

SEQ ID NO: 101850 - protein, 118 aa, Gossypium hirsutum
  unsure (1)..(118): unsure at all Xaa locations
  Clone ID: LIB3196-057-P1-M1-F10.pep
MANRYTMDLTGIYESLLSMIPDAPGPSDHGRTEFSPGWGSXRLCILSPCDCSTYGVTSRLAGRSTILVEGRSXGWVPPPPXLGPLAPRLSPMLXPLPTSSTRTSTTLXGYKTELCPTF

SEQ ID NO: 101851 - protein, 134 aa, Gossypium hirsutum
  Clone ID: LIB3196-057-P1-M1-F11.pep
SHSQGRGQTHAQRIPGTQGAGGCPCHPCFLAKGSYRASNCLVLAPLLTYFPPLICWGTSFVNTCQIQVQLCNLYTEDSKGSSHGSPGITKSARMQNIYRFHLLRVQYKYIKVSTAFPHSDFKTRGAFAKGCRAS

SEQ ID NO: 101852 - protein, 50 aa, Gossypium hirsutum
  Clone ID: LIB3196-057-P1-M1-F2.pep
MNNSTFSAQWVSLPIGNILIFSYRFFVLMETSLLCNKYIYFKGNNNFCLR

SEQ ID NO: 101853 - protein, 134 aa, Gossypium hirsutum
  Clone ID: LIB3196-057-P1-M1-F3.pep
SQGGLAEFNPFSETNAATTVPVTQLPGSSQPAVLQPSVEPTQPTPQAAVSAAQAGLLRQQEELDRKAAELERKERELQNTVANLHVRENWPPLPSWCPVKPCFYQDFSTEIPADYQRICKMLYYLWMLHSVTLF

SEQ ID NO: 101854 - protein, 69 aa, Gossypium hirsutum
  Clone ID: LIB3196-057-P1-M1-F6.pep
LVYLFSQGDRVVLFSQFTMMLDILEVLLKHHQHRYLRLDGKTQISERLVYFMFQKKNHSFVVVVRILNV

SEQ ID NO: 101855 - protein, 111 aa, Gossypium hirsutum
  unsure (1)..(111): unsure at all Xaa locations
  Clone ID: LIB3196-057-P1-M1-F8.pep
LLSSNALLALGSDWPVTSTYPLRAIRTAMNRIPPGWDTAWIPSERLSLNDALIAHTISAARACFRENEIGSLLTGKLADFVILSSDSWDEFATXGSTSVNATYVGGIQAYP

SEQ ID NO: 101856 - protein, 116 aa, Gossypium hirsutum
  Clone ID: LIB3196-057-P1-M1-G3.pep
MGENADPFFADRDDYIDTAEYEMLFGQFAENENAFIGKPPASKSVVENLPCVVVTQEDVVNNNALCAVCKDEVNLGEKMKQLPCAHRYHGDCIIPWLGIRNTCPVSRHELPTDDAD

SEQ ID NO: 101857 - protein, 136 aa, Gossypium hirsutum
  Clone ID: LIB3196-057-P1-M1-G4.pep
SRTQGTKIASDGLKGRVFEVSLADLQNDEVAFRKFKLITEDVQGKNCLTNFHGMDLTRDKMCSMVKKWQTMIEAHVDVKTTDGYLLRLFCVGFTKKRNNQIRKTSYAQHQQVRQIRKKMMEIMTREVQTNDLKEVV

SEQ ID NO: 101858 - protein, 90 aa, Gossypium hirsutum
  Clone ID: LIB3196-057-P1-M1-G5.pep
GHFSQPNPNFQLSVIMKPGHLYHFQMISFMLVFAPQGCWELPTRDRDCVSSLLWSPKYQPHISVSLRISIEFQTGGIGTNHTFLLRFGIP

SEQ ID NO: 101859 - protein, 56 aa, Gossypium hirsutum
  Clone ID: LIB3196-057-P1-M1-G6.pep
GLIFLSGVVVFSRYSCVIQFSFTLTLILWIINYFRHIYNEVIETNEQTVLNKAIYC

SEQ ID NO: 101860 - protein, 63 aa, Gossypium hirsutum
  Clone ID: LIB3196-057-P1-M1-H1.pep
NMSIKNGHRIFVTYIFNGTRRTETHQGRLRQHKLDLAKLKICFLWSDYDIRWQGLTIEANSGG

SEQ ID NO: 101861 - protein, 56 aa, Gossypium hirsutum
  unsure (1)..(56): unsure at all Xaa locations
  Clone ID: LIB3196-057-P1-M1-H10.pep
EVQSSYYFPSVLHSAANNQLRYGFKDHRFLLGQLSSPHNSIVWSGCIWKRGXSSKY

SEQ ID NO: 101862 - protein, 69 aa, Gossypium hirsutum
  Clone ID: LIB3196-057-P1-M1-H4.pep
ESLLSFSLLHPSSMISKWSDSRHLQEGTAPTKHCPLKVKGLERRREVKFSPLFRVASFPACSPPCSGRH

SEQ ID NO: 101863 - protein, 133 aa, Gossypium hirsutum
  Clone ID: LIB3196-057-P1-M1-H5.pep
IAPSPPPPPPPPQPAPEQQTMPPPSSPSGGAGSPGGLGLESLSPEFFTSVVQGVLSSLLGSLGARAGSSESIAAFIQRLSGSSNIFVPGADGALGFFGALLSLLCQNFSMVDVVMLLHGHFQPLQRLQPQLRS

SEQ ID NO: 101864 - protein, 59 aa, Gossypium hirsutum
  Clone ID: LIB3196-057-P1-M1-H6.pep
MLNYLIECFDRVGIEEKKAPKMCSQPAVSQLLSNIRSQCISHTALVLQGSLTQPRYEDP

SEQ ID NO: 101865 - protein, 68 aa, Gossypium hirsutum
  Clone ID: LIB3196-057-P1-M1-H7.pep
ISHSGFHLTQAKPFTLANSLSFKSDQNEDFNLGCSSIEMLILSCNEKSGHIDFSDCSQLSGIPFSVCI

SEQ ID NO: 101866 - protein, 121 aa, Gossypium hirsutum
  Clone ID: LIB3196-058-P1-M1-A2.pep
SPPSNLNRVIPTTTLPAWPPSPPPPPPQVTVEETKTSSPQNQNQNPAINDGAGISSGSPETDLSPPLLKALLDCATLADSEPERAIKSLAKLKESVSEHGDPTERVAFYFTEALHSRLSHQ

SEQ ID NO: 101867 - protein, 35 aa, Gossypium hirsutum
  Clone ID: LIB3196-058-P1-M1-A5.pep
AVDLSNKGTHSYPAVDVSLKNMFQQAKKARLSRMF

SEQ ID NO: 101868 - protein, 130 aa, Gossypium hirsutum
  unsure (1)..(130): unsure at all Xaa locations
  Clone ID: LIB3196-058-P1-M1-A9.pep
MRFLQLGAKVPKGALLLGPPGCGKTLLAKAVATEAQVPFLAMAGPEFVEVIGGLGAARVRSLFKEARARAPCIVYIDEIDAVGKKRSTTMSGFSNTEEEQTLNQLLVEMDGMGTTDHVIXLAXTNRADIL

SEQ ID NO: 101869 - protein, 127 aa, Gossypium hirsutum
  unsure (1)..(127): unsure at all Xaa locations
  Clone ID: LIB3196-058-P1-M1-B1.pep
TKSAHFIPVRIDYSLDRLADLYISEIVRLHGVPLSITSDRDLRFTLRFXNKLQEALGTKLSFSTAFHPQTDGQSGLMIQILEDMLRCCILEFQGSWEKYLPVVEFAYNNSFQTSLKMAPYEALYGRK

SEQ ID NO: 101870 - protein, 58 aa, Gossypium hirsutum
  Clone ID: LIB3196-058-P1-M1-B12.pep
CVSTTPISFIMIRNTFYLLLKLLYDFICVFTDKVFEGFFNYKFYCWTFQIPIGDMALN

SEQ ID NO: 101871 - protein, 34 aa, Gossypium hirsutum
  Clone ID: LIB3196-058-P1-M1-B8.pep
GPFQLQSLGPVFLNTPLHSLTGFENKPSLTQMLT

SEQ ID NO: 101872 - protein, 66 aa, Gossypium hirsutum
  Clone ID: LIB3196-058-P1-M1-B9.pep
PCYGLSRNLITVPMPCPRHGLIRDLISMPMPYSRYGFTWDLILMSMPCPRRGIIWDHLSMSMPYPI

SEQ ID NO: 101873 - protein, 112 aa, Gossypium hirsutum
  Clone ID: LIB3196-058-P1-M1-C11.pep
GSRNVMAVVPASLSGQDVGFVLLFSSPLLRKAGPHQEPVGTKRRALALRWAAFESRRRARLPRTPLRVSRTGSEARGGGPGEGARPRWLLVRIRTGLSFAVCSWRSLFIYSL

SEQ ID NO: 101874 - protein, 85 aa, Gossypium hirsutum
  Clone ID: LIB3196-058-P1-M1-C2.pep
NPPLFSDWKAQIEPRNRQYLLRLQQLPVNSVFKCCWLFLPMEKGVPSSLFVNDGSFMERFKQLQQQKDDKDKAAALEESKPPKVV

SEQ ID NO: 101875 - protein, 93 aa, Gossypium hirsutum
  Clone ID: LIB3196-058-P1-M1-C4.pep
GPVLCAGGRTEGEKSPQITGDPDKFRDSRPLKGDNQSSQGSGVPSNLGYQADPLEGLCSWFCPVLLTPSRFWEHGPPPCPRAWSPSRMCAPPV

SEQ ID NO: 101876 - protein, 107 aa, Gossypium hirsutum
  Clone ID: LIB3196-058-P1-M1-C5.pep
ATQKLLSSSLLPATLPCMLFQRALQILLVLGCQQIFRYASLRPCLNLLHIVASEDMHSRAYLPSLTNSCSYSVTDIQPCFSSRNSFLCGSMNLWLIYLFRNSAWKNS

SEQ ID NO: 101877 - protein, 85 aa, Gossypium hirsutum
  Clone ID: LIB3196-058-P1-M1-C8.pep
GNLPCLCCFQVLFLPRVSRSSNSVGVLKTGALVSRLKRSTIITHARPFSLPETSAASASAMAEIPIRYQVCCLCVDPPVLYMCSC

SEQ ID NO: 101878 - protein, 52 aa, Gossypium hirsutum
  Clone ID: LIB3196-058-P1-M1-D1.pep
FVPHLKLLLLIMYEFYTDISYYYCAQQLFIKINSLYLTDCHPPFLKKKNFKR

SEQ ID NO: 101879 - protein, 126 aa, Gossypium hirsutum
  Clone ID: LIB3196-058-P1-M1-D2.pep
GRVGFPSSNNARNNADSSEDDDDDSPVARDETRRLGAALEEERALSAREAAAAQEAATVAETNARPIGSTEEPVRMSLMDFLEETERQMGLTVSKCTTGDADADDEENEEKDKAEGSGGMEQTCCV

SEQ ID NO: 101880 - protein, 56 aa, Gossypium hirsutum
  Clone ID: LIB3196-058-P1-M1-D5.pep
LGCSAFVTSTTVYLTRILALSVPWPAERSRAKGMIGSLDRSQAIFKKTNPFSHLFF

SEQ ID NO: 101881 - protein, 75 aa, Gossypium hirsutum
  Clone ID: LIB3196-058-P1-M1-D8.pep
RWQKACSGSLLDKWNPNQLKWAGRVESSTAFCSITSNGEWLVCILHLHFSIQELRALLVIITLVVYQLIGAPTWP

SEQ ID NO: 101882 - protein, 54 aa, Gossypium hirsutum
  Clone ID: LIB3196-058-P1-M1-E12.pep
VLLTIFYLTMALRADTSLAEQREPRGQQKGLWVENLGSSLGSDAGEREESGSAC

SEQ ID NO: 101883 - protein, 62 aa, Gossypium hirsutum
  Clone ID: LIB3196-058-P1-M1-E3.pep
TYLIINNSIHSIENFPKKIIKMISINTYISLNREKVYSILFKIILSRTRGRTRGRTRGRTRG

SEQ ID NO: 101884 - protein, 118 aa, Gossypium hirsutum
  Clone ID: LIB3196-058-P1-M1-E6.pep
IEIADTMVQIFKGLQERFQTEIQTVNKQFPCEPFKFLEPTLRLEYCEALAMLKEAGVEMGDEDDLSTPNEKLLGHLVKEKYDTDFYILDKYSLAVRPFYTMPDPRNSKQSNSYDMFMR

SEQ ID NO: 101885 - protein, 65 aa, Gossypium hirsutum
  Clone ID: LIB3196-058-P1-M1-F1.pep
MKMACSRCNRKFHLHLYCMTCAHNCIGVIRAFVSIFYASRLLCLDPIKLLIYLSRRIIIRIINNI

SEQ ID NO: 101886 - protein, 53 aa, Gossypium hirsutum
  Clone ID: LIB3196-058-P1-M1-F12.pep
THITTNGNTLYYSYLKLPIGPAQLINKRIMHFNPLKLMCFCISINAHAHTAKT

SEQ ID NO: 101887 - protein, 42 aa, Gossypium hirsutum
  Clone ID: LIB3196-058-P1-M1-F2.pep
VDLHAQEGVDHGSNGVVQLHFRVLVFEFPRVPPSDCVVHSSG

SEQ ID NO: 101888 - protein, 132 aa, Gossypium hirsutum
  unsure (1)..(132): unsure at all Xaa locations
  Clone ID: LIB3196-058-P1-M1-G1.pep
IRNSLTYLTVSSVHVTLSRNIGFLKISHSPVVKTLIDSKEGLYRRLHSFQFLMIVSGGASPAQRPHPSPVSRDPPLPGGGVSRGWGSRDGRFLCRPAAWSPAWVRGLSLAMPLXRHSAPCDMGFESHCSCFS

SEQ ID NO: 101889 - protein, 55 aa, Gossypium hirsutum
  Clone ID: LIB3196-058-P1-M1-G11.pep
RGLKCQKLPRLLIHILVITTDQVNFLCKIHYILIEQENHYFRPLTGENPQQKKHL

SEQ ID NO: 101890 - protein, 85 aa, Gossypium hirsutum
  Clone ID: LIB3196-058-P1-M1-G12.pep
GPSPIRGSTKSYTPQYHHIAVSEFRSSPLWSSRISSRLLMACFYRHGGQLSADAVGVEAQISSYRAIRHQSSISLFPMFFASLKP

SEQ ID NO: 101891 - protein, 42 aa, Gossypium hirsutum
  Clone ID: LIB3196-058-P1-M1-G8.pep
ILFFSSDLWSQDYYFDFTKIGLLHSKYTRKKYHIEHQKHKLN

SEQ ID NO: 101892 - protein, 85 aa, Gossypium hirsutum
  Clone ID: LIB3196-058-P1-M1-G9.pep
IDWLKGLKENVVLGGMIPAGTGFKGLVHRSRQHNNILLETKKKNFFGGEMRDIFFHHRELFDSCISNNLHDTSGRSFIGIEFNDS

SEQ ID NO: 101893 - protein, 103 aa, Gossypium hirsutum
  unsure (1)..(103): unsure at all Xaa locations
  Clone ID: LIB3196-058-P1-M1-H1.pep
PLLKIETNNPSLLAGNWCQLCATCKIVRPLRAKHCFTCDRCVEQIDHHCPWVSNCVGKRNKWDFILFLDLEGXAMLVTCGGTIARIVXDPVAPSSFLPWMNYA

SEQ ID NO: 101894 - protein, 103 aa, Gossypium hirsutum
  unsure (1)..(103): unsure at all Xaa locations
  Clone ID: LIB3196-058-P1-M1-H3.pep
YYKLQADFFSDHLGCVTKCRKPCSVTSYQLXAGYSRWTSVTSQEWVFEMLSRQNNYTINNKRNGVAKVNIFFKELNYKTNSESPSVTMVTLLSNLGSQWSLWF

SEQ ID NO: 101895 - protein, 48 aa, Gossypium hirsutum
  Clone ID: LIB3196-058-P1-M1-H7.pep
LYYERHYVVILPAASSFHQIQVVNPIHAIRYVNEGKLSIYFVADNGVN

SEQ ID NO: 101896 - protein, 37 aa, Gossypium hirsutum
  Clone ID: LIB3196-058-P1-M1-H9.pep
NSRDIGKTHRVSFESLISHKQINHFNDIYKPISLNRI

SEQ ID NO: 101897 - protein, 63 aa, Gossypium hirsutum
  Clone ID: LIB3196-059-P1-M1-A12.pep
KLAARLLLFLLLIFSHHFLLSFFHHKLTCSLQTAAKLAIHYQRGQNNILKASGKSLKFYLKRI

SEQ ID NO: 101898 - protein, 63 aa, Gossypium hirsutum
  Clone ID: LIB3196-059-P1-M1-A3.pep
MSFKDLRIYCQGHGTERWTLTVCRALTKLYIITHSKRSELESGSPTGRVISHTTYSTLLSNSV

SEQ ID NO: 101899 - protein, 118 aa, Gossypium hirsutum
  Clone ID: LIB3196-059-P1-M1-A5.pep
MAARRGALIVLEGVDRAGKSTQSRKLVETLCAAGHRAELLRFPERSTEIGKLLSSYLEKKSDVEDHAVHLLFSANRWEQVPLIKEKLSQGVTLIVDRYAFSGVAFTGAKENFSLDWGK

SEQ ID NO: 101900 - protein, 120 aa, Gossypium hirsutum
  Clone ID: LIB3196-059-P1-M1-A6.pep
DPRVRRHIYRGTPRRHLLTTGWSAFVNRKKLVAGDSVVFLRAENGGIRVGIRRAKLGIGDGDCYGSLGFCGNSKGNGKVKPEEVLEAAKAASGGRKPFEVAYYPRTRGPEFCVKASAVNT

SEQ ID NO: 101901 - protein, 72 aa, Gossypium hirsutum
  Clone ID: LIB3196-059-P1-M1-A8.pep
AAAAVSLRGVVLGPRGAGLPGARARGLLCSARPGQLPLRTPQAVALSSKYGLSRGRKVMLSALGMLAARGAG

SEQ ID NO: 101902 - protein, 87 aa, Gossypium hirsutum
  unsure (1)..(87): unsure at all Xaa locations
  Clone ID: LIB3196-059-P1-M1-A9.pep
KYLRRTKDTFLIYGGEEELSVKGXTDASFQIDKDDSRSQSSFVFCLNGGAVSWKSSKXSTVADSITEAXYIAASEAANEAVWIKKFI

SEQ ID NO: 101903 - protein, 80 aa, Gossypium hirsutum
  Clone ID: LIB3196-059-P1-M1-B11.pep
PFPISPLGCFSLTLSPCPPPFFSQFEFTSSSNPPPVLHRSKTRPPRLHPFPESEVRYSVFDRRLSIQQKSRSQVWGCLIL

SEQ ID NO: 101904 - protein, 38 aa, Gossypium hirsutum
  Clone ID: LIB3196-059-P1-M1-B2.pep
ISKAIIRCGGGNATLSKKDYDFTPFRLLMLALSPRCAK

SEQ ID NO: 101905 - protein, 51 aa, Gossypium hirsutum
  Clone ID: LIB3196-059-P1-M1-B4.pep
ISITANNPTAQYHYKVVDLTNHNISSLLGHAHMMLIPKEMLTTKIKSLLLN

SEQ ID NO: 101906 - protein, 48 aa, Gossypium hirsutum
  Clone ID: LIB3196-059-P1-M1-B7.pep
TIVLRLEETLCTQNTLFYIMHIITRDKKLSISSLIDKSIKTLYRMILP

SEQ ID NO: 101907 - protein, 70 aa, Gossypium hirsutum
  Clone ID: LIB3196-059-P1-M1-B9.pep
KCITVILFSKDNTHIINEQSIVIQFFLKTPNKRSSFLKVLFSHKQKEENKKQIIKILLIIHLLYLSTLKS

SEQ ID NO: 101908 - protein, 43 aa, Gossypium hirsutum
  Clone ID: LIB3196-059-P1-M1-C3.pep
VYVFGLFRSPKMKINIEHILSKFYQGQNHQNFIDGKIVKILLG

SEQ ID NO: 101909 - protein, 68 aa, Gossypium hirsutum
  Clone ID: LIB3196-059-P1-M1-C8.pep
NLGRVVWKKTYRGCFWNEYIRDPDFIIKGEDMLGGVMKGLRQVLFWNPAAWEAWVGVSLKSGVGGSKL

SEQ ID NO: 101910 - protein, 37 aa, Gossypium hirsutum
  Clone ID: LIB3196-059-P1-M1-C9.pep
ASHFRMALHTYSFKIINSKTSLYMPYNRVSKYYLLKC

SEQ ID NO: 101911 - protein, 58 aa, Gossypium hirsutum
  Clone ID: LIB3196-059-P1-M1-D11.pep
HASGENEFTRFMLPFMNLHAIKVFNYEDTCSIQVHERPKEMNATFWCTYKSFEAFLYD

SEQ ID NO: 101912 - protein, 52 aa, Gossypium hirsutum
  Clone ID: LIB3196-059-P1-M1-D3.pep
FFRANFSLYICLKWRRFTAQPDDPIRCPQDPRVSAVKVYLRIRSLPGLPPSD

SEQ ID NO: 101913 - protein, 103 aa, Gossypium hirsutum
  Clone ID: LIB3196-059-P1-M1-E1.pep
MGKEKTHINIVVIGHVDSGKSTTTGHLIYKCGGIDKRTIEKFEKEAAEMGKGSFKYAWVLDKLNAERERGITIDISLWKFETTKYYITIIDAPGHRDFIKNMI

SEQ ID NO: 101914 - protein, 66 aa, Gossypium hirsutum
  Clone ID: LIB3196-059-P1-M1-E5.pep
YLIQMAPPLQKPSLITTPPSYGRFNNYLISWGPVIVGEKRPYEWRFHLHLNFNQGCLAFGWLKFWD

SEQ ID NO: 101915 - protein, 127 aa, Gossypium hirsutum
  Clone ID: LIB3196-059-P1-M1-E6.pep
MKLRKLEERFYQMTGEAWKLSSGHKLGGDEGTSQSSFETSNREAAKSQNLPKPLTEFPSPAVQPTCKEIPDLPEEPSQTAEEVVTVALRCPSGNVLRRRFLKSCSSQVLLDWMMRIGYHTSLYSLST

SEQ ID NO: 101916 - protein, 67 aa, Gossypium hirsutum
  Clone ID: LIB3196-059-P1-M1-E7.pep
CHPPWPCGHQPRSVGLTQSAELRTHNFKKGLLHCCLKCSSYSRRDHTLHRKTPSVIALLNVLCLVFD

SEQ ID NO: 101917 - protein, 126 aa, Gossypium hirsutum
  unsure (1)..(126): unsure at all Xaa locations
  Clone ID: LIB3196-059-P1-M1-E9.pep
VINGGVPETXELGKERFDHILYTGSTGVGKIVMTAAAQHLTPVTLELGGKSPCYVDKNCGLDVACRRIAWGKFMNSGQTCVAPDYILCDPSIQNQIVEKLKKSLKEFYGEDAKKSRDYGRIISARH

SEQ ID NO: 101918 - protein, 51 aa, Gossypium hirsutum
  Clone ID: LIB3196-059-P1-M1-F10.pep
RTRGLGHGLSFLMDVDEKKHIYIKLVKLKFKICIWLEYYFIKKYKIKIFSY

SEQ ID NO: 101919 - protein, 90 aa, Gossypium hirsutum
  Clone ID: LIB3196-059-P1-M1-F11.pep
LTAIAGGSRFSWFLAISSVVVEVSSSCSFSMYLKLHFISLWFLRTVRSISSSKSSGPDRFLLVINYKNLPREKKSKLINSNTNKIKLTCK

SEQ ID NO: 101920 - protein, 113 aa, Gossypium hirsutum
  unsure (1)..(113): unsure at all Xaa locations
  Clone ID: LIB3196-059-P1-M1-G3.pep
LLSADVPIPIMRFLIHLSGGFWGVDAAYQSAPGEVLGTDLRAXTCPRVCGLVSQEIXMAFADFCSPGVRMDILLQVCSKQLAPWNLSXEDFLQNPYLSKLFLNLSQHVDESGL

SEQ ID NO: 101921 - protein, 83 aa, Gossypium hirsutum
  Clone ID: LIB3196-059-P1-M1-G5.pep
QDMIFKVTSTQIGSLSGKYLISGLKSVNTSCSTPTTVSGSGCYSLYVNNVLFYYVIIFYFVTCEISFSIVQLMETNGDLWLMN

SEQ ID NO: 101922 - protein, 51 aa, Gossypium hirsutum
  Clone ID: LIB3196-059-P1-M1-H11.pep
RLNIRSMSTEKNYFSRHVLHEMYESTWIDVPQKDSIILCIATSLHYRLMIC

SEQ ID NO: 101923 - protein, 73 aa, Gossypium hirsutum
  Clone ID: LIB3196-059-P1-M1-H7.pep
PGAKNKVSQSHERMLFRDTPGWNCLVICWSLPRFSSAHQGGASKQERTYLSEEMRRGTCFGTVLQRGRRGARA

SEQ ID NO: 101924 - protein, 85 aa, Gossypium hirsutum
  Clone ID: LIB3196-064-P1-M1-A1.pep
GLKGEDSTSSFSRFSFARQKCLFRDSAFLEPSFHMNALSKCTSYIQDVGCFRAHKVSDKLIMKGLSQFKSVKNALKEFISSNYLP

SEQ ID NO: 101925 - protein, 52 aa, Gossypium hirsutum
  Clone ID: LIB3196-064-P1-M1-A11.pep
NLLELTPKLKQGMIHLQINLFTLVLNCTLKFYSSFRSLNGYLRLIRPFLRFL

SEQ ID NO: 101926 - protein, 96 aa, Gossypium hirsutum
  Clone ID: LIB3196-064-P1-M1-A2.pep
LKTLTHLLDKTILMRKKHNGKKKRFFTTKHLHALHKAFCNQPTRSLCPYVPIDSNSVNMKCELKTNGYQISRRSYSPAIVMDRSHGRAWQPLLSMI

SEQ ID NO: 101927 - protein, 45 aa, Gossypium hirsutum
  Clone ID: LIB3196-064-P1-M1-A5.pep
FHVLYSGELRIAKRARNGPKMDKLGLNQCCTRLRHFHTGNPHAIV

SEQ ID NO: 101928 - protein, 120 aa, Gossypium hirsutum
  Clone ID: LIB3196-064-P1-M1-A7.pep
ISSLREQLPPTTVQTIVKRCGLPSSGKRRAPRRVYQIPQRRRLQGKDPRWATMADLKMQAVKEICYEVALADFRHGRAEIEALAALKMRELCRTYGKPDGPGDAWRAVARDVWDTVGEEE

SEQ ID NO: 101929 - protein, 77 aa, Gossypium hirsutum
  Clone ID: LIB3196-064-P1-M1-A8.pep
TKGCFCYFYTERSCDPITTYNELNVKEKKKDACWIWPKMIFFFIPMYFFSNMTERFIQKNMTLELTPTHQEQRLDYY

SEQ ID NO: 101930 - protein, 96 aa, Gossypium hirsutum
  Clone ID: LIB3196-064-P1-M1-B10.pep
MLTLPLSPPSRKMATNFLVHEKIWFDKFKYDDAQRRFYEQMNGPVAGASRHENGASVILRDIARARENIQKSLAGTSCPGASIGPSGDHRELVVRI

SEQ ID NO: 101931 - protein, 110 aa, Gossypium hirsutum
  Clone ID: LIB3196-064-P1-M1-B11.pep
MGSNTKLILALLGLLITTATVATGYTNHTVGGDAGWFFHSKTNTSATNYTFWAANQTFSLGDYLIFRTTTYQTVIQTYNETTYRNCTTDDASDTDTFQYNGGNTDFDQSL

SEQ ID NO: 101932 - protein, 58 aa, Gossypium hirsutum
  Clone ID: LIB3196-064-P1-M1-B3.pep
KLAKQCDSNEVIKALCDEAGRTVEPDGTTYRKGCKPSERMDVRKWITKQRASFYITTQ

SEQ ID NO: 101933 - protein, 63 aa, Gossypium hirsutum
  Clone ID: LIB3196-064-P1-M1-B9.pep
NVFKVLTYGGGDHTFPTCFFRQNFVGAGGLLLASENICFPIGDGQNYWVGWEDGRQQLVEGAL

SEQ ID NO: 101934 - protein, 100 aa, Gossypium hirsutum
  Clone ID: LIB3196-064-P1-M1-C1.pep
MASPWEKLIPRARGTLRQGDGDAGSVESSRLSWKRGREQHLQCLLWGGGHVSTVRHWWTQCVRAGLAHGTGWCCLKLANCLLPQGNLKIRCGFASNSCNL

SEQ ID NO: 101935 - protein, 62 aa, Gossypium hirsutum
  unsure (1)..(62): unsure at all Xaa locations
  Clone ID: LIB3196-064-P1-M1-C11.pep
PXXFKFLVFTFYXIYIXYVFYINFSIFFTNICTCIYVFEYIRMQIFTIYLCLYTYTFYFSIL

SEQ ID NO: 101936 - protein, 46 aa, Gossypium hirsutum
  unsure (1)..(46): unsure at all Xaa locations
  Clone ID: LIB3196-064-P1-M1-C12.pep
IYTIFCDFTKSHHCYCPKQYYCKFTLSQLSFVLTXILTIHITKSFS

SEQ ID NO: 101937 - protein, 36 aa, Gossypium hirsutum
  Clone ID: LIB3196-064-P1-M1-C3.pep
AFSLKQRSPSNSFHTILGDSYKSCRCRNLECVPIRV

SEQ ID NO: 101938 - protein, 80 aa, Gossypium hirsutum
  Clone ID: LIB3196-064-P1-M1-C5.pep
NRFTFKKPKENHKLRKNFPIIFSQSRKETTSLHLTMCDATLSVTDLPIIQVLKIKTLSANQNFNPYKKKTFSNILLFFTK

SEQ ID NO: 101939 - protein, 129 aa, Gossypium hirsutum
  Clone ID: LIB3196-064-P1-M1-C6.pep
ISYLSSGCHSSGFVGSGGWFCEGSFNGSEKETMQFLNDRLANYLEKVRQLERENAELESRIREWYESQIPYICPDYQSYFKTIEDFQQKILLTKSENARLVLQIDNAKLAADDFRTKYETELSLRQLVE

SEQ ID NO: 101940 - protein, 124 aa, Gossypium hirsutum
  Clone ID: LIB3196-064-P1-M1-D10.pep
IRDGLKLMLLLEVISGERLPKPERGKMRVHKINNVNKALDFIASKGVKLVSIGAEEIVDGNAKMTLGMIWTIILRFAIQDISVEETSAKEGLLLWCQRKTAPYKNVNVQNFHISWKDGLCLNAL

SEQ ID NO: 101941 - protein, 47 aa, Gossypium hirsutum
  Clone ID: LIB3196-064-P1-M1-D12.pep
MRVSGVLRLLALIFAIITTWIFVRSYMSFSMKTIRLPRWLAPPSTKE

SEQ ID NO: 101942 - protein, 44 aa, Gossypium hirsutum
  Clone ID: LIB3196-064-P1-M1-D4.pep
NIDGCSCSTQKVYKTINRQLIIRVPIRALNQGAHSRATYQNAQL

SEQ ID NO: 101943 - protein, 115 aa, Gossypium hirsutum
  unsure (1)..(115): unsure at all Xaa locations
  Clone ID: LIB3196-064-P1-M1-D5.pep
HPRLSTPRNHARAMRRRGPRRLQPLRTEXPPRPAHGPRGGQRGAVGAPQTLEAEAERKALVEAHAGPQPEDEPQYSMEAKPEEHQPQDKRSPLHGRAGATGIIFQRGGLPADHRT

SEQ ID NO: 101944 - protein, 74 aa, Gossypium hirsutum
  Clone ID: LIB3196-064-P1-M1-D7.pep
GWWHGVLSLSGFLLWEKESRLHLSLPLASGMPCAFSGTRFNSFNLSIAPSAPAEGTIIHSAEHPNQAAVISWKL

SEQ ID NO: 101945 - protein, 118 aa, Gossypium hirsutum
  Clone ID: LIB3196-064-P1-M1-E11.pep
MCIDYRKLNSQTRKDHFSIPFIDQMIERLAGKTHYCCLDGFFGFFQVPVAPEDQEKTTFTCPFGTFAYRRMPFGLCNAPVTFQRCMLSIFSDHIERGIEVFMDDFTIYGNLFSQCGRV

SEQ ID NO: 101946 - protein, 118 aa, Gossypium hirsutum
  Clone ID: LIB3196-064-P1-M1-E12.pep
CGGCGGTGAVGGGGAGQASAGAATGATGASGGGGPINPTSLAPCDPQIIALIVEHLKSRRLFDSFRPYCLADVVTKPAHQNLMQKVDNFVSTHLDQPEWNPTMNKNQLRNGLRQSVVQ

SEQ ID NO: 101947 - protein, 64 aa, Gossypium hirsutum
  Clone ID: LIB3196-064-P1-M1-E3.pep
KVENWRKCLITLKTKRESNLSNVKDENLKPFMVWPSSSPPIAESPTKDYLKILKEGVSLRKLSV

SEQ ID NO: 101948 - protein, 128 aa, Gossypium hirsutum
  Clone ID: LIB3196-064-P1-M1-E6.pep
MRADWLCGRVSETGSACSMADQLTEEQIAEFKEAFSLFDKDGDGTITTKELGTVMRSLGQNPTEAELQDMINEVDADGNGTIDFPEFLTMMARKMKDTDSEEEIREAFRVFDKDGNGYISAAELRHVM

SEQ ID NO: 101949 - protein, 80 aa, Gossypium hirsutum
  Clone ID: LIB3196-064-P1-M1-E7.pep
MVTGKWLQSKILNLSLPPPFKSLITKNGNLIWPVGTFDNCQHFIPTRWFSMISFIPPIRVEEVPGCLEEALNKLLNASNG

SEQ ID NO: 101950 - protein, 83 aa, Gossypium hirsutum
  Clone ID: LIB3196-064-P1-M1-E9.pep
ATAGASSCTSSDTRRRRFDPSSFQQRAEALEGLLEFSARLLQQERYDELGVLLKPFGPGKVSPRETAIWLTKSFKENTVKPED

SEQ ID NO: 101951 - protein, 92 aa, Gossypium hirsutum
  Clone ID: LIB3196-064-P1-M1-F2.pep
GPEVFWISDSGISAYIQWDLTNYIIQVSHPPYTYSLKVIYITFLIILCKKQNPFKLNHQKAKVSGGEFSTCGVKSVLRKIQILKLLDFRFLN

SEQ ID NO: 101952 - protein, 130 aa, Gossypium hirsutum
  Clone ID: LIB3196-064-P1-M1-F4.pep
CRHILLQYLILFQYLKGQVKFKSSNYVLTDEQSLWIEDTTKSVYQLLSENPPDGERFSKMVEHILNTEENWNSWKNEGCPSFVKERTSDTKPTRIIRKRTAPEDFLGKGPSKKILMGNEELTRLWNLCPD

SEQ ID NO: 101953 - protein, 53 aa, Gossypium hirsutum
  Clone ID: LIB3196-064-P1-M1-F5.pep
YIHKARSRKSQKFVLIIMRTILGHDLGGPMNKFPKVQPNPFLFLPDLVTFVKV

SEQ ID NO: 101954 - protein, 39 aa, Gossypium hirsutum
  Clone ID: LIB3196-064-P1-M1-F6.pep
SIHGLAFNVHPCIYPMHVFVPLLNLPVHAPAFPLCSFIR

SEQ ID NO: 101955 - protein, 39 aa, Gossypium hirsutum
  Clone ID: LIB3196-064-P1-M1-F7.pep
STKNTLRMMLKHTNFSSYQISPQLSICLSLSKTLNPYSS

SEQ ID NO: 101956 - protein, 78 aa, Gossypium hirsutum
  Clone ID: LIB3196-064-P1-M1-F9.pep
GTIYIQNSLEMHCNFTSLTIFNHKVSVTNELQIQRSPSNLVLSGPLNMSKAHNVGIYKVFLRLPAPEKSHLHSFRLTT

SEQ ID NO: 101957 - protein, 89 aa, Gossypium hirsutum
  Clone ID: LIB3196-064-P1-M1-G3.pep
EPSPLLLSPDINFNVSGLFSAVTLQDTVSDRLASEELSPTAVPTPTTTPASAPAPVPAPALASAATKERTESEVPPRPAFPKVTRSPPE

SEQ ID NO: 101958 - protein, 89 aa, Gossypium hirsutum
  Clone ID: LIB3196-064-P1-M1-G4.pep
AMDLMHHSSTFLLPTIPLHHRPSLTYALVVLNQTLPRFAPLLWKHAQLRLCADGGANRVFDEMPLLFPEEDASDVRRRYKPDVINGDMD

SEQ ID NO: 101959 - protein, 128 aa, Gossypium hirsutum
  Clone ID: LIB3196-064-P1-M1-G6.pep
GILALSHTISPFMNKFFPATFPNRQYQLLFTQGSGENKEEIINYEFDTKDLVCLGLSSIVGVWYLLRKHWIANNLFGLAFSLNGVELLHLNNVSTGCILLGGLFIYDVFWVFGTNVMVTVAKSFEAPI

SEQ ID NO: 101960 - protein, 74 aa, Gossypium hirsutum
  Clone ID: LIB3196-064-P1-M1-G7.pep
GRVGKNQIPNFYFICSLNRIHLPCSQTLFNDFFSLVKHIIFHLKIYFPTNLTYSEVECYFSIKLIFSSLLSNCS

SEQ ID NO: 101961 - protein, 127 aa, Gossypium hirsutum
  Clone ID: LIB3196-064-P1-M1-G8.pep
MSLARYGKSPYLYPLYGLGELPQGFARLSAIYGGTYMLNKPIEEIIVQNGKVIGVKSEGEIARCKQLICDPSYVKDRVEKVGQVIRVICILSHPIKNTNDANSCQIIIPQNQVNRKSDIYVCMISFA

SEQ ID NO: 101962 - protein, 46 aa, Gossypium hirsutum
  Clone ID: LIB3196-064-P1-M1-H1.pep
TAPDAAEALHEAGEGELPTAGGHGPKEGGERASSRLKKRKVLRKFD

SEQ ID NO: 101963 - protein, 115 aa, Gossypium hirsutum
  Clone ID: LIB3196-064-P1-M1-H10.pep
HACAHASARNSDFRHRAFSFLFAEGENEEINASQTVDSHSFPQHFIKSKDEFGLAPAAVVVTRKELYDSSSALKSLDYNRQIRPESPIIAARKMKGSILKENENPDFVTNPYQAI

SEQ ID NO: 101964 - protein, 129 aa, Gossypium hirsutum
  Clone ID: LIB3196-064-P1-M1-H3.pep
MSSRLIYTLRCGVFATFPIVLGILVYGLSLLCFSALRPFGEPRREVEIHRRYVAQSIQLFILYFFNLAVLSTYLPQDTLKLLPLLTGLFAISRLIYWLTFAVGRSFRGFGYGLTFLPLLSMLMWNLYYM

SEQ ID NO: 101965 - protein, 57 aa, Gossypium hirsutum
  unsure (1)..(57): unsure at all Xaa locations
  Clone ID: LIB3196-065-P1-M1-A3.pep
RGEESRRRPIGGRGRGPIPSPRSTXSYLSYSFILLLNYPISSPYILLLTFVLQPLDY

SEQ ID NO: 101966 - protein, 102 aa, Gossypium hirsutum
  Clone ID: LIB3196-065-P1-M1-A5.pep
QLPQWLSSMEITYVINTIYNTPSAHLTHPPPSYMTYPSPSAPSTLFWAPTTHSPQIICVPFVHFPDVPACLSPCHKMQHYTRSQHYDRADSFTLVACLIACM

SEQ ID NO: 101967 - protein, 115 aa, Gossypium hirsutum
  Clone ID: LIB3196-065-P1-M1-A9.pep
PPTRTLFFLRRLVNARVKAGLGGRGDPSASIALEVARVQLASLFWVAHTSDPWCLGSIPYLCRASGGGKPETGLQEEGQKGTGLKDQKAGRWGEEEVVLSVSLQRGSRVQICISH

SEQ ID NO: 101968 - protein, 127 aa, Gossypium hirsutum
  unsure (1)..(127): unsure at all Xaa locations
  Clone ID: LIB3196-065-P1-M1-B10.pep
RPRVRPRVRKHRTPASYADVFNPRGGXRITTAHSFNLSILQYLQLSAWRGDLYNNALYAHHWNMNAHSIVYITWGDGWIQIESEHGEALFYEQVERGPGISVLXNDAVLKKAXRRGFEWIAFKTYAN

SEQ ID NO: 101969 - protein, 67 aa, Gossypium hirsutum
  Clone ID: LIB3196-065-P1-M1-B11.pep
IVEIIFKFFLANVSILEGKLEPFEEGCRFFMFPRLLRTSTRHVLSFHLSSLFASLIFDLLFYFSYLF

SEQ ID NO: 101970 - protein, 67 aa, Gossypium hirsutum
  Clone ID: LIB3196-065-P1-M1-B4.pep
PLLSRHPSPVGSPKFQIMTRMTTRKAVVAIVFLISEENPKKSQVTPFFFLSLFLPVPVARILISQSV

SEQ ID NO: 101971 - protein, 135 aa, Gossypium hirsutum
  Clone ID: LIB3196-065-P1-M1-B6.pep
MARVPGPMGPNSGPGSRGIGLPGPNPSPMSRAPGPIGPNSAHFSRPGGPMGVNANSFPRGAGSSAFSQSSGTLASNPATFQRSAGLQGSNPTIFPRASGPLGPNPANFPRATGLQGPSPTTFPRSTGPLGPGQVT

SEQ ID NO: 101972 - protein, 132 aa, Gossypium hirsutum
  Clone ID: LIB3196-065-P1-M1-B7.pep
IDDNRGLEQGVQDNKITANLFRILLEKRSAVNTEEEKNSVSYPSLLSHITSSFMNHPVFPMTNKFSSPTLDLQGEFSPLQSSLPCDIHLVNLRTIQSKVGSGHSNEAALILHRKGFDCRFSSKGTGLFCSTT

SEQ ID NO: 101973 - protein, 123 aa, Gossypium hirsutum
  Clone ID: LIB3196-065-P1-M1-B9.pep
VLVKKIEWEPKRMKVAIEFITQMGNARHRNLIRLLGFCYNNHMAYMLYDYLPNGNLAEKVTMPRDWSTKCRIITGIARGLCFLHHDWNPAISHGDLNSSTIVFDDNFEPRLADFGFKYLIELI

SEQ ID NO: 101974 - protein, 39 aa, Gossypium hirsutum
  Clone ID: LIB3196-065-P1-M1-C1.pep
IMAYLKDIIIQQISHNYSSNIACIVIIICQKSDDITLDQ

SEQ ID NO: 101975 - protein, 66 aa, Gossypium hirsutum
  Clone ID: LIB3196-065-P1-M1-C12.pep
MAVPETRPNHTIYINNLNEKIKKDELKKSLYAIFSQFGQILDILVSRSLKMRGQAFVIFKEVSSAT

SEQ ID NO: 101976 - protein, 131 aa, Gossypium hirsutum
  Clone ID: LIB3196-065-P1-M1-C3.pep
SKEQVANSAFVERVRKRGFEVVYMTEPIDEYCVQQLKEFDGKSLVSVTKEGLELPEDEEEKKKMEESKAKFENLCKLMKEILDKKVEKVTISNRLVSSPCCIVTSTYGWTANMERIMKAQALRDNSTMGYM

SEQ ID NO: 101977 - protein, 134 aa, Gossypium hirsutum
  Clone ID: LIB3196-065-P1-M1-C4.pep
IGDRHSTPSLLEAALTQEASTPDSQVWPTAPDITRETCSTLAESPRNGLQEKHKSLAFHRPPYHLLQQRDSQDASAEQSDHDDEVASLASASGGFGTKVPAPRLPAKDWKTKGSPRTSPKLKRKSKKDDGDAAM

SEQ ID NO: 101978 - protein, 128 aa, Gossypium hirsutum
  Clone ID: LIB3196-065-P1-M1-C6.pep
YDSSKTCSQNVELTDPIISRFDILCVVKDVVDPVTDEMLAKFVVDSHFRSQPKGANLDDKAFSESQEEAQASARPDDSKILSQELLRKYLTYAKLNVFPRFHEKDMAKLTKVYADLRKESSRGQGVPI

SEQ ID NO: 101979 - protein, 144 aa, Gossypium hirsutum
  unsure (1)..(144): unsure at all Xaa locations
  Clone ID: LIB3196-065-P1-M1-C7.pep
RTRGNAKARWCPAAISGMAAQAAILMGDKSENVQDLLMLHEASLSLKLETVGGEMTVLIKLNFTIRTKQAQRCTTYXNNQPXALIQVYEGERDMTKDNNLELRLKLSVITAARRGTPEIEETFDINANRLLNETATDKNTCEVN

SEQ ID NO: 101980 - protein, 133 aa, Gossypium hirsutum
  Clone ID: LIB3196-065-P1-M1-D2.pep
MFKRKHKKDISQNKRAVRRLRTACERAKRTLSSSTQASLEIDSLFEGIDFYTSITRARFEELCSDLFRSTLEPVEKALRDAKLDKAQIHDLVLVGGSTRIPKVQKLLQDFFNGRDLNKSINPDEAVAYGAAVQ

SEQ ID NO: 101981 - protein, 127 aa, Gossypium hirsutum
  Clone ID: LIB3196-065-P1-M1-D3.pep
KNGSFHLRGNVYVHYKSLESAVLAYDSINGRYFAGKQVKCEFVNITRWKVAICGEFMKSRLKTCSRGTACNFIHCFRNPGGDYEWADWDKPPPRYWMKKMAALFGYGDEAEFEKQREQDNFGHLRNP

SEQ ID NO: 101982 - protein, 58 aa, Gossypium hirsutum
  Clone ID: LIB3196-065-P1-M1-D8.pep
YHLLGAIKNSGVTKCPYEPRVATLNPSPLLLSPGKEEAGNASSERGLKALSWFEVRSL

SEQ ID NO: 101983 - protein, 116 aa, Gossypium hirsutum
  Clone ID: LIB3196-065-P1-M1-E10.pep
MARGAALALLLFCLLGALVAAPDDGFDLSDALPDKEGKKPTATPKKPSAGDDFDLGDAVVDGGNDDPPPPNPPKPKPNPNPNQAGSSGSFSDADLADGVSGGEGKGGSDGGGSHRK

SEQ ID NO: 101984 - protein, 102 aa, Gossypium hirsutum
  Clone ID: LIB3196-065-P1-M1-E4.pep
SPLQCRTMARRRLKMAPTIKKIVKTTSKENSRENSWRKLKENFHSTKSDFNIQFNVIFIRWPAKPYYWPSNYFPNPIRKLKKNLIINFKREIRPRLLIGCLG

SEQ ID NO: 101985 - protein, 34 aa, Gossypium hirsutum
  Clone ID: LIB3196-065-P1-M1-E6.pep
CPKDTKLPQIMPPLGSISLLAPQVASLHHMVDLR

SEQ ID NO: 101986 - protein, 54 aa, Gossypium hirsutum
  Clone ID: LIB3196-065-P1-M1-E8.pep
VLRDRGPCTLFYPISSIDFLFSLTIKSIKTFYQYFHTMLLLYQFSCKNIEIDLS

SEQ ID NO: 101987 - protein, 72 aa, Gossypium hirsutum
  Clone ID: LIB3196-065-P1-M1-E9.pep
HPLPVSNAGTGYEALADLNANNHANRAIKFHSYFKTFQSHGHSPLFGFTKPKTYFRKGLGLNQKLWKALGKI

SEQ ID NO: 101988 - protein, 134 aa, Gossypium hirsutum
  Clone ID: LIB3196-065-P1-M1-F1.pep
SDLQKSEELIKKEMITMLHYDLLHHPYEPSGNKKGKTVGFGTNNSEHITYLEHNPYEKFSKEELKKAQDVLVQEMEVVKQGMSHGELSSEAYNQVWEECYSQVLYLPGQSRYTRANLASKKDRIESLEKRLEIN

SEQ ID NO: 101989 - protein, 52 aa, Gossypium hirsutum
  Clone ID: LIB3196-065-P1-M1-F10.pep
TEIELKYILIFKLYAIFVWPKIFTISKHRYHQPNLYMPYRVQNITVPKRSIV

SEQ ID NO: 101990 - protein, 43 aa, Gossypium hirsutum
  Clone ID: LIB3196-065-P1-M1-F11.pep
FSLVSLNQKRGVKADEGAGSRSLRVQKHHCLNPTVAASHFFSD

SEQ ID NO: 101991 - protein, 73 aa, Gossypium hirsutum
  Clone ID: LIB3196-065-P1-M1-F12.pep
HLQLEHLILSVQMGSSGQARSVMHMVGFPILPVSNPRGPSDQRPPGREGQGVLLHSSLNSLCRGAAVELYVLS

SEQ ID NO: 101992 - protein, 84 aa, Gossypium hirsutum
  Clone ID: LIB3196-065-P1-M1-F5.pep
SGRVAHTVKRHAHFSGRVDIRIGTHGHVLARAQTYMLFDFGHTAKPHTRVLDCVSILTCINKMQGSHGQATCSCAMPCEHSVLH

SEQ ID NO: 101993 - protein, 141 aa, Gossypium hirsutum
  unsure (1)..(141): unsure at all Xaa locations
  Clone ID: LIB3196-065-P1-M1-F7.pep
QEGTQKHAGAPPQYPGWDTNLRWRLTITGLVLQVAMVMLLXGVGRYNLNACSHWRTERKHKNXTRRKTNHYYDSPSXHDVHVMVLTGLRLLMTLLHRFGLRAIGFNFLITGSRMQCTLLMQDYDHLLESPCIFKGAENLIK

SEQ ID NO: 101994 - protein, 67 aa, Gossypium hirsutum
  Clone ID: LIB3196-065-P1-M1-G1.pep
CITNYDLERLVERVHELNQGEQEEPTESDTEESTDGTETEANSVTDTEEEQSDKELNILEPRVVPEE

SEQ ID NO: 101995 - protein, 76 aa, Gossypium hirsutum
  Clone ID: LIB3196-065-P1-M1-G10.pep
MINIDQETTVREIKPKSRRIMGGGGPDYDDDKEEVKWPPWLRPLLQTSFFVQCKLHADAHKSECNMYCLDCMNGAL

SEQ ID NO: 101996 - protein, 123 aa, Gossypium hirsutum
  Clone ID: LIB3196-065-P1-M1-G2.pep
MPPLTSLQLRRLLHRCVSSPSPFQPHALLSPKPQFTPTHFPKLPFVISKPFSTQNPNPQTPDPVALSISAELLKDPSLDPLTITPRLQLHFSHIKPTPLLISQTLNLSPEAGRTVLGFNDWVL

SEQ ID NO: 101997 - protein, 84 aa, Gossypium hirsutum
  Clone ID: LIB3196-065-P1-M1-G4.pep
LNKVCLKTSVKSLSGLRRKKGSLKSQEVKTYLGPLSFWIHASFRVFIIINVLCLPKNKKKNLVNMKTSSKTQGFNNRLSQETRQ

SEQ ID NO: 101998 - protein, 55 aa, Gossypium hirsutum
  Clone ID: LIB3196-065-P1-M1-G5.pep
MHSISASIAVNLSITGLCPSLTSHCTPRLLSMSVYNLVTLPRVSFVPRLFTCSAL

SEQ ID NO: 101999 - protein, 47 aa, Gossypium hirsutum
  Clone ID: LIB3196-065-P1-M1-G6.pep
INLVAREKIKSRKTFTCEEPVEVIEKIKYSRKKEGGNSLFFFFFYIY

SEQ ID NO: 102000 - protein, 66 aa, Gossypium hirsutum
  Clone ID: LIB3196-065-P1-M1-G9.pep
PECRDICTLSIPECFEWILIMNAQMHENDVHISIMPCNPILATNTGYGCYRASRVYLRDVTNNFEK

SEQ ID NO: 102001 - protein, 90 aa, Gossypium hirsutum
  Clone ID: LIB3196-065-P1-M1-H10.pep
QSLSPSTCHVHARWAVFLCEHIPALCACTPLSSGHSFLSSWTSLAPVSWLTLGPGLLLFGGCNPDLKPMRPWLSAPKLTGNGATQLRRLL

SEQ ID NO: 102002 - protein, 64 aa, Gossypium hirsutum
  Clone ID: LIB3196-065-P1-M1-H5.pep
KDNFFKGNQTQMALEKRVLPQSTRDFYTVPKNFTTHSKNQHTINKRTAQMYTEIPRKKTISQSP

SEQ ID NO: 102003 - protein, 63 aa, Gossypium hirsutum
  Clone ID: LIB3196-065-P1-M1-H9.pep
FIVGDLDSVYTTPGMKEYVNGGDFKRDAPMLEEVVIMEGVGHFINQERADEINSHIHDFIKNF

SEQ ID NO: 102004 - protein, 102 aa, Gossypium hirsutum
  Clone ID: LIB3272-001-P1-K1-A1.pep
RRENGELFFKGVTAECRNSIRVLTDGGEIIDVKGPKLARDIVNDFPGYVICKRDQAQASMFPLNEGEWLVSGGFYYLLPLAKVGAPKMSMAAADFVENLSSG

SEQ ID NO: 102005 - protein, 124 aa, Gossypium hirsutum
  Clone ID: LIB3272-001-P1-K1-A11.pep
MLSEVNPCQELDKYKDVYEIWQQSPRATYSRDSSPQKGRYKDNLNEKKMALVRQKFMEAKHLVTEEKLRQTKEFQDALEVLSSNRELFLKFLEEPNSNFSQHLYDFQSLPQPPEKKRILGLRTV

SEQ ID NO: 102006 - protein, 134 aa, Gossypium hirsutum
  Clone ID: LIB3272-001-P1-K1-A5.pep
ILIVYIDFLPMEFRRMHTFAVFLLIACYLVLSVEGRFLKSLSKNNSKQVLPPPTPTKASDFGDSIEGYKEDFRPTTPGNSPGVGHSFADVVEDIVEQNPASISVQGNGKRSIAVHSPGVGHSFADVVEDIVEQN

SEQ ID NO: 102007 - protein, 137 aa, Gossypium hirsutum
  Clone ID: LIB3272-001-P1-K1-A6.pep
SSLHGSQLNNKRQRGDGYTTSLNGNGLNAVHIGKDDLRFKLMQKNVFRRAQSDENRKDMDLREKLSRMGQPYETHQTSESRERIPEPRERVLESRETSILGRFPSTRSVDDLPRVTTSRSSYSPWTLDHLRQRSPDR

SEQ ID NO: 102008 - protein, 116 aa, Gossypium hirsutum
  Clone ID: LIB3272-001-P1-K1-B9.pep
MAWRSPNFFLRKHRKWPLISSHKTKWRQAFTQNQPMVSFKQLVARHNPLQPDFVPSLLQSLSLYNLHQSPQAYHFLIKTLLHNRQFHHIPSLLHHLQLQHFQTPEYIFTHLVKFYG

SEQ ID NO: 102009 - protein, 101 aa, Gossypium hirsutum
  Clone ID: LIB3272-001-P1-K1-C2.pep
GLSKFLFECNYLPLPDSGLDDGLVTPDSVLEPSCSTKTSSGSGGYDEVWCRALACTAATSEIVRKKRTSLTACRPTCPPVSEVSGNLMNRRKKAPQRAPLY

SEQ ID NO: 102010 - protein, 96 aa, Gossypium hirsutum
  Clone ID: LIB3272-001-P1-K1-D4.pep
MAAQAAATTFNGNLKKALAGLRRINLEGLRWRVFDAKGQVLGRLASQISTVIQGKDKPTYAPNRDDGDMCIVINAKDVCVTGRKLTDKVYYWHTGY

SEQ ID NO: 102011 - protein, 100 aa, Gossypium hirsutum
  Clone ID: LIB3272-001-P1-K1-E8.pep
MYSGSSDGESHEAAAQRKIPPVSSMLWVRNLRRYIGSGAGLGSEALMELETKRILLDIFKEKQQKSAEAGTIPSFYKKKPEEGSISHRVQKLAKYRFLKK

SEQ ID NO: 102012 - protein, 76 aa, Gossypium hirsutum
  Clone ID: LIB3272-001-P1-K1-G11.pep
KPICILCKCPGWGPPLRQGQNWCYPNCFKIHPRKGVSLFYLSQIFFSKMGFWGGKNFWGYKTWVRSFKGKFFSFFL

SEQ ID NO: 102013 - protein, 36 aa, Gossypium hirsutum
  Clone ID: LIB3272-001-P1-K1-G2.pep
DTERLCVMTNGDFMHSANDYAERLSSSATLLIPFAY

SEQ ID NO: 102014 - protein, 130 aa, Gossypium hirsutum
  unsure (1)..(130): unsure at all Xaa locations
  Clone ID: LIB3272-001-P1-K1-G7.pep
KMTTDWKTVRLFPIPSVIYLIHNNVQFATLMYLDTSTYQIMGNLKIVTTGILFRXELFLKKKLSNLQWMAIILLAVGTTMSQVKGCGEASCDSLFSAPIQGYMLGILSACLSALAGVYTEFLMKQNNDSL

SEQ ID NO: 102015 - protein, 65 aa, Gossypium hirsutum
  Clone ID: LIB3272-001-P1-K1-H8.pep
ASVRFRSPTSRSSHSLERQMVLRQFMPLWTTFFFPSLLGLLLPPYQCHPPTPPLLIHRRALGSLT

SEQ ID NO: 102016 - protein, 60 aa, Gossypium hirsutum
  Clone ID: LIB3272-002-P1-K1-A10.pep
PTPELFSAKKNLCLVRRNPSLVLNLTLTITKRTRPFTPKVKVLPIKGFPKNCIFWEKFGI

SEQ ID NO: 102017 - protein, 62 aa, Gossypium hirsutum
  Clone ID: LIB3272-002-P1-K1-A2.pep
SDDMPIRNIAGGETLSMLSSSGYINVFVCGSGSWLIAAAVTLGGCALYYGLPLRAIGYIRGM

SEQ ID NO: 102018 - protein, 115 aa, Gossypium hirsutum
  Clone ID: LIB3272-002-P1-K1-A3.pep
MCIAAFIWQAHPLYPLLLLQNRDEYHNRPTKALAWWDVDGCEILGGRDEVAGGTWLACSRQGRVAFLTNVLELHPRPDAKTRGDLPLLFLESTKSPMEFAEQLATDAHQYNGFNL

SEQ ID NO: 102019 - protein, 59 aa, Gossypium hirsutum
  unsure (1)..(59): unsure at all Xaa locations
  Clone ID: LIB3272-002-P1-K1-A7.pep
GVPSXASCWXRXSXGSPLXXLWSLGSSRXXWXCSFSSXXXXSXWCSLRXXXLWVPSGFF

SEQ ID NO: 102020 - protein, 84 aa, Gossypium hirsutum
  unsure (1)..(84): unsure at all Xaa locations
  Clone ID: LIB3272-002-P1-K1-A8.pep
GXXXFXPLXCXXXCXGSXXXXXAPXXLFXXXARLXXFVAPPFXXAXPPXXXXVXWXXLCXXXLXLASCXXXXXXGPXWXPXXPL

SEQ ID NO: 102021 - protein, 50 aa, Gossypium hirsutum
  Clone ID: LIB3272-002-P1-K1-B3.pep
IHSLLYKLGPKHMWVLPYLTILLLNVAWSYLTQMYAIANMANSTLMHGKY

SEQ ID NO: 102022 - protein, 80 aa, Gossypium hirsutum
  Clone ID: LIB3272-002-P1-K1-C2.pep
GIGDPRVGGKLGNCYLFLRRNGNLFRAVLSYLRNPIVLALNVGRAKNCTPFMIWVKGSRKKSIKAELNINKGTPKLRRYL

SEQ ID NO: 102023 - protein, 80 aa, Gossypium hirsutum
  Clone ID: LIB3272-002-P1-K1-C7.pep
MKNTKATTLSQPLTKKFHVDDYLSSFGEKCGTYGIDSAAIAAVIVPILLSSIMRKKKGKKRGVPVEVGGETGYAVRNAQT

SEQ ID NO: 102024 - protein, 115 aa, Gossypium hirsutum
  Clone ID: LIB3272-002-P1-K1-D1.pep
MEDTKMEDSSNQREMSHEEMPETHSKGGLITMPFIIANESFEKVASYGLVPNMILYLIKDYHMGVAKGTNILFFWQAATNFTPILGAFVADSYLGRFLTIGLGSICSLLGMILLW

SEQ ID NO: 102025 - protein, 123 aa, Gossypium hirsutum
  Clone ID: LIB3272-002-P1-K1-D2.pep
MSNNSIAESSNTQNPILKLLDCSLRVSVIPLSVATIWLTVTNKQDNSIYGDVKFNNLLGLKYMVCTSAICAAYALFAAIASWIRYFVTKAWLFFVSDQIVAYLMVTSRAAVMEILYLAYNGDI

SEQ ID NO: 102026 - protein, 49 aa, Gossypium hirsutum
  Clone ID: LIB3272-002-P1-K1-D5.pep
DPKILPKLKKAELHCTKATTSYIEANTPILKSLDIYISIAYKKKSGKCL

SEQ ID NO: 102027 - protein, 82 aa, Gossypium hirsutum
  Clone ID: LIB3272-002-P1-K1-E1.pep
LSNTRPKWPKIKAQKETLGFLPFAPQPNPNPQHRTTTTSDLCAPYSECQHTLHTFVNEPLKSPSPSLSSKFGGDFEVKIDEP

SEQ ID NO: 102028 - protein, 117 aa, Gossypium hirsutum
  Clone ID: LIB3272-002-P1-K1-E4.pep
MNFKETQQATTWTDEEDKQAQQYAMQLVSSSVVPMVLKAAIELGVFEIIQRAGPSALLSPSQIASQLPSQTNPKAPLVLDRILRLLATHSILTYSLVTNQADGQVYRLYGLATVAKY

SEQ ID NO: 102029 - protein, 80 aa, Gossypium hirsutum
  unsure (1)..(80): unsure at all Xaa locations
  Clone ID: LIB3272-002-P1-K1-E7.pep
GXLXVXXLLLAXXXCLXLWXXXXXXWVVLSXXPWVPXXSALXXWXLFXXXXXRGGXXXXXPGPPLXXXXXXSRLLXPXXP

SEQ ID NO: 102030 - protein, 49 aa, Gossypium hirsutum
  Clone ID: LIB3272-002-P1-K1-F1.pep
MTIPDSGCVMENGASCLPCTPEEEKKIVTDLRNESERNLKESNLYFVIS

SEQ ID NO: 102031 - protein, 122 aa, Gossypium hirsutum
  unsure (1)..(122): unsure at all Xaa locations
  Clone ID: LIB3272-002-P1-K1-F9.pep
GKSRVCVTGAAGFIASXLVKKLLEKGYTVHATLRNLGDASKVQLLKSFPHADTELVLFEADINRPNEFEQAIHGCTFVFHVATPLQPSDASQFKNTSEAAVSAIKSIAKCCIKSGSVKRLIY

SEQ ID NO: 102032 - protein, 122 aa, Gossypium hirsutum
  Clone ID: LIB3272-002-P1-K1-H11.pep
VVGDKKIMIGINGFGRVGRLVARVALHRNDVELDAANDPFIPIDYMTYMLKYDSNHGQWKHYDLKVKDCKTLLFEKKPVTDFGIRNHEEISWAEHGAAFDVESTGVCTDKDKAAAHLKGGAN

SEQ ID NO: 102033 - protein, 128 aa, Gossypium hirsutum
  Clone ID: LIB3272-003-P1-K1-A6.pep
MMQKAMMAATSRTLLSVSLLSSPKHFSYYPFLKPSRVFRGFKAFCSAPSPIPTTVDPDDLKHSMLLERLRTRHLRHSTKLPSSSPSKPPQNLPVLGQETEAYDKGKGKKKKKIMADSFEELGLSEEVM

SEQ ID NO: 102034 - protein, 35 aa, Gossypium hirsutum
  Clone ID: LIB3272-003-P1-K1-B5.pep
LRLLMSYLFCLTVVPLLKLFYRKYDPNLERAPYVT

SEQ ID NO: 102035 - protein, 101 aa, Gossypium hirsutum
  Clone ID: LIB3272-003-P1-K1-C11.pep
MSEEEWVKEALTDSMLAAKVLLSLYQASSPPPRSDSASSQALQVEWSVRQRRSKQSLKKKSEPARASPTTPLSWSGGISVSGGGSADGSEESSRPPLKPVD

SEQ ID NO: 102036 - protein, 125 aa, Gossypium hirsutum
  Clone ID: LIB3272-003-P1-K1-C7.pep
LPAAVSLGPMQPPVIPDSLATLSQYLSHMKHEFDGIARRSGDRDSIPASNSGTIREGLPTPASLAEVLQSTRQMLIDQAGECLQQLARQLEDQMNVTDTSARMIAQSNAWRIGVLLHNLSSLLLE

SEQ ID NO: 102037 - protein, 98 aa, Gossypium hirsutum
  Clone ID: LIB3272-003-P1-K1-D5.pep
YESKICACPSKVEQTDPCCSLAPHANPDSGIVWFNDRDPTASYLTFEKQRDRPHYIYSIRYNGKMPVFCLPPPDLAGLDEVVGALSFIGTIGSFGSEE

SEQ ID NO: 102038 - protein, 70 aa, Gossypium hirsutum
  Clone ID: LIB3272-003-P1-K1-D6.pep
SASYTERDCEFSVSLAAATATVTLTQFLSGLTKTYNRKEEKNLKGNQMKAPSQAETTGLLKLLQSCSNIR

SEQ ID NO: 102039 - protein, 80 aa, Gossypium hirsutum
  Clone ID: LIB3272-003-P1-K1-D8.pep
HPFFPLPFPPSFPSPPKMEASPALSRIGLAGLAVMGQNLALNVAEKGFPISVYNRTTSKVDETIQRAQDEGQLPLFGHYT

SEQ ID NO: 102040 - protein, 60 aa, Gossypium hirsutum
  Clone ID: LIB3272-003-P1-K1-E10.pep
AHTLHHLSRPHTDRVSNIIPPPTRTRYSPYTVVYECISVAHLSHLGPGFFFPKSCKPCGS

SEQ ID NO: 102041 - protein, 131 aa, Gossypium hirsutum
  Clone ID: LIB3272-003-P1-K1-E3.pep
ELQPISGTVFRSAKVRIAVFSQHHVDGLDLSSNPLLYMMRCYPGVPEQKLRGHLGSFGVTGNLALQPMYTLSGGQKSRVAFAKITFKKPHIILLDEPSNHLDLDAVEALIQGLVLFQGGILMVSHDEHLIS

SEQ ID NO: 102042 - protein, 56 aa, Gossypium hirsutum
  Clone ID: LIB3272-003-P1-K1-E6.pep
ITLKTISCDGEEYTSVKIRLEIRLRTRVEKRLVLERERAISLILIIICSIKIHIMD

SEQ ID NO: 102043 - protein, 65 aa, Gossypium hirsutum
  Clone ID: LIB3272-003-P1-K1-E8.pep
YKERIRLLLVVGMEFDSYEDVYYSYNCNAKEQGFGVRVSNTLYRKTKERYCGKLSCISAGFKKKS

SEQ ID NO: 102044 - protein, 114 aa, Gossypium hirsutum
  Clone ID: LIB3272-003-P1-K1-F4.pep
MDERMIGAAQTGDINILYELILNDPYVLQRIDDVPFFHTPLHVAASAGHIDFMMEMINLKPSFARKLNQAGFSPMHLALQNQKTLAVLRLLRFDEGLVRVKGREGFTPLHHVVQ

SEQ ID NO: 102045 - protein, 52 aa, Gossypium hirsutum
  Clone ID: LIB3272-003-P1-K1-G12.pep
TQRPFLYTINTHLNPHTHSQGEAFFLQKTYSEPYPILKNLQFIILCPLNYQA

SEQ ID NO: 102046 - protein, 118 aa, Gossypium hirsutum
  unsure (1)..(118): unsure at all Xaa locations
  Clone ID: LIB3272-003-P1-K1-G2.pep
THLLFIYEPNGLLSISKQRALLLLTIVLGASKAQLSANFYAKTFPSVSTLASHVLXHAQGKDLRLSTNTGPLHXDACSDHGWDASVLLNPTDGAKPATPNLTTGGYELIYNIKPALPK

SEQ ID NO: 102047 - protein, 52 aa, Gossypium hirsutum
  Clone ID: LIB3272-003-P1-K1-G3.pep
VSCLILTSILLLPLILLLMQMLNTLFLMPIEFLHIRIQHLNYLKSHTTFHAY

SEQ ID NO: 102048 - protein, 82 aa, Gossypium hirsutum
  Clone ID: LIB3272-003-P1-K1-G8.pep
KGQLLYMINTKRKNRVYRGFQLHKKEQHLYILTNTSVSISIDKGVNMASLRWGENHLTQPPSENTENPSEANEVHLNTSERH

SEQ ID NO: 102049 - protein, 41 aa, Gossypium hirsutum
  Clone ID: LIB3272-003-P1-K1-H10.pep
STCIYILLIVLVIVFMDTLLIHTLHLLTNIHLLVFTHLKAI

SEQ ID NO: 102050 - protein, 121 aa, Gossypium hirsutum
  Clone ID: LIB3272-003-P1-K1-H2.pep
MADEAQYSSGLDAGSNKRKYDDQPPLPSGARRPTGFSSPDSAPPYYNSVPPPLDGIEMAKQRAQEIAARLTAYVASAGAEPKRPRYENGSGGGFDHDKGFSSAPSDVKPLSNSAPSAITGF

SEQ ID NO: 102051 - protein, 69 aa, Gossypium hirsutum
  unsure (1)..(69): unsure at all Xaa locations
  Clone ID: LIB3272-004-P1-K1-A12.pep
LDMVEILGEIEPPSPVYEAELPEEDEEQEEISYEELKKRMWKDRLRMQRLKETRESSSSDHXVXVRQEA

SEQ ID NO: 102052 - protein, 40 aa, Gossypium hirsutum
  Clone ID: LIB3272-004-P1-K1-C6.pep
GIVCAASQVEQAVIKWTSKGTIRPHTMSIDQHEPPIHMLV

SEQ ID NO: 102053 - protein, 85 aa, Gossypium hirsutum
  Clone ID: LIB3272-004-P1-K1-D1.pep
TSFSKAQWFLHIKIGIHFAKMIQHSFDHFFLSQGKESKHATLMVICPTAVCVFFRHIWVHIGENSVPLVWEQIGESGHLLLILII

SEQ ID NO: 102054 - protein, 135 aa, Gossypium hirsutum
  unsure (1)..(135): unsure at all Xaa locations
  Clone ID: LIB3272-004-P1-K1-D2.pep
MQTMCYGGAMTMTAPPASGGSAFAYTIKDVMLERESELIIEVCNETPLKLLLLNGSAEILXANCAPEMRITFPTHLKXSLVDTSYGATIYMDGATEXTDYTADETPMVRYVNVHAVLQGLISRSEAQSPNDYDAY

SEQ ID NO: 102055 - protein, 85 aa, Gossypium hirsutum
  Clone ID: LIB3272-004-P1-K1-F1.pep
RNVLKACWLLPPAERSVLLATPSLPNQLLDHELPRGRPFLDVKQPQHKPFHAHRPTIHTGPAGLGQEPPHGETPTHRNLLSVEVA

SEQ ID NO: 102056 - protein, 138 aa, Gossypium hirsutum
  unsure (1)..(138): unsure at all Xaa locations
  Clone ID: LIB3272-004-P1-K1-F10.pep
VVYCWMALSLSMMHKYTEIDPNAGYFMAFRSVGMKRARYLVALGALKGMTTVLLVGALGQARYTTXHIARAHMIPPWFALVHPKTGTPXINATLLMTISSGLIAFLXSLDVLASLLSVSTLFIFMMMAVALLVRRYYV

SEQ ID NO: 102057 - protein, 75 aa, Gossypium hirsutum
  Clone ID: LIB3272-004-P1-K1-F12.pep
MDKHKCKLCFKSFAYGRALGGHMRSHMLNLPIAPKLAEQERSGLPRPTNQLSQESESESGSASYSASSSEEEEEG

SEQ ID NO: 102058 - protein, 103 aa, Gossypium hirsutum
  Clone ID: LIB3272-004-P1-K1-F2.pep
FLRLFLFTARPGNIVCSRGLQKEHIALFVFGDSQCDPGHNNYIDTIARTYYYPYGETLLKYPTGRFSDGRLIPDYIAGSALVPLVAPYLQPGNHELTTDVNFA

SEQ ID NO: 102059 - protein, 140 aa, Gossypium hirsutum
  Clone ID: LIB3272-004-P1-K1-G6.pep
KMLCKDVLPLFALPSSSASVSVSVPISVTYYKDASTSVSSYQTHEHGFIDYISFQIPGDSSSNIANCIGISRRFMHSLSNSSIEESASLEAVLLSVPDGYHCVDLSLYKEGQIVLLLNETTSASECSGESCMMIVQADDL

SEQ ID NO: 102060 - protein, 64 aa, Gossypium hirsutum
  Clone ID: LIB3272-004-P1-K1-G9.pep
MHRSGATMAWNVFKFCTALRGLGSIMILLVLGVVGVSYYSVVLTNFGPALYDGGLDSLTAVVVL

SEQ ID NO: 102061 - protein, 133 aa, Gossypium hirsutum
  Clone ID: LIB3272-004-P1-K1-H12.pep
YFNLRAHRYEMSVIEIYDQSRADNKDVWKLVLGKHNLTSPISLFSRPEVITKSQSYFFTHSLKAIAVTSTAKGITSKQLLLGTIGDQVLALDKRFLDPRRTVNPTQAEKEEGIIPLTDSLPIIPQSYVTHALR

SEQ ID NO: 102062 - protein, 67 aa, Gossypium hirsutum
  unsure (1)..(67): unsure at all Xaa locations
  Clone ID: LIB3272-004-P1-K1-H5.pep
VFLSMLCHFKFGLFLFFAIFVVEMSICVDNFLPESEGIPIEXMNRVCRSHWYWSRFVQEAHYFNGGI

SEQ ID NO: 102063 - protein, 141 aa, Gossypium hirsutum
  Clone ID: LIB3272-005-P1-K1-A1.pep
PKALLLPVSKDASTLQYLTQIKQRTPLVPIKLTLDLGGEYLWVDCDQGYVSSSYKPARCNSAQCNLARSKACGSCFDGPKPGCNNNTCSLLPSNSVKNSGTIGEVAQDVVSIQSTNGKNPGKEVTVSKFLFTCGSSFLLDG

SEQ ID NO: 102064 - protein, 85 aa, Gossypium hirsutum
  Clone ID: LIB3272-005-P1-K1-A7.pep
HPELLETQPPLLIFLYDLFFFSVLLPYLTLLFTCFTVVVILFLLCSTNPPVSTVIDDSYWENTIFMQNPEDFKTKFDPREKRSMC

SEQ ID NO: 102065 - protein, 45 aa, Gossypium hirsutum
  Clone ID: LIB3272-005-P1-K1-B10.pep
SFTRAQTAEDFWTGTAVSSPQSRSFSPGHGFCLLTSLDYNDPFKR

SEQ ID NO: 102066 - protein, 135 aa, Gossypium hirsutum
  unsure (1)..(135): unsure at all Xaa locations
  Clone ID: LIB3272-005-P1-K1-B4.pep
EMILVYEYMANGPLRSHLYGTNLPPLSWKQRLEICIGAARGLHYLHTGAAQSIIHRDVKTTNILLDENFVAKVADFGLSKTGPALDQTHVSTAVKGSFGYLDPEYFRRQQLTEKSDVYSFXVVLMEVLCTRPALN

SEQ ID NO: 102067 - protein, 58 aa, Gossypium hirsutum
  Clone ID: LIB3272-005-P1-K1-B5.pep
NHKLSPPFLSLKNTQFSLVPFSSASKPTPNSQTQTQPHCKKEKKERPFICVPKIKIWS

SEQ ID NO: 102068 - protein, 91 aa, Gossypium hirsutum
  unsure (1)..(91): unsure at all Xaa locations
  Clone ID: LIB3272-005-P1-K1-B9.pep
MGVKQAIKNLDAXFPRAEEHLLQKTQSGALVSIVGLVIMTTLFFHELTYYLSTYTVHQMSVDLKRGETLPIHINMTFPSLPCDVLSVDAID

SEQ ID NO: 102069 - protein, 49 aa, Gossypium hirsutum
  Clone ID: LIB3272-005-P1-K1-C10.pep
PYSLKLGCDCAKSRWFEYNELKTLRGVKEEGQVRHITSFCCYLLCSISW

SEQ ID NO: 102070 - protein, 86 aa, Gossypium hirsutum
  Clone ID: LIB3272-005-P1-K1-C12.pep
DLLPSSSNPNPSLRLLVSLVVLTPSAKKSSSVKNWDESQNSPSSKTSAITSKRKKKEKKRPKEKQQREVIRREKKGAFGESRELGA

SEQ ID NO: 102071 - protein, 94 aa, Gossypium hirsutum
  Clone ID: LIB3272-005-P1-K1-C2.pep
LSRDTSSSFLFINTYPLLQPIIVEMTCRVTSLSPGRASLLWKMRGFLTNKRSPKKLGCRHKRSGCAPTKMPDGAETLDTERKSCPFFAAVWVRI

SEQ ID NO: 102072 - protein, 63 aa, Gossypium hirsutum
  Clone ID: LIB3272-005-P1-K1-D11.pep
IPILLTVLLLRNGRTARAVFIPKALSRRSGRKTCRKEFGPHTSLKDTKVSKIAHRSDISANIG

SEQ ID NO: 102073 - protein, 111 aa, Gossypium hirsutum
  Clone ID: LIB3272-005-P1-K1-D6.pep
MFLPMSSLKTLAFLSIFLLLHLKIAKTDFLSPLLSPLFDDVCKEVECGRGKCKPSINGTLPFYICECDPGWKQTFSDKDDHAHLKFLPCIVPNCSMNNVCSAAPSPAQEKA

SEQ ID NO: 102074 - protein, 72 aa, Gossypium hirsutum
  Clone ID: LIB3272-005-P1-K1-D9.pep
PKRLKFLPLILEPLLYQYLRLNCLYTIVTFNYYVGYIMQKSTTTHRNKTDAIHLYLLLNMLMGLAYHVGLIT

SEQ ID NO: 102075 - protein, 105 aa, Gossypium hirsutum
  unsure (1)..(105): unsure at all Xaa locations
  Clone ID: LIB3272-005-P1-K1-F3.pep
MRRLFLQKPYTDPYMDEKAIESFQCXAQKKTAVAATHCKRGRALIKTNACPIELVEPRILHFKAGEPIILICRXRTNCVDTRIRVKGGGDTXQIFTLRQSMYEAL

SEQ ID NO: 102076 - protein, 59 aa, Gossypium hirsutum
  Clone ID: LIB3272-005-P1-K1-G11.pep
VFVFAAGFIEMFVYCINLRLVLHLGRLDMLTVGNRIIWILNPCRHVSICEICSRRVVAY

SEQ ID NO: 102077 - protein, 75 aa, Gossypium hirsutum
  Clone ID: LIB3272-005-P1-K1-G12.pep
KIARGVHSVLFKTLNTDRWLMHKTEFASHFTGLKKDGAQWWVDNTDIKLCGLDYLSTCAYVDAATTHHIFVMKRE

SEQ ID NO: 102078 - protein, 65 aa, Gossypium hirsutum
  Clone ID: LIB3272-005-P1-K1-G3.pep
HHMIDHTACVLIGCGIHPGYVMGLTLRNTGELAIMILSKVRGQTTVDHLNVTYSDQEFDLYVTDS

SEQ ID NO: 102079 - protein, 69 aa, Gossypium hirsutum
  unsure (1)..(69): unsure at all Xaa locations
  Clone ID: LIB3272-005-P1-K1-G6.pep
NLFNSDKAKALFEPLKWGTKLFLPSTHSFFRIFDSSALGVVSTRSPAVLTXARVYYGVKESSVKSLLWS

SEQ ID NO: 102080 - protein, 133 aa, Gossypium hirsutum
  Clone ID: LIB3272-005-P1-K1-H1.pep
ELVHSFLGDDHGAAEQTGYRSESELVDSNIDAADSLQIMIKSSFLNSTGSYLNRLADTVLNAIEMLSFFKTDKAIFRRKVMANLRQVGYNAAICKTKWGSSGGLTAGNYEFMDVVPSISPTRQTRDFVGLDFS

SEQ ID NO: 102081 - protein, 67 aa, Gossypium hirsutum
  Clone ID: LIB3272-005-P1-K1-H10.pep
SGCNDGENCSIYLILRCSEKTSNTQTILSRAAPTKKTCRVPEMGTTKAGHACNWRSSMKCYSYTCCK

SEQ ID NO: 102082 - protein, 129 aa, Gossypium hirsutum
  Clone ID: LIB3272-005-P1-K1-H12.pep
MADQPQPPPQVLLVTFASQGHINPSLQFANKLINNGVHVTLMSASSMIHQFNKASPVHGLSYAYYSDGYDHAFQLSGDTNHYLSETKRHGTQSLREFLADQGTRFTSIVYCTLLPWVATVAREFHIPAT

SEQ ID NO: 102083 - protein, 104 aa, Gossypium hirsutum
  unsure (1)..(104): unsure at all Xaa locations
  Clone ID: LIB3272-005-P1-K1-H2.pep
RPARCDRQIKNKPYPKSRYXRSAPDPKMRIDDAGMKKRGVDELRIXVHLYFCEKENVCSXSLESARISRHKSMAKYAGQDALHLRVRVQPXFHGLHFNKMLSCA

SEQ ID NO: 102084 - protein, 45 aa, Gossypium hirsutum
  Clone ID: LIB3272-006-P1-K1-A3.pep
WKVLFLLNKWPVVWFEKMGKQKTGVFFKFYLEKGSLIKELSLAGP

SEQ ID NO: 102085 - protein, 111 aa, Gossypium hirsutum
  Clone ID: LIB3272-006-P1-K1-A6.pep
MQILVKTLTGKTITLEVESYDTIDNVKAKIQDKEGIPPDQQRLILAGKQLEDRRTLADYNIQKESTLHLVLPLRGGMQIFVKTLTGKTITLEVESSDTIDNIKAKIQDKEG

SEQ ID NO: 102086 - protein, 54 aa, Gossypium hirsutum
  Clone ID: LIB3272-006-P1-K1-A7.pep
MGGASLPPGFRFHPTDEELIGYYLKRKTEGLEIELEVIPVIDLYKFDPWDLPKK

SEQ ID NO: 102087 - protein, 44 aa, Gossypium hirsutum
  Clone ID: LIB3272-006-P1-K1-A9.pep
LYISSKFYTYFIPYHTIYIQLKINITTFFTYFNHHFTSLNLHSL

SEQ ID NO: 102088 - protein, 81 aa, Gossypium hirsutum
  Clone ID: LIB3272-006-P1-K1-B1.pep
QNPTIGLVVFIDTKSSRVALNKTIPSTATIHLISSKNGIFKLKYPVTAICILLQGILGRHYWKHTKHARPEPPPVAQQQLR

SEQ ID NO: 102089 - protein, 110 aa, Gossypium hirsutum
  unsure (1)..(110): unsure at all Xaa locations
  Clone ID: LIB3272-006-P1-K1-B11.pep
MATLQLASISKFFLTTHPTQNDKHSKTYTIILXPPNKLLSKSKFNYSXNKLNNDNNSIGQVLSINDIYNNNPTKNNNYYICLLYQTRTRYHNIYKXYPNTTLNLTLQQIY

SEQ ID NO: 102090 - protein, 72 aa, Gossypium hirsutum
  Clone ID: LIB3272-006-P1-K1-B4.pep
SQVFGNFGLFTKKNMSKEIVKEEAPSSSPVVSGSFASLRSVRWRISLSILPSSSSDDDLRRVTADSRRRYAG

SEQ ID NO: 102091 - protein, 77 aa, Gossypium hirsutum
  Clone ID: LIB3272-006-P1-K1-B6.pep
MNPTMLLQQWWQLFNSTDVFNPLTLVPLLLTISFLFKLLRTWKLNLPPSPPKLPIIGNIHQVGKSPHRSFRALSEKY

SEQ ID NO: 102092 - protein, 63 aa, Gossypium hirsutum
  Clone ID: LIB3272-006-P1-K1-C1.pep
PYIKVNSRPIPCSHMSQPQMIGSRTRISVSCRGCNRTCIFILISRSVQSICHSNQCILRYLDP

SEQ ID NO: 102093 - protein, 131 aa, Gossypium hirsutum
  Clone ID: LIB3272-006-P1-K1-C10.pep
MALLSLSSLSPLAPRCPSFPLQLQTRISFSRARIGASSTSSPSTSQVIQHASSNPKVVVTRERGKNTKLIDALAEHGINCLELPLIQHLQGPDSDRLASVLSETAFDWIVITSPEAGSVFLEAWKAARTPN

SEQ ID NO: 102094 - protein, 41 aa, Gossypium hirsutum
  Clone ID: LIB3272-006-P1-K1-C6.pep
SCFSCKSEPHFVYLPKKFISSFLSCKREVQLDDQDLSFFTS

SEQ ID NO: 102095 - protein, 78 aa, Gossypium hirsutum
  unsure (1)..(78): unsure at all Xaa locations
  Clone ID: LIB3272-006-P1-K1-C7.pep
MSCCRGNWGCRTGCKXAKAXGGCKIYPNLNVAWMTTSETLVLGVAPQKAHFAGAGMEFEAANRCQCGYNCPCNPRNRK

SEQ ID NO: 102096 - protein, 129 aa, Gossypium hirsutum
  unsure (1)..(129): unsure at all Xaa locations
  Clone ID: LIB3272-006-P1-K1-D3.pep
RQGFQAFGGVQSARPYRPYTKLIRSRTLKKVYPAFYPEKRIEVSXNQIKLKNFSPDPAMIYLLYFEVPVFRSFTHNTIFSLYRFFRDAEHNTLNFITAVCTPWNFWEYRKKHMHVSMKALKKRSKQIFK

SEQ ID NO: 102097 - protein, 65 aa, Gossypium hirsutum
  Clone ID: LIB3272-006-P1-K1-E11.pep
YVLIALSIIFLCLLNFGEQSFNRHHLQFSFLQKWLLLMKGLPGLLLWFQLIYCYKFWLLHYITTW

SEQ ID NO: 102098 - protein, 80 aa, Gossypium hirsutum
  Clone ID: LIB3272-006-P1-K1-E12.pep
CNLSSNFESSLNFLCPVVLLKFTSTTLYFFPSFSLGISLPQVEISFPSNLFSFFTGVILVFTSQDLKQNPFPCDGYSRPN

SEQ ID NO: 102099 - protein, 75 aa, Gossypium hirsutum
  unsure (1)..(75): unsure at all Xaa locations
  Clone ID: LIB3272-006-P1-K1-E4.pep
MEKDKSPGLPPPSGRYTGFAAVGNVLNSTGCFGQSSDANLFSQDIIKMPDNPPKNLGHRRAHSXILTLPDDISFD

SEQ ID NO: 102100 - protein, 84 aa, Gossypium hirsutum
  Clone ID: LIB3272-006-P1-K1-E5.pep
DSYVKSMILPAHKYVFATACLTTIYQIHLQSINFTKETTHPRLMLIYPTSTSIYTLYRGSNIQIILRDQNDQLQNLADPNKAQS

SEQ ID NO: 102101 - protein, 32 aa, Gossypium hirsutum
  Clone ID: LIB3272-006-P1-K1-F1.pep
IQALNQRWLMPIRYHPHHQCPILDQVSLYLLL

SEQ ID NO: 102102 - protein, 127 aa, Gossypium hirsutum
  Clone ID: LIB3272-006-P1-K1-F11.pep
FVFFFFLLTIFLLSKSKSACSRPPLVPATSDPPRDDEAKPTTETTPGSSETPWHPSLNLVAFTNSAFSTIFKLRSSLASSSSLMLSTINGFESNGPDSFSSISNFADLALPFFAMKILCRECNFLDN

SEQ ID NO: 102103 - protein, 127 aa, Gossypium hirsutum
  unsure (1)..(127): unsure at all Xaa locations
  Clone ID: LIB3272-006-P1-K1-F4.pep
TNTLRENIAHITQKVCVTRARGYLGSCDVKHVFYNNYTVHGTHRQPGGAKYAHLNQFQRASHNLQLLKADVLDYDSVXSVITGLTGFFFIPFPVPSTXISNPQEELIEPAVXGTLNVLKACVQSNVK

SEQ ID NO: 102104 - protein, 133 aa, Gossypium hirsutum
  Clone ID: LIB3272-006-P1-K1-F9.pep
AALANFLSYDVYDIDLSEVSDDSDLKLLLLQSSAKSVIVIEDLDRYLSEKSTAVSLSGILNFMDGMLTSSCGEERVMVFTMNGKDHVDQAVLRPGRIDVHIHFPLCDFTAFKTLANSYLGLKDHKLFPQVEEI

SEQ ID NO: 102105 - protein, 112 aa, Gossypium hirsutum
  Clone ID: LIB3272-006-P1-K1-G12.pep
RTLLFLYTFLFTHPSQLCAKPTCPFLFKSLSPFQTQLTANSIPSARPAFFPFPLFQTSHVQHLIYHILLNYCSVSPASNFDVNNEVDSIHLKFAEAPAPIPMAMDSKKTVYF

SEQ ID NO: 102106 - protein, 109 aa, Gossypium hirsutum
  Clone ID: LIB3272-006-P1-K1-G4.pep
VQIHQRYQHHAGSVSDPPLSPFQPLSPDIAPLLPSPGGVVPTTGSSMPTIPFTPSPPNPDDFIAPGPTSAFPPFGPLPVSSSSPIFLLSSLHLTTFSVLVVPYYLLHLL

SEQ ID NO: 102107 - protein, 132 aa, Gossypium hirsutum
  Clone ID: LIB3272-006-P1-K1-G9.pep
MMMGSEKMNNPMEIEGKNIEKTKISLMRILVEKQDPSSKEVEDGTLRRFLRARDLDVEKASNMFLKYLNWKRNFVPNGSISPSEIRHEIQQNKMFLQGWDKKGRPIALLLAARHFQHEGGVDEFKRFIVYLF

SEQ ID NO: 102108 - protein, 85 aa, Gossypium hirsutum
  Clone ID: LIB3272-006-P1-K1-H1.pep
IKYYLSLKKGYLSPLGWGQPVGRAHPPESQEHTKIYMMMLWATNEGRAKSKYWYFLRKLQKGIKSNGQVLAIKEIFLKISTKIKN

SEQ ID NO: 102109 - protein, 91 aa, Gossypium hirsutum
  unsure (1)..(91): unsure at all Xaa locations
  Clone ID: LIB3272-006-P1-K1-H11.pep
KTHGLVQHVSDWEHFTLGLINFLWEPSQIYFSQHNCGQWVYAFDLEYIXRNKPIVYSSRHGHASFPHPRTYLQRSVKLGIRIRNDASRNKY

SEQ ID NO: 102110 - protein, 105 aa, Gossypium hirsutum
  Clone ID: LIB3272-006-P1-K1-H2.pep
VRVTHTLLFAEGVNTLIQALFVTRLPTAKGRSYAKKAPIISIMHDTSIVSLEHNHARLLNTMKAFQGPLIHASTIQNLLGYTHMRSIYSRYLKPLRNDPAISQTL

SEQ ID NO: 102111 - protein, 31 aa, Gossypium hirsutum
  Clone ID: LIB3272-006-P1-K1-H6.pep
GWSLSSLNGHSLKAVLNFLLLQVISRYVNSH

SEQ ID NO: 102112 - protein, 90 aa, Gossypium hirsutum
  unsure (1)..(90): unsure at all Xaa locations
  Clone ID: LIB3272-007-P1-K1-A1.pep
MLLISQSVDIYSGVLSXCLPRLKFYYIXGSMKLRAVGLPKNIITTPLLXAYTRPSLYYVHLTLISVGRFQGQHCPXYLSFNPNTAAQTII

SEQ ID NO: 102113 - protein, 31 aa, Gossypium hirsutum
  Clone ID: LIB3272-007-P1-K1-A10.pep
YLNPNFPLTLNPGLTKSSFKWEIEGEPMEGT

SEQ ID NO: 102114 - protein, 118 aa, Gossypium hirsutum
  Clone ID: LIB3272-007-P1-K1-B2.pep
MAAPSSIPLKFTVRRCEPELVAPAKPTPYEQKLLSDIDDQASLQFQVPVINFYQYEPSMEGKDPAEVIREAIAQTLVCYYPFAGRLREGATGKLIVDCTGECVIFIKADADVTLEQFG

SEQ ID NO: 102115 - protein, 105 aa, Gossypium hirsutum
  Clone ID: LIB3272-007-P1-K1-B3.pep
AGYIFSGDMIRALEAYGNDLVNSVMGRAEDICGKFSSNIKVDRIVGSGDARDVICNIVDKIKADTLVMGSHGYGFFKRAILGSVSDHCAKHVKCPVVIVKHPEKI

SEQ ID NO: 102116 - protein, 44 aa, Gossypium hirsutum
  Clone ID: LIB3272-007-P1-K1-B8.pep
FISSFVLSLTFALHLTIYILLELFPSFIHYRGFFVSVCLFRLVD

SEQ ID NO: 102117 - protein, 104 aa, Gossypium hirsutum
  Clone ID: LIB3272-007-P1-K1-B9.pep
MIHAAVKLSKSVISLSRTSSVAATSSQPLRFLHDGTNGPSSNPVAVQMINYALSHARSQKSDESYAQGMLILEQCLSTQSSESEGQFAQNSIGAVLLAMSNLLY

SEQ ID NO: 102118 - protein, 52 aa, Gossypium hirsutum
  Clone ID: LIB3272-007-P1-K1-C5.pep
YRLFNNLSLDHLKKRFSNLPKSKRIGYNRFSWVLSQKCFHILIGPDQTKTSS

SEQ ID NO: 102119 - protein, 51 aa, Gossypium hirsutum
  Clone ID: LIB3272-007-P1-K1-C6.pep
GFVFFFFFLHLHLYLHFRVVGLRFFPIGWDELLNHEITFAAGTAEAEVHLC

SEQ ID NO: 102120 - protein, 112 aa, Gossypium hirsutum
  Clone ID: LIB3272-007-P1-K1-C7.pep
FFSSPLSPVFSLYEDQVGLMDWHQQYIGKVKQAVFSSQRAGRKRVVVSTEENVIASLDLRHGEIFWRHLLGADDVIDGIDIGLGQYVITLSSGGSILRSWNLPDGQMGWESS

SEQ ID NO: 102121 - protein, 103 aa, Gossypium hirsutum
  Clone ID: LIB3272-007-P1-K1-C8.pep
SKPIKGIAGGTDRGLCIACMETPAMATQTQAPKLNQKLNYSMVGKENDMMMIGGLISKKSGIDLMQNCDLPPPLKVFAGLDKAVELMSLNNRAVYSIMGQEDD

SEQ ID NO: 102122 - protein, 83 aa, Gossypium hirsutum
  Clone ID: LIB3272-007-P1-K1-D10.pep
SGVDALANAATLGDNADNSGTTSVATTTKHPRHRPGCSCIVCIQPPSGKGKHKPTCTCVVCMTVKRRFKTLTMRKKKRQSERE

SEQ ID NO: 102123 - protein, 126 aa, Gossypium hirsutum
  Clone ID: LIB3272-007-P1-K1-D7.pep
SMNSVPKKVIAHLLKPRGWKPPVCRQFFLDCNEIADLCESAERIFAVEPTVLQLTAPIKTFGDLHGQFGDLMRLCDEYGAPSTAGDIAYIDYLFLGDYVDRGRHSLETITLLLALKDEHPNYVHLI

SEQ ID NO: 102124 - protein, 51 aa, Gossypium hirsutum
  Clone ID: LIB3272-007-P1-K1-E10.pep
GKTFRNQDLHMGGKSVGPTGATQKKPVQDSDLEFLFLEGRPEKIKMKMKFA

SEQ ID NO: 102125 - protein, 51 aa, Gossypium hirsutum
  Clone ID: LIB3272-007-P1-K1-G6.pep
QCQQEHQWSNFDKGLGDGYRKKRLCPNGVEALITDFKARCMSGNKNHVKEE

SEQ ID NO: 102126 - protein, 33 aa, Gossypium hirsutum
  Clone ID: LIB3272-007-P1-K1-G9.pep
LRSNLNQALSETLYIFITYDHSELILIGRGVFI

SEQ ID NO: 102127 - protein, 34 aa, Gossypium hirsutum
  Clone ID: LIB3272-007-P1-K1-H1.pep
SHPCFMATPGRIPIKFTDRRCEPKLVALAQPTTS

SEQ ID NO: 102128 - protein, 113 aa, Gossypium hirsutum
  Clone ID: LIB3272-007-P1-K1-H10.pep
MASSGTGSPCGACKFLRRKCASDCIFAPYFCSEQGPARFAAIHKVFGASNASKLLLHIPAHDRCEAVVTIAYEAQARIRDPCYGCVAHIFRLQQQVAYLQGQLMQVKAQLAQN

SEQ ID NO: 102129 - protein, 144 aa, Gossypium hirsutum
  Clone ID: LIB3272-007-P1-K1-H5.pep
PGGGGGISRVLQDGDVFEKAGVNISVVYGVMPPEAYRAAKANVTDQMPGPVPFFAAGISSVLHPKNPFAPTLHFNYRYFETDAPKDAPGAPRQWWFGGGTDLTPSYIFGEDVKHFHSIQKKACDKFDPSFYPRFKKLCDDFFYI

SEQ ID NO: 102130 - protein, 54 aa, Gossypium hirsutum
  Clone ID: LIB3272-007-P1-K1-H7.pep
AELSYVCISVCLSLCLLCPCMGGYGKMRACVGLWDIIMRRGLGSEGQLDEPYRL

SEQ ID NO: 102131 - protein, 141 aa, Gossypium hirsutum
  Clone ID: LIB3272-008-P1-K1-A5.pep
KNPFSKSPILPLKPSKNVFKHPSLSLSLKAVLSQNPAKTLNPTFQHCFTKSPDGFLYCEDTKVQDVMEKVEKRPFYLYSKPQITRNVEAYKEALEGLKNSIIGYAIKANNNFKILQHLRMLGCGAVLVSGNELKLALRAGF

SEQ ID NO: 102132 - protein, 32 aa, Gossypium hirsutum
  Clone ID: LIB3272-008-P1-K1-A6.pep
FSLFSFKPTKNVRGVFLTCSDLLKHPYLQNPA

SEQ ID NO: 102133 - protein, 47 aa, Gossypium hirsutum
  Clone ID: LIB3272-008-P1-K1-A8.pep
TFICQTSMIARNDLGKYIQRQARIKDRSIWDAVVWRQTSAPCRFVVI

SEQ ID NO: 102134 - protein, 107 aa, Gossypium hirsutum
  Clone ID: LIB3272-008-P1-K1-A9.pep
MTDQRRSNQKQGRLCDYCNQSKALLYCRADSAKLCFSCDREVHSANQLFSKHSRSQLCDACDGSPASIFCETEQSVFCSNCDWESHKFSSSSLHNRRPIEGFTGCPS

SEQ ID NO: 102135 - protein, 98 aa, Gossypium hirsutum
  unsure (1)..(98): unsure at all Xaa locations
  Clone ID: LIB3272-008-P1-K1-B6.pep
GSYGVLDIRIEETEMPIIGQILXSIREVNNAATVAQGVLYWKPPKHASDXGKALVEDIFRCSDGAGEGVPRIRGSLIRKLREENNVHRSTQMVTAASK

SEQ ID NO: 102136 - protein, 51 aa, Gossypium hirsutum
  Clone ID: LIB3272-008-P1-K1-B8.pep
SAKYSFKISSLSLSLSLSLYLSLSISLSLSHSLSIIRGSGFRPKTLVMSDL

SEQ ID NO: 102137 - protein, 86 aa, Gossypium hirsutum
  Clone ID: LIB3272-008-P1-K1-B9.pep
CDAQHEEGEEDEEERSVVFFLAEAIVKGLQARQIHRSKSQYNLLTYSKTFSVDSLWLSLSLLSISPLERSFKKIQEKLKEKKLKQK

SEQ ID NO: 102138 - protein, 142 aa, Gossypium hirsutum
  Clone ID: LIB3272-008-P1-K1-C3.pep
EVDFGKSTGGNSKLISCAKGLQSLAKRTIERSTAGEAGNFEWDDFREDEGGGDIYRRMKEEFYGNRSQARKSSTNLRKPKGKKLNESCNVDQPKSGDKRMVHSESKLLLCKLKDNDMTLQEGQMNFRKNLSNEFDEQFNSDS

SEQ ID NO: 102139 - protein, 84 aa, Gossypium hirsutum
  unsure (1)..(84): unsure at all Xaa locations
  Clone ID: LIB3272-008-P1-K1-C9.pep
MPTRNRCIGFGWVNTAERWWIRSTRVAIVSFDRCKPKKCRMECKASCPVAKAGKLGIEVTPDLEIAIIFEEERIGXGICVERCP

SEQ ID NO: 102140 - protein, 42 aa, Gossypium hirsutum
  Clone ID: LIB3272-008-P1-K1-D12.pep
SSSVSSIGIVSWTNSFDFSVASPVSFCSRLLVKIPRSSFKTD

SEQ ID NO: 102141 - protein, 64 aa, Gossypium hirsutum
  Clone ID: LIB3272-008-P1-K1-E11.pep
ADSPSSVNAFCLRTMEVYSKTKTRAPAMKQISILFWTMTVLYLLTNAHAKIKTDIMPSTAIVSY

SEQ ID NO: 102142 - protein, 128 aa, Gossypium hirsutum
  Clone ID: LIB3272-008-P1-K1-E8.pep
MVLKGIALPIITLILALGIQAGFSQNISKASFPKGFIFGTASSAFQYEGAVKEDGRGPTIWDTFSHAFGKILDGSNADVAVDQYHRYPEDIQLMKDMGMDAYRFSIAWSRIFPNGTGEINQAGVDHYN

SEQ ID NO: 102143 - protein, 67 aa, Gossypium hirsutum
  Clone ID: LIB3272-008-P1-K1-F11.pep
LLRHIQFSPTLGISIPEDAFKTLATLSFLFLTLFNLGQGSKFDLRNHWPYTGWAGAFTGGGKRLGQG

SEQ ID NO: 102144 - protein, 73 aa, Gossypium hirsutum
  unsure (1)..(73): unsure at all Xaa locations
  Clone ID: LIB3272-008-P1-K1-F5.pep
TAKHGQAKRHYAGTYILIGEILEDIARSYHSXDATHVNXRTDYKLIDIAEDGSVSLLTESGDTRGDLRLTTDD

SEQ ID NO: 102145 - protein, 79 aa, Gossypium hirsutum
  Clone ID: LIB3272-008-P1-K1-G10.pep
KSVVFLLPQASVKSLQARRNPRSKCPDNLLTYTKTASVDSVGLSLSLVFIFPLNHELQQYTRNLNTERPEALISKVRSQ

SEQ ID NO: 102146 - protein, 143 aa, Gossypium hirsutum
  Clone ID: LIB3272-008-P1-K1-G11.pep
VCGLPIFSSKRKTNTVENLGFSISISMDQELDPYICGCIIEFLVRYSPDDMHVKKVIEAFPPLKPRPQLKKAVLLRTMRTEVYAGDVSEKILDALEKIGRIDSNQGLPIPDSMKEAYCAVALECTVKYLPGDTDTCGGKYLDA

SEQ ID NO: 102147 - protein, 118 aa, Gossypium hirsutum
  unsure (1)..(118): unsure at all Xaa locations
  Clone ID: LIB3272-008-P1-K1-G12.pep
SIRWLLLLELDNRPQSIGITALLSLCTLIGLENATLVSVTLQSTLESMGVLMASPMHSYLEQQLENRVQLLKFWTAPLKXCFRASDKDSIQGVVRNSFAGACAKLIEASAKLEIAATF

SEQ ID NO: 102148 - protein, 99 aa, Gossypium hirsutum
  Clone ID: LIB3272-008-P1-K1-G2.pep
CVVKHQMPSASHGFVYVISFMLDSALASTLPVHDPTRISPDHGIYCLAVLSRRRIDSYSLSGYTKRPNIFVPTCIWPANLYVSGTLALSSSLSIPLMFA

SEQ ID NO: 102149 - protein, 82 aa, Gossypium hirsutum
  unsure (1)..(82): unsure at all Xaa locations
  Clone ID: LIB3272-008-P1-K1-H6.pep
ALCLALADQGLFESIADLSEDKGGVGSGLAVKQNCRSTAKNEIPFTICVKCDAPTPXDITMAFEKHLSTYGGLDGCMNSSGI

SEQ ID NO: 102150 - protein, 98 aa, Gossypium hirsutum
  unsure (1)..(98): unsure at all Xaa locations
  Clone ID: LIB3272-009-P1-K1-B6.pep
EGSFKCYPNVCRIRPLYYDCKHXCFLGPCCLMRKSRRSPQVSGEYDNGASLYDNTCALCIAQAAFLPLKWGKMPLAEIELQHFSPHRGQISPNDADYQ

SEQ ID NO: 102151 - protein, 90 aa, Gossypium hirsutum
  Clone ID: LIB3272-009-P1-K1-B8.pep
GIQIVHRVIKVHERQDTGEVDALTKGDINYGDDRLLYAQGQQWLDRHHIMCRAVRFLPYVGWITIIMTEKPIIKYILIAALRLLVITSKD

SEQ ID NO: 102152 - protein, 57 aa, Gossypium hirsutum
  Clone ID: LIB3272-009-P1-K1-B9.pep
RFSFVYMPPSPVCAHTPSTKGLAPRGFQRWPLPSYVIWAWPRRRRVGIGGALKRHPF

SEQ ID NO: 102153 - protein, 133 aa, Gossypium hirsutum
  Clone ID: LIB3272-009-P1-K1-C4.pep
SYGPLINLSEASNHMGHFVQLLVFVHRSTPVQYKLSKGGEIIRTDIQVGDDTRPFFSVSLWKKELRSIVAAGDIVLLRNVKITTFRDVFEARTVDWSSLLRLVHPYQSLVSKSAIELVAECRMGIVVKEKLSK

SEQ ID NO: 102154 - protein, 81 aa, Gossypium hirsutum
  Clone ID: LIB3272-009-P1-K1-D2.pep
RQPLGVRKRRLRPYEELSFLVNGLPTLETAQPEVGDNGRKSTLRRVVFGAPHTALENAQDRVPSEPARTHNRIMYPSEHPL

SEQ ID NO: 102155 - protein, 49 aa, Gossypium hirsutum
  Clone ID: LIB3272-009-P1-K1-E4.pep
GGKASWVKLFYALRVYLIKFNADFPHYILKAPSGKIRCFKSKIQVVLTI

SEQ ID NO: 102156 - protein, 136 aa, Gossypium hirsutum
  Clone ID: LIB3272-009-P1-K1-F2.pep
RTRGSTSWIVEGKDVEWGGSQGPKTLSLKISWKLKDGWSSRFPRYNIYVEKLKKQAVRPQGRKLEIPALAPPNARNGKTEVAGEYLGESQVEAFYVSDFIIPSAISSLKYIIQPCDSGGASQVLDDAPFFQFNVEG

SEQ ID NO: 102157 - protein, 101 aa, Gossypium hirsutum
  Clone ID: LIB3272-009-P1-K1-F3.pep
RPSRLGTCYHLQKLPKTLLLERPHSTALTTKVMKMNIMPSFSDSKHRRSPRGEALLPQKQGYRVLETPEAGFDGASTSGAIFNLSTTVVGAGIMALPATVN

SEQ ID NO: 102158 - protein, 58 aa, Gossypium hirsutum
  Clone ID: LIB3272-009-P1-K1-F4.pep
IKYYPLLFILLTQTESSRRGSPSTKAGLPVSINSRIRFLWFFNLKMPFSISLSQFFYA

SEQ ID NO: 102159 - protein, 57 aa, Gossypium hirsutum
  Clone ID: LIB3272-009-P1-K1-G3.pep
ITTMTLAKYADQKIHCTRILTRFSKFCLRPRALPNIFLSINTSESLRDRETVQLPLV

SEQ ID NO: 102160 - protein, 43 aa, Gossypium hirsutum
  Clone ID: LIB3272-009-P1-K1-G4.pep
LMQLFSLTICKLSLELMGRNILGRSRSHNLNWPNLVQILMLLI

SEQ ID NO: 102161 - protein, 121 aa, Gossypium hirsutum
  Clone ID: LIB3272-009-P1-K1-G6.pep
MAQITPSSDLDFVDDFYYSALFDEDEHEIFPPSDDKYAEELQFQEALMSSTVFSKMGNNDICNPCIAHASSPLLIQAVPLPELLEMETEETGESSLSFCEICAERKENDQMFTTQSCNHSY

SEQ ID NO: 102162 - protein, 29 aa, Gossypium hirsutum
  Clone ID: LIB3272-009-P1-K1-H1.pep
SLLEISFLILHYGIDHDLSTIVFTWFNSF

SEQ ID NO: 102163 - protein, 64 aa, Gossypium hirsutum
  Clone ID: LIB3272-009-P1-K1-H4.pep
LLFIFLSFCCLESALLFSPYAIKEVLLVVYGGLHQTSWILGIFCKPSWCLDWWKLGIRFDILHT

SEQ ID NO: 102164 - protein, 62 aa, Gossypium hirsutum
  Clone ID: LIB3272-009-P1-K1-H5.pep
QMSCSRGHGTVFHVSVRSFHLVIRSNSRALIKRTLCQGSSTGFYNDNRAIKHILACSLKKRN

SEQ ID NO: 102165 - protein, 53 aa, Gossypium hirsutum
  Clone ID: LIB3272-010-P1-K1-A4.pep
KIVYYTLSLLIYIILFYMPLSILTFKSLFLLFYIFLLTILTFYISCSFSNFTL

SEQ ID NO: 102166 - protein, 93 aa, Gossypium hirsutum
  Clone ID: LIB3272-010-P1-K1-A8.pep
PPIRPSFLPIIRSLNPQIYLSNPLVVISSAILSHPRYLFNVFLSFYFSLGYPQAKKTHAIVGREFSGERNPMFSMAFLVFAILEIFCLTGDSF

SEQ ID NO: 102167 - protein, 131 aa, Gossypium hirsutum
  Clone ID: LIB3272-010-P1-K1-B10.pep
METLLLNQTLCRLDLSPKPKRPLCIAPQIFHFKPNKSFALFAVQNQERDFQETGNTLQADVSDESFGEVSKIIGSRAVPGGKAMEYLIEWKDSHAPSWVPQDFIAKDVVAEYETPWWTAAKKADDKALAEL

SEQ ID NO: 102168 - protein, 128 aa, Gossypium hirsutum
  Clone ID: LIB3272-010-P1-K1-C12.pep
EDSSVSFCSAVASRLNSVILPLLDMRMLLVIPLIAYSGLQQAFVWASYTKDIVNPTLGEAGVGGAMAVYGAFDAICSLAAGRLTSGLRSITVIVCGGAFFQALIFLWLLLKYSATSGVLGVIYPLLMA

SEQ ID NO: 102169 - protein, 71 aa, Gossypium hirsutum
  Clone ID: LIB3272-010-P1-K1-C2.pep
PNKQAAATIERNTSPMEPIEVCDYQPPRIFSDLTATNKKHYKSTHVWTVAKKAETGWSSRGHDLQWKRVRC

SEQ ID NO: 102170 - protein, 58 aa, Gossypium hirsutum
  Clone ID: LIB3272-010-P1-K1-C8.pep
VNFQNIFQRFTAKYGHNMFFVIYDQQVTLPLLCFEIFQIFIHIRVSHVKLSSKKGGYC

SEQ ID NO: 102171 - protein, 51 aa, Gossypium hirsutum
  Clone ID: LIB3272-010-P1-K1-D12.pep
YRLMIVRSIAKYAIGSPVARVLAQSIGWCYGQAHLSAALSVLVSNPYISSS

SEQ ID NO: 102172 - protein, 83 aa, Gossypium hirsutum
  Clone ID: LIB3272-010-P1-K1-D6.pep
FIHRQWPRKKMHHQRLNLQEQALMHQGFIEQQYVYYRGILATAEIEPIPSGNVPAGFATRTCRSEYLGNIYTQVTEPLLKEVF

SEQ ID NO: 102173 - protein, 50 aa, Gossypium hirsutum
  Clone ID: LIB3272-010-P1-K1-D8.pep
LVTVAQHNSLVEVIACSSSVVLVVNSDALHFQIGHLLVIGLQKVMRFSDI

SEQ ID NO: 102174 - protein, 70 aa, Gossypium hirsutum
  Clone ID: LIB3272-010-P1-K1-E1.pep
CFHTWHIPPRVHLHVIRGLMSSPISCFSASLACTPLYYPAMSALQAFLFVFHACKIRSWASYDRALRCHE

SEQ ID NO: 102175 - protein, 129 aa, Gossypium hirsutum
  Clone ID: LIB3272-010-P1-K1-E10.pep
LELSPHMKIKVWVYKKTQEEKFSTLKKYSEKAPASNKLATHQVKVSYEYKSVDGSSTLVIPPEQRIKGYRYGPQVVPISTAEWDAVKFKPEKGIKVLGFTDASKIKRHCYMKDVYLFIAEPGNTRATLA

SEQ ID NO: 102176 - protein, 91 aa, Gossypium hirsutum
  Clone ID: LIB3272-010-P1-K1-E3.pep
MAQVVATRSIHANFFSKASGSLQDPVEKLKPASFASKVLLPDHRKSNAVVLTRNSRITAKRAARAEPELIPVSPEDVPKREEQYEQLRGIQ

SEQ ID NO: 102177 - protein, 96 aa, Gossypium hirsutum
  Clone ID: LIB3272-010-P1-K1-E9.pep
MRTNCCHVSFAFVLKLLNSLQGFVGVSIILYSIWMLDQWSHHVPISPPPPPSAPSPVSSVSNSILFNSGPEMGEQAARVFDDFAVGLVSGLDNDVR

SEQ ID NO: 102178 - protein, 46 aa, Gossypium hirsutum
  Clone ID: LIB3272-010-P1-K1-G10.pep
RFKEHLICLQTFYSCDHTSVCKAEISNASYCSSDMQVACSSIQWRG

SEQ ID NO: 102179 - protein, 66 aa, Gossypium hirsutum
  Clone ID: LIB3272-010-P1-K1-G11.pep
RNHILTLLDPEMQEEPPEFWLTLTINQASENGRKRQKLDLDLHRPRDDRDCDNTAESSTTNKRNGD

SEQ ID NO: 102180 - protein, 107 aa, Gossypium hirsutum
  unsure (1)..(107): unsure at all Xaa locations
  Clone ID: LIB3272-010-P1-K1-G12.pep
QVFFNGKELCKSINRDXDVACVAVKKVVILSGESYYKGQDLLILNVTTSYYLLXTHHGEVTDFDTQNITIHPQYYRALSCYYHNQAVVLIHGYQCETTWSIDNNWLC

SEQ ID NO: 102181 - protein, 44 aa, Gossypium hirsutum
  unsure (1)..(44): unsure at all Xaa locations
  Clone ID: LIB3272-010-P1-K1-G9.pep
HFETLNTKSXAPTIHIHHNFRSRNRIKTNQKEIKRKRSRIPSWF

SEQ ID NO: 102182 - protein, 86 aa, Gossypium hirsutum
  Clone ID: LIB3272-011-P1-K1-A11.pep
VHREGAPAPETGRFSGNGATPETEQKDRKRNENRNEIKETKKFQIKFLVYRPPCSTTGGRRTLGFSDGGACREEDQTIEKKREKVI

SEQ ID NO: 102183 - protein, 56 aa, Gossypium hirsutum
  Clone ID: LIB3272-011-P1-K1-A2.pep
MGCRVFELLVWVSLILCLACLVRGFTPADNYLIDCGSFTNTTAGHRVFMADNLASK

SEQ ID NO: 102184 - protein, 59 aa, Gossypium hirsutum
  Clone ID: LIB3272-011-P1-K1-A4.pep
NQIQKTPQSRSVFDTRYFGDVFIAKRLYWHAKGNQKRSSNLNLHEGEGKEMIPSIKKER

SEQ ID NO: 102185 - protein, 53 aa, Gossypium hirsutum
  Clone ID: LIB3272-011-P1-K1-A9.pep
QQKSKREGTFSNKKSSFLNLSIQRLANPTSDWNVYEFMVSIFDVYYYSERAKS

SEQ ID NO: 102186 - protein, 133 aa, Gossypium hirsutum
  Clone ID: LIB3272-011-P1-K1-B11.pep
KVDFLPEESFQNWNTYLSALSQIYSRFNDRLLSRSDDANEITQLRKQSENDMKRCLTWWDLTWFGFGSVIGAGIFVLTGQEAHHHAGPGIVLSYVASSISAMLSVFCYTEFAVENPGAGGSFAYLRIELGDFG

SEQ ID NO: 102187 - protein, 118 aa, Gossypium hirsutum
  Clone ID: LIB3272-011-P1-K1-B3.pep
MATAVPAVRAVNRLPLKSNGRGPTPSSIFLGKSVKKGTSKVNQNKVFPKNFKVVSEYDESKQTSKDRWVGLVYDESDDQQDITRGKGMVDTLFQAPVGTGTHHAIMSSYDYISQGLRT

SEQ ID NO: 102188 - protein, 136 aa, Gossypium hirsutum
  Clone ID: LIB3272-011-P1-K1-B6.pep
MPISQKKKKKKKKISQKIDSLEGGLLVCFVMDQDLVETEKRRKREINIDPGLQWSQWQLLDSILPTGGFAHSFGLEAAIQARLVSGPDDLQNFVIHLLENTGSLLLPFVYSATMNPTLDNCQKLDRILDATLSNEV

SEQ ID NO: 102189 - protein, 70 aa, Gossypium hirsutum
  Clone ID: LIB3272-011-P1-K1-D10.pep
LNQPVQEVIVKIFKFKQIEALEHSFKISLPPILAWPDAFPSHSWIEERINFFFLFFQRTGFHRNDQPSPF

SEQ ID NO: 102190 - protein, 37 aa, Gossypium hirsutum
  Clone ID: LIB3272-011-P1-K1-D7.pep
CRSGGDKSPCLIAMRCISNGFGRTHLALWYEPFYSLS

SEQ ID NO: 102191 - protein, 99 aa, Gossypium hirsutum
  Clone ID: LIB3272-011-P1-K1-F11.pep
LEDARWHSREDVRKALRFAEYKKAQRLAAAKVDQMIKGVKKRWSSSAGYLAKSGEFAPMFVPGPFAITHHLISAWANQDPPTGAKAQMKKPPSGFVLKL

SEQ ID NO: 102192 - protein, 61 aa, Gossypium hirsutum
  Clone ID: LIB3272-011-P1-K1-F9.pep
MMAIKSHHCCFRFIFLILRLLLQLDCVKGVLQFNYYAQRCPDAEEIIQQQVFKLYNKHGNT

SEQ ID NO: 102193 - protein, 94 aa, Gossypium hirsutum
  Clone ID: LIB3272-011-P1-K1-G2.pep
ARSIALKAVNTASLWGLNRSRFGGLPKVQTVRALSTVMSPPSKAVVYEHHGPPDFVTRMIELPPVEGQENQVCVKMLAAPINPSDINRIEGVYS

SEQ ID NO: 102194 - protein, 78 aa, Gossypium hirsutum
  Clone ID: LIB3272-011-P1-K1-H10.pep
KNKNLTENQCGAGYNGSRDLTKPLCILGVGFSFGSREDDSVSKTPGYNPVVVYSKSWCPFSFEVKSFVKKLGVEPLVI

SEQ ID NO: 102195 - protein, 69 aa, Gossypium hirsutum
  Clone ID: LIB3272-011-P1-K1-H3.pep
MGAAGSKLEKALGDQFPEGERYFGLENFGNTCYCNSVLQALYFCVPFREQLLEYYSSNKNGVDAEDNLL

SEQ ID NO: 102196 - protein, 43 aa, Gossypium hirsutum
  Clone ID: LIB3272-011-P1-K1-H5.pep
FYKFLYLNYFYFKPTWVFFLVFLQQIPSYSKKQSLHSNQLELG

SEQ ID NO: 102197 - protein, 46 aa, Gossypium hirsutum
  Clone ID: LIB3272-012-P1-K1-A2.pep
KTCRFSHRDFTFLKYLITYSVLFVFYFILGKCNQFLIWDGDVVGRY

SEQ ID NO: 102198 - protein, 89 aa, Gossypium hirsutum
  Clone ID: LIB3272-012-P1-K1-A5.pep
GTHFFISPSAMHRNDGVCFTSSSFKIPVPSPSQTLASPLSRARHSLFQLLHSLRNRSLPPTTSTHSPLLCCASLSLTAQTYDLLNAPLL

SEQ ID NO: 102199 - protein, 60 aa, Gossypium hirsutum
  Clone ID: LIB3272-012-P1-K1-B10.pep
VTPKSSFLGVGLAPTRCLYSLMRVIIKSRIQCSFPCSSGEFIDVSFDWILKDRTVKLQVS

SEQ ID NO: 102200 - protein, 65 aa, Gossypium hirsutum
  Clone ID: LIB3272-012-P1-K1-B3.pep
LWKHGLERYYSELSYWLLLQHTAGAYMEWDYRTRKTWGIAKSGANMLRGWPTLCTQGCYTGCSTC

SEQ ID NO: 102201 - protein, 83 aa, Gossypium hirsutum
  Clone ID: LIB3272-012-P1-K1-B4.pep
TVRVFIRPNTQVNRTICTQECMRASPTVSSAFGTLRHSWSSLMWRQACSHGNPSDKIKVGRQCIREVCRQLASLRLAPFLVRS

SEQ ID NO: 102202 - protein, 137 aa, Gossypium hirsutum
  Clone ID: LIB3272-012-P1-K1-B7.pep
DAWAPPPPLLKIDLWAIRSGYSRIIKAHSRHFLALSLLFLLPFSFFLSIYPFIAIESYLSFLQQDPSIFPTKIFILNVLYTIPISIFSLLATGSITYSIFHGFYGRPIKLLSAIKAAFTSFFPLFSTCLVTQLIVSG

SEQ ID NO: 102203 - protein, 42 aa, Gossypium hirsutum
  Clone ID: LIB3272-012-P1-K1-B9.pep
SYLVTGHRSCKPYIQYMYSSISAGSDPPIKLIHRETLPEGLF

SEQ ID NO: 102204 - protein, 87 aa, Gossypium hirsutum
  unsure (1)..(87): unsure at all Xaa locations
  Clone ID: LIB3272-012-P1-K1-C11.pep
MADSEDIQPLVCDNGTGMEKAGXAGDDAPRAVFPSIVGRPRHTAVIGVMGQNDAYVGDAAHSKRGILTSKYPIAHGIVSNCDDMEKI

SEQ ID NO: 102205 - protein, 135 aa, Gossypium hirsutum
  unsure (1)..(135): unsure at all Xaa locations
  Clone ID: LIB3272-012-P1-K1-D12.pep
EFAEELFEALARRRGITSSAVNKAQLREFWEQITDXSFDARLQTFFDMVDKDADGRITEEEVKEIITLSASANKLSKIQECAEEYAALIMEELDKDNLGYIEIYNLETLLLQAPSQSTNLVTGSRILSKLLSEKL

SEQ ID NO: 102206 - protein, 44 aa, Gossypium hirsutum
  Clone ID: LIB3272-012-P1-K1-D5.pep
KCLRTPYKLQVRKSVKVQEFYPNSPSKLALYVMKEGLHRSGIIK

SEQ ID NO: 102207 - protein, 123 aa, Gossypium hirsutum
  Clone ID: LIB3272-012-P1-K1-E5.pep
HHYPSISSLFSQTKSTLFSNSGSGSSWLQHNPLHRDASSGVGSRQGPIYSVSRTKPAEVASVEDLFEFICSGPLVDKMGLTQEKVAESIDKWLFYGSKLCRLFQLDELYLTTPQKARFYHYYI

SEQ ID NO: 102208 - protein, 136 aa, Gossypium hirsutum
  Clone ID: LIB3272-012-P1-K1-E9.pep
KISISMKVLGTPRPLPLALDTNDSRVLSHTHSSPSVLSSTKHSHKLSKSMATCIDTSRTTEPSRVSQRPNRSQPDEIHYKYVKFCRPTFTDHVSSIPFSENHTNGIHHQKIADLSFEEEGEVAEIGSLWLKMNEEA

SEQ ID NO: 102209 - protein, 80 aa, Gossypium hirsutum
  Clone ID: LIB3272-012-P1-K1-F11.pep
MASLNLGPVLPAKSRLSLFEHNGSLFVSRRKPKKKNQAIVPVARLFGPAIFEASKLKVLFLGVDEKKHPRKLPRAYTLTH

SEQ ID NO: 102210 - protein, 130 aa, Gossypium hirsutum
  unsure (1)..(130): unsure at all Xaa locations
  Clone ID: LIB3272-012-P1-K1-F4.pep
LTLTIPSSWNHRRRHCLRPTPPLIKCESGGVPLTKQAHRFFSSLTSTAAVDDPATANRLIKKFVASSPKSIALNALSHLLSPRNSHPHLSAIAFPVSXALYTKISEASWYNWNPKLVADLVPLLDIQGKH

SEQ ID NO: 102211 - protein, 79 aa, Gossypium hirsutum
  unsure (1)..(79): unsure at all Xaa locations
  Clone ID: LIB3272-012-P1-K1-G2.pep
MASNSKVFFDMTIGAXPAGRIEMDLFADCTTSTADNLRALCTGKKGSRRSGKPLHYKGCCLHXVIPNFMXHGGDFTDGN

SEQ ID NO: 102212 - protein, 74 aa, Gossypium hirsutum
  Clone ID: LIB3272-012-P1-K1-H1.pep
SNREITVRGKWGNSLIRGVRLTTKTFVSYLLESTTLLYQLLYFFRLGGHYKITVLHFLLNFLKSISCDIYGKWF

SEQ ID NO: 102213 - protein, 47 aa, Gossypium hirsutum
  Clone ID: LIB3272-012-P1-K1-H4.pep
LSIALLRVNLSRISLYRSMGAQPPCPAQILQFHTNQCIFSFRFLILF

SEQ ID NO: 102214 - protein, 51 aa, Gossypium hirsutum
  Clone ID: LIB3272-012-P1-K1-H5.pep
RHEFYHHEHPDSMNWILITLHLLGNLNVQILEPHIQQILNQQDDYLFQAQA

SEQ ID NO: 102215 - protein, 101 aa, Gossypium hirsutum
  Clone ID: LIB3272-013-P1-K1-A5.pep
FMVAMMMQQPQHATPPNPPLPSDSSLRSPTSTPTQSPLPLRPRQPLEHVAVPISAAHPSGEPLVTMGTAALSLARVRLSDISPYDGAPSGSYVRAEEAFSG

SEQ ID NO: 102216 - protein, 123 aa, Gossypium hirsutum
  unsure (1)..(123): unsure at all Xaa locations
  Clone ID: LIB3272-013-P1-K1-A8.pep
APRVRDKTQRIPTLWLSYFSAQYEKLRRASYERGCFRVDIHNIPFGLMHEMKHVVRSLLDLPIQIISNNCPIICRRWYWAPSTKNPLYEALGVYYIAXSHAVHTLSSQLDASSSQRDTVAMYA

SEQ ID NO: 102217 - protein, 117 aa, Gossypium hirsutum
  unsure (1)..(117): unsure at all Xaa locations
  Clone ID: LIB3272-013-P1-K1-B1.pep
MSPVTGASDAGADDDDDKAGYRNEPYDLRSKFLILVKVXSLILVLVGTAVGGVSPYTIKWNRRFLVLGTQLAGGVIFWTATIHVLSDANETFADLTSREHPFGFMVACAGYMWTMLA

SEQ ID NO: 102218 - protein, 67 aa, Gossypium hirsutum
  Clone ID: LIB3272-013-P1-K1-B10.pep
MFCLILKGGSFLVLVTSLGSALNSDGLSLLALKAAGESDPTRCLERWSQSDATPCHWLGIGCTRKPV

SEQ ID NO: 102219 - protein, 88 aa, Gossypium hirsutum
  unsure (1)..(88): unsure at all Xaa locations
  Clone ID: LIB3272-013-P1-K1-B12.pep
PHAATFDIRINCPYTAWSDVSSCGVLRLDQREAXYITVTSGTTQARICARTKCGFVAYDKGLCXTSYRGGALVWWGYGSIPNTLVEYA

SEQ ID NO: 102220 - protein, 119 aa, Gossypium hirsutum
  Clone ID: LIB3272-013-P1-K1-B6.pep
MGSSSKEETATDGDTSSGDTPPSNSNLFSEGERVLAYHGPRIYEAKVQKAELRKKEWKYFVHYLGWNKNWDEWVGADRLMKLTEENVMKQQALDKKQGVDKSSKSGRSSQSKPKSSADA

SEQ ID NO: 102221 - protein, 123 aa, Gossypium hirsutum
  Clone ID: LIB3272-013-P1-K1-C11.pep
METQPSSDNGYAGNNTSSEENLKRQKEIDAWLPITSSRNAKWWYSAFHNVTAMVGAGVLSLPYALSELGWGPGVAILVLSWIITLYTLWQMVEMHEMVPGKRFDRYHELGQYAFGEKLGLYIV

SEQ ID NO: 102222 - protein, 74 aa, Gossypium hirsutum
  Clone ID: LIB3272-013-P1-K1-C5.pep
LMVQHSLEHGIIRPNKGQVLVEPSIPKHHWRSHCFTPTSTKYWQLCASSKDWHYCHVMFIGWDTNNDVTCVPCS

SEQ ID NO: 102223 - protein, 132 aa, Gossypium hirsutum
  Clone ID: LIB3272-013-P1-K1-D2.pep
PPSPKKSPQKELGLSHAFLQCADLILPWLTPQELANVSLTCTTLHRAAQSITLYRSLDASRSFENFPIPFHNTVDQYPYAYFFYTPSQIIPSSSFSLNRQFWGPNSPQTLVLPESGLLDAEMGCALDSMDPL

SEQ ID NO: 102224 - protein, 115 aa, Gossypium hirsutum
  Clone ID: LIB3272-013-P1-K1-D5.pep
GKHHFGFSLRQPFYNLTGQRVGTMFLVRLAQPSTASVQIRSLFILIAVIARHGHSIVWSANHNLLCMDLTEEELQKAPLVLYIERYIISLESGKVVAYKIVFLQIEITCKFKADH

SEQ ID NO: 102225 - protein, 123 aa, Gossypium hirsutum
  Clone ID: LIB3272-013-P1-K1-E3.pep
ETDAFMGARKDLEMEIGAEKTLLAQKMMIYKCYRCSKRGDTATNMLELMIKSPRPTRAKPTLVAYAVLDGTDCVMLTAESAAGASPELAVKIMARICIESQSCIGYRALLIELIRSTALEMSS

SEQ ID NO: 102226 - protein, 78 aa, Gossypium hirsutum
  Clone ID: LIB3272-013-P1-K1-E5.pep
WAGFGSKGNTSPKKDIFCPNTHVKGPTNGSPNSNRWCLKPLEVTQLQAEARRRPLCHRYCTASCLIHFLKSKTWESKL

SEQ ID NO: 102227 - protein, 129 aa, Gossypium hirsutum
  Clone ID: LIB3272-013-P1-K1-F11.pep
ILEIKGRVRLEAFEKFLQELPLSRSRAVMVIHIVCKEGSSESERQSLVETADSYISDGRAGLAEPACGVELYCCPPDAKTLEMLTKVLSKDQIQALNALDNGLIGVVVWRRTQLTSPNSTSHHKHISKK

SEQ ID NO: 102228 - protein, 111 aa, Gossypium hirsutum
  Clone ID: LIB3272-013-P1-K1-F7.pep
LKTISAKIKKPNPRAPHARTCCHRPCPIAARPICTSAVYLLHLNRPLDWPAMVLCRRRIRLERGQRSCFLLDSPSKSSGPLNMLQLRRPGTPSRDAGHRPWRRFGAVEKRD

SEQ ID NO: 102229 - protein, 100 aa, Gossypium hirsutum
  Clone ID: LIB3272-013-P1-K1-G3.pep
MAATTANTSLLKPSPLASSSKSSIPISKSVLHFRTIPRKLTPPRSLSVSSSLSQSNSTPGSTVFFVAPTKAPTHDFISRYAPDEPRKGADILFEAPEREG

SEQ ID NO: 102230 - protein, 80 aa, Gossypium hirsutum
  Clone ID: LIB3272-013-P1-K1-G4.pep
LPLMQSRVWRLYLMLALHVSANDQLGCEHCIPIYRYIICSRPMKSFYASLTAILHARLIVTGQYLISTAFILGLLLESLP

SEQ ID NO: 102231 - protein, 59 aa, Gossypium hirsutum
  Clone ID: LIB3272-013-P1-K1-G9.pep
GGRSIKDLYTFSFKETDWKSNQALDEMNKRFLDLTLLDLLRTHDGKRDYHGGQTKQHVL

SEQ ID NO: 102232 - protein, 55 aa, Gossypium hirsutum
  Clone ID: LIB3272-013-P1-K1-H4.pep
EDGLTDEQGQITCNRFILRPQKISYIVLVPPPRCAHMTAQTGLAKRVISRQTAPS

SEQ ID NO: 102233 - protein, 85 aa, Gossypium hirsutum
  Clone ID: LIB3272-013-P1-K1-H6.pep
FLCILQQDWSLSSTVEPIMGEHSILWQMQPDRNHCRILPKSRTVRPLVRNSRFHSFPNICKSQNSGHGDIERGKVKEGALKKLQC

SEQ ID NO: 102234 - protein, 138 aa, Gossypium hirsutum
  Clone ID: LIB3272-014-P1-K1-B5.pep
KIMEKRERNERPSDLDEVLVKYQVALADGTIVAKTPEEGYEFYVKDGHLFPALTKAIVTMKRGEKVKLIVQPKYAFGDKGKEATDGFPSIPPNSVLNVELELISFKPVIDVTGDSKVFKKILKEGEGALVANEGAAVT

SEQ ID NO: 102235 - protein, 135 aa, Gossypium hirsutum
  unsure (1)..(135): unsure at all Xaa locations
  Clone ID: LIB3272-014-P1-K1-C1.pep
LATPSHDSASTTMAKHVLVPVANGTEPMEAAITXDVIRRSGAELMVASVEKELXVDACHGVNIVGDALDCDXKDTGFDLMVLSGGMHGATNFKGCASLESAGKKQAADRRLYADVCAIPALALGSWGLTNGLKAT

SEQ ID NO: 102236 - protein, 73 aa, Gossypium hirsutum
  Clone ID: LIB3272-014-P1-K1-C2.pep
EDRSVLSLMRRRHRGSALCRVYHESSDRRRKRGSTLYLINTSLPIVVRRFEDLVLEHLPLFEYQGPARPLDVI

SEQ ID NO: 102237 - protein, 138 aa, Gossypium hirsutum
  Clone ID: LIB3272-014-P1-K1-C3.pep
SVLFILTKQVECAGKEAFTWSGGGAIFTSGSPFDPFEYDGKVLVPGQANNAYIFPGFGSGVIISGAIRVHDDMLLAASYALDLQVTDEHYEKGLIYPPFSDIRKISANIAAKVAAKAYELGLASHLPQPKDLVKYAES

SEQ ID NO: 102238 - protein, 68 aa, Gossypium hirsutum
  Clone ID: LIB3272-014-P1-K1-C4.pep
LRASTMFSRMAYMSQLSFQPRKRLIMRATPNRCSIRRRHGSSTLSTSNFSPSSSRALALTMISPRPFL

SEQ ID NO: 102239 - protein, 72 aa, Gossypium hirsutum
  Clone ID: LIB3272-014-P1-K1-D9.pep
TQNTYIVECTFHTNHYCGFTSTCLAAYSMHMTKFNALQLSLLYIETMNIAKYYDHSIESLLGEATDMIHGCF

SEQ ID NO: 102240 - protein, 107 aa, Gossypium hirsutum
  Clone ID: LIB3272-014-P1-K1-E1.pep
VGADDGKVLNQIIDSLTSIANPTENHGTPSQQLNKISLKVGKLQETGMKKDSESDPKRKKSVLILGAGRVCQPACELLASIGTASSCQWYKSCVQNDSEEQMDVHVI

SEQ ID NO: 102241 - protein, 43 aa, Gossypium hirsutum
  Clone ID: LIB3272-014-P1-K1-E11.pep
DWHSGGGTPCSVLYSCTCCIYKAGITVICITDHYERHRKYLTD

SEQ ID NO: 102242 - protein, 124 aa, Gossypium hirsutum
  Clone ID: LIB3272-014-P1-K1-E3.pep
MVPGELRGLHYLAPENPILIAANLGMMQNSIPSFHFNTFESSLPNSHIVPSAQEFAAVSSSISNTSTSNEAGEQQVYFIDEREQRGMISNRESARRSRMRKQKHLDELWSQVIRLRNENQSLLD

SEQ ID NO: 102243 - protein, 55 aa, Gossypium hirsutum
  Clone ID: LIB3272-014-P1-K1-F2.pep
MPRPGPRPYVCERRAWHSDRHQPMRGSLIREIFRVVNEIHSSATKKNKEWQEKLP

SEQ ID NO: 102244 - protein, 71 aa, Gossypium hirsutum
  Clone ID: LIB3272-014-P1-K1-H1.pep
LYREKISNLSPLPDHIVIDLFLRTLRAGKLTERVLKLFIDTGKDEVFSLIQALNIRLTLTPVLPTRCSEKF

SEQ ID NO: 102245 - protein, 89 aa, Gossypium hirsutum
  Clone ID: LIB3272-014-P1-K1-H3.pep
MLSSNSGSQGFLSSTGARCKALSALSSPFLGEDDDDLWRTTNVLPLRSRSLSLPRAYKDDVFKFRYPVITEKPEWWLRTLACVPYLLAL

SEQ ID NO: 102246 - protein, 88 aa, Gossypium hirsutum
  Clone ID: LIB3272-014-P1-K1-H7.pep
HCKSPLTCVMQICQLHFCVVRRHVLHRILSILIYLSNVTLMVQFLVRIWIMAHRALKAIFSQVRPSQRKVAAAICLPHKHTKGCPLSD

SEQ ID NO: 102247 - protein, 61 aa, Gossypium hirsutum
  unsure (1)..(61): unsure at all Xaa locations
  Clone ID: LIB3272-014-P1-K1-H8.pep
MVHKLEAIHGGGGSIKLGTKGTISSLMTKELDSIKTPKQTPPRHKSXAIPAWVACSSTTLK

SEQ ID NO: 102248 - protein, 136 aa, Gossypium hirsutum
  Clone ID: LIB3272-014-P1-K1-H9.pep
FYFILYFVVQKAYSEKPLFLNKLCLYKSNFGPKTPKLTKPITSKPTKLKTQQQPNSKPKTKRTTNPSCCLPVPSPLAWPPSLLQHRPIKSTATSTSGRFSAIVYVSWHGGRHSGGRLAPRRFLGKPREKRKKMKFF

SEQ ID NO: 102249 - protein, 40 aa, Gossypium hirsutum
  Clone ID: LIB3272-015-P1-K1-A2.pep
KTWNFLVARVKLKRQSVLVAQILINCFIWYTFELQRPTNL

SEQ ID NO: 102250 - protein, 55 aa, Gossypium hirsutum
  Clone ID: LIB3272-015-P1-K1-A8.pep
FDLIAKILKPTASSFAVRSKLLYKTKLLRKISSKSLAMPSHGDLYREIEHLMQCK

SEQ ID NO: 102251 - protein, 135 aa, Gossypium hirsutum
  Clone ID: LIB3272-015-P1-K1-A9.pep
CPQLFSKLILIGASPRFLNDENYHGGFELGEIEEVFSAMEANYEAWVNGFAPVLVGADVPTAVREFSRTLFNMRPDISLFVSRTIFNSDLRGELGKVRVPCCVIQTAKDVSVPASVAEYLKTHLGGRTTVEILRT

SEQ ID NO: 102252 - protein, 69 aa, Gossypium hirsutum
  unsure (1)..(69): unsure at all Xaa locations
  Clone ID: LIB3272-015-P1-K1-B12.pep
MATQTPHIIIHPSPGMGHLIPLIEFSKRLVHHHSLTITXVFPTAGSLTPLKKSPLDPFPPSFITFFFLP

SEQ ID NO: 102253 - protein, 93 aa, Gossypium hirsutum
  Clone ID: LIB3272-015-P1-K1-B2.pep
SQDPIIFFVKPRKKMEREDTKSLTSALIHITPENDDFTLQQAVSSNGINEVRRKKIWDEAKKQVWLAGPLIGVSLFQYCIQMTSVMLDDMLES

SEQ ID NO: 102254 - protein, 64 aa, Gossypium hirsutum
  Clone ID: LIB3272-015-P1-K1-B3.pep
STDQTQFRLLMIETDEARSLGTKEQIMFLGTLAATDDSPRKSHEHGLTIYSLILPRAQLLYNPD

SEQ ID NO: 102255 - protein, 87 aa, Gossypium hirsutum
  Clone ID: LIB3272-015-P1-K1-B8.pep
MVKSGEETLDSVTNRRSIAMGKHQEGTIMSKKPVKASAVVVSHVDEKEQSHPGTGSADSEVSSKCIVCSGNNSCQTVRARTKLMNIL

SEQ ID NO: 102256 - protein, 77 aa, Gossypium hirsutum
  Clone ID: LIB3272-015-P1-K1-C11.pep
SSTQAPWRHTNIEHNVQNDLGRSPGRLIHVVSFIVFGHPNLQLILGGLEQSITGLSCSPTLTLNYRGLISQAAHPYL

SEQ ID NO: 102257 - protein, 118 aa, Gossypium hirsutum
  Clone ID: LIB3272-015-P1-K1-C12.pep
MGIARAQDEESERREFEDFRKTLVALAATERSKENDDFKGLTSSHIADLDLQLDKLVCVTSGVSFLGLALVNRLLLRGYSVRILVDNQEDVEKLREMQVSGEMMMACNNKISVVIAKQ

SEQ ID NO: 102258 - protein, 102 aa, Gossypium hirsutum
  Clone ID: LIB3272-015-P1-K1-C5.pep
KGIVINFLNHHASADGIFRLYEDFRESLAKSHVLCLTACQPWKRVIRKKGPTFRRAPHVAWCTLRPRLALENTDDRVPCEPTRTHNQIHVYKDVQTLTHGTM

SEQ ID NO: 102259 - protein, 138 aa, Gossypium hirsutum
  Clone ID: LIB3272-015-P1-K1-E10.pep
ETVLQRLKIIEQEIRDLKQEIQGMRYYEHRLLIELHRKVNYLVNFNVHVEGRKVPNMFYFVQTENYSRRLVTTVISGMTALRLHMLCEFRREMHVVEDQVGCEVMHVDNTVVKCLAPYMTKFMKLVTFALKIGAHLAA

SEQ ID NO: 102260 - protein, 104 aa, Gossypium hirsutum
  Clone ID: LIB3272-015-P1-K1-E4.pep
MESCNCIEPQWPPDDLLMKYQYISDFFIALAYFSIPLELIYFVKKSAVFPYRWVLVQFGAFIVLCGATHLINLWTFTVHSRTVASVMTTAKVLTAAVSCITALM

SEQ ID NO: 102261 - protein, 94 aa, Gossypium hirsutum
  unsure (1)..(94): unsure at all Xaa locations
  Clone ID: LIB3272-015-P1-K1-F9.pep
MPNQGLEAMQYHWAGMALIPQHQGMMTYPSHHYMAYNHPHLDYQQQYQQQQLHKQQHGSNSDEGKTIWVXGDLLHWTDETYLHSFFCQSREDSA

SEQ ID NO: 102262 - protein, 70 aa, Gossypium hirsutum
  Clone ID: LIB3272-015-P1-K1-G5.pep
TKVQKNDFYLVTSNGLVNKSALATNMNNCHALHQASILQIMLSALPSCAFCRAATLARCAANAIALFPLS

SEQ ID NO: 102263 - protein, 68 aa, Gossypium hirsutum
  Clone ID: LIB3272-015-P1-K1-H3.pep
CNTYISSVPKRTSPHYDPKAYLPPIGEAWPLPYIEQSIFRGWRLNLPRQELPISLLLRCHRWGGQTVT

SEQ ID NO: 102264 - protein, 85 aa, Gossypium hirsutum
  unsure (1)..(85): unsure at all Xaa locations
  Clone ID: LIB3272-015-P1-K1-H7.pep
MLAYQXLMSGDELLSDSFLYMDIVNGMLWQGDGLWIVQGAGNAYIAAHYSADGAGLDGGVVNQASKAVDNVDTFKLXEPPPFNKK

SEQ ID NO: 102265 - protein, 64 aa, Gossypium hirsutum
  Clone ID: LIB3272-016-P1-K1-A5.pep
HTNVSPHGLCTTQPQFSIRLHPTGTFRPSCIIYKPPHIIFLTDNTPIRAFKNAESIDLPFPMSQ

SEQ ID NO: 102266 - protein, 69 aa, Gossypium hirsutum
  Clone ID: LIB3272-016-P1-K1-A8.pep
GQRNMVSLHIYSLYIASVSPLLCTSMRHGTGWPYVRLSRAPTVRASSPTRGNTAVDPMGIPNWSTNDSV

SEQ ID NO: 102267 - protein, 126 aa, Gossypium hirsutum
  unsure (1)..(126): unsure at all Xaa locations
  Clone ID: LIB3272-016-P1-K1-A9.pep
TAFTRSVGDSIAEKIGVIAAPEISGVPLTRNHIFFGVASDGVFEFICIKTGVNMAXEYADPRDACAATAGESHKLWLDYEKHPDDFTIIIVQIKGLCNSGARATDNEVDCRPLVMKSHKGSFDTSS

SEQ ID NO: 102268 - protein, 102 aa, Gossypium hirsutum
  Clone ID: LIB3272-016-P1-K1-B1.pep
MTHSHSSQNPVIEQQRVIIPNKHGEKLVGLLHETGSKEIVILCHGFRSTKADRTMVNLAVALEKEGISAFRFDFAGNGESEGSFEFGNYSKEADDLHSVIQH

SEQ ID NO: 102269 - protein, 84 aa, Gossypium hirsutum
  unsure (1)..(84): unsure at all Xaa locations
  Clone ID: LIB3272-016-P1-K1-C10.pep
MGINNLSFHSYSQIKLREVLHTEGGQICDHMVAKDGIEVCADHGINPTGXFQRDWDRHLGRINDYYNESSGGGFGARARLMRSC

SEQ ID NO: 102270 - protein, 128 aa, Gossypium hirsutum
  Clone ID: LIB3272-016-P1-K1-C3.pep
SDPSCASVLQSVLCARCDPFSAQLFAIDTETRTVPLLCNSTVSTNSSQSNQATNDFCSNVWDTCQNVSMLNSPFAPSLQGQAGAPANSNFTKLIDLWQSKTDFCNAFGGASTDESVCYDGEPVRLNET

SEQ ID NO: 102271 - protein, 62 aa, Gossypium hirsutum
  Clone ID: LIB3272-016-P1-K1-C8.pep
QKQNFWLPGHYYLFFSSPSRALCTPNFVLNSISLLISKFLEVLCPQYLAIPFKFLNLFFFSP

SEQ ID NO: 102272 - protein, 108 aa, Gossypium hirsutum
  Clone ID: LIB3272-016-P1-K1-E5.pep
MGGSRAQVNKPHKTRFSSKSSRNIHKISQKDKNRIAKSNRNVTQGARAARLQRSKMLREQKKEALLKEKRASSGSASPPRVILLFPLSASVNVSSLAEDILRLLSADV

SEQ ID NO: 102273 - protein, 127 aa, Gossypium hirsutum
  Clone ID: LIB3272-016-P1-K1-F11.pep
RDFWLLRYTSVLEDGSLVVCERSLKNTQNGPSMPPVQHFVRAEMLPSGYLIRPCEGGGSIIHIVDHMDLEPWSVPEVLRPLYESSTVLAQKTTMAALRQLRQIAQEVSQSNVTGWGRRPAALRALSQ

SEQ ID NO: 102274 - protein, 47 aa, Gossypium hirsutum
  Clone ID: LIB3272-016-P1-K1-F6.pep
LTWCTEKHKLTPLWTQIEKKPLLNTVVPLGWWTDTLTDTSVHTIDRG

SEQ ID NO: 102275 - protein, 65 aa, Gossypium hirsutum
  Clone ID: LIB3272-016-P1-K1-G12.pep
IWESFSSFVPKFMPNKKTEALGFAVTSISFWHLDLHCGIYCVFSSSRAMKCFIFLSWRRKDEPKT

SEQ ID NO: 102276 - protein, 56 aa, Gossypium hirsutum
  unsure (1)..(56): unsure at all Xaa locations
  Clone ID: LIB3272-016-P1-K1-G3.pep
RTHFRVLSPGLMNLNHQKLQXKSKLLLNHQIYPVFSVKSRGRYVTCDFYTHSLTWC

SEQ ID NO: 102277 - protein, 104 aa, Gossypium hirsutum
  Clone ID: LIB3272-016-P1-K1-H9.pep
MKKAELVFIPFPAKGHLVSTVEVAKLLVDLNSNLSIYALIIERTVDAESTVYADSLTAASTTTRIKFIHLPQPVQDTDAANFIRSVVQTHEPLVREAVTIIVEH

SEQ ID NO: 102278 - protein, 132 aa, Gossypium hirsutum
  Clone ID: LIB3272-017-P1-K1-C10.pep
MPSSLQLHRTTTAVGTCHHQKQQPPPPTTLTTFFPLPTGVSFPDMVSAYHFHTLGPNQCCSAVVQTINAPVETVWSVVRRFDNPQAYKHFLKSCHVIVGDGNVGSLREVHVISGLPAAFSTERLEILDDEHH

SEQ ID NO: 102279 - protein, 85 aa, Gossypium hirsutum
  Clone ID: LIB3272-017-P1-K1-C9.pep
LNIWKRRDYNNLSGLRVRRQGFAKIFYNPLHHTSPLWWLHWWVANGCLRRFRRPAVTASRISTTSIISTAAAALAVAFTHPLIST

SEQ ID NO: 102280 - protein, 97 aa, Gossypium hirsutum
  Clone ID: LIB3272-017-P1-K1-D11.pep
MATSALAIATAKPLTHRFSNSKHTSSPSFSCSCSSSTPLPPPNEPKLSFSSKPVAKQCVFNVGVGLLATSLLACSPLEADATRIEYFATVGEPQCEL

SEQ ID NO: 102281 - protein, 125 aa, Gossypium hirsutum
  unsure (1)..(125): unsure at all Xaa locations
  Clone ID: LIB3272-017-P1-K1-E5.pep
NXXSCFRARVXWXXFXAYNXXXWXXLXXGTFXXXKNXPXXMXXFIXLXFXDFXXDMXPICXXLQXSFXXLPFKNXXNFFKNXKQKGYSXEIARAYXXQTNXMXXVXXQSFTLFLEWXXTNYFNXC

SEQ ID NO: 102282 - protein, 127 aa, Gossypium hirsutum
  Clone ID: LIB3272-017-P1-K1-G11.pep
MEFSLRLQYYRLVCVMVLLPALCYSKDYFVKSRATYYGSSDGLGTTSGACGFGEYGRNISSGNVAGVYRLYKNGVGCGACYQVRCTTNPQICTKKGVNVVVTDYGQGDNTDFILSHHAYEAMARPGT

SEQ ID NO: 102283 - protein, 96 aa, Gossypium hirsutum
  Clone ID: LIB3272-017-P1-K1-H12.pep
HLSSLLSHLNKRGRLLLLWRNRPHLRSHSPSSLFTSYYTPQPHSPSTCSFAIPYSRKTFSSRSTFLNQPSSTSSPRFNLHRISSSSSNAQFILYNL

SEQ ID NO: 102284 - protein, 91 aa, Gossypium hirsutum
  unsure (1)..(91): unsure at all Xaa locations
  Clone ID: LIB3272-018-P1-K1-C9.pep
KELKAFYISKSGVKGLVNAGITNAPRMFMTIYISSNTLXQPXKTQYKFGFISLQSIEYDPRSLIEIIVEVRHSLDTWVYFQIVNHGYTVCV

SEQ ID NO: 102285 - protein, 79 aa, Gossypium hirsutum
  unsure (1)..(79): unsure at all Xaa locations
  Clone ID: LIB3272-018-P1-K1-D2.pep
PSKAEKKILYDAKLCHLLDEHTQIWIGTRDKVYSNHLXKHVVKWLTLHTQRAVMVTSIMMHNVVRMHAEKTVNQAFINF

SEQ ID NO: 102286 - protein, 143 aa, Gossypium hirsutum
  unsure (1)..(143): unsure at all Xaa locations
  Clone ID: LIB3272-018-P1-K1-D3.pep
MDKVKFVMLFVFLVSLLGATMGEQCGRQAGGALCPNNLCCSQYGWCGNTDDYCSPEKNCQSNCRSGPPPPTGEGATVRSTYHFYNPEQNGWDLMAVSAYCSTWDANKPYSWRSKYGWTAFCGPVGPSFPAAXGRCLRVRNSRT

SEQ ID NO: 102287 - protein, 136 aa, Gossypium hirsutum
  Clone ID: LIB3272-018-P1-K1-D6.pep
ALHIENAPLLTDVLIGGNLDDEPAFAFCPLSGYLCQLKSLTLEMSAYNMTFPNFPELTNLRHLAVSAYGGYDDDLLVLTSLIDASPSLNKLSLELNIWRSSTYNHAHNTSNVTGKPIPSLKVVQVIGFRGFKIDVD

SEQ ID NO: 102288 - protein, 110 aa, Gossypium hirsutum
  unsure (1)..(110): unsure at all Xaa locations
  Clone ID: LIB3272-018-P1-K1-E2.pep
MATTEECHSIQLIDGDGLFNDVGTDRLIKEIKLAECGLSYAVVAIMGPQSSGKSTLLNHLFCTNFREMDAFKGRSQTTKGIWMAKCAGIEPCTLVMDXEGTDGRERGEDD

SEQ ID NO: 102289 - protein, 70 aa, Gossypium hirsutum
  Clone ID: LIB3272-018-P1-K1-F1.pep
FKKKNIYCFGSLENGKNETIFFSPFFFYLFISANSQWRLSKDNVKERGENKAQKPSILSQKILRSLTEKN

SEQ ID NO: 102290 - protein, 49 aa, Gossypium hirsutum
  Clone ID: LIB3272-018-P1-K1-F5.pep
KAKCRLHFIDKTSHVYNIKHEIFIPTIFTYRGIIELKKDYKLKALTTSF

SEQ ID NO: 102291 - protein, 76 aa, Gossypium hirsutum
  Clone ID: LIB3272-018-P1-K1-F7.pep
MGDSSLALGTSVHKALGGGSLSDVLLGRKWRGGSVMLVLATTMWVLFEVAEFNVLTFGANVLVLLIVILFCGTKSA

SEQ ID NO: 102292 - protein, 50 aa, Gossypium hirsutum
  Clone ID: LIB3272-018-P1-K1-G11.pep
QACSVLHTHLAPFISGEKTPLFNISEKRLAHYETETSRVAVSGAVTTEAT

SEQ ID NO: 102293 - protein, 146 aa, Gossypium hirsutum
  Clone ID: LIB3272-018-P1-K1-G2.pep
SFGFCRLRMSHFRRLLSLLARNQPQASLFKEPLSPAISSASVSFNSRYDFYRRWLQTQPDPSGLAIDNTENQEADSLKPASCSANVPSETNDSAMKHTAISNLKTSARHDLAMIFTCKGWGTPTGKNGCRGSYEKGVVVVRCGGCN

SEQ ID NO: 102294 - protein, 116 aa, Gossypium hirsutum
  Clone ID: LIB3272-018-P1-K1-G4.pep
METSQPLSIGSFSYSWLVNLKPSLDSVDSSLRASLDAYDEASFIEKDPRMPPSKRFFRNSQDFKFDFPILQTPLTLVHADELFSNGHVMPFFINPSKVEAYEVFGSTSSLPTTTSH

SEQ ID NO: 102295 - protein, 104 aa, Gossypium hirsutum
  Clone ID: LIB3272-018-P1-K1-G8.pep
DEAAEDFSSKQPNKNLDATPQSQLLKGESEEQVAILVKAPQDTSPKAKGNAPLWRQVVGFLHQILEELMAPPTLGAIFGFTFGAIDWLRNLVIGPGASLPGRPK

SEQ ID NO: 102296 - protein, 55 aa, Gossypium hirsutum
  Clone ID: LIB3272-018-P1-K1-G9.pep
PERKQETIWSHLVKKMKGECLEPQNEGENPNNNMFSKLHHPFSHHCQLIHDSDNT

SEQ ID NO: 102297 - protein, 49 aa, Gossypium hirsutum
  Clone ID: LIB3272-019-P1-K1-B12.pep
NGRAGPTSPVRKKKSFFTSILETIPLQVVCFTLLKGYHRDLTNITSYSR

SEQ ID NO: 102298 - protein, 108 aa, Gossypium hirsutum
  unsure (1)..(108): unsure at all Xaa locations
  Clone ID: LIB3272-019-P1-K1-B5.pep
CPRAVTFSNQHTESALKAVNDSLSGKSSISGTXLTKDDIKVHAAVMKNPGDSFHNASQGCNSGSSQLAASFPGKAVDVGFGGIAAPAESAKAEAAHDDHDLDLFRDET

SEQ ID NO: 102299 - protein, 124 aa, Gossypium hirsutum
  Clone ID: LIB3272-019-P1-K1-B7.pep
TFQVLSPPHFHQKAAVKLSAMSTAPPISADRVQKFIEDLEAQKKIVSKCTELFTTLTNHFTSLQNSLSQKSQSLDAKFLSLSSKFCQTLDSLSQRESSLPDRESCGAAHIETLKEAGFAEFKDP

SEQ ID NO: 102300 - protein, 89 aa, Gossypium hirsutum
  Clone ID: LIB3272-019-P1-K1-B8.pep
IFTNFFADFCSLFSLILSLFSFLHLWAKDGVLPLVPNPVLRSFLQTNSIPPTVAAVLLSGCSNTTTTTGTCLSSLLVFWGRAMTTAVEL

SEQ ID NO: 102301 - protein, 31 aa, Gossypium hirsutum
  Clone ID: LIB3272-019-P1-K1-C11.pep
LGLRLPLQIISNHLLFHREWRSSPPFICQHA

SEQ ID NO: 102302 - protein, 77 aa, Gossypium hirsutum
  Clone ID: LIB3272-019-P1-K1-E3.pep
PTFFEYPGACFCGCYHVKTEGIDFPPLRLEKGTLRFQLKRPLPVVFFVTLTPSKTTTCVFHRLFKYHFMISMRREIV

SEQ ID NO: 102303 - protein, 107 aa, Gossypium hirsutum
  unsure (1)..(107): unsure at all Xaa locations
  Clone ID: LIB3272-019-P1-K1-F12.pep
TSDYKPLFSKDSKKPKTHAGILPRLDGKXEATIPMKHRFTLRNHIDTKEATTLIQCLQDNGLNCLRNCRRHHQCSSRCISLVMLLVPLQANDPISLQLPRRFTLILN

SEQ ID NO: 102304 - protein, 64 aa, Gossypium hirsutum
  Clone ID: LIB3272-019-P1-K1-F6.pep
GSLRGSWKRVGDIVGEGSHESPDRSTMNSGGGGCNQPPRRGKLCLASHHSEIASPLAMNFSLPL

SEQ ID NO: 102305 - protein, 71 aa, Gossypium hirsutum
  Clone ID: LIB3272-019-P1-K1-G6.pep
GKQLALELIFRCEKKMGFFFETSCIAKEKSTCYSSLFLWRKMENLFSEKEGFPFGLKGVVKIQKKSPPFPK

SEQ ID NO: 102306 - protein, 101 aa, Gossypium hirsutum
  Clone ID: LIB3272-019-P1-K1-G7.pep
KKRKSLKMGSSSSRPGLNPSQGRLNLRFNRFPRLSSLFTCSSGSSYAPLEMEDYPTQIPVKSSEHRDSISNMVQTPLEESGSICSTETGLSCTGTETGTSS

SEQ ID NO: 102307 - protein, 44 aa, Gossypium hirsutum
  Clone ID: LIB3272-019-P1-K1-H8.pep
SIDLHFVLVLNKETMTLASPKGNGKMVAFPRGLTSIAASVVILA

SEQ ID NO: 102308 - protein, 91 aa, Gossypium hirsutum
  Clone ID: LIB3272-020-P1-K1-A4.pep
PTWINTNLTPSFREGYHVFGMAHIFDSFNVTFIHVTDFSGKQTIVPISRDLMVKADRENSSPYASMLAAQDVSLLPKEYDITALYINHKNL

SEQ ID NO: 102309 - protein, 126 aa, Gossypium hirsutum
  unsure (1)..(126): unsure at all Xaa locations
  Clone ID: LIB3272-020-P1-K1-A5.pep
TFPGLGSPIIHVDVTHVGWRVLVTSDTYVVLIITLFTDEDGKPKTGFSSRMXYEIAGPRLFKMTPLDSHIADNNNKSHGTHFSWFTRIPQQDRHLVATVGKCILIWQPMQARTALTXCYRNQTCVK

SEQ ID NO: 102310 - protein, 99 aa, Gossypium hirsutum
  Clone ID: LIB3272-020-P1-K1-A6.pep
KIHKVDLRQGKRPLPPSDHESEEKEEAPPQFYTARSQQDTNAMIQALTQVIGNDNDNNNPLLVQLHHHNQYQYQSQHQPQGNVRRIHYRGVRQRPWGKW

SEQ ID NO: 102311 - protein, 54 aa, Gossypium hirsutum
  unsure (1)..(54): unsure at all Xaa locations
  Clone ID: LIB3272-020-P1-K1-A8.pep
MTLLRILEELPDLQXDPPSRCSAHALAEDMFHCQATITLPLNSPYACCVVLVTI

SEQ ID NO: 102312 - protein, 96 aa, Gossypium hirsutum
  Clone ID: LIB3272-020-P1-K1-B1.pep
IVRRQATRAILCYSPSIGLAPFALIRRRPSLCVKVHASVNESDQPKWCKRNAGPNMIDVHSTKECISALSDAEDRLVIVECYGTWCACCRALFTKL

SEQ ID NO: 102313 - protein, 69 aa, Gossypium hirsutum
  Clone ID: LIB3272-020-P1-K1-B4.pep
VWSSSRVTPDSICSILKTVPSRSICCSACFISRRRCTSACKCWLEKSLVQFVSGNINSNSACMDRLYNL

SEQ ID NO: 102314 - protein, 117 aa, Gossypium hirsutum
  unsure (1)..(117): unsure at all Xaa locations
  Clone ID: LIB3272-020-P1-K1-B6.pep
MTLLFGCAAVESTRNNYNPMQMESNGLTEXKCSVLSVICHTKDAMVLIRIAYNHGKRLELVDEMKHQIQIFDDNXXLIISTNKKGLTYTLACNHYTDRSCEESMXHRVGAAQNCSAT

SEQ ID NO: 102315 - protein, 132 aa, Gossypium hirsutum
  Clone ID: LIB3272-020-P1-K1-C2.pep
FSPLRVPHKIGDVKVKGTWPRFHGWSRQENRVRKPPWFLKFPVGRTCTLNNKFPTAWWNWLAPNCGWNLSWIMPPQQILGTVFWFRPLLAKEPPPQPWVKNYPASKPDEPFPRPGSGPPNPKSIRSAMAYMF

SEQ ID NO: 102316 - protein, 117 aa, Gossypium hirsutum
  Clone ID: LIB3272-020-P1-K1-D2.pep
EKYDEVKCWQGELIYVPEKWTPFDVIFLYFLPALLFELDQIFAALAKRCSSGARVVISHPQGREVLEQQRKEFPDIVNGNLPDKTTLQKVAADHSFEMTEFVDEPGFYLAVLKFSEA

SEQ ID NO: 102317 - protein, 72 aa, Gossypium hirsutum
  Clone ID: LIB3272-020-P1-K1-D4.pep
IHTKRPQQVVNRSTSRTSGWTAPFMTPLAIMGSTAYQLCHAAPVLRTWPGSSPIDPRPIKTTPFSESSVETE

SEQ ID NO: 102318 - protein, 96 aa, Gossypium hirsutum
  unsure (1)..(96): unsure at all Xaa locations
  Clone ID: LIB3272-020-P1-K1-D6.pep
MKINTAKHVFLFAKINFAAALALAQVVRYQRLRMNFDTDNGAKAKNIIKDEVXLLFNRHKNTAFFXRINISYDCTVHSCDALLLLLSKSWSFSEKE

SEQ ID NO: 102319 - protein, 78 aa, Gossypium hirsutum
  Clone ID: LIB3272-020-P1-K1-E10.pep
PFLCAPSAYLFRQHSRAFTQFILLHCLPEPFASPLVCVFDSPILASFCVSILLHFMAPGDNPRLKEKKDDEGTRHVPP

SEQ ID NO: 102320 - protein, 132 aa, Gossypium hirsutum
  Clone ID: LIB3272-020-P1-K1-E2.pep
NGVGIGTYSHGDDGDDVKRKAGLKALIAMVFASVTSIKAAYAELQMAQHPYDGEAIQVADQAVVEQLKVLSELRHKFLKQDLDLSPQVTLMLAEIQEQQSMMRTYDITIKNLESDIEEKDSAIDLHHKQLEH

SEQ ID NO: 102321 - protein, 57 aa, Gossypium hirsutum
  Clone ID: LIB3272-020-P1-K1-E3.pep
PNSCKHGSILYRDKSTSPFMKEKPPLQTTGNMFSLSPKHVNKKPRAWGPPKRTGTQA

SEQ ID NO: 102322 - protein, 53 aa, Gossypium hirsutum
  Clone ID: LIB3272-020-P1-K1-E6.pep
TSPLDIFHLGRSEHQVVLSTPASHKYTKKPNQTGETLNGVSISSHLTTLVPGA

SEQ ID NO: 102323 - protein, 79 aa, Gossypium hirsutum
  unsure (1)..(79): unsure at all Xaa locations
  Clone ID: LIB3272-020-P1-K1-F3.pep
ARHRRNSVKNDENCENSALMVMPLKEEPIEPGPDRKTHPSXPIRVVPVSKQMSMQIPIPTPVTTAKRSYNKDRHTKVES

SEQ ID NO: 102324 - protein, 132 aa, Gossypium hirsutum
  Clone ID: LIB3272-020-P1-K1-F7.pep
LVQKEKRKTEEPSPLLSFNLIEKSSKRRGRFLFLSPLFGCIMTGFWFHHFWLPRFPIMGRGLRVMRATLSRTRRVNGRVMRSLRDSQVAASEMVRQNRRTRAKLELIFVANTLANQWVYDRLVEIENDPLMR

SEQ ID NO: 102325 - protein, 53 aa, Gossypium hirsutum
  Clone ID: LIB3272-020-P1-K1-H3.pep
PEFPGTPNASAGFIILTPHRVKHTMWGRGVTLYAVTDVSPHISHYTYTLRTTR

SEQ ID NO: 102326 - protein, 97 aa, Gossypium hirsutum
  Clone ID: LIB3272-020-P1-K1-H7.pep
MPSAVSQQWHEKATAFFSSSGVKLKEASQTDVTFVGEAAKDANGNVTDVAKRVGSMDKNRWAFLRQPATRHAVQDSLILAAATTGTFLRKGITGTKD

SEQ ID NO: 102327 - protein, 88 aa, Gossypium hirsutum
  Clone ID: LIB3272-021-P1-K1-A3.pep
PFRISGLRPPVRWGLRKGLPFSFTDLPTLVTVKPECGPNGRKSTPFFCCRLPPAWPLKFRRTACHLAPFFLIPGSVFDGDHPLVIEPT

SEQ ID NO: 102328 - protein, 90 aa, Gossypium hirsutum
  unsure (1)..(90): unsure at all Xaa locations
  Clone ID: LIB3272-021-P1-K1-A8.pep
FEEMLGKGAMKTVYKAIYEVLGMEVAWNQVKLNEVLRSPEDLQRLYSXVHLLSTLNHDSIIRFHSFXIDVHRKTLNFITEMLTLGSLRAY

SEQ ID NO: 102329 - protein, 54 aa, Gossypium hirsutum
  Clone ID: LIB3272-021-P1-K1-B6.pep
YFDKRTRALSMINNKFQDFLTYLFQSPASTFQKFPNYRIILMTYHENTGITRHP

SEQ ID NO: 102330 - protein, 77 aa, Gossypium hirsutum
  Clone ID: LIB3272-021-P1-K1-B9.pep
QTENQNMGAVSRTGLLHKAANDFPTRRAPSVCGRIDMTHAQSPHITYHAAILLIACIIHHGDKRYFTFTNTGMHDIM

SEQ ID NO: 102331 - protein, 59 aa, Gossypium hirsutum
  unsure (1)..(59): unsure at all Xaa locations
  Clone ID: LIB3272-021-P1-K1-C9.pep
FPEXAIGEAWSAELQTEIDLWKYTISNQTLKFNFKENPINQFFPSALNSKSRTNPPNKN

SEQ ID NO: 102332 - protein, 43 aa, Gossypium hirsutum
  Clone ID: LIB3272-021-P1-K1-E1.pep
GLKTLGGHTSPGISDKCHIEPLRHWLFRHFAHPSKDRLVPRCV

SEQ ID NO: 102333 - protein, 136 aa, Gossypium hirsutum
  Clone ID: LIB3272-021-P1-K1-E5.pep
KTTAGSGKKKKKNSNSGGVSDFDGVTGACGNELGDSGRANLRSDSLSLRLGNLQKYVEGEHVAAGWPAWLSAVAGEAIHGWVPLKADSFEKLEKIGQGTYSTVFRARDLESGKIGALKEGRFDNFEPESVRFMARE

SEQ ID NO: 102334 - protein, 112 aa, Gossypium hirsutum
  unsure (1)..(112): unsure at all Xaa locations
  Clone ID: LIB3272-021-P1-K1-F11.pep
RSPLDWESRVKISLGIARGISHVHSMGGPKFTHGNIKSSNVLINQEHDGCISDLGLTPLMNVPATPSRSVGYRAPEVIETRKHTHKSDVYSXGVLLLEMLTGKAPLQSPKRD

SEQ ID NO: 102335 - protein, 131 aa, Gossypium hirsutum
  Clone ID: LIB3272-021-P1-K1-F7.pep
NILKFSWLNASESFVESIAKLKTACLARKKFVIMALEAVVFQRDPFCYGGSGPCNTYGVGFQQQEEKANYSNNGEMVSKSGGGGTRGSSSSSFMVHQKEWPWDFNSSSSPDIGFSTGGPIFSPTEAPAIDT

SEQ ID NO: 102336 - protein, 113 aa, Gossypium hirsutum
  Clone ID: LIB3272-021-P1-K1-G10.pep
SSGLLYNLYIYFPIMKSTQRYDQSTLDTVYGFKDIGDNWGVLCGLLYTFTTPSNRRIAYFGGPCLLLAVGALQCFMDYLLIGAYVVEMIPKPSAAGMCILKTSSTSCSDSLLY

SEQ ID NO: 102337 - protein, 94 aa, Gossypium hirsutum
  Clone ID: LIB3272-021-P1-K1-G5.pep
AMCSMSAQRHKGGAPAVDMLKSSSLVILSRPVQVVVVQAIAIVSKETGLASFVRIPLMICDSVFTKNMLPADHPPPSSWSVQYCNPFYSYTVIS

SEQ ID NO: 102338 - protein, 65 aa, Gossypium hirsutum
  Clone ID: LIB3272-021-P1-K1-H10.pep
ESVFIIQERQQWGGGIVTTRRHFFDLLNYINILVDKVTLGGDNWVYIHANSAYSHMSLQKALYKN

SEQ ID NO: 102339 - protein, 120 aa, Gossypium hirsutum
  Clone ID: LIB3272-021-P1-K1-H9.pep
MDVKARSSSGPNMVSTEEEDLKRGPWTIEEDFKLINYISIHGKGRWNSLAHSAGLKRTGKSCRLRWLNYLRPDVRRGNITLEEQLLILQLHSRWGNRWSKIAQYLPGRTDNEIKNYWRTR

SEQ ID NO: 102340 - protein, 141 aa, Gossypium hirsutum
  Clone ID: LIB3272-022-P1-K1-A11.pep
NMWDNNQHQFTLEMTVVSAQGLKNTSSFIFTHRLRPFITITTFPSPLEAADLKSCRGFQTRVDDQGGVNPTWGDKFHVPIHHTFFANRYSCIYLQLFTKRLISGKAQLGWCQIPAADIGLPPRGSVRQLYYRLREADGTRT

SEQ ID NO: 102341 - protein, 66 aa, Gossypium hirsutum
  Clone ID: LIB3272-022-P1-K1-A2.pep
VAGSCVSLFISLNQKDFSFYLRERPCRFTRICICADELLCYSFYYTAIWYDLLCLRRGNVSCARCY

SEQ ID NO: 102342 - protein, 107 aa, Gossypium hirsutum
  unsure (1)..(107): unsure at all Xaa locations
  Clone ID: LIB3272-022-P1-K1-B10.pep
FLITQSPKGMKTMSTGLFXTTLSLGFFFSSLLVSIVKATTGSSDKQGWLGEHINKGRLDCFYGLLAALSFLNFGLFLLSAVWFRKKTVKQAPKMEIVVKESTIEEKC

SEQ ID NO: 102343 - protein, 44 aa, Gossypium hirsutum
  Clone ID: LIB3272-022-P1-K1-B12.pep
FSCSLNLSLIPTIEVCWPGIANFVLENVMDDDRYVMDDGSERSV

SEQ ID NO: 102344 - protein, 34 aa, Gossypium hirsutum
  Clone ID: LIB3272-022-P1-K1-B6.pep
GVICETRSTQTWVWPDSLLTTVLTTVVKFVAIQH

SEQ ID NO: 102345 - protein, 50 aa, Gossypium hirsutum
  Clone ID: LIB3272-022-P1-K1-B7.pep
LLVPSERMMASVSCTWHYPFIHLKLYSFFMLTLILHGKMGEKLVFHSKDV

SEQ ID NO: 102346 - protein, 143 aa, Gossypium hirsutum
  Clone ID: LIB3272-022-P1-K1-B8.pep
KTIDVDSGKIDICWDLSNARFGSGPEPVEGFYLAVAFDQEMVLHLGDLKKEASKKINISSTPLSSDAVFIAKREHIFGKKFYGAKAQFCDKGPIHDVVIECDPFDLKDPCLVIRIDSKTVMQVKRLKWKFRGNHTILVDGLPV

SEQ ID NO: 102347 - protein, 76 aa, Gossypium hirsutum
  Clone ID: LIB3272-022-P1-K1-C8.pep
MLVIAWNEVIICIGCPMEDHTFAVGQEFPDVKAFRNAIKEAAIAQHFELRIIKSDLIRYFAKCATEGCPWRIRAVK

SEQ ID NO: 102348 - protein, 56 aa, Gossypium hirsutum
  Clone ID: LIB3272-022-P1-K1-D12.pep
TALLSELRTTNFIIEMQNGESRLNVSEHCKRHITTGSYVLLNGRQRSTYRAYPLLL

SEQ ID NO: 102349 - protein, 75 aa, Gossypium hirsutum
  Clone ID: LIB3272-022-P1-K1-E10.pep
IVVEVYVCFNIKHSIGVCQQVWVHEVPPCPYLWMVCHQGILKHVQVNPFNVVRVHLISVVEVLCVPSASTLNKCL

SEQ ID NO: 102350 - protein, 128 aa, Gossypium hirsutum
  unsure (1)..(128): unsure at all Xaa locations
  Clone ID: LIB3272-022-P1-K1-E3.pep
MGEAKAHINIDVIGHVTSEKSTSAGHLIYTLGGLDKRVTERVEMEAVNINKRSSMYAXALDKWTAERKRRITIDIVLGRVETTKSYCTGLDAAGHQRXTNTMITGASQAXDCAVLMIDFTTGRFEAGI

SEQ ID NO: 102351 - protein, 107 aa, Gossypium hirsutum
  Clone ID: LIB3272-022-P1-K1-E4.pep
MTEEPVNVNEFRELARQALPKMYYDFYTGGAEDQYTLKENEEAFRRIIIQPRILRNVRSIDLSTTVLGYNISMPVMIAPTSLQKLANPEGEIATARAASACNTIMVL

SEQ ID NO: 102352 - protein, 54 aa, Gossypium hirsutum
  Clone ID: LIB3272-022-P1-K1-E6.pep
RKSLYFDALLKSSNNYARHFGVLEEPIKELVLKWKKGQPLLPRIASVIARANGV

SEQ ID NO: 102353 - protein, 53 aa, Gossypium hirsutum
  Clone ID: LIB3272-022-P1-K1-E9.pep
SQSVEEFSTPHLPNHLAAKTYRYLTSRPIPVRRGKDHSFVTNSSTRSSDNSYL

SEQ ID NO: 102354 - protein, 41 aa, Gossypium hirsutum
  Clone ID: LIB3272-022-P1-K1-F12.pep
IFEYMRCRSQTVSPLNVYRVILPAVTVFGYINMVRAPPPIQ

SEQ ID NO: 102355 - protein, 73 aa, Gossypium hirsutum
  Clone ID: LIB3272-022-P1-K1-F9.pep
KQVMFMCSIPARSRTLSRVFTGFALLRQSSQPSRSTQGCSHASPVKKIKVVCGGSVERSLQTATLCFMGFLAH

SEQ ID NO: 102356 - protein, 110 aa, Gossypium hirsutum
  Clone ID: LIB3272-022-P1-K1-G12.pep
MEGLAMLGQLIGQLQDLLQLHGSPPPPPPPSHFRLLHPHLHPGDYHRRWCLHNIDDTPADDYYSLVMAAGKSGSCKMLEPFEPPGPPPSKKSRKGRNQEKLHGSTAIPEA

SEQ ID NO: 102357 - protein, 41 aa, Gossypium hirsutum
  Clone ID: LIB3272-022-P1-K1-G3.pep
AIVSIVYKHIIKISLNGYFGSSFLQFFWCSNMDIKNVHLAT

SEQ ID NO: 102358 - protein, 93 aa, Gossypium hirsutum
  Clone ID: LIB3272-022-P1-K1-G8.pep
MAADSFLMPPCRKIRICKAKREPNLNHSDSSSGVEPQDADYSYVPQLCDELENLILARFPRSEFWKLYLLNKHFLQILKSGELFKIRRQIGFK

SEQ ID NO: 102359 - protein, 116 aa, Gossypium hirsutum
  Clone ID: LIB3272-022-P1-K1-H3.pep
TSFSKYMCYTSYSVLGFRTFQAQSDVDSYKPECIHSTSLMCLEALSLLTHLADLSHPDVSSASFASVRKEYISVCPRQRPRLYIKRCNFCTFLRFNSMVLFSGHERGVIKDAFFDI

SEQ ID NO: 102360 - protein, 54 aa, Gossypium hirsutum
  Clone ID: LIB3272-023-P1-K1-A2.pep
VCPEHISTISFCYKVFPHMLAPVLCSQVHCVLAVGVNIMAGGGVDYYLLQISPV

SEQ ID NO: 102361 - protein, 62 aa, Gossypium hirsutum
  Clone ID: LIB3272-023-P1-K1-A4.pep
QVLVDYLKVSIGLGHTIEYNSPSSNLPMALVLGYICVYFTDRAKIRNNLSMLSSSNGGIHCL

SEQ ID NO: 102362 - protein, 51 aa, Gossypium hirsutum
  Clone ID: LIB3272-023-P1-K1-A7.pep
IKRASAPLRILVNKSNNVRSSGISVSVTEGQFIFHLGSHVSKSEYSQAPQG

SEQ ID NO: 102363 - protein, 50 aa, Gossypium hirsutum
  Clone ID: LIB3272-023-P1-K1-B1.pep
CGIFSIRVGLAFNLHISVLSNSRGLLRIGLVRLCISLVFVIMIVVCHFSV

SEQ ID NO: 102364 - protein, 70 aa, Gossypium hirsutum
  Clone ID: LIB3272-023-P1-K1-B4.pep
LRLCLVTRTLLGIEPAVDLRCYMFFRSTASVLHLMLIRRGGAGTISVEKTADTWNIIFYQRTGCTDCMGY

SEQ ID NO: 102365 - protein, 144 aa, Gossypium hirsutum
  Clone ID: LIB3272-023-P1-K1-B6.pep
KIIAPEFFMDKVKGMVGLMVESTVPLLKKWEAMIDAGGGLAAEINVDEDLRSVSADVIARACFGSSYVKGKQIFSKLRTIQTTITKQGFLFGLNGSRFFPNKKVSNLEREVELLIWETVKRRQQECVDKSSGQKDLMQLILESA

SEQ ID NO: 102366 - protein, 136 aa, Gossypium hirsutum
  Clone ID: LIB3272-023-P1-K1-B7.pep
GSPPGYVGYEEGGMLTEAIRRRPFTLLLLDEIEKAHPDIFNILLQLFEDGHLTDSQGRRVSFKNALVVMTSNVGSSAIAKGRRASIGFLLNDDESASYTGMKALVMEELKTYFRPELLNRIDEVVVFRSLKKSQML

SEQ ID NO: 102367 - protein, 141 aa, Gossypium hirsutum
  Clone ID: LIB3272-023-P1-K1-B9.pep
YKLSKLIKAEEARAKLVKRAISGEEDEDLSWDIDEDDEGVEGGNVDSEKKEHDLREDSEECSKKDEDKVSSCKDSDVSIISTQHSMAEEEGWDEIEEIRSSNDNKGDNVVGSTSRIDLCKRLSVAEEEKDLTCDIDDEEED

SEQ ID NO: 102368 - protein, 75 aa, Gossypium hirsutum
  Clone ID: LIB3272-023-P1-K1-C1.pep
PLGFSRRSSPAGPPREPLRSTPHAIFSTRHTTLKLPRDRLVRGLFVVVAIEPKRGHEPLPFRFQGSKAFWPSNAP

SEQ ID NO: 102369 - protein, 146 aa, Gossypium hirsutum
  Clone ID: LIB3272-023-P1-K1-C11.pep
KEITASYCRSFSPMESQSSDEEDQFFDAFDDFPFYDCLTFDQSDPSTSHLPSTLRRRALSRRGISSKESGGESLPETSTLEDHSRTSSREPRYNLFRDLKPSDSTLVVTESPRDGVNPIRVSEENAGVESTVTTAENDESLDQARY

SEQ ID NO: 102370 - protein, 80 aa, Gossypium hirsutum
  unsure (1)..(80): unsure at all Xaa locations
  Clone ID: LIB3272-023-P1-K1-C7.pep
INGVIDVLRDVATWQAKGNAADTIFSLXWVHAYRKGLGRKTRVIKGWVDXVKRXPTNSKRSAHETILNWAGDRQTRERLV

SEQ ID NO: 102371 - protein, 82 aa, Gossypium hirsutum
  Clone ID: LIB3272-023-P1-K1-D1.pep
IQSNRRCCEWQRGGSLVGRLRGGRTTPPPISTLVLSSTAPILLIVSDPIAPPADFPSLTLLNAVLPPDVFLLSHSPQKVTTV

SEQ ID NO: 102372 - protein, 90 aa, Gossypium hirsutum
  Clone ID: LIB3272-023-P1-K1-D11.pep
EGDLCSSILFVISSVFFCFYNFTFMKKKRKRGLALRLSRGFPLASLKSGFEGNPVAKRNHVSKPASAVLIPSGGLASWKEKMRVMPEEKN

SEQ ID NO: 102373 - protein, 60 aa, Gossypium hirsutum
  Clone ID: LIB3272-023-P1-K1-D6.pep
KTVSARVVIKNFSKITQKKTLHYSLTLSYPNNYHSLQCYLSPSLIPSSTNILLSSFNFNP

SEQ ID NO: 102374 - protein, 86 aa, Gossypium hirsutum
  unsure (1)..(86): unsure at all Xaa locations
  Clone ID: LIB3272-023-P1-K1-D9.pep
MVNMTLIATVTDGFXIAEGLDDGCDLADAEMYKHHVKAVFNNLYKGHNEAXRMCIETGPYIFHYMMERRVCYLTMCDRYYSIKHGF

SEQ ID NO: 102375 - protein, 102 aa, Gossypium hirsutum
  Clone ID: LIB3272-023-P1-K1-E1.pep
MGWFPCGGKPNKKGKKKLPNHNNTTTINSSDDQIPSTSEKLKVNSVPDAKKEANKDGGSDHIAAHTFTFRELAAATKNFRADYLLGERGFGRVYKGRLESTN

SEQ ID NO: 102376 - protein, 87 aa, Gossypium hirsutum
  Clone ID: LIB3272-023-P1-K1-F5.pep
HDGAIVNNQIVYKSIIDWITFHSCTQIVETFLGSSGFVLLISSCSTLLLFGDCIVFSHGPLCIFISCHYQLGCSFRSSKIHSFCFPF

SEQ ID NO: 102377 - protein, 69 aa, Gossypium hirsutum
  unsure (1)..(69): unsure at all Xaa locations
  Clone ID: LIB3272-023-P1-K1-F8.pep
YFQGPTEAPLDAESACTGISEKGAFPTYXGKVLMGKTTEASYNAVGVNGRKYLLPAMWNPQTSACKTLL

SEQ ID NO: 102378 - protein, 91 aa, Gossypium hirsutum
  Clone ID: LIB3272-023-P1-K1-G1.pep
GSHHHIPAAYINFTANHLLLKGKKLWIYKKGTNKLCFDSGFWIIEAMRHFSSMFNGLARSFSMRRGKNSSNGDGREAAETMAKDAKKHDMI

SEQ ID NO: 102379 - protein, 87 aa, Gossypium hirsutum
  Clone ID: LIB3272-024-P1-K1-A6.pep
YIHLFGKTSISLIVFKRRNIERHQEKANLDVDGILKELPNAGRIPKTKIVGTLGAATLSAHTIEHLLRACMNAARLNYSHGSHDYHQ

SEQ ID NO: 102380 - protein, 118 aa, Gossypium hirsutum
  Clone ID: LIB3272-024-P1-K1-B12.pep
MKMRAGYSIFLLILSLTVCNAGKLSNSFYKNTCPQVEKIVREIIQIHTRNNPSLGAQLIRMQFHDCFVRGCDASVLLDTVNNSKAEKEAMPNQSLGGFDVIDDIKATIERVCPKVVSC

SEQ ID NO: 102381 - protein, 83 aa, Gossypium hirsutum
  Clone ID: LIB3272-024-P1-K1-B9.pep
AYPIMKVKLIILVPFMVLVSMVVAQQHVDQMQHQHDSNSITLELIHRHAPQFTNNHPITQHQRLVDLLYHDIIRHGIMSHRRR

SEQ ID NO: 102382 - protein, 65 aa, Gossypium hirsutum
  Clone ID: LIB3272-024-P1-K1-C3.pep
TIAVDRAKLVSVRFMLRAINTPASRRLPDCRYTMASSMTLRCATYVADKHVPLGAFFVLAFAQPH

SEQ ID NO: 102383 - protein, 45 aa, Gossypium hirsutum
  Clone ID: LIB3272-024-P1-K1-D1.pep
NAGHGSECLLIGILLLINFLTICKGVKASNSFYKYACPQFYKFVR

SEQ ID NO: 102384 - protein, 129 aa, Gossypium hirsutum
  Clone ID: LIB3272-024-P1-K1-D5.pep
AGLCKSCDKEGKWRYLVLGQACCHLGLMEDAMVLLQTGKRLASAAFRRESICWSDDSFSLPTAIALSDISSAATTPSSTPPRNPTSFSESENISQLLSHIKLLIRRRTAAIAALDAGLHSEAIRHFSKI

SEQ ID NO: 102385 - protein, 78 aa, Gossypium hirsutum
  Clone ID: LIB3272-024-P1-K1-E1.pep
ENKGPPSKYYQVAPWLSSRGSSFGLSVCFFLISTSSISPHFFFFFFTLFLGFVWLILDSSSSSSLLCLDLEGKSWILV

SEQ ID NO: 102386 - protein, 29 aa, Gossypium hirsutum
  Clone ID: LIB3272-024-P1-K1-E3.pep
YGGRGGITCALVHCRSTGSSISLACSISC

SEQ ID NO: 102387 - protein, 95 aa, Gossypium hirsutum
  unsure (1)..(95): unsure at all Xaa locations
  Clone ID: LIB3272-024-P1-K1-E6.pep
MSSTEAIILQLHERSAAKSGYWKLKSGIFCSIYIDRRLSDSYRXLLHQISHSLLSSLCAKTHCNLICGGPYTVLPIATXICLDTSMLMLMLRKEV

SEQ ID NO: 102388 - protein, 54 aa, Gossypium hirsutum
  Clone ID: LIB3272-024-P1-K1-F1.pep
PMLSRRTLLTSVQTQGYGECMKLLAKIIRISPTLILAILPFQRNPNVFSCSDHP

SEQ ID NO: 102389 - protein, 56 aa, Gossypium hirsutum
  Clone ID: LIB3272-024-P1-K1-H1.pep
HMLATAIVHGAVGQFSLKEAYITNDVDRLSSSLYQKPRLKNGWCRLYASQCLNIHH

SEQ ID NO: 102390 - protein, 70 aa, Gossypium hirsutum
  Clone ID: LIB3272-024-P1-K1-H12.pep
REGRRERQTDKTTRMEKTTETTPSYSLQDQATTELGAGGKLRRQRPRRPPTTPYARPQQNQSLRGRLLSK

SEQ ID NO: 102391 - protein, 44 aa, Gossypium hirsutum
  Clone ID: LIB3272-026-P1-K1-A4.pep
VGGCVNKRLRLNLKVPIASLCERPCFVTRISYPGASFFLTHYPT

SEQ ID NO: 102392 - protein, 51 aa, Gossypium hirsutum
  Clone ID: LIB3272-026-P1-K1-A5.pep
NDMGDFNRCSPSSPPTNVSLAGDFFNPTLFSITADPAGVVNVAAAIVAAFP

SEQ ID NO: 102393 - protein, 66 aa, Gossypium hirsutum
  Clone ID: LIB3272-026-P1-K1-B11.pep
NLLPPTPFTSTPNPTLPIRRGILPFLGIHNFPTKLSTLLSILRANTLSAILIACCTINAGTLMSVA

SEQ ID NO: 102394 - protein, 55 aa, Gossypium hirsutum
  Clone ID: LIB3272-026-P1-K1-B2.pep
YLYETEDLAAYHIGESIVSKSTSFLSALSSATTKWTVVSFEGLPIQLFAAQVLDS

SEQ ID NO: 102395 - protein, 30 aa, Gossypium hirsutum
  Clone ID: LIB3272-026-P1-K1-C11.pep
VQFHIAFMKSQQSHKEPQPPLHKVQYPVLS

SEQ ID NO: 102396 - protein, 127 aa, Gossypium hirsutum
  Clone ID: LIB3272-026-P1-K1-D1.pep
DEQDQADLEAEEENSKNRAKGGVAGKKARRPVAPKNPKKVNKKDDPQVPEASEISSTTAMEAENVPAVVKPKGRAGAKKKTKKDDSDDDDDNDFDIPDLRERLAKHNIDSSPDNSADMETELFQEPA

SEQ ID NO: 102397 - protein, 44 aa, Gossypium hirsutum
  unsure (1)..(44): unsure at all Xaa locations
  Clone ID: LIB3272-026-P1-K1-D11.pep
VISSPWVSWFKAASLPALGSLLLTPLILYKSYPPQTKXDTPDCP

SEQ ID NO: 102398 - protein, 68 aa, Gossypium hirsutum
  Clone ID: LIB3272-026-P1-K1-D7.pep
FILNQLYFSLIPPFSFCFHLWVFKLFPLLIMEIILELFLTAFIALVFSFLIAKIVSLATGGDAGGGCS

SEQ ID NO: 102399 - protein, 89 aa, Gossypium hirsutum
  Clone ID: LIB3272-026-P1-K1-E10.pep
AVEEVATATKNSSIPSPVLALSSRQLETFSTTSVYTTVSGAGASIGGWAFSSSLTSTGAGASTGGSAFSSPLTSTGAGASVSTFTSVSA

SEQ ID NO: 102400 - protein, 134 aa, Gossypium hirsutum
  unsure (1)..(134): unsure at all Xaa locations
  Clone ID: LIB3272-026-P1-K1-E11.pep
CHEFERFSTYLPDIKVAVXYGGVNIKVHKDLLKNECPHIVVGTPGRILALTRDKDLSLKNVRHFILDECDKMLESLDMRRDVQEIFKMTPHDKQVMMFSATLSKEIRPVCKKFMHDPMEIYVDDEAKLTLHGLV

SEQ ID NO: 102401 - protein, 42 aa, Gossypium hirsutum
  Clone ID: LIB3272-026-P1-K1-E9.pep
MSNQWSLYLIGGHDKNNFSYSYSVIEGGPLWDMLEKINYENQ

SEQ ID NO: 102402 - protein, 34 aa, Gossypium hirsutum
  Clone ID: LIB3272-026-P1-K1-F2.pep
MHCKFHASSNFNGILILGFKKKKKKKKKKKKKKK

SEQ ID NO: 102403 - protein, 85 aa, Gossypium hirsutum
  Clone ID: LIB3272-026-P1-K1-G6.pep
GPIDPSPNKVSSPANTGLHKLNTSETKKKSRTLASNALRRRMSVQLRLHQFTGAARLGIDHPMRAVCSTFPCGFIRALSRFIPSQ

SEQ ID NO: 102404 - protein, 117 aa, Gossypium hirsutum
  unsure (1)..(117): unsure at all Xaa locations
  Clone ID: LIB3272-026-P1-K1-H5.pep
MDTLFQDLPGSMYGFKFDHGSVPMPVYANHNLDNGSKESPIDSSSSSPSSGVSSDSPFPNEMLKYINQMLMEEDLEEKTCMLQVLXSTQAAERSFYEVLCHNYPIPAGLNHYYPDDD

SEQ ID NO: 102405 - protein, 136 aa, Gossypium hirsutum
  Clone ID: LIB3272-027-P1-K1-A8.pep
LSLDEIADSVVSDFLKMLEIEHGPFSLNSDNAVESPRERLLREFENEALDSGDFILNFEAGGEEEEVGSTTPGACHGDNYDDFAFSSFILPRQEQEESRSLANRKSIKMLEYLETVALMCEWGLDGRHFKVLRVFR

SEQ ID NO: 102406 - protein, 39 aa, Gossypium hirsutum
  Clone ID: LIB3272-027-P1-K1-B1.pep
ASSYTADPYMKLMGGVPSTFCEYKLYFVDLTQAFDILRQ

SEQ ID NO: 102407 - protein, 50 aa, Gossypium hirsutum
  Clone ID: LIB3272-027-P1-K1-B10.pep
RTHLFVHRRASLYNTSAQIGVRDGPLGIKPPLWPRMIFLYIQRNICCARP

SEQ ID NO: 102408 - protein, 113 aa, Gossypium hirsutum
  unsure (1)..(113): unsure at all Xaa locations
  Clone ID: LIB3272-027-P1-K1-B3.pep
PVTPTRLLKAITRHTPKVCPTDSPNAVKXALNAEATXSSGSMTETIYAEGLSFQLMKHQMRXHETKDFQYSIDLIAHAPWMDMLKKMNYENRVAAPACGGRIHLSSMKYNTIC

SEQ ID NO: 102409 - protein, 132 aa, Gossypium hirsutum
  Clone ID: LIB3272-027-P1-K1-B4.pep
MSKQTYRVCFCFRRRFRVAVSEAPEEIKRVFEQYSENGMMSIDALHRFLVEFQKEDKATREDAQKIVDSVKHFHRKGLNLEGFFKYLFADINPPLASLGVHHDMNAPLSHYFIHTGHNSYLTGNQLSSDCSD

SEQ ID NO: 102410 - protein, 99 aa, Gossypium hirsutum
  unsure (1)..(99): unsure at all Xaa locations
  Clone ID: LIB3272-027-P1-K1-C2.pep
MVSDLGSSVEIRKIMDAKVLFFFALLSFXGVWSFAHCVLYQSLAMNFYKDPCPXLTTFSMGQVKLLSKRHTNTGDYWLRNISHDWAVQTCDASLVLDCT

SEQ ID NO: 102411 - protein, 120 aa, Gossypium hirsutum
  Clone ID: LIB3272-027-P1-K1-D4.pep
MAAAADSECKRSLDRRPSSSSFRLRCSSLNSLRLRRVFDIFDKNRDGLITVQEIHQALTRLGLETDVSDLDSTIRSFIKSGNIGLTYDGFVALHESLDQRLFGLEMEEVAEEDESESDLT

SEQ ID NO: 102412 - protein, 89 aa, Gossypium hirsutum
  Clone ID: LIB3272-027-P1-K1-E3.pep
HGNRASLLQVSNTINMSWCGVTNINVSRKLLRISTRWPRVIEAAVVFYFRRLARYMTRSWYVRWQCSSLSWAVRQVWVGCMENTSQKGA

SEQ ID NO: 102413 - protein, 48 aa, Gossypium hirsutum
  Clone ID: LIB3272-027-P1-K1-F12.pep
LYKSQTCMGQDLDTNDRQRFCELSARVCRQPVHIVTPKINDLSITIGY

SEQ ID NO: 102414 - protein, 52 aa, Gossypium hirsutum
  Clone ID: LIB3272-027-P1-K1-G5.pep
SPPKEGGIFDFFFLFFNDPTQASLLLITAQRRRHLRFFFFFSLMIPLKPLSF

SEQ ID NO: 102415 - protein, 34 aa, Gossypium hirsutum
  Clone ID: LIB3272-027-P1-K1-H4.pep
QAKKLQLEEHQALALKVIKQQHPGKSAHDMVRCS

SEQ ID NO: 102416 - protein, 66 aa, Gossypium hirsutum
  Clone ID: LIB3272-027-P1-K1-H7.pep
TASLLRRDTLFLGVSADLLDSGRVVVCTGRTKCCSLILGVADLDAAGCLCTAIKAYVMGVNLYVPV

SEQ ID NO: 102417 - protein, 43 aa, Gossypium hirsutum
  Clone ID: LIB3272-028-P1-K1-A2.pep
MGGDNGISLEEIKNESAGLERIPIDEVFEQLKCTREGSSTEEG

SEQ ID NO: 102418 - protein, 135 aa, Gossypium hirsutum
  Clone ID: LIB3272-028-P1-K1-A5.pep
GNIPNVICFESDPGLVNKLGGSYVHSEMKGSIFDKVVGISQLKKTDETKEVVQTVSEAWDRCNSDDIRFCLLVIINAYIQPVPTLKNLRSKGFSTLNCMVKNCGPQILDCLMDPNCRKALQCLNKCSPVDQVCNY

SEQ ID NO: 102419 - protein, 57 aa, Gossypium hirsutum
  Clone ID: LIB3272-028-P1-K1-A8.pep
IQLTIKGKIGDFQSKPMQGICIILSIRKAPISFYYIRVIANPHNLNWILKKNLEISI

SEQ ID NO: 102420 - protein, 71 aa, Gossypium hirsutum
  unsure (1)..(71): unsure at all Xaa locations
  Clone ID: LIB3272-028-P1-K1-B1.pep
MAEEAQNVILNLNDLSQALARXFXMTLLAKPIGGIWHTGGVVDGTEYYQGGXIQHSSAGTTPYGTPITVID

SEQ ID NO: 102421 - protein, 121 aa, Gossypium hirsutum
  Clone ID: LIB3272-028-P1-K1-B10.pep
RSPSTQLSLCHGALLFLLEPSFPAPKKPKTLVVLATALGAKPTVLVAEKIGDAGIQLLKTFANVDCSYNLSPEELCTKISLCDALIVRSGTKVTREVFESAMGRLKVVGRAGVGIDNVDIS

SEQ ID NO: 102422 - protein, 58 aa, Gossypium hirsutum
  Clone ID: LIB3272-028-P1-K1-B7.pep
AFPDNLYFTLSVSLVSFSDCSFWVSFFSNILLTCTSLGAILLQVLLDIKLQDFEYFPI

SEQ ID NO: 102423 - protein, 82 aa, Gossypium hirsutum
  unsure (1)..(82): unsure at all Xaa locations
  Clone ID: LIB3272-028-P1-K1-C1.pep
LYHQKEMFSDRVHVDSYNNAGLXNKPTFQGRARWDVXTGCDIIAIRTAQXAGARKVYDGEPTKMTYPATAIAEAXNNLDDIV

SEQ ID NO: 102424 - protein, 84 aa, Gossypium hirsutum
  unsure (1)..(84): unsure at all Xaa locations
  Clone ID: LIB3272-028-P1-K1-C2.pep
GSFTNERCPPPGKSDMRTLKSPLWEPKQSAACPECTLTLGVCAGXWGSMRVVVGPLRTKCCIFIRGLADLDAAVCLCTAIKANE

SEQ ID NO: 102425 - protein, 42 aa, Gossypium hirsutum
  Clone ID: LIB3272-028-P1-K1-C6.pep
EEMGSNIQTALAIERNYPTLDGKSFNLSNEQKSPLFTEDFEY

SEQ ID NO: 102426 - protein, 106 aa, Gossypium hirsutum
  unsure (1)..(106): unsure at all Xaa locations
  Clone ID: LIB3272-028-P1-K1-C8.pep
IGFFLDVKKTGLHTTKLVRRLFAKKEMRILMGGLEAAGKTTIHYMLKMGEIVTXTIHTIGFNVRTVVNKNIRMTGRDGGGQDRRPPXRRHSHTNMQGLIFVVDSAD

SEQ ID NO: 102427 - protein, 58 aa, Gossypium hirsutum
  unsure (1)..(58): unsure at all Xaa locations
  Clone ID: LIB3272-028-P1-K1-F2.pep
CTISLAARVDVNHASLLKACIASSRSTRFNSFDIKLNADAFIGVGCSSRXAVQVLLEP

SEQ ID NO: 102428 - protein, 86 aa, Gossypium hirsutum
  Clone ID: LIB3272-028-P1-K1-G1.pep
MMESSEEDDDFPSIESITPQSKIDSVHQSHTEKGIRKLCCELLDLKDAVENLCGNRRTTYLAFLRMSEEVVEMEHELVELRKHISS

SEQ ID NO: 102429 - protein, 118 aa, Gossypium hirsutum
  Clone ID: LIB3272-028-P1-K1-G8.pep
MVKTPIRYYLVDACTDSTFRGNPAAVCLLEEERDRKWMQAVAAEFNISQTCYLTRIPNCTSTNTRFRFIWFTPVTEGKLCRHATLASAHTLFTNGWVNVNIIEFDTLCGILTATKVAD

SEQ ID NO: 102430 - protein, 81 aa, Gossypium hirsutum
  Clone ID: LIB3272-028-P1-K1-H7.pep
AALKRATYTQPTGKGQAIDSKTRGVRARPAHKPRRVTALQISSVDSDIDMRSLDAESGYGCKATVLAHGFVDPKRRNKPLR

SEQ ID NO: 102431 - protein, 136 aa, Gossypium hirsutum
  unsure (1)..(136): unsure at all Xaa locations
  Clone ID: LIB3272-029-P1-K1-A1.pep
NHRETKVLQTSCGAANISKLLSVXDIITSPTPRLVLEHLNRXDFNRVDTTLTNDNILFYIYTLLTAFDYXDSHGMMHKAVEPHNGRVDQELIALPLRDRRLDEFYQSCKEYKRPLASRYYKGPELLVDXQDYDYSL

SEQ ID NO: 102432 - protein, 35 aa, Gossypium hirsutum
  Clone ID: LIB3272-029-P1-K1-A10.pep
KSACGEFVVNIHSHPLRQPPPTSTWKIFHLLMTLD

SEQ ID NO: 102433 - protein, 59 aa, Gossypium hirsutum
  Clone ID: LIB3272-029-P1-K1-A11.pep
TAEEVDIVSLEKNTCCLQHTFYNCFNKYFDGGCAIHKKKRALCQAFHLNLCFWPTLQHI

SEQ ID NO: 102434 - protein, 141 aa, Gossypium hirsutum
  Clone ID: LIB3272-029-P1-K1-A2.pep
RLVKTIVDDEDYTIRTVEQAKDALCALRELNFNKRSTVPTTTTTSFLKLHEALFCPEEFKCPLSKELMRDPVIVASGQTYDRLFIQKWLNAGNRTCPHTEQVLSHTILTPNHLIRDMILQWCKSQGIELPNPVMDGKEEGV

SEQ ID NO: 102435 - protein, 69 aa, Gossypium hirsutum
  Clone ID: LIB3272-029-P1-K1-A3.pep
MARESRPKALGSGQCSYKRITLIVCFDNIGIALFDLRSLYSSLYIYSNKDHVVKYTPDQIRKMGESDKI

SEQ ID NO: 102436 - protein, 57 aa, Gossypium hirsutum
  Clone ID: LIB3272-029-P1-K1-A9.pep
VCDGTSECSPHTTSSIHQCNFKQEAESRSAVPAFGVSDPTPCSSDSVISSYHGKAAV

SEQ ID NO: 102437 - protein, 44 aa, Gossypium hirsutum
  Clone ID: LIB3272-029-P1-K1-B12.pep
GFCIFSSVSGKILSEEEKAADNIYIHKTDREKLDKLSRMGPKPE

SEQ ID NO: 102438 - protein, 55 aa, Gossypium hirsutum
  Clone ID: LIB3272-029-P1-K1-B8.pep
VICCILHQRLNALFVKTRLFIQHKYVVQAPTYKACEYVITSTKLSFYELKHGRSW

SEQ ID NO: 102439 - protein, 108 aa, Gossypium hirsutum
  Clone ID: LIB3272-029-P1-K1-C1.pep
MSTVEAPLYPIAVLIDELKNDDIQLRLNSIRRLSTIARALGEERTRSELIPFLSENNDDDDEVLLAMAEELGVFIPYVGGVEHAHVLLTPLETLCTVEETCVRDKAVE

SEQ ID NO: 102440 - protein, 124 aa, Gossypium hirsutum
  Clone ID: LIB3272-029-P1-K1-C10.pep
EDSVSVIWAPLRRKVAIEGCSSSVLGKAIQPILSASRVSINAAKEILLLEPIGIAHIRNSSHVILPRCSTDLPNTRHACYSTHLQTIMQKSCLALSSGGGDLVAVISPLMGESISDGTIATFLK

SEQ ID NO: 102441 - protein, 47 aa, Gossypium hirsutum
  Clone ID: LIB3272-029-P1-K1-C11.pep
YTNLSYLNTIFITYFHYHLFKYLIYIKISCNILLYPIIWFIYLFLTK

SEQ ID NO: 102442 - protein, 48 aa, Gossypium hirsutum
  Clone ID: LIB3272-029-P1-K1-C5.pep
NCAVVRKNCHTSQIGYKIDQEGKKHRLIKPYKDGFSVYDSHGVQKVSR

SEQ ID NO: 102443 - protein, 97 aa, Gossypium hirsutum
  Clone ID: LIB3272-029-P1-K1-D1.pep
MNLLGHVDSLKSQTWIKFAAFIFISDASFYLGKHWSDGSRQLIFLCRQCPSGTTSSSPSIALSPNLNKEFNVSALIDTPEPSRSAKSERTWASGSLK

SEQ ID NO: 102444 - protein, 136 aa, Gossypium hirsutum
  Clone ID: LIB3272-029-P1-K1-D11.pep
VRRTETRKPIRKPLGAAGDTRGGRNNGHHEISKQRNATNNEGASNPSTDALEETSHVKHESQGDIPFSGPLQVASSSGFAWARRRKDDASGRSLSRSISRGHICSSLEPSAPLHTRNDNDLKRHENEDVINGGRTD

SEQ ID NO: 102445 - protein, 109 aa, Gossypium hirsutum
  unsure (1)..(109): unsure at all Xaa locations
  Clone ID: LIB3272-029-P1-K1-D2.pep
ELNISASHKSTNAPKQPXDTLHDLVSHHADDTCCMGKGNRAXAAYVRHERAASVHQSLFGGFDDIHCLVLGSLNNPSMLYRQPGLSKACNEAMIVIEVNSTLRDLGAYP

SEQ ID NO: 102446 - protein, 37 aa, Gossypium hirsutum
  Clone ID: LIB3272-029-P1-K1-D5.pep
MASDLGKLFIGGISWDTDEERVKEYFRTYGEVVEALF

SEQ ID NO: 102447 - protein, 79 aa, Gossypium hirsutum
  unsure (1)..(79): unsure at all Xaa locations
  Clone ID: LIB3272-029-P1-K1-E1.pep
MKKIMGSKGIYIFAXLEXSAVLAFAQDGVDQGLVMNLYTDFXLKVKXIIKDQDKLLFTRHKNTXFFWGXNKFNYCAVQS

SEQ ID NO: 102448 - protein, 92 aa, Gossypium hirsutum
  unsure (1)..(92): unsure at all Xaa locations
  Clone ID: LIB3272-029-P1-K1-E10.pep
MASMFGPGSSTANIYVPEEWSEAANSIAYDSVTSPPPFSFICGSXNSGKTTLSRHLLNILLQRYGKVAYLDTDVGQSEFTVAGLVSLTIVDK

SEQ ID NO: 102449 - protein, 98 aa, Gossypium hirsutum
  unsure (1)..(98): unsure at all Xaa locations
  Clone ID: LIB3272-029-P1-K1-F1.pep
MATASLLRSFRRTDIVAYTIYDYRCLTNNGQTSVGINXQAFVXAVKKKPAGYDVIGIDXGTTNCCVTDMEGKNPKVIDNCEGAWTTPSDVDFNQKGEL

SEQ ID NO: 102450 - protein, 56 aa, Gossypium hirsutum
  unsure (1)..(56): unsure at all Xaa locations
  Clone ID: LIB3272-029-P1-K1-F2.pep
MGHSNVWNSHPKTYRPDSRACRVGGNPHAIIRKNGIMXCRQCLTSKAKEIGFIKSR

SEQ ID NO: 102451 - protein, 46 aa, Gossypium hirsutum
  Clone ID: LIB3272-029-P1-K1-F7.pep
RMIMIDMQTELFSILNKIQLMQNPHSIFTKRLSWIQLYGAYKDISF

SEQ ID NO: 102452 - protein, 90 aa, Gossypium hirsutum
  Clone ID: LIB3272-029-P1-K1-G1.pep
MADKVYTIMTRKFKTNTLSFSKQLIIDELHAERPNVPNAQIKETLDRMYVAIDTDSLFVCKFRTYTVGGKASGSVTIYSAWASAIIYTAK

SEQ ID NO: 102453 - protein, 63 aa, Gossypium hirsutum
  Clone ID: LIB3272-030-P1-K1-A2.pep
MAPPPVEQNGDATTGTAESQRSIPTPFLTKTYQLVDDHTIDDVISWNDDGSTFIVWNPTGFAR

SEQ ID NO: 102454 - protein, 87 aa, Gossypium hirsutum
  unsure (1)..(87): unsure at all Xaa locations
  Clone ID: LIB3272-030-P1-K1-A6.pep
ALLPMIPLPSSRLGQIDCVLVLLRHVLLHMYFEGASPSTTRSRKPISSPKIITSRQAFASAVIGSPVLPSGATKLVSXIKRRRRHRS

SEQ ID NO: 102455 - protein, 62 aa, Gossypium hirsutum
  Clone ID: LIB3272-030-P1-K1-A8.pep
YAERAGKTVVRVCPMSRRRPHPEQVTAQKVNWNSLRISKLDASAEMHSTMMMRVANVCRIVN

SEQ ID NO: 102456 - protein, 98 aa, Gossypium hirsutum
  unsure (1)..(98): unsure at all Xaa locations
  Clone ID: LIB3272-030-P1-K1-B12.pep
PIMAVQLTVLADGVFIGCSANHAVTDGTSYXNSFNTSAETRRKVCHNNDQSVEKISRRSDLSRESVLISTAALRVPTGVPLASLYENEPSRERIGRFS

SEQ ID NO: 102457 - protein, 90 aa, Gossypium hirsutum
  unsure (1)..(90): unsure at all Xaa locations
  Clone ID: LIB3272-030-P1-K1-B5.pep
TSCEVWDEACYEADLCLSRQRENEEWIKGLRRLILESPGLAFDECESSWLVXAEVDRMDNEYRYPXDKTAIRAGIGTGRPTFVAIQADKD

SEQ ID NO: 102458 - protein, 50 aa, Gossypium hirsutum
  Clone ID: LIB3272-030-P1-K1-B7.pep
ILSTVEDDKERLMKMAGAVRTAGKGCMRRKKTAFLTTSTSGDKRLQSAPK

SEQ ID NO: 102459 - protein, 78 aa, Gossypium hirsutum
  Clone ID: LIB3272-030-P1-K1-D1.pep
TFSTLSISSTESTKNTQITRIKVTQNDNYKLYIIKLLKRKNKSTRFSTIFTYYSVQLSKKQKPKSRNKLNSKIIDCKS

SEQ ID NO: 102460 - protein, 130 aa, Gossypium hirsutum
  unsure (1)..(130): unsure at all Xaa locations
  Clone ID: LIB3272-030-P1-K1-D10.pep
QKRLLQTSSMCQRQLSKILDDSDLSSIIDGYLDLEMIEFTLNDVLIASISQVMMKSTGKGIRILNETAEEVMEETLYGDGVRLQQVLADFLLVSVNXAPKGNQLSVGASLTKDQLGRSVHLARLNLKITH

SEQ ID NO: 102461 - protein, 120 aa, Gossypium hirsutum
  Clone ID: LIB3272-030-P1-K1-D12.pep
PTFLSAYLLLLCLVCSLKEGYALGRRATVAESHHLEHSHTIQVSSLLPSSICSLATKVLDKKSSLQVVHKHGPCSQLYHHDKANIPTHAEILLQDVTRVKSIHSKLAKSLSSTKVDQTDA

SEQ ID NO: 102462 - protein, 139 aa, Gossypium hirsutum
  Clone ID: LIB3272-030-P1-K1-E5.pep
FALNQNRNSQQRRKQHKKNQKPKTRTYHHLIHLHYACNNDSWLPHTRMPLSISTLLPPPSHSFSLNILPIKPHFPPHFSLSPVVIFFNTIKSHHLNQKPTSFSFYIFSCFLSLFSSSCLWFFVVVWQWRFQGLKVLRSG

SEQ ID NO: 102463 - protein, 57 aa, Gossypium hirsutum
  Clone ID: LIB3272-030-P1-K1-F1.pep
EKFVKNNECKCLNQIPYPMSQLQTPSKTTSSPLMEPAYSCMLKIHTQILNRFSTPTP

SEQ ID NO: 102464 - protein, 124 aa, Gossypium hirsutum
  Clone ID: LIB3272-030-P1-K1-F11.pep
MAISACNNLFSTLTFLPNKVSIFTKTPQFITALNGSKTRLYSSKVSMSLRAGIVGLPNVGKSTLFNAVVENGKAQAANFPFCTIEPNVGIVAVPDPRLHVLSELSKSQRACPASIEFVDIAGLV

SEQ ID NO: 102465 - protein, 75 aa, Gossypium hirsutum
  Clone ID: LIB3272-030-P1-K1-F5.pep
IDCMPVLYQTPQMLLRAGRVPYGSSNLCLYALNSVLYHLLTMACWPMVIQRHQHTPTLQARPYTIYPMRSPATST

SEQ ID NO: 102466 - protein, 52 aa, Gossypium hirsutum
  Clone ID: LIB3272-030-P1-K1-H5.pep
RKEVNGKRFIAQMFINHLFSVHPFKPLPLKIHCFLLENLGVPFCPLIFRLKE

SEQ ID NO: 102467 - protein, 43 aa, Gossypium hirsutum
  Clone ID: LIB3272-031-P1-K1-A1.pep
PIAIKMPGAGVIAKPVIVGDIVNCTGVGVLQTRSMNMHFNNVP

SEQ ID NO: 102468 - protein, 127 aa, Gossypium hirsutum
  Clone ID: LIB3272-031-P1-K1-A12.pep
FDLFISCFLLTNLSPFLLPIFPFNSLSLIFSKVASVRRRLSSNSSSSNSNCPYPSPSTLELEDGVALIQHPRKCNRPLFVIIGKWVSETCGFLSNGFLILTMEEGKGIKGTQLHMLIILLQDRRLKL

SEQ ID NO: 102469 - protein, 60 aa, Gossypium hirsutum
  Clone ID: LIB3272-031-P1-K1-A5.pep
LVETGDLLDQIPTFLLHPLPKSLYLQYPFLYIPFKSLYFFCNLIEIGFHDLIHTKHRAPI

SEQ ID NO: 102470 - protein, 89 aa, Gossypium hirsutum
  Clone ID: LIB3272-031-P1-K1-A9.pep
PPAKEWLHGPLTLSPVHKHPSAWKHFKNFDPWTCYSIHQPVYRQQVTAGCPSQYSTPSWVSPSPSPTATSNHFHNMAILQPAISSIGSS

SEQ ID NO: 102471 - protein, 56 aa, Gossypium hirsutum
  Clone ID: LIB3272-031-P1-K1-B2.pep
CHPKRPEAMTKVYQRPTTNPASTGILIPVSSYGLLYHRSTGHTTVSYTKTKTGWSN

SEQ ID NO: 102472 - protein, 115 aa, Gossypium hirsutum
  Clone ID: LIB3272-031-P1-K1-B8.pep
DDVSSKNTNSAVTRDRDHATKRPTDTKYTAATTIRVGSILSLGRFGFLYPHPSHTPETSEAIEWEIYDFTRTTTHVKRHILVRFSTSANITSERVSESDWLVFLADDFLNLDTYS

SEQ ID NO: 102473 - protein, 134 aa, Gossypium hirsutum
  Clone ID: LIB3272-031-P1-K1-C2.pep
MEKPPLRDYTAANAVSAPPLLNTLTPSRRTSLNRAFAAVYTCAIVALFYRHTQTLFSSKTLVSFYVTLTLFVSDLILAFIWANGQAFRMRAVYRKEFPENLEKVVKTSDLPGLDVFICTADPYKEPPISVVNTA

SEQ ID NO: 102474 - protein, 107 aa, Gossypium hirsutum
  unsure (1)..(107): unsure at all Xaa locations
  Clone ID: LIB3272-031-P1-K1-C9.pep
LGIRPEYLNMEQGANINGGKNPXKHLSQEQASQIARKVISRLLTGVGFEGATXAPVEVFSQFLSCHMSKLGQNLKVLTDNYRKQLTAFVLIMYVLQTSAYIIFGALS

SEQ ID NO: 102475 - protein, 133 aa, Gossypium hirsutum
  unsure (1)..(133): unsure at all Xaa locations
  Clone ID: LIB3272-031-P1-K1-D4.pep
PTEHTKRALEGIRMETTDELLAVQGRNXYALPQNYQPKYCVYHIVYWPDILYNRLRTYNGRIGRYILAQMEDXSTQCHGHITSVDVLRTHRKLAHSTMLMNAGQASMEQIIGAEYVLLNVWKTHRTSVESGYP

SEQ ID NO: 102476 - protein, 110 aa, Gossypium hirsutum
  unsure (1)..(110): unsure at all Xaa locations
  Clone ID: LIB3272-031-P1-K1-E1.pep
VTDSKHSAVESVMEKISEGIHGHDSSPSSHSDSDHEKPASPSSVRAKIDRLFGRERPLHHVLGGGKPADVLLWRNMKTSXAVLGGATAVCVLCELIEYHLLTLLCHISIL

SEQ ID NO: 102477 - protein, 55 aa, Gossypium hirsutum
  Clone ID: LIB3272-031-P1-K1-E9.pep
TLKLAKYKTSNYFYYSEFFKCIMILKPLAASPALLLFPNTAPLNPSFHGSFTSSF

SEQ ID NO: 102478 - protein, 83 aa, Gossypium hirsutum
  Clone ID: LIB3272-031-P1-K1-F7.pep
MATTVDGGNQYDRAEEVKRFDDSKIGVKGLVDSGLTTIPRIFLHPPETLSDLKPKPKPKSGAIPTIDLSGPHSTVVEQVSSGS

SEQ ID NO: 102479 - protein, 78 aa, Gossypium hirsutum
  Clone ID: LIB3272-031-P1-K1-F8.pep
TDTMPQKLGVKWLVDFGPTTKTTILLDVNVALSNINTHPKPISPGILNINLSDPYSTVDEQVATNSQSFEFFHIIFHG

SEQ ID NO: 102480 - protein, 79 aa, Gossypium hirsutum
  unsure (1)..(79): unsure at all Xaa locations
  Clone ID: LIB3272-031-P1-K1-G3.pep
KACIREESVGKLKGILGCVEEDFLSTDFVRDSKSSIFDAKAGIALNKNLFKLGFGYDNKXGYKFCVIDLIVHMAFTKTC

SEQ ID NO: 102481 - protein, 34 aa, Gossypium hirsutum
  Clone ID: LIB3272-031-P1-K1-G4.pep
KPRPLLKCVTATAVFLPAEALTGPVAFSAIFGFV

SEQ ID NO: 102482 - protein, 102 aa, Gossypium hirsutum
  Clone ID: LIB3272-031-P1-K1-G6.pep
HDLNLEHSANLEQNANLEHIANLEHMANLEHNANLEHIANLQQIANLEHNANLEHIANLEHNANLEHSVDSEQNLNLEKNWKRTWRSRNCSRNHNINQNKTM

SEQ ID NO: 102483 - protein, 62 aa, Gossypium hirsutum
  Clone ID: LIB3272-031-P1-K1-G8.pep
QYKNAYFSYLKLTLNAKRLTSQNSGLLRTCCYAHQCTLNDYDDFHKDFAQVEQYYTLASKTF

SEQ ID NO: 102484 - protein, 47 aa, Gossypium hirsutum
  Clone ID: LIB3272-031-P1-K1-G9.pep
LVLFLVNHHHHIPFFFAMADDKEISAPVVDTGHIISTTIGGKNGEPK

SEQ ID NO: 102485 - protein, 81 aa, Gossypium hirsutum
  unsure (1)..(81): unsure at all Xaa locations
  Clone ID: LIB3272-031-P1-K1-H1.pep
IFLKTLTGKTITLKVDSRFTINNLNAKIQDTEGIPPDYQRVMVTRKQLEDGHTXLTTTSRRESTLYLVKEARGGTIDPSLM

SEQ ID NO: 102486 - protein, 88 aa, Gossypium hirsutum
  Clone ID: LIB3272-031-P1-K1-H6.pep
RRVHKGTLNIVDLDDYAVDDEHYEEKMKKESLAFFFLATYGDGEPTDNALCFYKWFTEGKERGVWLQNMKYGIFGLGIKQDEHFNRVA

SEQ ID NO: 102487 - protein, 64 aa, Gossypium hirsutum
  Clone ID: LIB3272-031-P1-K1-H8.pep
QSNIPTLFNSKNRNSARYLLLYRATFYPKPTHDCNGNCPTLHMYLLRTFSIPSELEMLLPITKH

SEQ ID NO: 102488 - protein, 71 aa, Gossypium hirsutum
  Clone ID: LIB3272-032-P1-K1-A10.pep
TSFLFFSLYFLISFNSAGGLNSYRQFQKSSKTMANAASGMAVHDDCKLKFLELSYLLSLTVCPPKKRLNRK

SEQ ID NO: 102489 - protein, 77 aa, Gossypium hirsutum
  Clone ID: LIB3272-032-P1-K1-A2.pep
VLDGTHPLVWEAMKKLLLLSTIRTAPCCLCCYELKKVELVNIDCIFDNVDILADLRLSVHVFPSSLSVSPPNVFRYL

SEQ ID NO: 102490 - protein, 98 aa, Gossypium hirsutum
  Clone ID: LIB3272-032-P1-K1-B1.pep
FRRENTCLAWRKLRRNRERKPIHDFSSEDMFFEVALPRDVKIHATNLDKPVSRRFILACVLDNLFKEKASEDHGYFVAVTLVKSICQGNVMDESGNTV

SEQ ID NO: 102491 - protein, 71 aa, Gossypium hirsutum
  Clone ID: LIB3272-032-P1-K1-B3.pep
SYNLIYMNKCTLHDKLHRLPSSSKQEQPDFNPRKSYHCTGELDPIHVSPAQPLRYFTQKPYPRLNCRAPPP

SEQ ID NO: 102492 - protein, 77 aa, Gossypium hirsutum
  unsure (1)..(77): unsure at all Xaa locations
  Clone ID: LIB3272-032-P1-K1-B5.pep
KSCWLFYHKGFGNSPEELLYPSFHKSTKKPKQSXETLNVFLSHHPHNTFYMNFSNTNNYSYIRHEHPPLFHQKKGWT

SEQ ID NO: 102493 - protein, 68 aa, Gossypium hirsutum
  Clone ID: LIB3272-032-P1-K1-B6.pep
REKVNNLLLCCLKVHSFPFLRLKLRSLQCKLCCWLWQNACADIAVAVIIMAYCLGFFSWKILSKWREI

SEQ ID NO: 102494 - protein, 106 aa, Gossypium hirsutum
  Clone ID: LIB3272-032-P1-K1-B7.pep
MASNTAALAALIITSNLVRFTAGCSTYVPCAPPPKGHKPTHESPPWAPNQTATWPNDTLYLGDCAGSQRSVLVVAGPARTKCCSLISRMTDLEGADCLSTAMIANA

SEQ ID NO: 102495 - protein, 73 aa, Gossypium hirsutum
  Clone ID: LIB3272-032-P1-K1-B8.pep
TVPYFFVAPSLFIFYFLLIFYIILPYGVGLLQPFLFYNQSIIFLMLRSPFIFLILGYLFLFFALCNRRFHQLF

SEQ ID NO: 102496 - protein, 58 aa, Gossypium hirsutum
  Clone ID: LIB3272-032-P1-K1-B9.pep
RLAAALLKARVLPFSLGQGCFGVWFNDLGFRLALGLYLLDCFLILFGPGSIGPYYSFI

SEQ ID NO: 102497 - protein, 129 aa, Gossypium hirsutum
  Clone ID: LIB3272-032-P1-K1-C12.pep
IVHGECLADDTFGTSQQQFKRLLLFSGNDYLGLSSHPAVRRAAAEAARDYGMGPRGSPLICGYTYHHRLLESSLASLKKKEDCLLCPTGFSANMALMVALGNLASLLAAGNVPVKDEKIAIFSDELNHA

SEQ ID NO: 102498 - protein, 41 aa, Gossypium hirsutum
  Clone ID: LIB3272-032-P1-K1-C8.pep
VYHDPPPPLLFNYLVLLLIKSYLYLHVISHVYFPLFLFLYI

SEQ ID NO: 102499 - protein, 90 aa, Gossypium hirsutum
  Clone ID: LIB3272-032-P1-K1-D4.pep
MSKAQDPFYIVKEEIQESIDKLQSSFHQWERILPDTGEQVHLTKELLANCESIEWQVDELNKTIDVAARDPSWYGIDNRELEKPRRWTIT

SEQ ID NO: 102500 - protein, 101 aa, Gossypium hirsutum
  Clone ID: LIB3272-032-P1-K1-E11.pep
MTPAVEKKAVSDKARAEKKPTAVKKLPREGGASVEDKKLMRALTSVQTYKIYIFMVLEQVHPDIAISSKAMGVMNRSINDIFEKLAQEASRLARYIKKPTI

SEQ ID NO: 102501 - protein, 104 aa, Gossypium hirsutum
  Clone ID: LIB3272-032-P1-K1-E12.pep
MGRRQQPETVGVLDRINNLPDSILSHILSFLPNKEAVRTSVLSTRWKYLFASSISILDFEHCLKNLCEEDVNNFMNFDDTLLFNPRERVHLESFWVNDYFVDDE

SEQ ID NO: 102502 - protein, 78 aa, Gossypium hirsutum
  Clone ID: LIB3272-032-P1-K1-E6.pep
ISERKSIHFSHTCYFFFGFPHYTILNHYKKKQSHPVSGILLIFILLSKFKALLARSLAVILSRGLLLVLMLMLGLHPT

SEQ ID NO: 102503 - protein, 74 aa, Gossypium hirsutum
  Clone ID: LIB3272-032-P1-K1-G10.pep
FYVHNLGTIIIHPKFHSFPTSNNLPFLCLADPNASLEASFISSFSRAPCCGIFSGFLVRFHVFMSWDFLSDYSF

SEQ ID NO: 102504 - protein, 73 aa, Gossypium hirsutum
  Clone ID: LIB3272-032-P1-K1-G3.pep
SDRSRVRSRIGISVRPPKPRKKKVSGSRSNLDKYSFKFILRELGMLCGEYGQRFEVGAKREDKKPSHAGRGAL

SEQ ID NO: 102505 - protein, 121 aa, Gossypium hirsutum
  Clone ID: LIB3272-032-P1-K1-G7.pep
CAIHTQHQVNVSFGSKNPLQNVKNLIKSFGIPSKSCSPHVSLQQGNWVKLICGASFEDVVDIRNLSLVYTLAGVDCIDCAADPSVINAVNEGIETAREIVSIRRPWVMISVNDDEDLHFRK

SEQ ID NO: 102506 - protein, 60 aa, Gossypium hirsutum
  Clone ID: LIB3272-032-P1-K1-G9.pep
DLMVKLPAYIVTYYHTMEFKTGFSGTRMEKLNINVLLMLTLAPMLQPKIPMMVKRMVTNL

SEQ ID NO: 102507 - protein, 67 aa, Gossypium hirsutum
  Clone ID: LIB3272-032-P1-K1-H10.pep
DAHNWPAWAKPLLNDQSTEPKTITVTLTGKIASSTAWIGAMALSKVWAQTMTMFISMFSYIDPRTLM

SEQ ID NO: 102508 - protein, 57 aa, Gossypium hirsutum
  Clone ID: LIB3272-032-P1-K1-H3.pep
SKDSLTSFVTPNHHLSSIIYKQALIQSPKMQLHVFAVLQDILSAYTLISNSMLSFHH

SEQ ID NO: 102509 - protein, 128 aa, Gossypium hirsutum
  unsure (1)..(128): unsure at all Xaa locations
  Clone ID: LIB3272-032-P1-K1-H4.pep
SVSVTHTISATNQKNPFRITPIIHSRRLFHLQAAARFRFGFISSYKKSDFQDFQGFAKPSRLFPSTEPKTFTGALNENIFPSTGLDGARTLFKVRLQTSNMYGSSLSNINAGILXCLIDEKGDSILKR

SEQ ID NO: 102510 - protein, 117 aa, Gossypium hirsutum
  Clone ID: LIB3272-033-P1-K1-C12.pep
GFGFSIEVEKSLPDLVFGDERRVFQVILHMVGSLLDGNSGGGTVVLRVFSENGSQEWNDQRRAAWKHSSLDGDVHIRFEIRIENSNSQPESSGSMSELQVSGRKYNSNSAEERLSFN

SEQ ID NO: 102511 - protein, 98 aa, Gossypium hirsutum
  Clone ID: LIB3272-033-P1-K1-C7.pep
MRRDDLCITIPNFFRCPISLDVMKSPVSLCTGVTYDRTSIQRWLDSGNNTCPATMQVLQSKEFVPNRNLQRLIQIWSDSVARRQHDAELAANSVVLPS

SEQ ID NO: 102512 - protein, 88 aa, Gossypium hirsutum
  Clone ID: LIB3272-033-P1-K1-D12.pep
DLPYPKKKSTYFIALTNSRQFFCILSLIDSWVYYLYPFFLKKSGNKEKKRLLIYLLTFVSGLIKKHILPSKLHDCKEQCRDTTTFTEK

SEQ ID NO: 102513 - protein, 77 aa, Gossypium hirsutum
  Clone ID: LIB3272-033-P1-K1-D9.pep
LIFCPFCSSCSSLSLSLSLSLFVFPASFNSVLKKVKELTKRKFHSRFKAFCFFSSFQSTHLIASPPLLFCLLLIGVC

SEQ ID NO: 102514 - protein, 101 aa, Gossypium hirsutum
  Clone ID: LIB3272-033-P1-K1-E11.pep
MGVPVTYCELFFARLFVHTLSLLADLHELISTLLLYLGLPGYLEPDMACSECARETHHAYACSVSGLVIRELLPGVKCFDLADPTESCAVCLYDLKGPDEI

SEQ ID NO: 102515 - protein, 104 aa, Gossypium hirsutum
  Clone ID: LIB3272-033-P1-K1-E8.pep
CFERTTRSLDQNGNLPPLTPSRPFFGVDILRLSLLWSKSQRILRCSVKVATEEVKGRKSIGLGILKALNLFYMKEMRVISGFGQHSGHHQWWLPSLVRRVADGT

SEQ ID NO: 102516 - protein, 60 aa, Gossypium hirsutum
  Clone ID: LIB3272-033-P1-K1-F1.pep
SNTLVYQCLIPDSAHSYMPNYIQSDPCGSISIMKQPEFKIPPSVLKISTIFQQIVCCRSD

SEQ ID NO: 102517 - protein, 124 aa, Gossypium hirsutum
  Clone ID: LIB3272-033-P1-K1-G8.pep
LFLVLRDLVNGIKKNKFTASESSEIISFLQQAFVRLEAWFQWFNTTQLGKDVGSYYWHGRDNLTIRELNPKTLSSGLDDYPRASHPTEDERHLDLRCWMLLAADCMNSVAELIWKENKPGKDYA

SEQ ID NO: 102518 - protein, 69 aa, Gossypium hirsutum
  Clone ID: LIB3272-033-P1-K1-H7.pep
FPFVVVGLSLYNRFPVLKLHLILLLSQETLLIELLKQSEKIDPVLVFDRRFSLFEFNLQLWRILGGLIK

SEQ ID NO: 102519 - protein, 79 aa, Gossypium hirsutum
  Clone ID: LIB3272-033-P1-K1-H8.pep
NFVSFGSEHVGGIRMSHTSSDCEFDHGNASSFYQSISVTSMNHSSQESRVCWVAPFPSVPSSTLAIYNGSVCTAFIFHL

SEQ ID NO: 102520 - protein, 53 aa, Gossypium hirsutum
  Clone ID: LIB3272-034-P1-K1-A2.pep
ASHSRYPCTEMSQIAARHRRSDPGKHTWSLSKLRAKVSFVQIDEEIYAAVGYR

SEQ ID NO: 102521 - protein, 79 aa, Gossypium hirsutum
  Clone ID: LIB3272-034-P1-K1-A5.pep
MANSAAACAERATHDMLIGPDWAINIELCDIINTDPRQAKDALKVLKKQLGNKNPKVQLLALNVLDSLSKNCGEHVFQQ

SEQ ID NO: 102522 - protein, 92 aa, Gossypium hirsutum
  unsure (1)..(92): unsure at all Xaa locations
  Clone ID: LIB3272-034-P1-K1-A7.pep
YLSKREKSLAFRFERDHIWLPGTHFRGELFFYLFPYQEIQNWILWESEGKWVVQRAVHVYIGANPSTQSAXRIKXVYNQTVKVVDIVDTFKL

SEQ ID NO: 102523 - protein, 70 aa, Gossypium hirsutum
  Clone ID: LIB3272-034-P1-K1-C3.pep
MDDSCAVCADNLEWVSYGACGHRDVCSTCVSRLRFICNDRRCCICKTESNVIFVTKALGDYTRMINDFSV

SEQ ID NO: 102524 - protein, 59 aa, Gossypium hirsutum
  Clone ID: LIB3272-034-P1-K1-E10.pep
MEQYEILEQIGKGSFGSALLVRHKHEKKKYVLKKIRLARQTDRARRSAHQEMELISKVK

SEQ ID NO: 102525 - protein, 92 aa, Gossypium hirsutum
  Clone ID: LIB3272-034-P1-K1-E5.pep
IHLLSRNMLPFMRIPSVNFLQNHLPVLLQQSGSLFPLSAPSTSAPHPPRPQPRRNPIHQINSFSLFESFSRYKVSNFVRIPVDKTKNTVSET

SEQ ID NO: 102526 - protein, 61 aa, Gossypium hirsutum
  Clone ID: LIB3272-034-P1-K1-F11.pep
PGKFPSWCSPTLTKHVISQIIGYLLQGLGIQKQRHLKLVFAIRSLILVGTFLFLPKKFQVA

SEQ ID NO: 102527 - protein, 32 aa, Gossypium hirsutum
  unsure (1)..(32): unsure at all Xaa locations
  Clone ID: LIB3272-034-P1-K1-G12.pep
AHLRRPALSLNQMCHXXSTRHSEQWAEITLRE

SEQ ID NO: 102528 - protein, 82 aa, Gossypium hirsutum
  Clone ID: LIB3272-034-P1-K1-G3.pep
PRSCHKNPSLGSKKRLSLVHVIKILHLDLYICFFNSFLLKVVMEDDAYEEEPLNLSLTIMADPSGEKINRKRKRRVPLPSSY

SEQ ID NO: 102529 - protein, 58 aa, Gossypium hirsutum
  Clone ID: LIB3272-034-P1-K1-H10.pep
MDRATVGPAMDMPIMHDSDRYDFVRDIGSGNFGVARLMRDKVTKELVAVKYIERGDKI

SEQ ID NO: 102530 - protein, 69 aa, Gossypium hirsutum
  Clone ID: LIB3272-034-P1-K1-H3.pep
KRRSRLASSKTLSEASSTQKESSECFIPSNAIACAAALPSLATNSNQQDVNPFNMFLMDISLSSFNFLS

SEQ ID NO: 102531 - protein, 61 aa, Gossypium hirsutum
  Clone ID: LIB3272-035-P1-K1-A4.pep
QPNVINHSRCCQEDPSVNGPPCSICMQRSQPYSSLRLILHPYANGHVLDKGLPKRMVCPFP

SEQ ID NO: 102532 - protein, 140 aa, Gossypium hirsutum
  Clone ID: LIB3272-035-P1-K1-A9.pep
MGASLSNLTEGSNGTAMGPGLGDIPESCVACVFTYLTPPEICNLARLNRAFRGAASSDSVWEMKLPSNYQDLLDLVPPERYQNLSKKDIFALLSRPVPFDDGNKEVWLDRVTGRVCMAISAKGMAITGIDDRRYWNCVST

SEQ ID NO: 102533 - protein, 105 aa, Gossypium hirsutum
  Clone ID: LIB3272-035-P1-K1-B10.pep
SRGNPTVEVDVSLSDGTVARAAVPSGASTGIYEALELRDGGSDYLGKGVLKAVENVNTIIGPALVGKDPTEQAKIDNFMVQQLDGKVNEWGWCKQKLEANAILAV

SEQ ID NO: 102534 - protein, 120 aa, Gossypium hirsutum
  Clone ID: LIB3272-035-P1-K1-B11.pep
NECPHSTVLCVHGSDIIQLRNLPYKKPRKALLLQKVLSPMEFLKLPSQIAMTPERYIKGEPNHWEVYPVQALLHMLKGKVRSPQIQVAGIKYHLDHNPRRKRQEPEVTLQVPYQRMSINN

SEQ ID NO: 102535 - protein, 54 aa, Gossypium hirsutum
  unsure (1)..(54): unsure at all Xaa locations
  Clone ID: LIB3272-035-P1-K1-B5.pep
VKGYVKSHESTNHGNGEQVPQWALLILGAFSXLPHPFVFALNPPWTNYLIKTPV

SEQ ID NO: 102536 - protein, 52 aa, Gossypium hirsutum
  Clone ID: LIB3272-035-P1-K1-B8.pep
VSPELSHQNKAATLLIPPHHKLHCGSKHASPIKQLGAKIYHNPLTLKSKQNP

SEQ ID NO: 102537 - protein, 82 aa, Gossypium hirsutum
  Clone ID: LIB3272-035-P1-K1-C1.pep
ISVRVWKPLPFCAFSPSIDRKKVSPLLLLGLISAIERVSSDTITRIPGSSCRCQTSGGRRWRAGKALREVTSGWPSVRLLEA

SEQ ID NO: 102538 - protein, 109 aa, Gossypium hirsutum
  unsure (1)..(109): unsure at all Xaa locations
  Clone ID: LIB3272-035-P1-K1-C11.pep
MPRPGPKPYGCVKRXWAYLTXQLIRGSMVQQILRLAFQTHSSATKKNRDWQDKILIAIVKAKESFNSTAMLDKLKANPEPFFTIDIASWESDTTKYYCPETGELLPPFF

SEQ ID NO: 102539 - protein, 55 aa, Gossypium hirsutum
  Clone ID: LIB3272-035-P1-K1-D2.pep
RNGYLKVSHRRIHDPGRALLSPLVFPPFVQETRNCSSPQGVSRSVVYCGRKLPLC

SEQ ID NO: 102540 - protein, 105 aa, Gossypium hirsutum
  unsure (1)..(105): unsure at all Xaa locations
  Clone ID: LIB3272-035-P1-K1-D3.pep
NLCACENSVNFHSLEXXGILXSXLSTHRPXPSHXXLLPXFPXXPPXXLPLSLPLPLLPFPQTPTLXPHMPGXXLTHCXXPXVAXPPSLLRPTSXSPCPHARRXXK

SEQ ID NO: 102541 - protein, 85 aa, Gossypium hirsutum
  unsure (1)..(85): unsure at all Xaa locations
  Clone ID: LIB3272-035-P1-K1-D8.pep
GREIRMTTRLASTVCATAGAHIRGSWGTIKPFSIGLIGGRNIVTGRAHDGASINTPVSFVPDLVSWTWDNDLIYXVGPLIGGGLG

SEQ ID NO: 102542 - protein, 95 aa, Gossypium hirsutum
  Clone ID: LIB3272-035-P1-K1-E7.pep
VSESVFPPGALKIRAPGCVFQNEVSPGDFKVERVAHEKRHKQMYFLVPENYREDGFIWGHPFLDFLWVFFYNNFVCRHSFMLTPKKKKKKNPRVR

SEQ ID NO: 102543 - protein, 140 aa, Gossypium hirsutum
  unsure (1)..(140): unsure at all Xaa locations
  Clone ID: LIB3272-035-P1-K1-E9.pep
IFAGYSSSRLYKMVKGPEGEKITLETCFIVPGILFRIFFGPDAPIWGXHFSVAVPFGXTRLALVGLWFGISVPLVFVGSHLGXKTPPIEHPVKTNKIPRQILKQAWYMKPVFSILMGGILPLGAVYIELFYIXTSIWLTQ

SEQ ID NO: 102544 - protein, 39 aa, Gossypium hirsutum
  Clone ID: LIB3272-035-P1-K1-G6.pep
LKTVDCKRGPFFSSLGVRFCPTNYFWHNSLSCLCVVEDI

SEQ ID NO: 102545 - protein, 58 aa, Gossypium hirsutum
  Clone ID: LIB3272-035-P1-K1-H1.pep
VSTKFSSFLSPCKINKMILVIKKPRSKISRHNYGIACRSNTQSAFHALIVAEYKTEHV

SEQ ID NO: 102546 - protein, 137 aa, Gossypium hirsutum
  Clone ID: LIB3272-035-P1-K1-H6.pep
KGEKTNWIMHEYRLADVDRSVRKKNSLRLDDWVLCRIYNKKGCIEKQPPRGSVTKKASVTEIEESKPDNGTLGVEACEFPPAATAVGNDYVYFDSSESVPRVHTDSSCSEHAVSREFMTEVQSVPKWKEELGMANNN

SEQ ID NO: 102547 - protein, 88 aa, Gossypium hirsutum
  Clone ID: LIB3272-035-P1-K1-H9.pep
GGELNPRENFGVTFAFRCSKVGRSLIGGLGNNLFYLPNAHSVRSHVAFFCLNHKGLLFMRTVLKVVDNSGAKKVMCIHTLKGKKGARF

SEQ ID NO: 102548 - protein, 100 aa, Gossypium hirsutum
  Clone ID: LIB3272-036-P1-K1-A10.pep
RFNLDPGFMTTVHAITAPQKTVGGPSLKDWGDGRANSFNIIPSLTCPINSAGKCIAVLNAKLTGTSLQVPTPDVSDVALTVRLAKSPSHDEITAALMEES

SEQ ID NO: 102549 - protein, 80 aa, Gossypium hirsutum
  Clone ID: LIB3272-036-P1-K1-A2.pep
WTGSKPVKLLSLHHRVDKVGNFETTPTMRNWDETVVSLGQERRFLLTQLQTDQKHSWSWLFYHNRLQKGCKKDAFHSKCC

SEQ ID NO: 102550 - protein, 81 aa, Gossypium hirsutum
  unsure (1)..(81): unsure at all Xaa locations
  Clone ID: LIB3272-036-P1-K1-A9.pep
NAXTSTELRRQQRLAAPGRGGQPARPGIHEDYETNGRPQNFLKAVRTWRGGAHGHRDFIARAGDMLYTGRLMVTTVCRGKQ

SEQ ID NO: 102551 - protein, 133 aa, Gossypium hirsutum
  Clone ID: LIB3272-036-P1-K1-B1.pep
PSPPKRRSPPSVVTSRFRSRRTTISASQLRFQRSRWNPTVLPKGCEDVEGRSARTWGEQCASRGHAWYVEAAGDHCCGVKQMETLGFPNLGLLLLGHYFGLFYVIGHLGQIFLFGFTICKWIFNIFVLFFGFC

SEQ ID NO: 102552 - protein, 49 aa, Gossypium hirsutum
  Clone ID: LIB3272-036-P1-K1-B10.pep
LLRLKDLIFDSKKIEVLKQFIYKRKSSVSWYTRMKESFVAERGGLHYFG

SEQ ID NO: 102553 - protein, 47 aa, Gossypium hirsutum
  Clone ID: LIB3272-036-P1-K1-B6.pep
MIYDVNSPLFRSFLSQKGGSSDKRKMEEQKPKEQRPKASENKPVMTE

SEQ ID NO: 102554 - protein, 81 aa, Gossypium hirsutum
  Clone ID: LIB3272-036-P1-K1-C12.pep
RELTSCNTLTLLKAFLMGGWFTTRTIITRFWCYSGSFPGLVLFTVMVMRKIFDISHKITFQMPTFNSQKGLGHFIWVVSRI

SEQ ID NO: 102555 - protein, 43 aa, Gossypium hirsutum
  Clone ID: LIB3272-036-P1-K1-C2.pep
GEAYRFGAIRMVGSYERMNYARVWGLPLLRRKWKCYIFLQDKQ

SEQ ID NO: 102556 - protein, 59 aa, Gossypium hirsutum
  Clone ID: LIB3272-036-P1-K1-C3.pep
VILIHIRFLFRDLLYGSFYDHLMRRAYNSLCVLLHCVGRTLFWWLSGARSYCKVEHNCV

SEQ ID NO: 102557 - protein, 51 aa, Gossypium hirsutum
  Clone ID: LIB3272-036-P1-K1-D12.pep
MADGEDIQPLVWDNGTGMGKAGFAGDDAPRAGFPNIGGRPRHTGVMGGMGQ

SEQ ID NO: 102558 - protein, 54 aa, Gossypium hirsutum
  Clone ID: LIB3272-036-P1-K1-D6.pep
VRMEQDMCKCRMSVTIPLFGLASSELGIGDYQRDLPPRSRSGGLSTGLCEESGA

SEQ ID NO: 102559 - protein, 137 aa, Gossypium hirsutum
  Clone ID: LIB3272-036-P1-K1-D8.pep
VKNLKMYEKYPSPIKCEPTTVSMPIKEGEPIVFTYEVTFEESDIKWPSRWDAYLKMEGAKVHWFSILNSLMVITFLAGIVLVIFLRTVRRDLTRYEELDKEAQAMVNEELSGWKLVVGDVFRAPSNPALLCIMVGDG

SEQ ID NO: 102560 - protein, 136 aa, Gossypium hirsutum
  Clone ID: LIB3272-036-P1-K1-D9.pep
CFLDATQFYASMRTQGCWPDNFTFPFVLKACSRLLDFHLGIRIHALVIKLGFDRDVFIKTSLLYLYSKCGYLDYARKVFDDIPDKNVISWTAMISGYIDVERYREAVDLFRKLIDMGLRPDSFSVVRVLAACAHLR

SEQ ID NO: 102561 - protein, 65 aa, Gossypium hirsutum
  Clone ID: LIB3272-036-P1-K1-E3.pep
MSRRPVNPARRFADGGSIPFVGSVQSKTRSSPFLSIGLLVVGAILLIGYLHYGSGQSTSVKEALK

SEQ ID NO: 102562 - protein, 82 aa, Gossypium hirsutum
  Clone ID: LIB3272-036-P1-K1-G8.pep
KINTALHFSTLKQLVASMASMASLSASYPKYTSNFPTRYTHLLYDLCLVPRNLPLVKKLSFSDLTIVRKSNQTESMIDSTDK

SEQ ID NO: 102563 - protein, 70 aa, Gossypium hirsutum
  Clone ID: LIB3272-036-P1-K1-H1.pep
VNREHSHMLTQAGYGARNHDCQKRSPLWGLTVTSGRKSGGCATGWKFELWKFVVAASVDIKNKELGFLLE

SEQ ID NO: 102564 - protein, 107 aa, Gossypium hirsutum
  Clone ID: LIB3272-036-P1-K1-H11.pep
RGRQDKEGCTPLHWAAIRSNLDACTVLVQAGKKEDLMVTDNGGLTPEQLASDKNHREVAIFLGNARRLYEKGCGRNNSFGQLSKLRLAPILWCTSLLLYGDIYSICV

SEQ ID NO: 102565 - protein, 66 aa, Gossypium hirsutum
  Clone ID: LIB3272-037-P1-K1-A1.pep
RNIINNPKLVPGGGATQLTVSATLKQKSASVEGIQKRPYEAAALAFEAIPRTWAQNCACNVIRAMT

SEQ ID NO: 102566 - protein, 78 aa, Gossypium hirsutum
  Clone ID: LIB3272-037-P1-K1-A4.pep
QGKCCWSRQLTMYNIEANPCAEGGEHEQRVVPLANKGPHIHGTLRLQDLHDAYTDLTMPRLNRIITTSPPRSDPVMHA

SEQ ID NO: 102567 - protein, 63 aa, Gossypium hirsutum
  Clone ID: LIB3272-037-P1-K1-B11.pep
FPNSHANFTLGIALKKREREIASISFLYWKNSLNLDMATVGRHSSIYRDLVVVHMVSTSMHWP

SEQ ID NO: 102568 - protein, 70 aa, Gossypium hirsutum
  Clone ID: LIB3272-037-P1-K1-B8.pep
CHNSFIFLENIKTKLHYQTGSSFFFRIKPVPDLGFHIELTYFFFFFQNGKPGFSWCSRTAIRLWAVIIIT

SEQ ID NO: 102569 - protein, 124 aa, Gossypium hirsutum
  unsure (1)..(124): unsure at all Xaa locations
  Clone ID: LIB3272-037-P1-K1-C4.pep
GGGSIIHIVDHLNLEALRGAEVLRALYESSKGIAQKMTXXGLRYIRQIAQETSGEVGYSLGRQPAGLRTFSQRLSRGFNDAINGFNDYGWSIMNCDGTEDVIIAVNSINSFSSTLNPANALSFL

SEQ ID NO: 102570 - protein, 106 aa, Gossypium hirsutum
  Clone ID: LIB3272-037-P1-K1-E12.pep
VLQASYFLIHYLFASQTGHVGALYSAFLAMHLAAGVPGVLAVLALGYNTNLFGSITHYSSGQAAVYYGAGYMELPDVFKMGFVMAIVNAIVWGGVGTLWWKFLGIY

SEQ ID NO: 102571 - protein, 88 aa, Gossypium hirsutum
  Clone ID: LIB3272-037-P1-K1-E2.pep
NNSRINYQLISPHHLHLSLSSLLTINFSFFSFFFPITKLLQWAERNLRGEKIHAATRSGVSASIDNQAVCTLPTQLSNLSRKDLICGI

SEQ ID NO: 102572 - protein, 75 aa, Gossypium hirsutum
  Clone ID: LIB3272-037-P1-K1-E7.pep
YGPKVKNKLVGDTSRLGIGGGQIDGKAVQTLQKSFVQVQNILDQKRLLINEVNQNHESTIPDNSRRNVGLINELN

SEQ ID NO: 102573 - protein, 104 aa, Gossypium hirsutum
  Clone ID: LIB3272-037-P1-K1-F2.pep
LHYFRPCPCLLNTQKRIPTAKIRSFLKRTEKSIIHITNPNQINEKKKKSNKAFNLFSFFSPHQLSLLFPFFSFAAQLHKYNCIRAVNWFFYKKNLRNNLLNKNR

SEQ ID NO: 102574 - protein, 96 aa, Gossypium hirsutum
  Clone ID: LIB3272-037-P1-K1-F7.pep
MVKVAGVLVCLLIVGMDVGAGILGIQAEAAQNKVKHLRLWIFECRDPSHDAFKLALGAATLLTLSHVLANLLGGCMCVCSQEEFQSSSTNRQLSVA

SEQ ID NO: 102575 - protein, 90 aa, Gossypium hirsutum
  Clone ID: LIB3272-037-P1-K1-G1.pep
KTQLQQPNTYGPKPKQSEDKGNPRLISAVASPTASVPMFAPTNHVVLHQRTNSRVARPCSLLLHDLTAPESRRRLGEPLVAFSAGRQRGE

SEQ ID NO: 102576 - protein, 139 aa, Gossypium hirsutum
  Clone ID: LIB3272-037-P1-K1-G11.pep
ISSDLTELGRTPVAVVSAGVKSILDIPRTLEYLETQGVCVAAYKTNEFPAFFTETSGCKVPCRLGSPKECAQLIDANRKLNLGNGVLIAVPIAKEYSASGSLIESAIQQALTEAREKNITGNAETPFLLARVNEITGGA

SEQ ID NO: 102577 - protein, 74 aa, Gossypium hirsutum
  Clone ID: LIB3272-037-P1-K1-H1.pep
THLKCDAASPTVFILNAKASTIHRCKNNIYMLVAPTHMFPFPVKAMIVPMSFTAQNLVCRDTTPIIDELSLDLT

SEQ ID NO: 102578 - protein, 58 aa, Gossypium hirsutum
  Clone ID: LIB3272-037-P1-K1-H11.pep
CCEPTSSAPQPVILCAATFDENTNPRVSRGHHNISCGIWSPSSACVWTSETTNGSHAP

SEQ ID NO: 102579 - protein, 112 aa, Gossypium hirsutum
  Clone ID: LIB3272-037-P1-K1-H12.pep
NRMIHSVATFLGRKKSPDFPSIFARLSYEFSHHLLSSPINSKLHCLNDQNKEFSRNLVPWSCHFHALGKTSISRESFCCYYNMLKYETIRLNQERFPWKMRSKKIASQVERG

SEQ ID NO: 102580 - protein, 66 aa, Gossypium hirsutum
  unsure (1)..(66): unsure at all Xaa locations
  Clone ID: LIB3272-037-P1-K1-H2.pep
TQSSFQXRAKLISDMLINDAVLFHARIIFPKHGMRNSATTTSVWVSYVFHLSIAPCRSSAHAGRAL

SEQ ID NO: 102581 - protein, 125 aa, Gossypium hirsutum
  Clone ID: LIB3272-037-P1-K1-H9.pep
MATKKHDDHENYPTVLVTKTVTVHPKPLLHHPQQILHLSNLDRQCPMLMYVVFFYKPCFAYQNLSLGSIFNSLKSGLEETLSIWYPAAGRLSLNQADGKLNLWCNNGGAVLAEAVTTAKIIQLGD

SEQ ID NO: 102582 - protein, 121 aa, Gossypium hirsutum
  unsure (1)..(121): unsure at all Xaa locations
  Clone ID: LIB3272-038-P1-K1-A5.pep
GGGEVQGKGFHXSSPTSIVDREELTKGAFYRGGITQFIGTLLFLYNNVLTGIGYKNXGDPYKGRDQCRGVGILGICWAFGGKNFILGYRTGWIFWGHNNPTRAFWLFLAWKGVLSRSIIYI

SEQ ID NO: 102583 - protein, 62 aa, Gossypium hirsutum
  Clone ID: LIB3272-038-P1-K1-B2.pep
CRIKGAAIYAPNHHHTNQNLCCYQTNTPLMNWNKAPSFVWHPLQKKKRTKETLFSFYLQGRT

SEQ ID NO: 102584 - protein, 42 aa, Gossypium hirsutum
  Clone ID: LIB3272-038-P1-K1-B8.pep
FGNQFCKQVLLKTLRLVGGSKPRTTIILQPLQWLDGREWPKW

SEQ ID NO: 102585 - protein, 63 aa, Gossypium hirsutum
  unsure (1)..(63): unsure at all Xaa locations
  Clone ID: LIB3272-038-P1-K1-C1.pep
LICKSEVYVVISFTGLLPMSFGASEHPFTYGQLFXIGGFYIYVSMKLGASFSVILVTNLHVPK

SEQ ID NO: 102586 - protein, 90 aa, Gossypium hirsutum
  Clone ID: LIB3272-038-P1-K1-C6.pep
MRWEKVQLYPKEEGGVGEACAGPGKRWGHTCNAIKGGRFLYVFGGYGKDNCQTNQVHVFDTASLTWSLLATKGTPSIPRDSHSCTTGGDN

SEQ ID NO: 102587 - protein, 138 aa, Gossypium hirsutum
  Clone ID: LIB3272-038-P1-K1-D12.pep
DRGYYSVETVSLLVALKVRYRDRITILRGNHESRQITQVYGFYDECLRKYGNANVWKYFTDLFDYLPLTALIESQIFCLHGGLSPSLDTLDNIRALDRIQEVPHEGPMCDLLWSDPDDRCGWGISPRGAGYTFGQDIA

SEQ ID NO: 102588 - protein, 91 aa, Gossypium hirsutum
  Clone ID: LIB3272-038-P1-K1-D7.pep
FILPCKVPMESRKSHPSIVCFSEILVEPNHKGKHQILRNSKFQPLGSGLRFQITDRHSYMVFCNSNVEQGPVIPSSPAPAPGSWFVFYICI

SEQ ID NO: 102589 - protein, 138 aa, Gossypium hirsutum
  Clone ID: LIB3272-038-P1-K1-E1.pep
TNKIQNVLQRATVDSNSQIGTIFHILQTKESPPTYFHTNKFTSAFQEIVDAYGIAKYQEANPGVFTIITFPFLFAVMFGDWGHGICLFLATSYFIIKEKKFSSQKLGDITEMIFGGRYVIMMMALFSIYTGLIYNEIF

SEQ ID NO: 102590 - protein, 74 aa, Gossypium hirsutum
  Clone ID: LIB3272-038-P1-K1-E10.pep
CHGGQVNIGSLEWLVKLREGYSVLPRYHINEATLCWKKPDVVGEDGKDLILHITGTNYDCNREIINPIAFGDPI

SEQ ID NO: 102591 - protein, 62 aa, Gossypium hirsutum
  Clone ID: LIB3272-038-P1-K1-E11.pep
IISFFSILLLFHKSLLLHIKTKIRKEKMTHQRVGSFESSLDSSQSKLGDDSKASERNSRTSG

SEQ ID NO: 102592 - protein, 81 aa, Gossypium hirsutum
  Clone ID: LIB3272-038-P1-K1-E6.pep
IVHECRVTFTPMVHSRWSTQNLSTISLVQHYQFCVPLSRVCISILHLQTIHRTLDNLSNKNHASQAIKSFLIPSKPKVQSI

SEQ ID NO: 102593 - protein, 42 aa, Gossypium hirsutum
  Clone ID: LIB3272-038-P1-K1-E8.pep
PPNCHRAVSSSAYSKVGDPSKIPCPFTFRADQNMCSPLNSLS

SEQ ID NO: 102594 - protein, 72 aa, Gossypium hirsutum
  Clone ID: LIB3272-038-P1-K1-F2.pep
LHKHNHVQPFRFSSPQTFYLHLKYLCWIRLFRSPVQGPRRCTFLRQRRWPVWQHECDLWVRGSNPHPLLLRT

SEQ ID NO: 102595 - protein, 113 aa, Gossypium hirsutum
  Clone ID: LIB3272-038-P1-K1-F6.pep
LSFLCDLFIFSQKTMSLFFERNGDGNSIRRSGFIHDMQCIQDSPELKNDDQRESVLAEDREEEDDLEYCSSSSIGGNSDVSGESSSDGEDSRETEVQGKLKGPLDTMDALQEV

SEQ ID NO: 102596 - protein, 119 aa, Gossypium hirsutum
  unsure (1)..(119): unsure at all Xaa locations
  Clone ID: LIB3272-038-P1-K1-G10.pep
MPMGCPFLSLRFSLFVSLSFATSSSPFSFFKLQSPSSSIPKATPSDLLSLLATPSHSSSVNPSVADELKSCFKFLVPFNPSNTRSSSDFKSPSSRRSLLKSPRDEQNELIWWPXEPVLE

SEQ ID NO: 102597 - protein, 72 aa, Gossypium hirsutum
  unsure (1)..(72): unsure at all Xaa locations
  Clone ID: LIB3272-038-P1-K1-G5.pep
KPSLEWRAIKKKTCSSFCGCRGSGGWXRKSKLYLYVDRPPSPPFDVWMRSKNFSSYEPDQSSRPLKNLYRSK

SEQ ID NO: 102598 - protein, 76 aa, Gossypium hirsutum
  Clone ID: LIB3272-038-P1-K1-G8.pep
RHLPSMLIIPFQRQHHPLEEDLVRRYHSVVFTEDSNSGGENGGSPEKVVSNLDPTSAQSLENEILGSIVRTPMNNA

SEQ ID NO: 102599 - protein, 138 aa, Gossypium hirsutum
  unsure (1)..(138): unsure at all Xaa locations
  Clone ID: LIB3272-038-P1-K1-H9.pep
GKLDVLTSLQNLVSLXFSGELPNXLFFRKLPLCDLESNKGLYISNGVVSSSDLEHSRHVGPAVKLVMSILISASVILVLLAIYALIRARFFNNGLMEDYTWEVTLYQKLDFSIDDIVHNLTSSNRDRTGSFRVVYRGT

SEQ ID NO: 102600 - protein, 44 aa, Gossypium hirsutum
  Clone ID: LIB3272-039-P1-K1-A1.pep
TKVQNSNFLEEYNLLFWRCLNFSFSFSTLSKRAWGPKKAKDLFN

SEQ ID NO: 102601 - protein, 132 aa, Gossypium hirsutum
  unsure (1)..(132): unsure at all Xaa locations
  Clone ID: LIB3272-039-P1-K1-A4.pep
LIQLHPKLKRVVSETSMADNCSLPQFVMELRVLPIKNLKKQGSCGLFTRHLRHHISLTKFNGVNNLCEGNVEKSTFGESFVVPIESNFFANNSYISLQLHTKRLLGRKDLLGWCQIPAADIXEPPVGSVRYL

SEQ ID NO: 102602 - protein, 73 aa, Gossypium hirsutum
  Clone ID: LIB3272-039-P1-K1-B10.pep
AKMNATMFKVLMMLGFLGTDWMGQGPTGPGPIFPPMFTPSAGGSSTPTPNPSPTPTSILTPTPFPFPFSTPNP

SEQ ID NO: 102603 - protein, 68 aa, Gossypium hirsutum
  Clone ID: LIB3272-039-P1-K1-B8.pep
NQCEQLQSYNAMKTSNLELLKTQYLLAKYRSKQCTFSLNVPQLRLPFTFRTRSGFSHHRSEAEVQPFT

SEQ ID NO: 102604 - protein, 56 aa, Gossypium hirsutum
  Clone ID: LIB3272-039-P1-K1-C11.pep
EGNGGELITSNPEVYIINRTRFVHRRQTIAASQRSNLLIFKQTRGLRFFSTSSNGH

SEQ ID NO: 102605 - protein, 95 aa, Gossypium hirsutum
  unsure (1)..(95): unsure at all Xaa locations
  Clone ID: LIB3272-039-P1-K1-D10.pep
SGTTDVMADTDGAYGTIKQPAEMGDAANNGIDIATRHFGPSKDQIPILSYTGFYELAGVGAVEITSGPXVALHSGREDKTYQPPEGCISNATEGT

SEQ ID NO: 102606 - protein, 89 aa, Gossypium hirsutum
  Clone ID: LIB3272-039-P1-K1-D3.pep
LSWETRLKIINGAARGLAGVHFSEKVICRDFKASNLLLDGHYNAKISDSGLAKLGPSGGDSHVTTRVMGTYGYAAPEYIATGHSFLNYA

SEQ ID NO: 102607 - protein, 76 aa, Gossypium hirsutum
  Clone ID: LIB3272-039-P1-K1-E12.pep
GFPTIVNVSQCSSSCISTCTSFNSSSILTSLSRCGSLLGISYYLRSISFFFLCYSSRSPYAVTSVGAKEFSKFFSI

SEQ ID NO: 102608 - protein, 81 aa, Gossypium hirsutum
  Clone ID: LIB3272-039-P1-K1-F3.pep
DKRFFNIGLDAVLTSYVSMLDDFLVDMILCMRDRTENDQLALVREDISVRHSVESKGDPGNLGVRFLRDIIRTSMISRNDA

SEQ ID NO: 102609 - protein, 106 aa, Gossypium hirsutum
  unsure (1)..(106): unsure at all Xaa locations
  Clone ID: LIB3272-039-P1-K1-F4.pep
GLGYFRWSVMEPKFTEFSDYINGFSVEDLDDTFQLNSGQYSNGTIGFEFNDPSPDLNVLNMNVAVAPSEPDPVTFVQPLTVSTDGSSISTSTXVESGKGSLLSPVG

SEQ ID NO: 102610 - protein, 88 aa, Gossypium hirsutum
  Clone ID: LIB3272-039-P1-K1-F7.pep
ENMGRDKHKPGHKALFSHLAHGGYAHSPGPYSPGVAYPQEGYSPAGYPSQGGCPTHGSPPFGISGGIRVRSQLHGSATCMWCTSCRTF

SEQ ID NO: 102611 - protein, 50 aa, Gossypium hirsutum
  unsure (1)..(50): unsure at all Xaa locations
  Clone ID: LIB3272-039-P1-K1-G11.pep
EKIFLHSSVQQNIKRXNVQHFGISTLYCFRVALLELISNYSRLCLLIIQS

SEQ ID NO: 102612 - protein, 127 aa, Gossypium hirsutum
  Clone ID: LIB3272-039-P1-K1-G8.pep
NYSYNSYPDSGDSSPRSRGIDFENAPPWEDQAQQPQSYKAKFMCSYGGKIHPRPHDNQLSYIGGETKILAIHQTKVLMRMKVLIAPLWGGGDGDLSFKYQLPGEDLDALISVTNDDDLEHMMKTGCG

SEQ ID NO: 102613 - protein, 57 aa, Gossypium hirsutum
  Clone ID: LIB3272-039-P1-K1-H9.pep
RTSEHPCYLFTHMSRQTNPPPLNVSPPDRPAQNRPLVSKKRAVPRLRFPELVKIRLK

SEQ ID NO: 102614 - protein, 67 aa, Gossypium hirsutum
  Clone ID: LIB3272-040-P1-K1-B11.pep
PAQKKKTPATKTTLNTPRPKFSYITRKSNHNHEMGMLEFSLPIPQNTQFTRRRKKKLRTNKPQLYKT

SEQ ID NO: 102615 - protein, 102 aa, Gossypium hirsutum
  Clone ID: LIB3272-040-P1-K1-C3.pep
FIIDLVVFHGNLTFKPGCGLCRGVNLNFIHPLFILLCELQLPHHQGNQTMIALWTTVNNIYRSENSPCSHLSSRHTSSLCTGTFLTSIPQMYHTGRGFNSSA

SEQ ID NO: 102616 - protein, 112 aa, Gossypium hirsutum
  Clone ID: LIB3272-040-P1-K1-D1.pep
MEGDMEMKPSKFKRICVFCGSSPGRKSSYKEATIELGRELVSKNIDLVYGGGSIGLMGLISQAVFDGGRHVIGVIPKTLMPREITGETVGEVKAVADMHQRKAEMARQSDAF

SEQ ID NO: 102617 - protein, 84 aa, Gossypium hirsutum
  Clone ID: LIB3272-040-P1-K1-D11.pep
MKMETPLWWWFDTPQNGSKRSPWLQSTIYELYHRTKAMLKLIEEDADSFAQRAEMYYKKRPELICLVEDLYRAHRSLAGAGRSS

SEQ ID NO: 102618 - protein, 56 aa, Gossypium hirsutum
  Clone ID: LIB3272-040-P1-K1-D7.pep
FPTGLAPAKAQNTLDLEGFNLYPSSPFPKFGVLNFRKTKGNVLCGGRGPPRESGTG

SEQ ID NO: 102619 - protein, 51 aa, Gossypium hirsutum
  Clone ID: LIB3272-040-P1-K1-E11.pep
FHRPIFHVIQIALHRGGGELKRKLIFHSAKVYTNMVDFMLEISGELTNIGN

SEQ ID NO: 102620 - protein, 50 aa, Gossypium hirsutum
  unsure (1)..(50): unsure at all Xaa locations
  Clone ID: LIB3272-040-P1-K1-E3.pep
VGGEFQAKDYHNPSPTPLINGEDLSKFSFYRASIIVFIATLXLFLYITVF

SEQ ID NO: 102621 - protein, 130 aa, Gossypium hirsutum
  Clone ID: LIB3272-040-P1-K1-E4.pep
TASLFLSVPCPRFLFSRSGPCPFCSNSDATTNEEDDFYFDVDDDGIVSSDDETQPLSEDGVFIEIKKLGGNSRRIRSKIGIEANLDTVWNILTNYEKLADVIPGLAVSEVVEKKHKFARLYQNGQQNLPL

SEQ ID NO: 102622 - protein, 125 aa, Gossypium hirsutum
  unsure (1)..(125): unsure at all Xaa locations
  Clone ID: LIB3272-040-P1-K1-E6.pep
GIQSDGQMPIDKTVGGGGDAYNTFFNETAAGKHVHRAVFADLEPTGIDKVRTSAYRLFLHPDQLIRSRXDSYNNLDQGHYTIGREIVHLILDRFRKLADNCTGLKGFLVLNAHSGGTASWLCSLL

SEQ ID NO: 102623 - protein, 66 aa, Gossypium hirsutum
  Clone ID: LIB3272-040-P1-K1-E9.pep
RYFRPNFQEKIAALRGRSTHCLRSYKLVTQSFKYGSTQIRNPLRRSLSFGQTFRQDGSQTPFFFGK

SEQ ID NO: 102624 - protein, 60 aa, Gossypium hirsutum
  Clone ID: LIB3272-040-P1-K1-F12.pep
HKLFFLLERSFKEGKIPKSANIQKCNSCYTKSKWLILSHPVQEKKKAPASGSLDFELPRW

SEQ ID NO: 102625 - protein, 66 aa, Gossypium hirsutum
  unsure (1)..(66): unsure at all Xaa locations
  Clone ID: LIB3272-040-P1-K1-F9.pep
KLVSRCPEVFSFYIGAGVKKEVXLLSEFAISNDHLPRVIKKYPEVLVYDLYKTLLPHHNHFIEMRL

SEQ ID NO: 102626 - protein, 60 aa, Gossypium hirsutum
  unsure (1)..(60): unsure at all Xaa locations
  Clone ID: LIB3272-040-P1-K1-H6.pep
MGTDPYGGFKIHIFVKTLTGETITLEVGSVDTISILKVKIHDRGGIPPDQXHFIFAGKQF

SEQ ID NO: 102627 - protein, 67 aa, Gossypium hirsutum
  unsure (1)..(67): unsure at all Xaa locations
  Clone ID: LIB3272-040-P1-K1-H8.pep
MQWRRVCRSGLKVNQLSYGAWVSFRNQLDVKEAKXLGRLCKDNWINFFDIAEVNANGRAEEIMGHAY

SEQ ID NO: 102628 - protein, 86 aa, Gossypium hirsutum
  Clone ID: LIB3272-041-P1-K1-A10.pep
EPSPLFSFRGKQKILQKKGKIPISFSFFGVHNDRVLVSLVLAASLSNHRRVSLFLSFFHFSFDAFPFLFIKVVNLGKFFFFQKAFW

SEQ ID NO: 102629 - protein, 104 aa, Gossypium hirsutum
  Clone ID: LIB3272-041-P1-K1-A11.pep
RFLSCPLECPRFLQLRFLPRKVTIFRRVMDPPPLLLEEVILSASSSLRLVCHLKNLFRRLATRTPSWVLSWLGLLEGISSVPLILMKIGSLLVSLGVTSPALIL

SEQ ID NO: 102630 - protein, 95 aa, Gossypium hirsutum
  Clone ID: LIB3272-041-P1-K1-A2.pep
KPTHSTASDPRPYLSILEILGISLAPSRGLMDNAFGFSFQFQSQRSEQRPKPIRKVRFDFLFVFTCKMIKIIAGKINKNKRIITTKEDHLLEIPF

SEQ ID NO: 102631 - protein, 37 aa, Gossypium hirsutum
  Clone ID: LIB3272-041-P1-K1-A3.pep
QPCRCYLRRRIVLTVYNIYIPPVTIAIPSPHIKNLER

SEQ ID NO: 102632 - protein, 106 aa, Gossypium hirsutum
  Clone ID: LIB3272-041-P1-K1-A6.pep
RLLFLVVLEQCFVHVSLLLQPFSMLLSYYWRWLCSVFEHPFLSLSVNIQSIKGISVKGICLPTWMSMVVKEVPVGLERDQVWLWTIMLITENETLGFAIEMDVVPG

SEQ ID NO: 102633 - protein, 111 aa, Gossypium hirsutum
  Clone ID: LIB3272-041-P1-K1-A7.pep
GRLSLNGIRLLMGVECCKQLSLLKGVEKQTERQILPCESALALVHLVDFETGRRIQWLYSSSLNMAPNRLLISIKYLHKGKGHRLENVVVFNPVFFFFFHQNDLRFWNFFF

SEQ ID NO: 102634 - protein, 72 aa, Gossypium hirsutum
  Clone ID: LIB3272-041-P1-K1-A9.pep
GYYEYLIKGWFQFRVTQDGNLTYFHDMVEEPMGGVKPMLVQKSIPRELVLWGEFPFGPKGSLDPKRDTRDVF

SEQ ID NO: 102635 - protein, 67 aa, Gossypium hirsutum
  Clone ID: LIB3272-041-P1-K1-B10.pep
IPILNDDIHNTGVVLYSYKENINYNQYKIKLNKQLPYLFYNIVDIFKINPQYHSHNDCSNIKLYSHI

SEQ ID NO: 102636 - protein, 53 aa, Gossypium hirsutum
  Clone ID: LIB3272-041-P1-K1-B12.pep
MIFKKGSRVCVKKGGINKGMPKGMDRKGVSGKLVYRSLLQRFHAPNIVVNIIL

SEQ ID NO: 102637 - protein, 103 aa, Gossypium hirsutum
  Clone ID: LIB3272-041-P1-K1-B4.pep
MDTSMASGNPSFDDLQNKGEAIDHPQNEDTMDCESLNISSQAAVKPNGTVSSSVRELLECPVCCNSMYPPILQCLNGHTLCSGCKPKVDNRCPTCRHELGNIR

SEQ ID NO: 102638 - protein, 46 aa, Gossypium hirsutum
  Clone ID: LIB3272-041-P1-K1-B7.pep
NQRGFPGGSRGLLGFKTLFGWLLKDGGCPHLFFFLETNTCCCRCYS

SEQ ID NO: 102639 - protein, 71 aa, Gossypium hirsutum
  Clone ID: LIB3272-041-P1-K1-B8.pep
AHQMNIELNWQQAPFVVCSDLHITNRGRLRYISQKILFRHWTCPVFHESGYMRRIYDEIMLLYSKKRAQKL

SEQ ID NO: 102640 - protein, 84 aa, Gossypium hirsutum
  Clone ID: LIB3272-041-P1-K1-C11.pep
VNLKRGALLGGGYSYHSYPTQSCTNVQASSIWLLLINTELEFKTLTPALNSSHLQVDRPACRLWAKCLGCYTITQYIAERLSNG

SEQ ID NO: 102641 - protein, 42 aa, Gossypium hirsutum
  Clone ID: LIB3272-041-P1-K1-C12.pep
SIKLQQKECFLYIHTENEYTPKVSTYLLYLNFNFCHLSTYLG

SEQ ID NO: 102642 - protein, 39 aa, Gossypium hirsutum
  Clone ID: LIB3272-041-P1-K1-C3.pep
ILSNPSILSRSLDAQIKPTVEFLSQFLKPDKIPVAIKPS

SEQ ID NO: 102643 - protein, 44 aa, Gossypium hirsutum
  Clone ID: LIB3272-041-P1-K1-C8.pep
VQRQCHGDDWLIQAGSLGIFHNRDTLLQVLKLRIYKRKGTESIA

SEQ ID NO: 102644 - protein, 114 aa, Gossypium hirsutum
  unsure (1)..(114): unsure at all Xaa locations
  Clone ID: LIB3272-041-P1-K1-C9.pep
DVIQKDIKNLLILQEIYREXGPFLEGQLSLGKMVFQKXDPGIAALYHKVLFSXGNLVFXERVRTNFXKLKTLFFKMVGTKDFLEGIPXLKRRLRVLXLFLTPLNVLQGFTLKTF

SEQ ID NO: 102645 - protein, 48 aa, Gossypium hirsutum
  Clone ID: LIB3272-041-P1-K1-D1.pep
GSLTMGYCLIFSIFRGHIWSLFYKNVLLMGMGRYSLDRFLSHCVLGRK

SEQ ID NO: 102646 - protein, 67 aa, Gossypium hirsutum
  Clone ID: LIB3272-041-P1-K1-D2.pep
MGSYRMLSTKIVETQMPIMGHIHQLIRGAQNAVSLAHGVGYWEPPPHAFDMVKALVEESSDRCYGAH

SEQ ID NO: 102647 - protein, 85 aa, Gossypium hirsutum
  Clone ID: LIB3272-041-P1-K1-F1.pep
FLYLFLTFYFLRGVSCELIQELTMQATEAVSNGVSNGSSQANSPVPEPLDNKPPRPETSGRHSDLSLQIPPKPIGFGRHSGKGLL

SEQ ID NO: 102648 - protein, 111 aa, Gossypium hirsutum
  unsure (1)..(111): unsure at all Xaa locations
  Clone ID: LIB3272-041-P1-K1-F10.pep
HPSIALHLILHTPIRYWVFIRISVLIVLIAILQYFISNLMRSFQVPYPKIYKKSQLNFITLISQGAANFIPPKSFRSPMFYIINHXNYIICFPXGHTQNAQTQNFSYPNMA

SEQ ID NO: 102649 - protein, 81 aa, Gossypium hirsutum
  unsure (1)..(81): unsure at all Xaa locations
  Clone ID: LIB3272-041-P1-K1-F12.pep
LKGWETVGSGGVRQYTFQLLKLAHTHITFTCLALNIYLFNNLGAYXFLYYKTSNWVAFNIPSIQIYNVIIHCAHNIPFSTL

SEQ ID NO: 102650 - protein, 101 aa, Gossypium hirsutum
  Clone ID: LIB3272-041-P1-K1-F3.pep
QLSKLWDPSAAPPPTKKISPSALASLYFFFIFPNWSVGGMERLLLMVNGGDPFLFNNFPLLKNIKPLVVGFGFSHVSLFFNMGGRVNLFKNLDNGFLRVVS

SEQ ID NO: 102651 - protein, 113 aa, Gossypium hirsutum
  unsure (1)..(113): unsure at all Xaa locations
  Clone ID: LIB3272-041-P1-K1-G11.pep
SSFTEQDPCRLNYGGVRDSSDDSINQRGIYSSCLNTDASNGCSTLIDPFVSSAILDDFFSLEDADFSKPSTXVVGNFSSCQDGQSQITCVSLADSQAFSRLDLPDTFGGKRRS

SEQ ID NO: 102652 - protein, 85 aa, Gossypium hirsutum
  Clone ID: LIB3272-041-P1-K1-H7.pep
MSGGELEWCVSVPKVELHAHLNGSVRNSTLFELARVLGDKGVIVFSDVENVIMKDDRSLHEVFKPVYLIHILTTDHFTVTRSTKE

SEQ ID NO: 102653 - protein, 40 aa, Gossypium hirsutum
  Clone ID: LIB3272-042-P1-K1-A10.pep
FYSSISIINFFIKPKNQIRMRRIIAWVVPFYIIFISQIFY

SEQ ID NO: 102654 - protein, 94 aa, Gossypium hirsutum
  Clone ID: LIB3272-042-P1-K1-A2.pep
MGRWAYFIKLRLMSDLDTQSATGLEPCGEADAVDSGAGAQEYVHILIQQRHGRKSLTTVQGVKKEFSYNKILKDLKKAYCWNAAVVHDPELGQV

SEQ ID NO: 102655 - protein, 51 aa, Gossypium hirsutum
  Clone ID: LIB3272-042-P1-K1-A8.pep
FTKTCLNTCEILHCYISFNTGGDNSTLYKQLLILHAGNITKPIGMVIRDSR

SEQ ID NO: 102656 - protein, 139 aa, Gossypium hirsutum
  Clone ID: LIB3272-042-P1-K1-B3.pep
MLERYFADSIIFVLSSVLLTHSLCFVAINKAATMSPSSSLTAASSSSSLWILKPSPAFKSSRFQSIPPSLPPSSPPCFRLLRRAASLPHASATDFDFALHDALESSGINTSHAREARKGFISQINELSDVERETSISIN

SEQ ID NO: 102657 - protein, 47 aa, Gossypium hirsutum
  Clone ID: LIB3272-042-P1-K1-C1.pep
QGAGGSDGGREKKHTLKRDVQSRTSCFTDVKGQGCCNITTECNHSQT

SEQ ID NO: 102658 - protein, 46 aa, Gossypium hirsutum
  unsure (1)..(46): unsure at all Xaa locations
  Clone ID: LIB3272-042-P1-K1-C12.pep
GTEGPTHPTRTINFTLIFHTLFVLSSXLWAADYAMRGKTKLPRSLI

SEQ ID NO: 102659 - protein, 61 aa, Gossypium hirsutum
  Clone ID: LIB3272-042-P1-K1-C8.pep
LQSAHFTSDPNNIINPLVMSIQFCIFYLLASSVARTVFVRVHSLQNIQHPHPLHTGLASIT

SEQ ID NO: 102660 - protein, 115 aa, Gossypium hirsutum
  Clone ID: LIB3272-042-P1-K1-D10.pep
CYSTMVMNLSWSLLSFTPVMITFLFLSTFLTFSHGVSVSLSPTPLAQQLTSGKVNGSEAKSGVELSWGITRRSVVEVPIRQPLPPLEDTTSSLALAAEKTYRKDPLNGFKRYTRG

SEQ ID NO: 102661 - protein, 137 aa, Gossypium hirsutum
  unsure (1)..(137): unsure at all Xaa locations
  Clone ID: LIB3272-042-P1-K1-D5.pep
MFCQGSVHCLSLAYVRDNVPEGRRASXFGILSGIGSCAFVCGTLSTRFLSTASTFQVSTAMAMLSAVYMRVFLPDSIINDNLSTPIISEGKSDGVANQNEEPDKKMQVFKTMPSMEDMLALLKSSLTFSQAAIVSFV

SEQ ID NO: 102662 - protein, 100 aa, Gossypium hirsutum
  unsure (1)..(100): unsure at all Xaa locations
  Clone ID: LIB3272-042-P1-K1-D8.pep
HKLMTHMRRQRRANTAYKKSNLGNEWKKPFAGFSHTKSIVLEKIGFETIQPHSAIKKCATVXMXKNGNKISSFLPKYGCLNYIEENFEVFISSFRPKVHT

SEQ ID NO: 102663 - protein, 50 aa, Gossypium hirsutum
  Clone ID: LIB3272-042-P1-K1-D9.pep
LSSNEYISLSKKPSKVNQIVNFIHHTMCDRHKMGPQLDCIVACSLLLIIH

SEQ ID NO: 102664 - protein, 62 aa, Gossypium hirsutum
  Clone ID: LIB3272-042-P1-K1-E1.pep
GKMSFYQVGSTITLPPFTKTTSYTFSQNITLLTKHLLYEYYSPPELYLQTHDSRMTIINFET

SEQ ID NO: 102665 - protein, 85 aa, Gossypium hirsutum
  Clone ID: LIB3272-042-P1-K1-E12.pep
ITITPVHKHYTQHQLKIKHGMALKTPTYDLTAIKNYGIFDVLDNPPHGESISSIKIVLINTIITIIKIIRVTNNTGKSCTLFNNA

SEQ ID NO: 102666 - protein, 48 aa, Gossypium hirsutum
  Clone ID: LIB3272-042-P1-K1-E9.pep
ILFVRRTLQIGKISTGVSALGRNSNLPNLAKTVVLSVDLLHFQHWTGL

SEQ ID NO: 102667 - protein, 97 aa, Gossypium hirsutum
  Clone ID: LIB3272-042-P1-K1-F12.pep
KNRLSGEIHNLFSNSVSWKIEDLNLSNNIFYGSLPQSLGNLTYLMYLDLHGNKFTGAIPSEIGNLMQLEYFDVSGNRLSGQIPEEVCSLFSLFYLNL

SEQ ID NO: 102668 - protein, 113 aa, Gossypium hirsutum
  Clone ID: LIB3272-042-P1-K1-F3.pep
MYQAIAASKASDPDPRRVWKEVVSRKVLKPWHPHHLHEVVYYSVYANWDVFINGPPLYWFPSLDESKITNLGRIMEIHGPKLLGTLYKDPIESFSLFQKLSGQHPETYWSICL

SEQ ID NO: 102669 - protein, 53 aa, Gossypium hirsutum
  Clone ID: LIB3272-042-P1-K1-G12.pep
RFLRFRKRQAKSNEDLVRLIGLWGICSSQHIVWSPELPWWRKNKILVSQGELT

SEQ ID NO: 102670 - protein, 138 aa, Gossypium hirsutum
  unsure (1)..(138): unsure at all Xaa locations
  Clone ID: LIB3272-042-P1-K1-G2.pep
MPFRLPLDDVYKIGGVGTVSDGRVETPVMKPGMVRTFGPXGMTTGVKVYEMHHEALTEALTRDNGGMNGXNFVVKDLKRVFXPSNLRDDLAKGXAATSLFSVLVRNHTRQIENGYSLFLDCHTRYIAKKNDELLTKID

SEQ ID NO: 102671 - protein, 93 aa, Gossypium hirsutum
  Clone ID: LIB3272-042-P1-K1-G4.pep
AWKAQDRSARTDRLIIAVLFTAVLGVNGLVNIAGAIASPGALHRRLINGTFLNPDPSAVLEYDCYPLVTALTVCEPDTDAIQNVSVFPLVDQS

SEQ ID NO: 102672 - protein, 65 aa, Gossypium hirsutum
  unsure (1)..(65): unsure at all Xaa locations
  Clone ID: LIB3272-042-P1-K1-H2.pep
QKKKGTLEDVIAHKQAIAFQRFCGGGGRTEQAKKRHSKGQGQWPEKXGKFMHEVIKNAESNAEVK

SEQ ID NO: 102673 - protein, 48 aa, Gossypium hirsutum
  Clone ID: LIB3272-042-P1-K1-H5.pep
SLLTLSSSAFDLLYIPFSRGFSGVGRKRVSVYKALETHIFCNQFIFIP

SEQ ID NO: 102674 - protein, 67 aa, Gossypium hirsutum
  Clone ID: LIB3272-043-P1-K1-A1.pep
MLSPLNLSTTTFDSSVCCAGPSVAYLANQSVVCSGKIMVFNNLKYSLSINLVTSVVTLIIFCLLMGI

SEQ ID NO: 102675 - protein, 71 aa, Gossypium hirsutum
  Clone ID: LIB3272-043-P1-K1-A3.pep
GSCVLMPSYEDSRPLNRIKFSTPAFKAQPPYRCENKATSLLYGAIVLGTTLMSGPVKWVLGLEEIRQFPFL

SEQ ID NO: 102676 - protein, 100 aa, Gossypium hirsutum
  Clone ID: LIB3272-043-P1-K1-A7.pep
RTHPRNLAPPFAARTLVFLFWLFCLLIVVLRLWFLTIFSAISYLISSKVLKSKSKSLKSWKIKKQTGVCRFKNGGGSQLKKGFGLSNSYNHIFNKFSLKK

SEQ ID NO: 102677 - protein, 68 aa, Gossypium hirsutum
  Clone ID: LIB3272-043-P1-K1-B11.pep
LVLSWCVELAGMAALSTRGLVSRLHQQFLSLSRPSAAAPTSLPFHSLTRRLFSSDALMDGSQILHKPP

SEQ ID NO: 102678 - protein, 66 aa, Gossypium hirsutum
  Clone ID: LIB3272-043-P1-K1-B3.pep
VPPLSLSVLSLPPWSLVEIAPSLVACCSQQISRSTVSILGCHRRDAPFCVIVWEPFDFGDTYNLAR

SEQ ID NO: 102679 - protein, 56 aa, Gossypium hirsutum
  Clone ID: LIB3272-043-P1-K1-B4.pep
WKGFVLCFLNNAERGDIRMEAFNLCFINNKAIIEENIFLDYLKSFRFFPRIGESSY

SEQ ID NO: 102680 - protein, 60 aa, Gossypium hirsutum
  Clone ID: LIB3272-043-P1-K1-C2.pep
LKSGAGRQRQIIILLPKARYALKLEDSRLYEGATSFGRFHDSHRTAFLYAPSLCLWLDEV

SEQ ID NO: 102681 - protein, 100 aa, Gossypium hirsutum
  Clone ID: LIB3272-043-P1-K1-C4.pep
LMAQFTPQGRLKLLFHGDGVEPKDPFHYKLVSNVFGGSGGLKSLQTHKGMLRFLGSTTRRSHFSSSLKKGSKFNATASLNVSDEGLYDEEDYDSEFGTDE

SEQ ID NO: 102682 - protein, 123 aa, Gossypium hirsutum
  Clone ID: LIB3272-043-P1-K1-C5.pep
GHLTLFWGKNTEDIFPGWSGGSFCSYFFGLIWVFLLSFMVERLSHTKFIKQGTNHVVAGLLQTLMYATRVALAYLVMLAVMSFNVGVLLASVGGYAVGFLVYGSPAFRKADFIQYEESSDIPP

SEQ ID NO: 102683 - protein, 68 aa, Gossypium hirsutum
  Clone ID: LIB3272-043-P1-K1-C8.pep
SNVSTYIQREEWGSAAYVPLKMANICLKMGALKVLLHLHSGSKVCSLSMNANNVPWEYQFMLYRGYTS

SEQ ID NO: 102684 - protein, 53 aa, Gossypium hirsutum
  unsure (1)..(53): unsure at all Xaa locations
  Clone ID: LIB3272-043-P1-K1-D12.pep
VDCCTYLPLERRDRLVDRLEAQIFIXSWTQRKTALEQMKIDRLKIYEYGQPYF

SEQ ID NO: 102685 - protein, 72 aa, Gossypium hirsutum
  Clone ID: LIB3272-043-P1-K1-D6.pep
LRYYCKEKKKKPDMFYNTAASADLVITFNLLYLTLESYTYVPWPPPPTEAQGLSTRAHPRYLNSQPLFPKIH

SEQ ID NO: 102686 - protein, 46 aa, Gossypium hirsutum
  Clone ID: LIB3272-043-P1-K1-D7.pep
STVVGISILSGPLLAYDIKLVVCSQTRRCQASMVFIVALLIGLSYP

SEQ ID NO: 102687 - protein, 69 aa, Gossypium hirsutum
  Clone ID: LIB3272-043-P1-K1-E1.pep
MLDTQSALGSEGERPLRKNRPSTVLPVKGSMSPLAHHKPWALYLYKCEEPHSHMTCHFSQIGEDGECRP

SEQ ID NO: 102688 - protein, 80 aa, Gossypium hirsutum
  unsure (1)..(80): unsure at all Xaa locations
  Clone ID: LIB3272-043-P1-K1-E5.pep
VLXFSGLPVXAFGGXGCALLPVLGLXXXGXLAGGFXAPXXXSRLFLGXPPSFLFRXXXPPPLSFXXXXXGXGVGLWGXFR

SEQ ID NO: 102689 - protein, 133 aa, Gossypium hirsutum
  Clone ID: LIB3272-043-P1-K1-F12.pep
AANSTIVGVINFITLLVSIPVIGAGIWLANEPDNACVKILQWPLIILGTSIAVVALLGFVGGCWRITWLLIFYLFAMFILILVFACLVVLIYVITNQGSGHPAPGRIYLEHDLDDFSGWLRRKVTNPYKWDRI

SEQ ID NO: 102690 - protein, 33 aa, Gossypium hirsutum
  Clone ID: LIB3272-043-P1-K1-F3.pep
SSAFRFMYFTMTTYSSSRCSFPSRVIIRLLGSD

SEQ ID NO: 102691 - protein, 49 aa, Gossypium hirsutum
  Clone ID: LIB3272-043-P1-K1-F4.pep
KSLKRDGFAVMGNCEGGGDGVYGSISGHFFYGASSVMGWLLFIKGGILV

SEQ ID NO: 102692 - protein, 56 aa, Gossypium hirsutum
  Clone ID: LIB3272-043-P1-K1-F5.pep
GRRHAPANILRGGKITPTRHGFQAGASGAVLLTFNYVGFTSGSSTYGPCPHSAYEP

SEQ ID NO: 102693 - protein, 122 aa, Gossypium hirsutum
  unsure (1)..(122): unsure at all Xaa locations
  Clone ID: LIB3272-043-P1-K1-G10.pep
VESLCPGVGSCADIVAGAARDSVAALGGPSWIVLLGRRDPTTASLSAGNSNIPAPTLDLSGLITAFSNKGFTAKEMGALSGSHTIGQARCTTFRTRIYNETNIGSXFATSIRANWPSHGGDN

SEQ ID NO: 102694 - protein, 50 aa, Gossypium hirsutum
  unsure (1)..(50): unsure at all Xaa locations
  Clone ID: LIB3272-043-P1-K1-G2.pep
MARVRGSQDTLTSMYNAPKRGKRQVMIRPTSXAIIKLILFMQRHGSIARV

SEQ ID NO: 102695 - protein, 71 aa, Gossypium hirsutum
  Clone ID: LIB3272-043-P1-K1-H11.pep
NIFGAPPKISLGFRPAKKNFPLLGVQKEIFPLNPLKKIKLVGGGTAKEFPPISSLALYGFYSQITRTNVNP

SEQ ID NO: 102696 - protein, 56 aa, Gossypium hirsutum
  Clone ID: LIB3272-043-P1-K1-H2.pep
GIIPTKCDIYNNTQSTIFTKTVTSSRKVVCILNDFYDKWHLVYAKHLCDPLPPLQG

SEQ ID NO: 102697 - protein, 39 aa, Gossypium hirsutum
  Clone ID: LIB3272-043-P1-K1-H5.pep
IDCLSLSLFAHSLTSSLCGQGLNREFASKSFVIRSTRTR

SEQ ID NO: 102698 - protein, 127 aa, Gossypium hirsutum
  Clone ID: LIB3272-044-P1-K1-A3.pep
LPSQTILAYSCSLFHSWGAYKWNLGVLHHRNHPKFNRPAPIVISCSSSCTFDPSSTTSSSNNISPSPQKNRRLADENIRDEARRHRSTAKNTLFAKYVPVNAGPDCTEFYSLDEIVYRSRSGGLLDV

SEQ ID NO: 102699 - protein, 71 aa, Gossypium hirsutum
  Clone ID: LIB3272-044-P1-K1-B10.pep
HPRMGSPFKYRKSAPTHPRQMTLLLRTLPTPWDTYDHLWPLRPIPSYSGNSNINLDALSRVIAKPDIVKTA

SEQ ID NO: 102700 - protein, 115 aa, Gossypium hirsutum
  unsure (1)..(115): unsure at all Xaa locations
  Clone ID: LIB3272-044-P1-K1-B12.pep
VDLSGKGNHKGHSHFNRGFDSGADTLKYKXCMWGYKLFFRRTTLERSVYIKDDCLIMNWTGGAVTTLLEGPKLFSITVPPSDMGQNLTALLXPEVGGILGQRRHETFNAHKLDPW

SEQ ID NO: 102701 - protein, 98 aa, Gossypium hirsutum
  Clone ID: LIB3272-044-P1-K1-B2.pep
MPSSLKLHPPLAATIGTCNQKQNQPITTSTALTRFFPLPCGISLPDTVATYHVHTLGPNQCGSAVVQAIEAPIETVWSEVRRFDNPQAYKQVLKSWHI

SEQ ID NO: 102702 - protein, 46 aa, Gossypium hirsutum
  Clone ID: LIB3272-044-P1-K1-B3.pep
LTRTGNHSKLINRGRRNMLQGSLIAWTNALITGYRCLMDRARSYIG

SEQ ID NO: 102703 - protein, 46 aa, Gossypium hirsutum
  Clone ID: LIB3272-044-P1-K1-B5.pep
RGIGNTKKLKEKVDSHFQYTILGLQALNIGISMLKRGKCWIRLVQH

SEQ ID NO: 102704 - protein, 88 aa, Gossypium hirsutum
  Clone ID: LIB3272-044-P1-K1-B6.pep
KQPHYTHFFFLYPFPKFIPFRNHNQGFRKLTTPFNWFSLAPPQKGGGGRFQKWAQLQFPLRYSSCFVSYSLQVEVFQRRSIYLVNKRT

SEQ ID NO: 102705 - protein, 126 aa, Gossypium hirsutum
  Clone ID: LIB3272-044-P1-K1-B7.pep
MTTLTPNNPDSVYAFTVKDAEGNDVDLNIYQGKVMLIVNVASKCGMTNSNYTELNQLYEKYKDQGLEILAFPCNQFGEEEPGSNVEISEFVCTCFRSEFPIFDKIEVNGDNASSLYKYLKVVKWGI

SEQ ID NO: 102706 - protein, 56 aa, Gossypium hirsutum
  Clone ID: LIB3272-044-P1-K1-C9.pep
GLEGSNKNQKKSVVLCKSKGEEWDYLEHHIGGHDDINLPYSYSLIEGWPLSDTLWK

SEQ ID NO: 102707 - protein, 111 aa, Gossypium hirsutum
  Clone ID: LIB3272-044-P1-K1-D10.pep
AFSQSSVVNGTGLSHYEGGKFQLLVNNNLARMLALPSTRLLLLFGESLPSSRLPNVSRKVWGQTSVRFVSQVNPDNGPLTLSSLGFKSGFEKTNKIKADKIERLDVPSEAP

SEQ ID NO: 102708 - protein, 35 aa, Gossypium hirsutum
  unsure (1)..(35): unsure at all Xaa locations
  Clone ID: LIB3272-044-P1-K1-D3.pep
LKTHRNSLINNHSNKGDDPYKFXKLAQAYEVLSDP

SEQ ID NO: 102709 - protein, 123 aa, Gossypium hirsutum
  Clone ID: LIB3272-044-P1-K1-D8.pep
ESRLSDAETVAKSFPQWSVSLSVICPKQLSKLKAIYSAGKRNPRASDPPVDNVRNPQFLVLISENFMEGCAALSRSGVPSLAPNQSPVKMDMASVNAVAGTPPTSVPSVNGSIMSRQPVSAVN

SEQ ID NO: 102710 - protein, 86 aa, Gossypium hirsutum
  Clone ID: LIB3272-044-P1-K1-E10.pep
TLPKLINYKMVISRDQDRFWITTFVIPNKGTIIKTPKEFIYNQHTLLFKNSYIIEFFLFAFSDPARHIYNRERLHVSAVLSPSDSN

SEQ ID NO: 102711 - protein, 64 aa, Gossypium hirsutum
  Clone ID: LIB3272-044-P1-K1-E12.pep
NLEFPVGGTSGSGSGMHPRGNGGFHRLLVLIIEIGKVDDEIQGVDCSRPDQVYVSEAGIYVISL

SEQ ID NO: 102712 - protein, 59 aa, Gossypium hirsutum
  Clone ID: LIB3272-044-P1-K1-E6.pep
GDDYEHNSSSDEGRKEVGVYPLSCYYFGSKEAIVFMVVTVSARISRTNFKYSANRKRTP

SEQ ID NO: 102713 - protein, 76 aa, Gossypium hirsutum
  Clone ID: LIB3272-044-P1-K1-E7.pep
MSRRKVWDPKVENTTLGPAVQDGEHVLGGAHILASSNDTFIHVTDSSGRETLVRIPGCLIVKAEWDECSPYADMLA

SEQ ID NO: 102714 - protein, 79 aa, Gossypium hirsutum
  unsure (1)..(79): unsure at all Xaa locations
  Clone ID: LIB3272-044-P1-K1-E8.pep
AYQNLICRDELLFDSFPYRAIENGTAXKLRQCGHVQGAIDVDIGANPSVNDAAEAEGVDDQSENVVDIADTYRLQEQPS

SEQ ID NO: 102715 - protein, 78 aa, Gossypium hirsutum
  Clone ID: LIB3272-044-P1-K1-F10.pep
NELTFSFSLFRDPTFGKWVVLDLTTNKFFIKFQPLLEISLDYLLKLIPIFVSVYSHNQGLLSSSRPIPRISNLLSNLS

SEQ ID NO: 102716 - protein, 58 aa, Gossypium hirsutum
  Clone ID: LIB3272-044-P1-K1-F3.pep
SGGDHACSQFPLLQSRITPLKSNTESLYSDTKFLQERTTGRKKREREKYILFTLRLHI

SEQ ID NO: 102717 - protein, 125 aa, Gossypium hirsutum
  Clone ID: LIB3272-044-P1-K1-G10.pep
MQMEERRGNIKAENEMTINMKEEQSTLDWRGRPSNPNKHGGFQAASFVLGLQAFEIMAIAAVGNNLITYVINEMHFSLSNSANIVTNFVGTIFLLPLLGGYLSDSFFGSFWTMLIFGFVELSGLI

SEQ ID NO: 102718 - protein, 73 aa, Gossypium hirsutum
  Clone ID: LIB3272-044-P1-K1-G11.pep
LEKIPMEGKKRNLKTFNSISHQLKEKPSPTFLKRKPFNPNKHWGFQTCSFVFGPQAFDIIAISTIVEQPDYIC

SEQ ID NO: 102719 - protein, 99 aa, Gossypium hirsutum
  unsure (1)..(99): unsure at all Xaa locations
  Clone ID: LIB3272-044-P1-K1-G3.pep
LFPVRSCSLCRLRLGGLRCRACACLLRRVCCFRRFFVGPGAASLPFSLGRAALCWVFVPSVLLFGFLGFRFCFFPAXVWAFASLLLVFGLLLGGGLAPP

SEQ ID NO: 102720 - protein, 103 aa, Gossypium hirsutum
  Clone ID: LIB3272-044-P1-K1-G6.pep
NYCYGDGNVCCWEGITGRLLIGSYAPPPHQHHRRRRRRHLGWQVLELSPLSSGLYTLPSCIIYVSSGEPQCTAGSAALIMHISFLYHLSNMRISRRCSSYCRI

SEQ ID NO: 102721 - protein, 98 aa, Gossypium hirsutum
  Clone ID: LIB3272-044-P1-K1-H5.pep
KISPSSPKSPSNSRARPWPLLPLLLPAILLPVVAAIVVYQLDSFDAAPMPLHELSVPFEPPLLHNDHMLQGAEFVGAGQLSGPEEFAYDSRSQVIYTG

SEQ ID NO: 102722 - protein, 112 aa, Gossypium hirsutum
  Clone ID: LIB3272-044-P1-K1-H6.pep
PSFYLISSRLQNSHGWEKDELRACDQTRFCKRARFRKPGACTLIAHDVSISDGDLTAKLIPKAPHDQDQDQIKPLTLSVSVYQDGIMRLKIDEDPSLHPPKKRFQVADVVIS

SEQ ID NO: 102723 - protein, 53 aa, Gossypium hirsutum
  Clone ID: LIB3272-045-P1-K1-A7.pep
YSKWISHGKENTTHAGPIESAKKYGQYMDRSVGRGAYNVLAHYKLGKTLGIRS

SEQ ID NO: 102724 - protein, 139 aa, Gossypium hirsutum
  Clone ID: LIB3272-045-P1-K1-B5.pep
MEQKAFKRPFVDWVYIFFLSHLVFCQLDYRFYDSTCPSLTGIVRYGVWSAIANDTRMAASLVRLHFHDCFVNGCDASILLDDIDSTFVGEKTASVNQNSVRGYEVIDKIKANVEKACPSTVSCTDILTLAAREAANIAG

SEQ ID NO: 102725 - protein, 97 aa, Gossypium hirsutum
  Clone ID: LIB3272-045-P1-K1-C12.pep
SIIATTYGCGIIPEIQATIAPPVKGKMFKGLCVCFGVIVSTYFSVAISGYWAFGNQSQPSILSNFMDENRPLLPSWFLLLTNIFTLMQLATITVIYL

SEQ ID NO: 102726 - protein, 65 aa, Gossypium hirsutum
  Clone ID: LIB3272-045-P1-K1-C2.pep
RQSLERKQLACSVQSLEMKCLFLTPSPVLFCSVLSCPVSYNWTHSLPRQDCNVHLPFVIGVATAN

SEQ ID NO: 102727 - protein, 112 aa, Gossypium hirsutum
  Clone ID: LIB3272-045-P1-K1-C3.pep
MHPSKPGNLFFMVTVMIRLCFADLPCFREAPACRNGREWPQTTWSSLDKEIHNAFIMHIGMTLDTAYLRGSGAGVYCGLHHATCAENIEYHFGPTPRHGAKLTRADTSIFPY

SEQ ID NO: 102728 - protein, 86 aa, Gossypium hirsutum
  Clone ID: LIB3272-045-P1-K1-D2.pep
WYLQSIKAIHTKYKRDSPFLFALTFSLHSFFYCCSFEIMSSCVIITMKSLTFSLTLFLFSFYNFRYKHVFPIYITLGFFLLLDYNK

SEQ ID NO: 102729 - protein, 103 aa, Gossypium hirsutum
  Clone ID: LIB3272-045-P1-K1-D5.pep
MAGGGFGNEGGNLKRAHLYEYKITNYFIFACLVAATGGSLFGYDLGVSGGVTSMDDFLKEFFPKIYRRKQAHLHETDYCKYDNQLLTLFTSSLYFAGLVSTFG

SEQ ID NO: 102730 - protein, 56 aa, Gossypium hirsutum
  Clone ID: LIB3272-045-P1-K1-D8.pep
YISFLLFRTNKKSTFKMLRLSSHHHIYLTSQKIPSPTLHIITLLYHLKGIYHYNTT

SEQ ID NO: 102731 - protein, 63 aa, Gossypium hirsutum
  Clone ID: LIB3272-045-P1-K1-E4.pep
LASTGDRTTPRNESLGMLALTTHGGRTRSLEVNRNGNKYYYSDSGKRKHNLCVAYIRIFLEKT

SEQ ID NO: 102732 - protein, 101 aa, Gossypium hirsutum
  unsure (1)..(101): unsure at all Xaa locations
  Clone ID: LIB3272-045-P1-K1-E7.pep
GTCAGVWTWITWRDRVIMGGSTAMXMGMVLVGLAMVVVESAVTSIYICYAEDPSLIRRWDPQFFNQMSEMLHQRLQHRSARAREVLTQNQLDSHMQDTFHL

SEQ ID NO: 102733 - protein, 74 aa, Gossypium hirsutum
  Clone ID: LIB3272-045-P1-K1-E9.pep
YQIRNNWFCTSFSGNFWHSLCISPHPVRFYDVQAAVRNHIFILIFLKSTAFIFLLLLFSELCLVVVIISSKEYK

SEQ ID NO: 102734 - protein, 51 aa, Gossypium hirsutum
  Clone ID: LIB3272-045-P1-K1-F11.pep
RQSSLVNSAHVEVLHIHSIASSPCPMQIPVKRNHKSMLYTIALCVSPRSIC

SEQ ID NO: 102735 - protein, 103 aa, Gossypium hirsutum
  unsure (1)..(103): unsure at all Xaa locations
  Clone ID: LIB3272-045-P1-K1-F4.pep
MASEGPAPKHFWRGMPEEDYYXEQGIRNIKCYFYTHNGALFTQSYLPLDKKVKAYDYTTHGYGSDTGWLFQTICVNFYNWGHARFAHDLIGHGRYEGLPCYLS

SEQ ID NO: 102736 - protein, 104 aa, Gossypium hirsutum
  Clone ID: LIB3272-046-P1-K1-A11.pep
MTTSFGSATSTVIPNDPKIRMQSFTGLKSLHSIALARNHRVFPLPFSTPSVIRAVSTPVKPETSTTEPKRSKVEIFKEQSNFIRYPLNEEILTDTPNINEAATQ

SEQ ID NO: 102737 - protein, 140 aa, Gossypium hirsutum
  unsure (1)..(140): unsure at all Xaa locations
  Clone ID: LIB3272-046-P1-K1-A12.pep
KHYTGLKPLRVTILCGTTVHPLYNYPTLSALEPIRTESYHPSGEDFVHIDNPNPNVVDALSDSIVNVEKEEEEEEQEEAASASXEIRDEDYYYRNDGDVFRSERSYSSERRNVELPEEIARSVIVLSSQSSSEGGNFDVY

SEQ ID NO: 102738 - protein, 69 aa, Gossypium hirsutum
  Clone ID: LIB3272-046-P1-K1-A2.pep
MSSFLHQRPIQNPFSNAYPVSPRSSSTSQRPISIFSPTGLIILLSLMVILGVFVPWSGMARATFSNSKK

SEQ ID NO: 102739 - protein, 53 aa, Gossypium hirsutum
  Clone ID: LIB3272-046-P1-K1-A9.pep
RQHSSQFSVVITPTSYNHKKLGLNWLKTWKNKFWNLGFPIPELTPHVLNFAFG

SEQ ID NO: 102740 - protein, 124 aa, Gossypium hirsutum
  unsure (1)..(124): unsure at all Xaa locations
  Clone ID: LIB3272-046-P1-K1-B1.pep
GTLTYYNIQKQSTLHRVLTVXGGMQILIKTLTLNTTTFEVQSSYSIFNLKTNIHYKKXLPPYQQKFIFSPKQLSLFITLPHYNIQKESTSPFLSPSSDFILIFLKTLTKKPSFLKLKDPILYIF

SEQ ID NO: 102741 - protein, 51 aa, Gossypium hirsutum
  unsure (1)..(51): unsure at all Xaa locations
  Clone ID: LIB3272-046-P1-K1-B10.pep
GAVPSLSPGRHTXNRSRCGSSSISAPSPEVFPSGIPVPSPKSQSFSLGYGS

SEQ ID NO: 102742 - protein, 72 aa, Gossypium hirsutum
  Clone ID: LIB3272-046-P1-K1-B2.pep
TCNTGPGLPCRPMHSKNLKNKRSSRFCPKSGFYSAPAPDQLYRTPTPYKWYPMASAASNPSFFLSSVTLTML

SEQ ID NO: 102743 - protein, 138 aa, Gossypium hirsutum
  unsure (1)..(138): unsure at all Xaa locations
  Clone ID: LIB3272-046-P1-K1-B6.pep
GFYPPLGANYSPQRRGQLGRRGRCTYNTYPWEPEAPTKKCNLTTVAYFTSNPDSDLNAVNHNPPHGSFTPLAFKPNAITNYANQRFLSNXLNYILRHRHQXGXTNLLYDDLTTNYVPYWWINKHTLEQICFTFIGGTN

SEQ ID NO: 102744 - protein, 40 aa, Gossypium hirsutum
  Clone ID: LIB3272-046-P1-K1-C1.pep
RKEFASSRFLFCFSMKSMHSHIRLFMCLLVSPFIGIKLVM

SEQ ID NO: 102745 - protein, 134 aa, Gossypium hirsutum
  unsure (1)..(134): unsure at all Xaa locations
  Clone ID: LIB3272-046-P1-K1-C10.pep
MGSNTMGAATLGLTLNVXVFTLVSSTYVPWPPPPKRHKATDKSPPSGPKQAGTCPKDTLKLGGWADLVGSVRVGVGPARTKCGXLISGLADLDGGGWLCTAXIKGNGVGGNLNGPGSLALLLNSWEKRMAAGYK

SEQ ID NO: 102746 - protein, 59 aa, Gossypium hirsutum
  unsure (1)..(59): unsure at all Xaa locations
  Clone ID: LIB3272-046-P1-K1-C6.pep
SAVTISITGWFTYLPSPKCSASDPDHQKSAIYNIKDLFKYKFCHPILIQLRXHDTGTYN

SEQ ID NO: 102747 - protein, 43 aa, Gossypium hirsutum
  Clone ID: LIB3272-046-P1-K1-C8.pep
CESEKTLPLFVYLMCLNWNGQTKGGVVNDHSYITKNYTSLNIC

SEQ ID NO: 102748 - protein, 60 aa, Gossypium hirsutum
  Clone ID: LIB3272-046-P1-K1-D10.pep
LDSLFSSPLLFSSSPYLKPASSHGNPNMMSPPKNTIPIFPKSTPNSPFFFPTRNPTFNPP

SEQ ID NO: 102749 - protein, 94 aa, Gossypium hirsutum
  Clone ID: LIB3272-046-P1-K1-D2.pep
SSPTLRFSFSFPLLLPPSPSEPFIFQKLEIPFLSFGISNPPPKQKTLIFSTILNQVSFFLFRINNQNRCELERLEFSFYRITPHLVLQIIINWI

SEQ ID NO: 102750 - protein, 59 aa, Gossypium hirsutum
  Clone ID: LIB3272-046-P1-K1-D3.pep
CKIAMYFIFLSPYIVVLLLVGTPNWATNYNTVYLTSIKNTIDDSWYYKPPSWTKNPNTV

SEQ ID NO: 102751 - protein, 87 aa, Gossypium hirsutum
  Clone ID: LIB3272-046-P1-K1-E1.pep
MGAGREVAISLDGVRDKNVMQLKKLNTALFPVRYNDKYYADALASGEFTKLAYYSDICVGSIACRLEKKEGGAIRVYIMTLGVLAPY

SEQ ID NO: 102752 - protein, 84 aa, Gossypium hirsutum
  unsure (1)..(84): unsure at all Xaa locations
  Clone ID: LIB3272-046-P1-K1-E3.pep
HIFAIYHQFCADXIARTVSYIITXINNNYYDLVELSXYFQHCPGKPITNISITHRRVTTAFQQADNPRFLSTLLQTNCGYNNAN

SEQ ID NO: 102753 - protein, 93 aa, Gossypium hirsutum
  Clone ID: LIB3272-046-P1-K1-E9.pep
SSIGTYFILCKMGGGMYNSFQRWDLNISNAGTTHVTVPPPLTISTLKRYLTATNIYILKHQQYGPQAGWYTLMDATHQNGVQCLGLMVLNHIT

SEQ ID NO: 102754 - protein, 130 aa, Gossypium hirsutum
  Clone ID: LIB3272-046-P1-K1-F12.pep
GQDSSAVYPYAHLTSTSMALTSTLPLYCHPKRLVLQALASDHGRCLGHDSAWFITRRRYSRAKRLVVAAAYGAEGGARRRVYRQAQAKQPLSSAPKQIATFVAPAGVFIARTFADSVMEIGGETPYAEAI

SEQ ID NO: 102755 - protein, 148 aa, Gossypium hirsutum
  Clone ID: LIB3272-046-P1-K1-F2.pep
TIPLQRRPSLTYALLVLNQGLPRFTPLLWNHAQLHLCADGGANRLYDEMPLFFPQEDASDVRRRYKPDVIKGDMDSIRREVLEFYASLGTEIVDKSHDQDTTDLHKCVTYIRDSASGLDKSNLCILVVGALGGRFDHEMGNLNVICRF

SEQ ID NO: 102756 - protein, 84 aa, Gossypium hirsutum
  unsure (1)..(84): unsure at all Xaa locations
  Clone ID: LIB3272-046-P1-K1-F9.pep
MILGATMICTDNSKWIRNSDYSPARYQAQADAGRLICGAKTQSNPEYTGGILTMAGKRVRXLATSTIDLGKILVCIHGLEMWGE

SEQ ID NO: 102757 - protein, 57 aa, Gossypium hirsutum
  Clone ID: LIB3272-046-P1-K1-G1.pep
KNEGEFLEPQNEGENPNIICFKAYHPFSHHFNSVMIPMTPHSQTPTRGVGGEEHGLA

SEQ ID NO: 102758 - protein, 78 aa, Gossypium hirsutum
  Clone ID: LIB3272-046-P1-K1-G12.pep
WVYFFCISLSLGYKIRIQFILLKKKQIQRGEERSEYKSLKITKFMCIGYECDTCVIFFIHSSSLGVSLFCKQEETLPF

SEQ ID NO: 102759 - protein, 78 aa, Gossypium hirsutum
  Clone ID: LIB3272-046-P1-K1-G5.pep
FTPPTAPNWVDGNMTSTLCPHMVFHMAIGYQPTHFLNLPTINSDLLGFTCVSWRSPPTRSYTHRVEEKEIFGSSQHTP

SEQ ID NO: 102760 - protein, 83 aa, Gossypium hirsutum
  Clone ID: LIB3272-046-P1-K1-H6.pep
TIRPHPYIPTLPYTPIQCRICSTALNTFSPVYFFAKIKIFPFFYQRNHFSPHYAMISETNLPVELYLQYTTVQYTLQLDPNNP

SEQ ID NO: 102761 - protein, 74 aa, Gossypium hirsutum
  Clone ID: LIB3272-046-P1-K1-H9.pep
LTLIFTTVHLELVHYPSSLPSSTRDYSTNNHTQIGERSSIFFGFFFLMVSKESMLQRSGLARHSLRNLHGGLLH

SEQ ID NO: 102762 - protein, 101 aa, Gossypium hirsutum
  unsure (1)..(101): unsure at all Xaa locations
  Clone ID: LIB3272-047-P1-K1-B2.pep
SSRSQSKLWIANLSQKTHIFVQTLTDKTSPLEVECFDTIDYVEAXMHDTESIPADQQKLIFXGKQLEDGRTVADYNIHTVPTLQLVLWLRRGMQMFVHTLT

SEQ ID NO: 102763 - protein, 89 aa, Gossypium hirsutum
  unsure (1)..(89): unsure at all Xaa locations
  Clone ID: LIB3272-047-P1-K1-C1.pep
FVHKHLKLKHPELVMELTDKMRAELYFQNYMNDPGAPGAXPVMQQSGPDDKPMRRKMLENRLKDERSSRSERCNRANGSDRYDRHGNPQ

SEQ ID NO: 102764 - protein, 118 aa, Gossypium hirsutum
  Clone ID: LIB3272-047-P1-K1-C2.pep
TKDYAVELVDSFKCELELFYGKNPLASKDLSRVVNSNHFARLLKLLDEDTVSSQIVYGGERDNSNLQIAATVLLDAPQDSLIMNEQIFGTLLPIITIDIVEDSSDLITAGTKPLAACM

SEQ ID NO: 102765 - protein, 116 aa, Gossypium hirsutum
  unsure (1)..(116): unsure at all Xaa locations
  Clone ID: LIB3272-047-P1-K1-C4.pep
DGVKLGVFSNRVGETFVRIWRGGSGLHKKVDMVFLGDSITQCSPGLKGDVCDIYPSAIQAALSRLLNAXASPGPNAQENRRQCLKVLRLKLERRILPESVVRHHIRELDSLSVSSS

SEQ ID NO: 102766 - protein, 95 aa, Gossypium hirsutum
  Clone ID: LIB3272-047-P1-K1-D5.pep
MAHTLGLTQPANIELPKISFAAKEIDVAEWKGDLLAVGVTEKDMTKDENSKFQNPILKKLDGLLGSLLAEASFEEDFTGKAGQSLVHRLPGLGSK

SEQ ID NO: 102767 - protein, 105 aa, Gossypium hirsutum
  unsure (1)..(105): unsure at all Xaa locations
  Clone ID: LIB3272-047-P1-K1-E10.pep
IPPAKMYKARILDGDTVIQQILAXAYKSDEYIERNGEAASINMVTVGEGSHFKYVKLTVVAVHKDKFAYIYSVIERDALMDKLAMIYYETKLDTSPDGGSVCKTT

SEQ ID NO: 102768 - protein, 121 aa, Gossypium hirsutum
  Clone ID: LIB3272-047-P1-K1-E11.pep
RSLQPPEPIVTAEKVFDEMPVTVMTEEDEEIIRSVVCGMTPSYSLESKLDDCKRAAAIRREALQRITGKSLSGLPLDGFDYESILGQCCEMPGGYVQIPVGIAGPLLLNGREYSVPMATTE

SEQ ID NO: 102769 - protein, 93 aa, Gossypium hirsutum
  Clone ID: LIB3272-047-P1-K1-E7.pep
MVSPEFSLSQFSPMAKPRNRSFWCLSDSFLYCGGVFLAILLVCSFWSFFTPTLNFSSAITDPSSAVSCKESGFGVNLKSDPKDLTFYDDPELS

SEQ ID NO: 102770 - protein, 88 aa, Gossypium hirsutum
  Clone ID: LIB3272-047-P1-K1-G2.pep
TPGRGRDLLGGPHASGSDPYTGAFFCFHRFKRNLKGNKVGPNRNFNTVLETLAKKKADAMARQRLDRGDLWKNKARVLQLQLMQRFTL

SEQ ID NO: 102771 - protein, 127 aa, Gossypium hirsutum
  Clone ID: LIB3272-047-P1-K1-H10.pep
AVHRDIKPANLLVNLKGEPKITDFGISAGLDNSMAMCATFVGTVTYMSPERIRNESYSYPADIWSLGLALFECGTGEFPYMANEGPVNLMLQILDDPSPSPPKHKFSPEFCSFIDACLQKDADARPT

SEQ ID NO: 102772 - protein, 74 aa, Gossypium hirsutum
  Clone ID: LIB3272-047-P1-K1-H11.pep
PCGVKAHPLSHNSSFSGWGVRIYGFAGGAGQSSSLCFKARSFIPFKPFPFYNLITFSQICSCSLSLSLSRLLYR

SEQ ID NO: 102773 - protein, 118 aa, Gossypium hirsutum
  unsure (1)..(118): unsure at all Xaa locations
  Clone ID: LIB3272-047-P1-K1-H7.pep
CLFPWLAGGFLMSVVWSYIIAQELVGLLISLGHILGITQSILGFTVLAWGNSLGDIVTNLTMALNGGPEGVQVAISGCYAGPIFNTLFGLGMSLVGSAWHGYPSPVQIPKDPYXLETL

SEQ ID NO: 102774 - protein, 79 aa, Gossypium hirsutum
  Clone ID: LIB3272-047-P1-K1-H8.pep
HGTTDRIRTEKAWPINPLDLRKWETDMCTNVLYGPKTNEILVRKALHHFSLLKRQFSTKFGVENTKCRIVHPPMAHVSW

SEQ ID NO: 102775 - protein, 131 aa, Gossypium hirsutum
  Clone ID: LIB3272-048-P1-K1-A11.pep
AFQSNATLPECGINMDSIAESRVIAVMATQKSADLVNPANNPREESTAVEGPFSAECLNGKKYTSIIKGKGPKFGPWMLVERRSSRREKRGNKMKVLENQNRAVAGTRFSARLEKQDLGMKSGQSAGRNFG

SEQ ID NO: 102776 - protein, 76 aa, Gossypium hirsutum
  Clone ID: LIB3272-048-P1-K1-A4.pep
FSRTVILISRFYGREDLLLTNMHGPNFGRSFFEDRCIFIYRSSDFDEKGTFTGGDSSLGLFAAFTKSADFGNAITR

SEQ ID NO: 102777 - protein, 77 aa, Gossypium hirsutum
  Clone ID: LIB3272-048-P1-K1-A8.pep
PYVLCHMGLYTRVDWTKKGHTLPGVIPSLYAHLTNKVSGRSYLNPPHGTNFLGAKTASSGLYRRVASGQYWHTNWLG

SEQ ID NO: 102778 - protein, 41 aa, Gossypium hirsutum
  Clone ID: LIB3272-048-P1-K1-B1.pep
FVLCSRASGTKDGWLPQCHSPQIESELYSLLDDRNIVSNSI

SEQ ID NO: 102779 - protein, 112 aa, Gossypium hirsutum
  unsure (1)..(112): unsure at all Xaa locations
  Clone ID: LIB3272-048-P1-K1-B3.pep
GEPSTASAFLVPGLYTGIGTTARDLLFKGXKTVHTYTLTTCCPTGVAITSAGTKKGELFLADVNTQLKNKNVTTDIKVDTYFNLYTTITVDQPAPGLKAIFSLRVPDQTFGK

SEQ ID NO: 102780 - protein, 97 aa, Gossypium hirsutum
  Clone ID: LIB3272-048-P1-K1-B4.pep
VFLGRGSRGCGLLVLISFPLGRLLFLVFPRRSLCFALPLPFSLGALLGGPPGVLGSRGWGGCAFISLRCLISSASGLFLVSCTLFLALAACRSRGSP

SEQ ID NO: 102781 - protein, 63 aa, Gossypium hirsutum
  Clone ID: LIB3272-048-P1-K1-B5.pep
FSYNMHRVCGKVRGVINLNLFTYLLYSFFCLNPTKPPSNFQYGVVGLGLVSAMTDSTHTHQFM

SEQ ID NO: 102782 - protein, 126 aa, Gossypium hirsutum
  Clone ID: LIB3272-048-P1-K1-B6.pep
MGRGLKGSELLPFTVQFLRGRWFALFASFLIMAGAGATYLFGTYSKEIKAALDYDQTTLNLLGFSKDLGANVGVFSGLIAEVTPTWFVLLVGAALNFGGYFMIWLAVTGRIAKPKVWQMCIYICIG

SEQ ID NO: 102783 - protein, 51 aa, Gossypium hirsutum
  Clone ID: LIB3272-048-P1-K1-B8.pep
CFGSMDFIVTMLVLGLGIFRSKAFVLCGPKPEDSDLLSFQYMEMFPLTYPT

SEQ ID NO: 102784 - protein, 122 aa, Gossypium hirsutum
  Clone ID: LIB3272-048-P1-K1-C10.pep
PFSSRPVGDGVIGIDLGTTNSCVSVMEGKNSRVIENAEGARTTPSVVAFNQQGELIVGTPAKRQAVTNPTNTFFGTKRLIGRRFDDAQTQKEMKMVPYKIVRASNGDAWLEANGKTYSPSQI

SEQ ID NO: 102785 - protein, 67 aa, Gossypium hirsutum
  Clone ID: LIB3272-048-P1-K1-C7.pep
NRKVMWAHFTPKPSGNTKRKYFFPLNHKQKKQTQLKREEDPTEDMKVMGKFDVNNIYDVSGTLHPQP

SEQ ID NO: 102786 - protein, 77 aa, Gossypium hirsutum
  Clone ID: LIB3272-048-P1-K1-C8.pep
ALESIPSSLFDYSNFLYQWAFAIASAGITSGSIAERTQFVAYLIYSSFLTGLVYPLVSHLFLAADGWASAFRTHDFL

SEQ ID NO: 102787 - protein, 33 aa, Gossypium hirsutum
  Clone ID: LIB3272-048-P1-K1-D2.pep
RTPHLRSVGNPALSIWSSVAMVRSLFCCDACRP

SEQ ID NO: 102788 - protein, 73 aa, Gossypium hirsutum
  unsure (1)..(73): unsure at all Xaa locations
  Clone ID: LIB3272-048-P1-K1-E12.pep
MGKTRWMGAGRXLRTHPMRQMXSDKAYIKSDLGNEWKKPFSGSCHATXIVQQKIGIGDQQSDFDMRKCAIVQV

SEQ ID NO: 102789 - protein, 135 aa, Gossypium hirsutum
  Clone ID: LIB3272-048-P1-K1-F6.pep
ASVRVSNELGSEHPKSAAFTVAVVTLVSLIIAVVEAVIVFALRDVISYAFTEGETVAKAVSDLCPFLAVTLILNGIQPVLSGVAVGCGWQAFVAYVNVGCYYVVGIPLGCVLGFKYDLGAKGIWSGMIGGTMMQT

SEQ ID NO: 102790 - protein, 136 aa, Gossypium hirsutum
  Clone ID: LIB3272-048-P1-K1-G1.pep
GSGSRIVFPCRAFSLAFLVPSFTSSTQLSLKSFLAHTSLPPTAFSFLRMASSSSSSLTNGNDINPSNDAAAPSPPSASSAIDFLTLCHRLKTTKRAGWVRRDVQNPESIADHMYRMGLMALIASDIPGIDQDKCVK

SEQ ID NO: 102791 - protein, 107 aa, Gossypium hirsutum
  Clone ID: LIB3272-048-P1-K1-G8.pep
MDEDALNMRNWGYYEPSFKGHLGLHLMAERDKKPFIPGRDPNNLMVTTNAFHPRDCIVSEAPPIRMQYVRDTWISQREKLFNMLPPVTAPNYDILSETSATHSMPIW

SEQ ID NO: 102792 - protein, 55 aa, Gossypium hirsutum
  Clone ID: LIB3272-049-P1-K1-B1.pep
YHPPPCKAHTLVLVLATRIRCPHTLWVSTSDNDVNPSTQLMSIRNIRRVSNDVSS

SEQ ID NO: 102793 - protein, 110 aa, Gossypium hirsutum
  unsure (1)..(110): unsure at all Xaa locations
  Clone ID: LIB3272-049-P1-K1-B2.pep
MAAGKVVWPAISCSSSGLDGGQSVPLPKAGFVKLPLPAPLTSLGLSSGNNARLSSVQATEESTVVITDDRVAVISGENLRQMATNIVWHKSSVGKLHRQEXLQQKGXVIW

SEQ ID NO: 102794 - protein, 40 aa, Gossypium hirsutum
  Clone ID: LIB3272-049-P1-K1-B7.pep
WIFLLFINEMAANTDLGQNLYFIVPVIMVGSKKTFPRKTS

SEQ ID NO: 102795 - protein, 52 aa, Gossypium hirsutum
  Clone ID: LIB3272-049-P1-K1-B8.pep
FALSTIAAASMSKHRSAIGPQDPLLFECRHQSCHTSVKTVLSRTTPACVAAT

SEQ ID NO: 102796 - protein, 64 aa, Gossypium hirsutum
  Clone ID: LIB3272-049-P1-K1-C3.pep
KKTQQSIIHISNRNQINEKKKKSNKAFNLFSFFSPLQLSLLFPFFSFAAQLHKYNCIRAVNWFF

SEQ ID NO: 102797 - protein, 77 aa, Gossypium hirsutum
  Clone ID: LIB3272-049-P1-K1-C9.pep
TQALAFSQLPLQSTVFSTSFTAWFRSISMNTPQVLLYFFFSTVQVQPNYQLPPPNGIITGKFTKKKTRMRVKGTQES

SEQ ID NO: 102798 - protein, 57 aa, Gossypium hirsutum
  Clone ID: LIB3272-049-P1-K1-D1.pep
FIISMTLIDAGRKPTFPTWVLNIHAGNEIVLRVSFVYARLINLCCSKRIDWSELEAH

SEQ ID NO: 102799 - protein, 94 aa, Gossypium hirsutum
  Clone ID: LIB3272-049-P1-K1-D12.pep
VHKVNSCSGNRLLGLCRTYGSQKHYNISYKKRVARLMRTTPSLLTMNINHSLLNLSNIINLDSIPGHTGIDLVFSTRLARKRTDESSKSILRPH

SEQ ID NO: 102800 - protein, 111 aa, Gossypium hirsutum
  Clone ID: LIB3272-049-P1-K1-F1.pep
SNAMESSNRRLTLFEQMSAVDNGRTTLAAAFTLDALLGNTKPPQQPSSHNRTLLEIILDDGSNKDKKSWKAFRDKIRLKRPGSALTFSVHVPVSDVNVQTDRSESPRSGPF

SEQ ID NO: 102801 - protein, 76 aa, Gossypium hirsutum
  Clone ID: LIB3272-049-P1-K1-F3.pep
RASTTHSGVHLVHALPKAMHNQNLRMKLIHKEHILHKDIKQDMLLTDIVENTPFNIPLRLLLNNRKTLCAEKGVQM

SEQ ID NO: 102802 - protein, 55 aa, Gossypium hirsutum
  Clone ID: LIB3272-049-P1-K1-F4.pep
HVPWDDNSNISFDTRICSSDPTRPNPRVHAFKKPNLLDLRLPLKLHFLASVCMPL

SEQ ID NO: 102803 - protein, 41 aa, Gossypium hirsutum
  Clone ID: LIB3272-049-P1-K1-G10.pep
MDERHADVKSKPEPKIQDSKHGSFSRLAMYNIRWCCCQGIH

SEQ ID NO: 102804 - protein, 56 aa, Gossypium hirsutum
  Clone ID: LIB3272-049-P1-K1-H1.pep
PLIRHASWIILIRFIHLSRSVHFSQRLLFCPIPFFDFNQHALSVLSPLKIYTGPNI

SEQ ID NO: 102805 - protein, 89 aa, Gossypium hirsutum
  unsure (1)..(89): unsure at all Xaa locations
  Clone ID: LIB3272-049-P1-K1-H11.pep
PRXRSFELSLTRAASIYDHRAFPFEMVWPLNKIWGQLSIPNLFFLNPLGFLGGPKPFSKMCLGRFFLRLSTGFPFLYPPSTPGPVLAGH

SEQ ID NO: 102806 - protein, 71 aa, Gossypium hirsutum
  unsure (1)..(71): unsure at all Xaa locations
  Clone ID: LIB3272-049-P1-K1-H9.pep
QGPGTVLLGHSTVCTVPCTGLEGQCLEKLSYGNNMWTDNXQGHTPNYVADHDTTYCGGAIESKGRQAHMAL

SEQ ID NO: 102807 - protein, 70 aa, Gossypium hirsutum
  Clone ID: LIB3272-050-P1-K1-A4.pep
QQTTMDDYNCKRRGQISASGDWDHATELPITQYSESAREAGWIGLSSSSAQPIPYLTDDGKTKHPQNHVP

SEQ ID NO: 102808 - protein, 64 aa, Gossypium hirsutum
  Clone ID: LIB3272-050-P1-K1-A6.pep
FLLILSIPWAIVPSVQSLSRPRVDLCIYPLVVRVIVPVLRCVLFIITNQLVNLGIHLHTMAVKS

SEQ ID NO: 102809 - protein, 73 aa, Gossypium hirsutum
  Clone ID: LIB3272-050-P1-K1-A8.pep
LERLRLHAPAKDSALSASWMDMVRTIQAYFPPPQPLILDLCQGRRLVPFYKSDWMYKRQCIHRLCLVRFAGSN

SEQ ID NO: 102810 - protein, 112 aa, Gossypium hirsutum
  Clone ID: LIB3272-050-P1-K1-B1.pep
MAADAAATASSSVTEEELTLTVKWSGKEYTVRVCGDDSVAELKRRICEMTNVLPQRQKLLYPKIGNKLSDDSLLLSQIPLKSSLKMTMIGTVEDDIIVDPVEAPEIIDDFEL

SEQ ID NO: 102811 - protein, 111 aa, Gossypium hirsutum
  unsure (1)..(111): unsure at all Xaa locations
  Clone ID: LIB3272-050-P1-K1-B10.pep
MAGTGVXMHYGEHALAETHKCPFSDKGGLSQQLPGGMMMGVTLREQDHIGEKPGAXPEMAFQRVQADIPSLRCDSRKNDPQLIREILQADTIALMAKARINHCAEAHMLEA

SEQ ID NO: 102812 - protein, 102 aa, Gossypium hirsutum
  Clone ID: LIB3272-050-P1-K1-B11.pep
WTDTGLATLLSMIATDETRIPVVDSDGACQSAHATFYGGSDAFGTMDVACGYRNLYSQRYSLNTAALSTALFNNGFSSGPCFEIKCVNQPQCCHSASASFSL

SEQ ID NO: 102813 - protein, 72 aa, Gossypium hirsutum
  unsure (1)..(72): unsure at all Xaa locations
  Clone ID: LIB3272-050-P1-K1-D12.pep
SKLPPRQARLVVYNKRSNETSILVGELXKVIAATGGGHNRGKVFWFKVVPVVQPPMDALEFAEWEAVVKNFL

SEQ ID NO: 102814 - protein, 96 aa, Gossypium hirsutum
  Clone ID: LIB3272-050-P1-K1-D6.pep
MTSSLYMFLLISLILTSLTNGDAGLIQTTCKTTKSADLCVSILHSDPTSLNSDTKGLALILIRVATANATATSTFLSSQLLTTTNDTTLKTVLKEC

SEQ ID NO: 102815 - protein, 51 aa, Gossypium hirsutum
  Clone ID: LIB3272-050-P1-K1-D8.pep
AFIGLSSAMHMPTFMVHGEQTGTGKGQEKLGISERIMKPKCEARLQCLIRD

SEQ ID NO: 102816 - protein, 98 aa, Gossypium hirsutum
  Clone ID: LIB3272-050-P1-K1-E3.pep
SVSRIRFLKCKYKLEIETVRGSGTVSCAFIFRPLIKKAAYLAFLEKDDGWDSLDIIGKCGWDVVFMAILPGTDWKLKGIKKIIQPSEDATDSSDDDGM

SEQ ID NO: 102817 - protein, 86 aa, Gossypium hirsutum
  unsure (1)..(86): unsure at all Xaa locations
  Clone ID: LIB3272-050-P1-K1-F1.pep
DKNAVYXGTPHGKGITGADECTGSIRKRIXCINVPDIEXNRRALHVLRLTVSGALQHVSEAIICEDTVDKKTVSNKHFADVVNEGA

SEQ ID NO: 102818 - protein, 109 aa, Gossypium hirsutum
  Clone ID: LIB3272-050-P1-K1-F8.pep
MEVHDTRDSLEEDNLNLLQAMASVYLWILFFAMACGMGSGLATVNNLGQIGESLGYSNFENNTLVSLWSIWNFLGRFGAGYVSDHFLYVKGWARPLFMVLTLSSMSVGH

SEQ ID NO: 102819 - protein, 124 aa, Gossypium hirsutum
  Clone ID: LIB3272-050-P1-K1-G12.pep
MALYLVRAIKLTNTIRTTTLLLRSSNTQTRNISHFLVSHNQLTPRSQNLTPFCSFDFLRDSRRGFAKGKKSKDDSGGSTMELAPDIGPSVKASAASQMDAAIVALSRELAKLRTGRASAGMLDH

SEQ ID NO: 102820 - protein, 130 aa, Gossypium hirsutum
  Clone ID: LIB3272-050-P1-K1-G2.pep
QSSSDHDKAKQLLQRVRGTTDVEAELEDLIKARSISKTIKHPFKKIIQRKYRPQLVMAIAIPFFQQVTGINVIAFYATLLFRTIGIGESASLLSSVATGVIGAGSTFISMLIVDKFGRRALFMVGGIQML

SEQ ID NO: 102821 - protein, 91 aa, Gossypium hirsutum
  Clone ID: LIB3272-050-P1-K1-G8.pep
TNTERQCRLPFYSRRWLKFKSDPVHRAPFFYIVALMVSNRSICSNVINGNQLRFGRASWYIVRIIHLPIRLMIIDSTRRSDRSCTLHFTTV

SEQ ID NO: 102822 - protein, 48 aa, Gossypium hirsutum
  Clone ID: LIB3272-051-P1-K1-A2.pep
LETLANPWWANQVSLPGMDPAGNSPALNKRDLEISMNDANKSRSNGRG

SEQ ID NO: 102823 - protein, 56 aa, Gossypium hirsutum
  Clone ID: LIB3272-051-P1-K1-A7.pep
TEPIGRIFAGRFLMALPRQNTLLGQTLILRAGGRTMNVCYYTSHRVESYILSLAVQ

SEQ ID NO: 102824 - protein, 45 aa, Gossypium hirsutum
  Clone ID: LIB3272-051-P1-K1-A8.pep
LNLMIYVVTDINGFPSCLQEWCFPQKCVLNLHVPLGILNVIWFHG

SEQ ID NO: 102825 - protein, 105 aa, Gossypium hirsutum
  Clone ID: LIB3272-051-P1-K1-C6.pep
FNVGVRKGLDSAICSDLAKKEKRKKKDAMVRLTGKQQHTPGTIRFLLICIGIGLLLIGLIADIFWASSSRFKLSSLSISHSSDFPATFPLMFTEPLNSSANQKPK

SEQ ID NO: 102826 - protein, 62 aa, Gossypium hirsutum
  Clone ID: LIB3272-051-P1-K1-C8.pep
SGEIEIPLLLTLYYLCREWDVGHGPYFWTQGQVGTTNPREIHCNVGREGFTTHTMKRLPRCS

SEQ ID NO: 102827 - protein, 91 aa, Gossypium hirsutum
  Clone ID: LIB3272-051-P1-K1-C9.pep
MASLQWLLQLSSSPFLLFASILLLLKLLFNQNSTKTKPNLPPCPPKLPIIGNLHQLGTMPHLSLRRLSNKFGPIIYLQLGQIPTVVVSSAK

SEQ ID NO: 102828 - protein, 131 aa, Gossypium hirsutum
  Clone ID: LIB3272-051-P1-K1-D11.pep
MRDSPSCFGENGVQVADSSSSNTSKNGQNIVLCVYQCQILGRSCLITVTWNKSLMGQGLSVGIDDSTNQCLCKVDIKPWLFSKRKGSKSLEAYFCKLDIFWDLSTAKFSSGPEPSQGFYVCVVANKQMVLL

SEQ ID NO: 102829 - protein, 27 aa, Gossypium hirsutum
  Clone ID: LIB3272-051-P1-K1-D4.pep
YVMPQMPSIGTDHGMRKLTLLSSMILQ

SEQ ID NO: 102830 - protein, 88 aa, Gossypium hirsutum
  Clone ID: LIB3272-051-P1-K1-E3.pep
AHSLGAAMHASLHSILLHPQASAADPIPSMLRNPDWSARYMTPLAVLGPIAYPMCLTAPAPSTRSGSFAIHDSLSKQTPFSSSSMESG

SEQ ID NO: 102831 - protein, 54 aa, Gossypium hirsutum
  Clone ID: LIB3272-051-P1-K1-E5.pep
ALFECILHATASQYRNHCFSLLILPFLKNLGQTTKLETTVILSGRQIIVITYTT

SEQ ID NO: 102832 - protein, 133 aa, Gossypium hirsutum
  unsure (1)..(133): unsure at all Xaa locations
  Clone ID: LIB3272-051-P1-K1-F2.pep
SKSSRARTYMADGXPADIHCGTGAISGYFSEDHDTDGDLTVXHMEYIEATNECSLTFLIAKFDGILRLGFKEISFRNARPVSYNMTNQGLANEPXVFDSNLHRILMIMYAYXVRIRGMDTKHHRGEHTYVPVT

SEQ ID NO: 102833 - protein, 133 aa, Gossypium hirsutum
  Clone ID: LIB3272-051-P1-K1-F9.pep
MIAKSLKDRSAAMDPGIWSKLPQELLEHILSFLPLKTLLNLRSTCKHFKSLVFSPSFISKYSSASLFSSFFLLSHPQCYSNFPLYDTICGAWRKIALPLSFLPPSAAQFNLLSSCNGLFCFSLPNSSSFLVCN

SEQ ID NO: 102834 - protein, 73 aa, Gossypium hirsutum
  Clone ID: LIB3272-051-P1-K1-G5.pep
LKLLDSAGSSFGLFRYIFHLLWTHEMVIGLLRAGNAMYIQLPCYIDLVRHELSCHRLTCILKAADGSTPPPLM

SEQ ID NO: 102835 - protein, 96 aa, Gossypium hirsutum
  Clone ID: LIB3272-051-P1-K1-G6.pep
MATEGGKSFARRDKLLEIESKVRVWWDEKDVFKAEPAEKPPQPGEKFFGNFPFPYMNGFLHLGHAFSLSKLEFAAAYHRLRGANVLLPFAFHCTGM

SEQ ID NO: 102836 - protein, 136 aa, Gossypium hirsutum
  unsure (1)..(136): unsure at all Xaa locations
  Clone ID: LIB3272-051-P1-K1-H1.pep
RTRGFFYISGAGQLTGLGXGDSIALEITKHCTDXHIIHWLYLQTHHATEDGNVCESSRIKCFQPCPDCYADYTTCSERKRAMTVSRDNMIYPERHCTQQEEKMHCFAPAPKXTSPAFTWPTSRDYEIYANAPYKAL

SEQ ID NO: 102837 - protein, 97 aa, Gossypium hirsutum
  Clone ID: LIB3272-051-P1-K1-H10.pep
MSSVLNTVSSLRLSRVYNSNNNNHLRLPIHSVLTPPSVSFTRRRLTIRAADTDTNEVKSKAPDKAPAGGGSSFNQLLGIKGAAQETDKWKIRLQLTK

SEQ ID NO: 102838 - protein, 107 aa, Gossypium hirsutum
  unsure (1)..(107): unsure at all Xaa locations
  Clone ID: LIB3272-051-P1-K1-H2.pep
VILNVLTVGCADTDRRIVLEALIITAAAWASLTVYTSWAXNKGADSNYMRPIQCYQLITLIITGLIQMFIPIRQTCTAIYCGIRAKVGCPYIVYNTGNLERQPHILG

SEQ ID NO: 102839 - protein, 127 aa, Gossypium hirsutum
  Clone ID: LIB3272-051-P1-K1-H3.pep
MAVAGLYRRVLPSPPAIEFSSPEGKQLFTEALAGGTAEGFFKLISYYQTQSEPAYCGLATLAMVLNALAIDPGRTWKGPWRWFDDSMLDCCEPLEKIKSQGITFGKVACLAVCNGAQVEPFRTDQSS

SEQ ID NO: 102840 - protein, 50 aa, Gossypium hirsutum
  unsure (1)..(50): unsure at all Xaa locations
  Clone ID: LIB3272-052-P1-K1-A1.pep
WARTPLIANIHTYLISSGNPRDMXLAYAHITFASPVQWDHGQGSHTLYDA

SEQ ID NO: 102841 - protein, 135 aa, Gossypium hirsutum
  Clone ID: LIB3272-052-P1-K1-B3.pep
RYLLHCFLLALLTTKAASHLFQSNANANANRKSYIVYMGDRLKDGASTALLHGSMVQDVFGSESKTVLYSYKKSFNGFVVDLTEEEAQKMAGMKGVVSVFPNEKRKLHTTRSWDFMGFPQQVERATMESDVIIGV

SEQ ID NO: 102842 - protein, 113 aa, Gossypium hirsutum
  Clone ID: LIB3272-052-P1-K1-B4.pep
MAISSTFSAAKLDSLLMNYCSSSSASFSGAYFQDQQQKKVFPRPNHGNKGMVSRNGGVRCEAAEFNAALGPQKIDLSKASALSALQQLKTSAAGRYTKGRGNIGVIGLNVHTA

SEQ ID NO: 102843 - protein, 56 aa, Gossypium hirsutum
  Clone ID: LIB3272-052-P1-K1-B5.pep
LSVINVFFYLICCWAFGSSDNKNKIVWDEEEGTEDELELELGDHAKGVASPIVFTH

SEQ ID NO: 102844 - protein, 69 aa, Gossypium hirsutum
  Clone ID: LIB3272-052-P1-K1-C1.pep
MQFFFKTITNKTITFAVESTLSIDRVKGMIRYNRRMRHDQHRLIFDDETFLDGETLHHYDIEEENTLHL

SEQ ID NO: 102845 - protein, 118 aa, Gossypium hirsutum
  unsure (1)..(118): unsure at all Xaa locations
  Clone ID: LIB3272-052-P1-K1-C10.pep
QKRMAASVLKCGRDEDRLVPNEMNEIFMANCRQNVMKLAKXGYIIREPXRSTTRTRARRMKEATRQGGHHDYGKRNDTREARLHTKILWMMRMHVLKRWLRMYRECKTDDKLMYHDMY

SEQ ID NO: 102846 - protein, 96 aa, Gossypium hirsutum
  unsure (1)..(96): unsure at all Xaa locations
  Clone ID: LIB3272-052-P1-K1-C2.pep
QQVANLHRPXTPANEVPGHMTHSMPSNEIEIFKCWQGWSYNNCLTHLTPLEQMRQPSGSLTDTKSDGLYDQVKQLRAWTKQIPDCYSGAVVLNIIT

SEQ ID NO: 102847 - protein, 81 aa, Gossypium hirsutum
  Clone ID: LIB3272-052-P1-K1-D2.pep
SAIAESAMHVRKTLSNSAQYCCSKRYIHRAPFSQYWHQNSRSSQNKQFRCACSILMCQFRVRYNHLLLPATLYYCKVIRFN

SEQ ID NO: 102848 - protein, 118 aa, Gossypium hirsutum
  Clone ID: LIB3272-052-P1-K1-G1.pep
VNDSMDKVLERFYKNPYWDSARQMVDDKYKTIDFPFEAVDGEDSTGPFEFENERWMGLEDYFTYLRSWSAYQKGKEKGVELLSEHVVEEFKRAWGEDENGGQKLVKFPIYLRIGKVGA

SEQ ID NO: 102849 - protein, 95 aa, Gossypium hirsutum
  Clone ID: LIB3272-052-P1-K1-H2.pep
LIGTIEHVWRFLKCHCLCRLWQVTIIIVHIFVNGSCWRSRGPSNAWLICGFPYILPIVFVITNPSSTRYILPQCNIFRTKSHRLTILNHFRCWII

SEQ ID NO: 102850 - protein, 114 aa, Gossypium hirsutum
  unsure (1)..(114): unsure at all Xaa locations
  Clone ID: LIB3272-052-P1-K1-H6.pep
IPISMIGVAVIVGSPISVANAECMPIASKHCGNFXASLAEKYVGVKRRXAPLLRLVFVVXTTIKRAFTLLCHTKLLFLLSAXLGHGRYLLAXVQPQPNSPPVNVFRPDRPAVAD

SEQ ID NO: 102851 - protein, 133 aa, Gossypium hirsutum
  Clone ID: LIB3272-052-P1-K1-H9.pep
FFEVESFIVMSTSTTASTTALLGRDGSVNTWFSSFGMLARWSMWAISSSFDCFGPFSNISKAFRLLEFTAFTSSSGCCSSKFITSCCFLKAAKCNTVLPSSSFKFNISLALIPSIKPLTNLHPFSFFPAKCKI

SEQ ID NO: 102852 - protein, 87 aa, Gossypium hirsutum
  Clone ID: LIB3272-053-P1-K1-A11.pep
SQLVRINVPLKWCNIMLPLLAHLGPYLSCVVSVTLPVYLPPGISQHPGSRQPLYTIWCSLYHRSPCWPPLTLVIATWYVLYPSEPLR

SEQ ID NO: 102853 - protein, 139 aa, Gossypium hirsutum
  Clone ID: LIB3272-053-P1-K1-A12.pep
KLLFQSKKYPQNLPPSPPSLPIIGHLHLLKTPIHRFYHHLSQKYGPVFSLRLGSRLFVVVSSSAVAEECFTVNDIVLANRPKLIAGKYLGYNYTTVSTSSYGDHWRNLRRIGAIEIFSSSRLNAFAAVRKDEVRRLLVS

SEQ ID NO: 102854 - protein, 63 aa, Gossypium hirsutum
  unsure (1)..(63): unsure at all Xaa locations
  Clone ID: LIB3272-053-P1-K1-B12.pep
RTLQEQKLHWHKNQMMLDYSTVGTPEYNDAQVSLXKGYGTECDRCTLEAIMYEMLDDMHPFIQ

SEQ ID NO: 102855 - protein, 113 aa, Gossypium hirsutum
  unsure (1)..(113): unsure at all Xaa locations
  Clone ID: LIB3272-053-P1-K1-B4.pep
MRFRNILIDRPEXATNPDALKEVLAELIXTLIFVFAGSASGMLFTKLTDTGAPPPPGLVAAVLANGFGLFVVVSVGANISGGHVNPAVTFGAFVGXNITLLRGILYWIAQLLG

SEQ ID NO: 102856 - protein, 96 aa, Gossypium hirsutum
  unsure (1)..(96): unsure at all Xaa locations
  Clone ID: LIB3272-053-P1-K1-B6.pep
AKVEKLDVMHGCTQAHLALAWVLHHGDDDSPIPGSTKNKNFDRNIARVHVKLXKTDWXEVAYATQIHEVAGCTHPDGLQQYTWRYGHTPPKKRTYV

SEQ ID NO: 102857 - protein, 106 aa, Gossypium hirsutum
  Clone ID: LIB3272-053-P1-K1-B7.pep
MYQIWKLMLLVSLLICHLLSKVPGTSSEPPKHFVLVHGSCHGAWSWYKVVPLLKSGGHNVTALDLGGSGVDPQQVNTLRSISDYIKPLREFMASLPNEKKWCLLSQ

SEQ ID NO: 102858 - protein, 51 aa, Gossypium hirsutum
  Clone ID: LIB3272-053-P1-K1-C1.pep
MGSRIPFPPFWLLSFFDCGRPLERKRRSPENQSKRSKTNRRRIRKIRRRGR

SEQ ID NO: 102859 - protein, 142 aa, Gossypium hirsutum
  Clone ID: LIB3272-053-P1-K1-C11.pep
RPGFTIIQKFGGELFNARQDFSPFNVVAWHGNYVPYKYDLSKFCPYNTVLIDHGDPSINTVLTAPTDKLGVALLDFVIFPPRWLVAEHTFRPPYYHRNCMSEFMGLIYGGYEAKADGFLPGGASLHSCMTPHGPDTKTYDAT

SEQ ID NO: 102860 - protein, 73 aa, Gossypium hirsutum
  Clone ID: LIB3272-053-P1-K1-C5.pep
RQWLQPSSPPPFKGECLHSYPVSDFHWHPGQIQARFEFRKLKPTSRQQKKPCQLSQQGRGCNCSDIFPFGVVN

SEQ ID NO: 102861 - protein, 106 aa, Gossypium hirsutum
  unsure (1)..(106): unsure at all Xaa locations
  Clone ID: LIB3272-053-P1-K1-D1.pep
RXXHESRHITQVYGFYDXCLRKYCKTNVWXFFTDLFDYLPNTSLIVSCSFCIYRILALCFDTFYIIXALDRVQEVPHEGPMCDLLCTDSCDRXLWGIYYSGVIYTF

SEQ ID NO: 102862 - protein, 69 aa, Gossypium hirsutum
  Clone ID: LIB3272-053-P1-K1-D5.pep
KVQSVGLSSQGASDVLAPQAQQQCISGSLSCSSADPSASHSGHPIGFMPQSFLEFVECRHAVASRTHSH

SEQ ID NO: 102863 - protein, 55 aa, Gossypium hirsutum
  Clone ID: LIB3272-053-P1-K1-D8.pep
VYEFFLSKRSVMRLEFSIHATTSKVNGCLSRPQSQSVQDVASSKCIGSNFHGYRS

SEQ ID NO: 102864 - protein, 71 aa, Gossypium hirsutum
  Clone ID: LIB3272-053-P1-K1-E12.pep
MLTCIARSKLPGDDSVSQQEEMDSSTTPNTKHNQAIKSLTSQLKDMALKASVAYRHCNPCTAHSRLRNMGE

SEQ ID NO: 102865 - protein, 82 aa, Gossypium hirsutum
  unsure (1)..(82): unsure at all Xaa locations
  Clone ID: LIB3272-053-P1-K1-E3.pep
GSCXSPSXXKLCDSLGGXLSXRMXXGXLXWSXXNLKWQMVQPFQNPPKPWTXIVQQTVMNXCASKGTQQGVIVPLSSPCKPK

SEQ ID NO: 102866 - protein, 79 aa, Gossypium hirsutum
  unsure (1)..(79): unsure at all Xaa locations
  Clone ID: LIB3272-053-P1-K1-E8.pep
CLASGGAACACDACXTVVSGISRRSARVAYWGPFGFSFGGSGIPWEGCAPLMEKLPWINHFHKTPGREWFGTDSMLGVN

SEQ ID NO: 102867 - protein, 54 aa, Gossypium hirsutum
  Clone ID: LIB3272-053-P1-K1-E9.pep
ILLNFSDGDGSKDCCCGGRGCFLADASHAQGQEDQGHAMNSYKDSFPQAEDIIK

SEQ ID NO: 102868 - protein, 135 aa, Gossypium hirsutum
  Clone ID: LIB3272-053-P1-K1-G4.pep
MVKPQKPPSGRTNLASCIVATVFLIFLVIIVLIVYFTVFKPQDPKISVNTVQLPSFSVGNNTVSFTFSQYVTVRNPNRAVFSHYDSSIQLLYSGSQVGFMFIPAEKIEAGRTQYMAATFAGQSFPLAPTNEASAA

SEQ ID NO: 102869 - protein, 91 aa, Gossypium hirsutum
  Clone ID: LIB3272-053-P1-K1-G5.pep
ITTTGKKKKRKGANLKVFILKKESSVCLSHRSKKTQNLFQKKLNLRKKPNKWNRRSCMRADRHRHYDGPVTIILVNDNPNSFSHNDDKLYN

SEQ ID NO: 102870 - protein, 89 aa, Gossypium hirsutum
  unsure (1)..(89): unsure at all Xaa locations
  Clone ID: LIB3272-053-P1-K1-G7.pep
EFLMTIELIGVSLVGKSNLLSRSARNYFTSNXEASICVXLLTQRFEMDGNEVNAQTXTLVTXERIRAVTFDYYLGAVGAXIVNDMTRRG

SEQ ID NO: 102871 - protein, 73 aa, Gossypium hirsutum
  Clone ID: LIB3272-053-P1-K1-H11.pep
LESIGLQFVMQSVDVSKEKNTNLKRSRSLFVHDMPVTDSTAARTLDHYYIITVEDIVQSPLPVYVAPTSVSFS

SEQ ID NO: 102872 - protein, 105 aa, Gossypium hirsutum
  Clone ID: LIB3272-053-P1-K1-H3.pep
QKFRVSTIELKLKRVMEGLIPYLIHAMKKQKPGHNYRSTSVGSSRSYHLLEGSSHRRTMSEFQPPATVEVVEQRSGLGYNNGSSSVGSYAHQQASVGNTGDVRRR

SEQ ID NO: 102873 - protein, 72 aa, Gossypium hirsutum
  Clone ID: LIB3272-053-P1-K1-H5.pep
WLVALFYSGHEASKACPQNLHRLMSNTDASLMFQSRTRTGMNIHSSCSREKELLPNLLTGTTATSTVSRLSS

SEQ ID NO: 102874 - protein, 101 aa, Gossypium hirsutum
  Clone ID: LIB3272-053-P1-K1-H6.pep
SVQPVLSGVAVGAGWQRVVAWVNIASYYLVGIPIGVVLGYVWNMHVKGVWIGMLLGTLLQTIVLVVITWRTDWDKQVILARTRLNKWFVPESREDNQNVAA

SEQ ID NO: 102875 - protein, 38 aa, Gossypium hirsutum
  Clone ID: LIB3272-054-P1-K1-A1.pep
LALGVTVTLDHQPKKLTPTMFLKGPHLAVLYYNNPLRL

SEQ ID NO: 102876 - protein, 83 aa, Gossypium hirsutum
  Clone ID: LIB3272-054-P1-K1-A12.pep
MCPLRLILIFLSATLAGFFLLRNIKSQPQTNDDDHTRSNNNNSHSAFSKVWAAIESGFWASLDMASGRYLWRHLVSSNSKPSS

SEQ ID NO: 102877 - protein, 83 aa, Gossypium hirsutum
  Clone ID: LIB3272-054-P1-K1-A8.pep
MKNPLGSLLSFLGLKKKSPRLELPEGFCCRFSLAQIKAATNNFHPLSIIGEVRFGTVYKGTLHDGTIVAVKRLMRSSYGGGGE

SEQ ID NO: 102878 - protein, 111 aa, Gossypium hirsutum
  Clone ID: LIB3272-054-P1-K1-B7.pep
MELDPSENSNWLLDYGIPDFPPSAAAFAWPCQSTLNAPSNVSATVDCSFADSDCLKDVVSRKRVKSESCGGSGSKACREKLRRDRLNDRFLELGAVLEPERPMKADKVAIL

SEQ ID NO: 102879 - protein, 66 aa, Gossypium hirsutum
  Clone ID: LIB3272-054-P1-K1-C1.pep
PSPSPGRHGATRSPGGTSSRSAPTTEGLGIGTAVTSHKRHSFSGGGGSILPTSLAYFVPLHRVCSP

SEQ ID NO: 102880 - protein, 62 aa, Gossypium hirsutum
  unsure (1)..(62): unsure at all Xaa locations
  Clone ID: LIB3272-054-P1-K1-C2.pep
RKQQGSYTMKLFYTSNMPIMLELALDPNFYFISQLLNRKYSGNFFVNLLGXWKESEYVRRPT

SEQ ID NO: 102881 - protein, 52 aa, Gossypium hirsutum
  Clone ID: LIB3272-054-P1-K1-C5.pep
MLKKMPTGITPSCFDNNHIIQLNSRLYSQQPVNSVLRWKKRVHVSIASTCAH

SEQ ID NO: 102882 - protein, 68 aa, Gossypium hirsutum
  Clone ID: LIB3272-054-P1-K1-C9.pep
PFSPPTPCSFSQALSQRYGCFHQCISPCSFHFLLYSNYAIKKKRVKRSPFVKSCVLLSPLFYKVQLWI

SEQ ID NO: 102883 - protein, 28 aa, Gossypium hirsutum
  Clone ID: LIB3272-054-P1-K1-D11.pep
DPGFFFGLSTSPLNHKNNIVFLFMAEGC

SEQ ID NO: 102884 - protein, 46 aa, Gossypium hirsutum
  Clone ID: LIB3272-054-P1-K1-E10.pep
YQLLAVTFKNKIIGQYSDEIIEKQRKLKMKVGIIELPSDQFTKRKR

SEQ ID NO: 102885 - protein, 90 aa, Gossypium hirsutum
  Clone ID: LIB3272-054-P1-K1-E4.pep
GRELPFYSHVLCSLQSLPFDLYLLHNCCWYKLGNSYDFASLFTTVCVYPNKRFISWPGEEHPSVLVSRTGPFVRSISWSNEECPSVCQLA

SEQ ID NO: 102886 - protein, 77 aa, Gossypium hirsutum
  Clone ID: LIB3272-054-P1-K1-E8.pep
ACHSISEVQLPLPLSLCLSTEHVQPPLSLDPCAGHHSLHVSELIGSSFMADAVADLARDPSRRRCRGRPLPEIQRFF

SEQ ID NO: 102887 - protein, 119 aa, Gossypium hirsutum
  Clone ID: LIB3272-054-P1-K1-F4.pep
MSELTRYSRVLLLMVLGLSAGACYGFGTFGFEFHHRYSDPVKQILAVDELPPKGSPEYYSAMIHRDKIIKGRSLAVENDQTPVTFLEGNATYRLRSLGYLHYANVTVGTPAFWFLVALD

SEQ ID NO: 102888 - protein, 77 aa, Gossypium hirsutum
  unsure (1)..(77): unsure at all Xaa locations
  Clone ID: LIB3272-054-P1-K1-G12.pep
INSNFILLFYFILLHILRDLERLAKMNIFRLAGDMTHWLGVLVWFFRSTQPSLVLGFFCRLKNTILLLFYSVLXHIY

SEQ ID NO: 102889 - protein, 87 aa, Gossypium hirsutum
  Clone ID: LIB3272-054-P1-K1-G4.pep
RIKLFCALLSLPVPPNVVNPAGEDVSQRTLEQQVLLKLLLVGYQKSGTSTIYKQAKILGKGPFLKNERPNIKLEIPCKLGGYLAILL

SEQ ID NO: 102890 - protein, 72 aa, Gossypium hirsutum
  Clone ID: LIB3272-054-P1-K1-G5.pep
ILKAFLFSAHFPLHFQKNFMLSNIHLLNMTPQLGNITGTILVNNPGHLRSLCHGRWDVQDMRLSGSESEERL

SEQ ID NO: 102891 - protein, 47 aa, Gossypium hirsutum
  Clone ID: LIB3272-054-P1-K1-G6.pep
FISRRRERWRKRSTDSKFCLNTLILQLVLFRQTKATLPSLNCLVSWR

SEQ ID NO: 102892 - protein, 135 aa, Gossypium hirsutum
  Clone ID: LIB3272-054-P1-K1-G8.pep
ARVANAHSFIVKLPDGFDTQVGERGLQLSGGQKQRIAIARAMLKNPAILLLDEATSALDSESEKLVQEALDRFMIGRTTLVIAHRLSTIRKADLVAVLQEGSVSEIGTHDELMAKGENGAYAKLIRMQEAAHETA

SEQ ID NO: 102893 - protein, 89 aa, Gossypium hirsutum
  unsure (1)..(89): unsure at all Xaa locations
  Clone ID: LIB3272-054-P1-K1-H11.pep
KNIGAKGLFFFALLFFSXVLHLARMKNTLIFLNFYKDSCSXAENIIKEQVKLLYKRHKNTSFSWLRNNFHDCAGHACDTSLLLDSTRRS

SEQ ID NO: 102894 - protein, 106 aa, Gossypium hirsutum
  Clone ID: LIB3272-054-P1-K1-H4.pep
MCKTEQFFGGGGLFGQQLVLYVTDDPVELHIYGDPKGIPIQQTMYRDTPAPFNCPFWGNTGLTLVRSKPSLAAVVGCMMPFMLGICFLCPSMDCLWHKYYYCPKST

SEQ ID NO: 102895 - protein, 65 aa, Gossypium hirsutum
  Clone ID: LIB3272-055-P1-K1-A2.pep
RNMYSTTPVINIYRPIPHSKISFKYLIRPPRSPLKLATTGLARRVFLRPPRPPTHTGPGPCPADA

SEQ ID NO: 102896 - protein, 105 aa, Gossypium hirsutum
  unsure (1)..(105): unsure at all Xaa locations
  Clone ID: LIB3272-055-P1-K1-A3.pep
YLQDLVLSSNHLTGKIPAELGNCTSLRKIEIYDDLLSGTIPADRGNLTIIXALRAGGNKHIVGRIPDEIGDCSHLTALGLADTRVLGSLPASLGKRSPLHTLSIY

SEQ ID NO: 102897 - protein, 97 aa, Gossypium hirsutum
  unsure (1)..(97): unsure at all Xaa locations
  Clone ID: LIB3272-055-P1-K1-A8.pep
GARSNNPVMIISRWFQXTLSRKPNFHKLSWLSILAAVMSFTYACIGHGLFIAKAASGGEHVTTSLTGVQVGVDVSGCXKVWRTFHGIGDIGFGYAYS

SEQ ID NO: 102898 - protein, 57 aa, Gossypium hirsutum
  Clone ID: LIB3272-055-P1-K1-B2.pep
LFCSLKNDTMRRRFLICISMRIMAVRYKPEPAICGLEYAPTLICLLAYDLSDNNSGL

SEQ ID NO: 102899 - protein, 89 aa, Gossypium hirsutum
  unsure (1)..(89): unsure at all Xaa locations
  Clone ID: LIB3272-055-P1-K1-B4.pep
NHKGPILTGKITIYQIWYRXVYPTQRSIIHDFINSVSSXRIKQNYVGTLLVTNPREKXKYGSCTLDEGKQLLLANTALGKTLNNAHLSA

SEQ ID NO: 102900 - protein, 107 aa, Gossypium hirsutum
  unsure (1)..(107): unsure at all Xaa locations
  Clone ID: LIB3272-055-P1-K1-B9.pep
PVRANKDKLNSLRVTXTATDGATAVGIDEICMIIHAIGSXDYMEGARPYVQPYQTSTGYIGADTCHMNLHKTFCIPHGGGGPVMGPIGAKTHWAPFMASHRGGSTGG

SEQ ID NO: 102901 - protein, 125 aa, Gossypium hirsutum
  Clone ID: LIB3272-055-P1-K1-C11.pep
DEVAVKRLSRQSGQGWDELKNEAILIGKLQHKNLVKVLGCCIERDEKILIYEYLPNKSLDTLLFGTNAMVTLPWKTRVRIIEGIAQGLLYLHQYSRVQIIHRDLKASNILLDEDMNPKISDFGMG

SEQ ID NO: 102902 - protein, 47 aa, Gossypium hirsutum
  Clone ID: LIB3272-055-P1-K1-C3.pep
PTRMQILVRTLTGRTITLQVESSNSFHKMKTRIQKWEGYSTNQRRVI

SEQ ID NO: 102903 - protein, 84 aa, Gossypium hirsutum
  Clone ID: LIB3272-055-P1-K1-C7.pep
MEGKEEDVRLGANKFSERQPIGTAAQSQDDKDYTEPPPAPLFEPRELTLWSFYRAGIAEFVATTLFSYISVFTVMRVLKDISKV

SEQ ID NO: 102904 - protein, 140 aa, Gossypium hirsutum
  unsure (1)..(140): unsure at all Xaa locations
  Clone ID: LIB3272-055-P1-K1-D5.pep
KKGCKKLSSATVPNVKIFWDLSRAKFGSGPEPDSGFFVAVVVDGEMTILVGDATKEAYTRTRAQNPGSRSSPTLVLRKEHVLGNRVYSTXARFGGKLRDISIDCRVNEDAQLCLSVDNKRVLQIKRLKWKFRGNERIEVD

SEQ ID NO: 102905 - protein, 61 aa, Gossypium hirsutum
  Clone ID: LIB3272-055-P1-K1-E2.pep
VVALVKEVSPPEGATNWFCPSCTAYINKKELAGGRALQCLCLVCCHVLRRISHTYRGTRFR

SEQ ID NO: 102906 - protein, 64 aa, Gossypium hirsutum
  Clone ID: LIB3272-055-P1-K1-E3.pep
KCFLDSSHIISFLQHCRKPMLVIHSAFFSLKIPHRASPVVIIFSASFSSMPQQNAQLQCVLGSL

SEQ ID NO: 102907 - protein, 31 aa, Gossypium hirsutum
  Clone ID: LIB3272-055-P1-K1-E8.pep
KVHPQVDPGTPFGFLAPRFLISIGYATVQSN

SEQ ID NO: 102908 - protein, 120 aa, Gossypium hirsutum
  unsure (1)..(120): unsure at all Xaa locations
  Clone ID: LIB3272-055-P1-K1-F1.pep
NASTSSAEEFVPHTTRKTELKLNIANPTTGCQKMLEIDDDHKLCAFFDKRISQEVRGDALGEEVKGYVFNIMGGCDEQGFAMEHGVLTPGRVHVLLYRGTSCFSGYGTRNGXRKMKSIRG

SEQ ID NO: 102909 - protein, 57 aa, Gossypium hirsutum
  Clone ID: LIB3272-055-P1-K1-F2.pep
NQNIFQSLIHLFLSKSNHPTRRPTKAMAQRLINGSRVGAFLVPPLSFLASPFRARMG

SEQ ID NO: 102910 - protein, 46 aa, Gossypium hirsutum
  Clone ID: LIB3272-055-P1-K1-H11.pep
GPFIHSSIPCLLLSFMETSAFQDACTIIADERLFTCHRDWIFTKTE

SEQ ID NO: 102911 - protein, 67 aa, Gossypium hirsutum
  Clone ID: LIB3272-055-P1-K1-H5.pep
LEDLEKEKAVRCANRWTSRPKAQTNCSCMRNLHLGYHLETTGTRSIIYGVPPVQMTYAGPVVSPTAS

SEQ ID NO: 102912 - protein, 141 aa, Gossypium hirsutum
  Clone ID: LIB3272-058-P1-K1-A12.pep
ARSRTKKFATKEATFNAFQTLYSLAQCTPDISSEDCYRCLQDAIADLQFYFGGKQSGFAMYPSCTAQYQTSPFYSLNQTGLAKPPVSPQHPLLLPAPPPPPPGKRGISSQTVIKIVVSTVGFLVLSCFLCGVLGWKATKKL

SEQ ID NO: 102913 - protein, 77 aa, Gossypium hirsutum
  Clone ID: LIB3272-058-P1-K1-A7.pep
QLYISQLRKGKAVRTLLFQWPIHLACEKKRQMASVLSFQGLDFLYAFTAHLCSLWWVLSVRPAPIPRVYPMWLEDPC

SEQ ID NO: 102914 - protein, 50 aa, Gossypium hirsutum
  Clone ID: LIB3272-058-P1-K1-C2.pep
SAVRCNIRVVSIINICGMVCMHYTLTPPFHIRLGVHRRAFERSSDATPML

SEQ ID NO: 102915 - protein, 102 aa, Gossypium hirsutum
  Clone ID: LIB3272-058-P1-K1-C4.pep
KPFTNTRRLGASPSVRKQSVLPSPLKSITLVIIRSGSALSISRYKGVVYSFVFISAFSFFILTCSHLSRPSSMLIRWTILGYLVDPTCSITSMPMLVFSLTQ

SEQ ID NO: 102916 - protein, 141 aa, Gossypium hirsutum
  Clone ID: LIB3272-058-P1-K1-D1.pep
EPMVPFNYTGIAPNNTNVMNGTRTVVLPFNTSVELVMQDTSILGAESHPLHLHGFNFFVVGQGFGNFDPVKDPAKFNLVDPMERNTAGVPAGGWIAIRFLADNPGVWFMHCHLDVHTSWGLKMAWIVLDGPEPNQKLQPPP

SEQ ID NO: 102917 - protein, 60 aa, Gossypium hirsutum
  Clone ID: LIB3272-058-P1-K1-D2.pep
KNKRGCYSIFFFNFDCKLKRCGVEGGKTRAQAQSIGWIRALVFRMVNFRVKSFVFAQTFR

SEQ ID NO: 102918 - protein, 126 aa, Gossypium hirsutum
  Clone ID: LIB3272-058-P1-K1-D5.pep
MRMSRGYNRLASSMFTMVSPRFFSTAATRGVLSNDMVKAPAVGLGVRCRSSMAAIAGGDKEQEKKQAVGGGGGSSKDDKEIVSYWGLDPTKVSKEDGSPWKWTCFRPWDTYQADLSIDLKRHYAPV

SEQ ID NO: 102919 - protein, 87 aa, Gossypium hirsutum
  unsure (1)..(87): unsure at all Xaa locations
  Clone ID: LIB3272-058-P1-K1-E8.pep
MYGITGYSNGYHQNQQQHSSEEKRGGGRRRRGGRRSRHRPGFRVSDHHHHHYNNDDDDDKQEQKAPXPCTDFDMAYFHSYAHVGIHE

SEQ ID NO: 102920 - protein, 63 aa, Gossypium hirsutum
  unsure (1)..(63): unsure at all Xaa locations
  Clone ID: LIB3272-058-P1-K1-E9.pep
MKQLHKQSIFNHRRDEEILIPHTLSYSPNSXKHPRSFPRSIFFKEQRLLVFFMGILNGYTFFI

SEQ ID NO: 102921 - protein, 115 aa, Gossypium hirsutum
  Clone ID: LIB3272-058-P1-K1-F11.pep
MRKLEFHEKKLLKKVNFLEWKREGGHRENLILHRYHVTGRDDYKKYSGLCRMVQKLVNILKQMDPRDPFRIEMTDLLLEKLYNMGVIPTRKSLALCDRLSVSSFCRRRLSTVLVH

SEQ ID NO: 102922 - protein, 59 aa, Gossypium hirsutum
  Clone ID: LIB3272-058-P1-K1-F7.pep
DFTITLDGSKALNEGGGVVSLPREAYLYCKSEICSANVSTLISIIQLRLKEGTESQRGS

SEQ ID NO: 102923 - protein, 142 aa, Gossypium hirsutum
  Clone ID: LIB3272-058-P1-K1-G2.pep
QTLARLGIRTHHQPCAACRMLRRRCDSNCILAPYFPGDEPDKFAGVHKVFGASNVIKLIQMVEETNREDAVKALVYEARARLRDPVYGSTGTIFQLQRMVQDLKLQLKSTNARVLELQQQKDQLLGIFMNFDHLDVLSRDHG

SEQ ID NO: 102924 - protein, 119 aa, Gossypium hirsutum
  Clone ID: LIB3272-058-P1-K1-G4.pep
MLKQVSLICFLIFSCYMGVESKDLKHLTNELEVNVAASRVWELYRHLGISMLTARELKTVIQSVQVLKGDGGVGTILKLTFVPGNSSYTERFIKIDDEKKVKVAKGLEGGCLAIGCSDQ

SEQ ID NO: 102925 - protein, 89 aa, Gossypium hirsutum
  Clone ID: LIB3272-058-P1-K1-G6.pep
LSIKVFYVSPNYLAYIIHSKSFEKKKVDHRRHGKRPLPPETSAEKRQGPDDFRTASWPESADSSAIVTALSQVIGSDDQQLIGFPQSSA

SEQ ID NO: 102926 - protein, 47 aa, Gossypium hirsutum
  Clone ID: LIB3189-010-P1-K1-B1.pep
TQASVTILSKTKSVPQFHFLKLENTDDRLLLYKAISSPTAPLRFDGA

SEQ ID NO: 102927 - protein, 114 aa, Gossypium hirsutum
  Clone ID: LIB3189-010-P1-K1-B2.pep
INPSVNSFSRWFSSRFFFRSDPPQIDKMSAPSSRERAQRLYEKNIELEKNRRRSAQARVPSDSNAWQQMRENYEAIIFEDHAFFDQTFFVFHLWMFHYLRFDELNGLFRALVSS

SEQ ID NO: 102928 - protein, 81 aa, Gossypium hirsutum
  Clone ID: LIB3189-010-P1-K1-B3.pep
WFSSLKVHELLLFVFVNRKKYMKKYSDWKMCAKYVQHAQELISKLDFPSFYKDAIVMLLKHAATCIIELDQSAPSTTVESM

SEQ ID NO: 102929 - protein, 132 aa, Gossypium hirsutum
  unsure (1)..(132): unsure at all Xaa locations
  Clone ID: LIB3189-010-P1-K1-B9.pep
VGDNNSTLSRVDSGRRRQLQRGQLSQFLPTSRRIVQFSNGKGPGPNARIVYIDGAFNLFHAGLVGILKKAGQLENFWLVGIYPDYIVSEQRGMPYPVMHLLERTLSVLACRYVDEVIIGAPWELXKDMITTF

SEQ ID NO: 102930 - protein, 66 aa, Gossypium hirsutum
  Clone ID: LIB3189-010-P1-K1-D3.pep
SRSTTRPGGTKPNISTMGADQFDDFEPKEMFQKLTFFNWWMLSIFFGTLFFNTFLIYIHDNVGWLL

SEQ ID NO: 102931 - protein, 109 aa, Gossypium hirsutum
  Clone ID: LIB3189-010-P1-K1-E2.pep
HTLLKSFFNTLLLKMQIFVKTLTGKTITLEVESADTIDNAKHKIQDTESIPPHQQRVIFDGKQLGDGRTFGDYNIQKEYNLHLALRVRGGKKIFEKTLTGKTITLEVES

SEQ ID NO: 102932 - protein, 59 aa, Gossypium hirsutum
  Clone ID: LIB3189-047-P1-K1-A1.pep
ILSTDMNHCSISFSCGFNTCTKGCFLLLLHVSYPTVKIVPQYNSSFLISDSGLSSVSFF

SEQ ID NO: 102933 - protein, 76 aa, Gossypium hirsutum
  unsure (1)..(76): unsure at all Xaa locations
  Clone ID: LIB3189-047-P1-K1-C1.pep
LHNNSLIRLLVRRLRKEMGEKNHVMFARMNRFGAKGRAKKAQTTEERNXSPQHHPHIRSNNHTPLSPPISFSFCKY

SEQ ID NO: 102934 - protein, 88 aa, Gossypium hirsutum
  Clone ID: LIB3189-047-P1-K1-D7.pep
HLFFLNAFTSFPKLTNACFLPTSLRVVRKTFEDCKTLFIISYIFLFFSFTYLNNKLINLIFLYYYYIFTIYSYKINFTLFFFFHFHSI

SEQ ID NO: 102935 - protein, 65 aa, Gossypium hirsutum
  Clone ID: LIB3189-048-P1-K1-A4.pep
KRRLEDPLPISSDVDSMRMSYDFREFSPDLARPLHLLGYPTFPSFFLHKVFMIALRFRGKDKEGR

SEQ ID NO: 102936 - protein, 107 aa, Gossypium hirsutum
  Clone ID: LIB3189-048-P1-K1-B10.pep
RIMILALYSLKRVFRTRVKQRESYIADTHMNERMKTFEFCLLKHWARLEEPKYIQRPCLASIRNINIINNRRTRRYTACCFFWLNILGLLHFLKDFPFHKFGSGNLG

SEQ ID NO: 102937 - protein, 40 aa, Gossypium hirsutum
  Clone ID: LIB3189-048-P1-K1-B11.pep
NKILGSCVDFAKGLGTIILIIILKPVLFLFDGLHKIHVNM

SEQ ID NO: 102938 - protein, 64 aa, Gossypium hirsutum
  Clone ID: LIB3189-048-P1-K1-B4.pep
MRECISVHIGEAGIQVLNACWELYCLEHGIHPYVLIPSDNTVTLSDYTFYTFFYSNFYFKSTIP

SEQ ID NO: 102939 - protein, 49 aa, Gossypium hirsutum
  unsure (1)..(49): unsure at all Xaa locations
  Clone ID: LIB3189-048-P1-K1-B6.pep
SLIFYNYKLLIYKILIMKNLLFLNQSLRKSSRSENICXNHWXXXFXHPP

SEQ ID NO: 102940 - protein, 79 aa, Gossypium hirsutum
  Clone ID: LIB3189-048-P1-K1-C5.pep
FISLNEMLFLIRRIMFRSMLGIKDVSWNEDGERLLRLYEKGVDDEEMVVLLRKKVLCKGIMVREKWGREKCRAFVSGNL

SEQ ID NO: 102941 - protein, 114 aa, Gossypium hirsutum
  Clone ID: LIB3189-048-P1-K1-H3.pep
FFTALVNSWFAGSVTYDRRSLIIDGQRKLLISAAIHYPRSVPAMWPGLVQTAKEGGVDVIESYVFWNGHELSPGKYNFEGRYDLVKFVKIVQQAGMYMILRIGPFVAAEWNFGG

SEQ ID NO: 102942 - protein, 79 aa, Gossypium hirsutum
  Clone ID: LIB3189-048-P1-K1-H7.pep
IFCLLDLQSLISAGLVCRSWTLGANDNHVWELQYTIFFGRSNNSSRTKTQWSGKSVNKDYTFWKENVNTRTDIDLERDP

SEQ ID NO: 102943 - protein, 90 aa, Gossypium hirsutum
  Clone ID: LIB3189-049-P1-K1-A4.pep
NLLSLCSPSFPNLKEKKMEIVFDNYIVGTFLVSLFAFLFLFILRRYNNNNNDNNTRKKRFEKGYSREFKIQTGTGKGECSPGNGSGDEVI

SEQ ID NO: 102944 - protein, 105 aa, Gossypium hirsutum
  unsure (1)..(105): unsure at all Xaa locations
  Clone ID: LIB3189-049-P1-K1-B11.pep
EKKSEKDNGDVVSSGPTTDVMGVIXNENQELNTIMRTAKTMIRLEPMAXGYGAIVVMIXDSQGNDLDSVIYSDLGAFRYLQHANGIWAGYFLISVNFRYVPSSST

SEQ ID NO: 102945 - protein, 53 aa, Gossypium hirsutum
  unsure (1)..(53): unsure at all Xaa locations
  Clone ID: LIB3189-049-P1-K1-B4.pep
ETGFVWLKQKKSXPHKFEKIGKPGSYATEVTAPIEKNRIKKLNGVKSTDRRDP

SEQ ID NO: 102946 - protein, 62 aa, Gossypium hirsutum
  Clone ID: LIB3189-049-P1-K1-B5.pep
ICYPHAVLLIRGLVLKSNDSPFTCCSFSCTQAWQNHSVSIRGPCKLVFYSRIPCPTTRGRRI

SEQ ID NO: 102947 - protein, 38 aa, Gossypium hirsutum
  Clone ID: LIB3189-049-P1-K1-E12.pep
ATYCVPSILAKRELKEPLSPRSRTCCKNRYVVEFMTEM

SEQ ID NO: 102948 - protein, 82 aa, Gossypium hirsutum
  Clone ID: LIB3189-049-P1-K1-G4.pep
PTEYHTSFRISAMVSCSTTTTVKVVLFCTPALSPSTKPTDLKTRSTSSSASRNSPIPKSLRAHHVFTRANAIVAKKGTVPSA

SEQ ID NO: 102949 - protein, 63 aa, Gossypium hirsutum
  Clone ID: LIB3189-049-P1-K1-G5.pep
VLFTVHPRVDHLSQLHFFILLASKKASFGEAPLIRTHKAHLLMISSMETFLYLLNTTFINNPP

SEQ ID NO: 102950 - protein, 72 aa, Gossypium hirsutum
  unsure (1)..(72): unsure at all Xaa locations
  Clone ID: LIB3189-049-P1-K1-H2.pep
AFAHLLVFLLGVGTFITPTXXTXKGRVYRKPSAPTNKPHKAKPPPYEPKDPEEEPHLIAEGSPNPTFIGPSN

SEQ ID NO: 102951 - protein, 45 aa, Gossypium hirsutum
  Clone ID: LIB3189-049-P1-K1-H7.pep
EIRLSSGPHKRTIQFEYLLELSSLLLILITFSYAKTCKQFATRSL

SEQ ID NO: 102952 - protein, 95 aa, Gossypium hirsutum
  Clone ID: LIB3189-050-P1-K1-B12.pep
HNEEPRQGVARKRSLTETGEEENGRSIDLNVELTPTGQPPKDRLSTNRSSEISSTSLSETSRMLLNQQDSSGEEVEFSNATPEEPPLVAMGCTRC

SEQ ID NO: 102953 - protein, 94 aa, Gossypium hirsutum
  Clone ID: LIB3189-050-P1-K1-E10.pep
NVANAFIAEARACESSLLFVQQMGFQCLIVEGDSLTVIKKLFVSRAVNEAAHTLAVEGRKSQRFGFWVDGVPASVKRVLERDWRIWLQTNQSLS

SEQ ID NO: 102954 - protein, 145 aa, Gossypium hirsutum
  unsure (1)..(145): unsure at all Xaa locations
  Clone ID: LIB3189-050-P1-K1-E4.pep
EVKKERIRKASIYGKLPGWDLRXVIVKSGDDCRQEHLAVQLISHFYDIFQEAGLPLWLRPYEVLVTSSYTALIETIPDTASLHSIKSRYPNLSSLREFFAAKYQENSPSFKLAQRNXVESMAGYSLVCYLLQVKDRHYGNLLLDE

SEQ ID NO: 102955 - protein, 102 aa, Gossypium hirsutum
  unsure (1)..(102): unsure at all Xaa locations
  Clone ID: LIB3189-050-P1-K1-E5.pep
HKHKLHTYSQLEVIELTCIHRTKFFKNFKYNTFYYIRMFLIIFSYILFFSFKFYLYFLFFYIISSIFLIFFIFXIIIFLFFLYNFFIYFFLYFYFTIFINFF

SEQ ID NO: 102956 - protein, 71 aa, Gossypium hirsutum
  Clone ID: LIB3189-050-P1-K1-F4.pep
STSALDEVNEAHLYEKMKAAGITYISIGHRRTLYAYHNRVLDISSADADSRQRNWNIKSIEDDTLHNFLKL

SEQ ID NO: 102957 - protein, 69 aa, Gossypium hirsutum
  Clone ID: LIB3189-050-P1-K1-F6.pep
MATGWRRAFCTATPREPETTVPSPKNCAKLSFFSSGSNPSTPRLQPSSTNENTPKASNPSSPRSPLKLS

SEQ ID NO: 102958 - protein, 52 aa, Gossypium hirsutum
  Clone ID: LIB3189-050-P1-K1-G3.pep
AKMTLVYCIKCTDMMLNVQNITSQVSSYAATPWSMIASIKKKKKGGCSRSRT

SEQ ID NO: 102959 - protein, 104 aa, Gossypium hirsutum
  Clone ID: LIB3189-051-P1-K1-A6.pep
MSLSCSDRFTDLLCAEDSDEVLSGESPACSSELDSQASCIEESSIDGFIEDETNFVPGFDYLARFQCQSLDASAREASVAWILKVQAYYNLQPLTAYLSVNYLD

SEQ ID NO: 102960 - protein, 48 aa, Gossypium hirsutum
  unsure (1)..(48): unsure at all Xaa locations
  Clone ID: LIB3189-051-P1-K1-C7.pep
MPTIKQLIRNARQPIRNVTKSPALGGCPXRRGTCTRVYSITPKIPYSG

SEQ ID NO: 102961 - protein, 64 aa, Gossypium hirsutum
  Clone ID: LIB3189-051-P1-K1-D7.pep
DCLNYHKSIWNLLFRFGWGTFWATYVGCALCGLLFTSLATSGILMRYLVDEPLSIKVMLNFDYC

SEQ ID NO: 102962 - protein, 154 aa, Gossypium hirsutum
  unsure (1)..(154): unsure at all Xaa locations
  Clone ID: LIB3189-051-P1-K1-E3.pep
VRDDELSWFRKASLLGACNGFILNSIPVVVTVISFGLFTLLGGDLTPARAFTSLSLFSVLRFPLFMLPNVITQVVNANVSLKRLEELFLTEERVLLPNPPLDPELPAIQIRDGFFSWDFKAERPTLSNINLDIPXGSLVAVVRITGECNTSLIF

SEQ ID NO: 102963 - protein, 46 aa, Gossypium hirsutum
  Clone ID: LIB3189-051-P1-K1-E7.pep
ASPIDVVMMTNKSGSRTRLKRENPPKFQDLANSLRSIFSLDLSLSR

SEQ ID NO: 102964 - protein, 61 aa, Gossypium hirsutum
  Clone ID: LIB3189-051-P1-K1-F2.pep
SVAFAPSQMSTESNIIQLIEKRTAQDIRKRAGTGRNLKDRLFLSWFTNEANFSPEALVVAC

SEQ ID NO: 102965 - protein, 77 aa, Gossypium hirsutum
  Clone ID: LIB3189-051-P1-K1-F9.pep
LFTNSPFIYAVFSYHEHFSFSGSTNSAFEPSTIIPYYNPLHLKYMSTLLIYLSNDISKYFNSSISHHLYQTHHLILS

SEQ ID NO: 102966 - protein, 142 aa, Gossypium hirsutum
  Clone ID: LIB3189-051-P1-K1-G3.pep
DAWAELELRNSKKEMEIKSLFDRITILRMGLYQMLKALEIDVHGYDDKIKQDQLVLDCIFGGIQKMKNSHLKSLDDNQQFIIENSVLIGLLGQLKLEAENLATEKNSLHQELKVQFEKFSELETSLFNTNAELEISRTKLKS

SEQ ID NO: 102967 - protein, 150 aa, Gossypium hirsutum
  unsure (1)..(150): unsure at all Xaa locations
  Clone ID: LIB3189-051-P1-K1-G7.pep
MIAYLRRCPSLTIVCGNNVGSLQRFLHNGPDTLEELLNRHLVKKEKSLDDEEEESLNRQRLTSTRREALGLYRDILRATRFFMWPDSRGILWRDILRENARKEFEEARFEKDPEVVTRLLIGGRDAVESALEKLAEKQRHQIQKERXDGR

SEQ ID NO: 102968 - protein, 35 aa, Gossypium hirsutum
  Clone ID: LIB3189-051-P1-K1-G9.pep
LNVWDDLPIGCKYPTLFAPSLTSYSLPSIFKKIDS

SEQ ID NO: 102969 - protein, 69 aa, Gossypium hirsutum
  unsure (1)..(69): unsure at all Xaa locations
  Clone ID: LIB3189-051-P1-K1-H1.pep
MIVFLTVLFLLNFRVVLLGAVPCPKDVRRLKQSDVGGEISLNEAYETLDCTLXDSARGMDHLVIPTRDH

SEQ ID NO: 102970 - protein, 64 aa, Gossypium hirsutum
  Clone ID: LIB3189-051-P1-K1-H7.pep
ASKSNNSILFKNKNASLFRTLLLFSLCIGIFNVQFSYVVFFFCHENAEILESLSNSNSNYDSQD

SEQ ID NO: 102971 - protein, 79 aa, Gossypium hirsutum
  unsure (1)..(79): unsure at all Xaa locations
  Clone ID: LIB3189-052-P1-K1-A12.pep
GQVVETDSGRPILSVRRIXPAKLDFASVEATSXFDKPKRNLRKVSSRPAEMAVQENPQNELEKVKRNLRKVYNPVIENS

SEQ ID NO: 102972 - protein, 79 aa, Gossypium hirsutum
  unsure (1)..(79): unsure at all Xaa locations
  Clone ID: LIB3189-052-P1-K1-B4.pep
EETNEIILNHPPRSIHLSTIIHILYYSFYMKRTYCICHKRWGMGXTKTQTKQYYKKELTQKSPQLVHIILTNLMNINLH

SEQ ID NO: 102973 - protein, 157 aa, Gossypium hirsutum
  Clone ID: LIB3189-052-P1-K1-C4.pep
GRFSTPPPSPQPFFSHFLRPRTGAPLETQGGTWVQKLKPGFTPSDVESALRAQRDADLALDIFRWTALQRGYKHTDTTYLTMIKLLISAKRYGHAETLVEEVIAGACPISVPLYNAVIRFCCGRKFLFNRAFDVYKKMLKSDDCKPTLETFAMLFNS

SEQ ID NO: 102974 - protein, 50 aa, Gossypium hirsutum
  Clone ID: LIB3189-052-P1-K1-E11.pep
KPYNINISLPISFIYSFLFSCRNTSYLWGANSNLPLFPLIYSINNTSTKY

SEQ ID NO: 102975 - protein, 143 aa, Gossypium hirsutum
  unsure (1)..(143): unsure at all Xaa locations
  Clone ID: LIB3189-052-P1-K1-G11.pep
MSVSIPQTAFFSQTNVNGRRRANGVVRKPLMLRSLTVRAGPKRISFGGDCREALXAGIDKLADAVSVTLGPRGRNVVLFESEKLKVVNDGVTIARAIELSDSIENAGAMLIQEVASXMNDLAGDGTTTAIILVRAMIKFGLLV

SEQ ID NO: 102976 - protein, 153 aa, Gossypium hirsutum
  unsure (1)..(153): unsure at all Xaa locations
  Clone ID: LIB3189-052-P1-K1-H10.pep
QTVPFGALFLNEPVTGKEXXCRIYEDDRCAVXLINSNPRSIIITFSLNVTSKVYDVTKASDMCSTLNGSCRLQLQFPHTQYVIVSTPDNGDIAGRYVELSFVARVVTYIAILSFFIIIILLVLKYLGACNDERTVINSNTTFREISWRTETDP

SEQ ID NO: 102977 - protein, 35 aa, Gossypium hirsutum
  unsure (1)..(35): unsure at all Xaa locations
  Clone ID: LIB3189-052-P1-K1-H5.pep
MXKEKVHINIVVIGHVHSGKSTTTGHLIYKLGGID

SEQ ID NO: 102978 - protein, 145 aa, Gossypium hirsutum
  unsure (1)..(145): unsure at all Xaa locations
  Clone ID: LIB3189-052-P1-K1-H9.pep
DVQELTEALGALKTRLHGCSSFLKAAXVEWSAXFGADKNGDPQLHTMLAEYIYSESLEMDMAKVSYHFVRGNNLKKFANTLVNFMSKCYPGEDDIAIARAILMYLAMGNLQDACSLMEELKKHVQAQELEFPVFDLIQLNNLLFA

SEQ ID NO: 102979 - protein, 84 aa, Gossypium hirsutum
  unsure (1)..(84): unsure at all Xaa locations
  Clone ID: LIB3189-053-P1-K1-A10.pep
GXALAAXXGRRAXXLXARXPLLGXGWCXPSVXAGSXXAXXXXGRSVSFFPLFCFGPLXLXXRRRLXXXXXLXWPXWGXGXGKGX

SEQ ID NO: 102980 - protein, 123 aa, Gossypium hirsutum
  Clone ID: LIB3189-053-P1-K1-B11.pep
PPRRNCRDRPTRSKIWHHPSYSPERNQMFSTLRSLCLEDLPKLKDTCFENSFEFPCLRDLTLKNCPLLKTFISKSVCEDKPQIHQPTQTNNSGVLNEKGGFPRLEKLLIQGCDSVEEIIELQA

SEQ ID NO: 102981 - protein, 121 aa, Gossypium hirsutum
  Clone ID: LIB3189-053-P1-K1-B4.pep
VQSVKAEKAAKSVGITKESYSVMHLDLASLESVRQFADTFRRSGRPLDALVCNAAVYLPTAKEPTYTAEGFELTVGTNHLGHFLLARLLLDDLKQSDYPYKRLIIVGSITGNTNTLAGNVP

SEQ ID NO: 102982 - protein, 55 aa, Gossypium hirsutum
  unsure (1)..(55): unsure at all Xaa locations
  Clone ID: LIB3189-053-P1-K1-B7.pep
LLXGXXXXXXXXXCXXVXWXXXPSLPLXXFXXASPFPFXXXXXVLXLXSXXLXXP

SEQ ID NO: 102983 - protein, 58 aa, Gossypium hirsutum
  unsure (1)..(58): unsure at all Xaa locations
  Clone ID: LIB3189-053-P1-K1-C3.pep
DAWADAWVRRSQTSGLLFGLSQLALYASEALILWYGAHLVSEGVSTFSKVIKVFXVLV

SEQ ID NO: 102984 - protein, 66 aa, Gossypium hirsutum
  Clone ID: LIB3189-053-P1-K1-C8.pep
YFIPLHKLFHALSLSFILAAIPANFPAISLLHLSFHTLTIISVKSSSFTDIEPSKLSTLHSALIAP

SEQ ID NO: 102985 - protein, 92 aa, Gossypium hirsutum
  unsure (1)..(92): unsure at all Xaa locations
  Clone ID: LIB3189-053-P1-K1-D3.pep
MGCAGSTPAKGDGNVKKIRKPKPWKHPQPITKSQLEQMREEFWDTAPHYGGSKEIWDALKAATKQDLTFAQAIVDSAGVIVQSADXTICYDE

SEQ ID NO: 102986 - protein, 119 aa, Gossypium hirsutum
  Clone ID: LIB3189-053-P1-K1-E3.pep
MAEQQQDQLQHRSAGKVLWFNDQKGFGFIRTGDGGEDLFVHHSSIKSIGYRSLAEGESVEFTISQGNGGKTQAVDVIAVGGSAINKKDRRSGGGWRGGNDRRNGTGGCYNWGDLNHLAR

SEQ ID NO: 102987 - protein, 63 aa, Gossypium hirsutum
  Clone ID: LIB3189-053-P1-K1-E4.pep
YKTALDSKTASIAKLIPLNLCESNLQSSYKCLFLILCKNISVHPYFSNQSCDQSSMTALSPNA

SEQ ID NO: 102988 - protein, 85 aa, Gossypium hirsutum
  unsure (1)..(85): unsure at all Xaa locations
  Clone ID: LIB3189-053-P1-K1-E7.pep
FCRLXSXLLXLFFLFALLXFXFLXLGFXAXXXCWXXXFXALPLXGXXGXFPLPCPPLPFGXXPPLAXXLXXXXXSLWLSKSGRVG

SEQ ID NO: 102989 - protein, 50 aa, Gossypium hirsutum
  Clone ID: LIB3189-053-P1-K1-F8.pep
INSFIYSDSNLFQCFLVFIFGWVENDFYGLIFLRVSVFFGCHFPIQNRLL

SEQ ID NO: 102990 - protein, 55 aa, Gossypium hirsutum
  Clone ID: LIB3189-053-P1-K1-F9.pep
LTSLIFPIKTKIHSIYTINFPLKPKTIPPYLTVFSINNTVFIRFTPPLLFSPPTK

SEQ ID NO: 102991 - protein, 61 aa, Gossypium hirsutum
  unsure (1)..(61): unsure at all Xaa locations
  Clone ID: LIB3189-053-P1-K1-G7.pep
FFFFLFSLLRSAGASSPSSKDLFASTEMXVRPSRRLEFPPPRYVVIQLPSTLRVFYTGTCR

SEQ ID NO: 102992 - protein, 92 aa, Gossypium hirsutum
  Clone ID: LIB3189-053-P1-K1-H1.pep
PNHLSLSQISCYRRRNRCCCRGGLHRRILGLSRCDHFPPSYFSSFFASLNSPSLLVCFRWLFLLFPRSATFTKLPDSLASVTPHCSAYNTRF

SEQ ID NO: 102993 - protein, 109 aa, Gossypium hirsutum
  Clone ID: LIB3189-013-P1-K1-F11.pep
TFPLIPSLPQIFLDNTNMLFMDFKRFGEKMGFVAFRLFHLLHNRCSRHPFFPNLLLGSFRFIGIQLRLPRPFSRLSGWRALLVQRSRSPFWSLPHLLLKRKKRLVGLHW

SEQ ID NO: 102994 - protein, 58 aa, Gossypium hirsutum
  unsure (1)..(58): unsure at all Xaa locations
  Clone ID: LIB3189-013-P1-K1-F5.pep
LLQNYTLLTNLTTLTNHSLTPILPKPTNSNISFXXYYSNTKFQYFITSFKKNLYKIYI

SEQ ID NO: 102995 - protein, 70 aa, Gossypium hirsutum
  Clone ID: LIB3189-014-P1-K1-A7.pep
FKGNGSKRDQCWGQRILFILLGNLILALLKSLLEASFANDITSSSSTFKIFLSLIIHRPLHITETMFSVR

SEQ ID NO: 102996 - protein, 73 aa, Gossypium hirsutum
  Clone ID: LIB3189-014-P1-K1-A9.pep
LHLPNTNPFKEIFSNKKENPISSSPYLLLFSPLFISFTFFFLSPNLSYFLLNLPTISTFPFFIFYIQPFPPFY

SEQ ID NO: 102997 - protein, 102 aa, Gossypium hirsutum
  Clone ID: LIB3189-014-P1-K1-B3.pep
QVLKNINLEIKKGELTAIVGTGGSGKSSRLASVLGEMHKISGKVKLCGTTAYIAQSSWIQNGTIEDNILFGLPMNREKYREVIRACCLEKDLEMMEFGDHTE

SEQ ID NO: 102998 - protein, 54 aa, Gossypium hirsutum
  unsure (1)..(54): unsure at all Xaa locations
  Clone ID: LIB3189-014-P1-K1-B8.pep
FLRGHITSLTDSLYINERTIVDLPNQNCKRYCMFLIPXCFFFFFTLXILRELWI

SEQ ID NO: 102999 - protein, 75 aa, Gossypium hirsutum
  Clone ID: LIB3189-014-P1-K1-C2.pep
NAIVITLLLMAVSHSLQLKVLLLRDAVNSPSSRDQTQRTGFASQPHTGSNDHQHPRNSFRQRNGGPHPRGEGSHH

SEQ ID NO: 103000 - protein, 117 aa, Gossypium hirsutum
  Clone ID: LIB3189-014-P1-K1-D1.pep
MAEQQQEQQQSRSTGKVLWFDDQKGFGFIHPDDGGEDLFVHQSSIKSEGYRSLAEGESVEFTVSQGNGGKTQAVDVTAIGGSQISKKDRRTGGGGWRAGNDRRNGSGGCYNWRGSES

SEQ ID NO: 103001 - protein, 50 aa, Gossypium hirsutum
  Clone ID: LIB3189-014-P1-K1-D7.pep
PPPFIYFKIGGLLCCCPIKTDGVVNRTGRENSPSMKNIIRNKRKRRGCYG

SEQ ID NO: 103002 - protein, 59 aa, Gossypium hirsutum
  Clone ID: LIB3189-015-P1-K1-A2.pep
GRPLLSPILDVGWCIGICQMDKWGLAMHSKLHSILLLSVDRDTILMVVVFSESGRTRGR

SEQ ID NO: 103003 - protein, 102 aa, Gossypium hirsutum
  Clone ID: LIB3189-015-P1-K1-A6.pep
TLPTTRSSTRTFFSFFSQLHFRQLGRHKGQQRTRPILSCLSLQLFRLLFLISPKPIRTQIFLHQGLTCLSQFLTSNTTLGLHTQPFFKMDAACHNLLIIALS

SEQ ID NO: 103004 - protein, 55 aa, Gossypium hirsutum
  unsure (1)..(55): unsure at all Xaa locations
  Clone ID: LIB3189-015-P1-K1-B3.pep
MDVERRHFIFKPVIKKAGVEFDGAAGNKFASLRXERSIKNCFIFPCPIQYFCPIF

SEQ ID NO: 103005 - protein, 39 aa, Gossypium hirsutum
  unsure (1)..(39): unsure at all Xaa locations
  Clone ID: LIB3189-015-P1-K1-C2.pep
EVYYKMLALVPKLKYPLLLTCVLLYSQRIGRLKHXSPLS

SEQ ID NO: 103006 - protein, 49 aa, Gossypium hirsutum
  Clone ID: LIB3189-015-P1-K1-D8.pep
QHQRLEDFEERHFPHNTSFNIACGLRVRVFNRESFRRVSYRCFPAKQAS

SEQ ID NO: 103007 - protein, 56 aa, Gossypium hirsutum
  unsure (1)..(56): unsure at all Xaa locations
  Clone ID: LIB3189-015-P1-K1-E7.pep
NRFGERTLETKSPILPNPLIAPLTFKIMQNXXAVSRQSTTEENIEDGEVSGRVAWT

SEQ ID NO: 103008 - protein, 125 aa, Gossypium hirsutum
  unsure (1)..(125): unsure at all Xaa locations
  Clone ID: LIB3189-015-P1-K1-E8.pep
MEEPKAAQNSPPSQDPNAPAATVNAGGTTAPPPQPPPTAPEQPASRKRPLENSNDQYQNSPYFKMRLVLKDLRPHFIEVLRTPDFRNCKGAHEIKEKMKHXVDLYKQMIVSIEKSINGAGNQTMQ

SEQ ID NO: 103009 - protein, 75 aa, Gossypium hirsutum
  Clone ID: LIB3189-015-P1-K1-F3.pep
PTHPIASDLPFFSLTSLFLIPAVSFLPARVLSKNTLLINNTYIVQMHNSAMPALFLNSFLFYSSKLNFFNSYTHS

SEQ ID NO: 103010 - protein, 60 aa, Gossypium hirsutum
  unsure (1)..(60): unsure at all Xaa locations
  Clone ID: LIB3189-015-P1-K1-H9.pep
TINQMELGELFSIFGPGVSFAVFYSRLGVXXXXLHIHSLQFIFIITFYNLLIYFYLIFFF

SEQ ID NO: 103011 - protein, 59 aa, Gossypium hirsutum
  Clone ID: LIB3189-026-P1-K1-A10.pep
QIVSHIACASKVTVANGQSLLISSTGQSTFLINNKPLHMKNLMYVLGITKNLMSVSQFS

SEQ ID NO: 103012 - protein, 63 aa, Gossypium hirsutum
  Clone ID: LIB3189-026-P1-K1-A8.pep
WVGVCQCAKIFSQRHKALNLVWASSMILWFLQRETKARMCSNLRVSLSFWGFTFCRPKPTSQR

SEQ ID NO: 103013 - protein, 42 aa, Gossypium hirsutum
  Clone ID: LIB3189-026-P1-K1-B11.pep
PYPVTHLPHLRYCWSSPHTGVMVGCGGEPIINQPFLKTSLPL

SEQ ID NO: 103014 - protein, 43 aa, Gossypium hirsutum
  Clone ID: LIB3189-026-P1-K1-B2.pep
SRQQAYKYSFGYLWTSHYTTHYSVILTVARAGKPVQQTSQEGL

SEQ ID NO: 103015 - protein, 102 aa, Gossypium hirsutum
  Clone ID: LIB3189-026-P1-K1-B5.pep
YVPQLAQLIYDINQGSSPDSYRDVKGFMIGNAAINEPTDTLGLFDYAWSHAIILDQLYDKINKECDFKQTNNLTVQCADHMKGFMDAYANIDMYSIYTPVCI

SEQ ID NO: 103016 - protein, 102 aa, Gossypium hirsutum
  unsure (1)..(102): unsure at all Xaa locations
  Clone ID: LIB3189-026-P1-K1-C1.pep
VAQTPENAFVGHLRCSWRLFVSFYDYFCFYDLHLYVFISTYVLFVFVFVNCCLFSFFYFNFFYFYXIFFIFSNFYYKLLAIYCYFYFLIFFFLILFLLIIYI

SEQ ID NO: 103017 - protein, 38 aa, Gossypium hirsutum
  unsure (1)..(38): unsure at all Xaa locations
  Clone ID: LIB3189-026-P1-K1-C2.pep
RLRICKKINNGVYWSLAIVPMRRGGVFVLSDFXSLGLH

SEQ ID NO: 103018 - protein, 54 aa, Gossypium hirsutum
  Clone ID: LIB3189-026-P1-K1-C9.pep
SRSLAQILSYHRSIISYLQERYPDEHGPFVITATCLETFIKSCAGYSVITYIHV

SEQ ID NO: 103019 - protein, 56 aa, Gossypium hirsutum
  unsure (1)..(56): unsure at all Xaa locations
  Clone ID: LIB3189-026-P1-K1-E11.pep
NHHSSNYHMLLNVYLILYTQXFPFKFLITFLYFFIFLLLFSHSILIQFLLFLSFSF

SEQ ID NO: 103020 - protein, 39 aa, Gossypium hirsutum
  Clone ID: LIB3189-026-P1-K1-F11.pep
YGRMGPKRELKFALESFWDKKSSAYDLQKVAADLMLFIW

SEQ ID NO: 103021 - protein, 48 aa, Gossypium hirsutum
  Clone ID: LIB3189-026-P1-K1-F6.pep
IKMELGIKKGNVPAFDSGISKITLSSGISTSPESSPYHNLSSHFTKSD

SEQ ID NO: 103022 - protein, 45 aa, Gossypium hirsutum
  Clone ID: LIB3189-026-P1-K1-G1.pep
MVEEGQVIACHTVESWQQQFQMGNESTKLGGGDLTASWGGPCRFI

SEQ ID NO: 103023 - protein, 122 aa, Gossypium hirsutum
  unsure (1)..(122): unsure at all Xaa locations
  Clone ID: LIB3189-026-P1-K1-H2.pep
KCQVYLPHFASHISKPPGFPFSGSQSXVALFPGLHTPKNKFVTXYVXYASSKSIIPQGXQSCPTAAQAASQXTCPTGKPPTAQSLPPTAQDHFSXHLPLIPLKXAISLNTKYRGXAWGSTPG

SEQ ID NO: 103024 - protein, 74 aa, Gossypium hirsutum
  Clone ID: LIB3189-026-P1-K1-H8.pep
MASQQHLEKMQLRQNYRNLWHTDLITTIHRHPLYCCFALWCGPCASYMLRKRALYGDMSRYTCCAGYLPCSGTE

SEQ ID NO: 103025 - protein, 108 aa, Gossypium hirsutum
  Clone ID: LIB3189-030-P1-K1-B1.pep
GRVGDNRTSRSASGLVVCGMEGDIMASKSVIHSNISSSFVAEAHTGLKAIQLGIEMRLHSLDIKRDSRTVIKKCQFINQDKSITRAIIRYINSIKVVFQNIVFYFTLK

SEQ ID NO: 103026 - protein, 98 aa, Gossypium hirsutum
  Clone ID: LIB3189-031-P1-K1-B10.pep
SIDSNSSTSGGAPLSFSVVTTRSSRPFFISLGKLRATGVVEMKQRKMKTIRRTCLQGTLAIVLKLIHFTMFLQISFCFSYIKAKLAVVAIYIRRQVVQ

SEQ ID NO: 103027 - protein, 43 aa, Gossypium hirsutum
  Clone ID: LIB3189-031-P1-K1-B12.pep
NAVKRHANGRLLFIYLDNCDWLDGENTIVVKDTADSILNLVMI

SEQ ID NO: 103028 - protein, 72 aa, Gossypium hirsutum
  Clone ID: LIB3189-031-P1-K1-B7.pep
ESAKPREKQRWVINTERRRSKLKEEMDLGLFILEFGDVPSSLELDFCSQLWNLLILIQRDLTKIHLMKAWEK

SEQ ID NO: 103029 - protein, 50 aa, Gossypium hirsutum
  Clone ID: LIB3189-031-P1-K1-D5.pep
YLSLYFSLPQGFNFLIKNPSWMRRCFACHLQASLSWLPSLNLGGLNLDHP

SEQ ID NO: 103030 - protein, 88 aa, Gossypium hirsutum
  Clone ID: LIB3189-031-P1-K1-D8.pep
AENNESGVIKILLTLIARKYHSMTQLAIYISSNKDTRTNVACRRRRITDAFSALRQDLTLTRDLCHKSRWRDNSMAVAAVGTMYHCCI

SEQ ID NO: 103031 - protein, 69 aa, Gossypium hirsutum
  Clone ID: LIB3189-031-P1-K1-E4.pep
YIKRIPEINHNRKLSWVSCQYRVHFTNSETQSRSRSSSVGSSPSRDFSLLSFAYILALKSLPDSTLSIA

SEQ ID NO: 103032 - protein, 70 aa, Gossypium hirsutum
  Clone ID: LIB3189-031-P1-K1-E6.pep
VVTKTAEGSRKGTNLFNRLKLASQEEQEILHTSLLTFYSCHQDMLQRIQQMPCLNRLLPCFFFQINGRVG

SEQ ID NO: 103033 - protein, 78 aa, Gossypium hirsutum
  unsure (1)..(78): unsure at all Xaa locations
  Clone ID: LIB3189-031-P1-K1-E8.pep
CGFWFXPFFFTIGSLQCPFTFFVELYNFYLSSVPHACTSPLLFSLFSIRFLVYWILLFFFIFPFFFCLFYFFPFILFF

SEQ ID NO: 103034 - protein, 58 aa, Gossypium hirsutum
  Clone ID: LIB3189-031-P1-K1-F3.pep
DPASEKTTLHRPALYLRHSLSFFHNMAAILSLYTNPSHFKILFNTILLPINLHLSYSF

SEQ ID NO: 103035 - protein, 94 aa, Gossypium hirsutum
  Clone ID: LIB3189-031-P1-K1-F4.pep
LEYLGRVVFNTNGMLYPDSVVGTDSHTTMIDGLGVAGWGVGGIEAEAAMLGQPMSMVLPGVVGFKLSGKLRNGVTATDLVLTVTQILRKHGVVG

SEQ ID NO: 103036 - protein, 58 aa, Gossypium hirsutum
  Clone ID: LIB3189-031-P1-K1-F5.pep
SSRTIGFPSPNTFLSHSLHLPHLGLPNQLILGVSSSVPTHHSGSTQQQWIIIRHIGRV

SEQ ID NO: 103037 - protein, 58 aa, Gossypium hirsutum
  unsure (1)..(58): unsure at all Xaa locations
  Clone ID: LIB3189-031-P1-K1-G12.pep
VVDATRPXKLDISILCNKWIKTEINSIDFASEIVEFIKPSNYFLVQLRAWDRGRWREI

SEQ ID NO: 103038 - protein, 77 aa, Gossypium hirsutum
  unsure (1)..(77): unsure at all Xaa locations
  Clone ID: LIB3189-031-P1-K1-G6.pep
PLGFDVHKKNYKMRLQNLKAGGEGNLNVATXIFQVAPSLHMVEVRKAKVDTLEFNTFYKSLLTCLEDVVLKTDEDIK

SEQ ID NO: 103039 - protein, 57 aa, Gossypium hirsutum
  Clone ID: LIB3189-031-P1-K1-H6.pep
RKERKKLGKHQQQQQHLTKLLFFFFKENPFSLLIARFLLLGFGNIINLTRTAQPRSL

SEQ ID NO: 103040 - protein, 115 aa, Gossypium hirsutum
  unsure (1)..(115): unsure at all Xaa locations
  Clone ID: LIB3189-031-P1-K1-H8.pep
MRVDWGDLPEEPQQPEQDSNLNFDFFSLISKPKDYYKILEVDYDATEDAIRSNYIRLALKWHSDKQKDDGDSATLRFQEINGAYQVLIDPVKRSEYDXKGMLHVYDYDIIGYLNR

SEQ ID NO: 103041 - protein, 101 aa, Gossypium hirsutum
  Clone ID: LIB3189-032-P1-K1-C4.pep
KNPKHTRYQYFVPVGLFQSTYTNTQSKSKGRIRARAIQEDMETDGGGGGAMVVVCGFRFGVMTAGIDDGVLMVNEEDCEGKMANFSDYPDAWASGRSRSRT

SEQ ID NO: 103042 - protein, 49 aa, Gossypium hirsutum
  Clone ID: LIB3189-032-P1-K1-D4.pep
QFIVQESQLYPRRNQALKHRKPNVHTLNYMMPACLCSIPYLYLNKGLPG

SEQ ID NO: 103043 - protein, 65 aa, Gossypium hirsutum
  Clone ID: LIB3189-032-P1-K1-D7.pep
DAWDSLPSSLNSHSIPRECFFSLFIFFPQLHLLLSFPYLCLPFFLLISLYLISLFSFITDVEIPL

SEQ ID NO: 103044 - protein, 30 aa, Gossypium hirsutum
  Clone ID: LIB3189-032-P1-K1-F1.pep
MNLLTWGTVIVKIDVKPLCQIVLRTLLNCF

SEQ ID NO: 103045 - protein, 108 aa, Gossypium hirsutum
  Clone ID: LIB3189-032-P1-K1-F2.pep
AGLFNNKKGEKKGNFCQAGKMGKGRGFPNLKVGKNGQLINFEDAKKRPIFASTRQETRSLKNGHPSLEPMKPKDRQPTFFIIFYLFSFFFFFFFFFFFFFFFFFSDAW

SEQ ID NO: 103046 - protein, 151 aa, Gossypium hirsutum
  unsure (1)..(151): unsure at all Xaa locations
  Clone ID: LIB3189-032-P1-K1-F3.pep
IKAHENRKQLFSKSTIRENPFQHQTRSVAEPPPWSSSSKVPTSSPLLGPPPNGVQAGSQLRRRPAVDGTPSNHMEMPMLQQVVPRQEEYSQGRSVALQNVESTISELSGIFTHLASMVCTFXGELAFRIDEDMDQSLANVEGARSASIGHF

SEQ ID NO: 103047 - protein, 148 aa, Gossypium hirsutum
  Clone ID: LIB3189-032-P1-K1-H3.pep
HASAFFLTNICSFSSFSVKVSFSSMLSLLNFFKWFQCIFRGFLYLITVKRDQRHGGKVSEETTHVINTSKQGSVFQLNPQGTFSNQISHNLPVVGFKDPKDEETELEFDVGDQDNITPCTELKSIVAGEDDSQLQVSSETVINDDHSI

SEQ ID NO: 103048 - protein, 93 aa, Gossypium hirsutum
  Clone ID: LIB3189-032-P1-K1-H9.pep
TILSFIFPIRSRLTGLQSLVFDPQRESVTLQIIERNFSFCFYFSYVGGRIGIQERSWRRSVLQSTQGEKREPESAKRSTVEGSSRCFTESIKG

SEQ ID NO: 103049 - protein, 52 aa, Gossypium hirsutum
  Clone ID: LIB3189-033-P1-K1-A10.pep
RHGNAKISSPSSLSTHLAHLHHSFHRRTQWHRAPQGGLQPNVRLRILLCYFN

SEQ ID NO: 103050 - protein, 121 aa, Gossypium hirsutum
  Clone ID: LIB3189-033-P1-K1-B1.pep
TRMKMNSKRNALSNAIQFHFTNWNEYLHNQESKSRHILFIIHPTSLISTRDMNPANLEINSHYQLSAETNLQQQICFSLNIATINKFFYDMFSLVTIILKIGSNVFSQHFLIFAFVSLSLS

SEQ ID NO: 103051 - protein, 103 aa, Gossypium hirsutum
  unsure (1)..(103): unsure at all Xaa locations
  Clone ID: LIB3189-033-P1-K1-B10.pep
MAASSLIISPRKLRSDLYCYSYQRDANTPLVISVLASLIERTMARNERIVKNCKWALTRKDFRSRVFDCHETPDMTIQSYLERIFRYTKAGPSIYVXAYVYID

SEQ ID NO: 103052 - protein, 63 aa, Gossypium hirsutum
  Clone ID: LIB3189-033-P1-K1-C8.pep
YKLKVIVSRSPPYPEIPKSRLLPSISSPFIAPGFFSVYLMPSPPRLYVSSSQEHRHISFKLVY

SEQ ID NO: 103053 - protein, 40 aa, Gossypium hirsutum
  Clone ID: LIB3189-033-P1-K1-D2.pep
TNLCVQKYPNLILPHPDLPYVCAYALLNAILNTILSLLKF

SEQ ID NO: 103054 - protein, 52 aa, Gossypium hirsutum
  Clone ID: LIB3189-033-P1-K1-D7.pep
KALDTFHSFEYRVNYSRLICGKLCIIDADLARFFIIIVKLKDRSLLYKKTIL

SEQ ID NO: 103055 - protein, 102 aa, Gossypium hirsutum
  Clone ID: LIB3189-033-P1-K1-E1.pep
VFFHPLFRKHLISKFSQESEGGLQTQLCSGAPINIYRDLASRRALVSRQNLICGTQDSSHAADSCIFHINTRVFSYQRLDHALGSPRDTPERLERWLKHGYI

SEQ ID NO: 103056 - protein, 66 aa, Gossypium hirsutum
  Clone ID: LIB3189-033-P1-K1-H7.pep
PTRPPTRTHNLSFDSNRNLIAGLESEGKVCVFAQTNSFFTQIILSNIHPTNIDEGKYNLMLFISPI

SEQ ID NO: 103057 - protein, 30 aa, Gossypium hirsutum
  Clone ID: LIB3189-034-P1-K1-E1.pep
YLVHLGLSLYQLLRLKVNKFRGLRVRSYRN

SEQ ID NO: 103058 - protein, 60 aa, Gossypium hirsutum
  Clone ID: LIB3189-034-P1-K1-E7.pep
FSESLYGLRRRAAKIRTKQADIRSKSNDGIQHSSLEKRQRVLSVVFFGWLPYLNSISYSI

SEQ ID NO: 103059 - protein, 68 aa, Gossypium hirsutum
  Clone ID: LIB3189-034-P1-K1-F7.pep
IHSIYWRFTNSLGGLRRCESPLAGNKTDSPWNSSLEGTPNRKTLFSIPESMPKLSLHKPLFSLSLRTA

SEQ ID NO: 103060 - protein, 56 aa, Gossypium hirsutum
  Clone ID: LIB3189-037-P1-K1-B9.pep
KSPLYSAAKKQQEIREVSSALREGEDGRENQFSNSIIKEKIRRHPINTEACNHVKE

SEQ ID NO: 103061 - protein, 57 aa, Gossypium hirsutum
  Clone ID: LIB3189-037-P1-K1-C3.pep
FVPVRYLFEHRINFKSIRRESLRTNHGTHDPGKHPAHIKQSVFISLEINDAWATDSD

SEQ ID NO: 103062 - protein, 38 aa, Gossypium hirsutum
  Clone ID: LIB3189-037-P1-K1-C8.pep
DLACVLSDRHPRGRPLVIRIDLDIVRPLCDLRVTSWLG

SEQ ID NO: 103063 - protein, 45 aa, Gossypium hirsutum
  Clone ID: LIB3189-037-P1-K1-D1.pep
LCERQPHFSRVRETRAMIKRNRTTQRSQDQLFSHSLFSLKIKGTV

SEQ ID NO: 103064 - protein, 41 aa, Gossypium hirsutum
  unsure (1)..(41): unsure at all Xaa locations
  Clone ID: LIB3189-037-P1-K1-D6.pep
MLEILHGQGEQCGNHICSKFWEVVCDXHSIDPTGRFIVSSD

SEQ ID NO: 103065 - protein, 30 aa, Gossypium hirsutum
  Clone ID: LIB3189-037-P1-K1-E4.pep
YIYILKLEHFPTKYFFLLQMIYNEDVISLT

SEQ ID NO: 103066 - protein, 60 aa, Gossypium hirsutum
  Clone ID: LIB3189-037-P1-K1-E6.pep
FIFISLHNLDYTTNHRRVLSAFIPMHQQLDHLLLNNTPTVVRTKEWIQKNSNGLVIFFMP

SEQ ID NO: 103067 - protein, 53 aa, Gossypium hirsutum
  Clone ID: LIB3189-037-P1-K1-G10.pep
ELLLQTSTDLPRKMFLRIINAGCSTNEQLKLVTQLEIAIKRTHLSCNLNTTRN

SEQ ID NO: 103068 - protein, 64 aa, Gossypium hirsutum
  Clone ID: LIB3189-037-P1-K1-G5.pep
LSGLSKSADKSSYIQTLCIRWGMEDLSTMALCIIVRSFSFSFVKRPLFSLVLKIYTMNVSAHWM

SEQ ID NO: 103069 - protein, 83 aa, Gossypium hirsutum
  Clone ID: LIB3189-039-P1-K1-A10.pep
RTRGKRYNLFFFQENFHTPFFTSFPRISLSLSFALNFFFLFVLNKGLLSFAEVEGLGDCFGSVLIGISLFIVFTCDYLLTRSS

SEQ ID NO: 103070 - protein, 86 aa, Gossypium hirsutum
  Clone ID: LIB3189-039-P1-K1-A4.pep
PISPPSHFDIVSKIPFLINNNIQMSFQYLIFFICIIHIKEPDNSFNIALSLNQNQRQGHVSRSRPILYPSPQPEIGNGIIITRFFS

SEQ ID NO: 103071 - protein, 81 aa, Gossypium hirsutum
  Clone ID: LIB3189-039-P1-K1-B10.pep
SVSLNVDAAYEFTDPNQSAAGGNAEVIVLSDSDEENEILISPPTVYKDNHNQNDGGGLGFSVAPSGISYTYSEDPPLVPSC

SEQ ID NO: 103072 - protein, 76 aa, Gossypium hirsutum
  Clone ID: LIB3189-039-P1-K1-C2.pep
GVYGEVKEIRETPYKRHHKFIECYDVRAAEQALKSLNRSDIAGERIKLEPSHTGGARGNLMSQLNQDLEHDDSWGS

SEQ ID NO: 103073 - protein, 67 aa, Gossypium hirsutum
  Clone ID: LIB3189-039-P1-K1-C7.pep
KPFTDTEINGTLPFYPGRVNTPRFLPSLPNSDSLTSIAISFCTIIVYLAISWLLIYRTNSHKSLKSS

SEQ ID NO: 103074 - protein, 115 aa, Gossypium hirsutum
  unsure (1)..(115): unsure at all Xaa locations
  Clone ID: LIB3189-039-P1-K1-D6.pep
DQLMCALIPDHTTASGSKSNRGRTXITKWDGIQHSGESVXHAVVYSDYMRASYIYILSIGDDTYKPSDLTKFAQYHAEYMMGDDLMDIPSLMWCGGQIPKFDHHHGAVIPEHASS

SEQ ID NO: 103075 - protein, 53 aa, Gossypium hirsutum
  Clone ID: LIB3189-039-P1-K1-D9.pep
KEQKIFYSIKERNIFLTVTICRKIKNNIDELLQSTTTFSCWSSYSRSSTLRIS

SEQ ID NO: 103076 - protein, 53 aa, Gossypium hirsutum
  Clone ID: LIB3189-039-P1-K1-E7.pep
GKTYQDAKLSHNSINLHYDVGGDSRGAAKIRVSSDLRYSVVESLQMILKFAWN

SEQ ID NO: 103077 - protein, 64 aa, Gossypium hirsutum
  Clone ID: LIB3189-039-P1-K1-F12.pep
MFETINKYRRNMDHSRSMRVRIIKITIINISTTEQAIPTSNANHPKMKKFPKLVEYCLVYADAW

SEQ ID NO: 103078 - protein, 79 aa, Gossypium hirsutum
  Clone ID: LIB3189-039-P1-K1-F2.pep
RKIEEERDKQCLVSLYLKVKWPLSGGERRILSNSSSPKYVFLLSTLFQSLNSLLYVTRLVLGCLFSFFFFSFNHELHGF

SEQ ID NO: 103079 - protein, 67 aa, Gossypium hirsutum
  Clone ID: LIB3189-039-P1-K1-F5.pep
LSRISPSCHESIIFLVLVSWKSLFENIVRDRLCMLMSISVLNHQMFLRCGIVAAFAIAWCLGSGVSP

SEQ ID NO: 103080 - protein, 91 aa, Gossypium hirsutum
  Clone ID: LIB3189-039-P1-K1-F7.pep
QNWDRTYMIPWTTSGNPLAEYENKVATSMVKSSPTSVVNQDNQLIESDSLEDQHIFNPSVAASTYGNVLSQCPAIPALSNIQCGEFYHPAL

SEQ ID NO: 103081 - protein, 69 aa, Gossypium hirsutum
  Clone ID: LIB3189-039-P1-K1-F8.pep
PVAAAMARVSSQTSESSMTAISPSFLHFLVIIKKEIKKILICLFRERAREKSPPLLDPSARLVVYGKSW

SEQ ID NO: 103082 - protein, 39 aa, Gossypium hirsutum
  Clone ID: LIB3189-039-P1-K1-G6.pep
PTRPINLMATHRNEQKTDSTSGTVLASVMRSLHTSVDCL

SEQ ID NO: 103083 - protein, 143 aa, Gossypium hirsutum
  unsure (1)..(143): unsure at all Xaa locations
  Clone ID: LIB3189-039-P1-K1-H1.pep
TICCPGINCEEQHNPCLTKFQSSLKEESNPQFGLAVPYTSPDEANGQNGVSGTHLRPNPQPPLAKQFHSNLQNGTDSSGETQIRNGRPRPDGRGKNNLFPRYWPRFTDQDLQQITGDSNSVITPLFEKMLSASDXWRIGRLVL

SEQ ID NO: 103084 - protein, 46 aa, Gossypium hirsutum
  Clone ID: LIB3189-039-P1-K1-H10.pep
CFLSCLKRDQVLMTELIKSLSLILLLSQRKRKRRKAARDRTRGGAT

SEQ ID NO: 103085 - protein, 113 aa, Gossypium hirsutum
  unsure (1)..(113): unsure at all Xaa locations
  Clone ID: LIB3189-039-P1-K1-H2.pep
FPIGFAGNVETIFHKWDQHALGGAQVRGSSLLVEXGPESLVHXSGKGKPWVXIHAKNPWRLDYFWRPIVLFKGSSLKERCSFPCSIFLGFSSFLARIPIFLCFKKIHCYKNNG

SEQ ID NO: 103086 - protein, 43 aa, Gossypium hirsutum
  Clone ID: LIB3189-039-P1-K1-H5.pep
MASSMSLKLACVAEGCMVAGSPVHEGAQTCGPVTSSLARCIGL

SEQ ID NO: 103087 - protein, 76 aa, Gossypium hirsutum
  Clone ID: LIB3189-040-P1-K1-B7.pep
FKPLKETDQFRKKDKRPMKVNEHDLPYQQPLKSHLCTLKPQLMFQSHMGYRVLWESDSDPSKLFSGCFKAMKFILN

SEQ ID NO: 103088 - protein, 42 aa, Gossypium hirsutum
  Clone ID: LIB3189-040-P1-K1-E3.pep
HAYGKVKKKTKNSTVNKLYAKVCELFFSGGTTHKISRNISYI

SEQ ID NO: 103089 - protein, 65 aa, Gossypium hirsutum
  Clone ID: LIB3189-040-P1-K1-E7.pep
QVEKANRTQLTTPQPSIIRPTKKPKTTGILNKTAMEAPEPESGPPGGSKLSEASTLNPRVRGRVG

SEQ ID NO: 103090 - protein, 147 aa, Gossypium hirsutum
  unsure (1)..(147): unsure at all Xaa locations
  Clone ID: LIB3189-040-P1-K1-F3.pep
RTRGAVPVPGKFGRGGGEDETARDRARLRPVGSLNLLSDSWELHIDRFLPFLTENTDFKVAGIIGPPGAGKSTIMNELYGFDGVSPGMLPPFAIQSEETIAMARHCTVGIEPQISAERLILLDTQSVISPSALXEIMRPDGLSQFQD

SEQ ID NO: 103091 - protein, 44 aa, Gossypium hirsutum
  Clone ID: LIB3189-040-P1-K1-G1.pep
MATPSLGEDTAKAVLRQVEFYFGDSNLPKDDFLKTKINESENDM

SEQ ID NO: 103092 - protein, 36 aa, Gossypium hirsutum
  Clone ID: LIB3189-040-P1-K1-G7.pep
PHEPVLPITFTTTANSICESIMAEPCLEDGRRSGCF

SEQ ID NO: 103093 - protein, 113 aa, Gossypium hirsutum
  Clone ID: LIB3189-040-P1-K1-G8.pep
QKHPTSGQDLKSLSTSTLFRWAPFPKSAAFSTSHSFFHLSQPTKRKGGRHTPHSSANVCGCNHPTMICLYLSQPYSASSFSLIPSLIPSSIPKFKPAFHCFPKTHKKKKKINR

SEQ ID NO: 103094 - protein, 154 aa, Gossypium hirsutum
  unsure (1)..(154): unsure at all Xaa locations
  Clone ID: LIB3189-040-P1-K1-H3.pep
LRYTYPVLLCILILMQGRWGYAVKDEIFRENETKISHHIKSAEVGLFTMDELLNFHVGQKLPIFFPIRNLSLYPPFFLPPKYQNIIPFIKPAAMFNLFKVPPSSPKGKAFLGTLYSCDSINGETTKICATSLDSMLXFVKKAFGPDVDFKFITT

SEQ ID NO: 103095 - protein, 97 aa, Gossypium hirsutum
  unsure (1)..(97): unsure at all Xaa locations
  Clone ID: LIB3189-040-P1-K1-H9.pep
MVYFLRQLQWEREQGVLVKEGPCHTATHPDALNAALTDSISTLIFAFAGSGSGMAFNKLTDNXATTPAGLVAAALPNAXRLSVAESGGANISCGHAN

SEQ ID NO: 103096 - protein, 62 aa, Gossypium hirsutum
  unsure (1)..(62): unsure at all Xaa locations
  Clone ID: LIB3189-042-P1-K1-A3.pep
RPKDSILLTVFLTLXFSPKNTIMCGEYINIGAIFISYTFSXKFTTTGHFIYKLYNHLIRFLY

SEQ ID NO: 103097 - protein, 90 aa, Gossypium hirsutum
  Clone ID: LIB3189-042-P1-K1-A5.pep
QLSTTFTSDLKHLPLISTKFTGSTTFIGYVTASFFRFLVSAFFLVSSFLLFVFSFSPYYYLFFYFLLSLSLCLLSFSLFLFFILSSFLSL

SEQ ID NO: 103098 - protein, 57 aa, Gossypium hirsutum
  Clone ID: LIB3189-042-P1-K1-A6.pep
PDLEAYPLICNKNRIKEDYLVLLLSRRSRQSQSQTLNGLGALGVGESPSTTDEREAT

SEQ ID NO: 103099 - protein, 63 aa, Gossypium hirsutum
  Clone ID: LIB3189-042-P1-K1-B8.pep
KIGHGYYSEDMYAGEDGQLSWFNAGVRVGVGIGLGMCLGVGIGVGLLMRSYQATTRNFRRRFF

SEQ ID NO: 103100 - protein, 62 aa, Gossypium hirsutum
  unsure (1)..(62): unsure at all Xaa locations
  Clone ID: LIB3189-042-P1-K1-C4.pep
KKXKKKIWDILKKGGGYKNVFFLILTYIFILYLSLFLLPLTCELSIPKLYFTLFHTMLSLFS

SEQ ID NO: 103101 - protein, 65 aa, Gossypium hirsutum
  Clone ID: LIB3189-042-P1-K1-D1.pep
FKKTELFIHLSLLLVSQLAIFDSSFVLKLSLNSLEFIYPLPCIFFPNAQFPDQNQILPLWLIQDS

SEQ ID NO: 103102 - protein, 37 aa, Gossypium hirsutum
  Clone ID: LIB3189-042-P1-K1-D10.pep
PASADRVVFMFYPIELNSYAHILIVRDFLIPHNSPFS

SEQ ID NO: 103103 - protein, 58 aa, Gossypium hirsutum
  Clone ID: LIB3189-042-P1-K1-D3.pep
RVGNIEIVLQRLWAQMGVKAVVVVMVIMDPRVSCKGSIVYVRESYHTARDRLESCVRV

SEQ ID NO: 103104 - protein, 46 aa, Gossypium hirsutum
  Clone ID: LIB3189-042-P1-K1-F1.pep
NLLSIYTTKFLNSTHGFTKPTHLFLIYSPLINFKSLPPKISHISPL

SEQ ID NO: 103105 - protein, 69 aa, Gossypium hirsutum
  Clone ID: LIB3189-042-P1-K1-F10.pep
YISPILFLYTTHLTLIFHTSHISPSPHTYSAVALLGIAWAFCGMIFILVYCTAGISAGHINPAVTFGLF

SEQ ID NO: 103106 - protein, 87 aa, Gossypium hirsutum
  Clone ID: LIB3189-042-P1-K1-F6.pep
SYKHAPYHVHRHQWSRFHRITFYSLLNSSMMKVARVGLSSTATFGMLFLQTYRIVHLTSCNKLSWIIFETMTAKLFFFSMKFVPERT

SEQ ID NO: 103107 - protein, 73 aa, Gossypium hirsutum
  Clone ID: LIB3189-042-P1-K1-H3.pep
AKILWFLHSSNQFLSFSPPLKKGPSLKPGRGGVKPKTSQASKNAGLNHGVLNYPCFHNNQPHHLLKNPFFPFN

SEQ ID NO: 103108 - protein, 82 aa, Gossypium hirsutum
  Clone ID: LIB3189-042-P1-K1-H9.pep
IQSILLQIHILTFHTSLTLSPSSSFPTPSSKSPLSLLIKQPPPFYPPSPNFFNQLSIPTFLPSKATQIVYLFPTVSSQIFFS

SEQ ID NO: 103109 - protein, 55 aa, Gossypium hirsutum
  Clone ID: LIB3189-044-P1-K1-D11.pep
RRYKQIKRTEGVSSTDIVGRILSSVNDNKGVGDTNRTLSRVDPGRWRQLHRCPLF

SEQ ID NO: 103110 - protein, 55 aa, Gossypium hirsutum
  Clone ID: LIB3189-044-P1-K1-D2.pep
LVSLFIGFYGCDVGGGSGSPSGTAFVIERLSLFAWDTTSAFAHGGLRVTGSRLMG

SEQ ID NO: 103111 - protein, 80 aa, Gossypium hirsutum
  unsure (1)..(80): unsure at all Xaa locations
  Clone ID: LIB3189-045-P1-K1-A6.pep
ISGLHKHVTQLKHVAQEIXTDARIQNEFVSDLQMLMSRAQAGVKSGMTKLNRTVAQQRSNHILQVIIFGLTCFSIVYLWP

SEQ ID NO: 103112 - protein, 57 aa, Gossypium hirsutum
  Clone ID: LIB3189-045-P1-K1-B10.pep
SHWFGRERTSIKGKWAKIGEDNWELTGCNFFFKKENASLEKDRQDLLSTIEALQEEK

SEQ ID NO: 103113 - protein, 45 aa, Gossypium hirsutum
  Clone ID: LIB3189-045-P1-K1-C6.pep
WINGENQRKQTPASWQCCHASPLGLELEKERENRSIHQMCRTRGR

SEQ ID NO: 103114 - protein, 155 aa, Gossypium hirsutum
  Clone ID: LIB3189-045-P1-K1-E12.pep
SFFFAGKQTTSNLLTWTAVLLAMHPQWQVQAREEVLRVCGLRDIPNKDNFVKLKTLSMILNESLRLYPPTVATIRRTKVDAELGGYMIPHGTELLIPILAVHHDKAIWGNDANEFNPARFSGGVARAAKHPIGFIPFGLGVRTCIGQNLAILQAK

SEQ ID NO: 103115 - protein, 43 aa, Gossypium hirsutum
  unsure (1)..(43): unsure at all Xaa locations
  Clone ID: LIB3189-045-P1-K1-E5.pep
DWRLISWLVTSLDSVAQQVIGETIKALMAVDXQNEEKMKPEES

SEQ ID NO: 103116 - protein, 59 aa, Gossypium hirsutum
  unsure (1)..(59): unsure at all Xaa locations
  Clone ID: LIB3189-045-P1-K1-F11.pep
EKVRDYNYMPNGSLCXILYGNRGPDNTPLILNTMLKISYIAVRVLSFIHYTCKAFNTTH

SEQ ID NO: 103117 - protein, 147 aa, Gossypium hirsutum
  Clone ID: LIB3189-045-P1-K1-F12.pep
MKSEVSEMGSGVGGGGGGNKYGSLNLTDLPQDCIATVFSFTSPRDACRLSLVSTTFKSASESDAVWESFLPSDHQASIPSSLSFSSKKELYLSLCENHILIDGGRKSLQLERVSGKKVYMLSARDLFIVWGDTPTYWRWISLPESRF

SEQ ID NO: 103118 - protein, 143 aa, Gossypium hirsutum
  unsure (1)..(143): unsure at all Xaa locations
  Clone ID: LIB3189-045-P1-K1-G10.pep
LFRDMPYLLIIDNLETEREWWEGKDLHDLIPRNTGGTHVIITTRLPKVMTFDMMQLPPLPLSDAMILVRGRKKKDYPTKELEFLTKFDEKLGRLSFGLWIIXSLLFELSIFSSALFEAVNQVSTSLEDASTSPTDEQFFKHNP

SEQ ID NO: 103119 - protein, 77 aa, Gossypium hirsutum
  Clone ID: LIB3189-045-P1-K1-H4.pep
CCWNTTRMLLVNALILVLPLSSHILAAVAKHVFSVVPGNIFNNPVLSFFSLLLLPLLFSSITIQTYLPSNKCDCFPF

SEQ ID NO: 103120 - protein, 139 aa, Gossypium hirsutum
  unsure (1)..(139): unsure at all Xaa locations
  Clone ID: LIB3189-045-P1-K1-H6.pep
LKFFLYILDPEFHFGLLDWNHKEXSVWLDIRTKIPSYPGGLNSQHSIEYWLTLDLLASEFSENPSSREAIRVKNSSEADLIFVPFFSSLSYNRYSKLSPHQKKSKNWELQEKLVKFVMGQKEXKISGGRNHVVLAHRTL

SEQ ID NO: 103121 - protein, 79 aa, Gossypium hirsutum
  Clone ID: LIB3189-045-P1-K1-H8.pep
IHNGWYYIAPFFRSSVPCLSSLFLVILLGYPISLPGFTLPLSPPGVTPEVSLFFRPVHLPFFPLVLTDSQIRTRLFLSP

SEQ ID NO: 103122 - protein, 73 aa, Gossypium hirsutum
  Clone ID: LIB3189-017-P1-K1-C10.pep
GRGKSTCASRVKKTGCKEVCILTTGRGPLSQGATNTKDNTTTHASFRDLELAISVNPQKNQKVREILAWSSST

SEQ ID NO: 103123 - protein, 60 aa, Gossypium hirsutum
  Clone ID: LIB3189-017-P1-K1-D4.pep
KVPKVNKIKKVKQNKKPGYQQTLLSVSSVLPAICLGDSIPSSGFLPSSLLLEMGNLGDFS

SEQ ID NO: 103124 - protein, 67 aa, Gossypium hirsutum
  Clone ID: LIB3189-017-P1-K1-D8.pep
RILILILQERPDICIVPPWDLIKSHNIVPIVSWDSTRGCSCSHRSIHCNSSQSEPLKLKNWGKKNDV

SEQ ID NO: 103125 - protein, 68 aa, Gossypium hirsutum
  Clone ID: LIB3189-017-P1-K1-G12.pep
TGKTQLANHQSGRHCTLSGTFLGIGTAETYLWMKNLGGLAIASRYDKVTALSACPRHRKMAKRLMSEI

SEQ ID NO: 103126 - protein, 59 aa, Gossypium hirsutum
  unsure (1)..(59): unsure at all Xaa locations
  Clone ID: LIB3189-017-P1-K1-G5.pep
HDPPXLLKPVRQRSQRELRKGIGLKFQNRDAEADDNIRESGDVSRGPNKRTYNTQSFYP

SEQ ID NO: 103127 - protein, 66 aa, Gossypium hirsutum
  Clone ID: LIB3189-017-P1-K1-H4.pep
DHPNLNPNLISTKTSNQRKPFDTESMTWFELSNPVFYDSSIFVLNTRLDKPLVSGPIDQIFALLDN

SEQ ID NO: 103128 - protein, 43 aa, Gossypium hirsutum
  Clone ID: LIB3189-021-P1-K1-A10.pep
LRLGKNNGPPPIPIKVLPHAIMLPSVHEHPFAIGLCSMPPHPF

SEQ ID NO: 103129 - protein, 108 aa, Gossypium hirsutum
  Clone ID: LIB3189-021-P1-K1-A9.pep
MSGRNRGPPPIPMKGPPHAGLLPPVHEHPYARGLGPMPPHPALLDEIREPQFVLGPRGFPPHPAIIEERLGVQLQEIQALLADNQRLAATHVALKQELEAAQHELKQM

SEQ ID NO: 103130 - protein, 59 aa, Gossypium hirsutum
  Clone ID: LIB3189-021-P1-K1-C3.pep
GKRKPLEREKNYWGMEERKDMETVHSGATRQQVRPGIKDKHFVISGGESRTKNYRRPTK

SEQ ID NO: 103131 - protein, 44 aa, Gossypium hirsutum
  Clone ID: LIB3189-021-P1-K1-C5.pep
KKQIFLCNMSHQYNNKILGTNHYSRFHPSSLRNALTNQLLLQQT

SEQ ID NO: 103132 - protein, 50 aa, Gossypium hirsutum
  Clone ID: LIB3189-021-P1-K1-C6.pep
RSENRRSRFRAVWMLSLSHWWMKMGLGSSPLWHDLCMETIKGVHYKVHIC

SEQ ID NO: 103133 - protein, 39 aa, Gossypium hirsutum
  Clone ID: LIB3189-021-P1-K1-C7.pep
KMGGSSFKGFVILYCITYLTITNRSPLMYTRIITLLNLL

SEQ ID NO: 103134 - protein, 69 aa, Gossypium hirsutum
  Clone ID: LIB3189-021-P1-K1-D4.pep
IVNMGGELTREGQEMDSSFYAHQGEWRSCAMTLLWEKKVAPKTHINKQTCLLLCLSIYVCYRYYYFNSK

SEQ ID NO: 103135 - protein, 38 aa, Gossypium hirsutum
  Clone ID: LIB3189-021-P1-K1-D7.pep
SLSHSFSLLFFFISLDPFKGHQIIRGRRGANFHKWQQH

SEQ ID NO: 103136 - protein, 52 aa, Gossypium hirsutum
  Clone ID: LIB3189-021-P1-K1-E6.pep
SYNTTSNKYMNFPSLRSQFQIMLEASKRLLVIPDRVSLIDLAVCLGSPGLSH

SEQ ID NO: 103137 - protein, 84 aa, Gossypium hirsutum
  unsure (1)..(84): unsure at all Xaa locations
  Clone ID: LIB3189-021-P1-K1-F10.pep
RYSIPKASFYFQCNXLLCVHSRANGGAKVFRDVEKALHVPIPYTNWNCKNSTLKALLVIILGGSLITLHPSPAVYISERSSNLV

SEQ ID NO: 103138 - protein, 82 aa, Gossypium hirsutum
  Clone ID: LIB3189-021-P1-K1-F2.pep
NKKNDRTKVNENDGQIDKRLQKKKKPRFMAYRCKFFYISNVRTDWRKRRRDKPRRLRWCWSNSRWIFFTKKKKWFFGMRGNL

SEQ ID NO: 103139 - protein, 43 aa, Gossypium hirsutum
  Clone ID: LIB3189-021-P1-K1-F3.pep
CSIAKPEKMTNMKHYCESITVDFSQANRLLVRQIFSSAYAKYT

SEQ ID NO: 103140 - protein, 68 aa, Gossypium hirsutum
  Clone ID: LIB3189-021-P1-K1-F8.pep
HASGGFNVQLFLLLYFTLKLCDLEYAYSPYVGTHILKIHCVVIVWFHFLNREFYYFLYYISILYYFLL

SEQ ID NO: 103141 - protein, 50 aa, Gossypium hirsutum
  Clone ID: LIB3189-021-P1-K1-G11.pep
NSRTTHASCYFNQFFELARFYSNGNQNYDVSNIVTVLLFPHYLQLHFPLS

SEQ ID NO: 103142 - protein, 43 aa, Gossypium hirsutum
  Clone ID: LIB3189-021-P1-K1-G5.pep
MYRTVDASLPSTCYINSPCKTLSKDSTNEKRLQRGLTCIDTQP

SEQ ID NO: 103143 - protein, 101 aa, Gossypium hirsutum
  Clone ID: LIB3189-021-P1-K1-H2.pep
MNSLLKFRRPLSSSLTSLSLQRLSTTLHYVFEEKKEGTSFIHPTAIVHPNAVIGQGVSVGPLCTIGPSAKLGNGCQMHPSSHIFGNTEFGEPLAFDDALLR

SEQ ID NO: 103144 - protein, 41 aa, Gossypium hirsutum
  Clone ID: LIB3189-027-P1-K1-A6.pep
CPNCGGPTAGGQTICDEHQLKLENARLKEETDRIRTIARNG

SEQ ID NO: 103145 - protein, 97 aa, Gossypium hirsutum
  unsure (1)..(97): unsure at all Xaa locations
  Clone ID: LIB3189-027-P1-K1-H9.pep
SFRRSSPRLPGPSRRXFASLLXSLCRRFCSRFSPPCCLCSCGPSGLGSCXPCGRGVFGPPLSSPSAFGGVRAXXGLVSRRAFVALSPXRPRXRGSSR

SEQ ID NO: 103146 - protein, 158 aa, Gossypium hirsutum
  Clone ID: LIB3189-005-P1-K1-A2.pep
VKKETQKETFKFSRFLSEYSSFSSSSSSSSSSSLSARVSLNSFHLTKMADLPEATRRNTNVVSRDISIDVSCDDSNCADSSGCSSDMPDVEIVSEDDKSSSASDSGSNQLSKSRRLTHSKLVKYASKFLDDTVPFRKKIKWLPRLAIVKHDGTVQCDF

SEQ ID NO: 103147 - protein, 56 aa, Gossypium hirsutum
  Clone ID: LIB3189-005-P1-K1-A4.pep
SFLVANLLTGLVNLSVDTIFVSPLSAVLILVSYSLTLCFVMVLVDFSGVKYKFWSV

SEQ ID NO: 103148 - protein, 71 aa, Gossypium hirsutum
  Clone ID: LIB3189-005-P1-K1-A7.pep
NGRSTRASETVTQKETSLTSNQPLDFYPLLCLEHAETILMFAKLQTSNPLWISQNGRFAQKRQGIIDDDDS

SEQ ID NO: 103149 - protein, 45 aa, Gossypium hirsutum
  Clone ID: LIB3189-005-P1-K1-A8.pep
GSARLHRANVNLGHFTWWACPCGRTRILCRSRFSGLVAYFAGVSL

SEQ ID NO: 103150 - protein, 104 aa, Gossypium hirsutum
  unsure (1)..(104): unsure at all Xaa locations
  Clone ID: LIB3189-005-P1-K1-B10.pep
WRPLLPPPRSLWPRRLPPLSGWFLCVCFGRLRXLASLRVGCGLRLGFVGCGAFFFRCGCCVWRPCRLLGFGCGGAPWLVRLXPSPWGFXXXXFVWGXXXXXXFV

SEQ ID NO: 103151 - protein, 149 aa, Gossypium hirsutum
  Clone ID: LIB3189-005-P1-K1-B2.pep
VNLIGYCADGDQRILVYEYMANGSLEHHLLDLPPGKEPLDWNTRMKVAEGAAKGLEYLHDFADPLIIYRDFKASNILLDENFNPKLSDFGLAKLGPTEGKDHVSTRVMGTYGYCAAEYAMTGQLTTKSDVYSFGVMFLELILGRRAFDF

SEQ ID NO: 103152 - protein, 47 aa, Gossypium hirsutum
  Clone ID: LIB3189-005-P1-K1-B4.pep
GAEMLATNPSHFQHHELKLTTIFFLVSHTLHAFFSYAKYSSERYREW

SEQ ID NO: 103153 - protein, 87 aa, Gossypium hirsutum
  Clone ID: LIB3189-005-P1-K1-B6.pep
PRVRGRVGGSRLKTDFIFTASYRSTSSVANVGNDDDGTDARRFLACSMRKALNSVLEKASISPEHSPFLTFPNKRRRISYIDSPSSS

SEQ ID NO: 103154 - protein, 139 aa, Gossypium hirsutum
  unsure (1)..(139): unsure at all Xaa locations
  Clone ID: LIB3189-005-P1-K1-B8.pep
MASPVPLTSAAGSGGGGGCGVAPFLLKTYDMVDDSATDDIVSWSSHNKSFVVWNPPEFARLLLATYFKHNNFSSFIRQLNTDGFRKIDPERWEFANEDFVKGQKHFLKNIHXRKKPIHSXHSNPYGFFVDSERAGFEEE

SEQ ID NO: 103155 - protein, 144 aa, Gossypium hirsutum
  unsure (1)..(144): unsure at all Xaa locations
  Clone ID: LIB3189-005-P1-K1-C11.pep
PRVRDEFSLIDDHETNPSHHHVLHHHHSYAQVHAPPPDNHNGDDDSDSAFRGANFVNNNSSNATSSDVRIEKRRDQEEINDGVLKRSKQSAATEYRKDREEWSDAAIGCLLEAYMEKLTQLXNRGNLRGRDCEEVAVVVIERCE

SEQ ID NO: 103156 - protein, 157 aa, Gossypium hirsutum
  Clone ID: LIB3189-005-P1-K1-C3.pep
KELGEEGLTGNEWEDRKIGRRKDFLVRRMELAKHFIRTNIEPEWMVLCLLPVLPPELRPIIQIDGGKLMSSDINELYRRVIYRNNTLTDLLTTSRSTPGELVMCQEKLVQEAVDTLLDNGIRGQPMRDGHNKGYKSFSDVIESKEGRFRETLLGKRV

SEQ ID NO: 103157 - protein, 42 aa, Gossypium hirsutum
  Clone ID: LIB3189-005-P1-K1-C5.pep
DPIVKKIVFLNIGLFRNNKPIKIKIFIHCISILCHNITLVIM

SEQ ID NO: 103158 - protein, 36 aa, Gossypium hirsutum
  Clone ID: LIB3189-005-P1-K1-C7.pep
RAASSGRVMSHYRSGRGRPTGRPTVRRGSDDVGVAP

SEQ ID NO: 103159 - protein, 51 aa, Gossypium hirsutum
  Clone ID: LIB3189-005-P1-K1-D2.pep
QSDFYKSNSHKNQLLFFIPNAQAGLSTYVSASGIVQQISGLHSDLMALQFD

SEQ ID NO: 103160 - protein, 87 aa, Gossypium hirsutum
  Clone ID: LIB3189-005-P1-K1-D4.pep
STSNSLALSFISIPRKTMPFFWAALTVTCFSFFILLAISYIGTYVNYINQVMDPKLQWLLFYLEDTFFPLTYGILSEGTQVILEFMI

SEQ ID NO: 103161 - protein, 148 aa, Gossypium hirsutum
  Clone ID: LIB3189-005-P1-K1-F1.pep
MVTPSKVHYLRPRRHLAGATKNVSETLEATADVYVSSDENHACHEATRIKNASSVMPNRLGRSMGPSGYFTPSSQRRTLGRDAQNLLNYFKKMQAENPGFYYAIQLDDDNRMTNVFWADARSRAAYNYFGDAVTFDTMYRPNQYQIPF

SEQ ID NO: 103162 - protein, 101 aa, Gossypium hirsutum
  Clone ID: LIB3189-005-P1-K1-G2.pep
AAGLEDRLVHGLLVASLFPWIISSHFSGAIYVSQSLHFRSPVYVGDEIVGEVKAISIKQSKKRYIAKLSTKCFKNGELLVLDGEAMAILPTLALEHDSRRS

SEQ ID NO: 103163 - protein, 152 aa, Gossypium hirsutum
  unsure (1)..(152): unsure at all Xaa locations
  Clone ID: LIB3189-005-P1-K1-G9.pep
FTHVLHLAAQAGVRYAMQNPQSYISSNIAGFVNLLEVAKAANPQPSIVWASSSSVYGLNTENPFSERDRTDQPASLYAATKKAGEEIAHTYNHIYGLSLTGLRFFTVYGPWGRPDMAYFFFTKDILQGKSIDIYKNAXDRKEVARDFTYIDD

SEQ ID NO: 103164 - protein, 114 aa, Gossypium hirsutum
  Clone ID: LIB3189-001-P1-K1-A2.pep
EDAYDDCNTVNAISTLTTGPARITLNKTGDHYFICSVPGHCSAGQKLKVEVRTGNTTGGVAPSPPVTSSTTTFTVGDSTGWRVPTNDDFYEDCADHKHFVVGDDLMFNFTTLQL

SEQ ID NO: 103165 - protein, 62 aa, Gossypium hirsutum
  Clone ID: LIB3189-001-P1-K1-B7.pep
KCCDSKLFNLSGKCFGSFFVVIPEPHNLTEAAHLNLGAIREHPDLSSACFTVLTHRYWNGTF

SEQ ID NO: 103166 - protein, 59 aa, Gossypium hirsutum
  Clone ID: LIB3189-001-P1-K1-B8.pep
LIVNCTSPNLPGLIPVKQKKRPNYNVDSTGSKSLAQTAKAHYKPDQPNKPITNPILNKT

SEQ ID NO: 103167 - protein, 131 aa, Gossypium hirsutum
  Clone ID: LIB3189-001-P1-K1-E8.pep
NGMPVTVGVGNIISDEGFALLMSPAAADSVWKTLLSQGAIPLGSNAWEKLRITQGRPAPGKELTNDFNVLEAGLWNSISLNKGCYKGQETISRLITYDGVKQRLWGIHLSAPAEPGSPITVNGKKVGKLTS

SEQ ID NO: 103168 - protein, 88 aa, Gossypium hirsutum
  Clone ID: LIB3189-001-P1-K1-F1.pep
QHPTSQSLRVNNAVTVGCFRKSGCKYLIGWKFPVYEKCNSYKKGLVKKKIHPPLLNHNRNSWRPINSWPKWTKNLAFFNQPIKKGLEE

SEQ ID NO: 103169 - protein, 42 aa, Gossypium hirsutum
  Clone ID: LIB3189-001-P1-K1-F3.pep
PSANPSGNQKIMTRKISELPFGYFVDLCGNSFKVSYTSVNLN

SEQ ID NO: 103170 - protein, 96 aa, Gossypium hirsutum
  Clone ID: LIB3189-002-P1-K1-A3.pep
MQHDEVIWQVIRHKHCSFMSKITTGIFCRNPYNVTGICNRSSCPLANSRYATIRDHDGVFYLYMKTIERAHKPNDLWERVKLPRNYEKALELIDKH

SEQ ID NO: 103171 - protein, 84 aa, Gossypium hirsutum
  Clone ID: LIB3189-002-P1-K1-B2.pep
HAIVYMFIFPSLTHTIWVYSFATGISLSTSHRSKTLDFLMFHRIQNFLASSYLILAFPQKPFLLFHVGRFIFSKVTKGSKPPNI

SEQ ID NO: 103172 - protein, 110 aa, Gossypium hirsutum
  Clone ID: LIB3189-002-P1-K1-C1.pep
PRVRPRVRTPFFTSSHSPFHRVLIMLGKRPRPMIGKLSELLVSRGLTVAYLDTTGSPRGPLDMKMMHSSPRGLKNYDLGGVGLGIVLALDKFNEVVVREVFPNTPFVPSI

SEQ ID NO: 103173 - protein, 101 aa, Gossypium hirsutum
  Clone ID: LIB3189-002-P1-K1-E6.pep
MATTTVIMTTLPQFSGLRPQFSAAPVKNLVAVQQPMRPKGKGALGARCDYIGSSTNLIMVASTTLMLFAGRFGLAPSANRKATAGLKLEVRDLGLQTGDPA

SEQ ID NO: 103174 - protein, 114 aa, Gossypium hirsutum
  Clone ID: LIB3189-002-P1-K1-F10.pep
MAEEFVKGTVHQNGVAVITLDRPKALNAMNLDMDVKYKSYLDEWESDPRVKCVLVDSSSPRAFCAGMDIKGVVAEIQKDKNTPLVQKVFTAEYSLICKISDYKKPYISFMDGIT

SEQ ID NO: 103175 - protein, 101 aa, Gossypium hirsutum
  Clone ID: LIB3189-002-P1-K1-G10.pep
MADEAVVVPDPTQIDVKLFNRWSFEDIEVTDISLADYIGVAASKHATYVPHTAGRYSVKRFRKAQCPIVERLTNSLMMHGRNNGKKLLAVRIIKHAMEIIH

SEQ ID NO: 103176 - protein, 126 aa, Gossypium hirsutum
  Clone ID: LIB3189-002-P1-K1-G12.pep
PPQQQDGFSPLPGWIIEWLKAVKFIDSKHFNVPFGLGAVELVAGRESAIAQIIRTVTNKVYNITFSVGDAKNGCHGSMMVEAFAAKDTFKAPFKSEGKGTFKTVSFKFKAIAPRTRLTFYSSFYHT

SEQ ID NO: 103177 - protein, 107 aa, Gossypium hirsutum
  Clone ID: LIB3189-002-P1-K1-G5.pep
KQQHQKASSTINSHSSCEFCWLTQEDVIRFLLGSIGVFTPLPALSIDSLGIVSSDVLAIDYYSPASSTVGAISKSLAQQTSVAIVDSDGTFIGEISPFTLACCDETV

SEQ ID NO: 103178 - protein, 107 aa, Gossypium hirsutum
  unsure (1)..(107): unsure at all Xaa locations
  Clone ID: LIB3189-002-P1-K1-G6.pep
MKHTRTITYLYLNITSLMEAERDKYKMINXEETELRLGLPLSGNETLKNTCSTGKRVFSDTAVDLKLNLSSTSNSASSDLAKEKNITAAAPXANDPAKPPAKAQVVG

SEQ ID NO: 103179 - protein, 125 aa, Gossypium hirsutum
  Clone ID: LIB3189-002-P1-K1-H10.pep
TLKKFPNQSPSLTDPLRKDHVSFPARRADRTLSLAPPPRAVAREVSDGALAAMKKGLEKDPRALWRRYVDWLYQHKELGIYLDVSRVGFSDEFVKEMEPCFEAAFRAMEELEKGAIANPDEGRMV

SEQ ID NO: 103180 - protein, 97 aa, Gossypium hirsutum
  Clone ID: LIB3189-002-P1-K1-H11.pep
MAKGEKKPAEKKPAAEKAPAEKTKAEKKIPKDAASGEKKKKRTKKSVETYKIYIFKVLKQVHPDIGISSKAMGIMNSFINDIFEKLAQESSRLARYN

SEQ ID NO: 103181 - protein, 77 aa, Gossypium hirsutum
  unsure (1)..(77): unsure at all Xaa locations
  Clone ID: LIB3189-002-P1-K1-H12.pep
MVSSFTCLKSMAGFPTRKTNNDITSIACNRLRVQCIHVSPPIVKKKFDTFSYLPYLYYSQLSNEVXYLLTKGLIPFF

SEQ ID NO: 103182 - protein, 126 aa, Gossypium hirsutum
  unsure (1)..(126): unsure at all Xaa locations
  Clone ID: LIB3189-002-P1-K1-H5.pep
VKKLKLWSKXKRKKKTHGHEHPPHYCCSCYCSSSIQPSAPPLPSSSCLDFEYSNYGTFLPTPEPEPEPEPQPQEIASLNSSYQQYMVSVSEPVYGIPVPVIHASRTERSAGQFGCLFSFGSYLFRC

SEQ ID NO: 103183 - protein, 67 aa, Gossypium hirsutum
  Clone ID: LIB3583-043-Q6-K1-A5.pep
LLVPPLVQVSFIHSFLIALGLPVLLPPFHLFLNFSAPLFYIFKVGQPGFVSLLSFSGKLEKKEIITN

SEQ ID NO: 103184 - protein, 71 aa, Gossypium hirsutum
  Clone ID: LIB3583-043-Q6-K1-A6.pep
RHAGTLSTTKVVKIQLIYRVLMAIGARDLLPTYYLVLNLSPPLFSIFKVCQPGLGSLLSFSGKLDKKKKAK

SEQ ID NO: 103185 - protein, 61 aa, Gossypium hirsutum
  Clone ID: LIB3583-043-Q6-K1-B10.pep
NFEIGIRISHLCPMNRFQRIEVLCYFKHAMEYTYPPQSSGITIEHRRPWLSYSVSSGLQVL

SEQ ID NO: 103186 - protein, 46 aa, Gossypium hirsutum
  Clone ID: LIB3583-043-Q6-K1-B2.pep
SACLASLIIALYRSYMHPWSVLLLHDAIVIVARLLLVTWPVVQKMK

SEQ ID NO: 103187 - protein, 141 aa, Gossypium hirsutum
  unsure (1)..(141): unsure at all Xaa locations
  Clone ID: LIB3583-043-Q6-K1-B7.pep
YRADGAHEEAADQSRWVSHHHPAVLNGQYPDTHHPGLGHSYMDPAQYPLTEEVDVLFNIDGQGNHVPSYYXNSVRATVQRYPPTHHGSQVCRPPLLHGSLPWLDGGKALGSHHTRXPWNLSPFSKTFIHHGFPGATFSFNP

SEQ ID NO: 103188 - protein, 86 aa, Gossypium hirsutum
  Clone ID: LIB3583-043-Q6-K1-B8.pep
EKRAFSIPEACCYHALNQRYKELSFQLSYSTMAINLWQKQTECIIRMRSLNQPVNSFATAEEEAPRFGHGHRWGLGAELPSNPPRE

SEQ ID NO: 103189 - protein, 84 aa, Gossypium hirsutum
  unsure (1)..(84): unsure at all Xaa locations
  Clone ID: LIB3583-043-Q6-K1-B9.pep
HLESLKLKGKPRAAMFNLIPEDWGGYVTPWVFEIAENFNFLKSVHFRRMIVKDTDLEILARSRGNVLQGLSLIXCSGFFTDGLF

SEQ ID NO: 103190 - protein, 33 aa, Gossypium hirsutum
  Clone ID: LIB3583-043-Q6-K1-C10.pep
HTQNTSYFCVSFCNGIKNLWAHINGRTASYLRS

SEQ ID NO: 103191 - protein, 116 aa, Gossypium hirsutum
  unsure (1)..(116): unsure at all Xaa locations
  Clone ID: LIB3583-043-Q6-K1-C12.pep
MPWKPTIVMLFLGVMLLLLAENNAASSSHEMSREAPAPQPQPPGNFTMHGITQGXLLPQECGPRCGERCSNTQYKKPCLFFCNKCCAKCLCVPSGTYGNKQVCLCYKNWKTKRRRP

SEQ ID NO: 103192 - protein, 124 aa, Gossypium hirsutum
  Clone ID: LIB3583-043-Q6-K1-C7.pep
KTQDQYIQFRWHYKKDKDLQASVSKLGYTKTDATAPPLCVIGHTLGMLSSKFDFFFSDLYKIYYYILLRTTCHERSITRSSNREKRNQAAECHQLHFGVYVKGSSRRQCEVSVDHVEPRLHRLS

SEQ ID NO: 103193 - protein, 104 aa, Gossypium hirsutum
  unsure (1)..(104): unsure at all Xaa locations
  Clone ID: LIB3583-043-Q6-K1-C8.pep
VHMGTNNCDFXMDRYDFKRRNDGTXYIINLAKTCEKLELASRVNDSIENPHDIMEQSARPYGQRAVLKLXSHTGCHAIARRHTPGSFTNQLQSCISEPRLSILT

SEQ ID NO: 103194 - protein, 65 aa, Gossypium hirsutum
  unsure (1)..(65): unsure at all Xaa locations
  Clone ID: LIB3583-043-Q6-K1-D1.pep
YQDLKHRDVTWXPSSIEKELIKLCLXARGKENRVCYXIGASDDAATKLITXVSKPLAPHILVVKV

SEQ ID NO: 103195 - protein, 52 aa, Gossypium hirsutum
  Clone ID: LIB3583-043-Q6-K1-D10.pep
RFTLRISLSARSNKAQSSLKDLCVYPIKASSEIVGRELQAVVEHHRARTVLC

SEQ ID NO: 103196 - protein, 66 aa, Gossypium hirsutum
  Clone ID: LIB3583-043-Q6-K1-E10.pep
SRKRQLKGIHKKDFLRKSPKLSSCNQPVYGNKHQAFIGHLVSLGILQLCSSCKHFWILNRRAPRHK

SEQ ID NO: 103197 - protein, 36 aa, Gossypium hirsutum
  Clone ID: LIB3583-043-Q6-K1-E11.pep
LAKFPEENDSIGVKKNTLTVRVSISMRAIYDSFIHL

SEQ ID NO: 103198 - protein, 93 aa, Gossypium hirsutum
  unsure (1)..(93): unsure at all Xaa locations
  Clone ID: LIB3583-043-Q6-K1-E7.pep
SIAEKGVVSNITASPTKKKKDNGSGSEMSAKQGIESLMESLMKCDLFDGEWVKDNSYPLYKPGSCSFIDXQFSCIINGRPDKSYQKPKWNPHG

SEQ ID NO: 103199 - protein, 79 aa, Gossypium hirsutum
  Clone ID: LIB3583-043-Q6-K1-F10.pep
IKSLSYIPPREKIFPQRDVASDGSEEEGSGHANKPENNVQRMSVQDAINLFERKQRDQITDVPKRNSLANTLLVQVSLY

SEQ ID NO: 103200 - protein, 56 aa, Gossypium hirsutum
  Clone ID: LIB3583-043-Q6-K1-F11.pep
RFNRLSDLLDKQIVFTQRHATSDGRVMLRSGHPYQLETNVHGMSFLNAINLFEFNL

SEQ ID NO: 103201 - protein, 52 aa, Gossypium hirsutum
  Clone ID: LIB3583-043-Q6-K1-F5.pep
HAFDHTSGVILRLSTKIPTTQAPRWHLLSHATKPPINLRLHYNSKDTLLVLN

SEQ ID NO: 103202 - protein, 115 aa, Gossypium hirsutum
  unsure (1)..(115): unsure at all Xaa locations
  Clone ID: LIB3583-043-Q6-K1-F7.pep
MDNACESPTEKGGEARESDETAPAPGVPGPTDTDGIPEETDVDGDGDLKEATAEDXELKNQDISDLTAVEREDSSLLTPAAKKNKNXDPKKKKEKRQKVDEDEIQKXMQILVSFF

SEQ ID NO: 103203 - protein, 61 aa, Gossypium hirsutum
  Clone ID: LIB3583-043-Q6-K1-F8.pep
MTREDSSLLTAATKKINIDASEKNETKRNVDEDEIQKMQILVPSFSEEQLNRYEMIRPVSL

SEQ ID NO: 103204 - protein, 113 aa, Gossypium hirsutum
  unsure (1)..(113): unsure at all Xaa locations
  Clone ID: LIB3583-043-Q6-K1-G2.pep
ATRTLRNMSACVVLLFSLFLSFGLLCSAKDFPXNMSXDDPPKRYEDCRRRCECDTXGQTEQQQCEESCKSQYXEKDQQQRLRPEYPQSRFEECQHVCLHQXERHRPLCLQWCL

SEQ ID NO: 103205 - protein, 62 aa, Gossypium hirsutum
  unsure (1)..(62): unsure at all Xaa locations
  Clone ID: LIB3583-043-Q6-K1-G4.pep
SADDTKQRYEDCRKRCQLETRGRTEQDMCDDWCXTLLKVEHQRDGEDPHRRYQYWRHHCQQE

SEQ ID NO: 103206 - protein, 60 aa, Gossypium hirsutum
  Clone ID: LIB3583-043-Q6-K1-G5.pep
EWTTNTSISCKNLHGDASDPPTIAINNCNNTCLAQSVPVSPIAVASGRPRISNRYRPRGR

SEQ ID NO: 103207 - protein, 129 aa, Gossypium hirsutum
  unsure (1)..(129): unsure at all Xaa locations
  Clone ID: LIB3583-043-Q6-K1-G8.pep
MWVRGKTGGKARAKAKSRSSRAGLQFPVGRVHRLLRKGHYAERVGAGAPVYLAXVLEYLTAEILXLVGNAARDNKKTLIIPRHLQLAIRNDEELNKLLGGVTIAHGGVLPNIQAELLPXEDQRHHGAEG

SEQ ID NO: 103208 - protein, 72 aa, Gossypium hirsutum
  Clone ID: LIB3583-043-Q6-K1-H7.pep
TLILAIIERSGKHLWNRQKTTRGAPSHPALSGAHSRFWASVCRLNTTELPGGSRCCAGWTRAPSPLTPVVAR

SEQ ID NO: 103209 - protein, 85 aa, Gossypium hirsutum
  Clone ID: LIB3583-043-Q6-K1-H9.pep
YSCPPVFPCVLSEIFSKACFYIYVRFNRKRLKGRIGEEDCHMAFSTLCNVCTIFFFIFVVEIIASNLLSYVQQKSQLIYMLRNMQ

SEQ ID NO: 103210 - protein, 172 aa, Gossypium hirsutum
  Clone ID: LIB3584-047-P1-K2-A11.pep
RLGQLFDFFRMLSFFFTTVGYYVCTMMTVLTVYIFLYGRVYLAFSGLDEEIARQARMSGNTALDAALNTQFLVQIGVFTAVPMIMGFILELGLLKAVFSFITMQLQLCSVFFTFSLGTRTHYFGRTILHGGAKYRATGRGFVVRHIKFAENYRLYSRSHFVKALEVALLLIV

SEQ ID NO: 103211 - protein, 131 aa, Gossypium hirsutum
  Clone ID: LIB3584-047-P1-K2-A6.pep
ASYISIYSKISKLHLIFSSILNSVSDKDEFIIASTYLVSSPIISLFIHECLDFQITVNLENLFESPSDRYFVFILLGYCQGSKFLSHPSVEILVTVLVNSKFPMCFLVREMMGRRLQRRRMVMTEASGRVG

SEQ ID NO: 103212 - protein, 60 aa, Gossypium hirsutum
  Clone ID: LIB3584-047-P1-K2-B11.pep
RSKILTSELIGFKGHFLSDPKREIHWFLLKDNFHESNHQMKILIMVAFWNEAREQEESFS

SEQ ID NO: 103213 - protein, 94 aa, Gossypium hirsutum
  Clone ID: LIB3584-047-P1-K2-B2.pep
MLEGKALVEDTDMPLKMQIQAMSSASQALDLYDVFDCKSIAGFIKKEFDGKYGNGWQCVVGSNFGCFFTHSKGTFIYFTLERLKFLIFKGASSP

SEQ ID NO: 103214 - protein, 62 aa, Gossypium hirsutum
  Clone ID: LIB3584-047-P1-K2-B8.pep
FKLLNHLIHMACREKPTRSMGRLMLSIIRQLSEWLTDNEKAELDGTIPYKRENGYVRCTVEL

SEQ ID NO: 103215 - protein, 101 aa, Gossypium hirsutum
  Clone ID: LIB3584-047-P1-K2-C10.pep
FCGNKEACGSRFGECWLKKQKDPLSPDRQDAGKSVIWTSGLIFGKGEGIVGMETEYGTLHIKLFPGCAPYSVAYILELLTMRHCVGCQFYRAESRGQSWDS

SEQ ID NO: 103216 - protein, 59 aa, Gossypium hirsutum
  Clone ID: LIB3584-047-P1-K2-D1.pep
VGFCQGFISQVRCRIKGSEFHLGIPPGALLGCLQKVRSLCSCRARVGDVCPPAWGVGGF

SEQ ID NO: 103217 - protein, 81 aa, Gossypium hirsutum
  Clone ID: LIB3584-047-P1-K2-D7.pep
PTRPPTRPQENTVLKRAVAIQHERQKEYQDKNNELEHLKQLVSQYQDQLRTLEVNNYALTMHLRQAQQSNSIPGRFHPDIF

SEQ ID NO: 103218 - protein, 54 aa, Gossypium hirsutum
  Clone ID: LIB3584-047-P1-K2-E6.pep
NIADEGLYSWNVCLSISPDFHRDWVTLAILVTKKTMYCANTIRKTVVRRFQACS

SEQ ID NO: 103219 - protein, 78 aa, Gossypium hirsutum
  Clone ID: LIB3584-047-P1-K2-E7.pep
RDVIPFLEADNDVILICTSILSLSEVLNSMPLRRLKRHMLFVDVLSVKEHPRNVLLQVLPENMDVLCTHPMFGPGTDG

SEQ ID NO: 103220 - protein, 68 aa, Gossypium hirsutum
  Clone ID: LIB3584-047-P1-K2-F4.pep
LHLWLHIQICAVRFISHALQWCHKVIPISPFCNKADWMVCTWYWSYQSVYAVGWDCICIDLDYLGVTW

SEQ ID NO: 103221 - protein, 60 aa, Gossypium hirsutum
  Clone ID: LIB3584-047-P1-K2-F6.pep
ILILLYFSNYMIGTMINKFLLKLCKHLLHELIFDILIITLFISVYWESMYGYNDKWNTYY

SEQ ID NO: 103222 - protein, 66 aa, Gossypium hirsutum
  Clone ID: LIB3584-047-P1-K2-F8.pep
TNGPYQQLFRINGQCDWPLRRALNAAIMLVTRSVYAPLDSYIWQGPSARFFCFLASFAGYARQVLN

SEQ ID NO: 103223 - protein, 154 aa, Gossypium hirsutum
  Clone ID: LIB3584-047-P1-K2-G7.pep
YDRWSSWTVSVSWGYAIQAYSKPVSLPDVLPVPETFRQWKRGNVLAGVYTFNTKKFHPHPCQRPTIFYLNSVSSTKHGIIETVYNKSHEDCMLFMDPTRKLEEIRVFTKKLDLNHKQMQAPRRHCCDVLPSKSGKVLDVAIRECGEDELIYMHA

SEQ ID NO: 103224 - protein, 48 aa, Gossypium hirsutum
  Clone ID: LIB3584-047-P1-K2-H4.pep
VTTFHIQKSTRVLQVIGASFYLHPATKLPLSPNIPTTSSLKLKMQSLF

SEQ ID NO: 103225 - protein, 152 aa, Gossypium hirsutum
  Clone ID: LIB3584-048-P1-K2-A11.pep
RLSMEAQECLVMARWMDSASLMLTYAELVFTKVSDKDLQRIFTVIFNVSSKLENSDHELEMAQIIYTKMSQQPIDKPAMPQKILINLYNTMEGPYSSFFRYMLALDLTLNGKCIDHIEPSSKKIDSSLKEWNIGVKDQSNLSLTVANVLNEN

SEQ ID NO: 103226 - protein, 85 aa, Gossypium hirsutum
  Clone ID: LIB3584-048-P1-K2-A4.pep
GKKKTKNFFFYKKKKGDFIKLKNNLNSNKKIITFRDPNKKLNANTTLNVLEILKENPKGGILNLNAKTMQIFFKKDPSPFFFKSF

SEQ ID NO: 103227 - protein, 130 aa, Gossypium hirsutum
  unsure (1)..(130): unsure at all Xaa locations
  Clone ID: LIB3584-048-P1-K2-A8.pep
IKKATAVRQNNAEEAARTILGRENGGNCDINNLSRRSKIYLSVFVEGAHLSCGDIHSFQGDSELSLCGAFEKSGFFNLKCEMARDCRNEYLISMELSPLYVNTIYEIAPFEPRFXEWLVPEAINMDESGR

SEQ ID NO: 103228 - protein, 160 aa, Gossypium hirsutum
  Clone ID: LIB3584-048-P1-K2-A9.pep
LTSKGSNTELRLGFRKPAVIMIVGVNGGGKTTSLGKLAYRLKNEGAKILMAAGDTFRAAASDQLEIWAERTGCEIVVAEKENAKASSVLSQAVKRGKEQGFDVVLCDTSGRLHTNYSLMEELIACKKAVEKVVRGAPNEILLVLDGNTGLNMLPQAREFN

SEQ ID NO: 103229 - protein, 143 aa, Gossypium hirsutum
  Clone ID: LIB3584-048-P1-K2-B9.pep
ILATIQVLSKIRRQRPYFGRYPRNMSSLSKDVVAPYVHVVDSFTDDDPLDPYGSRTTLLFFRGNTVRKDEGKIRVKLANILAGIDDVHFENSVGTPKSFKMSTKGMRLSKFCLHPAGDTPSSCRLFDAIVSHCVPVIVSDKIE

SEQ ID NO: 103230 - protein, 161 aa, Gossypium hirsutum
  Clone ID: LIB3584-048-P1-K2-D1.pep
ATRTGRGKKSHAYTHSLEAGHHVYINLGTEKAYWLPDGYEINDPSLDGIYHGLYPRLSREQLEQLDKNKQRSRALDGSDDLAGMVGLNNIQKTDSVNVTMQSLMRITSLRNFFLIHENYQHCGSQLGHRIGELTRKIWHARNFKGQVSPHEFLQAGMKASK

SEQ ID NO: 103231 - protein, 82 aa, Gossypium hirsutum
  Clone ID: LIB3584-048-P1-K2-D11.pep
AVSSIPHLYIIWLFNHLAHNIAYLLVRVIDQSLIPACLLPYINPITLCIYTLNLYRSSPIDQITYHSGYYCNSICMPRYLSL

SEQ ID NO: 103232 - protein, 130 aa, Gossypium hirsutum
  Clone ID: LIB3584-048-P1-K2-D8.pep
LDPVADKLMVAATLVLLCSRPLNIAVFGQVPWLLNVPSIAIIGREITMSAVREWAASQNGKLLAAVAVNKLGKWKTATQMAALTILLATRDSSLGETGILVASGVIFLYLSAGLSVMSLVVYMEKIRKIL

SEQ ID NO: 103233 - protein, 162 aa, Gossypium hirsutum
  Clone ID: LIB3584-048-P1-K2-E1.pep
HASGLNKSGSLSVFRIEDYNATVEFYWAPFLVQSNSDDPDMHSILNRIIMPKSIQNHGKNWKDVDYLVFNTYIWWMNTFNMKVLRGSFDQGDTEYDEIDRPVAYQKVLTTWSKWVDKNVNPNRTTVFFSSMSPLHIKSLDWENPDGIKCALETTPILNQSMH

SEQ ID NO: 103234 - protein, 39 aa, Gossypium hirsutum
  unsure (1)..(39): unsure at all Xaa locations
  Clone ID: LIB3584-048-P1-K2-E3.pep
SATTXNFFRSFATLKLCYYTKGYSWEGGFYRTQVSLFII

SEQ ID NO: 103235 - protein, 75 aa, Gossypium hirsutum
  Clone ID: LIB3584-048-P1-K2-F11.pep
RWQARGRKLGSFKRAPPLFFFFFFFFFFFFFFFFFFFFFFFLGFFFFFFFFFFFFFFQIGINVFHNIYLYIYTHR

SEQ ID NO: 103236 - protein, 139 aa, Gossypium hirsutum
  unsure (1)..(139): unsure at all Xaa locations
  Clone ID: LIB3584-048-P1-K2-F4.pep
GRVGGRVGFTSIWDLQIPTKIKIHLWRLLQNYVPHFMNLVKXRLRTDSVCPLCMSEPEDFHHLLWYCSTLRQLWFHLKLPMDFDAFSSIGTTNFVRAFLAMNMNSQKLSAISLWALWYKRNKLVNEGLNFDFCELVGFI

SEQ ID NO: 103237 - protein, 69 aa, Gossypium hirsutum
  Clone ID: LIB3584-048-P1-K2-F5.pep
PMVTKLGRLGYNDSSTREDRCLVLHHKIRYANTSSSMTTTFITIRTSPIDMSYTYSICMNNGSRDVSAH

SEQ ID NO: 103238 - protein, 55 aa, Gossypium hirsutum
  Clone ID: LIB3584-048-P1-K2-G10.pep
TRTRGKKKKKKKKKKKKKKKKKKKKKKKKKKKKKKKKKKKKKKKKKKKPSGGGPF

SEQ ID NO: 103239 - protein, 150 aa, Gossypium hirsutum
  unsure (1)..(150): unsure at all Xaa locations
  Clone ID: LIB3584-048-P1-K2-G12.pep
IGGAGEKKPMGWDERTKITDTCTYAPRNWXWDAPIIIGDVKAMEPGXLIDDESLEIDYPEATNYSDSQHEXDGDEEAPKMEDPKVLDSHSSLRMXRPMNMNTAYIXIWPTSLIDDTSDMGLXEPSDIAHRYYYYLEKPDCDAIAAIDIEI

SEQ ID NO: 103240 - protein, 146 aa, Gossypium hirsutum
  unsure (1)..(146): unsure at all Xaa locations
  Clone ID: LIB3584-048-P1-K2-G4.pep
MNKAFIEKTLSFIRTNKKNSLKKKKKKKKKKKKKKKKKKKKKKKKKTKKKKKKNKPEXQKLLIKKKRKAKKKQTKLGRTFTGDTHSTPWKNSIRTLYGPAKKNKTGGEKKIEALEKALHKQNLGLIPKPPYRLRHKKKKGPPLCIF

SEQ ID NO: 103241 - protein, 162 aa, Gossypium hirsutum
  Clone ID: LIB3584-048-P1-K2-G6.pep
HASVTLYPVAARLVLEEKLSATSDDGKKYREIVFTESNWKTSSFYKLENFLYSFLDGSTSRGMERMKLKLGTPIAIAERILSACETLNRKDCESAEQDLSSANEIIDSVKEYVIKMENESISWRRRTLSAIDATKSRTLELIESTLQLSNLDVVASFLLKGE

SEQ ID NO: 103242 - protein, 58 aa, Gossypium hirsutum
  Clone ID: LIB3584-048-P1-K2-H5.pep
RLQSYSIAIPKPNSMALAVQRQHWESQNPTQPNLIALDAHSASCRYSNKDQADRDRQQ

SEQ ID NO: 103243 - protein, 166 aa, Gossypium hirsutum
  Clone ID: LIB3584-048-P1-K2-H6.pep
TYAYAYAFACSRSRADALYCGRCTIPWHAHEGKLLLKINRILRPGGYFILSTKHDSIEVENAMNTLTSSICWNILAHKTDDVSEVGVKIYQKPESNDIYVLRRRRNPPLCKENENPDASWYVPMKTCLHTVPSAIEQHGTEWPEEWPKRLETYPDWLNNKEKAIDD

SEQ ID NO: 103244 - protein, 57 aa, Gossypium hirsutum
  Clone ID: LIB3584-056-P1-K2-A4.pep
STRVCHTSNFRSIKLGNVNNTSLSLYTVAYRQQLLEPKRYSHDVAVRKRAERFTHAS

SEQ ID NO: 103245 - protein, 72 aa, Gossypium hirsutum
  Clone ID: LIB3584-056-P1-K2-A6.pep
FIVKVTMRVSNTFEERNAPFIGAFQLPIRVCNVRKRDRSVLVSIMDVRKLNVREENNWVMGVYLVKCCKNAH

SEQ ID NO: 103246 - protein, 112 aa, Gossypium hirsutum
  Clone ID: LIB3584-056-P1-K2-B12.pep
ALEMKPTSKGNSDTLASNEISKHSGNGSEVFRLLDNGDNTRKKSSAAPLLASNPLVPTLGITHGELEGPSMAFRSFDNRKRQIVRASVRSKSLLSAFFVKQKSMKLKAGYVA

SEQ ID NO: 103247 - protein, 50 aa, Gossypium hirsutum
  Clone ID: LIB3584-056-P1-K2-B5.pep
DAWADAWVIIFCWLFLWADLSPAEKTLVLAFLRLKQNEGMITVYLLLHDE

SEQ ID NO: 103248 - protein, 53 aa, Gossypium hirsutum
  Clone ID: LIB3584-056-P1-K2-C3.pep
MLFRRYSGLILSDTFMAEVTSLVSFHFFSFFTVNWQLIIFLFVVQLVLLWFKL

SEQ ID NO: 103249 - protein, 111 aa, Gossypium hirsutum
  unsure (1)..(111): unsure at all Xaa locations
  Clone ID: LIB3584-056-P1-K2-C4.pep
MPGLFLEIGFFGRVNFFVAFGPKVVEWVSTIFLPGFKEFLPNLISPVKLVLITNQHMAITEVNFDDEKSRHCFLAGLVIRSLSISTSNGECETLXDISRKNIMGXYDVDTR

SEQ ID NO: 103250 - protein, 34 aa, Gossypium hirsutum
  Clone ID: LIB3584-056-P1-K2-D4.pep
QARHSVEGGNRLWLGSYFDIKSKGGVSRRNDDDI

SEQ ID NO: 103251 - protein, 71 aa, Gossypium hirsutum
  unsure (1)..(71): unsure at all Xaa locations
  Clone ID: LIB3584-056-P1-K2-E10.pep
PPXFFFFFFFFFFFFFFFFFFFFFFFFFFFFFFFFFFFFFXXRKKNFTVLNQTHPYDMINNIRPKIHPCRQ

SEQ ID NO: 103252 - protein, 182 aa, Gossypium hirsutum
  Clone ID: LIB3584-056-P1-K2-G1.pep
PRGLDPHSVPSEELAASLGYMVQLLNLVVRNLAVPALHNSGFAGSCSRIWQRDSYWDACPSSRSNEYPLFIPRQNYCSASGDNSWTDRSSSNFGVASMESDKRFRLDSSGSSSFNCSSGSPHTAETHKDLQKGISLLKKSVACITAYCYNSLCLDVPTEASTFEAFSKLLATLSSTKEVQSV

SEQ ID NO: 103253 - protein, 57 aa, Gossypium hirsutum
  Clone ID: LIB3584-056-P1-K2-G11.pep
FKKTERTIKTLSMTNYPLKQVRKPNSKFHERNQLPQNMRASRITILLVLSYGPGIPS

SEQ ID NO: 103254 - protein, 71 aa, Gossypium hirsutum
  Clone ID: LIB3584-056-P1-K2-H1.pep
KNDPNLKKAKFLEGKIKGYQGFCLKPVWGEKTGNALFRKKFERFWEAPLKQEGCNNRGQIFKFKTNERPNF

SEQ ID NO: 103255 - protein, 52 aa, Gossypium hirsutum
  Clone ID: LIB3584-056-P1-K2-H11.pep
KTVLFILGYNCQIQECSKIFKLFHVLGVLGRSCLSKCYLDMSVGHGHFKKKK

SEQ ID NO: 103256 - protein, 112 aa, Gossypium hirsutum
  Clone ID: LIB3584-056-P1-K2-H12.pep
VFPLVANYCLAYSRNLEILTILDCQPMKQGISEGEIVGDVQDTREEEIGGDEFFQNLKTLSLTCLPSLETICRLPQFFSSPIEIQVSRCPCLRQLSFDDENVDFLKKITGEF

SEQ ID NO: 103257 - protein, 80 aa, Gossypium hirsutum
  unsure (1)..(80): unsure at all Xaa locations
  Clone ID: LIB3583-044-Q6-K1-A11.pep
MPAALINLNGDLKEPKGGTNQEGIQNSISYYEDICRRENQMIKQALLANLAYVELELENPLKAXLSAAQALLELADCSRI

SEQ ID NO: 103258 - protein, 28 aa, Gossypium hirsutum
  Clone ID: LIB3583-044-Q6-K1-A2.pep
QLCLLLLSMLLMVMVYLLYLQHPCDTPP

SEQ ID NO: 103259 - protein, 48 aa, Gossypium hirsutum
  Clone ID: LIB3583-044-Q6-K1-B10.pep
HASAHASERNPCNLLSKKNTVGAISLKSTVEGLFHLKNHNTHSQCRFP

SEQ ID NO: 103260 - protein, 38 aa, Gossypium hirsutum
  Clone ID: LIB3583-044-Q6-K1-B11.pep
QPTESNTGLPKVENLSIKDGICNGSEGHASLHTYVGFS

SEQ ID NO: 103261 - protein, 73 aa, Gossypium hirsutum
  Clone ID: LIB3583-044-Q6-K1-B3.pep
KPRSQAHSVCPIMVSAKHLRDVHLHPANTHSVALCVISESLWRRMNPSEVNKTERVAERVGVRVGGRVGGRVG

SEQ ID NO: 103262 - protein, 36 aa, Gossypium hirsutum
  Clone ID: LIB3583-044-Q6-K1-C3.pep
CYQCQDQVTMAKLAVYLATLARIAFLVKATITSEAA

SEQ ID NO: 103263 - protein, 41 aa, Gossypium hirsutum
  Clone ID: LIB3583-044-Q6-K1-C6.pep
QRDKRGRGMRRSRNGLEETFCSMRLKHRTPACSADGCNPRR

SEQ ID NO: 103264 - protein, 57 aa, Gossypium hirsutum
  unsure (1)..(57): unsure at all Xaa locations
  Clone ID: LIB3583-044-Q6-K1-C8.pep
PRVRAYTSLLSFSVRLLVLYRGCCSQIDLFTNHHQDPPCGHPNQPXPRHHSQCQLHN

SEQ ID NO: 103265 - protein, 75 aa, Gossypium hirsutum
  Clone ID: LIB3583-044-Q6-K1-D3.pep
FAVGHDSVGEIKWCRSFYNLAVRKSFMAFRKSWYTVGLSVALKIQCYAGIVRCSIPNGSSKRCSLDIAFVCPDAW

SEQ ID NO: 103266 - protein, 104 aa, Gossypium hirsutum
  Clone ID: LIB3583-044-Q6-K1-E10.pep
ASQSSTPPPFKRLVDALIECETRKVQPYQEVVYAANLVEDASLQITDGSTRGGRSGVRGHGRNFRPRLQSQICSRFSHVAQRCYYRYHRDDSSPMQTHASAHAS

SEQ ID NO: 103267 - protein, 34 aa, Gossypium hirsutum
  Clone ID: LIB3583-044-Q6-K1-E11.pep
LGRDSSIRIPILQCKRTRYQDELPKHFQCDKPRA

SEQ ID NO: 103268 - protein, 84 aa, Gossypium hirsutum
  Clone ID: LIB3583-044-Q6-K1-E12.pep
MQQSICMRNLRRVSARMAFASPDASYINSLYSSLDHVRPSNRVFYNVQSTVDELFNSACTGLTIRSPCAQTLNGHNSSAIFTVS

SEQ ID NO: 103269 - protein, 36 aa, Gossypium hirsutum
  Clone ID: LIB3583-044-Q6-K1-E4.pep
SMFKFFVYLTTVYLIRPLPHINSHMSVKLIGSAPLR

SEQ ID NO: 103270 - protein, 43 aa, Gossypium hirsutum
  Clone ID: LIB3583-044-Q6-K1-E5.pep
DVWNNNSHMMSIEMVACIAIDAISILEKIHFTLYIHGDVKPVN

SEQ ID NO: 103271 - protein, 63 aa, Gossypium hirsutum
  Clone ID: LIB3583-044-Q6-K1-E7.pep
THPSGRGFQITTCVHVQSQIPMVASIAYPLEDHIMYFIHCIKRNCMTTFTPIQQCVNKTCSNW

SEQ ID NO: 103272 - protein, 57 aa, Gossypium hirsutum
  Clone ID: LIB3583-044-Q6-K1-E8.pep
IESGRSQRYTMRFSGMLKSIITHHSLTKATKPPIHALCNRAYHVPYYYCIDLCRCQR

SEQ ID NO: 103273 - protein, 54 aa, Gossypium hirsutum
  Clone ID: LIB3583-044-Q6-K1-E9.pep
STRPSTRTKKAGLTCLNHRNMIRNFNWLDPSLQDMVTDLWCSKIARSINEFGKP

SEQ ID NO: 103274 - protein, 25 aa, Gossypium hirsutum
  Clone ID: LIB3583-044-Q6-K1-F10.pep
PRIHQDCRQHCRQEERRLSPHNEQI

SEQ ID NO: 103275 - protein, 109 aa, Gossypium hirsutum
  unsure (1)..(109): unsure at all Xaa locations
  Clone ID: LIB3583-044-Q6-K1-F2.pep
TECVETFQDSQQWQHQSRGRFHDQPQIVRQLQHGDMIVFTXGALYCSYNDVNERVVTVNLLDCGECTTEAYTMRTTTNTTGLAAEGQNRLMTLAQQMLKRLNTAEEVRE

SEQ ID NO: 103276 - protein, 140 aa, Gossypium hirsutum
  Clone ID: LIB3583-044-Q6-K1-F8.pep
TERGQVWRRVVFQFFICFIIGFLIGFTPFISMDFSYMNPVSKHQAFSFEVVSTAGNFQSLNNSQRNVASTMNNPGVENNFTLEGLVQRQEMTDGNLDDALTNQSVPQDLNLESRKLLINGDSNICLNRFRLISKSIGGHH

SEQ ID NO: 103277 - protein, 193 aa, Gossypium hirsutum
  Clone ID: LIB3583-044-Q6-K1-G12.pep
EEYRDAKAKLFAKMVDPERHRKVVNIDDPHAPFFVAQGNPEVPMVTFAMENKNADVHPLKFELSLFETQVLVNTPHGILEISSGLLGRHNIYNILASVAVGIAVGAPLEDIVRGIEEVDAVPGRCELIDEEQAFGVIVDYAHTPDALSRLLDSVRELGPKRIITVIGCPGESDRGKRPMMAKIRTYKSEVAML

SEQ ID NO: 103278 - protein, 114 aa, Gossypium hirsutum
  unsure (1)..(114): unsure at all Xaa locations
  Clone ID: LIB3583-044-Q6-K1-G6.pep
HASAHAYEEQQQCEESCKSQYGEKDQQXRHRPEYPHMRYEECHHECRHQEERRRPLCQHRCLNRFELEQHQSQRQLQECQQHCYLHEQMPHRMQQCVMHCRERYQENTWRRERE

SEQ ID NO: 103279 - protein, 70 aa, Gossypium hirsutum
  Clone ID: LIB3583-044-Q6-K1-G7.pep
VAQLLTLQRFASRIDDVMDRKVSRTFVGNVVALMIKKFTFGITVIRFHRIYITLGVCIDIIITIVVLHPL

SEQ ID NO: 103280 - protein, 39 aa, Gossypium hirsutum
  Clone ID: LIB3583-044-Q6-K1-G9.pep
FISALIQGTTLPWGKGSEGYAFNLLNHTPLFSNQNFRFY

SEQ ID NO: 103281 - protein, 181 aa, Gossypium hirsutum
  Clone ID: LIB3584-050-P1-K2-A2.pep
ATADPLSRRTRMYWQPPMDRFFIDLMLEQLQNGNQIDGVFCKQAWTEMIASFNAKFGFNYDVDILKNRYKTLRRQYNVIKNLLQLDGFTWDDDRQMVIADDSVWQDYIKGHKDARQFMTRPVPYYKDLCLICNSPYPDGSDCFSLQCTDPENRVQEVKLGQATKCSPSPVTSVSGEDEIDV

SEQ ID NO: 103282 - protein, 46 aa, Gossypium hirsutum
  Clone ID: LIB3584-050-P1-K2-A5.pep
WSFQDLSSIYKIFRVSRTLPVPSCPPQFSVMMTVMRLSDALYAHIK

SEQ ID NO: 103283 - protein, 72 aa, Gossypium hirsutum
  unsure (1)..(72): unsure at all Xaa locations
  Clone ID: LIB3584-050-P1-K2-B1.pep
CVHLSKLSTYYKIVKTNXTQSIQSIEYLLSLFSATFLLYSTRLNHLDSVILITIYMIDCCIQYTHHFLYLIY

SEQ ID NO: 103284 - protein, 101 aa, Gossypium hirsutum
  Clone ID: LIB3584-050-P1-K2-B4.pep
VSKIQFNGNQILSNSNSFTYMKKGKKSLRHVRILQRPIFEPLENTRKMKSPDSLTDQTSRDKPRKCARNLEREANKQEKINREKGKLTEQIRPEREPAHAS

SEQ ID NO: 103285 - protein, 147 aa, Gossypium hirsutum
  Clone ID: LIB3584-050-P1-K2-B8.pep
GHECAGIIEEIESEVKNLVPGDRVALEPGIGCWRCDLCKEGRYNICPDMKFFATPPVHGSLARQVVHPADLCFKLPDNLSLEEGAMCEPLSVAVHACRRANIGPETNVLVMGAGPIGLVTLLAARAFGAPRIVVVDVDDYRLSVANN

SEQ ID NO: 103286 - protein, 114 aa, Gossypium hirsutum
  Clone ID: LIB3584-050-P1-K2-C12.pep
GEAFTYIGQLDFFLRECPKGMKAMSTGLFLSTLSLGFFVSSLLVTVVHKVTGNNKPWLPNNLNQGRLYNFYWLLTILSCFNLGIYLVFAKWYMYKDKRLADEGIELEEAEPTFH

SEQ ID NO: 103287 - protein, 177 aa, Gossypium hirsutum
  unsure (1)..(177): unsure at all Xaa locations
  Clone ID: LIB3584-050-P1-K2-C5.pep
KIVLATNIAESSITIDDVVYVIDCGKAKETSYDALNKLACLLPSWISKASAHQRRGRAGRVQPGVCYRLYPKLIHDAMLEYQLPEILRTPLQELCLHIKSLQLGSVGSFLAKALQPPDPXSVENAIELLKTIGALGDAEELTPLGRHLCTLPLDPNIGKMLLMGAIFQCLNPALTIA

SEQ ID NO: 103288 - protein, 117 aa, Gossypium hirsutum
  Clone ID: LIB3584-050-P1-K2-D5.pep
MAGEDLVELKFRLADGTDIGPSKYSPATTVASLKEKILAQWPKDKENCPKTTQDVKLINGGKILENNSTLADCTLLVGELPGGVITMHVVLRLPLSDKNSEHVNLYGDLTIHRETTG

SEQ ID NO: 103289 - protein, 74 aa, Gossypium hirsutum
  Clone ID: LIB3584-050-P1-K2-D8.pep
VGDVEKGFSNRLKLWYDSLGGDAIGLTWERSKKREREEEETDGKYPVDLLRNIGELGKGFVRDVYLLKAPRLSS

SEQ ID NO: 103290 - protein, 67 aa, Gossypium hirsutum
  unsure (1)..(67): unsure at all Xaa locations
  Clone ID: LIB3584-050-P1-K2-E11.pep
MTSTYTNIKDLLSLSCAYYKFLEYLEXTKLIYTFQIQSNNXIKKSLYIFVPKDILLQFLNKSSLLNL

SEQ ID NO: 103291 - protein, 180 aa, Gossypium hirsutum
  Clone ID: LIB3584-050-P1-K2-E12.pep
VANHKYRYSNRLSQPQHSTLTSISNKKKESGSNSETILSNIVSEHDAATPSPTVTSQRNMIPSTAGATDQSRHTEVATSCMEQRECPSSVNQHEPTFGVNPFHHSSLEMNSSRQFYDRLASGTNQMDQKLDSVEDKGHISPTVNQSGTGSFCNGSISQLNGIAYGSGSASNSNVDQVIVR

SEQ ID NO: 103292 - protein, 55 aa, Gossypium hirsutum
  Clone ID: LIB3584-050-P1-K2-E7.pep
RICTCMVTSYISSLKECSLHLCNLCFERQGFHLFKFLMLGAQLIFPIHVYIGSIR

SEQ ID NO: 103293 - protein, 183 aa, Gossypium hirsutum
  Clone ID: LIB3584-050-P1-K2-G4.pep
HASEDEWSKITRSTVSDWDRNAETIVQWSPFSSEADLLRQFNLMKDHGTRIIIYNLWEDDQGLLELDFHADQHDIQLRGVNRDEKNIQMAKEFPNSRHFLTYRHSLRSYASILYLRLPPNFRIILRGKDVEHHNIVNDMMLTEMITYRPNPSAEGAPKDLNLAALVTIGFVKDAKYHIDVQGF

SEQ ID NO: 103294 - protein, 37 aa, Gossypium hirsutum
  unsure (1)..(37): unsure at all Xaa locations
  Clone ID: LIB3584-050-P1-K2-G9.pep
PRVRGRVGRRVILFLXFEQVQAGVLEEVLSCSFRSRV

SEQ ID NO: 103295 - protein, 94 aa, Gossypium hirsutum
  Clone ID: LIB3583-045-P1-K1-D3.pep
MFAPSVIYIIIVVAGWCRFIRLSPFRSFPSLSRPVGTRDSCWFPLRQLFVLSAQACIISYTPDAVSVRADHIHRIVKKNASSLLKLLCLRSMFS

SEQ ID NO: 103296 - protein, 200 aa, Gossypium hirsutum
  unsure (1)..(200): unsure at all Xaa locations
  Clone ID: LIB3583-045-P1-K1-H1.pep
XGREDNFVYVSEALMAGMAAGAVESLTSTPFELIKLRAQVTSASRITRASSASENKAVMPAVSKLLRGYTLDMKVLNNAVGMLSILNSKHSNMVGAIQEYPWMMTGSGRPPPVYDVRRPSEIISLEGWGALWRGLRSGIARDSVFGGIFFSTWELLHQVMLNWKAAGMDPPPRYDEEIGPLSPLAASLAAGFSGFSCCCS

SEQ ID NO: 103297 - protein, 107 aa, Gossypium hirsutum
  unsure (1)..(107): unsure at all Xaa locations
  Clone ID: LIB3583-046-P1-K1-A2.pep
DFPTFDGLEDPLIWLHXCEXFKNQHTNKVDKVSLAAFHMLDEXQLWYYHIKLEGHAMNWLKIRNNCSLYFGPXVGNSPLGDKVSLKQTGIVALYQGKFQEKLPRVVQ

SEQ ID NO: 103298 - protein, 32 aa, Gossypium hirsutum
  Clone ID: LIB3583-046-P1-K1-C1.pep
PSTNILKTLDSPFALCKPYCIHKPTNREDLNK

SEQ ID NO: 103299 - protein, 51 aa, Gossypium hirsutum
  unsure (1)..(51): unsure at all Xaa locations
  Clone ID: LIB3583-046-P1-K1-D2.pep
FVKAFTAFRAGVSQTNCPLNLRVDLVDFVLVASGYLISFSPFXNYLSRHHF

SEQ ID NO: 103300 - protein, 157 aa, Gossypium hirsutum
  Clone ID: LIB3583-046-P1-K1-F2.pep
MEATPEGNESSRDAKTLISFYSNYLSNRFTSLFPSFPSNFLEKISNLYRQTLLPISTKRRAGLPLPLPTNSVNSIRTASEASRIYEVLNDIMDRFILNLHKIQENLQFWQSIAEGSNARKVYFMIFERGPRAFVNGSVQLMREAVTDGSAMQNLSQS

SEQ ID NO: 103301 - protein, 170 aa, Gossypium hirsutum
  unsure (1)..(170): unsure at all Xaa locations
  Clone ID: LIB3583-046-P1-K1-F3.pep
MVTIVXANXGLNXXXSXCNAVAVAGYLNATLLIPNFHFHSIWXDPSKFKXIYDEDYFIXXPXXMIITAWSSIQYYKDVVLPKLLEEKIIRISPFANRLSFDAPPAVQRLRCLANYEALRFSSPILXLXETLVARMKELSANSGGKYVSVHLRFEEDMVAFSCCVFDGGQQ

SEQ ID NO: 103302 - protein, 109 aa, Gossypium hirsutum
  Clone ID: LIB3583-046-P1-K1-H2.pep
PASAPRPALHSFHDYVAEELMGALHEIYGLRWSVATYIEGHSTLARYIGCIPKPAPAECLVHRLFTLCTLTTHHSQRIFETEKLNHVGHQYQQAKEVFLRDTIQLKDCY

SEQ ID NO: 103303 - protein, 123 aa, Gossypium hirsutum
  Clone ID: LIB3583-047-P1-K1-A5.pep
PRPTGYAFDYGKNGLSFSDQAFRLVSEAWNVLSNPSKKAIYDNELRFLQFGPVSQFGEGGGGYQQQHLLHQQPHLPRSVISSFFHASSPASPSYSVSDDVPSPLFSVSVFLFCFCFRSFSLLA

SEQ ID NO: 103304 - protein, 138 aa, Gossypium hirsutum
  unsure (1)..(138): unsure at all Xaa locations
  Clone ID: LIB3583-047-P1-K1-B1.pep
GLFSDFGKKXKXLLNKXYTSDQKFTISSSSYTGLALVSNIVNKGGLSSGDVAAQYKHQNAVVDFKLDTXNILTTLTITDLHPSAKTVASFKLPDYNSGKLEVQYFHEHATVATAVGLKKSPAADFSATIGAPGVALGA

SEQ ID NO: 103305 - protein, 173 aa, Gossypium hirsutum
  unsure (1)..(173): unsure at all Xaa locations
  Clone ID: LIB3583-047-P1-K1-B4.pep
GKQPXXTLGLTISFAXKPWQSADRFRCIXVGLRLIQPLXDPDMTDKXKLEYYKSQEKDYKRRIERARPCLLPMQVHREVLQMLRDQGKVSARLLQKIRDRVQKWYHDEGYACAQVVNFGNLNTKEVVCEVVEGDITQLVIQFQDKLGNVIEGNTQLPVVRRELPRQLRQGNVF

SEQ ID NO: 103306 - protein, 86 aa, Gossypium hirsutum
  Clone ID: LIB3583-047-P1-K1-B6.pep
IPDFSPTSQNVNSMKVLGERKHEQEYISLFCDSQSALYLVRILLFTQERNTSGSSITSFMRKWDGRYTENLYQRQHSRFHDKGNEY

SEQ ID NO: 103307 - protein, 90 aa, Gossypium hirsutum
  Clone ID: LIB3583-047-P1-K1-D1.pep
MARNEEKAQSMLNRFIALKAEEKKKPKERRPFLASECRDLAEADKWRQQIMREIGRKVAEIQNEGLGEHRLRDLNDEINKLIREKSHWER

SEQ ID NO: 103308 - protein, 113 aa, Gossypium hirsutum
  Clone ID: LIB3583-047-P1-K1-D3.pep
RLHADDTSSSTRGPTYNDLPEDISTDATVKNRGIADSYEPYRTYQLCRLHCQQERPKAACTAQPKLPLTLRVDTRRGTVPCDSRGVNTTPNGTSQLAIAFNTGCLECTGHSLH

SEQ ID NO: 103309 - protein, 76 aa, Gossypium hirsutum
  Clone ID: LIB3583-048-P1-K1-A2.pep
MRTVKYNKHPPTIILTLQSLQEALFKILFSDLLYKTQPEIKTQTVVLKLLVYFKLPKCRQAAPKTHRTNPFLNSKS

SEQ ID NO: 103310 - protein, 179 aa, Gossypium hirsutum
  Clone ID: LIB3583-048-P1-K1-B2.pep
EAVEVLDQMVSRDCSPNTVTYNTLISTLCKENQIEEATELARLLTSKGILPDVCTFNSLIQGLCLTRNHTLALELFEEMKNKGCQPDEFTYNMLIDSFCCRGKLEEALSLLKEMESSGCARNVITYNTLIDGFCKNKRIQEAEEIFDEMELQGVSRNSVTYNTLIDGLCKNREVEEAAQ

SEQ ID NO: 103311 - protein, 88 aa, Gossypium hirsutum
  unsure (1)..(88): unsure at all Xaa locations
  Clone ID: LIB3583-048-P1-K1-B5.pep
PASAVGCYSLLIHFQDPWXQWXKLNSEVLDPRRYSAVIFKXNKVPKIISSNEDADLIGRYKGILISKGKDQGLRVDLSVVAALSTKSF

SEQ ID NO: 103312 - protein, 56 aa, Gossypium hirsutum
  Clone ID: LIB3583-048-P1-K1-C2.pep
SSVDLGHSSLAVSYVNVHCATAVYSLETESCVIDFWCRSRILLFISTTRNHRDPVF

SEQ ID NO: 103313 - protein, 192 aa, Gossypium hirsutum
  Clone ID: LIB3583-048-P1-K1-C4.pep
MAAHSYAILDFGGVKCLECCLNEALALHRNSPTFSNPEEMQASDSHPKASDDTEETVTGVDPIASPDSVALNASPDKIGTPTPGAVPAAETEGESSVNSPAGTKKSRKKKGRKNRKDASKQHQIQARYSPKTSPEELREICRQAKSSLIPLFEKKLTASDVDTRNGRLVLPKRCAEAYFPKISGQQGIFLTV

SEQ ID NO: 103314 - protein, 133 aa, Gossypium hirsutum
  unsure (1)..(133): unsure at all Xaa locations
  Clone ID: LIB3583-048-P1-K1-C6.pep
XRKHDKLLVDKKQSTRLDGGLVENLGDAFCKPDLEMVDVSAVNSDVKVSEGSSTQLVNNKFLMYTRKRKKDPLSSPDRDCSLDNDNSKRKTEDKRNGSLDSEKSTLTTESSRDSRRLAQVARQLISLSEKKWR

SEQ ID NO: 103315 - protein, 139 aa, Gossypium hirsutum
  unsure (1)..(139): unsure at all Xaa locations
  Clone ID: LIB3583-048-P1-K1-F2.pep
MGLLDSLLNWLRSLFFKQEMELSLVGLQNAGKTSLVNSIATGGYSEDMIPTVGFNXXKVTKGNVTIKLWDLGGQRRFRTMWERYCRGVSAIVYVVDAADRDGVPISRTELHDLLTKPSLSGIPLLVLGNKIDKSEALSK

SEQ ID NO: 103316 - protein, 182 aa, Gossypium hirsutum
  Clone ID: LIB3584-049-P1-K2-A8.pep
MERRAEARQRRKARFDSKRLSSMETDRSYQKIEGESSTDESDSESTAYRSNRDMLLQTANEIFSDASEEYSQLSAVKQKFEKLKKDYSSSYRDAYMSLSIPSIFSPYVRLELLRWDPLHGDEDFSDMKWHNLLFNYGFCEDGSSALDDSDANLVPALVEKIALPVLHHEISHCWDMLSTQET

SEQ ID NO: 103317 - protein, 45 aa, Gossypium hirsutum
  Clone ID: LIB3584-049-P1-K2-B8.pep
LIRLSQAVVIAASASLRFMIALGDLGSTLLAFHDGVHTYLHVNRV

SEQ ID NO: 103318 - protein, 80 aa, Gossypium hirsutum
  Clone ID: LIB3584-049-P1-K2-C12.pep
KKPHKKGLQPWELRPRGRPGSSQGLAVCGLHALNEPPPDPPYTVDTVSKTLPFLWQYISINLVPLISDTIFLDLRAYMLA

SEQ ID NO: 103319 - protein, 78 aa, Gossypium hirsutum
  Clone ID: LIB3584-049-P1-K2-C9.pep
ITDVPTDTKDRDEILESEFFDTRQAFLSLCQGNHYQYDTLRRAKHSSMMVLYHLHNPTAPAFVTTCNVCHLDIETGQG

SEQ ID NO: 103320 - protein, 40 aa, Gossypium hirsutum
  unsure (1)..(40): unsure at all Xaa locations
  Clone ID: LIB3584-049-P1-K2-D1.pep
VVVRDLAGTEAAGHQSDFLGIVVSIGLTRVIGEVTSXMGG

SEQ ID NO: 103321 - protein, 101 aa, Gossypium hirsutum
  Clone ID: LIB3584-049-P1-K2-D12.pep
LKEKFVATVSAGGLVINDTTVHLAEPTLPFGGVGDSGMGAYHGKFSFDAFSHKKAVLYRGFACDAFVRYPPYTRGKLGLLRALFDGSILRIIRALLGWAKA

SEQ ID NO: 103322 - protein, 162 aa, Gossypium hirsutum
  unsure (1)..(162): unsure at all Xaa locations
  Clone ID: LIB3584-049-P1-K2-F11.pep
MASRLLLQNLSKRHLLRSTFASRSASTLVLAEHEGGSIKAQSLSAVVAANSLSQDNPVSLLLAGSGSSLHQAAEKAATCHPSISQVLVADSEKFAYPLAEPWAKLIQLVQLKGDYSHVXATLDSFGKNILPRAAALLDGSSVTDVGDINGPRQFIKPIYAGN

SEQ ID NO: 103323 - protein, 101 aa, Gossypium hirsutum
  unsure (1)..(101): unsure at all Xaa locations
  Clone ID: LIB3584-049-P1-K2-F12.pep
LFSPHMASPPLLSSYMEAPIDPQQDDHXLLSPDRNFALHGEIMMFVFLLLFAAFLSFLLFDFYKKRCGCSDNANRQDFYSSEPVSLNKLFYVQPKTQFPKQ

SEQ ID NO: 103324 - protein, 70 aa, Gossypium hirsutum
  Clone ID: LIB3584-049-P1-K2-G12.pep
ILVLAKISSVYEFTFQHNKTHTQFKDIIIKKDNYSTEKWVSSNLTFSSGDKADPQKKIQSFFFNLSLIKY

SEQ ID NO: 103325 - protein, 168 aa, Gossypium hirsutum
  unsure (1)..(168): unsure at all Xaa locations
  Clone ID: LIB3584-049-P1-K2-H11.pep
MILHGSCMPFGGVSMSSRLSKPFPCTSVFASIPRFSTTDALYTRSSWKQDQDSKSWQVKGLPPLHLSAASTPLLSGDLGGLALTVPLFRRRTSSSLVPRASKDVPYSFRYPPMTKKPKWWWRSLACLPYLMPLHETWMYAETAYHLHPFLEXDFEFLTYPFLGAIGRL

SEQ ID NO: 103326 - protein, 63 aa, Gossypium hirsutum
  Clone ID: LIB3584-049-P1-K2-H4.pep
GPNGPKHIINAKNLRSPLPPCAAVLTSSLSTSRHAHIPYAPYRPAVTSAPAQPIPERQHTCTC

SEQ ID NO: 103327 - protein, 138 aa, Gossypium hirsutum
  unsure (1)..(138): unsure at all Xaa locations
  Clone ID: LIB3584-049-P1-K2-H5.pep
LIYLKAALAETLRLYPSVPQDFKYVVEDDVLPDGTFVPAFSTVTYSIYSVGRMKTIWGEACMEFRPERWLSPEGDKFDPPKDSYKFVAFNAGPRTCLGKDLAYLQMKSVASAVLLRYRLSLVPGHKVEQKXMSLTLFM

SEQ ID NO: 103328 - protein, 186 aa, Gossypium hirsutum
  Clone ID: LIB3582-013-P1-K1-A12.pep
ADFLFNRNERPVWKQRARIAWDVAKGILYLHEECEVSIIHCNIKPRNILLDDSLTAKISDFGLAKLLRPNQTSITSGTAWYSAPEWQNRALLSVKVDVYSFRVILLEIICCRSNIQVEGRSADEILLSTFVYNCFVGGELNKLVEGEEEVDMKMVERFVKVVLWCIQDDPNLRPLVKDVILMLEGT

SEQ ID NO: 103329 - protein, 72 aa, Gossypium hirsutum
  Clone ID: LIB3582-013-P1-K1-A5.pep
HIYLYSLSIKEIQIIYQLYQTFLDSTTPEDHSQAQTYTFQLSHTYKGLRNHRKQTQSPYVGCLVYSLYCYGS

SEQ ID NO: 103330 - protein, 183 aa, Gossypium hirsutum
  unsure (1)..(183): unsure at all Xaa locations
  Clone ID: LIB3582-013-P1-K1-B1.pep
PTRPPTRPGEGFLARDITIDNSAGPEKHQAVALRVNADFTALYRSSINGFQDTLYVHSFRQFYRECDISGTIDYIFGNAAVVFQACNIITRMPMPGQFTVITAQSRDSLDETTGISIQNCSILATVELYGNSSRFKSYLGRPWRVYSTTVYIESYIDDXINPSGWTKWSNDEGLDTLYYGEYD

SEQ ID NO: 103331 - protein, 117 aa, Gossypium hirsutum
  unsure (1)..(117): unsure at all Xaa locations
  Clone ID: LIB3582-013-P1-K1-B11.pep
MITLSTIKSDDCYNKIPTHLTEAYLSGAGYSIIAALAVMFIFGMELNSYFTVSNYTSGIDDDTSDGDFLRADFDMSLPALSCEFASVXDVSDVLRTTRFNITKTMRKFSIDQHLRPT

SEQ ID NO: 103332 - protein, 78 aa, Gossypium hirsutum
  Clone ID: LIB3582-013-P1-K1-B8.pep
AGNGQVLKHYKDLSPFLRKCKTLTLSPDFLIRHSYYPNISLKDFINRLGKRLDVMQQCTSYHLARKKQEPDPIHHSNQ

SEQ ID NO: 103333 - protein, 173 aa, Gossypium hirsutum
  unsure (1)..(173): unsure at all Xaa locations
  Clone ID: LIB3582-013-P1-K1-C7.pep
PRVKXRRXXNAGXDXXMEHTTPPFSSLPSGQRKNGEESPSDFSPGLIDLHSFVTELLPEVKHLRFNCASIWTSGYDAEXXRYVAYALYGVKFAFALIRVSIGFCLQVRKRPLNKKGLARNEEDIIETVSNSLVVHETKLKVDLTEHLEQHEFVFDAVLKEEVSNDEGVEKPIL

SEQ ID NO: 103334 - protein, 56 aa, Gossypium hirsutum
  Clone ID: LIB3582-013-P1-K1-D12.pep
PKKHEGDAPATIINMYCKPYLAQYIIDHLYADMQRKGRHMRIIIPSKRMDERTVHQ

SEQ ID NO: 103335 - protein, 67 aa, Gossypium hirsutum
  Clone ID: LIB3582-013-P1-K1-E10.pep
MHSDSILFDTSVIHPLVIDSAHRIFHTPTVSRYLSWLSVHLSIRPRTSPRCVVGWCTSDASLRRTRR

SEQ ID NO: 103336 - protein, 103 aa, Gossypium hirsutum
  Clone ID: LIB3582-013-P1-K1-E12.pep
MMRRRGASAVAPAACANAVTRRPGLQPGRSIKEPRYICVRKQPLNRFVTDILYPLNKTRDWLRTFHSFEEAVRAYNSVSRTLRGLKAKTNFPINSLNIPDFSF

SEQ ID NO: 103337 - protein, 125 aa, Gossypium hirsutum
  Clone ID: LIB3582-013-P1-K1-E9.pep
MASSDNGNLKEQIEESSDTKTTGQISLQVSSSQKILLNSENPQRKPFMNFMSPPSRFKFLDFSSASASFKRFAEERDEVSRLVASSSGHRIRERLTGVFAKKIDWVSLMKMCKEWIRDPMNMGLF

SEQ ID NO: 103338 - protein, 154 aa, Gossypium hirsutum
  unsure (1)..(154): unsure at all Xaa locations
  Clone ID: LIB3582-013-P1-K1-F1.pep
LITLISCSHQWPAVTLSYRTSDQGQIAYTTNYKISPSTTXHLTVLTLLPICCTLLALTGLTLTDTFICLCIATPLFIIFSPVLVPSAITVFMAMGGGCVDRAFVFTGLSSLFYVFNRFRQATVTKHLYSDRTKRCLQDILLYVEQKNYQTWLTI

SEQ ID NO: 103339 - protein, 131 aa, Gossypium hirsutum
  Clone ID: LIB3582-013-P1-K1-G11.pep
ESSIISVALAVNIVIIILQGQEDKIELEKAIMDLTYLVLESHGSYKSYVMARTILIFFAYNLFHGIQRHSWTLMRQYCFEALKSDLSISGLVYDSDIPIKPNERTPSILSRPLHTNPARTRLDSSICNCDQ

SEQ ID NO: 103340 - protein, 100 aa, Gossypium hirsutum
  Clone ID: LIB3582-013-P1-K1-G12.pep
NCQRSNTGLTTVVRHQSPLYYVNSISLGTPRRLHLHLHPHVMNRTNQITYSRYTCSPLLLYPNRAYATACITYLTHRLAASATGSSPPMHWMLMTSCHMP

SEQ ID NO: 103341 - protein, 109 aa, Gossypium hirsutum
  Clone ID: LIB3582-013-P1-K1-G6.pep
MSDNNSPPGSPKQNPAQNSETNLLPKDDSSLETIVRKIQDSMSLAKRHKFWETQPVGQFKDVGDTSLPEGPIEPPIPLSEVKQEPYNLPNPYEWTTCDMDSEDTCTEVY

SEQ ID NO: 103342 - protein, 76 aa, Gossypium hirsutum
  unsure (1)..(76): unsure at all Xaa locations
  Clone ID: LIB3582-013-P1-K1-H10.pep
VGPGARCVPVRCWPCWRRAFVLLGSSVRFRWCFPRRGVVVAVLVXCXLVSLFLSSLVACGVLLSWLSWLVRPRSCA

SEQ ID NO: 103343 - protein, 40 aa, Gossypium hirsutum
  Clone ID: LIB3582-013-P1-K1-H3.pep
LTIPLFFRHKQQTQFLGFQHNRGCGPTTRLSDHSTAPFHH

SEQ ID NO: 103344 - protein, 189 aa, Gossypium hirsutum
  unsure (1)..(189): unsure at all Xaa locations
  Clone ID: LIB3582-013-P1-K1-H6.pep
LWKHFRGDEKPPEKLGASREYNVDMMPKFMMANGSLVRILIHTDVTKYLNFKAVDGSYVYNKKKVHKVPATDVEAFKSPLMGLFEKRRARKFFIYVQDYDDNDPKSHEGLDLNKVTARELISKYGLEDDTIDFIGHALALHSNDSYLDQPALGFIKRMKXYAESLARFQGGSPYIYPLYGLXEXPQAFA

SEQ ID NO: 103345 - protein, 102 aa, Gossypium hirsutum
  unsure (1)..(102): unsure at all Xaa locations
  Clone ID: LIB3582-013-P1-K1-H7.pep
SISCNLPAIPHPTFAREPVPFSLSPKLSNKIGLEAAVEAAAEFLKQAGKPVLVGGPKLRGGQGCQAHDRVSAAIGYDVSVMPSGHGLAPEHYPHXIVTYWGA

SEQ ID NO: 103346 - protein, 198 aa, Gossypium hirsutum
  unsure (1)..(198): unsure at all Xaa locations
  Clone ID: LIB3582-014-P1-K1-A10.pep
AAGHRYVNWAAKMAVGLDSGVPWVMCKEDDAPDPVINTCNGFYCDAFSPNKPYKPMLWTEAWSGWFTEFGGPIHRRPVQDLAFAVARFIQKGGTFINYYMYHGGTNFGRTAGGPFITTSYDYDAPIDEYGLIRQPKYSHLKELHKAIKLCEHALVSSDPTVTSLGTFXQAHVFSSKGSCAAFLSNYDMKTCCSVIFNN

SEQ ID NO: 103347 - protein, 176 aa, Gossypium hirsutum
  Clone ID: LIB3582-014-P1-K1-A12.pep
PRVRSNSSRTTIIISILAVAFAALLISNVICIILRFRKRKLKPQKHEATEEGDEIATADSLQYDFNTIRAATNRFSDADKLGQGGFGAVYKGILAGGKLIAVKRLSTDSGQGDLEFKNEVQLMANLQHRNLVRLQGFCLEGNERLLIYEFVHNGSLDKFLFDPAKRPYLNWEIRYK

SEQ ID NO: 103348 - protein, 70 aa, Gossypium hirsutum
  Clone ID: LIB3582-014-P1-K1-A2.pep
YGTYFWIFLKKSYSYMGLKRRGVMSENQGMVCNCITNRGFCGEQKTILTKKNDKVKRRFRGHIMINHTGT

SEQ ID NO: 103349 - protein, 141 aa, Gossypium hirsutum
  Clone ID: LIB3582-014-P1-K1-A9.pep
MMGEFEEKKVAQSFNSCFPFFVRIMKRFNVSGSYTLNIPYQFAMEHLPNCKTEIVLRNLKGACWTVNSVPTTRVHTSHTLCGGWLSFVRSNEIKAGDICIFELVHKFEFRVHILRVGQEDLIRQSRKAVLDRSDSTLLKKL

SEQ ID NO: 103350 - protein, 116 aa, Gossypium hirsutum
  unsure (1)..(116): unsure at all Xaa locations
  Clone ID: LIB3582-014-P1-K1-B2.pep
FIVYELMENGSLETQLHGPSHGSSLTWHRRMKIALDTARGLEYLHEHCNPPVIHRDLKSSNILLDLDFNAKLSDFGLAVTDAATNKNNLKLSGTLGYLAPEYLXDGKLTDKSDVYA

SEQ ID NO: 103351 - protein, 183 aa, Gossypium hirsutum
  Clone ID: LIB3582-014-P1-K1-C5.pep
KKKIFICNKKMEDSSPKEDDPGVLKLLEALKQASHELQAHPTYKSVQSNSSPIKALLELETESDSIISKDPHLSTLSRHLAELKILVETLERNRGYGLRSFLTRRVSTHSISRVAGSIESEVQALMDRGSIDSLINALKDPWKDEDELARLLSQFEVRVSQGFNPELQDSVLKSKAFSVLQTV

SEQ ID NO: 103352 - protein, 172 aa, Gossypium hirsutum
  Clone ID: LIB3582-014-P1-K1-C9.pep
PTRPPTRPNNPQRLKPSIYARHCASLCLNTKAQICLFFFIFQIIFEMDSLPDAIIQYILSHLSNARDVAACNCVSKRWRESLTYLRSLYFPRNSFDSRPGSYSSDTVVWKMLSATACLEELVVYSPFTSASLASWLSLVHSSLKDLELRMDNVMDYQAYLDSPSKLDCIAAA

SEQ ID NO: 103353 - protein, 92 aa, Gossypium hirsutum
  Clone ID: LIB3582-014-P1-K1-D1.pep
MVLMSTMPVTDFNEIAKHFIEGIYVHLYNTNLRGGMTTQPEVANSNFGNPTKSYGYQTNLTNQFSGQYNTVEEQIRGVSSKVLQYLRRLACL

SEQ ID NO: 103354 - protein, 51 aa, Gossypium hirsutum
  Clone ID: LIB3582-014-P1-K1-E2.pep
KGTVDQNYQVNSIKLDVDRREKKEIRKLKEKEKCIKKQCLPRVTSGAASLG

SEQ ID NO: 103355 - protein, 127 aa, Gossypium hirsutum
  Clone ID: LIB3582-014-P1-K1-E9.pep
IEESHSIEMESYKKAGQGSVGTENSGDATKDSSAAAKDCSPAADKHFEQLRLVSGKIEFPDWASDVSSILWIPIRAIDDKLARRSSSRAPEKQIIVDRMKTIALKLEFGISKNQIYDTTIAFHFNDP

SEQ ID NO: 103356 - protein, 198 aa, Gossypium hirsutum
  Clone ID: LIB3582-014-P1-K1-F3.pep
QDQCRVQLDKNVKLLDCPGVGMLRSEGNDASIALRNCKRIEKLDDPVGPVKDILKLCPERLLVTIYKIPGFQSVDEFLQNIATVRGKLKKGGIVDVEAAARIILHDWNEGKIPYYTMPPVRNQEEPSEARIVTELGKEFNVDEVYNTESSFIGSLKSTDDFHSVEVPASHPLKFDEAMLEDNAQPLQSNEGDEKQEDT

SEQ ID NO: 103357 - protein, 137 aa, Gossypium hirsutum
  unsure (1)..(137): unsure at all Xaa locations
  Clone ID: LIB3582-014-P1-K1-G5.pep
HACNADRIESHIVSLNVTPKYRERKSYWKYYAAQEVATVITINIEGNNDACNYLXELYYGRXSSSNIYSLGYDXVDMLVNILIGGLTALYNARRHREGHHDRHTSIDTAIKAGYHDGHNHVHMLMLLEELIEIYLPH

SEQ ID NO: 103358 - protein, 55 aa, Gossypium hirsutum
  unsure (1)..(55): unsure at all Xaa locations
  Clone ID: LIB3582-014-P1-K1-G6.pep
LPFPSSLVLSSLRLFFFXSYSLPRKIGKPFQRSISFGTRITKALGQAFGTNVSCD

SEQ ID NO: 103359 - protein, 71 aa, Gossypium hirsutum
  unsure (1)..(71): unsure at all Xaa locations
  Clone ID: LIB3582-014-P1-K1-G7.pep
PLPLFCYTSFPLMIXDAHVNKXKVTHSPNKKXXFYPFNQXFQEFYYKYLLQVQIQNHTRLTFVTTFQETFQ

SEQ ID NO: 103360 - protein, 194 aa, Gossypium hirsutum
  unsure (1)..(194): unsure at all Xaa locations
  Clone ID: LIB3582-014-P1-K1-H1.pep
DAWGLETLRSSDLISQKQQVSACLEDSGLVKELPAKLIEIEKLKSDNLAKDNELKALRNRQKELEAHICSVEKQKSQLEENMEIMRREVVVTAKFLDDLRSEMMELNSNMDSRMSANKILIKKPSELEEGKKGMEVYLSQLEEENLLLSEGLCCLEEKLMYPNDGREYCHVELQIPEIDATNXKDEIIRRWEMK

SEQ ID NO: 103361 - protein, 70 aa, Gossypium hirsutum
  unsure (1)..(70): unsure at all Xaa locations
  Clone ID: LIB3582-014-P1-K1-H10.pep
LNLIDLAGSESSKAKTTGIRXKEGSYINKSLLTLGTIILSQEKNIQRLQELVGIASFSYLAWLIASSTQT

SEQ ID NO: 103362 - protein, 63 aa, Gossypium hirsutum
  Clone ID: LIB3582-014-P1-K1-H11.pep
IINYTLSFSLPFHFVLVLDLFIITCISVGFCYDFFGFFFINPLTLPVHLYFFGSDIFIYHCFI

SEQ ID NO: 103363 - protein, 43 aa, Gossypium hirsutum
  Clone ID: LIB3582-014-P1-K1-H6.pep
NRIKLDIKRSFKVNWLISVSLQTYKRLHTNKKATCQRLSGSPS

SEQ ID NO: 103364 - protein, 168 aa, Gossypium hirsutum
  Clone ID: LIB3582-015-P1-K1-A1.pep
HASGPIPSAYGFFKRLEFLHLAGNFISGNIPPELGNLQTVTHMEIGYNSYEGNIPWQLGNMSELQYLDIAGSNLSGSIPKQLSNLTKLQSLFLFRNQLTGLIPWEFSRILALTNLDLSDNFISGPIPESFADLKNLRLLSLMYNEMNGTCPDGIAELSSLDTLFIWNN

SEQ ID NO: 103365 - protein, 130 aa, Gossypium hirsutum
  unsure (1)..(130): unsure at all Xaa locations
  Clone ID: LIB3582-015-P1-K1-A11.pep
MTRVFILIFLSGLRGTKTGMLVQPIVXYHSDLCTSRISRRRPFISCGEQELVATVVDLIGYAGDLCYLFGDNLSTETKLEAIDAFAIWFGILYVANNMLQGSCRALLADIYRNRHKKTLTANACLCFFMA

SEQ ID NO: 103366 - protein, 36 aa, Gossypium hirsutum
  Clone ID: LIB3582-015-P1-K1-A4.pep
VYLIFFFFIIPALFFFFFFFFFFFFFFFFFFFFFFF

SEQ ID NO: 103367 - protein, 64 aa, Gossypium hirsutum
  Clone ID: LIB3582-015-P1-K1-B6.pep
HLSHCTIHRTAKRIGRLVVHDQCHTLIHLHFKLESIRLLRSHTNTLCTSMETLLMDLIINTIAD

SEQ ID NO: 103368 - protein, 52 aa, Gossypium hirsutum
  Clone ID: LIB3582-015-P1-K1-B7.pep
HPQHMSWRKGSGPCKGIVVCTHIICRSIGTATVRFPFALPYESSWIASSGSE

SEQ ID NO: 103369 - protein, 73 aa, Gossypium hirsutum
  Clone ID: LIB3582-015-P1-K1-C3.pep
YAGGKSDDYQPFPVKDQLPGVDFCLSSTPSWPEAVLLGFQHYLVMLGTTVIISSIIVPLMGGGNVEKADVINT

SEQ ID NO: 103370 - protein, 175 aa, Gossypium hirsutum
  Clone ID: LIB3582-015-P1-K1-C8.pep
SLCPENVFFHFLVSETDMETLVRSTFPQLKFKVYYFDPEIVRNLISSSVRQALEQPLNYARNYLADLLEPCVRRVIYLDSDLVFVDDISKLWNTNLRSRTIGAPEYCHANFTKYFTNSFWSDDRFSGTFRGRKPCYFNTGVMVIDLVRWRRAGFTRRIERWMEIQKSNRIYELGS

SEQ ID NO: 103371 - protein, 81 aa, Gossypium hirsutum
  Clone ID: LIB3582-015-P1-K1-D11.pep
LLHPLKYAKQISKLEPPLKLSTTKKVRQTSIFRFTTKHILTIVYQDSRVLLPFQDLPPLPLSFLPLLHLLPEDRMALVVVM

SEQ ID NO: 103372 - protein, 184 aa, Gossypium hirsutum
  unsure (1)..(184): unsure at all Xaa locations
  Clone ID: LIB3582-015-P1-K1-E1.pep
SAKSKASTLRNTIISLWVAIVEMGYAMSRLEIESELFEGGNVTSEAGCSNRSDKPFCKVDHEIAQLTNLKSVPNERLHQLMPGKKKLPVSPVKMLAGREGNYSRRGGFSSADRCHMISRYLPVNGPWLADQMTSRAYVSQFSADGSLFVAGFQGSDIRIYNVDRGWKVQKXIFAKKLRWTCTDT

SEQ ID NO: 103373 - protein, 162 aa, Gossypium hirsutum
  unsure (1)..(162): unsure at all Xaa locations
  Clone ID: LIB3582-015-P1-K1-E4.pep
MAMAMTHHHNRESSIDKHLDTGKSVRYTAEQVEALERVYAECPKPSSLRRQQLIRECPILSNIEPKQIKVWFQNRRCREKQRKEASRLQTVNRKLTAMNKLLMEENDRLQKQVSQLVCENGYMRQQLHTVNASATDASCDSCGTHSSQXLRNANNPAGLLSI

SEQ ID NO: 103374 - protein, 78 aa, Gossypium hirsutum
  Clone ID: LIB3582-015-P1-K1-E6.pep
HASAALFFFFSERDIYSLSLFPQKPFACVCYPLFFLSSATFLLTKISSFLAHSWFSRRLMNFLMKRLMVDFSSFQASL

SEQ ID NO: 103375 - protein, 66 aa, Gossypium hirsutum
  Clone ID: LIB3582-015-P1-K1-F1.pep
LHFLSFIIVLKNNRKKERRYLTLWIGHRSLFASSDLKLKKRSQGRKLSSKGHICRLSFMKEDWRWC

SEQ ID NO: 103376 - protein, 131 aa, Gossypium hirsutum
  unsure (1)..(131): unsure at all Xaa locations
  Clone ID: LIB3582-015-P1-K1-F11.pep
SSFSFCAPVCFALPSPLCVCPLAVVSASAFVFCGRVRVCPASCSCLAPCSFCACSPCSWLVCPPLGCSXLLASVWCSSVLSVXGLWSFFSLWLLSXXAFSFLVSSCAXPPPVPLCLLVXFGRCXSPAXRVG

SEQ ID NO: 103377 - protein, 168 aa, Gossypium hirsutum
  Clone ID: LIB3582-015-P1-K1-F12.pep
SASSSSCSSPIECRGWRLFSGGYISQKLREELTRALIEVKDGNIVDGGTEGSLETFSELVKEMTSKQQDIKAFAFKTKAMLLGMEQKVQSAKKRELMYWYLASRGVPKSLHCLCLKLAEEYAVNAMARSCLPPPEHVSRLADTSFNHIVLLTDNVLAASVVISSTVEN

SEQ ID NO: 103378 - protein, 92 aa, Gossypium hirsutum
  Clone ID: LIB3582-015-P1-K1-F6.pep
SSTLLLLSHAIYGHAYLPHSAINLFKKLYFIVNNYYEIHRLLNFLMVKGQNGRCYSYRRKYFCWERIGRKRKYKNYLIGSISNLISKFLFLE

SEQ ID NO: 103379 - protein, 79 aa, Gossypium hirsutum
  Clone ID: LIB3582-015-P1-K1-G3.pep
PIAETLEGIKLVYTLVPRMEHSLQPMLVTLLLTEKLTKHLLVHLQIHYLRHYMKHKLTISRPPLQLRLLNTMMVTMITL

SEQ ID NO: 103380 - protein, 167 aa, Gossypium hirsutum
  Clone ID: LIB3582-015-P1-K1-H10.pep
PTRPASIMFGMLHTGKLTDSHRAVDGIFGFGQQSLSVISQLSSQQVTPRAFSHCLKGNDDGGGILVLGEIVEPDMVYTPLVPSMPHYNLDLRSISVGGQVLSIDASVFSTSINHGAIIDSGTTLSYLADEAYNAFIDAINNAVSEHVHPVLSHGNQCYLITDSIGHI

SEQ ID NO: 103381 - protein, 61 aa, Gossypium hirsutum
  Clone ID: LIB3582-015-P1-K1-H7.pep
MDIHSGLSRGDDLTNPELLQWITDIEQRRGTALESNYQQTNYYNHQIKRHYTVIDQSDDSR

SEQ ID NO: 103382 - protein, 142 aa, Gossypium hirsutum
  unsure (1)..(142): unsure at all Xaa locations
  Clone ID: LIB3582-016-P1-K1-B5.pep
MTTTVAPKADKKHPAKKPTAETKTAADKATAETKPKVSKELPTEGGAAXGDKTKKSAETYTDTYXIYMFKVLNHVHPDIGVSSIAIRIMNSFINDIFEELAQHACRLARYNMNSTITYTDIQTAVTLELARELAKHATYEGT

SEQ ID NO: 103383 - protein, 76 aa, Gossypium hirsutum
  unsure (1)..(76): unsure at all Xaa locations
  Clone ID: LIB3582-016-P1-K1-C11.pep
QGSCTGFHDCVLHNDDTSFLAFLPVSSTTCSRCCCCCCCCCCCCCCCCCXCCCCCCGLPKNRPLTSDQLEGGLSFF

SEQ ID NO: 103384 - protein, 77 aa, Gossypium hirsutum
  Clone ID: LIB3582-016-P1-K1-C12.pep
GGERGRGSRSSSTVNTKYRCCIPQRKASEDCQRTPMKVLSSICCSSNAWSQMHHRTYIYIIPLHFYSKLYDQLIIIP

SEQ ID NO: 103385 - protein, 171 aa, Gossypium hirsutum
  unsure (1)..(171): unsure at all Xaa locations
  Clone ID: LIB3582-016-P1-K1-C5.pep
SGSISFGRFENEPLAWERRSSFSHNKYLEEVEKFSKPGLVIEKKAYFEAHFXKKALLLQGSSEGQTGGEDQTCENDAVENEGYREYQVVENHAAENKHYEEGSDSLSKDSHCNHFGENGLDDADCREDFCCGSGNEGNQSGDANEGSLCAHFDNGLEDSKYHTEGALIECG

SEQ ID NO: 103386 - protein, 177 aa, Gossypium hirsutum
  unsure (1)..(177): unsure at all Xaa locations
  Clone ID: LIB3582-016-P1-K1-D9.pep
VLDIEPADEDSCCFPDIKAENVIVGIENKYLSQRSFCPENPVITVCQTLLDKNRNSWEALNLSQKFCLPPLNDECLRKAVLGEKSENVSGPHGTNYMFGFQFSESEHLRAQHDTKLLEVLLPFPTLLPSLQDNISMSKLLPFQKNSTLSSSVLSWIQXVQPRISPLPTVIMXECLNV

SEQ ID NO: 103387 - protein, 183 aa, Gossypium hirsutum
  Clone ID: LIB3582-016-P1-K1-E1.pep
PTRPAVARLQGELAKDGREPPVSSKKMPEKSLSRNAAGTRSPDKTKGESPLDQFCVDLTARASEGLIDPVIGRENEVQRIIQILCRKSKNNPILLGESGVGKTAIAEGLAIRIAQAQIPAFLLNKRIMSLDIGLLMAGAKERGELEARVTALLSEAIKSGEVILFIDEVHTLIGSGTVGRRNK

SEQ ID NO: 103388 - protein, 85 aa, Gossypium hirsutum
  Clone ID: LIB3582-016-P1-K1-H11.pep
QLLEVEQKHGKSGYDEDTNCVGFARLGSEDQMIVAGTMRQLRTVNFGEPLHCLVIVGKTHPVEDEMLEFYKITTENPEQKGNGIP

SEQ ID NO: 103389 - protein, 48 aa, Gossypium hirsutum
  Clone ID: LIB3582-016-P1-K1-H4.pep
SLCNRQILEAVLNTRSDQLDQLCDPRHSLDMQQVQGMFSKTSQDHIIP

SEQ ID NO: 103390 - protein, 105 aa, Gossypium hirsutum
  Clone ID: LIB3582-016-P1-K1-H7.pep
MLAMEKDFDSKLRVQGTDDTNKDNSSNTGASNNVQRSKSFAFRAPQENFSIQDFELGKIYGVGSYSKVVRAKKKDTGMVYALKIMDKKFITKENKTAYVKLERIV

SEQ ID NO: 103391 - protein, 45 aa, Gossypium hirsutum
  Clone ID: LIB3582-017-P1-K1-A1.pep
HVSAHVITLFSCLQMKGHVCQSFTLRGLLAQHERASIIGYAYGYS

SEQ ID NO: 103392 - protein, 75 aa, Gossypium hirsutum
  Clone ID: LIB3582-017-P1-K1-A7.pep
MAGEGVSRETQMSIEASSMFPGFRFSPTDVELISYYLTKKLEGYEKCVEVIPEIEICRYEPWDLPDKSVIKSDNE

SEQ ID NO: 103393 - protein, 170 aa, Gossypium hirsutum
  unsure (1)..(170): unsure at all Xaa locations
  Clone ID: LIB3582-017-P1-K1-B2.pep
MSRLMLSSNKESKPEFPDATSSASASGSPDEKVVSEDAINEVDQFLREAIQNPRERLSILRMEQDVEKFIRDPNQQQFEFQQLPTSYLRLAAHRIAQHYSLQSMVLLDNNLPDGSGSRIIVCKTSECRLPRIRLADIPVNXPSEDPGVVKVAIKQRPQKRSQLVSNSNSN

SEQ ID NO: 103394 - protein, 64 aa, Gossypium hirsutum
  Clone ID: LIB3582-017-P1-K1-D10.pep
VWNGIISWNGGNLVLNNLNVNFVVANLRHTCKLHDNKFYIKEKLELVCNRLHLISHFTFSVCIT

SEQ ID NO: 103395 - protein, 66 aa, Gossypium hirsutum
  Clone ID: LIB3582-017-P1-K1-E1.pep
PVAFYCGNVAETTAGGKASLSGGTLSYLLPSFIRSSSMRTSLSIQVIEIEEVAWVLNYLYQQYNIT

SEQ ID NO: 103396 - protein, 175 aa, Gossypium hirsutum
  Clone ID: LIB3582-017-P1-K1-E11.pep
PRVRPRVRPRVRVNKAEKPRWSTAVSIFAKNLALLLVLVGLAQIIRRLALKSGDVSSVGTHTGLTEFEGRVAEVESFLKTTAKMIQVQVEVVDRKIENEIGGLRKELNERIVDQTVVLENSLKKMEEKNEELDKSLSELKSANLLTKEEFGKMYEQMLKEKGQNGESENAVSLSD

SEQ ID NO: 103397 - protein, 83 aa, Gossypium hirsutum
  Clone ID: LIB3582-017-P1-K1-E9.pep
PSPGWGGFSFPLACFKLNTMDGVLQPSVWTNTGVTLLQRHCQSCTFDSRSHTMCCHIRKPLPTDEQPDFRDEPDMRYHDYRQH

SEQ ID NO: 103398 - protein, 65 aa, Gossypium hirsutum
  Clone ID: LIB3582-017-P1-K1-F11.pep
CNQAAVSHHRLPWLAKYSVALTGLLMGSSHLALQTWMRSRALKGTAPHALESAVLGSAPHACANA

SEQ ID NO: 103399 - protein, 176 aa, Gossypium hirsutum
  Clone ID: LIB3582-017-P1-K1-F8.pep
DNVSLPRQNFGKLVPFEKNFYIESPAVREMTEQEVMFYRRTRDITVQGHDVPKPIRMFRDANFPDYCLEVIANLGFVEPTPIQAQGWPMALKGKDLIGIAETGSGKTLAYLLPALVHVNAQPRLVHGEGPIVLILAPTRELAVQIQEEAAKFANHANIRSTCIYGGAPKGPQIRDL

SEQ ID NO: 103400 - protein, 146 aa, Gossypium hirsutum
  Clone ID: LIB3582-017-P1-K1-G11.pep
NAGYGSGNLNATMHGVLTPSQWIELQHQALIYKYIMSNVPVPSNLLTPLKKSLYPYGFTSSSVGSLPYNSLGLGSFHLRYTGSTDPEPGRCRLTDGKKWRCSRDAVADQKYCERHIYRCRHRSRKPVKGHTDHTFHSFKGWIHVFL

SEQ ID NO: 103401 - protein, 136 aa, Gossypium hirsutum
  Clone ID: LIB3582-017-P1-K1-H3.pep
MATIVCHQGSQSCLESQLVEPRALRLTLSSARPRELISKSCSVNPEPGGWSLLQALFNSPQSSKREQGNENTYVHPLVKRSLSSLSEKSLELCTENLGSETGSDDVLEDDVFALSSHSSQGGNPPTWKSGQSLGGT

SEQ ID NO: 103402 - protein, 99 aa, Gossypium hirsutum
  Clone ID: LIB3582-019-P1-K1-A4.pep
IVDFARDMGLSPVVFEGDSLHVVRKLCNPNEDRSEIRALINEGKQRLLTSFATVEIRHCYREQNSIAHQLASLGVSLAFGSTLGIGGTFLGGTRSCCRD

SEQ ID NO: 103403 - protein, 88 aa, Gossypium hirsutum
  Clone ID: LIB3582-019-P1-K1-B1.pep
REEEKKENAVILQIAKSKAKQNPSLIYSKTTISHLLQLRKEEEELMASWKKTIATPFRKACTFFNQQPRDKKSQTGIYFSLPLLSLSL

SEQ ID NO: 103404 - protein, 65 aa, Gossypium hirsutum
  unsure (1)..(65): unsure at all Xaa locations
  Clone ID: LIB3582-019-P1-K1-B9.pep
MNKGVLQLDLHDDKAMQNALRADSTLXGIDSIAMDMRANAITGMGTVDPVTAVSKLRMRWPTYIV

SEQ ID NO: 103405 - protein, 145 aa, Gossypium hirsutum
  Clone ID: LIB3582-019-P1-K1-C1.pep
MADNYWNRQQPTPPMLSSGGMLKRPRTDYDAPPSGLHPAHEMHHNLARDDDQGGHLAVKDTKTIGSAYDRYLQSAQLSSFTSGEASTFGGLGRAVGVAMPARPMADPPVMGRPASAAPDLALNGGNVSFGGQFPIDPMARLGRDI

SEQ ID NO: 103406 - protein, 180 aa, Gossypium hirsutum
  Clone ID: LIB3582-019-P1-K1-C11.pep
PTRPHFPFLNYSSSSNPTQELEEILKNASMVNNTVILTTLNDAWARTGSIVDLFLESFMLGDGTRKLLDHLVIVSLDERAYNRCRIVHKHCYALVTKGVGFHQEAYFMTPQYLKMMWRRIDFLRTVLELGYSFVFTMLVQDADIMWFRDPFPRFFPDADFQISCDNYLRRPEDMNNSPNG

SEQ ID NO: 103407 - protein, 42 aa, Gossypium hirsutum
  Clone ID: LIB3582-019-P1-K1-C12.pep
TTTLTLFDYLYHYYNINPTHQRDDIFKGASMHNYTEITTTLI

SEQ ID NO: 103408 - protein, 149 aa, Gossypium hirsutum
  Clone ID: LIB3582-019-P1-K1-C2.pep
MNSLTLKPSSFVLQSSFTVFSSYDKSKQSFPSVRFPTNIKSNTRLGLRIKAYDSSKSDDASKPNGDSNPPNGTLKNQQPKARRDILLEYVKNVQAEFMELFVKRAPQQVVEAMRQTVTNMIGTLPPQFFAVTVTTVAENLAQLMYSVMM

SEQ ID NO: 103409 - protein, 53 aa, Gossypium hirsutum
  Clone ID: LIB3582-019-P1-K1-C4.pep
SDKIGSWFSCFFPVSESLKTKQVKNNKLLGELHVRMLLSPLLKKGITCIFVYT

SEQ ID NO: 103410 - protein, 139 aa, Gossypium hirsutum
  Clone ID: LIB3582-019-P1-K1-C8.pep
MVGLSVVLENQKSGNHNIFSKKTPQLISKTTMLINTSSKVSSSSSSSSRLSPPTTTSHMVPSFLEQCFLCKQKLLPGKDIYMYKGDRGFCSVECRCRQIFMDEEESLKKENCCLASMKIKPSTPSPSSSSSSRHHRKAY

SEQ ID NO: 103411 - protein, 182 aa, Gossypium hirsutum
  Clone ID: LIB3582-019-P1-K1-D11.pep
HASASLRLGDDQESGSLFTNSNWFALEDDRGSNDNPTGALPSASPNIEGAGVVNGDGEDDKVVVGKGDDLEDTATSSQVPDVKSEVNSADLSEDSKEAAHNANDEPPTWVEWRETSDGIKASGFAESAIVRNGEVQVKLEEKGSDTDHNQEYTCRPSPSSSSDNASETTLEPSAKSTNTNPW

SEQ ID NO: 103412 - protein, 82 aa, Gossypium hirsutum
  Clone ID: LIB3582-019-P1-K1-D3.pep
KTVHNSIYNNACFCRKKFSSIKIKSSFIHIPQDRPPLKKMQNHSDQRNEKEKRRKWYFNSYKGLYLITIFSYHISLHGLVNY

SEQ ID NO: 103413 - protein, 168 aa, Gossypium hirsutum
  unsure (1)..(168): unsure at all Xaa locations
  Clone ID: LIB3582-019-P1-K1-E1.pep
IFSAKTKNVFQPVIAECFKLLCNEYGTMSDKKKHFSVSRMALSLIGMPKLGFFVDVIQDCAVLVCWDAILGLKNMILETEWWPRPSPIVLEQCQKALPCMYYLFXKFPDKFKKLGGDDSNVMDMALGVLISLLKSVAFLRDCFVASDVSFFAAFQVRLSDQELGLFII

SEQ ID NO: 103414 - protein, 63 aa, Gossypium hirsutum
  Clone ID: LIB3582-019-P1-K1-E10.pep
WYLRNNLTQTFTTYHVFLINSFLLLEMVSIFFTLIFKTRILHVIIGLLQNLCYFLLKNSWDFL

SEQ ID NO: 103415 - protein, 179 aa, Gossypium hirsutum
  Clone ID: LIB3582-019-P1-K1-E3.pep
MAAIETLAFPSRQLLSNPLRFSSTVSVNLNPRFSGSRSRSISLVGSTSRVRTLRCTSLSSSPSIVDQSVKFREASKNGNLVPLYRCIFSDHLTPVIAYRCLVKEDDRDAPSFLFESVEPGLMASSVGRYSVVGAQPSIEIVAKENMVTIMNHEEGSKIDEIVDDPMTVPRRNMEQWEPP

SEQ ID NO: 103416 - protein, 128 aa, Gossypium hirsutum
  unsure (1)..(128): unsure at all Xaa locations
  Clone ID: LIB3582-019-P1-K1-E4.pep
TWQLIKRWNLCLVVDKDLGGMSDFXYELEDNVWDEFGASATDDHIVPRTVDEYGAQFKIQGDGRTKPQYEVNGVARNADNTAKYGILGEKKKGIHTLTKNKMLEKCPWSHSSDGIFPTPGDNDSLKEV

SEQ ID NO: 103417 - protein, 178 aa, Gossypium hirsutum
  unsure (1)..(178): unsure at all Xaa locations
  Clone ID: LIB3582-019-P1-K1-H6.pep
TTTHPYKIILDPYAKXISRGEFGALGPEDNCWPQMAGMVPTSEDQFDWEGDLPLRHPGRDLIIYEMHVRGYTRHESSGTKFPGTYXGVSEKLDHXMELGVNCIKVMRHHELTELEYYSYNSVXSDYKLNFWGYSTINYFSPMIRHSSCGIRSXGRHAINEFKIFVKEAHKRXIEVIMD

SEQ ID NO: 103418 - protein, 162 aa, Gossypium hirsutum
  unsure (1)..(162): unsure at all Xaa locations
  Clone ID: LIB3582-031-P1-K1-A12.pep
ASSPXFSLXXLXSLSFFXCXXVXXLVXPLPFXAFXVXGSXXFXLXXVXXLFXXXXXXXXXXXXXXLLXXLXXXXLXXXXSWSXXXLXCRXFXXXPXXXXXFVXFXVVSXXXPLVXRXXXXXGGXXFLXXLVLXXXXFLXFXLXFXXXXXXFXPPFXSXXLXX

SEQ ID NO: 103419 - protein, 209 aa, Gossypium hirsutum
  unsure (1)..(209): unsure at all Xaa locations
  Clone ID: LIB3582-031-P1-K1-A4.pep
WKNKRKVLATDMLSNANLNACYDLRREQVMKMVEDVYENVGKPIDISELAFCTLINSIGKMVWGGALRGEKGTAVEGHFKEISSQMVVLMGKPNIFDILPAIAWFDMQGIQXELSKSVNXFNELLKSVIELRMNTVTEKETSEQKSDFLQLLLDLHKNQDSPSSLTMNQVKGLLXDTTSTTTEWAMAELMQHPEIMEKVKKEITDVVGV

SEQ ID NO: 103420 - protein, 90 aa, Gossypium hirsutum
  Clone ID: LIB3582-031-P1-K1-A5.pep
KSFCFGHLCHPCFIKEFTNRQAEALLICFALVLFVFLPLLIPEEFLCQSLKHLKYEAEILDKIGRLYVLSLPNMHIHVLTHTGTRIFALV

SEQ ID NO: 103421 - protein, 89 aa, Gossypium hirsutum
  unsure (1)..(89): unsure at all Xaa locations
  Clone ID: LIB3582-031-P1-K1-A7.pep
RRVWWLRAXGXXXWXXXXLFXXXCXXXLXXXXSXALXLXXLXSXWXCXGSPXWGXXGXXLVXSXXPGGVGVXGWFXCAVVSRRWRRVGA

SEQ ID NO: 103422 - protein, 130 aa, Gossypium hirsutum
  unsure (1)..(130): unsure at all Xaa locations
  Clone ID: LIB3582-031-P1-K1-B7.pep
MAXGSXXKXNAPXXXXXXGQQXXXQRXGXTXRXAXRRXXXPXXXGXXTDEXXKTAKTXXXXXXGXPAXXEXKATXGKRXXXXGXDXXEPNRQXXRQXXXTXXGXGEXXXXAXXXEETXXQXXTXGKKTTR

SEQ ID NO: 103423 - protein, 141 aa, Gossypium hirsutum
  unsure (1)..(141): unsure at all Xaa locations
  Clone ID: LIB3582-031-P1-K1-C3.pep
VLXXXGALFRXXXVSLSLFSPSSXXXLXXPFAXSPFFGXSXXXPXXXLPVWXXVXXXXGXFXVXFVXXSXXXXXAFLGLXXXXXXXXXRXXCVXGVXXXXXXXXAFXGSLXSLSLFSCLXCXXXSEXXXXLXSPSVXXGLP

SEQ ID NO: 103424 - protein, 117 aa, Gossypium hirsutum
  Clone ID: LIB3582-031-P1-K1-C4.pep
MGVVLLHADARRHGNGRNSNQKASSGGENTWCIAKPSTENFRLNGNINYSCSQKGVDCKPIQPGGTCYRPNTIVSHASYAMNLFYKVAGKNSWNCHFNGTGIIISENPSIGSCNYPM

SEQ ID NO: 103425 - protein, 225 aa, Gossypium hirsutum
  unsure (1)..(225): unsure at all Xaa locations
  Clone ID: LIB3582-031-P1-K1-D9.pep
YIQWRKQVNLIIDGYGLTXFLDGTIAPPSXLFPCPMDLAHXNLAAQVFTQQDRLLTSWLLSTVSSSHQSSFDDACIECDIWTTTINLFAADIGAKQSRILHELHSLKKGNLSIKAYVARIKDLCAMLDASGSCISDEEKIEVMLAGLPSEFEAVISSARLLIGILSLQRLVDALVDCESGQAQVLQEVNLNVNLVEEALSVEGASRGGCPSGHGRGRTFRSHIQC

SEQ ID NO: 103426 - protein, 164 aa, Gossypium hirsutum
  unsure (1)..(164): unsure at all Xaa locations
  Clone ID: LIB3582-031-P1-K1-E10.pep
PRRPTPQFPPPQPGGAKATAEEAAXQTAQXEEKTEEPEKEQEATTDEAAAEAPAAEPAAEEPKEAEXAAERDEEXEAAAEXETKEAXEEPKXATEEPAAEEAPKETXPEPXAEATKETXEQTXATKETTEXXEAAAEAPKEEXKTEEEAKPXEXEAKXETEAPA

SEQ ID NO: 103427 - protein, 123 aa, Gossypium hirsutum
  unsure (1)..(123): unsure at all Xaa locations
  Clone ID: LIB3582-031-P1-K1-E4.pep
RTSADSEKAQGNPPEEHRXPAAGGEGDGKRTREETAQTFREERPETTRXHXTEGKXKTQAHGAQGPQHTRATEXXQDNXSNXTGTQENXSEXRRXXGXXRQATEAXPXXEADKGTRDRAPXPP

SEQ ID NO: 103428 - protein, 137 aa, Gossypium hirsutum
  unsure (1)..(137): unsure at all Xaa locations
  Clone ID: LIB3582-031-P1-K1-E8.pep
XXFLXFLXXXXXAXRXXXXXXXSXPXXXASLPPXXALAPXXXXXGXXXXXXXXXXXXXGXFXXXSFVXFXXXGXXLVPXXXLXFSXAACFXXAXSXLXFXXXGXLVALXVVATALCPXXXXGXXXLXXXAXRPXRVG

SEQ ID NO: 103429 - protein, 166 aa, Gossypium hirsutum
  unsure (1)..(166): unsure at all Xaa locations
  Clone ID: LIB3582-031-P1-K1-F1.pep
KXEAXXXTRXEQXDEXXGGRQSXRRQEGQGXXXKASQEQXRAXSQGXXXPRGKGSEGXAXNXKSQTXRYXNQNGRXNEXXXXXXQQQXREXXXXXXAXEXNKGXXXXPHXXXKATXXXXXTEGNGHXEKXXXHXXRQSXHXAXREEEEQEEQEXERRXGQXKRXRA

SEQ ID NO: 103430 - protein, 149 aa, Gossypium hirsutum
  Clone ID: LIB3582-031-P1-K1-F10.pep
MKPQILNPPNPNFFLPFPQEQQPLPKRLNHGQIPKLPFSDHELFIKKQQLVGFQEQKPLMVSQQQQAATLLDQLCKVAEMVETGNFSHAQGILARLNHLSPVGKTFQRIGFYFKEALQLLLLMYNNTPVSKNPTPFDVIFKMGAYKVFS

SEQ ID NO: 103431 - protein, 162 aa, Gossypium hirsutum
  unsure (1)..(162): unsure at all Xaa locations
  Clone ID: LIB3582-031-P1-K1-F7.pep
XPXNSPQXXTAGKEGTTRXAGEXKEGDXKTKEXEXPIIXGXAAKXSKTLQAENSCQIPSEEPGKLMGDQKNNLNDSVRNENMEIMENNVGESDPKKKRGRPRKAVVTSPKAFHAGRINDDQKTREVHLATAGISDMNEDDQPLSTWIGGIHSSGDEESRLSF

SEQ ID NO: 103432 - protein, 158 aa, Gossypium hirsutum
  unsure (1)..(158): unsure at all Xaa locations
  Clone ID: LIB3582-031-P1-K1-G7.pep
PTPAXTXXXXXSXXXXXXXXGGXXAEERXTNXHQXPXXGQXQQXQPXHQXQXQPQNPXXXQXKHRXRXEXXETEXXDQXEXQXQXXXXXXXXXKNQRKGPXXXXXTXXXXAGXXEQGEXXQGAXXPXXPETXQXQXQQXXQXRPQRXQHQKPRRXKEG

SEQ ID NO: 103433 - protein, 122 aa, Gossypium hirsutum
  unsure (1)..(122): unsure at all Xaa locations
  Clone ID: LIB3582-031-P1-K1-G8.pep
XXXXFXXXXXXXXVXXXXCPXXVLXXXXXXXXLXXXXXXGVGXGXXXAXXXXXXXXXXXLXXLXXASXAXXXAXXLCAXXLPVLXXWVXLLVLVLVPLXPLSCXFXXLXLXXLVXXWPXRVG

SEQ ID NO: 103434 - protein, 62 aa, Gossypium hirsutum
  unsure (1)..(62): unsure at all Xaa locations
  Clone ID: LIB3582-035-P1-K1-B2.pep
QTRSYFIFISIYXISTFIXFNPHRTQPFRIETIQPLFNHFQLSLRSYLAIQLINAANEVIQI

SEQ ID NO: 103435 - protein, 158 aa, Gossypium hirsutum
  Clone ID: LIB3582-035-P1-K1-B4.pep
QEKKTSLLDKEEIIPSCKDSKNIRLIVQSPEKDFEEERESVDPGSLQKETNDSLVVDCVDQPRGASAKTKNNPWRMDLQALGVSYKIKRLKQQLLMLERLKGKQESGEDMDGGDNGIKGFLLLISLLDKQVSRYQSLQGKTDDLCKRMVSNDINDFHW

SEQ ID NO: 103436 - protein, 99 aa, Gossypium hirsutum
  Clone ID: LIB3582-035-P1-K1-C1.pep
PTRPPRVRPRVRPRVRIIAAEYLGDGVVTEPCWLNYMREWGPTIVYDSRSELDRIINMLPFFVRFSVENIFDLFPTELYGEEGPTGPKEKDNWEGDERC

SEQ ID NO: 103437 - protein, 199 aa, Gossypium hirsutum
  unsure (1)..(199): unsure at all Xaa locations
  Clone ID: LIB3582-035-P1-K1-C12.pep
RQQIKESQKTQMMTSGKAHGSIVGSRMGDKRATLFLSGERIENRLKKPTTFLCKLKFRNELPDPSAQPKLMSLKKDKDRFTKYTITSLEKMYKPKLFVEPDLGIPLDLLDLSVYNPPSIRLPLAPEDEELLRDDAAITPVKRDGIRRKERPTDKGXSWLVKTHYISPLSMESTKQXLTEKQAKELREXKGGRNLLVNLN

SEQ ID NO: 103438 - protein, 67 aa, Gossypium hirsutum
  Clone ID: LIB3582-035-P1-K1-C5.pep
LIICVYHDMYYGGLRVKWVLESRHWSASKYNCYALQQAKLNIPFLFSSRTSSPRINHKKENSFGRVG

SEQ ID NO: 103439 - protein, 91 aa, Gossypium hirsutum
  Clone ID: LIB3582-035-P1-K1-D2.pep
NIQVLKAFANTGVELMVAVPNSDLLAFSQFQSNANSWVKDKFLPYYPATKITYLTGGFEVTESPNYASALVEPSMHNVPTALKKAGLHKKD

SEQ ID NO: 103440 - protein, 89 aa, Gossypium hirsutum
  unsure (1)..(89): unsure at all Xaa locations
  Clone ID: LIB3582-035-P1-K1-D6.pep
PRVRPRVRPRVRPRVRPRVRKVVVIFMSHTTVVVLVVLLFDLTLCRXNDESRKDIGLNXWEKFCFYKSNVRNDEFYALPFRLNKFFPPI

SEQ ID NO: 103441 - protein, 87 aa, Gossypium hirsutum
  Clone ID: LIB3582-035-P1-K1-D7.pep
IFGCFVCVCKKRSIHCLWLYSRNPKIKIKFFFLFLLSFSRLFAGTGYGASCERTEAVHGSVGCGAPRKPRASESFLILGHLGLVFLG

SEQ ID NO: 103442 - protein, 78 aa, Gossypium hirsutum
  Clone ID: LIB3582-035-P1-K1-E10.pep
WRLQQVQKTKGKGRRPLKLQQMELKRENLLLFGIILKKLMVIKIMMNVFISSNNGTNVMRCHSSRCKKAPFNLDKKQS

SEQ ID NO: 103443 - protein, 220 aa, Gossypium hirsutum
  unsure (1)..(220): unsure at all Xaa locations
  Clone ID: LIB3582-035-P1-K1-E11.pep
MAVEARNMNLFPPQLIPNGDFMKGYQGSGNIHNTQMQQEVSQIFPTVYQSLVRDPISAKADSGVTYNMNIPVSAPRKRPRDSYSYTVARKNEFCGVSSVLDDDIFSQIQKQQQQEIDRFIAQHTEKVRLEVEERRKRQSRMLITAIQEGVMKKLKEKDEEIQRMGKLNWVLQERVKSLYLENQLWRDLAXTNEATANSLRTNLEQVLAHVGEERHASGRG

SEQ ID NO: 103444 - protein, 170 aa, Gossypium hirsutum
  Clone ID: LIB3582-035-P1-K1-E4.pep
VWIVATNLFAADSSAKQSQLRHELHSLRKGSLSICSYVNKITSLCALLAASGSQISEDEQTAVLLAGLSSEFDAIISSVSLSTSLLSFQRIVDALLECEARQVRSAQEVLVAANVVEGPLIPPTDGPFRGGGHSSIQGRGRSFRPRVQCQICSRYGHLAQRCYYRYIRDE

SEQ ID NO: 103445 - protein, 224 aa, Gossypium hirsutum
  Clone ID: LIB3582-035-P1-K1-E7.pep
VDSSAGALARVHWLRVILDEAQTIKNHRTQVARACCGLRAKRRWCLSGTPIQNAVDDLYSYFRFLRHEPYDVYKSFCYGIKVPIARDYVKGYKKLQAVLKVVMLRRTKATLIDGEPIIKLPPKSIHMSKVEFSAEERAFYNQLEADSRSLFKEYAAAGTLNQNYANILLMLLRLRQACDHPLLVKGFNNDSIRNSDSVENSNPVGQVSVEMAKTLPRELLINLL

SEQ ID NO: 103446 - protein, 76 aa, Gossypium hirsutum
  Clone ID: LIB3582-035-P1-K1-E9.pep
MVKETEYYDVLGVSPSATEAEIKKAYYIKARQVHPDKNPNDPLAAQNFQVLGEAYQVLSDPTQRQAYDAYGNQDLS

SEQ ID NO: 103447 - protein, 214 aa, Gossypium hirsutum
  Clone ID: LIB3582-035-P1-K1-F10.pep
MLSRVNSGLVWMEGTKEDEHSSSWNRTNGNNNNNNNSVIMENKEMMGSSLSSFKSMLDDEWYVPNNGISSHHDIRELSFSPNLGDHQDNLLLHHHQQQQQQQQRPVDSSSSCSPSSSVFNNIDPSQVQFFLQPKPSLSSFLNVVSNNPLDHGFDLGEIGFLDNQATTNATTLLNREHTRVLGGFTDLSPGNQLDTANSCPETQFSGSRVVQLTE

SEQ ID NO: 103448 - protein, 222 aa, Gossypium hirsutum
  Clone ID: LIB3582-035-P1-K1-F12.pep
MLKQALRVRLGAISSSPASSTMLSSSSSILALRSNNPASLLPSRFFSNGVLNNQLVFSPHFQRSISLRCFASSSGFDKVQVLNPIVEMDGDEMTRIIWSLIKDKLIFPYLNLDVKYFDLGILNRDATDDKVTVESAEAALKYNVAIKCATITPDETRVKEFGLKSMRRSPNGTIRNILNGTVFREPILCRNIPRIVPGWKKPICIGRHAFGDQYRATDTGIT

SEQ ID NO: 103449 - protein, 237 aa, Gossypium hirsutum
  Clone ID: LIB3582-035-P1-K1-F5.pep
SSLIQKYRFKRAILVQKRAGSTTPVPTWITATTKSPSLAIPSVEFPSKGSPKNVSKTKEGSVSARKLAATLWESNKIPSPQAMEDLEKKDRRRKPPIVAKMPHSLPPSLSDPSYTPISEKMDRPRIKAHKRRSSVVSPKLQLTDLDSVGNASLMEIEAHSRGNDHDGCITGIGNRLKDVRNSLATSKELLKVLNHVCGLEERNSSSVSLISALRVELDRARVEIDQLIRERQSNFDE

SEQ ID NO: 103450 - protein, 59 aa, Gossypium hirsutum
  Clone ID: LIB3582-035-P1-K1-F8.pep
VVLDLASCSHCLTSNIGFIVKVAVINGRFLLLEEFYSCCLEFVNSFKNFEFFSWVRIKI

SEQ ID NO: 103451 - protein, 64 aa, Gossypium hirsutum
  Clone ID: LIB3582-035-P1-K1-G11.pep
YYGLLALNTLFYSNTRRYGEPYTIYLSPAQCFFSKLPNKLIRYARTANKASFSENHIEVPSNCR

SEQ ID NO: 103452 - protein, 216 aa, Gossypium hirsutum
  Clone ID: LIB3582-035-P1-K1-G8.pep
MSAQKGNRRSSFSSSTTSSLAKRHASSSENVGRVIASLAKKRVPLTNITNQKQSSSSKSSALASSLVQSSNKIQKARKTQSVTNVGLSGHVLPPTNERRSSVLPPKVVPSLPTGNEVLLPPPPVQFSMEFSPSKSDGLSSFSLDETMSTCDSFKSPEVEYIDNHDVSAISSIERKTFSNLCISDHDVVATGSICNRDAVAEKEADDMVNDVDDNFM

SEQ ID NO: 103453 - protein, 128 aa, Gossypium hirsutum
  unsure (1)..(128): unsure at all Xaa locations
  Clone ID: LIB3582-036-P1-K1-B11.pep
LKMLAEGIVIVMRFLIGHIATSWGILDRAIESENLNHGDILRLDHVECFLKLSSNTKTFFDTAYALWYTYYYVNVXNYLLLNIATLXASLARHVSKPXFYISCMKFVHFLLNXGIIYHEPEYLKFVLE

SEQ ID NO: 103454 - protein, 51 aa, Gossypium hirsutum
  Clone ID: LIB3582-036-P1-K1-B12.pep
SMVSRAFGPVIRYTAVFAYIVCQHMYRCRIDYSLSITSSRHTVAVSPVAML

SEQ ID NO: 103455 - protein, 170 aa, Gossypium hirsutum
  unsure (1)..(170): unsure at all Xaa locations
  Clone ID: LIB3582-036-P1-K1-C12.pep
PLLQVARCQSEADVDVAEAVEGGELGIVGEDVQDFGDGNFGPAPGVETVCIFPKNSAKLVVAGEETELLVGMENVGSPLNSIAIQASVHLPFDHRMLVQNLTAQTFNKASVSPSVQATFPYMFAVSRYLQPGTFDLVGTIVYEIHQKPYQNTFYNGTVXVVEACGFLSGE

SEQ ID NO: 103456 - protein, 195 aa, Gossypium hirsutum
  Clone ID: LIB3582-036-P1-K1-C4.pep
PTRPTTRPPTRPPTRPLNCKSVPWALHTPLCSLHSWSSVGSKVNEASSQVVMDSEPVQEPMDVDMDGRSGISKEELEGFREDGELPSLLSVPSFTNDAKLTPLKGSSLKHSKQLALISKSILSPGSRGKLPSFKKHDDDSVFMLETDSEVDEPLETETENSSSTQCCEIAEKSWVDCGIKEFVLLLTKKMDTTGH

SEQ ID NO: 103457 - protein, 91 aa, Gossypium hirsutum
  Clone ID: LIB3582-036-P1-K1-D6.pep
MSSRRSRSRQSSGSRITDDQIYDLVSKLQQLLPEVRNRHSDKVSAAKVLQETCNYIRSLHREVDDISERLSELLATTDSAQAAVIRSLLMQ

SEQ ID NO: 103458 - protein, 162 aa, Gossypium hirsutum
  Clone ID: LIB3582-036-P1-K1-D9.pep
KGPISLHLMIAGKIAVVCGYGDVGKGCAAALKAAGARVIVTEIDPICALQALMEGIPVLTLEDMVAEADIFVTTTGNKDIIMVSHMKQMKNNAVVCNIGHFDNEIDMLGLETYPGIKRITIKPQTDRWIFPETNRGIIVLAEGRLMKLGCATGHSNFVMSCS

SEQ ID NO: 103459 - protein, 119 aa, Gossypium hirsutum
  unsure (1)..(119): unsure at all Xaa locations
  Clone ID: LIB3582-036-P1-K1-E11.pep
MLFSEMDTNMGSLDRXKPTCNDTCCAANCAAYTIQGSVYGTIINSFEDTLGRHLGRQFAQVVIRDGICDAGDVNWTLIEHLIDQPGLNLMGCCNELYAGHAADGYARSHGGGPCVGTFT

SEQ ID NO: 103460 - protein, 74 aa, Gossypium hirsutum
  unsure (1)..(74): unsure at all Xaa locations
  Clone ID: LIB3582-036-P1-K1-F6.pep
MASNPLLLFPSLRLVLNGRLLRQTFKRQXPKQRVKDLRXATSAPDTRTHCAGHTTKRGNHDCQQLTCAGLSLIW

SEQ ID NO: 103461 - protein, 144 aa, Gossypium hirsutum
  Clone ID: LIB3582-036-P1-K1-F9.pep
SFSLEAFSVLFIAWREPFESRQSVASFHVVMADHALVVADTSHTLVEHSLVIGQEFPDVETCRRTLKDIAIALHFDLRIVKSDRSRFIAKCSKEGCPWRVHVAKCPGVPTFSIRTLHGEHTCEGVRNLHHQQASVGWVARSVEA

SEQ ID NO: 103462 - protein, 194 aa, Gossypium hirsutum
  Clone ID: LIB3582-036-P1-K1-G3.pep
MKKSKKSQKGVTSNDKNKGMGKEKEREKKSSSLESGSYNYKMFSFFNRKFKINEVEPPSDVNKAFSLFTDEGSTHMTPEQLRRFMSVHQCEVSTRLEDAQNIIEQVVNRRHHITKFARHTLNVEDFFHFLLSDDLNGPIRTQVHHDMSAPLSHYFIYTGHNSYLTGNQLSSDCSEVPIIKALQNGVRVIELDLW

SEQ ID NO: 103463 - protein, 61 aa, Gossypium hirsutum
  Clone ID: LIB3582-040-P1-K1-B1.pep
KNTELILIMVRNKPLLEAQLSHQCQGYSSLATPKTAPAEEARMILTRSTRTARSEANWKHV

SEQ ID NO: 103464 - protein, 202 aa, Gossypium hirsutum
  unsure (1)..(202): unsure at all Xaa locations
  Clone ID: LIB3582-040-P1-K1-B2.pep
RHVATTKANDRGANGGEQHGFERPAEGQRRQGREEEGEEEREPKRKRRQERQEERAQEEEREERGTGTRRTRNGLKKTVRSRRLKHRTPADNTDVGNPRSARITADNRNKRPIHQYNKLSANRGVHNNNAIYACNXSMNAHSIVDITRGKGRTQMVXENGEAILDEHVERRQRITVPQXHAEEKNAGRRGQERIAFKTHAKA

SEQ ID NO: 103465 - protein, 70 aa, Gossypium hirsutum
  Clone ID: LIB3582-040-P1-K1-C2.pep
SSPLILLSSLISSLASSIYRLARAAMSDGDVAPAEGTVVGDAAGGRVGVFIGRWVGILVCRFPRDLGTVC

SEQ ID NO: 103466 - protein, 82 aa, Gossypium hirsutum
  Clone ID: LIB3582-040-P1-K1-C3.pep
NFKIVHTVSYFNHSMHTLTPTRINSWFLACYIKKQTPKNMKHRHCPTVKLAVYFHTSSVDTPIATIFMFWKQSLLPLLSAPK

SEQ ID NO: 103467 - protein, 86 aa, Gossypium hirsutum
  Clone ID: LIB3582-040-P1-K1-C7.pep
ASQNSRCNTKLQSTNFSSPLILLSPLISSLASSIYRLVAAAESDGDGDAAEGTVDGDAAGGRVGVFSGRWVGILIWGKFRELGKFC

SEQ ID NO: 103468 - protein, 136 aa, Gossypium hirsutum
  Clone ID: LIB3582-040-P1-K1-D1.pep
WDWTCRKIISQLWSMLESSFIGNLSVAIVILLGQLARLGVDAVGYEDKEVENLRAKLSAFLWQETTIRAGLPIQLASVSALLGLVSLDFKKASLENGNLPGMSGQCVPAELLRNWFLQLTEEQRSMSIRLFFQAVD

SEQ ID NO: 103469 - protein, 94 aa, Gossypium hirsutum
  Clone ID: LIB3582-040-P1-K1-D8.pep
SGSSVPPSVRSRVLIIAVDVPLSYSALSFNTVCCLHISLNRWISTAVVDLPSFDVDDSSSHEMQKRAFCLLRSKTGKQASRFSQQIGKQAGASE

SEQ ID NO: 103470 - protein, 161 aa, Gossypium hirsutum
  Clone ID: LIB3582-040-P1-K1-E6.pep
MALETLSSNELLNFIIYDTIFATPCSSHHHESLVTDFSMENSFSSLEQARNSGNALSCLPMVTPKCRSKGMERSNLAVQGRKKRRRKPRVCKNKAEAETQRMTHIAVERNRRKQMNEHLTVLRSLMPESYVQRGDQASIVGGAIEFVKELEHLLQTLEAQK

SEQ ID NO: 103471 - protein, 102 aa, Gossypium hirsutum
  Clone ID: LIB3582-040-P1-K1-E8.pep
IFVAEPEKRISIPEIKQHPWFLKNLPIEFVEGENGYMENEEESQSIEEILSIRDEARKGGDGPKVGSQLLGGSMDLDDDDIDCDADIDDLETSGDFVCALRV

SEQ ID NO: 103472 - protein, 133 aa, Gossypium hirsutum
  Clone ID: LIB3582-040-P1-K1-F5.pep
MATGKTEGEESKNDNKVYTRKTHNKPKNPSFFPHQSSEQTLPTTTTADYHNSSRQLPPQHFDAVASDDSSSHNQLQRGAQNATNGTATSGHVRYDNLVKINLSVLSKNDVRVLQRKLTRELEQVRGLLKKFDA

SEQ ID NO: 103473 - protein, 248 aa, Gossypium hirsutum
  Clone ID: LIB3582-040-P1-K1-G11.pep
HASVGFSGTSKFGIVKCGSSSNGREPDSADNGVKSVERLLEEKRRAELSARIASGEFTVQKSGFPSLLKNSLSKIGVPSGALEILFKGVDDVEDYPKIPEAKGAIKAIRSEAFFIPLYELYLTYGGIFRLTFGPKSFLIVSDPSIAKHILKDNSKAYSKGILAEILDFVMGKGLIPADGEIWRIRRRAIVPALHQKYVAAMISLFGLATDRLCQKLDDAATDGEDVKMESLFSRLTLDIIGKGSFNYD

SEQ ID NO: 103474 - protein, 149 aa, Gossypium hirsutum
  unsure (1)..(149): unsure at all Xaa locations
  Clone ID: LIB3582-040-P1-K1-H12.pep
HAXXEXMPXSXXHATKPGXRXXEGRKXGXXXXXRXDXKTQXTGEXNNXXGAXXPXXXHXXXXXTQHDETXXNXEXXXDXKEXXXKXXXXEKHXXEKTXXHXNPXXRXXXXGXHXEXXXXGXKNXXDXXXGXGAHXXXAXXGKEXTKXDR

SEQ ID NO: 103475 - protein, 175 aa, Gossypium hirsutum
  unsure (1)..(175): unsure at all Xaa locations
  Clone ID: LIB3582-040-P1-K1-H9.pep
PTEGXALRKRGPEHXXKXXTXEXXTXXXXXXRTXAXQXXPEEEGXXXXXXNAXXRXXXPXXXGDHGXAXAXPXAXAQAGKPXQNPXEXXXEXXKQAKXXXTEENXKXXAXXRXXKXRPXXTXXRXNXXXXXTQARXGXAXXGXGXAXXXGPXKXGGGAXXGEARXXKPXKNKKGE

SEQ ID NO: 103476 - protein, 72 aa, Gossypium hirsutum
  Clone ID: LIB3583-007-P1-K1-B4.pep
HYIQTQCFFRCLEAVTGQNTSGSNIVRFGFLILECGFSFSTDFCIFAKEKSIVYVNILITKDIIVFSWPGLI

SEQ ID NO: 103477 - protein, 148 aa, Gossypium hirsutum
  Clone ID: LIB3583-007-P1-K1-B6.pep
MDGERNGLKAKVPFHPRRRINVYGLPLLPPNNQGEKDDLHVQLWHACAGPSVYVPHAGEKVLYFPQAHIEQVDACMNQDGIMEMPIYNLPSKILCRVMHVQLKVEPGTDEVFAQITLIPEAEQDEESLEHRNYQPLPQKAYPVFFSKK

SEQ ID NO: 103478 - protein, 67 aa, Gossypium hirsutum
  Clone ID: LIB3583-007-P1-K1-B9.pep
CYLSNIKNILNLIVKAGLELADDVVGKIRNGIRYIKKSGIHRKRFYDVVDKSFHLNVTKKLRQDVCV

SEQ ID NO: 103479 - protein, 179 aa, Gossypium hirsutum
  unsure (1)..(179): unsure at all Xaa locations
  Clone ID: LIB3583-007-P1-K1-C5.pep
QTPDNDIGKNSFNYXRSAFGMALSNLSNPKNILALGPNRSILGTIIRPDPVLLERKGGPSGDVTFSNLLPGAGEPLQTLNGEKQDILCNWQFDDEEPLPRGNGNAGDVSAQSSGRKRKSSSKGRHKKKKIKENVDVTKDWDEETFLKKEKSSRKKSSRHSHKHKDSNGYGYHHGGAWSR

SEQ ID NO: 103480 - protein, 132 aa, Gossypium hirsutum
  unsure (1)..(132): unsure at all Xaa locations
  Clone ID: LIB3583-007-P1-K1-D10.pep
PTRPPTRPGNLEIGSLREVDVKSGLPATTSTERLELLDDNEHILSIRIIGGDHRLQNYSSIISVHPEMIDGRPGTLVIESFVVDVPEGNTKDETCFFVEALIKCNLKSLADVSEGLAMXDRTERIDIRKLGA

SEQ ID NO: 103481 - protein, 108 aa, Gossypium hirsutum
  unsure (1)..(108): unsure at all Xaa locations
  Clone ID: LIB3583-007-P1-K1-D3.pep
ILQNVNPKHLPFLYLTQTSSLSVSYNLLMLFFQFDRKIYAIKRIGFFSLNCYFAPLLLLTMLFSSKVEDLSHFFACIHMECPLCIIYLILTSLMKLKLLFSPIXFKEL

SEQ ID NO: 103482 - protein, 175 aa, Gossypium hirsutum
  Clone ID: LIB3583-007-P1-K1-D8.pep
WKGLTTDIKQWVRECVICQRCKYDNAVSPRLLQPLPIPERVWADISMDFVEGLPLSQGKSTILVVVDRLTKYGHFLALGHPYTASTVAQEYLTRIYKLHGILESIVTDRDKIFLSQFWQELFKHMGTKLKKSTAYHPQTDGQTEILNKCLEGYLRCMVGEKPSAWASWLPLAEWW

SEQ ID NO: 103483 - protein, 201 aa, Gossypium hirsutum
  unsure (1)..(201): unsure at all Xaa locations
  Clone ID: LIB3583-007-P1-K1-E11.pep
PTRPDEMRSQKCKPNICTYTALVNAFAREGLCEKAEEIFEQLQEAGHEPDVYAYNALMEAYSRAGYPYGAAEVFSLMQHMGCEPDRASFNIMVDAYGRAGLYEDAESVFEEMKKLGITPTMKSHMLLLSAYSRVGNIAKCENIVNQIQESGLQPDTFVLNSMLNLYGKLGQFENMEKVLVAMEXGPYEADISTYNILINVY

SEQ ID NO: 103484 - protein, 84 aa, Gossypium hirsutum
  Clone ID: LIB3583-007-P1-K1-E3.pep
THFNGELHCNGLFSQDPYLIFLTRFLTDLRLINPCCDQIYLPQSHTPLSPQPVMQLRPSLLPLFNGDQSSNGNDTPCCNALNIT

SEQ ID NO: 103485 - protein, 147 aa, Gossypium hirsutum
  unsure (1)..(147): unsure at all Xaa locations
  Clone ID: LIB3583-007-P1-K1-E9.pep
MEGNKEKIVDDVGSVAEAISADDDNAAPLYQVESLCMRCTQNGITRFLLTSIPHFRKVLLSAFECPHCGERNNEVQFAGEIQPKGCHYRLEVQPGDPKLFSRQVVKSESATIKIPELDFEIPPEAQRXSLSTVEGILVRAIDGLQAL

SEQ ID NO: 103486 - protein, 163 aa, Gossypium hirsutum
  Clone ID: LIB3583-007-P1-K1-F12.pep
MEGNGSRADAKLLLGIAKKLLQGRHFKASRDVAVLAQQTDPLLEGPDQILAVIDVVVADVKRINDQHDWYSILQIDCRSQDNDLIEKQYHRLTLLLDPEQNKFPFADDAFKLVSDAWSILSNSSKKSVYDKEFDSCTRIDLSTGDRSYHAGDQLSGEKRIRNA

SEQ ID NO: 103487 - protein, 64 aa, Gossypium hirsutum
  Clone ID: LIB3583-007-P1-K1-F8.pep
CAYWFDSFCEPKMTLGVEITEMGWDLSIRAQSQRALAMNSVWLRKASEAVMGGIHEINMGSING

SEQ ID NO: 103488 - protein, 68 aa, Gossypium hirsutum
  Clone ID: LIB3583-007-P1-K1-G10.pep
TILHQHIFLLHFLFFVFQNAKSIGRNNNYTTFFKRLWWINLLEKIKITAWRIFKNYTPSYYNLYNKRL

SEQ ID NO: 103489 - protein, 174 aa, Gossypium hirsutum
  Clone ID: LIB3583-007-P1-K1-G12.pep
NDVGIIDRSFGFQTAVEMAEQAIHAAHVEAESAVNGIGLVKLMGRSTGHIALHATLSSRDVDCCLIPETEFYLEGKGGLLEFLEQRLKERGHAVVVVAEGAGQDLIPRTTAQKEERDESGNMVFLDVGAWLKTELKKWWDREHPHELFTVKYIDPTYMIRAVPANATDNLYCTL

SEQ ID NO: 103490 - protein, 108 aa, Gossypium hirsutum
  Clone ID: LIB3583-007-P1-K1-G6.pep
AEPIQNSNGKEFVAVEGTSDEEPYVGKEFESEEAAKVFYDAYATRVGFIMRVEAFRRSMRDGKVVWRRLVCNKEGFRKLRPRRSENRKPRAITREGCKAMIVVKKEKT

SEQ ID NO: 103491 - protein, 68 aa, Gossypium hirsutum
  Clone ID: LIB3583-007-P1-K1-G8.pep
FILSVNGRNRASVSVQFSSVNLVNIFLLLFEELQFRVLRSLILYFLSKFIHGQRQRIHDNETDVAFKR

SEQ ID NO: 103492 - protein, 102 aa, Gossypium hirsutum
  Clone ID: LIB3583-007-P1-K1-H1.pep
VRHAFGGFHGAFFPSPKKRGLLPLEPRLYSPKGKGGNPKKEKIEYIFNHIPLVDLWTFLDASGWFYVLQVLSALAARDMEGLGMGVACLKRLKRTGGQSFGC

SEQ ID NO: 103493 - protein, 176 aa, Gossypium hirsutum
  Clone ID: LIB3583-007-P1-K1-H7.pep
ATVPEYPKLGGHGLAFVLSPSKQLSGSPSQYMGLLNASENGNSTNHIFAVEFDTVKDLEFGDINDNHVGVNVNSMKSIASTPAAYFLENGTKEELIIKSGAKIQAWIDYDSAKNRLDVKLSLLSEKPRSSILSIDVNLSSILQDFMFVGFSASTGLLASSHYVLGWSFNMSGEAQS

SEQ ID NO: 103494 - protein, 41 aa, Gossypium hirsutum
  Clone ID: LIB3583-012-P1-K1-A4.pep
RVQGLPAALLCRVNILSYVARESCPFLDLVAVTCIREQGRC

SEQ ID NO: 103495 - protein, 203 aa, Gossypium hirsutum
  unsure (1)..(203): unsure at all Xaa locations
  Clone ID: LIB3583-012-P1-K1-B12.pep
PRVRRELFYSFHRDEVPAESVMHKCVVHFVPIHKQHPNRKQHPGFIVQRVYDTVERKLWKLTDKDYEDSKQHEIDLLVQKTLSRLGDLPDLEIDAAAAVVDQEEQLKAKRTLRKKNISPLDVTRNDEGTTRSDQHMKAETPGSCTSNTTEYYTILSKANVLTGVTHRDKWMERAXQAXQYMCKSSDSVHNDDKVKGGSDSLEP

SEQ ID NO: 103496 - protein, 59 aa, Gossypium hirsutum
  unsure (1)..(59): unsure at all Xaa locations
  Clone ID: LIB3583-012-P1-K1-B8.pep
FLYENLAXKKKKKKKKKKKKKKKKKKKKKKKKKKKKKKKKKSKKKKKKKKGGALKKNQS

SEQ ID NO: 103497 - protein, 62 aa, Gossypium hirsutum
  Clone ID: LIB3583-012-P1-K1-C7.pep
IRCHKRKILRIFREISKIPVLFGLSALILALKQIPIKPPLSLQLFLFSSCKPNPTLNQSKKT

SEQ ID NO: 103498 - protein, 187 aa, Gossypium hirsutum
  unsure (1)..(187): unsure at all Xaa locations
  Clone ID: LIB3583-012-P1-K1-D11.pep
MTKKECRIIPEETSSATVKRKHIYFEEFHCNRQTKRQKLVSSETKTKTKTLTLNPEPVRNPPGWNRFHAIRPCSSSSSRVHKRWQKRNNFRSSEASRNWVFSSYDCSDCKDKVVIVSYNILGVENAAKHPDLYLNVPRKFLKWDRRKDLICKEVNHYNADXLVFQGGDRXKDLDDLLHENGLKVFTR

SEQ ID NO: 103499 - protein, 205 aa, Gossypium hirsutum
  Clone ID: LIB3583-012-P1-K1-D4.pep
TEPEVRARRTLIYLSIFFLYAPNKGRAKVIGWLALEILFLGVVAACTLTLRKTHAQRSDLVGILCVIFGVLMYASPLTIMRKVIKTKSVKYMPFYLSLANFLNGVIWVTYALIGFDLYILIGNGLGALSGAIQLILYACYFKSAPKDDDENDVVKPSELQLSGSNGPARPTVIVIYIYMSKGKKSKKTLKYFSSIYKYACKDISV

SEQ ID NO: 103500 - protein, 71 aa, Gossypium hirsutum
  unsure (1)..(71): unsure at all Xaa locations
  Clone ID: LIB3583-012-P1-K1-E3.pep
KLNTPLLTVSFNPYLFHLLPFLPIFNHVPPIXLARXYLFRISHLLNXXPKYQISPXWVFFFAFAFFSFPFP

SEQ ID NO: 103501 - protein, 166 aa, Gossypium hirsutum
  Clone ID: LIB3583-012-P1-K1-E6.pep
STLAHALASALKFPLVDKDDIRDSTFPLHQQPQGSDTLLNHLSYEAIWRVASTQLHLGISVIIDSPLSHRTHLDRLISLAASAGARLLIVECRPSDEAKWRERLEGREKSWHKPNSWEELQELIKGYGGCTEYDVGDVPKMVVDTTAPNLGLEELVSSVVRFIASS

SEQ ID NO: 103502 - protein, 93 aa, Gossypium hirsutum
  Clone ID: LIB3583-012-P1-K1-E7.pep
NCVKQGIEGTEVYTNVHDLSEMLKSTVLKATPLQQREASEVRCIMNSMHPNRLELLYEYWTIEQPDVKFNAEKLRDPVKENKVSYFRDFFYSL

SEQ ID NO: 103503 - protein, 73 aa, Gossypium hirsutum
  Clone ID: LIB3583-012-P1-K1-E9.pep
LTNHPRLQLLRIQTLPQIESPRRMRKLLLRILLVYVRFCIFLFLRLDPRISDNNPCTQSIILFFKCSVKIDFD

SEQ ID NO: 103504 - protein, 152 aa, Gossypium hirsutum
  Clone ID: LIB3583-012-P1-K1-F8.pep
PTRPPTRPQTFQNLTHVFWYGPLKSPNAVYNLVALGDCPSLIEIAVDFREESGAVFCQCISEGHVADEYEEGESSQRNPYEGGNLETLEIAEVRCFSGFNGEMLLVRLLLEKAVNLRKLWLFWRLGDLSVMHDNVLQDITKFGYPQQLSDTI

SEQ ID NO: 103505 - protein, 124 aa, Gossypium hirsutum
  Clone ID: LIB3583-012-P1-K1-G4.pep
MGICLSARIKAESPNNTGLSSNYVSGDTSSKVSSVSMPLTPRSEGEILQCTNLKSFSFANLKTATRNFRPDSVLGEGGFGSVFKGWIDENSFNASKPGTGIVIAVKRLNQEGFQGHKEWLAEVN

SEQ ID NO: 103506 - protein, 171 aa, Gossypium hirsutum
  Clone ID: LIB3583-012-P1-K1-H4.pep
LISISSPSHSPPALRLSSFPGLRFCGGRKISVGARAGVNGASETTSFEPYLEEMDVVTFLDPPNYLIPLDPGSYNPAAYLWKKIEDIPEERRHRLLQLLNPRLISIAWEIAGTRYHDPKFVKKTDSNIRFNKDAAIPFHVYNCRTSGGPFLIAWLKFFKKTIFYGNNGKTY

SEQ ID NO: 103507 - protein, 176 aa, Gossypium hirsutum
  Clone ID: LIB3583-012-P1-K1-H5.pep
TPTRSTRPPTRPGSLKPSGSTTGSTKSLSIRVFDEKEGNDLTPVCLEACPKEHAVTDIVGAGNACMTKETAIICTRGGQTLWSDRISGKVSVLAGNANFWAVGCEDGCLQVYTKCGRRALPTMMMGSAATFIDCDESWKLLLVTRKGSLYLWDLLNRNCLLRDSLASLITLDHNSS

SEQ ID NO: 103508 - protein, 53 aa, Gossypium hirsutum
  unsure (1)..(53): unsure at all Xaa locations
  Clone ID: LIB3583-012-P1-K1-H8.pep
XCNSYFSLFSKYSSRIHGLGGFSDFIVNVVIIADRQCLFDHAIVYRVDAKYPC

SEQ ID NO: 103509 - protein, 201 aa, Gossypium hirsutum
  unsure (1)..(201): unsure at all Xaa locations
  Clone ID: LIB3583-019-P1-K1-A10.pep
KKARKNGLLNWLKHRKRDSGMESMMSASDKSSGNKSNSTPSTPKSGSKKFNVESRLSQSLFTESSLCMDLLSDARRHREVPENDYLGQETPLTSLKAVDQIDLLREQQKILSGEVALHSSTLKRLSEEAARNPQNEQIQDKMKRISDEIRGKNERIALLEKXNADSITVSSHMEKSEISQSTCAEWXAQLNEKSFELEVMY

SEQ ID NO: 103510 - protein, 106 aa, Gossypium hirsutum
  Clone ID: LIB3583-019-P1-K1-A7.pep
KKRTVLSRSIHVFQLFFDYGALRHGHLCFLGSYFSHWFNLLFQNFCSFTLNFFPLCHNPNRICLYFSCLLCIMCTTYETEHTFSKVYKFFRGFRHSKIFVHERKHT

SEQ ID NO: 103511 - protein, 122 aa, Gossypium hirsutum
  Clone ID: LIB3583-019-P1-K1-B11.pep
MASMILSDPSSAASVHRLSFTRFSNSLVFLRRFVGPLHVFSHTAALPRALSLHAPRSSRFITASMAAEPSAKVIDGKSVAKQIREEISAEVTKLKEAIGVVPGLAVILVGDRKDSATYVRNK

SEQ ID NO: 103512 - protein, 137 aa, Gossypium hirsutum
  Clone ID: LIB3583-019-P1-K1-B9.pep
MYHPKTVPGSSLVRSNSLVHGQHLDCGASSMDPVSGGNSSNPNLASKQRLRWTHELHDRFVDAVAQLGGPDRATPKGVLRVMGVQGLTIYHVKSHLQKYRLAKYLPDSSSDGKKPDKKETGDMLSNLDGSSGMQITE

SEQ ID NO: 103513 - protein, 71 aa, Gossypium hirsutum
  Clone ID: LIB3583-019-P1-K1-C11.pep
APRVASWATLFDRIRTSCAYTYYKIFIFIMNMIEEAEKLLLKRFYHVKEMLLMLDEKYVLIVAIFNKKLIY

SEQ ID NO: 103514 - protein, 123 aa, Gossypium hirsutum
  Clone ID: LIB3583-019-P1-K1-C2.pep
MQNGVAADGVCSSESANGSRDVWSCKGSDSSSADHLVIMVHGILGSSSDWKFGAEQFVKRLPDKVFVHCSERNMSKLTLDGVDVMGERLAKEVLEVIQEKPNLCKISFVAHSVGGLVARYAIG

SEQ ID NO: 103515 - protein, 122 aa, Gossypium hirsutum
  Clone ID: LIB3583-019-P1-K1-D1.pep
GFWLVITFQFYKSWWCYSNSKDFGSGATHSSSSSGASGSSTSSSSLSGLNNSKNSKTSNSSLSHDASGSSTSLGSNNSKDSKSSSKSGASSSSTDSNSLSGFNNSKGSGSFQTSNSSSNLSA

SEQ ID NO: 103516 - protein, 167 aa, Gossypium hirsutum
  Clone ID: LIB3583-019-P1-K1-E2.pep
ENVPPPVNTFVDIDLGELLNQNIRRCKYVKPTPVQRHAIPIVLGGRDLMACAQTGSGKTAAFCFPIISGIMQEQYVQRPRVARTGYPLALILSPTRELSCQIHDEVKKFSYQTGVKVVVAYGGAPITQQLRELERGVDILVATPGRLVDLLERARVSLQMIRFLALD

SEQ ID NO: 103517 - protein, 111 aa, Gossypium hirsutum
  Clone ID: LIB3583-019-P1-K1-E3.pep
RIPWQNSRIWCALLEAFGSSVSETKKVEVILVGLPSEFDAVVTLALFSSEALPFQKLVDVLLEIECRQTRTVPDVLMHANLVETPPEIESVRSDVCSGHSRGRGFRPRIQC

SEQ ID NO: 103518 - protein, 88 aa, Gossypium hirsutum
  Clone ID: LIB3583-019-P1-K1-F9.pep
STTMTAVSSFKASMSRFLALRFSSDFDFNEVKENHRPIRKVLRERGTTVRRRRPRKPCVGIARGSLIRCYSDVFQKLRCFGPALKLDG

SEQ ID NO: 103519 - protein, 134 aa, Gossypium hirsutum
  Clone ID: LIB3583-019-P1-K1-G4.pep
MGKIGGNSWLTAVKKAFRSPTKENDKRSCRRREDGEQEEEEKKRGKRRWIFKKPSYQETVIQHSEASTIVTITNAKVATNSETSALNTVPEAEQRSHAIAVAIATTAAAQAAVATAQAAVEVVRLTRPSVFLRE

SEQ ID NO: 103520 - protein, 53 aa, Gossypium hirsutum
  Clone ID: LIB3583-019-P1-K1-H12.pep
ENLIEAKNQALQTLLLLFSPKQKSASLSGFDIISFHKFPRYDNVANETCCGLQ

SEQ ID NO: 103521 - protein, 186 aa, Gossypium hirsutum
  Clone ID: LIB3583-024-P1-K1-A12.pep
INLRACFGTTKYCHAWLRNVPCNNPDCLYLHEIGSQEDSFTKDEIISAYTRVQQITGATNNMLWPAGNMLPPPVNDYCPTPSYASAAKPISKNAPNNTTVCIPKGSSPNGSTGRSVALPAGALWGMRALNHPQTAGLASSNGPSKQKSDTVRSALPFSSAVTNTNHNYPVHGDVIKKSSERITICK

SEQ ID NO: 103522 - protein, 110 aa, Gossypium hirsutum
  Clone ID: LIB3583-024-P1-K1-A2.pep
MDSSSPEDNSKQTDQYPLLMERVESHSDQEHIINVTWHDELDDASSSSALDELSSRVNLARNEYRSSSSTQASGYQTSSSNGLNSQNSSFMRHRKSPLNSALWILFELLF

SEQ ID NO: 103523 - protein, 97 aa, Gossypium hirsutum
  unsure (1)..(97): unsure at all Xaa locations
  Clone ID: LIB3583-024-P1-K1-A3.pep
MATIPESVLWLFDAGTLPTHVYSALIGGVLCHMAQEIFINLXMVGADALGXYAALLFYRPKCESTTYFLSIGYQTGCHVYDMRVDAWQEGRIEATRA

SEQ ID NO: 103524 - protein, 164 aa, Gossypium hirsutum
  unsure (1)..(164): unsure at all Xaa locations
  Clone ID: LIB3583-024-P1-K1-A6.pep
MGRHKSGSVASLVALSLDSGLLCSAKDFPGRRSEGDPQQRYEDCRKRCQLKTRGHTEQDTCEDTAXNCSLKEEHHRDGXILRARYHDCRXHCQQEXERTLSSHCEPSCREQYQKQXQQQTDKRFKECQQSWHTAEQRPXRKQQCAKECMEQNQEDPCNEQRENL

SEQ ID NO: 103525 - protein, 150 aa, Gossypium hirsutum
  Clone ID: LIB3583-024-P1-K1-A7.pep
MAEVTSMNNCSKDGGATEAVTNNGCTINGTGKDMIKVTVKKANVKDPEIFSCLVQPASSDSDLDSVGVRRFLLARKAESGVHRRLDWRCNGKGYVAYRNYIRRPRNWENSQIPSYPSTPGNSGRWMLTSSPLSRLSEVESWSSSQVCTTF

SEQ ID NO: 103526 - protein, 95 aa, Gossypium hirsutum
  Clone ID: LIB3583-024-P1-K1-A9.pep
MYCPAKPACHSVWYSTSSVFWLDDLTATLGINYVSSRWCFDPSTTMVTVHLSLTAFLFFAMRVALTQTWCLHIVQSTAIICPPLFGSEPFSSACH

SEQ ID NO: 103527 - protein, 43 aa, Gossypium hirsutum
  Clone ID: LIB3583-024-P1-K1-B10.pep
ESVCLNPPMPASQGWLLDHRSSCSSTYDCWSSTAEQFTLELLL

SEQ ID NO: 103528 - protein, 148 aa, Gossypium hirsutum
  unsure (1)..(148): unsure at all Xaa locations
  Clone ID: LIB3583-024-P1-K1-B8.pep
SGKDANDEVKWLSQGSNRVVKRYSAFLINGIVVNFSITSYASTRDSNLVEGNVEYYRLLTNIIELDYYGIWKVVLFRCDWADVKTACRIKQDQFGFTMVNFSXIHIGQQLIDETNVFSSLEKQVFYSIDPTDEGWYVVLRNMARDLFD

SEQ ID NO: 103529 - protein, 85 aa, Gossypium hirsutum
  Clone ID: LIB3583-024-P1-K1-C6.pep
KPSSVGQIFDYDISKKLDLATTNYKTTLSHQPVESSNTCASHSFFFFLVLSFSFELSPDKIASKNHYDVGGIGESERVFKPKNRL

SEQ ID NO: 103530 - protein, 64 aa, Gossypium hirsutum
  Clone ID: LIB3583-024-P1-K1-D3.pep
ACLYISILCPNLPHQLKSYAVLSCTKALSNSILLFTCMTPQAITSKEKKVEPYKIRNSYHHGDK

SEQ ID NO: 103531 - protein, 54 aa, Gossypium hirsutum
  Clone ID: LIB3583-024-P1-K1-D9.pep
STHAFKKHSFYEYGSSNGEGTVCIGEELIILPAQLTKSLGILIGNKHSMIKALT

SEQ ID NO: 103532 - protein, 127 aa, Gossypium hirsutum
  unsure (1)..(127): unsure at all Xaa locations
  Clone ID: LIB3583-024-P1-K1-E5.pep
MARKCSVGGNXQCNGTSDEVQEIATTFYEAEAPYEDVAEVXARPAYVDMTFVKRLMHSEQHVAAKNCXSRKGRALTGDMKVLMLVNLGVCKTIIXNCARTALLNEKNAFVRGQTSYALYQRLKVIAC

SEQ ID NO: 103533 - protein, 64 aa, Gossypium hirsutum
  Clone ID: LIB3583-024-P1-K1-F3.pep
FLLLCIDLIPGDFIHVLGDTHVYSTHVRPLQEQLQKLPKPFPILKINPEKKNIDSFVASDFKLI

SEQ ID NO: 103534 - protein, 92 aa, Gossypium hirsutum
  Clone ID: LIB3583-024-P1-K1-F9.pep
VSLRSSAGAGLCLALACQRLPKTMKQEEASTDLRRRTKTVPGEDTGTHGARQSIRQVKKAVKGRAGRIDQTILKRHTKTDNSNDKSKKECRQ

SEQ ID NO: 103535 - protein, 197 aa, Gossypium hirsutum
  Clone ID: LIB3583-024-P1-K1-G12.pep
TGSLRLAAALIERYFPRGEVLISSPTWGNHKNIFNDAKVPWSEYRYYDPKTVGLDFEGMIADIKAAPEGSFILLHGCAHNPTGIDPTPEQWEIIADVIQEKNHIPFFDIAYQGFASGSLDADAASVRMFVARGMEVIAAQSYSKNLGLYAERIGAINVVCSSPDAAARVKSQLKRIARPMYSNPPVHGARIVAQFVG

SEQ ID NO: 103536 - protein, 117 aa, Gossypium hirsutum
  unsure (1)..(117): unsure at all Xaa locations
  Clone ID: LIB3583-024-P1-K1-G8.pep
GRESXTXNNXXXAXDRNDXAEAGNGDHDNXRKXQXARGXRGTNNRXRDRRQDXTPPRXEEEEREERQQEQRDRQTRGGAKEKGRKETTSXKRNKENXADPERADRENPQAGQKTTRN

SEQ ID NO: 103537 - protein, 77 aa, Gossypium hirsutum
  Clone ID: LIB3583-024-P1-K1-H1.pep
VRTKHAPLVTSSYCWLWLLSSVYTKKEMVVAFYSALPSTFMIMEVHANCLIWTTIFDYLDRLNTSGIFTIGTKRLYA

SEQ ID NO: 103538 - protein, 89 aa, Gossypium hirsutum
  unsure (1)..(89): unsure at all Xaa locations
  Clone ID: LIB3583-024-P1-K1-H10.pep
PRDRKKXPRDEDRRGGTRREGGQXPTRTRPRXREDKXSRKGRGREGEXKRDEAXEEHXXXRDADXAREATKXRDRXGSRKKAEKAKGAP

SEQ ID NO: 103539 - protein, 71 aa, Gossypium hirsutum
  Clone ID: LIB3583-024-P1-K1-H2.pep
SNRCSLYDYIITKSSLIQVCRSISSYGLCDSEQILQGTKEEHNGELLQSLSSVSILTNLPQPLLLAILFQN

SEQ ID NO: 103540 - protein, 184 aa, Gossypium hirsutum
  Clone ID: LIB3583-024-P1-K1-H4.pep
KHAAHGGFSSYTNNASSGRNQNLHHFPHVMNLHNARPSSGVAQAYGYMNHMYPSNMTYDHYGNAIRGGSGFGSYGYDAWKKGLGWYPVGNNIKSKGRGYGKESMNGLNELNKGPRVKGYRSQDGVEAATLAVKEPNLPLIESDKENNVSLVPDIEQYNKEDFPESYSDAKFFIIKSYSEDDVHK

SEQ ID NO: 103541 - protein, 69 aa, Gossypium hirsutum
  Clone ID: LIB3583-024-P1-K1-H5.pep
QPHFSWLYFSDRRSCAYCTCGCCSHMRCPQLMTAMHCIDALPKDNIRACESRSIASCSNVNIIWYVQHV

SEQ ID NO: 103542 - protein, 97 aa, Gossypium hirsutum
  unsure (1)..(97): unsure at all Xaa locations
  Clone ID: LIB3583-024-P1-K1-H8.pep
NSSMMSYMIPELYMEVPETATVGLLYRTVLDAVTFXSVGGIRVVLLLKGNKVRDDIRTLSQAGIYCDDNMDAIGYTMEPGPVKATTTMCSEEPTFLL

SEQ ID NO: 103543 - protein, 62 aa, Gossypium hirsutum
  Clone ID: LIB3583-024-P1-K1-H9.pep
KKQLNSITTQVLSFTWIGKKKDICCSKSTYKQNNTKNSIYYETYYLCPCNLVLFLQNVIPMM

SEQ ID NO: 103544 - protein, 102 aa, Gossypium hirsutum
  Clone ID: LIB3585-062-P1-K2-A11.pep
MGLSGLPAPSEGVLCVVQSILHIVGIASSSPSSDSVENPSESFEFSPTTCDSYMEEFRNRTPAMRFDAICSCKQPEYECSVCLTRFEPESEVNRLTCRHFFY

SEQ ID NO: 103545 - protein, 176 aa, Gossypium hirsutum
  Clone ID: LIB3585-062-P1-K2-A4.pep
RFFSPLAAAPLVILTGLGLYSHGFPQLARCVEVGLPALIALIFFSQYIPHLIKSNRAIFDRFAILFSIVVIWVYAEILTASGAYDNSVSKTQFSCRTDRSGLTSAASWIRVPYPLQWGRPSFHAGDAVSVIAASFVAIIESTGTFIAASRYASATPIPPSVHSRGVGWLGVAILLN

SEQ ID NO: 103546 - protein, 80 aa, Gossypium hirsutum
  Clone ID: LIB3585-062-P1-K2-A6.pep
TRKGGNFLPNNKAVVRLNLYLEVHHKQATDHDDRLETMPEHLMTVLRSHDCSGRNIVERGALTIRKSGTKLWIKTLVRGF

SEQ ID NO: 103547 - protein, 166 aa, Gossypium hirsutum
  Clone ID: LIB3585-062-P1-K2-A8.pep
HLTAISCQVPFEFAVQQVSEQLRKIAKGDYTIPSTEKRKLGTVVFAAVDLPAAEIQGLLNKLSGMNSNAEAFLEDKPMDNFLRKAHVTLAHKKSHGFSAVAGYGLYLHRQVPVELNALLFTDKMAALQAQLGSIDDEKIVSKNEWPHVTIWTGEGVAPKEANTLPQ

SEQ ID NO: 103548 - protein, 156 aa, Gossypium hirsutum
  Clone ID: LIB3585-062-P1-K2-B12.pep
TLMTISFSSSHADKRKRWKSDDNLLHSMDFSVRLEHMETEALFIHEQLHHESSRSYRFSNNQEKIENEAYGKRQHYEHDSDLADRLTTAENEVISPSSSKVVDDMVFNKYLTEASGLLKEAKECMKGRHDEERVEVILNTSALLLLQAISMKPMNL

SEQ ID NO: 103549 - protein, 145 aa, Gossypium hirsutum
  unsure (1)..(145): unsure at all Xaa locations
  Clone ID: LIB3585-062-P1-K2-B2.pep
HASAHASEQXQQQHLTTAAAAAAQARSLFPKQQTVAFAPSMHLMNTTQLASPGGRSSMVGIGDPSMNSNIVQSSGLQSGGMGIVGIGTPASQISSDVISKNSVDTSSLSPVPYVFGRGRKCSAALEKVVEIMQRRLINNLESSCK

SEQ ID NO: 103550 - protein, 139 aa, Gossypium hirsutum
  Clone ID: LIB3585-062-P1-K2-C1.pep
MANLFIKQAKQYAQGRPAYPPHLFQFIASKTPQHDLAWDVGTGSGQAARSLAEIYNNVIATDTSPKQLEFATKLPNIRYQQTSPTMSSAELEQKVGAESSVDLVTIAQAMHWFDLPVFYKQVKWLLKKPHGIISACLLH

SEQ ID NO: 103551 - protein, 71 aa, Gossypium hirsutum
  unsure (1)..(71): unsure at all Xaa locations
  Clone ID: LIB3585-062-P1-K2-C9.pep
DPRVRKTYHLLDHPITFFYXHANENXRCFFVWKTPYFPKHLLPNYFNHINFSSFIRHLNTYLFLKVIPHKF

SEQ ID NO: 103552 - protein, 164 aa, Gossypium hirsutum
  unsure (1)..(164): unsure at all Xaa locations
  Clone ID: LIB3585-062-P1-K2-D2.pep
GRKGADFLEVAHQLRLLYNRYLQGRFANARPKAVLFNQKVTVVEILYNVCKATLGLWDAVIKKKIPLQXLMLELKLNTDLNDQMGYLNNCALLERDHISSLAGALKDLDASTLRLPIAGRARADIVSLKAAISSAVDVMQAMGSCICSLLSKVEGINNLVFHLC

SEQ ID NO: 103553 - protein, 55 aa, Gossypium hirsutum
  Clone ID: LIB3585-062-P1-K2-D3.pep
NKYGCLVKVKVGKFRSMGHGIGICFVVFSLKQYIFYHILKCKHHLLCILSFFKAV

SEQ ID NO: 103554 - protein, 142 aa, Gossypium hirsutum
  unsure (1)..(142): unsure at all Xaa locations
  Clone ID: LIB3585-062-P1-K2-D8.pep
NIITSSILRHSWAIIAPTKNKLLAVVQQRDYXKNAVTKHNNLVAHHPFFSWCHNNEEGSNDRSXQQLSMHDEXYDPCCSASLTAAVVVTTSMTTAIVTTLLPAASSAFFPFFVTTVGFSPRAAINRLLPWRLLISALQLLHQ

SEQ ID NO: 103555 - protein, 54 aa, Gossypium hirsutum
  Clone ID: LIB3585-062-P1-K2-E2.pep
MWKLQTLPKIKVFYWRLGHDILPTYEKISGIRREVNGICPRLKNDKDTLFHAIR

SEQ ID NO: 103556 - protein, 127 aa, Gossypium hirsutum
  Clone ID: LIB3585-062-P1-K2-E3.pep
DPWFQVEIVLVNYIGTAPTKSRSETPTNKQDETSGTFESADGATSKSKTTNSDQVASLVKSTEKVSIGSTDTQHTHAINEPRKDTVQQAADAADARVSISSSESQFKAMAADASVFSFGDEEDFDSE

SEQ ID NO: 103557 - protein, 153 aa, Gossypium hirsutum
  Clone ID: LIB3585-062-P1-K2-F11.pep
LQSDGSMKIIDRKKNIFKLSQGEYVAVENIENTYSRCPLVASIWVYGNSFESFLVAVVVPERKALEDWGIENGEATDFKSLCENPKARKYILNELNSTGQKHHLRGFELLKAVYLEPNPFDMERDLVTPTFKLKRPQLLKYYKDRIDELYSEG

SEQ ID NO: 103558 - protein, 173 aa, Gossypium hirsutum
  Clone ID: LIB3585-062-P1-K2-F5.pep
REEHPPNQSGQSNQSMVSDSENRSSQTTSRVSDTPSFAGESGVRVVPIRTMVAAVPAPLGRLPSESSGNSVGVYYPLLGRLQNIAPGHVSGERGPQASGEHPSSGAQPELLRIPESAVQHQSSEESARDGSLPNANSRQQERPNTRSVNISILAAGRTHNNQNSGRQSSSNVL

SEQ ID NO: 103559 - protein, 128 aa, Gossypium hirsutum
  Clone ID: LIB3585-063-P1-K2-A12.pep
PDRDPGRPRVRPRVRPRVRIKYPENFFLLRGSHECASINRTYGFYDECKRRFNVRLWKCFTECFNCLPVAALIDDKILCMHGGLSPDLTNLDQIRSLSRPTAIPDTGLLCDLLWSDPDRDVKGWGMND

SEQ ID NO: 103560 - protein, 68 aa, Gossypium hirsutum
  unsure (1)..(68): unsure at all Xaa locations
  Clone ID: LIB3585-063-P1-K2-A4.pep
NNMLTKIYLFFHLKIELVALKCEPTYYYGEIXGFKFYCDSNPTPLTLLDYSILFKSIKYLFYQSNKII

SEQ ID NO: 103561 - protein, 64 aa, Gossypium hirsutum
  unsure (1)..(64): unsure at all Xaa locations
  Clone ID: LIB3585-063-P1-K2-A6.pep
MALMADHHTLTVVFGISXNIISPLVFLAPAPTFXRIYKKKSTERIQSLPYHVASFTYMQWLNYP

SEQ ID NO: 103562 - protein, 164 aa, Gossypium hirsutum
  Clone ID: LIB3585-063-P1-K2-A8.pep
NKEDLLMGFHRGNCETVEKVERDANEERVMERNKNMFEIKTVESNDMDVSSNDVSYVHKPHSQDSTIPSEEERERIIEETRDSLPRWVTRDQILDLVGSSRWNIVEAVSNFYEHEIEFYEQVSVFRSFESASHASSPKSPISLSNSGHFRSSTDENVNTNLSLI

SEQ ID NO: 103563 - protein, 142 aa, Gossypium hirsutum
  Clone ID: LIB3585-063-P1-K2-B1.pep
RESHKYDWWENLEKKVPDIAKSGFASVWLPPAINSFSPEGYLPQNLYLLSSSYGSEQQLKALLQKLKKYKVRAMADIVINHRIGTTQGHGGLYNRYDGIPLAWDEHAVTSCTGGLGNQSTGDNFHGVPNIDHSQPFGSKDII

SEQ ID NO: 103564 - protein, 112 aa, Gossypium hirsutum
  Clone ID: LIB3585-063-P1-K2-B12.pep
EIFNIGKSTRDESKPDSLKMGRTGLKKKGSGVVFGVPKPGKKQKFMEVSKHYVADQSSKTHETSDSAKFTKYLMPQGSEPRGTKNKIEPKRMAVSKPKILKSGKLPSVSSRS

SEQ ID NO: 103565 - protein, 91 aa, Gossypium hirsutum
  Clone ID: LIB3585-063-P1-K2-C11.pep
GRVGVKLLLEDIGELKPSVLCAVPRVLDRIYSGLQQKISEGGLLKKTLFNVAYSFKFYNMRNGSKHAEASPFSDRIVFSQVKERLGGNLRI

SEQ ID NO: 103566 - protein, 153 aa, Gossypium hirsutum
  unsure (1)..(153): unsure at all Xaa locations
  Clone ID: LIB3585-063-P1-K2-C2.pep
PTRPDQYKYWSNPLETKLPNAPGMEIYSLYGVGLPTERGYIYKVAPPSDCSIPFQIDTSVDGDSEDSCLKGGVFSGDGDETVPIISAGFMCAKGWRGKTRFNPSGIRTYNREYKHAPXANLLEGRGTQSGSHVELLGNFALIEDVLRVAAGAT

SEQ ID NO: 103567 - protein, 73 aa, Gossypium hirsutum
  Clone ID: LIB3585-063-P1-K2-C3.pep
NSHNAFLLMPNLPHLPIGTSTYHGHFSISHRGLFLSYIFFSNYFYCLFIFFQCFFHSIRDLKANLASKNQVIK

SEQ ID NO: 103568 - protein, 45 aa, Gossypium hirsutum
  unsure (1)..(45): unsure at all Xaa locations
  Clone ID: LIB3585-063-P1-K2-D1.pep
LGRSIKIRVRALVCNQPNFHLELHRSNRHLMNHIKASYXSYYIKN

SEQ ID NO: 103569 - protein, 107 aa, Gossypium hirsutum
  Clone ID: LIB3585-063-P1-K2-D10.pep
ALKSFGKDMRALWVQQGEEQKQKRKVDGLAKELERKVLAFQRTESRILGSKLSEKDIEVNVRNRIEYLAERKTMLDMLRKRIDAEKLKHITVMEQTQQITVKGFQTG

SEQ ID NO: 103570 - protein, 57 aa, Gossypium hirsutum
  unsure (1)..(57): unsure at all Xaa locations
  Clone ID: LIB3585-063-P1-K2-D9.pep
DSLKPPPPPFFFFFYFFFFFYFFFFFFFFFIFFFFFFFFFFFFFFFFXTDFFSANFK

SEQ ID NO: 103571 - protein, 124 aa, Gossypium hirsutum
  unsure (1)..(124): unsure at all Xaa locations
  Clone ID: LIB3585-063-P1-K2-E5.pep
GYSVISSSMKEIKVKDASPXVLVAPDTEPRIQPSSSVSEDRKCSSISVKSTPEIEKKYVHHVYDAIAHHFSSTRFAKWPKVAAFLESKTTGSLILDAGCGNGKYLGLNSLCYLIGCEISPFLIK

SEQ ID NO: 103572 - protein, 72 aa, Gossypium hirsutum
  Clone ID: LIB3585-063-P1-K2-E6.pep
PCQEWFWYSKVIQWWRKIISVFRELGVRNKGRFGKKERKKYNQVSRKVRADSEFGITTKIRIGFFLVCYVFS

SEQ ID NO: 103573 - protein, 100 aa, Gossypium hirsutum
  unsure (1)..(100): unsure at all Xaa locations
  Clone ID: LIB3585-063-P1-K2-F1.pep
DGYSCFAFAGIHLCGQPFLPMWNMLVXICNSMLLLRGKHKDGRKCYKSSVAAHTNKHGSKASHCDSFHKHQDASLNKKVQKECEPSTCCSEKISSRIHSG

SEQ ID NO: 103574 - protein, 130 aa, Gossypium hirsutum
  Clone ID: LIB3585-063-P1-K2-F3.pep
TAKLRSSPNLKSHSSDASKVVQNVGSTSSKKVGLSSKEVSSKPNDKNFSKALSTSSKPKSQVEKLPLASVPSGASSVKRNSGSSDTKMRKRTVTSKVAVKKALASPRASLSPRASPDRATSLTARKNLNL

SEQ ID NO: 103575 - protein, 68 aa, Gossypium hirsutum
  Clone ID: LIB3585-063-P1-K2-F5.pep
TPHLVLSSNSSSCKSEELDENGVVGVLAVAISHVRISEPKRSRLCSPPGPIEQQCSSNLTANNLCRAF

SEQ ID NO: 103576 - protein, 80 aa, Gossypium hirsutum
  unsure (1)..(80): unsure at all Xaa locations
  Clone ID: LIB3585-063-P1-K2-G1.pep
RVRPRVRPPSPPKHPYKYKSPPPPPAXPKHPYKYKSPPPPPPSPPKHPYKYKSPPPPPPSPLIYSYKYKYPPPPSPPNLP

SEQ ID NO: 103577 - protein, 89 aa, Gossypium hirsutum
  Clone ID: LIB3585-063-P1-K2-G2.pep
HIQHLSSKMKIQFMQLSITLLQKRQSRLTKLEVLDLSSNYFNSSKFSSLAVLPHLKSLNIERNHLTEWSYIRGKYAVKYIHLLVSHYKF

SEQ ID NO: 103578 - protein, 82 aa, Gossypium hirsutum
  Clone ID: LIB3585-063-P1-K2-G8.pep
CSHTREKIAESFMESFLCNEGLYYRCSFITFLQRTRLPIILNLIYPFIMYVCHYMNTKDIQVRPTKSGLTILTRLLSTRLFF

SEQ ID NO: 103579 - protein, 108 aa, Gossypium hirsutum
  Clone ID: LIB3585-063-P1-K2-G9.pep
HASAHASAHAFGESIPQTKKEASGSTEYGENLVGLKVKVWWPKDRAFYEGVIHSYDAVKKKHKVNYDDGDQEILNLKREKWEVIEDESGPDEEEAADHPSPAGPSEMP

SEQ ID NO: 103580 - protein, 70 aa, Gossypium hirsutum
  Clone ID: LIB3585-063-P1-K2-H4.pep
ACADALEESSVATSTCDERRPEWRHLGLAHKALQYNVCTRKSRAAPNARTYANIKPVPARAITWRPRTNG

SEQ ID NO: 103581 - protein, 167 aa, Gossypium hirsutum
  unsure (1)..(167): unsure at all Xaa locations
  Clone ID: LIB3585-064-P1-K2-C3.pep
GNKRPAPECPVMFSRCQSPNSRAVNGHLVYVRXKPEAELAKNCALDCSSTSNCQQPRPAGGQVEEINQQKPQIKEPKVSCFPAFAPLPMAPLTSSSAKPSVPIPLGKSATRLAPPLESNQHTLDSSASALDSPNGFKKLHWEERYYHLQMLLKKLDQSDLEDYTQML

SEQ ID NO: 103582 - protein, 53 aa, Gossypium hirsutum
  Clone ID: LIB3585-064-P1-K2-D2.pep
TPKTLLKPRKRNNLQLACWMGKIAKRKSQIPKKILVWFESSLYSLGISTLYHP

SEQ ID NO: 103583 - protein, 118 aa, Gossypium hirsutum
  Clone ID: LIB3585-064-P1-K2-D5.pep
GCGLQLEVVPHKIKKPKIKERLDWSTLGVKKGICSGRELKEVIVDVIFVAILTGRPWMHHHHPCALILQFSQQHLLNLISSPHFFYSNSILSLTASASIPHHCQLMCPISLSNTGRVG

SEQ ID NO: 103584 - protein, 78 aa, Gossypium hirsutum
  Clone ID: LIB3585-064-P1-K2-E9.pep
VLPGLLLRKIQISKNGLKTFLSKFLAKYRMIACALWAIWTSRNRFIHKGEKKQGSQISDFVSNCLKELDGLNTNIPAR

SEQ ID NO: 103585 - protein, 166 aa, Gossypium hirsutum
  Clone ID: LIB3585-064-P1-K2-F11.pep
ASIPQTPRSEGEILQSSNLKTFTFSELKAATRNFRPDSVLGEGGFGSVFKGWIDEHSFKATKPGTGIIIAVKRLNQEGFQGHKEWLAEINYLGQLHHPNLVKLIGYCLEDEHRLFAYEFMVRGSMENHLFRKGSHFPPLSWGIRMKGALVAVKGLAFLYNAKTQVI

SEQ ID NO: 103586 - protein, 64 aa, Gossypium hirsutum
  Clone ID: LIB3585-064-P1-K2-G1.pep
LFHFDFYVADCKRTGFRQFAYLSILVEENRSPFTSSFSWLNESKVDDPIHLIRQSNTVDSTKSV

SEQ ID NO: 103587 - protein, 53 aa, Gossypium hirsutum
  Clone ID: LIB3585-064-P1-K2-G12.pep
SCFLDYVRKCCVVQVVDSMVVERARGESQAISGSLQSLCWGSSAFGGIVSFYF

SEQ ID NO: 103588 - protein, 169 aa, Gossypium hirsutum
  unsure (1)..(169): unsure at all Xaa locations
  Clone ID: LIB3585-064-P1-K2-G3.pep
DDAQSSSSSLPPFLTKTYEMVGXHSTDSIVSWSASNRSFIVWNPLEFARDLLPRFFKHNNFSSFIRQLNTYGFRKSDPEQWEFANDDFIRGQPHLLKNIHRRKPVHSHSMQNLLGQGASPLTESERQSFRDEIERLKSEKMSLVLELKRHEEERQGFEMQMQILRERLQ

SEQ ID NO: 103589 - protein, 156 aa, Gossypium hirsutum
  Clone ID: LIB3585-064-P1-K2-G8.pep
HASALSESPKEQERERREGSELPSNPEEVEDLRGGDSAANPLIAFTFEELKIITANFRQDRVLGGGGFGNVYKGFIPEDLREDLQIQPLPLPVAVKVHDGDNSYQGHREWLTEVIFLGQLSHPNLVKLIGYCCQDDHRVLIYEYMPSGSVENNLFS

SEQ ID NO: 103590 - protein, 176 aa, Gossypium hirsutum
  Clone ID: LIB3585-064-P1-K2-H2.pep
PTRPQSLVTEDSFLVRNFGNDWYIGRKIKVPKDNVLRRLRLFNEYLVPEDKDPLHAWSVILSVFLLALAVLSLSIEYDTAIPVAKNVYIHPPSADRIILPDGRYMAYREQGVPADRARFSIIIPHSFLSSRLSGIPGLKASLLEEFGVAVLTYDLPGFGESDPYPYRNLESSASDM

SEQ ID NO: 103591 - protein, 35 aa, Gossypium hirsutum
  Clone ID: LIB3585-065-P1-K2-A11.pep
DQVRMGVVYRHDLRIHWEIIMRATSVINAVKYQAV

SEQ ID NO: 103592 - protein, 62 aa, Gossypium hirsutum
  unsure (1)..(62): unsure at all Xaa locations
  Clone ID: LIB3585-065-P1-K2-A3.pep
VRPRVRGRIGRRVXCLFKXKPIQAGVFFFNILSHITRXSNLDVFSFAIEHTTIIDFHTISYS

SEQ ID NO: 103593 - protein, 56 aa, Gossypium hirsutum
  Clone ID: LIB3585-065-P1-K2-B10.pep
RPIPSPPPPCPLYHFLLRVISDFGMGSYSTSNLTLTLHPHSPLLSGQDCQIRSHTL

SEQ ID NO: 103594 - protein, 42 aa, Gossypium hirsutum
  Clone ID: LIB3585-065-P1-K2-B8.pep
NAPSIEPLIKGGVFVTHTQTDTFTSPLPTAPFFFFPSLLTTH

SEQ ID NO: 103595 - protein, 159 aa, Gossypium hirsutum
  Clone ID: LIB3585-065-P1-K2-C2.pep
GVEVNAPGTKIRSDESFLYECEKANLRVEGITSVPVGNHNFVFPEVEGKAGALSAPSSIYYEMRLAALSRKNGILEVQLGAAMASRDSIERNLASALKSKEEMEKRLADTVKEMDLVKEKLAGIELAQEEANNISNIVHSDNVRLEHDVAFLKAVLDDT

SEQ ID NO: 103596 - protein, 54 aa, Gossypium hirsutum
  Clone ID: LIB3585-065-P1-K2-C3.pep
IGGKKRLGHKMSKKGHVDLYFEGDTISSHRNCCYEIGLFFIICPGNKKRTVNLC

SEQ ID NO: 103597 - protein, 115 aa, Gossypium hirsutum
  unsure (1)..(115): unsure at all Xaa locations
  Clone ID: LIB3585-065-P1-K2-D5.pep
RTTHASENGQKYEPHFDYFHYKANQELXLHXRISTVLMYXSDVESGGETEFPNAEGKLYQPNDDKYSYCSKNGYATKPIXSDSLLLYSLHKQHALHCYSYFPILAIIKLYKKANS

SEQ ID NO: 103598 - protein, 111 aa, Gossypium hirsutum
  unsure (1)..(111): unsure at all Xaa locations
  Clone ID: LIB3585-065-P1-K2-E11.pep
LSXKNSKEVLTQKEHIXLLYXQVLNLGXPRLMXRAEIKAIPFECXIXXESAEVKFLDIXXGLDEIPTPSLIQFRYLLASIESFYSKYNQLQKILEDFFSSDSCSLFSVNSY

SEQ ID NO: 103599 - protein, 154 aa, Gossypium hirsutum
  unsure (1)..(154): unsure at all Xaa locations
  Clone ID: LIB3585-065-P1-K2-E7.pep
NESYSTVRSQILLMSPLPSVERAYSMIMQEESHRKHSSSDIGDYLVPFSSVQMVQKKRFTGICDHCKVKXHKRETCYKLIGYPADFKFTKKKVNSNSASAVNSVSAPDSACSNEVMDSRGSRSQALVFTQEQYTQILYLLNKEPAVIEAATSIA

SEQ ID NO: 103600 - protein, 74 aa, Gossypium hirsutum
  unsure (1)..(74): unsure at all Xaa locations
  Clone ID: LIB3585-065-P1-K2-F1.pep
QVFMAHRRCLLSLARHATAIISXRKMPPLSALXVLTRKPNPAITIPNSELSWFSLWSHSRHFSSSKSQYSETQL

SEQ ID NO: 103601 - protein, 61 aa, Gossypium hirsutum
  unsure (1)..(61): unsure at all Xaa locations
  Clone ID: LIB3585-065-P1-K2-F9.pep
IXXVLVQYLQCXQSGLQLLTASTDXFQYFLSFRXKIISTNSSKTLHFTGRAWAXTRWRRRR

SEQ ID NO: 103602 - protein, 176 aa, Gossypium hirsutum
  unsure (1)..(176): unsure at all Xaa locations
  Clone ID: LIB3585-065-P1-K2-G3.pep
PRVRFEQENPVAITKSNGDSNVVHNGFNEKNQQTVTKNGGLNGFSNVENGSNDEIFKNEMRDLVEILSKLNPMAEEFVPPSLANHHHHEKHDQNQNRDNRFPENGFGYTDNFVVQANSGNADGHTNRRKRNNYSQGKRRLNNRTSIVQREDAIRXTVYVSYIRSGRLSEKLFWCVF

SEQ ID NO: 103603 - protein, 43 aa, Gossypium hirsutum
  Clone ID: LIB3585-065-P1-K2-H1.pep
KFINSKFNISDFPSLIRREVSFPVKCIDVLIYWSNLWELVGRY

SEQ ID NO: 103604 - protein, 156 aa, Gossypium hirsutum
  unsure (1)..(156): unsure at all Xaa locations
  Clone ID: LIB3585-065-P1-K2-H6.pep
QECISLPRHIMITRHSHTIGLSYSLRQIQVEDWMCKICYTEVDINYGHYCCPASCCRYIAHVRCATDKAIWDGRIMLEGYDERSEEVVDEPWNLITDVVEQIRIGELMVASEIKHSYHDHNLRLTFSGKTKDDDSQCDGCIRPISTPXYSCEQCKF

SEQ ID NO: 103605 - protein, 158 aa, Gossypium hirsutum
  unsure (1)..(158): unsure at all Xaa locations
  Clone ID: LIB3582-050-P1-K1-A9.pep
PEEAVVQXVKEAAANTYDTFDMRVDKHWSEKKLEEMTERDWRFFREDFNTSHEGSKIPGGVRSWSESKLSSELLKAVESVGYKKPSPLQMAAILLGLQQRDVIGIAETGFGKTAAFVWPMLSYISRLPPXEKNEXEGPYTGVMAPTRELAQQIEDETL

SEQ ID NO: 103606 - protein, 81 aa, Gossypium hirsutum
  unsure (1)..(81): unsure at all Xaa locations
  Clone ID: LIB3582-050-P1-K1-B12.pep
NKFLKINLSHWRCSXXKFXIXIYPXSLSIXXPXLXPLXXXXSSXSTXFLTXLIXFTXXXLILXXLXILSIPTXFFXXXHKP

SEQ ID NO: 103607 - protein, 126 aa, Gossypium hirsutum
  unsure (1)..(126): unsure at all Xaa locations
  Clone ID: LIB3582-050-P1-K1-B3.pep
MANFAKPENALKRAEELINVGQKQDALQAFHNLITSKRYRAXQKPLERIMFKYVELCVDMRKGRFAKDGLIQYRIVFQQVNVSSLEEVIKHFMHLSTEKAEQARTQAQALEEALDVGDLVFGIKIA

SEQ ID NO: 103608 - protein, 153 aa, Gossypium hirsutum
  Clone ID: LIB3582-050-P1-K1-B4.pep
VPDLSNLTAVKLLFLSHNQFTGEFPASVTSLFRLYRLDLSFNNFTGGIPVTINRLTHLLGVRLEENRFSGPVSGLNLPNLQDLNISANRLSGEIPESLSSFPMAAFGSNTALCGAPLEKCKSTGSDPTKPGSDGALPSPVMPGRNPTVIGFPS

SEQ ID NO: 103609 - protein, 82 aa, Gossypium hirsutum
  Clone ID: LIB3582-050-P1-K1-B5.pep
MSRDSNTRRRGGPGIFLIKSVRGKDWTLKSYRYIILLLTFIAYASYHASRKPSSIVKSVFYPESLKNSKVNPWPVGNVFIKE

SEQ ID NO: 103610 - protein, 120 aa, Gossypium hirsutum
  Clone ID: LIB3582-050-P1-K1-C1.pep
MNHPSMGTKIWEMRILILFLWRRLTCAVSVPVRVPLCPKNSVLEAVFDCRDSFCSIHSDFIESIDSVGVTEGDEISLQKALNMVHGNIHEYVAVLFYASWCPFSRSFRPSFLTLSSSYPS

SEQ ID NO: 103611 - protein, 50 aa, Gossypium hirsutum
  unsure (1)..(50): unsure at all Xaa locations
  Clone ID: LIB3582-050-P1-K1-C6.pep
FIIVLYQSLLNISQLILLIXTFXLINYIALIINRLNCXTLSHLWYNTIIK

SEQ ID NO: 103612 - protein, 61 aa, Gossypium hirsutum
  unsure (1)..(61): unsure at all Xaa locations
  Clone ID: LIB3582-050-P1-K1-C8.pep
PVDQLRTYRNALAGRKLGELSKSQSIVRSKVSLAHVIQQAEGCTQRNGWSKRKAXSIAEKL

SEQ ID NO: 103613 - protein, 73 aa, Gossypium hirsutum
  Clone ID: LIB3582-050-P1-K1-D4.pep
TKLLCEPKLHKDQHFEPKILSPLFSSKPVKTHFSSSPVYELNHKNYRKISPLNHKFPLSSSKPGNTHFTPHHS

SEQ ID NO: 103614 - protein, 138 aa, Gossypium hirsutum
  unsure (1)..(138): unsure at all Xaa locations
  Clone ID: LIB3582-050-P1-K1-D5.pep
GHERITFSTHESXQACNATPGAALTVPTGSTVNXANQDIKEKLPIAXNLTAPVNNPGHFEGSLPTTNPRPKASLPAFTRETLDPDFNTLREQLDXLHRGRQSHHKQQGQAMLRXTSQKQIRALSQEATTPTEKSDKRH

SEQ ID NO: 103615 - protein, 128 aa, Gossypium hirsutum
  Clone ID: LIB3582-050-P1-K1-D7.pep
CELLSESSVTFFLLLSASTSIEGTDDEPSTTSFSTFTPGSMTSSFTAEVLPFCLASKQQSSSTSSDFSSQRSLESSISVVFSTVHAEGRLTKAAITISFNLPFSGHGSAIFGKDEVTRSPADAWADAW

SEQ ID NO: 103616 - protein, 79 aa, Gossypium hirsutum
  Clone ID: LIB3582-050-P1-K1-D9.pep
NVRQIINVLMIFRKRETTIPLKPQATTSSGNLNNYGVNNLNNDYLEFYPPLNFFIELNTIISWFIFFNEIFKIMKNFGI

SEQ ID NO: 103617 - protein, 133 aa, Gossypium hirsutum
  Clone ID: LIB3582-050-P1-K1-E5.pep
DAWVKDIFVVQTAIGNFFTAVLSREGRVYTFSWGKDRKLGHQTEPNDVEPQPLLGALEGGPVVQIAAGYCYLLCLACQPSGMSVYSVGCGLGGKLGHGSRTDEKHPRLIEQYRLLNLQPMGVAAGAWHATVVA

SEQ ID NO: 103618 - protein, 128 aa, Gossypium hirsutum
  unsure (1)..(128): unsure at all Xaa locations
  Clone ID: LIB3582-050-P1-K1-G1.pep
MEENGSGAEALRLLGIAEKLLQNRDFNGSREFAILAQETEPLLDGSDQVLAVAXVGSSPPKKKINGQHDWYSILQVDRRSEDNDLIKKQYRRLALLLHPDKNKYPFADHAFKFGADAWSVLSNNSKKS

SEQ ID NO: 103619 - protein, 73 aa, Gossypium hirsutum
  unsure (1)..(73): unsure at all Xaa locations
  Clone ID: LIB3582-050-P1-K1-G12.pep
RVVLASVIFGRTWVGDGGRNHDEFDYWGQLALFSTIAVWFVTLVYLDYLTFFFFISVAVHXTXCNXIIISXIF

SEQ ID NO: 103620 - protein, 170 aa, Gossypium hirsutum
  unsure (1)..(170): unsure at all Xaa locations
  Clone ID: LIB3582-050-P1-K1-G6.pep
HVSAPWLEHKTWVADGNSCYRDETENKADGEEGLNLFCDYTTIQARLSEESDNVWGVIPELRKKLHFHQKRAFEFLWLNIAGSLIPALMEPSSKKTGGCVVSHSPGSGKTFLIIAFLASYLKLFPGKRPLVLAPKTTLYTWYKEFIKWEIPVPVHLIHGXRSYRVFKKNE

SEQ ID NO: 103621 - protein, 183 aa, Gossypium hirsutum
  Clone ID: LIB3582-050-P1-K1-G9.pep
PTRPVRTKWDMRDWWYLQPKNTDDYYDPEKPGVSGVSHLVTALILYGYLIPISLYVSIEGMKVLQATFINQDIQMYDEETGTPANARTSNLNEELGQVDTILSDKTGTLTCNQMDFLKCSIAGTAYGVRSSEVELAAAQQMANDLEDRDAKRSTCSRQKGKQQEIELETIVPSKDEKDHKSPI

SEQ ID NO: 103622 - protein, 87 aa, Gossypium hirsutum
  unsure (1)..(87): unsure at all Xaa locations
  Clone ID: LIB3582-050-P1-K1-H11.pep
NEXWXDXVVFXLXXKXXXDQNTTGKKXVXRKRKVEKWRGIFFYWLIFMKEIGDWRNRRYIWRKVEVMYPQRPPTRPPKSPGXLSRPG

SEQ ID NO: 103623 - protein, 105 aa, Gossypium hirsutum
  unsure (1)..(105): unsure at all Xaa locations
  Clone ID: LIB3582-050-P1-K1-H4.pep
SETNPVENLNTHFSESQNLVLSYLQKLNPQPFGHWDGGKGGKLPSFLSFLNPLFPLSRQLRLAISESFINQGTLSSKFSIPISQNPXTLYFDTXKSSIFNLLLIL

SEQ ID NO: 103624 - protein, 68 aa, Gossypium hirsutum
  unsure (1)..(68): unsure at all Xaa locations
  Clone ID: LIB3582-051-P1-K1-A10.pep
QTYETNKLVTVIKRNKYNIIILTYNILISYTLISSTITTPRKKATFTLDKISRTTLRGGWSXTPXQTI

SEQ ID NO: 103625 - protein, 143 aa, Gossypium hirsutum
  unsure (1)..(143): unsure at all Xaa locations
  Clone ID: LIB3582-051-P1-K1-B10.pep
MAGVCCGVVPESETAAAVEQTRMMXXXRMEVRPFKFVADAAVQPPSENGRKRQKLDLDLVLPASPRDCDNAVESSGTNKVNGDQEINEGLNSNRIVELEKELPEFGLTSVCGRRRDMEDSLSIQSAFCKLTSETQISSDIHFF

SEQ ID NO: 103626 - protein, 35 aa, Gossypium hirsutum
  unsure (1)..(35): unsure at all Xaa locations
  Clone ID: LIB3582-051-P1-K1-B12.pep
LQHPXYVSGGRSWIIFNFNTRIISVSIISDAKTTR

SEQ ID NO: 103627 - protein, 153 aa, Gossypium hirsutum
  Clone ID: LIB3582-051-P1-K1-B9.pep
DESTPVLNQKSSSSNHADQNAETSLPEEKVTSASPNCLSTDKKEPGTCAGGKEAKKASQSKDHEPGVMRGSDNLASQVPPSSAEETWGKETSAQESSQRTEVVKEVEMSESVPLEKNEPADAAASEPVAELSEPAEASKNVETVSGSPSRAKN

SEQ ID NO: 103628 - protein, 165 aa, Gossypium hirsutum
  Clone ID: LIB3582-051-P1-K1-C1.pep
DSASIPAAKKADIRAKIAQLQKQLKKVQKKIAEQNMQKAVTIAIELAELATKEGKTFCICGIDVGLDAAALREAVSKVIQQKEMPVMVFSIDEITNKAVVYAGVPEKSESIKRLEVSEWLTKALGPLKGKCGRGKGGLATGQGTDASRVNEGIDLATSFASMKLR

SEQ ID NO: 103629 - protein, 148 aa, Gossypium hirsutum
  unsure (1)..(148): unsure at all Xaa locations
  Clone ID: LIB3582-051-P1-K1-C11.pep
MQTPKASRTSSVVVPQKKSPMTPQTARXLRSGSVXXSVXSPNTASKASKDQSPKVTERKALKSSVSEKNGLSRVAELEAQLDQLQGELKKTKDQLTASESWKRLALQEAEEAKKEXSIMSAKLEKSERQLMEISASEDDPVEELPKIS

SEQ ID NO: 103630 - protein, 161 aa, Gossypium hirsutum
  Clone ID: LIB3582-051-P1-K1-C7.pep
HASAHASAGLRVGAKLSSQDPKHAHYGITFARNVIDSAADDQVNEHFKSQAHKFLGVWCVGAARISISDAERSVFQKESLASLNCAAFNMKEDPDLIFNLSLENAVQRNLDVACDNAMVYSNMVTEDSGRGWRLLALILSADRRFKDPQTILEVALDEAGS

SEQ ID NO: 103631 - protein, 79 aa, Gossypium hirsutum
  Clone ID: LIB3582-051-P1-K1-C9.pep
TGVENNLLPNSLSLHVLYIILPSAYTFSHYEEDHTLRNQLLQGISDLTLQTLSRGEQSYLYKLTQTHYYFLPIQTLPHN

SEQ ID NO: 103632 - protein, 68 aa, Gossypium hirsutum
  unsure (1)..(68): unsure at all Xaa locations
  Clone ID: LIB3582-051-P1-K1-E12.pep
IFIPXREDTVHETSQKFLPDYASSNPFFLKPTFTQSGGGGXKXXKRRYQPYYNFNGFLSXMCVSYLFD

SEQ ID NO: 103633 - protein, 89 aa, Gossypium hirsutum
  unsure (1)..(89): unsure at all Xaa locations
  Clone ID: LIB3582-051-P1-K1-F12.pep
SINLVVDGFSAGCGGYXEXCXIFNNXDIXSLTYCXYNMSIPFXISLHLVMFCSIFSTFLGICRLFYPDLDLVYLDMLSFKWFLTQIHSF

SEQ ID NO: 103634 - protein, 128 aa, Gossypium hirsutum
  Clone ID: LIB3582-051-P1-K1-F4.pep
KKTKPLLRRSTHRSFKLISEPPLRLRRRQRERGFDGQVFSLDFLLPLYLFKTPNGILNKKNHEKKEKKDPVEGPRNHLLVLFDIFFVFRSLSFFSKGYIDGVFITQKEKNIIFFLFLLFLFFFSLPML

SEQ ID NO: 103635 - protein, 71 aa, Gossypium hirsutum
  Clone ID: LIB3582-051-P1-K1-F5.pep
KMKQKALKECDEYTSKYAQCAAGKTLSIVWQCRKQAKELNDCLHQFTNDAVLEEMKKEYVLQENHRESARV

SEQ ID NO: 103636 - protein, 70 aa, Gossypium hirsutum
  unsure (1)..(70): unsure at all Xaa locations
  Clone ID: LIB3582-051-P1-K1-F7.pep
GIWQNHKGNFNYSTNHINPSSSSSSCPWLNAKKNPTKLPXPSNFYNAETNTLPLLNSAGDFKPQSHAIRN

SEQ ID NO: 103637 - protein, 81 aa, Gossypium hirsutum
  unsure (1)..(81): unsure at all Xaa locations
  Clone ID: LIB3582-051-P1-K1-G11.pep
RPQHLRFLLPVPWLFNLSHCFNNFFLPQRLPPHTNLYYLYVQPLHSISLFNIPSINLKPPLELFSKPHFLLXSKXXPHPPP

SEQ ID NO: 103638 - protein, 64 aa, Gossypium hirsutum
  unsure (1)..(64): unsure at all Xaa locations
  Clone ID: LIB3582-051-P1-K1-G3.pep
GLXCNLVLFIXGRIFLSLFVRKRSKMLAASLPSSSLISMLGWXLLASXLSFATYHQNSFNYYTL

SEQ ID NO: 103639 - protein, 166 aa, Gossypium hirsutum
  Clone ID: LIB3582-051-P1-K1-G6.pep
MAANQDDSGTLKYKTWVLKVFIHCEGCKKKVKRVLQARGGVYETTIDARQHKVTVTGSVDEELLIKKLSKSGKYVEPWPEKVEKKEKKPGKSKNNEKQKDGEGEADDDNHDPKKKKSDEKPELAATKDGGSDGSKGQPDGDNQPSTGDQMGGESEPTAARGGGMEG

SEQ ID NO: 103640 - protein, 141 aa, Gossypium hirsutum
  unsure (1)..(141): unsure at all Xaa locations
  Clone ID: LIB3582-051-P1-K1-G9.pep
MATVGRNIAAPLLFLNLIMYFIVLGFASWCFNRFIDGQTWDPSMGGNGATGFFLTISILAAVAGIVSKLAGGGHIRSWRSDSLAEAGSSSLIAWALTALAFGFACKHINIGGWRGWRXRVIEALIIILTLTELLYXCLIHA

SEQ ID NO: 103641 - protein, 133 aa, Gossypium hirsutum
  unsure (1)..(133): unsure at all Xaa locations
  Clone ID: LIB3582-051-P1-K1-H2.pep
ELIENADLKSGQLVDSNTKGNLTLEDEGWSRFTSNEDVPSLEASSAGKNQYGDSPRRGMVDLGQKPIVSVHHFPMILSPISPRVFVLPSEGSIAEACLSSEHEDSISAGLPSLSTGLPSDVDEXPXAATXTGH

SEQ ID NO: 103642 - protein, 49 aa, Gossypium hirsutum
  Clone ID: LIB3582-051-P1-K1-H8.pep
KALLILKKGCRWFTKLKANTVGIKNKIPGSLNLIFNVCSKKVPTGFQRT

SEQ ID NO: 103643 - protein, 75 aa, Gossypium hirsutum
  Clone ID: LIB3582-052-P1-K1-A10.pep
AIDHKDYYSTFHKTNLQKKFMEQEWKDFSQKSTRKAMVELAASPEFIDWMIEHAYILKLLPPDDSLDESVGNKSS

SEQ ID NO: 103644 - protein, 87 aa, Gossypium hirsutum
  unsure (1)..(87): unsure at all Xaa locations
  Clone ID: LIB3582-052-P1-K1-B10.pep
LNLLQIHLAWASLINNKHAPTDLPNKHSPXLNNESHPPSTHSSSAACVVLTRRPTHTLASYLPLVPFAXFPFLLPTFAFSPKQYINR

SEQ ID NO: 103645 - protein, 119 aa, Gossypium hirsutum
  Clone ID: LIB3582-052-P1-K1-B3.pep
MAKPLKFKGVDEELQKILDANMDEAPARRRAREAFKHIQLGLDHILFKTPLDGLKMKESYEMNSRGLEIFSKSWLPQTSYPKAMVFFCHGYGDTCTFFAEGIARKLASCGYGVFAMDYP

SEQ ID NO: 103646 - protein, 78 aa, Gossypium hirsutum
  Clone ID: LIB3582-052-P1-K1-B4.pep
HTKLFQQREKLPPFSHHAPMFSTHDHQRTHKPCSPYRCCVALTLSKGSTSFIVEFWAVEGLDIAFRLEAREGMSGRVG

SEQ ID NO: 103647 - protein, 70 aa, Gossypium hirsutum
  unsure (1)..(70): unsure at all Xaa locations
  Clone ID: LIB3582-052-P1-K1-C12.pep
PAKKSKASYFPREYYNECLQXLMRISYNPTSHPFLFLVQWTYFYLASALGLLKNLIXKGYIDGTTTMCTH

SEQ ID NO: 103648 - protein, 158 aa, Gossypium hirsutum
  Clone ID: LIB3582-052-P1-K1-D1.pep
MENQKPLQNGNNVAGDDRRRVGDGSALIFLGTGCSSAVPNAMCLIQPSDPPCHVGSQSLSIPPEHNPNYRCNTSLLIDYCSTNGMHNYIIIDVGKTFKEQVLRWFTFHKIPRIDSIVLTHEHADAVLGLDDIRVVQPHSPTNDIDPTAIYLTQYTMDS

SEQ ID NO: 103649 - protein, 137 aa, Gossypium hirsutum
  Clone ID: LIB3582-052-P1-K1-D11.pep
MTMDAAAESSESRLSSSQLNKNKPWRGDSCPKEVLPVRGCGSRNTSPSGRIGSRNTSPSRQKVVKTKPRGLDEETVATFGKAVHPDVQMEDNIWAMLPEDLFNEILARVPPFMIFPLPSVCKKWNSILQDNSFLKFH

SEQ ID NO: 103650 - protein, 164 aa, Gossypium hirsutum
  Clone ID: LIB3582-052-P1-K1-D4.pep
RNAVSVYRGTTWNLIKDSVHFHIGQWYASLGMYDVAVTHMLEILASSHQSKTSQELFLRDCLHIVQKTGKMFEVLKLQLPVINISSLKVIFEDHRTYASPAAASIKEGVWCSLEEDMIPSLSAKSNWLDVQSKRIPRKYKESNICVAGEAIIVDIEFKNPLEIP

SEQ ID NO: 103651 - protein, 61 aa, Gossypium hirsutum
  Clone ID: LIB3582-052-P1-K1-D7.pep
LKRARLSRDIRCATRSGGKTKKAIANAFTPHSWSLLKTFCYFWLSRGHLCKYGRRQSNIEP

SEQ ID NO: 103652 - protein, 62 aa, Gossypium hirsutum
  unsure (1)..(62): unsure at all Xaa locations
  Clone ID: LIB3582-052-P1-K1-E12.pep
IIFSKHSIINFHQILSTILVFXYPKIXSIKNSTIYTPFIYHSQFFQFLKPTIYTYTNNNYYY

SEQ ID NO: 103653 - protein, 179 aa, Gossypium hirsutum
  Clone ID: LIB3582-052-P1-K1-E3.pep
MSSKESCRIELRTAIRQLSDRCLYSASKWAAEQLVGIEQDPAKFTPSNTRFQRGSSSIRRRFRTNEITSTPPTGVAYVSTPVMEEDEAIHGDFYLLAKSYFDCREYRRAAHVLRDQTGKKSVFLRCYALYLAGEKRKEEEMIELEGPLGKSDAVNRELVSLERELATLCKNNTIDPFGL

SEQ ID NO: 103654 - protein, 147 aa, Gossypium hirsutum
  unsure (1)..(147): unsure at all Xaa locations
  Clone ID: LIB3582-052-P1-K1-F10.pep
DAWVLEGKSXGEISQITDLRVLDVSRNSLTDEIPKEIADCKKLSALVLTNLIDFGSDAGGGTXDGFRGEFNAFDLGVPFELFSHSSLEVLWAPRANLRGRLPAKWSEFCSLKVLNLGQNYFDGMIPESIVMCKSLTFLDLNSNNLFG

SEQ ID NO: 103655 - protein, 92 aa, Gossypium hirsutum
  unsure (1)..(92): unsure at all Xaa locations
  Clone ID: LIB3582-052-P1-K1-F11.pep
DSESTSMFXLGGCXLXKFQTIXXXLTYXSIYSFSNXXXHFXXXHXKXXLXKINXTXXXISXLIXXLPXPFSLYFLTXXPFYLYPXXXIXSHS

SEQ ID NO: 103656 - protein, 139 aa, Gossypium hirsutum
  unsure (1)..(139): unsure at all Xaa locations
  Clone ID: LIB3582-052-P1-K1-F12.pep
PGRLSVRPLFRPRVRGXRXEIVXSIIYAGLEAIFTCFSLIASISATNLSSVEVLALGIANLFSDGGGXXLXYFLSSNTXXXLXIXXXXXTQXXLNNHXXXQQXXLLQXXQTLXXXLNXPNXXXNIFXNFYXIXXNQKIT

SEQ ID NO: 103657 - protein, 78 aa, Gossypium hirsutum
  Clone ID: LIB3582-052-P1-K1-F7.pep
LTCKTINFPFAALIKHLPCFYVLILYTKITTAKKHNQTDHQNPKIYAETDKNKPQNSKDSHLNFKLPPQKTKSTLTDK

SEQ ID NO: 103658 - protein, 180 aa, Gossypium hirsutum
  unsure (1)..(180): unsure at all Xaa locations
  Clone ID: LIB3582-052-P1-K1-F8.pep
ALIDPKIDLNFKIEKDEGYWEQKVRINWLKYGDKNXKFFHSQASQRRRTNFIQKLQTEDGXEMDTLQEIEVVARSYFQKLFSEEIRRNYDHLLTGIDRCITEKDNHRLTAPYNREGIREAVFDTPLTKAPREDGFLVIFYKKCWHFIGEDVTLFCLNLLNGEMEVSSINSTNTSASSKNC

SEQ ID NO: 103659 - protein, 148 aa, Gossypium hirsutum
  unsure (1)..(148): unsure at all Xaa locations
  Clone ID: LIB3582-052-P1-K1-G12.pep
PSSYASVSFGIKFAVSKSRXHLALVLYLLTFDTPSQPLRRSFHKYLDQIPHXFSLSWIPLFLLGRSXTXXPLCRLXLLKIATGYPQALHYWLRTYLLDRPDVANKSQLGRMAMAQQRMQQNISXANPFSLLAAYGSARHTGSNPKNQV

SEQ ID NO: 103660 - protein, 173 aa, Gossypium hirsutum
  unsure (1)..(173): unsure at all Xaa locations
  Clone ID: LIB3582-052-P1-K1-G2.pep
KAKARSGGEVDLWSEIIGASDQPSTNAPLIQPVYQRRRRTSHPTPSDSDHPLLLQPTNSNGLSFAAANNKRVSWNRSLSIRGRISIAVAPCLANQPQQKQPRRRGKPPVPKGKAAEQSSFDKERAYFQEVDAFELLEESPSPKHFGTWATGNQTXTDPIPLGSTRLEKGLFSK

SEQ ID NO: 103661 - protein, 93 aa, Gossypium hirsutum
  unsure (1)..(93): unsure at all Xaa locations
  Clone ID: LIB3582-052-P1-K1-G6.pep
FLLNRLGYFILLRGYNQAFLNSFAIISESSKRVCDVHMDDTHRPSHGQFFRPSNGSFFLFFSMIFLCFLFRRKKLVCPLFALXVGAGLYSKNM

SEQ ID NO: 103662 - protein, 139 aa, Gossypium hirsutum
  unsure (1)..(139): unsure at all Xaa locations
  Clone ID: LIB3582-053-P1-K1-A2.pep
WLTWVFAQNTPSKCRLFYRALWEIWGERGGRMHEKASRTGKEIASFVNSYITELNGVEKRTPKISQEVKKWKHPPGQSVKVNFDGAYDGQLCQSASRIGVRNREGDVLXSSSKIHQEGTSAFAADAPPCLKAXQXGTNM

SEQ ID NO: 103663 - protein, 74 aa, Gossypium hirsutum
  Clone ID: LIB3582-053-P1-K1-A3.pep
IKGMGWSNPELEVSVSFGRFENDSLSWEKWSTFSPNKYLEEVEKCATPGSVAQKKAFFEEHYKKIACRKAELLA

SEQ ID NO: 103664 - protein, 50 aa, Gossypium hirsutum
  unsure (1)..(50): unsure at all Xaa locations
  Clone ID: LIB3582-053-P1-K1-A5.pep
FLAIYKLTLIGLLWGVSSLLLKXEKSFFFFFQFIYMMKIIQLACFYKVLF

SEQ ID NO: 103665 - protein, 157 aa, Gossypium hirsutum
  unsure (1)..(157): unsure at all Xaa locations
  Clone ID: LIB3582-053-P1-K1-B10.pep
MSTGTAFYTAWSDQLQQLLRQLCSAPKPPTTQDHLHHLNHLVNKVLSHYXEVRXVKAASXXRDXLXIFAAPWASAFEKSLHWIAGWRPTTAFHLVYTESSILFESHIGDILSGVRTGHLGDLSPTQFRRVSELQCETVKEENAITDELSEWQHSVSD

SEQ ID NO: 103666 - protein, 169 aa, Gossypium hirsutum
  Clone ID: LIB3582-053-P1-K1-B4.pep
PTRPPTRPGENECESGDYNEVPPSSNGDLQQSEIEVNDGEAVEQIEDLNGQCIPMTRLDWDMFKSETDVEKSMNETPSDKSLDTSPKNKLVPYSRLHPKLSKIPGSFSYKRLLPFLIDIANDYSCVPGKDAGTGASNCKSSYVEHSDRIRLTVTAATAIGLHQEQATLG

SEQ ID NO: 103667 - protein, 80 aa, Gossypium hirsutum
  unsure (1)..(80): unsure at all Xaa locations
  Clone ID: LIB3582-053-P1-K1-B8.pep
ANLLFIIINMSPINVPITSLRNNGIIRIPDSFKSKSPLNIDLQNKIHIELNYIWAKSNLLLLQNASQIYYSGKVRSNFXX

SEQ ID NO: 103668 - protein, 79 aa, Gossypium hirsutum
  unsure (1)..(79): unsure at all Xaa locations
  Clone ID: LIB3582-053-P1-K1-B9.pep
HSFKHFLLGRRRLSKTTIIELVAPNDPFITTEYMTYIFKHDIVHCQXKHHELNVIYSKTGGFLQNPFTVISIINPRGNP

SEQ ID NO: 103669 - protein, 72 aa, Gossypium hirsutum
  unsure (1)..(72): unsure at all Xaa locations
  Clone ID: LIB3582-053-P1-K1-C11.pep
PTLPKNNMGDGDNNNNIGFSEGRTYPKNAKLESSFAISHFQRCPAGGSISNPKFNSPQVVEKHLTLSTDTSX

SEQ ID NO: 103670 - protein, 62 aa, Gossypium hirsutum
  unsure (1)..(62): unsure at all Xaa locations
  Clone ID: LIB3582-053-P1-K1-C12.pep
AIVTLKLWCYSHRAVFXXTXNXSSKNXSXFXFXXXQLFXSXSXFKFXXXLNXPXXXXKLXQP

SEQ ID NO: 103671 - protein, 54 aa, Gossypium hirsutum
  Clone ID: LIB3582-053-P1-K1-D2.pep
LITFTNMGAISLWCVICSILYFSKKKPLNPKNQSFYYPNTSRFWLFLLNLQVVK

SEQ ID NO: 103672 - protein, 78 aa, Gossypium hirsutum
  Clone ID: LIB3582-053-P1-K1-E2.pep
MVMGDSRKPSGYKEYVAGLFAGVATVVVGHPFDTVKVKLQKHNTNVQGITYRNGFHCTARILATEGVCSLIFVLFFSP

SEQ ID NO: 103673 - protein, 139 aa, Gossypium hirsutum
  unsure (1)..(139): unsure at all Xaa locations
  Clone ID: LIB3582-053-P1-K1-E7.pep
HASAHASEDTVPGSLSDLPSHQRRHSVGEEDKLDLRVGDSLLIDDENQKDSPSLVSALXGDPCFEFKHRRSSSRRNDEFSPASRTFTESTQAGELITGSKPLAGRMTSDQMDLLVEQVKMLAGEIALSTSTLKRLVDFS

SEQ ID NO: 103674 - protein, 114 aa, Gossypium hirsutum
  unsure (1)..(114): unsure at all Xaa locations
  Clone ID: LIB3582-053-P1-K1-F12.pep
LSQLEENNKDESDPFGLDALIPSSGKKDDRAKGRKDVATKIWKDXDVDTXIFLKSKKKXXISXLKIAXXXYKTPXXXTXIXIXXXHPFXNXXXFTSXQXXXIXKLXXSFXXQQI

SEQ ID NO: 103675 - protein, 153 aa, Gossypium hirsutum
  Clone ID: LIB3582-053-P1-K1-F4.pep
PRVRVVSLGPGKFYGSSLPRPRIYTDTKFNPGRVDPPVPVLDPLLSWADEAHWSMGGLRGERLRLQGRIEGNVKRLKAQRKKLLKDTPDRGLNLKKSLRDDEDDEDVSPPPAPVAVKRRRFLDLNDDDDTEDENKGDDDEITVAKRKKKRVLR

SEQ ID NO: 103676 - protein, 73 aa, Gossypium hirsutum
  unsure (1)..(73): unsure at all Xaa locations
  Clone ID: LIB3582-053-P1-K1-F8.pep
LXSLSQWEXGWIHHSKIGDSDLSRSFESDPSSERPSTSIVENGVVPDCELHPQMNFELSDTARMTNAGLTRKK

SEQ ID NO: 103677 - protein, 184 aa, Gossypium hirsutum
  unsure (1)..(184): unsure at all Xaa locations
  Clone ID: LIB3582-053-P1-K1-F9.pep
ALNMIYPCEMRESTSFFHPTNSVSLPNLSTGGFVWKRKGYSTAIGRIRRLQCSAQAPHGGAAWPGRAFPHPGHKTWDGPKPISIVGSTGSIGTQTLDIVAENPDKFRIVGLAAGSNVTLLAHQVKTFKPQLVAVRNESLVNELKDALADMEQKPEIIPGEQGVIEGARHPDAXNVGTGIVGCAG

SEQ ID NO: 103678 - protein, 99 aa, Gossypium hirsutum
  unsure (1)..(99): unsure at all Xaa locations
  Clone ID: LIB3582-053-P1-K1-G10.pep
RRKVMAEILVFQKWRIQWQDQMILILQLLLQKGVEFXNHNSXIXXLTKXXKXSXLFXSXHXXXXXXXXPXYYXXNQXNXXLPFFQNTFXNXFFLXHFKP

SEQ ID NO: 103679 - protein, 78 aa, Gossypium hirsutum
  unsure (1)..(78): unsure at all Xaa locations
  Clone ID: LIB3582-053-P1-K1-G11.pep
QSFPLLLTGIWTPKSHFSNRSSLSYQTLALISHARKTYNHPFNSLITPQYNSVHFLIVDVFXXXLSNXTTXFIXINPI

SEQ ID NO: 103680 - protein, 61 aa, Gossypium hirsutum
  unsure (1)..(61): unsure at all Xaa locations
  Clone ID: LIB3582-053-P1-K1-G12.pep
GNIARATSRCRAVHVEGEIXPPWVASAPSIXLNSTPLLLPHAGHSTSLWLSSLXXXVARAQ

SEQ ID NO: 103681 - protein, 71 aa, Gossypium hirsutum
  Clone ID: LIB3582-053-P1-K1-G2.pep
YSKCGVAECTATHLNLVSIRIYAVRKLWSFIASEFNISNSILDLGFGMYSFVILDLYRDPLTILMLIGRVG

SEQ ID NO: 103682 - protein, 139 aa, Gossypium hirsutum
  unsure (1)..(139): unsure at all Xaa locations
  Clone ID: LIB3582-053-P1-K1-H11.pep
VLYREQHPERRCKKYQHRXQRQEQGPERKQQCVKECMEHYQEDPWKGEREXQVENIXKRRWCDKXXLQQXNNPYYFHXXXFQXLFKKXHFNFXFLXXFXSKHHLLXXINXFXIXILXTNPNTFFLPHHXNPXKIYLXTN

SEQ ID NO: 103683 - protein, 171 aa, Gossypium hirsutum
  unsure (1)..(171): unsure at all Xaa locations
  Clone ID: LIB3582-053-P1-K1-H12.pep
KEFVDSWMGGGAWKAGKFALSLRLALWSENLGLHRGEINQIIDPIIDSSYKDIWVGTANSGXTIYXDVFSCVPSDLIHSRLALRQSIVYWKERLGHTTIDLGIAPTKLESYHNGEVKQVDPMERLKSVRGHLVSFPLDFICKEDLRPXFNESEYYASPQXXHVREKLYKKA

SEQ ID NO: 103684 - protein, 82 aa, Gossypium hirsutum
  unsure (1)..(82): unsure at all Xaa locations
  Clone ID: LIB3493-027-P1-M1-A10.pep
LKLTTPRFGDINHLISATXSGVTCCLRFPGQLNSDLRKLAVFFIPFPRLHFFMVGFSPLTSRGSQQYRALTVPELTQQMWDA

SEQ ID NO: 103685 - protein, 107 aa, Gossypium hirsutum
  Clone ID: LIB3493-027-P1-M1-A4.pep
WRGKNQQNWNFFLSKIWDFGIFFLLTKKKKKIWVVFKKRLGWSLLLIACGEMAEKYRRDVDEIQMKGPEDMRTKKVREYKNERFDEFDERMSRCLYVNTTVVVMLVG

SEQ ID NO: 103686 - protein, 64 aa, Gossypium hirsutum
  unsure (1)..(64): unsure at all Xaa locations
  Clone ID: LIB3493-027-P1-M1-A9.pep
MNRDLVLRFIGWADXXYHSXCPHYAEFVWRELLKKEGFVFFSCWPSKKSPYLKLKSANKYFQDF

SEQ ID NO: 103687 - protein, 80 aa, Gossypium hirsutum
  Clone ID: LIB3493-027-P1-M1-B1.pep
FFFKCQRLNLPILASLPIRFAVFLFYLFIFPIILTLFILTIFFLIVCLCLSYILFFFIFYISFLIIFYYILSFSIFLIFI

SEQ ID NO: 103688 - protein, 46 aa, Gossypium hirsutum
  Clone ID: LIB3493-027-P1-M1-B11.pep
HLNIQIQKYQHLTLSTGNSITFSSNKSNIQMMIANKFHLHTKNCDF

SEQ ID NO: 103689 - protein, 57 aa, Gossypium hirsutum
  unsure (1)..(57): unsure at all Xaa locations
  Clone ID: LIB3493-027-P1-M1-B3.pep
IVRGPQXXXXXLYXXXTILGYKKSKSGQYPFSLLIQINKLNTYDELSFYSSNRFPYI

SEQ ID NO: 103690 - protein, 50 aa, Gossypium hirsutum
  unsure (1)..(50): unsure at all Xaa locations
  Clone ID: LIB3493-027-P1-M1-C1.pep
LSLKKHLELEFLKLEASSXSTYLILKQPSTTLYDMQAWIIAHFFSLPKKH

SEQ ID NO: 103691 - protein, 29 aa, Gossypium hirsutum
  Clone ID: LIB3493-027-P1-M1-C12.pep
YFNGLKNLAKIFFQWVKNIESCIFKKSNK

SEQ ID NO: 103692 - protein, 104 aa, Gossypium hirsutum
  unsure (1)..(104): unsure at all Xaa locations
  Clone ID: LIB3493-027-P1-M1-C5.pep
FYIQAFNSEGKLIGALPXRFSVKGKSNCFSFSFNQRQRNSIPLIYYSNSHSGWLQSCSHRTLPFFRHSPKYVSHFTLQNLHPLKTYPVRLKPRMSSPRSRLFVI

SEQ ID NO: 103693 - protein, 43 aa, Gossypium hirsutum
  unsure (1)..(43): unsure at all Xaa locations
  Clone ID: LIB3493-027-P1-M1-C7.pep
LEASFSXVYLKMGEALFFIYXXYYXLXQSXAYLLQPGKSNFFF

SEQ ID NO: 103694 - protein, 76 aa, Gossypium hirsutum
  unsure (1)..(76): unsure at all Xaa locations
  Clone ID: LIB3493-027-P1-M1-D1.pep
PPTSVFWCRFPPPNGPTTRNREPVLFTFFFLIIHIYICFVFFQYSQXFIVSKLQTFAFFSVSISLEKVFLCIINGS

SEQ ID NO: 103695 - protein, 49 aa, Gossypium hirsutum
  unsure (1)..(49): unsure at all Xaa locations
  Clone ID: LIB3493-027-P1-M1-D10.pep
KNQKAGTSDFTTGDCYCFALAXFTXVSFEPSPFKKGGAHIFFFFCTWLN

SEQ ID NO: 103696 - protein, 77 aa, Gossypium hirsutum
  unsure (1)..(77): unsure at all Xaa locations
  Clone ID: LIB3493-027-P1-M1-D2.pep
KKAAMEXDXMHLGDEWHLXXAMDRVRKVGQKFFELPGEEKEIFFYXXANXNVQGYCSNLSNNAYFHXXWYDYFFHLI

SEQ ID NO: 103697 - protein, 59 aa, Gossypium hirsutum
  unsure (1)..(59): unsure at all Xaa locations
  Clone ID: LIB3493-027-P1-M1-D7.pep
VTNXXIASDLKERVIXPVXPXKYLDEKTIFHLNPSGGFVILFSHGDTKITVFKIIIVSY

SEQ ID NO: 103698 - protein, 67 aa, Gossypium hirsutum
  Clone ID: LIB3493-027-P1-M1-F10.pep
VELSQVVTSPPCKRYKYIVRLSSKKKLGMLYTKKDCFLRLTSHVHTKIILVAIVLFYHVMCKHDCLE

SEQ ID NO: 103699 - protein, 84 aa, Gossypium hirsutum
  unsure (1)..(84): unsure at all Xaa locations
  Clone ID: LIB3493-027-P1-M1-F3.pep
KRIKDKKKENKREEGKVEGKGLEKNWRGEIEENLVGIKGLRKKMEGLKEGKERDLEEMMGISFNWKFXGRRYWKLTLCWXVRPS

SEQ ID NO: 103700 - protein, 71 aa, Gossypium hirsutum
  unsure (1)..(71): unsure at all Xaa locations
  Clone ID: LIB3493-027-P1-M1-F5.pep
MAMKPTSLFLFFFFNCFVLIFSFLVLFLFIFSFFYXFLFWFXVFFFFPFYFFLFYFFFFFFFYIFFLFFFF

SEQ ID NO: 103701 - protein, 65 aa, Gossypium hirsutum
  unsure (1)..(65): unsure at all Xaa locations
  Clone ID: LIB3493-027-P1-M1-F6.pep
KKILKKKKCREAIVFLVVRLLQKSYFEQSFISPHAAAILKCVRPTXRXXXKCLCTICGSFPPTRP

SEQ ID NO: 103702 - protein, 95 aa, Gossypium hirsutum
  Clone ID: LIB3493-027-P1-M1-G1.pep
STFISFFPSLPNLFLISLFPPSTFSYNLSSLFSSLLPFFYSFPTILYSFFILFSIIFSIYSLFFLFYFFSLSLSSFYSIFSSFFFYSFYFFFIFS

SEQ ID NO: 103703 - protein, 72 aa, Gossypium hirsutum
  unsure (1)..(72): unsure at all Xaa locations
  Clone ID: LIB3493-027-P1-M1-G8.pep
FLPPVINRPAYLSTESPLTXHXFINYYIQXINALNLNLTHKQSLYFIFLIIKTFLYYFFLFSIFYFSFFISY

SEQ ID NO: 103704 - protein, 33 aa, Gossypium hirsutum
  Clone ID: LIB3493-027-P1-M1-G9.pep
KLYENASSGYKTWKCVGFTPNVYKVSSQCFLMK

SEQ ID NO: 103705 - protein, 43 aa, Gossypium hirsutum
  Clone ID: LIB3493-027-P1-M1-H2.pep
SLFNLFSFAFFYISLYLFHFSFARFVAYFFYRLFIVERMADFL

SEQ ID NO: 103706 - protein, 62 aa, Gossypium hirsutum
  unsure (1)..(62): unsure at all Xaa locations
  Clone ID: LIB3493-027-P1-M1-H5.pep
QNTSSAISGLVIAFGACWXXXFIVLVLLPLIAINGYIQVKFMKXFSADVKTMYDDASQRAND

SEQ ID NO: 103707 - protein, 53 aa, Gossypium hirsutum
  Clone ID: LIB3493-027-P1-M1-H6.pep
ISHHTRVKTINSSKHNRSKIVYNVCIYFNNSLQSFIFLCLSKIYLIYSLSSNL

SEQ ID NO: 103708 - protein, 51 aa, Gossypium hirsutum
  unsure (1)..(51): unsure at all Xaa locations
  Clone ID: LIB3493-027-P1-M1-H8.pep
IKFPLXKSFFKTQLIXTIXHIPLLLFSYHKYLAHYRVQKKIFSHFLKINHQ

SEQ ID NO: 103709 - protein, 102 aa, Gossypium hirsutum
  Clone ID: LIB3493-029-P1-M1-A1.pep
MAGKGEGPAIGIDLGTTYSCVGVWQHDRVEIIANDQGNRTTPSYVAFTDSERLIGDAAKNQVAMNPINTVFDAKRLIGRRYSDSSVQSDMKLWPFKVIACPG

SEQ ID NO: 103710 - protein, 125 aa, Gossypium hirsutum
  Clone ID: LIB3493-029-P1-M1-A12.pep
SFADTYKMDCPAAINRLVTSGVPATVEHRAAAATSATNSAAIVAECVQNFITAMDSLKLNMVAVDQVHPLLSDLSASLNKLGILPPDFEGKMKMKEWISRLSKMGAADELTEQQARQLHFDLESS

SEQ ID NO: 103711 - protein, 73 aa, Gossypium hirsutum
  unsure (1)..(73): unsure at all Xaa locations
  Clone ID: LIB3493-029-P1-M1-A3.pep
YYLCEGPYFHFFRVTTIYLFCHILWXVISSLFFFLFFFSFFLFIPFSPFLSFFSYSLSYCVCVLLLLFFFLFP

SEQ ID NO: 103712 - protein, 126 aa, Gossypium hirsutum
  Clone ID: LIB3493-029-P1-M1-A8.pep
LFWIWACGIESKLADDVGNTEMDLFLIGKMVKASVSSCGQVHLNAEQMMKAKRFQEFFFNGLFGKLFVGSKSSGAPREFLLRDKSSSLWSPSRMYLLLPLEDNSTDELRIHWPGITACTLAAEFLN

SEQ ID NO: 103713 - protein, 68 aa, Gossypium hirsutum
  unsure (1)..(68): unsure at all Xaa locations
  Clone ID: LIB3493-029-P1-M1-A9.pep
KNRQGLKSLEACPETKAKMSELENELLNIVGLDELKVHLFKWAKGMLLDERPXSLGFKVCPLKPPYIS

SEQ ID NO: 103714 - protein, 128 aa, Gossypium hirsutum
  Clone ID: LIB3493-029-P1-M1-B5.pep
SRFTRNEVSLESKSTIGVEFATRSLNVDGKVIKAQIWDTAGQERYRAITSAYYRGAVGALLVYDVTRHSTFENVERWLRELRDHTDPNIVVMLVGNKSDLRHLVAVSTEDGKSFAEKESLYFMETSAL

SEQ ID NO: 103715 - protein, 99 aa, Gossypium hirsutum
  Clone ID: LIB3493-029-P1-M1-D12.pep
MGTTGGSDVEAGFAKLQGEDFEYYMQTYSIMLGRNSKKSTVDVDLASLGGGMNISRHHARIFYDFTRRRFALEVLGKNGCLVEGVLHLPGNPPVKLDSQ

SEQ ID NO: 103716 - protein, 63 aa, Gossypium hirsutum
  Clone ID: LIB3493-029-P1-M1-E12.pep
KRIEKGADNFLHKLPKRDQTFFPRKSTEKLIKIHGQRSAEKNPKKRGLRQRMGRKSRDQKKRE

SEQ ID NO: 103717 - protein, 128 aa, Gossypium hirsutum
  Clone ID: LIB3493-029-P1-M1-F6.pep
QSVLAIEARDKHNYIHRDIKPDNLLLDKNGHMKLSDFGLCKPIDCANLPAIYENKPMDDENMTEPMDIDGCITDKSSFRSPREQLQHWQMNRRKLAFSTVGTPDYIAPEVLLKKGYGMECDWWSLGAI

SEQ ID NO: 103718 - protein, 110 aa, Gossypium hirsutum
  Clone ID: LIB3493-029-P1-M1-F8.pep
RTLGRTRGAILLLIPLSIFIVFLLLLLFFHSYLILTNQTTYELVRRRRIPYLRGIPERVYPFSKGVCHNLYDFCCGGSNIYSLEPLPSAQELEEKSRPYTCLDVLTCRCC

SEQ ID NO: 103719 - protein, 122 aa, Gossypium hirsutum
  Clone ID: LIB3493-029-P1-M1-F9.pep
RTRGEGTRGNSRPQDISAAEAGWAHAANRLIEAENEPEMIEDWPPVLRSKRRLILTTQLMQQLHCAPPRAVLSADAIKNYETVVYFVARLGLGEACSSAYICESDKAVPSESGSTLPEKVKN

SEQ ID NO: 103720 - protein, 55 aa, Gossypium hirsutum
  Clone ID: LIB3493-029-P1-M1-G1.pep
KMATQALVSSSLTYSFYTARQILTTKRQIVPPRKGSFYIMLLQNQPFNQITLKTF

SEQ ID NO: 103721 - protein, 49 aa, Gossypium hirsutum
  Clone ID: LIB3493-029-P1-M1-H1.pep
LIRMKFIVNASKVVKERSKVQNFYQKCSSEVLSNKNIGFKFHAKDVENQ

SEQ ID NO: 103722 - protein, 50 aa, Gossypium hirsutum
  unsure (1)..(50): unsure at all Xaa locations
  Clone ID: LIB3493-029-P1-M1-H10.pep
AGNIPLNDGMDDESFRGLFRPIIQKVMVVCQPXAVVLQCGADSLSGDRLG

SEQ ID NO: 103723 - protein, 73 aa, Gossypium hirsutum
  Clone ID: LIB3493-048-P1-M1-A6.pep
VLLLVGDKMGAYIDFMGKLEWVNSYGKKQCRSLFWRAKAAMKKALKGRGNKKQFKFQYDPSSYALKFDDGYWH

SEQ ID NO: 103724 - protein, 124 aa, Gossypium hirsutum
  Clone ID: LIB3493-048-P1-M1-B5.pep
IMQMSTEDAYRMAMKSLLRWVTRNLDRERTRVFFTSMSPTHSKGDWGGEASENCYNQTTPIADSNYWGSDSRESIMKVIGEEFSKSEFPITFLNITQLSSYRKDAHTSIYKKQWNSLTTEQLAN

SEQ ID NO: 103725 - protein, 86 aa, Gossypium hirsutum
  Clone ID: LIB3493-048-P1-M1-B7.pep
MRGISSRARPPSLRRPVGLRDRRSLMCAPASGRPLSPPPSRSYDRRAPVMPYPKGSFKREYSQRDELPRPRSKEIMDYGSRVVPDR

SEQ ID NO: 103726 - protein, 65 aa, Gossypium hirsutum
  Clone ID: LIB3493-048-P1-M1-C4.pep
FIMQRNSDMEFYMKNVEEKLKKIRAGYWVRIRRRERKIEREFMKKRRTSKGKEQRKIEVDGSCAL

SEQ ID NO: 103727 - protein, 76 aa, Gossypium hirsutum
  Clone ID: LIB3493-048-P1-M1-E3.pep
SIKKLEYIRLIIVESLPLYPQPPFLIRRALQEVVLPGGYKGDKDGYTIPAGTDIFISVYNLHRSPYFWDHPHDFVP

SEQ ID NO: 103728 - protein, 72 aa, Gossypium hirsutum
  Clone ID: LIB3493-048-P1-M1-E4.pep
PSPPPQNGSFENAMTAIAAAVALSLPISLCDSCKVSKKFQGVKGGFGVFAVLGEANSLGPSDKKSLWGTLFD

SEQ ID NO: 103729 - protein, 67 aa, Gossypium hirsutum
  unsure (1)..(67): unsure at all Xaa locations
  Clone ID: LIB3493-048-P1-M1-F9.pep
IASQMGLFSLVFNVQVPXSTHYSMVFYFVTKELVPGSLLHRFVDGDDEFRNSRLKLIPSVPKGSWIV

SEQ ID NO: 103730 - protein, 70 aa, Gossypium hirsutum
  Clone ID: LIB3493-048-P1-M1-G11.pep
RKLVRLHIPLLNSLVHPLFRNIFITIMTFLLNVVHFILIQHLPPFNFHNIPNIVNSLPNLLFFYSLTSPS

SEQ ID NO: 103731 - protein, 167 aa, Gossypium hirsutum
  Clone ID: LIB3493-048-P1-M1-G3.pep
RTRGLYSSGGGAYLFVPHGEAVPISQSGGHLVISEGPLMHEVYSYPKTAWENTPISHSTRIYNGGNTIQEFLIEKEYHVELLGNSFIDKELIVRYKTDIDNKRIFYTDLNGFQMSRRETYHKIPLQGNYYPMASLAFMQGSNGHRFSVHSRQSLGAASCKQGWLEIM

SEQ ID NO: 103732 - protein, 60 aa, Gossypium hirsutum
  unsure (1)..(60): unsure at all Xaa locations
  Clone ID: LIB3493-048-P1-M1-G6.pep
GGVGGRGMCDXNKTINISIHLLISTSPSHCLIQDSLWFIIYYILRPTHTTLEILSYISLK

SEQ ID NO: 103733 - protein, 79 aa, Gossypium hirsutum
  Clone ID: LIB3493-048-P1-M1-G9.pep
YSRGGRLFVFNMLKILVRHVIYAVIYFFSARAWMITCLMVKCKDRDSQTIRNIRVVECFPCRSLKWKVLNICYPPMCFV

SEQ ID NO: 103734 - protein, 52 aa, Gossypium hirsutum
  Clone ID: LIB3493-048-P1-M1-H11.pep
CMYSLTTLSSFELLLCIPVYILKFLQWNCILLKLGFYLDEVYGAVRWIFKTS

SEQ ID NO: 103735 - protein, 108 aa, Gossypium hirsutum
  Clone ID: LIB3493-048-P1-M1-H6.pep
MEMGSSSLSDSGGSSIDSLNNNALKLGRNIYFNDSSAAVNDGPATMKTQSPPSQRPLGCKKPRAGGMIHGGQPPRCQVEGCEVDLSDVKAYYARHKVCVTHSKSPKAI

SEQ ID NO: 103736 - protein, 109 aa, Gossypium hirsutum
  Clone ID: LIB3493-048-P1-M1-H7.pep
WFRKCGVGAKSANYGRIISFGKDVTEAPLSDIDRRDLSCALNGHGAVNTTRTNLLTVCPDMGLVRIQPYGTTYFLSLTTLPCTNPYCDPILNNAHCDLQHTLQDKPNCR

SEQ ID NO: 103737 - protein, 74 aa, Gossypium hirsutum
  Clone ID: LIB3493-048-P1-M1-H8.pep
QNASFFPGAPFHLSLLGIQPSLRHPGGSSVPRTSTPPPVHGSRPDIAAKISESRGVAEWDAGERRAAQGLMQQL

SEQ ID NO: 103738 - protein, 35 aa, Gossypium hirsutum
  unsure (1)..(35): unsure at all Xaa locations
  Clone ID: LIB3493-049-P1-M1-A8.pep
RYCNLSGNMLLMISNLXFLNCSYSLFILDFNGFFR

SEQ ID NO: 103739 - protein, 65 aa, Gossypium hirsutum
  Clone ID: LIB3493-049-P1-M1-B1.pep
MRLGKGFQFELYLQGEPLIPGLPDDVALNCLLRLPVESHTACKALCKPWHFFVGNKKPIFTLKEG

SEQ ID NO: 103740 - protein, 96 aa, Gossypium hirsutum
  Clone ID: LIB3493-049-P1-M1-B12.pep
MELQAITDKTVKSFKKVISLLGQPRTGHARFRRAPLSHLEQEVKHQQQDARQPRQKIPESGDSSLQVAKNQVSAFKPFCSSLGHRLPPLPHNHHPK

SEQ ID NO: 103741 - protein, 72 aa, Gossypium hirsutum
  Clone ID: LIB3493-049-P1-M1-B6.pep
DGIKGNSRSIISDEISPADPVCLALVIPDCHHNQEIVPLKTYFGGQEGVGKYTFHITNTKPNGLVLTDISSS

SEQ ID NO: 103742 - protein, 86 aa, Gossypium hirsutum
  Clone ID: LIB3493-049-P1-M1-C10.pep
AYQKSNMEDYNRSRSYGNGMMQLDTYHGPPRPSASYDLRCHSAAAYAQSQMANNYNSGNNRDFKLKKGKSTSASSSSNPWSFGDPE

SEQ ID NO: 103743 - protein, 167 aa, Gossypium hirsutum
  Clone ID: LIB3493-049-P1-M1-C5.pep
AQAHKQVHISEARVATALDKLAYMEELVNDKLLEDRNATGSDVASPSSSTSTQSLEVKRKLPRKSLDVSGPVKPYHPRLKNFWYPVAFSTDLKDDTMIPIDCFEEPWVLFRGKDGNPGCLQNTCAHRTCPFHLGSINEGRIQCPYHGWEYTTDGKCEKMPSTQLLNV

SEQ ID NO: 103744 - protein, 100 aa, Gossypium hirsutum
  unsure (1)..(100): unsure at all Xaa locations
  Clone ID: LIB3493-049-P1-M1-D1.pep
ADIRGMNVAVTRARRALLVMGNAKALVQSDDWADLIADAKARNCYVDIDSLPKDFQKDFVCKEFSGPTGLGXPSIAGKASNTRSFKYAGPRHISGDMHMD

SEQ ID NO: 103745 - protein, 121 aa, Gossypium hirsutum
  unsure (1)..(121): unsure at all Xaa locations
  Clone ID: LIB3493-049-P1-M1-D10.pep
SILRRYMDDIGVSNDDALSGFSLRRPSRAERAIDDPIREMEGMLVDEYGSNATFQLPGLLSSNAFDDDEEELSDSPCGEAADASPLETAXALVELEACTVTPSDRRHCILKDVDGEXEMED

SEQ ID NO: 103746 - protein, 66 aa, Gossypium hirsutum
  Clone ID: LIB3493-049-P1-M1-D6.pep
EICSNSQLKVDCHLKIILLYLFTLFRLQINQMPVLTCIFTSRCGAREQTERACSESDSILVSTDIV

SEQ ID NO: 103747 - protein, 42 aa, Gossypium hirsutum
  unsure (1)..(42): unsure at all Xaa locations
  Clone ID: LIB3493-049-P1-M1-E1.pep
PWREVRKAQRAKGLPTVWPIGTXPPPNCVDQSTYLDYYFHIT

SEQ ID NO: 103748 - protein, 89 aa, Gossypium hirsutum
  unsure (1)..(89): unsure at all Xaa locations
  Clone ID: LIB3493-049-P1-M1-E7.pep
MHSEGLNXDAINSTTVVAVLIATVAFAAIFTVPGQYVDDPNDIPPGDSLGEANIAPKPGSIILFIFDSIALFISLADGGGTTPFLPIHF

SEQ ID NO: 103749 - protein, 35 aa, Gossypium hirsutum
  Clone ID: LIB3493-049-P1-M1-E9.pep
TVLTGDASDQRDLAARNCLAPGTLIFARHFGVQNR

SEQ ID NO: 103750 - protein, 125 aa, Gossypium hirsutum
  Clone ID: LIB3493-049-P1-M1-F5.pep
MMKKSFSMDCLSSSPSPSPSPSPSSLSSSRVSIDENSDKTSIGYLSDGLMGRYPDRKKGVPWTEEEHRIFLIGLEKLGKGDWRGISRNFLTTKTPTQIASHAQKYFLPQATLNKKNPPSHLFYLV

SEQ ID NO: 103751 - protein, 38 aa, Gossypium hirsutum
  Clone ID: LIB3493-049-P1-M1-G1.pep
IMINIKMGRVCYVNGLLNMVDAYLDATGAKASIAKTYM

SEQ ID NO: 103752 - protein, 98 aa, Gossypium hirsutum
  Clone ID: LIB3493-049-P1-M1-G2.pep
AGLQAITLGINLGINKIEIMGDAKTVIKKCKSSITDRSVIGAIIRDIRNRKNCYQEIKFSFIPKAKNIYAHTIATEALKRSESFYLEKGVPETVIRVL

SEQ ID NO: 103753 - protein, 85 aa, Gossypium hirsutum
  Clone ID: LIB3493-049-P1-M1-G3.pep
MAISGLYLLFLNLFSYGTILSSATLFTLQNHCSFMVWPGSLSGNGAAIGEGGFVLAPGSSTQYQAPPGWSGQFWGPTGCTFDNLC

SEQ ID NO: 103754 - protein, 24 aa, Gossypium hirsutum
  Clone ID: LIB3493-049-P1-M1-G4.pep
GFSGGIQGPGVPIDEPHPLNPSRV

SEQ ID NO: 103755 - protein, 99 aa, Gossypium hirsutum
  Clone ID: LIB3493-049-P1-M1-G7.pep
KKTQWLCWVSPNPFFAPLPTKAIPRPWSPQSPITAEKGAPWRHRGGTVRAFSLYMRAVSLPPLSLSFIPFHFPSLHYNPTCYYSPFTSAYSLHLTILSN

SEQ ID NO: 103756 - protein, 53 aa, Gossypium hirsutum
  Clone ID: LIB3493-049-P1-M1-G9.pep
GDLGALGNYPGSPFLPSDSEILLDSSEQEDIVEEFFVDSIPGQPRSPSEEEKS

SEQ ID NO: 103757 - protein, 51 aa, Gossypium hirsutum
  Clone ID: LIB3493-049-P1-M1-H2.pep
FFSGCRAHLSKYVIYGKFIRYILLLRSINRNLCIRRKFSTALRLLKDSYIS

SEQ ID NO: 103758 - protein, 103 aa, Gossypium hirsutum
  Clone ID: LIB3493-049-P1-M1-H5.pep
KGLKRSSAAGLKITLRSIREGRKQTLAESLKKEFRLTMNILRTTISADVYEGIRALTIDKDNAPKWGPPILDQVDDEKIDLLFQPFTEDLQLIGSKQEYCHFM

SEQ ID NO: 103759 - protein, 41 aa, Gossypium hirsutum
  Clone ID: LIB3493-049-P1-M1-H6.pep
NLIEPKTKVGILGSVACATLFVHIAEHQAFSSFDSSPSLKS

SEQ ID NO: 103760 - protein, 110 aa, Gossypium hirsutum
  Clone ID: LIB3493-050-P1-M1-A12.pep
MGNLWFLNLLLPLFLLQLFPILVVSKPYVFPEKYFINCGSDSSLPLGSRKFVGDMYPNSSSVTNGKTVKDSSQQSSLDSGLYQTARFSGHHFSYDLDITDKGLYVVRLHF

SEQ ID NO: 103761 - protein, 66 aa, Gossypium hirsutum
  unsure (1)..(66): unsure at all Xaa locations
  Clone ID: LIB3493-050-P1-M1-A2.pep
MQDIHSIEGGCIFSGXGRGGGXGXXGNKRLRSHHHYNHQALKCPRCDSLNTKFCYYNNYNLSQPRH

SEQ ID NO: 103762 - protein, 40 aa, Gossypium hirsutum
  Clone ID: LIB3493-050-P1-M1-B11.pep
MVADKGKKVKFTENGEEENSEQIDKDLVLSIEKLQEIQDE

SEQ ID NO: 103763 - protein, 107 aa, Gossypium hirsutum
  Clone ID: LIB3493-050-P1-M1-B12.pep
KKDQVKAWPLAKTLTLTLACRFFLGIDEPERISRLVKRFDDITLGMHSIPLDFPGTAFYKAYKAAAAIRRELKEVIKEKKAAMVTGVVMQDILCHMIGATDKTGKYM

SEQ ID NO: 103764 - protein, 35 aa, Gossypium hirsutum
  Clone ID: LIB3493-050-P1-M1-B2.pep
ISSRSHHLFYAPPFGVTGSGSLMDVYIRIFGFIFW

SEQ ID NO: 103765 - protein, 42 aa, Gossypium hirsutum
  Clone ID: LIB3493-050-P1-M1-C1.pep
ANSSLLRISGSTSYLTNTTRLRKAKATQSSKYPESHVYENVW

SEQ ID NO: 103766 - protein, 65 aa, Gossypium hirsutum
  Clone ID: LIB3493-050-P1-M1-C2.pep
VRVLLNTGPDYALKRNIKVIDYSVYNLIHNMIDLLHDYIVKSAVTKKDDILTSYLQVKVTDPKYL

SEQ ID NO: 103767 - protein, 95 aa, Gossypium hirsutum
  unsure (1)..(95): unsure at all Xaa locations
  Clone ID: LIB3493-050-P1-M1-C6.pep
DVFDADYLMTQMNGFVNVXKELPPDISSNEPHRVYCSKRKGQFDYIESVRPSLLKYHYVSITPAMSQRRDRYLVGXPNYAKAALCQACYRALKLT

SEQ ID NO: 103768 - protein, 125 aa, Gossypium hirsutum
  Clone ID: LIB3493-050-P1-M1-C9.pep
WKGGKDWILEFTDRSQWAIFKDMHEECYNRNIRAASVKNIPIPGVCLVHDYDENATDVTFVRSSFKYLRQVETDVEMALDPSHVFYDMDTDDEQWISGIHRSSQSDGSCSTLEFSDEMFEKVMDM

SEQ ID NO: 103769 - protein, 104 aa, Gossypium hirsutum
  Clone ID: LIB3493-050-P1-M1-D11.pep
TLRSQECYPKNPSKNSGCCGLGRWKVVATTWIGADEISLLAEELIQLSVKASMVEPSEKPTLICTIWTEKSYNPDSFKAQMRSIWKIKKKFEIQSVGQNLFTIV

SEQ ID NO: 103770 - protein, 97 aa, Gossypium hirsutum
  Clone ID: LIB3493-050-P1-M1-D3.pep
DDFPVDGYLSDLSPNSWASSTEEEIREGSSLKLNLQLTSSSSSYNYEYITLRDLMLDSNYRGGGISVINSLRTSIDNCYIAHFSTNGILVQGGHETY

SEQ ID NO: 103771 - protein, 122 aa, Gossypium hirsutum
  Clone ID: LIB3493-050-P1-M1-D4.pep
IVSIELNSSSESSYWIGYTKGMQELQRHIEDHNDCFEVDPLNSIYPVLDRLKIQQLLLGLEDLNVWGRCKFRAPHFLKVNSFDEPDLVQRLHDATLSLPSIVKPHVACGVADAHSMAIVFQV

SEQ ID NO: 103772 - protein, 89 aa, Gossypium hirsutum
  Clone ID: LIB3493-050-P1-M1-E1.pep
GIYKGIVMSIKEYGAFVEFNGGQQGLLHISELSHEPVSRVSDVVSVGQQISLMCIGQDVRGNIKLSRKATLPRPVSETKSVVEGSAPVT

SEQ ID NO: 103773 - protein, 116 aa, Gossypium hirsutum
  Clone ID: LIB3493-050-P1-M1-E11.pep
KRYRYKKSIGSPIVQIFQVIVAAINKRKMELPYRVELLYEDTPDAQRIHHTDQFQFLDRAAIVAERDFERNVVSSPNPWKLCSVTKVEEGKMMGGLLPVWATTIIFWTTFAQMITF

SEQ ID NO: 103774 - protein, 29 aa, Gossypium hirsutum
  Clone ID: LIB3493-050-P1-M1-E12.pep
GNGKNYALAATGMIEQTNVRLYFYSEIYR

SEQ ID NO: 103775 - protein, 86 aa, Gossypium hirsutum
  Clone ID: LIB3493-050-P1-M1-E4.pep
IPKTLWLMALCNLSINPHHRRVCSPLAINSPPFSLFLLFRSQNLNCNLKRAIYIYLFSITLLLLVPLDYLLESGFSHESREVATIW

SEQ ID NO: 103776 - protein, 100 aa, Gossypium hirsutum
  unsure (1)..(100): unsure at all Xaa locations
  Clone ID: LIB3493-050-P1-M1-E5.pep
GRVGFSYGAVVLDGASGRRPFVTGNAPARVSGNLVEWVWGLHKEGKSLTAADAYLEGRFEESAMXRVLLVGVACSHPDPLAXPTMRSVGQMSVGETEVPM

SEQ ID NO: 103777 - protein, 68 aa, Gossypium hirsutum
  Clone ID: LIB3493-050-P1-M1-F12.pep
YSESCYRADQTDILSTSLLRNFLCTPGQHVEITRSVIVPRLFPLPTRARFEPQSSQTQNVARFDGNCF

SEQ ID NO: 103778 - protein, 99 aa, Gossypium hirsutum
  Clone ID: LIB3493-050-P1-M1-F5.pep
ESLLSENRQLRDALFDSKKEVNQLSSQLSDAIMKISEQSLVEENLLRRVESLESAVEDAHIEATICWDVYNFLFRGAISQVKCMAEDSEMEHNIMKRNL

SEQ ID NO: 103779 - protein, 80 aa, Gossypium hirsutum
  Clone ID: LIB3493-050-P1-M1-F6.pep
DWDIRFKIALGLAEGLAYLHHDCVPAIIHRDVKAHNILLGDYYKPYLADFGLARLLEDENGSSFFANPEFAGSFGFMAPC

SEQ ID NO: 103780 - protein, 53 aa, Gossypium hirsutum
  unsure (1)..(53): unsure at all Xaa locations
  Clone ID: LIB3493-050-P1-M1-F8.pep
SVWQIWDSNSRDGDRYGRDYEERYGRDGDRDDDYRGXSRSVDDYQYGTMILEL

SEQ ID NO: 103781 - protein, 108 aa, Gossypium hirsutum
  unsure (1)..(108): unsure at all Xaa locations
  Clone ID: LIB3493-050-P1-M1-F9.pep
EEFDKSKLRPPYDPFNKKPVIEEVEDPKNLLQVFHNMRGDSLINNAGKMFDALSKDGLTHEALELFSEXKDXGPMPDSVGHTAVIDAYANAGQNKKTHKKYMRMLASG

SEQ ID NO: 103782 - protein, 66 aa, Gossypium hirsutum
  Clone ID: LIB3493-050-P1-M1-G10.pep
CLVNQSKCFGAIIQTWREGVNMKRAPPTDKSALDGRPISSSIMSVLPYQRPSLQQASAYLLFLKPN

SEQ ID NO: 103783 - protein, 87 aa, Gossypium hirsutum
  Clone ID: LIB3493-050-P1-M1-G3.pep
SGTACSTQASPTVESQIIGEIHTVRLLSLTLLWSLRLLGSVSCTDAETSRGGLIEATHYGGFDVVTAGKAAGRIAFGLFTKAAPKAA

SEQ ID NO: 103784 - protein, 64 aa, Gossypium hirsutum
  Clone ID: LIB3493-050-P1-M1-H2.pep
VTVSSGSPGSQLCRGMHEFTGGAISKGTPNAVCCNADVMDTFSVHISVCLFALAVIYNVACTEV

SEQ ID NO: 103785 - protein, 56 aa, Gossypium hirsutum
  Clone ID: LIB3493-053-P1-M1-A10.pep
RTRGHGSQARFLLAKLNPSATYNNANEMAAGSDVIFTDDVSLQVFFEHLQRLAVQS

SEQ ID NO: 103786 - protein, 75 aa, Gossypium hirsutum
  Clone ID: LIB3493-053-P1-M1-A11.pep
LPRPLNIEASHYFKFKNPPPRQHTPMTQNWLAFQINNCTHHVKLQVLLEHLQPLALQSPYTKNSRKEDSCISCIF

SEQ ID NO: 103787 - protein, 57 aa, Gossypium hirsutum
  unsure (1)..(57): unsure at all Xaa locations
  Clone ID: LIB3493-053-P1-M1-A2.pep
VGQIMTTLGSGEWMILLXTPHVGSCARYITGQVILLPSEASRFFQWRSDYKERGGSR

SEQ ID NO: 103788 - protein, 129 aa, Gossypium hirsutum
  Clone ID: LIB3493-053-P1-M1-B10.pep
HFSGLPGFLYQKKSSQVLVNGHLQRVELEALLEVCFSFHKYGHLKNLCLSSLADRSGHGRVETSRSPSNSGTDSATKNDALPMMGESFGLWMVVSANLSANRRDFADKRHKFRIEIKRVPDSKSCLQWL

SEQ ID NO: 103789 - protein, 81 aa, Gossypium hirsutum
  unsure (1)..(81): unsure at all Xaa locations
  Clone ID: LIB3493-053-P1-M1-B11.pep
TTNEDGEKAGPTVKHLLIISTGLMTGGSAIVTWVGVPSTFTIYNFRDQKAVMNWLLLLCVGGGLWAGLTIGFGTEXYTTNA

SEQ ID NO: 103790 - protein, 86 aa, Gossypium hirsutum
  Clone ID: LIB3493-053-P1-M1-B4.pep
KPSQDSCPLKDAVFAIVKVALETIDFELHSGTHPRLGVVDHICFHPLAHASLDQTAVVAKSLAADIGSKLKGLFLLNQMLCRYCQF

SEQ ID NO: 103791 - protein, 132 aa, Gossypium hirsutum
  Clone ID: LIB3493-053-P1-M1-B5.pep
PLLFPAPRLSRSFISSISTLYSFDLKIFSGKSERKRKTNKHTDKKMKIRRQSQGPLSKGDQIEVKRPNGAYYAATVLRPPSAMRKNMVFVEYHAEDGSKCVRGYVDLTHVRPSPPLELNRRFRIGDDVEAYW

SEQ ID NO: 103792 - protein, 108 aa, Gossypium hirsutum
  Clone ID: LIB3493-053-P1-M1-C1.pep
SCRSIPWVLDEKLAQKHGISTDLPEELRSKFFLQGGQLVNRTKKRKNENRNNVGEANGESGKSKRNKGETGKPDASKEENNQPEDEPVKYPIDDLLVKPGPDDPLFTD

SEQ ID NO: 103793 - protein, 39 aa, Gossypium hirsutum
  Clone ID: LIB3493-053-P1-M1-C10.pep
PWLDPFNRFSTTNGSCREPILFGPNLGSFFPHTHTVEDR

SEQ ID NO: 103794 - protein, 123 aa, Gossypium hirsutum
  unsure (1)..(123): unsure at all Xaa locations
  Clone ID: LIB3493-053-P1-M1-D3.pep
RAVDESDVXKMIYLPAVIKEVLRLHPPGPLLSWARLAITDATIDGYHVPKGTTAMVNMWAITRDPQEWPNPLEFMPDRFVTGEGEVEFSVLGSDLRLAPFGSGRRTCPGKNLGXTTVSFWVAT

SEQ ID NO: 103795 - protein, 48 aa, Gossypium hirsutum
  Clone ID: LIB3493-053-P1-M1-E3.pep
LDFGAPKSIDNIDYYRSLLFSFKYGDLCLLWPEALTTLCVWNLKTKLD

SEQ ID NO: 103796 - protein, 128 aa, Gossypium hirsutum
  Clone ID: LIB3493-053-P1-M1-F10.pep
NILLDEDGNAKLSDFGLARQGPLEGFGHVSTSVVGTVGYAAPEYVQTGRLTAKSDVWSFGVVLYELITGRRTLERNLPRSEQKLLEWVKPYISDSKKFHLIIDPSLEGQYCIKSAQKLASLANKCLMK

SEQ ID NO: 103797 - protein, 130 aa, Gossypium hirsutum
  Clone ID: LIB3493-053-P1-M1-F3.pep
DAWVSKDGWEEHMQVNHLAPALLSILLLPSLIRGSPSRIINVNSGMHYVGFVDTEDMNAVTGKRKYSSLLGYTSSKLAQVMFSSVLHKRLPVEAGVNVVCVSPGIVHTNVARDLPRIVQAAYHLIPYFIF

SEQ ID NO: 103798 - protein, 48 aa, Gossypium hirsutum
  Clone ID: LIB3493-053-P1-M1-F4.pep
QSWLIFYKSGGSLLEKTTQRNKIIGRGALNEMLIQYEMESILTKITLR

SEQ ID NO: 103799 - protein, 71 aa, Gossypium hirsutum
  Clone ID: LIB3493-053-P1-M1-F9.pep
QRSPLCLCLCKFSAMSSSHSLKSTPLKPKACLSLTSKSPVSKTPEKDFFQVPNRARNRGGALSIKEIPQGA

SEQ ID NO: 103800 - protein, 64 aa, Gossypium hirsutum
  Clone ID: LIB3493-053-P1-M1-G10.pep
KGRSSGGMSSTLQDYHIKRNKQIPSVKRILLSRFRSPGELSFPLFRLSFRYRVSFFYLARTPSE

SEQ ID NO: 103801 - protein, 125 aa, Gossypium hirsutum
  Clone ID: LIB3493-053-P1-M1-H1.pep
MENVIVRSGEKDDSQFPIKEPKLEASDSFKHLAFDQGNANSVPSNDKANGIVIPVKPTIKLPKPVIMFSPRPLSELDAAATKLQKVYRGYRTRRNLADCAVVVEELWWKTLDSAALRRCSVSFYE

SEQ ID NO: 103802 - protein, 82 aa, Gossypium hirsutum
  Clone ID: LIB3493-053-P1-M1-H6.pep
MEKKMDFVDSKSSKKPEKTQVPYNYETILRDVDLPIDTSTMDKLISQLHYGVFLNQKRKKYWVDKNNKNCFMLFARDLSITW

SEQ ID NO: 103803 - protein, 121 aa, Gossypium hirsutum
  Clone ID: LIB3493-054-P1-M1-A11.pep
ENEDGIWELQFFDSNVSKSVTVDDITLSAKQVNGICRGNKSSANDFQFVVKEMNDVNSIPSSFWSEIKQLGKLQHPNLVNLIGTCRSDKNAYLVYEYIKGKLLSEILHELTWERRRKNPMG

SEQ ID NO: 103804 - protein, 48 aa, Gossypium hirsutum
  Clone ID: LIB3493-054-P1-M1-A5.pep
VWLLENHWPGKFFLQNTGKGRFFLRRMSYPSRNLSDIFQKLTLLLPFT

SEQ ID NO: 103805 - protein, 73 aa, Gossypium hirsutum
  Clone ID: LIB3493-054-P1-M1-A7.pep
SDIGRKPSALNPNMEIQRTFSTTKQTKTYFESSLSNSSDPFPKHSIMKSECHHSIAQIFCFFALPLPKHRLQH

SEQ ID NO: 103806 - protein, 126 aa, Gossypium hirsutum
  Clone ID: LIB3493-054-P1-M1-B10.pep
LLAVLDERESLKPKVHRRIEELNKARAGAKLLEPDGYKTSSYGSEKTSPLEWPHVNKGSSMNLAIKQPANMAVQSSWKYNNDCNQFDKQLQKLSLNIPLPNKETLSRHSFLGPNGLRGQWLGPSAE

SEQ ID NO: 103807 - protein, 66 aa, Gossypium hirsutum
  Clone ID: LIB3493-054-P1-M1-B4.pep
KVQYSGDRLCECQSKGGCRTLQNSPSFDTVNLDGGLQEVWILLAMALGYRLCAYFCLRKRISGCHI

SEQ ID NO: 103808 - protein, 45 aa, Gossypium hirsutum
  Clone ID: LIB3493-054-P1-M1-C1.pep
IFSFSGSPIYSIPILMDWMRFILCQLPRWGITYKVEPKYSVFLYR

SEQ ID NO: 103809 - protein, 50 aa, Gossypium hirsutum
  Clone ID: LIB3493-054-P1-M1-C5.pep
PPFFFIFFLTTSRKQRNFFIHPSPNSNEVEKTTPNNKKVRVRRSPQNCSF

SEQ ID NO: 103810 - protein, 120 aa, Gossypium hirsutum
  Clone ID: LIB3493-054-P1-M1-D11.pep
KLSDFGLARQGPPEGFGHVSTAVVGTVGYTAPEYVQTGRLTAKSDVWSFGVVLYELITGRRVLERNLPLSEQKLLEWVRPYISDSKKFHLIVNPSLERQNCLKFGRKLASLANICLMKNC

SEQ ID NO: 103811 - protein, 99 aa, Gossypium hirsutum
  Clone ID: LIB3493-054-P1-M1-E12.pep
MALAATYKIVLGSIAFAIFWVLAVFPAVPLLPIGRTAGSLLGAMLMVLFRVITPDEAYAAIDLPILGLLFGTMVVRCYLERADMFKYLGKLLSWKSKGA

SEQ ID NO: 103812 - protein, 126 aa, Gossypium hirsutum
  unsure (1)..(126): unsure at all Xaa locations
  Clone ID: LIB3493-054-P1-M1-E6.pep
MRPQVTIQQWRKGAQWFEMDRDLAIEVVSDQIYFPVFQKYCKGACYADEHYLPTFVTMKFANKNSNRTLTWVDWSKGGPHPAKFIRTNVTVXILERLRSQSQCQYNGNTTDICHLFARKFSPDALY

SEQ ID NO: 103813 - protein, 123 aa, Gossypium hirsutum
  unsure (1)..(123): unsure at all Xaa locations
  Clone ID: LIB3493-054-P1-M1-F1.pep
DAWVPYWQDYLVIASYLAFKKXIFVGFNAGNSGPDAYTVVNTAPWIMTVAASTMDRSFVAIIELGNGETFXGSSFYTGKALKGLPIVYGKTTGNLGAEYCLSGSLDPKLVKEKIVICEQGIVR

SEQ ID NO: 103814 - protein, 92 aa, Gossypium hirsutum
  unsure (1)..(92): unsure at all Xaa locations
  Clone ID: LIB3493-054-P1-M1-F11.pep
ATRGPDAWAFAGCKMDDDSTYRIVRQAYSLXQRYISRTRLGFPNTAFGLYLILSAKCVINLTSNFVXGMTGITDKGVXQKIIRANFLKHQNI

SEQ ID NO: 103815 - protein, 61 aa, Gossypium hirsutum
  Clone ID: LIB3493-054-P1-M1-F8.pep
IKFENFSGFVIETRIKGKLFPYFLLFSRTSLRFSSSVGVKFGFVKRKTTCFGRFCVTGFWI

SEQ ID NO: 103816 - protein, 97 aa, Gossypium hirsutum
  Clone ID: LIB3493-054-P1-M1-G10.pep
TSSIFWAQAVGSSLTTFSNSSSSKVEVVIVDVSAGQKETESSGDFKFVTRKELLLCYSESGGGNPIALPDDRGEAVVIMSKALQHFIKKAYADGVLC

SEQ ID NO: 103817 - protein, 70 aa, Gossypium hirsutum
  Clone ID: LIB3493-054-P1-M1-G2.pep
NTLEWHQRVGFPREIPTHGLHAIWVISSVQLNLANRPLTFVHLVEIEVGRGIQRRHPSIMVLQVYMKQRQ

SEQ ID NO: 103818 - protein, 103 aa, Gossypium hirsutum
  unsure (1)..(103): unsure at all Xaa locations
  Clone ID: LIB3493-054-P1-M1-G8.pep
MGNRKKKLLGHPYGSFKGLKEDRRNSEEKNLRPGLSRMIPSVSFNEKILRSGLAPQSQRRKSAVFRLSFKRRSYDADDKLXVYASKRFLYRPKAGYIIPGIKD

SEQ ID NO: 103819 - protein, 90 aa, Gossypium hirsutum
  unsure (1)..(90): unsure at all Xaa locations
  Clone ID: LIB3493-054-P1-M1-H3.pep
GRVGARTGGEDIXPLGGPFGGENIKKPEWEQGEGTTYAFGLKLDGPFPEKVIPLGKGALXLMLKGLTKEPNKQSKNTTGWGLGRIFEILF

SEQ ID NO: 103820 - protein, 60 aa, Gossypium hirsutum
  unsure (1)..(60): unsure at all Xaa locations
  Clone ID: LIB3493-054-P1-M1-H5.pep
TGGKAPWKQLDTKANRKSFSTTSCVKKPYRYSPVIEMXLTEIRKYXKSTALLIKKWPFQK

SEQ ID NO: 103821 - protein, 109 aa, Gossypium hirsutum
  Clone ID: LIB3493-054-P1-M1-H8.pep
RSALVQETKGIWVDLLITVLCDQWKKCKRAIEASSPRKEPKCILLPFQKLNSEDIPAESSFTAGERMSELVKVFVLLHQLQIFSLGRTLPEQPSIQPQIDIPEISRAKA

SEQ ID NO: 103822 - protein, 37 aa, Gossypium hirsutum
  unsure (1)..(37): unsure at all Xaa locations
  Clone ID: LIB3493-055-P1-M1-A8.pep
FVHVEINRKXVFPLKNVNSWFGPFHISQDGDRDFRQG

SEQ ID NO: 103823 - protein, 81 aa, Gossypium hirsutum
  Clone ID: LIB3493-055-P1-M1-B1.pep
FSLSFLYLCLVFLLLLWIRLPFLFLSFIIINSTMCVEDIEQVSQEMEDLGDGSTNKKPWPLLSRGDFLSTQMENWVHKDSP

SEQ ID NO: 103824 - protein, 101 aa, Gossypium hirsutum
  Clone ID: LIB3493-055-P1-M1-C1.pep
GLVGEVGGGKKEFEQQMEVFNRVGRHPNVVPLRAYSYWPAQKLLVYNYMPDGSLVALLHGNRTSERTPLDWDTRMKIALGTARGIANNYTEGGGKFTHGNI

SEQ ID NO: 103825 - protein, 52 aa, Gossypium hirsutum
  Clone ID: LIB3493-055-P1-M1-C11.pep
TLKDSSRARWSVAYVSPRPKHGNSTPAAAMRRKCQIIKAYQAHLKTPTLLCE

SEQ ID NO: 103826 - protein, 48 aa, Gossypium hirsutum
  Clone ID: LIB3493-055-P1-M1-D10.pep
ARLCLYIVYKIRLCLMSSSVSVSCSVGVDVYVIDSGPQVIVLPLTLSR

SEQ ID NO: 103827 - protein, 68 aa, Gossypium hirsutum
  unsure (1)..(68): unsure at all Xaa locations
  Clone ID: LIB3493-055-P1-M1-D4.pep
HAFGQIXRQVQTTGKQALXDALRSILETSVIPAFEMACESMXEQIDVTFHKGLIEHTGTGHKEFENSH

SEQ ID NO: 103828 - protein, 67 aa, Gossypium hirsutum
  Clone ID: LIB3493-055-P1-M1-D6.pep
NMRDGLWDGICNLNYSRYFYLDASFPVACNCENSPMMAPKTWTLLLPLGHSTLPRWMDPELAFTKNR

SEQ ID NO: 103829 - protein, 67 aa, Gossypium hirsutum
  Clone ID: LIB3493-055-P1-M1-E12.pep
DISPLVCTGVLEAVVAALFMNIYIVGLNQLSDVEIDKVNKPYLPLASGEYSTLTGIMIVTSFSIMSF

SEQ ID NO: 103830 - protein, 43 aa, Gossypium hirsutum
  Clone ID: LIB3493-055-P1-M1-E4.pep
MHLLNHWISSELMGRLSLFGQTYFHFLVGRKNTYSLDPLFGTK

SEQ ID NO: 103831 - protein, 124 aa, Gossypium hirsutum
  Clone ID: LIB3493-055-P1-M1-E5.pep
LIKVRMRVEGEAQGPNAAAQNLRPSLAFQTNSTPSSTVHLRQATAARIGPVATGIRIFKTEGFRALFSGVSATVLRQTLYSTTRMGIYDILKHKWTDKETNTMPLASKILAGLIARGIGAAVGN

SEQ ID NO: 103832 - protein, 69 aa, Gossypium hirsutum
  Clone ID: LIB3493-055-P1-M1-F12.pep
MLFRLAHLVWPMCSFAYSHRNLFGRNQKLNISLERGQIDSIFRINYTDPWIEGDDKRTSRTIIIFASTF

SEQ ID NO: 103833 - protein, 65 aa, Gossypium hirsutum
  Clone ID: LIB3493-055-P1-M1-F9.pep
SPNPHPHNNRMYLSPNPGVRWLSLTTAFSSIFSFPSSYALLSAKTASTAHPACSEWEKVIFSGSS

SEQ ID NO: 103834 - protein, 52 aa, Gossypium hirsutum
  unsure (1)..(52): unsure at all Xaa locations
  Clone ID: LIB3493-055-P1-M1-G3.pep
VRDSVASAYKRKGKKPEIVSCFXIKDSVKHYLIMIRFKTLHTPLGKIVFTGL

SEQ ID NO: 103835 - protein, 73 aa, Gossypium hirsutum
  Clone ID: LIB3493-055-P1-M1-G4.pep
TWLDSTVAFEIPIYQSLLKIPPGMSFHHFLTISSKEFSKHHLASNRKGLIWLFRSYLPGPLVSRRIRQWSEKE

SEQ ID NO: 103836 - protein, 103 aa, Gossypium hirsutum
  Clone ID: LIB3493-055-P1-M1-G5.pep
HASAREKSVSHFPNIANECLQHGLDITQQPIPVVPAAHYMCGGVRAGLQGETDVHGLYAAGEVACTGLHGANRLASNSLLEALGFARRAVQPSINHMKRVRVD

SEQ ID NO: 103837 - protein, 97 aa, Gossypium hirsutum
  unsure (1)..(97): unsure at all Xaa locations
  Clone ID: LIB3493-055-P1-M1-G7.pep
KTVTGLLRMIEGERLGEVVDRTLLNHLLKMFTALGIYFESFEKPFLECTSEFYAAXRMKYLHQSYFPDFLKLATFKFPTNQIIFFPHLGVNFIKSLF

SEQ ID NO: 103838 - protein, 77 aa, Gossypium hirsutum
  unsure (1)..(77): unsure at all Xaa locations
  Clone ID: LIB3493-055-P1-M1-G8.pep
DTFENXGREINVETMADSPLVKKSETFRDRTNYQLPPSSSPASGKLRKEPALSQDELKLLVVINIKKFYGDMTFLWQ

SEQ ID NO: 103839 - protein, 65 aa, Gossypium hirsutum
  Clone ID: LIB3493-055-P1-M1-H1.pep
RTRGKKRTGPRPCPVCYLPVEEAVALMPKVPSFSPGIKNLIYIFEENLNRETEFGGSDSGGDSTF

SEQ ID NO: 103840 - protein, 78 aa, Gossypium hirsutum
  Clone ID: LIB3493-055-P1-M1-H10.pep
RTRGKKGGPFRTSHDIVGRSVALCVSKNCQLQDLSLEDMRNLSPVFDNDVYEFLGVENAVKKFSSYGSTGFACVAYQL

SEQ ID NO: 103841 - protein, 93 aa, Gossypium hirsutum
  unsure (1)..(93): unsure at all Xaa locations
  Clone ID: LIB3493-055-P1-M1-H4.pep
PTRXARYHIWLGTAMICFATFHGASTLFIWGVSHYIQDEITKWQRTGRIYLAGEITLVVGLVMWITSLPQIKRKRFEIFYYIHHLDIILPVFF

SEQ ID NO: 103842 - protein, 123 aa, Gossypium hirsutum
  Clone ID: LIB3493-056-P1-M1-A1.pep
DAWVSVENEYKPDTPHGNLNQSSTSYVYEMEDTNQLQDCLPQDELAIQAFNPTLRNSFRMGGIFHSNGENSLSFLSDDHFATEDNSEAEMPIWISTTPAWGYASGSVSTPAASESSSTNFDVN

SEQ ID NO: 103843 - protein, 115 aa, Gossypium hirsutum
  unsure (1)..(115): unsure at all Xaa locations
  Clone ID: LIB3493-056-P1-M1-A3.pep
GVDLVLAGHPLLTTPIATHLTGNSFSPRGGLYTIGDLITAKEDLHVXKPTTTADEALQALAEHTITWYTDIDDDTKXDRLASDYDLLAXNSISARRTENDLFPELDSTHKTFNEI

SEQ ID NO: 103844 - protein, 59 aa, Gossypium hirsutum
  Clone ID: LIB3493-056-P1-M1-A5.pep
VVVYKVRLRDETYLTPLKSLHRVDLVSSYTGYSLLDDSVESVNLSVVGLDSKHDSGESR

SEQ ID NO: 103845 - protein, 121 aa, Gossypium hirsutum
  Clone ID: LIB3493-056-P1-M1-B1.pep
CDFITQNGMALAIRKTGNLKSIFMNGIGIPSLDVCFLDSFSYARSLCELDLSNSFISDELLCLVAEANLPLNKLVLSRCFCFTFDGIYFLLSKYQFLAYLDLEGANFLNDESIIELAKFFG

SEQ ID NO: 103846 - protein, 86 aa, Gossypium hirsutum
  unsure (1)..(86): unsure at all Xaa locations
  Clone ID: LIB3493-056-P1-M1-B11.pep
GLLGGRVGRLLGAGPAFTHLIKVYHEEHHLLITHGIYRFVRHPGYSGFFIWSVGTQIMLCNPISTVGFAIVAWKFFAXRIPYEEVF

SEQ ID NO: 103847 - protein, 96 aa, Gossypium hirsutum
  Clone ID: LIB3493-056-P1-M1-B12.pep
VEALSRAQHPNLVHLQGYCMHKNDRLLIYSYMENGSLDYWLHEKVDGPSLLSWETRLKIAQGAARGLAYLHQSCEPHILHRDIKSSNILLDENFKA

SEQ ID NO: 103848 - protein, 81 aa, Gossypium hirsutum
  Clone ID: LIB3493-056-P1-M1-B3.pep
LRNSNWYKKKIHILRTSLGKLDDNICFKRGIDKHQWLQNLRHQNQLTFSGSSSIDKIREKDSIKIKCKDFSTSKILIPNNE

SEQ ID NO: 103849 - protein, 69 aa, Gossypium hirsutum
  unsure (1)..(69): unsure at all Xaa locations
  Clone ID: LIB3493-056-P1-M1-B4.pep
MRTASRRLADSIVLKFATNITKRGAVPETRTXKGKDYPVGPMLLGNFXYRVIGSSLFQMMTTATRGGMA

SEQ ID NO: 103850 - protein, 123 aa, Gossypium hirsutum
  Clone ID: LIB3493-056-P1-M1-B5.pep
HISNVVCSAQKLQTPKEKVDMEAKLQAWLESKGKTKSAQRMGPFASRLVGKTPSSIRSMKKLDSNSSCKVKNSTKDDPSNTKDRGLSVTSRNLFNNEDVVDIEQIMLKPTMNLAEESSGKEET

SEQ ID NO: 103851 - protein, 53 aa, Gossypium hirsutum
  Clone ID: LIB3493-056-P1-M1-D11.pep
LSDEGGSLIILLYLQVDRSTRECKHGFPIRPELGESLSLQSCRGDDCKQFCFC

SEQ ID NO: 103852 - protein, 76 aa, Gossypium hirsutum
  Clone ID: LIB3493-056-P1-M1-D2.pep
LLSPLLFLHLFSFLPKLLILFFITIVAESSLFAKVFIDLPFSIDFYEHFYVINVQGLNLKKISPDPMGRSTTNFDL

SEQ ID NO: 103853 - protein, 115 aa, Gossypium hirsutum
  Clone ID: LIB3493-056-P1-M1-D4.pep
EEVEIDQRRLPADYDPSNFDPTEHRSPPTERVWRLVDETSGLTLSEISELGSIIMKKRGMIEPPTVGVMKAGAAAGLAMKTAGGGAAAAAKEEKKPDKTVFELKLESYEAASKIK

SEQ ID NO: 103854 - protein, 95 aa, Gossypium hirsutum
  Clone ID: LIB3493-056-P1-M1-D5.pep
FFLLFFNPLFFLLISIDFFIILHQKRAKERGETHLHFEAFGSPLVSPQSKLSGDLGFVSKTHGSPWFNEASIDHSMGPKERQKNSRLGDHRSAEY

SEQ ID NO: 103855 - protein, 122 aa, Gossypium hirsutum
  Clone ID: LIB3493-056-P1-M1-D9.pep
LILIIVWFVHSNYAAYRDRQPQSLPELELSEEMVNNAAASFRVKINNVLLMAHDITLGKDFRLFFKVVTCLWLLSAIGSYCSFFTLAYIGTILSVTLLAFYSKYEEPVNKYCGMIQRKFSQQ

SEQ ID NO: 103856 - protein, 50 aa, Gossypium hirsutum
  Clone ID: LIB3493-056-P1-M1-E12.pep
NSKILGVETAIRRPYFHARPLNVAELENWHNYLDFIESEGDLNKVFEVGF

SEQ ID NO: 103857 - protein, 124 aa, Gossypium hirsutum
  Clone ID: LIB3493-056-P1-M1-E4.pep
QSLCWGSSAFGGIVSSYFSGSLVDAYGVRFVFGITALLPMITSAVAVLVKEQHVPGPTRGQNVLLANPSFLESSRENIIQLWNAVREPNVFLPTVFIFLWQATPQSDSAVFYFTTNKLGFTPEF

SEQ ID NO: 103858 - protein, 122 aa, Gossypium hirsutum
  Clone ID: LIB3493-056-P1-M1-F1.pep
RLAAQRNTRYYRGIWHAFHTICREEGIFGLYKGLGATLLGVGPSIAISFSVYESLRSYWQLQRPDDSTIMVSLACGSLSGIASSTATFPIDLVRRRMQLEGAVGRARVYKTGLTGTFRHIIH

SEQ ID NO: 103859 - protein, 62 aa, Gossypium hirsutum
  Clone ID: LIB3493-056-P1-M1-F12.pep
MEGETSWNSHCADDMSKDIGEFDSFSELSDEGNKETIISVDSILPDDLLERILAYLPIASIF

SEQ ID NO: 103860 - protein, 57 aa, Gossypium hirsutum
  Clone ID: LIB3493-056-P1-M1-F5.pep
VGRPARVLNVPVIPIGTLLAATHPFAANPPYLLSWLSPQISTPDMLQPKLFEKLVTK

SEQ ID NO: 103861 - protein, 114 aa, Gossypium hirsutum
  Clone ID: LIB3493-056-P1-M1-G9.pep
GMGCSAGLISVELAKNLLQANPNTYAVVVSTENITLNWYFGNDRSMLLCNCIFRMGGAAVLLSNKAGDKSRSKYQLVHLVRTHKGADDKHYNCVYQREDEKGTGGVSLARELMA

SEQ ID NO: 103862 - protein, 123 aa, Gossypium hirsutum
  Clone ID: LIB3493-056-P1-M1-H8.pep
PRVRFISGLMSLPVKLPGTQLYRSLQAKKRMVKIVHKIIQSKRDSSMSSMVPKDVVDVLLKDASELLTDDLIADNMIDMMIPGEDSVPVLMTLAIKYLSDCPAALHQLTEENLKLKRLKAQNG

SEQ ID NO: 103863 - protein, 63 aa, Gossypium hirsutum
  Clone ID: LIB3493-057-P1-M1-A11.pep
PPRTPWFTECLLKQGGIIKETWIEENPIETILKYSHVAAKDPNFIAPAYAETHPEPVFAKSDS

SEQ ID NO: 103864 - protein, 53 aa, Gossypium hirsutum
  Clone ID: LIB3493-057-P1-M1-A12.pep
ITVQIFLFCFNNLCFKKGWRLLLFLNHWPNQKELIHNTISKSLIPSKNPNSHH

SEQ ID NO: 103865 - protein, 105 aa, Gossypium hirsutum
  unsure (1)..(105): unsure at all Xaa locations
  Clone ID: LIB3493-057-P1-M1-A2.pep
LPAYTAQXMGKVSYKHLPSIFPYNPTXFYLLKPXXHFKLHQRAPLFFSXANHLHAFNETLXSNLNDEEKLKKLGYLINHSHHSFGVLYESSFPDFYELFKLFPNN

SEQ ID NO: 103866 - protein, 75 aa, Gossypium hirsutum
  Clone ID: LIB3493-057-P1-M1-A4.pep
GERSGNSAGINNHQGNHMLQLQPLTIHKAGDTGFLRLLSLIAHFSSSSSLNRSSSRFNLEEGVKTATFKLHLCWK

SEQ ID NO: 103867 - protein, 127 aa, Gossypium hirsutum
  Clone ID: LIB3493-057-P1-M1-A8.pep
MGYRKRLRIVSGILKDKGSFVKTTLSTKRHKASTRRVILRATTHGSSVPPSDHRIAAVIGLGHGSRFTACTCIQAVMDRLHRTKDSSVALKCLYTIHNIINKGSFILKDQLAVYPSSGGRNFLNLST

SEQ ID NO: 103868 - protein, 82 aa, Gossypium hirsutum
  Clone ID: LIB3493-057-P1-M1-B1.pep
PTQGGRFLPGEACCDIKLFTNPSTITGFTTIYQAHSSLVLQLSSSIITCQQHTNRPLSIGSLKLYLIGIGSYGSNAWTIFRT

SEQ ID NO: 103869 - protein, 62 aa, Gossypium hirsutum
  Clone ID: LIB3493-057-P1-M1-B12.pep
FSLFSHKMLEMGPGTVQIKHRPTTIFFYGSTPNRAKKLCRDRACHIKNVKKKISILSPENGT

SEQ ID NO: 103870 - protein, 37 aa, Gossypium hirsutum
  unsure (1)..(37): unsure at all Xaa locations
  Clone ID: LIB3493-057-P1-M1-B4.pep
FLWSWLLQVISCLVMENQNXNALSPHKNXAQVLPTRP

SEQ ID NO: 103871 - protein, 56 aa, Gossypium hirsutum
  Clone ID: LIB3493-057-P1-M1-B5.pep
CMHFIINESQIRIFKFMLPKGPLRECSSIGYGYILNSAKFILEYWPWLVPLPKNKK

SEQ ID NO: 103872 - protein, 127 aa, Gossypium hirsutum
  Clone ID: LIB3493-057-P1-M1-B7.pep
ARTLINRRWNWQDQLCKNPRPNPDIKTLFVDHSCGQANGARAPSPANNTLLGSLPKAGGFPPLGAHGPFQPTPAPVPAPLAGWMSNPSAVTHPAVSAGAIGLGAASIPAAVKHPRTPSTNTAVDYPS

SEQ ID NO: 103873 - protein, 125 aa, Gossypium hirsutum
  unsure (1)..(125): unsure at all Xaa locations
  Clone ID: LIB3493-057-P1-M1-B8.pep
SADSWAEAWVSERDRTDQPASLYAATKKAGEEIAHTDNHIYGLSLTGLRFFTVYGPWGRPDMAYFFFTRDILKGKSISIFEAANHGTVARDFTYIDDIVKGCLAALDTAXKSTGSRRKKKGPAQL

SEQ ID NO: 103874 - protein, 122 aa, Gossypium hirsutum
  Clone ID: LIB3493-057-P1-M1-C1.pep
KLDCKRGLSPKDIVEGSPNLNLAFVAQIFHHRNGLTDSKTTTFAEMMTDDAETSREERCFRFWMNSLGATTYVNNVFEDVRNGYVMLEIVDKIFPGTVNWKQANKPPIKMPFKQVENCNQVI

SEQ ID NO: 103875 - protein, 101 aa, Gossypium hirsutum
  Clone ID: LIB3493-057-P1-M1-C10.pep
DNIKYGWTFSDWTALGYGSSCNNLDANGNASYAFSMYYQVQNQKDMACNFQGLAIITTQNISQGACNFIIQIASSSSSFTSVSRLMLGLAIFIGLTSYLLI

SEQ ID NO: 103876 - protein, 68 aa, Gossypium hirsutum
  Clone ID: LIB3493-057-P1-M1-C11.pep
SARAPVFSALLHFRAVSSLAYRAAGFSSSIGPRSFMWLCMAEFLFSSLGFLLVNRFVMVEHHPQDGFP

SEQ ID NO: 103877 - protein, 74 aa, Gossypium hirsutum
  Clone ID: LIB3493-057-P1-M1-C2.pep
IILPYWQTKLSINGNAIYHLGGAFTFTQYTGSHCGQVSKVKPTCPLNKRSPIKSRVWTGVRGTMNSSKPKKGQT

SEQ ID NO: 103878 - protein, 66 aa, Gossypium hirsutum
  Clone ID: LIB3493-057-P1-M1-C4.pep
IMSGGAYAGHCTMYNLMVILLVWGVSSKGVPGIIGTLCFGLYNQYRYEINFLDIITMKKNTCNFNE

SEQ ID NO: 103879 - protein, 123 aa, Gossypium hirsutum
  Clone ID: LIB3493-057-P1-M1-C5.pep
GVLSVTVGWGEDLAIIDLMGKADPYVVLTMKKSELKDKTRVVNDSLNPVWNQTFDFVVEDGLHDMLILEVWDHDTFGKDYMGRCILTLTRVILEGEYKDCLPLEGAKSGKLNINLKWMPQPIF

SEQ ID NO: 103880 - protein, 75 aa, Gossypium hirsutum
  Clone ID: LIB3493-057-P1-M1-D12.pep
KIMVEGMRGNIEEEKEGKERKVREMEEEMKKTASFRGECVENLRKENEKLKMVVEEMRGKVEGSREMNRTALFIG

SEQ ID NO: 103881 - protein, 76 aa, Gossypium hirsutum
  Clone ID: LIB3493-057-P1-M1-D3.pep
MSGLEETPEISQITELREAYRAVGLDLVELLYFGGMDAIGLLKRFEKFDKPFPYRFTDYYGKTRANHPYSQVQQGV

SEQ ID NO: 103882 - protein, 82 aa, Gossypium hirsutum
  Clone ID: LIB3493-057-P1-M1-D4.pep
PSRSSGPLYVGAPSKGCIPLHNFSLESIPSSSFDYINFLYQWAFPITPTGITRGSIAERTQFRAYLIYSAFFTGFSYPLGSH

SEQ ID NO: 103883 - protein, 93 aa, Gossypium hirsutum
  Clone ID: LIB3493-057-P1-M1-D8.pep
VQRTPTNKKLAKFHFHVYQNTENQAKGGYLYQYKEIGCCWIQSKSMRPITDQLSIDQQSRIPLLVMFLFSFKEMMILNLQKKKKNPDGKSKRI

SEQ ID NO: 103884 - protein, 80 aa, Gossypium hirsutum
  unsure (1)..(80): unsure at all Xaa locations
  Clone ID: LIB3493-057-P1-M1-E12.pep
NYPNFIRPDKPRGLLXTLSYPKPCENPVGDHFLLXGGKNNIVYCXLHRIEIFFNIALXLDASMAGVFAENIRRFLKIFFF

SEQ ID NO: 103885 - protein, 37 aa, Gossypium hirsutum
  Clone ID: LIB3493-057-P1-M1-E4.pep
GKLGRVEGGVQSRVVIFQDNIFVKGFSNIGLGGRLVF

SEQ ID NO: 103886 - protein, 90 aa, Gossypium hirsutum
  Clone ID: LIB3493-057-P1-M1-F10.pep
RTIVVISNSMILFFVAQYRIVHKNIYFHKMPSNLIINHIRDVIRHRVVTRLIKPIYKVGVQVILTYLNNIVVIVRSITILLLQSSPLFMS

SEQ ID NO: 103887 - protein, 128 aa, Gossypium hirsutum
  Clone ID: LIB3493-057-P1-M1-F2.pep
SANHVLAGRRRREKLNERFIILRSLVPFVTKMDKASILGDTIEYVKQLRKKIQDLETRNKQMEADNDRPRSADSMQRNSSSKDQRSGLTTRSSGPDKKKMRIAEATKQKTVEPPPQTEETSVEVSIIE

SEQ ID NO: 103888 - protein, 53 aa, Gossypium hirsutum
  Clone ID: LIB3493-057-P1-M1-G11.pep
HFITFVFSLIYSTFLFFCRLSTHLPNILFFILCYSGLDYEFEILVFTHLPNMS

SEQ ID NO: 103889 - protein, 128 aa, Gossypium hirsutum
  Clone ID: LIB3493-057-P1-M1-G12.pep
RPRVHPKGDALVISMENITLNWYFGNDRSKLVSNCLFRMGGAAILLSNKRSDRRRSKYQLVHTVRTHKGADDKCFACVTQEEDSAGKIGVTLSKDLMAVAGDALKTNITTLGPLVLSMSEQLLFFATL

SEQ ID NO: 103890 - protein, 118 aa, Gossypium hirsutum
  Clone ID: LIB3493-057-P1-M1-G2.pep
FDPNVQRGLRQFLLLVLISQTAASLFRFIASAARNIIVANTFGTFALLVLFALSGFVLAREDIRGWWIWGYWISPLMYGQNALMVNEFLGHRWSRVPPGSNESIGLQVLKSRSFFHES

SEQ ID NO: 103891 - protein, 98 aa, Gossypium hirsutum
  Clone ID: LIB3493-057-P1-M1-H1.pep
SVPVNYGGPDLFNACNTSASPPIYLFQVPATLPVPSKNVFHSAASLMQHGNSYQPSPSIPSVDLFAGISEQPPSASFGGKLPESPVPKTEEWAMFYYS

SEQ ID NO: 103892 - protein, 115 aa, Gossypium hirsutum
  unsure (1)..(115): unsure at all Xaa locations
  Clone ID: LIB3493-058-P1-M1-A3.pep
SITTFXPESRMTTPLRSSTSGFNHXSTMDRPSLMLDPRKARYSRLFSPLPKLPNPSETTPAAMRSSSKFMGSPPMQVGSSKPKHPTVVAFQPKSLLWSPLNLMGTQKNQSFFPLP

SEQ ID NO: 103893 - protein, 83 aa, Gossypium hirsutum
  Clone ID: LIB3493-058-P1-M1-B10.pep
VVDAAGEAHPHCPQLYLYSTADKVVPYESVECCIEEMSKKGIKVSSFNFGTSPHVDHYRNFPNLYSSELYTFFKECFPLSKQK

SEQ ID NO: 103894 - protein, 57 aa, Gossypium hirsutum
  Clone ID: LIB3493-058-P1-M1-B11.pep
PSQKNVNENWNISALESEMDASCTSLKRFDPISTEKQSVGGCMGQPMLLAYPLSILK

SEQ ID NO: 103895 - protein, 65 aa, Gossypium hirsutum
  unsure (1)..(65): unsure at all Xaa locations
  Clone ID: LIB3493-058-P1-M1-B2.pep
VHFLILXVCVYLXPXSGRGELLLQEDIRGGXLLIEWIPRDGHSSYHGYLKFSRILSYSFNFTISI

SEQ ID NO: 103896 - protein, 46 aa, Gossypium hirsutum
  Clone ID: LIB3493-058-P1-M1-B5.pep
QMQLLYGFGNMSIHDLSIKSYFLYHNNSILIVGYIFYFLNIIMLFY

SEQ ID NO: 103897 - protein, 74 aa, Gossypium hirsutum
  Clone ID: LIB3493-058-P1-M1-B7.pep
RCYTKPMVNQNYDTWMDVCTTQIYVHFILSISMYLEGPRRVYIPILVFRYELDMNVGYKILEEKQEVKATQVLQ

SEQ ID NO: 103898 - protein, 60 aa, Gossypium hirsutum
  unsure (1)..(60): unsure at all Xaa locations
  Clone ID: LIB3493-058-P1-M1-D11.pep
CXKDMSPQMVAVLVLVRKAYNIVLVLDLEKHLNFSICISSCSCVMIRDLAPVTYSLTHGS

SEQ ID NO: 103899 - protein, 61 aa, Gossypium hirsutum
  unsure (1)..(61): unsure at all Xaa locations
  Clone ID: LIB3493-058-P1-M1-E1.pep
PSSRAPAAQIRXAXRPNGXLKLXXFXLXLIFXXPDPXVTHQGFSSSDXGPGLLFWTKVYGS

SEQ ID NO: 103900 - protein, 77 aa, Gossypium hirsutum
  Clone ID: LIB3493-058-P1-M1-E10.pep
MIHQQARHPQFPQEVPIKVHVLEVVRRASLHVYPRFFKFLYASKRFPMFAPVSARQQHPPNLAIVYLHFLPCQELVK

SEQ ID NO: 103901 - protein, 121 aa, Gossypium hirsutum
  Clone ID: LIB3493-058-P1-M1-E11.pep
LAYTSLTGLFPLLSRGQLRLVKVEEISQTIDAENLTVQNSVQFSGPLASSSISASAKFEVRSPRRVQIKFQEGIIGTPQLTDSIVLPENVEFMGQKIDLAPIKSLLNSVQDTASTVAKTIS

SEQ ID NO: 103902 - protein, 43 aa, Gossypium hirsutum
  unsure (1)..(43): unsure at all Xaa locations
  Clone ID: LIB3493-058-P1-M1-E2.pep
FLKHLDKLVEGAITIGTTNYXYPTPHRNHIIDHTHHHYISQTK

SEQ ID NO: 103903 - protein, 60 aa, Gossypium hirsutum
  unsure (1)..(60): unsure at all Xaa locations
  Clone ID: LIB3493-058-P1-M1-E3.pep
DSGPHXLGKVTPVHAPXXLSPGASVGHHSKRKVTTAIPAYIRIQTGDCNDGAPLMKEIFS

SEQ ID NO: 103904 - protein, 74 aa, Gossypium hirsutum
  Clone ID: LIB3493-058-P1-M1-E8.pep
HSVWISDLLNSCFTLSCLWSTQSFLLLALTFRASSRSSGHVFHSRLLTVHVVSLARAHWTHANWDRDIRLAHVN

SEQ ID NO: 103905 - protein, 124 aa, Gossypium hirsutum
  Clone ID: LIB3493-058-P1-M1-F2.pep
DAWDGLRGVILYILLSGVPPFWAETQQGIFDAVLKGNIDFDSDPWPVISDSAKDLIRKMLCSQPSERLTAHEVVCHPWISQNGVAPDRALDPAVLSRLKQFSAMNKLKKMALRVIAESLSEEEI

SEQ ID NO: 103906 - protein, 122 aa, Gossypium hirsutum
  Clone ID: LIB3493-058-P1-M1-F7.pep
NHPLYRAVGDLQMKIGFGFGLVCQLSNLYCHIILKNLRNPDGSGGYQIPHGFLFNIVTCANYTTEIYQWLGFNIATQTVAGYVFLVVATSIMTNWALAKHRRLKKLFDGNEGKPKYPRRWVI

SEQ ID NO: 103907 - protein, 66 aa, Gossypium hirsutum
  unsure (1)..(66): unsure at all Xaa locations
  Clone ID: LIB3493-058-P1-M1-F8.pep
YXXSWYPFTYXSXIPRSTHPSSKLLFIRAGSISKDIHLPSXFHAQYYHHPPPPSFIHPHQLSNLSF

SEQ ID NO: 103908 - protein, 56 aa, Gossypium hirsutum
  Clone ID: LIB3493-058-P1-M1-G3.pep
RGEVYYSSHFSSNPCFMIWGGGWFVTHSQPCLHGMKPSKIISVSTTYLMHFEAIRY

SEQ ID NO: 103909 - protein, 42 aa, Gossypium hirsutum
  unsure (1)..(42): unsure at all Xaa locations
  Clone ID: LIB3493-058-P1-M1-H10.pep
LTCSFVWFFLSFLFFNFSFFPLTIDALEILGILVVFXSFSVF

SEQ ID NO: 103910 - protein, 120 aa, Gossypium hirsutum
  Clone ID: LIB3493-058-P1-M1-H2.pep
RKKGLPVKALVRNEEKARKMLGPDIELIVGDITKESTLVAQYFKGVKKVINAASVIIGPKEGDTPDRAKYSQGVKFFEPEIKGDSPEMVEYIGMKNLINAVRESVGLRTGKLLFGFEDHL

SEQ ID NO: 103911 - protein, 32 aa, Gossypium hirsutum
  Clone ID: LIB3493-058-P1-M1-H5.pep
VYILNSYVQYIPLLISDIVGRTGDSFSTALHP

SEQ ID NO: 103912 - protein, 108 aa, Gossypium hirsutum
  Clone ID: LIB3493-058-P1-M1-H9.pep
KLSYIREGDNVRHGLNKDLGFKAEDRTENIRRVGEVAKLFADAGLICIASLISPYGKDRDACRAMLPDAFIEVFMNMPLALCEERDPKGLYKLARAGKIKGFTGIDDP

SEQ ID NO: 103913 - protein, 46 aa, Gossypium hirsutum
  Clone ID: LIB3493-059-P1-M1-A10.pep
SYWICVGRWLAIYFAKGALLLDVGRLATGYGMGVFSYVVPVFISEY

SEQ ID NO: 103914 - protein, 81 aa, Gossypium hirsutum
  unsure (1)..(81): unsure at all Xaa locations
  Clone ID: LIB3493-059-P1-M1-A3.pep
GSQNXDLSLAAILRKSHAARCVGTPEFMAPEVYEEEYNELVDIYSFGMCILEMVTFEYPYSECTHSAQIYKKSCLGKKPLG

SEQ ID NO: 103915 - protein, 38 aa, Gossypium hirsutum
  Clone ID: LIB3493-059-P1-M1-A7.pep
KIRVNPPQEPIFQGINLNLKLLQAQTIWYGSVDAHRSH

SEQ ID NO: 103916 - protein, 89 aa, Gossypium hirsutum
  Clone ID: LIB3493-059-P1-M1-A8.pep
WQSIWPFVLDNVRADMRIAWEEPFGPVLPVIRINSIEEGIHHCNASNFGLQGCVFTKDVNKAILISDAMETGTVHIYFVPARGPYHFPF

SEQ ID NO: 103917 - protein, 43 aa, Gossypium hirsutum
  Clone ID: LIB3493-059-P1-M1-B10.pep
VSFRINIQPGPHCQVAFRSQCLNSIFIADISAQLEPSQTPLIQ

SEQ ID NO: 103918 - protein, 86 aa, Gossypium hirsutum
  Clone ID: LIB3493-059-P1-M1-B12.pep
MGKASKWFRSILGFKKSDPHNQPSPSSSKPTSHKDKRRWSFVKSYREKDSSTNNSNAKLPSSSQQQKDSVSFVERKGDNEVTDPSK

SEQ ID NO: 103919 - protein, 90 aa, Gossypium hirsutum
  unsure (1)..(90): unsure at all Xaa locations
  Clone ID: LIB3493-059-P1-M1-B3.pep
KWQCTSPICGQSSLAVILNQFMYAATSLELVRRAVSKVESQLRSTPPTLRAFASSVSFWLKRVRDIAFNXETKICYSNSGSTSTLLGLTR

SEQ ID NO: 103920 - protein, 70 aa, Gossypium hirsutum
  unsure (1)..(70): unsure at all Xaa locations
  Clone ID: LIB3493-059-P1-M1-B4.pep
KGQCLXSLVNGHLVVGYPLVFGSKGEERYEIFGAFWCWRVAAWIEGGFWTGDMDREGGFHGGSWYYPVLG

SEQ ID NO: 103921 - protein, 81 aa, Gossypium hirsutum
  Clone ID: LIB3493-059-P1-M1-B5.pep
ELKMRFRMSNTNSKSDEQVEVKETKEKKEEAAMDKEDDGKIQMREKDEEMKSNCLSWVRKRQRNKHKFTRKIIWFPLPKGC

SEQ ID NO: 103922 - protein, 81 aa, Gossypium hirsutum
  Clone ID: LIB3493-059-P1-M1-B6.pep
KSAANHEKTKQAEDNPDVDLDRLLPEGFMERTRDRGLVVKSFAPQVAVFNKDSIGGFVTHCGWDSVLEAVVVGVPMIGWVL

SEQ ID NO: 103923 - protein, 60 aa, Gossypium hirsutum
  Clone ID: LIB3493-059-P1-M1-B7.pep
FFMRPPKFLFFYLLIVQSFASETICGEDNKLTAYEGLRDYNFPAGLVLAGDTSFDLDLVT

SEQ ID NO: 103924 - protein, 89 aa, Gossypium hirsutum
  unsure (1)..(89): unsure at all Xaa locations
  Clone ID: LIB3493-059-P1-M1-B8.pep
ISNMWGSGSSGQHVEYDQRPDVFRGTVRYASVHAELGRTGFMRDDLESLAXYTLIFLLRGRLPWHGYHGENIGFFVCKKKMATSLINFL

SEQ ID NO: 103925 - protein, 113 aa, Gossypium hirsutum
  unsure (1)..(113): unsure at all Xaa locations
  Clone ID: LIB3493-059-P1-M1-C1.pep
RTRGSFFGVGMDFGVWSENXXNNYNKWDAISRSTTEGYPRGWTAVLLSLDNVGVWNLRVENLDRWYLGQETYMRIINPEENGKTEMVPPDNGIYCGALXSLQNESHSSSALAL

SEQ ID NO: 103926 - protein, 77 aa, Gossypium hirsutum
  unsure (1)..(77): unsure at all Xaa locations
  Clone ID: LIB3493-059-P1-M1-D7.pep
MFIENVKGERPKLDYTENEIYGGYKYXTSELVHGNKNGSYXWVAKPKTDKYEFKSDIYVPKMGVILIGWGGNIGLFF

SEQ ID NO: 103927 - protein, 85 aa, Gossypium hirsutum
  Clone ID: LIB3493-059-P1-M1-D8.pep
QTTLLSLLFLFSFPAIVMADGPQTPASRASATLSPGLWYRWSRVAMVGLLLMLQLYFVASHINVHVPQPLASTSLRHKHSPQAWY

SEQ ID NO: 103928 - protein, 129 aa, Gossypium hirsutum
  Clone ID: LIB3493-059-P1-M1-E1.pep
FGRGGIGWGVMIAPVYIAEISPTVDRGSLTSFPEIFINLGILLGYVSNYAFSGLSVHINWRVMLAVGILPSVFIGFALFIIPESPRWLVMQNRVEDARSVLLKTNENENDVDERLSEIVAAAGMSNGEK

SEQ ID NO: 103929 - protein, 41 aa, Gossypium hirsutum
  Clone ID: LIB3493-059-P1-M1-E11.pep
RDKSNHCQYHHLYYPFSQLSQNPFKLIRACRSSDFSLISTI

SEQ ID NO: 103930 - protein, 95 aa, Gossypium hirsutum
  Clone ID: LIB3493-059-P1-M1-E3.pep
MGGTLRSSTSFIKLKETNNFKTPGDFLGSICFAQMKPSCRIRARNSMSMQEAPLVHGKISTKETGKLYSLTISHAENNSKVPGYGMVPLDTITSR

SEQ ID NO: 103931 - protein, 65 aa, Gossypium hirsutum
  Clone ID: LIB3493-059-P1-M1-F12.pep
NLTDYDMIILTGALLPILRSLQKRLLKWGWAVINLHPLVQEGSVWAQKVGRGTAFVFSTEKAPAN

SEQ ID NO: 103932 - protein, 93 aa, Gossypium hirsutum
  Clone ID: LIB3493-059-P1-M1-F2.pep
GRAESASSRQAASCSASNEAIKDWQDAWHDERKETENQGTDLHDKFWQKLKLTAEKKVGAAEADKLCKAFQHVHRKLVYEGLSFEAAQKFLHS

SEQ ID NO: 103933 - protein, 85 aa, Gossypium hirsutum
  unsure (1)..(85): unsure at all Xaa locations
  Clone ID: LIB3493-059-P1-M1-F4.pep
THSTFHLGCAAPKGNIPIXNIAVGLPEEATHPYALKGALAEFISTLIFCFAGSGSGMAFNKVTDNWATTLGWLVAVCLAHGLRLF

SEQ ID NO: 103934 - protein, 59 aa, Gossypium hirsutum
  unsure (1)..(59): unsure at all Xaa locations
  Clone ID: LIB3493-059-P1-M1-F6.pep
VRPLPXGTSGSGKGDKQCAHFFGVTINDEQAECGIVGRVTPTAQSKFKLLYYEHYINGG

SEQ ID NO: 103935 - protein, 42 aa, Gossypium hirsutum
  Clone ID: LIB3493-059-P1-M1-F7.pep
KKRVQLVGFFGFDYYIFLQFCCCDLIDLRVNQRDLVVNLSEI

SEQ ID NO: 103936 - protein, 71 aa, Gossypium hirsutum
  Clone ID: LIB3493-059-P1-M1-F8.pep
ACHSIINVRLTRPFYFLSVDDVELTLPLDPGAAHPPSDVPEFMVNDLTFLGSEMFVCSLLCCVPYTFCAIW

SEQ ID NO: 103937 - protein, 62 aa, Gossypium hirsutum
  Clone ID: LIB3493-059-P1-M1-F9.pep
GGLKLAMGLTLKGSNSIILPFVNNKPPTNEHTHVIIKLVTSYLKHVKHLRIIHCSFLPYLLH

SEQ ID NO: 103938 - protein, 130 aa, Gossypium hirsutum
  unsure (1)..(130): unsure at all Xaa locations
  Clone ID: LIB3493-059-P1-M1-G1.pep
RTRGESKQVSYKVVRDDNGNVKLECPAIGKQFAAEEISAQVLRKLVDDASKFLNDKVTKAVVTVPAYFNDSQRTATKDAGRIAGLEVLRIINEPTAASLAYGFEKKNNETILVFDLXGGTFDVSVLEVGD

SEQ ID NO: 103939 - protein, 91 aa, Gossypium hirsutum
  Clone ID: LIB3493-059-P1-M1-G12.pep
HASQLGLTFSDENGNLPTCGTDSFCIWQFNFREFNLSEDIFASDSIELLRQCGIDFKMNNEKGIDVKRFDALFVLYDVYFIIVSFDPLFFS

SEQ ID NO: 103940 - protein, 50 aa, Gossypium hirsutum
  Clone ID: LIB3493-059-P1-M1-G3.pep
DKQEGRPLTHIQHGFRQCDAGGLSFGSELIVFSGEVYPGSLASRIAVPDS

SEQ ID NO: 103941 - protein, 100 aa, Gossypium hirsutum
  Clone ID: LIB3493-059-P1-M1-G7.pep
GRVGILPDGTLSGGINQEGIDHYNRFIDELIENDIEPVVTLLHFDPPEALEKKYESFLSHTIVNDFKDYAQICSKTFGDRVKYWITMNEPLIMANLGDSM

SEQ ID NO: 103942 - protein, 98 aa, Gossypium hirsutum
  Clone ID: LIB3493-059-P1-M1-H1.pep
MRGKIRCKGGDSIKSIEIKPPPKPKDPENSEKEPEKKTEKPTESEKKSEKPKETPPKSPAKQASPPEGFCCTDCYHGHRGGPCYFGGPPPPPYYWALW

SEQ ID NO: 103943 - protein, 69 aa, Gossypium hirsutum
  Clone ID: LIB3493-059-P1-M1-H11.pep
GNTPHFVAMLHSGMEPDEFTYGSVLKACAGQKALNYGMEVHNRIIKSGIWFHSFVARGFGDMYCKCGDD

SEQ ID NO: 103944 - protein, 86 aa, Gossypium hirsutum
  Clone ID: LIB3493-059-P1-M1-H3.pep
SKSGESIVLFSSILLLTFTLSPLFTNLIFRCLSSKGFPYCVFHNVGESLPFRQASRYGGSACCQRRSSSEYEWYNSQRWHVKIPPL

SEQ ID NO: 103945 - protein, 59 aa, Gossypium hirsutum
  Clone ID: LIB3493-060-P1-M1-B1.pep
PGKYDTQTQITDNNRKWTLEVLKLITNTWELHNVSNKYNSQAVISHNPRNMYPHKTENI

SEQ ID NO: 103946 - protein, 122 aa, Gossypium hirsutum
  Clone ID: LIB3493-060-P1-M1-B10.pep
ENKGRTAAKNEYEDLLPVMAEKLDVEAFVSELCGGFRLLADEDRGLITAESLKKNSALLGMEGMSEEEAWDMVKEGDLDGDGALNQTEFCILMVRLSPRMMEDAETWLEKAIDQELRKKTSA

SEQ ID NO: 103947 - protein, 125 aa, Gossypium hirsutum
  Clone ID: LIB3493-060-P1-M1-B11.pep
KDDKHRRNEGDDDDDHGTQLVSSGSYYHFQPSNFPLSSHLASHGFAVHAPQVDNFNVVAAPLPSALSLCPLPPPQPGGGAPPLFPPHVVDPRQQVNHFQMLSSGAQQNLLLNSLNFPPITQSFRP

SEQ ID NO: 103948 - protein, 78 aa, Gossypium hirsutum
  Clone ID: LIB3493-060-P1-M1-C5.pep
MIGNYLAQVKECSWQQHSDDAMVSTLTETGTHLVLIQRKGDRRAFSTELIHSAVKFPTEQRQVRLDQTSCVSTNEVVN

SEQ ID NO: 103949 - protein, 108 aa, Gossypium hirsutum
  Clone ID: LIB3493-060-P1-M1-C7.pep
FLSRTKACYFLDVYPYFPWSTDSNNINLDYALFESRTIKYTDPVSNLTYSNLFDQMVDSVIFAMEKLGYPDVRIWIAETGWPNAGDIDQIGANIYNAATYNRNVIKKL

SEQ ID NO: 103950 - protein, 54 aa, Gossypium hirsutum
  Clone ID: LIB3493-060-P1-M1-D1.pep
RPIKSTSKCAVYLFDRPCLIAVIDLQHAGPMSSLLVITALPWSWKQASSAYSCD

SEQ ID NO: 103951 - protein, 107 aa, Gossypium hirsutum
  Clone ID: LIB3493-060-P1-M1-D12.pep
SSADFENQRHSNTSIHWRDFFRTRKKRQGVSSQGLPIKPKLTRRKKKRIKGDVVPQISSSLDAELSCFKSSWKNFSLSELREATDNFSRENLIGEGGYAEVYKGRLK

SEQ ID NO: 103952 - protein, 52 aa, Gossypium hirsutum
  Clone ID: LIB3493-060-P1-M1-E6.pep
ARRRLLRVPLEACSQRWCFHFGSFQKEVTETALTTTEPFNALATTRELCDTR

SEQ ID NO: 103953 - protein, 65 aa, Gossypium hirsutum
  Clone ID: LIB3493-060-P1-M1-E9.pep
RKPPFSEMHKNKDGDYFILITVVRSPTSIVFTYCFLSSLKNNNNSLSSCCLSLQMFGNFIFLPKK

SEQ ID NO: 103954 - protein, 126 aa, Gossypium hirsutum
  Clone ID: LIB3493-060-P1-M1-F1.pep
KKVIEYKFNDEGNKVKITTPTRVRKLAKARLNKRALERRNWEKFGDAVREDVGSRLTMVSTEEIILERPRTPGLILDSHSLPFSFIIVFISSRFDEWDGNGLCAFGYLSIFDLLFAGIPNSDILSN

SEQ ID NO: 103955 - protein, 42 aa, Gossypium hirsutum
  Clone ID: LIB3493-060-P1-M1-F9.pep
LHFGTLSGLNKLCKKKKLNHTIRNMASAVLTYEVGINTTYNG

SEQ ID NO: 103956 - protein, 58 aa, Gossypium hirsutum
  unsure (1)..(58): unsure at all Xaa locations
  Clone ID: LIB3493-060-P1-M1-G10.pep
KKLXIKKMLMELDFDRIYMHEEKIVIKRKNKTVGWFPAYVRKRRMAKDDKAKCRPRRI

SEQ ID NO: 103957 - protein, 101 aa, Gossypium hirsutum
  Clone ID: LIB3493-060-P1-M1-G4.pep
AEPPERDPLPEFRLDSDAGATFVLESKGKWWHAGFHLTTAIVGPTILTLPYAFRGLGWGLGFLCLTVLGCVTFYSYYLMSKVLEHCEKAGRRHIRFRELAA

SEQ ID NO: 103958 - protein, 109 aa, Gossypium hirsutum
  Clone ID: LIB3493-060-P1-M1-H12.pep
WSVYEVEVEKEKLRKQVVELKDDLKKKEDAVTTMEKKLKESNERAAVSDGTKTPLEDDKSAMVPLSPIEVASLREKVMLLEGQIKSKETAIETSTNVFLEMEEDLQKKN

SEQ ID NO: 103959 - protein, 89 aa, Gossypium hirsutum
  Clone ID: LIB3493-060-P1-M1-H3.pep
INTTTQLLSLRRLEEKVAIITGGARGIGEATVRVFVKHGAKAVIADIADAAGIALANSLAPSAVYVHCDVSSEEDVKMLINRTISFYGK

SEQ ID NO: 103960 - protein, 98 aa, Gossypium hirsutum
  Clone ID: LIB3493-060-P1-M1-H8.pep
VMQLLRVHANRMCRLKGKKDEHYLSSLTFLIGDTGGQLKNINTNFYLDSHAAHSVAAEINEQFEFTDHDVDLIAESIECSITKLLPGMKVYAYLSSGT

SEQ ID NO: 103961 - protein, 136 aa, Gossypium hirsutum
  unsure (1)..(136): unsure at all Xaa locations
  Clone ID: LIB3493-043-P1-M1-A1.pep
GSGLCDIAILVVDIMHGLEPQTIESLNLLKMRKTEFIIALXKVDRLYDWKARRNSPIGMTLKKQTKDVLSEFNRRVTHVITQFKEQGLNTELYYKNKEMGETFSIVPTSAVTGEGIPDLLLLLVQWTQKTMVEKLT

SEQ ID NO: 103962 - protein, 100 aa, Gossypium hirsutum
  unsure (1)..(100): unsure at all Xaa locations
  Clone ID: LIB3493-043-P1-M1-A2.pep
PTCSKRSTSLRSGSQELLGVHNSVIQRDRGTKTRNMSCQFVSSNTMSKRLDTEVPATVTHSAYVPPENIENITSAHASQYQPENIENITSAHASQXQRNP

SEQ ID NO: 103963 - protein, 64 aa, Gossypium hirsutum
  Clone ID: LIB3493-043-P1-M1-A6.pep
KEKKRDGVCNKICNLNSVPMFIFTLHFPCLVDPPITYSTYTLEFSAQAFSPYTPPSKIIQQLRL

SEQ ID NO: 103964 - protein, 122 aa, Gossypium hirsutum
  unsure (1)..(122): unsure at all Xaa locations
  Clone ID: LIB3493-043-P1-M1-A9.pep
MGVGDPAGLWHFIYRSIFLEQYXSSEFSPPLSSPQQQKRLYRAYQRLYDSMHDKGIGPHKTQFRRDENYVLLCWVTQDFELYAAFDPLADKAVAIKTCNRVCQWVKDVKNEIFLQGASPFSW

SEQ ID NO: 103965 - protein, 62 aa, Gossypium hirsutum
  Clone ID: LIB3493-043-P1-M1-B1.pep
TKNSPRKRRESCMKQTLPRMLTEKKERKVSPTANSSNKNGKAKKKSRKLSDVFVCRENQRES

SEQ ID NO: 103966 - protein, 155 aa, Gossypium hirsutum
  unsure (1)..(155): unsure at all Xaa locations
  Clone ID: LIB3493-043-P1-M1-C1.pep
GPHQQVMSEVYQPETDNWCRVYNGMVAGWRNPCTSLNGHXYALECXGXGCKLXGFMXSXXDSWXKAYXDSRIHXWAILEXLEXXAALVPLNGKLCIIRNNMSVSLVDVTKSDDLRGATAEHLWETIAGKGQFKTLFTNLWSSLAGRNRLKSHIVH

SEQ ID NO: 103967 - protein, 86 aa, Gossypium hirsutum
  Clone ID: LIB3493-043-P1-M1-D1.pep
DSPADHKAQEDLANPLPLLLRNTIIPLTETAPVLSGTSVFLKTPYNIFLISTSTPHITIPKLDQCFKIHFLILILIRTSITFIINL

SEQ ID NO: 103968 - protein, 54 aa, Gossypium hirsutum
  Clone ID: LIB3493-043-P1-M1-D12.pep
QFLEVANLLLEFSKLLPQKQLCFLSRQGAVVFDPTELDFLKQSFSKNCCLNHRP

SEQ ID NO: 103969 - protein, 84 aa, Gossypium hirsutum
  unsure (1)..(84): unsure at all Xaa locations
  Clone ID: LIB3493-043-P1-M1-D2.pep
WSFHFSIQSFLLFSQELKVFLLXXNRNPVSKKVMSQMSMRVFSKVDLELAIYIFVCVLQIKGSYYDLCYCNFHFAQSTMPNTNI

SEQ ID NO: 103970 - protein, 26 aa, Gossypium hirsutum
  Clone ID: LIB3493-043-P1-M1-D4.pep
KGITLRSLKFYVFIRFSAYNGEISDP

SEQ ID NO: 103971 - protein, 32 aa, Gossypium hirsutum
  Clone ID: LIB3493-043-P1-M1-D9.pep
FISTFIEAFLYENWLGFQSDKRSTRGYCPRRP

SEQ ID NO: 103972 - protein, 66 aa, Gossypium hirsutum
  unsure (1)..(66): unsure at all Xaa locations
  Clone ID: LIB3493-043-P1-M1-E10.pep
RDKGLMKHVLEIFENAHRXYSIYYLMDSFIQNLKGPFFEKEGLHCLDVXXLAREQSXLLFFFSPLP

SEQ ID NO: 103973 - protein, 160 aa, Gossypium hirsutum
  unsure (1)..(160): unsure at all Xaa locations
  Clone ID: LIB3493-043-P1-M1-E3.pep
PSSSPKGVVNSRGQLSPVRGSIRPASPSKLGASTTSSLXGMSPSRVRSGLANNLVNTPSILSFNGDVLKMGKIGENKAWDAHFLRLLHNRLLQWRFVNARADAAMSSQKSNAEKSLCGAWITTSKLRESVRAKRTEFQLLKQKLKLISILKGQMMLLDEW

SEQ ID NO: 103974 - protein, 48 aa, Gossypium hirsutum
  unsure (1)..(48): unsure at all Xaa locations
  Clone ID: LIB3493-043-P1-M1-E7.pep
YVSDWVKAAINQILGFXCRXKQARLYCIYPGLFGAFASFERRVRLRVR

SEQ ID NO: 103975 - protein, 65 aa, Gossypium hirsutum
  unsure (1)..(65): unsure at all Xaa locations
  Clone ID: LIB3493-043-P1-M1-E8.pep
RTRGFSHLFISLWSSKFKFQLQNMGSQPWXFVCHPLLLIQQVLKAQQAQSSVPGGHIAIYVWEVD

SEQ ID NO: 103976 - protein, 107 aa, Gossypium hirsutum
  unsure (1)..(107): unsure at all Xaa locations
  Clone ID: LIB3493-043-P1-M1-F1.pep
MASSASLMVLALVMASIAAIAEARAFFIFGDSLLTRGNXNTILETTARADSPPYGIDYSTGRPTGRFSNGLNIPDLIGKQIGLSESPLPYLSPDFNGKKLLLGANFA

SEQ ID NO: 103977 - protein, 80 aa, Gossypium hirsutum
  Clone ID: LIB3493-043-P1-M1-F10.pep
FQQRRESPATQSQGLGGSPLLLLLFLFKRDLKIKYKKEKNTKIEIEINRFLLLFFLFDCLMFVKKFTNENRGSYSQFINC

SEQ ID NO: 103978 - protein, 132 aa, Gossypium hirsutum
  unsure (1)..(132): unsure at all Xaa locations
  Clone ID: LIB3493-043-P1-M1-F11.pep
RNVVDGSTTFHSATVAAGGDGFLARDITFQNTAGPSNXPAVALRVGSDLSAFYRCGILAYQDTLYVHSLRQFYSQCLVAGSVDFIFGNAAPVLQDCDIHARRPNPNQRNMVTAQSRSDPNENTGIVIQKCRI

SEQ ID NO: 103979 - protein, 112 aa, Gossypium hirsutum
  Clone ID: LIB3493-043-P1-M1-F3.pep
TPPILYHYTKAKRPPRQLSVNYYAKSCPQVEQLVGSITSQQFKETPVSAPATIRLFFHDCFVEGCDASILIATQPGSKILAEKDAADNRDLRTEGFDTITRAKALVESKCPG

SEQ ID NO: 103980 - protein, 60 aa, Gossypium hirsutum
  Clone ID: LIB3493-043-P1-M1-F4.pep
NVVLHFFSPLILENKSRVFKSTYSRTLWKKWGIISWDDKVDRENSVERKGVILLPINICI

SEQ ID NO: 103981 - protein, 151 aa, Gossypium hirsutum
  unsure (1)..(151): unsure at all Xaa locations
  Clone ID: LIB3493-043-P1-M1-F7.pep
PKFRALLLFIEHRFYGEXRPFLKDLYHSAKTLGYLNSQQPCADLAXLITKLEVRTRHSEASPSVWSSVDLYXGLLAAWFRLKYPHIAIGALASSAPILQFDKIIPWSSFYDAVSLDFKDVSQNCYEVIKGSWAELVAISTRKQALAELTKL

SEQ ID NO: 103982 - protein, 94 aa, Gossypium hirsutum
  unsure (1)..(94): unsure at all Xaa locations
  Clone ID: LIB3493-043-P1-M1-F9.pep
GFEPPPPPLVGIEEEESGCLPVYETAGMLSEMFNFPSVGAAAAAATASTELLDQHVQPNYRAHRPTPGNTNEWYSNRQGAVGGLGQLGESXSHI

SEQ ID NO: 103983 - protein, 73 aa, Gossypium hirsutum
  Clone ID: LIB3493-043-P1-M1-G3.pep
HASDFLLLVLKMKEGIKGKGEAKKRKRRGKARRRMIRKKKKDKKSHKHSSHKGFNFKFISSILFLLSILFLIY

SEQ ID NO: 103984 - protein, 52 aa, Gossypium hirsutum
  unsure (1)..(52): unsure at all Xaa locations
  Clone ID: LIB3493-043-P1-M1-H1.pep
XLLKEEIERLKRQILELTSFSHQMMHHKKEKGKSLWLMKTTLKNWVHGLKDI

SEQ ID NO: 103985 - protein, 57 aa, Gossypium hirsutum
  Clone ID: LIB3493-043-P1-M1-H10.pep
PTLSVNVLYKVQDLLLLGGTPLSLGVATAFSFLTFFLPQKHTKSYSISNPFYYHYWW

SEQ ID NO: 103986 - protein, 71 aa, Gossypium hirsutum
  Clone ID: LIB3493-043-P1-M1-H4.pep
MTRTNVVLRNLFLVSRTGLEADIIGAFSEMGIWIPSEIQCVGIPALLDGKSVVLSSESGSGRTFAFLLPLI

SEQ ID NO: 103987 - protein, 108 aa, Gossypium hirsutum
  unsure (1)..(108): unsure at all Xaa locations
  Clone ID: LIB3493-043-P1-M1-H7.pep
MSLIPSFFGNRRSNVFDPXSLDVWDPFRDFAVSTTRTPETSAFVDTRIDWKETPEAHVFKADVPGLKKKVKVEVVDDRVLQISGERNVEKEDKNDTWHRVERSSGKFM

SEQ ID NO: 103988 - protein, 154 aa, Gossypium hirsutum
  Clone ID: LIB3493-045-P1-M1-A11.pep
ANSVLPQVEQLGTAQSNGCEPNNLLPPFPGREYSAYHNATDPQNNLLFGVSIDSSSLMLHHGMTNPKSIRNENDSMSLPYAASNFTSASGTDFPLNSDMTTSSCVDESGYLQSSENVDQVNPSTGTFVKVHKSGSFGRSLDISKFGSYDELRCE

SEQ ID NO: 103989 - protein, 50 aa, Gossypium hirsutum
  Clone ID: LIB3493-045-P1-M1-A4.pep
SRYSERSAKRKKREGDEVVGPHAVWRQGSFIRWTVKGGRLLLRTRRDCAD

SEQ ID NO: 103990 - protein, 88 aa, Gossypium hirsutum
  unsure (1)..(88): unsure at all Xaa locations
  Clone ID: LIB3493-045-P1-M1-B11.pep
MCRSAEPTFKKLVKPHTYAQISAINPLNSCFSMSSTTCIVSSTENLFFQXSPIFHSKLHCGLYLSPALNKHISRVVFTSNFTVASQSF

SEQ ID NO: 103991 - protein, 99 aa, Gossypium hirsutum
  unsure (1)..(99): unsure at all Xaa locations
  Clone ID: LIB3493-045-P1-M1-B12.pep
GKRCKFENCGKSAQXSTXCKAHGGGKRCSWGEGNAEXRGRSGLCAAHSSMLQERQASKGGLIAPGVFHGLVSATSTTRSSSNNNHSSSSNNVISDCIDS

SEQ ID NO: 103992 - protein, 122 aa, Gossypium hirsutum
  unsure (1)..(122): unsure at all Xaa locations
  Clone ID: LIB3493-045-P1-M1-B3.pep
SSNSPVISSPPTLIIFCCCHCPCPFNTAPKPNDDVSLFDEVTKLVKLPISGKIPDSDPCSSNPASKTKLLGFPYNFDSLTFILLMRRYCXHRLRHAACRTIVPAFICHCNVRISCNKTRTVA

SEQ ID NO: 103993 - protein, 37 aa, Gossypium hirsutum
  Clone ID: LIB3493-045-P1-M1-B6.pep
LTTVLHQDCFHLCSPSISNPCIYKTCCISFKASYSLN

SEQ ID NO: 103994 - protein, 65 aa, Gossypium hirsutum
  unsure (1)..(65): unsure at all Xaa locations
  Clone ID: LIB3493-045-P1-M1-C12.pep
SRKKKKVEWSPPLRFYCHAKAQISFPWHVIINKKLVIRTTIVSYERAXMXMIHSSNPFDLILKFP

SEQ ID NO: 103995 - protein, 76 aa, Gossypium hirsutum
  Clone ID: LIB3493-045-P1-M1-C3.pep
LIFSKIYLPYFLRTAKKVICEQLNFEKLVFLFCLSPLTISILKNKSSNFPHGKLGGIHIYKFSPLYLIKKQNNHPL

SEQ ID NO: 103996 - protein, 137 aa, Gossypium hirsutum
  unsure (1)..(137): unsure at all Xaa locations
  Clone ID: LIB3493-045-P1-M1-C9.pep
ANGLAMYSAICQQCGLVARVXPEILGDGPHDINKCAAXTERVPRSFATXALNDHXVMLEGTLLKPNMVTPGSDSPKVAPEVIAEHTVRALQRTVPPAVPAVVFLSGGQSEEEATVNLNAMNKLKTKKPWSLSFSFGR

SEQ ID NO: 103997 - protein, 31 aa, Gossypium hirsutum
  unsure (1)..(31): unsure at all Xaa locations
  Clone ID: LIB3493-045-P1-M1-D1.pep
XDHLNGEGDLPFTHPRXXLYLLNACAWIYNP

SEQ ID NO: 103998 - protein, 138 aa, Gossypium hirsutum
  unsure (1)..(138): unsure at all Xaa locations
  Clone ID: LIB3493-045-P1-M1-D12.pep
EIRVRNRQRKLYTNSPGXWWPSYKQTMWSHIVFEHPATLETNGVGTQIKKKEIXRDLVTFSDKXEFYARIGKAWKRGYLLYGTTRTGKSTMIAAMANLLNYDVYDLELTAGKNNTELRKLLIETTSKSYIVIEDIDCS

SEQ ID NO: 103999 - protein, 83 aa, Gossypium hirsutum
  Clone ID: LIB3493-045-P1-M1-D5.pep
FIFIIGSKSKIKSKFSIKGYILTPQNKKDLKKSFIRIFFFNSITFAFLLTIIFFSFNTCPSYHQKTFLTLNSSLKEPYLRIFH

SEQ ID NO: 104000 - protein, 55 aa, Gossypium hirsutum
  unsure (1)..(55): unsure at all Xaa locations
  Clone ID: LIB3493-045-P1-M1-D9.pep
QSNLLGDFLEYDGLDIGKGNRNYMRIRAKLDIRRYLKRKHPVLFNDRCSYVRFXL

SEQ ID NO: 104001 - protein, 50 aa, Gossypium hirsutum
  Clone ID: LIB3493-045-P1-M1-E2.pep
KDEALGISYNREVKNLRSPAASTSFFCFFPTPSLFYSFLSSLGTVAACPS

SEQ ID NO: 104002 - protein, 70 aa, Gossypium hirsutum
  unsure (1)..(70): unsure at all Xaa locations
  Clone ID: LIB3493-045-P1-M1-E9.pep
LPVGHLHAKIMDRFTXFLFVVXTLKHIGYPPFKAIXTALLLAYYFXVLPSPPPLYYLGGGGAPPPFIFFF

SEQ ID NO: 104003 - protein, 77 aa, Gossypium hirsutum
  unsure (1)..(77): unsure at all Xaa locations
  Clone ID: LIB3493-045-P1-M1-F11.pep
GFRVPGNYVKGIACGGRQXCLYHRCWSSTYFXLGTLWTGSICXXKVGEFGGEKKPQWEFENXSFYSNKGIFFLKLLF

SEQ ID NO: 104004 - protein, 205 aa, Gossypium hirsutum
  unsure (1)..(205): unsure at all Xaa locations
  Clone ID: LIB3493-045-P1-M1-F2.pep
LNGMLLNDKQVFVGPFLRRQERESSIGKAKFNNVYVKNLSXSTTDEDLKNAFSEHGPITSAVIMRDADGKSKCFGFVNFENPDDAARSVDSLNGKKFDDKEWFVGKAQKKSEREMELKGQYEQTLKETADKFAGLDLYVKNLDDSINDDKLREXFSEFGXVTSCKVMLDPNGISRGSGXVAFSTAEEASQALMEMNGKMVVSKPL

SEQ ID NO: 104005 - protein, 58 aa, Gossypium hirsutum
  Clone ID: LIB3493-045-P1-M1-F5.pep
IRDYGNRNKPGHYHSQEVGGPPPWLSRLNITHVNHPRQLSFVPLVGGFSSFFFFPISI

SEQ ID NO: 104006 - protein, 43 aa, Gossypium hirsutum
  unsure (1)..(43): unsure at all Xaa locations
  Clone ID: LIB3493-045-P1-M1-F6.pep
HASAGESSDEIFGGYLYFDGAPNKDEFHQXTCXKIKALHCMNC

SEQ ID NO: 104007 - protein, 104 aa, Gossypium hirsutum
  unsure (1)..(104): unsure at all Xaa locations
  Clone ID: LIB3493-045-P1-M1-F8.pep
MAPVLQSSQPWVEEYLPKQVRDVAHQDEVVRVLTTLLETCQLPRICLFYGXAGTGKTTTALAIAHQLFGPELYKSRVLELNASDDRGINVVLTKIKNFSAVAVL

SEQ ID NO: 104008 - protein, 45 aa, Gossypium hirsutum
  unsure (1)..(45): unsure at all Xaa locations
  Clone ID: LIB3493-045-P1-M1-G5.pep
MISRLHQXLLPEMWGRLSLAVLMIPRVLQKDSXTVCLRFHGLDLS

SEQ ID NO: 104009 - protein, 33 aa, Gossypium hirsutum
  Clone ID: LIB3493-045-P1-M1-G7.pep
KNKICKVHPSIVDHRFFTNALEFILTRWCADYL

SEQ ID NO: 104010 - protein, 58 aa, Gossypium hirsutum
  Clone ID: LIB3493-045-P1-M1-H5.pep
ISPKRAYLSYTWQVFSQSDKSQAQLVILSRFIGLSEHPRLWFRALVTSNYCYRGYLFR

SEQ ID NO: 104011 - protein, 84 aa, Gossypium hirsutum
  unsure (1)..(84): unsure at all Xaa locations
  Clone ID: LIB3493-045-P1-M1-H7.pep
XVGPLNINWGEQSHNDNPPNLWEKGGQGEYXXFLGAFEDKWGLFICFGSLGTLNYKIRPFSFFHFQIHPQTNLFSLKLSLLLPI

SEQ ID NO: 104012 - protein, 60 aa, Gossypium hirsutum
  unsure (1)..(60): unsure at all Xaa locations
  Clone ID: LIB3493-046-P1-M1-A10.pep
XXXAXXIPKPNSSHLTLQQACASKWIISMWLTNRGHLVHRKCPPPVSPNGFDGLIINCCC

SEQ ID NO: 104013 - protein, 120 aa, Gossypium hirsutum
  Clone ID: LIB3493-046-P1-M1-A11.pep
IMDEAEKIRVTGNRLFKEGKFELAKAKYEKVLREFNHVNPQTDEEGKVFLDTRDSLHLNVAACFLKMGECRKSIDACNKVLDATPVHAKALYRRGMAYMAAGDFQEARFDFQMMIKVDKS

SEQ ID NO: 104014 - protein, 62 aa, Gossypium hirsutum
  unsure (1)..(62): unsure at all Xaa locations
  Clone ID: LIB3493-046-P1-M1-A2.pep
MGRGKIEIKRIENATNRQVTYSKRRNGIFKKAQELTVLCDAKVSLIMFSSTXKXHEFISPNI

SEQ ID NO: 104015 - protein, 60 aa, Gossypium hirsutum
  Clone ID: LIB3493-046-P1-M1-A8.pep
RPKGKPIGNVCVGLVLEENGGCSKDPVISDNEVDCPSPILHEATNDSTSTTVSETGIVIL

SEQ ID NO: 104016 - protein, 109 aa, Gossypium hirsutum
  unsure (1)..(109): unsure at all Xaa locations
  Clone ID: LIB3493-046-P1-M1-B9.pep
DLYSSVEAMVKEAIGKEAVQDPSGAFNLCYGATXNINVPEMVFHFSGADVRLQPVNTFMVNGDLVCMVIVPNSVNPFSVFGNYAXINFQVEYDLXKRVVSFAPTDCTQI

SEQ ID NO: 104017 - protein, 55 aa, Gossypium hirsutum
  Clone ID: LIB3493-046-P1-M1-C4.pep
RRTYPDNTSDQYGENGYYLKGLGLFLVGAAIGFGFTFSGIMKSACGVKMQTCPRR

SEQ ID NO: 104018 - protein, 124 aa, Gossypium hirsutum
  Clone ID: LIB3493-046-P1-M1-C9.pep
HHHLVISVYVDRVHHLLRLIPRLLTFLKLGTCPRILAAARTLCDIATKPLRQNPDGITRWPKKPSQKAMKARKTKSIEKPDEIYATPSSLLGSDKPVRCDTDQLILSKRPKLSVVENKKDLNHI

SEQ ID NO: 104019 - protein, 66 aa, Gossypium hirsutum
  unsure (1)..(66): unsure at all Xaa locations
  Clone ID: LIB3493-046-P1-M1-D3.pep
KAMLESAMSSEVPLKVHIVLTTLSFFTHFLRHCXGLSQAFLCGLLMATPLIISMLVLCATKCSFKS

SEQ ID NO: 104020 - protein, 75 aa, Gossypium hirsutum
  unsure (1)..(75): unsure at all Xaa locations
  Clone ID: LIB3493-046-P1-M1-E3.pep
MADQLTDDQISEFKEAFXLFDKDGNGCITTKELGTCMRSLGQNPTEAELQDMINEVDADGNGTIDFPEFLNLMAR

SEQ ID NO: 104021 - protein, 41 aa, Gossypium hirsutum
  Clone ID: LIB3493-046-P1-M1-E5.pep
WSQNFCLGSLNKWYSVVSQSSLLLLVIIPLVTKEVKAFLFF

SEQ ID NO: 104022 - protein, 84 aa, Gossypium hirsutum
  Clone ID: LIB3493-046-P1-M1-F10.pep
SKVAKVPCKVGSNKREDTVALSANNQYLGLAENPEEDFLLDGMTPKFVGPDPCKDWEIFEKMDQVFEAREVPSVEIVRLKKYDE

SEQ ID NO: 104023 - protein, 61 aa, Gossypium hirsutum
  Clone ID: LIB3493-046-P1-M1-F7.pep
SFSPDSMKQIHQTANEGYSEKNSTFLEIVKMRQNYRDIKANLSFQITPIDVEDKSNKNQCE

SEQ ID NO: 104024 - protein, 32 aa, Gossypium hirsutum
  Clone ID: LIB3493-046-P1-M1-G11.pep
MRILLILMALELTERGHYVVSCYLGINPNIVL

SEQ ID NO: 104025 - protein, 53 aa, Gossypium hirsutum
  Clone ID: LIB3493-046-P1-M1-G4.pep
SKNQPGHVCQFLISVKSELCSMSESMKHHLLEDTPCRQLCPFLSRIIPQIKEL

SEQ ID NO: 104026 - protein, 45 aa, Gossypium hirsutum
  unsure (1)..(45): unsure at all Xaa locations
  Clone ID: LIB3493-046-P1-M1-G7.pep
MTRLAREFFALPAEEKRRFYMSGGKKGXFIXSSHLSXEKASARIG

SEQ ID NO: 104027 - protein, 74 aa, Gossypium hirsutum
  Clone ID: LIB3493-046-P1-M1-G8.pep
PPFPLILVSSLTPTLIGCSVLTHVSLPSLSVLIKPRYSFQESSSSSNASQFPRWPLRRRHIFFKVIISKNYDFC

SEQ ID NO: 104028 - protein, 41 aa, Gossypium hirsutum
  Clone ID: LIB3493-046-P1-M1-G9.pep
FFYYTCSFTPWVKAFIWYIVILRVYKTIIYTYLFFKSTLLS

SEQ ID NO: 104029 - protein, 112 aa, Gossypium hirsutum
  unsure (1)..(112): unsure at all Xaa locations
  Clone ID: LIB3493-046-P1-M1-H3.pep
FNILSGTSMSCLHVSGIVALIKARHQNXKCRTSNFVLMTTVNVNDTIHNPFQDFSTAAVSIPYDHGLGLINLLKALDPGLIYDISAQEYFXFLCTQKLTAMQLKAFSKHSNM

SEQ ID NO: 104030 - protein, 52 aa, Gossypium hirsutum
  Clone ID: LIB3493-047-P1-M1-A11.pep
KSLDLTASDLIDRLSFQAQRDISNLKNIAGETGQKITPWHPLLITDLQHTML

SEQ ID NO: 104031 - protein, 94 aa, Gossypium hirsutum
  Clone ID: LIB3493-047-P1-M1-A12.pep
FCKRSHARHNAKKRKPKKKKLCRNHRLRIQPPELEAHDLYSPSSPPIYHLPSPEKTRLAISLIKGSPKHCFGRVSQLTVYRAKEEETSNPFSKK

SEQ ID NO: 104032 - protein, 100 aa, Gossypium hirsutum
  unsure (1)..(100): unsure at all Xaa locations
  Clone ID: LIB3493-047-P1-M1-A5.pep
EEKIGNIETLLIGSLAGAMSSSATFPLEVARKQMQVGALXGRQVYKNVFHALSSILKQEGIHGLYKGLGPSCMKLVPAAGISFMCYEACQRILVDKDEEM

SEQ ID NO: 104033 - protein, 77 aa, Gossypium hirsutum
  Clone ID: LIB3493-047-P1-M1-B10.pep
KFQPQNQSRGKKSQLHSLCKILSCPSTTTRSRVRQPGNLNRSELHVAPKKYSDILSLHIPDCYLESYPDTKRHGTLL

SEQ ID NO: 104034 - protein, 142 aa, Gossypium hirsutum
  Clone ID: LIB3493-047-P1-M1-B11.pep
FAAALSLLPGSPSSVSVRGPSPFTPPMSPSANGMSHSNVAWPQPNVPALHLPGSNLQSSRLRSSLNARDIPTEDFNLLPDFDVQQQQLINELSSLSQPSMSSNSLNRSGRLKTLTPSNLDDLFSAENSSLQYSDQALAAAVY

SEQ ID NO: 104035 - protein, 107 aa, Gossypium hirsutum
  Clone ID: LIB3493-047-P1-M1-B3.pep
TVACITELCSWLYRTSVFGVVCVLFHLICNLQVLRLPTCQVFQIDSDVGSELCEHLLIRRHFLIIIHRYLPFIICCLILITGKQITSLVITTKATSALNFFKAGQLA

SEQ ID NO: 104036 - protein, 90 aa, Gossypium hirsutum
  unsure (1)..(90): unsure at all Xaa locations
  Clone ID: LIB3493-047-P1-M1-B5.pep
ATPHATCVIYHAEIETSRWREARYHDLLHNRSNFLERRRKYRSQRSTLFNGYXSRFENFSRHERSCILSGQHTNGRCTCRVNNRDSSSND

SEQ ID NO: 104037 - protein, 47 aa, Gossypium hirsutum
  Clone ID: LIB3493-047-P1-M1-B8.pep
RTRGPTLGRQVRWEQQARETRKTVLLQHHLVPISDLLTTIASTKWYL

SEQ ID NO: 104038 - protein, 81 aa, Gossypium hirsutum
  unsure (1)..(81): unsure at all Xaa locations
  Clone ID: LIB3493-047-P1-M1-C1.pep
VYDYTHHIHPTILLVLYCVHVYFCLEIILVTVATLTRALWXLXALEKQFNXEPYLSTSLQDFWGKRWNLMATSVLRPTAYE

SEQ ID NO: 104039 - protein, 110 aa, Gossypium hirsutum
  unsure (1)..(110): unsure at all Xaa locations
  Clone ID: LIB3493-047-P1-M1-C11.pep
AGVGNALKTGLFDYVGVQFYTNPPGQYXAADFATLEDAWNQWTSDIPATKIFLGFRAALDAAGSGFIPVNDLTSEVLPAIKNSSKYGGVMLWSKYYDDQSGYSSSIKSHV

SEQ ID NO: 104040 - protein, 93 aa, Gossypium hirsutum
  Clone ID: LIB3493-047-P1-M1-C9.pep
ASGPFSFDFQKPIVFCFPQPLLPILLFLHVFKHTMPRGCVGKAQGLYSNQSFACFPFHFPQGFFVVLRQLAWLLNLTLFFLSLQRHLRHDTRI

SEQ ID NO: 104041 - protein, 41 aa, Gossypium hirsutum
  Clone ID: LIB3493-047-P1-M1-D8.pep
SLVDGKIVGRWKINLAWWRYIILTYQFKIKSDMIHSRMPKM

SEQ ID NO: 104042 - protein, 108 aa, Gossypium hirsutum
  Clone ID: LIB3493-047-P1-M1-E10.pep
FPSFIANLKSLSSFVFIGEIQLKWRQLIIRRGSSKANYHSLSLRITKARTTSSGSNSSSKVVPCSTPSSTSSMYSSIPKVSTYSYASSKQPINFREQKNVAELPPSIP

SEQ ID NO: 104043 - protein, 52 aa, Gossypium hirsutum
  Clone ID: LIB3493-047-P1-M1-E11.pep
KDNIRSNPIILYYFTTLTYKVVLIIFDTALHLMISNHNGLLIFEGILPTMNL

SEQ ID NO: 104044 - protein, 74 aa, Gossypium hirsutum
  Clone ID: LIB3493-047-P1-M1-E4.pep
QGFHQENGALSLIVASFVGWNRNYVVQYIIELKVNSGNLLSQFKGHNVHLSMQKFSSHVVEKCLKHFAESRSQI

SEQ ID NO: 104045 - protein, 56 aa, Gossypium hirsutum
  unsure (1)..(56): unsure at all Xaa locations
  Clone ID: LIB3493-047-P1-M1-E8.pep
SMSLANIHRFWETQPVGQLKDAGHTRLPECTIDPPNQSSEVKHXPYYLSSTNQWTT

SEQ ID NO: 104046 - protein, 49 aa, Gossypium hirsutum
  unsure (1)..(49): unsure at all Xaa locations
  Clone ID: LIB3493-047-P1-M1-F5.pep
HCLRKNTNELLWLACVSLTDQFVHERLTDERYEAXVMXLQQHINKFRNL

SEQ ID NO: 104047 - protein, 40 aa, Gossypium hirsutum
  Clone ID: LIB3493-047-P1-M1-G7.pep
RAGLLNTLWWLLADSGLRGGGFFGEAEGTFYHIIDQAPAA

SEQ ID NO: 104048 - protein, 52 aa, Gossypium hirsutum
  unsure (1)..(52): unsure at all Xaa locations
  Clone ID: LIB3493-047-P1-M1-G8.pep
FLLESNSDNAVVHRISDREVRKGSMNKHGXHWKGVYIXVFNTYLWWVTGQEI

SEQ ID NO: 104049 - protein, 84 aa, Gossypium hirsutum
  unsure (1)..(84): unsure at all Xaa locations
  Clone ID: LIB3493-047-P1-M1-H1.pep
SKFRKHNILSMLILFHVEDMYKLRTTCYVNRFQGLKKPLSPSVRTNIFQIWANXLCEDPQFRPATKRRVILNNLVFLPTTNDLL

SEQ ID NO: 104050 - protein, 64 aa, Gossypium hirsutum
  Clone ID: LIB3493-047-P1-M1-H11.pep
FFFGKEGLNLHVVLGMIIGVAGMIWYGNASSKPGGKERPAYLFPTIRQQKPSSLSDSNEHDSKV

SEQ ID NO: 104051 - protein, 72 aa, Gossypium hirsutum
  unsure (1)..(72): unsure at all Xaa locations
  Clone ID: LIB3493-047-P1-M1-H2.pep
SYSLNTAIHGGRYKPTVACDAANPLSIEXSEVAPXPQKHEFRIKILCTAVCHTDVYYWECKDNTPLSTHILA

SEQ ID NO: 104052 - protein, 60 aa, Gossypium hirsutum
  unsure (1)..(60): unsure at all Xaa locations
  Clone ID: LIB3493-047-P1-M1-H4.pep
VLTQHSHLQSPAPKVNMPSRNISVGRAEEATHPDALKAAMAEFISNLDLRFRWIGLRNGX

SEQ ID NO: 104053 - protein, 36 aa, Gossypium hirsutum
  Clone ID: LIB3493-047-P1-M1-H5.pep
FRHLRKIDCSLCLIRKNAWVDRGSKYRQVQCRRTSF

SEQ ID NO: 104054 - protein, 33 aa, Gossypium hirsutum
  Clone ID: LIB3493-047-P1-M1-H6.pep
TSLGLCSTPLYVLVTLLLVLLGANSTDVRQMLH

SEQ ID NO: 104055 - protein, 54 aa, Gossypium hirsutum
  Clone ID: LIB3493-047-P1-M1-H7.pep
PHPPAPAERVSFRPHPFIIRNNSRNPLNTQLHHLCPTSLLYLSNKSPRVRPRVR

SEQ ID NO: 104056 - protein, 48 aa, Gossypium hirsutum
  Clone ID: LIB3493-047-P1-M1-H9.pep
SVQYITKLPVSHLAYVIYTSDYLDILKRAMEFTHLIILLKKPLTNVCL

SEQ ID NO: 104057 - protein, 99 aa, Gossypium hirsutum
  Clone ID: LIB3493-052-P1-M1-A10.pep
IPPMKAPLKEICISEIFGISLATFQGLMDDTFGYSFQFRSQRSEQRSMADLQDSAVRRSGETCEGGHARSRSLEPNSLVYSRSFWCSRPLNFFLGSEFQ

SEQ ID NO: 104058 - protein, 107 aa, Gossypium hirsutum
  unsure (1)..(107): unsure at all Xaa locations
  Clone ID: LIB3493-052-P1-M1-A3.pep
AISIPQVDNAVRYSGAECSSEGKNDXIEDYXNKNVXDLTVHEACRSYMRCNCMVDQPFCGEREVALVLSSEEKLYVLLVGVTFDGSESILDLLGSHRVEDIREVLVG

SEQ ID NO: 104059 - protein, 74 aa, Gossypium hirsutum
  Clone ID: LIB3493-052-P1-M1-A4.pep
IFNLSSLFMLWGSIPHGGVPGSPFKASPNFLLACPEAHSSYTVSVRYNVIQYYSAFRTGLLTTIFKHLKLFHKV

SEQ ID NO: 104060 - protein, 76 aa, Gossypium hirsutum
  unsure (1)..(76): unsure at all Xaa locations
  Clone ID: LIB3493-052-P1-M1-B12.pep
MPLPVMNPNVEPPLPGLAPAAQPPQPHRPSTSCDRHPXEHFTGFCPSCLYERFAGLEPSXSFASSSSRKPSIRAST

SEQ ID NO: 104061 - protein, 54 aa, Gossypium hirsutum
  unsure (1)..(54): unsure at all Xaa locations
  Clone ID: LIB3493-052-P1-M1-B4.pep
LSLFFLFYKWMLHRKLFLWLECWVHGHSHIGTTTLMNGXISVTLXDKSXDNSGY

SEQ ID NO: 104062 - protein, 35 aa, Gossypium hirsutum
  Clone ID: LIB3493-052-P1-M1-B7.pep
CNIWEKIKPFSLGKEYGLINYLLVFESYGNLVALD

SEQ ID NO: 104063 - protein, 112 aa, Gossypium hirsutum
  unsure (1)..(112): unsure at all Xaa locations
  Clone ID: LIB3493-052-P1-M1-C8.pep
TKLRAYLGDEKANEVMXEGLYIISVGTNDFXNYYNFPQRRAQFTIPKYEDFLIGNAEDFIRKIYSLGARKLSLTGLPPMGCLPLQRTLNLKNPHSCSEELNKVALKFNEKLK

SEQ ID NO: 104064 - protein, 46 aa, Gossypium hirsutum
  Clone ID: LIB3493-052-P1-M1-C9.pep
IPKIAIISCKFLKFGRTFWTPRTSCCSAPHPKYEEESIRDVESKGS

SEQ ID NO: 104065 - protein, 70 aa, Gossypium hirsutum
  Clone ID: LIB3493-052-P1-M1-D3.pep
WAGNWHVCQPAGETVLRGGTLRPIPKLNAPTESNEPSEAAGTADMWKLQETATSLNSNCRFSLQDLKFIT

SEQ ID NO: 104066 - protein, 47 aa, Gossypium hirsutum
  Clone ID: LIB3493-052-P1-M1-E3.pep
KKKNGLPHCFSNFWEFCLFNRGRDLSGNFSAEGFEVDPLFDQVTDGH

SEQ ID NO: 104067 - protein, 118 aa, Gossypium hirsutum
  unsure (1)..(118): unsure at all Xaa locations
  Clone ID: LIB3493-052-P1-M1-E6.pep
MFTVVGLEYCDTWLVEFQTSIIKPISCATVKXECRNRTTEKITFHSPEITTDAAGSYKIEVTXDYEDSYCDINLAKSPRADCNDPTESWKKASVELTELDGVTRPNSFCQQIFVFKKE

SEQ ID NO: 104068 - protein, 142 aa, Gossypium hirsutum
  Clone ID: LIB3493-052-P1-M1-F11.pep
GRYHTLLIRNSSVYSCGCSLCGVLGHGPETTQCVAFTRINFPSLANVIQVSASQNHAAFVLQSGEVFTCGDNSSFCCGHRDTGRPIFRPRLVEAMKGIPCKQVAAGLNFTVFLTRQGLVYTCGTNTHGQLGHGDTQDRPTPK

SEQ ID NO: 104069 - protein, 133 aa, Gossypium hirsutum
  unsure (1)..(133): unsure at all Xaa locations
  Clone ID: LIB3493-052-P1-M1-F4.pep
VKPYKEKGKVHEKKQQQLERGEYSATPVDTREXDLQLGTRMFYNAQEMMLRRKLEEQADLQQAIELQGRRLMNLQLLDLKNQHHSSFHHSLSTCSPIPSPTVSHIPTNQARIFPVEATLEDNGGLKSPAANKL

SEQ ID NO: 104070 - protein, 124 aa, Gossypium hirsutum
  unsure (1)..(124): unsure at all Xaa locations
  Clone ID: LIB3493-052-P1-M1-G3.pep
HASVKIINDCLDGLIRNAEDSRQEADVEKLQXGTYLNIKDASXLRFLVDMRGADVDDRQLRDDLMTMLIAGHETTAAVLTWAVFLLAQNPSKIKKAQAEVDSVLGQKSXTFGSIKKLEYIRLII

SEQ ID NO: 104071 - protein, 134 aa, Gossypium hirsutum
  unsure (1)..(134): unsure at all Xaa locations
  Clone ID: LIB3493-052-P1-M1-G4.pep
NKLKELAEQYALSEQQYAQKLKQKTLELQLSGLKXKQHEEKLIQEQAQMKVYAEQVSQLLVTEKNLRMQLTADGEKFQQFQDALSKSNEVFETFKQEIEKMAKSIKELRKENVFLKSKCDKSDFTLIELVEERE

SEQ ID NO: 104072 - protein, 95 aa, Gossypium hirsutum
  Clone ID: LIB3493-052-P1-M1-H2.pep
SINGERGINRFIKLWLCIIISCATLLIGEQETLKTVRSCYCRMAILAPTNILIIRGHCSHFACTQLTFASASLIIPSFLPRHCMLVPIKSTHPYI

SEQ ID NO: 104073 - protein, 145 aa, Gossypium hirsutum
  unsure (1)..(145): unsure at all Xaa locations
  Clone ID: LIB3493-052-P1-M1-H9.pep
MIQPSLISYSFQSAPEPALLDVAAIAADRILLLEFLFHXVVXFHGLKTIXFQWRKSLDTPQSNPEAIXGIXXXXXXDADCXIITGKEFPVPSSKSFCDQAWXQXRPVFFLAKFESLPQHXNSDSHHPGGDIIXTDDVSFEVFLDH

SEQ ID NO: 104074 - protein, 111 aa, Gossypium hirsutum
  Clone ID: LIB3493-051-P1-M1-A11.pep
FYIVVQPFPFPFLFPPIHKLIPSTLSFSLASSAMDSASPSMLFLCGKSSSEWEVPKSLKINYTLNLPNCGKVSALLQSEINTFRFGEYTFNVHLFLNSLSTKLFLLFLILS

SEQ ID NO: 104075 - protein, 58 aa, Gossypium hirsutum
  unsure (1)..(58): unsure at all Xaa locations
  Clone ID: LIB3493-051-P1-M1-B11.pep
YTTGGMGAEISKAAMISXLXIDVYIVKAATSHSLRALRGELIHGIPDDXLGTVIRFSR

SEQ ID NO: 104076 - protein, 107 aa, Gossypium hirsutum
  unsure (1)..(107): unsure at all Xaa locations
  Clone ID: LIB3493-051-P1-M1-B7.pep
PVASLSSVCISFIFMEDSRSFXEKQQLKRLFPSKIHGTEQNSLIEYQVELAAIAISLNVRLRPSHMPVYMQEHSLRCTLQLLDSAPKPQPSLTHLASAIKKEFYSVY

SEQ ID NO: 104077 - protein, 141 aa, Gossypium hirsutum
  unsure (1)..(141): unsure at all Xaa locations
  Clone ID: LIB3493-051-P1-M1-B8.pep
LYYHLTISKAACAYTYLILQFLTQPTHPVFNINNGWANYLKRVFLALNSHINPHHETIYFTSHIMIINHPFPISNLYPLILDFHTSNIHFKFSDLFTTIYTQSAPELXEXPNILHNFDALIINTISTKPIXVYTLYKYPPL

SEQ ID NO: 104078 - protein, 52 aa, Gossypium hirsutum
  unsure (1)..(52): unsure at all Xaa locations
  Clone ID: LIB3493-051-P1-M1-B9.pep
TPFLLKHYVYQTLYSHSTLTHSYSLLLSLLLYSLNSTDIXXXIXSFTNKSST

SEQ ID NO: 104079 - protein, 128 aa, Gossypium hirsutum
  Clone ID: LIB3493-051-P1-M1-C11.pep
LAAILDGGWGQLDDFHGQPTQEAKVKKLDVLLGVDSKPLKVDTTGKEYGGYFPSVGGRGSDALNGSSLYDSPKHLKMQNSIDLSRGYPRGSSLWSSQMQQLDAYAQNSSCNVISGERRYFSLRAAPSA

SEQ ID NO: 104080 - protein, 67 aa, Gossypium hirsutum
  unsure (1)..(67): unsure at all Xaa locations
  Clone ID: LIB3493-051-P1-M1-C9.pep
FIWPSXGRXXPNMATSSXXXXXPSIPLXXSSFXNPLDGXIQYSSXLXNKXQXXPPTPTSTFCXGYKS

SEQ ID NO: 104081 - protein, 88 aa, Gossypium hirsutum
  Clone ID: LIB3493-051-P1-M1-D1.pep
LVTRVRHYGRNHSLTTGILDDRLNLDDRRIVDHMITVLKIALICTSLSPFDRPSMREVVTMLIESKRQDQEDNFGKSPTCSPPKRSAS

SEQ ID NO: 104082 - protein, 128 aa, Gossypium hirsutum
  unsure (1)..(128): unsure at all Xaa locations
  Clone ID: LIB3493-051-P1-M1-D11.pep
YLGEFXVGGAGITGADLQGDMNCAEGYVKDMCNWVVGRCLDDMLFMGKRYDKGWIGRVRMGGSIPFGRVSYTEAVELLXEGVRGGKKFENEVEWGIGLASEHERYLTGVKFQKPGIGYNYPKGIKTFY

SEQ ID NO: 104083 - protein, 135 aa, Gossypium hirsutum
  Clone ID: LIB3493-051-P1-M1-D6.pep
MSNSEGGATNGAIMDPQRQQATGNGSLAIKKPPSKDRHSKVDGRGRRIRMPIICAARVFQLTRELGHKSDGQTIEWLLRQAEPSIIAGTGTGTTAGSFFTMSVFVRGGANSTFLSSTTGSSSLDHKPFVGSHPIY

SEQ ID NO: 104084 - protein, 108 aa, Gossypium hirsutum
  unsure (1)..(108): unsure at all Xaa locations
  Clone ID: LIB3493-051-P1-M1-D7.pep
NRIVEELKPGPXICFPFTPLGFLERAATVYGEGPXIIYNNTSFTWSQTHRRCLQLASSLSSIGIGSGHVVSVLAYNIPAMYEIQFGVPMSGAILNCINTRLDARTVSV

SEQ ID NO: 104085 - protein, 46 aa, Gossypium hirsutum
  unsure (1)..(46): unsure at all Xaa locations
  Clone ID: LIB3493-051-P1-M1-E10.pep
FCEHCAGRHHAKNKKCFXCNQPTLGIFNAAHEIRXKMAEEGKLKGH

SEQ ID NO: 104086 - protein, 129 aa, Gossypium hirsutum
  unsure (1)..(129): unsure at all Xaa locations
  Clone ID: LIB3493-051-P1-M1-E2.pep
GKRKFDGGYVHNGLLKAAXWVLDAECEVLKELVEEHPNYTLTFAGHSLGSGVAAMLALVVVQHQDKLGNIDRSRIRCYAIAPARCMSLNLAVRYADVINSVVLQDDFLPRTATPLEDIFKSLFCLPCLL

SEQ ID NO: 104087 - protein, 98 aa, Gossypium hirsutum
  unsure (1)..(98): unsure at all Xaa locations
  Clone ID: LIB3493-051-P1-M1-E4.pep
DTSHHDYRREPNLTDATITXIXPTEPAHDIHYILEITIAXYDLINIDQKFRRQHIKDXLLHLTELVDVMISSSHIALSDNHETYNVQLFKSIDKISDL

SEQ ID NO: 104088 - protein, 69 aa, Gossypium hirsutum
  Clone ID: LIB3493-051-P1-M1-E7.pep
PKICKPRWGCILPSAIPFRGIEAVDTVMSPQSAFENSGPAVAHLIMIIYNGNLETLKTNRETYALSQTK

SEQ ID NO: 104089 - protein, 113 aa, Gossypium hirsutum
  unsure (1)..(113): unsure at all Xaa locations
  Clone ID: LIB3493-051-P1-M1-F2.pep
LLGSNTVGGXFNGNIYYLIMKAKGFPYLEVHVEPYMRQLTVADVVTGPLQVCHGNXKVGNIVHILKTTNHQWFPVINEPPHSKSPIFDSLILHAHLITLLKKRVLFHTPILIS

SEQ ID NO: 104090 - protein, 162 aa, Gossypium hirsutum
  Clone ID: LIB3493-051-P1-M1-G6.pep
EMNPKISECGMAKFFKKDELEANTGRIVGTYGYVPPEYVRKGIYSTKYDVYSFGVLLLQIISGKRNSSLYGCHENLNLLEYAYELWKQGREAEFFDASLDDSSSSCKLIRCMQLALLCVQENPTDRPSMVKSFTILKNENSAAISVPKQPAYSITRYERKGK

SEQ ID NO: 104091 - protein, 138 aa, Gossypium hirsutum
  unsure (1)..(138): unsure at all Xaa locations
  Clone ID: LIB3493-051-P1-M1-H2.pep
VSGIMVTLGXYGVLQEKIMRVPYGLNKEYFKYSLFLVFCNRITTSTVSTVFLLASNKALFPVAPIYXYYLISASNILTTTCHYKALNYINFPIHTLSXYTKIIPIIIYNTXIIXKTYKVSNYLXAFLITLNXSIFILI

SEQ ID NO: 104092 - protein, 82 aa, Gossypium hirsutum
  Clone ID: LIB3493-051-P1-M1-H6.pep
INIRGLKYNSFQELSLGHNKYDCLLRKKQKGKNKVLVATKSDSGTSTNESFDRYLINNVILIHILLVSYNILLMSYLWNLRS

SEQ ID NO: 104093 - protein, 151 aa, Gossypium hirsutum
  Clone ID: LIB3493-051-P1-M1-H7.pep
ESLRRWREELLGTVDMSAVGESKEPEVKILSLSIVSPGRPDIILPIPFVTKPKTCLFTLKEGSRFRLKFTFNVSNNIVSGLKYINTVWKTGILVDNTKLMLGTFSPQKEPYTFELEEETTPSSLFARGSYSLMTQFVYYYEKVYLDVSYYF

SEQ ID NO: 104094 - protein, 126 aa, Gossypium hirsutum
  Clone ID: LIB3493-030-P1-M1-A5.pep
FIVTSDQEQVEGLSKSLDFIIDTASGDHPFDPYLSLLKSAGVYALVGFPSEIKFSPASLNMGMKTFAGSVTGGTKMIQEMISFCAARKIYPQIEVIPIQYANEALERLVKKDVKYRFVIDIENTLK

SEQ ID NO: 104095 - protein, 71 aa, Gossypium hirsutum
  Clone ID: LIB3493-030-P1-M1-B3.pep
ELTCVSNEYGVQKAEHRPNGRTINVAEIEPHDIDGPLRSQHELIKAAMECVVKHHANHRISYGLIHRDTLV

SEQ ID NO: 104096 - protein, 92 aa, Gossypium hirsutum
  Clone ID: LIB3493-030-P1-M1-B4.pep
GRVGINRATAGGYWKATGSDKQIISRRNQVAGMRKTLVFHMGKPPHGLRTDWIMHEYRLVNIPNNDFNLANNPMMQNYLNHEMKNGYYVMYF

SEQ ID NO: 104097 - protein, 135 aa, Gossypium hirsutum
  Clone ID: LIB3493-030-P1-M1-C10.pep
MDSSCVATSFRIPEQVLTSSGQRMQLLGFGTAAYPLVTPQVAKQAILQAIKLGHRHFDTAYIYGTEQPLGEAIVEAISLGLIISRDELFITTKLWCSNAYGELVLPQLRRSLQNLKMEYVDLFLIHWPLSLKPGR

SEQ ID NO: 104098 - protein, 58 aa, Gossypium hirsutum
  unsure (1)..(58): unsure at all Xaa locations
  Clone ID: LIB3493-030-P1-M1-C5.pep
LAANLYAKSMVGEDALVNVSIEKQADGKLSGYIRIRSKTQGIALSLXDKITLKQKGGS

SEQ ID NO: 104099 - protein, 144 aa, Gossypium hirsutum
  Clone ID: LIB3493-030-P1-M1-D11.pep
ITNAIEIYDRLSGGINFMASNNDCGMREYDTERFQLLNHFQFPWPVNHTSISPDRRLITVVGDHLDALLVDSQNGKAVATAVGHRDYSFASAWHPDGRVFATGNQDKTCRVWDIRKLATPVATLKGNLGAVRSIRFSSDGQFMI

SEQ ID NO: 104100 - protein, 63 aa, Gossypium hirsutum
  unsure (1)..(63): unsure at all Xaa locations
  Clone ID: LIB3493-030-P1-M1-E10.pep
PFPMPYPMPIPNWFPLPMPFPMPVPTRFPSPMPYPMAVPNWFPSSMPYPRPYTMPFXEPLPTP

SEQ ID NO: 104101 - protein, 141 aa, Gossypium hirsutum
  Clone ID: LIB3493-030-P1-M1-F12.pep
DNSSDDEESEDDEEDEKSVVLNNGNNSDSSKGTEGSSGLVSRRRRDGEFSGGVSSESGSEEEKDIVPLQSSKSGGEDVLNVENDKVEVEAIQPEILENNGTKTEDQKEIVSQGADVPVQENEGVGNKLIDRVDGCSDVKSE

SEQ ID NO: 104102 - protein, 148 aa, Gossypium hirsutum
  Clone ID: LIB3493-030-P1-M1-F5.pep
VPFAVVGVYHGDLVFKMAKALQRFGMKRALVVHSEGLDEMSPLGPGRVLDVTPEKIEKFSFDPLEFGIPRCTLDDLRGGGKNYNADVLKRILSGESGPIAEALILNAAAALLVSGHVKSLSEGVALARETQSSGKALNTLNSWIDISN

SEQ ID NO: 104103 - protein, 50 aa, Gossypium hirsutum
  unsure (1)..(50): unsure at all Xaa locations
  Clone ID: LIB3493-030-P1-M1-G7.pep
XXTKKNLALPPKESALSGRVGWLTLTIXXCCXYSPYFKICQNLITSDCFF

SEQ ID NO: 104104 - protein, 67 aa, Gossypium hirsutum
  unsure (1)..(67): unsure at all Xaa locations
  Clone ID: LIB3493-030-P1-M1-H7.pep
ITSFYGCPXXFFYFXKXKETNXHIHXLRTIFNEFLPKKLRSHHRLILTYFLKCNSYIQLKQMIFPLN

SEQ ID NO: 104105 - protein, 151 aa, Gossypium hirsutum
  Clone ID: LIB3493-030-P1-M1-H8.pep
KELPKVNRSETPWLIVLVHCPIYNSNSHHYMEGETMRVVYESWFVKYKVDVVFSGHVHAYERSKRISNIAYNILNGKCTPVHDLFAPVYITIGDGGNHCGPALGMVEPQPNFSAYRETSFGHGIFDIKNRTHAYFGWHRNQDRYAGEADSL

SEQ ID NO: 104106 - protein, 135 aa, Gossypium hirsutum
  unsure (1)..(135): unsure at all Xaa locations
  Clone ID: LIB3493-032-P1-M1-A11.pep
SDLNSVLANPRVXRXFSSEAPKKNNYENFYPKEKKEIPKQNDQKPDSKEDSKADDQWNFQETFLKLFQNLVTPLLVLALFLSMSPWTVEQQQISFQEFKNKFLEPGLVDHIVVSNKSVAKVYVRNTPYNQTSDDL

SEQ ID NO: 104107 - protein, 102 aa, Gossypium hirsutum
  Clone ID: LIB3493-032-P1-M1-A5.pep
MAPRTSVDEKPCLSIGTTNLPVDISSFELIKPSFDETNQHCSLDVLPILIEEASFPVREKSNLNTSHVSDAYSFSVLPDEGNMNPNCTRVKRVEPSTIFLFY

SEQ ID NO: 104108 - protein, 56 aa, Gossypium hirsutum
  unsure (1)..(56): unsure at all Xaa locations
  Clone ID: LIB3493-032-P1-M1-A8.pep
LTIYFRKIEFXQXEAXLLITGNLDIGISALXSNLPPIYVVXLVLRKLETDPLFFFF

SEQ ID NO: 104109 - protein, 83 aa, Gossypium hirsutum
  unsure (1)..(83): unsure at all Xaa locations
  Clone ID: LIB3493-032-P1-M1-B12.pep
SSYPFYFFFFVFSNTPNRKPNGFFKREKGRKRDLTFVMAQAIRWCSFSPIALKASXXXXXXXHPCHRNHTCXFXSSLAELRSF

SEQ ID NO: 104110 - protein, 106 aa, Gossypium hirsutum
  unsure (1)..(106): unsure at all Xaa locations
  Clone ID: LIB3493-032-P1-M1-B2.pep
GSEANDTXVKLVWCYNYALXRPEXXKFIAXXKXYHGSTWISXSLSXLPPLHQNFYLPPPFVLHTDCPHYWRYHLPSETEKDFSTKIANNLXNLILKKGPKTIAGLI

SEQ ID NO: 104111 - protein, 53 aa, Gossypium hirsutum
  Clone ID: LIB3493-032-P1-M1-B3.pep
SHLKYHLNLPALTATFLTTYETSAPLNCLNNTSSMSLILLIVLPFIFHLPWIS

SEQ ID NO: 104112 - protein, 139 aa, Gossypium hirsutum
  unsure (1)..(139): unsure at all Xaa locations
  Clone ID: LIB3493-032-P1-M1-B5.pep
MMSKPAESSVAKRLXXXVPLITGGASGIGESTARLFLKHGAKVLIADIQDELGQSLCKELGTPDIISYIHCDVTCETDVQNAVDLAVSRYGKLDIMFNNAGVAGEDELRAIASECDNFKRGLDFNVVCWLFILLYILIC

SEQ ID NO: 104113 - protein, 72 aa, Gossypium hirsutum
  unsure (1)..(72): unsure at all Xaa locations
  Clone ID: LIB3493-032-P1-M1-B8.pep
GRNWSGAPNNPGXMKTMGHRIPHXKXYLTPSXXSXXXRLLPFXSIFMEXYFXFSSFXNYKNYYFYSFILLLF

SEQ ID NO: 104114 - protein, 99 aa, Gossypium hirsutum
  unsure (1)..(99): unsure at all Xaa locations
  Clone ID: LIB3493-032-P1-M1-C1.pep
NVAVKDLKRGFXPWDSLYNSDKEAXNFTSXVIIINHPGQIGNGYAPVLDCHTSHISVKFSELLTKIDRLSGKELXKEPKFLKNGDPRMVNIIPTKPIVV

SEQ ID NO: 104115 - protein, 74 aa, Gossypium hirsutum
  unsure (1)..(74): unsure at all Xaa locations
  Clone ID: LIB3493-032-P1-M1-C10.pep
KKKDGVCNKICNLNAVNVDMGXLXFXXXXXPXTXQLXPQKHLLYCSIDALFFFLFQWTTNKHSLISCSPKKFLN

SEQ ID NO: 104116 - protein, 79 aa, Gossypium hirsutum
  unsure (1)..(79): unsure at all Xaa locations
  Clone ID: LIB3493-032-P1-M1-C7.pep
RESSYACELPFQNSPLYPHVLKPSQTQLTPTEGDMRIKHNLXQTXFXKWHXSCLTRANQRRLLFSAGLTHLLYSSSITS

SEQ ID NO: 104117 - protein, 49 aa, Gossypium hirsutum
  unsure (1)..(49): unsure at all Xaa locations
  Clone ID: LIB3493-032-P1-M1-C8.pep
AKHGTTTGVSXRXRATTRLAVASKDSKPXDFNRPXHIFPLKYXEGGGVK

SEQ ID NO: 104118 - protein, 56 aa, Gossypium hirsutum
  Clone ID: LIB3493-032-P1-M1-D1.pep
TSYKVKINTPPESQNLNYLKLRKKKGKISPYSSSSTSDSNQIKLLKKKKKKKDSSS

SEQ ID NO: 104119 - protein, 50 aa, Gossypium hirsutum
  unsure (1)..(50): unsure at all Xaa locations
  Clone ID: LIB3493-032-P1-M1-D12.pep
IRITSPPKAYKQVKFRAMAFXXXXXRXXSSTSLSVXHIFLGIAAIRCLNA

SEQ ID NO: 104120 - protein, 75 aa, Gossypium hirsutum
  unsure (1)..(75): unsure at all Xaa locations
  Clone ID: LIB3493-032-P1-M1-D2.pep
PLFQILTPPQISSPPWVPSQQIHSLFVXLNXXHVVTKXXLAPRPSNRKGKTSKRVHFLRNLIREDTCFSTYEKRI

SEQ ID NO: 104121 - protein, 34 aa, Gossypium hirsutum
  Clone ID: LIB3493-032-P1-M1-D7.pep
SQVRIGSNRAIRKDHKPPIEKRRSFLSVNFRREE

SEQ ID NO: 104122 - protein, 97 aa, Gossypium hirsutum
  unsure (1)..(97): unsure at all Xaa locations
  Clone ID: LIB3493-032-P1-M1-D9.pep
QKYTQSGXVXPVXRSTLRTGCXPYSXXPSLYYXDPSLTLLSSPGWGGAYYFLFFIAPFDKESSSHLNHPNCKLPKNCFRCQQQPPCFPGNKPLVFLF

SEQ ID NO: 104123 - protein, 78 aa, Gossypium hirsutum
  unsure (1)..(78): unsure at all Xaa locations
  Clone ID: LIB3493-032-P1-M1-E1.pep
PRVRSICSCHKEAKVXGGYTYPRCKXXACELPTECCVCGLTLVSSPHLARSYHHLFPIAPFDKVTSSHLNNPNCKLQR

SEQ ID NO: 104124 - protein, 76 aa, Gossypium hirsutum
  unsure (1)..(76): unsure at all Xaa locations
  Clone ID: LIB3493-032-P1-M1-E10.pep
FPXPPTPXSECLLLXXKTXRXLFTFRNWLXXXXXLXIFQSSFCXYTILPQNHAWLNSLFSFSSSTHKNILFFPSFT

SEQ ID NO: 104125 - protein, 53 aa, Gossypium hirsutum
  unsure (1)..(53): unsure at all Xaa locations
  Clone ID: LIB3493-032-P1-M1-E12.pep
KKKKIAARHPGFXSXGCTXXXNAXDENNGXXXKDTATSXACNXKPXXSVSHAS

SEQ ID NO: 104126 - protein, 63 aa, Gossypium hirsutum
  unsure (1)..(63): unsure at all Xaa locations
  Clone ID: LIB3493-032-P1-M1-E7.pep
PPLSSSVVYTLGWGLXSDTSXXTXNNXXXXKEADLNGKKVFVTVDLNDPLDYYSNITDDTRIP

SEQ ID NO: 104127 - protein, 50 aa, Gossypium hirsutum
  unsure (1)..(50): unsure at all Xaa locations
  Clone ID: LIB3493-032-P1-M1-F10.pep
IKIKKFSCSPHCQCFTAPPIXCLYELMEREXLTPRFLKXLYXSGRWAEEW

SEQ ID NO: 104128 - protein, 45 aa, Gossypium hirsutum
  unsure (1)..(45): unsure at all Xaa locations
  Clone ID: LIB3493-032-P1-M1-F4.pep
IFLISNCAICTXSTTSRNXXKSEQVLCVYCAQLLGPTYFFVAHAS

SEQ ID NO: 104129 - protein, 73 aa, Gossypium hirsutum
  unsure (1)..(73): unsure at all Xaa locations
  Clone ID: LIB3493-032-P1-M1-F5.pep
KESISSHFIVLLSQILRENTAMKXIHKHXDXXPTXFXESIXQTFFXLENTNHYLKIYLKELYINSAVQIDVSG

SEQ ID NO: 104130 - protein, 144 aa, Gossypium hirsutum
  Clone ID: LIB3493-032-P1-M1-F8.pep
DAWVSIGLCTPTLAPLLHPGKPSLHHRSTTVVCSASKWAERLLADFQFLPAPDNSVSSSSSSTATLSPPYPPLLAPSPPERHVSIPLDFYKVLGAETHFLGDGIRRAYEARVSKPPQYGFSQDTIISRRQILLAACETLSNPGS

SEQ ID NO: 104131 - protein, 67 aa, Gossypium hirsutum
  unsure (1)..(67): unsure at all Xaa locations
  Clone ID: LIB3493-032-P1-M1-H11.pep
XSQYSKSKPRSXLFLNCXRRKXXTRNKWXFLLVFLTXXGXSKFQSRCSLPMPQEAHTSECILHNXLA

SEQ ID NO: 104132 - protein, 39 aa, Gossypium hirsutum
  unsure (1)..(39): unsure at all Xaa locations
  Clone ID: LIB3493-032-P1-M1-H12.pep
KMAVTFFRRLLVVSPXTVNSAFQGQPKSGFAGFRFCTIA

SEQ ID NO: 104133 - protein, 87 aa, Gossypium hirsutum
  Clone ID: LIB3582-020-P1-K1-A1.pep
KSIPFSRKIFFSLLLFSIFFTEFPRWVSFVRNYIAKVDCIGLPLFLSRNFKLIFLLKRTRINLHVYRQCQVEFRCFHLPEMLQALQM

SEQ ID NO: 104134 - protein, 134 aa, Gossypium hirsutum
  Clone ID: LIB3582-020-P1-K1-A6.pep
PTRPRIVSLVSALLILLALAVSSTRNAQEDSMANNTGTLVGGIQDVPGSENDLHLQELARFAVDEHNKKANALLGFEKLVKAKTQVVAGTMYYLTIEVKDGEVKKLYEAKVWEKPWENLKGLQEFKPVEEGASA

SEQ ID NO: 104135 - protein, 83 aa, Gossypium hirsutum
  Clone ID: LIB3582-020-P1-K1-B11.pep
KCIIFKVRSAFENVFEPKNIQFISHNFQSFVYSISKKEIKKSKNLSRHGSSSWIWVLCFWKFIFLFSCGLRVSLGLGYFPFPG

SEQ ID NO: 104136 - protein, 185 aa, Gossypium hirsutum
  unsure (1)..(185): unsure at all Xaa locations
  Clone ID: LIB3582-020-P1-K1-B8.pep
HASADAWGAGERHKGDDLLCYSWGGNGHGQLGLGDTESRARPEIVGTFSQDIQWTVYEVACGAFHTALLTRKKRPSDTLESMCWTFGLGDRGQLGHGTTRSALVPEPVKELPQPVYLVSVDCGLFHTSVVSSAGDVWSWGMEKGLGLCPDASFTGTDSGDAISXLRIHGPKFNDPVQVSCGAAHT

SEQ ID NO: 104137 - protein, 185 aa, Gossypium hirsutum
  Clone ID: LIB3582-020-P1-K1-C10.pep
ISTLARAAKNPVVLVLLSGGPVDISFAKNDKHIGSILWAGYPGEAGGLALAEIIFGDHNPGGRLPVTWYPQSFVKVPMTDMRMRPEPSSGYPGRTYRFYQGQKVFEFGYGLSYSSYSYEFLPVAQNKVYLNHQIKSPKAELENSNALKHVPVSELGTELCSKRIPVTVRAQNHGDMAGRHPLLLF

SEQ ID NO: 104138 - protein, 117 aa, Gossypium hirsutum
  unsure (1)..(117): unsure at all Xaa locations
  Clone ID: LIB3582-020-P1-K1-C8.pep
LCNNWKDYSNCESLTTTFFFSHLHQFSNSKSLTQALTRARVPIVKLMDPVTGXSCDICVNNVFSVVNTTLLRDYAKIDVRLXQXAFTVKHWAKTRXVNATYQRTLSSYANVDLLSFH

SEQ ID NO: 104139 - protein, 182 aa, Gossypium hirsutum
  unsure (1)..(182): unsure at all Xaa locations
  Clone ID: LIB3582-020-P1-K1-D2.pep
MWLKMGLKWLNFTCVGTAGVWRISALNEAGGWKDRTTVEDMDLAVRASLKGWKFLYLGSLKVKNELPSTLKAYRYQQHRWSCGPANLFRKMVMEIIKNKKVSTWKKVHVIYSFFVVRKLVAHIVTFIFYCVILPATVLVPEVEVPKWGAVYIPSIITILNAVGTPRSFHLLVXWILXENVMS

SEQ ID NO: 104140 - protein, 95 aa, Gossypium hirsutum
  Clone ID: LIB3582-020-P1-K1-E1.pep
RKTKSRGLSCFFFHVHTILFPFRANSKHREVYLFSIYSHLFPIYFKFHLNFTKLLHYYQVTIIKHLTKYTTPIYSVKLEKRKSKEQVCKKWTVLQ

SEQ ID NO: 104141 - protein, 59 aa, Gossypium hirsutum
  Clone ID: LIB3582-020-P1-K1-E11.pep
PTRPPTRPVFFFLRKAKKKNRESLTWKRYFWLSALHLHILNSLNLLLTILSFFIIYYSN

SEQ ID NO: 104142 - protein, 102 aa, Gossypium hirsutum
  Clone ID: LIB3582-020-P1-K1-F1.pep
APSESLDFFKCLSLPPSLISLAFYLTSFPAWFFFFLSSPFFCFMLPVRSSICGLVHDFAEFRRYSLDLGGISRRRESGRTTMSSSIILLSPSPSFASHVCLL

SEQ ID NO: 104143 - protein, 173 aa, Gossypium hirsutum
  Clone ID: LIB3582-020-P1-K1-F4.pep
MAWLLILVLVFAVSQATADEEPYIGVNIGTDLSIMPHPTQVVALLKAQQIRHIRLYDADRGMLVALANSGIRVMVSIPNEQLLGIGQSNSTAANWVSRNIVAHYPATNITAICVGSEVLTTLPNAARILVNAMKFVHSALVASNLDNQIKVSSPLASSIILDSFPPSQAFFNR

SEQ ID NO: 104144 - protein, 186 aa, Gossypium hirsutum
  Clone ID: LIB3582-020-P1-K1-F6.pep
NGIGELLEILGSIINGFALPMKEEHKLFLARALIPLHKPKPVATYHHQLSYCVTQFVEKDYKLADTVIRGLLKYWPVTNCQKEVLFLGELEEVLEATQSAEFQRCMVPLFRQIARCLNSPHFQVSERALFFWNNEHIVGLIAQNRHVVLPLIFEALEKNILGHWNQAVHGLTVNVRKMFVEVDAEL

SEQ ID NO: 104145 - protein, 173 aa, Gossypium hirsutum
  Clone ID: LIB3582-020-P1-K1-G11.pep
MDHTDAALHENCEEKQVELKKVVDNLEQQLTEMHEENEKLMGLYERAMQERDEFKRRFSSSGSPNRMEPREFECPEKLVEVDGGEDSLDKPHVQFDSKDLEGGTAPVCSLMQDAGESLELNMLGAIEVIPSVKDVHSNLQSEAGNYMEIDQDITAAKLSEDLNSARAILKQAL

SEQ ID NO: 104146 - protein, 102 aa, Gossypium hirsutum
  Clone ID: LIB3582-020-P1-K1-G6.pep
PTRPPSPNTTIEATITPDGQYVISGSGDGTLHAWNINMRNEVAAWNSHIGVAACLKWAPRRAMFVAASTVLTFWIPNNCSKPAAETGSTDAQAGLQFEQVGQ

SEQ ID NO: 104147 - protein, 74 aa, Gossypium hirsutum
  Clone ID: LIB3582-020-P1-K1-G8.pep
LNQQPKSSSKGNGGEQEKPRGRNDAKERKKQNVWRNHRGRNQRPELEALDLYSPSRSSIYHLPSPENPSAATLL

SEQ ID NO: 104148 - protein, 143 aa, Gossypium hirsutum
  unsure (1)..(143): unsure at all Xaa locations
  Clone ID: LIB3582-020-P1-K1-H12.pep
MDDYYTRSHVPAFGSWDWNNDLPFTQCFESARQAGLLRYSYSEDRDLYVAGDLYDNDVVTPAMIVVPRRRKKGRQSNDKEGKRQNWEINDVKESPSPTSLHRPTPKPVDEDLYKISPHLLYAKPRKKRGLSFFASCMVPTCVX

SEQ ID NO: 104149 - protein, 188 aa, Gossypium hirsutum
  unsure (1)..(188): unsure at all Xaa locations
  Clone ID: LIB3582-020-P1-K1-H2.pep
NHFLVFLKHLKLDPEAKFRVQKEILKFLSVQGLFSASLGNEVTSFELQEKFRWPKATTSTALCKMCIEQLQSLLANAQKVEEPRSLANGLEPNDLGSYFMRFFSTLRNIPSVSLFRTLSDDDKESVTKLLEMESKXYKEERNFRLSNDANKVRALRYLLILLLLQVLPPPWEFCDAASELTNMCKKVF

SEQ ID NO: 104150 - protein, 173 aa, Gossypium hirsutum
  Clone ID: LIB3582-020-P1-K1-H6.pep
RLRYRSADSSYAYDENTLPATKPGSGMVVAVKKLKPEGFQGHKEWLTEVDYLGQLHHPNLVKLIGYCSEGENRLLVYEFMPKGSLENHLFRRGPQPLSWVVRLKVAIGAARGLSFLHDLKSQVIYRDFKASNILLDGEFNAKLSDFGLAKAGPTGDRTHVSTQVMGTHGYAAP

SEQ ID NO: 104151 - protein, 149 aa, Gossypium hirsutum
  Clone ID: LIB3582-021-P1-K1-A12.pep
KYVSNRTHEFYSMWWRSASFILDRQQHQNRTVAPSPESFLLSSPPPMADSPLNPKSNISAYYQTRAAHHAVVTSDWLAQAQAAVGRHSDDGGSLGDDKGAAPIGGGGGGGEEEGSGKAFSVIDEFNSWRKQPALAEAVAAIRALAAVIR

SEQ ID NO: 104152 - protein, 166 aa, Gossypium hirsutum
  Clone ID: LIB3582-021-P1-K1-A4.pep
QPHQPPRYVSTNRSSEFLYLGTLVNTRVDAAKATISSNGGIKLGVSSPPNQKLGSPELNPLPPLPKVQTFQSGEQFLQSPSLGCFENTIEVEEDEFFSPRGSSHGKESPPSPPKQLPKPAPQEPAVRVESSSRREFNGDNYGSRSFNSRTASYPYSNSCSPSNSVL

SEQ ID NO: 104153 - protein, 68 aa, Gossypium hirsutum
  Clone ID: LIB3582-021-P1-K1-A7.pep
VYWCQCWTAIRICADRYVFNIDSITEDNIVHQNVASLMLSIITGRLFQFILSGLVFVTIVYSHHFLVS

SEQ ID NO: 104154 - protein, 63 aa, Gossypium hirsutum
  Clone ID: LIB3582-021-P1-K1-B6.pep
AVDNYRCRRLTSTPTYTIQQGVEMDGFEQNEGIILMAATNLPDILDPALTRPGRFDRHICVPN

SEQ ID NO: 104155 - protein, 134 aa, Gossypium hirsutum
  Clone ID: LIB3582-021-P1-K1-B7.pep
LLQSLVFKAKAHLGLSSSTGSTHLNPISRPNSSNNSQNPLPPLSPSIIPRNGLLEFSKKAPSWSPASSPKSSPFLSYENIRSGSLLVTSKTGDSGTDLIDENQMSDYFSFLNDSASSRNEDFMVHRRRFSRSDA

SEQ ID NO: 104156 - protein, 175 aa, Gossypium hirsutum
  Clone ID: LIB3582-021-P1-K1-B8.pep
APHTCGSKVKNVGISTFKGSGQNNESRGRTNNAFLSKNTIKVSYVPKDREETMIESSNVHNVPLAYASETSENHLGSPAIQKLFKKWIMILLSQSPHQVMDEVTGVGPPPRDTSETQIGTQSNGKSEILKMVWSHFWDMDVTIKLPILLFIPLYMAVSLIYGAEVSKELTPLWVF

SEQ ID NO: 104157 - protein, 165 aa, Gossypium hirsutum
  unsure (1)..(165): unsure at all Xaa locations
  Clone ID: LIB3582-021-P1-K1-B9.pep
MAEIKGEQIMARNGGPQGDGGEPVLPRASSSTRLRSRSDPFLVVCRCFSVITSLTAILCIAVNVLSAFRSFKNGADVFDGIFRCYADVIAFFVVLAETEWGFIIKFWKVLEYWAGRGMLQIFXAVMTRAFPDYTVKQQDLVLLQNIASYMLLACGVVYVFSGILS

SEQ ID NO: 104158 - protein, 155 aa, Gossypium hirsutum
  Clone ID: LIB3582-021-P1-K1-D11.pep
ADGREVFVGLIYPCLLGARMLGSTVFPWLLNASLRTEDCLTCAFVVQALLLSIIAYDYEEIGVLVTQFSLYHACIGLILPLLARLRTMYVPNELRGGMISLSLAPANAAILFILMQRGYYRTIENSTMIVFAAVGLFMAAGCMYVLKREAFKGDM

SEQ ID NO: 104159 - protein, 91 aa, Gossypium hirsutum
  unsure (1)..(91): unsure at all Xaa locations
  Clone ID: LIB3582-021-P1-K1-D12.pep
LFALRXALPLGXFXLFVXXXVXLXXGXRRVXXXFFXXLGVLXLGLXFWCXXXCXXXXLWVXVXXLXXLXLXXAAXXXLXFFLVLXXVVALV

SEQ ID NO: 104160 - protein, 57 aa, Gossypium hirsutum
  Clone ID: LIB3582-021-P1-K1-D2.pep
AKFHVHSKFSSISINAFTYHLPDQFLEPSYHTTIPHHHGAWKLENPNHGFPLPDAWA

SEQ ID NO: 104161 - protein, 113 aa, Gossypium hirsutum
  unsure (1)..(113): unsure at all Xaa locations
  Clone ID: LIB3582-021-P1-K1-E3.pep
MPVTFCCAFIDTLILLHRGMERSGCXAFDCRNLAETFKCQGNRAMQSKLYSDAIELYSLAVSLCDDHAVYYCNRAAAYTQICKYNEAIKDCLKSIEIDHSYCKAYSRLGSAYY

SEQ ID NO: 104162 - protein, 85 aa, Gossypium hirsutum
  Clone ID: LIB3582-021-P1-K1-F8.pep
GFKDPLSAATGPSPYTVVGVPKVPFSAVLAPLNPIRRKSVRILPKIKRMEEKRTKTTALHLPIRDGDIFGEPEGLAAQTPIVGMR

SEQ ID NO: 104163 - protein, 128 aa, Gossypium hirsutum
  Clone ID: LIB3582-021-P1-K1-H7.pep
MMMSRVPKPKPRRSTMSLCHFCKSKPAVLYCSADSARLCLFCDQQVHSANALSLKHVRSQICDGCKAKPASFLCSIDNLMLCHDCDWSSHSNNNSSSSSSSSCVSAMHERAPVEGFSGRPSVVELASL

SEQ ID NO: 104164 - protein, 69 aa, Gossypium hirsutum
  Clone ID: LIB3582-034-P1-K1-A10.pep
CMLRFLIYQLDLSDIESPSIVTTVKPMSTSARTAIKHVKASATKSRPTPVCSTIFENKTFPTASLVTIS

SEQ ID NO: 104165 - protein, 179 aa, Gossypium hirsutum
  Clone ID: LIB3582-034-P1-K1-A12.pep
EFMRQFAAEPALSQPQAHFDNILPRLAGEEEIQSTLLDTSPRDVLLPKPVEVVHDHASFELSQSPTSRLQLQEAPEDASVSDQFEQIPQICEEDFLEIDDLTSNVEKPVENGLQFNDWDGLGEFDLYHDAAMFLQDIGPIEQGIVPFSYTENMINQVSYPLEPQLQHQSNTNHMDQRLQ

SEQ ID NO: 104166 - protein, 132 aa, Gossypium hirsutum
  Clone ID: LIB3582-034-P1-K1-A2.pep
CSGIEIVEYITFADQMPSLRMKAKSSTGSLREKNGLRVCQKSSVICKRPCCHVRVSQQGAEFSSCIQNSHDDSSNVDVAPQGFETDGADVQQLILDEENSELQKQLSVFVDSTTVGRMETAHGCASNLETIF

SEQ ID NO: 104167 - protein, 180 aa, Gossypium hirsutum
  Clone ID: LIB3582-034-P1-K1-A7.pep
INLNRSTNALFLIHKLKFLLGKLASVNLEGLSHQQKLAFWINTYNSCMMNAILEHGVPELPETVVALMQKATIVVGGHLLNAITIEHFILRLPFHLKFTCPKAAKNNEVKARNIFGLEWSEPFVTFALACGSWSISAVRVYTAAHCQEELETAKRDYLQAAVGISRTNKLTIPKLLDWYL

SEQ ID NO: 104168 - protein, 184 aa, Gossypium hirsutum
  Clone ID: LIB3582-034-P1-K1-B2.pep
PTRPARFTWEKIEDLKMEHCYIAPDYALEARLFQKGSKEAEDKTRCWQLPWVPPPIEEPPSEEEIARKAAIKERQGQRLREMAEAKRSSRINELENQLHGLEFLLQQLAQVEEEEISSFLSKTDYVSKQEIESTLTKVSQSLRKAKGESKVEQAENEEKADSSTSDKYPLINVPDNMLTPEQLK

SEQ ID NO: 104169 - protein, 180 aa, Gossypium hirsutum
  unsure (1)..(180): unsure at all Xaa locations
  Clone ID: LIB3582-034-P1-K1-B7.pep
NSGTHQAQIHNPQFDPTSSHDDFLDQMLSTLPSCSWSDLKSPWDPPKSDETPPSNPDNNAGFHYDEILASKLRQHQINGGGGGTTAAMKMMMQQQMLLPGRPIAAAGGGGLTMPLHNDIVDGSSFKSPNQQGGEGSVQALYNGFGAGPLHGTNNQSPNQPQHXHHPQGGNMQTQSFGATA

SEQ ID NO: 104170 - protein, 183 aa, Gossypium hirsutum
  Clone ID: LIB3582-034-P1-K1-D1.pep
APTRPSSQAMDPETEFLSSKRQTGNEWELFKENVRPLKRGRNVDLLNHALKAHTNDQLKKSLLENRRRLIEAIDEYQGDDPLQPWLDCIKWVQEAFPPGGDFSGLVLIYEQCVRAFWHSDRYKDDLRYLKVWLEYAEHCSDAEVIYSFLDANDIGKTHSAYYIAYALHMESKSKMKAANDILN

SEQ ID NO: 104171 - protein, 174 aa, Gossypium hirsutum
  unsure (1)..(174): unsure at all Xaa locations
  Clone ID: LIB3582-034-P1-K1-D10.pep
LGLSYKSLSLSLPSSNEKFSFRMFTYLSLSSCNLREIPTFLKDSKFLQHLDLSSSKIQGPLPDCFWGLGEASLTYLNLSHNFLTSFQGFPWQRLSILXDIHSNLLQGSLPDAVLWSGYVLLSNNKLTGEIPFSICNNSDMIILDLSINRLNGKIPHCLGKLSYYXTVSDLWMNN

SEQ ID NO: 104172 - protein, 179 aa, Gossypium hirsutum
  unsure (1)..(179): unsure at all Xaa locations
  Clone ID: LIB3582-034-P1-K1-D11.pep
TIWYRAPELLLGAKHYTSAVDMWAVGCIFAELLTLKPLFQGAEAKSTPNPFQLDQLDKIFKILGHPTLEKWPTLASLPHWQSDVQHIQSHKYENAGLHSVVHLSPKSPAFDLLSRMLEYDPRKRITAAQALEHEYFRIEPLPGRNALVPSQPGEKIVNYPTRPVDQNTXFEGTTSIQQP

SEQ ID NO: 104173 - protein, 157 aa, Gossypium hirsutum
  Clone ID: LIB3582-034-P1-K1-D5.pep
MTEEGMVTNKQGIGSILGSDAETPAAASLRRTLSADMSSKKWLNQHGLSPLKKIASSQEFVSQERGNRVVHYFLKDSAGESIRAVIGTERSVRHMFYIVAEEFVKVYGAEHSIHAGFKWRSRREVVDWLTSMLSKQHLEGDRSKSPKHDTLLARSPD

SEQ ID NO: 104174 - protein, 128 aa, Gossypium hirsutum
  Clone ID: LIB3582-034-P1-K1-F12.pep
LSLFITFFLCVYVVSSFQPGREFFFFRKKKKEKKRKLTTAKSNKEERKGEKEGERDHPQIPWERERERERKERSEGIEEGFQYHRKRKRCLRALHPFILCNSNKGKKVKDRRVRGLAEGEQSSKAKDI

SEQ ID NO: 104175 - protein, 162 aa, Gossypium hirsutum
  Clone ID: LIB3582-034-P1-K1-F3.pep
MLQKDTLAGCNDSCCGSSEQQMACNARNLVFPFERRGLLGSSKNLPAVPATAVPSTEQIIALPTTRSSGSFPAVPKETGTKSEPDDESSETNLEPADQSSQADSKPVDQSSETSKGETTAEKFSGDLWKYFIIIPCILVFIAFVALAFMCRKRAAKAIGPWK

SEQ ID NO: 104176 - protein, 93 aa, Gossypium hirsutum
  Clone ID: LIB3582-034-P1-K1-F9.pep
FVHMVCVCHFLKLVSDVFRTDNEYRLSSCDIMCSESIVGLMQLENTLFVIDIVVSYLSIVILILLSFATEDNMGSFVSEHVLHIFLLFYSLEA

SEQ ID NO: 104177 - protein, 143 aa, Gossypium hirsutum
  Clone ID: LIB3582-034-P1-K1-G2.pep
FIEKLVISLSFPCQNYPPKNSSIWFTHPLNLYLILSILRNSPFQRESPSIITAGQLFSTPIRTALRQATASAANAETTLWWVSEQDMITSPSSFMTTTPDAERLFGPSNTPSKLILTNYRVSPYGPECATENPTLTKGELVKN

SEQ ID NO: 104178 - protein, 68 aa, Gossypium hirsutum
  Clone ID: LIB3582-034-P1-K1-G7.pep
EFAGSERHDAHAVSCHQYRGGLDLEDSTLPRPPCHGIGRLSCHLTSIQRSSHRQRRYCENPDWTHIRC

SEQ ID NO: 104179 - protein, 167 aa, Gossypium hirsutum
  unsure (1)..(167): unsure at all Xaa locations
  Clone ID: LIB3583-008-P1-K1-B11.pep
HASAHASDHCPWVGQCIGIRSDRFFFMFISTSTILCLYVFVCSWINVLEKEAGNDSNIWKAMSHDILSIILIVYCFIAVWFVGGLTVFHFYLICTNQTTYENFRYRYDKKENPYNKGTTGKSWXEMFLSKIPPSLNDFRSFVEESEHMVMGSMMPNFMKGHISSKEK

SEQ ID NO: 104180 - protein, 63 aa, Gossypium hirsutum
  Clone ID: LIB3583-008-P1-K1-B8.pep
LSKNILIIPNIFYYLKTNYLPLDLYFNSQIKVFKSVVDISLSFDTHFSLSFNMFCSAPGSMFN

SEQ ID NO: 104181 - protein, 93 aa, Gossypium hirsutum
  Clone ID: LIB3583-008-P1-K1-C12.pep
ESPSFFGIFLLHAHGILNSIDSPGATNFISIQLSTQVIFLFLLLDMFSHLLYTIFYFTLKFMKLSLRLLIYFLRPPSWKHILIFLFQVWTCIN

SEQ ID NO: 104182 - protein, 168 aa, Gossypium hirsutum
  unsure (1)..(168): unsure at all Xaa locations
  Clone ID: LIB3583-008-P1-K1-C4.pep
AHASGGQSIDVIKNPASKKDMSTXTENLASTDPSSDDRGTNNSNDASGLSLLHDDGQFEASSVYIPPDQTRMIQNINSLISELTLEKEELTQALSFEVSQSSKLKELNNELSRKLEAQTQRLELLTALSMASEHIPARQPESQIMHDNTPYADEGDEVVERVLGWIMK

SEQ ID NO: 104183 - protein, 149 aa, Gossypium hirsutum
  Clone ID: LIB3583-008-P1-K1-D1.pep
HASAHASGFVAKRSVANIPLVGLISKCLGCVYVQRESKSSDFKGVSGVVTDRVRKAHQDEYAPKILLFPEGTTTNGDYLISFKTGAFLARAPVVPVILKYPYQRFSPAWESVTGGNLILSDIGLAEKRIYLATLNGNNSMPSVLRQKDD

SEQ ID NO: 104184 - protein, 126 aa, Gossypium hirsutum
  unsure (1)..(126): unsure at all Xaa locations
  Clone ID: LIB3583-008-P1-K1-D12.pep
MVYCNNCSRNVSGERLDEGLLSCSFCGKVLEEYNFATEPQFVKDSAGQSKLSGNFVRSVQAISDSRRRTLDYASEQMSGMKNALXIDDYSDDVVHTARRFYEIGLERXFTRGRRSELVQAACXYLA

SEQ ID NO: 104185 - protein, 81 aa, Gossypium hirsutum
  Clone ID: LIB3583-008-P1-K1-D4.pep
RKKISILKHQHVVISSYKTVLCFCCSSWDNIYISGIICRTSIRPNEKTDSLRFKFQHLEMHEPFSFNYYISRPLNLVMFSV

SEQ ID NO: 104186 - protein, 49 aa, Gossypium hirsutum
  Clone ID: LIB3583-008-P1-K1-D6.pep
PRVRGRVGKDMGSLGYPAMSLNRLGKRWLKHLHKLILETADFYYWKYEL

SEQ ID NO: 104187 - protein, 167 aa, Gossypium hirsutum
  Clone ID: LIB3583-008-P1-K1-E11.pep
PRVRPRVRPRVRKLGKNMISVDGAETFSLIDKKSLKVENVVDFSWSPTDPIIALFVPELGGGNQPARVSLVQMPGKEELRQKNLFSISDCKMYWQSNGDYLAVKADRYTKTKKSTYTGFELFRIKERDIPIEVLELDNKNDKIIAFAWEPKGHRFAVIHGDNPRPDV

SEQ ID NO: 104188 - protein, 148 aa, Gossypium hirsutum
  unsure (1)..(148): unsure at all Xaa locations
  Clone ID: LIB3583-008-P1-K1-E3.pep
CLSGRCFLYIVILVLLLNSAQTLCHTKGIKLKRKHHHKQSNVTGTHVSEQPFMQWVKFVGSLNHSVFRTAKNKLFPSRTITVDKNPKYGDFTKIQDAIDSLPFINLVRVVIKVHAGVYTEKVNIPPLKAFITIEGAXADKTIVQWGDT

SEQ ID NO: 104189 - protein, 65 aa, Gossypium hirsutum
  Clone ID: LIB3583-008-P1-K1-E8.pep
SETSESSFSVSLSLFCHGNPNSFSFSLIKTSVCMHGSSHAIRQGHQTLDELCKWHTGSQACKICI

SEQ ID NO: 104190 - protein, 120 aa, Gossypium hirsutum
  Clone ID: LIB3583-008-P1-K1-F8.pep
WGKQLVAVGDKDSTVELGGGSERIITRKSDERIMSKTLGSREYSRYYRQSPRPSPANNMAITAALASRYRSMGLATVQSKEQIVRMKVMKAMNRSGVETMRTKVGMKNNVIQNLPKNVPY

SEQ ID NO: 104191 - protein, 168 aa, Gossypium hirsutum
  Clone ID: LIB3583-008-P1-K1-G1.pep
RFGFFQVINHGISEDLMNDTMNVFKEFFELPAEDKADLYSEEFNRPCKLYTSSANYDGDKVHLWRDSLRHPCHPLEECIKIWPQKPTRYREIVAAYSIEAKKLGSRILDLISEGLGLDLGYFGDKLSESVVISVNHYPPCPDPSLTLGIAKHCDPSLLTILLQGDVFG

SEQ ID NO: 104192 - protein, 166 aa, Gossypium hirsutum
  Clone ID: LIB3583-008-P1-K1-H10.pep
PTRPGFRTADANGLADAWEEIQRRPHFDRVYEGATPAPPIQPSLDGPPQRVLSSFLHSFVDSSRSGIPLHPTPLPLLGLSQGDKQCIRDRSSIMARHIFADKSEEFINAQVNALLSSLEIENDIHARGPMPGRFRELEDYWNESQGVLKPGAHAADGWVTEFSQNR

SEQ ID NO: 104193 - protein, 119 aa, Gossypium hirsutum
  Clone ID: LIB3583-008-P1-K1-H5.pep
LSIEMEINCTVVSPLWVKHHKKQGLCFISLQMFFKPFLLLFSSRSFFFSQIPLLDFLSLSISVSSSLSSSVLSLCLPRPLKSMSFYNGPRISSFVASLLAVSIRKPRRRLRKPRRVATG

SEQ ID NO: 104194 - protein, 167 aa, Gossypium hirsutum
  Clone ID: LIB3583-009-P1-K1-A9.pep
FDRPLLRIANSLDLSIKSHSSNRSTRKGSSLLKDVHIGIPGSGVSGGSISLVQGSYEYYHYLQDGYDDSGWGCAYRSLQTIVAWLRLQHYSSVDVPSHTEIQQSLVDIDDKDPAFIGSRKWIGAIELSFALDKLLGVSCKVINVRSGSELPEKCRELALHFETQGTP

SEQ ID NO: 104195 - protein, 165 aa, Gossypium hirsutum
  Clone ID: LIB3583-009-P1-K1-B12.pep
PRVRLAENAARLHIIDFGILYGFQWPCLIRRLSSRPGGPPKLRITGIDLPQPGFRPAERVEETGRRLANYAETFKVPFEFHAIAQKWDTIQIEDLGIDRDEVLVVNCMYRLRNLLDETVIVESPRNKVLNLIRKMNPDVFILGIVNGAYSAPFFITRFREALFHF

SEQ ID NO: 104196 - protein, 66 aa, Gossypium hirsutum
  Clone ID: LIB3583-009-P1-K1-B7.pep
NNKHNFLFLYSYWLAAAVVSLFLRRYGVCLARVRGLGWRTEARVWLLEGTEAGAAAAQAETTRVLP

SEQ ID NO: 104197 - protein, 76 aa, Gossypium hirsutum
  Clone ID: LIB3583-009-P1-K1-C10.pep
MASLISETSQKIFTPETLRAAAKQSERCLVVPVRLRRAIKKYLREQEDPYMRRKVLRLSQSFSNIKDVNLQLVAET

SEQ ID NO: 104198 - protein, 87 aa, Gossypium hirsutum
  Clone ID: LIB3583-009-P1-K1-C6.pep
NTCVRHISRYVDDWTFQRPKHIGKIQYSCIGNILVTKTSEFKLYMSMLLYLIVGADMGMFPTSIYANCVIRLEDLWRVIFSYSYSNV

SEQ ID NO: 104199 - protein, 124 aa, Gossypium hirsutum
  Clone ID: LIB3583-009-P1-K1-D7.pep
SSMILMLSLPLLSTITLTRSFMLYQITTVTAWHSGPTHMPVVQFGVSLSCTVRVSIINNVLIFFRFSMFYIESVSYVHLAVRLVHVGLAVYVVFDVRSCSVRFVVWWDQRSSVFFASVGLSLSL

SEQ ID NO: 104200 - protein, 65 aa, Gossypium hirsutum
  Clone ID: LIB3583-009-P1-K1-D8.pep
KQYLNIISLNYQRRLVNKTQRERKALTARKMLDAGPKARRPLIESQLSLSSVKKEMRTRGLDSLI

SEQ ID NO: 104201 - protein, 81 aa, Gossypium hirsutum
  Clone ID: LIB3583-009-P1-K1-F3.pep
LPHHLCNKITLVKNKNLEYIIQHHNRPVDGPVIAMYGFNHCLHLLLHLILHFGCCHHHQRIHHHHHHHHHPRHFLHFHHHY

SEQ ID NO: 104202 - protein, 144 aa, Gossypium hirsutum
  Clone ID: LIB3583-009-P1-K1-F5.pep
MPSSSADQCRRFNKGLNNGAPPPEQEQLLCPRCDSTNTKFCYYNNYNFSQPRYLCKSRRHYWTHGGTLRDIPVGGGTRKNAKRSRSNIGTTTTFSTTNAGPSDVTTTTGTTTSYNSFPLPATPVMLPISSNQGSFSIGGESKGS

SEQ ID NO: 104203 - protein, 72 aa, Gossypium hirsutum
  Clone ID: LIB3583-009-P1-K1-G10.pep
MVRNKSACVVLLFSLFLSFGLLWSAKDFPRRRSHHDPPKRYEDCPRRCQWDTRGPKEPQPCEERWKRPYWEE

SEQ ID NO: 104204 - protein, 64 aa, Gossypium hirsutum
  Clone ID: LIB3583-009-P1-K1-H1.pep
PKYQLHRMRACRPWYMEISTPHRPDTNIQITSILQKASMNHRTTAPTNIAYQRKLNSWNNISLT

SEQ ID NO: 104205 - protein, 72 aa, Gossypium hirsutum
  unsure (1)..(72): unsure at all Xaa locations
  Clone ID: LIB3583-009-P1-K1-H12.pep
ASAVVHSCSGVGICLGDVCQAASSAGWCASGVWLVSIRVCAQQPWSRARDRPLMERSLPPAWAXAWAYAWVA

SEQ ID NO: 104206 - protein, 53 aa, Gossypium hirsutum
  Clone ID: LIB3583-010-P1-K1-A6.pep
VLILVFLCCFSFDIIISSRFLVHRKIILTFFSFPCDRQLKQRRKIEYYDQMRK

SEQ ID NO: 104207 - protein, 109 aa, Gossypium hirsutum
  unsure (1)..(109): unsure at all Xaa locations
  Clone ID: LIB3583-010-P1-K1-A8.pep
XRXXSXLPYINSADFYTGVNFKVHRGPLNTQSPHVVARTPEMILPVPSATKTDGKNVRQMILDACDQMLAALVVSRDVHEVDMMTAHDKQDMMSALTPNKEGPPVCTKC

SEQ ID NO: 104208 - protein, 68 aa, Gossypium hirsutum
  Clone ID: LIB3583-010-P1-K1-B12.pep
AKETMSQSASFNQRAQKCKPKQKGTMISHPRPYLPCNVHQVVIKLPKASETIPSLQGASICRLQIPLI

SEQ ID NO: 104209 - protein, 99 aa, Gossypium hirsutum
  unsure (1)..(99): unsure at all Xaa locations
  Clone ID: LIB3583-010-P1-K1-B8.pep
MATQALVSSSVTXNVETARQILGAKRQIGPLRKGSYDVKAAVTALAKQGADRPLWIVYKQRLSYLDGNTSGDYGFDTWGLLDPEESEXFIEFKWLAYGE

SEQ ID NO: 104210 - protein, 167 aa, Gossypium hirsutum
  Clone ID: LIB3583-010-P1-K1-C3.pep
LKQCLEYTGQHSKLVESFISALRYRLLTAGASTNDILHQYVSTIKALRTIDPAGVFLEAVGEPIRDYLRGRKDTIKCIVTMLTDGSSGNPNGSGNSGDSLLEELNRDEENQENVAIDDDFNTDDKQAWIDAQRWEPDPVEADPLKGSRNRRKVDILGMIVGIIGSKG

SEQ ID NO: 104211 - protein, 62 aa, Gossypium hirsutum
  Clone ID: LIB3583-010-P1-K1-C9.pep
NFLLLHLAKKFIFLSIFFKLKNKLFNNHFISKVLFVPKVLLVPKVLLKSNAKLTLNTNKLAY

SEQ ID NO: 104212 - protein, 69 aa, Gossypium hirsutum
  Clone ID: LIB3583-010-P1-K1-D10.pep
PIFVHTGRDMDVTQPCVTHGQVVRSYVPCSFQRVTSQVLHDLAHGQAYERMRLFLRVHGHVFWPCDPSQ

SEQ ID NO: 104213 - protein, 176 aa, Gossypium hirsutum
  Clone ID: LIB3583-010-P1-K1-G10.pep
HASATSSDDNSHLKYGSVAETVAYDLVLEVAMKVQRFQQRNLHLYGSWKWLLTEFASYYGVSDVYTKLRYLSYVMDVATPTADCLTLVHELLMPVIMKGHSKSTLSHQENRILGETKDQIEQILSLVFENYKSLDESSLSGIMDVFKPATGLAAPALEPAVKLYSLLHDVLSPEAQ

SEQ ID NO: 104214 - protein, 71 aa, Gossypium hirsutum
  Clone ID: LIB3583-010-P1-K1-G12.pep
LSPAIVDSGVSYSSTGGIQVAIFYRIELLARIACWPIIAYFVASVILYSFDFIFYFFFYIFFVRKDERWFH

SEQ ID NO: 104215 - protein, 79 aa, Gossypium hirsutum
  Clone ID: LIB3583-010-P1-K1-H1.pep
ENYALGFSFKFFRSCSVCKKLRFSELFIFIFDLFQLFETRKMFSLLIWFVNPQSQDSQVFYEKLLDFFGFFSWFLIFGS

SEQ ID NO: 104216 - protein, 59 aa, Gossypium hirsutum
  Clone ID: LIB3583-010-P1-K1-H6.pep
LFYPVLEHQVNLSHVFHLNVIVKLGHSLLTQVWMEVLVIVELSLIELVVDECMQAVVKS

SEQ ID NO: 104217 - protein, 150 aa, Gossypium hirsutum
  Clone ID: LIB3583-010-P1-K1-H9.pep
TGLAISLLGAMVMPHNLFLHSALVLSRKIPRSVRGIKEACRFYMIESGFALMVAFLINISVISVSGAVCNSSNLNQEDRDSCEDLDLNKASFLLRNVLGSWSSKLFAVALLASGQSSTITGTYAGQYVMQVLCYCMPHSFAAHVSLSSHN

SEQ ID NO: 104218 - protein, 102 aa, Gossypium hirsutum
  Clone ID: LIB3583-011-P1-K1-A3.pep
TVRSEENGRDEESPHCEDSNLPKSLEHNLTDRTVASLAKASKEYLYFNNAATDNDGAISANNNWIPYTLLAGNNALDMSFSNYLNCQMRRFSSGQGTIWMYT

SEQ ID NO: 104219 - protein, 72 aa, Gossypium hirsutum
  Clone ID: LIB3583-011-P1-K1-A5.pep
SHCCIAFFVLTSDINRVGFALLFCDSVFFLCNTFEHHSSMSLNPYSFQRLVDEYCFTSMMLNSSLEACPPEL

SEQ ID NO: 104220 - protein, 73 aa, Gossypium hirsutum
  Clone ID: LIB3583-011-P1-K1-A7.pep
MVLESNCRLTLIAKFSVAANVYHRDLKPKNILANANRKLKDCDFWLARVASSDTPTTVFWTDYVATRWYRAPE

SEQ ID NO: 104221 - protein, 75 aa, Gossypium hirsutum
  Clone ID: LIB3583-011-P1-K1-A8.pep
MSIICRIKAYFHKLIRLLIKRITLSFGERARFVQKSTAFAKNMDRGFCHSSTPRACNVSEKPSMLQVDPCWKIIP

SEQ ID NO: 104222 - protein, 39 aa, Gossypium hirsutum
  Clone ID: LIB3583-011-P1-K1-A9.pep
HASAHACGERNLFFLFFGFIQIARVVDLRKGGYRWGRRI

SEQ ID NO: 104223 - protein, 54 aa, Gossypium hirsutum
  Clone ID: LIB3583-011-P1-K1-B12.pep
RYPRVFKKNKISIIITLKASIYLNRCISNWFRPSSCLKFQTQWLMQGSVTKESK

SEQ ID NO: 104224 - protein, 181 aa, Gossypium hirsutum
  Clone ID: LIB3583-011-P1-K1-C12.pep
ESKNASFESDKKVENVTIPKVDASVVEVENEGTQKEEKANGERKQRGERRRAKPNPKSSNLPKHSLGEQVAAGWPAWLSDACGEALNGWIPRRADTFEKIDKIGSGTYSNVYKAKDMVTGKIVALKKVRFDNLEPESVKFMAREILILRRLDHPNVVKLEGLVTSRMSCSLYLVFQYMEHD

SEQ ID NO: 104225 - protein, 74 aa, Gossypium hirsutum
  Clone ID: LIB3583-011-P1-K1-C7.pep
ATRIQMLLLELTFKNPLPTKSTLGLLEKSQTYHLFNLALLVMPPYTIILGRHHEHTASATNWMPFTTKYSDWTI

SEQ ID NO: 104226 - protein, 146 aa, Gossypium hirsutum
  unsure (1)..(146): unsure at all Xaa locations
  Clone ID: LIB3583-011-P1-K1-D5.pep
VFESLDLTGYDLNGDLLDVHAHESTFHRFDKFNLKYNPCGQSRLREIFLKRDNLIQXRFLAEVTKQVLSYLGTSKYQIGQCRVSIYGRKQSEWDHVASWLINNEIYSETTSLVYHIPRLVNAVKQMGIVKSLPNTLDNSVITLCEV

SEQ ID NO: 104227 - protein, 113 aa, Gossypium hirsutum
  unsure (1)..(113): unsure at all Xaa locations
  Clone ID: LIB3583-011-P1-K1-D7.pep
QDTQPMADQIVKAXSGTTACDSILILSGXILPGTGLALTIATPVXTIFIPNLVPALIETAFPSNGFXLTAPDSVVASNTGLSXIYRYVTLRHPPYAHQLYSARIKLPFKVREM

SEQ ID NO: 104228 - protein, 186 aa, Gossypium hirsutum
  Clone ID: LIB3583-011-P1-K1-E5.pep
DDSLNEEAGSLTLKLGGQDGHGNALSQRDTINWEGTSGKKTKLSGGSGNRADCQVDDCRADLSDAKDYHRRHKVCEMHSKASKTLVGNVMQRFCQQCSRVHVLQEFDDGKRSCRRRLAGHNKRRRKRNPEAVVNGNSLNDEQTSGYLVLSLLKILSNLHSNTSGQTTDQDVLSHLLRSLENHTREQ

SEQ ID NO: 104229 - protein, 176 aa, Gossypium hirsutum
  Clone ID: LIB3583-011-P1-K1-E9.pep
PTAAPELAELAATISGLNLSETRHADENSHMRSHLQADLGHQQNFPLNLPNGHSHSAQQQFIDKSSAEKLLFSPNYIDFAREKGIAPNINASKISSNGEVRIPKRTCSSADLYAKVHPSGFGSLEGSDVAHPNVNLLNTDSIGQLPGAYSDNQKLNSAVKNNLSAGLYLTGTGDRQ

SEQ ID NO: 104230 - protein, 71 aa, Gossypium hirsutum
  Clone ID: LIB3583-011-P1-K1-H4.pep
SDPTNKKSDYCCNCRSALFLLCLQLFIIMNGKRTIITTEIEEGSLMAFGHRDLQNVWKSGILFQESKYLIG

SEQ ID NO: 104231 - protein, 74 aa, Gossypium hirsutum
  Clone ID: LIB3583-011-P1-K1-H9.pep
QRDFLRYTATNYFIIKMPHPHHFQQEVSASSTVPTLCSLLRRLLKYQTSGEHHDLRRNITTFSMQPVTTSCLLS

SEQ ID NO: 104232 - protein, 56 aa, Gossypium hirsutum
  Clone ID: LIB3583-020-P1-K1-A7.pep
VTTPSIYKTINTYYIYITYVYKIAIRITCTHLNFSHFGLTTYIFILCINSAIVISN

SEQ ID NO: 104233 - protein, 165 aa, Gossypium hirsutum
  Clone ID: LIB3583-020-P1-K1-B11.pep
MKGTQHILEELRMVPDSEARPDSVAISTAGLENNDLVPSSLSQVDTSVLQQLPEELRADIFEALPAHRMPEGTALGPRTDNMHPPLGIKTATDNQPGSTDSGLSNNLWIGDPPLWVDKFKVSKLSTLNFFVDMYYKANSAESLSSILQCIIAESLHPLNARCDAW

SEQ ID NO: 104234 - protein, 82 aa, Gossypium hirsutum
  Clone ID: LIB3583-020-P1-K1-B3.pep
KNDWSNNKRVQTCRSRSSDITPKFNHVVNTPCKIIRQYSQPLEDPKKSIYQNPVGIIKTSKSASDFFSSNYQTDYQIRQKKH

SEQ ID NO: 104235 - protein, 179 aa, Gossypium hirsutum
  unsure (1)..(179): unsure at all Xaa locations
  Clone ID: LIB3583-020-P1-K1-C11.pep
GIIHSQGVIHRDLKPENVLIDQEFHMKIADFGIACEEAYCDLLADDPGTYRWMAPEMIKRKSYGRKVDVYSFGLMLWELVAGTIPYEDMNPIQAAFAVVNKNLRPVIPKDCPPAMRALIEQCWSLNPEKRPEFWQIVKVLEQFESSLNRDGTLDWVPNSNCQDHKKGLLHWVQKLSXTH

SEQ ID NO: 104236 - protein, 159 aa, Gossypium hirsutum
  unsure (1)..(159): unsure at all Xaa locations
  Clone ID: LIB3583-020-P1-K1-C2.pep
MASEHEFYPSRATPMQYFTDEDEGEEGGGEIEEESTDDEVCKEEEKENSSDWRSLYLMCGGRRGGGRRRKTWSLGQVFFDPKAKWVQEWNRVFLLVCATGLFVDPLFFYALSISNTCMCLFVDGWFAITVTALPCMTDALHVWNMCXQLKMIKRSSSSY

SEQ ID NO: 104237 - protein, 179 aa, Gossypium hirsutum
  Clone ID: LIB3583-020-P1-K1-C5.pep
RTRGRYEGGRDLDDTWAVYIGNNSQNMLKWQKIQTGTPSGRFGHTCVVIENYLVLFGGINERGDRHSDTWLGQVSLHENLGISLSWQLLDVGSTSPPPRGAHAACCISSRKMVIHGGIGLNGVRLDDTWIIELSENRCYGTWRKIVSHPSPPARSGHSLTCISETQTILFGGRGMGYEV

SEQ ID NO: 104238 - protein, 70 aa, Gossypium hirsutum
  unsure (1)..(70): unsure at all Xaa locations
  Clone ID: LIB3583-020-P1-K1-C7.pep
DNGQGVKDQWXXXQFXXQTTKNTISLCEQWTIYVVCNNKQSLQSCALLIISSQQIDMPASLTKIWHEKLS

SEQ ID NO: 104239 - protein, 174 aa, Gossypium hirsutum
  Clone ID: LIB3583-020-P1-K1-D5.pep
RTRGGDAVVSEPSVVDNPDVPSYQPYVHGRCEPPALIPLHMHEVSMEVDCWMDTAFVTASGAWRVHCIMAGRRCDCRVAVPMGEQGSILGVEVDISETEKSSYNSKWVTLADSKDMEKVAKSGDGFFLTPHIYTFRIPQVEGGSYFSIKVCWSQKLPYKDGQFCLTVPFSFPTY

SEQ ID NO: 104240 - protein, 67 aa, Gossypium hirsutum
  Clone ID: LIB3583-020-P1-K1-D8.pep
MTTSKRLAGRKVARFQRNITKRGSVESSAKKGNEYPVGPILLGFFVFVSVGSSLFQIIRTATSKSMA

SEQ ID NO: 104241 - protein, 171 aa, Gossypium hirsutum
  unsure (1)..(171): unsure at all Xaa locations
  Clone ID: LIB3583-020-P1-K1-E2.pep
SIGSHNTWTICPLPENRRAVGCKWLFKVKKKADGSVDRYKARLVAKGFSXHAGIDFRDTFSPVVRASTIRTVLALSVMQGWSLRQVDINNAFLNGELTEELYMEQPPGFEVFDASGQKLVCKLXKALYGLRQARRAWFQTLRQYLCEQLQFRASKADSSLFIRETDGQTTL

SEQ ID NO: 104242 - protein, 176 aa, Gossypium hirsutum
  unsure (1)..(176): unsure at all Xaa locations
  Clone ID: LIB3583-020-P1-K1-E5.pep
SLFDFVQELKIRPCPVVFASFSGGPKACMYKVLQMIEGLCEVQVNPDDLQLLKECFSGHVFDSSPMDFTSDLGARFVVHPTVLQMSHPPRIASWIANGIASGLDALFLSRFESHRAEYWQTLYGSIRMGAPYLILCSETDDLAPYQIICNXAQRLQQLGGDIKLVKVNGSPHVGHY

SEQ ID NO: 104243 - protein, 140 aa, Gossypium hirsutum
  Clone ID: LIB3583-020-P1-K1-G1.pep
MLIYGPGAAFRVKTSLYCVNSNNKKVSSKSSNNLTRFSRRCNLAGSFLAAAAVLVSAAMPAEVPQDSETLSNIPQTLSGECSSAKDCKKPRIQRPKSRKAETCTIKCVTTCLRGGDGSPGEGPFNIRRYLNSFQGSISFC

SEQ ID NO: 104244 - protein, 95 aa, Gossypium hirsutum
  Clone ID: LIB3583-020-P1-K1-G12.pep
KSILTQPSVFMVEAIACIQSIQMGLDLGLMDTEVKGDAPTVIKKLLHEREDKSKIVVLIRDGKCLGKQFRTCIFKYCPITVNDVTHLLATEGLKT

SEQ ID NO: 104245 - protein, 99 aa, Gossypium hirsutum
  unsure (1)..(99): unsure at all Xaa locations
  Clone ID: LIB3583-020-P1-K1-G6.pep
MKWISLLKDIKEKVGLTQAPAASAAATASSSSSSSSSSNRDARASYLFDYIPSPSRDKHELEMDFKRFWEEFRSSNSEKEKETAFXLTVDALCKIVKQH

SEQ ID NO: 104246 - protein, 91 aa, Gossypium hirsutum
  Clone ID: LIB3583-020-P1-K1-H3.pep
FAPHCHSVRFVQSCCSLSHSSTISLSLSGHVTGCLLWRLGMTPVGCWLGRSRKKACLNHRFVYLFFFSLFSFFFFFFFLEYFKRSTKHINI

SEQ ID NO: 104247 - protein, 117 aa, Gossypium hirsutum
  unsure (1)..(117): unsure at all Xaa locations
  Clone ID: LIB3583-020-P1-K1-H7.pep
RGWXWWRXVLLPGFFPXXVXGAFXASGGAWXAXFVSXFVSWGXXXVVALGLGAFFALXXAAGAFPXXXLGVVVXSVFVVAFXRLLWRPLXAFAXXXLRLFSPLFCPVSGARSLVGFG

SEQ ID NO: 104248 - protein, 137 aa, Gossypium hirsutum
  unsure (1)..(137): unsure at all Xaa locations
  Clone ID: LIB3583-020-P1-K1-H8.pep
HAAETXQXXQQXQXQSXGRGQDQHQKXRRXRQXDXXXXPQGGXHXSXXXGXEXXXTXXXXDXGNXXXQXDNXXRRNQXXXNPEEEQRQXRRXAQQXQGRXERGEEXEEEEGEGEEEEEEDNPSRRSRHQEEEEQGRE

SEQ ID NO: 104249 - protein, 133 aa, Gossypium hirsutum
  unsure (1)..(133): unsure at all Xaa locations
  Clone ID: LIB3583-023-P1-K1-A1.pep
QLMRLAQHMQGRSERGEESXXEDGECEDDEQKNNPCRRRQHQEEEDHMRLCSPXNNDNLFLNLSIQINSNFNHYDLMKIKRSLASKGIMILMTSRLLVVTPPHMNQEEHTERPHTQVYYRTRGGSNDYVLEGS

SEQ ID NO: 104250 - protein, 177 aa, Gossypium hirsutum
  Clone ID: LIB3583-023-P1-K1-A10.pep
KIILSGNGDALGIPLVMYQRSNKNTCMHQTARVRRGKCIKKGQILADGAATVGGELALGKNVLVAYMPWEGYNFEDAVLISERLVYEDIYTSFHIRKYEIQTHVTSQGPERITNEIPHLEAHLLRNLDKNGIVMLGSWVETGDILVGKLTPQVAKESSYAPEDRLLRAILGIQVSTS

SEQ ID NO: 104251 - protein, 67 aa, Gossypium hirsutum
  Clone ID: LIB3583-023-P1-K1-B3.pep
HKWYLNLSRIGKTHHFLTFLLSISLPPHQYPDSATFTQWLVIEMLFMMFVAFDWKYLDRDGCFRRHC

SEQ ID NO: 104252 - protein, 60 aa, Gossypium hirsutum
  Clone ID: LIB3583-023-P1-K1-C3.pep
HFTRLHGRKGPSRKTLSLYYPTSKPYSCITSSINSLVPCCKRSPDSASISRPLIANRDRY

SEQ ID NO: 104253 - protein, 100 aa, Gossypium hirsutum
  Clone ID: LIB3583-023-P1-K1-C4.pep
MTKMDPQAFIRLSIGSLGLRIPGSALRSSKTGIRAFSSPCSCEIRLRGFPVQTTSIPLVSSPEATPDIHSIASSFYLEDSDVKALLTPGCFYNPHAYLEI

SEQ ID NO: 104254 - protein, 178 aa, Gossypium hirsutum
  Clone ID: LIB3583-023-P1-K1-D11.pep
YELPSQSELIRHAFAGDDVEEEFEKDKQEILNEENPEPDKPVLLPGWGQWTHVQQKKGLPWWMLKEHEDAKRKREESLKKRKDAQLKHVIISEKVDKKAEKLQTKSLPYPFTSKELFEQSMRMPIGSESNPETAIRSLNRPEVVKKPGVIIKPIKFVEMHHHEKSEDYKRSGQKQKKN

SEQ ID NO: 104255 - protein, 167 aa, Gossypium hirsutum
  Clone ID: LIB3583-023-P1-K1-D4.pep
MNQSNCGERFQSPSEGASIVSQTGKSYLVDPLGLPPGFESGNSCVQQPRLHSEDMAQSSGVEQHEATPKNLLENSVRGRDGESSKTRKKYTPRPLTSSDRVLRSKSQEKSKASELSNNITDIGSSEQQKGRNRNKMIEKREVSDEYSRIRSHLRYLVNRINYERSLI

SEQ ID NO: 104256 - protein, 48 aa, Gossypium hirsutum
  Clone ID: LIB3583-023-P1-K1-D7.pep
PRVRMILGGFHSLIQSHSSPIDPQGMYPPFVITKLKGAPFYLYIFCLK

SEQ ID NO: 104257 - protein, 151 aa, Gossypium hirsutum
  Clone ID: LIB3583-023-P1-K1-D8.pep
RKLAELKANQEEEEKQRALDKLVNNKAAYRKYTLDDIEAATDYFASAHKIGEGGYGPVFKATLDHTAVAIKILRPDISQGQKQFQQEVTMLVNPVSQEQLNFIEFYGVPKHWVSLFLVKKFESSLIVKLKASCVYSGRTYLSFFLPFICIK

SEQ ID NO: 104258 - protein, 120 aa, Gossypium hirsutum
  Clone ID: LIB3583-023-P1-K1-E1.pep
MPLIFCGCRDARVMWDQKTGRSKGFGFVSFRNQQEAQSAINDFNGKWLGSRQIRCNCAAKGATSNNDKSGLDAKGVVEPTNGTSEEGQEKTNDDAPENNPQYTTVYVGNLAPEVSSFFPI

SEQ ID NO: 104259 - protein, 49 aa, Gossypium hirsutum
  Clone ID: LIB3583-023-P1-K1-G11.pep
SRHIRNLSINNIRSVTKDYSASCTTTVVAASDSVSLALAKLECMIIYRA

SEQ ID NO: 104260 - protein, 177 aa, Gossypium hirsutum
  unsure (1)..(177): unsure at all Xaa locations
  Clone ID: LIB3583-023-P1-K1-G5.pep
PTRPFFSFFFGFFLSNLLQLLLIGGQAKEALSEVEKFCNISNMPFPFRLRASLLEYFYSNDSVRLCNCFEEVLKRDPTCCHSLARLVSMHQKGCYRLSCMDRPVFALFGDYSLESLVEMIALHVEATFPESETWREFASCFLKLYEYEEDRLSVCLVGNEGEQKAXRSIYYRRIPSI

SEQ ID NO: 104261 - protein, 178 aa, Gossypium hirsutum
  unsure (1)..(178): unsure at all Xaa locations
  Clone ID: LIB3583-023-P1-K1-H11.pep
RPIRGSTSKLLLQYIRTIPCKISLTAAGCYICPAPGSKGFEALVCCSVYCPLPSNAESFRTFSNVEEKHCFSDELEQIIANGRSYSNNNLVTDSSQAQFLDMRSQSVLDEARRLDVISESTYRNIISLQREEVSHFKSKTDEVASGCESKQGTEHIAAFLSEPLLPGQTCYXMNRFII

SEQ ID NO: 104262 - protein, 175 aa, Gossypium hirsutum
  unsure (1)..(175): unsure at all Xaa locations
  Clone ID: LIB3583-023-P1-K1-H3.pep
MAKVNEAAAMEIDDPNSNISDQISPKFSINVLQLLKSSQMQHGLRHGDYTRYRRYCTARLRRLYKSLKFTHGRGKYTRKAISESTVTEVRFLHVVLYMAERAWSHAMEKRQLPDGPNARQRIYLIGRLRKAVKWADLFSHLCSVKGDSRTSLEAEAYASYMKGNXLFEQDRNWDT

SEQ ID NO: 104263 - protein, 176 aa, Gossypium hirsutum
  Clone ID: LIB3583-023-P1-K1-H8.pep
PRVRPRVRPRVRLDKPTVTYSRPKLVILHMNMALHVYEDIMRMTENLSEKYVIGNGASSTVYKCVLKNCKPVAIKRLYSQYPQCLKEFETELETVGGIKHRNLVCLQGYSLSPSGNLLFYDYMENGSLWDFLHVSTKKKKLSWDMRLRIALGAAQGLAYLHHDCSPRIIHRDVKSS

SEQ ID NO: 104264 - protein, 166 aa, Gossypium hirsutum
  Clone ID: LIB3583-037-P1-K1-A12.pep
HASGQVEHVRSERNLLAEVDSRCIVKLFYSFQDSDFLYLIMEYLPGGDIMTLLMREDILSEDVARFYVAESILAIHSIHQHNYIHRDIKPDNLILDKNGHLKLSDFGLCKPLDDKYSTILLEDENLTSQDTNEAEVQSGSARPPWLMPKEQLQQWKRNRRALAYST

SEQ ID NO: 104265 - protein, 154 aa, Gossypium hirsutum
  Clone ID: LIB3583-037-P1-K1-A6.pep
APTRPETGWPSKGDEDDVGATPDNAEKYNGNLIKLMSKKTGTPMRPNSDLNIYVFALFNENMKPGPTSERNYGLFKPDGTPAYSLGISSTSNVAGSNTTTGGTNGKPLSPIPTPPSTPTSSSTGYLSISPATGRYEFVGTVLLASLILTKMLLW

SEQ ID NO: 104266 - protein, 50 aa, Gossypium hirsutum
  Clone ID: LIB3583-037-P1-K1-A7.pep
GSDDALNISIGDSENQSQLLADAILYIIYYIYTTFKNSSFLWNNTKNQNY

SEQ ID NO: 104267 - protein, 97 aa, Gossypium hirsutum
  Clone ID: LIB3583-037-P1-K1-B7.pep
RSQVIPGPQNHALVKQARRPGLEWIASKTHANAGIIQIAGRVFIMRGLPADLLANCSRIFPEDATRLKHNIHAVWAFNLRQGSQQLIKQLIYAYVRT

SEQ ID NO: 104268 - protein, 48 aa, Gossypium hirsutum
  Clone ID: LIB3583-037-P1-K1-C12.pep
FLSLSQNIVMLTDSSEKEVNFQNISGTRWRQHLQWQPSTGTNLVSKGE

SEQ ID NO: 104269 - protein, 77 aa, Gossypium hirsutum
  unsure (1)..(77): unsure at all Xaa locations
  Clone ID: LIB3583-037-P1-K1-D10.pep
NHPPFFFFFLFLIFFLFFFFXELLIFLKFWLIRQFDNQYCNGPFLPGPVQKQKLINSPYKPNNKTKSKSMLQWPTMA

SEQ ID NO: 104270 - protein, 166 aa, Gossypium hirsutum
  unsure (1)..(166): unsure at all Xaa locations
  Clone ID: LIB3583-037-P1-K1-D8.pep
TVSYVVSINGKRGKVFKPSRGLQQGIPLSPFLYFICSEGLSSLIRIATREGLIKGVKANRRGPTISHLLVADDCILFREVTKDRIRILKEILKKYEISSGQCVNFNKSSXFFSSNTTEADKVRISTELGIRCSTNIQKYLGLPSMVGRKKEAFQNLKDRIKQNPRV

SEQ ID NO: 104271 - protein, 167 aa, Gossypium hirsutum
  Clone ID: LIB3583-037-P1-K1-E1.pep
TSIEKESTVGGLLCFYDCSKLELVQRVGISPSCSVVQCAWHPRLNQIFATSGDKSQGGTHVLYDPTLSERGALVCVARAPRKKSVDDFEAPLVIHNPHALPLFRDQPSRKRQREKILKDPVKSHKPELPITGPGHGGRVGSTKGSLLTQYLLKQGGMIKETWMEEDP

SEQ ID NO: 104272 - protein, 74 aa, Gossypium hirsutum
  Clone ID: LIB3583-037-P1-K1-E12.pep
SDFVNRSPAHGDLVSALLLPFFLKKKKLKILCYFTKSKIKFKENIHFSPNQSRDLPSTSMSTKQREEIHGIFAR

SEQ ID NO: 104273 - protein, 151 aa, Gossypium hirsutum
  Clone ID: LIB3583-037-P1-K1-E6.pep
MEDHLQQRYFCEHPRLLNHLSSLSKETCCSACGDPLFPTQTSKPPPPPPPPPPPPPPSPPPPPPPPPLPSFAPSPGGDAWDYFFPPPPPPLPSFNPPSSSSEKRDESYPLRSSDRSTFSCEECDQFHLHGRCARAPLEFSHHPLHWEHPFL

SEQ ID NO: 104274 - protein, 122 aa, Gossypium hirsutum
  Clone ID: LIB3583-037-P1-K1-E7.pep
MNEFGTGRSVPWNIYPSSDPTPSQPVVDKETPLKNLGTSMNAISFGFVATAILISMFVIMAIFEHLFQPNPAFSSPNQDGAVGSGAAEKLGNPQRVSTSYATDLSVVMPGEQHPTYIAQLAP

SEQ ID NO: 104275 - protein, 165 aa, Gossypium hirsutum
  unsure (1)..(165): unsure at all Xaa locations
  Clone ID: LIB3583-037-P1-K1-F4.pep
DYLSTSQCLMFLDDXEGVANILERLLRSENKEDALLAFQVAFDLVENEHQAFLLNVRDRLSAPKSLPSEPVQPGSTNPAPAENENSTASEDVQMTDGSSAITTNVHEADPKEVIYAERLMKVKGILSGETSIQLTLQFLYSHNKSDLLILKTIKQSVEMRNSVCH

SEQ ID NO: 104276 - protein, 45 aa, Gossypium hirsutum
  Clone ID: LIB3583-037-P1-K1-F5.pep
GKDNIYMLNYIYNSDWIFFTLNKNILVIFNFRYVFIFDMFHLKLF

SEQ ID NO: 104277 - protein, 105 aa, Gossypium hirsutum
  Clone ID: LIB3583-037-P1-K1-G3.pep
MSQEPWKPPEQGFCKINFDAAVDTKNYRSCSGIIIRDCNGDVMNSTTTINENVPSGFAAEALACLQGLEMGKNLGLKYVEIEGDSLAQRNNGLDITIAEVDRGRC

SEQ ID NO: 104278 - protein, 54 aa, Gossypium hirsutum
  Clone ID: LIB3583-037-P1-K1-G7.pep
PRVRGRVGEAKSERLVQPCLWNGIKRPCYLFARKFYPETVDKLRSVINLSTVSG

SEQ ID NO: 104279 - protein, 80 aa, Gossypium hirsutum
  Clone ID: LIB3583-037-P1-K1-H7.pep
HTFHGKLLHPHIYSRSRIKPCAGFKTTGGEPKQTNRVPTLPGIRARPHIATMLPPNLLLLQKQTTLTPSHMISPPLPEHA

SEQ ID NO: 104280 - protein, 88 aa, Gossypium hirsutum
  unsure (1)..(88): unsure at all Xaa locations
  Clone ID: LIB3583-037-P1-K1-H8.pep
HKPSHGKLQHPFILIRSTIQPGGGFNIRDREPQXYKLVPTLLSIRSKPHMPTMLPFKLSLRTKTNSTNSTTSDIDPTTSTRPTTSYTN

SEQ ID NO: 104281 - protein, 61 aa, Gossypium hirsutum
  Clone ID: LIB3583-037-P1-K1-H9.pep
QNYHGILSHPLILFRSRFQTGEGLYIPDHEPQLSKLVPDTIVHHVKTTYSYNATYQTVTAT

SEQ ID NO: 104282 - protein, 44 aa, Gossypium hirsutum
  Clone ID: LIB3583-038-P1-K1-A10.pep
ISRNLVWQITVYFMELATPHTEEVIKLVDKVGDFEWLIQKSPLS

SEQ ID NO: 104283 - protein, 90 aa, Gossypium hirsutum
  Clone ID: LIB3583-038-P1-K1-A8.pep
MIPLKRHTRYLLNLSSSERRKDIHFGNTAPDLDRNDLFLPIQISSLVIDDCEFNLHRYLFDPIGRASQIVPSSCKGVRCFICLSRRKLKR

SEQ ID NO: 104284 - protein, 89 aa, Gossypium hirsutum
  Clone ID: LIB3583-038-P1-K1-B1.pep
RLFFMRSVSLREFRASLQAQFTVFKLLFNSETVHRILDEVLQEVHSSHKDSLRSCRQSFRLPFPFICLTRVIPIAPCKCSGAMSSRVRL

SEQ ID NO: 104285 - protein, 182 aa, Gossypium hirsutum
  Clone ID: LIB3583-038-P1-K1-B10.pep
GTSWLTAVKRAFRSPTKDGHDKRSNRRKDEPDHQDEDEDKKREKRRWIFRKTTIQEPVIHQQKTPVKATGRNGAGAASDGATATAAEQRYDIPMAATEGAAVVQVARPTRPSNYAREHHLAAIVIQTTFRGYLARRALRALKGLVKLQALVRGHNVRKQAKMTLRCMQALVRVQARVLDQRV

SEQ ID NO: 104286 - protein, 180 aa, Gossypium hirsutum
  unsure (1)..(180): unsure at all Xaa locations
  Clone ID: LIB3583-038-P1-K1-B12.pep
HASGMVSFVTSLVFLVEPIQNHAXVGKAYNEFKQGEPAIERLFDLTKMKSKVIEKPDAIDLGHVKGEVKFCDVSFKYADNMPLVLDGLNLTVRAGETIALVGPSGGGKTTLVKLLLRLYEPSSGSILIDNHNINNIGLESLRRHVGLVSQDTMLLPGTVAENIGYRDLMSNIDMEKVELA

SEQ ID NO: 104287 - protein, 122 aa, Gossypium hirsutum
  Clone ID: LIB3583-038-P1-K1-B3.pep
MDTLFRLVSLQSSDQSLNSSRTSSSSRSSKQNHRYHHHHQEEEDNEECFNVFMDEEDFSSSSSRNYYPYYPYQQQNQPHTHSPSVGSSGRGGSGGVTAVTTPTNTTPTTTHAFESSDYSTAA

SEQ ID NO: 104288 - protein, 173 aa, Gossypium hirsutum
  unsure (1)..(173): unsure at all Xaa locations
  Clone ID: LIB3583-038-P1-K1-D11.pep
PTRPPTRPLWHKISKNEYRRCAVIESYDSIKHMMLEILNARSEEYSVFAVLFHEIDHSIEIEKFTKTFKMTSLPQIHLKLIQFVEILTKPKKDASQVVYILQALYEIAVRDFFKDQRTIEQLKEDGLAPRDPAAMAGLLFEKVVKXAYPNDEKFYRQIRRLHTILTFKDSMQN

SEQ ID NO: 104289 - protein, 72 aa, Gossypium hirsutum
  unsure (1)..(72): unsure at all Xaa locations
  Clone ID: LIB3583-038-P1-K1-D3.pep
LCQLALSPVHLVSHTRFLLQSSILFLPFLTAQSSFLCCPLSLCSSIQALIHLFSKWXVLLLCSRNTYLSLSF

SEQ ID NO: 104290 - protein, 93 aa, Gossypium hirsutum
  Clone ID: LIB3583-038-P1-K1-D7.pep
APKLIQKLYLALSSSITSRIVSQHLEWIIRTPDRKFTLHVTSSLQRNLKRRLCYMDPEDCCSIFSLIRAISVRSIRLCPNIPHPRHIVCSFSY

SEQ ID NO: 104291 - protein, 176 aa, Gossypium hirsutum
  Clone ID: LIB3583-038-P1-K1-E1.pep
EVIKFLVSQKLIDRNQLTDDGELQASKEVMDVLRISSLDEELFLKLLRDPNSLVKYVRNMPDSQLKDEESKPRAVSKFSDNIHVGLRQLNEPVNTKQRNFFRRKSKSQDGNNISEASSKIVILKPGPITSETGSSFGSSPESRYTIRHKEPNEKVGSHYFLSEIKRKWKHAMGREQ

SEQ ID NO: 104292 - protein, 70 aa, Gossypium hirsutum
  Clone ID: LIB3583-038-P1-K1-E2.pep
ALNSYLKVEIIPLIVLGIYHITTSIYQFFNNSQTLSRGKDKDKDKHFQHFKLLNMIILRVLAENQFGRVG

SEQ ID NO: 104293 - protein, 180 aa, Gossypium hirsutum
  unsure (1)..(180): unsure at all Xaa locations
  Clone ID: LIB3583-038-P1-K1-F10.pep
WGLSSELLRSEIDAANMXIAGGKYDEAINTLKGIVQQTDKDSENRALVFISMGKALCNQERFADSKRCLEIACGILDKKETVSPIEVAEAYSEISMQYETMNEFEIAISLLKRSLALLEQQPQEQHSEGSVSARIGWLLLLKGEVPQSIPYLESAAEILKESFGSKHFXVGYIYNNLGAA

SEQ ID NO: 104294 - protein, 93 aa, Gossypium hirsutum
  Clone ID: LIB3583-038-P1-K1-F11.pep
MALVATMQLSNELKVHDSHGCSRQNIGVVEKGRLHLVRTNLSSHAMRQDAWSLHLLGSACRPIRPVYSRSNVILCRSVLIPTGGNEVPILKSA

SEQ ID NO: 104295 - protein, 39 aa, Gossypium hirsutum
  Clone ID: LIB3583-038-P1-K1-F2.pep
MGSFSFLPLFTKKIAEKYTRILKNQFEISFKVILDRVLP

SEQ ID NO: 104296 - protein, 55 aa, Gossypium hirsutum
  Clone ID: LIB3583-038-P1-K1-F9.pep
RASLVKPPVLVFLKSKQIFFSFSFDYLACSSRLETNFTSNDQYPYYNEKEYKPTS

SEQ ID NO: 104297 - protein, 120 aa, Gossypium hirsutum
  Clone ID: LIB3583-038-P1-K1-G7.pep
QCIDELKCKALDRQRKQVASELRRKKRITIGNRDPELLLLWTPTLDSLRFNAIGYQSLGEPMKRHMRWQHGEEVNRRLLGGRNLDSGRTSHSEGSKGNCLRGQRGSHIGISESGERGDLI

SEQ ID NO: 104298 - protein, 73 aa, Gossypium hirsutum
  unsure (1)..(73): unsure at all Xaa locations
  Clone ID: LIB3583-039-P1-K1-A4.pep
GXKERAGNDKRKLKRQSNLREEDAASKKTVVNAHADNFSICCSCANSYQENKNQYHSQSILKKEQISIPYVFC

SEQ ID NO: 104299 - protein, 110 aa, Gossypium hirsutum
  Clone ID: LIB3583-039-P1-K1-A6.pep
MQHDDPRNGESTHRSSKKPKISSQFITESDIRDEFSHHHPRVARINNGSFGSCPGSVLAAQRHWQLQFLRQPDAFYFNSLRDGITASRKIIKDLINADHVDEVSLVDNAT

SEQ ID NO: 104300 - protein, 36 aa, Gossypium hirsutum
  Clone ID: LIB3583-039-P1-K1-C11.pep
IRPIHYGMKRVFNWLVCVVRNPTRIDTVVHRFQAPT

SEQ ID NO: 104301 - protein, 139 aa, Gossypium hirsutum
  Clone ID: LIB3583-039-P1-K1-C9.pep
MAAGEESSTSRSLQETPTWAVATVCFVFISLSIIIEYLIHRISNWLERRRKIALFDAVEKLKSVLMVLGFMSLILTVSRSFISKICIPNEVANSMLPCRKTLDSIRTTQDLGYDQIWSVHGLHERIDDENVSPEYCDSK

SEQ ID NO: 104302 - protein, 165 aa, Gossypium hirsutum
  Clone ID: LIB3583-039-P1-K1-D11.pep
RTRGQNFSCHPMANLVMGLTFCQLWYSNLTEEVKLRNSDQDYLPQQSDASGSNMGNEIVYSEGNYAAYTHDAVSSQCGSETSVMNDKRESLVAGSNQQRVVHVQNNVNLQRAAPLVQEIEPLGSNQNSSENEVGFYDDSGYTCDPSVFSALEGLESWLMPLKLPY

SEQ ID NO: 104303 - protein, 133 aa, Gossypium hirsutum
  Clone ID: LIB3583-039-P1-K1-D12.pep
MKYGERMCKELLGVCDSCFNVDFVKDNHCPSCHTTYIASKSALIFSEHVAQCAQKMQMGAELALDGSVFSPMRIRLIKLQLALLEVSIPFEALQSTWTDDYRNSWGMKLDSSTTAEELLQVCVPGAFIVLIIS

SEQ ID NO: 104304 - protein, 154 aa, Gossypium hirsutum
  unsure (1)..(154): unsure at all Xaa locations
  Clone ID: LIB3583-039-P1-K1-E12.pep
PRVRPRVRPRVRKGVLNQNFKIKDLGDLRYFLGIEILRSQEGILLNQLKYAQDLIXDTGLSKAKVALTPLEQNQKLTTAEFDKVVQQHQNDKLLEDKAIYQRLIGRLIYLTHTRPDITFAVTHLSRFMQSPKQSHMEAALRVVRYIQKEPGLGI

SEQ ID NO: 104305 - protein, 63 aa, Gossypium hirsutum
  Clone ID: LIB3583-039-P1-K1-E6.pep
RAPLDFLLHTTPILPQITANRRGPLMMIFGLRISSYTSSLTKQSEINDRFKSEIPYSFLPINS

SEQ ID NO: 104306 - protein, 84 aa, Gossypium hirsutum
  Clone ID: LIB3583-039-P1-K1-G1.pep
IICLLKLSNFCNDQLAYNAVTLIWIGWVVSTLLAAAAVGSFTGGALADKFGRTRTFQLDAIPLIIGAVLTAIAQNVQTMIIGRL

SEQ ID NO: 104307 - protein, 49 aa, Gossypium hirsutum
  Clone ID: LIB3583-039-P1-K1-G3.pep
YFQKKKKTLREPRYIKFKPNPYPQTQKERLGERERKKNKKGHEKELKER

SEQ ID NO: 104308 - protein, 103 aa, Gossypium hirsutum
  Clone ID: LIB3583-039-P1-K1-G6.pep
VFNDAIEALRISYKKMNPFCVPFATTNMGSAMLAMDLGWMGPNYSISTACATSNFCILNAANHIISGEADMMLCGGSDAAIIPIGLGGFVACRALSQRNNDPT

SEQ ID NO: 104309 - protein, 70 aa, Gossypium hirsutum
  Clone ID: LIB3583-040-P1-K1-B11.pep
RKKKKNLKKRGEFRRIQILGKIIMYIQHNRINMQSIQYKEKQTNRMTWTILLKTKRQNAPFHLIFANVSC

SEQ ID NO: 104310 - protein, 86 aa, Gossypium hirsutum
  unsure (1)..(86): unsure at all Xaa locations
  Clone ID: LIB3583-040-P1-K1-B6.pep
HASGSIGFLKQNRGISASMSSYGHQKLTDLGSIFGSSQNEPTGSKLGTAPXTGGGRRRSPSKGARSTSRTTFGKPTFEQPPLLDLL

SEQ ID NO: 104311 - protein, 132 aa, Gossypium hirsutum
  Clone ID: LIB3583-040-P1-K1-B9.pep
MNKWAFGSNNPKSFNAYPRGDFDIESGTIKRTRSRKSSIYPVRMVKSWANRLHYYYKLHPLFVFSISLAFGVTILIVLSLYEQHYRVLRNYMKLDDGFGSYYPFAKLKNLVMVAGHSVYTSSSCEKADKEDS

SEQ ID NO: 104312 - protein, 49 aa, Gossypium hirsutum
  Clone ID: LIB3583-040-P1-K1-C10.pep
MYQLKMPLTTNSRFLANLTLSSWAAENPMRTKQIPYFKKKEDFKSNRTK

SEQ ID NO: 104313 - protein, 144 aa, Gossypium hirsutum
  unsure (1)..(144): unsure at all Xaa locations
  Clone ID: LIB3583-040-P1-K1-D12.pep
DCGGATLTSETHYYGESFTVACGALPRDFPGRTSYDDTQHSYEDCPMPCLQQTLGHTEQDKCEYRCEPQMTEEHQRDXKHPHRRDXDCPQHWQHEQRGLRPHCEQSCTEQYERQQQPAPDKQCKECQQRRQWQEQMPGQTQQCV

SEQ ID NO: 104314 - protein, 50 aa, Gossypium hirsutum
  Clone ID: LIB3583-040-P1-K1-D2.pep
SKISIKLFWRYFLGTNQVNFCFDGGGNIRSCFIWNFRSEILNCPLLLPSY

SEQ ID NO: 104315 - protein, 153 aa, Gossypium hirsutum
  Clone ID: LIB3583-040-P1-K1-D6.pep
PRVRSSSILELYAWGHVEWPAFEWVHVDCFSGLLQLACLLPQKEDNLRNRITKFLLAVSECFGDSYLIHIMLPVFLIAIGDDADLTFFPPNIHSRIKGLRPRTAVAERLAILGVLPLLLAGVLGSPGKRQQLADYLRKLLLEGATKESRSTTH

SEQ ID NO: 104316 - protein, 57 aa, Gossypium hirsutum
  Clone ID: LIB3583-040-P1-K1-E10.pep
FYHVLQVSFGIRDGHALVQSLRVVSIMSDGSLRFESNQINFDPASADAAEALACFLA

SEQ ID NO: 104317 - protein, 153 aa, Gossypium hirsutum
  Clone ID: LIB3583-040-P1-K1-E2.pep
DFLIMLSKRLTEIDVSTILTVLQCCGMKIRADDPVAMKNFILCVQNRVNELKALSGDGEAKINGKRMEFMLETICDIKNNKKKPKEDTVQHTQIKKWLQKLRVEDILIRGLKWSKLLDPDKKGQWWLPGDIASATDNVEEVANSIDKEAVEAQ

SEQ ID NO: 104318 - protein, 147 aa, Gossypium hirsutum
  Clone ID: LIB3583-040-P1-K1-E7.pep
ADPKPSIFSGKLNVRSGRDSPQTSAPISLHPSRHYHLSQPPLLDSMQAEPSGQTQKSLLSQISKVEAASALGSALECSNPLAIETSELSSTSSLLAAVMKSGILSSTSFTGNFPTKISQDVGRTSQPPLPNCPPAVFTTSGLIDAAI

SEQ ID NO: 104319 - protein, 117 aa, Gossypium hirsutum
  Clone ID: LIB3583-040-P1-K1-E8.pep
RSRGQHGTWRGLQRLASRPSIGRGIGELRLSILDAIPSTFLLPHHCDTEKSYLGTYTGGTLTYLTHENREAYDIPPIGADTGRAGRTVHFASRDSRAQLFIAVLHRADKNPGQSQAL

SEQ ID NO: 104320 - protein, 85 aa, Gossypium hirsutum
  Clone ID: LIB3583-040-P1-K1-F12.pep
NFHDLKMAESQVHESQHCSQLDHRLVLYQEHDHCFHGGFHVFAPFGKVSFVWPLINCSSFSSHHISLSISLANQQKSVLGRTTNL

SEQ ID NO: 104321 - protein, 153 aa, Gossypium hirsutum
  Clone ID: LIB3583-040-P1-K1-F2.pep
MAGIEVGDELVIDGGMASFQVIEKVGNDLRCKCTDSGLFLPRAKFSFWRNGKLVARNSELPTLSKKDWADIEFGVSEGVDFIALSFVNDADPVRQLKNYLYMRSSRSTRVLAKVESLESLQKLKEIVEASDGIMVARGDLGVEIPYEQIPTVQ

SEQ ID NO: 104322 - protein, 154 aa, Gossypium hirsutum
  unsure (1)..(154): unsure at all Xaa locations
  Clone ID: LIB3583-040-P1-K1-F9.pep
RAAFGAKAVLNPMAFMFGGIVGQEVVKACSGXAHPLFQFFYFDSVESLPAEPLDPSDFKPLNSRYDAQISVFGSKLQKKLEDAKVFMVGSGALGCEFLKNLALMGVSCGSQGKLTITDDDVIEKSNLSRQFLFRDWNIGQAKSTVAASAAASIN

SEQ ID NO: 104323 - protein, 134 aa, Gossypium hirsutum
  Clone ID: LIB3583-040-P1-K1-G1.pep
MESAQEALLPGLPDDLALRCLARLSHGYHGALESVSNRWKDLVRSPEYANYKANQGWCGDWLFVVTERSNNQWIAYDREADRWHPLPKIPTDHDGLQHFGFSCVCVHNRLLVIGGSHAPRDTAYPRQTPVITNA

SEQ ID NO: 104324 - protein, 184 aa, Gossypium hirsutum
  unsure (1)..(184): unsure at all Xaa locations
  Clone ID: LIB3583-041-P1-K1-A1.pep
RSRAEIVYHRFWVNGCLSYFEKVPDGFYLIHGVNPYVWTMCTDLHEHGRIPTIDSLRSVDHVGGSPIEAISVDRRSDLGLKELQNRVHNISCSCITTKEVVDELAKLVCTRMXGSSATGEDDLLLYWRDCSDELKDCLGSVVVPIGSLSAGLCRHRAXLFKVLADTIDLPCRXAKGCXYCKRDD

SEQ ID NO: 104325 - protein, 98 aa, Gossypium hirsutum
  unsure (1)..(98): unsure at all Xaa locations
  Clone ID: LIB3583-041-P1-K1-C10.pep
RLGTVDQQHHTVRGVPLVDMIALPERVVHCSYNDGLEPVASMNLLDTGTSDYQLDHIPRRLQLAGNPEXEQTLLMMLXAQHMHGRSERGEESDEQDGD

SEQ ID NO: 104326 - protein, 80 aa, Gossypium hirsutum
  Clone ID: LIB3583-041-P1-K1-C12.pep
RVRPIPVAHASDTASKRPFLLIVAAWTKGRLHQHLSSSIQHCEPEVIAQPRRLITLLSNSDLQTQNTSLAAHCAIAVSCY

SEQ ID NO: 104327 - protein, 189 aa, Gossypium hirsutum
  unsure (1)..(189): unsure at all Xaa locations
  Clone ID: LIB3583-041-P1-K1-C3.pep
PSTHAYALDQPQMKKAINDSEQIAWLTGAPSEDGHPRSKYAQQQVKGSDYPHSTYKCTHPTXQVKKKVERSHEGHITEIIYKGAHNHPKPPPNRRSSIGSSNPLIDVQLELPEQTGLQNGTDGEPVWATAQKPMVAATHDWTHENIEMTSSATICPENGTAPAPNGTHIESGDAVDASSTFSNDEDEDD

SEQ ID NO: 104328 - protein, 100 aa, Gossypium hirsutum
  Clone ID: LIB3583-041-P1-K1-C8.pep
PTRPEKLPSFSKQLSLKTSCLSFLFHPKSLFPKLGFSVWSSDDFTAKTDLLNVPLYIISLKLVFLVLLLSFSTVVAFSNILLPFSFQLYLAQNKIKFLLI

SEQ ID NO: 104329 - protein, 106 aa, Gossypium hirsutum
  Clone ID: LIB3583-041-P1-K1-D2.pep
YLKYGLQKDGSVGEAGTSTLLDDSWFSSDSFLHCFCKDFFSLVQDASVVDGDLLSWTRKLKELLENSLGWEFQQKSAVDGIYFEENDEYAPVVEMLDEPSGSEPTS

SEQ ID NO: 104330 - protein, 43 aa, Gossypium hirsutum
  Clone ID: LIB3583-041-P1-K1-D7.pep
STVPADGMDRLYAITRGVGYPRTVTAGLRRLRSPSSALALPAA

SEQ ID NO: 104331 - protein, 124 aa, Gossypium hirsutum
  Clone ID: LIB3583-041-P1-K1-D9.pep
MLFVMLLGHSDDFAADEVMKVTLVFNRFGEGLIERMPRVRIGYAHVANNRYDEWKMYAIGGSANPTIFSEGNYFIAPDDPGSKEVTKRETNNWETWRWQSSKDVFINGAYFVPSGHGSSDLFTP

SEQ ID NO: 104332 - protein, 135 aa, Gossypium hirsutum
  Clone ID: LIB3583-041-P1-K1-E12.pep
RSASFITGNGLELFSELEPAKVAGHARKLSTESFGSDVSFLRGSDMSISGIPNSSVNGFVDLPGTSEVLYTRGSLGNSDPQSSGDTKIVLPLDQRHKMNRVLLTMQRKLATAKTDMEDLVARLNQEIAVKGYLTT

SEQ ID NO: 104333 - protein, 122 aa, Gossypium hirsutum
  unsure (1)..(122): unsure at all Xaa locations
  Clone ID: LIB3583-041-P1-K1-E5.pep
MIYVLRPRTRASDKQAFVWCQPSEVHVQKVTTARLLALCPLGPTLLANKSNCKGLLNAEDGAAELAVDQXIRLMNNIAGCCAPHSTPKLLINYASGDDHNSDDQLAVEAVLNTDDPHYQHMR

SEQ ID NO: 104334 - protein, 103 aa, Gossypium hirsutum
  Clone ID: LIB3583-041-P1-K1-F4.pep
CGLSVLFLTLVVHVDRPSPGQQIADFINNCIAELNGLEIRSSVKGKEIRKWSYPLSELVFILFIGAYELHHDQFFSMACGYGHHKGVYIFPAQRSSITSKTFS

SEQ ID NO: 104335 - protein, 63 aa, Gossypium hirsutum
  Clone ID: LIB3583-041-P1-K1-F9.pep
NQRGDVFGSTIVINSYIPTVFVTKALACLQTVRLGLDLGLYQVVIEGDAITVVKKPDAWADAW

SEQ ID NO: 104336 - protein, 91 aa, Gossypium hirsutum
  Clone ID: LIB3583-041-P1-K1-G10.pep
HFSAKFKEEYKIDVSQNARACLRLRAACEKLKKVLSANPEAPLNIECLMDEKDVRGFIKREEFEQISAPILQRVKAPLENALADAGLAGGD

SEQ ID NO: 104337 - protein, 129 aa, Gossypium hirsutum
  unsure (1)..(129): unsure at all Xaa locations
  Clone ID: LIB3584-027-P1-K1-A10.pep
SNLYVTAFSSFYLLASSPSVLALHLQYVPEEPNSSWQWLLRWTMSHFWVSPLKPVRSGKTKRSIQKLSNAKVVNGSSHSTLEHEKNKLXVRRVSGNSAADSVRKHAQNELERVKRSLRKLSDSSKEVSD

SEQ ID NO: 104338 - protein, 122 aa, Gossypium hirsutum
  unsure (1)..(122): unsure at all Xaa locations
  Clone ID: LIB3584-027-P1-K1-A5.pep
PVLAKAKRGYSFKNLRFHCLLGNMSDLESPFKALTQVHGVTSVLGQMQLXHQVPIIAAIKEAAHAKRLMPXRTGMHMDNNNAGEPAQSTFLIKAQIQHAVEAXGTLYTYVPANCFSCYFIST

SEQ ID NO: 104339 - protein, 87 aa, Gossypium hirsutum
  unsure (1)..(87): unsure at all Xaa locations
  Clone ID: LIB3584-027-P1-K1-A7.pep
XIGXSKLRFILQCELKTSLSMPYXXQTEXQAGTXVVKMKGSSXXNEETFEKSSYEGNLSMLQVVGFTKGKLGMQSSXLRGDARSGIR

SEQ ID NO: 104340 - protein, 137 aa, Gossypium hirsutum
  Clone ID: LIB3584-027-P1-K1-B3.pep
KRFFIQTCRQSQSTVLRIIETAGDNEALLFKALNVSDDLQKALSKYEELRKPSVVPHEPEPTMIPVAAEPDDSPLNTKHDALIRKPAGTLHGIYGGSSDAMMDDLDEMIFGKKGGDSSEGGQDSKNQQAAIDDLITL

SEQ ID NO: 104341 - protein, 105 aa, Gossypium hirsutum
  unsure (1)..(105): unsure at all Xaa locations
  Clone ID: LIB3584-027-P1-K1-B6.pep
PHGSLASVLFGSDECLDWKTRYKVATGIAEGLKYLHHDCPRRIIHRDITASNILLTEDYEAHISEFGLAKWLPENWHQHVVHPIEGTFGLXYLASEYFMHGIVDE

SEQ ID NO: 104342 - protein, 26 aa, Gossypium hirsutum
  Clone ID: LIB3584-027-P1-K1-B7.pep
RQMPLSLYGLIKKRPCPVYFQNNRYT

SEQ ID NO: 104343 - protein, 55 aa, Gossypium hirsutum
  Clone ID: LIB3584-027-P1-K1-C3.pep
LPIQVLFSFLHFKILSLNDDDDDDDDDVYIIMVVMIKILIVKKDSMGQILSFCSL

SEQ ID NO: 104344 - protein, 89 aa, Gossypium hirsutum
  unsure (1)..(89): unsure at all Xaa locations
  Clone ID: LIB3584-027-P1-K1-C4.pep
PPTLPPTVPPTLPPTRPPTRPAVWGSYGNTLSKDPTYTLPCSWTAAEPSTFLIRGKNDXEDRKKFKANGTLMQMVAADWLRSDKREDDL

SEQ ID NO: 104345 - protein, 99 aa, Gossypium hirsutum
  unsure (1)..(99): unsure at all Xaa locations
  Clone ID: LIB3584-027-P1-K1-C9.pep
MLPFAPTPSPNITYNALLKPLHDTNYSRKYMHFTYHFQYSYSHHIDSPLHPRSFARKYKLSCFFDRPLNNSXELKHKYNLSKSRNDTIFIIETYNSLLN

SEQ ID NO: 104346 - protein, 105 aa, Gossypium hirsutum
  unsure (1)..(105): unsure at all Xaa locations
  Clone ID: LIB3584-027-P1-K1-D5.pep
ANPSAKMNHFIKPNNLTQLALMGGAQNFLSEELHXLNQFFAHYYTDNITTITFEXLKSGRARLPSXLTLTNVHQLIXTAPVYGNDTIDYITSITATKHRHMLERH

SEQ ID NO: 104347 - protein, 51 aa, Gossypium hirsutum
  Clone ID: LIB3584-027-P1-K1-D9.pep
ILPHIRMPLHLTNAHVRYAVNRYMSSTMFAMFVGCKQHYYWMVRVQSENVL

SEQ ID NO: 104348 - protein, 52 aa, Gossypium hirsutum
  Clone ID: LIB3584-027-P1-K1-E11.pep
IDSKGRVWFVHESPQELEDHVSAFLNSPSLLRIRFAGAGVGFGHEMVLLDLH

SEQ ID NO: 104349 - protein, 149 aa, Gossypium hirsutum
  Clone ID: LIB3584-027-P1-K1-E12.pep
HLVRDGYLTGERSPGELRCDPSQFFMLFDINSDGFISFKEYIFFVTLLSIPESSFSVVFKMFDADNNGEIDKEEFKKVMALMRANNRQGAVQRDGLRFGLKVSGSVEDGGLVEYFFGKDGKARLHHDKFVQFMRKLQDEILRLEFDHYD

SEQ ID NO: 104350 - protein, 119 aa, Gossypium hirsutum
  unsure (1)..(119): unsure at all Xaa locations
  Clone ID: LIB3584-027-P1-K1-E4.pep
FLPLLLPSFSPGGLDKKIKIGINGFGRIGRLVARVALQRNNVXLFGDNEPCISTDYMTYMFKYDSVNGQWKHHDLRVKDYKSILFGEXPVSAHRVRNTCQIPSAQSFADFVVESTGVFT

SEQ ID NO: 104351 - protein, 104 aa, Gossypium hirsutum
  Clone ID: LIB3584-027-P1-K1-F10.pep
PTRPAMHPKHADRNLHTDRIVGGAVYVLYDDTLRKLNVYVYKLSSQHNTIILHTYLRFLSHMFAADDLTCTRVFYPFLFQTFIHTKLIKLIPLYMEIIDLTLTS

SEQ ID NO: 104352 - protein, 79 aa, Gossypium hirsutum
  unsure (1)..(79): unsure at all Xaa locations
  Clone ID: LIB3584-027-P1-K1-F4.pep
WYLLFAGVAIASGGEPDSHWFGFIMCYXATAARAFKSVLKGILLSLEREMXNSINYLLYMYAIAXFVIVPAVIIMDPNV

SEQ ID NO: 104353 - protein, 121 aa, Gossypium hirsutum
  unsure (1)..(121): unsure at all Xaa locations
  Clone ID: LIB3584-027-P1-K1-F9.pep
MQWVSTMVRASAFCMMRIDDDYSWQSVAIGKLIVFNVDLIPGIYTTTLYGSISAVQCVTSCNVLCVASMSQAACLAALDIIEDGISTLAKVQEAYKLENETKETIEEXLQLRSLYQLKDTL

SEQ ID NO: 104354 - protein, 181 aa, Gossypium hirsutum
  unsure (1)..(181): unsure at all Xaa locations
  Clone ID: LIB3584-027-P1-K1-H6.pep
HASGLISLGIWGPLPDKIHRLSSLEYLDLSSNFLFGSIPPKMFTLLKLQTFVLDDNVFNDTVPSWLNSLPNLTTLRMKRIRLKGPFPSSIEGIKTLVDLDLSSNEISGDLPDLSSLTNLKLLXDLRGNKLGSHLPTLPKGVLMVFLNNTXFMGEIPHNMPIKSAQHIDVDLIGNWKPSPEL

SEQ ID NO: 104355 - protein, 66 aa, Gossypium hirsutum
  unsure (1)..(66): unsure at all Xaa locations
  Clone ID: LIB3584-027-P1-K1-H9.pep
FSDNSYLYFYIXTIXXYTKIFYKXQHPKTIKLQNLYTPFQXRFNTITNSYYHNSHNIIYIYNLTYQ

SEQ ID NO: 104356 - protein, 58 aa, Gossypium hirsutum
  Clone ID: LIB3584-028-P1-K1-A10.pep
LEPEIASLNNYKIYFKHFTLEIEGSKQFIKKIKKKSHKIFIIKYLIKGRIRTRGRTRG

SEQ ID NO: 104357 - protein, 48 aa, Gossypium hirsutum
  Clone ID: LIB3584-028-P1-K1-A8.pep
RKSKKRNMFLEVDDGFFNSQVYMTGPWQVKQLTHDELEDLVHIDVMFS

SEQ ID NO: 104358 - protein, 90 aa, Gossypium hirsutum
  Clone ID: LIB3584-028-P1-K1-B9.pep
PRVRFERVKGEGKQHGVKEGSSARAEEDVKGSSVNLRANATSDRQTAEALTLDFSAIKPGIAADLKFGGSGSYPNLPWVSTTGTGPHGKT

SEQ ID NO: 104359 - protein, 73 aa, Gossypium hirsutum
  Clone ID: LIB3584-028-P1-K1-C5.pep
TSVCKVDYVITRSVLSWYIRTGSKITDPARRPFRLIHSPRYGVDPRAALVAQLIPRSIAPRPQVCLMVRHAPS

SEQ ID NO: 104360 - protein, 113 aa, Gossypium hirsutum
  Clone ID: LIB3584-028-P1-K1-C9.pep
LTPNEQQISPKKQSKQLSASGERKDQHLENGGSFNQYGNIKHSADVKHTFTDSSCQFFSSSDLQQHKQNIGPDSVSCVQTNIPYMHLNYSSPLDQLLGCRTFSNIKSENNGYP

SEQ ID NO: 104361 - protein, 80 aa, Gossypium hirsutum
  Clone ID: LIB3584-028-P1-K1-D2.pep
QSSTISCTIARGYAQASKMAWEKHLANHKATPLGCHIDAITIDFTVHFQAFMRTSTYATSQVHSQAHPAAYHLYSCLYTS

SEQ ID NO: 104362 - protein, 44 aa, Gossypium hirsutum
  Clone ID: LIB3584-028-P1-K1-D6.pep
SIRNGGCVKVSFKFRNDGFFHFFVKCMLGFLICLKFEDLNFYVF

SEQ ID NO: 104363 - protein, 148 aa, Gossypium hirsutum
  Clone ID: LIB3584-028-P1-K1-D9.pep
MADYHCVYKDVEGASTQWDDIQRKLGNLPPKPPAFKPPPFEPAPDPDSAPKDKSWVDAKTEDELDELEDDLDDDRFLEEYRKKKLAEMKEAAKVSKYGSVMQISRSDFVREVSQAPQDVWVVVFLYKEGSPKCGLLLRCLDELAIKYP

SEQ ID NO: 104364 - protein, 136 aa, Gossypium hirsutum
  Clone ID: LIB3584-028-P1-K1-E1.pep
MEENIKFMQCDKVENANSPSRTSPSTFSVGNLSQPVKVDSSSPNLQLKIGPTETVYTQAINSQPSAVSLVQAREADVEALSQLTRALDKKEAIVSELRRMNDEVLENQKGGDNHIKDSDSFKKQYAAVLLQLNEVN

SEQ ID NO: 104365 - protein, 55 aa, Gossypium hirsutum
  Clone ID: LIB3584-028-P1-K1-E10.pep
MEGPNASRATISSYRVVTMFITCLCILAVDFRIYPREYAKTETYVTSLVRYYQGR

SEQ ID NO: 104366 - protein, 68 aa, Gossypium hirsutum
  Clone ID: LIB3584-028-P1-K1-E3.pep
LFINYRCQTLFKNPLIHPQKVNIYHLQNYKLPPIEQEYSYHILTITIIQPLYNELSDFLQTCNNLSHT

SEQ ID NO: 104367 - protein, 105 aa, Gossypium hirsutum
  Clone ID: LIB3584-028-P1-K1-F2.pep
PNCKKLTKSINTAPRSSTLELQCFIENNEFRLKGEKNDDNTISLTLRIADRYGRARNIHFSFYLGSDTAISITEEMVEQLDLSNEDIIAIAELIDSMILELVSRT

SEQ ID NO: 104368 - protein, 98 aa, Gossypium hirsutum
  Clone ID: LIB3584-028-P1-K1-F3.pep
PRVRPRVRDNQIENLTEILEGPDLQTMFLSNNDLKVIMDDFFNSMPMLKVLDLSHNTNFQKLPVRIAKFVSLEHLNLSFTKIKKLPVELRALEKLKYF

SEQ ID NO: 104369 - protein, 145 aa, Gossypium hirsutum
  Clone ID: LIB3584-028-P1-K1-F5.pep
HASAHASENFRQSLPLSLHSAMARYYRDSYMDYLSLPPLHLCFFISILFFVLGFSWYLNYESVLEDFMNQLKFFLMLTTIVLLLLLHCFSGRVPSFIPKPEKDSLHKAGRSPRGGALVLGLLLYMISYQAYFQERWFPFGVLCLN

SEQ ID NO: 104370 - protein, 47 aa, Gossypium hirsutum
  Clone ID: LIB3584-028-P1-K1-H4.pep
PRVRFQLECRDNGVTFTLRCPLIELAEVSFDFMYLFGVSLVYSRKDI

SEQ ID NO: 104371 - protein, 55 aa, Gossypium hirsutum
  unsure (1)..(55): unsure at all Xaa locations
  Clone ID: LIB3584-029-P1-K1-A1.pep
MVLKADLHCSRCCMKVXNVLILFRYIPYQIYDETTNTETITVVCCNSDKLRDNIC

SEQ ID NO: 104372 - protein, 134 aa, Gossypium hirsutum
  Clone ID: LIB3584-029-P1-K1-A5.pep
DAWAKIKLLNLCIGIHAGIVFMSKVIRFISVYFMGTILLCYDHGRDWLMKFTPNNSIRNDSSPESPPNYKQDLSRFVLHLEGEDALVDLMMKENRDATDYWWRKAKKRQPKHLMELLELSRPCEGFKGLTEFGS

SEQ ID NO: 104373 - protein, 67 aa, Gossypium hirsutum
  Clone ID: LIB3584-029-P1-K1-B12.pep
QRACHLVNSLISWARTEARKSVRRRRSLETRFVCVHNANTVVPPPLIELGIGCHHHLVDILFFTCVQ

SEQ ID NO: 104374 - protein, 123 aa, Gossypium hirsutum
  Clone ID: LIB3584-029-P1-K1-B3.pep
WFSWFFREERGNYLRDGYRGTCPNLEMIVKHVVSIKFSQTFVTIPATLRLFFHDCFAEGCDASVMIASPNGDAEKDAQDNLFLAGDGFCTVINAKQAVEIQCPGIVSCADILALAARDVVVLA

SEQ ID NO: 104375 - protein, 71 aa, Gossypium hirsutum
  unsure (1)..(71): unsure at all Xaa locations
  Clone ID: LIB3584-029-P1-K1-B4.pep
RKEKSKNXRXRGYXLQEKRXXRRRQXXXHTRIXHGPKESXXXEEGRNTGXXXXXRXXNRSXGQRXXRGTXH

SEQ ID NO: 104376 - protein, 114 aa, Gossypium hirsutum
  unsure (1)..(114): unsure at all Xaa locations
  Clone ID: LIB3584-029-P1-K1-B5.pep
PNADICTTVNKGCSSGMKAAMLAWQTIELRINDAVDAGGMESMSDAPKALAQARNGSPMGHDTDIDGVLKDGXWDVYNDYGMGVCGEECADQDKITPEEQDAYAIPSYECGIAA

SEQ ID NO: 104377 - protein, 97 aa, Gossypium hirsutum
  unsure (1)..(97): unsure at all Xaa locations
  Clone ID: LIB3584-029-P1-K1-B8.pep
GLFVFPPAGVRGLCRPAFLFGVARVFPVPPLFXAGRXLGFGWPCXWVVSSLGCVRSLGSFCAAARFFFLVFFFPPPLLSCLCFFXGXGXXVRFGCVG

SEQ ID NO: 104378 - protein, 57 aa, Gossypium hirsutum
  Clone ID: LIB3584-029-P1-K1-B9.pep
PSTIFRTMKRGSTKKTPFNMESYQYGQADPNPKPPKSNNLITTKNKFRGSRLNNLGH

SEQ ID NO: 104379 - protein, 108 aa, Gossypium hirsutum
  unsure (1)..(108): unsure at all Xaa locations
  Clone ID: LIB3584-029-P1-K1-C1.pep
CLTAFGRNRXSGTPIATDFDYPATFFPVATLGLRLSAITSLRDQPSPFFXLAPYCQPAMSSQVRQNYSIEVEAFVNRLINMHVQALYIYLSVGFYFDRDQEALEGVSY

SEQ ID NO: 104380 - protein, 46 aa, Gossypium hirsutum
  Clone ID: LIB3584-029-P1-K1-C12.pep
NNFYYSLIVYNSKYLIVIVIIILLDVFSSILLGHICYTDYIFDLGI

SEQ ID NO: 104381 - protein, 178 aa, Gossypium hirsutum
  Clone ID: LIB3584-029-P1-K1-C5.pep
RFPWVLFLVAAVNMAVAAEPLRPGFYFETCPPAEFIVRDVMKKAMIREPRSLASVMRLQFHDCFVNGCDGSLLLDDTADMVGEKQALSNINSLRSFEVVDEIKEALEDACPSTVSCADILVLAARDAVALSGGPNWEVRLGRKDSLTASQQDSDNIMPSPRADATSLINLFAQFNLSV

SEQ ID NO: 104382 - protein, 64 aa, Gossypium hirsutum
  Clone ID: LIB3584-029-P1-K1-C8.pep
THLLAVSLYLSRSPCHEGFFLLISSAVITNPQIYLFNPNLLSCLYRISLSVSFEGASSHYGSLG

SEQ ID NO: 104383 - protein, 169 aa, Gossypium hirsutum
  Clone ID: LIB3584-029-P1-K1-D11.pep
GRQNRKLAVAYHKRRNGKSVFAIAQTTKGILSNSDDSCVGLMTANLLGSKYHIWNQNGRTMSSNKQSNPLLGVVRFMPTIATWTGSYRSMKAYIPKHQSMQLKNVAHMQHINGLPKDWEEKMDKIHKLFSRIPRYNKMLKQYELDFRERGRAAGLRIQSSVKNFQLTLQ

SEQ ID NO: 104384 - protein, 81 aa, Gossypium hirsutum
  Clone ID: LIB3584-029-P1-K1-D12.pep
DSTFCYGVLRTLVSCIASALCIYAFLTRIQFLYAYIDGLYLTRFEQELRCLFREVAGNFSLQFNDIYPINSPSHLVKGDMV

SEQ ID NO: 104385 - protein, 91 aa, Gossypium hirsutum
  unsure (1)..(91): unsure at all Xaa locations
  Clone ID: LIB3584-029-P1-K1-D3.pep
ARGTRLQINNAEMANLYVWMSTRNTYSAATITSMMADREQHXPMDATGGTQRVLGTDSEDTRCNPDVYRAHGLSAAQDEPSSSSVFQWPVG

SEQ ID NO: 104386 - protein, 166 aa, Gossypium hirsutum
  Clone ID: LIB3584-029-P1-K1-D5.pep
PRVRKNLLAMPVGIMQKENVDNVVQKFLAANFTIILFHYDGNVDGWWDLDWGDKAIHVVAHNQTKWWFAKRFLHPNVVSIYDYIFLWDEDLGVDHFDPKRYLQIVKTAGLEISQPALDPDSTEIHHKITIRSRTKKLHRRVYELRGKTKCSKASEGPPCSGFVEGM

SEQ ID NO: 104387 - protein, 60 aa, Gossypium hirsutum
  Clone ID: LIB3584-029-P1-K1-D8.pep
SMMYVLQAHIVVLWQGLSSPCRCGADVPLGGLTERLCAPSSSSACVRSLVACVGSACDYG

SEQ ID NO: 104388 - protein, 107 aa, Gossypium hirsutum
  Clone ID: LIB3584-029-P1-K1-E11.pep
SMSTSVPYCALYGIAFLLVQSLYLVSPIVSLGSGCLISCSCLIFFSLLEASLVACIRQQASLFSICGPCSFILGMLLLYNHSYLVPLFFICSPRIRMRGRTRGLSRE

SEQ ID NO: 104389 - protein, 44 aa, Gossypium hirsutum
  Clone ID: LIB3584-029-P1-K1-E12.pep
LRVLPTTAAIRCTVKRRVTFLIQAELFFIIAVGICLLDTTSFVD

SEQ ID NO: 104390 - protein, 121 aa, Gossypium hirsutum
  unsure (1)..(121): unsure at all Xaa locations
  Clone ID: LIB3584-029-P1-K1-E9.pep
PTRTPTRSQEAPADKVCWKDVLHWMXPLSSDNCXSWRRDDLNLSPYPFTDPVTGLATWHDRPPSPSTIVXGYNKEIVECPDYXPSNIRTRGFWFLPIEWQCSCQECGHISTLVITRHLNSR

SEQ ID NO: 104391 - protein, 83 aa, Gossypium hirsutum
  Clone ID: LIB3584-029-P1-K1-F1.pep
ETKLLGHVEAGLAVRHERLWAHERAADRAAEADVAEYGERWLGRLFNNQVHYANSADRAPQDLTAPMVTEVSSHVHTSNIHND

SEQ ID NO: 104392 - protein, 71 aa, Gossypium hirsutum
  Clone ID: LIB3584-029-P1-K1-F10.pep
TARDSQYKGLRTQINRIKKQKQYLLKVIFIFTFQFFLFYYFFFHFDTKLKKGKRRDLPDFPGLRRRCRNRL

SEQ ID NO: 104393 - protein, 137 aa, Gossypium hirsutum
  unsure (1)..(137): unsure at all Xaa locations
  Clone ID: LIB3584-029-P1-K1-F7.pep
GASLGAGLHDHAAHGYSGHNYINTWSDIFSGIDTTIIPWIDRTLFRAQYSPQPXYLTLXYETPSTTKISTHSTVTISTSFSIMKXPXHQLNALKAKSKENGNDFNYMTYHMYERHVWRSDCIAHRLKNDQGTKLIIG

SEQ ID NO: 104394 - protein, 66 aa, Gossypium hirsutum
  Clone ID: LIB3584-029-P1-K1-G10.pep
IILKLELMFLHDWFLLTCFFLRINYHIKSNLSNLLGFFGSVCSTIKESNLSPFEIAIYLLISMNKS

SEQ ID NO: 104395 - protein, 108 aa, Gossypium hirsutum
  unsure (1)..(108): unsure at all Xaa locations
  Clone ID: LIB3584-029-P1-K1-G7.pep
ASWRPEDPAITRSNAPGQYSRLTQGEACGVEALAKDQRVRSHSTGRSXEIAPNNTDKPQVIARTLQALTPKNNCLTNHIRIHLPHLFTSLNKVLLLDDDIVRQTYILP

SEQ ID NO: 104396 - protein, 138 aa, Gossypium hirsutum
  unsure (1)..(138): unsure at all Xaa locations
  Clone ID: LIB3584-029-P1-K1-H1.pep
MKVLFVAVAAVGSVLFMMEPGPYTADEKKTGLKDTDKAYFDLRIGDEDIGRLVSLLFGKTVPTTVDXMCGLDYXEKGYGYRNTKFHRAIKDFMIQGGDFTRRDGTGGTSIYGERFPDXNFTLKHYGPGXTSMANARKD

SEQ ID NO: 104397 - protein, 57 aa, Gossypium hirsutum
  unsure (1)..(57): unsure at all Xaa locations
  Clone ID: LIB3584-029-P1-K1-H10.pep
VVSLRSCFVSPCXFPSXXWCXPSCGLXFXSGFCSPPLGCXFRFVRXLXLXXFWGXGG

SEQ ID NO: 104398 - protein, 180 aa, Gossypium hirsutum
  Clone ID: LIB3584-029-P1-K1-H11.pep
PTRPPTRPPTRPPTRPSNTRAGEQDCKICFNEVKLDRGSYSCRKPGCNYVVHVNCVLEDEKLYEVIEEEKQCEEFYEKSMQSSIIHVIEVNEAGEATKIQHLSHQHCLVLTYKMEEEIDRKCDGCMLPISNIFYYCSECPFFLHKTCAELPRIKQHWFSSKQCHPQFQQLQTMGLLQSTL

SEQ ID NO: 104399 - protein, 159 aa, Gossypium hirsutum
  unsure (1)..(159): unsure at all Xaa locations
  Clone ID: LIB3584-029-P1-K1-H2.pep
AAFLWMGNQRSNAKVTFNNMHHNLPRRTISILPDSRNVDFNTDKVGTEAYRVQMVPTNVKIQSSETFNEDVHSVDDESAMTEKGLLEQLNITRDTSDYLSNTTRAQMSTFESFTCKGTPLTLKIQTTXGHGIHVFINGQHLRIRVLGLKQKRKVFFFPK

SEQ ID NO: 104400 - protein, 62 aa, Gossypium hirsutum
  Clone ID: LIB3584-029-P1-K1-H7.pep
LLTSPTGVSVQHASSSHQRAGTYFRPINDDYTHAYTSYSYALNAYVTYYLQTTYTYFITTIH

SEQ ID NO: 104401 - protein, 82 aa, Gossypium hirsutum
  unsure (1)..(82): unsure at all Xaa locations
  Clone ID: LIB3584-032-P1-K1-B3.pep
AHIRGHPEKIEEWTQAYEVLNDTEKREINEQFGEDTLKESMGIGVQGHDPFDIYEXYSVAYPVGAGGSSPGRRHIKGEDVIH

SEQ ID NO: 104402 - protein, 193 aa, Gossypium hirsutum
  Clone ID: LIB3584-032-P1-K1-B6.pep
QNSSGKATASIIPQLWQPNSGLNMTNDVPENSEDAVPCIALSKNDSYVMSACGGKVSLFNMMTFKVMTTFMPPPPASTFLAFHPQDNNIIAIGMEDSAIHIYNVRVDEVKTKLKGHQKRITGLAFSTSLNLLASSGADAQLFFWNMENWEKMKSVALQLPPGRTPQGATRVQFHSDQVRLLVCHETQLAVYDA

SEQ ID NO: 104403 - protein, 116 aa, Gossypium hirsutum
  Clone ID: LIB3584-032-P1-K1-B7.pep
RPSTRPKWGATLTPSEVADKVKHVFKYYSINRHKMTVLTPSYHAESYSPEDNRFDLRQFLYNARWPYQFRKMDELVQEMNGDRVAFKETGEDGGTAAGGGGMGVVAAASGNPKAGF

SEQ ID NO: 104404 - protein, 93 aa, Gossypium hirsutum
  Clone ID: LIB3584-032-P1-K1-C12.pep
HPSEHSSLLAAHCFNNSRFLLRFADTFVAFSQSYKIVHLMLAHCSTSQLRNFRAPYTALSNMSCSDINEPASQFILFSCPVCTCGRFARRTRG

SEQ ID NO: 104405 - protein, 130 aa, Gossypium hirsutum
  unsure (1)..(130): unsure at all Xaa locations
  Clone ID: LIB3584-032-P1-K1-C2.pep
ILKDSQCSFLFLVSLSKDTVLPFAENWQELIQKIKSKAMRPGVALKPGTLIEEVYPLVDSENPVEMVLVMTVEPGFGGQKFMPQMMDKXVRVLRKTYPSLDIEVNGVLGPSTIEMAASAGANRIAAGSSK

SEQ ID NO: 104406 - protein, 94 aa, Gossypium hirsutum
  Clone ID: LIB3584-032-P1-K1-C4.pep
MSRPWLLVFLVFVIVFTSQFEWKQQFDEEIEPTSTVSVKDQYVSKRQESVKEKIILSQERNIQKLNELVKSLQEQLLRCKAENEFTNHSTFALT

SEQ ID NO: 104407 - protein, 115 aa, Gossypium hirsutum
  Clone ID: LIB3584-032-P1-K1-D6.pep
PRLSPTRPRTRGQKHILASWQHRSGGVVHSPESPHCEKPDDQCDFDIDYADHGSLLGVVAADVFSLTYMNGSLIHLPLTFGCADDLKNPGPYDPPAAGVLGLGNGKASILSQLAR

SEQ ID NO: 104408 - protein, 172 aa, Gossypium hirsutum
  unsure (1)..(172): unsure at all Xaa locations
  Clone ID: LIB3584-032-P1-K1-E10.pep
GNLIKRVNLGKASGRQHGLLGDNFTLAVMVLLRDPFRNYEPIGTSMIALIQVERASLAIXPERDEQESPESEVAEEKDGAPFFLITEVHLAGLNTEPHKQHLWCSKAQXQSATRCLLASGIANSTKKTFSKLKAMVRYYPSMMRKMLPGNVLWSLTSNVHETGTDWNDLANF

SEQ ID NO: 104409 - protein, 42 aa, Gossypium hirsutum
  Clone ID: LIB3584-032-P1-K1-E4.pep
VMYRYIRDMRIDSRVLTRPTFKDKALVVCYFFILLFLFVRVG

SEQ ID NO: 104410 - protein, 47 aa, Gossypium hirsutum
  Clone ID: LIB3584-032-P1-K1-G12.pep
FIFYIITNLAFKVTTFSIFASTLYLKQMNTWAFIFSQINQKLIENMT

SEQ ID NO: 104411 - protein, 126 aa, Gossypium hirsutum
  Clone ID: LIB3584-032-P1-K1-H12.pep
MPFLMVLMPHACLFILSVLIVLFIYSSTFVVAAVFSLAYKLQPAIIFIDEVDSFLGQRRNTDHEAMTNMKTEFMALWDGFTTDQNARVMVLAATNRPSELDEAILRRLPQAFEIGVPDRMESAEIL

SEQ ID NO: 104412 - protein, 106 aa, Gossypium hirsutum
  unsure (1)..(106): unsure at all Xaa locations
  Clone ID: LIB3584-032-P1-K1-H2.pep
VRPRVXEKVYETIGLEVQNGYGLMGQHLALLVDNLIIMFTIHCFALCLKSFDMGLSVSFWLLFQRLISGLDITVSFRVSNLLISICLFFLFVSCVLLRDIFIYHSK

SEQ ID NO: 104413 - protein, 37 aa, Gossypium hirsutum
  Clone ID: LIB3584-032-P1-K1-H3.pep
FISSFLFFLPFFSFFTAELYLFLNSNGAITVQTLKKY

SEQ ID NO: 104414 - protein, 41 aa, Gossypium hirsutum
  unsure (1)..(41): unsure at all Xaa locations
  Clone ID: LIB3584-032-P1-K1-H6.pep
RATRNETTANCYKSEHXKKPENRTWEGRANYCYIAGYMLTE

SEQ ID NO: 104415 - protein, 77 aa, Gossypium hirsutum
  Clone ID: LIB3584-032-P1-K1-H7.pep
SYVRELNSLPRECSLSKTSALGICKPTFEPTIQVNYDVGIYGHLHAASAGLVVIYLEGLTLASISFWSEYLLDVVVD

SEQ ID NO: 104416 - protein, 45 aa, Gossypium hirsutum
  Clone ID: LIB3584-035-P1-K1-A1.pep
PTRPPTRPMGRTSMAAKAWLMVTEIRRLGFLFMFGLWACWALGFF

SEQ ID NO: 104417 - protein, 86 aa, Gossypium hirsutum
  Clone ID: LIB3584-035-P1-K1-A6.pep
LTRGKKSKSLSSLLGSARPWTPTGEPPEWFTAPPLWLVAVHKRRRGGVRRAWGTAVAACTELELSTGARAFMLIWIGLGFAPLYRN

SEQ ID NO: 104418 - protein, 53 aa, Gossypium hirsutum
  Clone ID: LIB3584-035-P1-K1-A8.pep
QNQMVECYIHVLSAFLKLRLHELPYNIILYSARNRGSIRVNDTEHLTYIHRTS

SEQ ID NO: 104419 - protein, 45 aa, Gossypium hirsutum
  Clone ID: LIB3584-035-P1-K1-B1.pep
RDSTSRRKRLQAWPYVTSLISFWVRCVSLIGPKGAPFKLREAATC

SEQ ID NO: 104420 - protein, 184 aa, Gossypium hirsutum
  unsure (1)..(184): unsure at all Xaa locations
  Clone ID: LIB3584-035-P1-K1-B6.pep
TNRQRRGKSSFDEDECSAEDSDSEGVHDFKSIARSGGNHRISSARSNTFISMGRNSEVRTSSRSVRKVSYVESEESEEIEEAKKKKTLKDEAEEEDGDSIEKVLWHQPKGMADDAIRNSRSTEPVLLSHLFDSEPDWNEMEFLIKWKGQSHLHCQWKSFFELQNLSGXKKVLNYTKKVMDDAKY

SEQ ID NO: 104421 - protein, 48 aa, Gossypium hirsutum
  Clone ID: LIB3584-035-P1-K1-C12.pep
IYLQHKTEAICTVHTAHLTVFSGKDHHYRKANTLLIITDVQKCNYVYQ

SEQ ID NO: 104422 - protein, 76 aa, Gossypium hirsutum
  unsure (1)..(76): unsure at all Xaa locations
  Clone ID: LIB3584-035-P1-K1-D1.pep
IILYLLIXREEKKKKKKTKKKKKKKKKKKKKKKKKKKKKKKKKKGGRFKGTKVNDRGKARKKFFNGAPKIKSRGGG

SEQ ID NO: 104423 - protein, 108 aa, Gossypium hirsutum
  Clone ID: LIB3584-035-P1-K1-D6.pep
IFGRESLRPAGAKTQHSPNEPWNTKPGASVVEGETGNTGNRDKSDKYQEQRIYPCHLSSSIYYGGQDVYLYPQGSQSSELDSVFKKDDGEDDSGSATRGNWWQGSLYY

SEQ ID NO: 104424 - protein, 175 aa, Gossypium hirsutum
  unsure (1)..(175): unsure at all Xaa locations
  Clone ID: LIB3584-035-P1-K1-E4.pep
PLYKEDCEFLNTMVTCLKNGRPDSLYQKWRWQPKACSLPKFEAKILLEKLRGKRLMFVGDSINFNQMLSMACMVQSVIPPEKRSLSYANYTIVFKMEDYNATMEFYWAPLLVESNVDPPTMRDGTVEPIVKLESISKHGDNWKNVDYLIFNTYXWWRYPTVKVLRGSFEDGVTDY

SEQ ID NO: 104425 - protein, 83 aa, Gossypium hirsutum
  unsure (1)..(83): unsure at all Xaa locations
  Clone ID: LIB3584-035-P1-K1-F6.pep
LVLDASNAPLYKIGFGQITLIVPKSGWPTAGHAPYTSVENAQSYNKILXNYVTQRDTPKRREYIMPTFLFDMYNEDLTQHTGA

SEQ ID NO: 104426 - protein, 92 aa, Gossypium hirsutum
  Clone ID: LIB3584-035-P1-K1-F8.pep
KAAMTVQINRQQVVGPLVVDYFGMKGCDDCSNYSGSSGYLAWDFIAGNVGSDYDDEISDGDWEDDQSMEDVEMRFYDGFDLDNAAFDWPLSP

SEQ ID NO: 104427 - protein, 58 aa, Gossypium hirsutum
  Clone ID: LIB3584-035-P1-K1-H4.pep
SLFFFSSLLINSQEKKLVMVQEKKEHENSANKKPAPTEKFAPRFDGLRFIETLVTAHR

SEQ ID NO: 104428 - protein, 83 aa, Gossypium hirsutum
  unsure (1)..(83): unsure at all Xaa locations
  Clone ID: LIB3584-035-P1-K1-H6.pep
QDMTATRXIIIRNHKGFTMGACTYPLGRTGNPTTAEVKVCLQAIIFGEKMGFRDLVVEGDALLSLLLERQMKWHTPLQLEGKI

SEQ ID NO: 104429 - protein, 87 aa, Gossypium hirsutum
  unsure (1)..(87): unsure at all Xaa locations
  Clone ID: LIB3493-001-P1-M1-A7.pep
MAFNHQHSSFVLDALYCSEENWEEDEDERCFNNGINDNDNDNQLNPFPILLEQDLFWEDDELSSLFXREERNQLYDSLQTNGNLAGG

SEQ ID NO: 104430 - protein, 57 aa, Gossypium hirsutum
  Clone ID: LIB3493-001-P1-M1-A8.pep
GTLLSPFYIINASDCPFNHSPITYKINCFTMAYTTMAIFFPSFGGKAMKFTFWRQSL

SEQ ID NO: 104431 - protein, 42 aa, Gossypium hirsutum
  Clone ID: LIB3493-001-P1-M1-A9.pep
ISAYDPPPARLFGLRVLELKELGVTEEEAVAVADGNISSTPG

SEQ ID NO: 104432 - protein, 105 aa, Gossypium hirsutum
  Clone ID: LIB3493-001-P1-M1-C11.pep
GKLYNRKSKGFIAEIPKKTNQNKHKIKHKFFVRICCCVRPFAGTARAGMRWLLAWGVRRHGRGRWRVRRLGLLRRKQKLLGFCLIFLFLGCGIFGSRFGLVISLG

SEQ ID NO: 104433 - protein, 114 aa, Gossypium hirsutum
  Clone ID: LIB3493-001-P1-M1-C3.pep
MACSEETSAQLELIRQHLFTDFASMETPPPFYQLSNSESSHVYSPTRLKQSSLSQRRPSINVMIPPTSFNIGPNPVPDSAAVAVESYEKSHYRGVRRRPWGEFAAEIRDPNKKG

SEQ ID NO: 104434 - protein, 47 aa, Gossypium hirsutum
  Clone ID: LIB3493-001-P1-M1-C5.pep
YRLMLFTTSNSENFQWSLMLVIMPSNTKPLKTRFEKKFLKCNKCFLA

SEQ ID NO: 104435 - protein, 132 aa, Gossypium hirsutum
  Clone ID: LIB3493-001-P1-M1-C8.pep
MLTSIQNSSASLDANFGMGHVMGLGFPGHQIVPSNLAAPGNGYAAAYPIFTQSKNMMGESSNVAENGNGTNCLLEPVVIQNKKRIIDGPPEVVVERRQRRMIKNRESATRSRARKQAYTVELELELNQQKQE

SEQ ID NO: 104436 - protein, 103 aa, Gossypium hirsutum
  Clone ID: LIB3493-001-P1-M1-D12.pep
CIVSVVSSGFECLSAIGSTTSPFQIVILELQMPELDGFEVATRICKFRSRSWPLIIAMTASIDQDIWERCLQIGMNGVIQKPVLLHEIAVELRKVLVQANRVL

SEQ ID NO: 104437 - protein, 92 aa, Gossypium hirsutum
  Clone ID: LIB3493-001-P1-M1-D7.pep
LKRQKRKQSNRESARRSRLRKQAECEELQARVENLANENCTLRGELQKLSDECEKLSSENSSIKEELMRICGPDALTKLEQENPSSVVEGNS

SEQ ID NO: 104438 - protein, 45 aa, Gossypium hirsutum
  unsure (1)..(45): unsure at all Xaa locations
  Clone ID: LIB3493-001-P1-M1-E4.pep
YTQMAIKTTIQSLXQSPLKIXYIXLYLRTHFQILADISILSPRLT

SEQ ID NO: 104439 - protein, 97 aa, Gossypium hirsutum
  Clone ID: LIB3493-001-P1-M1-F3.pep
HDLLFFINGFTDEFLPLFPRDLHLSQALANMFFFSFIFSTSIQDKPRFCFVIFWLLLGGCLAIYICRYDLVDNHHKAWKVSSIIYIYTHTYNNAGRF

SEQ ID NO: 104440 - protein, 129 aa, Gossypium hirsutum
  Clone ID: LIB3493-001-P1-M1-F8.pep
DSVLFIWNDKNQLLLGIRRANRPQTVMPSSVLSSDSMHLGLLAAAAHAAATNSRFTIFYNPRASPSEFGITLSKYVKAVYHTRVSVGMRFRMLFETEESSVRRYMGTITGISDLDPVRWPNSHWRSVKG

SEQ ID NO: 104441 - protein, 135 aa, Gossypium hirsutum
  Clone ID: LIB3493-001-P1-M1-G1.pep
DYSTDDNDPRFDGKEQTETNLAFMYNRMVSGAKKTELFMGCTYKAGDKNCDSPGTIESAPHNTLHTWIGSGLNPGREDMGKFYSAAKDPVFYAHHSNIDRLWEVWRDINDRKLDIDDSDWLNSFFLFYDENLNLV

SEQ ID NO: 104442 - protein, 42 aa, Gossypium hirsutum
  Clone ID: LIB3493-001-P1-M1-G2.pep
LLTKRKGPLAHNLELVVPQTNQRISKIIYINLISISCDPTKY

SEQ ID NO: 104443 - protein, 127 aa, Gossypium hirsutum
  unsure (1)..(127): unsure at all Xaa locations
  Clone ID: LIB3493-001-P1-M1-H7.pep
PSQLHEHEPQQYINSGKRQVHYTPIFRFLDKAXVKDGNSSKPPCTVTQVEGTKLVLGMLLIWLVTLIPSTIWAQMNTLFVKQGTTMDRSLSSSFQIPAASLGSFVTFSMLLSVPMYDRYFVPXMRRK

SEQ ID NO: 104444 - protein, 138 aa, Gossypium hirsutum
  Clone ID: LIB3493-002-P1-M1-A3.pep
RTRGLPPAMQQKIFEPAPPPVKEGGPPGRKIVVSTNIAETSLTIDGIVYVIDPGFSKQKVYNPRVRVESLLVSPISKASAHQRSGRAGRTQPGKCFRLYTEKSFNNDLQPQTYPEILRSNLANTVLILKKLGIDDLVH

SEQ ID NO: 104445 - protein, 137 aa, Gossypium hirsutum
  Clone ID: LIB3493-002-P1-M1-A5.pep
HASAKLRGASQIIGVDINPEKYEKAKCFGVTDFLNPNEYNEPIQQVIKRISGGGADYSFECIGNTGMVTTALQSCCDGWGLTVTLGVPKTNPEIASHYSAFLSGKTLKGSLFGGWKPKSDLPSLVNKYMNREIQVDE

SEQ ID NO: 104446 - protein, 67 aa, Gossypium hirsutum
  Clone ID: LIB3493-002-P1-M1-A7.pep
CRLSGEGNILLQSNHQNLIIIITPNMFSFYAQIKKSYIGDFIVITSMLRWGCCMYRQQESLFVRICA

SEQ ID NO: 104447 - protein, 101 aa, Gossypium hirsutum
  Clone ID: LIB3493-002-P1-M1-B11.pep
MKMPVALLVLLALCNAIKVNGEGNYLQCDHNPTSQPRPHSVSILEFGAVGNGKTLNTIAFQNAIFYLKSFADKGGAQLYVPPGRWLTGSFNLTSHLTLFLE

SEQ ID NO: 104448 - protein, 56 aa, Gossypium hirsutum
  unsure (1)..(56): unsure at all Xaa locations
  Clone ID: LIB3493-002-P1-M1-B6.pep
DSNAEETGGRYTSRIHLCEQVYMTDHSMAEMKYGVLKVDVXKIKEEESNDEINVQI

SEQ ID NO: 104449 - protein, 136 aa, Gossypium hirsutum
  unsure (1)..(136): unsure at all Xaa locations
  Clone ID: LIB3493-002-P1-M1-C11.pep
LCRCIFFRDVLFCASFDLGNIKIGINGFGRIGRLGARVALHSADVXELIAGDDPFITTDDMTYVYKYDSVHSQSEHRELTERDSRTLMFVEKSVTDIGMRYLDKMPRTETGTEYVEXITAVFTDKDKAAAPLEGVA

SEQ ID NO: 104450 - protein, 139 aa, Gossypium hirsutum
  Clone ID: LIB3493-002-P1-M1-C3.pep
DEGFGSRISADSFLVIMEDGIQTFMKFLKADKEKPYQIIKALLGRKRKGSLDPTLVRLVKKVNAKKKMKLKDLGRAHKCLRKGKNKVEKMEILMGLIDLKVVSRVLRMRDLSEQQLHWCEEKMNKLRILEGGLQRDSSP

SEQ ID NO: 104451 - protein, 104 aa, Gossypium hirsutum
  Clone ID: LIB3493-002-P1-M1-C6.pep
MSCCWQTRLMNMPISYNLLQMTPIIGERYRCKDCVEKIGFDLCESCYKAPAKIPGRFNQQHKPEHQLEIIQPLSLSDFISRLTSEQSDDDISDAPGHTDDASHM

SEQ ID NO: 104452 - protein, 120 aa, Gossypium hirsutum
  Clone ID: LIB3493-002-P1-M1-C7.pep
MACPQSFNLSIIKTSTTLKIFSNTSNQNSVTGSYLMNKCGFTPKFASFASKYGHFETTERADSLVAFLENHGFSKTQILNLIKRKPRLLIYDTEKTLLPKLEVFYSIWFSRAELTKILTS

SEQ ID NO: 104453 - protein, 137 aa, Gossypium hirsutum
  Clone ID: LIB3493-002-P1-M1-D4.pep
QIERFMVDLKRLEVQARDGPSDPNALAKWRILNRLHDRNETMYYKVLIANIEEYAPIVYTPTVGLVCQNYSGLFRRPRGMYFSAEDRGEMMSMVYNWPADQVDMIVVTDGSRILGLGDLGVQGIGIAIGKLDLYVAA

SEQ ID NO: 104454 - protein, 86 aa, Gossypium hirsutum
  Clone ID: LIB3493-002-P1-M1-D9.pep
ARALVLNSNSASVASSSNTSFSCLIIECIISFLAKRYIVLPVRRIAMSIGCFMLNFSIINLNYTSSTSFFSILFQWCIHVYFLQTY

SEQ ID NO: 104455 - protein, 118 aa, Gossypium hirsutum
  Clone ID: LIB3493-002-P1-M1-E3.pep
QFIIQKVLQLRRRSSKFRLVFFFFYTEDFPALFIKCRLFSLMASPVTDSAGLSPCIETVSWNADMVGTLPMPEAEAPMSSSVLNNCNIPKPPPLPSKIVTRNKHPKWPPESSFAPKET

SEQ ID NO: 104456 - protein, 136 aa, Gossypium hirsutum
  Clone ID: LIB3493-002-P1-M1-E9.pep
GRVGENPNSMALHSLSSILPFQNPIFSSLSSPLSPYHRQIRHLRPMVPLAISRRFRPRRKHTQKRSGTSMFLPLSSRGNESLLDSRNSSGNGDSIAMEQESSTSMSSIASSRKKDRYTGNARRFRIFGVDFSPDSV

SEQ ID NO: 104457 - protein, 137 aa, Gossypium hirsutum
  Clone ID: LIB3493-002-P1-M1-F5.pep
GILLCAKTKVAKTRLAAYFADGTSRVGATSNRKAERSGTRKISKIYRALVTGILVDDKVIINQPIGIVRYPGVAKGLYVASPSGKPALSKVEVLERDEKQNCTLVQVEIESGRPHQIRIHLSFIGHPLLVIHCILLG

SEQ ID NO: 104458 - protein, 118 aa, Gossypium hirsutum
  Clone ID: LIB3493-002-P1-M1-F7.pep
ARSSCKLALKELKQWMMPQKVETSLATYPSSAEIVAEPLGVVLVISTWNFPFSLSLDPVIGAIAAGNAVVLKPSEIASATSSLLSRLVGEYMDKSAIIVVEGAVAETSALLEQKWDKI

SEQ ID NO: 104459 - protein, 65 aa, Gossypium hirsutum
  Clone ID: LIB3493-002-P1-M1-F9.pep
PPIFILPRRGPSASPIRAEEDSPPHYFFSRRSRIYSRAELSVSTKRTCGRACGSPGESGRGTRGG

SEQ ID NO: 104460 - protein, 136 aa, Gossypium hirsutum
  Clone ID: LIB3493-002-P1-M1-G1.pep
NAGNVLVIEDNEPAAKWLALINHALNKPDYDLTHPSPDASQSSKHFNTLLKDHFFYKPSLKVLSRNFRAESSLLKTCNCPVESTHGEKRGQKKLRDLASKLDLGPLPARRDGAVDELVDLSGMPPNFSSGQMGYRL

SEQ ID NO: 104461 - protein, 127 aa, Gossypium hirsutum
  Clone ID: LIB3493-002-P1-M1-G3.pep
KPDGSSAQPEFSDDKKSTVENDDKKKIQDEYLKAYYAALYKKQQELEEAAKKQQELLDIPLATGLSDSSNRQVGMKAKRDDNEGEDDIDWEEAPVAGNTTESYKVNDLNVEAEESGDDEDDVDWEEG

SEQ ID NO: 104462 - protein, 83 aa, Gossypium hirsutum
  Clone ID: LIB3493-002-P1-M1-H12.pep
TKLLICMSNESKVLSAKSVAECKIRFSPFVYLALHMGSAHAYSDRVLSDVLDMDRVSVYQIMSACKCLVGHPYSIFIWEKTSA

SEQ ID NO: 104463 - protein, 112 aa, Gossypium hirsutum
  Clone ID: LIB3493-002-P1-M1-H3.pep
QDFGLKFDDPISKIWKYFGIPLKISLKIRERNQKMKVLFIYCFKEWEVFKNGISEEAKVREKMMEENRLKKRHVYFLGKSLTLKELVALNSSIEKKKKKKKKKKKKKKKQRQ

SEQ ID NO: 104464 - protein, 81 aa, Gossypium hirsutum
  Clone ID: LIB3493-004-P1-M1-B1.pep
VTPRGASSLFLQTFQFIQYDYSRFLITTAIMDFFTFIKTYLVMVFVEISTYFFANFFKYVYSPQSHHESALFALHFYAVYF

SEQ ID NO: 104465 - protein, 93 aa, Gossypium hirsutum
  Clone ID: LIB3493-004-P1-M1-B12.pep
TVLTVVKTSSLFLFIFPSVCFSGKPLQFPFVWCFLIRVPLFCLFVCIQGSLNLLDLSSTIILRTMEHFQNDDLEYIVDDYYDFDDFEQRRSLR

SEQ ID NO: 104466 - protein, 122 aa, Gossypium hirsutum
  Clone ID: LIB3493-004-P1-M1-B7.pep
MEAAADNQSPSSSDVDVTPRGASSAVLRALQLIQYDDSDSKLQAAKEIRRLTKTSQRCRRLLAEAVIPLVSMLRVDSPQSHHESALLALLNLAVKDERNKMSIVEAGALDHVIRFLQSENIN

SEQ ID NO: 104467 - protein, 116 aa, Gossypium hirsutum
  Clone ID: LIB3493-004-P1-M1-C5.pep
FKYHKRTKDVRTGKSDGKTYRFSNQLLALETHPYFQSLPATAAVAAPTSPQQAAAQATMPAPSLPNVTVPSAAALPSLPHNIVPTNINPTPTLPSFPNVSADHMSNSTSSSTSSDL

SEQ ID NO: 104468 - protein, 87 aa, Gossypium hirsutum
  unsure (1)..(87): unsure at all Xaa locations
  Clone ID: LIB3493-004-P1-M1-C9.pep
GHVIQESNNMDDAARRNIADQTVIKDCXTESLKTVMDICLRCLSDDPTGRPCIEDVLWTLQFAAQLQDPWRHDCHHIHGISDWHPDD

SEQ ID NO: 104469 - protein, 117 aa, Gossypium hirsutum
  Clone ID: LIB3493-004-P1-M1-D1.pep
SPEDRYYRRRDRSYSPYDRYYRRRDCSYSPDDRYYRRRDRFYSPDDRYHCRRDRSYSPEDRYYRRRDRYSPEDRHYRRRERSYSPDDRYYRISRDRSYSPYDSRYRRHHYRSGFSKP

SEQ ID NO: 104470 - protein, 130 aa, Gossypium hirsutum
  Clone ID: LIB3493-004-P1-M1-D12.pep
MYDPSGRSNKIILVLLLVLVLISLIVPLEKSPETSETHHFHVNNNLQIAYTACEGTLYPDLCVATVSILPNLASRSLPDLISAILNQTMDEVRLSCANCTEIEKGLKSNTTLEWAAINDCIELFKHTLAE

SEQ ID NO: 104471 - protein, 104 aa, Gossypium hirsutum
  unsure (1)..(104): unsure at all Xaa locations
  Clone ID: LIB3493-004-P1-M1-E5.pep
VICPYREEADKAVNACNIMKTMPGASSPLQVEDAYGELERLERKLCDGLLSKNVYEDDDAAXFSKYGTMRELHITLGSXQTCKGCALLKYGTKEQALVALHADN

SEQ ID NO: 104472 - protein, 135 aa, Gossypium hirsutum
  Clone ID: LIB3493-004-P1-M1-E8.pep
AIKNGISVSCSAGNSGPSSSTVSNTAPWIMTVGASYLDRSFEAIVELGDRQIFEGSSLYIGKPLKQLPLFYGDLRAAFCIDGSLKKNLVKGKIVICQRGITSRAEKGEVVKSAGGAGMLLINSVNEGEELFADAH

SEQ ID NO: 104473 - protein, 80 aa, Gossypium hirsutum
  unsure (1)..(80): unsure at all Xaa locations
  Clone ID: LIB3493-004-P1-M1-F2.pep
MGMDGXEEQMQEPAGCKERIFVSVRLRPLNYKEIARHDVSDWECINDNTIIYRNSPFGSERSMYPTCYTFEPIFSPDCPN

SEQ ID NO: 104474 - protein, 83 aa, Gossypium hirsutum
  unsure (1)..(83): unsure at all Xaa locations
  Clone ID: LIB3493-004-P1-M1-F4.pep
SHHAHRGTIAEDGAGGSTLXAAPPPPPPAPAAGGAANCILSDKTTFPDGIAIEKNSLTNRGKRNLKYPNSDLTNSNPTKSNQH

SEQ ID NO: 104475 - protein, 48 aa, Gossypium hirsutum
  Clone ID: LIB3493-004-P1-M1-G8.pep
LKRVVNHNQEKTKQNEKSKWMGNGNIMWDDALLHQLARQKNKKKKNYS

SEQ ID NO: 104476 - protein, 106 aa, Gossypium hirsutum
  Clone ID: LIB3493-004-P1-M1-H1.pep
MASFLRNVSSLKRSLFAPQVCRGGVLRSSSQLCNFSSKGRRKSKSDSSDSCDENMSKKDLALKLALDQITSSFGKGSIMWLGRAMSHRNVPVVSTGSFALDIALGI

SEQ ID NO: 104477 - protein, 64 aa, Gossypium hirsutum
  Clone ID: LIB3493-004-P1-M1-H11.pep
LFFFSTIEKEKKNQKTIGILFPFANSVDFNSLLFPMFICRKILYRRKLSFLNDLIIGSPFMFRN

SEQ ID NO: 104478 - protein, 45 aa, Gossypium hirsutum
  Clone ID: LIB3493-004-P1-M1-H12.pep
SKRYFSEFGDFSFVWIKLKIQNSSLSKFIDLFFSFLFFFTFKIFT

SEQ ID NO: 104479 - protein, 82 aa, Gossypium hirsutum
  unsure (1)..(82): unsure at all Xaa locations
  Clone ID: LIB3493-004-P1-M1-H5.pep
FFCVASLXFXGQDKRNLLGKIYTFFALISLAFFFXXLFXSFFFPLPXXCSASLFLPCFLPSLLAAFHCLFPGCWILHTPFCE

SEQ ID NO: 104480 - protein, 102 aa, Gossypium hirsutum
  unsure (1)..(102): unsure at all Xaa locations
  Clone ID: LIB3493-005-P1-M1-B5.pep
VNIMDTLRHDVLLWKQEGGTIVSSEAVLCTRMKASDELTYNVTRXRQIDINEMRESCXTIKMKHDIXLSRDIVLYEDPEGXLTDISLRDIVLNFVIAGRDTT

SEQ ID NO: 104481 - protein, 84 aa, Gossypium hirsutum
  unsure (1)..(84): unsure at all Xaa locations
  Clone ID: LIB3493-005-P1-M1-C11.pep
TKIGFCRVRVPFSSFRPVKPDDPPLDPFLVHTLTIRFEPRRQRPVEGSAXMKQDPRSFKLILEYIKALXTGQETDXIXVSCTGL

SEQ ID NO: 104482 - protein, 52 aa, Gossypium hirsutum
  Clone ID: LIB3493-005-P1-M1-C12.pep
FWILITLCRLKSMKSLIWRPSFQALNLKPGTSWMNKEKSSGIILQMIDDDKS

SEQ ID NO: 104483 - protein, 65 aa, Gossypium hirsutum
  Clone ID: LIB3493-005-P1-M1-C5.pep
IDHSMCKRMAISYWALRYNPNKAYHEGVRKRVHEVLAFISAYISEMEKLEDIAVLIQNPKIIKWE

SEQ ID NO: 104484 - protein, 53 aa, Gossypium hirsutum
  Clone ID: LIB3493-005-P1-M1-D1.pep
VVEESVVLTVMHVLPDVRSLLTLMEAEEPTGGAFLEGPTRAGGVHVDVQDAYA

SEQ ID NO: 104485 - protein, 109 aa, Gossypium hirsutum
  Clone ID: LIB3493-005-P1-M1-E12.pep
LVQIMSVLGVRNAAPVFSLVPTVGPFKPAGLLPSITEEDRVILNNVQKILEFLTAGSSISTTSSQGVNVAQVIQELLPVLPGISARVLPELISRLSSRVLARLIRDTFL

SEQ ID NO: 104486 - protein, 78 aa, Gossypium hirsutum
  unsure (1)..(78): unsure at all Xaa locations
  Clone ID: LIB3493-005-P1-M1-E6.pep
GENEMTQRRNSMKMKSWGKVRVSRXSSRNYWMWKWVGSWVGFLEMKEDPHLTVLLKKTPWERILELEGYIAKWGTTLK

SEQ ID NO: 104487 - protein, 109 aa, Gossypium hirsutum
  Clone ID: LIB3493-005-P1-M1-E8.pep
IKEDHPLLGSRQLTNIRGTRTVTFSSVIYSWTSSTWRAYKSFLTLQDLLESERFLRAYTLIRNIRIHQCVSTNISYSSNTRTIRARKAPTYIRPVHYLTISTIIMSVKT

SEQ ID NO: 104488 - protein, 37 aa, Gossypium hirsutum
  Clone ID: LIB3493-005-P1-M1-F11.pep
FCLWRGEETDQVREGHPDPSSSLVEKLLWTYMDLPYV

SEQ ID NO: 104489 - protein, 36 aa, Gossypium hirsutum
  Clone ID: LIB3493-005-P1-M1-F12.pep
PYSSSIHFKQIITYHIIISNFLLQNTFNFPIPNPIF

SEQ ID NO: 104490 - protein, 124 aa, Gossypium hirsutum
  Clone ID: LIB3493-005-P1-M1-G2.pep
STLAVRNADFSALQNNLKELEELREMREDIDRKNEQTAAILKMQGAQLTELEVLYKEEQILRKRYFNTIEDMKGKVRVFCRLRPLNEKEMLEKERKVLMGLDEFTVEHPWKDDKAKQHMYDRVL

SEQ ID NO: 104491 - protein, 103 aa, Gossypium hirsutum
  Clone ID: LIB3493-005-P1-M1-G9.pep
GRVGLIAPCHCRGTQKYVHRSCLDNWRSTKEGFAFAHCTECRALFILRANVPPDRWWLRLKFQFLVARDHAFIFVIVQLIVAFLGVLVYKFYGEELREMFGYD

SEQ ID NO: 104492 - protein, 57 aa, Gossypium hirsutum
  Clone ID: LIB3493-005-P1-M1-H10.pep
GGLDGPWTIHCFLIGCAQDVLERCDSGIINSLMLNCISGGCMMERFRSVQMTLYWII

SEQ ID NO: 104493 - protein, 92 aa, Gossypium hirsutum
  Clone ID: LIB3493-005-P1-M1-H11.pep
DSVQISSSLFCFSLYLRVMRTVFPGCVLCILCPVDGVLESSEVFVVLLSQLLGFVLQIDLLEVFHPLFPLLTMLTITFSSIHLMQWLYTSQL

SEQ ID NO: 104494 - protein, 136 aa, Gossypium hirsutum
  unsure (1)..(136): unsure at all Xaa locations
  Clone ID: LIB3493-005-P1-M1-H4.pep
FTKGLEEVGISTIKSNAGLFFWMDMRPLLKEQTTKAETELWRVIINKVKLNVSPGSSFLCSEPGWFRVCFANMDDKTVEVALDRIREFVLQGKEENNHEADKSQARAQRWRKQNLRLSFSSSRLYDQSLMSXTMIS

SEQ ID NO: 104495 - protein, 79 aa, Gossypium hirsutum
  Clone ID: LIB3493-005-P1-M1-H5.pep
GLDWYVKRTVLGGVYSTTEIYMLTDSSPEFRDTWLFLDNRVKDAFDLKKTIQEATYLAEAVGAGMGSSLQGFVGKVIQR

SEQ ID NO: 104496 - protein, 100 aa, Gossypium hirsutum
  Clone ID: LIB3493-005-P1-M1-H8.pep
EFQLLGKSSPKHFKNFPFRVSMDLFHTKSGLSLGFTKSSIADDPISLQMDTTFRFSVSPVPLQLFEEKDDGHRENRIESDEEIRIWGQSMCVKRQRDPKP

SEQ ID NO: 104497 - protein, 96 aa, Gossypium hirsutum
  Clone ID: LIB3493-006-P1-M1-A2.pep
IITEVRFTCTFLQTKLFWLGHRLQGFRRFIPHEAAQGDSACMQDCTKILISKEMPIKQQLRSNIWKQSHPKCSTIQITRSGHPVLIRIFITGIKLV

SEQ ID NO: 104498 - protein, 73 aa, Gossypium hirsutum
  Clone ID: LIB3493-006-P1-M1-A4.pep
IRILLPKDRSCWAASLFPLADFSFWNLHYKEVANFVFINVRTNNTRKTCWIFFHILDDSDLEFGNRAQKLETT

SEQ ID NO: 104499 - protein, 136 aa, Gossypium hirsutum
  Clone ID: LIB3493-006-P1-M1-B12.pep
LSVHVPFKRLRLKPNDHTVRSNHQPLTSIAFILLMMNPIEANGNMFETQMVYGVPTVATQGFLPLHNSLVTDSFIHRKPTAVIKSESSLTYNNLPLPRKRSRDSAMVSFPSPPHKSNEACSRFSFLGHDISLHMEQ

SEQ ID NO: 104500 - protein, 88 aa, Gossypium hirsutum
  Clone ID: LIB3493-006-P1-M1-B7.pep
IVMHKFIEKCKCGASVMLPKIEKAKRIRAAMAQQAQTIAPTIPGLNPLEGSNLNEDYGYTVPSKPQNMGLQVANQTPATGTLKTPRTL

SEQ ID NO: 104501 - protein, 145 aa, Gossypium hirsutum
  Clone ID: LIB3493-006-P1-M1-C7.pep
PTRSVNSMKVMVKKLHREGFEVLLEVVFTHTADSGALHGIDDSSYYYKGRANDLDSKSYLNCNYPVVQQLVLESLRYWVTEFHVDGFCFINASSLLRGVHGEQLFRAPLVEAIAFDPLVAETKLIAYCWDPLEMMPKEVRFPHWK

SEQ ID NO: 104502 - protein, 73 aa, Gossypium hirsutum
  Clone ID: LIB3493-006-P1-M1-C8.pep
FMFKYFLFHLVIFFKILIISLYSYLNAILFDITLNHIDFPSSSLITIAQQSRGLLCTVQVKTGFQNIDIKRVH

SEQ ID NO: 104503 - protein, 125 aa, Gossypium hirsutum
  unsure (1)..(125): unsure at all Xaa locations
  Clone ID: LIB3493-006-P1-M1-D8.pep
QKALEMADFDPNDLDLILMCTSTPEDIFGSAPQIQRELGCRNSPLAYDITAACSGFVLGLISAASHIRGGGFRNVLVIGADGLSRFVDWTDRGTCILFGDAASAVLVQACDAXRGWLLSFDLHSD

SEQ ID NO: 104504 - protein, 151 aa, Gossypium hirsutum
  Clone ID: LIB3493-006-P1-M1-E11.pep
ITTGLTSHQSGGPIFAEGEPPKLADPFDFGGGIVNPNSAADPGLVYDMNTENYVHYLCAMGYNNSDIFQLTEHPVVCPSKQPSILDVNLPSITIPNLKKPTIFTRTVTNVGPVNFKYKASVEFASGINVAVVPETLIFNFRTNAIFFFLMI

SEQ ID NO: 104505 - protein, 49 aa, Gossypium hirsutum
  Clone ID: LIB3493-006-P1-M1-E12.pep
LDLLNKAEKPPNKKQNPVFELPIWEVHKNPKPASKFQSSNLKTNKQINI

SEQ ID NO: 104506 - protein, 105 aa, Gossypium hirsutum
  unsure (1)..(105): unsure at all Xaa locations
  Clone ID: LIB3493-006-P1-M1-E2.pep
EIHVQPKIGLTWSXIWTVLQLEENSQTFLQSDAVNILQISLAQEAHEDFLVWSGETSEEFLVRSAYKLLQKNLEDPTAYALQTKSSASYKLLWNLDLSGKIKITI

SEQ ID NO: 104507 - protein, 44 aa, Gossypium hirsutum
  Clone ID: LIB3493-006-P1-M1-E5.pep
DVAQRTHRTLRGLPQYICLTWYGYEHTSKYSQSYAQSNATDTKS

SEQ ID NO: 104508 - protein, 127 aa, Gossypium hirsutum
  Clone ID: LIB3493-006-P1-M1-E9.pep
MGRVIRAQRKGAGSVFKSHTHHRKGAARFRSLDFGERNGYLKGVVTEVIHDPGRGAPLVRVVFRHPFRYKKQKELFVAAEGMYTGQFVYCGKKATLMVGNVLPLRSIPEGSGVCNVEQYVGDRGVSL

SEQ ID NO: 104509 - protein, 108 aa, Gossypium hirsutum
  unsure (1)..(108): unsure at all Xaa locations
  Clone ID: LIB3493-006-P1-M1-F3.pep
MARTWLHLTSSIIVCALICFNFFTVDAKDHHPRPMLLPLQLTSRNHSQQRHLDNIRRHLQQSGLSSSTPNARMRXYDDLLSNGYYTTRLWIGTPPQEFALIVDTRKYL

SEQ ID NO: 104510 - protein, 122 aa, Gossypium hirsutum
  unsure (1)..(122): unsure at all Xaa locations
  Clone ID: LIB3493-006-P1-M1-F5.pep
MAPNSDRRSNSGYGNGFSGLTLDSTGHGGKQSSRSDQERRKGIPWTEEEHRLFLLGLDKFGKGDWRSISRNFVISRTPTQVASHAQKYFIRLNSMNRDRRRSSIHDXHEVNNGGSSHQAPIT

SEQ ID NO: 104511 - protein, 134 aa, Gossypium hirsutum
  Clone ID: LIB3493-006-P1-M1-G5.pep
QPPLLSAMVYEIYNRTGDVDLVKKALPALLKEYQFWNSEIHTMIIHDAENCNHSLNRYYAMWNKPRPEASAIDKRFASKFLNVNEKQKFYRELASTAESGWDFSTRWMRNPSEFTSLSTTTILPGDLNAFIPED

SEQ ID NO: 104512 - protein, 55 aa, Gossypium hirsutum
  Clone ID: LIB3493-006-P1-M1-H8.pep
IWTLISNYVSTVREKIPNLHRTCDQRRKNLIGYCEGDTHTSEVNIKPVIKSCSFT

SEQ ID NO: 104513 - protein, 32 aa, Gossypium hirsutum
  Clone ID: LIB3493-006-P1-M1-H9.pep
VSHSVTETALSLKPYCLVALYLPRITLNALDT

SEQ ID NO: 104514 - protein, 85 aa, Gossypium hirsutum
  Clone ID: LIB3493-007-P1-M1-A10.pep
QLLWKTCLIGAGPDGKHTALEAVTIVLDLPPPQPGSMSGFTSVDRVSASDPKSALALQRLVQAAVWFLGENANYAASEYAWESAT

SEQ ID NO: 104515 - protein, 94 aa, Gossypium hirsutum
  Clone ID: LIB3493-007-P1-M1-A12.pep
SSIPEQIRNDSRYMPHFKDCIGAIDGTHIAAILPPNEQIPYIGRKCISTQNVMAVCDFNMCFTFVMAGWEGSAHDSRIFLDTNSDPKYKFPHPS

SEQ ID NO: 104516 - protein, 103 aa, Gossypium hirsutum
  unsure (1)..(103): unsure at all Xaa locations
  Clone ID: LIB3493-007-P1-M1-A4.pep
MTHLILVLGAVFCIRLFKFAYNTIWIPFRIQNHXKKQGVTGPRYRPIFGNMPEIRRLFEESNVEAIFTSRRRPRCPSRGWAPXTHKWVQHIWEKPFLYWVWVH

SEQ ID NO: 104517 - protein, 115 aa, Gossypium hirsutum
  unsure (1)..(115): unsure at all Xaa locations
  Clone ID: LIB3493-007-P1-M1-A7.pep
XIQEDFYAVVDWAYKIDPLRCISMHGITERYLSGQKADAAGFVRLLLGALESKISMQFSKFVDEACHQIERNERNVRQMGVLSYIPRXATLATRMEQYIQRQSRDXVISIHQISV

SEQ ID NO: 104518 - protein, 103 aa, Gossypium hirsutum
  Clone ID: LIB3493-007-P1-M1-B3.pep
LWKLSPGSGRIPGRHASLNLNHALFTRCKCACCKKIHVRLLDHCDEGMLLMETNFITAAYYTCGNLTLTNILSSMLGKVARIIQPPLLDKAVPISWGDMYRFW

SEQ ID NO: 104519 - protein, 70 aa, Gossypium hirsutum
  Clone ID: LIB3493-007-P1-M1-C12.pep
MEHVQAYPPPAAPSAYPPLATPVSVIGPQYCYPQPVDLAVVRKVLTITEGNFAVTDINGNIMFKIKGKFF

SEQ ID NO: 104520 - protein, 89 aa, Gossypium hirsutum
  Clone ID: LIB3493-007-P1-M1-C3.pep
MSILRPKVNRERHRTTFFNRFFRWCAAFLLLALILMIRARNIMDSEGRTHYMETMFPLYSLFGFIVLHMLMYAINIFYWRKYRVNYASI

SEQ ID NO: 104521 - protein, 69 aa, Gossypium hirsutum
  unsure (1)..(69): unsure at all Xaa locations
  Clone ID: LIB3493-007-P1-M1-C4.pep
RTRGFMKSLSDEDYETKQNITAPTNHSNVNGKNNEIRVGIKDWLVYFLFETXATLIIDEDKHIWEIILK

SEQ ID NO: 104522 - protein, 100 aa, Gossypium hirsutum
  Clone ID: LIB3493-007-P1-M1-C6.pep
ILRLEKNTKNIYSLAMGGNKHKKSFSFFTSLFKGKKGRRDHDYYSYGDDAWGAARKIYPSDEDNTHRVVAEPGIDKRASAFIANFHATRVSEAIHHQQAG

SEQ ID NO: 104523 - protein, 155 aa, Gossypium hirsutum
  Clone ID: LIB3493-007-P1-M1-C8.pep
DAWVTSELSGNVIDICPVGALTSKPFAFKARNWELKGTETIDVTDAVGSNIRIDSRGPEVMRILPRLNEDINEEWISDKTRFCYDGLKRQRLNDPMIRGADGRFKAVSWRDALAVVAEVALHVKPEEIVGIAGQLSDAESMMALKDLLNRMDQTM

SEQ ID NO: 104524 - protein, 91 aa, Gossypium hirsutum
  Clone ID: LIB3493-007-P1-M1-D10.pep
LKSVHFCEECTPKNIPIDFRCYQYTRPPGLISIPRYKTRFTILKPCPEFMNFIQNWLTFSLHTPPLSPCKFHMFRNCSVSHLFFLILILLP

SEQ ID NO: 104525 - protein, 96 aa, Gossypium hirsutum
  unsure (1)..(96): unsure at all Xaa locations
  Clone ID: LIB3493-007-P1-M1-D2.pep
PTPTTTNINFLDECGEKKNLTPKSAANKRRSKSKGGKLEEKRVLNDGFVISNNNFNNRSDHDQXNVERLGGGGGGSGAGGERGNLTAVVEETVKSC

SEQ ID NO: 104526 - protein, 71 aa, Gossypium hirsutum
  unsure (1)..(71): unsure at all Xaa locations
  Clone ID: LIB3493-007-P1-M1-D5.pep
CFWHLGFLFCFKDADQDGLLKLIYDXRLFKTIQQPGFHPKFLQMPDSFLKLLKLGTQGTPICRLVSHGRVG

SEQ ID NO: 104527 - protein, 24 aa, Gossypium hirsutum
  Clone ID: LIB3493-007-P1-M1-E11.pep
KHNSSFVNLALIPLNVTHHTQSRC

SEQ ID NO: 104528 - protein, 35 aa, Gossypium hirsutum
  Clone ID: LIB3493-007-P1-M1-E2.pep
LNIYFQCGVLVYRRLKEQISLLSIATKLHVQFLTT

SEQ ID NO: 104529 - protein, 54 aa, Gossypium hirsutum
  Clone ID: LIB3493-007-P1-M1-E9.pep
KWLPQLNSSSLSLLNPLIYYPTPPLLNPGLLTSPAASSYNKLEMIKPLAAAATP

SEQ ID NO: 104530 - protein, 62 aa, Gossypium hirsutum
  Clone ID: LIB3493-007-P1-M1-F11.pep
RDCNCSKSMETKRRVILEDDIVTFASIRTNMCIMNSPNYNLFSARHILPASRHNHVQALNQL

SEQ ID NO: 104531 - protein, 73 aa, Gossypium hirsutum
  Clone ID: LIB3493-007-P1-M1-G11.pep
NRHTAADLLEYANPRGLTVLLYATVQKILFRFRGRRSRPEAYGVIFRDGSGIEHRAYLKYGFKNEIIISAGAL

SEQ ID NO: 104532 - protein, 91 aa, Gossypium hirsutum
  unsure (1)..(91): unsure at all Xaa locations
  Clone ID: LIB3493-007-P1-M1-H6.pep
PRVRFGIFGVPMVGADICGFYPAPTEELCNRWIEVGAFYPFSRDHANYYSPRQEXYQWKTVTKSAQNALGMRYKLLPYLYTLNYLAHTSGA

SEQ ID NO: 104533 - protein, 103 aa, Gossypium hirsutum
  unsure (1)..(103): unsure at all Xaa locations
  Clone ID: LIB3493-008-P1-M1-A4.pep
PRVRIPLSAEPSPPQSWNSDPLDMLDVGLGTQVNEVDTLVTVSKSGRKCAKRLDSVWXAWFFFTYYFKPVFNEKSKVKVTRDXSGVSGFDKSDLELDVFLVQH

SEQ ID NO: 104534 - protein, 59 aa, Gossypium hirsutum
  Clone ID: LIB3493-008-P1-M1-A5.pep
NVTTDIKVDPYSNLYTTITVDQPAPGLKAIFSFRVPDQRSGKVELQYLHEYAGISSSIG

SEQ ID NO: 104535 - protein, 68 aa, Gossypium hirsutum
  unsure (1)..(68): unsure at all Xaa locations
  Clone ID: LIB3493-008-P1-M1-B10.pep
QTASDSAANLNIVETIDILQASRGEVKEMMVAIQSCGRALRLRVSMLSSPFPPSSISETLHFMRSSXN

SEQ ID NO: 104536 - protein, 118 aa, Gossypium hirsutum
  Clone ID: LIB3493-008-P1-M1-B2.pep
MVGVFEVGAVPFNPDGWGPPESTTATPPSTTTTLPSHVPYATFSRSERLGRIADFTRSFSSSNANASNRPSSGKPGSADSPFDFSLDLDAFPLANPDDGSAFRLVDTKPTPRPKFGPK

SEQ ID NO: 104537 - protein, 141 aa, Gossypium hirsutum
  Clone ID: LIB3493-008-P1-M1-C8.pep
MRSPKGIVRRIEEGVFQGNLCEKYPKWLLSQKVLHLHHVFHHHLHQRGISPRRHRQFQLSRHQTHLRRHRLPQQSQIHLHHLHIQVLHPLHHRRHPLCCHRHLLLHHRHHHRPCPRHLYRHRHGHHRQYRRQNHPHHHQQD

SEQ ID NO: 104538 - protein, 46 aa, Gossypium hirsutum
  Clone ID: LIB3493-008-P1-M1-D1.pep
YDCYFAIKQFLTELDGFEELTGVIVYVATRIVLMESYCIITIVSIL

SEQ ID NO: 104539 - protein, 118 aa, Gossypium hirsutum
  unsure (1)..(118): unsure at all Xaa locations
  Clone ID: LIB3493-008-P1-M1-D4.pep
MGLLIIIISLMGVVWFWYKMKKMMRKEDRGTNKSGGSGGGGGGVXPKGNLGWPFIGETLHFIASGYXSQPVSFMDIRKLLHGKVFKTHXLGTPIIVPQIPRKQGVCKPWHTSCYPKSY

SEQ ID NO: 104540 - protein, 141 aa, Gossypium hirsutum
  unsure (1)..(141): unsure at all Xaa locations
  Clone ID: LIB3493-008-P1-M1-D8.pep
EAQNQTLVGSSNANGAPKETGQEEDLDDEPFEKLLEPFGKDQLITLIRRAVDKHPEFISSVREFADADPSHRKIFVHGLSWDTTAETLTAEFCKYGEIEECKAVTDRVSGKSKGYAFILFKHSSGARRALKQXQKKIGNRT

SEQ ID NO: 104541 - protein, 143 aa, Gossypium hirsutum
  unsure (1)..(143): unsure at all Xaa locations
  Clone ID: LIB3493-008-P1-M1-E10.pep
LSKPVIAFATSKTCSKLPSLKLGTVLVDSPEFLSFLTQPNIGNEVFDSVKVSQHDTAAILYSSGTTGLVKGVLLSHLNIIALVAGYYHLRETPHEQEESHPESFFTVPLFHVFGFFMLARAFSMGETVVXTDRFEFEGMVRPL

SEQ ID NO: 104542 - protein, 93 aa, Gossypium hirsutum
  Clone ID: LIB3493-008-P1-M1-E4.pep
SCTVCRLDRAGQSLIVSPILLPAFIKLEWLSCLRYSIFNMDYECMPALELSIPLPLFGSRSPIPSCNHSWQLTLIFLCFMPYMLLPLHLIASC

SEQ ID NO: 104543 - protein, 135 aa, Gossypium hirsutum
  Clone ID: LIB3493-008-P1-M1-E8.pep
QEGSLVTQNELSKDSFPQNDKSIKGQEIAGCVTNIQSQPPLSKDLNSDLKLEPSKAEKQGKVTSSKGAPAPRKRSYDPDLFFKVNGKLYQRLGKIGSGGSSEVHKVISSDCTIYALKKIKLKGRDYASAYGFVRK

SEQ ID NO: 104544 - protein, 116 aa, Gossypium hirsutum
  unsure (1)..(116): unsure at all Xaa locations
  Clone ID: LIB3493-008-P1-M1-F10.pep
CDLYPQSLKHNPNGRFVVVCGDGEYIIYTALAWRNRSFGSALEFVWSSEGEYAVRESSSKIKIFSKNFQEKRSVRPTFSAERIFGGTLLAMCSNDXICFYDWAECRLIRRIDVTVK

SEQ ID NO: 104545 - protein, 86 aa, Gossypium hirsutum
  unsure (1)..(86): unsure at all Xaa locations
  Clone ID: LIB3493-008-P1-M1-F2.pep
PGYELSSFLLGHFVHSLIGHNDILISSIADSIQIISLANQAHGGHHGSFYSFTVFKYINSLXTLVIISTHYKGRMYIYIYRLSIIY

SEQ ID NO: 104546 - protein, 71 aa, Gossypium hirsutum
  Clone ID: LIB3493-008-P1-M1-F8.pep
CLLPQKSFFSLILWSSIPIFFTFSLSKFFRQILCSSSADENRRTYLKIWNSGEVDKRRSIRARNLWCIQDP

SEQ ID NO: 104547 - protein, 122 aa, Gossypium hirsutum
  unsure (1)..(122): unsure at all Xaa locations
  Clone ID: LIB3493-008-P1-M1-G1.pep
ENSYVTTRVMGTFGYVAPEYACTGMLNEKSDVYSFGILIMEIISGRSPVDYSRPPGEVNXXEWLKTMVGNRKSEEVVDPKLPEMPASKALKRVLLVALKCVDPDATKRPKMGHIIHMLEGCD

SEQ ID NO: 104548 - protein, 121 aa, Gossypium hirsutum
  Clone ID: LIB3493-008-P1-M1-G10.pep
KAPPLEHNTPDDEDVLEEENLVRTQTREGTVDPNVAVQTRGLAKTFPGTRTCGFCCKCKKTAPYHAVKGLWVNLAKDQLFCLLGPNGAGKTTAINCLTGITPVTSGDALIYGNSWSSSVGM

SEQ ID NO: 104549 - protein, 59 aa, Gossypium hirsutum
  Clone ID: LIB3493-008-P1-M1-H10.pep
GFEEEKPLSDMVDPMLLQEVHAKKEVLAVFQVALACTEADPEIRPRMKTVSDNLERIGS

SEQ ID NO: 104550 - protein, 59 aa, Gossypium hirsutum
  unsure (1)..(59): unsure at all Xaa locations
  Clone ID: LIB3493-008-P1-M1-H2.pep
LILCQANGTDKQLIDCLXQQMNVEQNLHGICLLKYQPXLHGSLNKYSVANAFPVFHHSS

SEQ ID NO: 104551 - protein, 42 aa, Gossypium hirsutum
  Clone ID: LIB3493-008-P1-M1-H3.pep
RPAPGAWLSLLYPHAMKQCSDRYCDTVVFDTLRMSINVPLLR

SEQ ID NO: 104552 - protein, 66 aa, Gossypium hirsutum
  unsure (1)..(66): unsure at all Xaa locations
  Clone ID: LIB3493-009-P1-M1-A6.pep
YWILIIIVSAFRSFLKTSIGLYLSTPXFAFYRTFALFLVMALHNDPHVWHARLGYTFVSTMKKIVQ

SEQ ID NO: 104553 - protein, 87 aa, Gossypium hirsutum
  unsure (1)..(87): unsure at all Xaa locations
  Clone ID: LIB3493-009-P1-M1-B12.pep
VKWKHDNLYLGYIYAMLYFGGTNLLLNNRPIRIKKWPHLPLRFRHDGTFKILQVADMHFGSGLLSRCRDALPXHLHYCSQLNTTRFL

SEQ ID NO: 104554 - protein, 68 aa, Gossypium hirsutum
  Clone ID: LIB3493-009-P1-M1-B2.pep
WKGRNESVIWDATLYYPLYTTAGGAPENRHGLGTYRLYRRSSASMRSFIPAPGPMTGGRLMNLKEKLT

SEQ ID NO: 104555 - protein, 92 aa, Gossypium hirsutum
  Clone ID: LIB3493-009-P1-M1-B9.pep
NIPVGGGSRKNKRSSSSSSSSITTSLTSSKKLPGLVTPPSLSQCSTQNPKIHDGQDLNLAFPTASQGSRSLSELVQVPLENQYQSQIPSSSS

SEQ ID NO: 104556 - protein, 97 aa, Gossypium hirsutum
  Clone ID: LIB3493-009-P1-M1-D8.pep
GRVGDSSDTRNMGFQFAGKAIYSAVWVAAVSLFMELLGFSTEKWLTAGGLGTVLLTLAGREIFTNFLSSAMIHATRPFVVNEWIQTKIEGYEVSGTV

SEQ ID NO: 104557 - protein, 65 aa, Gossypium hirsutum
  Clone ID: LIB3493-009-P1-M1-E10.pep
VNNTPERTHGRTHDGRALVGEQCLKTNDCQCHVTYGDMSSTIGILSSDTSSFDSINGQKTTFSTS

SEQ ID NO: 104558 - protein, 87 aa, Gossypium hirsutum
  Clone ID: LIB3493-009-P1-M1-E8.pep
PIPSVSPNQTLSCFPPYFTDSRPELDVSSQTNLPFFFFNSLSLSSPRFHFTLQISPSKLGRVGLVTNLMSLHCAAEQSACCLGQYTS

SEQ ID NO: 104559 - protein, 55 aa, Gossypium hirsutum
  Clone ID: LIB3493-009-P1-M1-F12.pep
MFHYRQGVSREGLGLYISQKLVKIMNGTVQYLREAERSSFIIFLEFPLARQLGHH

SEQ ID NO: 104560 - protein, 81 aa, Gossypium hirsutum
  Clone ID: LIB3493-009-P1-M1-F8.pep
AHFIAQPLTFIGLMANGADNGRILPTEPRFWKSGNLAPFFSFFLFKKNVNLLLFFQKKRNKFQRFKQNFNTARSSPTSMHI

SEQ ID NO: 104561 - protein, 56 aa, Gossypium hirsutum
  Clone ID: LIB3493-009-P1-M1-G3.pep
MPESDVGVSVSIDTAAEKMTPPSSSSSSSLVKNPYVSSDVSGSDLVSGVIPSITPR

SEQ ID NO: 104562 - protein, 65 aa, Gossypium hirsutum
  Clone ID: LIB3493-009-P1-M1-G6.pep
HTRTGAKADTYKITTLFAKLKTYHDFNLADYQRLNSFVNMVQINKWPSGRDVGDRDRTAGARAPL

SEQ ID NO: 104563 - protein, 96 aa, Gossypium hirsutum
  Clone ID: LIB3493-010-P1-M1-A11.pep
PTRPCTVNLVRDIIRDRFPGLQGILVKYMDPEGDLVTMTSTDDLRLAESVGGLSGGSLKFFIVEVSPDREPAYEGVSKEDMVKGEEKMNDVVENGE

SEQ ID NO: 104564 - protein, 104 aa, Gossypium hirsutum
  Clone ID: LIB3493-010-P1-M1-A7.pep
KNFTLNDIERATNSFDASRVIGEGGFGIVYRGSLDDGAAVAVKVLKREDQHGGQEFLAEVEMLSRLHHRNLVKLIGICTEDNTRCLIYELVPNGSLESHLHGAE

SEQ ID NO: 104565 - protein, 55 aa, Gossypium hirsutum
  unsure (1)..(55): unsure at all Xaa locations
  Clone ID: LIB3493-010-P1-M1-B1.pep
LYYCIKISLLPVFILLHLHTHNISINXQIYIILNMVFGLKSLKRPSFLMPPQPFL

SEQ ID NO: 104566 - protein, 72 aa, Gossypium hirsutum
  Clone ID: LIB3493-010-P1-M1-B11.pep
NRQAPHLMPVEEGIQSFRYLTQNPFFLAESFSDSNLPHLDPIDKWRFKKGFAKELLRLELGSSFGVFPSRLV

SEQ ID NO: 104567 - protein, 122 aa, Gossypium hirsutum
  Clone ID: LIB3493-010-P1-M1-B4.pep
VLQIMIMSGGIPDNITYNMMVRGLCKRGRMRSAIDLLEDMSLSGCPPDVITYNTIIRSMFDHGIFDQAVGFWKDQLRKGCPPYLITYTILIELVCRHCGIARAMEVLHDMAIEGCYPDIVLT

SEQ ID NO: 104568 - protein, 107 aa, Gossypium hirsutum
  Clone ID: LIB3493-010-P1-M1-C8.pep
FSYPSSTFANSLKPHPPNMPTLTSLKRSSPSMLHLSLIQQRLLTCQFSSLPLTDASNIDPNNKRGSFSRTFVKWVSGLAGGSSLGAVYWWYSTSVSELGSAFLKKPF

SEQ ID NO: 104569 - protein, 120 aa, Gossypium hirsutum
  Clone ID: LIB3493-010-P1-M1-D7.pep
KIHDRWLSKSACSSENSEDDIEQLDLKSFWGLFVICGIACMLALLVYFWLMFRKFSRLPPEELDTTSPSTSRSTRLQTFLSFVDEKVEKPKSSSKRKRESMSRNGYHINDESPHKSGRMD

SEQ ID NO: 104570 - protein, 105 aa, Gossypium hirsutum
  Clone ID: LIB3493-010-P1-M1-E1.pep
MKKSGAAEKRKARRSSASVQNVGRDPSSDTPPRKQAAKQDVYQLFAEKVRDHKDLESRWAVLQETRVEYFRGKDFVSFMKNHPELKEILESDRDLETEDIANNLY

SEQ ID NO: 104571 - protein, 137 aa, Gossypium hirsutum
  unsure (1)..(137): unsure at all Xaa locations
  Clone ID: LIB3493-010-P1-M1-E10.pep
SYPLYEPGSCSFVDHQFSCFAHGRRDIGYLKWKWKPKGCTLPRLNGGHMLEILRGKRLVFVGDSLNRNMWESLLCILKSAAKNPKTVHEVPGGRYFRGEPSSSFIFNDYNWSGEFFVXSPFLVPQWQMLDKNGTKKN

SEQ ID NO: 104572 - protein, 67 aa, Gossypium hirsutum
  Clone ID: LIB3493-010-P1-M1-E12.pep
RRRGFFPLSESSVRLTAGDEGSSRRSKSMASPIFLRSAASSVAAFSSSRLRCGDPEALLSPERFNRR

SEQ ID NO: 104573 - protein, 110 aa, Gossypium hirsutum
  unsure (1)..(110): unsure at all Xaa locations
  Clone ID: LIB3493-010-P1-M1-E4.pep
KERXSQQTCEANTERNRRFLSXTYSSRGYKAFFLICKKTGREKDLIAEIHPHKSREKNSRESKNRVFRSREKQKKRYRDLPNRITRTIVILLKQRNKKRISFFKGNRIVF

SEQ ID NO: 104574 - protein, 58 aa, Gossypium hirsutum
  Clone ID: LIB3493-010-P1-M1-E6.pep
RRNSRKKNGVTGAISFMALNTSTVIHVLDTKPKNFWATRRNSFWFIVRLCMAFLFNFI

SEQ ID NO: 104575 - protein, 98 aa, Gossypium hirsutum
  unsure (1)..(98): unsure at all Xaa locations
  Clone ID: LIB3493-010-P1-M1-E9.pep
LNIPEHEYGLVFTVSRGSAFKLLADSYPFHTNKKLLTMFDYESQSVNWMAQSAREKGAKVYSAWFKWPTLKLCSTDLRKQISNXKKRKKDSATGLFVF

SEQ ID NO: 104576 - protein, 49 aa, Gossypium hirsutum
  Clone ID: LIB3493-010-P1-M1-F10.pep
HASAALQLFSRLIFFIQLSILSFLFFSFPSPFRVFTFFVSFFSFILDLV

SEQ ID NO: 104577 - protein, 109 aa, Gossypium hirsutum
  unsure (1)..(109): unsure at all Xaa locations
  Clone ID: LIB3493-010-P1-M1-G2.pep
PRKLTEESHYNILLEFVSRFTRMLRDWWNSINQVDQMXFLVLIDLSQAIRIIHNHFTGNPEDLLTLKRSEFFKRKYYSYNKKVLSKHFHAMTKIFCSLDLEKSLKPAVL

SEQ ID NO: 104578 - protein, 46 aa, Gossypium hirsutum
  Clone ID: LIB3493-010-P1-M1-G7.pep
EIEKREIVLSETMVVMSDLFVKEEKKIIVGFFFIFIIFNHILGLKY

SEQ ID NO: 104579 - protein, 131 aa, Gossypium hirsutum
  Clone ID: LIB3493-010-P1-M1-H1.pep
RQCLDSQPGLETYPDIGQAAFGTYGRIALSIILYVELYACCVEYIILEGDNLASLFPNAYVSLGGLELSPQRLFALMATLAVLPTVWLRDLSVLSYISAGGVVASILAVLCLFWGGLIDQVGFHNKGTTLN

SEQ ID NO: 104580 - protein, 79 aa, Gossypium hirsutum
  Clone ID: LIB3493-010-P1-M1-H6.pep
KKIKEGLISSFLSCSFQDLLFFLFEYFFPFLFSYIWHEMNKKGEYLPLASACVSSAHGRPPSLMVVQRGLQVEALTLGI

SEQ ID NO: 104581 - protein, 135 aa, Gossypium hirsutum
  unsure (1)..(135): unsure at all Xaa locations
  Clone ID: LIB3493-011-P1-M1-A8.pep
RHPGAPREEFIAGVKYLSEIQHRNLVTLLGYCQESGSQMLIYECIPNGSICNHLYDTGREAPTRLEFKQRLSIALGACXGLCHLHSLQPPLMHKNFKTANVLVDENFTAKVADAGIAMLLERIEEAGSSHSSSIN

SEQ ID NO: 104582 - protein, 54 aa, Gossypium hirsutum
  Clone ID: LIB3493-011-P1-M1-B1.pep
SEPHLKTHNKRISLSLIPSFFPFFFFYYLPPKNENTKGKAKGQSFYAQVATTEK

SEQ ID NO: 104583 - protein, 62 aa, Gossypium hirsutum
  Clone ID: LIB3493-011-P1-M1-B4.pep
KYSSTPGAQSEAEPCCICQEEYNDGENLGTLECGHNFHADCIKQWLVRKNLCPICKTTGLTK

SEQ ID NO: 104584 - protein, 42 aa, Gossypium hirsutum
  Clone ID: LIB3493-011-P1-M1-B8.pep
EDLSPPRSELIIKCSRDNKKILVVYHAHNHRWVSLIILDCNV

SEQ ID NO: 104585 - protein, 84 aa, Gossypium hirsutum
  unsure (1)..(84): unsure at all Xaa locations
  Clone ID: LIB3493-011-P1-M1-C1.pep
SLLGKLSPESVRIPVATLGGDXDXADGLDNCYPWRYTIIRXTMQSCYRRIXACVRLGTAYICLPSCLLYEFKATLRLSRLETAL

SEQ ID NO: 104586 - protein, 32 aa, Gossypium hirsutum
  Clone ID: LIB3493-011-P1-M1-C9.pep
EAAAGSFDHHHRHLCVINLTLFSDNPQVKGNQ

SEQ ID NO: 104587 - protein, 163 aa, Gossypium hirsutum
  Clone ID: LIB3493-011-P1-M1-D10.pep
ALFDNEEVGSDSYQGAGAPTMFQAMRRIAGSLANSYAVSADMAHGVHPNFMDKHEEHHRPEMHKGLVIKHNANQRYATSGVTAFLFKEVAKMHNLPTQEFVVRNDMGCGSTIGPILASGVGIRTVDCGIAQLSMHSVREVCGKEDIDIAYKHFKAFYQTFFSI

SEQ ID NO: 104588 - protein, 95 aa, Gossypium hirsutum
  Clone ID: LIB3493-011-P1-M1-D3.pep
SALNSLLPMPIHLHQVGFFASGGILARNPSSTSISTKKEEKSMPARTEGSLSPSSIFIQWDAQRDEHAKAKDWRKRITCIDVFGIFLWRNRFLNR

SEQ ID NO: 104589 - protein, 44 aa, Gossypium hirsutum
  Clone ID: LIB3493-011-P1-M1-D8.pep
PQEQCSVTALKHILESTFKQFHLDAPSQYVSADPIKPCPDQCVL

SEQ ID NO: 104590 - protein, 149 aa, Gossypium hirsutum
  Clone ID: LIB3493-011-P1-M1-E6.pep
MQKASLLCSSNPISSPPAYLHTCCPLTAPIRTRFSPSLFAFSSLRFSLNRLHGRRHGFSPLHSTATEEMIEASKNVSSFVEIGYISSVHGLQGEICIKPNTDFPELRFCKAGRRWLKQQVSGKETNKEVELVEGREHPGKKEWILSFSG

SEQ ID NO: 104591 - protein, 73 aa, Gossypium hirsutum
  Clone ID: LIB3493-011-P1-M1-E7.pep
MFGQEEKNRLAGTAADAARQPYLRSISWTDRSPTKPNPKPPTNTKRRSRLPPLCIKRRPVEEWPNACSDDLGV

SEQ ID NO: 104592 - protein, 105 aa, Gossypium hirsutum
  Clone ID: LIB3493-011-P1-M1-E9.pep
EYWSLVLSIRLGYSGIAPNVIGLNLCFLFFGLVWCLLKGCKWTVWATSILDFIRLFILIYFWFRLLFGFSLVSPGKMGHIHYLYLFCLLINLLGLINCLNIRIRY

SEQ ID NO: 104593 - protein, 66 aa, Gossypium hirsutum
  Clone ID: LIB3493-011-P1-M1-F12.pep
ATAADGNDSVFPVAFAFVDAETNDNWHWFLSQLKSALSTSCPLTFVADRQKGLRESISEIFKDSYH

SEQ ID NO: 104594 - protein, 120 aa, Gossypium hirsutum
  Clone ID: LIB3493-011-P1-M1-F2.pep
FNGGFPSNLKVDVTVCKNHRKCYKTVQEAVDAAPKNKKGRDQYVIKIRKGVYEETVRVPFEKKNVVFLGEGMGKTIITGALNVHQPGMNTYNSATVGVLGDGFMASGLTIRNTAGSDAHQ

SEQ ID NO: 104595 - protein, 37 aa, Gossypium hirsutum
  Clone ID: LIB3493-011-P1-M1-G5.pep
RTRGQRPTDRHSCSLAFDLHCHLLSPSDTNPRFIRSL

SEQ ID NO: 104596 - protein, 115 aa, Gossypium hirsutum
  Clone ID: LIB3493-011-P1-M1-H2.pep
IEDEMARTQKNKATAHHLGLLKAKLAKLLRELLTPSSKGGGGASEGFDVTKSGDARVGLVRSTSVGKSTLLNKLTGTFSEVASYEFTTLTCIPCVIMYRGAKIQLLDLSGIIQGA

SEQ ID NO: 104597 - protein, 64 aa, Gossypium hirsutum
  Clone ID: LIB3493-011-P1-M1-H4.pep
GRVGLATRLLLTLLLISFYSQNLPPNFPFPATQVNRPTLITLLFPFHFTALNSPTIATPFYFLH

SEQ ID NO: 104598 - protein, 35 aa, Gossypium hirsutum
  Clone ID: LIB3493-011-P1-M1-H5.pep
FKLLGSSMTTELIRTYVLHHISVCSLVDLDKKLLR

SEQ ID NO: 104599 - protein, 122 aa, Gossypium hirsutum
  Clone ID: LIB3493-011-P1-M1-H9.pep
DGNLHVALLPSSGMGHLLPYLRLAASLIHHQCSLTLITTHPIVSSAESQLISTFLSAFPQITQKKFTPIPLDPVAANITDPFQIQWETIRQSAHLLSPLISSSSPPLSFIITDVTLMSSVIS

SEQ ID NO: 104600 - protein, 162 aa, Gossypium hirsutum
  unsure (1)..(162): unsure at all Xaa locations
  Clone ID: LIB3493-012-P1-M1-A12.pep
ENLIAETTPRSIPELDIEEEFVLARDTKEGCHESELAQKMKELGLQRARKYGWQDTYVFTKAMGEMMINNMRGDLPVVIIRPSVIESTCKEPFPGWMEGNRMMDPIVLCYGKGQLTGFLVDPNGVLDVVPADMVVNAXLAAIARHGMTPKQDLTSTHRIISC

SEQ ID NO: 104601 - protein, 84 aa, Gossypium hirsutum
  unsure (1)..(84): unsure at all Xaa locations
  Clone ID: LIB3493-012-P1-M1-A3.pep
VKAKDSDDDGNPSGHSQGLSSTIADDEVVKYLEPLAILAEKVIEDESVLRIGETFEGPYKDQREPKIVQEEIVMGVSEXTVKDA

SEQ ID NO: 104602 - protein, 81 aa, Gossypium hirsutum
  unsure (1)..(81): unsure at all Xaa locations
  Clone ID: LIB3493-012-P1-M1-A8.pep
TDRTPRSQFEVRETSLIWNYKYSDVEFGRLQARDLLQHLWTGPISNASLDVVQGRRPCEGAAFDRIPREIVHNKXMKEPID

SEQ ID NO: 104603 - protein, 97 aa, Gossypium hirsutum
  Clone ID: LIB3493-012-P1-M1-B1.pep
MIAPIAVALTVGLLGWTYRALKPPIPKICGSPDGPPVTSPRIKLSDGRHLAYREAGVPREEAKYKIVVIHGFGSSKDLNLPASEELVEELRIYFLFF

SEQ ID NO: 104604 - protein, 125 aa, Gossypium hirsutum
  Clone ID: LIB3493-012-P1-M1-B10.pep
SYDGIKAIGQCCQMLEELTLSEHRMDGGWLAGLSFCGNLKTLRLRSCKSIDKSPGADEHLGSCLTLEELHLQGLQVRDKQSVKALFLVCENVRDIVLHDWWGFEDDVFSLASICRRGKLLSLEGC

SEQ ID NO: 104605 - protein, 41 aa, Gossypium hirsutum
  Clone ID: LIB3493-012-P1-M1-B11.pep
LCRCCYLSAAVRVLGCSTNSPLLTPATWTLFLPLMHSSLPR

SEQ ID NO: 104606 - protein, 138 aa, Gossypium hirsutum
  Clone ID: LIB3493-012-P1-M1-B12.pep
RTRGINLRVARNSSVKAVQSSSVESDTGRWVRKRRHQNVDGDFFVDHTCIDCDTCRWMAPQVFTRVGEMSAVYKHATSSEDRLKALQALLSCPTSSIRTEVPPPDILEAQKTFPISVDEKKLPGVYHCGYHSEKSYGA

SEQ ID NO: 104607 - protein, 148 aa, Gossypium hirsutum
  Clone ID: LIB3493-012-P1-M1-C2.pep
KTTDYSLLCSLSKSRSGTINEFSTTVDQLKAIIHYATSRIVPQQNFREISVTFDVLQKRSPCNFLVFGLGYDSLMWTSLNPGGNTLFLEEDPKWILTVLKDAPSLRAHAVKYRTQLKQANSLLAHYKSEPNCHPSKAYLRGSPYVKLA

SEQ ID NO: 104608 - protein, 84 aa, Gossypium hirsutum
  unsure (1)..(84): unsure at all Xaa locations
  Clone ID: LIB3493-012-P1-M1-C5.pep
MEVLHFIFGVFGNATALFLFLAPTITFTRIIRSKSTEHCXGIPYVMALLNWILSGXYVVPFVSKYNRSVFNIXIGTGAGIETIY

SEQ ID NO: 104609 - protein, 138 aa, Gossypium hirsutum
  unsure (1)..(138): unsure at all Xaa locations
  Clone ID: LIB3493-012-P1-M1-D12.pep
AGPSANIEYLSRAKERIKEGLGARRPWKLMFNFHSINFPGNLSEAITRVRTNVAYFRMNYAMIVLLILFLSLLWHPISLLVFVAMMAAWLFLYFLRDEPLVVFRRTIDDRVVLVVYXGVTILFLLVTDATTNIMVSLL

SEQ ID NO: 104610 - protein, 110 aa, Gossypium hirsutum
  Clone ID: LIB3493-012-P1-M1-F10.pep
VSCILMSNFGSLYKRKDLIKIGRCCRPEIGGIESPNPLFTVLWRLGGCACNILSPLLHIYFHRHRRRICSHLRSSGCRALLAAIFAPECKIGIKYFILVYRNTKIFAHAS

SEQ ID NO: 104611 - protein, 48 aa, Gossypium hirsutum
  unsure (1)..(48): unsure at all Xaa locations
  Clone ID: LIB3493-012-P1-M1-F7.pep
FLNKIFLFXLIXFXNILFIHIIIFFFYFFFLKRQSRELFIHFLDDIQA

SEQ ID NO: 104612 - protein, 96 aa, Gossypium hirsutum
  unsure (1)..(96): unsure at all Xaa locations
  Clone ID: LIB3493-012-P1-M1-G6.pep
MAARILANLIVMGSGILGRAVFQAYRQALANASKSGVAQETMQNIRRGSKIMAEPEARQILGVTEHSXLGGVLKKYDNLFEQNAKNGSFYPRSKVH

SEQ ID NO: 104613 - protein, 98 aa, Gossypium hirsutum
  Clone ID: LIB3493-012-P1-M1-H12.pep
MGDSLNSETESSTVSNNSSPSTSPYGKRLGTELIPDPKREKRPRDNSKHPVYRGVRMRSWGKWVSEIREPRKKNRIWLGTFSTPEMAARAHDVAALSI

SEQ ID NO: 104614 - protein, 65 aa, Gossypium hirsutum
  unsure (1)..(65): unsure at all Xaa locations
  Clone ID: LIB3493-012-P1-M1-H2.pep
GRVSSDARDITKVKVKVTNTKWQSMSRNWSQNXPSNTGLVGHALSFRVTDSDRRTSTSLNVAPAN

SEQ ID NO: 104615 - protein, 53 aa, Gossypium hirsutum
  Clone ID: LIB3493-012-P1-M1-H3.pep
SMVNFIDQIDTFGLFTKCYQCPPPSVAVSPPSHGLNTTAAAPLHQPFNHTRRH

SEQ ID NO: 104616 - protein, 84 aa, Gossypium hirsutum
  unsure (1)..(84): unsure at all Xaa locations
  Clone ID: LIB3493-012-P1-M1-H5.pep
SLLLLLPFLKVNWRFGFXVPLYICKFEHPRQIKWGPVGVHRLVVIAIYGSILFIYHSKWRERXPCMFILNALKLFACALTGNGA

SEQ ID NO: 104617 - protein, 109 aa, Gossypium hirsutum
  unsure (1)..(109): unsure at all Xaa locations
  Clone ID: LIB3493-012-P1-M1-H8.pep
FTKKKKAQNKLISEMDRIPQELALDILSRLAIPSLVQSKSVCQDWRTLTHDQLLVNKHFKQMVENDPSFILHIMGYSIQNQXYFGDLSSDRNDWNVTMIAKKLTIPPLV

SEQ ID NO: 104618 - protein, 126 aa, Gossypium hirsutum
  Clone ID: LIB3493-013-P1-M1-A5.pep
DAWENFAPENELGRGGFGVVYKGELDDGTQIAVKRMEAGVITSKALDEFQSEIAVLSKVRHRHLVSLLGYSIEGNERILAYEYMTQGALSQHLFHWKSLKLEPLSWKRRLNIAPGVARGMEIFTHW

SEQ ID NO: 104619 - protein, 84 aa, Gossypium hirsutum
  Clone ID: LIB3493-013-P1-M1-B12.pep
IPMPITSFSLFRSRLPGITTVLRRHSPPYRHLFIVSAKQTPPNPRQSVSKKPQPNKNLLKAKHTFKDYSSLAPVLAPNETPSLS

SEQ ID NO: 104620 - protein, 73 aa, Gossypium hirsutum
  unsure (1)..(73): unsure at all Xaa locations
  Clone ID: LIB3493-013-P1-M1-B6.pep
LFFSSIFFLYNWKVPXGLYPFSTYAFDTGTKHRYSIKNEEPEQHEFNIHDVNRTNRSCGSLQQLISLKYHSIY

SEQ ID NO: 104621 - protein, 62 aa, Gossypium hirsutum
  unsure (1)..(62): unsure at all Xaa locations
  Clone ID: LIB3493-013-P1-M1-B9.pep
GEHKIEPGGLSFRDVLNILHNLEGNLVAADVVEFNPQRDTVDGMTAMVAAKLVKKLXAKMSK

SEQ ID NO: 104622 - protein, 154 aa, Gossypium hirsutum
  unsure (1)..(154): unsure at all Xaa locations
  Clone ID: LIB3493-013-P1-M1-C4.pep
YHQQLYDAGIIYAHANVLGMASPVLRGMLKRAKGFGKKRSISIHGVHQDAVRVFIRFLYSSRYEYEEMKEFMVPLLVLSHAYAVSSLKRVCEQQLEHGLLNLENVVDIFQLSLLCNAPRLTLISHRMDLSNXKGCXATEGWKSMRNSHPGLEKE

SEQ ID NO: 104623 - protein, 59 aa, Gossypium hirsutum
  Clone ID: LIB3493-013-P1-M1-C5.pep
WKSRMHTIAASIATLKANKEELYFFYFGHLGYIAQAIAICFSYIPTCYDLWLQCHKQTK

SEQ ID NO: 104624 - protein, 111 aa, Gossypium hirsutum
  unsure (1)..(111): unsure at all Xaa locations
  Clone ID: LIB3493-013-P1-M1-D5.pep
MSKQDLRHYSVPYSRLSPNPNHQNVVFXPVYYPRHNDNYRXXRHXXAFTSVILLLSAALFLLYPXSDPTLELARLQLKHVGVNTSPKLTLDPLIFCDHSGSVTRDFFSLDY

SEQ ID NO: 104625 - protein, 157 aa, Gossypium hirsutum
  unsure (1)..(157): unsure at all Xaa locations
  Clone ID: LIB3493-013-P1-M1-D8.pep
KRDRQLTMQTGLDWTKYVYGLLKTGGMLXVRRFYISNCEKRIAMQLEQATLEDLLIPNXSDXMETLYXXYCVQEILAHFIATDQIIGGASPSVADDADTTASPSLTPVTXVAKLIDGYLAQXASDVNLKLPKFQAXAAIVPDYSRPLDDGLFRAVDI

SEQ ID NO: 104626 - protein, 71 aa, Gossypium hirsutum
  Clone ID: LIB3493-013-P1-M1-D9.pep
DSVFLDRKFYHHEKNLIQLDSSQVLRDRDDIDWNQVGYDVLTQVGLPEDTLVKIVKEEEEPTEFLELLRTF

SEQ ID NO: 104627 - protein, 40 aa, Gossypium hirsutum
  Clone ID: LIB3493-013-P1-M1-E6.pep
VRLTHLRSFPFRLSRSPHRYLPSLFPASVCISHASFYLIR

SEQ ID NO: 104628 - protein, 87 aa, Gossypium hirsutum
  unsure (1)..(87): unsure at all Xaa locations
  Clone ID: LIB3493-013-P1-M1-E7.pep
NTHXQILAYSPKLKEVNFETEEKKKKRRNGWIERGRMGKKEKEYXSHGVQQHVTYIVPQKRELLKRGEXVKGESWGGGGVAACLPVR

SEQ ID NO: 104629 - protein, 102 aa, Gossypium hirsutum
  unsure (1)..(102): unsure at all Xaa locations
  Clone ID: LIB3493-013-P1-M1-F4.pep
XLSGQLPIAIGNLTQLQTLSLRFNALSGSIPSDFAKLTTLRNLYLQGNGFSGQIPGFLFTLQNLIRLNLANNNFSGTIPXSVNNSTRLGTLFLENNHLSGSI

SEQ ID NO: 104630 - protein, 70 aa, Gossypium hirsutum
  unsure (1)..(70): unsure at all Xaa locations
  Clone ID: LIB3493-013-P1-M1-F6.pep
GLVVYRAHLDVEREGFLDENEGRYSWFMNFLRACFRPKSDQYSHTSLDTRGRQDGLLWTRTQGSTSXGEF

SEQ ID NO: 104631 - protein, 53 aa, Gossypium hirsutum
  Clone ID: LIB3493-013-P1-M1-F8.pep
IVTAVTRSTHPVDLPSQFVLFLPFQPSKVIFMASSPSNPRVCVRVGRPPVMPG

SEQ ID NO: 104632 - protein, 171 aa, Gossypium hirsutum
  unsure (1)..(171): unsure at all Xaa locations
  Clone ID: LIB3493-014-P1-M1-A11.pep
PPSRIGHHFGQLLKTGKGTDVSFEVDGEVFYAHKLVLAARSPVFRAQLFGPMKEQNTKQIKVEDIEAPVFKAXLHFMYWDSLPDMQELTGLDFKWVTTLMSQHLLAAADRYGLERLRLLCESNLWEDVTINTAATTLALAEQYHCFQLKAVCLKFVAVPENLRAGMQTDGF

SEQ ID NO: 104633 - protein, 146 aa, Gossypium hirsutum
  unsure (1)..(146): unsure at all Xaa locations
  Clone ID: LIB3493-014-P1-M1-A2.pep
QFGAKADEKTDLSQPLLNAWKEACASPAPSQIVIPAGTFLLSRAALEGPCKGPVDIQVQGTIKAPSDPSHFKDXSWVIFSRIEGFTMSGGGIFDGQGALAWSKNDCHKNKKCTLFPINIRFNFLTNAYIHDITTKDSKQVNVNVLG

SEQ ID NO: 104634 - protein, 73 aa, Gossypium hirsutum
  Clone ID: LIB3493-014-P1-M1-A8.pep
QNLMWWSFDWEEKDKRKFCLQFPVIEQHNSARFSSFPCISPGLFHLALLIYKVYKKVAFFFFKLILVIYKTIQ

SEQ ID NO: 104635 - protein, 47 aa, Gossypium hirsutum
  Clone ID: LIB3493-014-P1-M1-B11.pep
HCVLLLIADTIILSYNRFHLSLLGFYSDFNTCYHSFFLLVYVIICIL

SEQ ID NO: 104636 - protein, 49 aa, Gossypium hirsutum
  Clone ID: LIB3493-014-P1-M1-B12.pep
THDKYIFQFIEWFTLTNSLTHYKYINIYKYQSMEWFTLTNILWIGNCEC

SEQ ID NO: 104637 - protein, 138 aa, Gossypium hirsutum
  unsure (1)..(138): unsure at all Xaa locations
  Clone ID: LIB3493-014-P1-M1-B3.pep
AFYSGIVAYAPVKELTVIIVLASAVLAIAEATVPNSISCQPYMLTISGLIGYAAVTGYISEPLYWTLLLGLYSFSRXIKKRDDVTSALPVAAVMAAIXEPWVRILVITSYLALAIXNHSKKLSEVTETECIAMERPLQ

SEQ ID NO: 104638 - protein, 72 aa, Gossypium hirsutum
  Clone ID: LIB3493-014-P1-M1-B5.pep
RLRPRIISKGGVSCQFIPFSHTEHTLATLRRGNSRFSLDKRYQERPRDRAPNILSSDYHLQCAGKQVSDEKI

SEQ ID NO: 104639 - protein, 115 aa, Gossypium hirsutum
  unsure (1)..(115): unsure at all Xaa locations
  Clone ID: LIB3493-014-P1-M1-C10.pep
INTVSLFGSNSGELFDEPTWLFSSGKGAAICTYAGSGEAHXSAGGGKGRKAMLVCRVIAGRVSKRVGFGYESLMDGRIGYDSVSGDNGELLVFDPRAVLPCFLISTNCKFPLIDL

SEQ ID NO: 104640 - protein, 58 aa, Gossypium hirsutum
  Clone ID: LIB3493-014-P1-M1-C11.pep
VWYHDDLFTILLGYIGFTPILHFLLTLNITFIFPPLLISFTPPPHCLSSLPISQDNIT

SEQ ID NO: 104641 - protein, 147 aa, Gossypium hirsutum
  unsure (1)..(147): unsure at all Xaa locations
  Clone ID: LIB3493-014-P1-M1-C3.pep
ELFGGPRNYPSAGSSVMLALDGDFKTAVIVICGGAEYGAFIERSTDTPAHGSCGRIIATDPNPVWEMEDMPFGRXMGDMVMLPTGDVLIINGAQSGTQGFEMASNPCLNPVLYRPDQPIGLRFMTLNPGTVPRMYHSTANXLPDGRF

SEQ ID NO: 104642 - protein, 38 aa, Gossypium hirsutum
  Clone ID: LIB3493-014-P1-M1-C9.pep
SALLDLKRCFIVAHLLLTRLISRTYIRILLYRVIGCTT

SEQ ID NO: 104643 - protein, 49 aa, Gossypium hirsutum
  Clone ID: LIB3493-014-P1-M1-D10.pep
VLELQKAWPGSEVRWVTGGHVSSFLLHNNEFRKAIVDGLNRLEWKESSL

SEQ ID NO: 104644 - protein, 167 aa, Gossypium hirsutum
  unsure (1)..(167): unsure at all Xaa locations
  Clone ID: LIB3493-014-P1-M1-D4.pep
EHSVRKWEPSIDGYLKFLVDSKLVYDTLESIIDEAAFPIYAEFRNTGLERSEKLAKDLQWFEEQGYAIPKPSSPGXTYAEYLKEISDKDPQAFICHFYNTYFAHSAGGRMIGKKVAQQILNNRELEFYKWDGDLSQLLQNVRDKLNKVAESWTRDEKNHXLEETEKS

SEQ ID NO: 104645 - protein, 57 aa, Gossypium hirsutum
  Clone ID: LIB3493-014-P1-M1-E11.pep
IKTCFFARNDNLMSTTLCVIDKDSSQSLRLIDVDTYHSRDSYIYGISSTMQVKHGPL

SEQ ID NO: 104646 - protein, 107 aa, Gossypium hirsutum
  unsure (1)..(107): unsure at all Xaa locations
  Clone ID: LIB3493-014-P1-M1-E6.pep
VRSIIKKGLHNISHHVSNSLVMLNKVPGVNKSKPEVFPGYGRVKNGFPTWLSXRDRKLLQASLNETKFDLIVAKDGTGNFTNIXRAVSAAPNNSDTRLILYCTYISV

SEQ ID NO: 104647 - protein, 82 aa, Gossypium hirsutum
  Clone ID: LIB3493-014-P1-M1-F10.pep
NLIMITWKRNWGFLIVFGMEGFSYKEIIMLLNKNWDLVYLLYLKNLFIFSLLNCVDTGCASFPIITIIFFFNKNIQTMVKTP

SEQ ID NO: 104648 - protein, 46 aa, Gossypium hirsutum
  Clone ID: LIB3493-014-P1-M1-F12.pep
RWRGSIPTYWVWSIPTSTHETRTSSMTDTSCFTALTLPNGGPCALY

SEQ ID NO: 104649 - protein, 56 aa, Gossypium hirsutum
  Clone ID: LIB3493-014-P1-M1-F5.pep
LHQTSLQIHHSSKAKCSNVFSSLPGTVIPSSCSITLLFLYNISHPFQYQLLSSYLV

SEQ ID NO: 104650 - protein, 108 aa, Gossypium hirsutum
  unsure (1)..(108): unsure at all Xaa locations
  Clone ID: LIB3493-014-P1-M1-G10.pep
RRNRLVRNIITCLVLLDRDLKPVKDLVREDGHIMLSDFDLSISCADRPMLVKSPSRESQPLRKNPCYCLQPACIEPCXIQPSCVAPTTCLCTWSIFXKSKKDREPMNE

SEQ ID NO: 104651 - protein, 55 aa, Gossypium hirsutum
  Clone ID: LIB3493-014-P1-M1-G12.pep
AISGDEALISGGYKYKSLSDAKKAPDISPADKRKVEHEKNIKAYTKIQTEDSIED

SEQ ID NO: 104652 - protein, 110 aa, Gossypium hirsutum
  unsure (1)..(110): unsure at all Xaa locations
  Clone ID: LIB3493-014-P1-M1-H1.pep
LVYDTIYAHQDKEDDMKVGVKSTALRFGDSTKEWTTGFGIACISSLALSGYNADIGWPYYVFLAAASGQLAWQTGXVNLTCRADCNRKFLSNKWFGALIFSGILFGRVFS

SEQ ID NO: 104653 - protein, 74 aa, Gossypium hirsutum
  Clone ID: LIB3493-014-P1-M1-H6.pep
CEFPKPSPFPSNPLLSLSTWRHRLGAELDTLLHTYQPEWSPNLLKANPTKPIPRTVRSLSYYLSRMLLLRWLPP

SEQ ID NO: 104654 - protein, 147 aa, Gossypium hirsutum
  unsure (1)..(147): unsure at all Xaa locations
  Clone ID: LIB3493-014-P1-M1-H7.pep
ITLKQRIKEAHTLAFYPMAVEAPHMNPFPPQLITNSSGFMKTNQRSGNICSGQVDYCIPLVDSMKQDSQFFPLYQSIVCDPVSAKTSINKADSGLTYNMNIPVSATRKRPRDSIINGFDSYTVSQKNKLCGFPLFLMMMSSXRSNNN

SEQ ID NO: 104655 - protein, 58 aa, Gossypium hirsutum
  Clone ID: LIB3493-014-P1-M1-H8.pep
VIQRNEYEASSSGEAEHQLTCVMNFGGSSMASAERTTEAADLILTSPNERPVIELSDM

SEQ ID NO: 104656 - protein, 42 aa, Gossypium hirsutum
  Clone ID: LIB3493-015-P1-M1-A3.pep
KKNIVLSYYLGTTLNYEILELHYLQLWFPFEYDIIHKFFFFP

SEQ ID NO: 104657 - protein, 90 aa, Gossypium hirsutum
  unsure (1)..(90): unsure at all Xaa locations
  Clone ID: LIB3493-015-P1-M1-A8.pep
LDLILMCTYTAEDILGXSAPHIQRELGCENSPLAYDITAACRGFVLCLISYDSHIKGGGFLNVLVVGAHVLSQIVDATDRXGSCLLCGDA

SEQ ID NO: 104658 - protein, 40 aa, Gossypium hirsutum
  Clone ID: LIB3493-015-P1-M1-B2.pep
EESDEEDEEDIDFDDDDFEDDDEDMLEHYLAEKSDLSTHS

SEQ ID NO: 104659 - protein, 63 aa, Gossypium hirsutum
  Clone ID: LIB3493-015-P1-M1-D4.pep
FLHLFTTLKDQFFWCMLKLVGLCSSCRPQPFCRISSHESILIYASSSNTSYNASVVVFHTIIR

SEQ ID NO: 104660 - protein, 118 aa, Gossypium hirsutum
  Clone ID: LIB3493-015-P1-M1-E11.pep
GARETLRLLISGSTQSNPPLIDVLPAVLTNADEKKGIFVAGSRGLYSGTRDVSAIATVSLVTLTSSSVVDSIIKQCSSSSNSHDDPDTKKLTGSSSSDESCSSSNGAKLSGSREEKVE

SEQ ID NO: 104661 - protein, 46 aa, Gossypium hirsutum
  Clone ID: LIB3493-015-P1-M1-E12.pep
HIHICHSHKDTAVWFTKYMKKNFKKSIKHTHIRYLFHFYLVCVSLE

SEQ ID NO: 104662 - protein, 53 aa, Gossypium hirsutum
  Clone ID: LIB3493-015-P1-M1-E3.pep
QICKYKLNLNNTSSAFLEASEYALGFYIISPPFVTFFFFIDSEEKRKEKTHGF

SEQ ID NO: 104663 - protein, 154 aa, Gossypium hirsutum
  Clone ID: LIB3493-015-P1-M1-E9.pep
VDLYAFVIGSYFIWTAMAGARYTIEHIRTKRAAVLLSQIWKWSAIVIKSSVLLSIWIFVIPVLIGLLFELLVIVPMRVPVDESPVFLLYQDWALGLIFLKIWTRLVTVIPKFIMYNRKRKLFRHVLDFRDRHWRILFHDSQKLISYIHRLCWII

SEQ ID NO: 104664 - protein, 68 aa, Gossypium hirsutum
  Clone ID: LIB3493-015-P1-M1-F3.pep
LTRGLHVRKEKVRDRITAFHQLVSPYGKHLKADSSHMFKTVYDLEVPREHWPFYKIQPHTEIYTDGQQ

SEQ ID NO: 104665 - protein, 142 aa, Gossypium hirsutum
  Clone ID: LIB3493-015-P1-M1-F6.pep
MATGGMDEASNMKVVLKHYVSGSPQETDMHLTAGTIKLKVPKDSNSIILKNLYLSCDPSMIFKMMKLERQLTDPYVLGSPITGYGVAKVLDSAHPGFAKDDLVWGITGWEEYSLISDPKNFFKIQHTDVPLSYYAGILGMPG

SEQ ID NO: 104666 - protein, 77 aa, Gossypium hirsutum
  Clone ID: LIB3493-015-P1-M1-G7.pep
NLITNNPNPQPNSQTAQKAQLLGNARNLRVSRTHQCCNRAHARLSRATFSVRSFLHTLQNRHGFFFASLKSKSEEWS

SEQ ID NO: 104667 - protein, 99 aa, Gossypium hirsutum
  Clone ID: LIB3493-016-P1-M1-A12.pep
MIASCLVKDPSKRPSAKKLLKHSFFKQARSSDYISRTLLDGLPALGDRIQALKRKEEDMLAQKKMPDGEKEELSQNEYKRGISEWNFNLEDVKAQASLI

SEQ ID NO: 104668 - protein, 103 aa, Gossypium hirsutum
  unsure (1)..(103): unsure at all Xaa locations
  Clone ID: LIB3493-016-P1-M1-B1.pep
APDALRLLGNQATYDESTVLGAFQYVYSDIYLHRDKNLMPKNPAAWSAWNFLGSTDKNVSLTYWLNVLQNLGETSLPFLVTLNPDYTPQHXLLKWRTGHPVPS

SEQ ID NO: 104669 - protein, 109 aa, Gossypium hirsutum
  unsure (1)..(109): unsure at all Xaa locations
  Clone ID: LIB3493-016-P1-M1-B4.pep
MLSGLTAGSQLQPKVLSFHSRXITVQNGGKLLALRIKAYPKNKVRCXIAESDQDFSSIKGYEKNHPLVKMCGITSARDAAMAAEAGANFIGMILWPKSKRSISLSVAKE

SEQ ID NO: 104670 - protein, 119 aa, Gossypium hirsutum
  Clone ID: LIB3493-016-P1-M1-B9.pep
EDIRMPTNARLKATSMLMQLISCGSISVKDHSFGLVPTYRPRFSHSKFSSPLFSTSIMLGELDCLSENPRLMGLRLEDKEYFSGSLIETKMLKEGEGHTTLERSSSYNDDRARKELESA

SEQ ID NO: 104671 - protein, 111 aa, Gossypium hirsutum
  Clone ID: LIB3493-016-P1-M1-C10.pep
DVDIDSEYKNYSASTRHSLEAWSGSQIDLGLVEATLEHICRHEADGAILVFLTGWDDISKVLDKIKVNSFLGDLSKFLVLPLHGSMPTINQREIFDRPPPNKRKIVLATNI

SEQ ID NO: 104672 - protein, 110 aa, Gossypium hirsutum
  Clone ID: LIB3493-016-P1-M1-C11.pep
FVFLFSLKSAVNHDAIVNANDEEKVRLEEQASQVAQRAAEALRQSRMLRSHDSISVPTWTGKSGAAGAPSAVRKKFGSALNTQLVKPSGESSSTGIAAGAAASKALSSAE

SEQ ID NO: 104673 - protein, 84 aa, Gossypium hirsutum
  unsure (1)..(84): unsure at all Xaa locations
  Clone ID: LIB3493-016-P1-M1-C2.pep
ERKLXTVPTXMNEVXSNGWNXDCXDDMNLSTSLFPTTXCHEFSTAXPLEQDXXYFNGXYWPFGDEFSAPQLTDSSNNTFDTPPP

SEQ ID NO: 104674 - protein, 123 aa, Gossypium hirsutum
  Clone ID: LIB3493-016-P1-M1-C3.pep
VVPAITDVTMFALCPGTDECSLAIYLSGFQQAVIGVGTALMMPLIGNLSDQYGRKSLLTLPMTLSIIPYAVLACSTTTNYFYAYYTLRTLTAMISEGSINCLALAYLADNISDTQRASAFGIL

SEQ ID NO: 104675 - protein, 128 aa, Gossypium hirsutum
  unsure (1)..(128): unsure at all Xaa locations
  Clone ID: LIB3493-016-P1-M1-C4.pep
HFLDAARENLSQEHFVASDVHKATNFYCVPLQEFTPEAGSYNVIWIQWCIGHLTDDDXISXFKRAKVGLKPGGFFILKENIARNGFVLDNEDRSITRSDLYFKGPIRQCGLHLYKMKDQKGLPEECLL

SEQ ID NO: 104676 - protein, 32 aa, Gossypium hirsutum
  Clone ID: LIB3493-016-P1-M1-C6.pep
SPRMSLYSSFNSVLSLDCLINQVGIHPRPGLS

SEQ ID NO: 104677 - protein, 109 aa, Gossypium hirsutum
  unsure (1)..(109): unsure at all Xaa locations
  Clone ID: LIB3493-016-P1-M1-D1.pep
AFISEIIALHKFLSEYGPDDDDQSLFQVFGSHKGKDKATTGAINGIARLQALQSLRKLLDDPIKLVPFSFLQKCTXGDAVFQTLAVKXWGGHLVAELTECGYPQAQGMS

SEQ ID NO: 104678 - protein, 109 aa, Gossypium hirsutum
  Clone ID: LIB3493-016-P1-M1-D11.pep
DLSNNHLTGNIPESLGELSYNTINFSNNELYGPIPLSLIKDGLVESFSGNPGLCAPVEVQSFPKCSHKHNQKKRNSMWAIMISVIVFTIGAILFLRRRYSKQKRCSKNM

SEQ ID NO: 104679 - protein, 130 aa, Gossypium hirsutum
  unsure (1)..(130): unsure at all Xaa locations
  Clone ID: LIB3493-016-P1-M1-D3.pep
RKLNLCCIVFDFTDPTKNLKEKDLKRQTLLELVDYVSSANGKFSEIVMQEIVKMVSVNLFRALTSSPRENKVLEAIDLEDEEPSMDPAWPHLQVVYEFLLRFVASPETDAKLAQRLYDHSFVXRWLDLFD

SEQ ID NO: 104680 - protein, 88 aa, Gossypium hirsutum
  unsure (1)..(88): unsure at all Xaa locations
  Clone ID: LIB3493-016-P1-M1-D6.pep
MSSSGVVRRGIHYLQKLKAANIPSDLIEKGQNRVIDASLTLIRERAKLKGEXVRAXGGALASTSLLXVPLGHNSSFXQGPAFAPSRIR

SEQ ID NO: 104681 - protein, 97 aa, Gossypium hirsutum
  Clone ID: LIB3493-016-P1-M1-E1.pep
AVEMDQFMSNRTQNTTNIININKKNWEKRIKTLRSYDQKRKRLYMCTYYLHQSSILIEVHHQVFGQVCPTLYTANPPKARHSVFAHLLHFFPLQPWL

SEQ ID NO: 104682 - protein, 88 aa, Gossypium hirsutum
  Clone ID: LIB3493-016-P1-M1-E3.pep
STTEVPLIATSETQSSSSPPENESGAEIFKSERTRKSETGNERKGKVKNDEIFEGKHQTYRGVRMRQWGKWVSEIREPKKKSRIWLGT

SEQ ID NO: 104683 - protein, 109 aa, Gossypium hirsutum
  unsure (1)..(109): unsure at all Xaa locations
  Clone ID: LIB3493-016-P1-M1-E4.pep
MGRGRVELKRIENKINRQVTFSKRRNGLLKKAYELSVLCDAEXVPLIIFSNRGKLYEXGSSGMTKTLERYQQYCXTPQPQHNIPEHETQSWYQEINKLKAKYEALERTQ

SEQ ID NO: 104684 - protein, 61 aa, Gossypium hirsutum
  Clone ID: LIB3493-016-P1-M1-F8.pep
VYVIRKRIKLSAEKAIFIFVDNVLPPTGAIMSAIYEEKKDEDGFLYVTYSGENTFGDQISQ

SEQ ID NO: 104685 - protein, 107 aa, Gossypium hirsutum
  Clone ID: LIB3493-016-P1-M1-G1.pep
MTMVTKMVMVLVFMAANTGVKWVGAQVHHVVGGDRGWDPSFDVASWSSGRIFRVGDKICFPSSAAQESIVEVKSKDEYESCDVGNPIRIYTVGLDGIELDWEGFDTS

SEQ ID NO: 104686 - protein, 51 aa, Gossypium hirsutum
  Clone ID: LIB3493-016-P1-M1-G4.pep
ISLLFETYQHYYHEHVTSPFPLSSFSINFCFKILIINRHTMVIDSCVVRFD

SEQ ID NO: 104687 - protein, 131 aa, Gossypium hirsutum
  unsure (1)..(131): unsure at all Xaa locations
  Clone ID: LIB3493-016-P1-M1-H2.pep
LRTHKKRADKKKNRKSSSGSGSXMAKRKQGLGWIEWLRGXMYVIYEMLFQRITASHLHNPLELPPLSDLTCIVTGSTSGIGREIARQLAEAGAHVVMAVRNPKAAHELINQWSASWHGLPLNNEVMQTDLL

SEQ ID NO: 104688 - protein, 57 aa, Gossypium hirsutum
  Clone ID: LIB3493-016-P1-M1-H5.pep
YNLTVVRSLSRLRTSGDPNVTKPTRVSTRVGGAAKTGVFSPCYSTIISFFCCVFLFF

SEQ ID NO: 104689 - protein, 65 aa, Gossypium hirsutum
  Clone ID: LIB3493-018-P1-M1-A4.pep
ISFGLRGKKKTDLLSLFPFHQKSEKQKISSSLLESSILSLSICLKFPAFFSSLHLIVFLVFVQFY

SEQ ID NO: 104690 - protein, 129 aa, Gossypium hirsutum
  Clone ID: LIB3493-018-P1-M1-B12.pep
VLTFHAVAFAVGYWISKVPAFRQREEVSRMVSLCTGMQSSTMAGLLATQFLGSSSQAVPPACSVVAMAIMGLSLASFWGNGFRIRDLPSQLIPHTGSAFQAQWNKHIRHLRGMDQGSFNFQRERDGHVF

SEQ ID NO: 104691 - protein, 72 aa, Gossypium hirsutum
  unsure (1)..(72): unsure at all Xaa locations
  Clone ID: LIB3493-018-P1-M1-B2.pep
MKITSTVALKCNPEGSDPIILANATDESHIRYLQRSSVKEMIDYVSRTCSKRTSFXQRQSVQHEEYRVHAYN

SEQ ID NO: 104692 - protein, 122 aa, Gossypium hirsutum
  Clone ID: LIB3493-018-P1-M1-C1.pep
AFRAAVLRHIRLPVQTLKPTASRAPSQWSLLRLFSSHDDHLTKEEVIDRVLDVVKSFPKVDPSKVTPDVHFQKDLGLDSLDNVEIVMALEEEFKLEIPDKEADKIDSCNLAIEYIYNHPMGW

SEQ ID NO: 104693 - protein, 103 aa, Gossypium hirsutum
  unsure (1)..(103): unsure at all Xaa locations
  Clone ID: LIB3493-018-P1-M1-C11.pep
AKSTTFQSLGCQAPQCKQVQNPSCDGSGNTCIFNMTYGGSAIAANLSQDTFTLANDSVSSYTXGCLQKTTGNSVPPQGLLGLGRGPLSLLSQTQDLYQSTFSY

SEQ ID NO: 104694 - protein, 141 aa, Gossypium hirsutum
  Clone ID: LIB3493-018-P1-M1-C12.pep
RTRGFIDKVKEAVTRCQRTQLLIDMLSTGENEAGLEVPDMSIFRPEIEENGCSNDQKLDMDKILSILDVNSLVEEAVSAKVLGKNSDFYGVGLWILVSFINHSCNPNARRLHVGDCVIVHASKGCKAGGKITFMYFDALSP

SEQ ID NO: 104695 - protein, 69 aa, Gossypium hirsutum
  Clone ID: LIB3493-018-P1-M1-C2.pep
KTTKTKKKKKNHPKPTKQQLSTSQISAKQLYSPSEKKIKTGKRTKTNALNPKLEIQRTFSSFKANQREP

SEQ ID NO: 104696 - protein, 74 aa, Gossypium hirsutum
  Clone ID: LIB3493-018-P1-M1-C5.pep
KQRTVLRKLLLQMIPRMTTSHTANANGKAEGNARYNGSYFRQYLLQAMSKVIWILPCILAFQILVHNIMPYSRH

SEQ ID NO: 104697 - protein, 64 aa, Gossypium hirsutum
  Clone ID: LIB3493-018-P1-M1-D12.pep
YTELLNRKLLDWVNSTGRVYMTHTKVGGIYILRFAVGATLTGDNHVVAAWKLIKEGADALLKTV

SEQ ID NO: 104698 - protein, 116 aa, Gossypium hirsutum
  Clone ID: LIB3493-018-P1-M1-E1.pep
PSSTPSTKNTEKTTQSQQWNPLQRAAAMALDAVENALVSHERQHPLPKTADPGVQISGNFAPVPEQPVKQRLPVIGTIPDCIQGVYARNGANPLHEPVAGHHFFDGDWMVMPVIQK

SEQ ID NO: 104699 - protein, 156 aa, Gossypium hirsutum
  unsure (1)..(156): unsure at all Xaa locations
  Clone ID: LIB3493-018-P1-M1-E2.pep
DLEHIDMVVLSIGHWFLHPAVYYEGVSXLGCHYCPGLNHTEIGFYDVMRKAIKTALKAIIERKSTDGNGIDVFLTSFSPSHFEGEWDKAGACPKTKPYEEGEKMVEGMDADMRSIANEEMEAAKVNAKNSKDXRLETFDVTQISLMRPDGHPGPYM

SEQ ID NO: 104700 - protein, 125 aa, Gossypium hirsutum
  Clone ID: LIB3493-018-P1-M1-E8.pep
YAASDMFIIPSIFEPCGLTQMIAMRYGSVPIVRKTGGLNDSVFDVDDDTIPYQYRNGFTFATPDEQGLNGALDRAFNLYNNDSETWQQLVQKNMNIDFSWRSSASQYEELYAKSVARARAATSRT

SEQ ID NO: 104701 - protein, 103 aa, Gossypium hirsutum
  Clone ID: LIB3493-018-P1-M1-F11.pep
MELFITNTTRFISSTGWVKSSYGIVTTKSIQDLSYSNSMVINGNLQIINQTIHFNDSVYADIPAPNAESKKSLKRFLFYLYSYDIDHGNRITFFVSNATLEFD

SEQ ID NO: 104702 - protein, 129 aa, Gossypium hirsutum
  unsure (1)..(129): unsure at all Xaa locations
  Clone ID: LIB3493-018-P1-M1-F3.pep
FLWGKYEPEVLVSINSTFPYLNFRLYHFDSDRVRGKISRSIRQALDQPLNYARIYLADMLPPDVKRVLYLDSDLVVVDDIVKLLEVDLEGKVLAAPEYCHANFTKYFTDLFWSDQGVVXTINGRKPCYF

SEQ ID NO: 104703 - protein, 144 aa, Gossypium hirsutum
  Clone ID: LIB3493-018-P1-M1-F4.pep
MVPPSTMITKMKRFSYVALSAVLSLMVVAAPAFSGETRWAEAAVTCNPIELSPCLAAVMSSTPPSETCCSRLREQTPCFCGYLNDPSLRQFADNPIIRTVGNACGVHILSAKTSSLQYYTYMHTYVYIHRAAYKADSAVNYITV

SEQ ID NO: 104704 - protein, 118 aa, Gossypium hirsutum
  unsure (1)..(118): unsure at all Xaa locations
  Clone ID: LIB3493-018-P1-M1-F6.pep
AVGADSCPQLIACKAEAFLKLHQIDDSDSCLSNISNLEKYTASSQIRYFGFVAEAYALFVQAQVEMALGRFENAVSAAEKARRIDYNNVXKLQRYLNNVKMVARARXXGNDFFNAGRY

SEQ ID NO: 104705 - protein, 35 aa, Gossypium hirsutum
  Clone ID: LIB3493-018-P1-M1-F7.pep
ATVIQMLALLLQFGQVDDNGRVLINYTLNGRSALS

SEQ ID NO: 104706 - protein, 106 aa, Gossypium hirsutum
  Clone ID: LIB3493-018-P1-M1-G4.pep
FPNTILALTDANQIVDSSYDFSVVDSNSLLFLFKYAPELAKELNIGPEFSFETAKMSNQRTFLTLFPVNFLFSRSMQFPARSDEILKQYRQFPHLYTNKPQTMSSD

SEQ ID NO: 104707 - protein, 87 aa, Gossypium hirsutum
  unsure (1)..(87): unsure at all Xaa locations
  Clone ID: LIB3493-018-P1-M1-G6.pep
PSGFDWLKTVDDFDEFMNWIXXRGGVFAKAEQSWERWWYEEQDHLRTTGLWGKILEIVLDLRFFFSSMEWYIKLGITTNSTSIYVYL

SEQ ID NO: 104708 - protein, 114 aa, Gossypium hirsutum
  Clone ID: LIB3493-018-P1-M1-H1.pep
HATFSCDSQLVYASFLDATICVFVAANLRPRCRINPSAYLPASVSSNVHPLVIAAHPSEPNEFAVGLSDGGVHVFEPLESENRWGVPQPADNGSASSITATPSVAAQGSEQAQR

SEQ ID NO: 104709 - protein, 63 aa, Gossypium hirsutum
  Clone ID: LIB3493-018-P1-M1-H10.pep
AAGTAIGFVGRYGNSHAGWSEICDRLKKYCDKVTTSMVLSYLSVICLVVLTVISAGKSRQIMV

SEQ ID NO: 104710 - protein, 130 aa, Gossypium hirsutum
  unsure (1)..(130): unsure at all Xaa locations
  Clone ID: LIB3493-018-P1-M1-H8.pep
FYKSTILVLIPKSASPSNMXFRPISLRNLVYKVLAKNMANRLRVIEKCFDCAQSAFVLGRLLSDNVLLAYEILHALKQKRFGKXGFMTVKLDMSKAYDRVEWDFLKEVMFRMGFNKKWTDAIIKCISTVF

SEQ ID NO: 104711 - protein, 86 aa, Gossypium hirsutum
  unsure (1)..(86): unsure at all Xaa locations
  Clone ID: LIB3493-018-P1-M1-H9.pep
PRVRLIHILLYEERRLIRRQKTCYHVITERTATVWAGRDPXGVLTAYTYTIRNTGADAVFXKWNGCGICHTDLHEATTDLVMSNYP

SEQ ID NO: 104712 - protein, 73 aa, Gossypium hirsutum
  Clone ID: LIB3493-019-P1-M1-A4.pep
IVFFLDFHFCFVIPYLLHENKFIRKKRKKEDLFVVGGGVELLVCFVETEIKAKILKPMSKALRCVADPISTWA

SEQ ID NO: 104713 - protein, 127 aa, Gossypium hirsutum
  Clone ID: LIB3493-019-P1-M1-A5.pep
QHLSGTRMLNSEIVGVLQGASKLEKVLVQMVVEDSVECEDGGKGIIREMSPYEVDSIILKLLRQWIDERLKKGKDLLSRAKETENWNPKSKSEPYAQSAEELLNLAKEMVKDFFEIPIGITNDLISD

SEQ ID NO: 104714 - protein, 78 aa, Gossypium hirsutum
  unsure (1)..(78): unsure at all Xaa locations
  Clone ID: LIB3493-019-P1-M1-A9.pep
LLFLVTKHQILADLNLCIVFFSRTIKSGQANTTFLFFCEFRPFFLSVDEELSPMAEDSHPLFAIFLCIRSXRVGLSET

SEQ ID NO: 104715 - protein, 124 aa, Gossypium hirsutum
  Clone ID: LIB3493-019-P1-M1-B11.pep
GRVGEELPKLLEEAMIKKRSEENGELTDSDKDYDLLPKVVEFSEENGHGSKEKPVLEIPSERPEEPKNENSRKLNNGLKDEALQANEMENVNGKVKKEDERKSKDDPVEFKMWESCKIEKKEFS

SEQ ID NO: 104716 - protein, 80 aa, Gossypium hirsutum
  unsure (1)..(80): unsure at all Xaa locations
  Clone ID: LIB3493-019-P1-M1-B6.pep
ILNRFLLHNPKPNFSIKNSFNGVSDLNFPIPHTSQKTQLHTLYSSQFXLQFHPPGLPVSKTQRLNSPRWLPGATSVGLTT

SEQ ID NO: 104717 - protein, 44 aa, Gossypium hirsutum
  Clone ID: LIB3493-019-P1-M1-B7.pep
MICNTMSYVSRLQLLGLMILLCMTSQWDVEYSGVIMVSPKNFYL

SEQ ID NO: 104718 - protein, 160 aa, Gossypium hirsutum
  unsure (1)..(160): unsure at all Xaa locations
  Clone ID: LIB3493-019-P1-M1-C5.pep
DNVTWESLFPEWIDEEEVFEVPNCPSLPSLQFPGKPRIDLIAVKLPCNKAGKWSRDVTRLHFQLAAARLAASAKGLHPVHVLFVTDCFPLPNLFACKDLVAREGSAWLYTPNLHRLREKIRLAIGSCEXLVPLQAXRVFYSERAHREAYATILHSAHVFV

SEQ ID NO: 104719 - protein, 112 aa, Gossypium hirsutum
  Clone ID: LIB3493-019-P1-M1-E1.pep
GGCILAHAPGSGKTFMIISFMQSFLAKYPHAKPLVVLPKGILATWKKEFETWQVEDIPLLDFYTVKADNRSQQLDVLKKWVECKSILFLGYKQFSTINCDGGTSQTSISCRE

SEQ ID NO: 104720 - protein, 111 aa, Gossypium hirsutum
  Clone ID: LIB3493-019-P1-M1-F11.pep
LPLRVYIKVKEKKPCNLTIAPACPILVTLALLSSLLMLWSRWCPSSSFSSDPSFSYRLPLYLNCVEQQAPIVWCGCKSKEIYPFFLKKKNSKKNVCSTHKKQGYGTGGKNQ

SEQ ID NO: 104721 - protein, 92 aa, Gossypium hirsutum
  Clone ID: LIB3493-019-P1-M1-F4.pep
MENRLKPMDAEQLREYGHKMVDFIADYYKTIENFPVLSQVEPGYLRNLLPDSAPNQPDSFQHVLDDIQAKILPGVTHWQSPNYFAYHPSNSS

SEQ ID NO: 104722 - protein, 108 aa, Gossypium hirsutum
  Clone ID: LIB3493-019-P1-M1-F9.pep
MNHGPLDQMPSSRNYGPLGVSADEYARNFHFMNNVRGSYKRKTSEGIPGNFQHFNASSSSSSSVTQLNTRHSGWGVPVDPASFTIPQYRGNDPPPIRDAGSQKSVRNR

SEQ ID NO: 104723 - protein, 72 aa, Gossypium hirsutum
  Clone ID: LIB3493-019-P1-M1-G11.pep
LPFVKWETGRPFSVGSRESKFPAHATPNRQSKVPFEGQCSFNFITSTANNSSPNTCLLIKSFTCSNNMKYNH

SEQ ID NO: 104724 - protein, 116 aa, Gossypium hirsutum
  Clone ID: LIB3493-019-P1-M1-H11.pep
MIDYFKQNGGLDQEFKSLQRIKVRADGNLTPTLIDDSKAADETKAGSDHSPLAPPLPKTPSESWLWRALPSTASRKSSLQPYTGTRFKPKKQEPKEPSTDTKWETIVKTFYLHHDH

SEQ ID NO: 104725 - protein, 100 aa, Gossypium hirsutum
  unsure (1)..(100): unsure at all Xaa locations
  Clone ID: LIB3493-019-P1-M1-H12.pep
RTRGYTLVSGGSDNHLVLVDLRPLGIDGARVEKILDMASITLNKNSVPGDKSALVPGGIRIGSPAMTTRGXTEKEFTAIADFIHEGVQITIEAXGLAFGS

SEQ ID NO: 104726 - protein, 70 aa, Gossypium hirsutum
  Clone ID: LIB3493-019-P1-M1-H9.pep
VATPGYNECVDVRDLMLVNNFIIDHIKNLACFAVVGEDEDEHSVVSTEPHLNIIEIISTHKRSVSLPISP

SEQ ID NO: 104727 - protein, 73 aa, Gossypium hirsutum
  Clone ID: LIB3493-020-P1-M1-A1.pep
KSNQKTHINKYISLPQIPSSLFCFVLSYYRKNNNKSEGELFYSTNLSMLKKEVVVYNFTIQKSFPTSLQNLLT

SEQ ID NO: 104728 - protein, 96 aa, Gossypium hirsutum
  Clone ID: LIB3493-020-P1-M1-A12.pep
FKRLSLCIYWLVLIYASVLRFYNISKNSKIERILLRKYYHLLAVLMFLPALIYQPKFLDLAFGAALAVFLVLEIIRVWRIWPLGQLVHQFMSAFTD

SEQ ID NO: 104729 - protein, 114 aa, Gossypium hirsutum
  Clone ID: LIB3493-020-P1-M1-A4.pep
MDTIDREIQAPNSGRKHGGWVTFPFITGAVLGLGLAGTGWMANLIIYLIQQFNVNAIDAAQVSNIVNGGSSLFPIVGAIIADSFLGCFSVISLFSSISLLGNKFYCLNSYTQLT

SEQ ID NO: 104730 - protein, 64 aa, Gossypium hirsutum
  Clone ID: LIB3493-020-P1-M1-A7.pep
SPKPIIKFIPQPLSFLLRLSMQRQYNKAIDPQVGALKGCMLKKEVVFYNFQVMKTPTTSAQTSS

SEQ ID NO: 104731 - protein, 109 aa, Gossypium hirsutum
  Clone ID: LIB3493-020-P1-M1-B11.pep
MSFTLVCLVLSLYLCFFSYVHSLDSFSNGSLDTFLQDFAFRALVIRHRPHTGALYKANLPVYLSGMGVSIARIRSRTLWKKGANFSCFRIPSRTFLVPHVRRVAIVYET

SEQ ID NO: 104732 - protein, 121 aa, Gossypium hirsutum
  Clone ID: LIB3493-020-P1-M1-C1.pep
GPFPVHKCDWKCQNEHVCGNMYRCKLTGTTHICDKNCNQRILYDNHSSLCRASGQVFPLSQAEEQVIRGVRRKLDADNFPPSDSCGFKRRRDVQIRPSPFERSFSAVSPICSQVGDGMDLS

SEQ ID NO: 104733 - protein, 69 aa, Gossypium hirsutum
  Clone ID: LIB3493-020-P1-M1-D6.pep
TFNSRVLVESLDDVDADSLKAAAENLIDTLQDPAAVILGSCPDEGKVSLVAAFTPAVVDLGIQAGNGRV

SEQ ID NO: 104734 - protein, 132 aa, Gossypium hirsutum
  Clone ID: LIB3493-020-P1-M1-D7.pep
ILDKSNRQVEVRRDCPYLDTVNRQVLDFDFERFCSVSLSNLNVYACLVCGKYYQGRGKKSHAYTHSLEAGHHVYINLRTEKVYCLPDGYEINDPSLDDIRYVLNPRFSREQVEQLDKNKQWSRALDGSNYLS

SEQ ID NO: 104735 - protein, 82 aa, Gossypium hirsutum
  Clone ID: LIB3493-020-P1-M1-E10.pep
LPTLTAKLHSVKEKYLAATPPVPSNIKDKWDFSFASIWNTIVWLMLMNFFVKIVNATAQRYLKKQQDKSLAEILPDSTHSDS

SEQ ID NO: 104736 - protein, 46 aa, Gossypium hirsutum
  Clone ID: LIB3493-020-P1-M1-E4.pep
VVGHLESCDGNDNYCRCHNSGNFISSFILSNGSLLYCLGISFKMRI

SEQ ID NO: 104737 - protein, 130 aa, Gossypium hirsutum
  unsure (1)..(130): unsure at all Xaa locations
  Clone ID: LIB3493-020-P1-M1-E6.pep
DASAHASERMKARALDSTTRNGDFLDVLLDQWEENRSILNREAIKPLIQNLFIAGSETSATTTEWAMAELLRNPQVMQKAXKELLEXIGSERTVKESDIDELQYLPAVVKKTLRLHPAAPLLLPYKARND

SEQ ID NO: 104738 - protein, 148 aa, Gossypium hirsutum
  unsure (1)..(148): unsure at all Xaa locations
  Clone ID: LIB3493-020-P1-M1-E9.pep
LKHVLVSCAKAVSDNDLLTAQWLMDELRRMVSVSGEPIQRLGAYMLEGLVARLASSGSSIYKALRCKEPASAELLSYMHILYEVCPYFKFGYMSANGAIAEAMKDEDRVHIIDFQIGQGSQWITLIXAFAARPGGPPYIRITGIYDFT

SEQ ID NO: 104739 - protein, 139 aa, Gossypium hirsutum
  unsure (1)..(139): unsure at all Xaa locations
  Clone ID: LIB3493-020-P1-M1-F2.pep
GRVGRFPWKKLMVLIMVWFSFFAIYLLRGNRYGQGVIPLKPCGIGYWSLSLLQVPLAIAFTAWILRRKESIAGQGPKSTGGVNKLIFPLMALMAGALGLSFGNRGGMLISPLLXKVGVXPQVTAAXTCSFHGFFSSHDV

SEQ ID NO: 104740 - protein, 112 aa, Gossypium hirsutum
  Clone ID: LIB3493-020-P1-M1-F7.pep
QKERMDGIESKCRSNSIEENLKLWKEMIAGSERGLQCCLRGKLDMQDPNKSLRDPVYYRCNPVPHHRIGSKYKIYPTYDFACPFVDAEEGITHALRSSEYHDRNAQYHRIQE

SEQ ID NO: 104741 - protein, 46 aa, Gossypium hirsutum
  unsure (1)..(46): unsure at all Xaa locations
  Clone ID: LIB3493-020-P1-M1-F8.pep
VALKQATTPEYKADQEQVLSNCAKFAQTLAVKGYXLVSGGTENYVI

SEQ ID NO: 104742 - protein, 116 aa, Gossypium hirsutum
  Clone ID: LIB3493-020-P1-M1-G12.pep
HDKKAVLWYTDTLKPKSTLEEHSCLITDVRFSPSMSRLATSSFDKTVRVWDADSPGYSLRTFMGHSGNVMSLDFHPTKDDLICSCDGDGEIRYWSINNGDCARAFKGGTGPGTGQL

SEQ ID NO: 104743 - protein, 75 aa, Gossypium hirsutum
  Clone ID: LIB3493-020-P1-M1-G6.pep
FLWTVTYVIFQWLLHACVNIWWPYPFLDLSSPYAPLWYFSVALMHFPCYGAFALVIKLKHHVFTRWFPESYQCGR

SEQ ID NO: 104744 - protein, 47 aa, Gossypium hirsutum
  Clone ID: LIB3493-020-P1-M1-G7.pep
RFIKGKSLKLCIWASIGTISCLHDKITFVKQASANSSYYEKMENWDK

SEQ ID NO: 104745 - protein, 121 aa, Gossypium hirsutum
  Clone ID: LIB3493-020-P1-M1-G9.pep
AKSANFVIRLGIDIGGGTGTFAALMKIFYNVTMLTTTLNVNAPYSEAAVARGLMPLHVPLQQRLPVFDGTMDLVRCGRAVNRWIPLPVMEFMFYDVDRVLRGGGYLWLDRFFSKAMDLEEV

SEQ ID NO: 104746 - protein, 120 aa, Gossypium hirsutum
  Clone ID: LIB3493-020-P1-M1-H11.pep
SGPKLSQNEPEGSHKDRLIEHQIISYDEFSRDRNFVKIGNEAKEVLLSLLAKLQTQVELITTEHGILQPTEKIYVKLVKAFLEARKLKDLARFLIKAEKENSPVSNDDSALVHVIKSCIL

SEQ ID NO: 104747 - protein, 57 aa, Gossypium hirsutum
  Clone ID: LIB3493-020-P1-M1-H3.pep
LKQYAGIESTYDHSRDVLIECNSSMIRHNMYCHRFINELVHSAMKLVHYGASQAVSR

SEQ ID NO: 104748 - protein, 110 aa, Gossypium hirsutum
  unsure (1)..(110): unsure at all Xaa locations
  Clone ID: LIB3493-020-P1-M1-H6.pep
MSSRVLCFVSLLLCIFPAIAFALHLPLTLTHFDANDPSRDPYQILSYLASSSLARAHHLKNPQITXTXTSDATTTTPLFSHSYGGYSISLSFGTPPQILPFVMDTRSDFV

SEQ ID NO: 104749 - protein, 60 aa, Gossypium hirsutum
  Clone ID: LIB3493-020-P1-M1-H8.pep
VNDLVKRRPSQMDSHQVHRLKFEQIKVEQKQNHPEILPNHNQQQYALPAIATEERSPHRA

SEQ ID NO: 104750 - protein, 47 aa, Gossypium hirsutum
  Clone ID: LIB3493-021-P1-M1-A9.pep
FFARQAIIFFQDLFLCRQTNFHPVIYEVTANKPKKGLNILSHTLWNF

SEQ ID NO: 104751 - protein, 92 aa, Gossypium hirsutum
  Clone ID: LIB3493-021-P1-M1-C1.pep
TALSINTKNLLLKGKEVILHYLGPEGEMDWMPAFSEISHLLNGLGNIQIIMVGPEVPTNLSGTTSGISSRVRVNLVRVFIRKKPPTCLPPML

SEQ ID NO: 104752 - protein, 140 aa, Gossypium hirsutum
  Clone ID: LIB3493-021-P1-M1-C9.pep
LIMQPCSREMQAMNSLLNPTQQIPLQDLQINGNRHHHQQIHVPSSSQFQYPTPTSTTHHDDSFLEQILSSTTSFPWSDETGPPNPEDNNNAGFNYDDMVLASKLRQHQINGGAAGNPFAAMKMMLMMQQQQQQQQMMLAG

SEQ ID NO: 104753 - protein, 108 aa, Gossypium hirsutum
  Clone ID: LIB3493-021-P1-M1-E1.pep
SLQVFLHPHFLLTPLHSSPLVTLLRLVQRLSLASIYLHLLQYSYPHLRNHFVFAYISNPHTPHIFPAPCLLHVKHFLSNPSISDKLNILRSRFHIRIPIGIPQFLLSN

SEQ ID NO: 104754 - protein, 149 aa, Gossypium hirsutum
  Clone ID: LIB3493-021-P1-M1-E10.pep
GRVGNPPTGTFVKVHKSGSFGRSLDISKFGSYDELRCELARLFGLEGQLEDPQRSGWQLVFVDRENDILLLGDDPWQEFVNNVWYIKILSPLEVQQMGKGQNPATSIPNQRLNTTTTATTSSSNGNHCDDYMSRQDLRSSVASMGSLEY

SEQ ID NO: 104755 - protein, 153 aa, Gossypium hirsutum
  unsure (1)..(153): unsure at all Xaa locations
  Clone ID: LIB3493-021-P1-M1-E3.pep
QSQHSVSSSSEKYRTKASDLSPFNPNQQVGDVLGAREPVANVGNIEVCTNSALRQKRQSVDLDELLANSPPWPPVVSPAQNFRDDEKELGSGEWVDKVMVNKQDTINRVGSPLGCWEAENGNLSDVFYQKYXHDSLKIYPEKSYNMFLGANGF

SEQ ID NO: 104756 - protein, 149 aa, Gossypium hirsutum
  Clone ID: LIB3493-021-P1-M1-E7.pep
DAWADAWADTWANLLELASGEAPSLGRISRRIPRIMTVPGIISDIDDDPSESVCSDPSSSSTQKDRIIMVANQLPIRAHRKSDNNKNGSSSSSTTTTSNNWIFSWDDNSLLLQMRDGLGDDDVEVNYGWCLKEEIHPNEQDEVSQILLE

SEQ ID NO: 104757 - protein, 42 aa, Gossypium hirsutum
  Clone ID: LIB3493-021-P1-M1-E9.pep
AQNNSLNAPGINNHFFSPKDLDMFLPIVIIGRIIKNVFSFNA

SEQ ID NO: 104758 - protein, 153 aa, Gossypium hirsutum
  unsure (1)..(153): unsure at all Xaa locations
  Clone ID: LIB3493-021-P1-M1-F3.pep
DCAPHLNINLQMNYWPSLPCNLKECQEPLFDFISSLAINGSKTAKVNYETSGWVAHQVTDIWAKTSPDRGEAVWALWPMGGAWLCTHLWXQFTYTMDXDFLKNKAYPLLRRCTSFLLDWLIEGPGGYLETNPSTSSEXICCAPDGKPAYVSYS

SEQ ID NO: 104759 - protein, 146 aa, Gossypium hirsutum
  Clone ID: LIB3493-021-P1-M1-F7.pep
RVQLQLECLGQEHVGYKRLDFPLLKLSIVGGRPFSCGGQQIFRKRLLSARYGIQDMEGSAKRIYEAALGTPEDHLVILLAHNGSTGLGSELNDICGKDWVFGGGDHGDPDLAQAISHLKETTNVSIPLLVFGHMHKELAHGNGLRK

SEQ ID NO: 104760 - protein, 56 aa, Gossypium hirsutum
  Clone ID: LIB3493-021-P1-M1-G1.pep
YIDLKCDNRLLENTISAFSAVYISILWGVCVFYIFIEFDSFFSGTVVGFLSNRYLI

SEQ ID NO: 104761 - protein, 35 aa, Gossypium hirsutum
  Clone ID: LIB3493-021-P1-M1-G10.pep
FFPSFSRIASIIAVCKLAMFVSISRNLTVYCLISK

SEQ ID NO: 104762 - protein, 88 aa, Gossypium hirsutum
  unsure (1)..(88): unsure at all Xaa locations
  Clone ID: LIB3493-021-P1-M1-H6.pep
VIELKQLHEGVEIELESLVLLGSQWNHGWDLVVLGSWSHQSNKGRKHVVFEPXDWVWXHMRKERFPAQRXSKLLPGGDGPFQVLERIN

SEQ ID NO: 104763 - protein, 33 aa, Gossypium hirsutum
  Clone ID: LIB3493-022-P1-M1-A2.pep
ISCTFRMMLSSHLSLDRRYIAKRCYYTGTLLPS

SEQ ID NO: 104764 - protein, 38 aa, Gossypium hirsutum
  Clone ID: LIB3493-022-P1-M1-A5.pep
SNRTDLSPLNPPFPIITSVWYHPLSKLKITRKLLSSNP

SEQ ID NO: 104765 - protein, 75 aa, Gossypium hirsutum
  Clone ID: LIB3493-022-P1-M1-B11.pep
VFPFLAASVARYALSCAFAGSGLFVPLGCCLRDDLYPFPAPFGWGAGPPSAKGSAPACWLSFFFMGGPASACAWV

SEQ ID NO: 104766 - protein, 130 aa, Gossypium hirsutum
  unsure (1)..(130): unsure at all Xaa locations
  Clone ID: LIB3493-022-P1-M1-B5.pep
PRVRGATHKRKRKPAGTPDPNAEVVSLSPKTLLESDRYVCEICNQGFQRDQNLQMHRRRHKVPWKLLKRESQEVKKRVFVCPEPTCLHHDPCHALXDLVGIKKHFRRKHSNQKQWVCEKCSKGYAVQSDY

SEQ ID NO: 104767 - protein, 45 aa, Gossypium hirsutum
  Clone ID: LIB3493-022-P1-M1-B6.pep
VNLRNIHRILSVTIFNDATHVPRRVKHLKHPLMMFYIVLSSSSNY

SEQ ID NO: 104768 - protein, 61 aa, Gossypium hirsutum
  unsure (1)..(61): unsure at all Xaa locations
  Clone ID: LIB3493-022-P1-M1-B7.pep
IXLRXXFXHHPTLKEXLHXSLFLCNHFCXXXCSSNDCXYWICEXDRYLCRVRRXLSLTRVP

SEQ ID NO: 104769 - protein, 80 aa, Gossypium hirsutum
  Clone ID: LIB3493-022-P1-M1-C11.pep
RSQTKGIQALWVMGSFGSMELTRFWGIPHILHQLKTILVIHQKKSPLHLLKRKKRLVGLQWGLKVFAIEKDRRGRAGEGD

SEQ ID NO: 104770 - protein, 80 aa, Gossypium hirsutum
  Clone ID: LIB3493-022-P1-M1-C8.pep
ALGRFLNHMGSHTGMCHLDIRLIVCYTVRDRSHGHAFPVSCKLVSYIACAHDRVPYSHGRVSWPYGRVPSVLKIDNELQG

SEQ ID NO: 104771 - protein, 86 aa, Gossypium hirsutum
  Clone ID: LIB3493-022-P1-M1-D1.pep
RQSKECKRVKGFPTSDRRAYTFYLFQHRLSDIRPRGARAISIEMLPISSQSHAWRAMVHANPQILQPMLHELGIQNSNLMRLIQDH

SEQ ID NO: 104772 - protein, 56 aa, Gossypium hirsutum
  Clone ID: LIB3493-022-P1-M1-D10.pep
IANYTIRVANDPRTCNKIVIYKMQKNILSQIELISLWEKKTGKYFKKVHVPEEELV

SEQ ID NO: 104773 - protein, 80 aa, Gossypium hirsutum
  Clone ID: LIB3493-022-P1-M1-D4.pep
PPQWKRKGKAPVGSSEHPKQWIGGIFYSFFLFLLRKRRNIKKKPRESKIETSTKIFTFRKLYSFFDFSVRTREKGSPLAF

SEQ ID NO: 104774 - protein, 34 aa, Gossypium hirsutum
  Clone ID: LIB3493-022-P1-M1-D5.pep
QMSMKLYDVPVSHLSLIQINHKQFQLMSKQNFSI

SEQ ID NO: 104775 - protein, 94 aa, Gossypium hirsutum
  Clone ID: LIB3493-022-P1-M1-D7.pep
ELQDRMEHDYNIGSAIRDKLIPHAVSWFTGEAVQGNEYDGLESDYDSDDQDGDEDEDGDEEDEREERKGKKMQRASANAGLNQHVERPPECKQQ

SEQ ID NO: 104776 - protein, 69 aa, Gossypium hirsutum
  unsure (1)..(69): unsure at all Xaa locations
  Clone ID: LIB3493-022-P1-M1-E2.pep
VDLPEFPTKRRRKPIIRGGKSEFVDAHXSELPHSVPEPPLKPVLTEIPDTQIVAPLDEEETIQLAEETL

SEQ ID NO: 104777 - protein, 70 aa, Gossypium hirsutum
  Clone ID: LIB3493-022-P1-M1-E5.pep
TIHSQTSKISHLIIKTYIHAKNSKQTQKPHRSTNIPAKNQRKNEIETDNTKSATLNFPLLLITTEQPTRP

SEQ ID NO: 104778 - protein, 120 aa, Gossypium hirsutum
  unsure (1)..(120): unsure at all Xaa locations
  Clone ID: LIB3493-022-P1-M1-E6.pep
MDLAHKLLFAALLIFAATIDGTQAAAMVSGAVFCDQCKDGQRSLXDYPLSGMKVTVTCADGTGQVTMSREETTXVFGNYVMRFDGTPXLSNCNAQVSGSGXRSNDCGATAGPAQKLRLMF

SEQ ID NO: 104779 - protein, 133 aa, Gossypium hirsutum
  Clone ID: LIB3493-022-P1-M1-E7.pep
EVLVPSGDAQETWYSCVLKQVSVYGVAAGYCISASLLSIINKWAVMKFPYPGALTALQYLTSAAGVVLCGWFKVLEHDPLDLRTMGQFLPAAIIFYLSLFTNSELLLHANVDTFIVFRSAVPIFVAIGKTLYL

SEQ ID NO: 104780 - protein, 38 aa, Gossypium hirsutum
  Clone ID: LIB3493-022-P1-M1-E9.pep
MITYRVIQSQLMTRETSIEPILFLQCDIFEVLLFYLTQ

SEQ ID NO: 104781 - protein, 53 aa, Gossypium hirsutum
  Clone ID: LIB3493-022-P1-M1-F11.pep
IFLVLYYDIYQIKSRDASLLKYSSLHNTNSSTTLSLLDSFFKHQTIQPTSKLI

SEQ ID NO: 104782 - protein, 136 aa, Gossypium hirsutum
  Clone ID: LIB3493-022-P1-M1-G10.pep
GRVHSNFGAVNITRDPLTNSITIQSPAPFSPSNVTVLSLFKTLPYNITILAVDSLLVPYDFNLLASETRPPLGLNITKALIDGHNFNVAASMLAASGVVDEFEADEGGAGITLFVPTDDAFGDLPGNVKWQSLPAD

SEQ ID NO: 104783 - protein, 54 aa, Gossypium hirsutum
  Clone ID: LIB3493-022-P1-M1-G2.pep
SVRDWSFGEIRFERSSADSIGGSLLTNLFQGPSTKGSMVSVHRLKNSKVKRVFP

SEQ ID NO: 104784 - protein, 35 aa, Gossypium hirsutum
  Clone ID: LIB3493-022-P1-M1-G3.pep
TYIRVKPCHTVKGFLYQATKLLDLQSNVQQYIAIW

SEQ ID NO: 104785 - protein, 114 aa, Gossypium hirsutum
  unsure (1)..(114): unsure at all Xaa locations
  Clone ID: LIB3493-022-P1-M1-G9.pep
GRVGSEVLEWYSELSAQQIWDEKAYSPTRKKLLSALESISGYSPEALLKRLPPDALFEERAILLGKMNQHEXALSLYVHKLNVPELALAYCDRXYESSVHQPPTKSSGNIYLTL

SEQ ID NO: 104786 - protein, 44 aa, Gossypium hirsutum
  Clone ID: LIB3493-022-P1-M1-H2.pep
TSPHDSYTLARYIKNNTCFFLNHSKSLVIKEYNTSLLIQRNFCE

SEQ ID NO: 104787 - protein, 151 aa, Gossypium hirsutum
  unsure (1)..(151): unsure at all Xaa locations
  Clone ID: LIB3493-022-P1-M1-H3.pep
MRSGIAAHLPKRTDNEIKNYWNTHLKKRLNKMGIDPVTQKPKTNALGSATGNPKDAATLSHMAQWESARLEAEARLVRESKFVGSSSSSSSSSSSSAPQHTSNTVXTPPATRPQCLDVLKAWQGLVTGLFTFNNTTDNLQSSTSTLNFVEN

SEQ ID NO: 104788 - protein, 114 aa, Gossypium hirsutum
  unsure (1)..(114): unsure at all Xaa locations
  Clone ID: LIB3493-022-P1-M1-H4.pep
KTGHHLESTDCNYLVWISFSGLGNRILTLASAFLYALLTNRVLLVDPGTDMVDLFCEPFPEVSWFLPLDFPLKNQFDSFDQKSPHCYGRMLKNKLFANSSKSILAPXVYLHLIH

SEQ ID NO: 104789 - protein, 47 aa, Gossypium hirsutum
  Clone ID: LIB3493-022-P1-M1-H7.pep
RTRGQRSNQRFSSLITPQEQPENFKAPSILSSKGNKISFLLYIFFSF

SEQ ID NO: 104790 - protein, 88 aa, Gossypium hirsutum
  Clone ID: LIB3493-022-P1-M1-H8.pep
YRREGKTPNRQNPKKTEYQNRVQGDFCFLIFKSIACIYFRKKELKIKNKKISYLSRWPAPASPRWPSGDRKSLPSPPLFLFSPSSFLF

SEQ ID NO: 104791 - protein, 91 aa, Gossypium hirsutum
  Clone ID: LIB3493-023-P1-M1-A11.pep
FPTGPPINQLFTDCLPPPFFPNQLGYIRPLKSLAHTTMSPDGDGAINGCCPCSFSSGENGIPGSHDDTCKHCTRSKSLSSSPSALGSDSVL

SEQ ID NO: 104792 - protein, 123 aa, Gossypium hirsutum
  unsure (1)..(123): unsure at all Xaa locations
  Clone ID: LIB3493-023-P1-M1-A2.pep
MAKFKNANPSSSSTSISDKTFTSLGNLIKLLPTGTVFIFQFLNPVLTNYGHCSPVNKVLTSTLIGLCGFSCAFSCFTDSYKGGDGLDHYGIVTVNGLWPSFGSDSVDLIEXKLRIGEFVHAFF

SEQ ID NO: 104793 - protein, 85 aa, Gossypium hirsutum
  Clone ID: LIB3493-023-P1-M1-A5.pep
TSFDLLLFLIIDLFLLIKMALESSIFSRPIFIYSTNSSSFMFFNRNLKNQSKFLPKTNLYPAPVISTCSNPQAFKAFGFPKNGSF

SEQ ID NO: 104794 - protein, 114 aa, Gossypium hirsutum
  Clone ID: LIB3493-023-P1-M1-B1.pep
EDEDEELSSALENGVAINDKTSSPSPPNPKTRENFKTKRAYFYWVTREQGSFDWFKGIMNEVAEMDHDHVIELHNYCTSVYEEGDARSALITMLQSLNHAKNGVDVVSGTRVKS

SEQ ID NO: 104795 - protein, 136 aa, Gossypium hirsutum
  unsure (1)..(136): unsure at all Xaa locations
  Clone ID: LIB3493-023-P1-M1-B4.pep
KEPHKYFDQVIITVRSGDGGHGAVLTMPSQQRATKWQGKHENKEKSKKKLSYKRDFDGSLILPVGGHGGDVVIYADEGKDTLLELHKKSRHNAKRGGNVAGXGVLTSQLRDGLAAPTLRIPVPVGTVVKRKPGKLL

SEQ ID NO: 104796 - protein, 105 aa, Gossypium hirsutum
  unsure (1)..(105): unsure at all Xaa locations
  Clone ID: LIB3493-023-P1-M1-C12.pep
KDTSGIENRYFDLGCVPIAICVVSTMLELRSNRSIYSKSVRGIGLVLHGTWFVQVGFSFYTNLMVHGCSLHENSLGNYTIKCRSHSDYHRAWSIATLXFNCHLSF

SEQ ID NO: 104797 - protein, 50 aa, Gossypium hirsutum
  unsure (1)..(50): unsure at all Xaa locations
  Clone ID: LIB3493-023-P1-M1-D1.pep
NYCSRACQALDWKLRHKAECAPVERWLDEXGDGGEGNGAVHGNDDVIAES

SEQ ID NO: 104798 - protein, 41 aa, Gossypium hirsutum
  Clone ID: LIB3493-023-P1-M1-D4.pep
KPSYPASYALQLWSAAINALLMLRLTSPPPHTTLNFKPPLV

SEQ ID NO: 104799 - protein, 58 aa, Gossypium hirsutum
  Clone ID: LIB3493-023-P1-M1-E8.pep
MADFKKATALILTVALLVNLALMVDADGDDDMKITVTTHTGHHDLFLCFVSSHLGLST

SEQ ID NO: 104800 - protein, 41 aa, Gossypium hirsutum
  unsure (1)..(41): unsure at all Xaa locations
  Clone ID: LIB3493-023-P1-M1-F4.pep
LRHSTMAGRSMVLVIVRTLYIIKCIVEASVKDGHTTXAFLR

SEQ ID NO: 104801 - protein, 111 aa, Gossypium hirsutum
  Clone ID: LIB3493-023-P1-M1-G11.pep
MAGRAKDRDKAGKTTKHFATERERRVHLNDKYQALRTMVPSPTKNDRASIVGDAIDYIKELLGTVRELQILVDKKRCGQERSKRLKTEDAASAADADVEIKSLGDPKQCYN

SEQ ID NO: 104802 - protein, 57 aa, Gossypium hirsutum
  Clone ID: LIB3493-023-P1-M1-G4.pep
RRDSLRQTWMPTGEKRKKLEKEKGIVIRFVIGHSATTVWCSFIALYKQQACSPGFLR

SEQ ID NO: 104803 - protein, 119 aa, Gossypium hirsutum
  Clone ID: LIB3493-023-P1-M1-G7.pep
LSHCESTTKKVRILSIDGGGTSGIVSGAALIHFEDQIRFKMGDPHAQIADFFDMIVGTGVGALIAAMLSVDDGIGHAIFSAREAVKFITQNNSKLFKVNRLARVLYRRKRFSGESMDNV

SEQ ID NO: 104804 - protein, 117 aa, Gossypium hirsutum
  Clone ID: LIB3493-023-P1-M1-H10.pep
MSFDASVHGGGGDANTDGATNKPFFCYQCNRTVTVTIYPSADPSCPLCNEGFLEEYENPSFENPNSNSNPLSEPFLSVSDPFSSLAPAPFPSSSSTTSSLPSPASIDLHNPNSFGST

SEQ ID NO: 104805 - protein, 81 aa, Gossypium hirsutum
  Clone ID: LIB3493-023-P1-M1-H11.pep
FRGPVGGNFFLGFPVEPGKMQTFVRTLTGKTITLEGESSATIDTWRTKIQDKEGIPPDQQGLIFAGKQLEDGRTLARYNIQ

SEQ ID NO: 104806 - protein, 61 aa, Gossypium hirsutum
  unsure (1)..(61): unsure at all Xaa locations
  Clone ID: LIB3493-023-P1-M1-H8.pep
CGVDAHAIDRVLLXSSKPSLYANINCNALSTAVICRQTSIVRSLFXAGIKMDLKVRVGSWS

SEQ ID NO: 104807 - protein, 54 aa, Gossypium hirsutum
  Clone ID: LIB3493-003-P1-M1-A1.pep
MSAARTYNGPISYNDIPFPALVPSSKVLQKNPCKNEPSPSQGASDFNAKITAQA

SEQ ID NO: 104808 - protein, 133 aa, Gossypium hirsutum
  unsure (1)..(133): unsure at all Xaa locations
  Clone ID: LIB3493-003-P1-M1-A11.pep
FQYSKSLDEAFPNVTCHFENSVTLKVYPHEYLFPYNRLWCIGWANTGMQCRDRKNMTLLGDLVLSNKLVLYDLENQTIGWTEYNCSSSIQVLDERTGTVHLVGSQNISSACHLNAWSITVLILLATLLHFXGC

SEQ ID NO: 104809 - protein, 128 aa, Gossypium hirsutum
  Clone ID: LIB3493-003-P1-M1-A12.pep
TVPFRAPINAILNPKSENPKPFPFSSETTAAPWPILLSPASNNSKPHLAPTWTEQIGLRRRLRAGKYPLLLFLFCKKGKKNQRKEKTIRKSLLFQNCYSISFLNICILFSFFFYSFGNPPFYKFNRLL

SEQ ID NO: 104810 - protein, 156 aa, Gossypium hirsutum
  Clone ID: LIB3493-003-P1-M1-A4.pep
SIVPLNYFFNHYTLQRRQFLGCGDGEEGGVLSKVYEERIVMGYSPEQLFDVVTAVDLYHGFVPWCQRSDVIKHYPDGSFDAELEIGFKFLVESYVSHVELSRPKFVKSTASQSSLFDHLINIWEFNPGPVPGSCSLYFLVDFKFQSPLYRQVAFMF

SEQ ID NO: 104811 - protein, 43 aa, Gossypium hirsutum
  Clone ID: LIB3493-003-P1-M1-B12.pep
SLFRINAYCSIHGEPWRLDVIFSQSITLASSSNVLSYFGLSVF

SEQ ID NO: 104812 - protein, 79 aa, Gossypium hirsutum
  Clone ID: LIB3493-003-P1-M1-B4.pep
MDSRFKGIDWVGGIYQKFETLCHEMDNIVNQDTVKYVENQAQSVGKSMKRFYSDVMLTLKHDAKGVALKRSTTIGTSFE

SEQ ID NO: 104813 - protein, 115 aa, Gossypium hirsutum
  Clone ID: LIB3493-003-P1-M1-C3.pep
GSYLVRHTRTTIDEGKLQDKDIDRALLNLFSVQLRLGLFDGDPTKGQFGELGPQNICTIEHKMLALEAARQGIVLLKNEKKFLPLDRNVVSSIAIIGPMANNISNMGGGYTGFPC

SEQ ID NO: 104814 - protein, 119 aa, Gossypium hirsutum
  Clone ID: LIB3493-003-P1-M1-C4.pep
KFIRLYFYPTTYPGFDDPYNNKAFFSVKAGPYTLLKNFSALLHAQGQVTLIKEFCVNVDGSQRLKLTFTPSPDISDSFAFINGIEVVSMPTNLYYTAGSEDEVPFLGQAEGRSYFLENN

SEQ ID NO: 104815 - protein, 57 aa, Gossypium hirsutum
  Clone ID: LIB3493-003-P1-M1-C6.pep
KRHGNSSPVREVQSAKSSIPIRQAGSPPIVMSKKPLGFQPIVIILRFLRRTRRFVIF

SEQ ID NO: 104816 - protein, 45 aa, Gossypium hirsutum
  unsure (1)..(45): unsure at all Xaa locations
  Clone ID: LIB3493-003-P1-M1-D12.pep
LESKISCFDERDGVCEQLMXIPMPLSYTRLTSRXLVLWHLTLPII

SEQ ID NO: 104817 - protein, 32 aa, Gossypium hirsutum
  Clone ID: LIB3493-003-P1-M1-D2.pep
SLLTPHGYAYAICLLELLKYEYLSLTITLSSN

SEQ ID NO: 104818 - protein, 110 aa, Gossypium hirsutum
  Clone ID: LIB3493-003-P1-M1-D4.pep
MIGLQLPLSQTQRIRLQRALEKLQSLSCKANSDASVTVADTIPVNYEDAFLKGHGTTDLNGDLVATVCGVVERINKLVYVRALRARYKPEVGDIVMGRVVEVSQKRWRLE

SEQ ID NO: 104819 - protein, 92 aa, Gossypium hirsutum
  Clone ID: LIB3493-003-P1-M1-E1.pep
GVHDVFNVVGAGSATAAAFGLIMPGSLQWRARNVVLGSVLGAAICFPLGWIHLKLVEKANEGNMAAKSSGEIGEAKSGLGAAIDRLEENLNK

SEQ ID NO: 104820 - protein, 48 aa, Gossypium hirsutum
  unsure (1)..(48): unsure at all Xaa locations
  Clone ID: LIB3493-003-P1-M1-E3.pep
QKQIFTHTAGSKSCACVAEADELSSGQKVGRLQXVEVTHRKKDGSPMT

SEQ ID NO: 104821 - protein, 139 aa, Gossypium hirsutum
  unsure (1)..(139): unsure at all Xaa locations
  Clone ID: LIB3493-003-P1-M1-E4.pep
EIVTGGLDSKFIIWDFSKGCPSKIVDFGLPDMHSGSNAGQCLNPAFVHSVKVPDVDMLDKIGKICVVARGDGVIDVINTESELTATKPKSSTKSRKGTQSKGSDGGVPDENGRKWLHLDYSLGGHTAAVSCMTXSLFGE

SEQ ID NO: 104822 - protein, 125 aa, Gossypium hirsutum
  Clone ID: LIB3493-003-P1-M1-E7.pep
DSVVESPTGHETAAHYENNDEEDCHEDIENDYDNEHGVDSSENAADDFCKGITEEEDEGDIDEISRLHGEKFIDDYSCSDFQLVTRVKGNNEDDYNDVQDDSCTSYEYQGEQVDSHGLPETAMDA

SEQ ID NO: 104823 - protein, 90 aa, Gossypium hirsutum
  Clone ID: LIB3493-003-P1-M1-F1.pep
MAGQSDPHISLFSAEEVEFMAEDELIEIVPNMRMDPLNFICGDFGPFLPQIASQVPLWLAVALKKRGKCAIRPPQWMSVENLTRVLEGER

SEQ ID NO: 104824 - protein, 56 aa, Gossypium hirsutum
  Clone ID: LIB3493-003-P1-M1-F10.pep
MAKTRPGISGTKPKQGKKDLDSYTIRGTNKVVRVGDCVLMRPFDTGKPPYVARVEK

SEQ ID NO: 104825 - protein, 72 aa, Gossypium hirsutum
  Clone ID: LIB3493-003-P1-M1-F4.pep
NTGNATVKCRVLVCTHLYLQVCIVFMFLLIPSTNLQIQSHIANQGYIPRPMDVDRNCSVSCVFIKQFSKHVL

SEQ ID NO: 104826 - protein, 45 aa, Gossypium hirsutum
  Clone ID: LIB3493-003-P1-M1-G1.pep
HAYYSWCHIKHTSCSTRCKVCLILKAYKGGPCSYCTVWRPHQSIS

SEQ ID NO: 104827 - protein, 119 aa, Gossypium hirsutum
  Clone ID: LIB3493-003-P1-M1-G4.pep
EAEFVDQIIGLVTRMHERLVLIKHSQTCSPVPIPADFCCPLSLELMTDPVIVASGQTYERAFIKKWIGLGLIVCPKTRQTLAHTNLIPNYTVKALIANWCESNNVKLPDPMKFMSPLLL

SEQ ID NO: 104828 - protein, 106 aa, Gossypium hirsutum
  Clone ID: LIB3493-003-P1-M1-H5.pep
AMIAVEIDSDDSVEEHVKVEAKVANYKKSRPSMLDNGEAESGYLKEKANEDAYSFGKKRGRVKLKKLPLSICSYRDRVNLKEEMITKNMGNSTAVVKPVFFSGTLC

SEQ ID NO: 104829 - protein, 117 aa, Gossypium hirsutum
  Clone ID: LIB3493-003-P1-M1-H6.pep
YDQCSGKIPEDEMLKNKILPMFPPVFHQWFLTTFSEPAAWFRARVAYAHTTAVWSMVGHIVGLGDRHGENILFDSTTSDCVHVDFSCLFDKGLQLEKPELVPFRLTQNMIDGLGITG

SEQ ID NO: 104830 - protein, 89 aa, Gossypium hirsutum
  Clone ID: LIB3493-041-P1-M1-A10.pep
SSSSDFWVMVAALKEFIANEGGGEVPLEGSIPDMTSSTEHYVNLQKIYQAKSEADYLVLEERVRNILKKIGRDPHSIPKATIKSFSKNA

SEQ ID NO: 104831 - protein, 104 aa, Gossypium hirsutum
  Clone ID: LIB3493-041-P1-M1-A12.pep
VFWCSHRSDLDLVLLVALLTDHDKNTCSMLTKNHLQTPVSYASPIPNWNTDLVYLLAIFSVLYTNPFCPAHQIKPKPKINQIHYKSKNRPNQNSPIVKTLSPNN

SEQ ID NO: 104832 - protein, 101 aa, Gossypium hirsutum
  Clone ID: LIB3493-041-P1-M1-A3.pep
DAWAGSDLIWTQCKPCAQCFDQSTPIFDPQKSSTFTKLSCSSDLCEALPQSTCNDGSCEYLYTYGDYSSTQGVMATETFKFDSVSVPNIVFGCGEDNDGDG

SEQ ID NO: 104833 - protein, 116 aa, Gossypium hirsutum
  unsure (1)..(116): unsure at all Xaa locations
  Clone ID: LIB3493-041-P1-M1-A7.pep
RKRKLLCLWEKSESRHVWPPAECIKNLPKPNTARSVFEDTIYWPLGFHCLDFPIVVQLKRSITCHLHKSEFFCLPPNLAIEFLIFGVIEIQSHFVXLFFTYERDEKKNTGFGLRNG

SEQ ID NO: 104834 - protein, 37 aa, Gossypium hirsutum
  Clone ID: LIB3493-041-P1-M1-A9.pep
RAQRPCTVLGICTLTPPYCVDQSTYPDYYFRVTNSEH

SEQ ID NO: 104835 - protein, 66 aa, Gossypium hirsutum
  Clone ID: LIB3493-041-P1-M1-B12.pep
RSFGTMNPYFPVKEEYPNSSYSQSDDDPPVMMMGPSPPQPMEGFYDSRPPSFLTKTFDIVDEPSTN

SEQ ID NO: 104836 - protein, 63 aa, Gossypium hirsutum
  Clone ID: LIB3493-041-P1-M1-B4.pep
KERPSKFFFSSKLLSIPNKVFFSFHFLGVLREKWKTYKFLLGTGSNLVIKAFLYKYLQKIPGY

SEQ ID NO: 104837 - protein, 56 aa, Gossypium hirsutum
  Clone ID: LIB3493-041-P1-M1-B5.pep
KIIGLQIFIKKPKKIKEKKKLIWIRKKIRRKKKFTGYFLSFLCQKTNKNKREYLVG

SEQ ID NO: 104838 - protein, 52 aa, Gossypium hirsutum
  Clone ID: LIB3493-041-P1-M1-B9.pep
PHIYHSNFIYHYFFYINITNTHTNFFKLFLYIFPFTTIISFHYFYNFSSHLF

SEQ ID NO: 104839 - protein, 122 aa, Gossypium hirsutum
  Clone ID: LIB3493-041-P1-M1-C1.pep
PVGGCSRKTKRSSSSSKKLPDLVNNPKIHGGQDLNLAYPVSEVYTTSMSEFVKVPNSSVENSKKEIPSSLFPRCHVSALELVTGMSCKGWNPFIPMPVPDPNTVYTPGFALHEIKPDSNSCV

SEQ ID NO: 104840 - protein, 70 aa, Gossypium hirsutum
  Clone ID: LIB3493-041-P1-M1-C4.pep
YIVYLTFCKCFVMVFGGCSLYIFLVFLLIFSVYVSLFFLLNCFIIFLLSISYLFYGLFGLIFSFIIFLFF

SEQ ID NO: 104841 - protein, 57 aa, Gossypium hirsutum
  Clone ID: LIB3493-041-P1-M1-C7.pep
HRGLGPTVIPLDEWLYNTGAHPLRICHRSDANLAALEGQHTPVIKIRSTITVRLGGH

SEQ ID NO: 104842 - protein, 85 aa, Gossypium hirsutum
  Clone ID: LIB3493-041-P1-M1-C8.pep
ETTYCYINSIIHGLQGASTGTIGCACRASSLGFSTYYGIVIIFLLSILVLFIAIIDILFHVLLFYFILDLLILYFYVHVHFFLLF

SEQ ID NO: 104843 - protein, 93 aa, Gossypium hirsutum
  Clone ID: LIB3493-041-P1-M1-D1.pep
NIFSKTTICANVSNNNESRDDHEMGSSSMSANGDILIQNPSFHCFLQGKDLNPARAIIAEMLGTFILMLCISGIIASAKLTGGDALFAYALTV

SEQ ID NO: 104844 - protein, 39 aa, Gossypium hirsutum
  Clone ID: LIB3493-041-P1-M1-D5.pep
SVICISGDDLRKPSNLQPPQGVTVSYKRKPKRHDAWVTG

SEQ ID NO: 104845 - protein, 35 aa, Gossypium hirsutum
  Clone ID: LIB3493-041-P1-M1-D9.pep
TINFDFLFQVVLAASDSLMVCHWRFHTPSFYSRFN

SEQ ID NO: 104846 - protein, 87 aa, Gossypium hirsutum
  Clone ID: LIB3493-041-P1-M1-E10.pep
LMPKQIVLRCMKLASNLLCSANEQWHRRCAARFAYLDMFARSDELQDDTIDHDMLCPTLHLIPCILFLQCLFSKYACLGSHMRFGCD

SEQ ID NO: 104847 - protein, 56 aa, Gossypium hirsutum
  Clone ID: LIB3493-041-P1-M1-E11.pep
HGRIDCITMLIGPTWQKCPDKQILQYTFYGIVYCRVQTGRNVVAPLDYTDFRYESQ

SEQ ID NO: 104848 - protein, 65 aa, Gossypium hirsutum
  Clone ID: LIB3493-041-P1-M1-E8.pep
SIKATVPSNADVYNSPESNPVPSAGRFRPDISGLMTQIVEFLAKNGAPFTINIYPFLSFYGNDDF

SEQ ID NO: 104849 - protein, 65 aa, Gossypium hirsutum
  Clone ID: LIB3493-041-P1-M1-F1.pep
EALCSGRGPMNVIKGDCMSQGNHTLARGASSINEDAFGVVVDADGNNMPTQPLPYNLSFYFYPLI

SEQ ID NO: 104850 - protein, 37 aa, Gossypium hirsutum
  Clone ID: LIB3493-041-P1-M1-F3.pep
SCITLIHRCLRVTSESTGYIEYIIYFKSCPTTSGITA

SEQ ID NO: 104851 - protein, 42 aa, Gossypium hirsutum
  Clone ID: LIB3493-041-P1-M1-F9.pep
GEFFLLHCIQLLYIIDYSLRNIYGCLTLNFIKESTDWFIDRP

SEQ ID NO: 104852 - protein, 39 aa, Gossypium hirsutum
  Clone ID: LIB3493-041-P1-M1-G1.pep
FSTYCDNQPCVLIQVYEGVRAQTRDHNLFCKFRLSGMAP

SEQ ID NO: 104853 - protein, 97 aa, Gossypium hirsutum
  Clone ID: LIB3493-041-P1-M1-G12.pep
MDRHSSDEDDDRQTLIHQNDTKHLPRQISTSPRAFTAPRSGFHIEELESQIRRRFKLTFNKRYLFAIFLPFVLIPILLSTDIRFLFSSNISSLKFNK

SEQ ID NO: 104854 - protein, 69 aa, Gossypium hirsutum
  Clone ID: LIB3493-041-P1-M1-G7.pep
EPGSTMIIPGHEHEILSCDWNKYDECLLASSSVDKSIIIWDVRNYRVPVLVRCGQGYPVANIQLHLYLR

SEQ ID NO: 104855 - protein, 46 aa, Gossypium hirsutum
  Clone ID: LIB3493-041-P1-M1-H10.pep
GKQGRRRMGSYALFLMALFLCKCLAVAILDPLDFLALQSIMNVFTF

SEQ ID NO: 104856 - protein, 38 aa, Gossypium hirsutum
  Clone ID: LIB3493-041-P1-M1-H3.pep
HVSLARARHGFCLVNEKMLEIDRIKIKKTSFKLTEDHR

SEQ ID NO: 104857 - protein, 81 aa, Gossypium hirsutum
  Clone ID: LIB3493-041-P1-M1-H6.pep
LSGNISGTDPLKDNRLLLEGKALDDTDEARHTAAVVNELSWEISRILVSHPLNAKRLAEGKNIANIVLLRGCGIRIEDPSY

SEQ ID NO: 104858 - protein, 52 aa, Gossypium hirsutum
  Clone ID: LIB3493-041-P1-M1-H7.pep
TNLVRDSVWKPNKMVSLLSLRSYESDARAERDEVPICIIHDMDDKKRKIRSK

SEQ ID NO: 104859 - protein, 52 aa, Gossypium hirsutum
  Clone ID: LIB3493-041-P1-M1-H8.pep
MAKIVVALAILLGFCSLASTVLAFTASGWTKAHATFYGGGDALGTMGGACVF

SEQ ID NO: 104860 - protein, 36 aa, Gossypium hirsutum
  Clone ID: LIB3493-028-P1-M1-A4.pep
IKLYIDTKSLYLIIALSFFKETLFEILFFTINPFPH

SEQ ID NO: 104861 - protein, 154 aa, Gossypium hirsutum
  unsure (1)..(154): unsure at all Xaa locations
  Clone ID: LIB3493-028-P1-M1-A6.pep
FKWPQSXXXAWYSNIPHRELSIEKAIQNWIQLEGNRFRFPGGGTMFPRGADAYIDDIGRLIPLTDGTIRTAIDTGCGVASFGAYLLNRNILTMSFAPRDTHEAQVQFALERGVPAMIGIMGSQRLPYPARAFDLAHCSRCLIPWQKYDGLYLAE

SEQ ID NO: 104862 - protein, 36 aa, Gossypium hirsutum
  unsure (1)..(36): unsure at all Xaa locations
  Clone ID: LIB3493-028-P1-M1-A8.pep
LSQTFCSATLNFLYIPSLXHVTTINVDSLHTFQISS

SEQ ID NO: 104863 - protein, 82 aa, Gossypium hirsutum
  Clone ID: LIB3493-028-P1-M1-A9.pep
SKSFFVGFGSIMLTSLAAIVPLTRGCYPSSLYAFMSTNSMKRHTGSQIIQTNSRGTGHHVTYGGCSFAVPYFRLSRFEGGQD

SEQ ID NO: 104864 - protein, 107 aa, Gossypium hirsutum
  unsure (1)..(107): unsure at all Xaa locations
  Clone ID: LIB3493-028-P1-M1-B7.pep
IIAAQEGKIQFGILLGWMVVSXIFLYVVFNMLAGRNNGNLDLHTCTSVVGYCMLPVVILSAVSLFMPQGIGVMRYATAGVFVVWATRSCANLMLALVMRGRTQWADR

SEQ ID NO: 104865 - protein, 140 aa, Gossypium hirsutum
  unsure (1)..(140): unsure at all Xaa locations
  Clone ID: LIB3493-028-P1-M1-C6.pep
QTPLREFIRRCEQGLEQCLXDXRKEDFNSFNLQSFSQTKEAIEEQCRRLYTFTIFKIFQDELLQSYSYIGIKTYEEGTICRYLVRRSGNENDKHAVTFSAVNLSVNCSCQMFEFEGVLCRHVLKVFKLLNIRELPSQYIL

SEQ ID NO: 104866 - protein, 45 aa, Gossypium hirsutum
  Clone ID: LIB3493-028-P1-M1-C7.pep
MADQLTDDQISEFKEACGLFDIYFYGRITTNELGTVMRSLRPNST

SEQ ID NO: 104867 - protein, 53 aa, Gossypium hirsutum
  unsure (1)..(53): unsure at all Xaa locations
  Clone ID: LIB3493-028-P1-M1-C8.pep
LSARNYIXYXXLRMNAVPCNQPGRSYYNCGIFFFSNPYTKQYIVLTLFRLFIF

SEQ ID NO: 104868 - protein, 45 aa, Gossypium hirsutum
  Clone ID: LIB3493-028-P1-M1-D2.pep
IPLRNDLVSKKKNSKIMENQAKYEKPKNKKQENFEIRQEFKQTSI

SEQ ID NO: 104869 - protein, 113 aa, Gossypium hirsutum
  Clone ID: LIB3493-028-P1-M1-D9.pep
MDVEQYFEDTEAYDPPSTEGKRSLDKWENSPGPFTGSDDDPSAGFDCNICLDSVQDPVVTLCGHLYCWPCIYKWLHCPTISTDNLDQKQQQCPVCKAELSNTTLIPLYGRGQT

SEQ ID NO: 104870 - protein, 73 aa, Gossypium hirsutum
  unsure (1)..(73): unsure at all Xaa locations
  Clone ID: LIB3493-028-P1-M1-E12.pep
EKLKAMYMADANNEANKDGGSNHIAAHTFTIRELAAATKNFRADYILGEGGSXRLYKGRLGYHLIKFVGYENY

SEQ ID NO: 104871 - protein, 45 aa, Gossypium hirsutum
  unsure (1)..(45): unsure at all Xaa locations
  Clone ID: LIB3493-028-P1-M1-E7.pep
KKSFSLSDLALFIFQKTLXMQSTKIILVRTPPFADLHSELFPHQF

SEQ ID NO: 104872 - protein, 57 aa, Gossypium hirsutum
  unsure (1)..(57): unsure at all Xaa locations
  Clone ID: LIB3493-028-P1-M1-F4.pep
TPLIQRIEIPGFIHSAEFEREKVLLSAETNKVHXETRKRTVINSPVFTCQYSSFVSP

SEQ ID NO: 104873 - protein, 38 aa, Gossypium hirsutum
  unsure (1)..(38): unsure at all Xaa locations
  Clone ID: LIB3493-028-P1-M1-G10.pep
ILEKQLPSQYQIEDLIGEPXXNLLILVSIFFGMETGSL

SEQ ID NO: 104874 - protein, 58 aa, Gossypium hirsutum
  unsure (1)..(58): unsure at all Xaa locations
  Clone ID: LIB3493-028-P1-M1-G12.pep
SQELKTKVVLEISSSRKAKIKKKPHQTNANXSEPTSINHHPKASIFLVFLSSLPSSPC

SEQ ID NO: 104875 - protein, 44 aa, Gossypium hirsutum
  unsure (1)..(44): unsure at all Xaa locations
  Clone ID: LIB3493-028-P1-M1-G3.pep
MAPEVLEXKPXNISCDVYXFXICLWEIYCCYMPYPDLIFADVSF

SEQ ID NO: 104876 - protein, 87 aa, Gossypium hirsutum
  unsure (1)..(87): unsure at all Xaa locations
  Clone ID: LIB3493-028-P1-M1-G6.pep
LIYTFXAPRTRXLSKYTEFTXNFTXISSHFLQKLSSSNNKFTYNFLLPSLTIKTITSSLILSFLFYTFTYILKNYILTINTINFSSF

SEQ ID NO: 104877 - protein, 64 aa, Gossypium hirsutum
  Clone ID: LIB3493-028-P1-M1-G7.pep
SLINVGFVAFKLCSLYFPTIEDMVHFYCELFRHLFKSVKLCCSFNQKLKKKELLLKKKYKINFK

SEQ ID NO: 104878 - protein, 48 aa, Gossypium hirsutum
  unsure (1)..(48): unsure at all Xaa locations
  Clone ID: LIB3493-028-P1-M1-H10.pep
NIKKKKKDPPTKMTSXNNIALTFLDHTCNXRIMAQAKHDKLLFASTNY

SEQ ID NO: 104879 - protein, 88 aa, Gossypium hirsutum
  Clone ID: LIB3582-001-P1-K1-A10.pep
TWERVVIFAGIMGLRHLIVEGDSRFAPRLANEAAHILAMEGRRFQRFGFWVEEVTDAVKKKAMKDRLDWFQTSSQYILICFENWRRFT

SEQ ID NO: 104880 - protein, 55 aa, Gossypium hirsutum
  Clone ID: LIB3582-001-P1-K1-A12.pep
MRSIWISSPLQQKTPSRSINKQELKDRFGQSEDFEFGAFFSLMNFLTRGRRESGR

SEQ ID NO: 104881 - protein, 82 aa, Gossypium hirsutum
  unsure (1)..(82): unsure at all Xaa locations
  Clone ID: LIB3582-001-P1-K1-A6.pep
RPXSRTTHPLRLHTSSISPHISLFIKSLLWPCARVAELVCRYGVPCEWILDTAAINHMLSGFHCLQSAVSCVLSPSYVRIPT

SEQ ID NO: 104882 - protein, 43 aa, Gossypium hirsutum
  Clone ID: LIB3582-001-P1-K1-A8.pep
QQWHGNHSSSFHQCAKLRRLAVQSLDILRTVTPSVFMKTITVL

SEQ ID NO: 104883 - protein, 43 aa, Gossypium hirsutum
  unsure (1)..(43): unsure at all Xaa locations
  Clone ID: LIB3582-001-P1-K1-B1.pep
YLLPNQSVRHFRQFNTMTLLITAIXLSIIYIESLSASLVLTYL

SEQ ID NO: 104884 - protein, 42 aa, Gossypium hirsutum
  Clone ID: LIB3582-001-P1-K1-B9.pep
LQVQPCPCMYFLTSDSNCPQESLDWRPKQVKRTTRGRPGIGG

SEQ ID NO: 104885 - protein, 49 aa, Gossypium hirsutum
  Clone ID: LIB3582-001-P1-K1-C2.pep
VIKLKEYIYISEFHHVIIKLKVLLQRRTLHKINLETLIKGHFPLIYLLV

SEQ ID NO: 104886 - protein, 59 aa, Gossypium hirsutum
  Clone ID: LIB3582-001-P1-K1-C9.pep
SRCDNLAGQSCHLQRDSIRCDWVRRLLRTANMVGVEPSYKAELEKRISWQLDQASTEEL

SEQ ID NO: 104887 - protein, 39 aa, Gossypium hirsutum
  Clone ID: LIB3582-001-P1-K1-D9.pep
NRQQINVCSCRVSVSLNYCFLLPFYFPFLAFSFINQLIK

SEQ ID NO: 104888 - protein, 46 aa, Gossypium hirsutum
  Clone ID: LIB3582-001-P1-K1-E3.pep
KPIAFTEDMIAVLLFQFTTRTSSICNYSFFLQISKSRKVVPREAPY

SEQ ID NO: 104889 - protein, 70 aa, Gossypium hirsutum
  Clone ID: LIB3582-001-P1-K1-E7.pep
RPRGCKTSRNFLEEFRRLTGIEPDDGWFDVSPYDRQSNDRAGDQECKVIVEQEGQDGYSSLSGNNSSGGN

SEQ ID NO: 104890 - protein, 63 aa, Gossypium hirsutum
  Clone ID: LIB3582-001-P1-K1-E8.pep
LSSAVTHSPLLFFHLSSLFTLAFCRINRVVLRSSTKKKTNLLVSDQCGWSRNFQKVFGFGFLD

SEQ ID NO: 104891 - protein, 58 aa, Gossypium hirsutum
  Clone ID: LIB3582-001-P1-K1-E9.pep
CSTSQGNKPVLTDWPSKSFAVARKSLKPCNALSRSLYKHIQFLVDGQHNMLSNATKVS

SEQ ID NO: 104892 - protein, 45 aa, Gossypium hirsutum
  Clone ID: LIB3582-001-P1-K1-F2.pep
IIYNITFSLPISHNIHMGLKIIFLQIFILTHKLLHICTSAPMLVN

SEQ ID NO: 104893 - protein, 54 aa, Gossypium hirsutum
  Clone ID: LIB3582-001-P1-K1-F3.pep
KKSRFYNCHNREIFLPPPPLKKKNFFFKAFLSSSWTNMTLLFFYNNSKTLIGLS

SEQ ID NO: 104894 - protein, 108 aa, Gossypium hirsutum
  Clone ID: LIB3582-001-P1-K1-F8.pep
TQSIPKSLLFFLLRVLFSYFHLIKTNPVPLLTLFCYRDSFRTSLLHNIFQKEKSFLPKGLSQALTTGKRFCTTLMETSPPSVLFFRKKPPSFNPWGGGGEKKSFSNTS

SEQ ID NO: 104895 - protein, 107 aa, Gossypium hirsutum
  Clone ID: LIB3582-001-P1-K1-G4.pep
TAGAAISAHMDIDKVTFTGSTEVGRKIMAAAAASNLKPVSLELGGKSPLLIFDDADIDQAADIAFRGMFYNKGEICVASSRVYVQEGIYEKLVKKLVEKAKATVVGD

SEQ ID NO: 104896 - protein, 76 aa, Gossypium hirsutum
  Clone ID: LIB3582-001-P1-K1-H11.pep
LDLQTQLETRNIEVDNLSHRVGSLESEKTSLCGQLATLTSILERNEENLEISKEPQSIRDLEMEVVELRRLNKDLQ

SEQ ID NO: 104897 - protein, 94 aa, Gossypium hirsutum
  unsure (1)..(94): unsure at all Xaa locations
  Clone ID: LIB3582-001-P1-K1-H2.pep
PRVRLDQADKEIQKWNKARFXLTDELKAKRAKRSEMLSQVRALNVDFEQFKTILDEKKKEIEPLQQALGKLRNNKECDNRLKLCASEEELDFFI

SEQ ID NO: 104898 - protein, 54 aa, Gossypium hirsutum
  unsure (1)..(54): unsure at all Xaa locations
  Clone ID: LIB3582-002-P1-K1-A11.pep
YYYKKDVRXQCTFFLFFVLXLSYKDIFTVKYFIPTPDLKRKQKYGTMKLLVIPA

SEQ ID NO: 104899 - protein, 38 aa, Gossypium hirsutum
  unsure (1)..(38): unsure at all Xaa locations
  Clone ID: LIB3582-002-P1-K1-A5.pep
PLITFTKPYLIHSLPPISPNYVVLTVENDVXQXGERKR

SEQ ID NO: 104900 - protein, 46 aa, Gossypium hirsutum
  Clone ID: LIB3582-002-P1-K1-A9.pep
STVRSRRPTSPRVVFVHCSLRSETWGSSGMLSQFSLSSLSRLPACS

SEQ ID NO: 104901 - protein, 68 aa, Gossypium hirsutum
  unsure (1)..(68): unsure at all Xaa locations
  Clone ID: LIB3582-002-P1-K1-B11.pep
YRPXPGRPTSEKIQTYSNHGEEQSVFVLGLFSFLSFGLLLCQTSRRRARMILTEVEDCRKLSFVTPVK

SEQ ID NO: 104902 - protein, 51 aa, Gossypium hirsutum
  unsure (1)..(51): unsure at all Xaa locations
  Clone ID: LIB3582-002-P1-K1-B12.pep
GCSSHVTSLSLHFHMVMVMGYVPCVIFIFXKTCVVKVSPEYLSSKLFNLSF

SEQ ID NO: 104903 - protein, 69 aa, Gossypium hirsutum
  Clone ID: LIB3582-002-P1-K1-B8.pep
PTCSQHASEEDEREEPGGGGRKSRGGLKKTFCSMLLKHMSSASFAHVTNPRCGHIITVNSVNFTILHYL

SEQ ID NO: 104904 - protein, 75 aa, Gossypium hirsutum
  Clone ID: LIB3582-002-P1-K1-C10.pep
LRTVRFPSTTRRHRRQLTLFGGRQSHQARDRNVVTTKQISIDQNHFQEKSARSLNYDQTLYSPNGALLVATKYVI

SEQ ID NO: 104905 - protein, 82 aa, Gossypium hirsutum
  Clone ID: LIB3582-002-P1-K1-C11.pep
FHLYFKFASFLLPLFLRGGVTLTLFRRQTDGPAMGLHLELWKGAYCHSKLGFHHWAGGHCSTCSSLIATTTSWLRLKRTSPD

SEQ ID NO: 104906 - protein, 45 aa, Gossypium hirsutum
  Clone ID: LIB3582-002-P1-K1-D10.pep
MKEDDCTGPSNRELYALLHLSPEASDEEILIAYSQWSQFYHPHIY

SEQ ID NO: 104907 - protein, 85 aa, Gossypium hirsutum
  unsure (1)..(85): unsure at all Xaa locations
  Clone ID: LIB3582-002-P1-K1-D3.pep
KLPGHEESYNPSLEYIPTQKRSTLIAXCTKNRPNLFLKSQSFRSIPXYENAXKDSFERCLDLYLXPRVRKKRINIDPESSAQVTS

SEQ ID NO: 104908 - protein, 77 aa, Gossypium hirsutum
  unsure (1)..(77): unsure at all Xaa locations
  Clone ID: LIB3582-002-P1-K1-D5.pep
STRPSTRPVFSTSTSYTALQSLSLPQTFNKKTPFXYTQCXCIHTRSIFPCQDTPASRIRYSASLNVPRKLSVPMLNP

SEQ ID NO: 104909 - protein, 62 aa, Gossypium hirsutum
  Clone ID: LIB3582-002-P1-K1-D6.pep
PAQLTGLLDTKGFCFNLGTICSSTKEAFIIQVRYNKCLILLKVRYLSSKDVFVHQFRRTLLR

SEQ ID NO: 104910 - protein, 55 aa, Gossypium hirsutum
  Clone ID: LIB3582-002-P1-K1-D8.pep
SYHNLSGDAHINLSNYRDLPSLNREPVDLVLLPDLLLPQCRYPYCRGGGLFPPFF

SEQ ID NO: 104911 - protein, 43 aa, Gossypium hirsutum
  unsure (1)..(43): unsure at all Xaa locations
  Clone ID: LIB3582-002-P1-K1-D9.pep
HXLDSGSPQVISMLGNSYPSAGGTLSQGHVQAVNNLCSLENVD

SEQ ID NO: 104912 - protein, 29 aa, Gossypium hirsutum
  Clone ID: LIB3582-002-P1-K1-E10.pep
PPSYTVVMQDPPCFEERTYRSDISSNLLK

SEQ ID NO: 104913 - protein, 71 aa, Gossypium hirsutum
  Clone ID: LIB3582-002-P1-K1-E11.pep
IVDIKWLLMAHSSPLKTGCTPGKTCHESYLSTTAQLPPSTSLREGGISTGGIRGLASSCHLSSRITCLRGG

SEQ ID NO: 104914 - protein, 51 aa, Gossypium hirsutum
  Clone ID: LIB3582-002-P1-K1-F10.pep
SRGAERRTKNREQQRTMFFIITHHYQIPSFTTCKLFRKALLPERGRRESDG

SEQ ID NO: 104915 - protein, 111 aa, Gossypium hirsutum
  unsure (1)..(111): unsure at all Xaa locations
  Clone ID: LIB3582-002-P1-K1-F11.pep
DRGQSYSSLYRKFLSLVDTQGAARQLLGRQSRKQQDRECSKPXEQIRHWPEALTKGEKGRDSLNLWPTLVLTKTAFLRLATEFGGGDICTVHLDLTKDNLVPTTFKAHFDP

SEQ ID NO: 104916 - protein, 73 aa, Gossypium hirsutum
  Clone ID: LIB3582-002-P1-K1-F7.pep
NRSPQNLIAIPSIHLSFAPRFSVMSFKLTINCQYRLKSLNPEMKNIEKLIQGLDDSNFTTKTFHQFYRQQGDA

SEQ ID NO: 104917 - protein, 37 aa, Gossypium hirsutum
  Clone ID: LIB3582-002-P1-K1-F8.pep
KQRKKTLAHILYSPQPKVLTCLDPCTCCLNNSDDGGE

SEQ ID NO: 104918 - protein, 71 aa, Gossypium hirsutum
  Clone ID: LIB3582-002-P1-K1-G11.pep
FAQEVFIMMKVRHKNVVQGLGACTQPPNLCIITEFMSGGSVYDYLHKQKGVFRLPSFLKVSIDVSNGLNYL

SEQ ID NO: 104919 - protein, 53 aa, Gossypium hirsutum
  Clone ID: LIB3582-002-P1-K1-G12.pep
RRNRVSCDETYVSSLKIVIITFKANSKQSSDLTIAGITALSQQFFNISRGGGG

SEQ ID NO: 104920 - protein, 63 aa, Gossypium hirsutum
  Clone ID: LIB3582-002-P1-K1-H1.pep
ITKDILNCPSCPSDGSDFLEDLHVNRELMDVIESLKHKSEEIEVPSAYEPMNGLEESTDLGFQ

SEQ ID NO: 104921 - protein, 48 aa, Gossypium hirsutum
  unsure (1)..(48): unsure at all Xaa locations
  Clone ID: LIB3582-002-P1-K1-H10.pep
PRVATLATRRSSRSQRRLXIKLTTSCDVYSFRYLIQLLAAFTTWTGKP

SEQ ID NO: 104922 - protein, 79 aa, Gossypium hirsutum
  Clone ID: LIB3582-002-P1-K1-H2.pep
MKPAISLRSMLDLEHLFSILTIFGRTKTCKKTTHYKNISSTLSRKKKLLLLFFLGFLSLETKRHILLFGLTGFHGFGTE

SEQ ID NO: 104923 - protein, 43 aa, Gossypium hirsutum
  Clone ID: LIB3582-002-P1-K1-H8.pep
PRVRIRHLPFSASSQIQAVWKMGLKQVMHRPKTMRRLEKKRDF

SEQ ID NO: 104924 - protein, 47 aa, Gossypium hirsutum
  Clone ID: LIB3584-002-P1-K1-A10.pep
TVRFPVDTRPLNKGLIAEILTLKPISKIAILKGMQSTTHKVCERAWI

SEQ ID NO: 104925 - protein, 41 aa, Gossypium hirsutum
  Clone ID: LIB3584-002-P1-K1-A2.pep
ASPVFPRRFGYTSAPCTQSQAPTLSPSLTLFLVASRLARLP

SEQ ID NO: 104926 - protein, 122 aa, Gossypium hirsutum
  Clone ID: LIB3584-002-P1-K1-B11.pep
MMMKRQRKQEATPSSVEAPPSNVRAKGYKGEKHGSPGNSRNGKRAPEATVKLTFVRDDRERFDLPDLLKASAEVLGSGSFGSSFKAALSIGPVVVVKRYKQINNTGKEEFLEHMMRILILSH

SEQ ID NO: 104927 - protein, 149 aa, Gossypium hirsutum
  Clone ID: LIB3584-002-P1-K1-C5.pep
LDKGKLLDTLHKAAHATLSSCPVNCPLAHMERTVSEVLRKTVRKYSGKRPEVIAIALENPAGVLSDELNENLSGNYNAGFGLPTLRKVVDGHPRRGPPNKMKVEDDGILHLENASEQSLLDDDAEAERFLPRGRHQHFNFPTIQNGLTP

SEQ ID NO: 104928 - protein, 52 aa, Gossypium hirsutum
  Clone ID: LIB3584-002-P1-K1-D1.pep
ALGYVLMGSLGGRRPRPGPKARTYEQIYEKIGETKVDTSSEGLCTGYPTEFD

SEQ ID NO: 104929 - protein, 99 aa, Gossypium hirsutum
  unsure (1)..(99): unsure at all Xaa locations
  Clone ID: LIB3584-002-P1-K1-D11.pep
TEELCKMGCSENDTSLNIXDCVEMIPKSSGDAINTSMDEKHVGFLLYAPTRPIVDIXGIFLWAMAVGTIVTASLWQEFGTFDNSDERYNELYKESPKAG

SEQ ID NO: 104930 - protein, 32 aa, Gossypium hirsutum
  Clone ID: LIB3584-002-P1-K1-D6.pep
LKNSIRRHQYSVPFYRSPMQNMIPSKKKRTRG

SEQ ID NO: 104931 - protein, 73 aa, Gossypium hirsutum
  Clone ID: LIB3584-002-P1-K1-D9.pep
PSDSRSTHLDLYENVETVNDSGWFLGVWSLITEIFADNSIFDHTAYYNIRTDHLKQRLHCQQLILLWRNQFHS

SEQ ID NO: 104932 - protein, 86 aa, Gossypium hirsutum
  Clone ID: LIB3584-002-P1-K1-E1.pep
SFPRPTYEKPHSRLKPRIGSAGFPYFIFHPSCCWPILKPLNSVSVPLLSPSTSSRNQTLFMDNALRDCAFIHKSHPISIIFTSRLI

SEQ ID NO: 104933 - protein, 151 aa, Gossypium hirsutum
  Clone ID: LIB3584-002-P1-K1-E7.pep
KLQLRDTGLKLEELQRELSMVNEAKQNLESQLRNMEADVETMSSKIESLEKEIEKERTLSAEVSVNANESKKMLESQLISIEVEARTMSAKIDSLETEVEKERALSAQITVKCQELEEELSRKKQETELQQTVNSNVEVKIKQEDLTAACG

SEQ ID NO: 104934 - protein, 93 aa, Gossypium hirsutum
  Clone ID: LIB3584-002-P1-K1-F1.pep
ALRYLYIRWGMELSGIVVFAGECGDTDYEGLLRGVHKTVILKGIGNTALKLHSNRTYPLDHVLPFDSPNIHHAEGCSNEEIRSSLRKLQVSKE

SEQ ID NO: 104935 - protein, 83 aa, Gossypium hirsutum
  Clone ID: LIB3584-002-P1-K1-F10.pep
DHKDQPPQIILTEIGQSSYSRLEHSCQFLAGHFESSLKSGNMSPQAMYPHLEYQILHIKIIHQSKKNAQVLGRNFAQYFLKHM

SEQ ID NO: 104936 - protein, 73 aa, Gossypium hirsutum
  Clone ID: LIB3584-002-P1-K1-F3.pep
KKAQFSGSKHCMSDIKFKQRTEMWRQQTSMLHNTLFSCIRCNYKLYKARHSLVLNIAVFRKTDSAIPNNGRVG

SEQ ID NO: 104937 - protein, 143 aa, Gossypium hirsutum
  Clone ID: LIB3584-002-P1-K1-F6.pep
GEVSKLREENMVLRERGKSAEERCNRLSEEVKGMYEKQHEIINLRSKNCELENEKAKAESELEILRKRFEELDKRVLCLETGFNTLQDEDDSKSNNRNGGEIGVSENGGLKPIEANRYSPNAGNGRPPSQNRGEIVDIDSRLL

SEQ ID NO: 104938 - protein, 102 aa, Gossypium hirsutum
  Clone ID: LIB3584-002-P1-K1-G9.pep
PRVRPRVRQIHELFPWNVRVVETQGLLHAEVDHFQVPQQTRKTSLSINKSSNKASTKGFSARPELLQMYSTHHLEHSGFGFGWINPIILINMRTDTFGMSSG

SEQ ID NO: 104939 - protein, 63 aa, Gossypium hirsutum
  Clone ID: LIB3584-002-P1-K1-H1.pep
PPLNYALNHSPIYYFDCCLPNSRCSTMNHQSVGAPLLAIILGRGGAARNDMFQPKIIFGCVYF

SEQ ID NO: 104940 - protein, 95 aa, Gossypium hirsutum
  unsure (1)..(95): unsure at all Xaa locations
  Clone ID: LIB3584-002-P1-K1-H10.pep
RSHRNLLNTLQSAEAXXLENGKLPPLPRSESNGNVETPASERERLLLGKITELQSRMMNLTDELTAEKLKHDQLQQQLRFVSGVEENGIRREVDA

SEQ ID NO: 104941 - protein, 87 aa, Gossypium hirsutum
  Clone ID: LIB3584-002-P1-K1-H2.pep
NFCLFIASNVPSLKGFCQHSGDLQNGISALQALSSAMVSLQRYEFKTNHEEWLKDVKPRLGPEVSRCVLAAINNTYENIKSLYKVND

SEQ ID NO: 104942 - protein, 62 aa, Gossypium hirsutum
  Clone ID: LIB3584-002-P1-K1-H3.pep
VFNISFVLFNFNWGSFHQIAGWICHLSISFMDFFDDFASHDFLYLKFDLTQLLLYMKKESRS

SEQ ID NO: 104943 - protein, 118 aa, Gossypium hirsutum
  Clone ID: LIB3585-001-P2-M1-A6.pep
METEVEAVDNGNGTTVAEINVPSPPPLDGGEGGDCGSRDDSAVGGRARKQRVKGPCSPEEDAILSELVSKFGARNWSLIARGISGRSGKSRRLRWCNQLDPAVKRKPSTDEEDRLIIS

SEQ ID NO: 104944 - protein, 43 aa, Gossypium hirsutum
  Clone ID: LIB3585-001-P2-M1-B12.pep
NLSPDKDEISNPVLRGHQVTTSPGKQKCLLELSHRLKRCKISY

SEQ ID NO: 104945 - protein, 70 aa, Gossypium hirsutum
  Clone ID: LIB3585-001-P2-M1-B3.pep
ALSSIGSSKKEGNTHQSTFTLSEKDFSVHHPVTQFCSEHRTNCSQCYQLSWEIPNGRRRWTFTYRKQKDD

SEQ ID NO: 104946 - protein, 116 aa, Gossypium hirsutum
  Clone ID: LIB3585-001-P2-M1-B8.pep
SPVRFTAFRTDILHISHPIDRFLKGCFTATIGSNITPVSINAVVGPVFGQDFGAHLCGGLPGVAQGLLYLPVNRSMRVMEFVPEEVVHLLRHTAREVPCKGFLNQNLDSLNGSKNG

SEQ ID NO: 104947 - protein, 100 aa, Gossypium hirsutum
  Clone ID: LIB3585-001-P2-M1-C4.pep
QRVRILPDDRSKCAQFSTTIGHQQVYSSALKLVRSMLPLPYLKEGNMTAPPVGNAIAPNSDWKRTEFFLNHEALQQVIKAEQKHVFRSLFGTIAEVTNEE

SEQ ID NO: 104948 - protein, 53 aa, Gossypium hirsutum
  Clone ID: LIB3585-001-P2-M1-C7.pep
ENLTKTLIVFICVLYWDLHCFTQLKRLDHILGILYRLNLNLPTLVTLPILTAY

SEQ ID NO: 104949 - protein, 69 aa, Gossypium hirsutum
  Clone ID: LIB3585-001-P2-M1-D12.pep
WLFQCNNMLCSSLFKSKPRKKIEKGKIKIQEKDFLIFIGKKKGDRRSYSVCKFSHVGLSFLIHRCRTRG

SEQ ID NO: 104950 - protein, 109 aa, Gossypium hirsutum
  unsure (1)..(109): unsure at all Xaa locations
  Clone ID: LIB3585-001-P2-M1-D8.pep
AILFLTLLFSQKRRITFVKSLTGKTITLEANSSFAIVFWNTNFHCMEGVHPDHLGLIFSEKQLEDRRTLADYIIHKEXIVNVGLCLPGGMQISQKTLTGKTFTLKGERS

SEQ ID NO: 104951 - protein, 137 aa, Gossypium hirsutum
  Clone ID: LIB3585-001-P2-M1-E1.pep
ANDQCVLLFNEVQKAWKVSFTLHSDLKSENVMLEDRLKIEKDQIAQLRNQVAQLLQSEQEQKLQMKQYDSTIQTLQAKVKSLESQLNEAIRSGEAKSVSSEKGSGVSTISKTAADGMDSSAVTKKLEEELRKRDAFD

SEQ ID NO: 104952 - protein, 67 aa, Gossypium hirsutum
  Clone ID: LIB3585-001-P2-M1-E2.pep
ANDQCVLLCSEVHKAWKVSFIRHSSLKSEHVMLGARHRIEKEQIAQFTHQVAQWLQLEQVQYLEMKQ

SEQ ID NO: 104953 - protein, 42 aa, Gossypium hirsutum
  Clone ID: LIB3585-001-P2-M1-F3.pep
LVVIYFITFNFFIIFKVSCNDLLVKDVHCFKCDWSSSWASNI

SEQ ID NO: 104954 - protein, 43 aa, Gossypium hirsutum
  Clone ID: LIB3585-001-P2-M1-G5.pep
GDKLNHSILFVWAHFGRKYCFWVLRLPRNLVINIRQIYSATQL

SEQ ID NO: 104955 - protein, 79 aa, Gossypium hirsutum
  Clone ID: LIB3585-001-P2-M1-G8.pep
VIVVIFLVFFFMNILKKYDFHHYHCQYYTSTPSSEALISEDEEMKTELIFGKRLPEEFQLRQCITTKRMHCCRAICQET

SEQ ID NO: 104956 - protein, 28 aa, Gossypium hirsutum
  Clone ID: LIB3585-001-P2-M1-G9.pep
MNVKGTISTVINKGFFLLNTANNIRTGK

SEQ ID NO: 104957 - protein, 93 aa, Gossypium hirsutum
  Clone ID: LIB3585-001-P2-M1-H10.pep
ESPGKTFISFGDPPPVSKKSFPYPNKILGLRSPSLTTQYPNLKKKNPNNNGSKTNESIKMPKNFFKSCNLISRLFLKFPFNFNHPSLIFPKFK

SEQ ID NO: 104958 - protein, 64 aa, Gossypium hirsutum
  Clone ID: LIB3585-001-P2-M1-H11.pep
SRDYLKPGKPCQGLKKDLEALVGGTNTFMVASHLFWAVWALIQARVAPIDFDYLGDFFLGCHGV

SEQ ID NO: 104959 - protein, 55 aa, Gossypium hirsutum
  Clone ID: LIB3585-001-P2-M1-H5.pep
SKPRVQYLAGIKAKRAQNKCKATMKVLVPPTKAPRSFSKPWNGFPGVVVKKPSGR

SEQ ID NO: 104960 - protein, 129 aa, Gossypium hirsutum
  unsure (1)..(129): unsure at all Xaa locations
  Clone ID: LIB3585-001-P2-M1-H7.pep
FNWSLGFNSMGLYKMTNLALIPSTGLLETMSLKKQLSQKIKMSLLAXLVGVGMASITDLQLNFVGTMLALLAIVTTCVGQILTNTIQKRLIVSXTKLLYQXAQFQAAILFVSGPSVDQLLTKQNVLAFK

SEQ ID NO: 104961 - protein, 84 aa, Gossypium hirsutum
  Clone ID: LIB3585-001-P2-M1-H9.pep
PTRPQKSNSINKLKIIKLFKKKKNHFSFDFKEWFFFCQLKKMVNFKLRAFLFSIIPDYVEGQIFDSILGRNRRRNSEHSYKLWV

SEQ ID NO: 104962 - protein, 39 aa, Gossypium hirsutum
  Clone ID: LIB3585-001-P2-N1-A1.pep
PFLINGQLYLGLTTASSNDPFSLRMRSHYYRLFRQGLCR

SEQ ID NO: 104963 - protein, 36 aa, Gossypium hirsutum
  Clone ID: LIB3585-001-P2-N1-A11.pep
LYACMCRYAIDGPTYAFDKPLPLSCKNLTLNFLCVI

SEQ ID NO: 104964 - protein, 85 aa, Gossypium hirsutum
  Clone ID: LIB3585-001-P2-N1-A4.pep
KKRWYQWFNALSITGLIFINSIHSKKYISLLYTCIYLAILFSECGSKSSFPLGDDSYYHLSSYGMHFFNLILNPLLYLFVTTVGI

SEQ ID NO: 104965 - protein, 72 aa, Gossypium hirsutum
  Clone ID: LIB3585-001-P2-N1-A5.pep
KTWSAHRLAIKRGRSSTCKGNHGPGVISRGFKWSTQIIPKMSKAIHALYIPDCKTHELISMFSISDSDLKVY

SEQ ID NO: 104966 - protein, 39 aa, Gossypium hirsutum
  unsure (1)..(39): unsure at all Xaa locations
  Clone ID: LIB3585-001-P2-N1-A8.pep
LIWHIHEEHPVEPKNGVCPVCAKRVXMDICSHITMQHGN

SEQ ID NO: 104967 - protein, 38 aa, Gossypium hirsutum
  Clone ID: LIB3585-001-P2-N1-A9.pep
SFVWRGFSHKSELNPVYTKTNYAFLISLLPCFYAGEVA

SEQ ID NO: 104968 - protein, 36 aa, Gossypium hirsutum
  Clone ID: LIB3585-001-P2-N1-B1.pep
RRKIDCTFCYSMLSQVFLACVFTIHASAYAWVDPSI

SEQ ID NO: 104969 - protein, 129 aa, Gossypium hirsutum
  unsure (1)..(129): unsure at all Xaa locations
  Clone ID: LIB3585-001-P2-N1-B10.pep
MAGGAEDNIQEPTRNRDSQGEGVIVIADYYYFRRRSECEDVHAETFTHSLRCPLCRGNVLRWEDVEHARKCLTSENRTXTRESSSYDGSYQELRRHARRVHPALRASYIDPSRERAWXPLEHQRDYRDI

SEQ ID NO: 104970 - protein, 91 aa, Gossypium hirsutum
  unsure (1)..(91): unsure at all Xaa locations
  Clone ID: LIB3585-001-P2-N1-B2.pep
RPRVRWEHATKIYEEAVQLNWSSPHALNNWGLALXELTAIVPAREMLTSVRTATSKFRAAVQLLFDFHRGLYILGTVLCGLPDDTLRQRSA

SEQ ID NO: 104971 - protein, 69 aa, Gossypium hirsutum
  Clone ID: LIB3585-001-P2-N1-B3.pep
LGSPIIYKLLPSKTWISSKTSFTRLLESMQITTTRVCEELFTMTRMSNNKRVGLGRPRYTVPARARAPA

SEQ ID NO: 104972 - protein, 52 aa, Gossypium hirsutum
  Clone ID: LIB3585-001-P2-N1-B4.pep
YLNMFLQHIQPFIVARTALVVNVVLHSSIQHPCSRTCDVIYQDDSCDSCKSE

SEQ ID NO: 104973 - protein, 67 aa, Gossypium hirsutum
  Clone ID: LIB3585-001-P2-N1-B7.pep
ALPLSNTGDADGVTRCHHSLCCLTSMPSLLETLSWFRVLQLKLSDPTDKAVTVTRSRQLQPALLLEI

SEQ ID NO: 104974 - protein, 42 aa, Gossypium hirsutum
  Clone ID: LIB3585-001-P2-N1-B9.pep
AYSTTPVALLFMHMARHIRHLEMRAVLRRAINVSIFAIRQPG

SEQ ID NO: 104975 - protein, 42 aa, Gossypium hirsutum
  Clone ID: LIB3585-001-P2-N1-C10.pep
CDVKTSWLQSHDINECWQNEEDVHYLKCCKTLGRKYHVFRRA

SEQ ID NO: 104976 - protein, 111 aa, Gossypium hirsutum
  unsure (1)..(111): unsure at all Xaa locations
  Clone ID: LIB3585-001-P2-N1-C11.pep
MKLCASRAHVMTDNLRTNRKHYPNPNVYYIRLLSEKSLSTNLLSPCPTEGSVYGDCYGLKLLPESLYPVFLCRTRPKRGVVTMVIPFXRGSAWEQPTXDLEWHLHKNGVVY

SEQ ID NO: 104977 - protein, 60 aa, Gossypium hirsutum
  Clone ID: LIB3585-001-P2-N1-C3.pep
SSAKALSLPTTRSSMPIYSTASYTKLMTSVSTEETEMIRFKFSSIFYFPFYFLFLGSEIS

SEQ ID NO: 104978 - protein, 43 aa, Gossypium hirsutum
  Clone ID: LIB3585-001-P2-N1-C7.pep
YPMLFAIRFVWCLSWELHSSTCYSVSMYQSPSSFLGTALLSLA

SEQ ID NO: 104979 - protein, 45 aa, Gossypium hirsutum
  Clone ID: LIB3585-001-P2-N1-C8.pep
MYVMKSSYDAAEWTCSYMCREYEFWTMNERVGRPLYSVPAHAGVP

SEQ ID NO: 104980 - protein, 32 aa, Gossypium hirsutum
  Clone ID: LIB3585-001-P2-N1-C9.pep
HPMPRGIMPHQVFLLSSSHHDVMRLIQQAGFR

SEQ ID NO: 104981 - protein, 92 aa, Gossypium hirsutum
  Clone ID: LIB3585-001-P2-N1-D10.pep
MKLLFLTSLLRPLLLCSSALELTMAQARSPLCDRKFKGRCPKTVVWDRCFKYCRICRAECKCGPSMSYGDKHQCPLFKYTGNIKGTPKSPLK

SEQ ID NO: 104982 - protein, 63 aa, Gossypium hirsutum
  Clone ID: LIB3585-001-P2-N1-D12.pep
PSFLFRNQFWVFIQTMGSITSRYIEKAIKASDSDCSWSLINKAYLSPDHVPSTPNTITCIYKA

SEQ ID NO: 104983 - protein, 74 aa, Gossypium hirsutum
  unsure (1)..(74): unsure at all Xaa locations
  Clone ID: LIB3585-001-P2-N1-D2.pep
MLSAAVGTDIMDAAYHVGVQKARSSDECCTFNXYTTCAKDIFKGKKAVNIGLPGAYTGDCXRQHVPRYTKNIDK

SEQ ID NO: 104984 - protein, 51 aa, Gossypium hirsutum
  Clone ID: LIB3585-001-P2-N1-D3.pep
YMRKLARVHELVRYRAVDLRVRSKKMKKIPLLLWIVLGIISQQNSYDIILS

SEQ ID NO: 104985 - protein, 60 aa, Gossypium hirsutum
  Clone ID: LIB3585-001-P2-N1-D5.pep
FAHSEPTLAHLTLPSCERNKRVKYTGSTPVDRRFKYCVLLEEECHNRPSKTHGFEHLCLC

SEQ ID NO: 104986 - protein, 81 aa, Gossypium hirsutum
  unsure (1)..(81): unsure at all Xaa locations
  Clone ID: LIB3585-001-P2-N1-D7.pep
RVIKMFDSCIKHCRHPFDASYTMLLCHPLTYSSKTRVIKLPQVRKPISVLNLPASVMIENGFFSLNKRTRGXTHGRTRRSA

SEQ ID NO: 104987 - protein, 56 aa, Gossypium hirsutum
  Clone ID: LIB3585-001-P2-N1-D8.pep
TFTIRAESCTAIDVVPANLHYGGRIGSDQNRMTYNREQIGLLRTLDSIHRPKELTL

SEQ ID NO: 104988 - protein, 102 aa, Gossypium hirsutum
  unsure (1)..(102): unsure at all Xaa locations
  Clone ID: LIB3585-001-P2-N1-D9.pep
MERYEILTDIGSGYLYVAKLXRDKRTGEIYAVKYIERCSRIDQHVLRENINHKXLKHPSIRKIDXGLGTPTHLAIEIEDTAVRELVCRMSNARRISEYEAWF

SEQ ID NO: 104989 - protein, 86 aa, Gossypium hirsutum
  unsure (1)..(86): unsure at all Xaa locations
  Clone ID: LIB3585-001-P2-N1-E1.pep
RSNDQCDLLFNEIHTAMNVSFTLDSHLKSENVMLDDKPKIDKEQNAQPYNSQXAQLLHAVQDQTLQMKHYDSPIHTLQAKVKSLES

SEQ ID NO: 104990 - protein, 52 aa, Gossypium hirsutum
  Clone ID: LIB3585-001-P2-N1-E10.pep
RLLKRHWIWSCPLLKERMHADYGKKSKGGLTDDLSSNSIHIGRRVIQQMTLN

SEQ ID NO: 104991 - protein, 100 aa, Gossypium hirsutum
  unsure (1)..(100): unsure at all Xaa locations
  Clone ID: LIB3585-001-P2-N1-E3.pep
PLVWNIQASTWLPHYVYERLITKAQKPGFFQLLATQTARADRHGLYPEYMLXFGQTHLMIAGSRVIYLWEQTTNMGTVEKALEIMNFVYALLILNYSGVG

SEQ ID NO: 104992 - protein, 46 aa, Gossypium hirsutum
  Clone ID: LIB3585-001-P2-N1-E5.pep
MVYLDTSNASSGWAAVHALGQASFQSCISFCVCYARLASSSSSKTK

SEQ ID NO: 104993 - protein, 42 aa, Gossypium hirsutum
  Clone ID: LIB3585-001-P2-N1-E7.pep
SATTTSLIWRRWHACMSRSAIARSTYAFAKHSTHRFLHIIQG

SEQ ID NO: 104994 - protein, 47 aa, Gossypium hirsutum
  Clone ID: LIB3585-001-P2-N1-F1.pep
WHQAPEELSHSCVQHEQVHGHQHMCHCQYQLRQGPELPRYQDSSVPK

SEQ ID NO: 104995 - protein, 104 aa, Gossypium hirsutum
  unsure (1)..(104): unsure at all Xaa locations
  Clone ID: LIB3585-001-P2-N1-F10.pep
MSRSAIERSTYAFASSSTPSHHQSIKRDILHIHGAQCCIQNAAMFCEAICAXHELNPTALFNGDLHLQLVMFNVYYNESSHGMYAPRADTMDLEQVTIDSTRSA

SEQ ID NO: 104996 - protein, 62 aa, Gossypium hirsutum
  Clone ID: LIB3585-001-P2-N1-F12.pep
KNDSSWIYFYHKESRFVRIKVIQFGNAPPAFVFKSSIDRCTVVGVFVDYCSNYAPFRIIEAP

SEQ ID NO: 104997 - protein, 85 aa, Gossypium hirsutum
  unsure (1)..(85): unsure at all Xaa locations
  Clone ID: LIB3585-001-P2-N1-F2.pep
TEEAGQLTAEEIIKVRSVIHSNIAANAIAVQMPLATYATRAMLDVXPEAEGQRTDIKAANKKLXWRLKKIVVGYEHTLCAMLACF

SEQ ID NO: 104998 - protein, 45 aa, Gossypium hirsutum
  Clone ID: LIB3585-001-P2-N1-F3.pep
LVAIYSITFNLFIIFKVSCNDLLVKDAHCFKCDLSSSSASHICQL

SEQ ID NO: 104999 - protein, 35 aa, Gossypium hirsutum
  Clone ID: LIB3585-001-P2-N1-F8.pep
SHIICVVIALSAPPVELCVSGYVSNPQCEATALSQ

SEQ ID NO: 105000 - protein, 98 aa, Gossypium hirsutum
  Clone ID: LIB3585-001-P2-N1-G1.pep
WLRVDSSAQDSAPLVGDLYPKLPAIPLAYRGLGSRAHLFLAHTISHAMLSTLHLRIDDDSAASQPSSALEGRHGTITDASTGADSHRSCLSSDPCRIR

SEQ ID NO: 105001 - protein, 61 aa, Gossypium hirsutum
  Clone ID: LIB3585-001-P2-N1-G12.pep
SILLRGPLFLLLDGPVSDVSRGAMPCSLRLAVSPRPVRAGFSVEPRPVSSKVDISTLSTRP

SEQ ID NO: 105002 - protein, 40 aa, Gossypium hirsutum
  Clone ID: LIB3585-001-P2-N1-G3.pep
YTLLFSLGARQGPNSSLTFCCIYLYTEHVNYIRSQILLLH

SEQ ID NO: 105003 - protein, 51 aa, Gossypium hirsutum
  Clone ID: LIB3585-001-P2-N1-G7.pep
PVCNRRADLRVRYLFRQSSLCHFLRSEKHTLDMHDASSYTHALFTGVRHSC

SEQ ID NO: 105004 - protein, 70 aa, Gossypium hirsutum
  Clone ID: LIB3585-001-P2-N1-G8.pep
SFVCWHMARQLCILLVVLHCNSSYSSGGLVPNIHAVFITNVLRDQSFRGRCGRVIPTRAYDESHTFLISA

SEQ ID NO: 105005 - protein, 40 aa, Gossypium hirsutum
  unsure (1)..(40): unsure at all Xaa locations
  Clone ID: LIB3585-001-P2-N1-H11.pep
TNTFMLASHLYCALWAXIQARMSPIDCDYLLYHSLRYNEY

SEQ ID NO: 105006 - protein, 124 aa, Gossypium hirsutum
  unsure (1)..(124): unsure at all Xaa locations
  Clone ID: LIB3585-001-P2-N1-H3.pep
FATSYLDVDHAEKVIRGHRTWLSHNHDCALTCAKTADMPALNANSADYLRGFTGLIVKEASVIDVKHIFSIDRLIGLPSCVCTISVFXSIVREAXANTARTLPGPHVGALLTLGYALMAASCIH

SEQ ID NO: 105007 - protein, 59 aa, Gossypium hirsutum
  unsure (1)..(59): unsure at all Xaa locations
  Clone ID: LIB3585-001-P2-N1-H5.pep
ADIRHEIEYLVCVPIMIGILFLLFEYYDDQLLALMXVLILVWICELFILISVRTPISMK

SEQ ID NO: 105008 - protein, 89 aa, Gossypium hirsutum
  Clone ID: LIB3585-001-P2-N1-H9.pep
SSTRTLTSISINKLRIIKWCRKETNHISCDSKESQFFCQLKKMANFKLWACLLSITSDYVDGQSFDMILGRNLRWNSQHTHQLLVLIAM

SEQ ID NO: 105009 - protein, 76 aa, Gossypium hirsutum
  Clone ID: LIB3585-026-P1-K1-A10.pep
PLTINTKREMPNWSKETEKHDTDSGHHTIEDSEYDRLVIVMNLPQVEWTYYNLNHPQGAKLLAGETKPSSDASVLV

SEQ ID NO: 105010 - protein, 79 aa, Gossypium hirsutum
  unsure (1)..(79): unsure at all Xaa locations
  Clone ID: LIB3585-026-P1-K1-A12.pep
AGVGAASVAVRARTPSPALMRRSGGPFAFAAHFGRRRAALAFALRRGVCSVKWYAGFPAALLTRRAXFGAYXACVAAAS

SEQ ID NO: 105011 - protein, 98 aa, Gossypium hirsutum
  unsure (1)..(98): unsure at all Xaa locations
  Clone ID: LIB3585-026-P1-K1-A3.pep
GIGAGYVGGPTMTIIALKCPETEVADVDIYDSRMTGGNSDTLPIYKPGLDEVVKKCIGKNLFFKRDAQKQDSEADIVGDSXNTPTKTQSLGAGKAADL

SEQ ID NO: 105012 - protein, 144 aa, Gossypium hirsutum
  unsure (1)..(144): unsure at all Xaa locations
  Clone ID: LIB3585-026-P1-K1-B11.pep
KXPXNXTAGNHGRTXPDKSKGSPKSRXEEAEKRTRRGKXATGXXENPGADNSXRDQRGXQEHREXXREAXRKARXXXKKGHXAXQPEXPRPKKTXKXRAAXXQADNPGXQRGGRTXEXQGXRGNDPTKGTTARKASKNTXXAST

SEQ ID NO: 105013 - protein, 162 aa, Gossypium hirsutum
  unsure (1)..(162): unsure at all Xaa locations
  Clone ID: LIB3585-026-P1-K1-B9.pep
PRVRXDPQRSRLDLARMIILHGYPLAMGEHVGFKAFVKNMQPLFEVVHNSTIELSRVEIYMKETQRMYDPLRKLHGRMNLTIEMWPSPENAKYVCLTAHHADDEWKLQLKILSSLTLDSSHTENMLSDVTIKCLMDGDIDWMXWPMTSDDCSTDDDIVLRIK

SEQ ID NO: 105014 - protein, 157 aa, Gossypium hirsutum
  unsure (1)..(157): unsure at all Xaa locations
  Clone ID: LIB3585-026-P1-K1-C1.pep
HAAKAXXQRXKDNGXNXXDNAEXXAKXRAEEXKXQXXREPGRKRTXXEXXTKNXRGXXGPKXKXXXRKXXEEGTKSAXKRXXKXXXXEXXXXRPDTQTPXEEXXRAKXXXXXKXRAXXRGTRERXAQQKTEAWGVAERVDLVGPIVEQPEYNLLTRH

SEQ ID NO: 105015 - protein, 167 aa, Gossypium hirsutum
  Clone ID: LIB3585-026-P1-K1-C10.pep
LSTLEHYMQSGGQTVLFLGDLSYADRYQYNDVGIRWDSWGRFIERSAAYQPWIWSAGNHEIEYMPDVGEVLPFKSFLHRFSTPHLASRSKNPLWYAIRRASAHIIVLSSYSPHVKYTPQWLWLRDELKRVDRKKTPWLIIIMHVPIYNSNQAHFMEGESMRAVFERW

SEQ ID NO: 105016 - protein, 120 aa, Gossypium hirsutum
  unsure (1)..(120): unsure at all Xaa locations
  Clone ID: LIB3585-026-P1-K1-C11.pep
HAAHAAHAAATENKPKKGKATXKGPXHRPXXXEEXEQXRKXXEGRXTNEQXXXDXXXHRKAAQXQAXRKGEGEXXGEEXXKRGEKEXTXXXERXERXXTXDXAEREXHXAKEATKXGTXS

SEQ ID NO: 105017 - protein, 140 aa, Gossypium hirsutum
  Clone ID: LIB3585-026-P1-K1-D1.pep
MGSVAEFESETTHTPKLLLYSFPSKAAEEPPCIATPSIHTSASIPFQWEEAPGKPMSCPAAESQPKPHTARCLELPPRLLAEAKVANMPSPTTVLDGPDSGRVVSRTLSFLKGGSFKNPDYKRVIKKKVLFGPSRGGILE

SEQ ID NO: 105018 - protein, 157 aa, Gossypium hirsutum
  Clone ID: LIB3585-026-P1-K1-E12.pep
IFLLPVSYTQDEPSLSQCFNVFDCGSVKGLTFPFWKEDSPEYCRQEGFQVIECEDDHQPVIRIGETKFRLVSVDQPLYRMTIAREDLWDQVCSSDPSRISNVTLAYSFLRYSDKNHNLTFFYNCNSSFPAHFRCGQELVPIYADGLVDRGSYEQFFG

SEQ ID NO: 105019 - protein, 94 aa, Gossypium hirsutum
  unsure (1)..(94): unsure at all Xaa locations
  Clone ID: LIB3585-026-P1-K1-E4.pep
EDPXQXAXEXRDEXEEGEEAXEXXXEGAREKKRSKKEKXKEREXKKDXSENTXDTGNKKXKEXAXARGRKGXGKXEQXEQXTXETKGAKTPXQK

SEQ ID NO: 105020 - protein, 188 aa, Gossypium hirsutum
  Clone ID: LIB3585-026-P1-K1-E6.pep
MEGYLRAPAEEKTEVAASPTCCVTGATGYIGSWLVKLLLERGYKVHATVRNPEKALHLLQLWNGGDRLRLFKADLLEEGSFDEAVKGCNGVFHVAASMEFDANTNENIESYVRSNIIDPAIKGTENLLKSCLKSKTVKRVVFTSSISTITAKDSNGNWRSVVDESCQTTIDHVLNAKASGWVYVLSKL

SEQ ID NO: 105021 - protein, 113 aa, Gossypium hirsutum
  unsure (1)..(113): unsure at all Xaa locations
  Clone ID: LIB3585-026-P1-K1-E9.pep
SLLXPRSXLAXPXXVLLFXLVFPXAVLSWPLFPLXAVFLFXGSLCXVVXWCAFSXLPLXXWWFSALXPXSVALSFLLCRLLLGXXCPFFRSXXSAGFGRLXXXPGAWAPGXPA

SEQ ID NO: 105022 - protein, 60 aa, Gossypium hirsutum
  Clone ID: LIB3585-026-P1-K1-F3.pep
EIGLALKKLSENGVVKREKLWITFKLWNTYHAPEDVPQALNGTLQDLLLDYVDLYLVSIS

SEQ ID NO: 105023 - protein, 103 aa, Gossypium hirsutum
  unsure (1)..(103): unsure at all Xaa locations
  Clone ID: LIB3585-026-P1-K1-G12.pep
LXXPFCXXXFFXFFSSSLXFLXLLXXWXXPFXLPXLLXWCWRXASXXXXXSXFXXXWPLXXPSRLPLLXGWXFPXFFRLCFLLPXFLXFCCXLAFPXFVFFXV

SEQ ID NO: 105024 - protein, 45 aa, Gossypium hirsutum
  unsure (1)..(45): unsure at all Xaa locations
  Clone ID: LIB3585-026-P1-K1-H2.pep
ISTLLSLCLVSQRQIFCFFIRPSVHLMEHLAYLGRCRVKSSARXF

SEQ ID NO: 105025 - protein, 91 aa, Gossypium hirsutum
  unsure (1)..(91): unsure at all Xaa locations
  Clone ID: LIB3585-027-P1-K1-A1.pep
LDGVRKMATNXVAHEKICFDKWKYDDAQRRSYEQRNGPVAGASRQSSSPGACSGTSGDHCELVVRIASLEVENQSLRGVVQDLQQCLFKME

SEQ ID NO: 105026 - protein, 46 aa, Gossypium hirsutum
  Clone ID: LIB3585-027-P1-K1-A4.pep
YTCWEVHCSYAHSTQQIRGVLAVPVDHHITTVDAGTLRNLMSVLTF

SEQ ID NO: 105027 - protein, 64 aa, Gossypium hirsutum
  unsure (1)..(64): unsure at all Xaa locations
  Clone ID: LIB3585-027-P1-K1-B10.pep
ATPTGPSVTIYGVKRPLPLYRIIEDQLYPTLLHLHRYFLLSYLXLHTLVHKEPLRQDVLRVKIT

SEQ ID NO: 105028 - protein, 45 aa, Gossypium hirsutum
  Clone ID: LIB3585-027-P1-K1-B4.pep
YIYINSRVVSWRIWETFVLRIRYVKESQALLLSWFLYQHIKFMIE

SEQ ID NO: 105029 - protein, 46 aa, Gossypium hirsutum
  unsure (1)..(46): unsure at all Xaa locations
  Clone ID: LIB3585-027-P1-K1-B5.pep
RIRRVTDRHASLHKLVIYMDRGEICXGLFTHSTKNQEEKGRSLNHT

SEQ ID NO: 105030 - protein, 153 aa, Gossypium hirsutum
  Clone ID: LIB3585-027-P1-K1-B8.pep
FSPSKEIAYMETVYPVFSVFALLSLHLFLYGCNLFMWKATRINYHFIFEFAPSTALKYRDAFLICTTFMTSVVGAMVIHLLLRAGRFSPSHVDTIPGILLLIFIALLVCPFDIFYRPTRYCFLRIIRNIICSPLYKVLMVDFFMADQLTSQIP

SEQ ID NO: 105031 - protein, 83 aa, Gossypium hirsutum
  Clone ID: LIB3585-027-P1-K1-C5.pep
APTISIFTNHNLAALTLSLCFSALLFYFLLIPLFHTLLYKHSFSLALFAFAFFLLYKRANNFSKLLPFLGFSLIFDVVMILGF

SEQ ID NO: 105032 - protein, 124 aa, Gossypium hirsutum
  Clone ID: LIB3585-027-P1-K1-D2.pep
MADNKIKFFELNTGAKIPSVGLGTYGAKHGVLQNTVISAIKVGYRHIDCASMYNNEKEVGSALKKVFSEGMVKRQDVWVTSKLWCTDHLPEDVPKALHKTLQGLQLDFGDLYLIHWPGSAKRGA

SEQ ID NO: 105033 - protein, 171 aa, Gossypium hirsutum
  Clone ID: LIB3585-027-P1-K1-D5.pep
PTRTPTTIIDSSKISRKNNSRLQNPTMASLETHLLASLFFTPIGIRRFLCSSSHFLKNPSLFKSKPWYFSNPKWKNLDLYILAVALPLASFAEIFIFSSLSGHSTYRMCFFQQFSSLSLFWILIIFLVLYDSLDHLLFNESFIFLYACIAFLVEYYFIGGGITGLGTIVNN

SEQ ID NO: 105034 - protein, 53 aa, Gossypium hirsutum
  Clone ID: LIB3585-027-P1-K1-F12.pep
SRTTCEFSRMGEMRYKPVHAEEIRTGKSQVLYRGQRASNSHYSNLSTQMACKS

SEQ ID NO: 105035 - protein, 156 aa, Gossypium hirsutum
  Clone ID: LIB3585-027-P1-K1-F9.pep
DHEAPPRPTKRNPDQHHDRDYDRDRHHHHRPESSKLAPETVTKATSTTATAAMDKSQKTSVFSRISFPEEHSKKRRLSSDAPASSGHHKSTSNGYYDDYKTSSAAPKAISGTSGGGRKSSRSNAVDYESSDDDRHFKRKPSRYSRSPSAEWIEQPR

SEQ ID NO: 105036 - protein, 154 aa, Gossypium hirsutum
  Clone ID: LIB3585-027-P1-K1-G1.pep
IKKKDSGSWMVDRLNKDHNHDLGEQTAYVNKFSTASKKFIEEETNGMVSMDLGEMNTGKLIKRSRESKIGTDWYPVLLEYFQTRHAEDTGFFYSVEVDNGSCRSVFWADGRSRYSCRQIGDVDILDTSYRKSNYVVPFATFVGVNHHKQPVLLG

SEQ ID NO: 105037 - protein, 134 aa, Gossypium hirsutum
  Clone ID: LIB3585-027-P1-K1-H8.pep
MRPQPQATGERLVRLSPQLSSGEPEMSSTSTSTCSPHTCRWRSYPKSNDLEANVATVLIILFCGLICSLALNAAIRCFLRGSEGRRPRHFRNDIAEADEEVEQRKPVGEAGAALMVAAPTLVYTSGMKLAGAES

SEQ ID NO: 105038 - protein, 89 aa, Gossypium hirsutum
  unsure (1)..(89): unsure at all Xaa locations
  Clone ID: LIB3585-030-P1-K1-A12.pep
YSSYQVFAFNSSIXLWPPESSARLTSVQDTSQXSLTFVNKFVMEDEGKLEGIPPQECSLIMIWCLHFPIGVVPRYLVNTSSLLDVISQL

SEQ ID NO: 105039 - protein, 168 aa, Gossypium hirsutum
  Clone ID: LIB3585-030-P1-K1-A6.pep
DYATIPFLAEVFKLIVSSVFLWRERKKSPPPKMTTDWKSVRLFPIPSVIYLIHNNVQFATLMYVDTSTYQIMGNLKIVTTGILFRLFLKKKLSNLQWMAIVLLAVGTTTSQVKGCGEASCDSLFSAPIQGYMLGILSACLSALAGVYTEFLMKKNNDSLYWQNLQLDT

SEQ ID NO: 105040 - protein, 112 aa, Gossypium hirsutum
  Clone ID: LIB3585-030-P1-K1-B7.pep
TSSQTLRSLPGHHMPIFKASIDHSFTECEKWLISLITNASRASVESATLATQAIHEMPVYVVHHLCIRISIALSPPNASICAPAWFIAISFLSKALWFFGVQCGIEMYTALG

SEQ ID NO: 105041 - protein, 101 aa, Gossypium hirsutum
  unsure (1)..(101): unsure at all Xaa locations
  Clone ID: LIB3585-030-P1-K1-C12.pep
SSLGSGSASDLWFGAMSSPLRFLDSAEVCSGRARSHVCPTSVPCVRFSWAVFPARSWLQCPGWQAVFSYPAKVTPVLGTFVSCGGFXRLMSXLSLSFRLLL

SEQ ID NO: 105042 - protein, 122 aa, Gossypium hirsutum
  Clone ID: LIB3585-030-P1-K1-C3.pep
PRVRPRVRIVVRFVIGRSANRRDSLDREIDNEHRQTDDIIVLNQVEAPEECSNKIKFFFVHAVESWDAEFYVKVNDDVYVNIDTLGATLSAHSDKPRVYMGCMKSGQSFSEPTHKWYEPDWW

SEQ ID NO: 105043 - protein, 82 aa, Gossypium hirsutum
  Clone ID: LIB3585-030-P1-K1-C6.pep
RFPALWVVGSFGSMQLTRFWGLPHLLRQLKTLVLLPLKMSPLHLLQRKIAAGAPSIGFERPRAFESQIGYRGCYRTCGCTCV

SEQ ID NO: 105044 - protein, 169 aa, Gossypium hirsutum
  Clone ID: LIB3585-030-P1-K1-C9.pep
PLLTCFTQEGDYLAILSPDGAVKIWSTGTGSLLAEWKQSDGNLPNSYSCMACSFIPKKHKKGRGTCLLAIGLNEGDIWIIDVLAGDKKWSSTGYYPSGIAGLSFRNKGHSLYVIGSNGKASEINSENGDLIREFKASKRSNTSLTFSQDGKDLALANGKLCGFQAWKTG

SEQ ID NO: 105045 - protein, 44 aa, Gossypium hirsutum
  Clone ID: LIB3585-030-P1-K1-D12.pep
PRALYHSNYSYPRTIHYKRGRINERTLLKCNHKQEHLTFNLVTT

SEQ ID NO: 105046 - protein, 204 aa, Gossypium hirsutum
  unsure (1)..(204): unsure at all Xaa locations
  Clone ID: LIB3585-030-P1-K1-E2.pep
LGKPDKDKDLARPVLGGEERPYPRRCRTGRPASKIDPLCESRIEKPHPVYVPRDEAFEEIKQDTFSAGRLKALLHNLVPLMAATLSSSDIPFTCFSEIDKLYNDGFILKDDEQRKLGDNLFIGNMMKQVLNVGQKLLKYEIPAVIRKDRFSWLRDNEFARQALAGXNPGNIEILKEFPILSKLNPAIYGPPGISDHLGNWIEPR

SEQ ID NO: 105047 - protein, 86 aa, Gossypium hirsutum
  unsure (1)..(86): unsure at all Xaa locations
  Clone ID: LIB3585-030-P1-K1-E8.pep
WRVGLLPLYVLSFSXVLAGVRFAXSVFLVFAXFXVGSAGCFXVFXLFRWGRLXXXXXXAHALLCGAPLFVPFXXXSLARSRGRXRG

SEQ ID NO: 105048 - protein, 120 aa, Gossypium hirsutum
  unsure (1)..(120): unsure at all Xaa locations
  Clone ID: LIB3585-030-P1-K1-E9.pep
LWAAGLSRLXLXLVFVLCPFWSGWLPCSSGGGSLSSFGAVAGLAVVVFVSPLALVVVXPGPFSXALSGLAVVVGWAGAVGPRRWLVLGLFGVVSSASRXVXRWXCXLFAXFCXCSCGGRV

SEQ ID NO: 105049 - protein, 70 aa, Gossypium hirsutum
  Clone ID: LIB3585-030-P1-K1-H1.pep
VLHIGMFNCRFHFHVFRGYYEELSFVCVAPERCGYLFLREGIHLNRCKIIIFCISSYNEYFNKSIIEIIN

SEQ ID NO: 105050 - protein, 131 aa, Gossypium hirsutum
  Clone ID: LIB3585-030-P1-K1-H4.pep
MPKRVLCKFFAHGACLKGEHCEFSHQWKHPPNNICTYYQKGNCFYGSRCRYEHVKASQSDPSASSSSTAPQQSTLSDTMPLAPSKTAFVGSVVSPAASSKVPGSSRACLAPFNNHAIWNLGPKIYQIMVNL

SEQ ID NO: 105051 - protein, 198 aa, Gossypium hirsutum
  unsure (1)..(198): unsure at all Xaa locations
  Clone ID: LIB3585-030-P1-K1-H8.pep
GNSRKAVENAESTEKVPGSCSEKTSLPIADLDVNLEKPDTSHRNSSLDNLNGVGLSLNSSFSHGNKHPVNPNVRAASIESDEENDDNSSSMFGLGRKLLVNGFHRKVSINHDVESEPATSTKTGVSEQRNGQQSTSNQKIPWTTFSQQYGNGSPVNSLTSSPPLEHMKIXFTPIDGFETSKLRLQFPDANHCQESVRD

SEQ ID NO: 105052 - protein, 159 aa, Gossypium hirsutum
  Clone ID: LIB3585-032-P1-K1-A10.pep
GKLPTLPSFESHPLYISLSSASNTSGSKSTASSRLSTATATTSSVNITVSFASSDYVTATEETIYETAEFGVNGSNLSTSSSRRPTNFFMVDTPREIPFKELIVATDNFAESRRVAELDFGTAYQGFLDNRHHILVKRLGMTKCPALRTRFSSELQNLT

SEQ ID NO: 105053 - protein, 64 aa, Gossypium hirsutum
  Clone ID: LIB3585-032-P1-K1-A4.pep
KSWTFEKRRVIKNLSFWSINSKKITRIIILAVKHTLQLIYTRLFLQVKLLGFLANKVLFLAFKP

SEQ ID NO: 105054 - protein, 178 aa, Gossypium hirsutum
  Clone ID: LIB3585-032-P1-K1-A6.pep
MASRGVEMGLILVLMAMVWAGASAQSCTSALTSLAPCLNYITGNSSTPSSTCCSQLLTVVQSSPQCLCSVLNNGASLGITINQTLATQLPGACRVQTPPISQCNGGTPGTPSAGSPTGSPSESSDDTPEGAITPSASNIPSGSKTVPSVDEGSFGASMEKGSLNWVFFLLSIAAVAKF

SEQ ID NO: 105055 - protein, 63 aa, Gossypium hirsutum
  Clone ID: LIB3585-032-P1-K1-A7.pep
LVLVGMVTHLTYNIHLLAAMHLLELTHLKAVHQLTTLLKEDTPLTAIHHTAMLEEAIHAKPPT

SEQ ID NO: 105056 - protein, 81 aa, Gossypium hirsutum
  Clone ID: LIB3585-032-P1-K1-B1.pep
SYVYIKTKYGRKSGSCCPLKWQMRVQRKTCEPQLPPVLLDLVVKLYPLPIYLPSRKHGRFEEYLSHIARTTFYLVKLSHPN

SEQ ID NO: 105057 - protein, 171 aa, Gossypium hirsutum
  Clone ID: LIB3585-032-P1-K1-B10.pep
SGERLPSIDTRPPRIRDSDAIIEIVCQDTLDDDSSTGNAVEDRTENDMPREDLRGDLAPEADIAHEDTEYVNGFPDAYSSRKRELVERTMNSVRTNVPEDDGILPVCGETSRPYGPGFRSQSPMYHNGNFGSPRDERHRQGRARERSPHMTSSRGKWDKLSDTHSHEEESW

SEQ ID NO: 105058 - protein, 126 aa, Gossypium hirsutum
  Clone ID: LIB3585-032-P1-K1-B6.pep
MRTRRGLCYPRADVCVDKIVVKRRDFAGYNMACRKRQRFSPVIAGNSDLFDALPDDLVISILSKLSSSASCPSDFINVLITCKRLNSFALQPLVLSKASSKLFAIKAENWSESAHRFLKCCADAGN

SEQ ID NO: 105059 - protein, 150 aa, Gossypium hirsutum
  Clone ID: LIB3585-032-P1-K1-C4.pep
MATTTTATLFLSPPLFTAYSSSSLRINHSLLPFPSIKPKPLHSPSTSTLKPSFLVRVDDGDADAGGPDDYDMDEEEVEELDNKKDFDVEYDPLAAASAATASSATIDVDIQITESKSFVSTQGWDSDMVVDYRINEEEFHKISLMDCDFF

SEQ ID NO: 105060 - protein, 197 aa, Gossypium hirsutum
  unsure (1)..(197): unsure at all Xaa locations
  Clone ID: LIB3585-032-P1-K1-C9.pep
VIDAFLSKIVNNFSTLLVSQGIKLGLFLKKILKADDGPVSKSDFIEATSDYIDKRSNLQAATDISKAYICIGNNEVVLNSVCRSPGRVEILTDLIQRHIEDLKLFFRETRLEVRKFHSYWEADIKRLEHHVRDLEVASSSYLKILQENXLLVKEVLNLKGKIRIXCRVRPILPGESXDQSTVDYVGEKGSILNANSL

SEQ ID NO: 105061 - protein, 48 aa, Gossypium hirsutum
  Clone ID: LIB3585-032-P1-K1-D1.pep
STACYLPGVSLGNVFLYDAPECLYECSLQSMLSYCHASTLAVHISTWV

SEQ ID NO: 105062 - protein, 48 aa, Gossypium hirsutum
  Clone ID: LIB3585-032-P1-K1-D10.pep
PSSGHLFGKRDISETQTFDNEVPKAKKYMNPLLLLKYSNFKHYMEGRK

SEQ ID NO: 105063 - protein, 159 aa, Gossypium hirsutum
  Clone ID: LIB3585-032-P1-K1-F2.pep
MLEAALQDLQGKLKLSDGKLNTFQVESETETQELKEELASAKQKQEILMADHEKLLDLLEDVKSNEDKLKGTVRGLELKLKASEYENQQLAEEISSLKVQLQKTMVLQDEILDLKKTISESKFENERLEASFQMLSRDYEELKVERTLLAEKVSNSQQA

SEQ ID NO: 105064 - protein, 38 aa, Gossypium hirsutum
  Clone ID: LIB3585-032-P1-K1-F6.pep
PTRPIGIKICFTLFVFIFLLSNIAYIYYPFSLDMFCNM

SEQ ID NO: 105065 - protein, 75 aa, Gossypium hirsutum
  Clone ID: LIB3585-032-P1-K1-G3.pep
KDRILYFGIGRSFHLEKKRSIQLDSSRVVGDREDIDWNQVAYDVLTKVGLPNDTPVKIVKEDEEPMEFLMLLRTL

SEQ ID NO: 105066 - protein, 158 aa, Gossypium hirsutum
  Clone ID: LIB3585-032-P1-K1-G8.pep
PRVRPRVRPRVRDASMDEVIDAAKASNAHNFISQLPQGYETQVGERGVQMSGGQKQRIAIARAIIKAPRILLLDEATSALDSESEQVVQQAIDQAAVGRSSIIIAHRLSTIRNADLIAVVQKGQVIEIGSHDQLMENDIGHYASLVHLQQIEKEKTLD

SEQ ID NO: 105067 - protein, 194 aa, Gossypium hirsutum
  unsure (1)..(194): unsure at all Xaa locations
  Clone ID: LIB3585-032-P1-K1-H3.pep
MGSTLPQPFPFKWDLPTEEPTFHLITTAASLRLGNLLRHQLHLGFHLRSSFKKLCHLCNVPRLNHVWSETISNFMGIGNFRFANDVVCSSCSSYLCFFNGGEQRKYFGNEGNSGSSKMDTSRRNSFNTRKWTNILLAINVLIYVAQLATQGEXLWFWGAKINSLIDKGQIWRLATYSLLHANIGHLMVNWYSLN

SEQ ID NO: 105068 - protein, 56 aa, Gossypium hirsutum
  Clone ID: LIB3585-033-P1-K1-A4.pep
MSIKSIIQDMKGEFGSISRRGFDVKFGYGMRSRSHRVVQDSSVPVDVFKQSCWANM

SEQ ID NO: 105069 - protein, 165 aa, Gossypium hirsutum
  Clone ID: LIB3585-033-P1-K1-B9.pep
PTRPPTRPVGGGGVSVAVTRFATEQKRPVGPLIVVGVRDGVLWLIDRYMTAHALSLSHPGIRCRCLAAYGDAVSAVKWASRLGREHHDDLAQFMLGMGYATEALHLPGISKRLEFDLAMKSNDLKRALQCLLTMSNSRDVGQDNPGLGLNDILNLTAKKENLVEG

SEQ ID NO: 105070 - protein, 48 aa, Gossypium hirsutum
  Clone ID: LIB3585-033-P1-K1-C1.pep
EKVNFFCFLLDNLLFLLIFLFSCTVRYQHLFDRYLLLFVKKMLISNSP

SEQ ID NO: 105071 - protein, 120 aa, Gossypium hirsutum
  unsure (1)..(120): unsure at all Xaa locations
  Clone ID: LIB3585-033-P1-K1-C12.pep
MADQLTDDQISXYTDALTLFDKDSDGCITTKELWTVMRTLVQNPTEVQLLDMINEGDADGHGTIYFTEFFNLIARNMKDTDSEEELKDVFMDDDXDQNAIISAAELHHVMTNLCEKLTDY

SEQ ID NO: 105072 - protein, 54 aa, Gossypium hirsutum
  Clone ID: LIB3585-033-P1-K1-D7.pep
RNHRSQLLPLLLMADQLNRARAGAGEGPTLIKQLAACDKASRGRSVRTSIKGGR

SEQ ID NO: 105073 - protein, 170 aa, Gossypium hirsutum
  Clone ID: LIB3585-033-P1-K1-D8.pep
VTPYNMEKMSPLVYAGDVVVPGVPLNVTGQCLPGSLDPNKVKGKIVVCTRGAGLRVGKGLQVKRAGGVGFVLANAKANGDEIACDAHLLPATTLTYDSGIKILEYINSTKNPMAVVSPGRTVLKYKPAPFMAGFTSRGPNVVDPNILKPDITAPGLNILAAWSEASSSSK

SEQ ID NO: 105074 - protein, 195 aa, Gossypium hirsutum
  Clone ID: LIB3585-033-P1-K1-E2.pep
LKKLSIAILLSASLLFLLFCFVFHQAMILGSQDCFYKSEKNPISTTRSGGKCSRDQRNGRFSMSAEVDGLLSSVEGAKSLKEASNGRFPNDHVRNKEERFTNRNAKLTPENDSEVNSFLDPQREISLPSLPSKSAGAVNPDTKEAPQTGNLTIRIGKDKGRRLRKRKGGFKELIGSFRFSKWEILNFNPLIPPHL

SEQ ID NO: 105075 - protein, 174 aa, Gossypium hirsutum
  Clone ID: LIB3585-033-P1-K1-E9.pep
HASDDCYLNAEARIQLVRVRSYKKRSKEFSALYKGQEIQAHEGSILTMKFSPDGQYLASAGEDGVVRVWQVLESELSGNSDIHDVNPSCVYFTVNNFSELVPLHVDKEKNGKSKRVKKVSGSTCVILPQKVFRILDKPIHEFRGHCGEVLDLSWSKSKHILSSSVDKTGRFGQV

SEQ ID NO: 105076 - protein, 92 aa, Gossypium hirsutum
  Clone ID: LIB3585-033-P1-K1-G12.pep
HDFVCLSSMFLGFIISFVHSQFDGVSFNNLFSFFRIDLILLFIINCSSGCLPNFLLFLKITLVSSVHSLFGRRPPTNLSSIFRIVRLLRLYS

SEQ ID NO: 105077 - protein, 169 aa, Gossypium hirsutum
  Clone ID: LIB3585-033-P1-K1-G2.pep
MRFHFSPKTPLLSLSSSSITSLCLRPFLPSAPKSHFYPSLACHVSTGGNLRMDSTSPDPSSSSSVSVDSVADGLKNQSLREHDISNNNNNMNNENKKNNGKLSLEDLNWDHSFVRELPGDPRNDSIPRQVFHACYTKVLPSAEVENPKLVAWSDSVADLLDLDPKEFGR

SEQ ID NO: 105078 - protein, 157 aa, Gossypium hirsutum
  Clone ID: LIB3585-033-P1-K1-G6.pep
IQGGERGGSHDRLATKHGELNFPFQNSELADKHVRSNLLSSRIENSEQSWNIKDVNKSAAVPTVLTCEDLEKSILSESTENDPRLPPAIEGCKIPDANCEKKEVIVDNHASQHLLSLLQNKTSMKNIVSSANLDIRSSERVHTIETTSADAASCDSI

SEQ ID NO: 105079 - protein, 180 aa, Gossypium hirsutum
  Clone ID: LIB3585-034-P1-K1-A1.pep
ITGSDDHTAKVWDYQTKSCVQTLEGHTHNVSAVCFHPDVPIIITGSEDGTVRIWHATTYRLENTLNYGLERVWAIGYMKGSRRIVIGYDEGTIMVKIGREVPVASMDNSGKIIWAKQNEIQTVNIKSVGADFEGSDGERLPLAVKELGTCDLYPQSLKHNPNGRVCCVCGDGEYIIYTAL

SEQ ID NO: 105080 - protein, 176 aa, Gossypium hirsutum
  unsure (1)..(176): unsure at all Xaa locations
  Clone ID: LIB3585-034-P1-K1-B12.pep
AVRFMADPETDEVYAKIMLVPLRENSFGVEDDGFDGNVGVENPEKSASFAKTLTQSDANNGGGFSVPRYCAETIFPRLDYNAEPPVQTILAKDVHGEVWKFRHIYRGTPRRHLLTTXWSNFVNHKKLVAGDSIVFLRADNGDLCVGIRRAKRGLGGGHEFPGWNSASGTSGSQIGS

SEQ ID NO: 105081 - protein, 163 aa, Gossypium hirsutum
  Clone ID: LIB3585-034-P1-K1-C11.pep
YDGDIAFASALEMFGGGHNDPISVAFGGPVMTKFTIALREIGTYKEVLRSQVETELNEKLMQFVNRDLLDVKEARKRFDKASLVYDQAREKFLSLRKSTKSNIANVLEEELHNARSTFEQASLNLVTALSNVEAKKRFEFLEAVSGTMDAHFRYFKQGYELLV

SEQ ID NO: 105082 - protein, 58 aa, Gossypium hirsutum
  Clone ID: LIB3585-034-P1-K1-C7.pep
AISLTAWGCHNVQSMDAVKVGTIRSLASVSISQSRLTGHIAVWHPASFAQSRPKSAVR

SEQ ID NO: 105083 - protein, 97 aa, Gossypium hirsutum
  Clone ID: LIB3585-034-P1-K1-D10.pep
HHTITSSSSSLLSGASSADMLYSFTNPTNVQKERNKKGEKEREFAKNMEEGCSEEDDEQFPLMLFSKVKSKGFCFSFSFGVRRPFCFTRWGGYGRVG

SEQ ID NO: 105084 - protein, 116 aa, Gossypium hirsutum
  unsure (1)..(116): unsure at all Xaa locations
  Clone ID: LIB3585-034-P1-K1-D7.pep
RARRARLSTARFTQWGKVLRAQETQGGISEISRVHCHTPSPERAFDMEELTSWPLYRGXISEFITTVLFLCDTAXTVINTKVHIRPYKNTMEPNSGGGTILGIARAFDGMICILEY

SEQ ID NO: 105085 - protein, 202 aa, Gossypium hirsutum
  unsure (1)..(202): unsure at all Xaa locations
  Clone ID: LIB3585-034-P1-K1-E2.pep
LAKLGPVGDKTHVSTRVMGTYGYCAPEYAMTGQLTLKSDVYSFGVVFLELITGRKAIDNTRAHGEHNLVAWARPLFKDRRKFPKMADPLLQGHYPMRGLYQALAVAAMCLQEQAATRPLIGDVVTALTYLASQTYDPXAPGNQSNRVGPSIPRPKEDGLDSPKEHSHRNSPDYRKRNHARESSPGAELGRNETSGGSRRKWV

SEQ ID NO: 105086 - protein, 104 aa, Gossypium hirsutum
  unsure (1)..(104): unsure at all Xaa locations
  Clone ID: LIB3585-034-P1-K1-E6.pep
FFLRFPRYTAIYLLLFFAALVQYFITSGSSPGYVLDAMRVVNETNVIXRSHQWPKQTASSKNGSLPVEGCQSGRNFQGTDSTSWTKLVMDMYPPGTSVRCVKLH

SEQ ID NO: 105087 - protein, 144 aa, Gossypium hirsutum
  Clone ID: LIB3585-034-P1-K1-F2.pep
PRVRGRVGGFSPDIIVFAMIMVGLVFAIVFANVVVVCDMGIVMCVLEEVWGVQALVRAGVLIKGQTQVGLLIFLVSTIGLTFVEGLFKHRVQTLSYGDGSSRIWEGPLLVIMYSFVVLVHSMMNTVFYFSCKSYTSDDHQSMLF

SEQ ID NO: 105088 - protein, 80 aa, Gossypium hirsutum
  unsure (1)..(80): unsure at all Xaa locations
  Clone ID: LIB3585-034-P1-K1-F5.pep
PPPALASPPPMPPHPPPPXPAGPPSPYPRALDPQPPLPPPLPCPPAPPYPPAPPTPPPSPPPPPYPEAPPPYPPALAPPP

SEQ ID NO: 105089 - protein, 194 aa, Gossypium hirsutum
  Clone ID: LIB3585-034-P1-K1-F8.pep
GDTGFQTLSSQGEEPSLFPVISLPWWSTSSCVTNQQSFPPPLPVALSVVSRIKYSSFGWLNTVSNAANSATGKVFVPSGAVAAVFHNSILLAPQHVVSRTNSLEHLLVYTPSGHVVQHELLPSIGADSSASNLRFQTASYTHVQEDDLRVKVEPVQWWDVCRRSDWPEREESISKATLERQDLAEVQSKSVCEE

SEQ ID NO: 105090 - protein, 61 aa, Gossypium hirsutum
  Clone ID: LIB3585-034-P1-K1-G2.pep
LCCSTLHSFWKYLSPTPVSNMRLEIRSVKDSQNSRGNIEKVEHARVRHTSTSGTHTQVQIT

SEQ ID NO: 105091 - protein, 102 aa, Gossypium hirsutum
  unsure (1)..(102): unsure at all Xaa locations
  Clone ID: LIB3585-025-P1-K1-A1.pep
MSCFISKYADEXAKNAAYXGTXKGILAADESTGTIGKRLSSINVENVEDYRRALRELLFTTXGALQYLSGVIXFEETPYQKTXSGKPFVDVLKEGVSSLHQV

SEQ ID NO: 105092 - protein, 85 aa, Gossypium hirsutum
  unsure (1)..(85): unsure at all Xaa locations
  Clone ID: LIB3585-025-P1-K1-B10.pep
MMYWMNRQTCGALILATCLRAEHNVGLVTSGIYTNGGGEPLEHHEALTAGGIRAVYTASXTHAHIRVDIGAHHCPVQELQNSFSS

SEQ ID NO: 105093 - protein, 165 aa, Gossypium hirsutum
  Clone ID: LIB3585-025-P1-K1-C12.pep
PTRPPTRPPTRPKQRKKMAEEERKKRVVVESLGWLTESSIMPKKHRAIEGVGVSSILELKAHLYKSQEESKKSKELTGSDVDYHRAKKKISAQDTFSFKNSGVESRALKDKLELKAVNDGSVSYAALEKKAELYDKLVKGELSDEEDKEKYCVDFSGRVSSSKNR

SEQ ID NO: 105094 - protein, 84 aa, Gossypium hirsutum
  unsure (1)..(84): unsure at all Xaa locations
  Clone ID: LIB3585-025-P1-K1-C9.pep
GCXSXXCPXXXXXXSXXXXXPXXXXXRARXFXXXXLLXXXLRXFXXRXSGLLXXLXFXLXGXGXLVAGLXSGLXLSXXXPVXXG

SEQ ID NO: 105095 - protein, 88 aa, Gossypium hirsutum
  unsure (1)..(88): unsure at all Xaa locations
  Clone ID: LIB3585-025-P1-K1-D3.pep
GRXGGEGXADRKPTKTTQDTQAGQHRGTSXASQXEARERENQTWRLTQQRAKGTAGRQAEPQGEMESHTDRRNPSTLSLEGTGDPHEG

SEQ ID NO: 105096 - protein, 63 aa, Gossypium hirsutum
  Clone ID: LIB3585-025-P1-K1-D6.pep
TSRPTTRPVLYISISFIVTVCCGRESPLSASLEVHISFCIRRFPVQYPISAYLQFFSKEVNRR

SEQ ID NO: 105097 - protein, 68 aa, Gossypium hirsutum
  Clone ID: LIB3585-025-P1-K1-E1.pep
ACRLRIRTDSTRGVLCGKRCHDPCLSRILPSSPSEVDYHDDVRLGSLFKAVKFPAGISDLNTSLTDVD

SEQ ID NO: 105098 - protein, 151 aa, Gossypium hirsutum
  unsure (1)..(151): unsure at all Xaa locations
  Clone ID: LIB3585-025-P1-K1-E6.pep
GRGRXRXSXXAADXERPKTGTAGRGXXXNEAGXXPEGGXXTHXEXGKKATXQGXXXXXXTRXXTXXGTXGTXHXTXXXXXDQEQEAXKTAXAKPGXNEXXTGXEPXPSEXTXTXXRPQEGXXXREXXTXXQNKKKKGAKPEXKGXTXSRKT

SEQ ID NO: 105099 - protein, 57 aa, Gossypium hirsutum
  unsure (1)..(57): unsure at all Xaa locations
  Clone ID: LIB3585-025-P1-K1-F4.pep
LTSRRNRLQAMAIRDHPLSSFWVRSVSTNRTLREPRLELAGXPRRAEKEGSIGRLGP

SEQ ID NO: 105100 - protein, 41 aa, Gossypium hirsutum
  Clone ID: LIB3585-025-P1-K1-G2.pep
WAAQSMREPPSENRTDDCKFSLVQPQKPHSLPLSYEEHMLL

SEQ ID NO: 105101 - protein, 152 aa, Gossypium hirsutum
  unsure (1)..(152): unsure at all Xaa locations
  Clone ID: LIB3585-025-P1-K1-H6.pep
GQNLRLEPLNPEEKALWKREMDCLLSVCDYIVEFTPKSHNLRNGAAVEIMESKQRSDIYINLPALRKLDAMLIEILDSFQDREFWYAEQGSMSANSTRMGSFRRVVQRNDEKWWVPLPSVPSSGLTXKARKHLLHKRECANQIHKAAMSINN

SEQ ID NO: 105102 - protein, 98 aa, Gossypium hirsutum
  unsure (1)..(98): unsure at all Xaa locations
  Clone ID: LIB3585-025-P1-K1-H7.pep
VSXLLVPAGXVRLVVPFRLRFRRFLXXWGSAXGRRRLVRRXPCRAARSSXRFFSPPXLGPGFLXXPXVFLRFFSFSFVGPXGACLXLCLGGLAXAWAS

SEQ ID NO: 105103 - protein, 87 aa, Gossypium hirsutum
  Clone ID: LIB3585-028-P1-K1-A12.pep
IMKKPKIKEDNWTPVWDEEFTFPLTVPELALLRVEVHEYDMSEKDDFAGQTCLPVSELKQGIQAVPLFDRKGEKLNSTRLLMRFDFV

SEQ ID NO: 105104 - protein, 167 aa, Gossypium hirsutum
  Clone ID: LIB3585-028-P1-K1-A3.pep
EIQARELADAEITIKSLEDALVKAENEFSALQSEKRATDQEISTLNSKLTVCMEELAGSRGSSASKTIELIGHLNNLQMLAEDQSLLSTMKQCFDRNLEHLKDVDLALKNTRDYLLDKKSEQLQDYPLMEDIALLAGCFADDIDNYVNIGMENDYENAIDGDDVSSC

SEQ ID NO: 105105 - protein, 129 aa, Gossypium hirsutum
  Clone ID: LIB3585-028-P1-K1-A4.pep
MASKLKAGQLRDELAQRGLDTIGTKPLLVLRLEDALLKERKKEEENGGKANNAIGNNKRKRGRESDVCSNEDSDKVNAVEEFRQMNVKQLREQATLRGLSTVGTKKELLERLCEDADKNPLPVVVESKQ

SEQ ID NO: 105106 - protein, 163 aa, Gossypium hirsutum
  Clone ID: LIB3585-028-P1-K1-A8.pep
AYYLYVTYSLLPPFFLTSFHLKFQALYYWLRTYLLERRDVANKSELGRMTMAQQRMQQNSGGNLPPDNQVNQVTHSGSGIGSHDGSNSHGQDPERSNVTENSVQTGNDQPMQQSSSSISDSGQSAMRRNGSLGLVASAASAFDAAKDIMETLRSKHANLAGEL

SEQ ID NO: 105107 - protein, 117 aa, Gossypium hirsutum
  Clone ID: LIB3585-028-P1-K1-B3.pep
METRVLDGIINRLLEVRGKPGKQVQLSEPEIRQLCLVSKDIFLMQPIFLELEAPIKICGDIHGQYSDLLRLFENGGFPPRANYLFLGDYVDRGKQSLETICLLLAYKIKYPENFFLL

SEQ ID NO: 105108 - protein, 112 aa, Gossypium hirsutum
  unsure (1)..(112): unsure at all Xaa locations
  Clone ID: LIB3585-028-P1-K1-C2.pep
LADLHQTSTATSLPFACLSSSGNKPRPLNLDVSLPTIKDLRWNISRLLYLFNIQLEXKNVATILVVLLVVCVSFIVVGGFLLFKFRGNTHSLEDCVWEAWACLGSSSTHLKQ

SEQ ID NO: 105109 - protein, 146 aa, Gossypium hirsutum
  Clone ID: LIB3585-028-P1-K1-C9.pep
RRKKRESKALKARSDPNSKVSDSNVGSEPIEVYENVIVHYVDDVNKSEETSPDPNGNNMVTKLKKAEILDDCSSDIEGETTQQKEEESDSETIKDSASSLGDSLTAEDEREEGVLGASNGVHNNNLKDGSFHGSRWDLNLKLINHI

SEQ ID NO: 105110 - protein, 144 aa, Gossypium hirsutum
  unsure (1)..(144): unsure at all Xaa locations
  Clone ID: LIB3585-028-P1-K1-D8.pep
AFNLLIQLGGFVNTVLSEFFPLRGCWTPFSGKSVGIIGLGRIGSAIAKRAEAFNCFISYHSRSKKPNTNYKYYSNIVDLAADCQILFVACALTEETHHIINRKVIDALGPKGILINIGRGAHVDEPELVSALXEGRXGGAGLDV

SEQ ID NO: 105111 - protein, 67 aa, Gossypium hirsutum
  Clone ID: LIB3585-028-P1-K1-F12.pep
MYWLRLMLSVTIVSIYAKITHHTKFRNACIFFFRVVLFVLCARKRDRPRVSPSVLERMVVRVGGRVG

SEQ ID NO: 105112 - protein, 133 aa, Gossypium hirsutum
  unsure (1)..(133): unsure at all Xaa locations
  Clone ID: LIB3585-028-P1-K1-F3.pep
MQLHISPSLRHVTVLPGKGVREFIKVKVGSRKVSYRMLFYSLLFFTFLLRFIFVLSTIDSIDGDHPKCSTIGCLGKRIGPRILGRRIESIVPEVIYRILEEPVSKDEVLGKTDVPQTLQXFMFEMKQSRSDAK

SEQ ID NO: 105113 - protein, 30 aa, Gossypium hirsutum
  Clone ID: LIB3585-028-P1-K1-G2.pep
SNTDRQGTRAKSPAPFTVINSTTLYGCYIY

SEQ ID NO: 105114 - protein, 57 aa, Gossypium hirsutum
  Clone ID: LIB3585-028-P1-K1-G3.pep
KAFTTPRAHPKYKFQAYVYNLIFAARISNQCKSPYPVRFKLRDHSIPSQASAYSSFS

SEQ ID NO: 105115 - protein, 186 aa, Gossypium hirsutum
  unsure (1)..(186): unsure at all Xaa locations
  Clone ID: LIB3585-028-P1-K1-G9.pep
SISRDAINTEGFDTFNPSGNKPSDLPLYTSVPKPSARVSSSENLTAARYPSSPHSIEANTAQELNTSNIDPKPASSALASTASDADIVCVASPPTVPPSPRLSRKPSGFHNYEDYPVDRQMDTVRSNLSGLHSSEDGSRNDDKKMVSDDKSGAYTPPIIXKHPTHLVTPSEILMAATSSGTTNVNE

SEQ ID NO: 105116 - protein, 96 aa, Gossypium hirsutum
  Clone ID: LIB3585-028-P1-K1-H3.pep
GCVTTCTLCEKINCRMQYEKPSILTVQGKIHCLAWAQNQDFCQTDYWVICKNSTCKLKAVDRISNVLHILRQKCSHRGCTGTDSLDIYRMDVHIEI

SEQ ID NO: 105117 - protein, 141 aa, Gossypium hirsutum
  unsure (1)..(141): unsure at all Xaa locations
  Clone ID: LIB3585-028-P1-K1-H5.pep
YSILINGKEGSSFRSSRGLRXGDTLSPYLFLFCGKGLFALMRLASQEGKFLGAKVCRSTPPITHLMFADDCILFGEASNRGICVLKDILEEYESCSGSVLITTVFFSSNVEDQDKNLVFQILNVRCSTNPENYLGLPNTMG

SEQ ID NO: 105118 - protein, 201 aa, Gossypium hirsutum
  Clone ID: LIB3585-028-P1-K1-H6.pep
RNRRVELDVRVRVRVRVRILAFFVPALYIPTRFFRMLFNKLARDFHNYPALGGLIQTVLSYTFGGDSSNWVGVMGLPHYNMDDMPGLSLGVIHHLAHVKWKGKFVMYDHGNASANMKAYGSSVPIDLGEYYSLIDIPIDLIAGRKDKIISAAMVTRHYKLMKNASVDVSYKEFEYGHLGLTKSNQEDILAYVMSRLLLVEP

SEQ ID NO: 105119 - protein, 59 aa, Gossypium hirsutum
  Clone ID: LIB3582-008-P1-K1-A4.pep
GSALFFLFTICCLWRENKYCPARYVFIKYAFYRARFEPRQLKTRPIRHIFIKKPLCSND

SEQ ID NO: 105120 - protein, 84 aa, Gossypium hirsutum
  Clone ID: LIB3582-008-P1-K1-B9.pep
RHERPHSHPRVQGQPLRHLTVDPLLRYKESKQDCHQQIQTQHPPGHPRCLKLVMHDHPLSQNRSHETNDIDSSENNSHSRRNIA

SEQ ID NO: 105121 - protein, 161 aa, Gossypium hirsutum
  Clone ID: LIB3582-008-P1-K1-C1.pep
KNGAIELKFLADVEDNQMDNLYPYVHLLPNGHLFIFANNKAVMYDHEGNRVIRDYPALSGGPRNYPSAGSSVMLALEGDFSTAVIVICGGAQYGAFIERSTDTPAHGSCGRIVATDPKPGWEMEDMPYGRIMGDMVMLPTGDTLIINGAQAGTQGFEMASN

SEQ ID NO: 105122 - protein, 65 aa, Gossypium hirsutum
  Clone ID: LIB3582-008-P1-K1-C6.pep
WARSNTIYLLGLPGTTSLVCHRLCQTGATTMPMTAMVLSVYLTCAFRAYHIDIIPRQAHLAHNLD

SEQ ID NO: 105123 - protein, 155 aa, Gossypium hirsutum
  unsure (1)..(155): unsure at all Xaa locations
  Clone ID: LIB3582-008-P1-K1-C9.pep
LNLSIKSCFEDSRKTCDKKARSFAPRLARDLKIINYNEPQKAAEPTTDTRGASRSGNPLDFCDYPSRTKITVAGDVYEMLGNFISAMNKCIADRYAGKRSVSEYHVYXFFKIWSXSRQEADIRVHEVFKSSYVKKGMHPIPGAERALHKVSRFCD

SEQ ID NO: 105124 - protein, 97 aa, Gossypium hirsutum
  Clone ID: LIB3582-008-P1-K1-D11.pep
ELEGVRDKKLTFITVKTHQPPRMTTSTTVQFDAAFDRRWFRSASGLVVRDQIGEFEASKMILHSNISSSLVAKARAGLEAIKLVLSMGLNSATIMGD

SEQ ID NO: 105125 - protein, 121 aa, Gossypium hirsutum
  Clone ID: LIB3582-008-P1-K1-E9.pep
VMVHKISLNMFLSLILIFALVVLSDAARPRHLGNENGIMSKEKMALGKEEEAKSNFREMKNLPPFPFPFPDMPFAPPVQFPPFPFPLPPPFEVPSVPSFPFAPFTFPPIPYFSPTTLPLHP

SEQ ID NO: 105126 - protein, 62 aa, Gossypium hirsutum
  Clone ID: LIB3582-008-P1-K1-F3.pep
YSFTPDCFKMIPSIDLEITYWLRSHFGFGSPQAFFLSISFALCLMKYIRSSPCVRTRGILTM

SEQ ID NO: 105127 - protein, 162 aa, Gossypium hirsutum
  unsure (1)..(162): unsure at all Xaa locations
  Clone ID: LIB3582-008-P1-K1-G10.pep
EESEKMDEDSKIIEELRESNEYQRAQIARLEKALKLAMAGQEEAKMTNNNELQKSKEIIDDLNKKLANCMRTIDAKNVELLNLQTALGQYYAEIEAKEHLERDLALAREESSRXSGLLKDADQQAELSKKEKEEILAKLLQTERMLAEGKARVNKLEEDNSK

SEQ ID NO: 105128 - protein, 138 aa, Gossypium hirsutum
  Clone ID: LIB3582-008-P1-K1-G2.pep
MNDMPQIGHEDTGVAACFDGPFFPSSINTSTVSPPSFQFHVSSEEGINLYVDLNSNPSEWIEKLKSEVSICQDMSHCKSKTSPKELGRFGESSKQMERSFQLNVDTGEMKDDFIHSGLPPNLIIKETSSLQFDHPDGD

SEQ ID NO: 105129 - protein, 153 aa, Gossypium hirsutum
  Clone ID: LIB3582-008-P1-K1-G3.pep
MAETNEPFHIPQQNRKNKLRFNIETNQHQQQAFMHGPQCGSGLALSLSFQHNNPNIMSNLPLSLNQQNLQIRSSVPLGPFTGYASVLKSSKFLIPAQQILDQFVGVDYTVSDLPLADHGDDGVDDDDDDNPITCSDKIQHRLKNSRLILLLDE

SEQ ID NO: 105130 - protein, 126 aa, Gossypium hirsutum
  Clone ID: LIB3582-008-P1-K1-H2.pep
EGFIFDASAIQRMELLVLDALNWRMRTITPFSFIGFFISLFELKDPPLIQALKDRATHIIFQAGIETNLLEFKPPTIATSAVLMASHELLPLQFASFKAIIVCCEYVNAVSKYVFCVKIVRSSKAY

SEQ ID NO: 105131 - protein, 65 aa, Gossypium hirsutum
  Clone ID: LIB3582-010-P1-K1-A11.pep
KKTLFEKIEARFDLFARKIKDPDKGDILQKGPYQKNGVQNDVKGPAGDDSEFMNERPSLSFEEVK

SEQ ID NO: 105132 - protein, 138 aa, Gossypium hirsutum
  Clone ID: LIB3582-010-P1-K1-A5.pep
MSSSSSSSLITLGQDASPTLQQRLHFIVQSRPEWWVYSIFWQASRDVDGRVVLSWGDGYFRGTRDGTGKSINRLSPSKLGSSFERKRSGKDQVQAYFNEVMDVDRMVDGDVTDYEWYYTVSMTRSFAVGDGILGKAFG

SEQ ID NO: 105133 - protein, 42 aa, Gossypium hirsutum
  Clone ID: LIB3582-010-P1-K1-B10.pep
WHHRQYRLVSLTQVQSTSYVKKPVSFCVSLGSSVGFLVPFKL

SEQ ID NO: 105134 - protein, 160 aa, Gossypium hirsutum
  Clone ID: LIB3582-010-P1-K1-B2.pep
IMQIPLSSSVQDDFQVWGGEPSGTFSVRSAYKLLQSSTRIPNNYFIQAENKKFYRKLWNLRMPSKIKITVWKISWNYIPTLANLKLKRVVTEDWCPKCRQIEEDSIYVFRQCPTTEEVWKQLRFDWMLNNSIQNVWEWLIWVFNQGTNEECRLFCYGLWL

SEQ ID NO: 105135 - protein, 156 aa, Gossypium hirsutum
  Clone ID: LIB3582-010-P1-K1-B9.pep
MAYYYHSPPPPPSSPPPSPPYPVPPPTPTTVPVSPPHAPSHHCAPPKPTPSIPSSPTTPTTPPSKATPPSIPSHPPSPGKAPTPPTAAAPPVIPSKGSPPHSSSPPTKPPKSSSPPHFPPPPKSPPGKVPPPAAAPGPYSSKTPSAGAKPPKSSSS

SEQ ID NO: 105136 - protein, 98 aa, Gossypium hirsutum
  Clone ID: LIB3582-010-P1-K1-C1.pep
LKFNFVSRFPKSSVSTSMATCPEKTKKKKTQFPPRRGRVKAQIFESIAKTVVSAASKTKEEMGKNKSEGYDGKSCSSSSTTSTPPQSGYTSEGNGHIS

SEQ ID NO: 105137 - protein, 113 aa, Gossypium hirsutum
  Clone ID: LIB3582-010-P1-K1-C8.pep
MGCVTSKLDQLPAVTLCGDRCNFLQDALLQSYAFADAHVAYMQSLTTLGPALHRFFDQCLKSSSGDEPAVSDEKPPKRRSPLSSPGHSFSSSNSDSHIQFDTDLEGEETGEDF

SEQ ID NO: 105138 - protein, 44 aa, Gossypium hirsutum
  Clone ID: LIB3582-010-P1-K1-E1.pep
TEQPWNPNPNLHCQGDHTPHFTYQQKRKRKKRICCHRCSAIVIT

SEQ ID NO: 105139 - protein, 158 aa, Gossypium hirsutum
  unsure (1)..(158): unsure at all Xaa locations
  Clone ID: LIB3582-010-P1-K1-E2.pep
LKDLYATDSDFASIHDACEHGAFHKFYKHYDYLFRNNRLCLPKXSMLELLVREAHSGSLMSHFGVTKTYDVLHEHFYWPNMQKLVEKICSTCITCKQAKSTVMPHGLYTPLPVPSSPWTDILMDFVIGLPRTKRGRDSIFAAVDQFSKIAHFIPCHKT

SEQ ID NO: 105140 - protein, 156 aa, Gossypium hirsutum
  Clone ID: LIB3582-010-P1-K1-E7.pep
NLPHAWRMWKLDSVHEILKRDYQLRGVAVELFSMDGCNDLLMFHKRERDEVFKNLVAMNLPRNSLLDTTISGSTKQESSEGGRLFKIMAKSFSKRWQNGEISNFQYLMHLNTLAGRGYSDLTQYPVFPWVLADYESENLDLSDPKTFRKLDKPMGC

SEQ ID NO: 105141 - protein, 157 aa, Gossypium hirsutum
  Clone ID: LIB3582-010-P1-K1-E9.pep
MNVGSDTQLRQLLYGGILNSKDPNVSLPDEKTFKIPNVDKVIEEGKKAPTKFRNIKLCSIGVKLPAEIYTATGWPSVSGVALKSLAGKVSAEYDFTEDTGDGDIDDYPETMTAVDKSAYGTAFAAFEDEEKGREACHAIASLCEVCSIDSLISNFIL

SEQ ID NO: 105142 - protein, 129 aa, Gossypium hirsutum
  Clone ID: LIB3582-010-P1-K1-F1.pep
MAFFRNAKQPLGILLYNTRLSTCSRHGYSTWATKGTSFAQSTDTKASKTAYLYWVSRRFNSQAASSAEQMSLIKQLRERTSAPIKDVKASLVDCNWDIEAAQKELRKRGKVLAMKKSSRTATEGLLALA

SEQ ID NO: 105143 - protein, 105 aa, Gossypium hirsutum
  Clone ID: LIB3582-010-P1-K1-F3.pep
MDVHGRERKLAGNNGEFSYSKANDIFLRNPNPPHNSSLSTLKSPDHNKLRKYWMSGHCHRGDKCWYLHSWSRGDGFTMLAKLEGHKKTIRGIALPSGHDKLYSGS

SEQ ID NO: 105144 - protein, 111 aa, Gossypium hirsutum
  Clone ID: LIB3582-011-P1-K1-A7.pep
YEVSIVPRIFFFPFPFLDPILCLRFSVLSCINCTGPAMAVCFNPKPTTYMPDRPPGIKSSRSLLFLSNHTNGKSWFDEFYTVLDPFLAVKNLGFKCLSRADSSVSCNPTTT

SEQ ID NO: 105145 - protein, 160 aa, Gossypium hirsutum
  Clone ID: LIB3582-011-P1-K1-B2.pep
GKLDEALQRRVTSEERVTHLDAALKECMRQLRFVREEQERRIRDAVMSVSKEFEKSGKGLEEKLAETSKRVNKLGVENTNLSKALLAKEKMIDDLNKQRARVETDLNALMARLQSMEKDNAALRYEVRVLEKEVEIRNEEREFNRRTAEATSKQLLENVK

SEQ ID NO: 105146 - protein, 150 aa, Gossypium hirsutum
  Clone ID: LIB3582-011-P1-K1-B7.pep
MREENSFENRAKASKFGDQNQLPKSLHTKTITNQSKPKSSWGSHIVKGFTGTADKKTKVQTITVQTKKPPISNTDVPTANPSLHSHSRVKRSLISDLSCSVSATQVHPQVYPTHRRQSSGSRDLFIELDHVRSLLQDSKERELKLQAELA

SEQ ID NO: 105147 - protein, 110 aa, Gossypium hirsutum
  Clone ID: LIB3582-011-P1-K1-C1.pep
QLVDVLLEFQTRQMQAMHDAPMHANVVEASPAVAVIESALRSRRDGRSFSGLSGRRFRSRVQCQICSRYGHLAQRCFYRFNRDYGGPSKFTPTRFRFGHSDQIHRLGRVG

SEQ ID NO: 105148 - protein, 50 aa, Gossypium hirsutum
  Clone ID: LIB3582-011-P1-K1-C10.pep
SRIPKNRRTLSNCKFGIFENIFVHDPCFIISVYFIFFIFFVFFLFLFFIF

SEQ ID NO: 105149 - protein, 82 aa, Gossypium hirsutum
  Clone ID: LIB3582-011-P1-K1-C11.pep
LHFSASPSTSTTERPTDNPNSTAFIHSTALAAKEVVSYITINLCSLRIEAFHFVSSMELVPVSPNCAKCTSKNSAKLIGMVV

SEQ ID NO: 105150 - protein, 160 aa, Gossypium hirsutum
  unsure (1)..(160): unsure at all Xaa locations
  Clone ID: LIB3582-011-P1-K1-C2.pep
HASAFSPIEEHFYQRQHETCVSYASEVLESLKEDFLKREIPGAFSSGAMFDPFITHTEAAKLLNALLKLRQACCHPQVGSFGLRSLQQAPMTMEEILNVLISKTKTEGEEVLXMLVSALNGLAGIAIIEEKLSQAVSLYKEALDITKEHSEDFRLDPLLS

SEQ ID NO: 105151 - protein, 112 aa, Gossypium hirsutum
  Clone ID: LIB3582-011-P1-K1-C9.pep
MEKESMDKASAFGERIKVEGAELGRKMSAGMSSMSFMVKELFQGPNPTDKLLEDATSEALDEPDWALNLDICDMVNHEKVNSVELIRGIKRRIMLKSPRVQYLSMVLLETFV

SEQ ID NO: 105152 - protein, 89 aa, Gossypium hirsutum
  Clone ID: LIB3582-011-P1-K1-D10.pep
IIKKKRYGGPFPELKEKSLPLISFFLKKIKNKNTRMQTVIHALTPSQKKKNIFSNTFFLFPYREKGAYFDQNRKKKKKRRVFFLLRKIE

SEQ ID NO: 105153 - protein, 54 aa, Gossypium hirsutum
  Clone ID: LIB3582-011-P1-K1-D9.pep
GRVVRLLSYYTSWSFFLRQNKTLQPTSTKLVRPFLDGSVSGNPSPAGAGFFLLN

SEQ ID NO: 105154 - protein, 134 aa, Gossypium hirsutum
  unsure (1)..(134): unsure at all Xaa locations
  Clone ID: LIB3582-011-P1-K1-E1.pep
MDAGSLNPFSKLRGRSRCPLQEXILQRINSKENXFIPNCSATDYDYAHYMLTEGRKIKENQTVFSPARDAYRMQLAEALNMNKTRILAFKNKPPTLVELFPSDHTTYSAHPEKPSKPXRHIPQSSERTLDALDL

SEQ ID NO: 105155 - protein, 160 aa, Gossypium hirsutum
  Clone ID: LIB3582-011-P1-K1-E2.pep
KRFPEWYPVTLFNELYYLNSGGTIWTDGSSPVHSLESIGGKKFSLDKSQLGLKSIIGVPHKNDTAIDILGRMTSILEQIHTPITSNSALGTNLLQEGEENIGQFLYLEGIEYHMWNTYDVHFYASFALIMLFPKLQLSIQRDFAAAVMMHDPSKMKLLHD

SEQ ID NO: 105156 - protein, 66 aa, Gossypium hirsutum
  Clone ID: LIB3582-011-P1-K1-E7.pep
MRNLSHGNEISILSRTECCYCACLALANEINWLIDKIQYVALLEIYAMTAARLQLMILHWKETNKL

SEQ ID NO: 105157 - protein, 138 aa, Gossypium hirsutum
  Clone ID: LIB3582-011-P1-K1-F2.pep
MPWPLWMNETTDSLHADCAAVDSKPSIDITIKDENSPITNVELKRKDGSVNNEPQLQKSGKKASNPAKQVGTENGHQNSPVLPSYMGATESVKAKLRLQGSPRSGQDGDEKSNLSRRQSLPSPANSKLSSHSPRTQRL

SEQ ID NO: 105158 - protein, 160 aa, Gossypium hirsutum
  Clone ID: LIB3582-011-P1-K1-F4.pep
GSGQWQCVICGNLNGSEGEYIALSKEELRNFPELSSPLVDFIQTGNKRPSFVPVTDSRTSAPVVLVIDECLDEQHLQYLQSSLHAIVDSLPPTTRIGIILYGRAVSVYDFSEESIASAEVIPGGASPTQEALKALIYGTGISLSPMHASKEVAHLIFSSL

SEQ ID NO: 105159 - protein, 60 aa, Gossypium hirsutum
  Clone ID: LIB3582-011-P1-K1-F6.pep
HCILLVVSVKLSQGILLIYNNICILITCMYGHMESGYRIKVNRMILTYGYLFRIRLGQHT

SEQ ID NO: 105160 - protein, 74 aa, Gossypium hirsutum
  Clone ID: LIB3582-011-P1-K1-G2.pep
ELPLLAHKLSAGAWYLDRIIGLTEVRITNVGLTTSGATISIRKIRFIQCCNGFVNLNCCPFAFTVASGKEFTTP

SEQ ID NO: 105161 - protein, 148 aa, Gossypium hirsutum
  Clone ID: LIB3582-011-P1-K1-H1.pep
FIWKIFSLTKQKGKEKRKEGEEMSLSLIIPNSPIFSPKKVPSIFCKSDGSSFSSSPRTNGSQQPPSSPLSLSLSSPKSSLPISSTPQFPSSPLKSPLSIRVPKKQLLFGTDVAPVKRKRPGRIEIPTSMAVQLGFAAETPRGEEEVQV

SEQ ID NO: 105162 - protein, 137 aa, Gossypium hirsutum
  unsure (1)..(137): unsure at all Xaa locations
  Clone ID: LIB3582-011-P1-K1-H10.pep
MSNSHIDTIRLHSSYQSGIDEIENLITASIQTGPTTVLPARPPSPPRAFIPVSSSPFIXSNIPPPPTLSSNQMPRPVPAAPSXPPFGNSSSIVATGFGPPSNTLTEPVLDTVKRDLSRIVSKLKLVVFPNPFREDPG

SEQ ID NO: 105163 - protein, 86 aa, Gossypium hirsutum
  Clone ID: LIB3582-011-P1-K1-H5.pep
FFSNWDVLHLHIILFNSQTSLIRIHSKFFFFSYWITQRPVSPLLQFSFNKLKENGTKKGSEEICVLQLTIPSKSTNTEYMWRDAWG

SEQ ID NO: 105164 - protein, 54 aa, Gossypium hirsutum
  Clone ID: LIB3582-011-P1-K1-H8.pep
MDNDNPHMRYHYSRPHVEHHERKLRSQCELSCQEQYEIHHYQQSDKRNKECEHH

SEQ ID NO: 105165 - protein, 76 aa, Gossypium hirsutum
  Clone ID: LIB3582-012-P1-K1-B12.pep
CIKPDQHDVIFNKYHPLPSQSTTNNNIQMQLTLHQTLPTLREKQTLTKTSSYKTITIKFHPYNTINRTKASNLRPL

SEQ ID NO: 105166 - protein, 155 aa, Gossypium hirsutum
  Clone ID: LIB3582-012-P1-K1-B4.pep
PRVRPRVRRGRDFFFSSSSSAKENTDNISCAKTVRATKRGRKMYGDCEAISSMGGNLVVSSETLFTSTFQNPNFSYLPLEPLPPMIPKEENGSLLRGKEEMKSGSESELQETTEQPLKKKRYHRHTAHQIQELEAVFKECPHPDDKQRMKLSQEL

SEQ ID NO: 105167 - protein, 160 aa, Gossypium hirsutum
  unsure (1)..(160): unsure at all Xaa locations
  Clone ID: LIB3582-012-P1-K1-D1.pep
GILDEGIGNFESILIMDLSHNQIGGSIASNIPLTIRNLXLSGNQFNGSIPVTLSALTQLTQLFLDDNRLSDNIPDSFQELXSLADLDLSGNNLTGQLPPSFGNXSSLTTLHFQNNKISGVLNVLQDLPLSDLNVENNKLSGPIPXKLLNIPNFRKDGNPF

SEQ ID NO: 105168 - protein, 49 aa, Gossypium hirsutum
  Clone ID: LIB3582-012-P1-K1-D3.pep
YTSIYSHGVVVGKLSVAYALFFVNSLISVRVYYSVYEDDAPPSSDMGMI

SEQ ID NO: 105169 - protein, 49 aa, Gossypium hirsutum
  Clone ID: LIB3582-012-P1-K1-F5.pep
HTGRRSGRLSVKRCLKMDSDPFTYTYLDGIFSKVKIELYCTRLTRAHNR

SEQ ID NO: 105170 - protein, 150 aa, Gossypium hirsutum
  Clone ID: LIB3582-012-P1-K1-F7.pep
HASDLARFLIKAEKEDSPVSNDDAALVHVIKSCISPGWLDQAHDLLDEMRFAGVRTGSSVYASLLKAYCKANRLREVTSLLRDAQKAGIQLDSSCYDTLIQSRVLQQDTQGALDLFKEMKEAKIPGGGNPEFERLVEGCAGNAEAGLMAK

SEQ ID NO: 105171 - protein, 38 aa, Gossypium hirsutum
  Clone ID: LIB3582-012-P1-K1-G4.pep
AHIRTLIHNCCLSLMSSPLPYQHYATSTYDVLTVPYCA

SEQ ID NO: 105172 - protein, 118 aa, Gossypium hirsutum
  Clone ID: LIB3582-012-P1-K1-H1.pep
MFRYKERMNFSEKGNRISDAKQNTPGKVTILNPNAAEFVPFSRRSPSSSGSTSAVDGTTRFAATGTLRKPVLDRSRSSVSNKSKEEAHQFWQSQLPNGITSDCKFINEEDSQGIGSGN

SEQ ID NO: 105173 - protein, 52 aa, Gossypium hirsutum
  Clone ID: LIB3582-012-P1-K1-H7.pep
TNFVVWCFNRYPTDSVKLMLSSQTGLTKNQVSNWFINARVRLWKPMIEEIYK

SEQ ID NO: 105174 - protein, 92 aa, Gossypium hirsutum
  Clone ID: LIB3582-012-P1-K1-H8.pep
KHSPHLSMATEASASEYPIFVKYNSLLSSSEPGLIISSVSEELSISVKSSKKFPSQSDEKSSESACCCTGADFSRACNLKLIIHDITERANN

SEQ ID NO: 105175 - protein, 92 aa, Gossypium hirsutum
  unsure (1)..(92): unsure at all Xaa locations
  Clone ID: LIB3582-003-P1-K1-A3.pep
ELVTAWNSCSQHPYVYGVTVFEAIDTFIGXVSVLSLIAILGSCSXRAMITTATQADTLMLRYMIFTIPLTEQHGSALWVIATGLLFKMRSYS

SEQ ID NO: 105176 - protein, 144 aa, Gossypium hirsutum
  Clone ID: LIB3582-003-P1-K1-A6.pep
TELSKTKQGPHLLRTLDIDRYATKPDQWRSKQASKQSAYNEFFVAFGYSESKSTKRNKLLYNASMDTSEHEELNIKKDIDGSLISTSVVDDTSSEKKGRKKRKRDVASEDAVGSNKAIEKAVKNLSSSTPDKKRHNASKQRLKI

SEQ ID NO: 105177 - protein, 87 aa, Gossypium hirsutum
  Clone ID: LIB3582-003-P1-K1-B1.pep
LQNFLQQFSFPGIASTSLFLLVFSFLGSKLLFLLSLSSLFSYSTKNLTPNLLISLFLTTFIHLITAPSLLSLGIELSFFFFTVLFED

SEQ ID NO: 105178 - protein, 146 aa, Gossypium hirsutum
  Clone ID: LIB3582-003-P1-K1-B10.pep
NICASTFIFPNKEKKIMHWRWSSHDKCQSVSLSSLACSCCICWNPSLSFSEGEAVDKFKMSSCSVRRSSKKLENIDENGPPRWLQLSCPLPETPTEPMEFLARSWSLSAMELSKALAKNNIAASNGVDADIKSSSASSVGNIETHD

SEQ ID NO: 105179 - protein, 73 aa, Gossypium hirsutum
  Clone ID: LIB3582-003-P1-K1-B12.pep
IVDEFTGIVLASVTFASTNASSFTTLVIRSSSATDSSSMSESPRTSSSDSSSAILVSGSSHSSTSMSESPRSS

SEQ ID NO: 105180 - protein, 36 aa, Gossypium hirsutum
  Clone ID: LIB3582-003-P1-K1-B8.pep
NGFKTFWLGLTSTKIRFNPTIFNFAYHRYKGTCKNF

SEQ ID NO: 105181 - protein, 123 aa, Gossypium hirsutum
  unsure (1)..(123): unsure at all Xaa locations
  Clone ID: LIB3582-003-P1-K1-C4.pep
MASYRLMIFLLYVSLVLTKIGANVSTEPXIESDADDTSALKMEFDQLKSTILLIESNVAEKILELKTNDEMINHKDIIIXEKSDTMASMHSELSSLQKKGTPDSEEQLGKAHATALELQKHVD

SEQ ID NO: 105182 - protein, 101 aa, Gossypium hirsutum
  Clone ID: LIB3582-003-P1-K1-C6.pep
CIMEGESQPVQHICSIIFSIIMEIMELRNLIPTQVNTMPLIWQPPPEPCDKMNSDDAFQAALQYSYSSFVISNSRGQVMGSGTVFLKFVSDSFTPAAIACL

SEQ ID NO: 105183 - protein, 141 aa, Gossypium hirsutum
  Clone ID: LIB3582-003-P1-K1-D10.pep
LLDHISNKIVSIERMITRWSETMSTCIGLHTFDGRVTRCITLAEEQHRWGTKNHLKAEVLRRIKETGSVLYRMGIHDIAERELDTTHIMQTEPYSGLITAANGQMLAQNARESPEVDLFKSATAVIVLNSMCPNSTCFYTK

SEQ ID NO: 105184 - protein, 103 aa, Gossypium hirsutum
  unsure (1)..(103): unsure at all Xaa locations
  Clone ID: LIB3582-003-P1-K1-D12.pep
PRVRLLVLFHGCCAQIELVTKHXQYPPWGHSQHPQARKQSKCQLQILDALXPKHLFRSKADETEVWHQNEDQFQCAGVAVLRDTIQRRGLLSPSLTNATMLMY

SEQ ID NO: 105185 - protein, 160 aa, Gossypium hirsutum
  unsure (1)..(160): unsure at all Xaa locations
  Clone ID: LIB3582-003-P1-K1-D4.pep
MQRRDQQKHVLVKCKRWITLIEIGTMGEDGHPNVVPLIXCCMESSLYVXFEVXSREYGASLXHDAHLPPRDWPSLYIIAVRTGPILYYLHYQCXTRIKERGIMPSYMKLTADIVPQTSYDGLAKWLTCXGTHHSIDPIEGTYGHLAPVVFMHGTADEKTY

SEQ ID NO: 105186 - protein, 70 aa, Gossypium hirsutum
  Clone ID: LIB3582-003-P1-K1-E2.pep
HNLLCRPKNLVSTPWFHSLRKWTNQTLVIANSAKRTPQNTSAQVADSAPCSSLAIMLTSNALAALANATS

SEQ ID NO: 105187 - protein, 64 aa, Gossypium hirsutum
  Clone ID: LIB3582-003-P1-K1-E7.pep
NPCQIMTRSLDPVWRKIPPRFSQGSFRITILGCFIEVIKVRVETPLIEGNFEPELKTQGPNAWP

SEQ ID NO: 105188 - protein, 52 aa, Gossypium hirsutum
  Clone ID: LIB3582-003-P1-K1-E8.pep
NPGYNGTPGKGIPGSDEFTCTIRERLSRFNGKNGGDHRPSFRELLITTSGTF

SEQ ID NO: 105189 - protein, 91 aa, Gossypium hirsutum
  Clone ID: LIB3582-003-P1-K1-F1.pep
FQSHKNPIYFLARKQNRREGPTILPLVFLIFILIFNPLLLFFLYSERKRKTFSLFLYVCARIYICIYIPFNSKYLNIKHTQPELDKKVRQS

SEQ ID NO: 105190 - protein, 59 aa, Gossypium hirsutum
  Clone ID: LIB3582-003-P1-K1-F8.pep
VDQYPITKIHTQTTGLILNIKIFSHSQTQATLSIHSPTYPTRFFFWVYRPDPRPLRRSG

SEQ ID NO: 105191 - protein, 42 aa, Gossypium hirsutum
  Clone ID: LIB3582-003-P1-K1-F9.pep
LVERARVEGLTTINLDRVLQKGVWTNIGLLSLMVVIIVVQNG

SEQ ID NO: 105192 - protein, 63 aa, Gossypium hirsutum
  Clone ID: LIB3582-003-P1-K1-G10.pep
KKKKKHSARSKDKDLGLILKPQSALSAKSTSKVIDLGGKNSSIDLRLLLWLNPCFSKENKCSN

SEQ ID NO: 105193 - protein, 58 aa, Gossypium hirsutum
  Clone ID: LIB3582-003-P1-K1-H10.pep
SDSHTHTNFGMSLGPFPFFLFFNCLFFGNFSFTISRPGALKGQSLPLFTFPTGTIPGF

SEQ ID NO: 105194 - protein, 62 aa, Gossypium hirsutum
  Clone ID: LIB3582-003-P1-K1-H9.pep
SLMLHLTLHLTLVFSRVLVGLRLRAPLTVRVPVLRLLRAIFPASASGRVLHSLEQAKGNSNA

SEQ ID NO: 105195 - protein, 87 aa, Gossypium hirsutum
  unsure (1)..(87): unsure at all Xaa locations
  Clone ID: LIB3582-004-P1-K1-A11.pep
MELLRSNLSRMXIREPTNRLYRXECCLLFDSPRPDGGLSVDMTTSVASGIDHVGWTLVQTGTPVYMRSKPTKKERYADTPLKKHTLM

SEQ ID NO: 105196 - protein, 78 aa, Gossypium hirsutum
  Clone ID: LIB3582-004-P1-K1-A2.pep
MHGAQSKRDLAMELQAQLPILRPSIHTRRANLTVKFQDLYGFTVECNVDDVNVLNEVREKVRQQGRVWWALEASKGAN

SEQ ID NO: 105197 - protein, 104 aa, Gossypium hirsutum
  Clone ID: LIB3582-004-P1-K1-A9.pep
MAAFSTKLAKKHGLRSVSFPASSHPSTLRLEEELNKRGSRHGASSSNGETLCTGLFGLAELYICIEDLLNLPLTQQALAQHHNEQWQNALLDCSLKQLDLCSNT

SEQ ID NO: 105198 - protein, 139 aa, Gossypium hirsutum
  Clone ID: LIB3582-004-P1-K1-C1.pep
ASENGPDLSIFVGDLAADATDSLLHETFASKYPSVKAAKVVIDANTGRSKGYGFVRFGDDTERSQAMTEMNGAYCSSMPMRIGAATPRKSAGFQQPYSSQGGYASNGSSTQSDGDSSNTTVFVGGLDPNVTDEDLKQPF

SEQ ID NO: 105199 - protein, 151 aa, Gossypium hirsutum
  Clone ID: LIB3582-004-P1-K1-C11.pep
RTRGRTRGRTRGRTRGSVFSKRLRQWRKKQSKRKEKNEASVLEKANKKGLRETQSEIGEYGLFGRRSCDTDPRLSVDDARYSFEEPRASWDGCLIGKQKPKANEEANVGEERLSAVKEEEKISPGGSNQTRDCYADSLTTRRKSFDRSNSS

SEQ ID NO: 105200 - protein, 167 aa, Gossypium hirsutum
  Clone ID: LIB3582-004-P1-K1-C2.pep
IDNFIIIVNGSRIDSELSEYHRTKYYELCCSQNSFLHDNLLESISSKLALEIITQIINIAEAIRACKISTSQADYTLWDKTLKGFELLGMNVGFLRAKLNRLNTLSLELQQGVNMERCKEQDHMKEEKKSLEQKLVKLKDAMHKLDTEIETLKENAEKYELIFREEG

SEQ ID NO: 105201 - protein, 130 aa, Gossypium hirsutum
  Clone ID: LIB3582-004-P1-K1-C9.pep
PTRPRTRGQVLTTRERRLAKAREAAARSARETAKARKRWIAAKNAAKKHASELQSHISQKFSFKKSTKDPEELKILDRTRFEEDEDLYAPVYTSASSESLSSSAASKGQMHEIEDDIEKHDIFDVSSHDR

SEQ ID NO: 105202 - protein, 182 aa, Gossypium hirsutum
  Clone ID: LIB3582-004-P1-K1-D2.pep
VPDNQVQFQLMQKLQQQQQLLLAQQSALQQPGQLAQPQDQQRQLLDASQSFSSSVTASQVLEMPQNIPTLLPQSNVAPQQMPKNNSQANVWFSQPPLQSKVQQQQTGMLPEVPGLVGPFQTTATNQFSTAVSSVMMSAAVAAPSVITDDNPSCSTSPSTNCPSVLQPMIDSRVHRSTGLGDD

SEQ ID NO: 105203 - protein, 83 aa, Gossypium hirsutum
  Clone ID: LIB3582-004-P1-K1-D4.pep
MRKERLYITIPSFFRCPISLDVMKSPVSLCTGVTYDRASMQRGLDSGNNTCSDTMQVLQSKEIVPNRNLLRLIQMWSDSVARR

SEQ ID NO: 105204 - protein, 76 aa, Gossypium hirsutum
  unsure (1)..(76): unsure at all Xaa locations
  Clone ID: LIB3582-004-P1-K1-D5.pep
PRXRLMLTAVSLGVCTTDLCGIGLAPLAYVCNDSRISHMKKCEKNRIRDYMDGRFDLMHDGHANALRQAKAVGDEL

SEQ ID NO: 105205 - protein, 175 aa, Gossypium hirsutum
  Clone ID: LIB3582-004-P1-K1-D7.pep
GGPASVRSSIDRPFEMGWNAASSMLKGGIFLPNASGVLPSSLSQLQTDSAFIERAAKFSSFNGGNFSDIVNPFGIPEAMGVYARGVGLMQGPQDVYTISGVKSISGVESQRSKLMTTEASRDLQAENRATQESPLKNERNSGSLVRSNEEAKQGNGGSGNESNEAESNGGAGGHD

SEQ ID NO: 105206 - protein, 146 aa, Gossypium hirsutum
  Clone ID: LIB3582-004-P1-K1-D8.pep
MLTLFFISLFLILVLSALLFKFAISDGDFTLLSRRHVKREEIEDKVVWITGASRGIGEILAKQLASLGAKLILSARNETELERVRKQLTGKYAPEQVKILPLDLTSGEATLKEAVDKAESFFPGAGVDYMIHNAAYERPKITALDV

SEQ ID NO: 105207 - protein, 45 aa, Gossypium hirsutum
  Clone ID: LIB3582-004-P1-K1-E1.pep
PLWFQLQRRLQVPRLPRSQVQLPLALRQLVRSLKLRQHFHHVEAS

SEQ ID NO: 105208 - protein, 168 aa, Gossypium hirsutum
  Clone ID: LIB3582-004-P1-K1-E10.pep
VEVDELLKIEKSEYPMRIVYCFGISHEHPGTFILTYIRTSNPHHEYIGLYPKGFKFRKRMFEDIDRLVAYFQKHIDDPQHESAQSIRSVAAMVPMRSPAADGSSGGSMGGWKGHSHDRGQSSTPGSRTGRGRDGYQSGAPRGGRGRGRGGSYNSNRGRNNGQDSSYDD

SEQ ID NO: 105209 - protein, 102 aa, Gossypium hirsutum
  unsure (1)..(102): unsure at all Xaa locations
  Clone ID: LIB3582-004-P1-K1-E2.pep
SGCRNKHGQCNVKFIRWSNCGKCCPNEKSFKRIIVRNIQVQAAVRDVHQACFYDTYTLAXLIVKMLYWVICAIHCHVDRLRYRSDRRKRDPPYCFIIRMDDM

SEQ ID NO: 105210 - protein, 66 aa, Gossypium hirsutum
  Clone ID: LIB3582-004-P1-K1-E3.pep
RKMYVKPVNLGGYRHCSVSHVGCKTTSQLILCSHHNRSTTSYDGGGSLGASTTAAADLVPLRYAYA

SEQ ID NO: 105211 - protein, 158 aa, Gossypium hirsutum
  Clone ID: LIB3582-004-P1-K1-E5.pep
QQQQQQQKMGGEDVHAVGGNEGNPSGFDDVVVEVERVMGSEEREMWLDRQQDDELLDVNDASIFYGDLPPLPDFPCMSSYSSSSSTPAPVKAIACSSSACTASSSSSAACWAVLNSDADEDMERKNNGHHIHLHHHHHQNYIQNSHHQEHHGKVDGTP

SEQ ID NO: 105212 - protein, 108 aa, Gossypium hirsutum
  Clone ID: LIB3582-004-P1-K1-F12.pep
HHSDFSDGELERVTLRLILVVRFRGQVDGVIDLDFDRDLQKVPQSMICISRNSSTTLFVFLVPRPHHHFHIANISPIVTRATIGRRIITLMISLFSKISFPLQAHYDS

SEQ ID NO: 105213 - protein, 87 aa, Gossypium hirsutum
  Clone ID: LIB3582-004-P1-K1-F8.pep
ALGVSVSTPTGSSVASSFSPAKRGSFRGRGRGNRGRPQCHICGRIGHLAQRCCHRFDRSVDGPPVSTIGPSSLSFSSPSTFYPGRVG

SEQ ID NO: 105214 - protein, 153 aa, Gossypium hirsutum
  Clone ID: LIB3582-004-P1-K1-H11.pep
KTFMELVPQNVLPDDFTRSIKYSDYSSGTTKINVAVDKLPDFHCCKSIDGLQYTGTIHIGSESMEEIDSACQDAVNGLPSRRPVIEMTIPSILDKTISPPGKHVINLFIQYTPYNPSSGCWDDPVYRESFAQRCFNLIDEYAPGFSSSVIGYD

SEQ ID NO: 105215 - protein, 46 aa, Gossypium hirsutum
  Clone ID: LIB3582-004-P1-K1-H6.pep
SFNIQIIFQKLLMIFIYLDFFIPENIYGKDLNTLSYNAQKLYGRVG

SEQ ID NO: 105216 - protein, 95 aa, Gossypium hirsutum
  unsure (1)..(95): unsure at all Xaa locations
  Clone ID: LIB3582-004-P1-K1-H7.pep
SQSQPNKITAGPRLRCTEQLLSHVRRTRVVPRANPASPTSMLRRCNNQTTKQQAKTKNSREAEKRMYFDYFFWIRLYKSHFSVFKGXPTHRSPIQ

SEQ ID NO: 105217 - protein, 108 aa, Gossypium hirsutum
  unsure (1)..(108): unsure at all Xaa locations
  Clone ID: LIB3582-005-P1-K1-C11.pep
MASSMFLAQRRWFHSLPRNLSNARFFSALPSQHPVSVSGPQNNVGPKSNKFEKASSAPSSLKEPELAKFSAIADTWWDSEGPFKPLHKMNPTRLAFLRSTLCRHXRKD

SEQ ID NO: 105218 - protein, 77 aa, Gossypium hirsutum
  unsure (1)..(77): unsure at all Xaa locations
  Clone ID: LIB3582-005-P1-K1-C4.pep
FMAGNETFEKLGAIGTLANLLIYLTTGCNLKSITAAPMSNVLNGTTNFGTLRRAVLCDTYFGRYKTYGYATAXSIWE

SEQ ID NO: 105219 - protein, 155 aa, Gossypium hirsutum
  unsure (1)..(155): unsure at all Xaa locations
  Clone ID: LIB3582-005-P1-K1-C8.pep
PRVREVFESELFGLAMKQALGKDVESIYVEEIGTLSRKEIHKVLVMDMMEGAIDIDWRDFFPYLRWIPNKSFEMNIQRKHFRRMALMNALIKDQMKRIDAGEEVNCYLDYLLSEAKTLTMDHLAMLLWETIIETADTTLVTTEWAIYQLAXDTTR

SEQ ID NO: 105220 - protein, 78 aa, Gossypium hirsutum
  Clone ID: LIB3582-005-P1-K1-C9.pep
DLHTFSSSFMFLSSNTIMRTAPFPDLSLQISPPSVSDCKAKEMAYDVLSGKSIYSDRSSTTDSGSSGSDLSHENGYSN

SEQ ID NO: 105221 - protein, 78 aa, Gossypium hirsutum
  Clone ID: LIB3582-005-P1-K1-D2.pep
FFLTVFSSKISSGLSSVPISAIESLITLILYSFPFNAGFFNYLIQNLISFLSVLCLLFGYFCSEMEKLVCAFLLFLVQ

SEQ ID NO: 105222 - protein, 87 aa, Gossypium hirsutum
  unsure (1)..(87): unsure at all Xaa locations
  Clone ID: LIB3582-005-P1-K1-D5.pep
TTMLGXGATMLGAVGPTYEATWKPSRHSSPFTVTPSVGPSLSSIYGKKTNHNWLKPCNLRLKIEAIFKILERLNRKKKENLSENNTT

SEQ ID NO: 105223 - protein, 53 aa, Gossypium hirsutum
  Clone ID: LIB3582-005-P1-K1-D7.pep
ALQLPTKVKIYVWKLHNNYLPTFGNLAKRKLSVEGVCPLCKDAEETAEHLVRS

SEQ ID NO: 105224 - protein, 50 aa, Gossypium hirsutum
  Clone ID: LIB3582-005-P1-K1-F1.pep
YRYLAYALEALIFHTPSYKLCSSCIMPRSSTKVTNCVTRDMTIKSLGSIN

SEQ ID NO: 105225 - protein, 65 aa, Gossypium hirsutum
  Clone ID: LIB3582-005-P1-K1-F12.pep
PLFTLGLQPPSAAVPLTPPTPLPPPLTPRPAKQKQEESREAGSKKNNRKLNIVFGYKKSLKQTMF

SEQ ID NO: 105226 - protein, 44 aa, Gossypium hirsutum
  Clone ID: LIB3582-005-P1-K1-F6.pep
GQNQEAISSLYDAIYKVLNNVTSKNTQQGTAQGFAPWSSSCSCW

SEQ ID NO: 105227 - protein, 124 aa, Gossypium hirsutum
  Clone ID: LIB3582-005-P1-K1-F8.pep
PTRPGPKASNNCSAFFPEPLSVPPDGLKAQSDSGSKGHHVAVAFGASFGAAFFIILFLGLLVWWRYRRNQQIFFDVNEQYVLEVCLGHLKRYTFKELRAATDHFNSKNILGRGGFGIVYKGLLS

SEQ ID NO: 105228 - protein, 115 aa, Gossypium hirsutum
  Clone ID: LIB3582-005-P1-K1-G10.pep
PTRPLWLGVLDRMERYMKVKFRGKRSEKIHELVPELLKNTLLVMKTTGILVPSDDLGGESFWQLTWLHVKNIVPSLQSEVFSEQELEQLQGKHLKKTGIPSTDGAMLVPSNETAA

SEQ ID NO: 105229 - protein, 116 aa, Gossypium hirsutum
  Clone ID: LIB3582-005-P1-K1-G4.pep
PTRPQPSNPIPLSNCPGFSSFLLHYVALINPCCAAPLVLNCFAYLFSYFTNELNTIFTLSFLPFWIFIVSHLFPWCCSEFYSHFFPLFFLVAIDLHCYFSSLYLIFLILKEVPKSP

SEQ ID NO: 105230 - protein, 64 aa, Gossypium hirsutum
  Clone ID: LIB3582-005-P1-K1-G5.pep
FKFCVLEAFVLCILEIQFISIRAIDKRYLPAQACHSFIPSFSTHCSILCPLKYITLKTSHLLTL

SEQ ID NO: 105231 - protein, 162 aa, Gossypium hirsutum
  Clone ID: LIB3582-005-P1-K1-H10.pep
KKEETSSSSDDSSDSEDEPVPLKKQPAIAKNGSLPAKKEKQASSSVSSESSSEEDSSSDEEVPAKNKIPVVAKKGSVPAAKTKKADSSSDSSSDDGSVEEEEPAAKTKVAVVKNGSAPVNKGKSSSSLDSSDEDSSSNEDEIKCQMKECMKLNRKCIWEVEN

SEQ ID NO: 105232 - protein, 60 aa, Gossypium hirsutum
  Clone ID: LIB3582-005-P1-K1-H4.pep
YACEGYHGVRSSTMRDSGLAKPGGWPLRCHLELSMRYSTATHMRVTKRIVRHRMHLNKEQ

SEQ ID NO: 105233 - protein, 75 aa, Gossypium hirsutum
  Clone ID: LIB3582-006-P1-K1-A10.pep
NLQTGNCSSSSIWAGSSLSDINLSSVTLRGRTYIEPLWFHGSLIRLIGWIQTHYLFSFSIKNCQKKMGLTFLSSL

SEQ ID NO: 105234 - protein, 41 aa, Gossypium hirsutum
  Clone ID: LIB3582-006-P1-K1-A11.pep
KLMDHIANFTVMQLLNFILDCLPNFIINEDESKTDYFLQLF

SEQ ID NO: 105235 - protein, 86 aa, Gossypium hirsutum
  Clone ID: LIB3582-006-P1-K1-A8.pep
PPYAPCAASYCLRTPPPLQYMQEGQTPQQQIEKKNKQTNCKKGKYMFGYKAKGIGFCIFFTHTQSILRNTLRYPNTKQKLTSKVVS

SEQ ID NO: 105236 - protein, 192 aa, Gossypium hirsutum
  Clone ID: LIB3582-006-P1-K1-B12.pep
PRVRKDIETMPDKKKGEGALFYEPPRFPGLDVPFISCDLVTSADLQEFSPLGIRQWMRSTMNVPTPLRLWGSPTHDESPDALKTAAESFPCTSSIMKKRQRSLLSPTPDERIEKKSGIAKGVTDISYMITATCSMNATNDEDIVTESAVCAKQPSLKHLDKKLEFSDINKENSDGASEQAKDAQNTQLVDEQ

SEQ ID NO: 105237 - protein, 66 aa, Gossypium hirsutum
  Clone ID: LIB3582-006-P1-K1-B6.pep
MESGLGSNRNERHWIFKDDSWFSQFRNGSNPWMARYAYALILLVSNLLAWAVRDYGHNAFPEMEKL

SEQ ID NO: 105238 - protein, 170 aa, Gossypium hirsutum
  unsure (1)..(170): unsure at all Xaa locations
  Clone ID: LIB3582-006-P1-K1-C12.pep
MEVAAIGGGIKGLVAAYVLVKASVDVVVYEKEEQLGGHAKTVNYDADDLDLGFLYLNAARYATLLDIIDSLGVDVETSDVSFSISHDKRNNGYEWCRQYGFSNYFAQKKKLLNPFNWQNLREIIRFSNDVESYLGSLENNPHIDRTETWXQGIKSKGYSENYXNTYLALY

SEQ ID NO: 105239 - protein, 83 aa, Gossypium hirsutum
  Clone ID: LIB3582-006-P1-K1-C5.pep
SKSCRYQKAASNWVGSRKMTNLCSDLTAVEITHKGQKNTKIYSFVPMLNTAENCLNTRKISCYAEQYLGHVTLVETSLIYDIN

SEQ ID NO: 105240 - protein, 62 aa, Gossypium hirsutum
  Clone ID: LIB3582-006-P1-K1-C9.pep
LFTTAPPDFFFCSLSFYRYFLVILVFLPFFFLFFCSFFFFFFFFFFFLFFPFSLINRFWWSS

SEQ ID NO: 105241 - protein, 187 aa, Gossypium hirsutum
  unsure (1)..(187): unsure at all Xaa locations
  Clone ID: LIB3582-006-P1-K1-D1.pep
HASADFISLHPHSANAVRSLDRSRIAVCLVGGARRFELTGPSILEKVLKRYPNSDLFXLHCPMDKNAFKLSLLRTAPRLASVRIFEQKLVPETGEQVRVLTAANSPNGIQGLLQYFNLVEGCITMIESHQKQHGFTYDWIVRTRVDGYWSAPLHPRNFVAGRYTVPYGSVYGGLNDRLGIGDFFTSK

SEQ ID NO: 105242 - protein, 162 aa, Gossypium hirsutum
  Clone ID: LIB3582-006-P1-K1-D11.pep
MATLHKFKLLATQCAVTGSPGRSPTTSPVVHLRRRKTLRMLLNRSSATDRRRFHRRQTDNLDPPPSPTPQPNTSNADSKKNSNGKKSRRKLKELFVASPPFEERESDDKICEEVTEDLLPVTSSSSERFSDRRSGTLTPVTTSVRYRLLKRAWRPMLLTISE

SEQ ID NO: 105243 - protein, 146 aa, Gossypium hirsutum
  Clone ID: LIB3582-006-P1-K1-E3.pep
PTRSRVGDDDERDAGSDLTSSDGRGVWSDIYTLTYREAESQADRSSPGGSRSATASKSGKSGSSNSSSDPQPRRMSLLDSILQGELSCDLDRSNPTYTILALLRVLQGQKQSAPQDEVLIDIDDTAMALCTTRYKMCLYRAEVNKE

SEQ ID NO: 105244 - protein, 164 aa, Gossypium hirsutum
  unsure (1)..(164): unsure at all Xaa locations
  Clone ID: LIB3582-006-P1-K1-E6.pep
TLYNKVPPNGLVXLYSVTIDTVGGTVQLVTIDFTPYGPIYAYKCLCDLMIHTATLYEHLKTDDTYIFIVMNLNGTVSVTKSANTNDVLYKFTVDLPXKHAIGRQSAIRCARXRLENRHIYARETAKLATQLFINAATSQYNVAXLILAGSADFRTELSQADMFD

SEQ ID NO: 105245 - protein, 123 aa, Gossypium hirsutum
  unsure (1)..(123): unsure at all Xaa locations
  Clone ID: LIB3582-006-P1-K1-E7.pep
VNDSGNDTVDALIDALCEVDWSSPSRPFSRFTIRWTIPRXFSQWNSRIYCYRYYYRTKNVIMIGVRLGMRPLARPVAILAAIMTALIIDCLNDSFTRTVTETVTRTVTHFSAHIAANMTPAFT

SEQ ID NO: 105246 - protein, 59 aa, Gossypium hirsutum
  Clone ID: LIB3582-006-P1-K1-E9.pep
RMGDHLVLLVDPLLTESTLEAAKNQSQQGITPESKSDIIKFSAHRMEGNVGSSPSKSVE

SEQ ID NO: 105247 - protein, 84 aa, Gossypium hirsutum
  Clone ID: LIB3582-006-P1-K1-F12.pep
NLNFRVFKKISMTNLDQKKVQTSMSEQLPSSRLNLDKKKFRPQCGNNCEVQCLTLTKKKKFRPQCENNCQVQGLIWIKKIQAPI

SEQ ID NO: 105248 - protein, 123 aa, Gossypium hirsutum
  unsure (1)..(123): unsure at all Xaa locations
  Clone ID: LIB3582-006-P1-K1-F3.pep
SQENRDRAQQQIWQQDHLEHWRNYIKDERGGECIDNIFHRLIDXCSQRLXKRDTHCTCQRLQHAPIQQMRQLLQQIVRKQTQDIMHKGAMNIMSGCATDPRMCDTQSVSKIKTKVGLKNKCNV

SEQ ID NO: 105249 - protein, 181 aa, Gossypium hirsutum
  Clone ID: LIB3582-006-P1-K1-F4.pep
FVDGWNGLRFDYGNFYASKTFFDPSKNRRILWGWTNESDTAQDDVQKGWAGLQAIPRKVWLDPSGKQLLQWPIEEIETLRGQNVQLSNQELKSGEHIEVKAITAAQADVDITFSIPNLDKAEPFDPSWTNAQDLCGLKGSTVQGGVGPFGLLTLASEKLEEYTPVFFRVFTGLYKHCCLLC

SEQ ID NO: 105250 - protein, 80 aa, Gossypium hirsutum
  Clone ID: LIB3582-006-P1-K1-F6.pep
SLIASVGDKSIAHTCAYMPRQGCSIGALKCILLLRASQRGDCIYQNGTQLVAFVHTMVMLQMLTLRRAEDEPHLPMTRED

SEQ ID NO: 105251 - protein, 152 aa, Gossypium hirsutum
  Clone ID: LIB3582-006-P1-K1-F9.pep
MDHEASQSKQDRSRTRWTASLDRIFADLVVKQIQLGNKPNNVSDKKTWNIIRDEFNEQTDLNFNNNQLRKHLYVLRIRIYNLKSAYDQNDFASMEDSSCIGFDLWEGIGAQPKPEPIKINDLPIYEPLCTIFTDSSADGKYAQSSHLEGLGK

SEQ ID NO: 105252 - protein, 86 aa, Gossypium hirsutum
  Clone ID: LIB3582-006-P1-K1-G4.pep
FVRVCDMNTALSEMLQCSDLTVLERQMALLKWLEEHFQQHLQQLSYISELSCGECYSQTNYVQIFHGVFMTGATGDSLLSDMVIDR

SEQ ID NO: 105253 - protein, 83 aa, Gossypium hirsutum
  Clone ID: LIB3582-006-P1-K1-G8.pep
SVSPPGLTLYSSMLSCVRRGLVRLRLVSSFIFGASRWRGRMMVWWFAVIVAMRNWCDAHVVADECQQTFVGLVRWVGASFSRA

SEQ ID NO: 105254 - protein, 75 aa, Gossypium hirsutum
  Clone ID: LIB3582-006-P1-K1-H2.pep
PRVRPRVREGLAARVVDRQQVHRTISNEEMLHLFEFGEEDNFYTLMELSEENGNQNMASEVRKSLNPKIPLSHGS

SEQ ID NO: 105255 - protein, 184 aa, Gossypium hirsutum
  Clone ID: LIB3582-006-P1-K1-H5.pep
PRVRKQQMRQHGAKKRERAMAYSVSRSYGNGSPNFRANKQQPLSRMHHQRLHMDSPDWDWLDRWMSTKPCETRTIEEPDSTVSRKSEDNIVSFHSTSSEQRGSLKLKTKNPKTSILTRPANQTSCSSSAPSSESVNDKSSTSTSSASVSPTTLSSNTIVVVTLNDSNHTQKPSYMNPTESIKAK

SEQ ID NO: 105256 - protein, 57 aa, Gossypium hirsutum
  Clone ID: LIB3582-006-P1-K1-H6.pep
DHVGGEVHIGELTSGAGMNQRVSERYIRVALREIELMAACPPIHVHPATMVERDWTA

SEQ ID NO: 105257 - protein, 75 aa, Gossypium hirsutum
  unsure (1)..(75): unsure at all Xaa locations
  Clone ID: LIB3582-006-P1-K1-H9.pep
PRVRRXGRXXARGAXQSEDXEXGXEKXXNTTXXXRTXXXKDDXXHGQXKHHEXKXKDXKXXTXXEKXDTGXGNKN

SEQ ID NO: 105258 - protein, 64 aa, Gossypium hirsutum
  Clone ID: LIB3582-007-P1-K1-B10.pep
GFWNQNPNQISTLSLFWHALFIWGVVIHAFILKKTLSCVVCWDDSVVCSYMMLTKSKPYLCLNL

SEQ ID NO: 105259 - protein, 98 aa, Gossypium hirsutum
  Clone ID: LIB3582-007-P1-K1-B9.pep
HASALKNDLKLSCAIVPKKYIFLIVILTILKHDNIRFNRINFYFGFLVLLYLLVSCSNIALRDGISGDTSIAPDGISNGYDSSFSAMHNFFQVLFYLV

SEQ ID NO: 105260 - protein, 35 aa, Gossypium hirsutum
  Clone ID: LIB3582-007-P1-K1-C1.pep
IIKFREKFSILSVKFLDSINKIKKLKMFYKDIIKY

SEQ ID NO: 105261 - protein, 77 aa, Gossypium hirsutum
  Clone ID: LIB3582-007-P1-K1-C3.pep
KKFIRRTTFKRLAQFEDLTYSFLILLALNFRFEERFFYFTGNVVFTNFTGKVFFFSNQQLKCFSAIDVMVLTAVPVR

SEQ ID NO: 105262 - protein, 54 aa, Gossypium hirsutum
  Clone ID: LIB3582-007-P1-K1-C8.pep
HASAPPLDDCFLSYLDFPLLFKYLHLAGENANSRCHCQVKLQLLSEPNPSFLKF

SEQ ID NO: 105263 - protein, 168 aa, Gossypium hirsutum
  Clone ID: LIB3582-007-P1-K1-D2.pep
MKNARILTVEVPRGRSNEKIKAVWDRNLTMIFCDLCIKEKDHNCRRGTYFKKEGWSRLVANFNKETGKEYEKSQLKNRWDLLKKEWKLWKQLKGNDTCLGWDPNKNNIDTSEAWWEKKLKLMPEATKFKNGGIDPELENKLDWMFQGINDDVTFTPTFGLPSIDGTDD

SEQ ID NO: 105264 - protein, 91 aa, Gossypium hirsutum
  Clone ID: LIB3582-007-P1-K1-E1.pep
MESSVGSNSHGNLDEQISQLMQCKPLSEQEVRALCDKAKEILMDESNVQPVKSPVTICGDIHGQFHDLAELFRIGGKVIFLIEAAFFVFQM

SEQ ID NO: 105265 - protein, 112 aa, Gossypium hirsutum
  Clone ID: LIB3582-007-P1-K1-E11.pep
TGLDLAKRVKKQIEEYEGVQAVKAPPNVNRNQWNQEDITVQAHHTLIGHRGIKKTYRDYRSSSMQHSTIQVFSQRRVWWLRARGENYWYPNRLFTTMCRHHLQQRHSHALKL

SEQ ID NO: 105266 - protein, 197 aa, Gossypium hirsutum
  Clone ID: LIB3582-007-P1-K1-E3.pep
RPILLYMTGHGGDEFLKFQDSEELQSHDLADAVKQMKEKHRFKELLIMVDTCQAATLFNQLQSPGVLAIGSSMKGENSYSHHLDSDVGVSVVDRFTYYTLAFFERLNIYDNASLSSLFSSYNPSLLMSTAYYRKDLYKRRLEEVPVTNFFGSVMETIHTDAAYKALSRRNSGRFEDEMSLDQSVHHIKRRMLIKVND

SEQ ID NO: 105267 - protein, 73 aa, Gossypium hirsutum
  Clone ID: LIB3582-007-P1-K1-E9.pep
FLFGKFMFTGNYLQICPLFLLATNKHLSQLLWLSFLIFVTIICSASHESKLVVQSVSLPFISMDPLLFSLTVG

SEQ ID NO: 105268 - protein, 60 aa, Gossypium hirsutum
  unsure (1)..(60): unsure at all Xaa locations
  Clone ID: LIB3582-007-P1-K1-F8.pep
RTFHXQCGECNITLEDVVLKLRLPFDKSAIKGISTISKPIALCYNLLGFSLNITESKFQV

SEQ ID NO: 105269 - protein, 195 aa, Gossypium hirsutum
  Clone ID: LIB3582-007-P1-K1-F9.pep
EKLGEDAPINELVDFITAAQIAEKLEESVDSLSCEEENDQNATNETLFGTMEKTLSLLEMGFSENEVSIAIEKFGSDVPITELADAMFTGHLSRSYIESKKLKSAASGSGLIHNVNEREDIETEDCSTTPVPQSGNINLGESSSKGKRPKEESLDGIPISNPQMKQSLNEKKREGKRPKQDHVGNASSFIDPPWL

SEQ ID NO: 105270 - protein, 173 aa, Gossypium hirsutum
  Clone ID: LIB3582-007-P1-K1-G9.pep
MFSDMSDLRETWLSPTTLFLFLDIMVGTIFFISRITPHRTPYVADDGNSSSSSSPSLDRSLSFFGRVTSFNFSTYSFPISSQDVNHHFLQTDDGSAAHQVERAPSILERVKSNFYKYSPQSPETDCIEPAQQSLISRAPSLLERVKSFYKPDTVKPNETEPTVTDSNGSETGL

SEQ ID NO: 105271 - protein, 48 aa, Gossypium hirsutum
  Clone ID: LIB3582-007-P1-K1-H1.pep
LVKLYIALLISKETMTFIDAVQFEQNIVYLFIHFGIQDEQNLVMYLLF

SEQ ID NO: 105272 - protein, 187 aa, Gossypium hirsutum
  unsure (1)..(187): unsure at all Xaa locations
  Clone ID: LIB3582-007-P1-K1-H11.pep
SLIVFLENHGFSQTQIANLIKRQPTLLLSDTEKTLLPKLEFLYSIGFSRPELAKLLSSYPLLLKSSLKKQIIPSFNLLRNLFQSHDKTVKAIKRYTGILVYDSESYLCPNMNKRGIGVPESNILMLLNCQPRALLFNPVRLKEIVEEIKRMGIDSSTKKLLIAVRALRSMTKSTLEKKXDVYRRWGW

SEQ ID NO: 105273 - protein, 191 aa, Gossypium hirsutum
  unsure (1)..(191): unsure at all Xaa locations
  Clone ID: LIB3582-007-P1-K1-H9.pep
LKQITKSNKLKGNVEGSSTRNSVAMKAKLAWSILHSLLHSDRILYRQNGFIWLGDLLIAEISDSRNGSIWSNVRSLQNKIAYAGVHDSSDPSDIPLSIWLMCGLLKSKNNSIRWGFLVVLERLLMRCKFLLDESEMQQPSNSDVSPDNRDTRLEKAITVIDIMSSALSLVAQINETDRINIXKMCDILFSQ

SEQ ID NO: 105274 - protein, 138 aa, Gossypium hirsutum
  Clone ID: LIB3582-009-P1-K1-A1.pep
GRVGPEENAFWTLVGIIDDYFDGYYSEEMIASQVDQLVFEELMRERFPKLVNHLDYLGVQVAWVTGPWFLSIFMNMLPWESVLRVWDVLLYEGNRVMLFRTALALMELYGPALVTSKDAGDAVTLLQSLACSTFDSSQ

SEQ ID NO: 105275 - protein, 54 aa, Gossypium hirsutum
  Clone ID: LIB3582-009-P1-K1-A11.pep
ELMLEVDMLNVLHHRKTLKALGDYNRRNYSQHLLGYQRAPHESSESWFHGMLTV

SEQ ID NO: 105276 - protein, 41 aa, Gossypium hirsutum
  unsure (1)..(41): unsure at all Xaa locations
  Clone ID: LIB3582-009-P1-K1-B12.pep
TRPLSLIHGTSLLLKPCQVINITARQRCIHRQFLHYIXHHV

SEQ ID NO: 105277 - protein, 67 aa, Gossypium hirsutum
  Clone ID: LIB3582-009-P1-K1-B3.pep
HFLLPYAHAVLLQEMKFENNCLYLFFRFVGRSQASSSQFMGKEFEVCSGSCCFCSVPDSGNLRHSMA

SEQ ID NO: 105278 - protein, 41 aa, Gossypium hirsutum
  Clone ID: LIB3582-009-P1-K1-B6.pep
TKTTKINETKTSQKSKCFITPNPIIKTIQISIVEQLTGRVG

SEQ ID NO: 105279 - protein, 102 aa, Gossypium hirsutum
  Clone ID: LIB3582-009-P1-K1-B7.pep
AFKPPANTAVPLNGSQKRTAPGPVVGWPPIRSIRKNLANSSSSKLASESPTHKAANEKPAAEPNGKGLFVKINMDGVPIGRKVDLKAYDSYEKLSTAVDELF

SEQ ID NO: 105280 - protein, 67 aa, Gossypium hirsutum
  Clone ID: LIB3582-009-P1-K1-C12.pep
FHVHSFSVRHEAEISVMLTVLEGLIRDGILSLFFKTSRAATCTARGFNTSWYVAEINVMVGESEYRS

SEQ ID NO: 105281 - protein, 52 aa, Gossypium hirsutum
  Clone ID: LIB3582-009-P1-K1-C4.pep
MATNPSLLSLYLVSVSNGCLARQTSASQQLLNECHINRLRAYAPHTGIRSEA

SEQ ID NO: 105282 - protein, 126 aa, Gossypium hirsutum
  unsure (1)..(126): unsure at all Xaa locations
  Clone ID: LIB3582-009-P1-K1-C5.pep
QLVQVTSSSVRLVSSTSRELRNEWHAPSGYSVNVATANATQVLLATGGGHLVYLEIGDGTLTEVKHAQLEYEISCLDINPIGENSNYSHLAAVGMWTDISVRIFSLPXLDLITKEQLGGEIILNLS

SEQ ID NO: 105283 - protein, 106 aa, Gossypium hirsutum
  Clone ID: LIB3582-009-P1-K1-C7.pep
EEVKTVEAIRMEHEKRVAQLRKLELKRADYVKTEKTKKEAEKLESQMMVSSQAIETISAEIIKLRELELYPQLLDLVNGLMWMWRNMYEIHQVHTHIVQQLKYLNF

SEQ ID NO: 105284 - protein, 92 aa, Gossypium hirsutum
  Clone ID: LIB3582-009-P1-K1-D1.pep
EVLKAAQEGTKHNRGALIVGYNALHKGHGWNNVDELKTHFLPIGDGLLVIRKAPTRKGAGDGFNSRKRSRWVVKIDKWTGEEHVFRITSPCF

SEQ ID NO: 105285 - protein, 130 aa, Gossypium hirsutum
  Clone ID: LIB3582-009-P1-K1-D11.pep
YEHFHKFSSLLFSTISPQKPAKNMEFQTQNGQTLVPHHEPQVFPECYESTSSTPYASAPSSPGRAPGPGPGFINSGFFYSAPASPMHFAMTSSVVASSRVSSSTQPSSSDFRVSAGSDLQGRSNRIHEPS

SEQ ID NO: 105286 - protein, 112 aa, Gossypium hirsutum
  Clone ID: LIB3582-009-P1-K1-E1.pep
MGSDSKIHTFEEVAKHNKNEDCWLIISGKVYDVTPFMSDHPGGGEVLLSATGKDGTNDFEDIGHSEDARKMMEKYYIGEIDEETGPQKRTYIPPHQMSNDTGSEFFIKLLQF

SEQ ID NO: 105287 - protein, 92 aa, Gossypium hirsutum
  unsure (1)..(92): unsure at all Xaa locations
  Clone ID: LIB3582-009-P1-K1-E11.pep
TPTYCFLCDFCFSAVFSISQNMPQDLPGFYYDAEKNRYFPNKPRIPGSSSFXNASPSQNNPLSSSLQATKLCPKTRVPASKLLHLRELNGNA

SEQ ID NO: 105288 - protein, 56 aa, Gossypium hirsutum
  Clone ID: LIB3582-009-P1-K1-E2.pep
FRTGRPTFYIHYLMIISYLDHPTSDIERLKSLILVCHIIHALLGHPTSVIEHCKSF

SEQ ID NO: 105289 - protein, 84 aa, Gossypium hirsutum
  Clone ID: LIB3582-009-P1-K1-F11.pep
MGGSHSREELISDSDEEEYEEEEENYQDSKDDTPERSSSGRRPKTPSSLDEVAAKLEALKLKYPTSNTPNPSLKNAVKLYLHIG

SEQ ID NO: 105290 - protein, 110 aa, Gossypium hirsutum
  unsure (1)..(110): unsure at all Xaa locations
  Clone ID: LIB3582-009-P1-K1-F2.pep
PTRPKVLINHCCNVGQLDKAHELLEEMTQTHWQRHISGYRKIIEGFNKDFIMSLGLLDEVRKSESLPVIPLYRMLSNSFMKAXRLDAALQLHQELASFSQVSTAYYSTCN

SEQ ID NO: 105291 - protein, 105 aa, Gossypium hirsutum
  Clone ID: LIB3582-009-P1-K1-F5.pep
HASADAWGPAVPLQVETTNDSGSMTRLVTPRMGLDANLAGENDGVEADDVSNHNVHSRHVFRMSSTSPSSESPLRRPTYIQHNVVSHPSRTSMGVTGSPSRFAPT

SEQ ID NO: 105292 - protein, 57 aa, Gossypium hirsutum
  Clone ID: LIB3582-009-P1-K1-G1.pep
SHFLFFAFCKCWWSKLILHFLCCKDLQLKLFTSNLLLLSFFRDRLSIGVFVLYPQIQ

SEQ ID NO: 105293 - protein, 51 aa, Gossypium hirsutum
  Clone ID: LIB3582-009-P1-K1-G2.pep
ATEATDERLKMVTFVEHIEPGDHTRHTGDRYVTRVAYTADHLEHATRLAVG

SEQ ID NO: 105294 - protein, 107 aa, Gossypium hirsutum
  unsure (1)..(107): unsure at all Xaa locations
  Clone ID: LIB3582-009-P1-K1-H11.pep
GTLIALAALSKDQLLNMLRSAALLCPIAYMGQMTSPLAKNAADNFIAEAVYWLGLSEFDPRGDAVVNLLKDICSKPGIDCTKLLTSXTGKNCCLNSFISNIFLDHEP

SEQ ID NO: 105295 - protein, 59 aa, Gossypium hirsutum
  Clone ID: LIB3584-016-P1-K1-A1.pep
KNAGIILFFLAIVLFLGSIVLGGFGWSSFSHPLLEVKNTKLYQIVFLNGFGWCWCYYSL

SEQ ID NO: 105296 - protein, 164 aa, Gossypium hirsutum
  Clone ID: LIB3584-016-P1-K1-A5.pep
GSNEILGIERSVEEWDAKRVLVGAGGGALFYPTLFYNVVRNKIQPEFRWWDRVDEFILLGAVPFPTDVPRLKENGVRGVITLNEPYETLVPTSLYHNYGINHLVIPTRDYYFAPSLTSICQAIDFIHRNVSLGQATYVHCKTGRWPNTTIVLCYLVYYKADDTC

SEQ ID NO: 105297 - protein, 72 aa, Gossypium hirsutum
  Clone ID: LIB3584-016-P1-K1-D3.pep
KCQPSRTFAKFYKCFMLWLGSNANTSIQPTKDVNNKHIKKNQHFKDCRKQKISTERALHEIDDTHLKLLAHI

SEQ ID NO: 105298 - protein, 169 aa, Gossypium hirsutum
  Clone ID: LIB3584-016-P1-K1-D4.pep
RPRVRELANQGNQLPSHLLLHLKNFKRSESCVRVIKCNVEEVEGIEPQAVKICSVARKMWRMYQADVNSIMLKVPSSQRYVYFSGSENDRKSVHALKKSIIKSRELSSSSSALEETKFVRHSVNFMKIWSSERELKGRCSLCRKKASDDGGLCNIWRPICPDGYVSVGD

SEQ ID NO: 105299 - protein, 108 aa, Gossypium hirsutum
  Clone ID: LIB3584-016-P1-K1-D8.pep
MSLFWVMIPQLAEIQEQMASSKKVIMREEWEKRLNHIRIRKEDMNKLVMNFLVTEGYAEAWAKFRMETGTEPDMDVAMIMDRMAVKEAVQCGNVEDAIEKVNDLNSEI

SEQ ID NO: 105300 - protein, 51 aa, Gossypium hirsutum
  Clone ID: LIB3584-016-P1-K1-E7.pep
NKQEPQSYTKNCHKYACPSISQKRIGGTSPHSPYQNKDRVKDLLQQALLPP

SEQ ID NO: 105301 - protein, 120 aa, Gossypium hirsutum
  Clone ID: LIB3584-016-P1-K1-F11.pep
EVKAREGVKIEHEKKLSALQSQEYKGEDETKIDKTKASITRLQSLIIVTSQAVTTTSTAIVGLRDSDLVPQLVQICRAFRSMWASMHQYHEVQNNIVHQVPGLINRSGKGGSTFELHLPA

SEQ ID NO: 105302 - protein, 143 aa, Gossypium hirsutum
  Clone ID: LIB3584-016-P1-K1-F12.pep
PRVRNCPVGVASQREELRARFAGVPGDLVNFFLYVAEEVRGMLAQLGYEKLDDIIGRTDLLKPRDISLVKTQHLDLNYILSNVGLPKWSSTAIRTQEVHSNGSVLDAILLSDPEVSHAIENEKEVHKTLKIYNVDRACCGRIA

SEQ ID NO: 105303 - protein, 55 aa, Gossypium hirsutum
  Clone ID: LIB3584-016-P1-K1-G4.pep
SRGIDQGLLPRCWHGYCQSVVACSAHAWLSHRVSVPWSLASENDHPCLFGSLRAF

SEQ ID NO: 105304 - protein, 57 aa, Gossypium hirsutum
  Clone ID: LIB3584-016-P1-K1-H11.pep
KKKTALAIAIKSSKLIGEKLSSKLNTNNIHSLKAPFGLFFVLLISISISPTHFSFLI

SEQ ID NO: 105305 - protein, 150 aa, Gossypium hirsutum
  Clone ID: LIB3584-020-P1-K1-A5.pep
PKFEDQWSKGNWSGGCERRTELECQRGKPDGFKRMKCMKLPDFSNLVPVKSRDDCRQSCLGNCSCTAYAYVYGIKCMIWIGDLVDVQHIDQSGNLEFFYRLNHSDLDDKKKISNGVIVIISVVGACFLVAFLWLLWRYKKKLKVSLMVCC

SEQ ID NO: 105306 - protein, 128 aa, Gossypium hirsutum
  Clone ID: LIB3584-020-P1-K1-A7.pep
VANPPLLNSRTLSRELLSSLFDRLSLLISEPDFRERIVDAVNDRHAPVAVTTRVQEEILLEIGVEPSSRLACLGNVIMTCENDHDWLIRYSRFVANEAVACDAAGLGPEGFAVQLHGYLQLPEQLLEM

SEQ ID NO: 105307 - protein, 134 aa, Gossypium hirsutum
  Clone ID: LIB3584-020-P1-K1-B1.pep
MDDVDDDDNDELDDEEDGDEDDYDENGDKQKGYDGKNDDVDMERHPKKRKLKSLLSSYEFAPRVPAPAVSAPSVPKPSFGGRNSLTDWTERETFVLLDAWGDLFLRRGRKSLRSEEWQEVAEKVSEVSKIERTD

SEQ ID NO: 105308 - protein, 88 aa, Gossypium hirsutum
  Clone ID: LIB3584-020-P1-K1-B10.pep
KRLYRSKASSLNLVLFIKGVGSSFLYMLSSVSELVCYKSRKFVSLWLENYYVSGKLLCFFVAGKLLCFFVAEKLLCFFVAGKLCFFCF

SEQ ID NO: 105309 - protein, 119 aa, Gossypium hirsutum
  unsure (1)..(119): unsure at all Xaa locations
  Clone ID: LIB3584-020-P1-K1-B12.pep
NQKPQKXXTNKAPAKNDKXNKKRXKXNNKQSXNPXXPQXKXHGNRGRKXRGTXXXXXRXNGXQXXXXXTXRXXXGRXSXQRKEEXGXXGXHTTXGHXDIXKXXXXHXXXXXGKLXRTRG

SEQ ID NO: 105310 - protein, 41 aa, Gossypium hirsutum
  Clone ID: LIB3584-020-P1-K1-B8.pep
TAGFTHPKAGSSMHLAEALLQTAEKFHQNTLEYMIMKSMSA

SEQ ID NO: 105311 - protein, 124 aa, Gossypium hirsutum
  Clone ID: LIB3584-020-P1-K1-C12.pep
MASLIARAFGSLLSVIAYCIYGYRGKKKSVSTNINYCNFNMPKGRPPLSLQTVDLKVRMCCTGCERIVKNAIYKLRGIDSVEVDLEMEKVTVIGYVDRNKVLKRVRRAGKRAEFWPYPDPPLYF

SEQ ID NO: 105312 - protein, 157 aa, Gossypium hirsutum
  unsure (1)..(157): unsure at all Xaa locations
  Clone ID: LIB3584-020-P1-K1-C9.pep
PTRPLLMKRGGQVIYSGPLGRNSHKIIEYFESIPGIPKIKEKYNPATWMLEVSSVAAEVRLGMDXAEHYKSSSLYQRNKALVNELSTPPXGAKDLYFATQYSQSAWGQFKSCLWKQWWTYWRSPDYNLVRYFFTLVSALMVGTIFWQVGTKKDTTTD

SEQ ID NO: 105313 - protein, 179 aa, Gossypium hirsutum
  unsure (1)..(179): unsure at all Xaa locations
  Clone ID: LIB3584-020-P1-K1-E3.pep
GRVGDPGKSDAFSSTNDLQMPSQSTVTTEPFKISQSEVLDAQKSSGRHSSTSAEINENTRPRDVSVNQYKVGSNMQPPASPVTTWGMDTIDTAWRSGPETTSTNCGPVHGNKNFSWRGLGEGNTNVSRGTGQGTFQENSSINAGTSGENLAYWGSQQRYVSPRHRDFQGRDSSSAXGSD

SEQ ID NO: 105314 - protein, 83 aa, Gossypium hirsutum
  unsure (1)..(83): unsure at all Xaa locations
  Clone ID: LIB3584-020-P1-K1-F2.pep
IAHEPLRELFPVARRQHVLALVPMIAREVMLDAVQPVSLHMRDILPAAEAMNGAKMEAGDAELPLXKGSCATAHAVDACTWVE

SEQ ID NO: 105315 - protein, 133 aa, Gossypium hirsutum
  Clone ID: LIB3584-020-P1-K1-G1.pep
WVWSGFDLEPGQEPLSWNNRIKIAVGAARGIEYLHCKANPPVIYRDLKSANILLDNDFNPKLSDFGLAKLGPVGDNTHVSTRVMGTYGYCAPEYAMSGKLTLKSDIYSFGVVLLELITGRKAIDTSKKNGEEN

SEQ ID NO: 105316 - protein, 82 aa, Gossypium hirsutum
  unsure (1)..(82): unsure at all Xaa locations
  Clone ID: LIB3584-020-P1-K1-G8.pep
ITTARKAVTLLLSYMIFTKPXAEQHGSGLLLIAMGILLKMLPDSKPAPWIPTSNVNARHHRETSSEEVESVELEDEEKKPLV

SEQ ID NO: 105317 - protein, 102 aa, Gossypium hirsutum
  unsure (1)..(102): unsure at all Xaa locations
  Clone ID: LIB3584-020-P1-K1-G9.pep
MAEEHRCQAPPQCANNCGFFGNPATQNLCSQCYRHLQHLKEQGSSSAAKQAFNQAPLPSFSSSSSAXSVSLAVKHEPLAETKEEVVQAEVQVHVQVPPNRCM

SEQ ID NO: 105318 - protein, 101 aa, Gossypium hirsutum
  unsure (1)..(101): unsure at all Xaa locations
  Clone ID: LIB3584-020-P1-K1-H9.pep
RTGRTXGGWXQXYGXRXXKPPXRDXXESRPKPTTRXXXXTAQSXXARPXKGRXTGXXTXXNXAPXRKXQPRXEXXXQXAXASKDEXEXXEKAXXKGXQXDE

SEQ ID NO: 105319 - protein, 87 aa, Gossypium hirsutum
  unsure (1)..(87): unsure at all Xaa locations
  Clone ID: LIB3584-021-P1-K1-B1.pep
DVGDENXETIIDERKIRIKPVPKKANPKPCEAADELPVSDVGLVRRNSSYLDTYLDPAVMSLIKDPDQSGRNSGNKLIKHKGDAIVL

SEQ ID NO: 105320 - protein, 128 aa, Gossypium hirsutum
  unsure (1)..(128): unsure at all Xaa locations
  Clone ID: LIB3584-021-P1-K1-B3.pep
PRVRPRVRFKEPPXDIKEPPASSSETLENGALEEGKQPLLITSEEKQEDDEDPEGDGSEEAPEESRQPAXSIVSAYRLLTPSVKVQLLIYFMLKYAMEILLSESSVITTYYFTWSTSTVSIFLACLGL

SEQ ID NO: 105321 - protein, 55 aa, Gossypium hirsutum
  Clone ID: LIB3584-021-P1-K1-B6.pep
SKIAAITVANTEHGCAGATSFQSVAVNSLPRTCIIILHYSILKCWRSSMLFKCQN

SEQ ID NO: 105322 - protein, 60 aa, Gossypium hirsutum
  Clone ID: LIB3584-021-P1-K1-C1.pep
RVRPHTLVHSWTCWLEHALARSKHASWRWSMRPIYTFFNIEQLWSVYNDIHAPSTIAAGA

SEQ ID NO: 105323 - protein, 157 aa, Gossypium hirsutum
  unsure (1)..(157): unsure at all Xaa locations
  Clone ID: LIB3584-021-P1-K1-C8.pep
MGGGSVDSTLSFVRKLVHWSKENEETCTPFVLCSDPVLNRELLSLERNSSTLCSRNARSQFDHSPIVXNLLSKRVFLEKSGAQCIVVPCHISHSWHDEVFNGCSIPSLHMAECVSRELKEAKLKPLEAGSPLRIGVLATDVTLKAGFYQEKLENEGF

SEQ ID NO: 105324 - protein, 50 aa, Gossypium hirsutum
  Clone ID: LIB3584-021-P1-K1-E6.pep
RTRGRTRGLASSFLLAFPEIFKGMMGLSGGLLYTKAILHMGIIPMLECTI

SEQ ID NO: 105325 - protein, 81 aa, Gossypium hirsutum
  Clone ID: LIB3584-021-P1-K1-F10.pep
HGIQPRTLLPVLHPTVFTCIMHEEDPTKLAIIFAGQSFWRDCFAFIPYLMIQKKLHPFVELLAILRSPIMSTTTKVQCRCC

SEQ ID NO: 105326 - protein, 139 aa, Gossypium hirsutum
  unsure (1)..(139): unsure at all Xaa locations
  Clone ID: LIB3584-021-P1-K1-F11.pep
MYGSDGTAGIAGXTNQLEDMEHFGDVGSLDDNAESLLSHDDGHGGNMDGTLKRHPSXAHTETPKSFGFNEVGSIRKSNGKVTCCHFSSDGKLLASAGHDKKAALXNMEILKTDCTTEEHTHIITDIRFRTNSNQLATSS

SEQ ID NO: 105327 - protein, 96 aa, Gossypium hirsutum
  unsure (1)..(96): unsure at all Xaa locations
  Clone ID: LIB3584-021-P1-K1-F3.pep
TRGRTREFPEDICEAFQEMRDRKVFDVEDMYTIADAWGWTWERELKNKPPRRWSQEWEVVLAIQVMHKXIELGGTPTIGDCAMILRATINAPVPSA

SEQ ID NO: 105328 - protein, 101 aa, Gossypium hirsutum
  Clone ID: LIB3584-021-P1-K1-F9.pep
VCFSIPGSPRFGGFTWFGQSIASKSSLLSGLYTVSASISCTGPSQSFMMLESLHMIPTFHFPRISSRSKHPWHDMQPEHTVLRHGFCFAMGTGTNYEEEKK

SEQ ID NO: 105329 - protein, 108 aa, Gossypium hirsutum
  unsure (1)..(108): unsure at all Xaa locations
  Clone ID: LIB3584-021-P1-K1-G10.pep
FFXVXFLVFAXFLXXFGFXVCCSRVFFFPXVSXVAPXGXXGFXVSPLVXXAXSSSGXCLXXAXXALLXAWCSXGXLVLXXXAXXWXSGLXFCXASLALXASRSAXRVG

SEQ ID NO: 105330 - protein, 121 aa, Gossypium hirsutum
  unsure (1)..(121): unsure at all Xaa locations
  Clone ID: LIB3584-021-P1-K1-G11.pep
MYKAPIFSHNVPSTDFLLVRSPKGKLSIRRIDRIAVVGQQEPLMEVFXPGSKNIQTYLMNRMLVYVYREFSASAKRGLIPFMGTDELFTHFPNLSDAIVRKKLKECAYLRRDKNGRQIWSM

SEQ ID NO: 105331 - protein, 164 aa, Gossypium hirsutum
  Clone ID: LIB3584-021-P1-K1-G2.pep
QFDLEKASDVIVGKVEEFMDKLGNARLVLVDLTERSKILSLVRAKAAEKKIDSKRFFTFIGDICQLYTKGGLCCNVIANAANWRLKPGGGGVNAAIFNAGGPALEAATKEQARSLLPGNALVVPLPSTSPLYSKEGVTHVIHVLGPNMNPRRPNCLDNDYVKGC

SEQ ID NO: 105332 - protein, 135 aa, Gossypium hirsutum
  unsure (1)..(135): unsure at all Xaa locations
  Clone ID: LIB3584-021-P1-K1-G5.pep
SESGHRVLXFSQWTSMLDILEGTLDVIGVTYKRFDGSTQVTDRQTIVDDFNNDTSIFVCLLSTRAGGXGLNLTGADTVIIHDMDFNXQIDRQAEDRCHRIGQXRPSTIYRLVTKSTVDENVYEIAKRKLTLDASM

SEQ ID NO: 105333 - protein, 92 aa, Gossypium hirsutum
  unsure (1)..(92): unsure at all Xaa locations
  Clone ID: LIB3584-021-P1-K1-G9.pep
DPRAGKKRSRKDXEXGQSKEPGXAXKAAKTXXXXGPNEQTGXPXXXQSAXXXTXQRXEERXTXXNTEQEXXXXHQEXEXENXXSKQTERXTA

SEQ ID NO: 105334 - protein, 52 aa, Gossypium hirsutum
  unsure (1)..(52): unsure at all Xaa locations
  Clone ID: LIB3584-021-P1-K1-H9.pep
AFXVLFXXXLXGXFCFMVLXXXLPFAXAFXLPLXCFLRXPCSCFFSXALXAX

SEQ ID NO: 105335 - protein, 76 aa, Gossypium hirsutum
  Clone ID: LIB3585-058-P1-K1-A3.pep
MSSSWSSILTNYPLISAFIAFVIAQTIKFFTSWYKEKQWDLKQLVGSGGMPSSHSSTVTALATAIGFQESFGGALF

SEQ ID NO: 105336 - protein, 128 aa, Gossypium hirsutum
  Clone ID: LIB3585-058-P1-K1-A4.pep
ETEPLTIVEAFQSPAWTKAAQEEYRALLANHTWDLMPLPDSRKAVGCKWVFKLKRHADGSIARHKGRLVVKGYLQEAGIDFHETFSPVVKPTTIRVVLALAVSFNWSLRQVDINNAFLNGNLREEIYM

SEQ ID NO: 105337 - protein, 73 aa, Gossypium hirsutum
  unsure (1)..(73): unsure at all Xaa locations
  Clone ID: LIB3585-058-P1-K1-B10.pep
KWIKAVNLLVNPPLLAIAPLLTIEIITLNTLTSFPIRYLNPFFXPPXAAVGGFRRWSVHKEASFGPAQNLTQA

SEQ ID NO: 105338 - protein, 118 aa, Gossypium hirsutum
  Clone ID: LIB3585-058-P1-K1-B4.pep
PRVREVNPISKKEIKWSDYKKVPILKVDGEQMVDSSDIIDKLFHRINPDSSIRDGEEKKWREWVDNHLVHVLSPNIYRSTSEALESFDYITTHGNFSFTERLVAKYAGAAAMYFVSKK

SEQ ID NO: 105339 - protein, 166 aa, Gossypium hirsutum
  Clone ID: LIB3585-058-P1-K1-B5.pep
MNLLCLLLLPMWQCFLSLLSLVILARTTPVSTVSSFSSQMEAVSPGMAVIKVVHHQDLNKRILVTLIVASTLLCGILLFLLYFWICRHKIMKNSNGEAKRNLEPTKTLSLSPIVDQFNSLPMASKKGSVAVIEYRLLEAATNNFRESNVLGQGGRGRVYKACFDGK

SEQ ID NO: 105340 - protein, 140 aa, Gossypium hirsutum
  Clone ID: LIB3585-058-P1-K1-C1.pep
MAGLFDQQADIYLDARPTYPLQWYSMLAARTLHRSLAWDVGTGNGQAAIGVAEHYEQVIGTDVSEAQLQHAIPHPKVKCLYTPLSISDEELLSSIGGENSVDLITVAQAVHWFDLPKFYSLVTRLLPKPGGIVAVWCYNN

SEQ ID NO: 105341 - protein, 54 aa, Gossypium hirsutum
  Clone ID: LIB3585-058-P1-K1-C10.pep
KGLLCSFFQFRRSNFHFLSRKGKMQYTSSMVLLSKHLCCNKLCAVTIQAAIQAP

SEQ ID NO: 105342 - protein, 149 aa, Gossypium hirsutum
  Clone ID: LIB3585-058-P1-K1-D8.pep
HASADAWVCIEDCYISTGDDLIAIKSGWDEYGISFARPSTNIIIRRLIGHNRNGSGIAIGSEMSGGVSEVYAENLYFFYSSTAITIKTARGRGGYVRNIYILNGTLVGVDTAIRVDRTFFSDSDDFYDPNALPVIERVTIKDVIGNNIK

SEQ ID NO: 105343 - protein, 139 aa, Gossypium hirsutum
  unsure (1)..(139): unsure at all Xaa locations
  Clone ID: LIB3585-058-P1-K1-D9.pep
SSTRPPTRPPTRPPTRPKLFTGSAWTVLSRPFVEFCVWGWDNLPRTLLMYYTNFVSSPEGYFQTVVCNVPEFAKTVVNHDLHYISWDNPPKQHPHMLNINGPNXIVPSHPAFGPKFKHHDPVLDKIDANLLGRAKGRFT

SEQ ID NO: 105344 - protein, 112 aa, Gossypium hirsutum
  Clone ID: LIB3585-058-P1-K1-E8.pep
MNFLIEAFKPACSISIKFSDGKTRKRVPIKRENGQTLLAPLFRNQENIAGKITIEPHQGKRIEHNGVKVELLGQIEMYLDRGNFYDFTSLGEYFLILLLLLLSPPGNCLDVR

SEQ ID NO: 105345 - protein, 189 aa, Gossypium hirsutum
  unsure (1)..(189): unsure at all Xaa locations
  Clone ID: LIB3585-058-P1-K1-F1.pep
LETLILDFNELTGTIPSGLSNCTKLNWVSLSNNRLTGEIPAWFGKFSSLAILKLSNNSFYGRIPPELGDCKSLIWLDLNTNNLNGTIPNVLFKQSGKIAVNFISGKRYMYIKNDGSRECHGSGNLLEFAGIRSEDLNRISDRNPCNFTRVYGGHTQPTFNNNGSMIXLDLSYNXVSGTIPXEVGSMSNL

SEQ ID NO: 105346 - protein, 56 aa, Gossypium hirsutum
  Clone ID: LIB3585-058-P1-K1-F3.pep
LATHSILNNRHQQAKNNANNINVWLLNQESGVPMPNTSTSLKVAMESEVVWYHGFS

SEQ ID NO: 105347 - protein, 177 aa, Gossypium hirsutum
  Clone ID: LIB3585-058-P1-K1-F5.pep
VELLKNDLPREDSAASSQFLDKHGGNKSKINARSESIQAQLEVPTTSVVQRDQNRIVEETGPDDEAQSLIACAGSIKKCENKLMERNSENGEISPAGKWSKFWLGADGEVYLENTATATKGCNPVSEQQSDEPTSGYGLINGNSTRSHSAQRCAGRYNQGLEDITGPKFSINGGAFS

SEQ ID NO: 105348 - protein, 45 aa, Gossypium hirsutum
  unsure (1)..(45): unsure at all Xaa locations
  Clone ID: LIB3585-058-P1-K1-F8.pep
VNVVNGVHCHLYGNVEGVGRPFVLDSAKVMFQVISGYSGFSSXRL

SEQ ID NO: 105349 - protein, 166 aa, Gossypium hirsutum
  unsure (1)..(166): unsure at all Xaa locations
  Clone ID: LIB3585-058-P1-K1-G1.pep
MSFPTVSSPFFFNLSPATSSFLSPRGVVTGLGLVTPLGCGVGTTWKHLIEGKCGIRAVTTEDLKMNAFDKETLTLTFDQLTSKVAAIVPCGTAPGEFNEDLWFNAKDHRSIARFISYALCAADEAXKDAXWAPADQEQEERTGVSIGGGTGSISDILDAAXMICEK

SEQ ID NO: 105350 - protein, 160 aa, Gossypium hirsutum
  Clone ID: LIB3585-058-P1-K1-G9.pep
DPLNLTAMACPAFPLCPLAITEAERGIPDILKRVRSVFEKVGLKYNDSVVIRITGCPNGCARPYMAELGLVGDGPNSYQIWLGGTPNQTQLARSFMDKVKVQDLENVFEPFVYYWEQKRQPKESFGDFTSRIGFEKLKKLVDKWERVMQTPPARYYLKLF

SEQ ID NO: 105351 - protein, 179 aa, Gossypium hirsutum
  Clone ID: LIB3585-058-P1-K1-H1.pep
RPTRTPTRTPTRTPTRTRYQTQFEATLPDIMESFNDLYRSVTGRITAEALKERVLKVLQVWSDWFLFSDAYVNGLRATFLRSGNSGVAPFHSICGDAPEIEKKTSSKDAVDGIKANQDTALAMGKSAAMKEVMDLPLAELERRCRHKGLSLGGGREIMVARLLSLKDAEKQRGYELDDE

SEQ ID NO: 105352 - protein, 62 aa, Gossypium hirsutum
  Clone ID: LIB3585-058-P1-K1-H10.pep
NEPISTPEPWLEARFCQGGIKFNDQQGKPLESGVDRRKEARKEKKREERGSEIRREHKESVK

SEQ ID NO: 105353 - protein, 127 aa, Gossypium hirsutum
  unsure (1)..(127): unsure at all Xaa locations
  Clone ID: LIB3585-058-P1-K1-H12.pep
MTMASRLTLLRRISKLLLSPSLSPSPPLRSSRLLFLLRNASRINVSPWPFASSRSFCSDPLNLPQDSQGPAPIDYRSVLPEDEFHRIANSTIHDLQEKLEEYGDIVDMDGFDVDYGNXVLTLKLGAL

SEQ ID NO: 105354 - protein, 66 aa, Gossypium hirsutum
  Clone ID: LIB3585-058-P1-K1-H4.pep
PNLSLYLFSLIRFFHQKGFLQSSFIFLHRSTSSSFTLTSLSFAFVYLKKHHPLKQRISSKGFPLKP

SEQ ID NO: 105355 - protein, 148 aa, Gossypium hirsutum
  unsure (1)..(148): unsure at all Xaa locations
  Clone ID: LIB3585-059-P1-K1-A1.pep
PPPPSLPPPVYSPPPPPPPVYSPPPPPLSPPPPSPPPPPPPIYSPPPPPPSPPPPSPPPPSPPPPPPTYPSPPPPSPPPPTYPSPPPPSPPPPTYPLPPPPSPSPPAPIYCVRSPPPPPNSPPXPPLLFSPPPPVPYYYNFSSPPHHS

SEQ ID NO: 105356 - protein, 91 aa, Gossypium hirsutum
  Clone ID: LIB3585-059-P1-K1-A10.pep
ELLALEERIGDVSTGLNEETILKLLKQQKYSFTTTESTQELEPCCICQEEYADGDETGTLDCGHDFHTNCIKQGLMLKNLCPICKTTGLLK

SEQ ID NO: 105357 - protein, 75 aa, Gossypium hirsutum
  unsure (1)..(75): unsure at all Xaa locations
  Clone ID: LIB3585-059-P1-K1-A2.pep
SGPXAAXXFLSPXGFFFXASXALXSASSXXXWLCLPLVXXVLFPXAFPPVGPPXLVFAPCFXSFPLXXPLFPWPL

SEQ ID NO: 105358 - protein, 186 aa, Gossypium hirsutum
  unsure (1)..(186): unsure at all Xaa locations
  Clone ID: LIB3585-059-P1-K1-A4.pep
RFGSTAFDSFFLFPHFLVQFYKWFTDLESALRSETEEKYQHYVDTLVDRIQTCDDILRQVDETLDLLNELQLQHQAVETKTKTLHDACNRLVMEKQRLIEFAEALRSKLEYFDELENVRXTSNFYSPNMNVGNANFLPLLKRLDECILYVENNPQYAESSVYLLKFRQLQSRALGMIRSHVVSVLK

SEQ ID NO: 105359 - protein, 81 aa, Gossypium hirsutum
  unsure (1)..(81): unsure at all Xaa locations
  Clone ID: LIB3585-059-P1-K1-B12.pep
TKTILQDIHAXKXGSFVXHILDLNKKQYNQFQLLMQKHNNYETAKRLQYEIQSIKAQKVHYXHMNKHDSIQYRLCKASLYN

SEQ ID NO: 105360 - protein, 122 aa, Gossypium hirsutum
  unsure (1)..(122): unsure at all Xaa locations
  Clone ID: LIB3585-059-P1-K1-C2.pep
IGLNKHYILYYICPMRALVKFSIYPPLPIFNKYNEKPSVISVKFLTYYLLVIFILEIPGFIKIICSPLSFLLRYTDPAKPDLSRLHEWQFISYLYRYIWIIXIIYAYYHPNVYKWIEKLKEC

SEQ ID NO: 105361 - protein, 145 aa, Gossypium hirsutum
  Clone ID: LIB3585-059-P1-K1-C7.pep
LNETVLSNLAIKYKKRAWFSVAKDFSDEAKVLYDMEKVPALVAIHPNYKQQSIFYGLFEGEFLEDFIKQNFLPPVVPLNPETLKLLKDEKRKIVLTITADENEDQTQNLIKLLKAAASTNRDLVFGYFRLKQWEDFADKFGANEK

SEQ ID NO: 105362 - protein, 180 aa, Gossypium hirsutum
  Clone ID: LIB3585-059-P1-K1-C8.pep
AEKFIKALLSIPFAFLRAEAMLFRETFEDEVIHLKNSFSMLEEACKELRSSRLFLKLLEAVLKTGNRMNVGTIRGGATAFKLDTLLKLADVKGTDGKTTLLHFVVQEIIRSEGIRVSDTDTITGKMNESNKSQTAEEKEEDYKRRGLDLVSGLSTELYHVKKTATIDLDVLATSVSNLSN

SEQ ID NO: 105363 - protein, 123 aa, Gossypium hirsutum
  Clone ID: LIB3585-059-P1-K1-D10.pep
FQNLIIWNGDEQYLPVIGYESLDEEEDQSSQISRFLEGYREGRMEKKMIKGPSFMDYMNVIGIAAVFIIVFLVAILMLIRRLSTHDDNKPRKDIYDDDDDDEGEEESPAESPESDYEVRKKED

SEQ ID NO: 105364 - protein, 94 aa, Gossypium hirsutum
  Clone ID: LIB3585-059-P1-K1-D4.pep
SLSHMINKNISLLAVLVECMQTYFFFFDDSFKKIYRIQFKWLQNHLNTLQSSMISCPRLRLLILIIEVTKAFSIASWELADLEINALVFRVVSK

SEQ ID NO: 105365 - protein, 125 aa, Gossypium hirsutum
  Clone ID: LIB3585-059-P1-K1-D5.pep
MGDSEEGNTDLMQRIQSSFGTSSSSIPKQVLSMNHLEIPPLNPNQIRAVRHFSHFGQNFNGGGGGGGGGGDGNKRVGIPPSHPNQIPPISPYSQIPVSRPSSHQMGSSQGFSPGPTHSRSLSQPS

SEQ ID NO: 105366 - protein, 65 aa, Gossypium hirsutum
  Clone ID: LIB3585-059-P1-K1-E2.pep
AHLRLDQLKSKFFQVFVHPPDVFVRSTWRVNLIGELIHYEGYSMLPIAIRQDTIVAIRKHKEREA

SEQ ID NO: 105367 - protein, 39 aa, Gossypium hirsutum
  unsure (1)..(39): unsure at all Xaa locations
  Clone ID: LIB3585-059-P1-K1-F10.pep
LNMDRLASXVLIQNGKSNYRVWVLFLXKMVLQLKVFLCK

SEQ ID NO: 105368 - protein, 183 aa, Gossypium hirsutum
  Clone ID: LIB3585-059-P1-K1-F11.pep
HASAHASAHASAHASEITWRSIFPSCSKGVVKPETKPKKEVTKQSSFNRLAMLELSYPSTMLTEDLSTSLAGSNLHVFTLGELKVITQSFSSSNLLGEGGFGPVHKGFIDDKLRPGLKAQPVAVKLLDLEGLQGHREWLTEVIFLAELRHPHLVKLIGYCCEEEHRLLVYEYMPRGSLENQLF

SEQ ID NO: 105369 - protein, 185 aa, Gossypium hirsutum
  unsure (1)..(185): unsure at all Xaa locations
  Clone ID: LIB3585-059-P1-K1-G10.pep
NVHRQILVAHSRFFAVRLSDRWTKQQRNGSTGPYIVEISDCDDVEVYIETLRLMYCKNLRKKLMREDVSKVLGILKVSAAIGFDAGVLSCLEYLEAAPWAEDEEEKVASLLAELHLENVGAGEVLKRVSVEVANGTDEGGDNEEVLLKLLHVVLEGKDEKARREMKGLVFKMLRENXIYNDLRKE

SEQ ID NO: 105370 - protein, 31 aa, Gossypium hirsutum
  Clone ID: LIB3585-059-P1-K1-H11.pep
ACLLWCDMAGLVVVDLLIQSNELLQIRCTNI

SEQ ID NO: 105371 - protein, 66 aa, Gossypium hirsutum
  Clone ID: LIB3584-017-P1-K1-A9.pep
NTLIHALSLFSKQGLQTFQRTSPLQPKCRLLKSMCNRAFIGVKCPTTSCNYPFISPLKRVNLLKLW

SEQ ID NO: 105372 - protein, 152 aa, Gossypium hirsutum
  unsure (1)..(152): unsure at all Xaa locations
  Clone ID: LIB3584-017-P1-K1-B8.pep
LTAINLENNDLSGIIPNSLGXYETLESLRLRNTSLYGEIPQSLENCTALKLQDLGDNKLTGIIPPWIGERLNGLNVLRLRSNEFHGNIPSTLCRQQLLQVLDLSLNNISGDIPSCLNNLTAMAHLGSSMALIPLAGITYTVDIGAIGINFHE

SEQ ID NO: 105373 - protein, 124 aa, Gossypium hirsutum
  Clone ID: LIB3584-017-P1-K1-C10.pep
MNRGLEVLSPASYLQTSNWLFQESKGTKWTPQENKCFENALALYDKDTPDRWFKVAAMIPGKTVGDVIKQYRELEEDVSDIEAGLIPIPGYSSDSFTLEWVNDGQVFDGFRNYHYTPGGKRGTG

SEQ ID NO: 105374 - protein, 64 aa, Gossypium hirsutum
  Clone ID: LIB3584-017-P1-K1-C7.pep
SYRMTESSPQSRESISALLIHNQKTLLCIDIFIINSLFYQRIFIHAKEKRNKRLPDVFIYVLTS

SEQ ID NO: 105375 - protein, 83 aa, Gossypium hirsutum
  Clone ID: LIB3584-017-P1-K1-C9.pep
SPTLATSHASVWKELEERTFSMNFLNQGLEGKDLNFYWSGIRIFISHHKESFKVYRTDVEQLQEAYSGREITKSDHIIYGAPR

SEQ ID NO: 105376 - protein, 147 aa, Gossypium hirsutum
  unsure (1)..(147): unsure at all Xaa locations
  Clone ID: LIB3584-017-P1-K1-D3.pep
ASGNGIDAFRKIVKTDGPKGLYRGCGISILTYAPSNAVWWASYSVAQRLVWGGIACYIRKKDDESNDNGNIISSSNNNNTIRPDSRTVMAVQGVSAAMAGGVXALITMPLDTIKTRLQVLDGEENGSRGPTIGQTVRNLIKEGGWLA

SEQ ID NO: 105377 - protein, 91 aa, Gossypium hirsutum
  Clone ID: LIB3584-017-P1-K1-D4.pep
ALAIRSLSAISGGHKSIFSKKENAQAALLVASQKTLPVMVAVVQQLGSAFGESGLLVLPCVAAHLIQIVLDSFLANFWLRKELSSNTAKVA

SEQ ID NO: 105378 - protein, 169 aa, Gossypium hirsutum
  unsure (1)..(169): unsure at all Xaa locations
  Clone ID: LIB3584-017-P1-K1-D5.pep
KIGNSMNYDTLEETIMNVQNNVVKXNRIPFSIVVISDREWLLGDPSRADKQSAYSLLLAENICNKLGVTVQNLVAEIVDSKLGKQITRIKPSLTYIAAEEVMSLVTAQVAKHSELNEVWKDILNAESDEIYVKDIGLYMKEGENPSFSELTERACWRQRVAIGYVKDNH

SEQ ID NO: 105379 - protein, 162 aa, Gossypium hirsutum
  Clone ID: LIB3584-017-P1-K1-D6.pep
MPSVSSGSADEKPASGMILNVEPGVAAAAFAAVNQNNESGNMIDPEFLVKILSNPRLIEKLVTDYGVASGAQNLPESTSPLATSPNPPPPVNLSNPFPAHINRTENGTASLSATSSGAFFAQPNGVGVGPSNKQGLTPNPHPISVSPACGLPQKKDVNYYKN

SEQ ID NO: 105380 - protein, 105 aa, Gossypium hirsutum
  unsure (1)..(105): unsure at all Xaa locations
  Clone ID: LIB3584-017-P1-K1-E1.pep
EGECFVFDKRVAVEHGFIQGNFKLCYGCKQPVSDADMEAPEWEYGVSCPYCYSTKSEEEKERARARQRQFRXWGIIGGPDKGRRPAAKADSIKSDQIQTNDSASA

SEQ ID NO: 105381 - protein, 121 aa, Gossypium hirsutum
  Clone ID: LIB3584-017-P1-K1-E8.pep
SPYLEGVYTWSKFLIKIYCKPVDSFAKLRQVKSHECFGRNSTYVYYWAISTGKSLMAIEKMVDGRLRKYFEEVGFMEQKYFLNDSLNIKTILDNVSKEGGSTMKIGNFFKMEVGERIQSQK

SEQ ID NO: 105382 - protein, 168 aa, Gossypium hirsutum
  Clone ID: LIB3584-017-P1-K1-F11.pep
SEVKKHNSADSAWIVVHGHIGDCTRFLKDHPGGADSILINAGTDCTEEFDAIHSDKAKKLLEDYRIGELTTSGYASDSSTSSPNSSVHGASNVMSFLAPIKEAVPTKPVALVPREKIPCKLIQKTSISHDVRVFRFALPSEDQVLGLPVGKHIFLCATIDDKLCMKTY

SEQ ID NO: 105383 - protein, 124 aa, Gossypium hirsutum
  unsure (1)..(124): unsure at all Xaa locations
  Clone ID: LIB3584-017-P1-K1-F2.pep
RPGSIGKWLRCNHGLPYNNDVPTSXAEHANLSAKGYRYLIYSGDHDMVVPHLATQAWIRFLNYQIIDDRRPWMVQSQVAGYTRTYSNRMTIATVKGGGHTAPEYKPAECFAMVTKWISGQPLGL

SEQ ID NO: 105384 - protein, 167 aa, Gossypium hirsutum
  Clone ID: LIB3584-017-P1-K1-G12.pep
DISVGTCNIIAEASHEEVVENSQNQYEAVSSGLELMDECSRMNFNKKSFSMGKFRNQVATDLVQESWKKLRNSHADLKQYVDSEPKDALNILKLTSRMSDLISQADQLLSKCQMQDSLEMLMIPSENSDAFVWRDKQLQMANTISQHGFCLYAKEIDTLRLKMGFEH

SEQ ID NO: 105385 - protein, 157 aa, Gossypium hirsutum
  unsure (1)..(157): unsure at all Xaa locations
  Clone ID: LIB3584-017-P1-K1-H12.pep
MEMGKNKSEKFSMDFVMAGMAAIMSKSAAAPIERVKLLLQNQGEMIKRGSLQKPYNGVGDCFKRVLKDEGLFSFWRGNQANVIRYFPTQAFNXAFKGYFKSIFGRSKEKDGYVMWFAGNVASGSAAGATTSLFLYQLDYARTRXGTDSQRQFKGLLD

SEQ ID NO: 105386 - protein, 48 aa, Gossypium hirsutum
  Clone ID: LIB3584-017-P1-K1-H4.pep
LAPLVLASLFSSYFIACVGSLAKYTRRSLSWTLTALYVFESLIFRFCR

SEQ ID NO: 105387 - protein, 59 aa, Gossypium hirsutum
  Clone ID: LIB3584-017-P1-K1-H5.pep
NNTMRWIHIFLPGIDTNIILLVHLVPLLRTPLPNELKIHCVMSLLLIPSFGYFLENVVL

SEQ ID NO: 105388 - protein, 159 aa, Gossypium hirsutum
  unsure (1)..(159): unsure at all Xaa locations
  Clone ID: LIB3584-017-P1-K1-H7.pep
PTRPPTRPPTRPIKIPVVKINENQHLENKVLSDIPFQKSVSSSCLRSMEWSQGAVIKPNFLDFPGMDFGSVYGMRRAFSEGDIQTLGNGNGSVICSPLERPIMISCCSTEDRKEKLSRYRKXKTKKNFGRKNKYACRKALADSQPKIRGRFAKTEESDN

SEQ ID NO: 105389 - protein, 116 aa, Gossypium hirsutum
  unsure (1)..(116): unsure at all Xaa locations
  Clone ID: LIB3584-017-P1-K1-H8.pep
MQIFVKTLTGKTITLEVEKLHPTDNVXKAKIKDREGXPSDQQRLIFVRKQIEDARTLLDTNIRRVTLNSSSLRVDAIRKPAAEYLSEVATHVTDSRDPKDVFANMNATCAHIKALH

SEQ ID NO: 105390 - protein, 59 aa, Gossypium hirsutum
  Clone ID: LIB3584-018-P1-K1-A4.pep
IPTYRILVMFTVCNVQHYSPYCLALCLIKVSCLLCEQLFLHLSLSGPRTGYNWALGVLK

SEQ ID NO: 105391 - protein, 25 aa, Gossypium hirsutum
  Clone ID: LIB3584-018-P1-K1-A9.pep
HYDSFRASARHLAAVDFPLLVCPQI

SEQ ID NO: 105392 - protein, 113 aa, Gossypium hirsutum
  Clone ID: LIB3584-018-P1-K1-B12.pep
PTRPPTRPGSTSSAMAEKVAWYCALFMAVMLVMSCCQEPNERGEEGMMRVVHQSKKPCDEIYVVREGETLHTISEKCGDPFIVEHNPHIHDPDDVFPGLVIKITPFLSTTGRP

SEQ ID NO: 105393 - protein, 137 aa, Gossypium hirsutum
  Clone ID: LIB3584-018-P1-K1-B9.pep
PYRQITSNVNDRFPDATPEELSASDATCIICREEMTLTKKLMCGHLFHVHCLLSWLERQHTCPTCRALCVPPENGAGSSGGQHGTWSDAPRQGFSTSSATQGPGVGMATDNLTPHQARLQAAAAAASIYEKSYVYTS

SEQ ID NO: 105394 - protein, 41 aa, Gossypium hirsutum
  Clone ID: LIB3584-018-P1-K1-C8.pep
YSLEEVWKVCNRSKPADSIPRHIGIKCSVVDKMLLCLNTSQ

SEQ ID NO: 105395 - protein, 157 aa, Gossypium hirsutum
  unsure (1)..(157): unsure at all Xaa locations
  Clone ID: LIB3584-018-P1-K1-D5.pep
MDNSKGTPGRMISSSVLSANTRSPIENESKYKSIVGALXKLXITSLEITFAINMVCQFMHKPLDHHFKATECILRFLQAKVDHGICFTAAPRLSLKGYSDASXGDDPNDRRSTSGFCIFLRGNPVSWGSKKQQGALLMLQSRSPGWNHYWENYKVTL

SEQ ID NO: 105396 - protein, 147 aa, Gossypium hirsutum
  Clone ID: LIB3584-018-P1-K1-D8.pep
MAIESQHMNQNLPPQLIMNRYFMKTNEGMYKDNLMDSCVPLQQASFAKLFDPILASNSIDDMGMRRRPKDSFINNAFGSSMDHIQLHQLDGFIAQHAEKVRFEVEEQRENQWRTLITLIQERVLKQLKAKDEEIQRMGKINWVLQQR

SEQ ID NO: 105397 - protein, 170 aa, Gossypium hirsutum
  Clone ID: LIB3584-018-P1-K1-F6.pep
GVPAVIGVLASIRLPYPSRACDMAHCSRCLIPWDNYDGIYLIEVDRILRPGGYWILSGPPINWENHWKGWNRTADDLKAEQSRIETVAKSLCWKKIVQKGDIAIWQKPTNHIHCKATRKVFKRPRFCQTQNPDMAWYTKLEKCLTPLPQVSEIKEIAGGQLPKWPQRLNA

SEQ ID NO: 105398 - protein, 65 aa, Gossypium hirsutum
  Clone ID: LIB3584-018-P1-K1-G4.pep
FFSHKLDLPIQNEHTNLGANMTQLNFKHLKENKEVKDMLDIEDNKYYKKKKENLRIHNYVPLSRP

SEQ ID NO: 105399 - protein, 122 aa, Gossypium hirsutum
  Clone ID: LIB3584-018-P1-K1-H7.pep
DIRSLKMDDFKYAHEQIAGGHRSSSYTHQTITWNGSNYANYTTQQLYYHCCRSFWAAQGLGCTIDLRCYNQPREYVVTEEGCVMTSRPVSLQNLFLASIFDVETLVSWCYDVGISFGPNKHL

SEQ ID NO: 105400 - protein, 57 aa, Gossypium hirsutum
  Clone ID: LIB3584-019-P1-K1-B3.pep
SVHMWHGDEDKIVPVILQRCGAQQLPWIHYHELPGAGHMFPHAPGMSDNIVKVLVGE

SEQ ID NO: 105401 - protein, 74 aa, Gossypium hirsutum
  Clone ID: LIB3584-019-P1-K1-B5.pep
DFVVINVRRIQASIFYGFGYCRSECCCDQLWCLCSIMNILRFLQSLAIWSQSAVSPLLRIRSAASSLPIMSPSL

SEQ ID NO: 105402 - protein, 56 aa, Gossypium hirsutum
  Clone ID: LIB3584-019-P1-K1-C3.pep
NKHSIQEQVLSSRVVNVSRNVHGSKGCDPDYDNVTSLESSPDKKQPINQPVLSARV

SEQ ID NO: 105403 - protein, 85 aa, Gossypium hirsutum
  unsure (1)..(85): unsure at all Xaa locations
  Clone ID: LIB3584-019-P1-K1-C5.pep
MAVTFNDLRSAAGXKNLDEYLITRRYMCGYQASKDDITVYSLVYGAPSDIYVKDFRWCKHIDALVRILCVTKECCDATADGFAHS

SEQ ID NO: 105404 - protein, 41 aa, Gossypium hirsutum
  Clone ID: LIB3584-019-P1-K1-D10.pep
NVIVIQNAYINIYMNINDINIAIVNRLFSIRVIKYNRNESI

SEQ ID NO: 105405 - protein, 149 aa, Gossypium hirsutum
  Clone ID: LIB3584-019-P1-K1-D6.pep
YDLNNQNLTYQEVRPVVSNPGFPSCHNETQRTVYLLQYVLSHMWPWNFFPSLLLSFSFPSLSLLFLLIHASNSEKNTARNRLGPPGNSCWQVVFRVASFSILVGSYFWLQKNIYFELLFLNLIWILTRGAFALIVFDFNQGYNVGSCEV

SEQ ID NO: 105406 - protein, 66 aa, Gossypium hirsutum
  Clone ID: LIB3584-019-P1-K1-E4.pep
TQSMSKRTDSESCCMSPVCSTASLAASLIYPRLCDTEMFMQHISLSRTFDVLAIWNRQEYLFIPYV

SEQ ID NO: 105407 - protein, 102 aa, Gossypium hirsutum
  Clone ID: LIB3584-019-P1-K1-E7.pep
MPGENAPRTWRAAQDASNIREVNGERKSQDALKSDKGDSRLIKDEERETGKVSLHVYKMYCTEGFGWWGVAAALLLSLLWQASLMASDYWLSYETSAERALP

SEQ ID NO: 105408 - protein, 68 aa, Gossypium hirsutum
  Clone ID: LIB3584-019-P1-K1-F2.pep
KMTITILSIQNIQRDSFAVFLFSFLSFIYTYLIKSFSIFMLIASVIIYSQKCFCFLLKCYTLFILSNV

SEQ ID NO: 105409 - protein, 114 aa, Gossypium hirsutum
  Clone ID: LIB3584-019-P1-K1-F4.pep
RVQYSILNNGEEGSSFNPSRGLRQGDHVSLYLFLFYGEGFSALIRLASRDKRILGAKVCRSSHPIIHHMFEDDCIVFGEVSDKGIMVLKYIFREFESCSGQCVNFEVSIFLVEM

SEQ ID NO: 105410 - protein, 107 aa, Gossypium hirsutum
  unsure (1)..(107): unsure at all Xaa locations
  Clone ID: LIB3584-019-P1-K1-F8.pep
AKLALQDKRYKMIYQLMQKLLIYSTPAFHLTIXNRTLCIKLIKTKNGSLRVEVXRSYSCIHQKEXVLYNEEHVELIKEYRSKVEFEKPDVCASISTLMDSNLIPSAD

SEQ ID NO: 105411 - protein, 66 aa, Gossypium hirsutum
  Clone ID: LIB3584-019-P1-K1-G8.pep
MSLVTATVLVETARKIIIRDISLSFFVAIPGMFLHGSISEKRKRCFEFIKYEFYAISYIKIPYPTI

SEQ ID NO: 105412 - protein, 48 aa, Gossypium hirsutum
  Clone ID: LIB3584-019-P1-K1-H3.pep
PPQLPLILPPSNMDVRHSLVLGSSNHFLAMRLSSWMKVLLFNGSSMFG

SEQ ID NO: 105413 - protein, 88 aa, Gossypium hirsutum
  Clone ID: LIB3584-019-P1-K1-H4.pep
PLSSLDDLSQARVDILIKQFLQACFLMHVQALVFMARRVSLEPVSSRVPFLSSKHGLISYNDSSGDHIAAIELLCARLGSPLPLAEAP

SEQ ID NO: 105414 - protein, 77 aa, Gossypium hirsutum
  Clone ID: LIB3584-019-P1-K1-H5.pep
EMYSKLNSLGKVSPCREVVLLKIIEEVSCKNLRYERSTHASDRSASELKGLSQDQRGPAPYMGHWKSSYTIHEWRDY

SEQ ID NO: 105415 - protein, 62 aa, Gossypium hirsutum
  unsure (1)..(62): unsure at all Xaa locations
  Clone ID: LIB3584-019-P1-K1-H7.pep
FSWWGSCFGCSCRCHVIFCSCNFVFDGVLLHSYXLSMLQLLHFDLWPATSCLXLVLVGCAYS

SEQ ID NO: 105416 - protein, 167 aa, Gossypium hirsutum
  Clone ID: LIB3584-019-P1-K1-H8.pep
EFIEQLKSFSLELYEMEAKADFETQSKQPELRSVSAFEKQMSMIYTDTVFKKFQAEILGIVSCHLQKESEDEDNVVFRVDDFEERQNFLVAWSKREFDICCLCRSFEYKGFLCKHSLLVLQMSGVSDIPCHYILKRWTQEVKIRQTLGEKSNRLHYRVQRFNDLCKR

SEQ ID NO: 105417 - protein, 52 aa, Gossypium hirsutum
  Clone ID: LIB3584-022-P1-K1-B2.pep
PTRPIKYYLLYADYFCFSFHGSFRYLDFYQVYLIFATFSKYIEFTIFGPQSH

SEQ ID NO: 105418 - protein, 57 aa, Gossypium hirsutum
  Clone ID: LIB3584-022-P1-K1-B5.pep
KRKASQPESWREKSLLGLSYGGVKGSQKKKKLPFCACVHPPTNGDGGNCSSSAHLHF

SEQ ID NO: 105419 - protein, 95 aa, Gossypium hirsutum
  Clone ID: LIB3584-022-P1-K1-C10.pep
NPTTVPRLYHSPAALFRDGRVLVGGSNPHAFYNLTGVLFPTELSLEAFSPAYLDTKFNNIRPTITAPKSMSGIKYGTKLTVRVVITGKVAKNQVS

SEQ ID NO: 105420 - protein, 44 aa, Gossypium hirsutum
  Clone ID: LIB3584-022-P1-K1-D10.pep
PTRPLKVVKEVPICNQKKNDGDGHIGRLERNNLYPVMMFIFYRL

SEQ ID NO: 105421 - protein, 83 aa, Gossypium hirsutum
  Clone ID: LIB3584-022-P1-K1-D9.pep
HASGFKWRLIPTKEKYEEIREHILENPFVCETAREWRPDISCDDPTDISQDGSRLWAIDKPNIAQPSPGWQRLLRIKSEGRSK

SEQ ID NO: 105422 - protein, 138 aa, Gossypium hirsutum
  Clone ID: LIB3584-022-P1-K1-F12.pep
HASDHPDVNKEANAQEKFMRGKHAYNTLLNSESRRRYNPGNRTSDFSYSGTQQSQSPNTQEEEFYGFEDFFRDLQEEFQNWEASASSQDKPKSLWEELAAIGEEFVESLEKELNISDDEILRKHQKLTLLIPRKQEAF

SEQ ID NO: 105423 - protein, 46 aa, Gossypium hirsutum
  Clone ID: LIB3584-022-P1-K1-H5.pep
FSCHFLGPKHWVVMSFVELAKVLAAFSGLLVRNQKLGPLILPSVEK

SEQ ID NO: 105424 - protein, 152 aa, Gossypium hirsutum
  Clone ID: LIB3584-024-P1-K1-A10.pep
MAVVENGSNQDAAATAVASNDQDQSKQNHVGSRIDPSLHQNDQGLYDKIGAPHHRSNGGDLQMSNGGTGDDVGDSFKRDMRELQELFSKLNPMAEEFVPHSIANHELNGGFFINNSFLQNNTNISRNGHANGNGAGRRKKIFNQGKRRLNNR

SEQ ID NO: 105425 - protein, 52 aa, Gossypium hirsutum
  unsure (1)..(52): unsure at all Xaa locations
  Clone ID: LIB3584-024-P1-K1-A3.pep
LFICSLMAQSVPYSLAVSVFPQSAHLWHKPHAVFGCVLFPXHADTPIWVSMA

SEQ ID NO: 105426 - protein, 125 aa, Gossypium hirsutum
  Clone ID: LIB3584-024-P1-K1-A4.pep
MAVSPHAFPPRKRRPSAGAFVSPKLADINLVKSLLSLSQEISSFKPFQCLLKRNSVSAINKSKLLSILFDELIKNPASVFFSPSTLLCFEEMYIVLQRIKTLLEDCSNGSKMWMLMQIQVLSNNF

SEQ ID NO: 105427 - protein, 45 aa, Gossypium hirsutum
  Clone ID: LIB3584-024-P1-K1-A5.pep
GRPFFFFFLKPHKFTACILIYDVTTLHIENLLQVKFLTNQTESSY

SEQ ID NO: 105428 - protein, 69 aa, Gossypium hirsutum
  Clone ID: LIB3584-024-P1-K1-A8.pep
PRVCALPPSQAVSGTGSLSICSFSSPARFMPPAWQAWWFIITLFKWCSKGDSSTVPRLRNTSIGFRQSY

SEQ ID NO: 105429 - protein, 133 aa, Gossypium hirsutum
  Clone ID: LIB3584-024-P1-K1-C12.pep
MDTFKAKCKALFSSRGCFGCFIAVDDPSKRLKIQGRKAKRSSCSEDFWNSSGCEMEHSGVQSQGSISSTNASNLDPSGSTSHPSEFENHGLLLWNQTRQQWLGNNKSDKWVQPRQPTISWNTIYESLHGNFKP

SEQ ID NO: 105430 - protein, 79 aa, Gossypium hirsutum
  Clone ID: LIB3584-024-P1-K1-C2.pep
RRGEAVAMFPHVSPQVCGSMAQDYILLSTLQTRTGEIETKKANTRAEKALLFFIIFFPSVHYGVIYFICIRYIHKGYLE

SEQ ID NO: 105431 - protein, 49 aa, Gossypium hirsutum
  Clone ID: LIB3584-024-P1-K1-C5.pep
VFGSFLSTWCQFIACESVAIHVNNSSSSLKLYTTSLDMFYFFPKRNYYL

SEQ ID NO: 105432 - protein, 169 aa, Gossypium hirsutum
  Clone ID: LIB3584-024-P1-K1-D8.pep
HASAHASVQMVVNSFDLVMGFGAAVPYTALAQKAMSRHFRCLKDAISAQLKHSCEMLGEKDGAGSSGITKGETPRLRMLEQSLRQQRAFNQMGMMEQEAWRPQRGLPERSVNILRAWLFEHFLHPYPSDADKHLLARQTGLSRNQVSNWFINARVRLWKPMVEEMSQPG

SEQ ID NO: 105433 - protein, 55 aa, Gossypium hirsutum
  Clone ID: LIB3584-024-P1-K1-E12.pep
FFFLIKKSPLFFFFLLFFFFFYYFFFFFFFFFFFFFFFFSDAWADAWADAWADAW

SEQ ID NO: 105434 - protein, 123 aa, Gossypium hirsutum
  Clone ID: LIB3584-024-P1-K1-E5.pep
KENILQTRVKSLPWFWKTSYRFGISKTFSIPFSILSSSQLQKFLRRLFLKRKLFARSLKSQRIGKGNKDGTSKQFRWTKSMEHVFLEILAEEAQKGNKPSNTFRAVFINRVVEAISERFQVQC

SEQ ID NO: 105435 - protein, 175 aa, Gossypium hirsutum
  Clone ID: LIB3584-024-P1-K1-E6.pep
PRVRDDDDDFAFDFSEALEKTSLSAEELFDGEKIKPLKPPPRLQVDEYNQKSPLLSSPRSPTSPLSQGRKFFREAFSPRKKKDRDPFATAIETSRNQTDDHRRGRERVQDHLSKNSSRRATRSLSPYRVSEYPWEEQEQENKQQRNGSTNDKPPSLDSKPSLSSNKGSSRKWRLR

SEQ ID NO: 105436 - protein, 171 aa, Gossypium hirsutum
  Clone ID: LIB3584-024-P1-K1-F1.pep
HASGSLILKKYMEFRKLAKLSSEINSQNKNLLTVGAPEGPNPREIELYLEEILSLMQLGEDYTQYMVSKIKGMTTVDPDLVPRATKAFRTGSFSKVAQDITGFYVILEGFFMVENVRKAIGIDELVPDSLTTSMVDDVFYVLQSCLRRAISTSNISSVVAVLSGASSLLNN

SEQ ID NO: 105437 - protein, 63 aa, Gossypium hirsutum
  Clone ID: LIB3584-024-P1-K1-F10.pep
LSCQEQIMPCVSCTTLKKQYLRYGMAKRSKWNKFFKQLLLKPGSLLRFQFKWKNTEADLVILL

SEQ ID NO: 105438 - protein, 132 aa, Gossypium hirsutum
  Clone ID: LIB3584-024-P1-K1-G1.pep
VNEAMLTCETEIVNEYNELLRTQLENQKVYFETLLQQENEETERAIADAFNKTVMQKRQKTQAKLERCVKEKKFLEDLNENLLKNQEIWKAKLLEVEKREKKVLRMKGNKIQALEDQVRYYLDIQTDLVHCC

SEQ ID NO: 105439 - protein, 177 aa, Gossypium hirsutum
  Clone ID: LIB3584-024-P1-K1-H11.pep
LARIPDYLWVAEDGMKMQSFGSQQWDTGFAIQALLASNLTDEIGPVLKRGHDFIKKSQVKDNPSGDFKQMFRHISKGSWTFSDQDHGWQVSDCTAEGLKCCLLMSMLPPEIVGEKMEPQQLYDAVNVILSLQSQNGGLAAWEPAGAQEWLEMLNPTEFFADIVIEHEYIECTASSIH

SEQ ID NO: 105440 - protein, 172 aa, Gossypium hirsutum
  Clone ID: LIB3584-024-P1-K1-H3.pep
QDDILESEFFDTRQAFLSLCQGNHYQYDTLRRAKHSSMMVLYHLHNPTAPAFVTPCCICHLDIETGQGWRCEVCPDYDVCNACYKKDGGIDHPHKLTNHPSMAERDAQNKEARQLRVLQLRKMLDLLVHASQCRSAHCQYPNCRKVKGLFRHGIQCKTRASGGCLLCKKMWY

SEQ ID NO: 105441 - protein, 119 aa, Gossypium hirsutum
  Clone ID: LIB3584-024-P1-K1-H5.pep
FGPRVRVRVRPRVRPRVRIIPFPYLFCLFGLSSSDTIAKRSTAKVKITCSMNFTAISNFPRSSFVQVYGTFFASFSHPDSYIAIYLLFLFMTSQGEDIKAKRKRLNSAISPCTLRKLWI

SEQ ID NO: 105442 - protein, 170 aa, Gossypium hirsutum
  Clone ID: LIB3584-024-P1-K1-H9.pep
RRQLPSGLRQRVRHFETQTWDTMGGEEEMKWIEELPDGLRRDIKRYLCLDLIKKVPLFDSLDDLILDNICDRVKPLVYSKDEKIIREGDPVLRMVFVVSGRVKRSQGLSKGKIATSILEPGGFLGDELLSWCLRRPFIDRLPASSATFTCIEYTEAFGLNENDLRYITQH

SEQ ID NO: 105443 - protein, 88 aa, Gossypium hirsutum
  Clone ID: LIB3585-041-P1-K1-B8.pep
VKMEGSNSIPKPQSNLNIPFSNASQMASPPPSPSSSPSPSPSYMRLSPENNNSKRPAIPPSHPNNPTASLPYSQQIMGSRPNAQHGAP

SEQ ID NO: 105444 - protein, 73 aa, Gossypium hirsutum
  unsure (1)..(73): unsure at all Xaa locations
  Clone ID: LIB3585-041-P1-K1-C6.pep
TXKETWGVNFRAICDLFQISKTREDVIEYKVGVQMIEIYNEQVRDLLVIDGSTKRLDIYDETQLIGLTVPVAS

SEQ ID NO: 105445 - protein, 70 aa, Gossypium hirsutum
  unsure (1)..(70): unsure at all Xaa locations
  Clone ID: LIB3585-041-P1-K1-C9.pep
PTRHARESIASXLKALNQISFFYASSKVSSGMVLHDNLVRDLFTVYANQLPMLLKKIFYTILSNVVNSGY

SEQ ID NO: 105446 - protein, 54 aa, Gossypium hirsutum
  Clone ID: LIB3585-041-P1-K1-D4.pep
IMDLHLSVFIKSFVDFSDYRSKWHIYASQFILYLFENLLNNLFVFILLFLIVLI

SEQ ID NO: 105447 - protein, 61 aa, Gossypium hirsutum
  Clone ID: LIB3585-041-P1-K1-D5.pep
LLNFFYFFFIFFFFFFFFFFFIFFFFLEQIKVETLNLHKTISPSTIFSPSHKYQNKSHCHW

SEQ ID NO: 105448 - protein, 74 aa, Gossypium hirsutum
  Clone ID: LIB3585-041-P1-K1-D9.pep
FMEVIRGRSLALHDKRGSSPSQPIRGEIKKIITNIQGGAMDIHALYFIKLAYLVDLMVGSCLKIRCIARGVLCL

SEQ ID NO: 105449 - protein, 184 aa, Gossypium hirsutum
  Clone ID: LIB3585-041-P1-K1-E5.pep
PTRPLESIQKYLWPRLCKLDQYTLYGLDYQMITFGKVFCTKSKPNCNACPMRGECRHFASAFASARFALPGPEERSITSSTAPMISETNPTRAVNQIPLPPPVHNLLKVGPNVGNNEPIIEEPGTPEPEHAEGSESDIEDACYDDPDEIPTIKLNIEEFTANLQHYMQGNMEPQERDLSKALVA

SEQ ID NO: 105450 - protein, 57 aa, Gossypium hirsutum
  Clone ID: LIB3585-041-P1-K1-E8.pep
HVWHNQCNFRNEVISHERLVVLVHLVDHIPDRNLPFFLHIVGCYVSRHQSFMHNLPC

SEQ ID NO: 105451 - protein, 150 aa, Gossypium hirsutum
  unsure (1)..(150): unsure at all Xaa locations
  Clone ID: LIB3585-041-P1-K1-F11.pep
TRRRKMYDSKGAQEQALKILIGSGGXKSNKVPYVKEILSFLSQHAKLSESVLWTPATTRVGSLYSAADVYVMNSQGLGETFGRVTVEAMAFGLPVLGTDGGGTXEIIEQNVTGLLHPMGHSGTRVLAXEYPVLLKNPNARKQMGLEGRKM

SEQ ID NO: 105452 - protein, 179 aa, Gossypium hirsutum
  unsure (1)..(179): unsure at all Xaa locations
  Clone ID: LIB3585-041-P1-K1-F7.pep
PTRPPENMSISVNGQSQVPPGFRFXDATEEELLQYYLRKKVSYEKIDLDVIRDVDLNKLEPWDIQESCKIGTTPQNDWYFFSHKDKKYPTGTRTNRATAAGFWKATGRDKVIYSNCRRIGMRKTLVFYKGRAPHGQKSDWIMHEYRLDDNIVETTVSNAMGEGTQEEGWVVCRFFKIKN

SEQ ID NO: 105453 - protein, 177 aa, Gossypium hirsutum
  unsure (1)..(177): unsure at all Xaa locations
  Clone ID: LIB3585-041-P1-K1-G1.pep
PTRPETPRAQQGLSLSLSSQQQQHHHXDGSHAQAVSGEDMRVSGGSGSSGSGVTNGVSGVQSMLLSSKFLKAAQELLDEVVNVNNTGITKNELAKKGRGGGDNSNSSKVVGESAAAAGDANGKQGPELTTAERQEIQMKKAKLISMLDEVDQRYRQYHHQMQIVISSFEQAAGIGSA

SEQ ID NO: 105454 - protein, 117 aa, Gossypium hirsutum
  Clone ID: LIB3585-041-P1-K1-G11.pep
MALAEVLPSSRKQEHLEAGKRRLEEFRKKKAAERAKKAASTTQSYNTDVSLNDKHQLETEVRAINSDGAGTSEGPNPSFLKTIYNNNKTTEVFRENQQVYSNNAFEGPSFLGDYNSS

SEQ ID NO: 105455 - protein, 64 aa, Gossypium hirsutum
  Clone ID: LIB3585-042-P1-K1-A12.pep
ILPLLSFTIFTTIVHVNVTEKMLHYQNPFGKVQRPFLILLILKLNNTTYFHVVLKLFNNNDTFI

SEQ ID NO: 105456 - protein, 103 aa, Gossypium hirsutum
  unsure (1)..(103): unsure at all Xaa locations
  Clone ID: LIB3585-042-P1-K1-A3.pep
TAYGLDLVRGTQTTDLVKKDFPKGXYRFAGVVDGRNIWANDLASSLSTLQALEAVVGKDKLVVSTLCSLLHTAVDLVNETKLDDEIKSWLAFVAQKVVEVNAL

SEQ ID NO: 105457 - protein, 82 aa, Gossypium hirsutum
  Clone ID: LIB3585-042-P1-K1-B1.pep
KGKTKQGYFCAGELSITFELTRVELGPRWEYMQLQSASSSPSRLCCVSASLISLQTLKKTQSYHQYATPEISPILALSDLIS

SEQ ID NO: 105458 - protein, 154 aa, Gossypium hirsutum
  Clone ID: LIB3585-042-P1-K1-B6.pep
MISFTPNPLTYPRVQLLLLLVAATDAMGFPSYWGTSFHRRSSSVSDIVGAEDPASGFGWRPCLYFARGYCKNGNNCRFIHCGLGESGSVVGGADGATMVGSPNKIEMDQCHELLKSKIRSATKVGCCFTAHGFLFLLLTPQKALNSFLQQQQND

SEQ ID NO: 105459 - protein, 94 aa, Gossypium hirsutum
  Clone ID: LIB3585-042-P1-K1-C1.pep
SFLFLFSERKVPNRGQEILGILVYGTVFPLLVSCLPNWGERLMFVVASLAVTGIQHVHFCLNHFSLSVYVAPPYGNNRFEKQTVGTLHLLCSSL

SEQ ID NO: 105460 - protein, 73 aa, Gossypium hirsutum
  Clone ID: LIB3585-042-P1-K1-C5.pep
HHNPNDVQNLHQYTQISTMYTIDQMIAAVHTANPNRNPIKSLIVSFDLCNDLCDTPYHTLFNTLFTTFHNYFP

SEQ ID NO: 105461 - protein, 170 aa, Gossypium hirsutum
  Clone ID: LIB3585-042-P1-K1-C6.pep
GNREGANSSAARTIAAVKVMATAMNTGGKERIATGIWNVSENPLTAEEILAFSLQKIEGMAVEALKVQAEMAEEEPPFDVSAFSGKAITQDQPLDSAIPLENWTKDYGLTSSEDQLGDPETLTLALVVQLRDPLRRYEAVGGPVLALVHALRGDIEPKKNDQKKRVKGMS

SEQ ID NO: 105462 - protein, 58 aa, Gossypium hirsutum
  unsure (1)..(58): unsure at all Xaa locations
  Clone ID: LIB3585-042-P1-K1-D12.pep
RSRLTIMDSFFNKGFKAAKCKTLVRLTITRIKLLTNRREIQIKHMRRDIAKLXETGQE

SEQ ID NO: 105463 - protein, 82 aa, Gossypium hirsutum
  Clone ID: LIB3585-042-P1-K1-D4.pep
TVTTDTSKVSALQQLKMAMPELAYAEEARKQAKRQVELAEKEFDRAKRIRQQARAELAQAQALKDRANKQIETTIVQITGRL

SEQ ID NO: 105464 - protein, 112 aa, Gossypium hirsutum
  Clone ID: LIB3585-042-P1-K1-D5.pep
LSVGLGGGEDGERDQGGVTHHSPTRGLRNFNELRFLRIELPGGELGIDDGVLLKWRADFGSTLDSCVILGAASVFNNVHFQVPDHGNDGFCINNGSICLATVMIMGVSLRSF

SEQ ID NO: 105465 - protein, 129 aa, Gossypium hirsutum
  Clone ID: LIB3585-042-P1-K1-E1.pep
WQIMADKNLEDYDIEPAPKLIEVVFRNCRGQVDHWVEPYLRITLDRLNRTEKPRLKCLLVQVIANAVYYNAALTLSILNKFSVTTEVFNLWFQLLQQVRKSGLRSNFKRKHDRKVCCFGLTLLLALSRD

SEQ ID NO: 105466 - protein, 65 aa, Gossypium hirsutum
  Clone ID: LIB3585-042-P1-K1-E11.pep
LALLILLSILLGSTLPLPIIVFYNFLPKINEKPNPRTNNLSHLNCFKTIRKGDFTCFFFFFCSCW

SEQ ID NO: 105467 - protein, 104 aa, Gossypium hirsutum
  Clone ID: LIB3585-042-P1-K1-E12.pep
ESSSIEGADFKKLASLHSGRDDLETRMEKRTNGETDLDDLCHAGFETVKELDQPLQESEILTEVMSSCGAIWGKICTMFMYPIPYMNIHYPRYRELERFLGDDT

SEQ ID NO: 105468 - protein, 95 aa, Gossypium hirsutum
  unsure (1)..(95): unsure at all Xaa locations
  Clone ID: LIB3585-042-P1-K1-E2.pep
HLLVFLLGVRLLSLPTFGTFISQMGRKRNIRLQKPAKVISPQSALTSLSFKPLQPDEASFLSHVFVTLKLMTXLLILLMYDPLENDHLPYYTVIY

SEQ ID NO: 105469 - protein, 161 aa, Gossypium hirsutum
  Clone ID: LIB3585-042-P1-K1-E7.pep
VPSTGFYAGKVSSVHRSLMSKNSSWTTSSNANSDQGTSAVLDIEGSDHQHDDMASESGKGPYGNVLEEVFAFDKMDVINQDASYERRNDSLNSLIEDTDRDSAIQCDPDHSEELGHRSLEVEMSSNSDALCDRGDLSEVDGCENTKICSKCGRRFRVIEPV

SEQ ID NO: 105470 - protein, 89 aa, Gossypium hirsutum
  unsure (1)..(89): unsure at all Xaa locations
  Clone ID: LIB3585-042-P1-K1-E9.pep
MKPRWKGKGSEAKASADPMSKIVSQLHSSLIRSVARGLLLSRNVLIEADAELSYLFNRARFGRSRITCXEEKQWFQLDMEEAFNLCFSL

SEQ ID NO: 105471 - protein, 88 aa, Gossypium hirsutum
  unsure (1)..(88): unsure at all Xaa locations
  Clone ID: LIB3585-042-P1-K1-F1.pep
GSPRTVKQRSGLSSLGXSRVKIVSEPVREVIPQFYFKNGRPPPNELKELCLFAIDKHFYGHKGXQIHEFKAVSXDICKFTSFFYTFFF

SEQ ID NO: 105472 - protein, 85 aa, Gossypium hirsutum
  Clone ID: LIB3585-042-P1-K1-F10.pep
HASGEKDALSSSSSDSDSDYSSRDVNSKNGQLESEFQKIADGIKQELEEANLEIADLKRKLTATSEEKDALNSDYLASLSKVQEA

SEQ ID NO: 105473 - protein, 165 aa, Gossypium hirsutum
  unsure (1)..(165): unsure at all Xaa locations
  Clone ID: LIB3585-042-P1-K1-F11.pep
KVFMVSFMFTTILLSVLYLPTKRRGPITRFNPMATLNIVHPSNRTYPVTFAYLISASKGDIIKLKRTLHALYHPGNQYLIHLDYEAPALEHKQIAEFVSNHPVFNLVGXNVYIVGKLNLVTYIGPTMLAXTTFYAMSMLLKSAKWXLVINLIASIYSLLTQDVSD

SEQ ID NO: 105474 - protein, 98 aa, Gossypium hirsutum
  Clone ID: LIB3585-042-P1-K1-F2.pep
MFNAIQPIVGEKPSLKAISTCLNLLIESNQVDLARDFLLNSKKSLRLRPNTCIFNILVKHHCNNGDLESAFEVVNQMKKFKVSYPSLVTYSTLDRRAL

SEQ ID NO: 105475 - protein, 40 aa, Gossypium hirsutum
  Clone ID: LIB3585-042-P1-K1-F4.pep
HAMPRYLAKPNWGRYCMSPDLLQYQNRRLKRSLSADDAPF

SEQ ID NO: 105476 - protein, 75 aa, Gossypium hirsutum
  unsure (1)..(75): unsure at all Xaa locations
  Clone ID: LIB3585-042-P1-K1-G4.pep
GTDPGMATLLISKIIEEYLDRMMLTRWVLPYSNVTSTIVEPYNATVSEHQLDDNADESMILDIEALYTIXFRTLK

SEQ ID NO: 105477 - protein, 61 aa, Gossypium hirsutum
  Clone ID: LIB3585-042-P1-K1-G6.pep
NVARNPKPIPFNYACEFLSFLSCSDFPLHTRPSPHFLSCDGCNFILIPVLFHIATTLTWKP

SEQ ID NO: 105478 - protein, 146 aa, Gossypium hirsutum
  Clone ID: LIB3585-042-P1-K1-G7.pep
FIGHQHLLTLFEKTADVTCHLCCVDCHNFILRCVLCDINIHFQCHPSALETIKHKSHLHPLTLTKSPFEFELNSDEEEEEFYCDVCEQKRNQKELIYYCAECKFIAEVKCVFATVSISFIIQFKHLIELFLISCLSFKIFAYKSLH

SEQ ID NO: 105479 - protein, 168 aa, Gossypium hirsutum
  unsure (1)..(168): unsure at all Xaa locations
  Clone ID: LIB3585-042-P1-K1-H10.pep
SPLRKTFAQPGKPPPLNVLPAAAPENKSVIKAVDGSPNYMKSTSSSKAKKESSPVSSLAGSDSKNLRRRCSTGSISSDSCNKAAGARTLTRTSNLKLVRTLTKSPTFKPARASAKKCSRVALCADMNVQRATCSSTLKDSKFPLYLMXLNHGTVSEGTFIIKVCPYTY

SEQ ID NO: 105480 - protein, 43 aa, Gossypium hirsutum
  Clone ID: LIB3585-042-P1-K1-H4.pep
LLTMFGMNLYSIIQSNERWMLSYKCNFSFVIECIIKYLIIEGK

SEQ ID NO: 105481 - protein, 93 aa, Gossypium hirsutum
  unsure (1)..(93): unsure at all Xaa locations
  Clone ID: LIB3585-042-P1-K1-H9.pep
MADAGGSGVSNRMWCSVPERLQLHMAMLASHFGYAGFHVVYRAALNMGVSKLGFPVYRNSDALLLLLPLAXSLEKKDRPAITLNFILQFILLA

SEQ ID NO: 105482 - protein, 153 aa, Gossypium hirsutum
  Clone ID: LIB3585-043-P1-K1-A1.pep
GRVGADLSSMQPVPTSDQGGAQPGDLVSPNVGPLPYASSEAQARCMSNNEMRNASQLAETSPFNGTIDATCNMSNPDTTGVELREQMQQLRSSESTSNLSHPDLPSVTAVEHQSNNEGQTVNQSSQAPTQPVANQIELFNQNVLAALHSPIDG

SEQ ID NO: 105483 - protein, 115 aa, Gossypium hirsutum
  Clone ID: LIB3585-043-P1-K1-A11.pep
MAREGRGAKWGGHGLGSGSGSGSGQCSYKRITVIVCSVNIVIALYVLHSLYSSLYIYSNKDHDVAMHTSDHIKQMEESVRIRRASEPIELVKLVKRLKHGFSSEESMAEAELPQA

SEQ ID NO: 105484 - protein, 100 aa, Gossypium hirsutum
  Clone ID: LIB3585-043-P1-K1-A6.pep
SCPIHVVMTVSGCSVVVISSDRCLFPVLHHSAMSVLPSCSGSACSQVLPVRLSIPASARFISHTWRVDGCMLFSTLLISRPCTDVVTFTLKRASRLPDCL

SEQ ID NO: 105485 - protein, 170 aa, Gossypium hirsutum
  Clone ID: LIB3585-043-P1-K1-B10.pep
GVTFTHNGPDNFCSALECNGVIAMENALENLDHYNPPVDSPCWRGAPSSHNSPFGSSEAVSVQLEKKLEACGDGQELKFMPMNTANMVRLPSEKPGESSMNVENGSVEDSSVSFLKLPSVSIMSSRDHLPDVVGKAGPYNRVTSSARKINFSDDASEQKNSNVLFNKSTD

SEQ ID NO: 105486 - protein, 170 aa, Gossypium hirsutum
  unsure (1)..(170): unsure at all Xaa locations
  Clone ID: LIB3585-043-P1-K1-B11.pep
LFGDELNYTFYGIXRERDFLRLHFCPFSFEDHNVNESSFDVAANGLKLLAQVNVVGEIAHKNLYLQSSGSNFSSFSLVKEYILPINSNSLVIEFTPTKGSFGFINAIEMIPMTDKLFADSVSKVGGNDVNLNLSGRGIETMYRLNVGGPEINPNEDSDYWRAWDVDSGYM

SEQ ID NO: 105487 - protein, 150 aa, Gossypium hirsutum
  Clone ID: LIB3585-043-P1-K1-B3.pep
QKIIVTVSEAVKQCLKKKGMRIPRWRKAEYIKAKWLSPYNRITPSPSPSPSPSPTPTSTSITGTLKAFELDPKAKEQCQPLFELNPEGKNSVDDADLGEPIFALSESSEEERNEKNVKKEERKPPQINPRSSQIGVKIVAGLASAVEDEQ

SEQ ID NO: 105488 - protein, 152 aa, Gossypium hirsutum
  unsure (1)..(152): unsure at all Xaa locations
  Clone ID: LIB3585-043-P1-K1-B5.pep
MASNICPRLGVAMVMVGFVCANLVLAMCGNISEVFEYNWAPNHIISQGDQIELTLDNVSGCGFESKKKYLFGQASVQIKLIEGDSAGTVTAFYMASEGPVHDELDFEFLGNVSREPYLVQTNIYVNGTGNREQRHTXWFDPTLDFHTYSFFW

SEQ ID NO: 105489 - protein, 83 aa, Gossypium hirsutum
  Clone ID: LIB3585-043-P1-K1-B7.pep
KMLTINIYVVTQGDRSKKVGVVDSEYIVHKGIQSLGGSGHPTMRTTMKVLALPASLLVLSVFFSLMCQSLSLAFKFCLNFCFF

SEQ ID NO: 105490 - protein, 106 aa, Gossypium hirsutum
  Clone ID: LIB3585-043-P1-K1-D10.pep
MSKKRKSDATRLDEVDRSMYTTFCAAANSLSQLYSQAMNHQRLSFQAGERHALEKLFQWILRQQEEGSRVTTADIVAYLQNELEYGVEESSMSPRLSFQQQQQQHP

SEQ ID NO: 105491 - protein, 136 aa, Gossypium hirsutum
  unsure (1)..(136): unsure at all Xaa locations
  Clone ID: LIB3585-043-P1-K1-D5.pep
EPYMKPLEGLKALYGDDYYICRFQEPGVIEAEFREMGYERVLKGFLTYRDPCPLLIPKGKYFGQPDTPISWPSWFSEEDCKYYLSQYEKKGFTGGLNYYRNINLNWQLTAPWTGSKIKVPXKFIVXDQDLTYNASG

SEQ ID NO: 105492 - protein, 48 aa, Gossypium hirsutum
  Clone ID: LIB3585-043-P1-K1-E10.pep
RKGTFCIDNLHPFILKLTSYIIQFNSACIINFFNVFIQSFIVSCHNND

SEQ ID NO: 105493 - protein, 97 aa, Gossypium hirsutum
  Clone ID: LIB3585-043-P1-K1-E4.pep
NYQTLNCEKSIDPTLNDAPIMATDFLTQYITATLVARYYTEGASLRHVSDESASRDNKRALSSSSPPRPSGSSNKINDRTAPPTAIALKTMKGLTLT

SEQ ID NO: 105494 - protein, 70 aa, Gossypium hirsutum
  Clone ID: LIB3585-043-P1-K1-E7.pep
ELILRKDMSTFTFKQGWAFPRKIYFNGDECAMPGPEEYPYLPNSANSKLISVSTMASFLLLVFANLLGMI

SEQ ID NO: 105495 - protein, 151 aa, Gossypium hirsutum
  Clone ID: LIB3585-043-P1-K1-F11.pep
MKLTLSLFGNGFNSSKCKTAAKMAVARIKLLRNKRQVVLKQMRRDIALLLQSGQDATARIRVEHVMREQNVLAANEFIELFCELVVARLSIIKKRRECPADLKEGIASLIFAAPRCAEIPELIEIRNIFEKKYGRDFVAAATDLRPNCGVN

SEQ ID NO: 105496 - protein, 34 aa, Gossypium hirsutum
  Clone ID: LIB3585-043-P1-K1-G10.pep
IITISYYHPNSIHFLTIHNIVTLISLTFLNLFDL

SEQ ID NO: 105497 - protein, 164 aa, Gossypium hirsutum
  Clone ID: LIB3585-043-P1-K1-G12.pep
GRVGQGVLPSNPKASGPDSNHSCKNTDNENGGAGKKAKSKQQEPKGQARPASPSRSRLEVPVSKPEVVVAPNTKETTVPAKSTTVKRSSSKHENMNSNCSANNKEKNSLPETGSWNSLPASLLKPGKGMLRRRNLASLVAAEAQSEASMAANLVKCLSMFSDLC

SEQ ID NO: 105498 - protein, 107 aa, Gossypium hirsutum
  Clone ID: LIB3585-043-P1-K1-G6.pep
NVVTNQHNAYSAESIQAPIPRSRKQQDQILFNQIGELRAAPCPAKHHFAQIPCKKLKECCPSFYHGKTHLILPQITPFTEISSSSAGIQGIPQRNPRQPFPSLRLNI

SEQ ID NO: 105499 - protein, 162 aa, Gossypium hirsutum
  Clone ID: LIB3585-043-P1-K1-H3.pep
DTSEGNSTDLLNDSLHGKSQWEREMTPEKKTDQGNSICSIVNPIIANLIRTEEFSNFYIHPYTQKQLLQMPNGLLCKNRVGECEGRKDTLNEFYGTKEGDLSRLVASSNASVCCSHESEHSMCNEKSCLVDDLELSVKARKLRALQFSPEDEVEGEIIFYQH

SEQ ID NO: 105500 - protein, 165 aa, Gossypium hirsutum
  Clone ID: LIB3585-043-P1-K1-H7.pep
PTRPLAQFVTMECYEEKWECVIKRIWPRTKYLDVIVTGAMAQYIPTLEYYSGGLPMACTMYASSECYFGLNLNPMCKPSEVTYTIMPNMAYFEFLPHGSSTSCLVDLADVEVGKEYELILTTYAGLCRYRVGDILRVTGFHNAAPQFRFIRRKNVLLSIESDKTD

SEQ ID NO: 105501 - protein, 42 aa, Gossypium hirsutum
  Clone ID: LIB3585-044-P1-K1-A10.pep
TRLTPISTLRLHTKHLSSQCFSTTLYHVHHTFITQDSSVLFT

SEQ ID NO: 105502 - protein, 102 aa, Gossypium hirsutum
  unsure (1)..(102): unsure at all Xaa locations
  Clone ID: LIB3585-044-P1-K1-A5.pep
PRVHFLEVHATPDHTMSCVSDVTADKPHQPQPMMSLTGYALLISRCDMTDIQDGRYHQLNITWHSQIFTLLXKQTFLYPAHDYERFLATTARDEMLYNPHST

SEQ ID NO: 105503 - protein, 34 aa, Gossypium hirsutum
  Clone ID: LIB3585-044-P1-K1-A6.pep
QRLISIGKHFQNGRTLNTYKIENDSTSLSSYFVY

SEQ ID NO: 105504 - protein, 75 aa, Gossypium hirsutum
  unsure (1)..(75): unsure at all Xaa locations
  Clone ID: LIB3585-044-P1-K1-B2.pep
QPSGEGGQRKRGRSPADKESGRXKRLLRNRVSXQQARERKKAYLNELETRVRDLEKKNSELEERLSTLHNENQML

SEQ ID NO: 105505 - protein, 77 aa, Gossypium hirsutum
  Clone ID: LIB3585-044-P1-K1-B6.pep
FKTAILLCIFLIWFFSLFEQFHSKREKSIVFFFLFLHTVISSFAVYLNQFHMNCVPLKFLFYMPFIYYSSQIVSFHR

SEQ ID NO: 105506 - protein, 114 aa, Gossypium hirsutum
  unsure (1)..(114): unsure at all Xaa locations
  Clone ID: LIB3585-044-P1-K1-C11.pep
MCSGWRYTKVEESFNIQAMHDILYHRHHLDNYDHLEFPGVVPRTFIGAFLASIFSSPIVLAVQLLHLPKIYSLIIXVRNKFGHQVEAFFVIFTAIQFHLLFYCSCALPNILAMG

SEQ ID NO: 105507 - protein, 51 aa, Gossypium hirsutum
  Clone ID: LIB3585-044-P1-K1-C7.pep
GRVGKIFRASLHMHSKKKHRESKKRTLKAHVLLKENLLDKDCFPSDLGSST

SEQ ID NO: 105508 - protein, 87 aa, Gossypium hirsutum
  Clone ID: LIB3585-044-P1-K1-D12.pep
YGQGGSLSPPDSCCDGSGGWIDNEDEFYGTPMVEVVEDTEHRPNSSMMKSSSYLLSPDDRISNSQEIFGVPAKALEPEQYHKQVMAT

SEQ ID NO: 105509 - protein, 57 aa, Gossypium hirsutum
  Clone ID: LIB3585-044-P1-K1-E6.pep
FLTNCLTRGLKDRLNRPLFFSCSWKQSYRMTDSLPQSIESLSALLTHNQKTLLCIDI

SEQ ID NO: 105510 - protein, 50 aa, Gossypium hirsutum
  Clone ID: LIB3585-044-P1-K1-F10.pep
SLSSFLTSNANYIIITTRSRLSGVFIARRKNEKNSSITSLLLIRKTGKHS

SEQ ID NO: 105511 - protein, 46 aa, Gossypium hirsutum
  Clone ID: LIB3585-044-P1-K1-F11.pep
HFEGFGITVTEALIWGKLDLRKSKLQINRSNVYGCNARPSENNILK

SEQ ID NO: 105512 - protein, 59 aa, Gossypium hirsutum
  Clone ID: LIB3585-044-P1-K1-F12.pep
GKPGPTHASAYFSHRFSCYPFIPRPTMQRGLIIFIRSHTPSNVYKFKIPSSPNLNIFSY

SEQ ID NO: 105513 - protein, 47 aa, Gossypium hirsutum
  Clone ID: LIB3585-044-P1-K1-F4.pep
VSGDVVRSFSINFIAGYRYIGLVYVDHLRVFFLNAVNRISLGLCPHG

SEQ ID NO: 105514 - protein, 115 aa, Gossypium hirsutum
  Clone ID: LIB3585-044-P1-K1-F5.pep
NKIKGFAKWLGYSLTVCRVTDSGNTNGHTNRRKRNNFSQGKRRLNGRTNMAQQEDVIRKTVYVSDIDLQVTEELLAGLFLSCGPVVDCRICGDPNSVLRFDLVEFYNEEDAMAAF

SEQ ID NO: 105515 - protein, 45 aa, Gossypium hirsutum
  Clone ID: LIB3585-044-P1-K1-F9.pep
GLYIYIYKHKVDISFMVIVNVINITNYINIMENRNPCGRVGGRVG

SEQ ID NO: 105516 - protein, 49 aa, Gossypium hirsutum
  Clone ID: LIB3585-044-P1-K1-G12.pep
NWTKHRECFRLMSQRRHLINAIRTARCTRVPSYMHLLRWGKIGRVGRAG

SEQ ID NO: 105517 - protein, 33 aa, Gossypium hirsutum
  Clone ID: LIB3585-044-P1-K1-G2.pep
SLSFTMYKQSFSLIQHASRGVQVTIKLAHNLNC

SEQ ID NO: 105518 - protein, 90 aa, Gossypium hirsutum
  unsure (1)..(90): unsure at all Xaa locations
  Clone ID: LIB3585-044-P1-K1-G3.pep
MMPGVNQDQSGRGSEPFVEIDPTGRYGRYSELLGSGAVKKVYRAFDQQEGIEVAWNQVKLRNFSNDPSMIDRLYSEVRFLXRPLTNKNLT

SEQ ID NO: 105519 - protein, 78 aa, Gossypium hirsutum
  Clone ID: LIB3585-044-P1-K1-G4.pep
MKQRITFHIIIACILIFIINLLTTLLFIWTILRSTNPMFILQDTHFSSLTPSTSNHLTFNFQDTLFFSNPNYRIVIYY

SEQ ID NO: 105520 - protein, 51 aa, Gossypium hirsutum
  Clone ID: LIB3585-044-P1-K1-G7.pep
SSYKIMLGLINYIHLVAFGICILQWGHISISSSSTCILVNAQYEFQHPVDP

SEQ ID NO: 105521 - protein, 53 aa, Gossypium hirsutum
  Clone ID: LIB3585-044-P1-K1-G8.pep
MGTRVETTVVTVFLCLLFPIVFSTSNDGFFRIGLNKRNFDRNNLITAQLDSKL

SEQ ID NO: 105522 - protein, 85 aa, Gossypium hirsutum
  Clone ID: LIB3585-044-P1-K1-H4.pep
QFPSLTSSRRRYKLQKAKHPPFDTTNNAPSPSSSSSSSIPVYHLKKPYLCCWFCFFFYYLKTKKFIQKLIQKVLLSILHDLQCSL

SEQ ID NO: 105523 - protein, 41 aa, Gossypium hirsutum
  Clone ID: LIB3585-044-P1-K1-H5.pep
LSYNKLEQQDLLIGMQIPPATMVYRNFKDEIDRLCFGGGVG

SEQ ID NO: 105524 - protein, 40 aa, Gossypium hirsutum
  Clone ID: LIB3585-044-P1-K1-H7.pep
GTRLHNINFIVIDLSLYPGRGNYPNTPQCLTIYIVPYLTT

SEQ ID NO: 105525 - protein, 34 aa, Gossypium hirsutum
  Clone ID: LIB3585-049-P1-K1-A12.pep
YAYVHSCAHSFHNSLPSHHILPNTLAFIIRIIFL

SEQ ID NO: 105526 - protein, 84 aa, Gossypium hirsutum
  unsure (1)..(84): unsure at all Xaa locations
  Clone ID: LIB3585-049-P1-K1-A3.pep
KKKPNLFWXXFCRNLXXLDLTLXRIKPLIGVVAFSKXETTKTISSFFNQNQRKGLNIQPKNFPTTPTKTRLNPRFVFKFQFFKI

SEQ ID NO: 105527 - protein, 150 aa, Gossypium hirsutum
  unsure (1)..(150): unsure at all Xaa locations
  Clone ID: LIB3585-049-P1-K1-A7.pep
MDEEHMLLPSWMDKNPAEVAADSRFFILSCVIAGLVGILTIVYTAFQWRRNINLSWMKAVARSKKIPKTKHKVPVAPHTWELESVSRAKNLNCCACLKPMSPSQTLGPMISSDSFIHRCSICXXXTHLSCSTSAHKDCKCVSMIGFDHVM

SEQ ID NO: 105528 - protein, 132 aa, Gossypium hirsutum
  Clone ID: LIB3585-049-P1-K1-B2.pep
MNFRKGNLVEVLRGEDDPCGSWFTANIVSADVENCVVRYKLLMDHEGKQVVEKLQRKDVRPLPPSVNWKSWVVGDVAEVFDNRCWRVGKITKVLKNNHRFVIKFFGSIQLMEFHGSSLRIRQAWDGKKWMVR

SEQ ID NO: 105529 - protein, 165 aa, Gossypium hirsutum
  Clone ID: LIB3585-049-P1-K1-B4.pep
MFGKRIGFLKFKADIIDKGTGNKVPGIVFARGPAVTVLILLESEGTTYAVLTEQVRVPTGRVVLELPAGMLDDDKGDFVGTAVREVEEEIGIRLKLEDMVDLTAFLDPSTGFKVFPSPGSCDEELGLFLYRGCVDKNIITQLEGKETGCVKHGELIKVRVVPYEK

SEQ ID NO: 105530 - protein, 162 aa, Gossypium hirsutum
  Clone ID: LIB3585-049-P1-K1-C5.pep
MVTPNETGPCDFCNHRIALLYCRAGWAKLCLLCDHHVHSANLLSRKHLRSQICHNCSAQPVSVRRATHNLMLCQDCDWDTHGTCSVSAAHDRTPVEGFSGCPSALDLAAAFGLHLHDTKPSDQSWNSCHQHLMMPIAEPCFYGMSVQDLMEPYDSLCNGKTF

SEQ ID NO: 105531 - protein, 119 aa, Gossypium hirsutum
  unsure (1)..(119): unsure at all Xaa locations
  Clone ID: LIB3585-049-P1-K1-C9.pep
LVCFMEPFLLNLQSIRYYSHASILRGVPLKKMAHRHQHLTAEYVANTVNRGSYFRSLXLRAFYFSFPLFLWIFGPLPMYFSCIALVFLLYLLDITFKFVWAVGAVDDNGHNCHNGDEEL

SEQ ID NO: 105532 - protein, 155 aa, Gossypium hirsutum
  Clone ID: LIB3585-049-P1-K1-D11.pep
PKEKSYVRHGCLLSSTAALLPPHYPYYQTPPPAVTPPPPPPPPPGAAAPPLHYHSYIPHQQPTLPPPPPFPSYSFPHVAAYSSHDSVRTLFIAGLPEDIKPREIYNLFREFPGYESSHLRSPNTCQNSQPFAFAVLSDQQSALAVMQALNGMVFD

SEQ ID NO: 105533 - protein, 40 aa, Gossypium hirsutum
  Clone ID: LIB3585-049-P1-K1-D12.pep
RPKPFKSSCSLKTLIILLTNIIAQSVLYIKLPSNPPHHNH

SEQ ID NO: 105534 - protein, 163 aa, Gossypium hirsutum
  Clone ID: LIB3585-049-P1-K1-D7.pep
TVTFQAPVLCQACGGEGVPPGVKPEGCRHCGGSGMLSINKGFMSIRSTCPHCGGSGQFVSKLCKSCNGARLVKGPKTVKLDIMPGVDNNETLKVYGSGGADPDRTHPGDLYVTIKVRQDPVFRREGANIHVDAVLSVVQAILGGTIQVPTLTGDVVLKVRPGT

SEQ ID NO: 105535 - protein, 99 aa, Gossypium hirsutum
  Clone ID: LIB3585-049-P1-K1-D8.pep
LDRYDDKTGFTNYEHQSRFAHHLFHILTHYTAIDLLNILLSLALNFFTFSIFQASHLSSKERGGGRKPQFSQIPLKQKKALEGLMHIESNPCLPRNRHP

SEQ ID NO: 105536 - protein, 102 aa, Gossypium hirsutum
  unsure (1)..(102): unsure at all Xaa locations
  Clone ID: LIB3585-049-P1-K1-D9.pep
MSKTINLIKANASNPKVWIVAGITVAGILLLADTTRRRRRRKAIIIQRQDFGAFLERFDLIPFPQPPTPPAKXSITRFDVKGYVTGFGNPDWRRTHEPSDKM

SEQ ID NO: 105537 - protein, 134 aa, Gossypium hirsutum
  Clone ID: LIB3585-049-P1-K1-E5.pep
MSIRPPPLEEMRAVRRPELLAFSMVSLREIPQVPAVTLIKMEPFSNEAQSEPLINSDDGDDKEESVLDGLIKIGLSQNTTELNSQKAFASLKSVFPTWEDVYAAETKSLENAIRCGGLAPRKASCIKNVLSCLH

SEQ ID NO: 105538 - protein, 47 aa, Gossypium hirsutum
  Clone ID: LIB3585-049-P1-K1-F2.pep
KGRPLFFLIFYFFFFFIFFFFLGFVFFFFFFFFFFFFKVNQMLYIRM

SEQ ID NO: 105539 - protein, 166 aa, Gossypium hirsutum
  unsure (1)..(166): unsure at all Xaa locations
  Clone ID: LIB3585-049-P1-K1-G6.pep
SCMTPIGYSRCRAIEKVLESVKVTCRNXKYGCKEAFSYSMKQKHGKACLFAPCSCPLPDCDFEGSSEELSAHFGNVHKYSATRFLYDRLAPITLGVSEKFLILREETDGSLFILHNKVENLGNVVTLSRIGPSTERGFFYELTVKAPSDVSNLRLQSFTKSTPKRV

SEQ ID NO: 105540 - protein, 88 aa, Gossypium hirsutum
  Clone ID: LIB3585-049-P1-K1-G7.pep
YVCWFTHTALGASVVFQFMVQALCSSICIFWLDACKSYISGFSFYELTPLQKDSGYELNKKARTQFYEGFADGFYYKYLIICMKLTSL

SEQ ID NO: 105541 - protein, 132 aa, Gossypium hirsutum
  Clone ID: LIB3585-049-P1-K1-H6.pep
MAVSFSSFPWRFWSIGSKDKQLVSNGSSLNSSSSETVIFQTKITPSKGKGKWQGGEKTRVVQSDGVCLSGYESDGPEWSIGWEEPHGPGFQSDNEDDGGFVVLVPCYKPGCKQLVEGPNSQLLSAIKNLSNG

SEQ ID NO: 105542 - protein, 148 aa, Gossypium hirsutum
  Clone ID: LIB3585-049-P1-K1-H9.pep
MPDPTHSAKGASKRSKPPSTTLYIPPGQVAFRLLCHVSRVGGIIGKSGSVIKQLQQATGTKIRIEDAPAECPDRVITIIGPNAVNTKVVLDLGGDGEGGSRVDEIEVSKAQEALVKVFERILEVAAESNGAALGMVSCRLLAEVKQAG

SEQ ID NO: 105543 - protein, 172 aa, Gossypium hirsutum
  unsure (1)..(172): unsure at all Xaa locations
  Clone ID: LIB3585-051-P1-K1-A12.pep
TIDLRTRQQRIAEITEMIQVAXSLLHDDVLDDADTRRGVGSLNAVMGNKLAVLAGDFLLSRACLTLASLKNTEVVTLIATVVENLVTGETMQLTTASNKRFSMEYYMQKTYNKTASLMSNSCKSVALLAGHTAKIAMLAFEYGKNLGLAFQLIDDVLDFTGTSTSLGKGFFI

SEQ ID NO: 105544 - protein, 108 aa, Gossypium hirsutum
  Clone ID: LIB3585-051-P1-K1-A3.pep
MLREAKRPVERPISKIAGADRETIEKSRKSSSNSNSSNDIKDSWCWVPHPKSGIYFPEGHEWVMKDVPDGAASLNQTYWLRNVEGVDKPEPSEHEYFSSDHHYSHANM

SEQ ID NO: 105545 - protein, 171 aa, Gossypium hirsutum
  unsure (1)..(171): unsure at all Xaa locations
  Clone ID: LIB3585-051-P1-K1-A9.pep
HASPRVAAYDDECAICREPMAKXKSFTVYLFHLACLRSWLXRLNEXYSCPTCENHFSWRSENEEISTANFXVMSSARQINSGLNRQICLVSLPASIQIKCRSSRRHPWRSGGLDSEWLHSWPNQNVDGAGPSTDTRSVGLGRVHMMMKHLASVGETYAQTALEDTAWSLCP

SEQ ID NO: 105546 - protein, 176 aa, Gossypium hirsutum
  Clone ID: LIB3585-051-P1-K1-B11.pep
GNIRTEILPALPGPVSPQRPGHAPVSPHHSGRDKGKQIVEPRPNYKGKEPMSPHVASKGKGPERASVALRIKDPAPEPGIIPNNRFSATQALIIPKEEPFTDDMPQDVVPLAVIQPDSLSGRDLPIGDFSTEKSNWLEPPESLHAAEIAGAGASASGTERHTSCEHATVPDGIPLF

SEQ ID NO: 105547 - protein, 87 aa, Gossypium hirsutum
  Clone ID: LIB3585-051-P1-K1-B4.pep
HCRISLDHYCIIYEFATSNISAYADFYNSNYVLPNNIIPTKPATYCEQKTKFVTDYQEKPLRSPSLKTLTQTLYSPHHPSRSDSPLA

SEQ ID NO: 105548 - protein, 111 aa, Gossypium hirsutum
  Clone ID: LIB3585-051-P1-K1-B5.pep
MGQRNMLCPSQMIDLEMDQQGHGYLRHEPCTFLGNITNYPPPDIPMTVIAPGNTTSLDAHPLPQHYENGMFYGMPQYPVPGVQHCHHPPNLDLGIGNASNFYIPYVATPSS

SEQ ID NO: 105549 - protein, 151 aa, Gossypium hirsutum
  Clone ID: LIB3585-051-P1-K1-B7.pep
MATDGVSDGDRQSIHTATPIAATSSLDLGHASLRKLHQFPKHDTVKLTASNFLLWKQQILLILEGYGLHGFVLGTVQVPSQSILASDGSPVANPDFVVHTQQDKLLASWLTTISDSILVHLTGTGTSFDVWSKVLKRFAAKSSITMLTLKH

SEQ ID NO: 105550 - protein, 139 aa, Gossypium hirsutum
  unsure (1)..(139): unsure at all Xaa locations
  Clone ID: LIB3585-051-P1-K1-C7.pep
RGITLYITQGSILATKITPIQLSLKINNLFSIQISTTSILIILLXTAIKLYYLNNILKADPIAFLFNQVSASNLATTNPDAPEMLTLILRLLTNYTFHTYILRTLSDDTLYKLYHLCPSCIFLTKNEDTVTLCGLSLMN

SEQ ID NO: 105551 - protein, 64 aa, Gossypium hirsutum
  Clone ID: LIB3585-051-P1-K1-D11.pep
MAGNAASIFWLEEYSGKSLTPVGSKRKAKSKKLEFNGWGSKPLIEFLESIGKDTTEKISQHDVS

SEQ ID NO: 105552 - protein, 63 aa, Gossypium hirsutum
  Clone ID: LIB3585-051-P1-K1-D5.pep
NNINISFKMLIYFKHEFDSLQRYKNYYVTHPSQKLFSTFNNHLLIVLLTLIRSVKTINQSLLR

SEQ ID NO: 105553 - protein, 166 aa, Gossypium hirsutum
  Clone ID: LIB3585-051-P1-K1-E12.pep
NMSDKGDFTSLNRIPDLSLHISPPNSAPSSICAAGDSSFDIWRKDDGVNPKSHSDSSIKPASQADTQLSLANPTTSALEAESESPWEKKSFAPLARTDDDNIYHGISLLDVSGLKPIKGIPVYSNYAWSYSSYNCSSSSALHSPPRFNGISLVTLRPHFYPSSVGV

SEQ ID NO: 105554 - protein, 162 aa, Gossypium hirsutum
  Clone ID: LIB3585-051-P1-K1-E5.pep
MGDRQGGGYWCYMCSRVVNPTTEPEIQCPLCDSGFLEEVGSIRSHSNINHAAIDTESPNSLSLWAPIVLGLMGSSSQLRIASRDQVTQDDELGREVESLIRRRTSSSALPLRMLQGMRTVAAASESENGGNGSGRMILFDPINDEALVVQGSFDVTKPGSNS

SEQ ID NO: 105555 - protein, 166 aa, Gossypium hirsutum
  unsure (1)..(166): unsure at all Xaa locations
  Clone ID: LIB3585-051-P1-K1-F4.pep
LTSLTFEAFITIQYGEDFICVEGQLEPISGRTISRPVKKREKMTFAIGKSEEKCDVFKGRWVRNELTRTLYEESECPYIQPQMTCQEHRXPDTEYHKWRWHPHGXDLTRFNATLMMETLRGKRMRFDADSSNRGQCVSMICLLHTLMPEHAKAMKSYDDDALTEFR

SEQ ID NO: 105556 - protein, 164 aa, Gossypium hirsutum
  unsure (1)..(164): unsure at all Xaa locations
  Clone ID: LIB3585-051-P1-K1-G12.pep
MDVELPISNNLATTFDEVSLERSKSFVIALQELKNLRPQLYSAAEYCEKSYIHSEQKQMVLDNLKDYAVQALVNAVDHLGTVAYKLTDLLEQQILEVSAMELQASCLHQQLHTCQVYTGKEGLRQHQVFAFIPKHHXHYIXPNSVNKKXHFSPLVRTDSRQKYF

SEQ ID NO: 105557 - protein, 55 aa, Gossypium hirsutum
  Clone ID: LIB3585-051-P1-K1-G8.pep
SFIFHENERTKKLTPKRTLFFSSLFIFNNLILNNYTLAFISISVKFRESCRFLYI

SEQ ID NO: 105558 - protein, 102 aa, Gossypium hirsutum
  Clone ID: LIB3585-051-P1-K1-G9.pep
MNEIKNLQQMNSEAGTCSNDDTSISDLLMKIDADEESKVKFTDFTGLDGKHVTVGKYCFPLSLLSTLKLIINVYGDVAATSKMSPSITERIYVMFCASIKEM

SEQ ID NO: 105559 - protein, 186 aa, Gossypium hirsutum
  Clone ID: LIB3585-051-P1-K1-H5.pep
TESEGPGATARVRTLSDYSKSSPVAYVPIVSCAAIGCGAKCMEKINVGNNVGSRVIPMDHKLKVTVSLTLPESEYNRYLGMFQVRVDFLSVNGETLASSSRHCMLKFRSEPIRFLLTVFKIVPLITGYSSETQILNLKITGLHEGTVPTACLRVVLEQRAEFRSGAGIPELYDAFLILDSELSFFQ

SEQ ID NO: 105560 - protein, 56 aa, Gossypium hirsutum
  Clone ID: LIB3585-053-P1-K1-A1.pep
KTESESKANAKIQHSHDGVLILWRTCIKCAQRSEQKQVLYFFSIAKLFICFFAHLQ

SEQ ID NO: 105561 - protein, 168 aa, Gossypium hirsutum
  unsure (1)..(168): unsure at all Xaa locations
  Clone ID: LIB3585-053-P1-K1-A10.pep
SFNRSKDFELLLAYDNEGLLPPGLAGPVFAQFAVSGLTDAANKYSSRNLSSPIKANLHFSLTRSGILSLDLAEAAFQVTEWIEVPKRNLTVENSTIASSNVSVDLDAENTFEQNSSSLESDGGISNASNSTTEPNTVDLGTEKKLXKMTFRIPLKIMLKTXGPGIPFF

SEQ ID NO: 105562 - protein, 177 aa, Gossypium hirsutum
  Clone ID: LIB3585-053-P1-K1-A11.pep
PRVRPRVRSDLDDFQPCSSSPGTSSHLRTFLSCFIAGALVLLVSLGCYMFIKVRKSNLDHPLKQGSWNMKSYRMLSFTEKDIIDAIKSENLIGKGGSGNVYKVELEDGKELAVKHIWTSDSGNRKNYHSSTAMLTQRNSRNSGSLEYDAEVAALSAIRHVNVVKLYCSITSEDCNLL

SEQ ID NO: 105563 - protein, 167 aa, Gossypium hirsutum
  Clone ID: LIB3585-053-P1-K1-A7.pep
YLPRSQAPEKKRPSRISELEVRNSQVQEELKVVKEQLNSSESCENQAQRDAKEFKKQLLSMSAKPETCRKQLLESASEGTRVVELELISQGRHQALQPELEATRKQQSLDSAVNEIQRLKDHLEMVAESEAKQTKQAESTILDFKDLNGNLIETLSLVSNMKNRLKD

SEQ ID NO: 105564 - protein, 177 aa, Gossypium hirsutum
  Clone ID: LIB3585-053-P1-K1-B11.pep
PTRPPTRPAVRAIGRCAIKLDRAAERCISVLLELIKIKVNYVVQEAIIVIKDIFRRYPNMYESIIATLCESLDTLDEPEAKASMIWIIGEYAERIDNADELLESFLESFPEEPPQVQLQLLTATVKLFLKKPTEGPQQMIQVVLNNATVETDNPDLRDRAYIYWRLLSTDPEAAKDV

SEQ ID NO: 105565 - protein, 178 aa, Gossypium hirsutum
  Clone ID: LIB3585-053-P1-K1-B2.pep
EDLLSKPEQIRSKIVEGRIQKRIDELGLLEQPYIKNDKMVVKDWVKQTIATIGENIKVKRFVRFNLGEGLEKKSQDFAAEVAAQTAAKPISSAGKEQSTSVEVKETDEKPKAAVSAALVKQLREETGAGMMDCKKALSETGGDLEKAQEYLRKKGLSTADKKSSRLAAEGSIGSYIHD

SEQ ID NO: 105566 - protein, 169 aa, Gossypium hirsutum
  Clone ID: LIB3585-053-P1-K1-B3.pep
NALAIQSSSSRIIIEHRWEPYILLFCIFLFLLFRRRSSAHSLPLGPINFPIFGSLHRLGSHPNQSLYQLAKTYGPLMTLRIGYVTTVIVSSAEFAKQVFQTQEQSFSDRTVPDCVASQPNPESTLAWAPGDGRWRNPRRLCSTQLFTVQRLNSLQHLRHQKAQLLIQHI

SEQ ID NO: 105567 - protein, 163 aa, Gossypium hirsutum
  Clone ID: LIB3585-053-P1-K1-B7.pep
PTRPGIAWAFGGMIFALVYCTAGIAGGHINPAVTFGLLLARKLSLTRTVFYMIMQCLGAICGAAVVKSFQKTQYERLGGGANTISSGYSKTSGLGAEIVGTFVLVYTVFSATDAKRNARDSHVPILAPLPIGFAVFVVHLATIPITGTGINPARSLGAALIYN

SEQ ID NO: 105568 - protein, 171 aa, Gossypium hirsutum
  Clone ID: LIB3585-053-P1-K1-B9.pep
LNPEILLKLLQSMNSPTRVTGDHRSALLQVIGIVPALAGSDLWPNHGFYVQLSDSLNSTYVSLSERDTDLILSNRLQLGQFVYVDRFHFDSPVPRVSGIRPIAGRHPFVGSPDPLIARISSSKREFVIQPVSESEYSVDPIAVYLSNKKLDQQQISTENKDTKTEKSRARQ

SEQ ID NO: 105569 - protein, 176 aa, Gossypium hirsutum
  Clone ID: LIB3585-053-P1-K1-C2.pep
HASAHASALGWPVGGFPGPQGPYYCGGGADKSFGRDIVDAHYKACLYAGINISGINGEVMPAQWEFQVGPATGISAGDQLWVARYILERITEIAGVVLSFDPKPIPGDWNGAGAHTNYSTKSMRNDGGIDVIRKAIEKLGLRHEQHIAAYGEGNDRRLTGRHETADINSFSWGVET

SEQ ID NO: 105570 - protein, 166 aa, Gossypium hirsutum
  unsure (1)..(166): unsure at all Xaa locations
  Clone ID: LIB3585-053-P1-K1-C5.pep
GWQMRMSLGKILLQEPDLLLLDEPTRXDLDLDTIEWLEGYLKKQDVPMVIISHDRAFLDQLCTKIVETDMGVSRTFEGNYSQYVEAKAAWIETQYAAWEKQQKEIEQTRDLISRLGAGANSGRASSAEKKLERLQEEGQIEKPFQRKQMKIKFPERGRSGRSVVTI

SEQ ID NO: 105571 - protein, 38 aa, Gossypium hirsutum
  Clone ID: LIB3585-053-P1-K1-E12.pep
CKHINDMPRRTKNFAKMKLKISITLKAQRFGYRLCKNY

SEQ ID NO: 105572 - protein, 65 aa, Gossypium hirsutum
  unsure (1)..(65): unsure at all Xaa locations
  Clone ID: LIB3585-053-P1-K1-E3.pep
TPIQXLEILIDLIEXSIDQRDLXXSESQTAVFRVSTCTLNSRVSRQXTEILLXESLAEYRRSLXF

SEQ ID NO: 105573 - protein, 68 aa, Gossypium hirsutum
  Clone ID: LIB3585-053-P1-K1-F1.pep
VRLKEFAMQNKTRLRYQVFFYLSINLIVIYLFIYLCYKIERNTVIHKITLKSIHSCDHGRAPSLKQSF

SEQ ID NO: 105574 - protein, 80 aa, Gossypium hirsutum
  Clone ID: LIB3585-053-P1-K1-F3.pep
MTWCNDCSDVQTIERSSPPSSHKTVIAQRHKDCLLRACPSCGHQIKYRDQGGIHDLPGLPAGVKFDPTDQELLEHLEGKV

SEQ ID NO: 105575 - protein, 176 aa, Gossypium hirsutum
  Clone ID: LIB3585-053-P1-K1-F6.pep
HASAPPPEESQLHEKTIVLALPPPQQTKNSGGGGGREDCWSEDATGVLIDAWGERYLELSRGNLKQKHWKEVADIVSSREDYRKTPKTDIQCKNRIDTVKKKYKLEKAKIAAGGGPSKWVFFDKLDQLIGPTAKTAVNVATAADGGSGGSTGLLSKVPMGIPVGIRSSLNPLRVSQ

SEQ ID NO: 105576 - protein, 101 aa, Gossypium hirsutum
  Clone ID: LIB3585-053-P1-K1-F7.pep
CGLDHYGFQLVPLTKGNGQFADCILLEKNCPSKSVDQIRKYESIGHLLTFWIYTAFLPQTYKSVPSRLNHLALPVFPLYIKAEILNNLIVYEKSKKPQSNN

SEQ ID NO: 105577 - protein, 113 aa, Gossypium hirsutum
  unsure (1)..(113): unsure at all Xaa locations
  Clone ID: LIB3585-053-P1-K1-G11.pep
RIPFSPSFTIKATIYSSSSSTTIANTKGINITINITKPINRQNTGTSTLTRKVKVIVEENNLYNCIHNLINSLPNEDYTNDFKILGGDXRCYNSYSKHIIIKIAVKNGVGKIF

SEQ ID NO: 105578 - protein, 147 aa, Gossypium hirsutum
  unsure (1)..(147): unsure at all Xaa locations
  Clone ID: LIB3585-053-P1-K1-H4.pep
MASSREPCLLENGNLKGYNKEIRHGRTAHNMSSSSLRKKSHLTLVSKVPCRKLRQFLANLQEVILGTKLSVLFPAIPLAILADCYGFARPWVFALSLLXLTPLAELVSFLTXPIAYYTGSTVGGLLNATFGHSTELIIAIFALSQLK

SEQ ID NO: 105579 - protein, 106 aa, Gossypium hirsutum
  unsure (1)..(106): unsure at all Xaa locations
  Clone ID: LIB3585-053-P1-K1-H5.pep
LREVKNRCHHYKLNEFCTPKLVTNEDLYGILTTMIWTVLCQYALINLXQYPFRGYMPNRSTLMTKLIPYETNPVFDKIMQNPHRIFLSSLPPQVDTAKIMYVHDTL

SEQ ID NO: 105580 - protein, 156 aa, Gossypium hirsutum
  Clone ID: LIB3585-053-P1-K1-H8.pep
RTRGRTRGRSVMRSMVFSGERGMAMGPERSKPLHNFNLPCLKWGNRRYLRCMKLDDASTATDSSTALPADHNQHCRRRVLQRRRSPPSKFDSLMVGGMRRRESESSPSSKNTDYAREQQLRISKGEAAAGIEAVREKIIKDLKTAADEIKDAIFRD

SEQ ID NO: 105581 - protein, 62 aa, Gossypium hirsutum
  unsure (1)..(62): unsure at all Xaa locations
  Clone ID: LIB3585-054-P1-K1-A12.pep
PRVRKEGKVGTPERPLSDLGLLSXRGYWTRVLLDILKKHKRIISIKVSLPEAVLKILFGCRS

SEQ ID NO: 105582 - protein, 78 aa, Gossypium hirsutum
  unsure (1)..(78): unsure at all Xaa locations
  Clone ID: LIB3585-054-P1-K1-A9.pep
MEYDHGKAPTXAKKPGDXVIGGTYXNKNGCLLVKATHVGSETALSQIVQLVXAAQLARAPIQKIADRISRFFVPAIVL

SEQ ID NO: 105583 - protein, 115 aa, Gossypium hirsutum
  Clone ID: LIB3585-054-P1-K1-B10.pep
DWRNLALKARASATSADEANTSSLIPSTISLLLFLVIAAIPLISDWFKNAASQFDFDNLWKWIIPFWRSQRPLIEACSLSEVLIPKEHHIPHHGSTFLFFECPPIACLFKFPNFL

SEQ ID NO: 105584 - protein, 176 aa, Gossypium hirsutum
  Clone ID: LIB3585-054-P1-K1-B11.pep
FEEVRVEHDTNEPLTNSSITTAGTGEDGRSELCGTDLSFLGPPYGNMSTAKMVCSPIWNTFVLRYHQREDNVMTIILSAVYTTGWVGIGFSRNGMMLGSSAMVGWFNRKGHARIKQYYLQGAHVSQVIPDKGELPLNGIPPVVALHGAMIYLAFQAKFEHRLGRQPILLAFGTRVP

SEQ ID NO: 105585 - protein, 87 aa, Gossypium hirsutum
  Clone ID: LIB3585-054-P1-K1-B2.pep
RFWLVKTPATQVHDSPERLFGLFQPIDVGSLETLGVNCIKKTPCLLRGTPRRRILERFTLGRLLFHPLYQSQPYKYPKLQRKSGRVG

SEQ ID NO: 105586 - protein, 166 aa, Gossypium hirsutum
  Clone ID: LIB3585-054-P1-K1-B4.pep
PRVRFVYAGRKSKMRGKEARKNLLRGCNSKGKFENVVFIDVDGDRFENVVIIDAPESVEENLQGSSGSKGGKHFFSPSVISIDDDETDKIDDPEICVEPAGDLDSDASSRKSCPAPNFMKKSTGLDDDDDCSFIREKKPAFKLSKCKKTYAGKTPCGKRFGLSPDS

SEQ ID NO: 105587 - protein, 113 aa, Gossypium hirsutum
  Clone ID: LIB3585-054-P1-K1-E2.pep
TFLGMMKLLITMDDIKVHKNAPYNSRSEASTDHGSTDHELEDDHLHTDVYTVSNMKRHMDIHMLILQVIIHMFKTNLQLLLHFNINIIVNIMSYIASYAEELNYETTSRTTIQ

SEQ ID NO: 105588 - protein, 96 aa, Gossypium hirsutum
  Clone ID: LIB3585-054-P1-K1-E6.pep
TRPPTRPATVIGVTGRNRSRKQRFSVLKWKAKSVQRKVKVIGRLVPGCRKQPLAVILEEATDYIAALEMQVRAMSALADLLSGSSSATSSSPPTSQ

SEQ ID NO: 105589 - protein, 173 aa, Gossypium hirsutum
  Clone ID: LIB3585-054-P1-K1-F10.pep
PTRPPTRPPTRPPTRPPTRPPTRPRGRPEIFSIQKKARFTDMKALVFLVVANGVAAAYSLVQVVRCVVSMVKGSVLVNKPLAWTIFSGDQAMAYLNVAAVGAAAQSAVFAKLGQAELQWMKICNLYGKFCNQVGEGISMAVLASVCMVLQSGISAFTLFCLCGVNIAKGNFRW

SEQ ID NO: 105590 - protein, 70 aa, Gossypium hirsutum
  Clone ID: LIB3585-054-P1-K1-F6.pep
IQPIPQSLWYSNTIKEIRIITTTYHYLWLTHCSQHDNKLILPITTCQLIMSPAPYGAQTKSFVIAPSLLD

SEQ ID NO: 105591 - protein, 145 aa, Gossypium hirsutum
  Clone ID: LIB3585-054-P1-K1-F9.pep
EALCLLYVTNKYLGTVAITYGPSMLPTLNVTGSILLVERISTRTGKLRPGDVVIFRSPETPRKIVCKRLIGLEGDQITYVVDPQSGDRCETIVVPKGHVWVEGDYIYNTKDSRNFGALPYGLLEGRAFWTLLPRKDFGPLTPKPK

SEQ ID NO: 105592 - protein, 148 aa, Gossypium hirsutum
  Clone ID: LIB3585-055-P1-K1-A1.pep
RDPKPVSNPCKLLCSEPSFDQRRAAVRSWGNQPLEEADPELNEIMNKEKQRQFLGIELIASENFVCRAAMEALGSHLTNKYSEGMPGARYYTGNHFIDQIETLCHERALTAFNLDSEKWGVNVQPYSGTSANFAVYTGLLLPGDRIMG

SEQ ID NO: 105593 - protein, 81 aa, Gossypium hirsutum
  Clone ID: LIB3585-055-P1-K1-A6.pep
LPLMYLQSESESLSILPMVFNLNHFPYSPGLQSSWSLLRTLLLPNAIFPFYRKKIIFDRSSKNCCDRRCNIFDISCFQRSQ

SEQ ID NO: 105594 - protein, 106 aa, Gossypium hirsutum
  Clone ID: LIB3585-055-P1-K1-A8.pep
MMMMKGEQWSNLGSTMAAIMFAYAMFRQYFPPQLQDYIFRYGKKLSNFMYPYVHVTFDEFIGERMKKSEAFSAIQNYLSDKSSSNAKRLKADVVKDSQSLVLSMDY

SEQ ID NO: 105595 - protein, 41 aa, Gossypium hirsutum
  Clone ID: LIB3585-055-P1-K1-A9.pep
QKSNQMMKKKTHKFETIKNKIPSAKSARVDERMGERVGERV

SEQ ID NO: 105596 - protein, 89 aa, Gossypium hirsutum
  Clone ID: LIB3585-055-P1-K1-B12.pep
IAHSLVNELLEQTLTFFFMPFMHTGLFSFFCHFHVSLDFMQLMVLHSSFNFHVTFQLLHCSDACLLRFILRLIKFHAMNNNFISVCVMK

SEQ ID NO: 105597 - protein, 159 aa, Gossypium hirsutum
  unsure (1)..(159): unsure at all Xaa locations
  Clone ID: LIB3585-055-P1-K1-C1.pep
QDDLRXQDSAAWIEYFESKAVGQQEAARNGTPKPDASIASKGHLSVSDLLDYISPDQVSKGTDVQKKPLRAKVLQTSDKTHDACHNFVTDSSVFNAVSEKSISTADINERGMVSSICLEEPKKTNDVTRVEPMVTSEVFEETTSDEGWQEANSKGRSGN

SEQ ID NO: 105598 - protein, 74 aa, Gossypium hirsutum
  unsure (1)..(74): unsure at all Xaa locations
  Clone ID: LIB3585-055-P1-K1-C9.pep
ENPGATSRLSASRLSCKNSLDYFXVRGLELXFQKWWAAXSHLLCTLSXXMLTSNLNSAICCCLKLPRSESPLFI

SEQ ID NO: 105599 - protein, 24 aa, Gossypium hirsutum
  unsure (1)..(24): unsure at all Xaa locations
  Clone ID: LIB3585-055-P1-K1-D1.pep
IHHNNARHNYGHTVGFIXPFVPLI

SEQ ID NO: 105600 - protein, 163 aa, Gossypium hirsutum
  unsure (1)..(163): unsure at all Xaa locations
  Clone ID: LIB3585-055-P1-K1-D5.pep
LTNDKFKWHRVVVQGQGPGPGYGHVMDLVAQRYLVTVSGNDGKRVLSDAWALDTGQKPYVWQRLNPEGDRPSARMYATASARSDGMFLLCGGRDSSGAPLADAYGLLMHRNGQWEWTLAPGVSPSPRYQHAAVFVGARLHVTGGTLRGGRAIXGEATVAILDT

SEQ ID NO: 105601 - protein, 122 aa, Gossypium hirsutum
  Clone ID: LIB3585-055-P1-K1-E1.pep
RQQQLEHHRQQQLEHQLQQQLEHQRQQQLELQRQQQLELQQYQRLLELQRQQQLELQQHQRQLELQRQQELRHHQIELLQQLQQQHLQQQNSQAQQILLDQLLEHQISDPGYGQDVFDAARD

SEQ ID NO: 105602 - protein, 66 aa, Gossypium hirsutum
  Clone ID: LIB3585-055-P1-K1-F1.pep
PDIVFTVAPDVELDDESEVDSKLDSNVCRVGLLDSDTTGLSYPTIDPSTSVDTFSSTTNNIKSIGN

SEQ ID NO: 105603 - protein, 159 aa, Gossypium hirsutum
  unsure (1)..(159): unsure at all Xaa locations
  Clone ID: LIB3585-055-P1-K1-F6.pep
QEVKIQRMQRLQDLGTTMLKXWKLMDTPIEEQQMFQNVTCNIAASEHEIAEPTTLSVDFIKYVEAEVSRLEELKSSKMKELVLNKRLELEEICRKTHLVPDSQSAVEDAIEAIESGAVGAATILEQIELQIAKVKEEAFSRREILERVEKWLMACDEEC

SEQ ID NO: 105604 - protein, 158 aa, Gossypium hirsutum
  Clone ID: LIB3585-055-P1-K1-G2.pep
MCSRGHWRPAEDGKVLDLVQRYGPHNWNAIAEKLQGRSGKSCKLRWFNQLDPRINRSPFTEEEEERLLASHRIHGNRWSVIARLFPGRTDNAVKNHWHVIMARRCRRQRSSSKTLPPSTSTSHQPHITSTTLFPHNNYMHAFPPYSYFKHLLRTQSKP

SEQ ID NO: 105605 - protein, 105 aa, Gossypium hirsutum
  Clone ID: LIB3585-055-P1-K1-G3.pep
MRDTMVDFEIKDAMISLGKRKRGRKPNVQAVNSEEERERGLEIVNKNGVAVDLVALGGLEDPYAEELKRRTEGMAGSEEALLGFMRDLGGQWCIRRRKRKIVDAS

SEQ ID NO: 105606 - protein, 148 aa, Gossypium hirsutum
  Clone ID: LIB3585-055-P1-K1-G6.pep
QKKCQIGLRYSVRDQTGDLKASKSILHSFAAEALAGLDAIKLVIKMGLTTATIKGDSKTVIKKCQSKEMDKSVLGVIIHDIQIRKSSVQDVTFQFIHRSKNTQADNLAKEVLERKDESYLVGEMTVRSEQIQREDGEKIWIEVVRTRG

SEQ ID NO: 105607 - protein, 167 aa, Gossypium hirsutum
  unsure (1)..(167): unsure at all Xaa locations
  Clone ID: LIB3585-055-P1-K1-H4.pep
PRVRPRVRIDAAVKNELFLQECPCFPTGTXNSREASGYNSSRQLEYGHNEMYLNAPSSQPSQQFQPGNTAFVQRPLPPSLPQTSSSHFSFTKPSMPPHPQHSYPPQYSLPSQHDGRRPFVSDEQWRMPAGEYIAGRNPPSAGPLFVQEAYFRPPGERTPSNNMAFPI

SEQ ID NO: 105608 - protein, 152 aa, Gossypium hirsutum
  unsure (1)..(152): unsure at all Xaa locations
  Clone ID: LIB3585-056-P1-K1-A12.pep
NYANERLQQHFNRHLFKLEQEEYIQDGIXWAKVDFDDNQDCLNLFEKKPLGLLSLLDEESTFPNGTDSSFANKLKQHLKSNPCFRGEREKAFTVSHFAGEVTYDTSGFLEKNRNLLHLDSIQLLSFCLCHLPSIFASNILNQSEKPLVGPLH

SEQ ID NO: 105609 - protein, 172 aa, Gossypium hirsutum
  Clone ID: LIB3585-056-P1-K1-A9.pep
MSCCCDENDDESTLTSRLDSFSSNPILIDSTATISPMNSHFAALTCRDTLRLIFEKLSLADLARASCVCKTWNAVASDDNMVVEAFKAPWKLLDVVGTPSSRSFWRDNGIGKFAISHRILRGETVASLAVKYSSQVTDIKRLNNMMSDHGIYSRERLLIPVSNPDILINGTC

SEQ ID NO: 105610 - protein, 179 aa, Gossypium hirsutum
  Clone ID: LIB3585-056-P1-K1-B4.pep
NSLLELPSFVSFFLHYRVEASGFFEVHFNMSEDEQREYFELQETEYPETVPSVLKHKSSKQVVLESETSGLSNTISAMQSISISMPSAGNKIITVVDENAQGFSINGVGGDSCPPLETLGNNAEPKAVMFLSRPMSKGSSIGEADNDSQRFKDKNFDFFKTWSGKLERQITSLSGRSRK

SEQ ID NO: 105611 - protein, 159 aa, Gossypium hirsutum
  Clone ID: LIB3585-056-P1-K1-B5.pep
GNLVPSFGTCSDIVGLNVDSEAVPIPGNSVPSSSVNEGDLHEDFDFSDEVLKYISQMLMEEDMEDKTCMFKESSAALQAAEKAFYEVLGERYPPSPKYDGDQNQESSDESHGQNCWGCSSASISSGSVVDPGHNHDFSEQRALNFPSQASSSHSSGNST

SEQ ID NO: 105612 - protein, 166 aa, Gossypium hirsutum
  unsure (1)..(166): unsure at all Xaa locations
  Clone ID: LIB3585-056-P1-K1-C5.pep
HASAQNAGESPVVNLFKSAXGATVSNPRCXNPASFYTMSKQAEAADLLYKANLNTGSVLEYALAFTSAALDKYCSKWSAAPKTGFIDITTSKDFYRIYSGLQIGYLEQSVQLQPNNHDMLGDSVAWGGCTIIYLLGQQLHXELFDXSYQILNVAEVEAASIMQTHK

SEQ ID NO: 105613 - protein, 79 aa, Gossypium hirsutum
  Clone ID: LIB3585-056-P1-K1-D1.pep
SFVPMPNKNSIPSNWSSHRLTVTSSSMSMWSVLLFFDSFMYPPSTPHLRSLASPHHLSIVVSVARPSALPLYFEETLKN

SEQ ID NO: 105614 - protein, 190 aa, Gossypium hirsutum
  unsure (1)..(190): unsure at all Xaa locations
  Clone ID: LIB3585-056-P1-K1-D10.pep
RPVLVVSSPSATEECLSRSDTVFANRPXLLAGKHLGYDYTTLVWAPYGDHWRNLRRVASLQLLSSNRVQKYLGIRMDEVKSLVVRLFRSTSKGSGEFQVVEMKSMFFELTLNVMMRMIAGKRYCRNGEDELEEEKKFKEIVRESFQVSGATNIVDFVPILKWGGLNKIEKKLGILPEKRDEFIQNLVDER

SEQ ID NO: 105615 - protein, 96 aa, Gossypium hirsutum
  Clone ID: LIB3585-056-P1-K1-D12.pep
TVVFLSYNLSSMCKPVAIVNDCTVFVASFQRSPPSVVSCLSDLQTSTGVHMKTRSTTIGASSSSSVKPLKDFSLHSVVSKVRSSLVVRVPDCSVNG

SEQ ID NO: 105616 - protein, 107 aa, Gossypium hirsutum
  unsure (1)..(107): unsure at all Xaa locations
  Clone ID: LIB3585-056-P1-K1-D3.pep
MKAKAVQSSFRDRTQEFLSVSERLRKSITSGPSQNGPSSSSSRAEDKRSVVAHQSEFNRRASKIGLTIHQTSQKLSXLAKLAKRTSVFDDPTMEIQELTAVIKQDIT

SEQ ID NO: 105617 - protein, 67 aa, Gossypium hirsutum
  Clone ID: LIB3585-056-P1-K1-D9.pep
FPLFSASKAHFVPKSRGDGAFCSPTSNLDRHSGPHQSFSSVYRHQNYLIDSFCVFPRVRGRVGGRVG

SEQ ID NO: 105618 - protein, 166 aa, Gossypium hirsutum
  unsure (1)..(166): unsure at all Xaa locations
  Clone ID: LIB3585-056-P1-K1-F9.pep
MSTVYVLEPPTKGKVIINTTYGPLDIELWPKEAPKAVRNFVQLCLEGYFDSTTFHRIIKGFLVQGGDPTGSGTGGESIYGSVFPDEFHSRLRFNHRGIVACANAGTPHSNGSQFFISLDKCEWLDRKNTIFGKVTGDSIFNLLRIGEVDTDQDDRPLDPSXRIKSV

SEQ ID NO: 105619 - protein, 85 aa, Gossypium hirsutum
  unsure (1)..(85): unsure at all Xaa locations
  Clone ID: LIB3585-056-P1-K1-G11.pep
FKLQWNRSPGKSGSHFDPXSDLFVPTERKDVITSTLSWTAMAAILVGLGFTMGPMQLLKLYGIPYWVGFKFLLSRKRYREVENMI

SEQ ID NO: 105620 - protein, 114 aa, Gossypium hirsutum
  Clone ID: LIB3585-056-P1-K1-G12.pep
FTSIISASSVVLRRQQFLIRSLKGYSVSDKIRMEAVKCLSGGASLEANAESVLRAITPSLDPTRHKGQAGKIAVVGGCREYTGAPYFAAISALKIGADLSHVFCTEGAATIIKS

SEQ ID NO: 105621 - protein, 193 aa, Gossypium hirsutum
  Clone ID: LIB3585-056-P1-K1-G3.pep
ELRDSKSRSLMESHDSFGQAKSDVNDSGGDWKFPFGIPDASTGITMVSPPESPLDKLPDDLCAALHDGREIFHSPRYKSTSTSAAFYDCNDDEMIDNHGGKTASADTRRAVYLGKDADLGFSEEEVDSARKIKSTSNSDCTKKKRVLPSQPLDFETELPSLSYGKAEDWEKADEDPDVYETGTGHSDTNASRL

SEQ ID NO: 105622 - protein, 191 aa, Gossypium hirsutum
  Clone ID: LIB3585-056-P1-K1-G9.pep
LSCKHLFDMFRVASSLEKRSEHCKSVLETLIGSQLDQATIDFLLVPPPRKKHYMYDMNLVLRLVNAFQNELSCCSSLVRLRKVGSLLDSYLVEVSADSYLTPSKFAALVLLLPDSARESHDRLFQAIDIYLQVHGGICEAEKMRICSALNYAKLSTDALRHLARNSKFPSRIAIQGFINQQSKLENLFEGQ

SEQ ID NO: 105623 - protein, 155 aa, Gossypium hirsutum
  unsure (1)..(155): unsure at all Xaa locations
  Clone ID: LIB3585-056-P1-K1-H8.pep
PKFKTLLCSEVVSEVSGDPQTSGQPAAGCVSPQNQLVSVSQIQTTVDTKHPSSEEDEKLRHTPNARASSAMGQYDSAEYVTIGEVPTPPADNFKKVSVLPLIFLIFYEVSGGPFGVEDSVQAAGPFLALLXFLVFSFIWSIPEALITAEMGTMFP

SEQ ID NO: 105624 - protein, 77 aa, Gossypium hirsutum
  unsure (1)..(77): unsure at all Xaa locations
  Clone ID: LIB3584-025-P1-K1-A10.pep
TAFLLDVLKPNLPEHAFLQTRVXEINLVTFPNVADAILANGMFSHYDRPRIAQLCEKAGLYALSLQHYTELPDIKLC

SEQ ID NO: 105625 - protein, 90 aa, Gossypium hirsutum
  unsure (1)..(90): unsure at all Xaa locations
  Clone ID: LIB3584-025-P1-K1-A4.pep
SRVFESNFKLTKNKWKFSCFRCDFFSPENPKSEYIDHFLPEETVQPEVDKSSPHKRDWKSTLPEAADAVLRAVGXQWTVPWTAQTILKVM

SEQ ID NO: 105626 - protein, 46 aa, Gossypium hirsutum
  Clone ID: LIB3584-025-P1-K1-B11.pep
RMSRNTTFLKAGEKIGYYVEPISSGSPGRLSRTACYLLKHLHLSQK

SEQ ID NO: 105627 - protein, 46 aa, Gossypium hirsutum
  Clone ID: LIB3584-025-P1-K1-B6.pep
QLISLFVWFVRVFYGRGGAYSMFTGRDASRSLAMLSFKPEDLTVNL

SEQ ID NO: 105628 - protein, 69 aa, Gossypium hirsutum
  Clone ID: LIB3584-025-P1-K1-B7.pep
QNTRSLSHRDLRSLLYIRARGYIPISMSYTTQFALNISPLSTSLKHNQQPLHGISDVISLRWPSLTIRP

SEQ ID NO: 105629 - protein, 74 aa, Gossypium hirsutum
  unsure (1)..(74): unsure at all Xaa locations
  Clone ID: LIB3584-025-P1-K1-C11.pep
QNQCTIANYIISVERLNQGMVIPSEAPEVIEENRPPSNWPAVGKVEIRDLHDXYRPNAPLGLLGISRSFQCGHK

SEQ ID NO: 105630 - protein, 127 aa, Gossypium hirsutum
  Clone ID: LIB3584-025-P1-K1-C4.pep
HASATAEEALADPYFKGLAKIEREPSCQPISKLEFEFERRRLVKEDVRELIYREILEYHPQLLKDYINGNEGTNFLYPSAIGQFRKQFAYLEENSGRSVPVFLPERKHTSLPRNTVHSITIPLNRQS

SEQ ID NO: 105631 - protein, 33 aa, Gossypium hirsutum
  Clone ID: LIB3584-025-P1-K1-C8.pep
RYSLQIWCDNVRIYIDSPLVKVRRTYTIRYGVW

SEQ ID NO: 105632 - protein, 43 aa, Gossypium hirsutum
  Clone ID: LIB3584-025-P1-K1-D12.pep
KRRFSENANKRLGCKLDSDRTNCSTRCSYVYRPTRSNPSSGNW

SEQ ID NO: 105633 - protein, 53 aa, Gossypium hirsutum
  Clone ID: LIB3584-025-P1-K1-E7.pep
LRLVSMMVAEGSQTILIRGETAYANYFLPCATSAVYAPRRCNAPPFYLVYSNR

SEQ ID NO: 105634 - protein, 117 aa, Gossypium hirsutum
  Clone ID: LIB3584-025-P1-K1-F10.pep
PRVRFNWFFFIFYSACVVSSLGIVYVEDSISWGLGFGMCAAFNFLGLVIFFLGNRFYRHDKPQGSPYTSLARVIVAAFRKRNVLVSSESKYYYHVINDGANKAIVVTPKRSCRFLNS

SEQ ID NO: 105635 - protein, 94 aa, Gossypium hirsutum
  Clone ID: LIB3584-025-P1-K1-F11.pep
YDCTKHRSIFRDLLEKLCHVEELTVGTWCLQVLSIWEIKGISSPLSKRHCLVLETEICEWDIPGIVNLLHSSPYLKKLVINLNYCDNSKFEFDQ

SEQ ID NO: 105636 - protein, 61 aa, Gossypium hirsutum
  unsure (1)..(61): unsure at all Xaa locations
  Clone ID: LIB3584-025-P1-K1-F2.pep
KTLTGKTXITLEVESSNTIDTVKTKIQDKVGIPPDQQRLIFAGKQIEDGRTLADNNIQKES

SEQ ID NO: 105637 - protein, 49 aa, Gossypium hirsutum
  Clone ID: LIB3584-025-P1-K1-F8.pep
KAWFFTVILLSHFAQCDVSSSPYSILITSVMLAHAILATSQIGSSRSIA

SEQ ID NO: 105638 - protein, 62 aa, Gossypium hirsutum
  Clone ID: LIB3584-025-P1-K1-F9.pep
PTRPPTRTTTRTKRKTDHERELPILELILVTSQWRKGPSKLNLLNLAFPGETYHRITHARNS

SEQ ID NO: 105639 - protein, 74 aa, Gossypium hirsutum
  unsure (1)..(74): unsure at all Xaa locations
  Clone ID: LIB3584-025-P1-K1-G3.pep
PTRPVGCDNNEVDELRXLVDEGYYLLGTLNWSDHLPWLAQFDPQNIRVRCSNLVLKVNGFVSGIISQHRVRTNE

SEQ ID NO: 105640 - protein, 83 aa, Gossypium hirsutum
  unsure (1)..(83): unsure at all Xaa locations
  Clone ID: LIB3584-025-P1-K1-G7.pep
SRLCHCGLLRSNELLPTRLMVKLDPASKLYCPYEPDKQGRSAXIKIKNTCKSYTAFKFQTTAPKSCLMRPPGAILAPGESFIS

SEQ ID NO: 105641 - protein, 185 aa, Gossypium hirsutum
  unsure (1)..(185): unsure at all Xaa locations
  Clone ID: LIB3584-025-P1-K1-G8.pep
RFPAMRTRKYIFVIAVDCDSVSDIPKVIRTIMDAAGKENPIGFILSTSLSVSEVHSILISGSISPLDFDAFICNSGGDVYYPSLSSEDGLGLPFTVDSDYQSHIEYRWGGEGLRKTXVRWATSVSDKNGQTVEEDESRSTTQCYAFRVKDAXLIPPVKELRKLMRVQALRCHVIYCQNGTTLNVI

SEQ ID NO: 105642 - protein, 121 aa, Gossypium hirsutum
  Clone ID: LIB3584-025-P1-K1-H8.pep
AYNAETTIMGERLKNSCDVRHSVWEPPDNDTIKINFDVSFNQITRCSISSIIARNKEGLIMVACTYPWENISDPVMAEARACLQAIIMAREANKAAHAMAKEGGRYGYHRFWIEEAPHIVE

SEQ ID NO: 105643 - protein, 60 aa, Gossypium hirsutum
  Clone ID: LIB3585-052-P1-K1-B6.pep
QHFSFYSTCCFLFSWKLLLAVLSIVQFMTDGSKRCSDCWFILFSQPYSYFNKIATAAMCF

SEQ ID NO: 105644 - protein, 53 aa, Gossypium hirsutum
  Clone ID: LIB3585-052-P1-K1-B9.pep
AGLFKRVLDLLENWLGRDTLGAFYINVTSGTTAGSYGIAMDCGKLGDQVTEFN

SEQ ID NO: 105645 - protein, 141 aa, Gossypium hirsutum
  Clone ID: LIB3585-052-P1-K1-C5.pep
EVYDNAWPHSPIECAHEDGKVVFQDGSIVEAEVIIHCTGYKLHLPFLKSNGIVTVDDNRVGPLYKHIFPPSLAPGLSFVGINYRALVFRVIELQAIWVAKVLSGKVKLPTQEAMAASVEEFYEQMEKAGLPKYHTHSLQND

SEQ ID NO: 105646 - protein, 110 aa, Gossypium hirsutum
  unsure (1)..(110): unsure at all Xaa locations
  Clone ID: LIB3585-052-P1-K1-C9.pep
WIWVNGLAIWAWYYFVCSLGPVIWAFTKLTTILTDQSALLALKDHVIHDPENVLTTNWSASAPVCYWFGVSCVXGLGLVDILPPQLGNLSFLSLLRIRNNSFYGILPVQL

SEQ ID NO: 105647 - protein, 128 aa, Gossypium hirsutum
  unsure (1)..(128): unsure at all Xaa locations
  Clone ID: LIB3585-052-P1-K1-D11.pep
MATNPILKALNVLPNDPSTSCRACPVSXDMYHWQSTLIGPPYSPYAXKVAYNTIHLPYNYAFQTPNVAFNTNVFHPNIYNNGLLCLNILKEQWSSNLTISKASLLNCSLLTDPNPDDPLLPEIDHMYT

SEQ ID NO: 105648 - protein, 120 aa, Gossypium hirsutum
  Clone ID: LIB3585-052-P1-K1-D4.pep
RTYQNSSNRRGVLARFTSSARVPRLRNRILNQSRAVSSRARNYHFPLDMDFDMRLDILEAMEAAIGDDDDIAGHIFRAHNDFNNGDYERFLTLDDNNHQHTGASLHRINSLPLYKVQTDN

SEQ ID NO: 105649 - protein, 59 aa, Gossypium hirsutum
  Clone ID: LIB3585-052-P1-K1-D9.pep
RDMANPSSKATESGSGELQTSSTTPGGADTYTKYDDGANPYEPQIMGFLKRDSECTIPM

SEQ ID NO: 105650 - protein, 45 aa, Gossypium hirsutum
  Clone ID: LIB3585-052-P1-K1-E9.pep
QTLTQSSITLIFCFYCERAYMKNLNTSTNLYLYLLHFYIITIYYS

SEQ ID NO: 105651 - protein, 155 aa, Gossypium hirsutum
  unsure (1)..(155): unsure at all Xaa locations
  Clone ID: LIB3585-052-P1-K1-F12.pep
EDVVAARHEAQKLKEHIRSMQNESDIQIXVLQEKIAKMEPDIRVGESVKKELQQALIEAQNLVKVRQELIAQIQQASQELAKTRSDVKCLPELHAELEDLRKEHHRLRVTFQHEKESNIEQVEQMQAMEKNLIRMAKEVEKLRAEVLSAEKKMNG

SEQ ID NO: 105652 - protein, 152 aa, Gossypium hirsutum
  unsure (1)..(152): unsure at all Xaa locations
  Clone ID: LIB3585-052-P1-K1-F3.pep
MVVKMMRWRXPWPPLLSKKYEVKLIVRRLEGWDPVRESTDKPEKLTVEIRWKGPKASLSSLRRTVKRNFTKEADAGDQNGVVLWDEEFQTLCSLSAYKENVFHPWEITFSVLNGLNQGAKNKFPSIIGTASMNLGEYASSSEQKEFELNVPL

SEQ ID NO: 105653 - protein, 65 aa, Gossypium hirsutum
  unsure (1)..(65): unsure at all Xaa locations
  Clone ID: LIB3585-052-P1-K1-F5.pep
HXXLYSXSDALFYTQNLNRPALSYKLSLNIVNLLNKIIYNPPKNYLQLSILIKIIIIPILSNTYK

SEQ ID NO: 105654 - protein, 55 aa, Gossypium hirsutum
  Clone ID: LIB3585-052-P1-K1-F8.pep
LIQTVMCLHPLRTKIKSYLGSTNVAKSMVKLLSREDEVFRSMRIRELNLKIIVMK

SEQ ID NO: 105655 - protein, 102 aa, Gossypium hirsutum
  unsure (1)..(102): unsure at all Xaa locations
  Clone ID: LIB3585-052-P1-K1-G2.pep
VGETDMLHTMQKAALHLTAKASLYFXATESTDIAQFIKKDFDRVYGPGWQCVVGTDFSSFVTHCHGCFIHFCVGSLAILLFRGAVNQAKEANLFPTFEALDA

SEQ ID NO: 105656 - protein, 82 aa, Gossypium hirsutum
  Clone ID: LIB3585-052-P1-K1-H11.pep
RVRFAVDEKPVQVQTTINGRRAKGHKLEVPRNIDEAKTKKSANVYNMPRTMKNQSSNLQERKQTRQEKPAISREADHEASTF

SEQ ID NO: 105657 - protein, 46 aa, Gossypium hirsutum
  unsure (1)..(46): unsure at all Xaa locations
  Clone ID: LIB3585-057-P1-K1-A2.pep
YPNRIIKLKSAXQVPLNQGRRVQWKXAXRGLQPIRMDXGVKHRIYR

SEQ ID NO: 105658 - protein, 169 aa, Gossypium hirsutum
  Clone ID: LIB3585-057-P1-K1-A6.pep
SSPRLGTMKKSSVSTRKSGACRSPGTPNYHHHNNLSAGMQKGSSSERVPLHNNGVKRQGNVAGMLPCNNGRTLPSKWENAERWILCPGDSGVKQSVMHPQRRPKSKSGPLGPPGAAYNSLYSPSMYIFDGGNMGNFMAGSPFSAGIISANGLVAHSRSHGGGFAVRTEP

SEQ ID NO: 105659 - protein, 119 aa, Gossypium hirsutum
  unsure (1)..(119): unsure at all Xaa locations
  Clone ID: LIB3585-057-P1-K1-B9.pep
MSYQQVEGFDYMAEDFCDDMDEDSCGSAADGDVDADEYDMLTKVTDTSAAQARKGKDIQGIPWERLNITRESYRLTRLEQYKNYENIPSSGETVDQEYKQIEKGGNYYXIFHNTRSVKP

SEQ ID NO: 105660 - protein, 111 aa, Gossypium hirsutum
  unsure (1)..(111): unsure at all Xaa locations
  Clone ID: LIB3585-057-P1-K1-C7.pep
MGNCQAAEAATVVIQHPGNKIERIYWSVSANEIMGSNPGHYVALVVTSPTMKNENGTPVKQLKLLKPDDTLLIGQVYRLVSFEDVXKEFAXKKCVKLGKLLKENGGLGLGM

SEQ ID NO: 105661 - protein, 77 aa, Gossypium hirsutum
  Clone ID: LIB3585-057-P1-K1-C9.pep
STQVALLGAFLYGCGDRVYIGVSVISSGGVSVTVSPECSKLANDNAASYSARLSDCMDTLASHRLGEDCLLSHRRVV

SEQ ID NO: 105662 - protein, 54 aa, Gossypium hirsutum
  Clone ID: LIB3585-057-P1-K1-D10.pep
TINCKLCSFTLIFLPPKLNQERKIKAFDQQTLRLIKYCIPLTQATHTQKKTRMN

SEQ ID NO: 105663 - protein, 148 aa, Gossypium hirsutum
  Clone ID: LIB3585-057-P1-K1-D2.pep
MAFWWPIIVLAFAYAICRFLLMLIPPNVPSIDVDASDVLDDGNQTQENSFIYIPPRGRPQQSDRKVQCYEPATMKYLGFFPALTPAEVEERVAQARKAQKIWAKSSFKQRRQFLRILLKYIIEHQELICEVSSRDTGKTMVDASLGEI

SEQ ID NO: 105664 - protein, 172 aa, Gossypium hirsutum
  Clone ID: LIB3585-057-P1-K1-D3.pep
PRVRPRVRLQLSLSASNLRNVGILSKSDPMAVLYVKKMDGTLEELGRTEVILNCLNPTWIEKINVSYQFEIVQNLVFHVYDVDTKYYNMSVKALKLNEQDFLGEATCVLSEIVTKRNQSLTLNLHGKNGPGGSKNFGTLTVHAEESCLSRMAVEMKLRCSELGNKDMFSKSD

SEQ ID NO: 105665 - protein, 153 aa, Gossypium hirsutum
  Clone ID: LIB3585-057-P1-K1-E1.pep
MHCKDCAKWVGALPEMSFSANTEDLHDDGFEGSHDEHGIFTKVFFENGGGSTSKRCPIAGVGNFECEHSKKLDTSLCSNSANSAVTSWSCSKNLCQEDTNAVIESYGGTLSGLMLFFWFPEKLPLFIAWQLLCETQWKRLAGGMCHARSSALD

SEQ ID NO: 105666 - protein, 109 aa, Gossypium hirsutum
  Clone ID: LIB3585-057-P1-K1-E3.pep
MGEMSSFQLGVIGALFLSVASSVSIVICNKALMSNLGFPFATTLTSWHLMVTFCTLHAAQRFSLFESKPIDMKTVMLFGILNGVSIGLLNLSLGFNSIGFYQMTKLAII

SEQ ID NO: 105667 - protein, 123 aa, Gossypium hirsutum
  Clone ID: LIB3585-057-P1-K1-E4.pep
DVRKLGQRTSSEAVPESLHNEATREREENTTKVAEDYEYRVGETSNERPEKAPADREGTPQYHENQSLTLGSAKEFNFENVDGVDAHKPILSSDWWANKKVAGKDDNVARNWSFFPMMQPGVS

SEQ ID NO: 105668 - protein, 64 aa, Gossypium hirsutum
  Clone ID: LIB3585-057-P1-K1-F1.pep
PKLPNFKNFANYDFFFSGRQIMDSGQNIRTLKIFLYRKIRESKPKTKVRRVSKEINSDRYCLTD

SEQ ID NO: 105669 - protein, 169 aa, Gossypium hirsutum
  Clone ID: LIB3585-057-P1-K1-G3.pep
RPQKPPSGVPTRWVSLFCIVRGFLGVLVVNRFWDPVEVEEEASSAQKHRRNEVHPMVICDKDVSVRTGNILSRVSQTRDVINTLDKTISSLERQLAAARAAKADTEEGSPMVTKSGTKDLNESRRVFFVMGIITALRNRKRRNSIRETWMPQGEELKRLEKEKGIIIRF

SEQ ID NO: 105670 - protein, 58 aa, Gossypium hirsutum
  Clone ID: LIB3585-057-P1-K1-G4.pep
IIILIKSINHILFSSFKNLKNYCKTENKNRNVRKQSKKGTEPNRSLPSNWFDLISASV

SEQ ID NO: 105671 - protein, 170 aa, Gossypium hirsutum
  unsure (1)..(170): unsure at all Xaa locations
  Clone ID: LIB3585-057-P1-K1-H10.pep
VYKGTMKGGPEIAVISLCSKGERWTGYLELYYQREVAELARLNHENLGKLLGYCRESTPFTRMLVFEYASNGTLYEHLHYGEGSQLYWTRRMRIILGIARGLKYLHTELDPPFTILELNSSAVYLTEDFSPKLVDLESWKSILSRSEKNSGSVGNNRSRCLLXNSVEKRH

SEQ ID NO: 105672 - protein, 80 aa, Gossypium hirsutum
  unsure (1)..(80): unsure at all Xaa locations
  Clone ID: LIB3585-057-P1-K1-H9.pep
LRGNERLDRXKGKQNKLNTKLDLDQNRREVEAEPRXLTSVALSAKAESIKNLENPKVEAFINTRFCVKNRVQSPQNAPGE

SEQ ID NO: 105673 - protein, 110 aa, Gossypium hirsutum
  Clone ID: LIB3585-018-P1-K1-C12.pep
FVIVHWYTKAAIPADPTEELRRMLQEARRYVESALNNLAADVPNAENLCQQTKAKEDIHIQLYNSVSAISNPRIEEFIMHDQNEKRMKLLDHKHSFIFFKLTPQLSLHDN

SEQ ID NO: 105674 - protein, 59 aa, Gossypium hirsutum
  Clone ID: LIB3585-018-P1-K1-C9.pep
SCSIARPSAGYCIGLVHQLVIHTDPYLCLNDVELLYLVLLSSVKEPLSGMHLCFSNSQS

SEQ ID NO: 105675 - protein, 88 aa, Gossypium hirsutum
  unsure (1)..(88): unsure at all Xaa locations
  Clone ID: LIB3585-018-P1-K1-E10.pep
CREPYLLRFSLLFAEITDDIGPVAIKLQVSLFYGSTASGQKCLDSVFHLTNSNPTCLIMILNKLPVWHTYNAGGKSIFXVVNYVQGHI

SEQ ID NO: 105676 - protein, 46 aa, Gossypium hirsutum
  Clone ID: LIB3585-018-P1-K1-F1.pep
SDQSFNLSQFGSDKISIKTPSHCSWLIIPYCTPDIAVRKLECLDAW

SEQ ID NO: 105677 - protein, 59 aa, Gossypium hirsutum
  unsure (1)..(59): unsure at all Xaa locations
  Clone ID: LIB3585-018-P1-K1-F10.pep
PRVRPRVRPRVRTLTISPYQLKFLISNHFLINEDLHNLRILEFVFLLLLCXSXLDQTEI

SEQ ID NO: 105678 - protein, 67 aa, Gossypium hirsutum
  unsure (1)..(67): unsure at all Xaa locations
  Clone ID: LIB3585-018-P1-K1-F7.pep
LSFSFILQSLFAPSMLHHFIRRQLFXYILLSIHLLKPPTSLFIYQLTAISLISFCTPSLSLLYSFVL

SEQ ID NO: 105679 - protein, 98 aa, Gossypium hirsutum
  Clone ID: LIB3585-018-P1-K1-G1.pep
AIVIQIVPLGSIDELAKQDFEQPAMDMELSYLEYKIKAKESSLISKYKADHLIIKDPLSVHKQGWDAVRSIYLDKQNVKLDIKRFRPTLLKALQLLHQ

SEQ ID NO: 105680 - protein, 174 aa, Gossypium hirsutum
  unsure (1)..(174): unsure at all Xaa locations
  Clone ID: LIB3585-018-P1-K1-G9.pep
GKRSFYAAAPLSLCTFCVLEAFNFAADQVAEFKVEGQELVSVTGFDLWGYVKPITRLGWCQWAGAAIFAWGWFHQYCCHAILGSLRERGDRTADYVSPHGDWFEIVSSPHYLAEMIIYAGLLVASGGTDFTIWLLLGFVVANLAFAAAETHQWYLXRKFEDYPRNRWAILPFVY

SEQ ID NO: 105681 - protein, 81 aa, Gossypium hirsutum
  Clone ID: LIB3585-018-P1-K1-H7.pep
KPGRPTRTLFSWHGGPIILLQIENEYGGMEGLYGQKGKEYFRWAANMALGLGAGVLWVMCKQTDSSGDIIDTCNYYYCDGF

SEQ ID NO: 105682 - protein, 69 aa, Gossypium hirsutum
  Clone ID: LIB3585-018-P1-K1-H9.pep
FHQIRTNSSRWFIDPTERSKAFMRGTALWISTIPFPAKRSSVEATKPSAGLWPLSQGCTHPMPTHRHAA

SEQ ID NO: 105683 - protein, 55 aa, Gossypium hirsutum
  Clone ID: LIB3585-050-P1-K1-A1.pep
PHFNNSFYLPSIHPDRTVCGPCPDPHSHSSQLPEVLIHRRVHPLPRLLPLHHHLL

SEQ ID NO: 105684 - protein, 70 aa, Gossypium hirsutum
  Clone ID: LIB3585-050-P1-K1-A12.pep
SYSKQADYNNTGLTDARHHSDHDLNAVNRNSSYSNLPFDMTRGFQLQPRCGAYKAKTNEHFMPWRKKWNS

SEQ ID NO: 105685 - protein, 179 aa, Gossypium hirsutum
  unsure (1)..(179): unsure at all Xaa locations
  Clone ID: LIB3585-050-P1-K1-A9.pep
AALAQMNLLQQQRILQMQYHHQLXKALPQQRPQLQPQFLQQNLPIRSAVRPAYEPGTCARRLTQYIYQQQCRPNDNNIEFWRKFVAEYFAPNSKKKWCVSLYGNSRQTNGXFPQDIWHFEICNRKPGRGFETTVEVLPRLFKIKYDSGTFEELFYVDIRREYLNGNGQIVLDYSKAIQE

SEQ ID NO: 105686 - protein, 63 aa, Gossypium hirsutum
  Clone ID: LIB3585-050-P1-K1-B10.pep
PRVRPTCDHAYNHASSHAYVHTFGEGHYSVHSKTLYSLLSTIPFFPSPNIIYLQYLPPLNQGL

SEQ ID NO: 105687 - protein, 62 aa, Gossypium hirsutum
  unsure (1)..(62): unsure at all Xaa locations
  Clone ID: LIB3585-050-P1-K1-B5.pep
SYIRPGCVVLSVYVSMPAAAWEQLERXLLRYVNCLLQDSDSNFWRKARFLVHTGNRQLTSHK

SEQ ID NO: 105688 - protein, 156 aa, Gossypium hirsutum
  Clone ID: LIB3585-050-P1-K1-B8.pep
MSSESQGVSLTSSAPPMKRKRGDYTPATPEPDNLKRNKQSAWISDPASSDMLGQMVSGVIEGSFDAGYVLQVKVGDTNTHLRSLVFLPGLFAPITNANHVAPHAKMHKRKDIPIPFVNLHGHLHVLSPSWKNEKPVEQNNDTFNRPDRSLHHGLEP

SEQ ID NO: 105689 - protein, 130 aa, Gossypium hirsutum
  unsure (1)..(130): unsure at all Xaa locations
  Clone ID: LIB3585-050-P1-K1-C1.pep
PTRACSLSQCFTPYPLFPLIRKNDVEGLHIQRGQCTYQIGAKLLEAVSAEHVIYVTAPYQXDSDFQLVRINVYYNEARXGRYAPAAVIIDLGPGTMDSIRSGPDEQIVRPDNFGFGGSGAWNNWAKGHYT

SEQ ID NO: 105690 - protein, 72 aa, Gossypium hirsutum
  Clone ID: LIB3585-050-P1-K1-C3.pep
PYIRTRVLKLGRFSPQQAPTLIQLHGMICIILAHITYHLPTKTLNEVTNSPYQTIKTNSIYNKVTTLVTNHR

SEQ ID NO: 105691 - protein, 168 aa, Gossypium hirsutum
  Clone ID: LIB3585-050-P1-K1-C6.pep
VLDRERLHAIETFGFSCNFSAQLERGTLSSDMSAFKAANPGAVFEDFIRWYSPRDWENDESEAKGPSTDLTEGMNVDWPPQGRLSRRMSESGNFWRKIWDEAPILPASEQKPLLDPNREGKKILHYLETMQPHQLLEQMVCTVFRASADTLNQTNYGSLKEIDTKMDQ

SEQ ID NO: 105692 - protein, 140 aa, Gossypium hirsutum
  Clone ID: LIB3585-050-P1-K1-D4.pep
ELCNRQYKLAMEFEVHLSSYDHNHRERFKEMREMHGSSSRDDRQKREQQRQEREMAKFAQMAGARKQQQQESREESGPATTPAPAPASAIATALADQEQRKTLKFGFSSKSSSSKNASGSAVKKPKVAVASVFGNDSDDE

SEQ ID NO: 105693 - protein, 178 aa, Gossypium hirsutum
  unsure (1)..(178): unsure at all Xaa locations
  Clone ID: LIB3585-050-P1-K1-E1.pep
DDALDDSTRTCLELLCGPDGELPEXLRNLEPRLIEHVSNEIMDRDPNVRWEDIAGLEHAKKCVTEMVIWPLLRPDIFRGCRSPGRGLLLFGPPGTGKTMIGKAIAGEAKATFFYISASSLTSKWIGEGEKLVRALFGVASCRQPAVIFVDEIDSLLSQRKSESEHESSRRLKTQFLIE

SEQ ID NO: 105694 - protein, 173 aa, Gossypium hirsutum
  Clone ID: LIB3585-050-P1-K1-E2.pep
RTRGEEIATVDESAATKFPTAVKTPRVTPAVSVTPRKRTIPSKKSQTGQKHDLVPISKTPVRKSSYSSRRESLPLLTRTAALVTPYRANVDVGLLRSINSPDVSVNTPRIDKITEFPLAPSDGPLFCVRGTSSTSAKCSSSSINSANHSITKDNCTVQTLDKGITTSNCSDQS

SEQ ID NO: 105695 - protein, 174 aa, Gossypium hirsutum
  Clone ID: LIB3585-050-P1-K1-E3.pep
PTRPPTRPRTRGGMSNVNVKSLLVSREDVLAMVFALLEYFFELLLFPGLKEHFWVSNLGLAMLVVGEIVRKLAIVTAGRSFTHLIRVYHEDHHKLVTSGVYAFVRHPSYCGFLIWSVGTQIMLCNPIATVGFAVVVWRFFAARIPYEEYFLRQFFGADYEEYARKVPSGVPFVM

SEQ ID NO: 105696 - protein, 57 aa, Gossypium hirsutum
  unsure (1)..(57): unsure at all Xaa locations
  Clone ID: LIB3585-050-P1-K1-F12.pep
IPVISYHHSLTVVFDILGNIIXILLFLIPLPIFCFIYKKKSTLSFQSLPYYVTFFTY

SEQ ID NO: 105697 - protein, 102 aa, Gossypium hirsutum
  unsure (1)..(102): unsure at all Xaa locations
  Clone ID: LIB3585-050-P1-K1-F7.pep
NRLRNKNYFHLILNHHSCHRFKIPSAKTIIKVNSYPRTMIYVNRPVTRTQGPIFHSIPIDLSRDLFWNXQYLKTCDKFSFSDLHPEQTAKFSTRLYLKLTRV

SEQ ID NO: 105698 - protein, 74 aa, Gossypium hirsutum
  unsure (1)..(74): unsure at all Xaa locations
  Clone ID: LIB3585-050-P1-K1-G11.pep
LYCIKHHIYPDXKLHDXKTAAGGYDALNTPFNQSXARKHIHRTILXNTVPTVILLIITVSFCQIYHPKQLISFI

SEQ ID NO: 105699 - protein, 105 aa, Gossypium hirsutum
  unsure (1)..(105): unsure at all Xaa locations
  Clone ID: LIB3585-050-P1-K1-G4.pep
EAVRKKDGLDSLVXEEGXNWSMGRGGILFGRALLRXSRVLVLDEATASIDNATDLILHKTIRTEFADCTVITVAHRIPTVMDCTMVLAISDGKLVEYDEPTKLIH

SEQ ID NO: 105700 - protein, 164 aa, Gossypium hirsutum
  Clone ID: LIB3585-052-P1-K1-A5.pep
AMNPIVAAGISPNFRDAKGRAALHWASYFGREETVIALIKLGASPGAVDDPTPNFPGGRTAADLASSRGHKGIAGYLAEANLTTHLSSLTVNQNVVGNDAATKPAQEAIETPSEVAPSNRTLDDNCSLKGSLAAVRKSAHAAALIQAAFRARSAHFRQLTKGND

SEQ ID NO: 105701 - protein, 155 aa, Gossypium hirsutum
  Clone ID: LIB3585-052-P1-K1-B11.pep
FLAFFFVEICSFILPAASFDFTLEFQRKKKLSGQQKKEVLEREISMLQKMLNQEEKMHEILTRVHHQEAGSSISIPNFLPPKTKELLAELAMVEGEIARLESQISQLRLDLKQEKEATKAKQWQPGSLMSYLQGHPSTTSNPNPIKQGGQEKVVF

SEQ ID NO: 105702 - protein, 150 aa, Gossypium hirsutum
  Clone ID: LIB3585-016-P1-K1-F12.pep
LICGTSTGGIFASALGIKLMSSDQLEEIYRNLGKVVFSEPVQKKNEAATWKHKLDQLYKSSSQSFRVVAKGSKHNAEKLEKLLQDMCADEDGDDILIETAVKNIPKVFLVSTLASVTPAQPFIFRNYQYPVGKPEVPIATFKNSRTTMLG

SEQ ID NO: 105703 - protein, 170 aa, Gossypium hirsutum
  unsure (1)..(170): unsure at all Xaa locations
  Clone ID: LIB3585-016-P1-K1-F2.pep
PTRPKVAIKRGNPLSEQGVHEFQTEIEMLSKLRHRHLVSLIGYCEENCEMILVYDYMAHGTLREHLYKTKKPPLPWKQRLEICIGAARGLHYLHTGAKHTIIHRDVKTTNILLDEKWVAKVSDFGLSKTGPTLDHTHVSTVVKGXLGYLDPEYFRRQQLTDKSDVYSFGV

SEQ ID NO: 105704 - protein, 109 aa, Gossypium hirsutum
  unsure (1)..(109): unsure at all Xaa locations
  Clone ID: LIB3585-016-P1-K1-F4.pep
TRSYLSFEKNLSIESQKGLTIAILSSFXLTPAYHXTAKHGDQRWMILLESFLGLTNGHLTVCVMTATPKCYKGPEQNALGNILVLCLLLGIXAGVASDWMWLIGKKNAS

SEQ ID NO: 105705 - protein, 171 aa, Gossypium hirsutum
  Clone ID: LIB3585-016-P1-K1-F5.pep
HASDPLVFGDYPPEMRQYHRSELPRFSSEETEYMRGSIDFIGLNHYSTLYAKDCIHSRCVLGGDHFIRGFTFTTGERDGILIGEPTGVERFYVVPRGMEKIVDHVSKRYNNMPIYVTENGYCPPLTEAAPNLLHDVNRINFYNGYLAALSRAIRKGADVRGYFAWSLMDNF

SEQ ID NO: 105706 - protein, 32 aa, Gossypium hirsutum
  Clone ID: LIB3585-016-P1-K1-G2.pep
EKLFWSSPLYDCCESTFKSKKPTPHLASAFLE

SEQ ID NO: 105707 - protein, 41 aa, Gossypium hirsutum
  Clone ID: LIB3585-016-P1-K1-G4.pep
MLRYDQGAYLFLPSYVMRTHGAKQQGETVKRTPRKQLESVF

SEQ ID NO: 105708 - protein, 137 aa, Gossypium hirsutum
  Clone ID: LIB3585-016-P1-K1-H1.pep
GFRVTTNVLVPKLAKIVLILYTCSQESIVSMAVAGAIIGAAIGGWMNDRFGRRTAILIADFLFFIGAVVMASAPNPSLLIVGRVFVGLGVGMASMTSPLYISEASPAKIRGALVSTNGFLITGGQFLSYLINLAFTN

SEQ ID NO: 105709 - protein, 173 aa, Gossypium hirsutum
  Clone ID: LIB3585-016-P1-K1-H3.pep
MLQMSNVGSYPPVFRQLNGEGVHPPQQMMAQLKKNNYSMEDTSTTTQEDSVPIPMVDLECLSLHKLGDACKNWGLFRLVNHGIPSTLLTKLQYHAKMLFGLSFESKQALITNPMSYFWGTPALTPSGTALNPAASTSTMNWLEGFNVPLTQLPHFHSEHPMLHCLSFCLKNME

SEQ ID NO: 105710 - protein, 117 aa, Gossypium hirsutum
  unsure (1)..(117): unsure at all Xaa locations
  Clone ID: LIB3585-016-P1-K1-H4.pep
MARRLCNVTSRIMGGTGFVSCSVAFRFGLRFGVGLHVGKHMPPDKHVPVNDEIITDNGTAFTEPSIDPIADTDAXIXALACMCGGSNFFSSVGLMDKGNDKAFKITFSPXDYPYDNL

SEQ ID NO: 105711 - protein, 53 aa, Gossypium hirsutum
  unsure (1)..(53): unsure at all Xaa locations
  Clone ID: LIB3585-016-P1-K1-H6.pep
LGTRLLTLTLSLPKALHKVINKPMILHNTEASKAVGVTEXVLSIKYQPDEMFN

SEQ ID NO: 105712 - protein, 89 aa, Gossypium hirsutum
  Clone ID: LIB3585-017-P1-K1-B1.pep
MEKKDKETMSKMDDYEVIEQIGRGAFGAAFLVLHKAEKKEYVLKKIRLAKQTEKFKRTALQEMNLMAKLNNPYIVEHKDGWVEKGSYVC

SEQ ID NO: 105713 - protein, 45 aa, Gossypium hirsutum
  Clone ID: LIB3585-017-P1-K1-B12.pep
IKHPYNEPLGRTPILFAILELLGAKTLKYTIVIEILILHQVFLSV

SEQ ID NO: 105714 - protein, 160 aa, Gossypium hirsutum
  Clone ID: LIB3585-017-P1-K1-B3.pep
MSSSQNSKVTAPYGSWKSPITADVVSGSSKRLGGTAVDPQGHLFWLESRPSESGRVVLVKEAGDEPIDITPPEFAVRTLAQEYGGGAFRISGDTVIFSNYKDQRLYKQSTSSKGSCPVPITPDYGGPVISYADGVFDSRFNRYITVMEDRRVSSTNSTTT

SEQ ID NO: 105715 - protein, 185 aa, Gossypium hirsutum
  Clone ID: LIB3585-017-P1-K1-C6.pep
LPSEQHRETLASEIVRSLGHLSEPELSSIRARLLREFLPDDVCPLGSQFPTDAPHKVYQASAEENEFIIEGAPILSLDDDDDAFVEPFEGQIMDNSEFSGEISNLMDVNQLLESVLETAYQFGRSSVCTGPNMSYKEIAHHCEALVTGKQQKMSHLLSAQLRQDNMTNQAGPIVEQTGNTNLFKL

SEQ ID NO: 105716 - protein, 182 aa, Gossypium hirsutum
  Clone ID: LIB3585-017-P1-K1-D10.pep
PRVRVPVGIPGILITDVSKTMDLIDYYNVSTPRDWTGRVKSFKAIGSIGDGLMPILHKSAPEVALFSARGPNIRDFSFQDADLLKPDILAPGSLIWAAWSPNGTDEPNFVGEGFALISGTSMAAPHIAGIAALLKQKHPQWSPAAIKSALMTTSTKLDRAGRPLQAQQYSETEAMKLVPATP

SEQ ID NO: 105717 - protein, 177 aa, Gossypium hirsutum
  Clone ID: LIB3585-017-P1-K1-D12.pep
ELLKKRLVQACPSCSSASGISYYRSELQSPKPPDVFLIKLCCVDRKGLLHDVTQVLSSLELNIQKVKVSTTPDGTVVDLFFITDTRELLHTKNRQEETYKALEDVMQDAMISFNIEKVGPEITACCQASPYLPSAITDDIFNLEMSNDLPSVSLTFNNVCVTMDNSLSPAHTLVQIV

SEQ ID NO: 105718 - protein, 171 aa, Gossypium hirsutum
  unsure (1)..(171): unsure at all Xaa locations
  Clone ID: LIB3585-017-P1-K1-E4.pep
MEVPGFDVDGDPQPHGHGSLIQSLFAFCPSQKALTTSATHINMESWDGNSSSSQHPDSGIFSHRLSPNTQIHLFSPNPSNEDEGRMCQASIVVDEKRLRRMISNRESARRSRMRKKQQIEELQSQVNQLQTINRQLSQKLINLLENNHEILQENAQLKEKVSTLHMXLSDV

SEQ ID NO: 105719 - protein, 129 aa, Gossypium hirsutum
  Clone ID: LIB3585-017-P1-K1-G8.pep
KLEAAWKNEDVKNPSRKTVKDVVEKFGSDDDVIAIGDVYFADVERDWVLQPGGPIAHKCKTLIEPSKLILLTAERFIQTFLGSNFIALHFRRHGFLKFWYVFLFCCDLLLRKPRTFIVLRYRIKSKTLK

SEQ ID NO: 105720 - protein, 79 aa, Gossypium hirsutum
  Clone ID: LIB3585-017-P1-K1-G9.pep
KRKVNEDIKSNIPTVPSFPIRCMSGVVKTKKHKLTILPFLKSHHSLLLLLQTNTTQLCYLHPTLLTFLTFFGRVGGRVG

SEQ ID NO: 105721 - protein, 162 aa, Gossypium hirsutum
  Clone ID: LIB3585-017-P1-K1-H1.pep
MKFLFRFISGPNRTLLRSLGRRQFSDLTGTKAKRNYADNVSEYNTVLASLNAKRRHFLLRDVFDDMMLDGVQPTRDTFEALIMGTMRGSRLQDALFFRDEMKAMGLVPEVSLYNFLISTCGKCKNANLAIQILEEMKRYNVKPNGQTYVCLINACAAAGRLD

SEQ ID NO: 105722 - protein, 163 aa, Gossypium hirsutum
  Clone ID: LIB3585-017-P1-K1-H10.pep
FLRHHTLLAHSITNYADLASHLGVSFYADPHDLFEQHPDVVLLSTSILSTETLLQKLPFQRLRRNTLFVDVLSVKEFLRNLFLKYLPPDFDILCTHPMFGPESGKTSWAGLPCVYDKVRIGDEESRIKRCDKFLDIFEKEGCRMVEMSCMEHDKYAAGSQFVT

SEQ ID NO: 105723 - protein, 63 aa, Gossypium hirsutum
  Clone ID: LIB3585-018-P1-K1-A1.pep
SVSFSRFQHSIVVVRVMAFSKKNWSWWIKKYLQHLYALSCGVAQHCWAACSTIRVSFLQIAQN

SEQ ID NO: 105724 - protein, 151 aa, Gossypium hirsutum
  unsure (1)..(151): unsure at all Xaa locations
  Clone ID: LIB3585-018-P1-K1-A10.pep
VIEDTHIINGKQVEIKRTIPRGAAGSKDFKTRKIFVGGIPSTVSEDEFKDFFTQYGVVREHQIMRDHATNRSRGFGFITFETEQAVDDLLEKGNKIDFAGAQVEIKRAEPKKPNSPPPPSKRYNDSRTAYGGGFXDGYGRYGCGGFGGGYN

SEQ ID NO: 105725 - protein, 64 aa, Gossypium hirsutum
  Clone ID: LIB3585-018-P1-K1-B3.pep
PTRSILAMFVRKPQKKLLINEKLRRLGSRKIVTNRKRRFSSPLNLPFSSAPNLLKLTLSFSHFP

SEQ ID NO: 105726 - protein, 117 aa, Gossypium hirsutum
  Clone ID: LIB3585-018-P1-K1-B4.pep
MGRCGRHNGAVRQYIRSKVPRLRWTPQLHHCFLHAIDRLGGQHKATPKLVLQLMDVKGLTISHVKSHLQMYRSMRSDYGRQVTSSTHERRQSFDDNHGFDGCVVPIEELCSHLIYIN

SEQ ID NO: 105727 - protein, 76 aa, Gossypium hirsutum
  unsure (1)..(76): unsure at all Xaa locations
  Clone ID: LIB3585-018-P1-K1-B6.pep
PTRPVFKNRTPFWFGFFNTAEEAVXAGAMADHXLIREFSRLNCTHLNHPRAHVLGEFVDSKPLHALVDAKLHAICQ

SEQ ID NO: 105728 - protein, 64 aa, Gossypium hirsutum
  Clone ID: LIB3585-018-P1-K1-C1.pep
PTRPQYSAYRLTSSLISEYKAVGWMYQERSLYNVGKDKIADLETATELDPTLPFPYKYRAVLKA

SEQ ID NO: 105729 - protein, 67 aa, Gossypium hirsutum
  Clone ID: LIB3585-014-P1-K1-E6.pep
ELGTVKVNPMTPGAKACTSAWSTTCCTPDSDTPSHTHDIETTHSTRDVGAPSDTPAYALRVCTCMCH

SEQ ID NO: 105730 - protein, 170 aa, Gossypium hirsutum
  Clone ID: LIB3585-014-P1-K1-E8.pep
ADVLAGYDYVPAAALVSHPALYSKELMKQHPVGPAIVHPAEAAKGPSWNDLLEPGVKHALVVGVGIEMLQQFSGMSSILYYIPEILELAGVRGLLSNTGLSSSSASLLISCVTTFLMLPSITVVMRFVDVAGRRRLLLITVPLLALCLFILVIGSFVKMGSVVRSAISTG

SEQ ID NO: 105731 - protein, 149 aa, Gossypium hirsutum
  Clone ID: LIB3585-014-P1-K1-G12.pep
MATPPVAAGGNFEASPPPPMQPPGTDMTGICFRDQLWLNTYPLDRNLVFDYFALSPFYDWTCNNEQLMMRSIHPLDLSQLSKMTGMEYMLSEVMEPHLFVIRKQKRDSAEKVTPMLAYYILDGSIYQAPQLCNVFAARVGRALYYISKA

SEQ ID NO: 105732 - protein, 77 aa, Gossypium hirsutum
  Clone ID: LIB3585-014-P1-K1-H1.pep
KKKSDNNNFSRSSFEQIIRFLFPFYPNTQFCILRKSSRIFLYHRQHCNNFFSLFFFNHGIMKFRFIILKNFIFFLIF

SEQ ID NO: 105733 - protein, 130 aa, Gossypium hirsutum
  Clone ID: LIB3585-014-P1-K1-H11.pep
MSIACCCPVLECVYCLACARWAWQKCLYTAGHESEHWGLATVEEFEPVPRLCRLILAVYEDDLHNPLWAPPGGYGINPDWVFLRRNDQETEGRAPPYMIYLDHENADIVFAVRGLNLAKESDYAVLLDTN

SEQ ID NO: 105734 - protein, 64 aa, Gossypium hirsutum
  Clone ID: LIB3585-014-P1-K1-H6.pep
CYRVSSIFSVTNRYAIDQVDLSICSTMCDLQFVIFLYPDPIGTAFESIHDLFLVYESILFHSHS

SEQ ID NO: 105735 - protein, 68 aa, Gossypium hirsutum
  Clone ID: LIB3585-014-P1-K1-H9.pep
GSAVDAIVVTIMFGVTEAAYSSFYITLINLLTIERSYFNSVLAICYVSCLLITICSSLQKCRDLVSFC

SEQ ID NO: 105736 - protein, 65 aa, Gossypium hirsutum
  Clone ID: LIB3585-015-P1-K1-A11.pep
FGFCGPLAAFPDFFPALNFTNSLALLVSDLDFSSLHVDSWLVNQRPGLYLEREKKNQRKDMRLGI

SEQ ID NO: 105737 - protein, 104 aa, Gossypium hirsutum
  Clone ID: LIB3585-015-P1-K1-A4.pep
PKLYAEVASSTVSSSDSRIEDISSINFVSCLTSWHNPLIKPSTARSIGRVEHPLLVNSLKFDLCHPSNLLILPLVVVQISPPYHLLKLLLEAFPFLRTRGRTRG

SEQ ID NO: 105738 - protein, 106 aa, Gossypium hirsutum
  Clone ID: LIB3585-015-P1-K1-A8.pep
EHFGPIKDLYPLGDMDGSLDTYAYNADGKCIRLFVSAKPCPYQSVPTKVVTVRPYMTFTNRLGQEIYIKLSSEDEPKVLHTSDSRIFFLHCENDGIDKLHVRLEDT

SEQ ID NO: 105739 - protein, 70 aa, Gossypium hirsutum
  Clone ID: LIB3585-015-P1-K1-B1.pep
GGSSVLEYFPSYLSIRGSGFSSYWMIRAASFRNLKFEQSRHFSISHCIVVVADDNRFSYITKLNAWLPKL

SEQ ID NO: 105740 - protein, 46 aa, Gossypium hirsutum
  Clone ID: LIB3585-015-P1-K1-B11.pep
LTTGGKKGYSFPRFAQVTNGNFYQRTIFGNLISPITIHHKPIDPKE

SEQ ID NO: 105741 - protein, 106 aa, Gossypium hirsutum
  Clone ID: LIB3585-015-P1-K1-C1.pep
SNSQPSSGNFQFLPQELSDPNQEDDILGEILPPSGPANDAALHTVFSAPSSQSALPVATYGQHAQSGANMYQPAQPSANPYGQLAQPSANPYGQNGQPSANPYGQA

SEQ ID NO: 105742 - protein, 44 aa, Gossypium hirsutum
  Clone ID: LIB3585-015-P1-K1-C4.pep
PRVRPRVRPRVRLFNMENYKNTVVIYEEIDWRGRLELMAIELHV

SEQ ID NO: 105743 - protein, 83 aa, Gossypium hirsutum
  Clone ID: LIB3585-015-P1-K1-C8.pep
ALSTQGMGHLVDKKFRRLNIGHDVGLEGPTTANQILIKLNDDLSIGIEAFSRIASGSSNNGHVNICENLFEGLTISTGGRLYI

SEQ ID NO: 105744 - protein, 121 aa, Gossypium hirsutum
  Clone ID: LIB3585-015-P1-K1-D10.pep
LDDAARMVTQLRDEAQKLRESNESLHEKINELKAEKNELRDEKQRLKTEKDNLERQVKALGSQPGFVPQAPAIPTPFSTPSQVVGGKLVPFVGYPGVSMWQFLPPAAVDTSQDHMLRPPVA

SEQ ID NO: 105745 - protein, 40 aa, Gossypium hirsutum
  Clone ID: LIB3585-015-P1-K1-D12.pep
HASGRAKPWLDITFPQLRPLWAKYIDFSDKFIKGCHIRVS

SEQ ID NO: 105746 - protein, 70 aa, Gossypium hirsutum
  Clone ID: LIB3585-015-P1-K1-D5.pep
SIHWTGGNCRLWLVECMNFMRLDYLTCKSLIYPFPILNLSGMGLMELFLVGYVGNKGNSLYSFNSASCYP

SEQ ID NO: 105747 - protein, 181 aa, Gossypium hirsutum
  Clone ID: LIB3585-015-P1-K1-E10.pep
PLYTDTSCPYLDRQFSCVKNGRLDFDYHHWEWQPEDCDLPRFNPELALQKLRGKRLLFAGDSLQRNQWESFVCMVEWTIPPEKKSMKRGKVHSVFKAKEYNATIEFYWAPFLIESNTDIDVLDPKKRILKVDSVAKHSKHWEGADILAFNTYVWWMSGLRLKTLWGSFANGDEGYAKLDTA

SEQ ID NO: 105748 - protein, 49 aa, Gossypium hirsutum
  Clone ID: LIB3585-015-P1-K1-E2.pep
GYCKHQVSAVGYRHINESSSHFREQKKGFHVAFFLFIKLLKYQYYYSGP

SEQ ID NO: 105749 - protein, 28 aa, Gossypium hirsutum
  Clone ID: LIB3585-015-P1-K1-E3.pep
VGTYGQSFIDRQSTITDCRGIITYLVRG

SEQ ID NO: 105750 - protein, 180 aa, Gossypium hirsutum
  Clone ID: LIB3585-015-P1-K1-F8.pep
QNLNFLDLGSNLLTGFIPQEISGCRNLTFLDLHSNSIGGTLPLSLSKLISLQFVDFSDNLIEGTLSSSLGSLSSLTKLVLGKNRFSGSIPTELGFCSKLQLLDLSSNQLMGNIPATLGKIPALEIALNLSWNQLTGEIPEEFTSLDKLAILDISHNQLVGDLQNLCRLQNLSLLNLFYNN

SEQ ID NO: 105751 - protein, 51 aa, Gossypium hirsutum
  Clone ID: LIB3585-016-P1-K1-A8.pep
PYYLRLLFLFFLIFFYCYSLCLRFLSLIIFNTFIFIFVFFISFLFFYFFII

SEQ ID NO: 105752 - protein, 167 aa, Gossypium hirsutum
  Clone ID: LIB3585-016-P1-K1-B1.pep
FMAPPPASTFLAFHPQDNNIIAIGMDDSAIHIYNVRVDEVKTKLKGHQKRISGLAFSTSLNILVSSGADAQLFFWNTDNWEKIKSVTLQLPAGKTSQGDTRVQFHSDQVRLLVCHETQLAIYDANKMECIPQWVPQEVLSSSISCAVYSCNSQLVYATFTDGNIGVF

SEQ ID NO: 105753 - protein, 111 aa, Gossypium hirsutum
  Clone ID: LIB3585-016-P1-K1-C5.pep
FAGYSVSLPWATRMKIALGAAKGLAYLHEAEKPVIYRDFKASNILLDSDYNAKLSDFGLAKDGPEGDDTHVSTRVMGTQGYAAPEYIMTGHLTAMSDVYSFGVVLLELLTG

SEQ ID NO: 105754 - protein, 153 aa, Gossypium hirsutum
  Clone ID: LIB3585-016-P1-K1-C9.pep
ERATKIHIVDFGIVQGVQWAALLQALAARSAGKPTRIRISGIPAPVLGSSPAPSLYATGNRLRDFAKLLDLNFEFEPILTPIKELKESCFRVDNDEVLAVNFMLQLYNLLDATPVTVEAALCLAKSLNPKIVTLSEYETKLNSVVFVNRFKNA

SEQ ID NO: 105755 - protein, 127 aa, Gossypium hirsutum
  unsure (1)..(127): unsure at all Xaa locations
  Clone ID: LIB3585-016-P1-K1-D2.pep
KHVGCSSADGRLLLESSKIARDKXKLEDAVNYGTKALAKMIAVCGPYHRTTASAYSLLAVVLYHTGDFNQAAVYQQKALDINERELGLDHPDTMKSYGDLCVFYYRLQHMEMCLKYVNRSLFLLHFT

SEQ ID NO: 105756 - protein, 82 aa, Gossypium hirsutum
  Clone ID: LIB3585-016-P1-K1-D5.pep
YEQKSHIHMCISIGSVASSRNQISIEQPTPDSSMDQCNVILAMELIAENRSDLHISGFERSHKKNKNKNGNEDLMEAKSMKR

SEQ ID NO: 105757 - protein, 50 aa, Gossypium hirsutum
  Clone ID: LIB3585-012-P1-K1-F9.pep
VAHDDQSNCFWRVKIWIFFGVMLPCFSSLLWSETSCYVFIAVYLSSIDEA

SEQ ID NO: 105758 - protein, 167 aa, Gossypium hirsutum
  unsure (1)..(167): unsure at all Xaa locations
  Clone ID: LIB3585-012-P1-K1-G12.pep
MSTATFNSICFNQGYLRKGEVKISKVKNRNQRVKFYVGGASVLSTKCMQSSEKNKKEVRIGLLGASGYTGAEIVRLLGNHPYFGITLMTADRKAGQSMGSVFPHLITQDLPTMVSVKDADFSSVDAVFCCLPHGTTQDIIKGLPRHLKIXDLSADFRXKDIAEYEEW

SEQ ID NO: 105759 - protein, 181 aa, Gossypium hirsutum
  Clone ID: LIB3585-012-P1-K1-G4.pep
PRVRVTSTAKILIGISLNPDDSKELLSWAIRVLARPNDGIIALHVLVGEEPKKCKLVRNDQSKLRQAKAHVISVLGEFARTCQSKQVNLEAKVRLSSSVRRGLIEEAKSISANFLLLLGSRTRSRETSHKITSYCFEHAPEGCAMVSIGKSKRPLQNSNSTYAHDETGQWSMRWSNTSDNS

SEQ ID NO: 105760 - protein, 175 aa, Gossypium hirsutum
  unsure (1)..(175): unsure at all Xaa locations
  Clone ID: LIB3585-012-P1-K1-G5.pep
GRPRVRQSLGIKKLSEVVTEKLDNEGNLETLDGIGSIPLDIIREKLLSRSFQGAVWTLVNSIAGYLPGINNLDLGTIHSSLESIADKLQFVKCLHTRFWLLSRSQDITFVSKDSVIPEWENESRHRTXYFVDKSKGCILVAEPPTYISVLDVVATVVSQVLGSXIPLPIGSLFHV

SEQ ID NO: 105761 - protein, 37 aa, Gossypium hirsutum
  Clone ID: LIB3585-012-P1-K1-H2.pep
ASEERVPQTPFVGPLITKKCNLPWIIFAASKPTPEIS

SEQ ID NO: 105762 - protein, 64 aa, Gossypium hirsutum
  Clone ID: LIB3585-012-P1-K1-H7.pep
DPPFGFDFNEAKKRFVAYSQGKPSTILFFLFFLTKTTTNNSMRKRNGSLKAKAIRRTKKSPLLF

SEQ ID NO: 105763 - protein, 71 aa, Gossypium hirsutum
  unsure (1)..(71): unsure at all Xaa locations
  Clone ID: LIB3585-013-P1-K1-B10.pep
TXXXRDAFLNFMRRKIAGESRYXIKNMSKDEISKDPVAMCDFEEALAXVQRSVLHAYIEKHEXWFTEFGSS

SEQ ID NO: 105764 - protein, 154 aa, Gossypium hirsutum
  Clone ID: LIB3585-013-P1-K1-B3.pep
PRVRSSPFIVSPLSSSSKEANKTRKRTLKTKKETSDSFQFMRRKCRTVEGIAVMELDNVGVRTIAMAEEAATEAVRNKRRRFNDDDEGGAAECKVTSSTTSYIQLRSRRILVDHHPRNENQCLSLGRTMMMTCHVVQALSARAEKGLSNCQIRR

SEQ ID NO: 105765 - protein, 88 aa, Gossypium hirsutum
  Clone ID: LIB3585-013-P1-K1-B6.pep
SFKGSRWIFQNSFDWGLCFALQSKNKRGCPKFNARKKSRRASCEMNHECIQVEANLVLYRWFRLRPYIISEVDMHNLYLVRVMAVHVL

SEQ ID NO: 105766 - protein, 97 aa, Gossypium hirsutum
  Clone ID: LIB3585-013-P1-K1-C1.pep
KTLCFWILGVADLRVVENLEKLMSKAKFSKAMLTSPIVHPSDCRNGEDSINYEQLLLVFFPSSSSLGFFFIKKISEILDLNFYPARLLMSLPFPPLL

SEQ ID NO: 105767 - protein, 166 aa, Gossypium hirsutum
  Clone ID: LIB3585-013-P1-K1-C7.pep
VSSSSHGDIGLQPISFPNVATISVTNCENLKTLFPLGFVSSAHQLKYLVVKQNPKLEQVFEVEDGREVTTKKEIKFDKLERLALEELACLVELCPKGYHFVFPALTFLIVRECPNMTTGFFIDSNHFVHSKKTEATEGPATAQSTVHNYMFWGSFMRSTLPHYMEE

SEQ ID NO: 105768 - protein, 100 aa, Gossypium hirsutum
  unsure (1)..(100): unsure at all Xaa locations
  Clone ID: LIB3585-013-P1-K1-D5.pep
KGLTPFNLTDRLNERLILALGDVKVLXKRPSLSHLRPVRQLKWLRLCDYEHTSTCPFTAIRELMYRTQSSTCLLTYTCIMAQIXHLTSLCVICLFVIHDA

SEQ ID NO: 105769 - protein, 171 aa, Gossypium hirsutum
  unsure (1)..(171): unsure at all Xaa locations
  Clone ID: LIB3585-013-P1-K1-D6.pep
ISYGRPISHPNQFLLLLRLSQKGFPRLNKASLSRRTLVKNNIRATAEHLGSASDPAKHKGRSHYHPFEDIGEATSKKSNDATLTAAETSRTIIEVNSKATVMFTGMINDEVHENIMWPDLPYATDEHGNVYLQVKSDEDILQSLTVENNXVQVIIGFDTTEIMKEIELSSP

SEQ ID NO: 105770 - protein, 156 aa, Gossypium hirsutum
  unsure (1)..(156): unsure at all Xaa locations
  Clone ID: LIB3585-013-P1-K1-E2.pep
VEGSPLKPYLGPNIVLNKGRREKVDLXRIIWKSLRXYQPRASIFPSVLDYTDCPYSWPFCLQPLYAGAMPVIFNATVLNGMGVIGYVRSPPIWHPSNEEGNLLSIRFTYSEVIWPWTGYLALHMQIKEEGAHFSGVIEGNVTVRVHSPPAQGERAV

SEQ ID NO: 105771 - protein, 93 aa, Gossypium hirsutum
  Clone ID: LIB3585-013-P1-K1-F2.pep
DISVLYENTSRELIWFTCFDEPVIETSYKEFMQGMCFRVFFFCSFHFLTQVFFTGILIKCKIRLPVYADYCNFSFPFFPLEFRVVRFLWCYIH

SEQ ID NO: 105772 - protein, 31 aa, Gossypium hirsutum
  Clone ID: LIB3585-013-P1-K1-F9.pep
FPLCFPFYFDDCMQNIMCTLNIIHETLPSLC

SEQ ID NO: 105773 - protein, 70 aa, Gossypium hirsutum
  unsure (1)..(70): unsure at all Xaa locations
  Clone ID: LIB3585-013-P1-K1-G3.pep
SAXXWFPGIQSLVDKCDPVSSXXLSQACCHFFGLIQGSRXXPAXXLFQYSXXFMIGFSADYLASSLESYY

SEQ ID NO: 105774 - protein, 177 aa, Gossypium hirsutum
  Clone ID: LIB3585-013-P1-K1-G7.pep
RTASSSSLGSTGRNPAEVKLEMTGSLIDFDADPEPPVASTVTQAPQTTETQSVVQTISSSNDQNWASFDFASQKNVSQARSNMNTLDSVLSQLSVPASVPGDQSGVYSSGGGQIPASMANVNGTPLGINTNIAFTGQIEMSPFGTAAPAAAPVSNFTTLPSTGALAAAPGLMPVNGG

SEQ ID NO: 105775 - protein, 178 aa, Gossypium hirsutum
  Clone ID: LIB3585-013-P1-K1-H12.pep
NWQNARYKADILAHPLCEQLLSAHVACLRVATPVDQLPRIDAQLAQSQHVVAKYSSLSGGSQGEVADDKELDQFLTHYVLLLCSFKEQLQQHVRVHAMEAVMACWEIEQSLQSLTGVSPGEGTGATMSDDDDDQVDSDANLFDGSLEGPDSMGFGPLILTDSEKSLMERVRHELKHEL

SEQ ID NO: 105776 - protein, 155 aa, Gossypium hirsutum
  Clone ID: LIB3585-014-P1-K1-A2.pep
NMFSSSLSLPPSSNPTAFGSTTPSFASPFQPAQTSGAFSFSNLGQTQMSGGSGIFGQSNVGLPSVTQNAAVVQPVTISNPYGTLPAMPQMSIGRAGTAPSVQYGISSMPVTDKPVPVRISPLLTSRYISQRRIRLPARKYHPNNDNPKVPFFNDD

SEQ ID NO: 105777 - protein, 93 aa, Gossypium hirsutum
  Clone ID: LIB3585-014-P1-K1-A4.pep
FIPGNLDQDVVDEVIEISSDEAVETAKQLALQEGLLVGISSGAAAAAAMKVGRRPENNGKLIAVVFPSFGERYLSSVLFQSIRDECEKMQPEP

SEQ ID NO: 105778 - protein, 168 aa, Gossypium hirsutum
  unsure (1)..(168): unsure at all Xaa locations
  Clone ID: LIB3585-014-P1-K1-B1.pep
GVKGSDSSLEKELVSETTTIHIEITATKNVVSEVPSTEKESSGQNENVNTDIEVESEDSKLQSDPKPRLENVGPKPEVKNEGSKPDVEIEGLKAEGENDDPKGQLQCVGSKPQLDLEESKAQLEIEGXKAPHIDDGRDSSAPNIQVSEVRPDLRFQSKSGSISTDSVS

SEQ ID NO: 105779 - protein, 57 aa, Gossypium hirsutum
  Clone ID: LIB3585-014-P1-K1-B2.pep
RAFGHAYGGQSQLLSGPNKSSIERGYVHRDYDHECGGCVGKCERPSAAWLPLYDIGT

SEQ ID NO: 105780 - protein, 161 aa, Gossypium hirsutum
  Clone ID: LIB3585-014-P1-K1-C1.pep
VPELQVWNNAAFDNGESEDTNAIKDSWCNFNSGSVNQSLESDGSKENQSPLWIKSPISFKSTASVVKPLSSKNVTGNTREPIPAKMKSGVCKEEEKKRDEKKIDMEIEEIEKEVGRLSAKLESLRLEKAEYNARSISMKGRIVPAKFMEQKQSIKNLETTK

SEQ ID NO: 105781 - protein, 64 aa, Gossypium hirsutum
  Clone ID: LIB3585-014-P1-K1-C12.pep
MRPYSLHCGISHGLIACCCEHGSGQGSVQRGFSPHTVTVCGPLVCCYTLLSWSFWGKERLWLAC

SEQ ID NO: 105782 - protein, 46 aa, Gossypium hirsutum
  Clone ID: LIB3585-014-P1-K1-C8.pep
YCSIRLKYFVLRAIKESGLKMVAIYNGGINQLSFQHKGEEGIERRL

SEQ ID NO: 105783 - protein, 126 aa, Gossypium hirsutum
  Clone ID: LIB3585-014-P1-K1-D4.pep
AIPRSRSRYMETNKQAHSAAGLECELNCPTVKSSQASTVSSIPPIESHIPPEPVTRNLILSRKEREKESSIQKHRISESGQVVNKFGGSRPKVGGYRINSELGTKNMKNAGIAGNSGMGRLAVIAS

SEQ ID NO: 105784 - protein, 70 aa, Gossypium hirsutum
  Clone ID: LIB3585-014-P1-K1-D5.pep
FLGLARGAEVSSLYRDNVARMPMILRVYCLCIPDLDKIKIKDHRENEIPMSGLFNILISISSLIGKSKIL

SEQ ID NO: 105785 - protein, 75 aa, Gossypium hirsutum
  Clone ID: LIB3585-014-P1-K1-D6.pep
SAKEEEQELFGWAYFLEEKHTMGRASNSTRCTLPLIKTCEILEASHELGDRQRNPSHYQSLLWYFISLNLNLWHV

SEQ ID NO: 105786 - protein, 50 aa, Gossypium hirsutum
  Clone ID: LIB3585-014-P1-K1-D7.pep
ETVYRSRRRRPPLPWLQLCWLPLNQHNYSCSHPHNSDQYCFIEGSLQHLL

SEQ ID NO: 105787 - protein, 88 aa, Gossypium hirsutum
  Clone ID: LIB3585-014-P1-K1-E10.pep
DYALLLRSSNFTFKSPYHIIKKTGIHYQFSSKEAEINLANNIFHGNIGSVNQMLQTVLDRHFTVEISKQFLFMTTPSSYCTSQIHMTA

SEQ ID NO: 105788 - protein, 95 aa, Gossypium hirsutum
  Clone ID: LIB3585-014-P1-K1-E2.pep
LSSWVYKVTSDPRESPFITKSELTSIQAGQTDPPTTTAEFAPIGLLLSKLPTWAIIFANVTNNWVSLLIICKTSHWLHYFFYNIIKLHFLISGIL

SEQ ID NO: 105789 - protein, 52 aa, Gossypium hirsutum
  Clone ID: LIB3585-010-P1-K1-H2.pep
SRVLFFFCGCLVASLIENNSNKKGKMHIIYSEYNCQNIGKKKGVISSYGYLN

SEQ ID NO: 105790 - protein, 124 aa, Gossypium hirsutum
  Clone ID: LIB3585-011-P1-K1-A10.pep
LSVAKWEGRPDLDSYAILLEGWEKEGNVSLAKTTFDEMVAEVGWDPANVPAYDLFLSTLIKGKDGVNEALKYIDILLQRKCYPGIKFFRDVLEDFQKVCNVRGAELIWKAMVEKVGIRPDTEMY

SEQ ID NO: 105791 - protein, 161 aa, Gossypium hirsutum
  Clone ID: LIB3585-011-P1-K1-A7.pep
MVKSTKIMRRSIFTFLQNYHYFTLTPALLAFPYSLSLLLSQIFVPSSSLFQSIHGRLSVVFQASGFPYSSDSFTFLSSKLSQTICFSVFALPFTFSFFLLSKASVISCFRHGKSFKQPSFSWVLSLYKPLLETLICNFFLIISANATAIFCLLVGFNSLDG

SEQ ID NO: 105792 - protein, 80 aa, Gossypium hirsutum
  unsure (1)..(80): unsure at all Xaa locations
  Clone ID: LIB3585-011-P1-K1-A9.pep
LTKTLTGCFEGPTRTTTSSKLFSSISNSKTFYNFNNITWPSSVDHIAAVTINCIPTIMSFAFGKMPESNPXTTHTXXYFH

SEQ ID NO: 105793 - protein, 182 aa, Gossypium hirsutum
  Clone ID: LIB3585-011-P1-K1-B10.pep
HASGEDVVSYDSSDENYGQPNSSFRSRKKKAPTPRQTKQKAPKNVKQGKRRTTKQVISQQSKQDTRRNRNTKIEQSARQDNSYDEDEIEGGPSTRLRKRARKPSKEPETKPKVKKQALKNKAKSASNAKVRDEGAEYQCDMEGCTMSFGLKQELVLHKKNICPVKGCGKKFFSHKYLVQHRR

SEQ ID NO: 105794 - protein, 163 aa, Gossypium hirsutum
  Clone ID: LIB3585-011-P1-K1-B4.pep
PRVREFALIVVTGSTVTYVPCSSCAHCGKHQDPRFQPDLSSTYQPVKCNPSCNCDDEQKQCTYDRRYAEMSSSSGVLGEDIVSFGNESELVPQRAVFGCENRETGDLYSQRADGIMGLGRGQLSIVDQLCDKSVIGDSFSLCYGGMDVGGSAMVLGKITPPPE

SEQ ID NO: 105795 - protein, 181 aa, Gossypium hirsutum
  Clone ID: LIB3585-011-P1-K1-C4.pep
RSESFSSLTSKGSIPEAILEAKIQKRLFVVYISGEDSESKNMEDSTWTDLKLKESLSKYCVLLHKCGGSTDAANFSAIYPQKSVPCITAIGYNGVQVWQSEGSISAEVLASSLEKAWLSLHIQETTAAVLSAALASKKYESSSSGSSTVSQSEQGSSSSASVPSTTMANVVQTLESNPSVM

SEQ ID NO: 105796 - protein, 89 aa, Gossypium hirsutum
  unsure (1)..(89): unsure at all Xaa locations
  Clone ID: LIB3585-011-P1-K1-D4.pep
MSTPLLGMXDERIQRMVTVLLSSGSMESVCHNSADSNEQNYMHSSECCTTNSSVQCPTSDDRQASXYLKATDPMLGLPGQQPPDRNPEL

SEQ ID NO: 105797 - protein, 124 aa, Gossypium hirsutum
  Clone ID: LIB3585-011-P1-K1-D5.pep
MEGSKKVKSLVLVCLISVLLHPFWLISANVEGDALHSLRTNLNDPNNVLQSWDPTLVNPCTWFHVTCNNDNSVIRVDLGNAALSGQLVPQLGLLKNLQYLELYSNNISGPIPSDLGNLTSLVSL

SEQ ID NO: 105798 - protein, 180 aa, Gossypium hirsutum
  Clone ID: LIB3585-011-P1-K1-D8.pep
QGYFLIDKDGKILEEQRGIIRSNCIDCLDRTNVTQSYLAQKTLDIQLQRLGVFTSTEYISMFPEDYVKFRTLWAEQGDEISLEYAGTHALKGDLVRYGKQTVAGFIKDGMSALSRYYVNNFHDGIRQDALDLVSGRYTVSKSNPSPFQLNSFESFSYLPVASALLIGGLTLTTFSLQQGI

SEQ ID NO: 105799 - protein, 62 aa, Gossypium hirsutum
  Clone ID: LIB3585-011-P1-K1-E3.pep
SPILPPIPPITSPPTTLPPTSSPPTWTPTEAPIDAPTETPTDPPTDAPTLARILKLPTMLPS

SEQ ID NO: 105800 - protein, 180 aa, Gossypium hirsutum
  Clone ID: LIB3585-011-P1-K1-E5.pep
FDSDMNDSSHPEGIRRTTGVSNAAGGKDTIAGMLASLMEVVRTTVACECVYVRAMVIKGLIWMQSPHESFDELKSIIASELSDPAWPATLLNDILLTLHARFKATPDMAVTLLELARIFATKVPGKIDADVLQLLWKTCLIGAGPDGKHTALEAVTIVLDLPPPQPGSMSGFTSVDRVSA

SEQ ID NO: 105801 - protein, 181 aa, Gossypium hirsutum
  Clone ID: LIB3585-011-P1-K1-E6.pep
PTRPQVITKLLYLLNQGETFTKVEATEVFFAVTKLFQSRDMGLRRMVYVIIKELSPSADEVIIVTSSLMKDMTSKTDMYRANAIRVLCRITDGTLLTQIERYLKQAIVDKNPVVASAALVSGIHLLQTNPEIVKRWSNEVQEAVQSRAALVQFHALALLHQIRQNDRLAVNKLVSSLTRGS

SEQ ID NO: 105802 - protein, 51 aa, Gossypium hirsutum
  unsure (1)..(51): unsure at all Xaa locations
  Clone ID: LIB3585-011-P1-K1-F1.pep
TEQEKNSQEHFQSPAIFVNAIHAIXCLGLFEQKLIPKVKPAEKIFLDQRAL

SEQ ID NO: 105803 - protein, 37 aa, Gossypium hirsutum
  Clone ID: LIB3585-011-P1-K1-G10.pep
LEDGKVQQIIGSNKLFLLLIRYDNTKWAHNTLAFSNA

SEQ ID NO: 105804 - protein, 167 aa, Gossypium hirsutum
  Clone ID: LIB3585-011-P1-K1-G5.pep
MMSIESLFIPQTLPLKSSSVDRTARKSTWASLKSPKFQRGPSRIRSFSAKSSLGFENGGFKQVPNGVGEKDGVIIVDHGSRRKESNLMLNEFVAMFREKSGYPIVEPAHMELAEPSIKDAFGLCVQRGANRVIVSPFFLFPGRHWYQDIPLLTADAAKDHPGVSYII

SEQ ID NO: 105805 - protein, 65 aa, Gossypium hirsutum
  Clone ID: LIB3585-011-P1-K1-H2.pep
SESESDSKRAITGSVTIRIEEISSLESGIDQRIVCCGSQFHSCQFLTDPILTLLMLLLRNLKLFP

SEQ ID NO: 105806 - protein, 60 aa, Gossypium hirsutum
  Clone ID: LIB3585-011-P1-K1-H8.pep
QLTVSITGLRRDMIWNSWHNHFSGDNPDTLVALICEKASFTAADQLPIPLADKNLPTPRC

SEQ ID NO: 105807 - protein, 61 aa, Gossypium hirsutum
  Clone ID: LIB3585-012-P1-K1-A5.pep
TVTEYQKSWFIGNFIPYGPYRRVIFDSHDNHNPRENFQNLGPHARVASTVSILGFSRSLIS

SEQ ID NO: 105808 - protein, 151 aa, Gossypium hirsutum
  unsure (1)..(151): unsure at all Xaa locations
  Clone ID: LIB3585-012-P1-K1-B1.pep
MGRRPCCAKEGLNKGAWTANEDQILKNYITIHGEGKWRDLPQKAGLKRCGKSCRLRWLNYLRPDIKRGNISIEEEELIIRLHKLLGNRWSLIAGRLPGRTDNEIKNYWNTNLSKRMQGQKXRNISPNTPQVSSHNVIRTKAVKCTKAVNVD

SEQ ID NO: 105809 - protein, 33 aa, Gossypium hirsutum
  Clone ID: LIB3585-012-P1-K1-B4.pep
RAGVLAFLIINLIKPLYMLGKSWHQDEKRSKRC

SEQ ID NO: 105810 - protein, 192 aa, Gossypium hirsutum
  unsure (1)..(192): unsure at all Xaa locations
  Clone ID: LIB3585-012-P1-K1-C3.pep
FLETLNLSYNSLEGPIPEDFSHRFSSDSFWGNKYLCGNLPDFSPCPSKSSNELKIVQIILPVLCFLAFLGLGVLLFLRSRAKDNIPEPNVTKNGDLFSILNFDGRIAFEDIIEATNDFDIRYCIGTGGYGSVYRAQLPSGKIIALKKLHRREAEVLAFDKSFKNEAKILSEIRHXNLVKLHGFCLHNRCMFL

SEQ ID NO: 105811 - protein, 137 aa, Gossypium hirsutum
  unsure (1)..(137): unsure at all Xaa locations
  Clone ID: LIB3585-012-P1-K1-D10.pep
IVARDNEGKVLLSCSMIYQXVASPFAAEALASRKAIKIGKEMKWRKIIIEGDSLSIIKKCRSNIPDKSKVCAYISDIHKLQSSFQEYRFEHVPRAVNSLAHMIEKATLRDKRILYLAEGVPEYAKDQNGRDRGGESD

SEQ ID NO: 105812 - protein, 178 aa, Gossypium hirsutum
  unsure (1)..(178): unsure at all Xaa locations
  Clone ID: LIB3585-012-P1-K1-D12.pep
MKSSRQFSYSSRSTSTLVCTVNSDHSNSPQQPKEIPIETPVPITVHLPDAASVAAATKIQSVYRAHVIRNLYKQISDVNSSADRLQHLIQRQETVDAIRNEEKEKLRINETLMGLLLKLDSVPGLDPTVREGRRKVSRKIVGLQEIVDGISETKVEDDXXWWCGQPRGIFTMKDWDEV

SEQ ID NO: 105813 - protein, 120 aa, Gossypium hirsutum
  unsure (1)..(120): unsure at all Xaa locations
  Clone ID: LIB3585-012-P1-K1-E1.pep
VGKKSSQIFDSXESDPEWGGWTTSQELRNPSIRIIFPTIEQVKNACSGISPSRRILFFSEKTWQRLRNVGILHDAIPSPSNRVGHPMHVKVARRRFWSKASSSSSGWVYCGSHNFSAAAW

SEQ ID NO: 105814 - protein, 140 aa, Gossypium hirsutum
  Clone ID: LIB3585-012-P1-K1-E3.pep
MGAVLSLAAPRSSINDCNEVLQSGTCKKNKSSCLNEDNSRLIPCLPDELSLQILARLPRIHYFNLRLVSQKWKATVMSPQLFNLRKELGKTEEWLYVLTKLDEEKPLWYGLDPLSRKWQKLPSIPSAGFEGDSRRVYGTW

SEQ ID NO: 105815 - protein, 163 aa, Gossypium hirsutum
  Clone ID: LIB3585-012-P1-K1-F2.pep
LATAISLYANMLVAKLHEFDGKRHIRYRDLAGQIYGREAYYITWALQYVNLFMINIGYLILGGSALKAFYVLFNEEHTLKLPHFIAIEGVVCILFAISTPHLSSLRIWLGCSTVLNLIYIIVACVLATKDGLNAPARDYTIHWTSTTNRIFSTIGASANLVLN

SEQ ID NO: 105816 - protein, 100 aa, Gossypium hirsutum
  Clone ID: LIB3585-009-P1-K1-A9.pep
EQKPPGRRKAMPIILGNETFERMATMGLLPNCMVCTMKNINMHQVSTDSVLTIGSGVSNLTPLIGASTADAYAGRYDTIVAAFVDGFMGKLTITLTDLDP

SEQ ID NO: 105817 - protein, 175 aa, Gossypium hirsutum
  Clone ID: LIB3585-009-P1-K1-B10.pep
MRSDGIAPTDVTFLSLLHACSHVGLVEKGMELLKSMTDVYGIIPRAEHYACVVDMLRRAGLLNEAKTFIQGLPVKADVLVWQALLGTCSIRGDSKIGKYAANQLILETPESPVPYVSMANIYSSRGKWKERARTIKRMKEIGVSKEIGISWIETEKEVHSFVVQDRMHPQAELMY

SEQ ID NO: 105818 - protein, 66 aa, Gossypium hirsutum
  Clone ID: LIB3585-009-P1-K1-B12.pep
ALWLGTFICSATVAVSCSAYDAIVLVIEYPPSFLFPFGAVYIHGSGPRTLILILIFIILSCGARAQ

SEQ ID NO: 105819 - protein, 74 aa, Gossypium hirsutum
  Clone ID: LIB3585-009-P1-K1-B4.pep
ESASTYTPIDFGFSSLTKPDSLSIGILCGSTISIKDTFWDGNGETSLDWPFICDGTSWAVLMSRSSDKRRKPNS

SEQ ID NO: 105820 - protein, 148 aa, Gossypium hirsutum
  Clone ID: LIB3585-009-P1-K1-B6.pep
LGVRLGVGMHICIQTLTEKTITLKVASYDTIYNTKAKVQDKVRVPAGLQRVMLRGKQLEDRLTVGHYIIENELTIDLVLHLRGGMQSLMKTLTGKTISLKVDSLDAIDNAKANIQDKDRVPPGLPRVNFGGKHVEDRMTFGGYNVENE

SEQ ID NO: 105821 - protein, 164 aa, Gossypium hirsutum
  unsure (1)..(164): unsure at all Xaa locations
  Clone ID: LIB3585-009-P1-K1-B9.pep
SICAAEQEEEEEEEDKYYIFKNGTYSVGRKGCDIIIHKDKGVSRIHAHIMVDEMTQSCQVRIRDLSKYGTFINKNLSSNKKVHHFPNKQTFXEDGDLLSFGTGNATFRFSYVPLVLYICCAEASQMNHHLQDKVSSIGARLTHVYSEDCTHVIVDQHVPLKRDM

SEQ ID NO: 105822 - protein, 80 aa, Gossypium hirsutum
  unsure (1)..(80): unsure at all Xaa locations
  Clone ID: LIB3585-009-P1-K1-C12.pep
QWRVIGALPMSVAXSDSIVICNKALMSNLGXDFATRLTSWDVMETFRNINAAQRSNLFENKSIDINTVMLVGIHNGGSNG

SEQ ID NO: 105823 - protein, 170 aa, Gossypium hirsutum
  unsure (1)..(170): unsure at all Xaa locations
  Clone ID: LIB3585-009-P1-K1-D6.pep
DKMKLERRKRKEERQREAQYQMHLAXMEAAREGMPVVCVNHDSSGGPAVRDIHMENFNVSVGGRDLIVDGSVTLSFGRHYGLVGRNGTGKTTFLRYMAMHAIEGIPSNCQILHVEQEVVGDDTTALQCVLNSDIERTQLLQEEANLLARQKELDLEDENGKSGGDLNGMP

SEQ ID NO: 105824 - protein, 131 aa, Gossypium hirsutum
  unsure (1)..(131): unsure at all Xaa locations
  Clone ID: LIB3585-009-P1-K1-D8.pep
RTFALEELEDATNNFDTTGFMGEGSQGQMYRGRLKDGTFVAIRCLNMKKSHSTQSFMHHVELISKLRYRHLVSALGDCSECYLDDSSVSRIFVIIEYVPNGTIGSWIYEGHAXRTLTWPERISAAMGITKG

SEQ ID NO: 105825 - protein, 169 aa, Gossypium hirsutum
  Clone ID: LIB3585-009-P1-K1-E1.pep
PTRPKLSYTAIKQDPLDSPPPSLPPRLPIPPPLAVVKTEPEQQQRQQEQLQLQLQEKEQEERQPHLLKFIDDLTSFSTAIEAFKYRFDELTKHLDFINQAIGSKFNEQSTQIVPQPSPKSTQKVPQTVSPSVSSLYGIGNLCERMRSKRVRKYIITHLSDIPKLREEVP

SEQ ID NO: 105826 - protein, 144 aa, Gossypium hirsutum
  Clone ID: LIB3585-009-P1-K1-E5.pep
MGGIKKSAENLSELIMGDQIDNSPYRFRMNVNESLYLCTTSPLNEREVKLLKQRTRDLYQVNMILDNLPVMRITKQNGVNIQWTGFPIGYTPPNSNDDYIINHLKFKILVHEYEGSGVHIIRTGEEGMGVISEADYTNASGYEI

SEQ ID NO: 105827 - protein, 97 aa, Gossypium hirsutum
  Clone ID: LIB3585-009-P1-K1-E9.pep
LSVQFQKYLQTQVYPRRIYILPSSNDDELRTMLVHIHPRQMLIPQQSQAPFSHRALVDLDPSPIFKAVSHHLTSKQCHLLLWYVELGSTECMGPSLH

SEQ ID NO: 105828 - protein, 160 aa, Gossypium hirsutum
  Clone ID: LIB3585-009-P1-K1-F2.pep
MAAIGSCFSKFCSAVFLLVFFHGRTNAKLSTNFYSKSCPNLLPTVKFIVHSAIMKEARMGASLLRLFFHDCFVNGCDGSILLDDDISSFIGEKNAAPNRNSARGFNVVDDIKSAVEIVCPGVASCADILAISARDSVTILGGPYWDVKLGRRDARTASQA

SEQ ID NO: 105829 - protein, 169 aa, Gossypium hirsutum
  unsure (1)..(169): unsure at all Xaa locations
  Clone ID: LIB3585-009-P1-K1-G1.pep
IYHDTALILLTYHIKQQTSVMKTPSTKVEWFMRVEPTNRGGTEIXYGPYEDCPPYSISPIHAHFENNSLFADVEELVQEIEISHCGNIQVTEHYXRYTHAGARHKGVYSRVDYQSRRXSNGASSFRYLLARLPARVHSVYYRDEIGNISSSHLRTKSLKSELENEPRYS

SEQ ID NO: 105830 - protein, 66 aa, Gossypium hirsutum
  Clone ID: LIB3585-009-P1-K1-G10.pep
NYGATCFSITTSFLAISLMGYVCPFLGFQSLGNLHSLYTDCDALTSEKVAVFWAPTSMLFPQKLVI

SEQ ID NO: 105831 - protein, 62 aa, Gossypium hirsutum
  Clone ID: LIB3585-009-P1-K1-H11.pep
HAYDHAYRHAFWPPRKFEKKDLRETQLSSFLSFSSLSAIKSCPFLSLCYPSQSKEPQILFYR

SEQ ID NO: 105832 - protein, 85 aa, Gossypium hirsutum
  Clone ID: LIB3585-009-P1-K1-H4.pep
TMVKKFLYKFMPLVTYFDHKANSSSSKPFNLSPFANMPLYVPKSINLSLNEEQLKAVFRKHDVNGDGCLSKDELMKVFRELGSRN

SEQ ID NO: 105833 - protein, 54 aa, Gossypium hirsutum
  unsure (1)..(54): unsure at all Xaa locations
  Clone ID: LIB3585-009-P1-K1-H6.pep
DPTCNMRQLHLXTYGQLIYNSRICAPSPLXSTHRITSLFCFLNVESPGATILSM

SEQ ID NO: 105834 - protein, 147 aa, Gossypium hirsutum
  Clone ID: LIB3585-010-P1-K1-A10.pep
PTPRPSNFEENNTVMSPRFGFYPAQTVPSSYPAPNPEFSSVTKNAKATQQQQQQPVQPQQQPKEKENNKENHDAKELHMFVWSSSASPVSEGGGLHVYGGTDFGASEQSGRSEQGAQEIRMLVADHPENGENKGMTSSGDCNGEDFS

SEQ ID NO: 105835 - protein, 91 aa, Gossypium hirsutum
  Clone ID: LIB3585-010-P1-K1-A7.pep
RIESVVHEAKGRRLQTAAAALAALANCHESPKPEEKMDKDTKLCDKRWESKRWLKYCSNHTTSDYFQTYQKADLLAKRNTPAAHAAGFWDY

SEQ ID NO: 105836 - protein, 146 aa, Gossypium hirsutum
  unsure (1)..(146): unsure at all Xaa locations
  Clone ID: LIB3585-010-P1-K1-B11.pep
MGLLDSLLGAEGRKSFKRKDSDAGEAGKALEELRGSLYNELRTSEGAKRQQQRFCGPVVAMTFNFFVAVGIILTNKLVMGRVGFNFPILLTLLHYARSWLLLAIFRTLSWLPAYPAAKTTSSXSIFLLGAIMAFASGPANTSLKNN

SEQ ID NO: 105837 - protein, 131 aa, Gossypium hirsutum
  unsure (1)..(131): unsure at all Xaa locations
  Clone ID: LIB3585-010-P1-K1-B12.pep
XAGFNGGVHVLHEWAWAGTPNEGAAXLRMPSLAYTWHQILLGPLTGGVIDGMMHGLLEILNQIPEFQSSQQQSFNLGAWVLPTVKALQAAITLGTGXSLGPKGPHGYIWKSCAHGFSLMIANNRERKIALV

SEQ ID NO: 105838 - protein, 60 aa, Gossypium hirsutum
  Clone ID: LIB3585-010-P1-K1-B6.pep
SSFLISFSSEIREAENFFFFIRIFHSISLHVNQMSRLLFISSFDSLPCSRAIILKPFARK

SEQ ID NO: 105839 - protein, 140 aa, Gossypium hirsutum
  Clone ID: LIB3585-010-P1-K1-B9.pep
FQNRKYAMMKWDRFGKKGFGLRMLENISAGHFLIEYVGEVLDMQAYEARQKEYASRGQRHFYFMTLNGSEVIHAYVKGNLGRFINHSCDPNCRTEKWMENGEICIGLFALRDIKKGEEVTFDYNYVRVFGAAAKKCHCGS

SEQ ID NO: 105840 - protein, 88 aa, Gossypium hirsutum
  Clone ID: LIB3585-010-P1-K1-C10.pep
MENREQARDKTLITDPKKINAAHENVQLIEWEDFDNELARLWSLTSALKEANEKKQSLQEKLQSLIQVKNESLNKLNELEEMRERLEA

SEQ ID NO: 105841 - protein, 90 aa, Gossypium hirsutum
  unsure (1)..(90): unsure at all Xaa locations
  Clone ID: LIB3585-010-P1-K1-C4.pep
MYIYFADLMVWVGGRTLASYISELGQPKIRXWQNTLSQVTCSIRMVFSYCMGFGMALFASPKWKLLLGVLSIPPLIFFILTNFFFPVIPR

SEQ ID NO: 105842 - protein, 90 aa, Gossypium hirsutum
  unsure (1)..(90): unsure at all Xaa locations
  Clone ID: LIB3585-010-P1-K1-C5.pep
NSVPIVDFHIDEPTKDNVFKEVLTTRSAAVIRSMGCKKVEVACLSMHEATNLFLSKVGHDVSVXTTLESGMHLVVEECDGLPLALVTLAA

SEQ ID NO: 105843 - protein, 103 aa, Gossypium hirsutum
  unsure (1)..(103): unsure at all Xaa locations
  Clone ID: LIB3585-010-P1-K1-D11.pep
MTKDIETAQQRGGRASLKDYHDPPPAALMDAEEITKWTCYRAVIAEAIATLLXLHVTEMTVTGDKVQTDPAENTEDPDCSGLGIHETAWAIGGMXLMQVYCTD

SEQ ID NO: 105844 - protein, 125 aa, Gossypium hirsutum
  unsure (1)..(125): unsure at all Xaa locations
  Clone ID: LIB3585-010-P1-K1-D2.pep
MAVGEIPRVQAGRCVYQIAGGSWEAVCDEHGIDATGDYVRTSAVQLVRLDDYYNESRGGRYVPXAARMDLEPTTMDCLLAGPPGKXNKPDDYVFGQDGSGNNCANGHYTEGAEWIDADIDVASEE

SEQ ID NO: 105845 - protein, 149 aa, Gossypium hirsutum
  Clone ID: LIB3585-010-P1-K1-E10.pep
HASGRTEVQVRNSEHCGRNECGISLNNPASESSPRINMPEDRCSHGGITKKGRDELILKLQNGSAHGLNPACFVATQFGCEKTEEEENVSIYSDKVQITIEDEHHDASPHSGKSSCISDNDSSPIRTMESGMQSCNSTIPASDQSSGTH

SEQ ID NO: 105846 - protein, 71 aa, Gossypium hirsutum
  unsure (1)..(71): unsure at all Xaa locations
  Clone ID: LIB3585-010-P1-K1-E11.pep
HASXGTDTNTRHSENRAKKKTGARLDLSFFTFTSFNSHLKFILFKDFSTKKSLSVSNLGLRKEKQISPNTQ

SEQ ID NO: 105847 - protein, 49 aa, Gossypium hirsutum
  Clone ID: LIB3585-010-P1-K1-E5.pep
EQENSADYHHAVHMTEESASYGGENLDMSFDAEEYIKDELIELARLNDH

SEQ ID NO: 105848 - protein, 144 aa, Gossypium hirsutum
  unsure (1)..(144): unsure at all Xaa locations
  Clone ID: LIB3585-010-P1-K1-F10.pep
FIAEPSTQSNSLVGTEEYIAPEIITGAGHSSSIDWWALGILLYEMLYGRTPFRGKNRQKTFSNILNKELTFPSSIPVSLAARQLINALLNRDPSSRIRXRADAADIKQHSFLHGIXNWALIRCTSPPSLEVPLQFIKKDTTNTK

SEQ ID NO: 105849 - protein, 48 aa, Gossypium hirsutum
  unsure (1)..(48): unsure at all Xaa locations
  Clone ID: LIB3585-010-P1-K1-F11.pep
LIXSASXXLPDPALHWXACVASSXLLFCAPSLSVSPSHLSPVAWAAAW

SEQ ID NO: 105850 - protein, 112 aa, Gossypium hirsutum
  unsure (1)..(112): unsure at all Xaa locations
  Clone ID: LIB3585-010-P1-K1-F6.pep
PTRREGHKTSRPLPEXQEALKDLPTNGFNSDIKTLPDFYRDLKKDKTQRCPDIFIAGYPGSLYGRLFPNNCLXIIYXSYXSHWLYKVPPSLXDEHGKFINRGNAYISESNPT

SEQ ID NO: 105851 - protein, 39 aa, Gossypium hirsutum
  Clone ID: LIB3585-010-P1-K1-F7.pep
RMGDMERPSYTEANHVVYQVIYPTSALFRATTVHATWMR

SEQ ID NO: 105852 - protein, 144 aa, Gossypium hirsutum
  Clone ID: LIB3585-010-P1-K1-F8.pep
PTRPQKKAFFEAHYKTLAARKAAALLEQANAAAATNATESEAQNPNPRMAETGSIYDCKENNSEIVKVQSSSVDEPQVLLENNMKNEAFEKNGVVVDKAEITDLEVKETTQVKNNCVKANQSRLLGDDKELELSEGTQMEKPLL

SEQ ID NO: 105853 - protein, 115 aa, Gossypium hirsutum
  Clone ID: LIB3585-010-P1-K1-G10.pep
MEGHEDGAAPNVSTDKAVAPKHFSTPLHAKTTAKFNARKRHESAENGGDGEDGSVSCNKCRPHFREKIYVVTLDNNKGVNKHTCSMARPNGIFKAIFHDVTRRSAKETDRDTSRE

SEQ ID NO: 105854 - protein, 68 aa, Gossypium hirsutum
  Clone ID: LIB3585-010-P1-K1-G2.pep
ASVRAACTSSLPRPALVMFPPSTQLAEPFSGPVESCKRILLGAIAWFPIFMSDSAELEVCHAAPASVT

SEQ ID NO: 105855 - protein, 176 aa, Gossypium hirsutum
  Clone ID: LIB3585-010-P1-K1-G4.pep
GEGTRTIGIISKIDQAASEQKALAGVQALLLNQGPPKTADIPWVALIGQSVSIASAQSGSENSLETAWRAEFETLKSILTGAPQSKLGRIALVDALAQQIRKRMKVKLSNLLSGLQGKSQIVQDELVRLGEQMVQSAEGTRAIALELCREFEDRFLQHITTGEGSGWKIVASFEGN

SEQ ID NO: 105856 - protein, 115 aa, Gossypium hirsutum
  unsure (1)..(115): unsure at all Xaa locations
  Clone ID: LIB3585-010-P1-K1-G6.pep
PRRPRXXXGPHXEAAQXGRAAGXRAXTRXXGDETEAQNQSHSHEGGANGRKPTXEGTPRSSXXSHRKGRDSHDGQXXQRNXARDAPGGERKEPKPRXXGRXXKEQQRPEANXXXP

SEQ ID NO: 105857 - protein, 119 aa, Gossypium hirsutum
  unsure (1)..(119): unsure at all Xaa locations
  Clone ID: LIB3585-007-P1-K1-B10.pep
STWCEDYSHIKHRHERPGLGGIFLDALNDNDQEMLLSWATGCAHSGAPAYVPTREKXRKNTPFTDSHTAWQTXRKGRYIEPNXGYDRRTTCGLKTGGCIESIRGCLRLTARREYEHQLK

SEQ ID NO: 105858 - protein, 171 aa, Gossypium hirsutum
  unsure (1)..(171): unsure at all Xaa locations
  Clone ID: LIB3585-007-P1-K1-B5.pep
NSDNARTLQAGEGSIIPEERTSDVPKSCENTNGLLEDEVSENKDDVEKGVSNDVGFFDCNICLDLAREPVVTCCGHLFCWSCLYRSLHKHSDAKECPVCKEEVTIKTLIPIYGTGKVNLEPXEDSGLKIPARPNARKLESWRQTIQRTALNLPVEEMIRRLESRFDLTRDL

SEQ ID NO: 105859 - protein, 167 aa, Gossypium hirsutum
  Clone ID: LIB3585-007-P1-K1-B8.pep
HASEKPEILGIEMDTIENQCGAPAIKALGSLFKLTQVHLWDYGSKEIREFSFLLSDTIKSCTKNDKNCSSMSHGSCDFSSSVEDIELAKEMDALGLPLCFHTNKQTSSKMTVSRKKGTRAKHSNRHKDIEEVMEFSKVSEMEIESPIFHDNSSRSFWESSYHDVAVG

SEQ ID NO: 105860 - protein, 174 aa, Gossypium hirsutum
  Clone ID: LIB3585-007-P1-K1-C10.pep
GLPSLPRVRFNKEGNLLSVTTADNGFKILANALGLRSLRAVETSFDPLRTPIVSSAIKASGSSAVANVGPVSCKVERSSPVRPSPMLNGVDPLSRSVERPRVLDDAIDKTKPWQLAEIVDPGHCRLVTLPDSTDTSSKVVRLLYTNSAVGILALASNGVQKLWKWPRNEQNPSG

SEQ ID NO: 105861 - protein, 115 aa, Gossypium hirsutum
  unsure (1)..(115): unsure at all Xaa locations
  Clone ID: LIB3585-007-P1-K1-C2.pep
FYLNKKNEVIDNGSQTVGDDTRTFWTKGLLSKLLNHTHDVSSWTGGISSGGFGSGIKPYRLKTYXVASLGKPLRRYSSTYIKXSVGIIEKHTEALFVRPEIDITPEGTVDSSNDD

SEQ ID NO: 105862 - protein, 163 aa, Gossypium hirsutum
  unsure (1)..(163): unsure at all Xaa locations
  Clone ID: LIB3585-007-P1-K1-C8.pep
IARPMSMGPTGVGKTXLAEARACYLFNTDQALVPIDMSESMEKHAESRLIGAQPGYVGHEEXRQLTYIVQQRPYAVIXLFDEIEKAHGDVHNVFLQILDDGRVTDSQGQTESFTNTDIIMTANVSSQYILNSDEDTPKNIAYGTIKHMVMDAARAVFRPEFMN

SEQ ID NO: 105863 - protein, 93 aa, Gossypium hirsutum
  Clone ID: LIB3585-007-P1-K1-E12.pep
APALRRVKKPFCTMRTHDKILYAPPPLTLYGAPLQRPAYYDAAVTQVNRHDKHPPCRNVTGLMLYHHIDGPPPTADHDAYRIAPALYRRIKPY

SEQ ID NO: 105864 - protein, 141 aa, Gossypium hirsutum
  unsure (1)..(141): unsure at all Xaa locations
  Clone ID: LIB3585-007-P1-K1-E5.pep
TTVKKKHIHGILNAASRGIMFSLEAMIDRYIISLESSDAAWLYIHVLWQILSYAIEIXGWGTGLKLVSAYYGITYARHIYIGIGLIXLPTVQIIWLLLRTKMDYKXRLYCDTYHHXLGYTILGLSIINVWKGCNIWKPEHK

SEQ ID NO: 105865 - protein, 78 aa, Gossypium hirsutum
  Clone ID: LIB3585-007-P1-K1-F10.pep
LNCSFNFLALIYTSLANKMNIMIKLAFNIIVNLGECKFDCIEVYYTLIYRLKKSYIIVGMSKITNMIKIYNEIIFKKN

SEQ ID NO: 105866 - protein, 182 aa, Gossypium hirsutum
  Clone ID: LIB3585-007-P1-K1-F2.pep
VVQLLKSQGVAKVKIFDSDSAVLTALANSGISVVVCLPNEQLASAANDQSFSDGWVQANIAKYYPATKIEAIAIGNEVIAENITDTTKFVVPAMKTIQASLVKLKLDSNIKVSSPVAISCLGNSYPASAGSFKTNQVQSTIIPMLDFLRETGSYLMVNVYPFFAYKDNSKTISLDYSLFKDN

SEQ ID NO: 105867 - protein, 73 aa, Gossypium hirsutum
  Clone ID: LIB3585-007-P1-K1-F5.pep
MKLLALQQIYLGLQNNSLRSSGPIDSSSDGATKSTAAGLCLVLHGLTCLICLLLVFRFSRLVLLLLSTCSTYT

SEQ ID NO: 105868 - protein, 179 aa, Gossypium hirsutum
  Clone ID: LIB3585-007-P1-K1-F9.pep
HASADAWVIDGYCRNRAMSEALKIRDEMLEKGCNMDVVTYNTILNGLCKEKMLTEADNLLHEMTERGVFPDFYTFTTLIHGHCRDGNMNKALNLFDAMTQRNIKPDIVTYNTLIDGFCKVGEIEKAKQLWAGMISRKIIPNHISYGTLINGVCSIGHVPEAFRLWDEMVGKGIKPTFVI

SEQ ID NO: 105869 - protein, 175 aa, Gossypium hirsutum
  Clone ID: LIB3585-007-P1-K1-G11.pep
PTRPPTRPPTRPIEFEIKRPKSEWDPISVNYTSGTTSRPKGVVYSHRGAYLNTIATLFLHGMQSMPVYLWTVPMFHCNGWCLTWGVAAQGGTNICMKNVSPSKIFENIALHNVTHMGGAPTVLNMIVNSSVREQKRISSKVVICTGGSPPAPQILLKMEELGFSVTHLYGLTETY

SEQ ID NO: 105870 - protein, 36 aa, Gossypium hirsutum
  Clone ID: LIB3585-007-P1-K1-G12.pep
AESVDPRSYTRRSKLWLRSVKWTPESVWVVSGTQLW

SEQ ID NO: 105871 - protein, 171 aa, Gossypium hirsutum
  Clone ID: LIB3585-007-P1-K1-H12.pep
ASLVIEEFGLKEGYGPLFISSFERFTQASSVRALNSSYVCDQEPDLVEAYTNFASTFVRSSRKEVLAASGALLEISFQKAAICCTAMHRGAALAAMSYLSCFLEVGLASLLESMTFSPEGSFGATSIQVIFHSGEGLVSNIVYALLGVSAMSRVHKCATILQQLAAFCCLS

SEQ ID NO: 105872 - protein, 119 aa, Gossypium hirsutum
  Clone ID: LIB3585-007-P1-K1-H4.pep
IWNNMMNRRKIRGPFFVFSSNYGSCYASYSCTNSCRRASSAASSAYSAFSPASRSLAISTVAPRFDGWSYGSESMGVTVDAPAGLLVWLVVPQALPRPVPCPDPVSADGLTSSLTSSLA

SEQ ID NO: 105873 - protein, 125 aa, Gossypium hirsutum
  unsure (1)..(125): unsure at all Xaa locations
  Clone ID: LIB3585-007-P1-K1-H7.pep
MFAGVRKTGDSMEPFTDLGREMILCERALKXGDKKFTENIRSXARTICLSVHREETSSLTYYREGEYXARSADRSAAXDDPLNEMSCELLKLQYPQAHLKQRDAFSGRPGSLCLLPSMRKLLTGS

SEQ ID NO: 105874 - protein, 65 aa, Gossypium hirsutum
  Clone ID: LIB3585-008-P1-K1-A12.pep
SFGTSSFYGYYDLISKIIYINATIYGSLLYNSISAISFTNSHVPMRSRSIKRQKTMYPQIESISQ

SEQ ID NO: 105875 - protein, 54 aa, Gossypium hirsutum
  Clone ID: LIB3585-008-P1-K1-A2.pep
GAQLRPAKFRCSVTMAIVKIVMVEVIMAASLGGNLGALQVHYVVEGDRGWDVSS

SEQ ID NO: 105876 - protein, 50 aa, Gossypium hirsutum
  unsure (1)..(50): unsure at all Xaa locations
  Clone ID: LIB3585-008-P1-K1-B1.pep
RLXNFLSRXFSFSPKKDARXLRXRPLNXGKERSNSRGSKRLPTPNRKNVK

SEQ ID NO: 105877 - protein, 44 aa, Gossypium hirsutum
  Clone ID: LIB3585-008-P1-K1-C12.pep
ESLNTAFKVRYSFNMLMIVISYFNTYFLKLVSYLFQHNPISQMK

SEQ ID NO: 105878 - protein, 176 aa, Gossypium hirsutum
  unsure (1)..(176): unsure at all Xaa locations
  Clone ID: LIB3585-008-P1-K1-C2.pep
PTRPRXXXAYTTGTRKRRKIQTECDLQGGETRWHKTGKTRPVMVNGKQKGCKKILVLYTNFGKNRKPEKTNWVMHQYHLGQHEEEKEGELVVSKIFYQTQPRQCNWSDRTNAATTVDGTTNVVICHPNNIRRDSGIRSCSSKEQLIPLRDEVSGAGIAAVVLSRFAFGIGYLKTLK

SEQ ID NO: 105879 - protein, 84 aa, Gossypium hirsutum
  unsure (1)..(84): unsure at all Xaa locations
  Clone ID: LIB3585-008-P1-K1-C3.pep
PRVRLSXXGSYFTQDIPLPAGTIIDFQRTADGHLITKIGGNQIGAVHSKDLCRAFFDMYIGNFPVSEQTKEDIGQNVANIIRRC

SEQ ID NO: 105880 - protein, 86 aa, Gossypium hirsutum
  Clone ID: LIB3585-008-P1-K1-C9.pep
VSSTMINYQLSPPFAHLSTLIHRATRTPGIVKQGRYVSIPYQSMAQSRPSHSASHLGSLGDTGWRSSPSGVVIGCADQLGLMSMSI

SEQ ID NO: 105881 - protein, 132 aa, Gossypium hirsutum
  unsure (1)..(132): unsure at all Xaa locations
  Clone ID: LIB3585-008-P1-K1-D10.pep
LTLLPXLFPSPSAARFAAGFSGAVTSISSVCLFFAAANFLYSAGPLHYEMAQRMVGSVYDWSSVKLALDIGCGRWILLNSVATQLKKTGSSGRVVGLDRSKRTTLSTLRTANVEGVXEFVTCIEWRVRCFPF

SEQ ID NO: 105882 - protein, 70 aa, Gossypium hirsutum
  unsure (1)..(70): unsure at all Xaa locations
  Clone ID: LIB3585-008-P1-K1-D12.pep
PRVRXXSSYCHFFFLLYILCCYKVRLFDTSYVSIIVFNHSSSPDLRKTHKKKSLCWVLPGTLSTGGTDEF

SEQ ID NO: 105883 - protein, 88 aa, Gossypium hirsutum
  Clone ID: LIB3585-008-P1-K1-E11.pep
RILSARSPPQSPVLMVYNMEYAITYTSCATCFNLQLVLTFSHITVRPLYVHVDLIASLCCTAGFYLYLCCISIIHLIEVRCFYTKFIA

SEQ ID NO: 105884 - protein, 69 aa, Gossypium hirsutum
  Clone ID: LIB3585-008-P1-K1-E2.pep
RCIFDLVVFSLISSRFKSHHLKMKIKIYSKLVLYRFLLLDFYLLNFLFTLSASEWFHNVLDHWFLVQLV

SEQ ID NO: 105885 - protein, 43 aa, Gossypium hirsutum
  unsure (1)..(43): unsure at all Xaa locations
  Clone ID: LIB3585-008-P1-K1-E4.pep
YAXVHXXXLRLLASACMAQAPTVAPTLYGPTYAPPPGDTATAT

SEQ ID NO: 105886 - protein, 148 aa, Gossypium hirsutum
  unsure (1)..(148): unsure at all Xaa locations
  Clone ID: LIB3585-008-P1-K1-G11.pep
PRVRVRLWEDDELSSLLSKEEQNQMYNCLQTNRNLAVARFTAVDWMLKVTAHHSFSALTAVLAVNYLDRFLFSLPFQTDKPWMTQLGAVACLSLAAKVEETQVPLLLDLQVEESKYYFEAKTIQRMGIFXCFSTLHWERNPITPISFL

SEQ ID NO: 105887 - protein, 97 aa, Gossypium hirsutum
  unsure (1)..(97): unsure at all Xaa locations
  Clone ID: LIB3585-008-P1-K1-G4.pep
ERFKIYDFISQARTSNNLSISSLYRYNQISISVSSDRRCFSSEMNESSPVVTSPKASCTFVQRYPDLFPCQEVACSQIHNSSSVXFIAGRVGGRVVA

SEQ ID NO: 105888 - protein, 113 aa, Gossypium hirsutum
  unsure (1)..(113): unsure at all Xaa locations
  Clone ID: LIB3585-008-P1-K1-G9.pep
MLNYSCFYTAILEXRGDEVISAASIMIHGNQLAEMPFIGTRYAYRRQGMCRRLLCAIESALRSLNVQKLVIPAVPELRETWTSAFGFQPLETASKPKMTNMNILVFPGVDMSR

SEQ ID NO: 105889 - protein, 138 aa, Gossypium hirsutum
  unsure (1)..(138): unsure at all Xaa locations
  Clone ID: LIB3585-008-P1-K1-H12.pep
PTRPXXAMRSLLPKLSFKARSISSDIEKAANLAPESSITSLKEKPSMSRTLSLNKIFTPMINRTSSLPVTQTANSNPESAIGGSLGGSSKGSMRKISRSFSVPVNEKXGKLRRMDSFFRVVPLTTRAKECDIRITPSI

SEQ ID NO: 105890 - protein, 79 aa, Gossypium hirsutum
  unsure (1)..(79): unsure at all Xaa locations
  Clone ID: LIB3585-008-P1-K1-H6.pep
EITTDDXFQAAHIEERGMLDRKERSPETWKQVAINEAAMAVVAVNFPDLRNIEFVTIAPRASWELGYVRMKMDHIIITK

SEQ ID NO: 105891 - protein, 104 aa, Gossypium hirsutum
  unsure (1)..(104): unsure at all Xaa locations
  Clone ID: LIB3585-009-P1-K1-A10.pep
LSYSLSFEAMADDLSFFSKDSFILKLPKKSPLVLRMVVSLFAMVXGVYIFSICLKQISTSSTFEFLNIGVIQKPCPEPNIEPWEIPYVHYPNPKTFSRAECACN

SEQ ID NO: 105892 - protein, 46 aa, Gossypium hirsutum
  Clone ID: LIB3585-009-P1-K1-A11.pep
DLTFSLGKSSRSSMWYKKIAAMYLVDEVGWYYHGLFMLIISLLINL

SEQ ID NO: 105893 - protein, 143 aa, Gossypium hirsutum
  unsure (1)..(143): unsure at all Xaa locations
  Clone ID: LIB3585-009-P1-K1-A12.pep
MTRGLRQHPLICVSLATGSHTDSADGRRIFETQATAXIATTNGFNIXKREESKYKEPEYKQAMSNHXTXKPDKTVKHMDEKQKLCKQDDEFLKLHESYAQKEYDGENLEFHKWEKPXEHEKHEVKYAQIPQYNVKHDEGIEHK

SEQ ID NO: 105894 - protein, 144 aa, Gossypium hirsutum
  unsure (1)..(144): unsure at all Xaa locations
  Clone ID: LIB3585-005-P1-K1-C5.pep
MAQAQQTRESSSLPSCEAYFEKVNSRKKLPQPVQETLTTAFARIPVSSIPHVPAGKEIEIQADTTVADAVNVLSHCNILSAPVINPDADTSMNWRERYLGIIDHSAIVLWVLETAEVAADALSANTATGCGLGAXAVGALGALA

SEQ ID NO: 105895 - protein, 102 aa, Gossypium hirsutum
  Clone ID: LIB3585-005-P1-K1-C7.pep
PPRPAWVHRKGSTSLRNAPDTRGASLFFSTEVEDRALRPHNGEREGPGGRRPQTGSGYLAVSTWKRGVPQRDGAREAKAREGVNLWEVLCENVSWGWGLRFD

SEQ ID NO: 105896 - protein, 43 aa, Gossypium hirsutum
  Clone ID: LIB3585-005-P1-K1-C9.pep
LAILYRSNLDRYRLKGYVKTVLMLRLSSLPNFLDIPEYLFIFQ

SEQ ID NO: 105897 - protein, 62 aa, Gossypium hirsutum
  Clone ID: LIB3585-005-P1-K1-D10.pep
YRVFTTLGTLPRASFSFFLAYMNHMSHRQQAVLEGRHLVELDLHFGPVTHPAPRPACARLRV

SEQ ID NO: 105898 - protein, 131 aa, Gossypium hirsutum
  unsure (1)..(131): unsure at all Xaa locations
  Clone ID: LIB3585-005-P1-K1-D11.pep
LALATRDVXALSGXPSYAVELGRLDGLSSTAASVNGKLPHPTFNXNQLNSLFAANGLSQTDMIALSAAHTLGFSHCDKFSNRIYNFSRQNAVDPTLNKDYATQLQQMCPRNVDPSIAINMDPNTPRTFDNV

SEQ ID NO: 105899 - protein, 84 aa, Gossypium hirsutum
  Clone ID: LIB3585-005-P1-K1-D12.pep
YKMSNPCLRLNHHLTRTGLCMSHPVVNKISKQHKVVNILKKHTSCHQDPQQNSCYIAPPIQSLSSSSISNTYIIYAVQPTNSKV

SEQ ID NO: 105900 - protein, 65 aa, Gossypium hirsutum
  Clone ID: LIB3585-005-P1-K1-D8.pep
KSGNIVGVGESAVKICPGKRKVDSYNVDFEVFEKAIKGGIVPPFASSENEHETHLPAREKQFEHA

SEQ ID NO: 105901 - protein, 157 aa, Gossypium hirsutum
  Clone ID: LIB3585-005-P1-K1-E3.pep
KFPSVTAAQKEVGGSYYVVRKVLQELEYKSKICSSNSSYENLSAKAANKVDKPFSVVEVISTAVQDDTCARAMDDVKMHDTNDKQLEADRGSCHDFVLEENSVLKVDAKGLEKQEDAKVGGLEMDDSDNFLIFPDKQKIVEATDQDLESDKLFKTES

SEQ ID NO: 105902 - protein, 47 aa, Gossypium hirsutum
  unsure (1)..(47): unsure at all Xaa locations
  Clone ID: LIB3585-005-P1-K1-E7.pep
TTQATXXXXPGQDXGTTGXXKKXTDTTXXTGRQXXQNTVKTRAGXXP

SEQ ID NO: 105903 - protein, 88 aa, Gossypium hirsutum
  Clone ID: LIB3585-005-P1-K1-F12.pep
SHRCSICLSLSSGIGQLQPVNLPKLISLLRPMNNPNLTACNRTCAYVTYGFAISEWMVRFDARILPLACHTNRPEADLKASWSKATSK

SEQ ID NO: 105904 - protein, 98 aa, Gossypium hirsutum
  unsure (1)..(98): unsure at all Xaa locations
  Clone ID: LIB3585-005-P1-K1-G10.pep
QGKKHRKDXEPPXGXKRGQXXHTTTHPRTXAEKQRTPANKPSKGQRGGATKKKKRRXRXEANXARDAAHRRAQERHRXXGRRKAGKKGTTRADAGRPG

SEQ ID NO: 105905 - protein, 39 aa, Gossypium hirsutum
  unsure (1)..(39): unsure at all Xaa locations
  Clone ID: LIB3585-005-P1-K1-G4.pep
WVQKLMICNLCRLLYPVQHGCLLMSNXKWXXXHLXGRVG

SEQ ID NO: 105906 - protein, 75 aa, Gossypium hirsutum
  unsure (1)..(75): unsure at all Xaa locations
  Clone ID: LIB3585-005-P1-K1-G6.pep
GSDPTPXPKICDSNEGPSSSTINSLLIRGTKTRGCVFFSFACLSTSVXXRKFVAFFWGECXVGRGGGEWGXEEDG

SEQ ID NO: 105907 - protein, 97 aa, Gossypium hirsutum
  Clone ID: LIB3585-005-P1-K1-H5.pep
LAGNRTVGKLTASETGMLRVGVGALSPSEAERTTYISAGEKEDHTSLLTAGKRMKTMALEWAEDHAGVDVLGTTANIWPHSDHNLITMNSRRYGGEL

SEQ ID NO: 105908 - protein, 52 aa, Gossypium hirsutum
  Clone ID: LIB3585-006-P1-K1-A11.pep
PRVRKSLVDGRWTLAFRDDESCKTALSMILEEINLQNMEVERRLKPVLDLEL

SEQ ID NO: 105909 - protein, 125 aa, Gossypium hirsutum
  Clone ID: LIB3585-006-P1-K1-A7.pep
MDGNKDEALRCVRIAEEAIASGNKQRALKFIKIAQRLNHTLSVDELLDACKNLDSGTTPVSPVGEKRVLSDENEGGSTKLDEGFDGDRSYTEEHVQLIRQIKRNKDYYSILGVEKTCSVDEIRKA

SEQ ID NO: 105910 - protein, 155 aa, Gossypium hirsutum
  Clone ID: LIB3585-006-P1-K1-B5.pep
MSKPWGGVGAWAAEAEREEAEEREAAEAAAAAPTAESRSFPSLKEAVSAKRKSKKMTLSEFTMGTYSSSAGAGVGGGARVTDYNKLTPEEMMLLPTRPKERTPEEMQYSRLGGGFSSYGRSGPSAGRVMHESDGSDGSWGSGRRQYGGFDEERRG

SEQ ID NO: 105911 - protein, 125 aa, Gossypium hirsutum
  Clone ID: LIB3585-006-P1-K1-B7.pep
MNGYQQQKTTEQVVDRKHGEGKLKHEPKEGSADKQSPPASPPSAASSPSHEFSFTVVSLHSSSNSVPGKTKTPPSMAIDLSPADDIFFHGHLLPLHLLSHLPVSPRCSTNSLDGFNGPVTDEPKP

SEQ ID NO: 105912 - protein, 69 aa, Gossypium hirsutum
  unsure (1)..(69): unsure at all Xaa locations
  Clone ID: LIB3585-006-P1-K1-C10.pep
XXRSSXDREGGSLYESIXXLTYRXCMRACIARSIVVSLXIQFTXXRRLYQPDRDLXENPVALTPTLNRP

SEQ ID NO: 105913 - protein, 166 aa, Gossypium hirsutum
  unsure (1)..(166): unsure at all Xaa locations
  Clone ID: LIB3585-006-P1-K1-C11.pep
NIGGSAYGGQRSICCTPDLAKLEGCKQGEVIRIPSATEINWPMVFSIQFNGNDLSTQMNNAEVPIKKTGMHNLFFIACDPKLKGTVMSGKTVWKNPDGYLPGRMAPLMTFYVYMAIAYLLLSAIWFSQYMRFWEDILQLQHCIAAVIGLGLFEMILWYLDYSNXNK

SEQ ID NO: 105914 - protein, 161 aa, Gossypium hirsutum
  Clone ID: LIB3585-006-P1-K1-D5.pep
HASGKSAPSNSELVTLCSEFLNGGTDTTATALEWGIAQLIENQDIQSKLLDEIKSTVGDRRVDETDIEKLKYLQAVVKELLRRHPPTYFSLTHAATEEAATLGGYDIPTDANLEIYLPGIGDDPKIWSDPEKFDPDRFYLGKEDGDIMGVKGVKMMPFGVG

SEQ ID NO: 105915 - protein, 86 aa, Gossypium hirsutum
  unsure (1)..(86): unsure at all Xaa locations
  Clone ID: LIB3585-006-P1-K1-E1.pep
WSVDLEKLVRAIADCTEIAGVRAPSAITIRVPRRCRMLKAVLKNEYFSRNSLFHEIAQYQAIVLTSIRRECFXKKKFDRKKSMKMR

SEQ ID NO: 105916 - protein, 164 aa, Gossypium hirsutum
  unsure (1)..(164): unsure at all Xaa locations
  Clone ID: LIB3585-006-P1-K1-E11.pep
YVDKIXTLCALLAASGSPISEAERTAVLLAGLSSEFDAIVSHASLFPVPLPFQRLIDALSECEALQIRSVQDVLVAANVVEGTQLPSTDGAFRGGRPLVMVVAEAFVLASNVKSAADLVISRSGVTTAIIVRGSRRWKHGCWKGAMVVLLLVRTGKSLDVRIKS

SEQ ID NO: 105917 - protein, 47 aa, Gossypium hirsutum
  Clone ID: LIB3585-006-P1-K1-E12.pep
CSEYVSKPLVNLSLDIVVAADTGILRVYVVSQQLSLLAEMSVCTRSR

SEQ ID NO: 105918 - protein, 126 aa, Gossypium hirsutum
  unsure (1)..(126): unsure at all Xaa locations
  Clone ID: LIB3585-006-P1-K1-E8.pep
ADRTVTGKEGLMILNKTLGPYSDQAAKGVHSNWLTHVYRATSRALASADPVQNDLAVRSVSHNAERRTDTDIHDPAXHTGFTMAMTKSHAVDAAYCLLHDTDRFTTDDIXPAGCMHNDRIAGDTIL

SEQ ID NO: 105919 - protein, 60 aa, Gossypium hirsutum
  Clone ID: LIB3585-006-P1-K1-F10.pep
HLIEGIIDQVKGTAYISWVQPRVLGIPQIKSLRDRLDNWVGKVHTACLSIEAETPDLVAP

SEQ ID NO: 105920 - protein, 176 aa, Gossypium hirsutum
  Clone ID: LIB3585-006-P1-K1-F11.pep
HASAHASAHASAHASAHASVLRRRCADKCVLAPYFPPTDPAKFTIAHRVFGASNIIKFLQELPETQRADAVSSMVYEASARIRDPVYGCAGAICQLQKQINELQAQLAKAKAQAEVANMQLQQANLAAFLCMEMAETTSAQPNSHQFVDNPSFMEDNNFGSFWEPLWTLFIASRFN

SEQ ID NO: 105921 - protein, 169 aa, Gossypium hirsutum
  unsure (1)..(169): unsure at all Xaa locations
  Clone ID: LIB3585-006-P1-K1-F6.pep
HASDEFRFCRGLRQRDPLSPLXLFILVTEVLHLALDKALEEGLIEGFNDVIQGMNFSHLQFADDTILFLKADDKVVTNVKYILRVFEXFSGQSINFNKSCLVGFEVEEELLFRMATICKCKIGNLPFNYLGVPLGANPKRLSTWEPIIDRVRKKLSRWKCRSLSWAGRV

SEQ ID NO: 105922 - protein, 46 aa, Gossypium hirsutum
  Clone ID: LIB3585-006-P1-K1-G7.pep
TKPTITSKLTASNSTQTSMPFIQISKYQTITSKTNYTFIINTIFQT

SEQ ID NO: 105923 - protein, 145 aa, Gossypium hirsutum
  Clone ID: LIB3585-006-P1-K1-H8.pep
TKKSAKIETQNQNPNSNSNPNNQNQIRGSKGKSCKGCLYYSSALKSKSQNPTCVGIPRTLQQVPRYIIGESELEASKEGRTLTDFKYACVGYSVYLDNKDSSADNQSDKPVELPFCVGLEVLLDRTAASNDHVPANIHKNKDSHV

SEQ ID NO: 105924 - protein, 102 aa, Gossypium hirsutum
  Clone ID: LIB3585-007-P1-K1-A10.pep
GFQLQLTDKKSCGLRLQRMLMPLIKLGQQTYALQSSKQEPENKRETKGPLQLERNNKQDSTCRKNHAERKKKKDFHASKVTFAAKIEKKEEKKGPHHKLSAD

SEQ ID NO: 105925 - protein, 133 aa, Gossypium hirsutum
  unsure (1)..(133): unsure at all Xaa locations
  Clone ID: LIB3585-007-P1-K1-A3.pep
KMKPPVRFSDEEVXQLTIRIQNAGTEVVEANAGAGSATLSMAYAAARFVESSLRALDGDGDVYECSFVQSDLTDLPFFACRVKLGRKGIEAMIPSDLQGLCAYEEKALEALKPELKASIVKGIAFAQKQPVTA

SEQ ID NO: 105926 - protein, 105 aa, Gossypium hirsutum
  Clone ID: LIB3585-007-P1-K1-A8.pep
GRVGGRVGWLMHQYHLGGNEEEKDGELVISKVFYQTQSRQCGSIKDSLKLQSGHEASHHLKNNNNNGLVEFYNPSFISFDQGGQRRANPTQLLPHFADHDGSFIP

SEQ ID NO: 105927 - protein, 141 aa, Gossypium hirsutum
  Clone ID: LIB3585-003-P1-K1-C8.pep
MEKETQVQIPRVKLGTQGLEVSKLGFGCGALSGMYNAPLSHEEGCFVLKEAFSKGITFFDTSDLYGELYDNEIMIGKALKQLSRDEVQLATKFGIRVLEGFNFEVKGTREYVRKCCEASLNRLGVDYIDLYYQHRVDTLVP

SEQ ID NO: 105928 - protein, 103 aa, Gossypium hirsutum
  Clone ID: LIB3585-003-P1-K1-D2.pep
QPITSSRSTTNFGISVPFSFQSKVTLSRNQPSSFTLLDFQLFSFHFFSIQTMESLALQAFSTVTTTPFSLSSRSSLHLRSRPIYENFQPCMFPLSSIPTLRSP

SEQ ID NO: 105929 - protein, 63 aa, Gossypium hirsutum
  unsure (1)..(63): unsure at all Xaa locations
  Clone ID: LIB3585-003-P1-K1-F1.pep
PAGQPLVDDWKCLTEMVRTFETHCGKLTRXGMKHTRSFANIYKFDVCVINQPLCPIFLKSCEV

SEQ ID NO: 105930 - protein, 142 aa, Gossypium hirsutum
  unsure (1)..(142): unsure at all Xaa locations
  Clone ID: LIB3585-003-P1-K1-G11.pep
PTRSVPELGSKQCCYEELRTLMVATDRSDSIVMGEWAIAGHARALLEWHNLSRFXGHCGENTIPKEAGRRKHCYNESCKKRIYPAVDPVVIMXDIDRENDRALLGRQSRFVPSMSSCXAGFIEPGESLXKAGTRETYEEAGI

SEQ ID NO: 105931 - protein, 51 aa, Gossypium hirsutum
  Clone ID: LIB3585-003-P1-K1-G2.pep
LWRLFGYWWKLISIEIPFIRDQRSILYLHSRYVSSTIQRDPSPDPTSLYLF

SEQ ID NO: 105932 - protein, 77 aa, Gossypium hirsutum
  Clone ID: LIB3585-003-P1-K1-G3.pep
KSHPILRNKKEDDIPYTKRNKKDKREKREPFLIEDYCCCIDLATKRRVYGNGLSCFLHNNRLKPTMKYFRCSSMVKS

SEQ ID NO: 105933 - protein, 127 aa, Gossypium hirsutum
  unsure (1)..(127): unsure at all Xaa locations
  Clone ID: LIB3585-003-P1-K1-G4.pep
SLMGRFSQFLSLDIEEPTLYPTEEELAAQRRLREIVXECHVDNIFMESKFLQAESXLQLVEVIILAASRFSKGTGVMEDDTAVFCLELLIVITLNNRDRILIIWQKVYKHISDIVQQKAVPCALVEK

SEQ ID NO: 105934 - protein, 53 aa, Gossypium hirsutum
  unsure (1)..(53): unsure at all Xaa locations
  Clone ID: LIB3585-003-P1-K1-G6.pep
RSLVFLLNLMDGSCTQHLMMVMCMSMMLRGXAXNWAMSGHSGLVXSVDVKPRW

SEQ ID NO: 105935 - protein, 44 aa, Gossypium hirsutum
  unsure (1)..(44): unsure at all Xaa locations
  Clone ID: LIB3585-003-P1-K1-H4.pep
KYSNLCXRRKSKSQSDQKMETKRCWSGIHWTLTQFVTPLSLSTC

SEQ ID NO: 105936 - protein, 118 aa, Gossypium hirsutum
  Clone ID: LIB3585-003-P1-K1-H8.pep
MQLHVSPSLRHVTVFPGKGVREFIKVRIGSRWVSYRMLFYSLLFFTFLLRFIFVFSTVDTIDGDLSKCSTIGCLGKRIGPRILGRMESNVPEVIYQILDEAISKEEVEPKSDIPQTLH

SEQ ID NO: 105937 - protein, 90 aa, Gossypium hirsutum
  unsure (1)..(90): unsure at all Xaa locations
  Clone ID: LIB3585-003-P1-K1-H9.pep
HVFYNVHTVKSLNDTNIHVTDYIRIETIGLITNSMKANALTNKCSPYTAILTRHDASHKSQELXMTRVHIPLHSTGRYKTMISVSGAHLS

SEQ ID NO: 105938 - protein, 144 aa, Gossypium hirsutum
  unsure (1)..(144): unsure at all Xaa locations
  Clone ID: LIB3585-004-P1-K1-A4.pep
HASADASVHASVSTPLSPFIGGSDLAGKASIERPNIANKRFSSMPTVSENHKQNGDARTRCTSSNEQVTTISNFIPTSYRGCTHLSLRSRAPLGCVPAQSMATIKLELLPLIDGIITLDSLLIALXENDRTYISKHSLMMNAAY

SEQ ID NO: 105939 - protein, 58 aa, Gossypium hirsutum
  Clone ID: LIB3585-004-P1-K1-A7.pep
DPCPFVLILLSNLSLKFQLSTKPSLLKIHTYTSTFYCKIKLKNFPHQVGSIPYIHTNT

SEQ ID NO: 105940 - protein, 64 aa, Gossypium hirsutum
  Clone ID: LIB3585-004-P1-K1-B11.pep
KFTSFLHVQIHCAHNCSDLQKKVNEKCLALLRFTNNLFFFTVIPEYVCISVHKCAWSVHIVIVH

SEQ ID NO: 105941 - protein, 94 aa, Gossypium hirsutum
  Clone ID: LIB3585-004-P1-K1-B5.pep
RGVPLLTWSIKGDQHYNANWLLNHLKEACMISYDTARQNIKKDDIAEGIDRLLGDKNIKTHAGTLNTKSQHGFPASSAVCMDAFKDCIVNLYAH

SEQ ID NO: 105942 - protein, 94 aa, Gossypium hirsutum
  Clone ID: LIB3585-004-P1-K1-B9.pep
KKEKPEPKLLFYAPPKKEERGPKPPMYEPPKKEKPEPKPPVYTPPKKDEPKPKPPVYEPSKKEKPEPKPPIYTPPKKEKPEPKPLVYEPSKNDK

SEQ ID NO: 105943 - protein, 61 aa, Gossypium hirsutum
  unsure (1)..(61): unsure at all Xaa locations
  Clone ID: LIB3585-004-P1-K1-C9.pep
PIVRPNFLPCFRTNHGKGQGVFLHSITTTTHXKNNSRLQIYTTASTETTHSTKMFHLLSFN

SEQ ID NO: 105944 - protein, 65 aa, Gossypium hirsutum
  Clone ID: LIB3585-004-P1-K1-D3.pep
FEHFIHRREPSTPFLSHRRSKNRSFRFRRKSKGWRFRETGNAVREMLRITDQYGDMEMVAGFRFG

SEQ ID NO: 105945 - protein, 166 aa, Gossypium hirsutum
  Clone ID: LIB3585-004-P1-K1-D4.pep
DAWAPPNQPHVEEDAQLAEAVSLSLKTAEQEKALHDQGWSGTSEPEASKPADMQLGHLEVSNGRLMRGSSSIHDDAEDVEEQPLVRRRTRQASSGSGESVKEIGVVEASSPSNPGQQDAGNLPRNNGNAFPSDEWGGISSEEHDEAVMLEAAIFGGIPESRYHFAY

SEQ ID NO: 105946 - protein, 93 aa, Gossypium hirsutum
  Clone ID: LIB3585-004-P1-K1-E4.pep
MGDVIQLQVPQLTKTNYGNWSIRMKALLGSQDCWEIVEKGYIEPGDAATEAALSNDAKKALREARKKDQKALNSIFQGMDESTFEKISGRVGG

SEQ ID NO: 105947 - protein, 60 aa, Gossypium hirsutum
  Clone ID: LIB3585-004-P1-K1-E5.pep
SARSRANVRGASSTRCLRRTTSSMVSPKYHTLCVVKQRRDCEYPGDTHLNRLALHAAVIS

SEQ ID NO: 105948 - protein, 152 aa, Gossypium hirsutum
  Clone ID: LIB3585-004-P1-K1-F4.pep
LGTVQDKALPICWKGTKPFKSVHDVKNYFSTLTLKFKDTQNIQLELQPEAYLIVTEDGNACFGILNGTEAGLGDLNVIGDISLIGKMVVYDNEKQRIGWISADCNRLPNSLDSNYKEDIQRPYAANFGILEENHPKTQGSSETNVRVRNREL

SEQ ID NO: 105949 - protein, 114 aa, Gossypium hirsutum
  Clone ID: LIB3585-004-P1-K1-G4.pep
PTRPVLGDIGVRIQQETKKYFKEIGIPADVKYIDPTYMIRACRANASDGILCTVLGQNAVHGAFAGYSGITVGICNTHYVYFPIPEVISHPREVDPNSRMWHRCLTSTGQPDFI

SEQ ID NO: 105950 - protein, 171 aa, Gossypium hirsutum
  unsure (1)..(171): unsure at all Xaa locations
  Clone ID: LIB3585-004-P1-K1-G5.pep
PRVREWAGASIASVGIQGLAYGIMLGMASAVQTVCGQAYGAKKYAAMGIICQRAIVLHIGASVILTFLYWYSDTVLQAIGQSASIAEQGQVFARGLIPQLYAFAISCPMQRFLQAQNIVNPLAYISVGVFLLHILLTWLAVDVLGYGLLGASXTLSLSWWILTILNGLYIG

SEQ ID NO: 105951 - protein, 64 aa, Gossypium hirsutum
  unsure (1)..(64): unsure at all Xaa locations
  Clone ID: LIB3585-004-P1-K1-H12.pep
FIDQKLTSQVHEIVGRINGRFGTLTAVPIHHLDXSLDFHALCALYACTDVALVTSLRDGMNLVS

SEQ ID NO: 105952 - protein, 80 aa, Gossypium hirsutum
  Clone ID: LIB3585-004-P1-K1-H9.pep
RTRGQLPKILSSICYHFRFTPHLKHLQSGFLGHSSSKAASLQIGVSLTRALPKDMEAVLFPRPTSRASHICGYSLASEID

SEQ ID NO: 105953 - protein, 146 aa, Gossypium hirsutum
  Clone ID: LIB3585-005-P1-K1-A3.pep
LQEYGEIEGEFAEIGVERVLKGHLSDFPVLLPKRKLSKRPLDEENTLPCWLSEEEANYYVTKFQKTGFTGPLNFYRNLNRYVYIYMYVYKTQGRNQRLCLGVLSYDGRNWELLKPWLGCKIKTPAKFIMGDKDLVYGVPGVKDYIH

SEQ ID NO: 105954 - protein, 57 aa, Gossypium hirsutum
  Clone ID: LIB3585-005-P1-K1-A5.pep
YYNIVYVIDMYMHMNMYMNVRALIWRNRMKISRDCSGESLERTFERFYSIVAEKETI

SEQ ID NO: 105955 - protein, 85 aa, Gossypium hirsutum
  unsure (1)..(85): unsure at all Xaa locations
  Clone ID: LIB3585-005-P1-K1-A8.pep
MALALAEYRRPYVLLQEPDLRTMLRRIDAHNASICVGRVLARILRTNVGPKGMEXVLRSPAGADASASVWATIFVHMDVDNQMAK

SEQ ID NO: 105956 - protein, 67 aa, Gossypium hirsutum
  Clone ID: LIB3585-005-P1-K1-B10.pep
SGDTYSKLERETRSLRLYVPTDCLLRYVYGTLRLTACTSASIDTVDLLCYRCPKTSDSHNISILTYT

SEQ ID NO: 105957 - protein, 71 aa, Gossypium hirsutum
  Clone ID: LIB3585-005-P1-K1-B11.pep
LQPAHKGSMYSAYIKHPVMLDENQHLIYGILRKVVFVHMGCSSSLLGSKLKLRRGQMLGSLKSQSNFTFFF

SEQ ID NO: 105958 - protein, 88 aa, Gossypium hirsutum
  unsure (1)..(88): unsure at all Xaa locations
  Clone ID: LIB3585-005-P1-K1-B7.pep
HSRGESSANVARKASAAVKIWGDMPEGDCHKSQXVRNTKCYLYTPNGKLLTQSFSPSDEKANASVYMTHGSGSDTGWLLQKIWINYVN

SEQ ID NO: 105959 - protein, 155 aa, Gossypium hirsutum
  Clone ID: LIB3585-005-P1-K1-C10.pep
HASAHACAHAFGEKEVISDPSTPKPNPEPFFYAPEGKSDHYFEMQDGVIHVYDNKDTRRELFPVADATTFFTDLHHILRVIAAGNIRTLCFHRLNLLEQKFNLHLMLNADREFLAQKSAPHRDFYNVRKSDTHVHHSACMNQKHLLRFIKSKLKK

SEQ ID NO: 105960 - protein, 119 aa, Gossypium hirsutum
  unsure (1)..(119): unsure at all Xaa locations
  Clone ID: LIB3585-003-P1-K1-A1.pep
AFNLLIQLNTFLNTVLSEFLPFPQCRTPFSGKSVWIIGLCRIGSAVATRAXSINCFFSYYSRSTKPNSYYNFYSNIADWAADCQILFVACATSDVTHHIINRAVIDAWGPNSILINIRL

SEQ ID NO: 105961 - protein, 117 aa, Gossypium hirsutum
  Clone ID: LIB3585-003-P1-K1-A10.pep
NRSAGSSLGKACFSVFKKTKPLLPLLRQHFKLSLILLFLMRSAHAIDTEIHVGETKNNAVNQDTRLLSLNIDYNIQLFASHLPNKGWNNFITLLSRVALLTSFFFSFSFSPFFFRYG

SEQ ID NO: 105962 - protein, 69 aa, Gossypium hirsutum
  unsure (1)..(69): unsure at all Xaa locations
  Clone ID: LIB3493-033-P1-M1-A4.pep
IFNFFNQQGRGKIKALGTAPXKKKEKKLSDHLFLNRFLHFVILNPQIQGLFGSYILSDKEPRKSNSKQN

SEQ ID NO: 105963 - protein, 72 aa, Gossypium hirsutum
  unsure (1)..(72): unsure at all Xaa locations
  Clone ID: LIB3493-033-P1-M1-A5.pep
EKISVMGRSSRNCKLLLVQALXXXGHVVAVTGDGTNDAXALHEAYIGLAMGIQGTEIAKESSDIIILDDNFA

SEQ ID NO: 105964 - protein, 75 aa, Gossypium hirsutum
  unsure (1)..(75): unsure at all Xaa locations
  Clone ID: LIB3493-033-P1-M1-B2.pep
GQMHKYLLSFSLRHNMDASSXCTTEKREKLKKGKKSVVXFASCSSCLSLFLRSSSFVLLFTKYCKRWPTVRIFNL

SEQ ID NO: 105965 - protein, 135 aa, Gossypium hirsutum
  Clone ID: LIB3493-033-P1-M1-B4.pep
MSDDPGAKENKQFVPFIFSPSISPASISARGSDPPASLRPKCEANVDLQDVLAAAEAAAETAEHAAAAARSAASLAQVRIAELTQKKNERVTESSSPENPIHTYIPHQQASTEKLNFDHQNFCIDPADSLYSLDS

SEQ ID NO: 105966 - protein, 128 aa, Gossypium hirsutum
  Clone ID: LIB3493-033-P1-M1-B8.pep
KDRLALQRLREAAEKAKIELSSTSQTEINLPFITADASGAKHLNITLTRSKFESLVNHLIERTKAPCKNCLKDAGISTNDVDEVLLVGGMTRVPKVQEVVSGIFGKSPSKGVNPDEAVAMGAAIQGGI

SEQ ID NO: 105967 - protein, 147 aa, Gossypium hirsutum
  unsure (1)..(147): unsure at all Xaa locations
  Clone ID: LIB3493-033-P1-M1-C5.pep
KGFACIPLFCLSALQLDNEIYTXASSLYKSIDIHNKACASIVNKGEPLKTQLIYAPVRKYSPCLDDRKQNKCSSATCFDPWQSSASECEDSTCSNNNLRSEKLLASDEGLGNSLGKSIAGFPLDASDLANFLTRDRHIGFNCSAQNS

SEQ ID NO: 105968 - protein, 150 aa, Gossypium hirsutum
  unsure (1)..(150): unsure at all Xaa locations
  Clone ID: LIB3493-033-P1-M1-C9.pep
ELNASSNRVQDLPDSGGLLLNLRILDVSGNKLNALPESIARCSSLVELDASFNNLTFLPNNIGYGLLNLEKLSIQLNKIHFLPSSICEMRSLRYLDAHXNELHGLPQVIGRMTXLEVLNLSSNFNDFTELPDPISDLTNLRELDLSNNQI

SEQ ID NO: 105969 - protein, 119 aa, Gossypium hirsutum
  unsure (1)..(119): unsure at all Xaa locations
  Clone ID: LIB3493-033-P1-M1-D1.pep
GRVGSEELIHGFDQKAAACVMAKITSLKMEMEGQKQCLLXVKVGTDGFDATRWLDRNLIRVCSKFGEYRKDDASSFTLNPXFSLFPQFMFNLRRSQFVQVFNNSPDETAYFRMVLNREN

SEQ ID NO: 105970 - protein, 142 aa, Gossypium hirsutum
  Clone ID: LIB3493-033-P1-M1-D4.pep
MSRNGPKLQAMESPRSICHVVAVPYPGRGHVNPMMNLCKLLCSKTPNIVISFVVTEEWLGFISSDDKPVNVRFRTIPNVIPSELDRANNFPAFIAAVLTKMEAPFEDLLDRLELPVAAIIADTYVAWTVRVGQRKNIPVASL

SEQ ID NO: 105971 - protein, 50 aa, Gossypium hirsutum
  Clone ID: LIB3493-033-P1-M1-D6.pep
IALSDYPNNRDLILNIFKLQIAGLSILMDDVDEFSASTVIAWAQVYKGKP

SEQ ID NO: 105972 - protein, 81 aa, Gossypium hirsutum
  unsure (1)..(81): unsure at all Xaa locations
  Clone ID: LIB3493-033-P1-M1-D9.pep
GRVGGRVGVRADLIVQRVXFVLESDKRSHLMDLLHAQRENGNHGKHSLTLVFVETKKGADSLEHWLCMNGFLSTTINGDRT

SEQ ID NO: 105973 - protein, 61 aa, Gossypium hirsutum
  unsure (1)..(61): unsure at all Xaa locations
  Clone ID: LIB3493-033-P1-M1-E11.pep
PXRXXLXTHVIFKTRQYXSLFKNNLXSFKRENPXAXNKCMEIIYIFLNIKTKLPPKTKIPC

SEQ ID NO: 105974 - protein, 54 aa, Gossypium hirsutum
  Clone ID: LIB3493-033-P1-M1-E4.pep
TGSNFQRKLLSPKPFIYSFPTFLYSSSFPSNFNLILTLYHILSYFQHIQGHSQT

SEQ ID NO: 105975 - protein, 115 aa, Gossypium hirsutum
  Clone ID: LIB3493-033-P1-M1-F5.pep
MITHSGGEIAEVQRGHIARSTVRTYPHTKCCADKRSPDCHVHISNHTHMHLYDDKYRLVCDRSIITKRCMFLTDETVIDNLTVLPYMDPSLDATHDMVAVAGPQLDQDATTAAVN

SEQ ID NO: 105976 - protein, 162 aa, Gossypium hirsutum
  unsure (1)..(162): unsure at all Xaa locations
  Clone ID: LIB3493-033-P1-M1-F6.pep
TSGKLLATTLLWTFTPGASMPSKEVLVATFSRFGPLKESEVQILKDSSNAHVVFMRNEDAAXALRSLEESNPFGATLTNYQLQNNNILTTHQHMEGFRLPAKLTGAMPRLGDAPPIDVIKKNLEMMTSMLEKSGDNLSPEMKAKLESEIKGLLKKVSHCPGS

SEQ ID NO: 105977 - protein, 48 aa, Gossypium hirsutum
  unsure (1)..(48): unsure at all Xaa locations
  Clone ID: LIB3493-033-P1-M1-G1.pep
LFFRSLQSTMLKEQAFPAFFLRPVKRSIILHLFFSAFWXLVALYCIPG

SEQ ID NO: 105978 - protein, 89 aa, Gossypium hirsutum
  Clone ID: LIB3493-033-P1-M1-G7.pep
NMTTEHDCSFSSQAHVTTFTSVTSITLSRSNLGVMTSDFRLLPRPLQLDPIEFQLAESYLAVPAPLWHSLLKSLCASSSSSSFSSINLA

SEQ ID NO: 105979 - protein, 77 aa, Gossypium hirsutum
  unsure (1)..(77): unsure at all Xaa locations
  Clone ID: LIB3493-033-P1-M1-G8.pep
RNQLVSSVHCTIEPPVMLGHAVRQLTATSSSGXHTIALINTPNIFLTPKTKTRLQKENDCISSSFFSFSFVGTTKIK

SEQ ID NO: 105980 - protein, 150 aa, Gossypium hirsutum
  Clone ID: LIB3493-033-P1-M1-H4.pep
ELVSSIASSEIYRDSLFDRLLLVLHGLLSSCQPSWLRSKTANDFSGFDREALESFQNELDSMQLPEMIRWRIQAAMPILFPSFRNVISCHTPSVPVGALSALQSSIYIPESCNGTLNAPQRQVASARTANNIPGKAKSMPSLQEYDMEID

SEQ ID NO: 105981 - protein, 72 aa, Gossypium hirsutum
  unsure (1)..(72): unsure at all Xaa locations
  Clone ID: LIB3493-033-P1-M1-H6.pep
NSNDYKSLLSQALQTIHRINVGGPTLTPDTDTLLRTWLPDDSYLTNSXIAKNNQVLSSRPNYVNVTELLHQI

SEQ ID NO: 105982 - protein, 225 aa, Gossypium hirsutum
  unsure (1)..(225): unsure at all Xaa locations
  Clone ID: LIB3582-058-P1-K1-D2.pep
RNRHSRRPASAGXHFXGXPXPPIILHYNVRLHGDKITEDPVIVQNTWTIAHDWGEEVRCPPPTPEENEKVDELEQCNKLVGKDDNRTIRVHSHGLRLPLMGLQGVKPRRYFPFKQGSLFVATLRVGPEGVQMTVDGKHVTSFAYRETLEPWLVSEVRISGDVKLISVLASGLPTSEDSDHTIDIEALKSVPLSIQRPVDLXIGVFSTANNFKRRXGCEKNWMQYP

SEQ ID NO: 105983 - protein, 172 aa, Gossypium hirsutum
  unsure (1)..(172): unsure at all Xaa locations
  Clone ID: LIB3582-058-P1-K1-E1.pep
AQRPAXIRXSKXSEAFDDTKAGVQGLVDVGVVKLPXIFHMPREYIHDHPTLNGHNLHGFQIPIIDLKHVSDPCLXKEIVDKIRLASEKWGFFQVINHGIPQDVMREVLEGVRRFHEQPREVKMNYYSRETGIVRYYTNYDLHQSKGASWRDTLICVMAPNPPPPKMYPSACR

SEQ ID NO: 105984 - protein, 213 aa, Gossypium hirsutum
  unsure (1)..(213): unsure at all Xaa locations
  Clone ID: LIB3582-058-P1-K1-E3.pep
PRVRSXGTLGXWAKLETMHSSHPMYFANKLTEVASDDPIDWMEQPSDGLAIQGLLRPAFIEEHSEIQKHISTNQSRSSDKHQVEKVVGDKIEDVSIINGHRNGLGSSKDNSTSEESEKNEISMNGSLFYKLQMSKIQLITAHGHQTDVELEDFKQAQPDAIAHSTAKIISRLKAGGEKTVQALKSLCWRCKGIPVEEAAIISVDSLGFNLRVC

SEQ ID NO: 105985 - protein, 69 aa, Gossypium hirsutum
  unsure (1)..(69): unsure at all Xaa locations
  Clone ID: LIB3582-058-P1-K1-E7.pep
RQAIDRAHRIGQTRPVNVTRIPLKNXEDRILSLQEEKRKXVASAFGEDQSGSSATRLTVEDLRYLFMGD

SEQ ID NO: 105986 - protein, 181 aa, Gossypium hirsutum
  Clone ID: LIB3582-058-P1-K1-H7.pep
NTDSGETVERQREELKKEKDEHQNEKAKRIKCERTIMEAVRKTEKGKTTVLGELEKYQLSVKRISEELEKLKHAEGNLPQGTSVVQLLSGTISDDHASSYLSAAEDFEKVARSILNELGTGSISGDVPAVDNSAPVLTGTVVPDQGPVIASSTVPVTSHQQPAKTSEERRSILPKTNTDTR

SEQ ID NO: 105987 - protein, 155 aa, Gossypium hirsutum
  unsure (1)..(155): unsure at all Xaa locations
  Clone ID: LIB3582-059-P1-K1-A9.pep
ASLTKXWSPIVELHYRGGVYRGRCQGGLPEXGRLILGDGSIYDGMWRYGKRSGVGTFYFSDGDVFQGSWRDDLMHGKGWFYFHTGDRWFVNFWKGKANGEGRFYSKSGDVFFGHFEDGWRHGHFLCITVDGTRCIEIWNEGVLMSRQQLDADAAL

SEQ ID NO: 105988 - protein, 116 aa, Gossypium hirsutum
  Clone ID: LIB3582-059-P1-K1-B2.pep
KHGNAKDSDRRTIWLLELSRFPYFGQCSGCLHLIEVDSISKPRFHILEMKPDHSHWCVKYRVNLNNVASEFPEIARRYMDEFPTLALNNVEEIEVQYYAYSILSVVRGEKEKMLKW

SEQ ID NO: 105989 - protein, 116 aa, Gossypium hirsutum
  unsure (1)..(116): unsure at all Xaa locations
  Clone ID: LIB3582-059-P1-K1-B3.pep
KRRQPVLNKASHGYSNTTEFAFKHPAHIVGYNFQCDVKQLAQSYGDLECFKCFNMLLDIQNMFKDPRGGLSGLAEKIXGASLNKTRRNSNWEQRPLSQNQLEYAALDAAVLIQIFY

SEQ ID NO: 105990 - protein, 219 aa, Gossypium hirsutum
  unsure (1)..(219): unsure at all Xaa locations
  Clone ID: LIB3582-059-P1-K1-B6.pep
VIALFLRSNLKETVETTNFRRINXEAQIEGEIDYVRVLNRVLPSDIRILGWSPVSIDFSARFSCLAREYKYFFWRGNLNLSAMENAGKKFLGEHDFRNFCKMDAANVHNYRRRITQFEISSSNMSFEGGQLCAIKVKGSAFLWHQVRCMVAVLFMIGQGLESVDVIDILLDIEKTPRKPQYAMAPETPLILQSCEFEDVKFICSSDSGQALRIHLENEG

SEQ ID NO: 105991 - protein, 70 aa, Gossypium hirsutum
  Clone ID: LIB3582-059-P1-K1-B9.pep
IIRGQSKKPKLKILSGDSERYKISHSDDFQFNGKPTKQIVDKRSKAGQPQIYIITFKSIITEKKSTCSFT

SEQ ID NO: 105992 - protein, 217 aa, Gossypium hirsutum
  Clone ID: LIB3582-059-P1-K1-C6.pep
MGTVTGISDLDQVRWPNSHWRSVKVGWDESTAGERQPRVSLWEIEPLTTFPMYPSLFPLRLKRPWQPGSSSLHDNRDDVSSGLMWLRGGSGESFSTFPWMQQRIDPNFPVNDHNLQYQAMLANGLQNLGSGDPLRQQLQQSLPYVQQPGSHSLLLQQQQQRGVSQSVPHNIVQVQSQILSENLPSVLGREQVSNHPEEQAQQQHNMIQSDQLLQRQP

SEQ ID NO: 105993 - protein, 176 aa, Gossypium hirsutum
  unsure (1)..(176): unsure at all Xaa locations
  Clone ID: LIB3582-059-P1-K1-E2.pep
KSFAPFWCSVLVDHVISEYQRGVNSSHIHNDSESEGAKILRILETSAEPEVLMAEMSPEQLTSFATYKSKLEATRQLEMEKSIEKALAEAGLNERDVVPFMRVRVVGLINRNYHGKGRPKEGIITIWNPTEKQECELVEGQAYVVSGLIPMXNSDSEILYLQARRIYQLKAAPISP

SEQ ID NO: 105994 - protein, 220 aa, Gossypium hirsutum
  unsure (1)..(220): unsure at all Xaa locations
  Clone ID: LIB3582-059-P1-K1-E6.pep
PASAPRPPTRPIFKYMVSGVPIPPQLLYSVKTSFDSSLASHLFPHQPXGWGCFQVGFGRKPDPEPGRCRRTXDGKKWRCSKEAYPDSKYCERHMHRGRNRSRKPVEANSSSSTAPPAPPTTAAASILSPSFPSINSNLPTSSSSLSFSPMATENFTHFDPFLYSHSSTRLHGSGLSVPSHHFLDSGTGIDYPQTDKLYRYVHGTREVLMKDLSSPKLQRV

SEQ ID NO: 105995 - protein, 142 aa, Gossypium hirsutum
  unsure (1)..(142): unsure at all Xaa locations
  Clone ID: LIB3582-059-P1-K1-E8.pep
TRRVLERIQERGMVCGWAPQVEVLSHNAVGGFVSHCGWNSILESLWFSVPIVTWPMFAEQQLNAYMMKELGLAVVMTLDYRKGISDVMADEIXEGVRQVMDAGSKVRKKVKKTEEMARKAIMNGGSPFNSIGRFIEDMIGNI

SEQ ID NO: 105996 - protein, 85 aa, Gossypium hirsutum
  Clone ID: LIB3582-059-P1-K1-E9.pep
FSCLDLHTFKALETSRSVLEFGWEKKGEHEEKHEESLMEKLAEKIHGHDSSSDSDNDKPSESSIKAKVFRLFGRERSVHHVFCGG

SEQ ID NO: 105997 - protein, 52 aa, Gossypium hirsutum
  unsure (1)..(52): unsure at all Xaa locations
  Clone ID: LIB3582-059-P1-K1-G2.pep
LVLXRXAAAMGWDVTQLPPQVSPLFFDFLFLNLVNIYPICRVFQFTNLFCKD

SEQ ID NO: 105998 - protein, 79 aa, Gossypium hirsutum
  Clone ID: LIB3582-059-P1-K1-H2.pep
ITKSILLQSTKARGPTPIMQKSSVLVNTTAHPHLSPLNPFSYFTSCLLSCSSFFSLYFIDAVKFHLFRFLLMLIHIQQY

SEQ ID NO: 105999 - protein, 58 aa, Gossypium hirsutum
  unsure (1)..(58): unsure at all Xaa locations
  Clone ID: LIB3582-059-P1-K1-H5.pep
QLLHNILKVRSLHYVYLIKVRFPFLISCSTKKSLPQGPPYSKGVLNICKYLFIFXGRG

SEQ ID NO: 106000 - protein, 53 aa, Gossypium hirsutum
  Clone ID: LIB3582-060-P1-K1-A3.pep
QLMWKTLNKKDKETPIIFNHLASISPATIRTHVVYPQHLQILMNLNRARPIIH

SEQ ID NO: 106001 - protein, 167 aa, Gossypium hirsutum
  Clone ID: LIB3582-060-P1-K1-A5.pep
MLCACSGEQFKFEDAPQSPESLATRDFSASGLSSRTGDWESKLEDVQVDEVESTLKEALSLNYEEARALLGRLEYQRGNFDAALQVFQGIDIKGLTPRMTTAIVERTRLRKSRSKADIIPHTVMSMHSVSLLLEAIFLKAKSLEELGHIKEAAKECNLILDVVEAAL

SEQ ID NO: 106002 - protein, 140 aa, Gossypium hirsutum
  unsure (1)..(140): unsure at all Xaa locations
  Clone ID: LIB3582-060-P1-K1-A9.pep
YGKLRGLEEEKKHLCFFFVRIRMAFVRKKTLFTVSVCIFLLRKCASPPITMNIFWLYIRNERKTNKRKIIFSLLSLFVAAFVLFAGTEQRTCAGKLVRGVRGGAGVCTGACVAPGGVYSAWRLLRLLRLEDPFCPRXCQS

SEQ ID NO: 106003 - protein, 130 aa, Gossypium hirsutum
  unsure (1)..(130): unsure at all Xaa locations
  Clone ID: LIB3582-060-P1-K1-B3.pep
WYLVLFFFVTGCSSACLNALSLIQHYDPTWXECYKILSSAPKXNHNFRSHTYLLMDHXLRTGILSYIIIDVGXNVRXQALWGFIYHRISGVVHIARTNEHACAIVGLCDIIAISXPHRPTNDLDPTRTFT

SEQ ID NO: 106004 - protein, 161 aa, Gossypium hirsutum
  unsure (1)..(161): unsure at all Xaa locations
  Clone ID: LIB3582-060-P1-K1-C9.pep
HAPTRVLVLFLGYTSPDSLLRXSLSVDLSFDLXLSALVGDNIYNFGELLAHPYXKSLLGTSGEWLYYILLAFNSWDIGHYQELCSIHNAALRTQPASGENEKRLLEKINVLCLMETIFSRPAEDRTIPLKAIADRTKLSIEDVEHILMKSXSAHLLEGIVD

SEQ ID NO: 106005 - protein, 50 aa, Gossypium hirsutum
  Clone ID: LIB3582-060-P1-K1-D4.pep
LTLFFLKRPPLFFFFFFFFFFFFFFFFFFFFFFFFFFFFFFFFFFFFFFF

SEQ ID NO: 106006 - protein, 84 aa, Gossypium hirsutum
  Clone ID: LIB3582-060-P1-K1-D6.pep
AILCFLLCVPQSKCLIRYLNFGMPKSPQNWPFPNWTKLGLGRDTLVCDCLRPWSRLLNGHGRVIYPCKSCFDLDKGTRPCGLPV

SEQ ID NO: 106007 - protein, 176 aa, Gossypium hirsutum
  unsure (1)..(176): unsure at all Xaa locations
  Clone ID: LIB3582-060-P1-K1-D9.pep
GTARXTFQGNTWTGERAEKLAGGTLNTESNDKSXGRLHFPPQSFQSRFKGXHGSVSFLQCLAXRHAILTPIREXGLYIFLASPDTLVLPXTSTLAKTYLERNGRATLSSLSHEHLEIYTMCPXLLLKTGPARSTAYLLDHDNRPKVFIAXLDRPVANRVQYSGFFPAGSLRPWLYL

SEQ ID NO: 106008 - protein, 59 aa, Gossypium hirsutum
  Clone ID: LIB3582-060-P1-K1-E3.pep
GPLIVLFKFDSLPRCCNNVNGAAVLTEWDQCYWLHALFGSRHSRLVMPLLCLLTAMICS

SEQ ID NO: 106009 - protein, 102 aa, Gossypium hirsutum
  unsure (1)..(102): unsure at all Xaa locations
  Clone ID: LIB3582-060-P1-K1-E5.pep
FPILAIPWNHTRPENVSFKSFDLISFFHKPNSVRRNARKPNSIRRNDQAWFKFLDSNYQKSYNLKSSQHAKSYASFRXKGRSFPEYKLLTIQLLGIMGVVXX

SEQ ID NO: 106010 - protein, 59 aa, Gossypium hirsutum
  Clone ID: LIB3582-060-P1-K1-F3.pep
ELSNKFFIKSKPLNRPKSRQYTVQNPRIHFSTRLKTWKRKATNSSGKQLNSELIYSKNP

SEQ ID NO: 106011 - protein, 104 aa, Gossypium hirsutum
  unsure (1)..(104): unsure at all Xaa locations
  Clone ID: LIB3582-060-P1-K1-F8.pep
PSVXKLSSVPIVVEFRASSVQMNISKLHGDLNKSNIVKTEFAESGALVDDLGAKGVVPRPLDANSLMKMKLRDLRAIAKSQKLKKYSTMKKEDLVKRLENGLSC

SEQ ID NO: 106012 - protein, 210 aa, Gossypium hirsutum
  unsure (1)..(210): unsure at all Xaa locations
  Clone ID: LIB3582-060-P1-K1-G1.pep
SCPIISARTQSIDFVGVTEGDEVSMQXALNMVYKNGHGYVAVLFYASWCPFSRSFGPSINILSSSYPCIPHFTIEESSVRPSILSKYGVHGFPTLFLLNSTMRARYHGNRSFESLGAFYSDVTGIKNSLDKTSLEKIGHLSNQEKHNSTEQESCPFSWARSPENLLRQETYLSLATTFVLCRLLYLLYPTLLVFAQLTWRRLIXNVKLGT

SEQ ID NO: 106013 - protein, 94 aa, Gossypium hirsutum
  unsure (1)..(94): unsure at all Xaa locations
  Clone ID: LIB3582-060-P1-K1-G7.pep
FSVIXYVKAYIKKVKDIRNVTSDKKIDEGKSRHPPEESIVKINFDASFQQITNSTILGIIIQDHEGLIMRACTYPIKNVLDPAMAEASACQQAV

SEQ ID NO: 106014 - protein, 51 aa, Gossypium hirsutum
  Clone ID: LIB3582-060-P1-K1-H9.pep
FDHIIGFINCWEIVLITLAIGPFIVAAGGISNIFLHRLVKNIQDAYAEAAS

SEQ ID NO: 106015 - protein, 53 aa, Gossypium hirsutum
  unsure (1)..(53): unsure at all Xaa locations
  Clone ID: LIB3582-061-P1-K1-A9.pep
TKKNEXGKRDRVPYTFMLWKIISYIYMPLSSDVNHLCFLIQFQYNXRKSINFL

SEQ ID NO: 106016 - protein, 68 aa, Gossypium hirsutum
  Clone ID: LIB3582-061-P1-K1-B2.pep
MIHGNQACSSHVFTFFSEAYKRSLPVYLPVYLIPTLIVHRQGLLKGKVVSSKLVQYSLTIWLLHFFLI

SEQ ID NO: 106017 - protein, 78 aa, Gossypium hirsutum
  Clone ID: LIB3582-061-P1-K1-B9.pep
NQYEKQPTRHRIGQKFRNSWGRRDSDNHKSVRKSNSLAGMVEFIGMIKVNVVKGTNLAVRDMVTSDPYVMLTLGQQSV

SEQ ID NO: 106018 - protein, 93 aa, Gossypium hirsutum
  unsure (1)..(93): unsure at all Xaa locations
  Clone ID: LIB3582-061-P1-K1-C3.pep
TLSAVKFAPYCYSICFLHSCMSLEKLKSGYWCFNFWSNNKLNKQQLKLAWQFSRLQILSSLSICLTSLFLGEKPLYRDKLLXEFAIASLLADG

SEQ ID NO: 106019 - protein, 199 aa, Gossypium hirsutum
  Clone ID: LIB3582-061-P1-K1-D1.pep
MALCSAFCPRISTNFRPKPFSSFPSKPLLSLSFKVFSSQATDASSQDKFSGRVGFLGLGIMGSPMALNLIKAGCDVIVWNRTKSKCDPLISLGAKYSSSPEEVAANCDVTFAMLADPESAIDVACGKNGAVSGMGPGKGYVDVSTVDVATSKLINEHIKARGALFLEAPVSGSKKPAEDGQLIFLTAGDRSLYELVSPL

SEQ ID NO: 106020 - protein, 184 aa, Gossypium hirsutum
  unsure (1)..(184): unsure at all Xaa locations
  Clone ID: LIB3582-061-P1-K1-D8.pep
PGQKLTIAVLLRPVNNPGNYQKFFPAGQDNAQAYLQIFRREIIEAVFNARSEPLDELFGGRQSHRRQHGQGMLQEVSQEQXIRALSQGATSPRGKGREGGALNLLSQTFSYSNQYCRLYEGCHEDCQQQLQEEDSYVDAFEIDKGSILGPNYNPKATLEVLFTERNGHGKMVCPXVCRQSSQWC

SEQ ID NO: 106021 - protein, 168 aa, Gossypium hirsutum
  unsure (1)..(168): unsure at all Xaa locations
  Clone ID: LIB3582-061-P1-K1-E7.pep
PHIYTSTFITLVILPYHIYACSXHHIGHSALSHICMFTFITLAIRPYHIFACSRSSHXHSALSHICMFTXHHIGHSTLSHVCMFVSITLAIRPYHIFACSRPSHXHSALSHICMFTFITLAIRPYHIFACSRLSHWPFGFITHMHVHVHHIGHSALSHMHVHIHLIQS

SEQ ID NO: 106022 - protein, 173 aa, Gossypium hirsutum
  unsure (1)..(173): unsure at all Xaa locations
  Clone ID: LIB3582-061-P1-K1-F9.pep
MTLKSLPEQMRSLFPSLDHLSIRYCPEIESFPEEGLSSKLKTIEIGRTDKLIASMMRRAWGLRTLPSLRGFELSGAELEMESFPEEHMLPSSITSLTISDLPDLKFLDNKAFQHFTSLCELIIDSCPKLQSMPEKSLLTSLSYLSINNCPLLRXFQKEEGKDWPKVSHIPVIH

SEQ ID NO: 106023 - protein, 73 aa, Gossypium hirsutum
  Clone ID: LIB3582-061-P1-K1-G1.pep
RESTALTPISYIGYAFPLPFATSLLDFYRNMHLSSLRFALFYLHLKPYKVMVPLEQLIHLSGLIKSLHICVCL

SEQ ID NO: 106024 - protein, 66 aa, Gossypium hirsutum
  Clone ID: LIB3582-061-P1-K1-G9.pep
KGNPCTIRIGRLYSRMLKIKEHTSSLVVSIGLCVWLVCLQVQVQCTRIVLALEVWTSCRGAPQSCV

SEQ ID NO: 106025 - protein, 84 aa, Gossypium hirsutum
  Clone ID: LIB3582-061-P1-K1-H2.pep
MAYMCADNGNLMAIAQQVIKQKQEQEQQQQQQQQQQQQQQLLGLNPFFLNPWSSTTHHGVSSSGNVGYGLTGPGFTDPFQGDAW

SEQ ID NO: 106026 - protein, 53 aa, Gossypium hirsutum
  unsure (1)..(53): unsure at all Xaa locations
  Clone ID: LIB3583-031-Q6-K7-A1.pep
FSHNKSTHLFHPFNNHLHILLXQXNLXXQIVFXNCQGPSXTITSPXKNXSWVS

SEQ ID NO: 106027 - protein, 105 aa, Gossypium hirsutum
  unsure (1)..(105): unsure at all Xaa locations
  Clone ID: LIB3583-031-Q6-K7-A7.pep
ARAKHQGKGRKFHSKSAKPSDSTHVGGREVETLTDYKDDSKDDAHPPKTKRETDVQPSLTKATEDESNDVAXPTPTGTVHDEXXLKKAXLPKRKEXLSKEXIFVE

SEQ ID NO: 106028 - protein, 48 aa, Gossypium hirsutum
  unsure (1)..(48): unsure at all Xaa locations
  Clone ID: LIB3583-031-Q6-K7-B2.pep
AYQLYQLNFIIINFCILSFQTFCNYERXLXEXGLLPKPTRPRTXVXNR

SEQ ID NO: 106029 - protein, 115 aa, Gossypium hirsutum
  unsure (1)..(115): unsure at all Xaa locations
  Clone ID: LIB3583-031-Q6-K7-B7.pep
KNITFNHIQSXNQYFFLXXTHSXSXXHXYXSNSXXTLSFXIKPXVEQEAVAENSIVSSISKSSSAHCSMASASSGDLIHSSSNATCFMVGSFLSVKIQALFASLANASISVLDRP

SEQ ID NO: 106030 - protein, 58 aa, Gossypium hirsutum
  unsure (1)..(58): unsure at all Xaa locations
  Clone ID: LIB3583-031-Q6-K7-B8.pep
LLXIXINKPHQGXKAXSSEEDKFRVPPHPDLWTQLQPEFVANCTFSRGNASMPSDQIS

SEQ ID NO: 106031 - protein, 84 aa, Gossypium hirsutum
  Clone ID: LIB3583-031-Q6-K7-B9.pep
VSHWLASFHITRRQPSEPPPPPPVSLHRQGNPSPPHRLSFGAVSCGLLYICATVMICSGQLEDRPMKPPLSTRRTLGDRECRYR

SEQ ID NO: 106032 - protein, 49 aa, Gossypium hirsutum
  unsure (1)..(49): unsure at all Xaa locations
  Clone ID: LIB3583-031-Q6-K7-C12.pep
DVRTGSAVSRRLDFRTEKERGKTSCSWCYAARFEREWNKMRTRGRPGXG

SEQ ID NO: 106033 - protein, 97 aa, Gossypium hirsutum
  unsure (1)..(97): unsure at all Xaa locations
  Clone ID: LIB3583-031-Q6-K7-C4.pep
FLYSYTYHSFSIYFLFPFLTLIXLFFSYHKYNKITIYPPPPLXLLPITSNSPCPIXLFGLKTDPSGTGEWGSGRRAKVEEWKEAARGGGRGATGNAD

SEQ ID NO: 106034 - protein, 52 aa, Gossypium hirsutum
  Clone ID: LIB3583-031-Q6-K7-C5.pep
GPASRSPSVRDIWSINHLKVQVSVKYGIFNFFSYFWRFLRSQCQHLAQIGDG

SEQ ID NO: 106035 - protein, 116 aa, Gossypium hirsutum
  unsure (1)..(116): unsure at all Xaa locations
  Clone ID: LIB3583-031-Q6-K7-C8.pep
PSESRSTPRPPRVRGRVGGRVYPTWALGYGTLGQSGYSAWNSEFQKAKTSIGTDREVMLEKVADMMXRDGGGIXATXVEXKLXKGVSXCIDNIXEVVVKMWVLMVEMMEIDINIVF

SEQ ID NO: 106036 - protein, 81 aa, Gossypium hirsutum
  unsure (1)..(81): unsure at all Xaa locations
  Clone ID: LIB3583-031-Q6-K7-D11.pep
XVKNGVGSVWFVKVQSELVAYLGLLQPLPIPDRAWLVVSLDFIEGLFNSNKKNLPMRGGGGGVXXXXXIXXFXNINIKNFI

SEQ ID NO: 106037 - protein, 89 aa, Gossypium hirsutum
  unsure (1)..(89): unsure at all Xaa locations
  Clone ID: LIB3583-031-Q6-K7-D4.pep
PIEDRVKDLLSRMTLQEKIGQMTQIERSVATPADLKSFSIGSILSAGGSVPFEKALPADWADMVDKXQXAXLEXXXGIXXIYGIDEXNG

SEQ ID NO: 106038 - protein, 75 aa, Gossypium hirsutum
  unsure (1)..(75): unsure at all Xaa locations
  Clone ID: LIB3583-031-Q6-K7-D6.pep
VRHPGRPRVRPHRRTAPGVGEQGRETHHATTFLCLRRTSSLSFHVDPTSLGKPRVRGNEDHHQGGGGLQXXTXXH

SEQ ID NO: 106039 - protein, 66 aa, Gossypium hirsutum
  unsure (1)..(66): unsure at all Xaa locations
  Clone ID: LIB3583-031-Q6-K7-D7.pep
GFVPPPPRQVTSFLISGQKFSAIILXPLSMRILLLLALPRLSPXGWCTTGVVRTRGGRGATGNADR

SEQ ID NO: 106040 - protein, 54 aa, Gossypium hirsutum
  Clone ID: LIB3583-031-Q6-K7-D9.pep
IVTSASLEQIKSLILISYFTKGIKVTSRFPLQLIRAKPLVGGDQNGSILMRTCP

SEQ ID NO: 106041 - protein, 139 aa, Gossypium hirsutum
  unsure (1)..(139): unsure at all Xaa locations
  Clone ID: LIB3583-031-Q6-K7-E11.pep
MLNGISESGSDVVGSFISQLQAFQNRVKELEAENSKLSSQISKCCCHKTEEMQNGSDVESFKQGVESQRKNAGGDKTRKKKTIERNPGYDLKIMTHHSKRYVALRVMYFGQRFYGFAXEAQMDPTVXVEIFKSIEKKGF

SEQ ID NO: 106042 - protein, 190 aa, Gossypium hirsutum
  unsure (1)..(190): unsure at all Xaa locations
  Clone ID: LIB3583-031-Q6-K7-E5.pep
RVPKSTKTLDVFSTNGGNGSHLTAIASEKPQFALAKQEHAFAGAFAGIFVSLCLHPIDTVKTVIQSCHAEQKSIFYIGRSIISERGFTGLYSGIASNIASSAPISALYTFSYESVKGALLPLLPKEYHSLAHCMAGGCASVATSFIFTPSERIKQQMQVGAHYQNCWNALVEIIRKGGXXXLYTGWGAVL

SEQ ID NO: 106043 - protein, 94 aa, Gossypium hirsutum
  unsure (1)..(94): unsure at all Xaa locations
  Clone ID: LIB3583-031-Q6-K7-E6.pep
ITQLTLPNLDSSEDLSSPLLLLMPFTLXYLSPPPPVFRRLALASSTLRGLLLFCRGILAEQSSQRKGKEKRAKLRKLTVPPCYLSGRWATGNAD

SEQ ID NO: 106044 - protein, 77 aa, Gossypium hirsutum
  unsure (1)..(77): unsure at all Xaa locations
  Clone ID: LIB3583-031-Q6-K7-E7.pep
SIXNXXPLSXNFPXLXVLXXRXXXIWSGRGERSAILERLRTAESIVRDSKEGEVLIHLLLFFLCKIIFLKLISSIYN

SEQ ID NO: 106045 - protein, 169 aa, Gossypium hirsutum
  unsure (1)..(169): unsure at all Xaa locations
  Clone ID: LIB3583-031-Q6-K7-F12.pep
XKDPSLLTREEMRPXVWAQICIQRMVELAKESTTLRLVVDPMFVYFDSRQHWVSQQGLAMVVLSDMSYWEASGNQQLVLAAVVRHLDHKNVAHDPQLKSYIIQVAAALARQIRSRRMLAEIGFVSDLCRHLRKSFQATXQSVGEQDTNLNILLQNSIEDCLLEIARRMD

SEQ ID NO: 106046 - protein, 97 aa, Gossypium hirsutum
  unsure (1)..(97): unsure at all Xaa locations
  Clone ID: LIB3583-031-Q6-K7-F4.pep
MLGKGRKVSGRGETVTANYAFGPAEDDAIIKHRLLTRTTTTRGEPPLKKLQRKFTSFVLEVEKEEENYNDWAXIXTXXLQELXXFEIXFIKSKGVXD

SEQ ID NO: 106047 - protein, 74 aa, Gossypium hirsutum
  unsure (1)..(74): unsure at all Xaa locations
  Clone ID: LIB3583-031-Q6-K7-G1.pep
HSSXTSPCSRSNLMIQKAXNPSLHSIWVGFIQLRLPTSQXKXRGSTPFPKCFFXIVIKKAKSYSFQATIPLRFP

SEQ ID NO: 106048 - protein, 53 aa, Gossypium hirsutum
  unsure (1)..(53): unsure at all Xaa locations
  Clone ID: LIB3583-031-Q6-K7-G5.pep
ISPPPQEXSXXNNTLYDQTGRRFRVSITGLNRISSPKKLNAACHRFSKHLAFS

SEQ ID NO: 106049 - protein, 60 aa, Gossypium hirsutum
  unsure (1)..(60): unsure at all Xaa locations
  Clone ID: LIB3583-031-Q6-K7-G6.pep
SASRSPRVRPAXASHEAQGQXCSVSQQTNKALSQNYLQGKRWRIPFTFDQTLSPTKXRGG

SEQ ID NO: 106050 - protein, 88 aa, Gossypium hirsutum
  unsure (1)..(88): unsure at all Xaa locations
  Clone ID: LIB3583-031-Q6-K7-G7.pep
FCVPQLPITFVASQTRPAXTGFGLXNQNINPDHNQRIFVAGKXNHVRXWDSQAKELGGGVSSRLVDEIXNNNXXEXYXVXXKRXXXFE

SEQ ID NO: 106051 - protein, 54 aa, Gossypium hirsutum
  unsure (1)..(54): unsure at all Xaa locations
  Clone ID: LIB3583-031-Q6-K7-G9.pep
TCFMVAEVFLSMKNEQISEGTYGIVYRAKVLDTFLNXALKRGGGGDLXXLXKYG

SEQ ID NO: 106052 - protein, 135 aa, Gossypium hirsutum
  unsure (1)..(135): unsure at all Xaa locations
  Clone ID: LIB3583-031-Q6-K7-H3.pep
PRVRFGDLWDGSIAYGFDRTAXVSAGVYLPRLKTLVAPMTVRAYLLTQDLLTFSSYKERSVGLSVGLFSNRFHNLEYHLAWRNLIDPSQMTSSVKMQLGHDYLSSLKYTLKIDKRNSPVRPTKGYAFIAKTLLVV

SEQ ID NO: 106053 - protein, 128 aa, Gossypium hirsutum
  unsure (1)..(128): unsure at all Xaa locations
  Clone ID: LIB3583-031-Q6-K7-H7.pep
IISPGEKXAVGTGYSPSXXSHLSWSPESGDSFTAEHLARLDVRSPDRLVGELHFLDDTVTLTPEELSRAPAEVLGRSSHGTXYRATLDNGVXLSVKWLXEGXGKERKEXXKEGKKLXNMXXXKVVELR

SEQ ID NO: 106054 - protein, 56 aa, Gossypium hirsutum
  unsure (1)..(56): unsure at all Xaa locations
  Clone ID: LIB3583-031-Q6-K7-H8.pep
TASRSPRVGSQHTFLCLRRTSSLSFQRCHDSLGKSRXEEKSTYQSRTDPVVTHXME

SEQ ID NO: 106055 - protein, 77 aa, Gossypium hirsutum
  unsure (1)..(77): unsure at all Xaa locations
  Clone ID: LIB3583-032-Q6-K7-A1.pep
PSKTXIGSXTNFQHFKKVTKPXXTXTXXKXKAKTSKGNPXYXVVAMVKGEKQCRXGSQMTXXLLSRXXEKLRXSYAC

SEQ ID NO: 106056 - protein, 86 aa, Gossypium hirsutum
  Clone ID: LIB3583-032-Q6-K7-A3.pep
PVDPASEIFSSFPFHRLNQRLFTLCLHVIKSDPPKSPSELRFQRIQQGFEGSSRRKYFCFCLFYLGGTQITKSKELKAKSTRRMRF

SEQ ID NO: 106057 - protein, 53 aa, Gossypium hirsutum
  Clone ID: LIB3583-032-Q6-K7-B4.pep
KKKKDHPQRPSKPKGNTRTAQGGGNWSVTNTASVRKEEQVQEPRTRGDRECGR

SEQ ID NO: 106058 - protein, 85 aa, Gossypium hirsutum
  unsure (1)..(85): unsure at all Xaa locations
  Clone ID: LIB3583-032-Q6-K7-C9.pep
RKKKKKKKKKRKGEKKEKKKKKEKKEKKKKKEKKKKKKKKRKKEEREKKKKKRKKKKKKKKKKKKKWXFXRKKXKYIIYYPPPPP

SEQ ID NO: 106059 - protein, 64 aa, Gossypium hirsutum
  Clone ID: LIB3583-032-Q6-K7-D1.pep
PASAPRPVCYKKKKKKKKKKKKKKKKKKKRKKGDKKIKKEGRLCLECFEIFYECFFMLNKMERK

SEQ ID NO: 106060 - protein, 69 aa, Gossypium hirsutum
  Clone ID: LIB3583-032-Q6-K7-D3.pep
DVLSVWPTVSQIWSYGFSTVPQTDFKAHQGLRATNMNHSNLKIDMISQPRIPITKLTDIISGSERELNN

SEQ ID NO: 106061 - protein, 65 aa, Gossypium hirsutum
  Clone ID: LIB3583-032-Q6-K7-D6.pep
PRPPPSDFSKTSRSVPQMEKNINPVQVDKDPPRIFTIKQKAGDQFSSCFLSPAFFRTLGDRECRP

SEQ ID NO: 106062 - protein, 84 aa, Gossypium hirsutum
  unsure (1)..(84): unsure at all Xaa locations
  Clone ID: LIB3583-032-Q6-K7-D7.pep
SKTLXXSXXXKHXXXSQSNIRVYILEKXQWPPGPSKEFQIKLAKDFSLCNLLLSRETKPRNDRLCFQKDKNQTLXLVKQTKKCH

SEQ ID NO: 106063 - protein, 102 aa, Gossypium hirsutum
  unsure (1)..(102): unsure at all Xaa locations
  Clone ID: LIB3583-032-Q6-K7-E1.pep
PPPPPPPPPPPPPPPPTPPPPQPKPPPTPPTPPQNPPPPPPPPPPPPPPPPPKKXHPPTNPPQPTTPIIHNKFKNTPPDKNPLLSTLWFFPTSDPTVLTRSQ

SEQ ID NO: 106064 - protein, 74 aa, Gossypium hirsutum
  unsure (1)..(74): unsure at all Xaa locations
  Clone ID: LIB3583-032-Q6-K7-F2.pep
SCLXFWXAQTKREAXKXPXSXXKKAASPSLPXXXFFFFFGFSSLYSNXPNHQXXKFLLCYLKEKXEXKKLKSSV

SEQ ID NO: 106065 - protein, 69 aa, Gossypium hirsutum
  Clone ID: LIB3583-032-Q6-K7-F4.pep
SAIPGRPASDIFSTTKHMANSQFISPLALILFLASLIHWTRKQKTDSGQQIEEPTEHGEGRRKGGEGGN

SEQ ID NO: 106066 - protein, 95 aa, Gossypium hirsutum
  Clone ID: LIB3583-032-Q6-K7-F9.pep
TLKIGSCPSASRMDYIAEFTVTMPILSFTGTSDPPDEHIVKIYCVQTQAIQQYALELCEGGAPPLENIGLEKSDSSVSRDAINTEGFDTFNPSWN

SEQ ID NO: 106067 - protein, 86 aa, Gossypium hirsutum
  unsure (1)..(86): unsure at all Xaa locations
  Clone ID: LIB3583-032-Q6-K7-G11.pep
LPSHTFCNLNFSWLNYVKNLIWFCQRYEVSFWFFSWIFFHKSFVFETFFFMILFIVQIVGGGANHFVFXSGDSEVXEXMQTGFLIL

SEQ ID NO: 106068 - protein, 97 aa, Gossypium hirsutum
  unsure (1)..(97): unsure at all Xaa locations
  Clone ID: LIB3583-032-Q6-K7-G3.pep
RSPRVRLPHPTHCLMSDHRVFTFDKATLQPTFVRQSIYTWSNLSQSCQWARNSLTNGCGFDKSMVRMRPHAKAASKLEQQIQPLGKIFANRRIXVGS

SEQ ID NO: 106069 - protein, 138 aa, Gossypium hirsutum
  unsure (1)..(138): unsure at all Xaa locations
  Clone ID: LIB3583-032-Q6-K7-G8.pep
LPSNIFSFKXGQRNIKANLGLLKVLVAKSQAEGLQAHLASLVEGLLKWQDDTKNHFKAKGGLLVEMLVRKCGIDAVKAVMPEEHMKLLTNIRKIKERKEKKQAVSSGESKSXXXKATXXRLSRWNFTKIFFGFGGDFF

SEQ ID NO: 106070 - protein, 40 aa, Gossypium hirsutum
  unsure (1)..(40): unsure at all Xaa locations
  Clone ID: LIB3583-032-Q6-K7-H6.pep
STLSKEEKLRSIGEGRQTIEPNGLFCLLHQCSQLXLLGQV

SEQ ID NO: 106071 - protein, 57 aa, Gossypium hirsutum
  unsure (1)..(57): unsure at all Xaa locations
  Clone ID: LIB3583-033-Q6-K7-A5.pep
DRIPVAQRPEMTLATVWWEQTSKQRDRECSVSQQTNKALSQDYLQGEGXRDTFNYDQ

SEQ ID NO: 106072 - protein, 54 aa, Gossypium hirsutum
  Clone ID: LIB3583-033-Q6-K7-A6.pep
PPPFLFFVVFDPPPPNYILNKNNPCSVVPLILCLLVPPLILGCALISTVASASR

SEQ ID NO: 106073 - protein, 61 aa, Gossypium hirsutum
  Clone ID: LIB3583-033-Q6-K7-B10.pep
FSPPPPLISISLPLIRESPCVILSSCHISHAACIHCQPPKLRSLSPAYGTFADAGRPGMRT

SEQ ID NO: 106074 - protein, 80 aa, Gossypium hirsutum
  Clone ID: LIB3583-033-Q6-K7-B11.pep
SLDVFECSNSSVMHDHTPPPLKVQMFLIKKVFSSLVQRPLAFFGGIVNSIFFRSFLVINCSIISMLLFDESASLYRLFLL

SEQ ID NO: 106075 - protein, 68 aa, Gossypium hirsutum
  unsure (1)..(68): unsure at all Xaa locations
  Clone ID: LIB3583-033-Q6-K7-B5.pep
KERERRGIIDNREKVKDIERNLKLSGGKRNGFRRQREXDEKLQXLFIKTXAGIKKCWGVLFLLVFCGG

SEQ ID NO: 106076 - protein, 72 aa, Gossypium hirsutum
  unsure (1)..(72): unsure at all Xaa locations
  Clone ID: LIB3583-033-Q6-K7-C1.pep
TNPTTKPPPPPPKTPPKTPTPTPKNPPTTHKXXPPNPPPPXPPPPPPXKKKKKXTIPPPPNIPKKKKKYTTL

SEQ ID NO: 106077 - protein, 73 aa, Gossypium hirsutum
  unsure (1)..(73): unsure at all Xaa locations
  Clone ID: LIB3583-033-Q6-K7-C2.pep
QILAVGKRRTGXTISILDIYGFESFDRNSFEQFCINYANERLQXYFNXXLLRGGGEEYIXDXIDWXKVGFDDN

SEQ ID NO: 106078 - protein, 138 aa, Gossypium hirsutum
  unsure (1)..(138): unsure at all Xaa locations
  Clone ID: LIB3583-033-Q6-K7-C4.pep
SWSXGKVSLAFNLWLSYLSSRPGREDAVMKEFEKXFVEGEVERXILGLLNLDFKLNNFSLAPYTIFLIGFCQAGRVEEALKIFSILDEKNVVVSPPSCVKVIVXLCKERNLDQAXDMXLYTXEKGXKLMXXVXNYLXR

SEQ ID NO: 106079 - protein, 37 aa, Gossypium hirsutum
  Clone ID: LIB3583-033-Q6-K7-C6.pep
CVYIYLRWYNLSFSLKSPFFFEKTHQKDSNRTNRITN

SEQ ID NO: 106080 - protein, 66 aa, Gossypium hirsutum
  unsure (1)..(66): unsure at all Xaa locations
  Clone ID: LIB3583-033-Q6-K7-C9.pep
GPHPGRPRVRPASAPRPGGSRXVDEIDAMGVSELVEYDKSTIIKRASIPARDLRILGPVFSHSSXI

SEQ ID NO: 106081 - protein, 67 aa, Gossypium hirsutum
  unsure (1)..(67): unsure at all Xaa locations
  Clone ID: LIB3583-033-Q6-K7-D10.pep
IKTKXQFYXFPTIXSXXHQFFYXSHFXQLKXXXPLLQHIKIRTQSPSPEVAITHYQYIYKLLKFSSS

SEQ ID NO: 106082 - protein, 198 aa, Gossypium hirsutum
  unsure (1)..(198): unsure at all Xaa locations
  Clone ID: LIB3583-033-Q6-K7-D5.pep
GSKXAFVLIGTRCSFFEELDATDNEIDDEGLKSISRCSKLSILKLGICSNISDEGLAKVGSSCSMLKEVDLYRSVAISDAGIAAIGDGCPALEMINIAYNDKITDNSLVSLSKCRMLKALEIRGCLGVSSIGLLAIAVGCKQLTVLDIKKCFNINDNGMLXLAQFSXNLKQINLSYCXGTDVGLXALXXISXLQNMTI

SEQ ID NO: 106083 - protein, 59 aa, Gossypium hirsutum
  unsure (1)..(59): unsure at all Xaa locations
  Clone ID: LIB3583-033-Q6-K7-D6.pep
PNTNEVXMNLENSKHTAQMVMQEIPNQSVLQMFSLLKLVNTLRNIYGGEGPNXSAHDVF

SEQ ID NO: 106084 - protein, 81 aa, Gossypium hirsutum
  unsure (1)..(81): unsure at all Xaa locations
  Clone ID: LIB3583-033-Q6-K7-D8.pep
SVXIPGRPASVSFLVPSFAVFAFIASFQGIRWVRKDPLTLGIGTRFGNTPWPPDYNCGIDRGGGGXKNXXKKXYSSFWLFE

SEQ ID NO: 106085 - protein, 137 aa, Gossypium hirsutum
  unsure (1)..(137): unsure at all Xaa locations
  Clone ID: LIB3583-033-Q6-K7-E11.pep
MTILSFFTRASRAFNGYPSSSKLLLLCTLSGRGGGVVAYSEAQVDASKTSVQVNEKDXKKKRVVVLGTGWAGISFLKDLDVSAYDVQVVSPRNYFAFTPLLPSVTCGTVEARSIVEPVRNIIKKRNGEIQFWEXECV

SEQ ID NO: 106086 - protein, 80 aa, Gossypium hirsutum
  unsure (1)..(80): unsure at all Xaa locations
  Clone ID: LIB3583-033-Q6-K7-E3.pep
VHLAXTVGAVLSRWWQTSVVDGTRADLGVPFDFFLIEKCGLGGLGLVLNWALGLNLSVIGFKGYRNGFWAGQIGLVTTRI

SEQ ID NO: 106087 - protein, 64 aa, Gossypium hirsutum
  unsure (1)..(64): unsure at all Xaa locations
  Clone ID: LIB3583-033-Q6-K7-F10.pep
PASXTNPXCHIATTTVVDGGWSTRSLILFKSAFEDLTPTIAKNQKEIPLPXLDPVLTERGGGVY

SEQ ID NO: 106088 - protein, 105 aa, Gossypium hirsutum
  unsure (1)..(105): unsure at all Xaa locations
  Clone ID: LIB3583-033-Q6-K7-F3.pep
PKKKKHRPTKTPHPQQNKKKKKKNKQHNHTDQPTKTTQKKKRTTQKNKNNRNTKKKEKKEKKKKEPPPPPXQXKKXRKXEPPPTPXXXGXGKKKKTQGKRTHPET

SEQ ID NO: 106089 - protein, 118 aa, Gossypium hirsutum
  unsure (1)..(118): unsure at all Xaa locations
  Clone ID: LIB3583-033-Q6-K7-F4.pep
IIPLPXPXHHXFFXXTXGSXXQSSLAKIVXVKFLVXTSSXXIXXXAMXEKXCGPSXKDWXXNNPIFTISAHKGRVSMYRSSLETRVTLEQPVRLSPAVDPCASCCTRQRNIRRXIRIP

SEQ ID NO: 106090 - protein, 90 aa, Gossypium hirsutum
  unsure (1)..(90): unsure at all Xaa locations
  Clone ID: LIB3583-033-Q6-K7-F9.pep
VRIPGRPASAPLIPTVILRVSFYSFSCQTAVVPAPAPLSSVLTAQILLVSRHSPFGSRSAFLFGGGGIXIFTFYKPVKVNTEKKQDEFGW

SEQ ID NO: 106091 - protein, 64 aa, Gossypium hirsutum
  unsure (1)..(64): unsure at all Xaa locations
  Clone ID: LIB3583-033-Q6-K7-G1.pep
FPPPPFRQXKYTYKKKPILSYVIYVIENSLHARFIMFVRNDTKVKNNQYLKQMLCLLCLDQVSE

SEQ ID NO: 106092 - protein, 75 aa, Gossypium hirsutum
  unsure (1)..(75): unsure at all Xaa locations
  Clone ID: LIB3583-033-Q6-K7-G3.pep
KKNPKPQRKKEKKKKQRKTNQKTTKTKRKRPPPPKKXKEKKKKRNPPPPPREKRRXKKKKNPGESSSSKLRDLLM

SEQ ID NO: 106093 - protein, 56 aa, Gossypium hirsutum
  unsure (1)..(56): unsure at all Xaa locations
  Clone ID: LIB3583-033-Q6-K7-G7.pep
HFHPIKXXKNISAHFVLLLACIDRTLDWIKLSTIPIALFGNALTTLQNGRWATGIR

SEQ ID NO: 106094 - protein, 51 aa, Gossypium hirsutum
  Clone ID: LIB3583-033-Q6-K7-H1.pep
LLKTSKLDAYVLFFYYNVVYFNSCYLLGLLLMFFIIIFLYYVCYLFGIMLF

SEQ ID NO: 106095 - protein, 139 aa, Gossypium hirsutum
  unsure (1)..(139): unsure at all Xaa locations
  Clone ID: LIB3583-033-Q6-K7-H10.pep
MDNVLEIGFRFLPPDEEIISFFLKKKXMGDHKATRYIREVDLLKHEPWQLPAMSVVQSTYPEWLFFYKLNKISQRKNDRSTNDGYWKSTGADRPITCGDSVIGTKKTLVFYKGRTPNGLRTDWVMHEXRATAGLPPNAV

SEQ ID NO: 106096 - protein, 52 aa, Gossypium hirsutum
  Clone ID: LIB3583-033-Q6-K7-H6.pep
KKQQIHHVVLVMVSFQGHITPMLQLASILHSKGFSITIVHTEFNSPNPSNHP

SEQ ID NO: 106097 - protein, 80 aa, Gossypium hirsutum
  unsure (1)..(80): unsure at all Xaa locations
  Clone ID: LIB3583-033-Q6-K7-H8.pep
KRLKRERSELFASTLVLCWGDSDNGLQSENNGGKKKGGKREEPEKDKKSEREEGGGGQNKXVMTTVLEKEDVRTLGEXVV

SEQ ID NO: 106098 - protein, 59 aa, Gossypium hirsutum
  Clone ID: LIB3583-042-Q6-K7-A11.pep
QEEQQRSNVYFSVMRYGGYGSRESGTILMLRTTTKLADAAPGMVRYRTAWVRTREWPVP

SEQ ID NO: 106099 - protein, 68 aa, Gossypium hirsutum
  unsure (1)..(68): unsure at all Xaa locations
  Clone ID: LIB3583-042-Q6-K7-A5.pep
PPPPPKXKXXXTKQPCQNXXINNLDRALFLLENVRPEXSGGEVDWNGFRWEGKQGRRNGGRGXEREWR

SEQ ID NO: 106100 - protein, 136 aa, Gossypium hirsutum
  unsure (1)..(136): unsure at all Xaa locations
  Clone ID: LIB3583-042-Q6-K7-A6.pep
AFLXPVAXKLMVAATLVLLCSRPXEVANFGQVPWLLIVPSIAIIGREITMSAVREWAASQNSKLLEAVAVNNLGKWKTATQMAALTILLATRDSSLGEAGILVASGVILLYISAGLSVMXLAVYMGKIWXXLLKLF

SEQ ID NO: 106101 - protein, 66 aa, Gossypium hirsutum
  unsure (1)..(66): unsure at all Xaa locations
  Clone ID: LIB3583-042-Q6-K7-A7.pep
FTTFSPPNPPXLSXXIYHKIWHLPFLVSQCVHSMFLSSLWSSPHTLASPPGESLANVSVTKHXQET

SEQ ID NO: 106102 - protein, 81 aa, Gossypium hirsutum
  unsure (1)..(81): unsure at all Xaa locations
  Clone ID: LIB3583-042-Q6-K7-A9.pep
YLNYHSLKQSTSPIIIMYSSSSASTCXQKNQCDLFLARSPQKIPTAPLFFGKKNHTFIGEKNQGAIIPPPPKESAFFTSQS

SEQ ID NO: 106103 - protein, 199 aa, Gossypium hirsutum
  unsure (1)..(199): unsure at all Xaa locations
  Clone ID: LIB3583-042-Q6-K7-B1.pep
MGTLVXHVAPGFAFFALGFWHLFNHIKLHSLNPNSYTSFPWFPTLKFRYLELVLIMVGSSISISMELFIGPAKHQPFDTDXTIPSNHLHNFEHSAISMTFFIYAAFSIVLDKTSINIDLMFKHSLTQFLGAIAFAQQLFLFHLHSADHMGVEGQYHLLLQSAIVVSLVTTLMGIGYPKSFMVSFIRSLSILYQGLWLMT

SEQ ID NO: 106104 - protein, 54 aa, Gossypium hirsutum
  unsure (1)..(54): unsure at all Xaa locations
  Clone ID: LIB3583-042-Q6-K7-B10.pep
FYPSIXIHPTNHNLLNQYILHKLYIXIFXXTPPPPLIFLFSFLXPQINHLSICK

SEQ ID NO: 106105 - protein, 68 aa, Gossypium hirsutum
  unsure (1)..(68): unsure at all Xaa locations
  Clone ID: LIB3583-042-Q6-K7-C4.pep
FPILLFIPPKGAFTXGHSYQXRKPEVLRFFEGGSLEAPGHLDREWGWGVAGTEGEQVLRTRGDRDADR

SEQ ID NO: 106106 - protein, 84 aa, Gossypium hirsutum
  unsure (1)..(84): unsure at all Xaa locations
  Clone ID: LIB3583-042-Q6-K7-C5.pep
SSIPHXLYTHSSSPPKFXSGLANSSPPSSFSXVVLFTCPPPLLFFSRIVWLCLWCFFSQGLLAKVSSRLEKPRDRVNKRTRGDR

SEQ ID NO: 106107 - protein, 37 aa, Gossypium hirsutum
  unsure (1)..(37): unsure at all Xaa locations
  Clone ID: LIB3583-042-Q6-K7-D11.pep
FDQNRLAFLKQLLCFRNRLHIGHXLSLSKXTRXCWDD

SEQ ID NO: 106108 - protein, 79 aa, Gossypium hirsutum
  unsure (1)..(79): unsure at all Xaa locations
  Clone ID: LIB3583-042-Q6-K7-D9.pep
XIFFFLSVNNEXLDLRFVFLIFLCRVYTLLDLYLIIRFCFLLLFLKLNMKWKYSYKAWGGGGADQGTATVXVXXVGGGX

SEQ ID NO: 106109 - protein, 56 aa, Gossypium hirsutum
  unsure (1)..(56): unsure at all Xaa locations
  Clone ID: LIB3583-042-Q6-K7-E10.pep
LFSRKHYQPETEPTLPIKPVPKNHVLLTYNNMCISHCFXFXQDAGRTRGDXGNAGP

SEQ ID NO: 106110 - protein, 76 aa, Gossypium hirsutum
  unsure (1)..(76): unsure at all Xaa locations
  Clone ID: LIB3583-042-Q6-K7-E11.pep
MVKVPRRIHVRREREEEAEEEETEEGEQEQSHNPFQFDCRSXQSRFREEHXNLRVLQRFVLRYXIFRGIIEXXLFI

SEQ ID NO: 106111 - protein, 95 aa, Gossypium hirsutum
  unsure (1)..(95): unsure at all Xaa locations
  Clone ID: LIB3583-042-Q6-K7-F1.pep
KNKTPTNPPPPPPPPSPPQKKKQTKQKNXPXHQQNQXXKNKHINKTHPPPPLXKNKTFPFYTPSSFAPQSPLLKASPWFSLSQSSVALLRTPLPF

SEQ ID NO: 106112 - protein, 50 aa, Gossypium hirsutum
  Clone ID: LIB3583-042-Q6-K7-F2.pep
KVIGYDSSLELTESFIEGEEKGSETNAPVLEREYMQGVLISEFVLNNSFL

SEQ ID NO: 106113 - protein, 98 aa, Gossypium hirsutum
  unsure (1)..(98): unsure at all Xaa locations
  Clone ID: LIB3583-042-Q6-K7-F4.pep
KVQNSFLGNPGLCGNYSGSCGGKDEEKHKGYVWLLRSIFILAGLVFVVGVVWFYFKYRSYXKXKXIDKXKWXLMXXXKLGFSEYEILDCXDEXNXIGR

SEQ ID NO: 106114 - protein, 107 aa, Gossypium hirsutum
  Clone ID: LIB3583-042-Q6-K7-F5.pep
FLESISCTFSKKGNSCAPLHHVRRHTEHDPLARRPCPTIMYSPTPTRLALAPRGSLFGRRISQEALKVGVSLVALEKRGMGKQKEFWGLFKKRIKVKTDAGRPGLRT

SEQ ID NO: 106115 - protein, 84 aa, Gossypium hirsutum
  unsure (1)..(84): unsure at all Xaa locations
  Clone ID: LIB3583-042-Q6-K7-F9.pep
QGKHFGASFPYLTFCFXGHDIPPPRGIRTAAESGRTARRCGNARWDTGVLKVLEEAVRSAWDNSVSADAWADAGRTRGDRDADR

SEQ ID NO: 106116 - protein, 55 aa, Gossypium hirsutum
  unsure (1)..(55): unsure at all Xaa locations
  Clone ID: LIB3583-042-Q6-K7-G12.pep
GRHPGRPASVIFSPSSINTMANSHLLATLALICSLPSFNHICEVEARKTXSCEQF

SEQ ID NO: 106117 - protein, 55 aa, Gossypium hirsutum
  unsure (1)..(55): unsure at all Xaa locations
  Clone ID: LIB3583-042-Q6-K7-G7.pep
CSKLMLRSGWQVICCSSFNITLLRRKMKTLYFDSSNNSTTSQAXXCNRWGEDEHY

SEQ ID NO: 106118 - protein, 103 aa, Gossypium hirsutum
  unsure (1)..(103): unsure at all Xaa locations
  Clone ID: LIB3583-042-Q6-K7-H5.pep
QEKNDLESLRLPPSFXLLRXSVTPGKGIRVENKGFLVCKKKMATSPETLCCFCPAPFRQFVEHVVNLKFDEEPNYAKYISLFDGIVGXNXEFRCIIYVGAQKL

SEQ ID NO: 106119 - protein, 43 aa, Gossypium hirsutum
  Clone ID: LIB3583-042-Q6-K7-H8.pep
SASRSPRVRDLSEAQSLALWRRPVTVFGSETLRNPGVKRADYV

SEQ ID NO: 106120 - protein, 74 aa, Gossypium hirsutum
  unsure (1)..(74): unsure at all Xaa locations
  Clone ID: LIB3583-042-Q6-K7-H9.pep
SASRSPSVRPASHSSAPCPXTDSLRTGTTMVDPTVTAQCAGVSVMRQILNYGLVLFPSHAGGGVSCPRRGSRFV

SEQ ID NO: 106121 - protein, 68 aa, Gossypium hirsutum
  Clone ID: LIB3584-033-P1-K1-A10.pep
CIVPIPCPRHGLTWKSHIDANSPAMVLHDASCQCHVLDMSYTGSHNYVDAMSQTWFYTGLHNDADAMS

SEQ ID NO: 106122 - protein, 77 aa, Gossypium hirsutum
  Clone ID: LIB3584-033-P1-K1-B12.pep
PIVLYTKITASYSQLQASQHNTCVSALAIVAQSPPCIEYISVSAPWRIDSHRFWPRASMRDSRSNYSSYRSSSQSTC

SEQ ID NO: 106123 - protein, 155 aa, Gossypium hirsutum
  Clone ID: LIB3584-033-P1-K1-C2.pep
DAWADAWAKIGGKISIRLIKHENNENTEYQADSLVYKVFGLYFMQSYIGVFYHALLHRNFMTLRQVLIQRLILYEVLENLVENSLPYLKYSYKKYRAVRNKKKREKGLIGKIQFATRVEKEYLKPTYSASISEELEDGLFDDFLELALQFGMIMM

SEQ ID NO: 106124 - protein, 156 aa, Gossypium hirsutum
  Clone ID: LIB3584-033-P1-K1-C3.pep
GRVGSGWCDVGNSNKAFGIFFEMTERGFAPNIKICSKVVSCLYRLGRIDDANILLQKMVGTDPLLSHFGLDSLRADVSCVNIQNIANTIDENAKCFALPNNVVYNIAITGLCKSGKVDDARRVFLALLQRGFNPDNFTYTTLIHGYSASGDVNEAF

SEQ ID NO: 106125 - protein, 100 aa, Gossypium hirsutum
  Clone ID: LIB3584-033-P1-K1-C7.pep
SRGFLQITFASPNEDELIAMANALSSQNLFCPIERNNCSTDTLFQMLKPAIWLLLEKGVKILVLTIGSDGVLLCTKGESISWRICLEKTQQHGFSRQLFE

SEQ ID NO: 106126 - protein, 162 aa, Gossypium hirsutum
  Clone ID: LIB3584-033-P1-K1-D11.pep
GWLTVTFRPVLQWLGTHANPALRNHGVRIELAWFCSAPGGYCQYGLLVYSVEEENGHISLGNTNGRVRTELHSSLNTTYMQNQSDYPREDALLTLGNEGFAKQKSYGELIDANSLQKLEDKRYIFYLLPFLVHNTKPVGHQDLVGLVISMLLLGRFSLVLLT

SEQ ID NO: 106127 - protein, 154 aa, Gossypium hirsutum
  Clone ID: LIB3584-033-P1-K1-E2.pep
MKSAKILKGRKEVKEKSTSPNVPLGSSKESVQTLKRKDKDEKDSASPGFIKKCMKKSAVRSKGMKEDTPLSASSRFASGSSKKPASVVKDKEEGSSDSAHQVLPLANAKKLPSTVERKKGPSADDPICSVRKFDGKEAEDCLEDNNPTIAEMMR

SEQ ID NO: 106128 - protein, 165 aa, Gossypium hirsutum
  Clone ID: LIB3584-033-P1-K1-E9.pep
GVSRGRENVVCSICNRSGGSCIQCRVVDCSVRFHPWCAHQKGLLQSEVEGLDNESVGFYGRCMLHALHPICESDSDPTNGKLSFPRKGESTCARTEGFKGRKQDGFWHNPYGQSRRKNGCFVPQEQLNAWIHINGQKPYMQRLPKLSKSDIENDCRKEYARYKQA

SEQ ID NO: 106129 - protein, 47 aa, Gossypium hirsutum
  Clone ID: LIB3584-033-P1-K1-F12.pep
TGIISKRAKEYTLFNILTSCMENGTRHLVKLLIAIGFDLMSRVTATL

SEQ ID NO: 106130 - protein, 35 aa, Gossypium hirsutum
  Clone ID: LIB3584-033-P1-K1-G4.pep
KQMVDWLIYENPPFKNVIFPELCKGVVKLYLYVGL

SEQ ID NO: 106131 - protein, 125 aa, Gossypium hirsutum
  Clone ID: LIB3584-033-P1-K1-H10.pep
SIETKTRSLLRGRLTLNDVQRLERNVKNILRKYPIDHRVSEADWDTLMMALYFHPHRVEKIGSGAKEIKVGHHPDHADSRCFFLVRTDETTVDFSYRKCVVGALEIIAPCRAQSYKSKWLQHGSL

SEQ ID NO: 106132 - protein, 127 aa, Gossypium hirsutum
  Clone ID: LIB3584-033-P1-K1-H5.pep
NNNNCIHMLTNLLVLFLLASFPTVLFKIVRGQFGCWVAFLAVALHLFFPDTFPVSRFILFVITPDWLADRFRDDIVPGILCLVITILVTLLEIRGVGGLENCECSCYCFSYWFGIACLVCITISYLA

SEQ ID NO: 106133 - protein, 66 aa, Gossypium hirsutum
  Clone ID: LIB3584-033-P1-K1-H7.pep
RCFQFPRRAFPPNLLISISKLSILHLLPSIFSLVLSHYPFLSVFLHIGGLFLLGKSPSYSSTFRLQ

SEQ ID NO: 106134 - protein, 116 aa, Gossypium hirsutum
  Clone ID: LIB3584-040-P1-K1-A1.pep
MASIGLQMCLTLALMGMLWAGANAQILTPGLTNLTPCLNYITGNTSTPSSACCSQLKTVVQSSPQCVCSMLSMGASLGITINQTLALKLPGSCQVQNPSLSQCNGGKSGTRSTAPA

SEQ ID NO: 106135 - protein, 52 aa, Gossypium hirsutum
  Clone ID: LIB3584-040-P1-K1-B12.pep
HMLRSFIHALFSLWPSDMRDLSSVQLCLGIASALPVYSLVVLRPLNCSYMTR

SEQ ID NO: 106136 - protein, 125 aa, Gossypium hirsutum
  unsure (1)..(125): unsure at all Xaa locations
  Clone ID: LIB3584-040-P1-K1-B8.pep
ACTHPHAMPYIGDSIAILYXPAIAADASPLPPXIRWASTQCTEKQNEIVPMKQMKMDCVPYIPLEKRDSQMDRGTPHISILCCTQRWVALTQMTIHCLTKYEHCLSYFYHPLMEDELDQRTEVQI

SEQ ID NO: 106137 - protein, 141 aa, Gossypium hirsutum
  Clone ID: LIB3584-040-P1-K1-C4.pep
HASGNNPENTKTLQSFFGWYYATVTFSALIAVTSIVYFQDNLGWGMGFGIPVMLMFGSAVSFFLASSFYIKLKAMTRLLTGLAQVLVASFRNRHIELPSHATNEVHHIRKGSMLQVPSEKLRFLNKACVIKDPQEDLTSNG

SEQ ID NO: 106138 - protein, 113 aa, Gossypium hirsutum
  Clone ID: LIB3584-040-P1-K1-D2.pep
HALLRVVGNLTRRRRLSLGADVLTSVDGDLTTTVTIGSTTSDSTALLRWVLPTEPRPTGITEAARSFKKKNRVSLFSNLCMSRSEKFNWDPNVRYRLYWSDEPYSSSSSASWV

SEQ ID NO: 106139 - protein, 73 aa, Gossypium hirsutum
  Clone ID: LIB3584-040-P1-K1-D7.pep
LIKSAVLFFIQRLAEYRIIEIYYGASISDCLCDRCGVAVPNIPSSSLDIQNSHMKNAIRPISYMRNRVVRSML

SEQ ID NO: 106140 - protein, 72 aa, Gossypium hirsutum
  Clone ID: LIB3584-040-P1-K1-E2.pep
MCMSHTWSDQKPHMMPYPRYGLTRDLGHPHVMTCVPCLFTRFIPYGISDISRSNNPIALYSQLYSIFQHSPN

SEQ ID NO: 106141 - protein, 73 aa, Gossypium hirsutum
  Clone ID: LIB3584-040-P1-K1-E3.pep
GTVLHFCIEHGLRYSKSSLFSPKLFGLNQNALTEHVPVLSESMIMYFERACLDVEITKVLVAFGSILRYRSTK

SEQ ID NO: 106142 - protein, 91 aa, Gossypium hirsutum
  Clone ID: LIB3584-040-P1-K1-F2.pep
VLHLSVVHIARDATSGRQWCSVMITAVDIVDDVISRVFMDVSPVCSIGNVIDGSSRSNVVSSFCVCQVNTIRKGLDGGRKQCHMIGCAGWR

SEQ ID NO: 106143 - protein, 100 aa, Gossypium hirsutum
  Clone ID: LIB3584-040-P1-K1-F8.pep
CIFVISMFNTVRVLRANNLFMVQLSHIVQSFVDLRHFVPFGGSHICHGTAPLASGTSTSEYPYSNNRSNSSYSTKWHIRQVCSRIRHEVSRASSRVELLN

SEQ ID NO: 106144 - protein, 153 aa, Gossypium hirsutum
  Clone ID: LIB3584-040-P1-K1-G10.pep
HASANAWTLKAIPEEGYISCLVAGPCGNWFVSGSSRGVLTLWDLRFRIPVNSWQYSLVCPVEKMCLFVPPSSVSVSTTARPLIYVAAGCNEVSLWNAENGTCHQVFRAANYDSDAEMSDLPWALARPSAKTSSKSDPTRNAYPRYRVDELNEP

SEQ ID NO: 106145 - protein, 49 aa, Gossypium hirsutum
  Clone ID: LIB3584-040-P1-K1-H6.pep
ADLIMDSTTGGFDAAISNDGQTREHAVLASTLGVTQMIWCSNKKDATTP

SEQ ID NO: 106146 - protein, 63 aa, Gossypium hirsutum
  unsure (1)..(63): unsure at all Xaa locations
  Clone ID: LIB3584-041-P1-K1-A11.pep
MLGVSSKAIVSXPDEQEAAGCRTTSPKITEDALVKQILATNCSGVSMRIGDHVRSRYCDHKEY

SEQ ID NO: 106147 - protein, 87 aa, Gossypium hirsutum
  unsure (1)..(87): unsure at all Xaa locations
  Clone ID: LIB3584-041-P1-K1-A3.pep
MDVNGEKEEPIPRGNEWEVESVTASGYAAAPGTKQVETNDDTKGDRYAVRDAETRYAXFMTGHSGFPPSEHENWLMEPANSSERVGK

SEQ ID NO: 106148 - protein, 74 aa, Gossypium hirsutum
  unsure (1)..(74): unsure at all Xaa locations
  Clone ID: LIB3584-041-P1-K1-A4.pep
VREPVRTSLQFSXMGPKLNISPDQVAAGRKPXTGLKLSLQGNTQNRLAIHLQHLVSLTKILQPHWDVHKAMSAP

SEQ ID NO: 106149 - protein, 55 aa, Gossypium hirsutum
  Clone ID: LIB3584-041-P1-K1-A5.pep
HASAKKEPVIRSVRDGSAHCRQTTIGSIDRQVRYYTMSTEVATTGRNSNCGYPFL

SEQ ID NO: 106150 - protein, 76 aa, Gossypium hirsutum
  unsure (1)..(76): unsure at all Xaa locations
  Clone ID: LIB3584-041-P1-K1-B2.pep
TREHHGNMKFCCQSFTSQCTDTCKVSTPHSYHNLRHTSYTSLLFGIEAAPPFDHXDQQHQKGMLVHTTYQQQQIEH

SEQ ID NO: 106151 - protein, 142 aa, Gossypium hirsutum
  Clone ID: LIB3584-041-P1-K1-B3.pep
MDSHLQSEYTPCPPQPPTFAITPPLSDTATEPPFHHLLQQQQKRLQMFRSYQRQEIEHVNDFKNHQLPLARIKRIMKADEDVRMISGEAPILFGKACELCILELTIRSWLHAEENKRRTLEKNDISAAITRTDIFDFLVDIG

SEQ ID NO: 106152 - protein, 76 aa, Gossypium hirsutum
  Clone ID: LIB3584-041-P1-K1-C11.pep
HAALCNCYTPSSDRTHHIDHMLRRLRQFIAEQWPLSDEILSGLSRKAKFTVLIMHSRLLKALRCHTAINISILQST

SEQ ID NO: 106153 - protein, 90 aa, Gossypium hirsutum
  Clone ID: LIB3584-041-P1-K1-D11.pep
CVCGDSVTQISQCSSCYHAGKCNDQSGRSIHVPSRSMCSLSAIFQSPISVVSPRVRECSNGARALNMTAPFNKNGGMSEKLSLGTALVFS

SEQ ID NO: 106154 - protein, 48 aa, Gossypium hirsutum
  Clone ID: LIB3584-041-P1-K1-D2.pep
PRVRPLVLPRVGASVLFIGLQLAIILTGVLELRWHVVTIDDLLRSQHI

SEQ ID NO: 106155 - protein, 95 aa, Gossypium hirsutum
  Clone ID: LIB3584-041-P1-K1-D3.pep
THLRQHDHLVVDAFVLGQNTRLLAVELRLCGDIIEDLWCIAQVPTICGIYKHISTDSQGSLTNLAALDTNMHWPCHASSNADAGVLYTSEMDYTC

SEQ ID NO: 106156 - protein, 60 aa, Gossypium hirsutum
  Clone ID: LIB3584-041-P1-K1-D7.pep
PRVRCMNLYSLYMRLCSVSRSGNGEHVDQNKADQYGCSGCLRYKVSKATMFYSTVASLLR

SEQ ID NO: 106157 - protein, 105 aa, Gossypium hirsutum
  unsure (1)..(105): unsure at all Xaa locations
  Clone ID: LIB3584-041-P1-K1-D8.pep
DYSRSRGAVNLNKWLKTXVASRDAECVFDTRSPEKPSSTALNQALLDALRLDDLNAQKPPKMRHVIDMLDADDCPVSDDRRGGAENLLSLRDGLKDRLADSPVNE

SEQ ID NO: 106158 - protein, 84 aa, Gossypium hirsutum
  unsure (1)..(84): unsure at all Xaa locations
  Clone ID: LIB3584-041-P1-K1-E4.pep
LNWQDIHLSSASWLTNKEAPTDRPNKQSRXLDGESHAPCSHSSRAACGVLTRRATDTLASDLALVPVAFFPFLLGTFAVFARLA

SEQ ID NO: 106159 - protein, 93 aa, Gossypium hirsutum
  Clone ID: LIB3584-041-P1-K1-E5.pep
GVHLTSQVMLMYLQPCTSVPLHDLLLQLMQILLLLRKKLQLLDRLPGGTAEERISAPWGKADDTPSPATGDAMVAADNHDASNAQRSIHNGHC

SEQ ID NO: 106160 - protein, 71 aa, Gossypium hirsutum
  unsure (1)..(71): unsure at all Xaa locations
  Clone ID: LIB3584-041-P1-K1-E8.pep
GTWHGEETEMWVPGQXTMLQVLVSIQALILNAKPYFNEPVFKIVYVAAESEKRSRKYNEDAXALSLETMIY

SEQ ID NO: 106161 - protein, 84 aa, Gossypium hirsutum
  Clone ID: LIB3584-041-P1-K1-F11.pep
FQLDAWLSLDLQATVIDPADVDRLQAELRINKPYVVFTEYTTSAFLSCLVLERVSEMSDNEGTLACIDSTLCSPTTEHAVVLEG

SEQ ID NO: 106162 - protein, 38 aa, Gossypium hirsutum
  Clone ID: LIB3584-041-P1-K1-F3.pep
LCRCMQGKLSVEPTKPPPILFHLAARCTTLCSIPSDAW

SEQ ID NO: 106163 - protein, 120 aa, Gossypium hirsutum
  unsure (1)..(120): unsure at all Xaa locations
  Clone ID: LIB3584-041-P1-K1-G3.pep
MAGSQKATALILTMAQLENLDLTVDANGDDDKTMPVTKHNGEKESLQRWECSYWSKYXRNQTIKDVSHGYQYEDLSAKRNSPLAHAGGLSDYHSLMSAAYIHEPXLFGTTGGKHMQMNEV

SEQ ID NO: 106164 - protein, 98 aa, Gossypium hirsutum
  Clone ID: LIB3584-041-P1-K1-H1.pep
CISSSLNYLPATNNISILSPEHVLEIKLQPPRSPPRYRSTNILNFGADLSIRTCPKNQTWVPSLPVSLLQDLRPPRPLPRQQKASIIIMTDMINVSRI

SEQ ID NO: 106165 - protein, 80 aa, Gossypium hirsutum
  unsure (1)..(80): unsure at all Xaa locations
  Clone ID: LIB3584-041-P1-K1-H4.pep
GWGTDDKALLSELGHRYADQRKQIRLAYEDLHLEDLIKRLESXLSGAFEQAVYRMILAPAHRDARLANVAITQLSPDHHV

SEQ ID NO: 106166 - protein, 96 aa, Gossypium hirsutum
  Clone ID: LIB3584-042-P1-K1-A12.pep
HSKPSTRRWHFAGTLMSIVLFIYSMLFNWWFLVFVPICGYGFAWYSHFFVEGNVPATFGHPFWSLLCDFRMFGLMLTGKMDREIKRLGKRPILQGF

SEQ ID NO: 106167 - protein, 61 aa, Gossypium hirsutum
  Clone ID: LIB3584-042-P1-K1-A5.pep
KNKGRSKIREPKQEISYLTTNSVNHHPHRYYLFFGCGYKSSLNILLKALVATSSFKATPIF

SEQ ID NO: 106168 - protein, 44 aa, Gossypium hirsutum
  Clone ID: LIB3584-042-P1-K1-A8.pep
CYWLDNLHDSSCTHHANITSFVIYVTSTNNSKIIKLISKYIKVP

SEQ ID NO: 106169 - protein, 60 aa, Gossypium hirsutum
  Clone ID: LIB3584-042-P1-K1-B12.pep
RKRERRPYLADMRKVLLTSLQSKLKRDLKAESSPSLAGSGHRLRCRPPDLVVVRCCKFID

SEQ ID NO: 106170 - protein, 101 aa, Gossypium hirsutum
  Clone ID: LIB3584-042-P1-K1-C12.pep
GNLKPDYLQKRGFVEAHVDDGILEIFGLKQGWHASFVMVELISAKHIAQASSIRLELSGGDWRDAFLQMDGEPWKQPMSKEYSTIVEIKRVPFPSVMVNGE

SEQ ID NO: 106171 - protein, 43 aa, Gossypium hirsutum
  Clone ID: LIB3584-042-P1-K1-C3.pep
FNTHDDTLKVDWGGRFNGSKIRRRGLEAILIMGSGCNGNYVLH

SEQ ID NO: 106172 - protein, 180 aa, Gossypium hirsutum
  Clone ID: LIB3584-042-P1-K1-C4.pep
HASAHAFAHAYGGKLKKDLQYQADETFMMHDDPVLCVDFSRDSEMIASGSQDGKIKVWRIRTGQCLRRLERAHSQGVTSLVFSRDGSQVLSTSFDSTARVHGLKSGKLLKEFRGHTSYVNDAIFTADGSRVITASSDCTVKVWDVKTTDCLQTFKPPPTLRGGDASVNSVHVFPKDTDHI

SEQ ID NO: 106173 - protein, 175 aa, Gossypium hirsutum
  Clone ID: LIB3584-042-P1-K1-D10.pep
TATSYFQNLFSTHVAGDLSHLLTGINNSISSEINLDLLSEEIFAALKGMGSTKAPGFDSFPALFFQKYWHIVGKDIGDFCLGVLNNGKDFKGLNLTEIILIPKTSKPTNLGHFRPISLCTVIYKIIAKTIENRLQEFIGRCIDNAQSAFVPGRLISDNILIAYELLHTLRQKRTG

SEQ ID NO: 106174 - protein, 179 aa, Gossypium hirsutum
  unsure (1)..(179): unsure at all Xaa locations
  Clone ID: LIB3584-042-P1-K1-D8.pep
GYVKTPRGLRTLGSVWAQHLSEXVKRRFYKHWCKSKKKAFTKYSKKFETEDGKNDIQLQLEXLKKYCTVIRVLANTQVFPPQADLYFVVMFXSFQFWMIECFNYYVFLFFPDFFYVLYCIFLXIRKMKGLKQKKAHLMEIQVNGGTIAQKVDFAYXFFEKHIPVDAVFQKDEMIDIIGV

SEQ ID NO: 106175 - protein, 48 aa, Gossypium hirsutum
  Clone ID: LIB3584-042-P1-K1-G6.pep
ISLKCIYSRRDDEVLIGAMIRTLAVCRDGPASSAGQITRPIGESLCVP

SEQ ID NO: 106176 - protein, 129 aa, Gossypium hirsutum
  Clone ID: LIB3584-042-P1-K1-H3.pep
GAAKADGKVLTVLNGKLTVNGLNVFPPGDRSEGDLTERLVKAASYDELKADVNAVCEGELKGILSYTDEDTVSTDSKGDSTASLLDAIDIIALNELDAKLVSWGDNECGYSARMDDIMMHEDAVLEANE

SEQ ID NO: 106177 - protein, 43 aa, Gossypium hirsutum
  unsure (1)..(43): unsure at all Xaa locations
  Clone ID: LIB3584-042-P1-K1-H5.pep
ESHKANYKPFFTHYLGKPPXXHALRLTASHFYFSAGRLSLCFA

SEQ ID NO: 106178 - protein, 104 aa, Gossypium hirsutum
  Clone ID: LIB3584-043-P1-K1-A11.pep
IPESIGFLSDLETLELCENSFENKIPSSLGQLTKLQKLDLHSNRLNSRIPFELGSCSNLTFLALAENKLTGELPLSLSNLTKISELGLSHNLLSGEILPSLISN

SEQ ID NO: 106179 - protein, 80 aa, Gossypium hirsutum
  Clone ID: LIB3584-043-P1-K1-A4.pep
MEKNDGKASLMVRPKAVNAEGSENQVKKRRAEGEWRRSEAKQALRDRIVNLLKAAGWKIDYKPRNNKEYNDAVYVNPEGK

SEQ ID NO: 106180 - protein, 103 aa, Gossypium hirsutum
  Clone ID: LIB3584-043-P1-K1-B9.pep
PTRPPTRPPTRPLAQEFPTWQFVLVDLRCHGDSASIKKRGPHTVASTALDVLKLIAQLRITPRVLIGHSFGGKVVLSMVEQAAKPLPRPVRAWVLDATPGKVR

SEQ ID NO: 106181 - protein, 103 aa, Gossypium hirsutum
  Clone ID: LIB3584-043-P1-K1-C1.pep
KKLENPKSPFINKKGTFLLSSSFRINKVAFKKGSKTMERSSSSLSPNEEQLLSCWGRLKLKLPWTKRKIRSLGHSITAAFRAKRPRPVGGFKYDPLSYAQNFD

SEQ ID NO: 106182 - protein, 71 aa, Gossypium hirsutum
  Clone ID: LIB3584-043-P1-K1-C2.pep
QLCRTVILPVRFPQFFTGKEKGHGRGFSVVWGQPGELGKFITLAKAVATEADSTFFSVSSSNLVSKWMGGK

SEQ ID NO: 106183 - protein, 98 aa, Gossypium hirsutum
  Clone ID: LIB3584-043-P1-K1-C6.pep
LIGGGDIGQFGLMDLRNVLGMVPHAPVLFSVTVRYNLNPFTEHNDADLWQALEIAHLKDGIRRNLVGVNAVVSEAGENSTVVQRLLLSLDRALLGRSK

SEQ ID NO: 106184 - protein, 103 aa, Gossypium hirsutum
  unsure (1)..(103): unsure at all Xaa locations
  Clone ID: LIB3584-043-P1-K1-D10.pep
CIVLPWRVRSAILSTLXLMMXKGGIALKPFVPKLQTTFIKCLQDNTWTVRSSAALALCKHSALSIRVDPLVIDLLSCXRHLPSGVREAILSALKGAVKYAGKS

SEQ ID NO: 106185 - protein, 102 aa, Gossypium hirsutum
  Clone ID: LIB3584-043-P1-K1-D7.pep
AWKLAKLDSTDAMRAAARARASSSVLRPVDNRRMGDPEHSSSGNMSIRSSVSTDTGLNKEVKHDQRLSPLGNSFAPSQGSRDEYNTGTQSISSFSSPSHIHE

SEQ ID NO: 106186 - protein, 68 aa, Gossypium hirsutum
  Clone ID: LIB3584-043-P1-K1-E1.pep
LKLASQFYFIPAPPPESLRGVPFVAPMRPVLFPAPEPPDRQLHANIVNQIDYYFRLCFFLHVDLGQLG

SEQ ID NO: 106187 - protein, 89 aa, Gossypium hirsutum
  Clone ID: LIB3584-043-P1-K1-E10.pep
MLCSSSAAIKRISVSWLIIANNSNFKSHRLSRSESSTKRPRTMSTHSSLKDAFSSYADHLNALNEKRERIVKASRDVTMNSKKVIFQVH

SEQ ID NO: 106188 - protein, 47 aa, Gossypium hirsutum
  Clone ID: LIB3584-043-P1-K1-E6.pep
FTKLEAPQLMDLQNQRRENIMKLLECKVTRTTNPRLMTHLSSTMVNF

SEQ ID NO: 106189 - protein, 104 aa, Gossypium hirsutum
  Clone ID: LIB3584-043-P1-K1-E8.pep
PTRPQSSDKSKFKLLYFELEENGGLSLALQEDSAKTGKVTSAGMYFLGFPVYCLDQTTNSVAAAKDPDAAFFKKLDGFQPCEITELKPGKHVFAVYGDNFFKSV

SEQ ID NO: 106190 - protein, 104 aa, Gossypium hirsutum
  Clone ID: LIB3584-043-P1-K1-F4.pep
HASDLMKAELDCSMISLECCKEEKEKLEAFLQECKEEKSRISVELSIVKELLEASTSTMNVQKEKDSKLKDGCFSDELVVNNAQTRDIDLKYLDQDTPKNSKDA

SEQ ID NO: 106191 - protein, 64 aa, Gossypium hirsutum
  Clone ID: LIB3584-043-P1-K1-H10.pep
SFFTLAYRKKKSLISKFMYIYIYIYFLVPTHPSKTLSLKAYVLNKVNERSLLYTNTKSFIIKPN

SEQ ID NO: 106192 - protein, 56 aa, Gossypium hirsutum
  Clone ID: LIB3584-043-P1-K1-H6.pep
ELRVDVYQVVPWYVKVYLHSLRVFVDQQPRAVSDFIEKIHVSPSKDKMSPGVMEVV

SEQ ID NO: 106193 - protein, 103 aa, Gossypium hirsutum
  Clone ID: LIB3584-043-P1-K1-H7.pep
VVHHGTLFSLEAFLSSNGFTVPPQLNALEYAMEILNQLHANKPITPPSLPPSQQESVISPDNKEASDVRYRSSRLDEICSLYNRFWKIIYRTRQLLLTNALEA

SEQ ID NO: 106194 - protein, 159 aa, Gossypium hirsutum
  Clone ID: LIB3584-044-P1-K1-B12.pep
LAAGKGVAVATTLEEAYKAVDSMLVEGIFGSAGYRVIVEEFVEGEEASFFALVDGENAIPLESAQDYKRVGDGDTGPNTGGMGAYSPAPVLTKELQNVVMESIILPTVKGMSMEGCKFVGVLYAGLMIDKKSGLPKLIEYNVRFGDPECQVTGWFICIF

SEQ ID NO: 106195 - protein, 160 aa, Gossypium hirsutum
  Clone ID: LIB3584-044-P1-K1-B9.pep
LARGGPSVSTSTCKRSDLRLLLGVLGAPLAPVHVSALDSFSHLTIKDTPIESSSAQYILQQYTAASGGQKLQNSIHNAYAMGRVRMIASEFQTANKVTKNRNSTKVAESGGFVLWQMNPDMWYVELALGASKVHAGCNGKLVWRHTPWLGAHATRGPVRP

SEQ ID NO: 106196 - protein, 138 aa, Gossypium hirsutum
  unsure (1)..(138): unsure at all Xaa locations
  Clone ID: LIB3584-044-P1-K1-C1.pep
MNLIAFPFDSSLTEAFCIAILEAASCGLLTVSTRVGGVPEVLPDDMIVLAEPDPSDMVHAIRKAISILPNIDPQVMHDRVSNFHXLHIVILNCVRWTNAYFSFCGKMKRLYNWNDVAERTEIVYNRALKCSDQSLLER

SEQ ID NO: 106197 - protein, 182 aa, Gossypium hirsutum
  Clone ID: LIB3584-044-P1-K1-C2.pep
LPSPNRRFGLYIYSSKSDEWDSSWISFRANEYIRFDHGVFCNGVFHWNSNGRKSLRFDLENKVLKKMPMLAPMFQAPQGSEDEDSRYFGESRGHLHLGVTYMPLCFKFNIFEMAADYSHWFLKYCLNLDDTMKAFPDLRLPVVDIYYGFHVLSVIRSEGEEVKSVILVDNKAIAMSLRMGFC

SEQ ID NO: 106198 - protein, 150 aa, Gossypium hirsutum
  Clone ID: LIB3584-044-P1-K1-D1.pep
VRHDNVNRRALGDSTPTRYGREAPRQGTRPKVGSENSIEKSPLHHQARVTGRGTMASPAYEAKTSYDNSHGTPGRSKMRPNTRGDESPDESAAVPKFGDWDENNPASADGYTHIFNKVREERNNGGKTPGMPGEQSPYRTTRNRKQANSN

SEQ ID NO: 106199 - protein, 105 aa, Gossypium hirsutum
  Clone ID: LIB3584-044-P1-K1-D10.pep
EVFILLLVLSIIQHGIRGHLILGWWFLSFVGCMDSLSSPSDTQSATPTMASNLTSSVVDSRFFSTKKVSVLLDDSNYLLWKQVFLAVKAYKLQSFLDLHTVPPPS

SEQ ID NO: 106200 - protein, 109 aa, Gossypium hirsutum
  Clone ID: LIB3584-044-P1-K1-D2.pep
LSHFISFAAPLKFFLSMDLLNHILCSSSWLCFPDLSSSKLLRALLPVFFSRLSPTNLGTLSLIKSPLVFNNDGLNLQRSFFHPKSQKITSSAPCGHRMRRSIGFLHPLR

SEQ ID NO: 106201 - protein, 161 aa, Gossypium hirsutum
  Clone ID: LIB3584-044-P1-K1-D5.pep
ANSPEETHGGSVSPNGSIQNSGFLSSTTTSLSDDRNSADSSEKKSRVGGEPSNTSVTTETNPSQGGCPDTPTSKKGSEAREEKESKYSSKQVFSAPLGNMNLEAEQSAMQQQIVDMYMRSMQQFTESLAKMKLPMDLDKPEHEDRGDLIQNNSKKIEHEKK

SEQ ID NO: 106202 - protein, 69 aa, Gossypium hirsutum
  Clone ID: LIB3584-044-P1-K1-D6.pep
GRVGFQEDDLENLFEVVKTCVNPDPKERPTMKEVAAKLKEITAMGPDGATPKLSPLWWAELEILSTESS

SEQ ID NO: 106203 - protein, 62 aa, Gossypium hirsutum
  Clone ID: LIB3584-044-P1-K1-E4.pep
SCNDIAPLKFWLSISLFALYINFLNDVCNFYSIPLNIIFAQFVLSICRYYSDLSFCSLYGQA

SEQ ID NO: 106204 - protein, 162 aa, Gossypium hirsutum
  Clone ID: LIB3584-044-P1-K1-F10.pep
ALLLDTPNKVDDMQLHDATDGIDASHFCDPCNEADNSNMLNSIGESDLQTAKTVEEVIPQSFELPDATNGNTDLEIHNETNKPEDSQGCNATNGINGPQTLVATDVNKAQIHGATDKVSESQPSDVVHSDQRMVKEEVEVVPQLSHENTEDLAQQGDNSVIA

SEQ ID NO: 106205 - protein, 160 aa, Gossypium hirsutum
  Clone ID: LIB3584-044-P1-K1-F12.pep
HASGQRSSPAGFLSHLTSENGFSVTMGNRNYSSQGSGNGGHGVSRLKSQLSFTRQDFLSQISEVSENLVDGVSSNSNHQNPAHSFAAAGFGMDSWDNTNSIVFSAPSSKRAKNLDGDIYNCFNALETQFSLPQTTLEMATVEKLLHIPEDSVPCKIRAKR

SEQ ID NO: 106206 - protein, 152 aa, Gossypium hirsutum
  unsure (1)..(152): unsure at all Xaa locations
  Clone ID: LIB3584-044-P1-K1-F2.pep
MVNLVAAQKPLMNGLMKMAXVQPYSVEIEPGTVMNFWVPCETVKKPGKGEKKVTHLEKPTKPVVVLVHGFAAEGIVTWQFQVGALTKKYSVYVPDLLFFGGSITDKPDRSPTFHAEYLVQGLRKLGVEKCVVVGFSYGGMVAFKMAQMYPHM

SEQ ID NO: 106207 - protein, 99 aa, Gossypium hirsutum
  unsure (1)..(99): unsure at all Xaa locations
  Clone ID: LIB3584-044-P1-K1-F7.pep
LLKSAIVQVDAAVCKQWYLQHCGVDIGRKSSSXKKEGEEGESGTEEAKKSNHVMRKPEKQQLYRGXLLACISSRPGQCGHADGYVMSRNSFFIHKISLN

SEQ ID NO: 106208 - protein, 150 aa, Gossypium hirsutum
  unsure (1)..(150): unsure at all Xaa locations
  Clone ID: LIB3584-044-P1-K1-F9.pep
RPRVRPQRAATRPSSQTRTTTVVVKVYGPTCASAMREIXCLIEKEIESYTAPVDSLKGEHKDPEFIKLQTVGTDSVTHDGDYDSYEYRAIMIYYAEKYTXHGTDLLAKTRHEWGQVAKWLEADAHNLNPPIYALTVHMMIAYKMVFPADE

SEQ ID NO: 106209 - protein, 100 aa, Gossypium hirsutum
  unsure (1)..(100): unsure at all Xaa locations
  Clone ID: LIB3584-044-P1-K1-G2.pep
MRAVQYREYNGGSGDLKHVEAPXPVHKWMKICHCEAXSINPIDWKAQEGVARPSIPRNIRHIPGTDAAGEIGHVGSGVQSFKVGDTVDDVLGNGGALAEY

SEQ ID NO: 106210 - protein, 190 aa, Gossypium hirsutum
  unsure (1)..(190): unsure at all Xaa locations
  Clone ID: LIB3584-044-P1-K1-G3.pep
PRVRQPILIQHGVLVDGMTWLLNSPQQNLPMILADNGFDVWIANTRGTRFCRKHVSLDSAQAEFWNWSWDELVSFDLPAVFDFVFNQTQQKIHYIGHSLGTLIGLASFSEGHQADTLKSAAFLSPIAYLSHMNTALGMVAAKAFVGEITTWFGVAEFNPKGQKXHQLFLKRXCNYPGVDCYDLLTAITGK

SEQ ID NO: 106211 - protein, 161 aa, Gossypium hirsutum
  Clone ID: LIB3584-044-P1-K1-G6.pep
NAVPPNIAPYLNIEPSTGNYYPTIFFNEFWLLRDKLIAINESVTELPLNLEVGPISMMKWQLFLQIDQSFQIHRSYGSMLEGEADELKRVFLEGNPYLLVITMVVSLLHSVFDFLAFKNDIQFWNKNKSMEGLSAKSVVVSFLCQLVGFLYLLDNDTSWMI

SEQ ID NO: 106212 - protein, 90 aa, Gossypium hirsutum
  Clone ID: LIB3584-044-P1-K1-H12.pep
LLRKCLLLYCSFLYSCTLQLDSLVGFFHLTLHQLRLFMIVLCFQLKGQHIYVKCCIVGQRPVQDWIRRYIIYIYSHRCPFFRQIKTVDMF

SEQ ID NO: 106213 - protein, 161 aa, Gossypium hirsutum
  Clone ID: LIB3584-044-P1-K1-H3.pep
SHFEASELTNKSPSLDDIADTVANDFLKMLEIEHDPFSFNSDSALESPRERLLREFENEALASGDFILDIGTAGEEEEFDSTIPGLCCGDSSEDFTFLSVVLPSKEQKMESLSLKDRKTVEMVEDLETEALMHEWSLDETLFQSSHVQSDGFGSSIVLSPG

SEQ ID NO: 106214 - protein, 43 aa, Gossypium hirsutum
  Clone ID: LIB3584-044-P1-K1-H6.pep
NKVLITSWDGMSHRIYIIYQIRCKYEYLKEFENYLYLNIIEPV

SEQ ID NO: 106215 - protein, 116 aa, Gossypium hirsutum
  unsure (1)..(116): unsure at all Xaa locations
  Clone ID: LIB3584-061-P1-K1-A4.pep
MRQNQQADTSDLWMQNPREVPSLQSAAYYNMPQTPHGYMPSHTGHGSFNAAATQSTHMQFLGLDHPPXPAAMANPHHLNPAMGANGGFGGAPTTSGAQVGAYQQAXLGHLNWTTNF

SEQ ID NO: 106216 - protein, 141 aa, Gossypium hirsutum
  Clone ID: LIB3584-061-P1-K1-B10.pep
MAFPAKKFITSSFFGFTLLVALVAFLLKFNSSQKLFTVEELALYNGTGDSLPILLGILGSVFDVTKGKSHYGAGGGYNHFAGRDASRAFVSGNFTGDGLTDSLRGLSSTEVHSVVGWRDFYFRSYKFVGRLVGRYYDSQGN

SEQ ID NO: 106217 - protein, 90 aa, Gossypium hirsutum
  unsure (1)..(90): unsure at all Xaa locations
  Clone ID: LIB3584-061-P1-K1-B11.pep
HASAFYLDLLKNKGTDIASSNKQIQILDCYSDPLGWKDQLAGSRNFTALSNEVLVSSTAIVFREVKHMDKLYNSIIEXGKRLVGRGKNPV

SEQ ID NO: 106218 - protein, 57 aa, Gossypium hirsutum
  Clone ID: LIB3584-061-P1-K1-C11.pep
TFPLFSSLIGIIAPIYVFKCLRSVLYGYLKGKKGPWQLLDHKRTFHPEPSIFLAGSI

SEQ ID NO: 106219 - protein, 53 aa, Gossypium hirsutum
  Clone ID: LIB3584-061-P1-K1-C6.pep
TWVPLNRPPLFSLFVFFFLFACFFFLVSPFSFFFFFFFFFFFFFFFFFFFFFF

SEQ ID NO: 106220 - protein, 95 aa, Gossypium hirsutum
  Clone ID: LIB3584-061-P1-K1-C7.pep
GTFGYVAPEYANTGLLNEKSDVYSFGVVLLEAITGRDPVDYGRPAHEVNLVDWLKMMVGSRRSEEVVDPNIEVRPSTRALKRALLTALRCVDPDS

SEQ ID NO: 106221 - protein, 178 aa, Gossypium hirsutum
  unsure (1)..(178): unsure at all Xaa locations
  Clone ID: LIB3584-061-P1-K1-D5.pep
ADSQIVRCLSCKTVSSFLKNFDDKSIYAIKLIIDCDIYPLLLDCRVNGDEQVATAAIDAIKNLAQFPEAMGIIFPSNFNEATHLXNVASRCSSLGRVRVLSLIVKLFSISSSIASVIYNSNLLSLLETEIKNSNDTLVTLSALELLYELTEVQHGAQFLARTTFQLLHSIISNSSMES

SEQ ID NO: 106222 - protein, 77 aa, Gossypium hirsutum
  Clone ID: LIB3584-061-P1-K1-E2.pep
ISCRYIDKWKLFCPSYCIILVIASSASSLISFYGSELAVQSKILNLHCLKAASRLLFFLGGGGVKCMYCERKENACL

SEQ ID NO: 106223 - protein, 132 aa, Gossypium hirsutum
  unsure (1)..(132): unsure at all Xaa locations
  Clone ID: LIB3584-061-P1-K1-E4.pep
GCDSKGKSVDNQCSPAELRVADSLEGIEKEYVLVNSRSASMETFSYYLETSLQDYSTLKCQAKKSDQEPAVSLEKETAESSVASAKSPQFQGSDLQTSSESAMLREVQRLNILHPSTRLQLLHQYALAXAEI

SEQ ID NO: 106224 - protein, 52 aa, Gossypium hirsutum
  unsure (1)..(52): unsure at all Xaa locations
  Clone ID: LIB3584-061-P1-K1-E5.pep
DSRVIDAXDKSQFRSISLTYPAQHLHAHNASPHTVCMNVNETGSRQVHSYHK

SEQ ID NO: 106225 - protein, 95 aa, Gossypium hirsutum
  Clone ID: LIB3584-061-P1-K1-E9.pep
HASVCFVIAICSFLLYRHRLQNYKKLLENKSSVLTEQFTLRSFTFDELDEATHGFQDELGKGSFGTVYKGILPGDGKSKTIAVKRLEKSNEGETD

SEQ ID NO: 106226 - protein, 56 aa, Gossypium hirsutum
  Clone ID: LIB3584-061-P1-K1-G10.pep
VQIIVIMKLVLMNFVDLEGLLVSYSMCRVLTTTTDSPTICSSFYLSFLQIKNLQQL

SEQ ID NO: 106227 - protein, 106 aa, Gossypium hirsutum
  Clone ID: LIB3584-061-P1-K1-G5.pep
PTRPSTRSEKELVVSKEEPPEEDAESDEDEGDENSKTARRIKPHRMSDIIPSRVEDERETCDHRDDKRLLCRFDIYMGGVPITANREHGRNRIQGNLRRWLETDYA

SEQ ID NO: 106228 - protein, 106 aa, Gossypium hirsutum
  Clone ID: LIB3584-061-P1-K1-G9.pep
DAWGFKLGNIEEAIKTFKKVGTKPGSKPFAMDVAGYNNIITRFCEHGMLSEAEKFFQELCGKSLTPDVPMYRTMIDAYLKAGRVDDALRSFTKMVETGLRVVASFG

SEQ ID NO: 106229 - protein, 123 aa, Gossypium hirsutum
  unsure (1)..(123): unsure at all Xaa locations
  Clone ID: LIB3584-061-P1-K1-H4.pep
RRIHPHVRLHVEIAGKLDRIITEHELTERRQLEQDLHFDDAGMKEVSNSLTTNAAVYDENKLPVMTILADIYPEKFEDAKGLXLMNLADLSTDDANAVNTMSVLAPLSEYKKGSGSSFSLKSD

SEQ ID NO: 106230 - protein, 171 aa, Gossypium hirsutum
  Clone ID: LIB3585-040-P1-K1-A2.pep
DGRVRPRVRWTAILLFLLAILGACSIINSVTRLAGELFGLLIAMLFMQEAIKGLVDEFRIPERENPKLLEFQPSWRFANGMFALVLSFGLLFTALRSRKARSWRYGSGSLRGFIADYGVPLMILVWTAVSYIPARSTPKGIPRRLFSPNPWSPGAYENWTVMKDMLKVPVL

SEQ ID NO: 106231 - protein, 71 aa, Gossypium hirsutum
  Clone ID: LIB3585-040-P1-K1-A3.pep
ILMLHKLFTIMLDTHLYSCQGNPPLRFYDKYLPHTQDPSHTIFLSCLTLLHLCFFINNNLIYFTTIYIYNY

SEQ ID NO: 106232 - protein, 52 aa, Gossypium hirsutum
  unsure (1)..(52): unsure at all Xaa locations
  Clone ID: LIB3585-040-P1-K1-A6.pep
TQRAARVQFEERPVAHGCTHSNAYSMSSAFSMSNILXIPNKFQMPIARLFII

SEQ ID NO: 106233 - protein, 124 aa, Gossypium hirsutum
  unsure (1)..(124): unsure at all Xaa locations
  Clone ID: LIB3585-040-P1-K1-B12.pep
MNRGASAGAIGVKKGASFTIDCTKPXDDNIMDIASLENFLQERINVGAKANALGDSHTVTXDKTHITVTSDSNFSKHALKYFTNKYLKKHNVRHRLRLIASNKDHNHYELLYFNIAENEGEEEE

SEQ ID NO: 106234 - protein, 79 aa, Gossypium hirsutum
  unsure (1)..(79): unsure at all Xaa locations
  Clone ID: LIB3585-040-P1-K1-B3.pep
MPPPFLHKLILYTTLQHDKLRIHYNFINKFNDXLSVTTTLTVPDHHVXLIGITKSNNKFCFHKDXQEFIKPYHIHLNYL

SEQ ID NO: 106235 - protein, 155 aa, Gossypium hirsutum
  Clone ID: LIB3585-040-P1-K1-B4.pep
MSCSSSFKKSSCRRGLSRSLRTKSASSGTISTAASQPEFNLASAEEEEDGGESWSTMLPELLSDILERVQASEDQWPSRQNVFTSACVCNKWREVAREIANASPASGKITFPSCLKQPGPRNLPNQCIITRNIKNSTFYLYLALSPSFTDKGKFL

SEQ ID NO: 106236 - protein, 128 aa, Gossypium hirsutum
  unsure (1)..(128): unsure at all Xaa locations
  Clone ID: LIB3585-040-P1-K1-B5.pep
PSSMMAKCYPLHEKIIACCVIYRXGGIPNDINAAINYINTKHTIQFVYCCPTRFKCGINYQPPTAVPGGDLSNIQRAVYIISNSTNVTQVFSRIHHKYDLMCAKRTFIHWYVSEDMEEREFSKPPEDL

SEQ ID NO: 106237 - protein, 161 aa, Gossypium hirsutum
  Clone ID: LIB3585-040-P1-K1-C12.pep
MGLLKICGLWVHGVLRLAGISPKKIEIQPGTVVNFWVPTQTTTKPAVVFLHGFAFDGILTWQFHALALAKHYSVYVPDFVFFGDSITDKSERSVEFQAECIAKGLKKLGVQKCTLVGFSYGGMVGFKMAEIYPELVHSMVVTCSTMALTESISKARLHRLG

SEQ ID NO: 106238 - protein, 171 aa, Gossypium hirsutum
  unsure (1)..(171): unsure at all Xaa locations
  Clone ID: LIB3585-040-P1-K1-C6.pep
ARVRWSLLTEIEKRKQAEXALNKMQSRWWXIGQECGNMTLSLPVDPLVVTEDELVNPAEELLQQMGIARLVSLSMGRGIAXAELETEMEAQIKSKNFEIARLLNRLHYYEAVNREMSQRNQEAVEMARRERQRKKLKQRWVWGSVATAITLVAAALAWSYLPTGKESSSAN

SEQ ID NO: 106239 - protein, 142 aa, Gossypium hirsutum
  unsure (1)..(142): unsure at all Xaa locations
  Clone ID: LIB3585-040-P1-K1-C9.pep
PNKYLIRSGRGEPKLSDNQNEQLTSASSSNAYTSSLNNANSYQTSSSCISSTPNLHLNKLNKASQVINTKLNAYVLTSSFDTLSKHKDITNSEKQNXFIQKLNLCRILSDFTDPTKNLKXNDIKRQTLLQLLDHVSSTNGKF

SEQ ID NO: 106240 - protein, 123 aa, Gossypium hirsutum
  unsure (1)..(123): unsure at all Xaa locations
  Clone ID: LIB3585-040-P1-K1-D2.pep
DHTSERVGSDQLVFKRSSSFXDWKTVPNNFKIDXVTIFRRGESLDSKINSNNCGRKEDSLVATATDLIHSRSIYGFQTDHICVYQVSCYHKILRILSISSRCLSETDFSSFAFFLEEQSCSYR

SEQ ID NO: 106241 - protein, 157 aa, Gossypium hirsutum
  unsure (1)..(157): unsure at all Xaa locations
  Clone ID: LIB3585-040-P1-K1-D4.pep
REPTKIDEVRTETYRQLFHPEQLISGKXDTGDNLPRAHYTIRKQIVDLCSDRIPKLADNCTVLQSFSTINTIGGNTDTGLASLLLERLSVDYGKTSNLDFTDYTSPEGSTSFVEPYNSMLTTHSLLEHTDAAVLLNNKSIYHICKHSLHIEPPTYTN

SEQ ID NO: 106242 - protein, 75 aa, Gossypium hirsutum
  Clone ID: LIB3585-040-P1-K1-D8.pep
VKLDYLKGQALYLSTSCTPFYVLFYFFCIILVCYYFYGFFFQQFNFRKITYIAKECFNLKKRYTIKIRKKTKQKQ

SEQ ID NO: 106243 - protein, 167 aa, Gossypium hirsutum
  unsure (1)..(167): unsure at all Xaa locations
  Clone ID: LIB3585-040-P1-K1-E1.pep
QQQSKPKPNGSTQSTAAGERLPFYCCAXXXTTSPENRHRSIFDLPVNFFDSCRLLCPSLTSVFEPLSISENYSSENPHSTDDREEKSTKTGVFFPRWTCNTCKAEFDSLQDQRSHFKSDIHRFNVKLSIAGKDIVKEEDFDELTTDSFKDYDVSSISRSEDETYKGS

SEQ ID NO: 106244 - protein, 118 aa, Gossypium hirsutum
  unsure (1)..(118): unsure at all Xaa locations
  Clone ID: LIB3585-040-P1-K1-E5.pep
GDVYSFGVELLEMSSGRTAITRVKGALXHKRAECTKPYLANKRKIFXVLYNRLQRQYSMEAAFKAATLALQYLSAEAKFTPRMNYFLTALEHLQDSGECGNNPNNIMQQTPNTHAKYW

SEQ ID NO: 106245 - protein, 144 aa, Gossypium hirsutum
  Clone ID: LIB3585-040-P1-K1-H10.pep
MKNNGSKTKLILLHPYIQKQGSSNKLWLLAFISFFTIAFLLTLVYTRESTTGKPTAVGIIAETGGGVGDAAPLPTTVVNTLLHYASKSNDSFHMSYSELKPISDVLRKSSSPCNFLVFGLTPKTLLWKSLNHNGRTVFIEENRY

SEQ ID NO: 106246 - protein, 171 aa, Gossypium hirsutum
  unsure (1)..(171): unsure at all Xaa locations
  Clone ID: LIB3585-040-P1-K1-H11.pep
NTRPHDSCPLTVYTATSINXEGIIWLGAQGNNGFIAADIERSSLILCGKAFADINGTKLALTALSEPVIFARGGLPLSARFLVSCDSVVLLFAPENAIQSYSDLLVSADASVVLSPQGVAPLFQTKKLGGINPYRIPSAVILATSDSSGTIPYISKLSPGQAAYHFLAGYQ

SEQ ID NO: 106247 - protein, 172 aa, Gossypium hirsutum
  Clone ID: LIB3585-040-P1-K1-H2.pep
SGIQNTAEKSRPPSPGSSDRLPSSARNRTALSPLIQSKDKSIGTSLGSQQFQASTDDSEPSKDVRQTSIGKSLPADNYFKPGLLSDRGSSTFGNGFLPKHIPYLSGSDTYLGNTYKENQKYRVSTWLASLPFSSSSSACSVDAQKMMKPDREHHTSCPSSLLRGFSSLSSFA

SEQ ID NO: 106248 - protein, 170 aa, Gossypium hirsutum
  unsure (1)..(170): unsure at all Xaa locations
  Clone ID: LIB3585-040-P1-K1-H3.pep
RNDISFLCMARLLLGFGVGIISCALAVYIAEIAPANLRANLCSVNQLSDTTGTMVAYLLGLFVERTILTILXILTCTILIPSLSFITQSTRLLTKMGMTQYPKPSLQALRDFYTYISIAFNEIKTSVASTNIITTIHFAELTKTIYCFPLICGIGLLILQQLIGINGVIF

SEQ ID NO: 106249 - protein, 157 aa, Gossypium hirsutum
  unsure (1)..(157): unsure at all Xaa locations
  Clone ID: LIB3585-040-P1-K1-H9.pep
TTRPEDNRDNSIPFELYKIAHGVXFTRECFLXVGSHALYQYKYFDPIKMTYLILTCIISQMNASITCLFSTTSTCNKSTLSSLLTTKLXGITTVISTDSIRHMMRCFVYINXNSLLWSSTYHSGEYLHPLAFSQAKAKNKAKYFSCSAQSFSNGERA

SEQ ID NO: 106250 - protein, 86 aa, Gossypium hirsutum
  unsure (1)..(86): unsure at all Xaa locations
  Clone ID: LIB3585-061-P1-K1-A11.pep
MAGKPYILLLLIFLPLAYFIHFIIPWITNYRDSNSDAGELIFVGIERLEPSHGQSNLITLSEXSRDGRVIIYSIMDAWDVPYPNAY

SEQ ID NO: 106251 - protein, 81 aa, Gossypium hirsutum
  Clone ID: LIB3585-061-P1-K1-A12.pep
PTRSNTRLVTTSDMTDASYEERKKALAFFNHSCLSCKPKYILRTPATGERTHACINQAYALSWANELSYTIRTTPISLANN

SEQ ID NO: 106252 - protein, 135 aa, Gossypium hirsutum
  unsure (1)..(135): unsure at all Xaa locations
  Clone ID: LIB3585-061-P1-K1-B7.pep
YTLSYQPSFHQDQKNRVRVLFNGAAGQIQNSIEPMIAKRVILTAYHPVIHYMLDIPPNADAXNGGKMELMDSASTILKGVVATTENFEACTVSNVPVTDRKLPRKEIMERKDVMSNNVYIHTXSAFDMEQHAAPN

SEQ ID NO: 106253 - protein, 77 aa, Gossypium hirsutum
  Clone ID: LIB3585-061-P1-K1-B9.pep
KVSSSSRVDRQNNRREQLVTPRPSIPLQAEVVADPLYVMLEAKIISCMLHLKLFRLSCRADPPLYHSHKNPPSFLRP

SEQ ID NO: 106254 - protein, 143 aa, Gossypium hirsutum
  Clone ID: LIB3585-061-P1-K1-C10.pep
MDDIADDARYPTNPFGVSHQQGYGSSNRQKLPLRNIPSSRPIRNQYVDDDEDGEDELEDLGEEEETLNRSNGVRYVRKGMDDDNEDDDDEDEDDDLLDDDDDDEDDYNERGDDRKNVVANLGRHPKKRKLKSLVSSYEFAPRV

SEQ ID NO: 106255 - protein, 94 aa, Gossypium hirsutum
  unsure (1)..(94): unsure at all Xaa locations
  Clone ID: LIB3585-061-P1-K1-C9.pep
YEWLTLEERHAPKRENMCMCLYRSQQYXSFLMHGNSNIVCLRYTHLXYLIGIIFKEISLAILDFIHILLVSMDRPFGKAGQLDIMSHPDIAHSM

SEQ ID NO: 106256 - protein, 53 aa, Gossypium hirsutum
  unsure (1)..(53): unsure at all Xaa locations
  Clone ID: LIB3585-061-P1-K1-D10.pep
NGDKTFQIKEFCGXNPMCXPVLKYKFVKICQQSGIIXSDIIDLSIIDCCFHLR

SEQ ID NO: 106257 - protein, 80 aa, Gossypium hirsutum
  Clone ID: LIB3585-061-P1-K1-E10.pep
ENFQTRNVKYNKQVWQEALDDRNIFLNFGIHICQNFKNYYFIGIVIIILIIITKSEEEKKINKNVCSGEFLSWLRGNESD

SEQ ID NO: 106258 - protein, 187 aa, Gossypium hirsutum
  Clone ID: LIB3585-061-P1-K1-E2.pep
TPIVIQTNMTILQALAMDRHLGPNFKIPAGSITVVVLISSAIFIALFDQFLYSTWQSLTGRSLTPLQRIGAGHVFNILSMAISALVESKRLNVAHDNHLQDQQGGAAAVVPMLALWLFPQLIVVGMGEAFHFPGNVSLYYQEFPVSMKSTATSMISVVIGVAFYVSTAVVDLIRNVTGWFADDINDG

SEQ ID NO: 106259 - protein, 90 aa, Gossypium hirsutum
  Clone ID: LIB3585-061-P1-K1-E6.pep
APLTVPFSLVAIVGRFMQRFNQLDHQNEATALAESMPESNPPRVVNGTPAINPNIAFKPNAAHMTTQLTLGGKLALSSKLVSPLVTPPAN

SEQ ID NO: 106260 - protein, 70 aa, Gossypium hirsutum
  Clone ID: LIB3585-061-P1-K1-F10.pep
FAMHHHHSSQCPNFISQLCLLEKSFCTERVQSKSIRALAFPFCRIMASIVEYTASLAQVPKDSNDCVLEH

SEQ ID NO: 106261 - protein, 135 aa, Gossypium hirsutum
  Clone ID: LIB3585-061-P1-K1-F2.pep
SIYISSSEMPPEKVMQTAVVGTNGSLTYRLNLDGFPGFGWAFTYFAEIEDLAPDESRKFRLVLPGQPDLSKAVVNIQENAQGKYRVYEPGYPNISLPFVLSFRFGKTSDSSKGPLLNAIEINRYLEKNDGSVDGK

SEQ ID NO: 106262 - protein, 85 aa, Gossypium hirsutum
  Clone ID: LIB3585-061-P1-K1-F4.pep
KSKVNRSKSNKLHAVQFSEFSFSNSLLQTNRKNERKRSSTRKDQREGKGSSVIVEVKLKSELWIIAEEEEEEEEASTRKGEIYEN

SEQ ID NO: 106263 - protein, 145 aa, Gossypium hirsutum
  unsure (1)..(145): unsure at all Xaa locations
  Clone ID: LIB3585-061-P1-K1-F5.pep
MLSQDGLSIPSTVKGLAQAQQPNPNPNPNPVKKKRNFPGTPDPDAEVIALSPKSLMATNRFLCEICNKGFQRDQNLQLHRRGHNLPWKLKQRTNKEVRKKVYICPEKTCVHHDPSRALGDLTGIKKHFSPKHGEKKWKCEKCXKK

SEQ ID NO: 106264 - protein, 68 aa, Gossypium hirsutum
  unsure (1)..(68): unsure at all Xaa locations
  Clone ID: LIB3585-061-P1-K1-F8.pep
MERIISGKFKLGRKISRGSFGEIXLATHIDTFEIVAVKIENSRTKHPQLLYEAKLYNILQGGSGDSSI

SEQ ID NO: 106265 - protein, 169 aa, Gossypium hirsutum
  Clone ID: LIB3585-061-P1-K1-G10.pep
AFQVCGYHIDSVLADSSQISSVSKLQSKPMAASGSRVVIGGYLVDTSKLKHEHLSSSKSSTNIFYSNKSLNSCIQARMSLKNPEKPNNSPIYGYFMYSVGKRWCNFDSLLGSGSSAFHSSLHCLSAGTLPDVSFDNSRSEEQGNNSSVSSEEKDSAGKTLKLLSGSWYL

SEQ ID NO: 106266 - protein, 55 aa, Gossypium hirsutum
  Clone ID: LIB3585-061-P1-K1-G8.pep
PELVEGSKIHGTNGSATAITREDDLDCHQFLHLLRLSSDGQEINRGRTEWRKKPT

SEQ ID NO: 106267 - protein, 172 aa, Gossypium hirsutum
  Clone ID: LIB3585-061-P1-K1-H2.pep
PRVRKMCGLDQATSLCLIFEIVKKEIPDATLQSSNNQFYFQFLTYYQHSTAEMRLRVTSLSRRWVAGPGSIQDLIAGFDQEAAAVVMARLVSFKMEIEAEFDPIRWLDKALIHMCSRFGDYQKDSPSSFSLSPRFSIFPQFLFHLRRSQFVQVFNNSPDETAYFRMILNREN

SEQ ID NO: 106268 - protein, 66 aa, Gossypium hirsutum
  unsure (1)..(66): unsure at all Xaa locations
  Clone ID: LIB3493-034-P1-M1-A11.pep
XFAEGXXFKKKATLXFDVXHCAYQSRXRKSIQAYVTRAGGSVVEVRLPFPVNSEEEIISEFKKSIT

SEQ ID NO: 106269 - protein, 118 aa, Gossypium hirsutum
  unsure (1)..(118): unsure at all Xaa locations
  Clone ID: LIB3493-034-P1-M1-A12.pep
LAYXXLAXQLXXFGWASFKXXXXEXMXXXXXSFKGXXMXPXXCGXEEGXXCIFVXNQXKIQWGXXPRKRQXLSXXCDWALSRXXRAKETEXXLYSLDLXXESGVLWGSYIFXRLNEKG

SEQ ID NO: 106270 - protein, 114 aa, Gossypium hirsutum
  Clone ID: LIB3493-034-P1-M1-A7.pep
KFEGEMLAACGKDPERCMKAVCALYRQQTSGEKLSKAALCQNQRGFNKIDAYRGCTLAEFLTDGDPQGDLMKSVKELEAYDRNAVELCRNLATKYSKQLFEIYKSKEDPYFLPP

SEQ ID NO: 106271 - protein, 88 aa, Gossypium hirsutum
  unsure (1)..(88): unsure at all Xaa locations
  Clone ID: LIB3493-034-P1-M1-B5.pep
VKSMSWCGENRCVGIRKEDMILNATNGALSEVFSSXKIAPPLVVALPSGELILGKENIGVFGDQNGKLLQADRICWSETPAVVVIQKP

SEQ ID NO: 106272 - protein, 108 aa, Gossypium hirsutum
  unsure (1)..(108): unsure at all Xaa locations
  Clone ID: LIB3493-034-P1-M1-B8.pep
GKRKREIKSVDFPILMMRRKCXTIGEIAVMELADVGVQTRAVATTGRVQTYLKRLNYRDKEQECKKTTSSTTSTTSYIQLRSRTFLTDRHGGEGNSILSLNFDHDDGR

SEQ ID NO: 106273 - protein, 45 aa, Gossypium hirsutum
  unsure (1)..(45): unsure at all Xaa locations
  Clone ID: LIB3493-034-P1-M1-C3.pep
SYNFDLEDLLXGSAEVLGKGXYGTAYKAVLEESTTVVVKRLKEVV

SEQ ID NO: 106274 - protein, 83 aa, Gossypium hirsutum
  Clone ID: LIB3493-034-P1-M1-C7.pep
TILLQIYLHTHLKTWDQNKSLRSLDTNKTSDFLTTTLSIQGRDDKIVWKAHHNGVFTLKNAYSCLFQGSCSITPPSISANRLS

SEQ ID NO: 106275 - protein, 98 aa, Gossypium hirsutum
  Clone ID: LIB3493-034-P1-M1-C9.pep
RALTWTVVWTLMVSIASFVPEMAFVSAVSPSSSFSRSCNSEGFVRIPLDFPREKLCLPAHTVKRSKIDFFVPTIFAALVVAASACVVRSLGLWGTETG

SEQ ID NO: 106276 - protein, 103 aa, Gossypium hirsutum
  unsure (1)..(103): unsure at all Xaa locations
  Clone ID: LIB3493-034-P1-M1-D10.pep
MTAVAMVIVIIIIKMSKQTGNPIEENRKKIWLVDSKGLIVDSRKHSLQHFMKPXAHEHEPVSKLVDAVKAIKPTVLIGTSGVXKQFTREVVEAMASINEKPLI

SEQ ID NO: 106277 - protein, 115 aa, Gossypium hirsutum
  unsure (1)..(115): unsure at all Xaa locations
  Clone ID: LIB3493-034-P1-M1-D5.pep
GRVGSFSXIPALMVYGNCXXXXLSSKQRNGYASVLFYAAWCPLSHSLYPKFDILSSMFPQIEHLAVEESSASPSIFSRYGIHSLPSILIVNQTLRVQYRGLKYLSSIITIYEKTT

SEQ ID NO: 106278 - protein, 131 aa, Gossypium hirsutum
  Clone ID: LIB3493-034-P1-M1-D9.pep
MNGLALVDMFMDSNEWVELFPTIVSIAKTIEVISPGMLGTHSGSLQLMYEELQVLSPLVPTREFYTLRYCQQIEQGLWAIVNVSYDLPQFASECRSHRLPSGCLIQDMPNGYSKVTWLEHFNIEYQTPLLR

SEQ ID NO: 106279 - protein, 66 aa, Gossypium hirsutum
  Clone ID: LIB3493-034-P1-M1-E1.pep
NLACKAEGIPSIGPHCHGRGYSLRMSILPHFAMETNSPIKNDYPPPLKGGKNVLRAILGFHVLGTH

SEQ ID NO: 106280 - protein, 42 aa, Gossypium hirsutum
  Clone ID: LIB3493-034-P1-M1-E4.pep
QLSSSDQHQLENLGFITRGLRLSKLSNSSSVWNQLKHWGLCP

SEQ ID NO: 106281 - protein, 67 aa, Gossypium hirsutum
  Clone ID: LIB3493-034-P1-M1-E9.pep
HVTRPSVNATMRMHHHASVNLPALCSNRSRFVIGIGIIIKGNILGIVLHLYLLQLKVLSPLSTDPFV

SEQ ID NO: 106282 - protein, 120 aa, Gossypium hirsutum
  unsure (1)..(120): unsure at all Xaa locations
  Clone ID: LIB3493-034-P1-M1-F11.pep
MVFLKIAIICYLQKKIFKSQGLWCALKMLVSWIRTKISAEKRHENDDPNLQVFSFYSIKAATNNFSXKLGEGGYGPVYKGKLPNGQEIAVKRLSKSSNQGFEEFKNEVTLTARLQHVNLV

SEQ ID NO: 106283 - protein, 132 aa, Gossypium hirsutum
  unsure (1)..(132): unsure at all Xaa locations
  Clone ID: LIB3493-034-P1-M1-F3.pep
YFSAKIADFGRAGLKSEEIKLEIAEDHGSIAETESVATGFEDYGSIAENSEGGTVAVSPPAVATSPEIMEKGSVSVSEGNFDRASVENGKELVNGGGKQSGGSSSDWWWKQDMGAMGESGKVXDYVMEWIGS

SEQ ID NO: 106284 - protein, 129 aa, Gossypium hirsutum
  Clone ID: LIB3493-034-P1-M1-F4.pep
MAMMTCSRIFLCYSTPRSQFPTVISSPSHFLTPKKATYKSTKHITLNANGGNSRFMARVSSSSAAEFPTNIGDMLSEVTIFTASGQPVLFKDLWDQTEGVAVVAFLRHFGCYCCWELASALKEAKPKFD

SEQ ID NO: 106285 - protein, 152 aa, Gossypium hirsutum
  Clone ID: LIB3493-034-P1-M1-F7.pep
LIAGLANMRARNYSIPEVDKLKAKFIAGRIIPAIATSTAMATGLVCLELYKVLDGAHKVEDYRNTFANLALPLFSMAEPVPPKVMKHRDMSWTVWDRWILKDNPTLRELIQWLKDKGLNAYSISYGSCLLFNSMFPRHKERLDKKVVDVARE

SEQ ID NO: 106286 - protein, 103 aa, Gossypium hirsutum
  Clone ID: LIB3493-034-P1-M1-G5.pep
TQPKRGGVHLPARRSASNSDPSILTKITSSAIVSRGKQAACDAAFVSKKLLRSTGKAAWIAGTTFLILFVPLIIEMDREQQFNELEIQQASLLGAPPTGPPHK

SEQ ID NO: 106287 - protein, 40 aa, Gossypium hirsutum
  unsure (1)..(40): unsure at all Xaa locations
  Clone ID: LIB3493-034-P1-M1-G9.pep
ENPSFTFLCFVKHQIGEMDLSXISPXISFSLYQKIKFTSL

SEQ ID NO: 106288 - protein, 139 aa, Gossypium hirsutum
  unsure (1)..(139): unsure at all Xaa locations
  Clone ID: LIB3493-034-P1-M1-H4.pep
VFVYTITAWWVMGEIPNLCDTSLLPHDSPWTCPMDRVFFDASVIWGLVGPRRIFGTEGEYGNVNWFFLGGALAPFLVWLAHKAFPDKEWIRLMHMPVLLSATSMMPPASAVNFTSWLLVGLLSGFGVFNXRPKWWKRYN

SEQ ID NO: 106289 - protein, 128 aa, Gossypium hirsutum
  unsure (1)..(128): unsure at all Xaa locations
  Clone ID: LIB3493-034-P1-M1-H8.pep
QSLDKWLQWNERSFPRGVLDWPTRLKIAIGAAQGLCYMHHECPTPIIHRDVKSSNILLDKEFKAKIADFGLAKMLIRXXFYTMSTVAGXFXYXGXKYXYTXKVNTKVDVYXFGVVLLELVIGKRSLWV

SEQ ID NO: 106290 - protein, 74 aa, Gossypium hirsutum
  unsure (1)..(74): unsure at all Xaa locations
  Clone ID: LIB3493-034-P1-M1-H9.pep
REVIDDRNLPAALQRRFRRGLGNPYPKSINENKTYPPRSCQRRCQPAHXVCWTHPEEEGSLLIQMMQIMNQNTP

SEQ ID NO: 106291 - protein, 158 aa, Gossypium hirsutum
  Clone ID: LIB3493-035-P1-M1-A1.pep
DNCVILGAASVTKNVNLQVAECGNDGFCPNNNIANGLNVGNGDDNGSIPESFYTNGGLKLRVVWTISSLIAASARHYLLQPIIAEHKTLDSLVLTDSDGQGVLCMNRDQLEELRVKPLSASSASKRTLVPALNMRLWYAPQLELPDGVVLKGATLVAI

SEQ ID NO: 106292 - protein, 78 aa, Gossypium hirsutum
  unsure (1)..(78): unsure at all Xaa locations
  Clone ID: LIB3493-035-P1-M1-A10.pep
QTRGTRGQKEEGRKTERRNRDEFRKLVEGHVAAATLTAKTHWRDYCMMVKDSPPFLAVASNTSGPTPKDLFXXVSEEL

SEQ ID NO: 106293 - protein, 144 aa, Gossypium hirsutum
  unsure (1)..(144): unsure at all Xaa locations
  Clone ID: LIB3493-035-P1-M1-A3.pep
RDAKLYNVTLSPVGGAERVIAVNGATPGPAVNVTPHHNENIKAHNQLDENLLMTXPGMQMQRNSWQDGALGTNCAIDPKKNFTYRFQVKDQIGSFCYFPSLNIQRASGGFGPIIINNRNIIAIPFAHPDADIVLLVGDWYTKNH

SEQ ID NO: 106294 - protein, 80 aa, Gossypium hirsutum
  unsure (1)..(80): unsure at all Xaa locations
  Clone ID: LIB3493-035-P1-M1-A6.pep
NEKAMKILRVSLFFFIFLAPFAFVTVQAFTGTYGINYGRIANNLPSPDEVVTLLKAAKIRNVRIYDAXQSVLKEFSGTGL

SEQ ID NO: 106295 - protein, 47 aa, Gossypium hirsutum
  Clone ID: LIB3493-035-P1-M1-B3.pep
SIFDPHLPFHVISQYIHTYRACADNNNEALPSSSPINFPFTATPLLL

SEQ ID NO: 106296 - protein, 159 aa, Gossypium hirsutum
  Clone ID: LIB3493-035-P1-M1-B6.pep
FDNFEKTLEFCTALKDCLEHVRNNHGIIESALKCYDEEDKLEVRTVEENSVKALGELRKFKEAEEPFVKQFLVLKKMAHRRYESMQGKVRARKKTLKKKLESWETWRRVTMAFFVAAFISVLVFSVAEATKSAKPVITALAGASTAAIVPLGTWCNKWW

SEQ ID NO: 106297 - protein, 75 aa, Gossypium hirsutum
  Clone ID: LIB3493-035-P1-M1-C1.pep
NHKVTKICITIHYVTSTITKQESSIIFKLLFKPKIHVKGICKDYHPYNSNPTNFLTTIEDISMIQEDLQGKNKIK

SEQ ID NO: 106298 - protein, 156 aa, Gossypium hirsutum
  unsure (1)..(156): unsure at all Xaa locations
  Clone ID: LIB3493-035-P1-M1-C10.pep
PIQNQTLSTDQDGLLAKTLADLLRFSDMTDPSIPLSALNLSHGSIIFLYYHGERTVRGGPTVSPAGSFGRKMTMDDLIAKQTRITRQESPHCDSVSFDRDSANAFQRFVSETLAFASKRGGFMYGTVTDEGRVEVDXIYEPPQQGLEDDLVLLRDP

SEQ ID NO: 106299 - protein, 151 aa, Gossypium hirsutum
  Clone ID: LIB3493-035-P1-M1-C2.pep
LKKYLTETSKVPNSVAKVVVLLICVYVNGFAWSWGPLGWLISSEVFPLETRTSGYFFAVATNMLCTFIIAQAFLSMLCHMRAYIYFFFAAWLIVMSIFVMAMLPETKGVPLDEMVEKVWKKHWFWKSFFKSSDIERPKAMVQLEHQEKPNH

SEQ ID NO: 106300 - protein, 54 aa, Gossypium hirsutum
  Clone ID: LIB3493-035-P1-M1-C5.pep
DTHNVRSVSFHPSGDFLLAGTDHPIAHLYDVNTFQCYLSANSPEIGVNGAINQV

SEQ ID NO: 106301 - protein, 40 aa, Gossypium hirsutum
  Clone ID: LIB3493-035-P1-M1-D2.pep
TLKSIKVYRDNDSHKTKLIKKVSSETNITKTKAKRNPRVR

SEQ ID NO: 106302 - protein, 61 aa, Gossypium hirsutum
  Clone ID: LIB3493-035-P1-M1-D7.pep
PALTDYAQSLAMDHDCDDCPRYPKPTSSDPPFHLRRPGFHNSTYVLTELTANLAFNIFYLL

SEQ ID NO: 106303 - protein, 156 aa, Gossypium hirsutum
  Clone ID: LIB3493-035-P1-M1-E12.pep
TLREQMFRPSLSTIIADNPKIVIVSPDDTVLTTTKKMQECRINSAVVLVENKPRGILTSKDILMRVIAQNLPPETTSVEQVMTPNPECATLDTPIVSALHTMHDGNFLHLPVLDRDGELVSIVDVIEVTHAGVATVGKNFGVNNEACSTMVQKFLG

SEQ ID NO: 106304 - protein, 68 aa, Gossypium hirsutum
  Clone ID: LIB3493-035-P1-M1-E6.pep
KEKVLMNKNKVKRLREKKEQKIFPFEAAAERKRRRISSQKFQLGSVYKKLKKRSLSEGKQEKEKEKNT

SEQ ID NO: 106305 - protein, 104 aa, Gossypium hirsutum
  Clone ID: LIB3493-035-P1-M1-E8.pep
RKGRDFNSGNRGASCNNLSALYKKLILMLRSLYVTVRLLPAYNIFRDLNSSGLIRSFKLVPRVSSFVEPLTRKEEVDMQRFWFTPVDTSCGRLCLSVLEYSIIS

SEQ ID NO: 106306 - protein, 48 aa, Gossypium hirsutum
  Clone ID: LIB3493-035-P1-M1-F12.pep
DEAKDKAFELEMSWVCDESKQQHQKVPDDLLEEAKAAARIALEEMDAD

SEQ ID NO: 106307 - protein, 121 aa, Gossypium hirsutum
  Clone ID: LIB3493-035-P1-M1-F7.pep
MRNKKGYHIIHPIPNEERFSSYYCYYLFWVAVGYYLWKKILTITGYRFHPTDFELLHYYLLNKNLGRDSLVQAIAELEDICGLEPWQLPGHSNIHSGDHVWYFFYRPKFKYQNGSRINRTT

SEQ ID NO: 106308 - protein, 76 aa, Gossypium hirsutum
  Clone ID: LIB3493-035-P1-M1-G12.pep
HEYGRLADKLGFLPADDKMFRFVLLLQHSMPTSVLSGAVANLRGYGKEAAASLFWVHIFAVFSMAGWIILYLNILF

SEQ ID NO: 106309 - protein, 79 aa, Gossypium hirsutum
  unsure (1)..(79): unsure at all Xaa locations
  Clone ID: LIB3493-035-P1-M1-G8.pep
LLKQLEKENSSELSLQHFSPANTTSEVAEAAVIALSNSTSAGEANASSCNSIETTDFXXFDTNNLFFEPSISALSTLRL

SEQ ID NO: 106310 - protein, 161 aa, Gossypium hirsutum
  Clone ID: LIB3493-036-P1-M1-B11.pep
VHIIDLNAAEPAQWVALIQALSARPEGPPHLRITGIHQQKEVLDQMAHRLIEEAEKLDIPFQFNPVVCKLENLDVDKLRVKTGEALAISSVLQLHSFLTSDDELLRKKSPLGSKNLNGIHLQRALQMNQSTLGELLEKDMVNGYSPSPDSASSSPLFSTGS

SEQ ID NO: 106311 - protein, 45 aa, Gossypium hirsutum
  Clone ID: LIB3493-036-P1-M1-B3.pep
FLIFFIYLKVSSPIILYNDISYHIVYKILISYVCASMIKHYNIME

SEQ ID NO: 106312 - protein, 132 aa, Gossypium hirsutum
  unsure (1)..(132): unsure at all Xaa locations
  Clone ID: LIB3493-036-P1-M1-B4.pep
GDPIPTNKRXDGDKIFSHPDVVAEEPWYGIEQEYTLFQKDTKWPLGWPVGGFPAPQGPYYCGVGSDKAFGRDIVDAHYKACLFAGINISGINGEVMPGQWEFQAGPVTGISSGDQVWMARYILERITEIAGA

SEQ ID NO: 106313 - protein, 87 aa, Gossypium hirsutum
  unsure (1)..(87): unsure at all Xaa locations
  Clone ID: LIB3493-036-P1-M1-C11.pep
IHDYEMELGKXLYEKLGSVANIRIYGPKPSDDVHRAALWSFNIENIHPTDIATFLDQQHGVGIRSGHHWAQPLHHHLGVNASARASL

SEQ ID NO: 106314 - protein, 37 aa, Gossypium hirsutum
  Clone ID: LIB3493-036-P1-M1-C2.pep
KVDALIITDDTLAIAVSYLLAYIIICGLIGHIITCLS

SEQ ID NO: 106315 - protein, 101 aa, Gossypium hirsutum
  unsure (1)..(101): unsure at all Xaa locations
  Clone ID: LIB3493-036-P1-M1-C3.pep
TPKPQLLFIYSTTKAPGQPPTKPPIHPPPKPPVQPPTKPPTKPSTXPPTKPPTQTPTKPPTKPSTXPPTKPPTHPPSYTSAKPPKSSQVAVQGVVYCKSCK

SEQ ID NO: 106316 - protein, 136 aa, Gossypium hirsutum
  Clone ID: LIB3493-036-P1-M1-D10.pep
MPMNRIAVGTAGEASHPTVIKAALAEFFYMLIFVFAGEGSGMAYNKLTNNGSSTPAGLVAASLSHAFALFVAVSVGASISGGHVNPAVTFGAFIGGHITLLRSFWYWIAQLLGSVVACLLLKVATGGMETLAFALF

SEQ ID NO: 106317 - protein, 131 aa, Gossypium hirsutum
  unsure (1)..(131): unsure at all Xaa locations
  Clone ID: LIB3493-036-P1-M1-D8.pep
CEAMNPTLATLSSPSLSFLPLKSLSSPSFLTFPFPKPLRLRASSANFDAIPVSKPNNNGQSLSQKLQSFAKTAVLVGATSLMIGKFSNFPAKADSLPATTEQEPAVLQENEQLKTQSPKETXTVSEVLGSN

SEQ ID NO: 106318 - protein, 57 aa, Gossypium hirsutum
  unsure (1)..(57): unsure at all Xaa locations
  Clone ID: LIB3493-036-P1-M1-E10.pep
LIMQFGVGGEGIDMDGGTXHXIKXAKIPGDATGNAGSCGEMAIYLTLGLLGKQKEMQ

SEQ ID NO: 106319 - protein, 52 aa, Gossypium hirsutum
  unsure (1)..(52): unsure at all Xaa locations
  Clone ID: LIB3493-036-P1-M1-E3.pep
AKVFAQHGXKGLIADIQEDLXHXVXXDIXPSNCSLQHSNVTDEDQFKNAVNK

SEQ ID NO: 106320 - protein, 115 aa, Gossypium hirsutum
  Clone ID: LIB3493-036-P1-M1-F1.pep
FIALSLWCFWFHRNKLVHEGIKLSMPQLLGFIRGYERDLWLVRENLCVSTAFMRNEVWRPPDYGFIKINFDASYIPGNNCDNSNLSQKSQRGSYRSSYLSGGRCGQCIRGGSTSL

SEQ ID NO: 106321 - protein, 150 aa, Gossypium hirsutum
  Clone ID: LIB3493-036-P1-M1-F2.pep
FSLTVSFATFFSQFTSAGNPSIFHRVPPPPNASFAGSASMASCCTAKFRFSISSCRAARSPRPFPGSLIHSFPLFHSPFARPMKPTNLRSVSASTEVSAGAASSTPTFSWNDVVRVSQPEFNPNDSSNLRGFFDKIKACNRGAELQSEFL

SEQ ID NO: 106322 - protein, 72 aa, Gossypium hirsutum
  Clone ID: LIB3493-036-P1-M1-F3.pep
YRSRHFKVLHRCVSSYVPMFGETEYDPVRQFSSGPIEGELDALGKAVDAGKIKYIGLSNETPYGVMKFLYFV

SEQ ID NO: 106323 - protein, 39 aa, Gossypium hirsutum
  unsure (1)..(39): unsure at all Xaa locations
  Clone ID: LIB3493-036-P1-M1-F6.pep
NEYFAMRSDKTLVINLRLWRTPGTXSRSRQEYSPSVFSL

SEQ ID NO: 106324 - protein, 145 aa, Gossypium hirsutum
  unsure (1)..(145): unsure at all Xaa locations
  Clone ID: LIB3493-036-P1-M1-G2.pep
SNAKWNRRSRGWTPSDKEPLNNVREIHQKALDDLVNVNSLFTLAVFVGLSMARQGERSLENRTECDADVGNARRLVVNEVVSFACFLLSSLVAKALKIHVTICQEEDFKDTRNQIVRFSMLMLSVGXSVFGCIFLTVSMVDVIQI

SEQ ID NO: 106325 - protein, 103 aa, Gossypium hirsutum
  Clone ID: LIB3493-036-P1-M1-H10.pep
VFPTYKPKDIGQDIKQEFGIQLNYFQAWRGKEIAREQLQGSYKDAYSQLPLFCERIMETNPGSCATFSTKEDSSFHRLFIGFHASLSGFLQGCRPLLFLIAYP

SEQ ID NO: 106326 - protein, 69 aa, Gossypium hirsutum
  Clone ID: LIB3493-036-P1-M1-H11.pep
ERVRNTNQGSTYLSECHPRPSHGLHWERGHQTGTASISRALQITVRHSTLLRLMQRLTSYQMLMQIKKV

SEQ ID NO: 106327 - protein, 116 aa, Gossypium hirsutum
  Clone ID: LIB3493-036-P1-M1-H2.pep
NIKYLTSSKLMGLELKDPSFRRHILLQCLILFDYLKAPGKNDKDSSESMKEEINSCEDRVKKLLEVTPPKGKDFLHSIEHILDREKNWVWWKRDGCQPFEKQPIEKKTVHDGTKKR

SEQ ID NO: 106328 - protein, 66 aa, Gossypium hirsutum
  unsure (1)..(66): unsure at all Xaa locations
  Clone ID: LIB3493-036-P1-M1-H7.pep
GQALRAPEIMSNNKAKPMALKEKIPIESPFLCPFCFLGVYMYKLNENLVLILRXEPIPHMNPSQRE

SEQ ID NO: 106329 - protein, 115 aa, Gossypium hirsutum
  Clone ID: LIB3493-036-P1-M1-H8.pep
MEENPQQRSHLKRQFFEDQHSNKPPAQKRVRFPKGKKVKPGEEAPNRVDIEDGSGDLKDPRLAAKERAKRRSQITTELFAEDGRGMLNDVSAAEISYEDNENFRDDGVQIEPFNL

SEQ ID NO: 106330 - protein, 128 aa, Gossypium hirsutum
  Clone ID: LIB3493-037-P1-M1-A12.pep
MSFLAGRLAGKEGAFFFQESKQAVNRLVEKTPKNLPSNPPSLGQQTQADVLPEVLKHSLPSKIFRQPSDASSLSRSSKWALHPHPTNASSSSPDALNPLRAYVSLPQVTFGPKRWEFPTTEHSTMAST

SEQ ID NO: 106331 - protein, 93 aa, Gossypium hirsutum
  Clone ID: LIB3493-037-P1-M1-B11.pep
WHLKTQHRFHQEKEDRKIYRLKKAKVHDNRQEQGSSGSRTLTWYRSGTFIRVWVVVLYKGTVVANGTRGVTTGWGYRYVKGPGCIGSIRKAYW

SEQ ID NO: 106332 - protein, 144 aa, Gossypium hirsutum
  Clone ID: LIB3493-037-P1-M1-B6.pep
SELDINEDEALAINFVGTLHSITAVDNRRDLVISNFRRLQPRIITVIEEEADLDVGVDGFEFVKGFHECLRWFRVYFEALDDCFERTSNVRLMLEQAAGRAIIDLVACSPSMSIEMREPATRWSWRVKAGGFNPGVLSDEVCDD

SEQ ID NO: 106333 - protein, 156 aa, Gossypium hirsutum
  unsure (1)..(156): unsure at all Xaa locations
  Clone ID: LIB3493-037-P1-M1-B7.pep
DAWVAVGGLPEKILTAYQSVLEDNPSEDTVLNKCNAAVQNLSKLEENAESXLAQGNQNGSALLDELQXXENALRQCVEQLESIETTRAALIFQLKEALQEQESKLELICSQLQVARGQIEQGSNLRKRLTLPSVHGHVTTTSIPTGEAVAVSERNL

SEQ ID NO: 106334 - protein, 70 aa, Gossypium hirsutum
  unsure (1)..(70): unsure at all Xaa locations
  Clone ID: LIB3493-037-P1-M1-B8.pep
YQKGVCVYIYVACMCALLYILGFCFFHSLYIYYLSANFNSISASIEKTPDNVLGVKTRLMVILLAFXIMV

SEQ ID NO: 106335 - protein, 135 aa, Gossypium hirsutum
  Clone ID: LIB3493-037-P1-M1-C11.pep
RFHSPSLPLVCAGADPPVTADQGENNNVDEEEEEEEDDDDEEGDEEPESYSAETGRNTQQVPTENTLAVVAAEEPSELMQLDMSEDIKLGSPDDASNNLDSDFNMLAVSQSGNPTVNQRGAALFTDESNRGRLVV

SEQ ID NO: 106336 - protein, 158 aa, Gossypium hirsutum
  Clone ID: LIB3493-037-P1-M1-C2.pep
RLAGIFVGAARNKRRPEILKIVKEGIGYAFEDTPRHLSFLEASVLHFASRLPAPDIRDILKDVQKRTENVNAEEDPSGWRPYNTFYESLLEKCAKNEGIQDEKEWTTTRQRGRPRKRQNIEGRRLFNEHGSSDEEDSINTLDQEDAQVEGDEEDDNAP

SEQ ID NO: 106337 - protein, 90 aa, Gossypium hirsutum
  Clone ID: LIB3493-037-P1-M1-D10.pep
MPPTNMNPNHNQSQATETRSSTANGDHHHHPNGHSITAQPLQRHHTYYPRSSSSSASFKGCCCCLFLLFSFLALLVLAIVLIIVLAVKPK

SEQ ID NO: 106338 - protein, 158 aa, Gossypium hirsutum
  Clone ID: LIB3493-037-P1-M1-E1.pep
GRVGKATMPTGGVGAIKVLSSGSHQGEKEFHTEVCLLGRLHHRNLVNLIGYCVDKGQYMLIYEFMSNGSLATILYDEEEQGLSWDERLQIALDVSHGVEYLHEGAVPPVIHRDLKSANILLDQSMRAKVADFGLSKEEAFDGRNSGIKGTYGYIDPEY

SEQ ID NO: 106339 - protein, 77 aa, Gossypium hirsutum
  unsure (1)..(77): unsure at all Xaa locations
  Clone ID: LIB3493-037-P1-M1-E10.pep
APRSQASPLALVPLLTPRSLGYLTDGTKKERFFEPWLQYTVVIXRRVGAWAKCDXXRXKPRAXFPSLXXREIFFSFF

SEQ ID NO: 106340 - protein, 41 aa, Gossypium hirsutum
  Clone ID: LIB3493-037-P1-M1-E12.pep
EIPLLLTLFYLLGESKAGRGPSFLTQCRLRPIYPFRKHFHL

SEQ ID NO: 106341 - protein, 55 aa, Gossypium hirsutum
  Clone ID: LIB3493-037-P1-M1-G3.pep
TNTELVANLHKFILSSTVKYHTWQVNNDRAKAMFLISSSKSASDYTRYRVYADAW

SEQ ID NO: 106342 - protein, 135 aa, Gossypium hirsutum
  Clone ID: LIB3493-037-P1-M1-H10.pep
REAPAVFKYQGTYYMITSACTGWAPNEAKVDAAESIMGPWETIGDPCIGGKEMFRLTTFLSQSTFVLPLLGLPGSYIFMADRWNPAELNDSRYVWLPLAIGGRSLESNSSGSQSPWPRVSIHWHKKWRLPLSWRL

SEQ ID NO: 106343 - protein, 116 aa, Gossypium hirsutum
  Clone ID: LIB3493-037-P1-M1-H6.pep
LNNRLNKSANFIDQTQGPTPTEEDDEAAVNQYVTDLSVNSPLSTHKPLWELHVLTAHKCAVFRIHHSLGDGISLMSMFMANCVSADDANALPRMVPDKKTVIKGDKGRDTLWMSEA

SEQ ID NO: 106344 - protein, 84 aa, Gossypium hirsutum
  Clone ID: LIB3493-037-P1-M1-H8.pep
MASTKESDNTSDTPSSPKNVYKDPDDGRQRFLLELEFVQCLANPTYIHYLAQNRYFEDEAFIGYLKYLQYWQRPEYIKFIMYPH

SEQ ID NO: 106345 - protein, 125 aa, Gossypium hirsutum
  Clone ID: LIB3493-038-P1-M1-B11.pep
MALQWMILTYVVAAEAALALLLTLPSPKLLKNRLVSLISLILQPALFIVPFAGFQLLDIYWKNEHRLMCTSEICTAAERDRYEKSFYKSQRNVILCVTACLLYWCIQRICKYNKEIQSLEEIEKR

SEQ ID NO: 106346 - protein, 147 aa, Gossypium hirsutum
  Clone ID: LIB3493-038-P1-M1-B3.pep
MEEPQLLQQQEEEQSQSVSLQDCLKLLKGERDEQRLAGLLLVTKFCKSDDLVSLRAIYDAVGPHFLDRLSRTGLGKGVLSSGSGENRDAYLQLSVTVLSAFCRVSEIASSKEMVSKVPMIFEVMSMKSGMPVLEECYEFLYLVSTAS

SEQ ID NO: 106347 - protein, 50 aa, Gossypium hirsutum
  Clone ID: LIB3493-038-P1-M1-B8.pep
DLFLSLEQKKKRKRFPTKSVAFILKLQGNLLCMKILLLLLHKLLLMLVRL

SEQ ID NO: 106348 - protein, 104 aa, Gossypium hirsutum
  Clone ID: LIB3493-038-P1-M1-C1.pep
VMKSICSLKISPRVFYFNETKKIHGEFAKPGRTEETCEGSRARIHSWEPQLSNRFQKLLVPSSAALSLGVLGLGYGFRIIGSWVRDFRIWVEIIFGLVKFVKGH

SEQ ID NO: 106349 - protein, 51 aa, Gossypium hirsutum
  Clone ID: LIB3493-038-P1-M1-C11.pep
ALRQFLNQLSQSDSSCYPSKVRIGLGRTSEWSPRSSNLRMVLVLGNYSVYV

SEQ ID NO: 106350 - protein, 134 aa, Gossypium hirsutum
  Clone ID: LIB3493-038-P1-M1-C4.pep
QDQLKKDSIHSPSFAEPMGRISGAVDDSHTGESGVDASGTSTLSLQGEADNGSIKPQLDAPVGDVLKSSSHNDSLAGQWGSVSVSSMQSDNPAAINTENLSPTGSHPLLEPEKANINKPSAVLGEKHFDKSDEF

SEQ ID NO: 106351 - protein, 120 aa, Gossypium hirsutum
  Clone ID: LIB3493-038-P1-M1-D10.pep
FVLGYVYIDRWADKHPDSLLVSLNVHRLLVTCVMVASKVLDDVHYNNAFYARVGGVSNAELNRLELELLFLLDFGVAVSSQVFETYCFHLEQEMLINGVDQKVERGISPVAVDEIVTDIG

SEQ ID NO: 106352 - protein, 148 aa, Gossypium hirsutum
  Clone ID: LIB3493-038-P1-M1-F2.pep
ENQGLKRLNGGFLGDNNRGLCGTGFPTLRVCSRFDNMNINQLEPFQSDLNDTVPRVNSHIVHNQGHCNHTHCSNPLRFPKLPIITGIITVGFVFMFSVFLAIFHYRRKKQKIGNTCESSDGRLSTDHQAKELQRNGSVSPLVTLEYSY

SEQ ID NO: 106353 - protein, 109 aa, Gossypium hirsutum
  Clone ID: LIB3493-038-P1-M1-G1.pep
DAWADVESLLGKGLENESFTMVELGLTGSKDKDLREYSYGNGQVKIEDEESFEGGMGREPFEFSFNYDSPPSCGGVDEIIKEEDSIYIKEAGECHVNPAKIKNPWTLPS

SEQ ID NO: 106354 - protein, 86 aa, Gossypium hirsutum
  Clone ID: LIB3493-038-P1-M1-G4.pep
MHIVASGSVWFLRFHVGHHQYTQSESDVACLALFWSFESVYGSHTSPLFRSLCSRGQELAGGSVSALASDSLFPLGTTLLVSSPCM

SEQ ID NO: 106355 - protein, 66 aa, Gossypium hirsutum
  unsure (1)..(66): unsure at all Xaa locations
  Clone ID: LIB3493-038-P1-M1-G5.pep
DAWACTPKGCIXLXHRYGGDIKGXXAXXICRSNXVGMPADLLLQREDSTLTIVHSRTKNSEEIIMK

SEQ ID NO: 106356 - protein, 147 aa, Gossypium hirsutum
  Clone ID: LIB3493-038-P1-M1-H3.pep
HASDRNAAQEVNGIWFYNPRECEDVANLFSRILNAYTKVPAKPKTSASKSEFEELEAVPSMSVIEGPLEPPATASRATDAPQDSSFVNFFSAAMNLGSNAPNGTKPTQPYHSISTTPLSSHAPTAIPTPTPAPSVSSLPLSAAPLVD

SEQ ID NO: 106357 - protein, 65 aa, Gossypium hirsutum
  Clone ID: LIB3493-038-P1-M1-H6.pep
RYIPPRLLNNSNHHHGHRIHGQSCLTYKKCRLQLPSLANINLLERKLSSQSKSSVPVPRFLPAKT

SEQ ID NO: 106358 - protein, 147 aa, Gossypium hirsutum
  Clone ID: LIB3493-038-P1-M1-H9.pep
SGPEPSAVTYQIILKILVEGNKFKEAEEVFETLLEKEKYPLKPDQKMFHMMIYMYKKAGSYEKARKLFALMAERGVKQSTVTYNSLMSFETNYKEVSKIYDQMQRAGLHPDVVSYALLINAYGKARKEEEALAVFEEMLDAGIKPTH

SEQ ID NO: 106359 - protein, 68 aa, Gossypium hirsutum
  unsure (1)..(68): unsure at all Xaa locations
  Clone ID: LIB3493-039-P1-M1-A11.pep
NTSMELYGDAAELSRDLFDNTQITFTMDEDDCVDPILSVLVTEYSTANHSNDPALYXLGDDEQLADTS

SEQ ID NO: 106360 - protein, 63 aa, Gossypium hirsutum
  Clone ID: LIB3493-039-P1-M1-A12.pep
IHALTYSVLSTGSNSVSCLGKHDSACMCRPSSNHYLDASSLIKSCCTLYMLNTGLSGDLLTGK

SEQ ID NO: 106361 - protein, 122 aa, Gossypium hirsutum
  unsure (1)..(122): unsure at all Xaa locations
  Clone ID: LIB3493-039-P1-M1-A3.pep
LLRLQVPIPNSSHESRVFGKIGFLVSRVDVQSDDIELVSVYDMLXYCECMIYMFXTIVCHGEWXHYELKVKDLXTIFFGEMDVTVLGMLKLAWIHILWIHLGLSLSFQTCDETCFCGDGCWL

SEQ ID NO: 106362 - protein, 127 aa, Gossypium hirsutum
  Clone ID: LIB3493-039-P1-M1-A9.pep
GTLCERSDGTKNGNQQLLEDSQDPFAFDDDDFVPSKWDVLYGEKKKSRTKKHGKLGLRKREIQDEHHFQFKMSQQESSNGEICQRENEEYHHSNATSCSQSTEEEYSSLLSDCLLAAVKVLMNLTND

SEQ ID NO: 106363 - protein, 95 aa, Gossypium hirsutum
  unsure (1)..(95): unsure at all Xaa locations
  Clone ID: LIB3493-039-P1-M1-B2.pep
GRGAATGERQPRVSLWEIEPLTTFPMYPSLFPLKLKRPWHPGSSSLFDNRDDISYGLTWLKGGSXEQGLQSLKFQAFCSYSWMPQKLNLSFPGND

SEQ ID NO: 106364 - protein, 156 aa, Gossypium hirsutum
  unsure (1)..(156): unsure at all Xaa locations
  Clone ID: LIB3493-039-P1-M1-C2.pep
GHSSPSDAPKVYRLCIVFLTFSCIGYAMPFILCATICCCLPCIVSILGIQEDFSPTRGASREIINALPTFKFKSKKTGNVNNQEISASEDGVLAAGTAKERVISGEDAVCCICLAKFADDDELRELPCXHVFHVECVDKWLKINASCPLCKTEISE

SEQ ID NO: 106365 - protein, 44 aa, Gossypium hirsutum
  Clone ID: LIB3493-039-P1-M1-C4.pep
MEETFVPLRGIKNDLRGRLMCYKQDWTGGFKAGFRILAPTTYIF

SEQ ID NO: 106366 - protein, 90 aa, Gossypium hirsutum
  Clone ID: LIB3493-039-P1-M1-C5.pep
CAMENAHMFDLDMKDSLFCFYCGSLGHSDSFCEARMELGVEAKEMGWDLSLRAQSHRAQTMTSVWLQEESEGQGRGSNGERHNRGQMSTV

SEQ ID NO: 106367 - protein, 167 aa, Gossypium hirsutum
  unsure (1)..(167): unsure at all Xaa locations
  Clone ID: LIB3493-039-P1-M1-C9.pep
TPARSGTNSHSTHTYASDSIYKKTYAGPAHNKVNNLPQLYLLNLQYHLPIHVLHTDLSLNSNATIPNTNIHKEYFAQQHHNTPRAHLDYESSYCKLHPNDTILNLQTTIPYYMKNLAHISTIYVRRECTIGTDCPYNHEMPXTADLSHQNIKHRHLSVNDPIALNLL

SEQ ID NO: 106368 - protein, 61 aa, Gossypium hirsutum
  Clone ID: LIB3493-039-P1-M1-D10.pep
NCMFDDVKLLWTHNFRKGNIKLLVLYCFFLFCSLGIKQKYMVIRDNHLGLKMSKRIKIKYQ

SEQ ID NO: 106369 - protein, 86 aa, Gossypium hirsutum
  unsure (1)..(86): unsure at all Xaa locations
  Clone ID: LIB3493-039-P1-M1-D5.pep
LLGCSGNRRXXIIPLDEEPRHSASWCRWYIHSFPAQLSLPFRDIGILICGSEGFLPLNTPWDTTPQRELLRRGILPFALXXAKKXH

SEQ ID NO: 106370 - protein, 39 aa, Gossypium hirsutum
  Clone ID: LIB3493-039-P1-M1-D7.pep
GRVVGRVGREGEMAAVIKSAILILSVFLCVRFSSVVKLL

SEQ ID NO: 106371 - protein, 57 aa, Gossypium hirsutum
  Clone ID: LIB3493-039-P1-M1-D8.pep
RLSSLSPMAWGVQERRELKPKTHMISLIAILQDSISSTSILCLHMVHHTNIMLIDVI

SEQ ID NO: 106372 - protein, 89 aa, Gossypium hirsutum
  Clone ID: LIB3493-039-P1-M1-E5.pep
GLLPWLCLQLGEDPLVGPASPLQQQHHKACSVAANIAIWSRAESLDELATVFMAYSGGEITSIENLLACVSPMMSEEWQPMHSPITTGH

SEQ ID NO: 106373 - protein, 145 aa, Gossypium hirsutum
  unsure (1)..(145): unsure at all Xaa locations
  Clone ID: LIB3493-039-P1-M1-F2.pep
MTLWISFCLESGRNHQLIEASICALIKXGKDRTPLKSDMVKAGVIDNCLEVLPLASSSLSSSIAELFRILTNSSAIARSSDAAKIIEPLFMVLLRPDFGLWGQHSALQALVNILEKPQSLAALKLTPSQVIEPLISFLESPSQAI

SEQ ID NO: 106374 - protein, 52 aa, Gossypium hirsutum
  Clone ID: LIB3493-039-P1-M1-F3.pep
RPRVRFLKNTIGDRVFLFTFLIIRIYSNGERKSGLEQDLQHAWSTVDLCIYD

SEQ ID NO: 106375 - protein, 84 aa, Gossypium hirsutum
  Clone ID: LIB3493-039-P1-M1-F7.pep
RKESLTRCRFSSIILKSPCICPQRIRNRRTHEQQALQAHIDKRLIRTHKLTFQPPADEAPHTISGDIFFVMEQTQHPPLAASFF

SEQ ID NO: 106376 - protein, 92 aa, Gossypium hirsutum
  Clone ID: LIB3493-039-P1-M1-F8.pep
MTGPAIMNGKKTGNLYPAFTRVNHGKYAASDVRGHISTSNLIWDYFYTTAGVSFGTYNPAIVAQLQEIFDADWNSPYAVPVEGLSDGHACSS

SEQ ID NO: 106377 - protein, 146 aa, Gossypium hirsutum
  Clone ID: LIB3493-039-P1-M1-G4.pep
IFLALRSPEVEVVGLTTIYGNVYTTLATRNALHLLEVADRTDIPVAEGSHVTITKGTKLRVADFVHGADGLGNQNFPPPEGKPIDMSATDFLVEQANLYPGKVTVVALGPLTNIALAIQQDPSFVKNIGQIVLLGGAFAVNGNVNP

SEQ ID NO: 106378 - protein, 40 aa, Gossypium hirsutum
  Clone ID: LIB3493-039-P1-M1-H11.pep
SPPRGVLVLVVGMAFLFVHLNHTIFDSCMISNCMPLKGLY

SEQ ID NO: 106379 - protein, 140 aa, Gossypium hirsutum
  Clone ID: LIB3493-039-P1-M1-H4.pep
PVPTFFRIYKSKGVDEFQPYPYLCTVLNCIFWMFYGLPIVKKDNILVLTINSVGLVIELLYLTVYVVYANDRKKRLRVAHILLAEAALTVAVVLIAMLCFDKHRSLFVGIIADVFNIIMYAAPLGIWKKVITTKSVEYMP

SEQ ID NO: 106380 - protein, 75 aa, Gossypium hirsutum
  Clone ID: LIB3493-039-P1-M1-H8.pep
KPINIVDFLLIFKPIITPFTLPIKEEHKIFFDRIIIPLNKPKPLENYSQQLSNRISHFIDNEPNSYTTLIQGLLN

SEQ ID NO: 106381 - protein, 114 aa, Gossypium hirsutum
  unsure (1)..(114): unsure at all Xaa locations
  Clone ID: LIB3493-039-P1-M1-H9.pep
GLSDISTWGAAQRLIYTDGVTNSRARVLGGRSXLNAGLYTRASTEYIRQAEWDGRLWNRSYKWVDKSVEFAPQWAHCSSAGKHGLYNEPSEEKAKDMESGSLYCCKWGSNWDYH

SEQ ID NO: 106382 - protein, 158 aa, Gossypium hirsutum
  unsure (1)..(158): unsure at all Xaa locations
  Clone ID: LIB3585-029-P1-K1-A10.pep
MGFLNIFIVALMPVLKVILMTGIGFFIALDRIKLLGPEANHHLNNIVFYVLSPAIAVSSLAESITFQSFITLWFMPLNILLTFVFGSILAWLLIKITKTPKHFRXIVIGCCSAGNLGNLPLIMVPAVCEEPNNPFGDPSVCSLLARPYASLSLSDGGI

SEQ ID NO: 106383 - protein, 169 aa, Gossypium hirsutum
  Clone ID: LIB3585-029-P1-K1-A11.pep
GRVGKFSSLPFSFLSHLSIFFFFFKPLIPISFQPSPSFSRPKHHFQPYLSLNLDSTSNQKPPNFYLPANSPLSLHKFILVLRLKSGSTVSIFSQQKHSLKSRFLSFLKKIRLRYERKGLTIQHPDVKSVLNRVKQFTDKVLPFSLLLCWFFRSFLKTEGWQSHSSIGKS

SEQ ID NO: 106384 - protein, 183 aa, Gossypium hirsutum
  unsure (1)..(183): unsure at all Xaa locations
  Clone ID: LIB3585-029-P1-K1-A4.pep
NYGVHEMKSGPQAFPGSSSQPLDYALKETSPFLGGGRIVGGRVIRGDRPTSTYDLVEQIRFLFVRVVKARDLPSKDATGSLNPYVEVKVGNYKGITKHYEKKQNPEWNQVFAFSRETVQSSVLEVVVKDKDLVKDDSVGFVRXDLHEVSTKGSPDSPLASEWYRLXRLERREKERELMLAVWY

SEQ ID NO: 106385 - protein, 93 aa, Gossypium hirsutum
  Clone ID: LIB3585-029-P1-K1-B3.pep
PKSLALISSLSQTHCHNKLHCNSQAWPLNLRDRAQTSIGHRIIAKLIFSFQELLSSTHYERQFKHDQLKALLFTSPIDYSRHFHGMCVVGAVT

SEQ ID NO: 106386 - protein, 99 aa, Gossypium hirsutum
  Clone ID: LIB3585-029-P1-K1-B6.pep
MVDLSWLSAILVGAGCLALGYCIGRHRPTCLFLSSRGAKDTTVSKVNKKIKEPLEIEKLAGILEDFKMVLVVRNDLKMGKGKNAAQCSHATFGLYKKLL

SEQ ID NO: 106387 - protein, 68 aa, Gossypium hirsutum
  unsure (1)..(68): unsure at all Xaa locations
  Clone ID: LIB3585-029-P1-K1-C9.pep
MEVRSENSIQVRSDKFPSTVIPKTWLQGWFFRSWSNILVWTCLVHIVAXAELWHPRLLTGFTSRISWI

SEQ ID NO: 106388 - protein, 158 aa, Gossypium hirsutum
  Clone ID: LIB3585-029-P1-K1-D1.pep
PRVRSLFELVCHSSSRERMEVLFIDKNLLTGEIPDCWNQLESLTFLNLGNNNLTGKIPPSLGRTGLDWLNLRNNSMFGELPSTLQNLTKLRILDLSENHFSGNIPTWIGDKLSTLMILSLRSNNFDGQIPHKICDLQYLQNLDLSRNNILGAIPKCFS

SEQ ID NO: 106389 - protein, 204 aa, Gossypium hirsutum
  unsure (1)..(204): unsure at all Xaa locations
  Clone ID: LIB3585-029-P1-K1-D7.pep
PRVRHGAAVVQDKMYIYGGNHSGRYLSDLNVLDLRSWTWSKVEASIESKSEESPSPVNIAPCAGHSLIPWENKLLSIAGHTKDPSETIQIKAFDLQTGTWSILKTYGKAPVSRGGQSVTLVGSTLVIFGGQDAKRTLLNDLHILDLETMTXDDFDAVGVPPSPRSDHAAAVHAERYLLNFGGGSHCTCFNDLHVLDLQAMEWSR

SEQ ID NO: 106390 - protein, 170 aa, Gossypium hirsutum
  unsure (1)..(170): unsure at all Xaa locations
  Clone ID: LIB3585-029-P1-K1-D9.pep
WLEXQHTCPTCRALVVPPENGXSSSGGQHGTWSDAPRQGSSTSSATQGPGVEMATDDLTPHQARLQAAAAAASIYEKSYVYPSANTLVWSPGNAVLPGSYAPLADTMKVEHSGESPSIGHQQFAIPGGLPNLPFPQFPNCVFVPFQLPGANGNSGGGGSGSNLKDSDGRV

SEQ ID NO: 106391 - protein, 125 aa, Gossypium hirsutum
  unsure (1)..(125): unsure at all Xaa locations
  Clone ID: LIB3585-029-P1-K1-E5.pep
LRLMDQEKRGVRIGTSMNLSQVGECVGGNSKNSVNGVVSGTAIVENSEEKLCSNGENSDLRLQNDGFESCKNQEMDFGRGIGQNDLGTNGNSNSLIDANVVVSSSEXLVEERNESIYEEMNEIRG

SEQ ID NO: 106392 - protein, 106 aa, Gossypium hirsutum
  Clone ID: LIB3585-029-P1-K1-E7.pep
TPRFFPMSVTLSSSLSGAGLLPFLLSFSCCFCSKFIVISGLQNHSFCCQKFLFCSALIRSLLSSPVVVFCPLITTFGVAIFPSFTALSDILFHHLFLCYNSPKIFN

SEQ ID NO: 106393 - protein, 64 aa, Gossypium hirsutum
  Clone ID: LIB3585-029-P1-K1-F11.pep
ENPGETHLNPLAKHPPFHTCFNSEEARTEPLSEHLFNLNGKWNAPCNAPLSAALMAVTLMVTPT

SEQ ID NO: 106394 - protein, 165 aa, Gossypium hirsutum
  unsure (1)..(165): unsure at all Xaa locations
  Clone ID: LIB3585-029-P1-K1-H10.pep
DQGWDYMHKGIKKLRRILEGLPEPPFTSEEYMMLYTTIYNMCTQKPPYDYSQQLYDKYREAFEEYITSTVLPSLREKHDEFMLRELVKRWGNHKVMVRWLSRFFHYLDRYFIARRSLPALNEVGLTCFRDLVYXEVHAKVKDAVIALIDKEREGDQIDRALLKKC

SEQ ID NO: 106395 - protein, 92 aa, Gossypium hirsutum
  unsure (1)..(92): unsure at all Xaa locations
  Clone ID: LIB3585-029-P1-K1-H5.pep
HSLFFPLTFXCXTKXTPNYYFFHSSSTFKVFGGSRKTKNIWXKVGNCFCKTCFLXXKPLFLYLEKNMLYYSNYFNFLLSKLSFQRFEKGQFL

SEQ ID NO: 106396 - protein, 174 aa, Gossypium hirsutum
  unsure (1)..(174): unsure at all Xaa locations
  Clone ID: LIB3585-035-P1-K1-A11.pep
HTIRYGSDGVQVTAGSQVFEGDMALCTVPLGVLKSGSIKFVPELPERKLDGIKRLGFELLNKVAMLFTYVFWGTDLDTFGHLTEDPSRRGKLFLFYSYATVAGGPLLLATVPXEAAHRFETLPTTHAATQVLHILKGIYEPQGITVPEPLQTVCTRLGGDPFSLRSHSNVAVGA

SEQ ID NO: 106397 - protein, 87 aa, Gossypium hirsutum
  unsure (1)..(87): unsure at all Xaa locations
  Clone ID: LIB3585-035-P1-K1-A2.pep
VLPLLPFXRFAFGSCCACPPXLLXAPPCXRLLCGXXLLSVRLRPPAFALRLPLLFVXGGXXVXVRLAVCRXXCSXSWSSPAXFAVGV

SEQ ID NO: 106398 - protein, 103 aa, Gossypium hirsutum
  Clone ID: LIB3585-035-P1-K1-A3.pep
YNVVTGTSLTIPPITIMMDNLISIAGGFRRTIYRVVLHSSRLLGRANVTLPCIWLNKYPFAKGLMERRRWTRTIASVWSGLMGITISLHGGGINPSCTTNQTG

SEQ ID NO: 106399 - protein, 183 aa, Gossypium hirsutum
  Clone ID: LIB3585-035-P1-K1-A4.pep
ELTKAIERAGLDMRVAAGVNDTVGTLAGGRYNNPDVAAAVILGTGTNAAYVERAHAIPKWHGLLPKSGEMVINMEWGNFRSSHLPLTEYDQALDAGSLNPGEQIFEKMISGMYLGEIVRRVLCKMAEEAAIFGDAVPPKLKIPFILRTPHTSAMHHDTSPDLKVVATKLKDILEVEYLSNTFL

SEQ ID NO: 106400 - protein, 136 aa, Gossypium hirsutum
  unsure (1)..(136): unsure at all Xaa locations
  Clone ID: LIB3585-035-P1-K1-A8.pep
PRRGERRKKREGKTTAAEEESGEGDXXXNXRXKGKXGHEXXEXEXRPDGKXRXXNNXNXKNDTXXRKEXXXTXAXXKEXRRNNTESENXKEEDNNXPEPDXXGRQEPEKXXGXEQXXXXTTKXGXXXXXQSSKEPE

SEQ ID NO: 106401 - protein, 64 aa, Gossypium hirsutum
  Clone ID: LIB3585-035-P1-K1-A9.pep
LKPRNQVKLNCFRLKLNSRLALDFSVDLCVQNIYITISDNCCSLDFPGSQRASYILLSGSRLEV

SEQ ID NO: 106402 - protein, 64 aa, Gossypium hirsutum
  Clone ID: LIB3585-035-P1-K1-B11.pep
KIADIRWESSGLVIGIYIGVVIEVLRAIFALFCIRYYLKRSQIGNSSSSKAASIPIRANGTSFL

SEQ ID NO: 106403 - protein, 174 aa, Gossypium hirsutum
  Clone ID: LIB3585-035-P1-K1-B12.pep
RKPETMKEEQSRKRRRGKNKKPQKTQPSLLPKHSTKLHKKTHQQKNPAHQSSSSSSSLKSSSFLDKMKARLAGGHFRMINEKLYTCTGKEALDYFKEDPELFDMYHTGYQEQMSHWPELPVNIIIKWLKERSSSLIVADFGCGDARLAKNVKNKVFSIDLVSNDPSVISCDMAN

SEQ ID NO: 106404 - protein, 170 aa, Gossypium hirsutum
  Clone ID: LIB3585-035-P1-K1-B5.pep
LGHMRTNKHCPKYGQDAETHVEATELEKTAGKSTTLEPSGQTQLKMMKKKLITKSATKIAVVEASEGEKCSTNTKALTLKFKCSTDRPSDKLTSGGTQSSDHPVTSDPENGAKSAAKVSKIIISNRAKPDEMQVESNKLPVVIRHQVDTDRGQAESHKKSIVIKPPANME

SEQ ID NO: 106405 - protein, 92 aa, Gossypium hirsutum
  Clone ID: LIB3585-035-P1-K1-B6.pep
MTKSSFKIEHDFEKRRAEAARIRGKYPDRIPVIVEKAQRSDIPNIDKKKYLVPADLTVGQFIYVIRKRIKLIAEKAIFIFVDGVLPPTGAIM

SEQ ID NO: 106406 - protein, 171 aa, Gossypium hirsutum
  Clone ID: LIB3585-035-P1-K1-C12.pep
HASVKLLEEEEKEKREEEEQRERKRTKEREKKLRRKERLKGKEREREKKCADSSVTPDFSKEVSSPNTKVEENISINCRDSVCETSDIIVSTLGSPDDQGEQFLDGHLASSLQNHSFDGPDGEGTKVKDGNGSFPTEQSKFSRRRLKFCKDGQFDTSLKWSDRRRFPVVSE

SEQ ID NO: 106407 - protein, 126 aa, Gossypium hirsutum
  unsure (1)..(126): unsure at all Xaa locations
  Clone ID: LIB3585-035-P1-K1-C7.pep
MTGTNSRVIEVRHGIRIKLWLHPDPAEVMNAHRIIDIAQTEHRXQYGDENAMTVLXFTPTHELTFXALHMTDVMHSLMLVHYDLICIVVEALGVRNKTALLIAKSGMKTIHIGFIYPMPNHCVERH

SEQ ID NO: 106408 - protein, 179 aa, Gossypium hirsutum
  Clone ID: LIB3585-035-P1-K1-C8.pep
PTRTEETEYVSRWLIVATGENAEEVVPKIEGMDDFGGPILHTSSYKSGRLFRGKDVLVVGCGNSSMEVCLDLCNCEARTSLVVRASVHVLPQEMLGRSTFGLSMWLLKWLPVRIEDRLLLLLSRFTIGDTGKFGLHRSQLGPIELKSRSGKTPVLDVGTLDKIKNGNIKVYPRIKGITF

SEQ ID NO: 106409 - protein, 170 aa, Gossypium hirsutum
  unsure (1)..(170): unsure at all Xaa locations
  Clone ID: LIB3585-035-P1-K1-D1.pep
EPMIVGRNFMVKVNANIGNSSAASAIEEEVYKVQWATMWGADTAMDLXTGRHIHETREWILRNYAVPVGTVPIYQALEKVNGIAEDLCWEVFRDTLIEQAEQGVDYFTIHAGVLLRYIPLTAKRMTGIVFRGGSIHAKWCLAYHKENFAYEHWDDILDICNQYDVALLIG

SEQ ID NO: 106410 - protein, 43 aa, Gossypium hirsutum
  Clone ID: LIB3585-035-P1-K1-D12.pep
KLKKITWDTRELPCKLSSLKKINILVSIFILNTTTHLFLRTRG

SEQ ID NO: 106411 - protein, 169 aa, Gossypium hirsutum
  unsure (1)..(169): unsure at all Xaa locations
  Clone ID: LIB3585-035-P1-K1-D3.pep
PHXMENPXLGRLAEPQCSALAKIWFSRTHKTKPRPNNLDILSIARSSCCKVSLKASLEEKYGMLPECLYLKAAKLCSEHNVQVEWHQEKFVCINGCKPAKDPDFLSPLIPLPNGFEGCQSADSLDDADEELELDECHYIIDSQHFRKGPMQKASILCDDLSFGKESVPV

SEQ ID NO: 106412 - protein, 53 aa, Gossypium hirsutum
  Clone ID: LIB3585-035-P1-K1-D4.pep
HRRHLVRGPVVISLLIFIWDRTVVKVSLVGMICLRVMPMNCGCLQCYDSIQNG

SEQ ID NO: 106413 - protein, 93 aa, Gossypium hirsutum
  unsure (1)..(93): unsure at all Xaa locations
  Clone ID: LIB3585-035-P1-K1-D5.pep
NTQKRKTATREEPEQEXAXAEAEAHRKAXKGRGTXEKAXRAGAGHRKAEQRKQTKRANEDXXQEERNKRHETQRXXEDKKAXERQRQEPADRE

SEQ ID NO: 106414 - protein, 53 aa, Gossypium hirsutum
  unsure (1)..(53): unsure at all Xaa locations
  Clone ID: LIB3585-035-P1-K1-D7.pep
LCVWXGSFGRLLPALVVVPCSRAPSAPASPCSPSPVASLVGXFRAWXVVGXXL

SEQ ID NO: 106415 - protein, 101 aa, Gossypium hirsutum
  unsure (1)..(101): unsure at all Xaa locations
  Clone ID: LIB3585-035-P1-K1-D8.pep
QTRGRTXGRTXGQPXEXXKRGKGATRKDADXXXAPPKDQPRKAGARATXXHRPPQTKPTENRTQHRXERTKGHPPXDEKPKTGRNEXRXPADGQGESNSPT

SEQ ID NO: 106416 - protein, 134 aa, Gossypium hirsutum
  Clone ID: LIB3585-035-P1-K1-E10.pep
MNADTLLVDDKARDNSCHQGANVSSLSNGYLDKYVSSSIGSDITIEGPPLLSNEEKGKQLGRILAKSQSNDANDTGESNIISNILSLDFDTWDESLTSPQNLAKLLGDSDKQVNPLKLSSSWKAPNHNQSRFSF

SEQ ID NO: 106417 - protein, 172 aa, Gossypium hirsutum
  unsure (1)..(172): unsure at all Xaa locations
  Clone ID: LIB3585-035-P1-K1-E12.pep
DAWVHGMFRSNGGCGYVKKPDFLMNVNPDGSVFNPKADLPVKKTLKVKVYMGDGWHLDFKQTHFDLYSPPDFYTRVGIAGVPADEIMKKTKKKEDDWTPVWDEEFAFPLRVPELALLRVEVHEYDRSEKDDFAGQTCLPVSELKPXIRAVPLFNRKGEKFNSVRLLMRFEFF

SEQ ID NO: 106418 - protein, 160 aa, Gossypium hirsutum
  unsure (1)..(160): unsure at all Xaa locations
  Clone ID: LIB3585-035-P1-K1-E2.pep
MSPPLLGVEDEGIQSNVTLLGSSSSMERECHNSAVLPERNYMGLSDXSSEDSSVLSPSSXERKASSYLKATDLRLGLAVLQTTERNPELSLASSYQVDENPFLPMHPSSXGHCFTSHKTVVLGNKRRISDAMDXYLDGKFLSDSHNDVLLSPKPSLNFGG

SEQ ID NO: 106419 - protein, 151 aa, Gossypium hirsutum
  unsure (1)..(151): unsure at all Xaa locations
  Clone ID: LIB3585-035-P1-K1-E4.pep
HTSGAANREGSLALTQTATKTAMLQRYLLLFYWPSICNFMTGGANGDHNXAGKLTHAILYGGADATRTMGGACANGSLSRXGYGTSTEPLITGLFNNGYSHGDCYTLQCNNDPXWRIIRTISRTGTKFCPPNYTLCSDYGGWSNRSPEHFD

SEQ ID NO: 106420 - protein, 84 aa, Gossypium hirsutum
  Clone ID: LIB3585-035-P1-K1-H4.pep
TTANRLFVASICAKISRIKHELYSLKKDALAVTEFIAKIQNTCALLEASRSVVSEAEKVKVILAGLPFEFDTVLTCTSFSSDAW

SEQ ID NO: 106421 - protein, 150 aa, Gossypium hirsutum
  Clone ID: LIB3585-035-P1-K1-H7.pep
MGKHPLGCVLMFSVLASLGLVSFAACLVAEAKRSKVDLKLDGKMCFLPRKSDAFELGVAASVSLCTAQIIGNVLLCASYWWRANTRKPTKPTLTAILLAISWISFGVAAILISAATSMSRAQPYGEGWLDGECYLVKDGVYLSFGVLSLL

SEQ ID NO: 106422 - protein, 182 aa, Gossypium hirsutum
  Clone ID: LIB3585-035-P1-K1-H9.pep
PTRTDASKLASEWKARMKLNADNSMEILGFLQFIAAFGLVSSFNRDEIFKLLGTTAQHQQARNVCQVLGFTDMIPGFIQSLIERKQYIEAVRFVCAFDCKDKCQPKQLLTLFLQDVNRVACHCCKIGKNSPEVWQKATDEQIAALKSVIECIKDCKLESCMPVEVIGKYIAELEMPKMNMTF

SEQ ID NO: 106423 - protein, 163 aa, Gossypium hirsutum
  unsure (1)..(163): unsure at all Xaa locations
  Clone ID: LIB3585-036-P1-K1-A1.pep
QSQLGQRPPVLARSAANKVSVXKSLSAGQNLLVKSRVPQKKYANGHGMKQSTIGRMPSKGSARQRLHPGMLSIQDRATAHYGAVTGLKVTDDGMYLLSAGSDSRIKLWDLESGYNTLVNFGKVHXQASKAIQLAVSQDSAQVFVPCMAVVKAFDIWSGKMSLT

SEQ ID NO: 106424 - protein, 123 aa, Gossypium hirsutum
  unsure (1)..(123): unsure at all Xaa locations
  Clone ID: LIB3585-036-P1-K1-A6.pep
GIVTSAAHYNGVLDYDAHSLYCYLQAIITHMVLLRLEGKRTGILSLATYVASRKYAAYXTGDYNGSWKDLNYSITTALNYYILAVPMEGADICQLYTDPTEQLCNLLIECATFYPLSMDHATY

SEQ ID NO: 106425 - protein, 164 aa, Gossypium hirsutum
  Clone ID: LIB3585-036-P1-K1-B2.pep
RPRVRPRVRPRVRERIVFPLLQRADPGLCKAANEEHARDLPVMNGIKEDMKSIGVMDYGTPASKEGLSNLSTRLKSLQKHCKEHFDEEEKDVLPLLEATELSGEEEKRVFEDCIEAMKVTHSHLFNFFLEGLLPSEAMDYVDLIMKCGDKQLRASMIQIISNAK

SEQ ID NO: 106426 - protein, 62 aa, Gossypium hirsutum
  Clone ID: LIB3585-036-P1-K1-C10.pep
LNQLQLLNPMFWKLVHSFTVFQQVQESNSSDIIGQGNTRDITRPYGPVEKLRLLMTSSPTHQ

SEQ ID NO: 106427 - protein, 73 aa, Gossypium hirsutum
  Clone ID: LIB3585-036-P1-K1-C11.pep
QKKCILDFCSIVSKFPVCYFSKIWFAKINIQNRETRRDRITDTQCLAQKHLMVFSFCCVTFISKYITICSIPK

SEQ ID NO: 106428 - protein, 162 aa, Gossypium hirsutum
  Clone ID: LIB3585-036-P1-K1-C3.pep
PTRPPTRPGKGSWKWSEFPSKVAVQLNDTHPTLAIPELMRLLIDDEGLGWDEAWDVTTRTIAYTNHTVLPEALEKWSQSVMWKLLPRHMEIIEEIDKRFLAMINATRPDLEHKLPTMRVLDHNPQKPVVRMANLCVVSAHTVNGVAQLHSDILKAELFADYI

SEQ ID NO: 106429 - protein, 44 aa, Gossypium hirsutum
  Clone ID: LIB3585-036-P1-K1-E3.pep
HKILSFMFWVSLPFINASLMHHFQDPPQCSWMLFILRGATRATR

SEQ ID NO: 106430 - protein, 27 aa, Gossypium hirsutum
  Clone ID: LIB3585-036-P1-K1-F1.pep
NRPPYRYVPSLTVIPGVKLPSLRAIDT

SEQ ID NO: 106431 - protein, 129 aa, Gossypium hirsutum
  unsure (1)..(129): unsure at all Xaa locations
  Clone ID: LIB3585-036-P1-K1-F12.pep
MASRSLFLSLRRRSSQRCMSRPLSSGSVSTEYTDDYIKNSETDDLRSRIFQLRLPKRSATTVIEKWVGEGNRVSISDLRQISKDLRKSQRFKHALEISEWMVSHEEYKLSDTDYAVRIDLMTKXFGIDA

SEQ ID NO: 106432 - protein, 145 aa, Gossypium hirsutum
  unsure (1)..(145): unsure at all Xaa locations
  Clone ID: LIB3585-036-P1-K1-F4.pep
GEMRTFTPTQILGMVLLNLKSIAEKNLNAAVVDCCIGIPVYFTDLQRRAVLDAATIAGLHPLRLIHETTATALAYGXYKTDLPENDQLNVAFVDIGHASMQVCIAGFKKGQLTILAHSFDRSLGGRDFDEVLFQHFAAXLKRNTR

SEQ ID NO: 106433 - protein, 103 aa, Gossypium hirsutum
  Clone ID: LIB3585-036-P1-K1-F6.pep
MVHVVPADPQAVVAVKKKAQSSRSWVLLDSTGETTVLDVDKYAIMHRVNIHARDLRILDPLLSYPSTILGRDGAIVLNLEHIKAIITSEEVLLRDPSDENVVP

SEQ ID NO: 106434 - protein, 145 aa, Gossypium hirsutum
  Clone ID: LIB3585-036-P1-K1-H3.pep
MLARRLVSFFKNSPSSKLSSNGTSVNDEKNKSFAGKAVSFILITVTGGVALSAVDDLAIYHGCSRKAMEKAGKNQAIINAIGEPIKKGPWYNASLAVAHKRHSVSCTFPVSGPQGNGVLQLKAVRNGDDNWYSYVLPRDWEILIM

SEQ ID NO: 106435 - protein, 153 aa, Gossypium hirsutum
  unsure (1)..(153): unsure at all Xaa locations
  Clone ID: LIB3585-037-P1-K1-A1.pep
NHELTVGKEFTDVHSCRRALRDAAIALRFEMQTIKSDKTRFTVKCASEGCPWRIHAAKLPGVPTFTIRTIHDQHTCGGITHLGHQQASVQWVADAVAESIKENPHYKPKEILEEIHRVHGITLSYKQAWRGKGTHHGXVCVGSFEEXFRLLPA

SEQ ID NO: 106436 - protein, 126 aa, Gossypium hirsutum
  Clone ID: LIB3585-037-P1-K1-A2.pep
MEESVSKVPPSLRLGSFKSSLSGRSTPKSSPTFRRLHSSRTPRREATSGAGGIQWFRSNRLVYWLLLITLWAYLGFYVQSTWAHGHKKEEFLGFTGDPRDKLLDAEKNARLDLLADDSLVAVNYWN

SEQ ID NO: 106437 - protein, 121 aa, Gossypium hirsutum
  unsure (1)..(121): unsure at all Xaa locations
  Clone ID: LIB3585-037-P1-K1-A3.pep
HAAHAYAHAFVHAFGKCIRGLGVKVGFLSRHREELHEKYTNIEALTEQLKKELREKNELGKTLYTKHQLEKHASXEKISFIRLQVHEIAAFVLNSSGHYEAITRNCSNYYLSAESVALFTD

SEQ ID NO: 106438 - protein, 98 aa, Gossypium hirsutum
  unsure (1)..(98): unsure at all Xaa locations
  Clone ID: LIB3585-037-P1-K1-A5.pep
MGTDSARIDQDSPYNCLSYKQAMQVMLYXHQPIAGSEDAQLRXLLRLEARAYALIIDMYSRLQLYDMERGRITRRTYRAAYYNRRMVHALCTMFREDG

SEQ ID NO: 106439 - protein, 66 aa, Gossypium hirsutum
  Clone ID: LIB3585-037-P1-K1-A6.pep
HIMLVHLSSMDTGPLSVSIGLPSFLDGPTRGCLQSFPLCVNSNRHYCGHLLVHFLLHEYAPIHQVL

SEQ ID NO: 106440 - protein, 92 aa, Gossypium hirsutum
  Clone ID: LIB3585-037-P1-K1-A8.pep
IGLSSSLQLLFFRLLCSRKSTHPLQEDFQPVLRYTNPNLLLLYLQFPWHTQCCIFLDTIFVIYIYHCWAPFPLFLFPLQSLHHKALYPRDSQ

SEQ ID NO: 106441 - protein, 166 aa, Gossypium hirsutum
  Clone ID: LIB3585-037-P1-K1-B12.pep
GRVGGDIGRPISKFYSHDVGRHSEQYSGKIASNMVLHNEEPHTPKLRCRVIGAYFEKLKSKPFAVYSIAVTDAENRTWFVKRRYSNFERLHRHLKEIPNYTLHLPPKTIFSSSTEDAIVHQRCIQLDKYLQDLLSKANVAEQHEVWDSLNVFLKNYSFGKSSSVMR

SEQ ID NO: 106442 - protein, 88 aa, Gossypium hirsutum
  unsure (1)..(88): unsure at all Xaa locations
  Clone ID: LIB3585-037-P1-K1-B8.pep
GRKRKGEXREXXSXHXGQXGXQGGKXSREXXRXEQENHPGGTXPSDTXKGGAHXAXNTXXNETGXGKQGPRAGXGEPEPTRNEEGRTG

SEQ ID NO: 106443 - protein, 66 aa, Gossypium hirsutum
  Clone ID: LIB3585-037-P1-K1-C6.pep
LLSRHCYRKNQIRVYNDFSDAAHSCLSHSLQNQRPFRRCVLIPFILIKVHRTRGRTSGRTRGRTRG

SEQ ID NO: 106444 - protein, 131 aa, Gossypium hirsutum
  unsure (1)..(131): unsure at all Xaa locations
  Clone ID: LIB3585-037-P1-K1-C9.pep
VWXRLXGXVCAVXWWLLRVSWCXFXCCGLVLXLLLCLXRSLLLLRXAGXRLLGLFXGAXXLVFRFFLRLLWVLVGCXWWFXXLCXLLSSGXLGXXFXWFWWXGFVCCXGPSRRCLXACXLXCXXCLXXRVG

SEQ ID NO: 106445 - protein, 124 aa, Gossypium hirsutum
  unsure (1)..(124): unsure at all Xaa locations
  Clone ID: LIB3585-037-P1-K1-D10.pep
ARVHPAYVHTYVTRSVQIGGIVTVHVXHVKTGRLKHEMVVTFGPTDLTTEVKFVEIHHESLLEAVPGDNVGFNVENVTDKDLKRIFDDRNSKDDPAMEAANSILQVMMMNHSCLMVNRYVQVLY

SEQ ID NO: 106446 - protein, 160 aa, Gossypium hirsutum
  Clone ID: LIB3585-037-P1-K1-D2.pep
GIDIGNTADYFSLSSRTNSDIHVATCIAQYEGYLHTFVDELMHSKISHWDRSWRELATEALAALVRYDAAYFADFVLEKLIPFTLSSDLCTRHGATLAAGELVLALHQCGYDLPNDKQKQVSGIVSAIEKARLYRGKGGEIMRIAVSRFIECISFSRVPL

SEQ ID NO: 106447 - protein, 133 aa, Gossypium hirsutum
  unsure (1)..(133): unsure at all Xaa locations
  Clone ID: LIB3585-037-P1-K1-D7.pep
KHKRASRGQKAEETSKAXEXESNXSXEGAXESKERGXXXXXGKKEEEKXQEEXXXTEXEKXXXEETKAEEEGEEKKKXXXXEKXHRXESSSXSXXSDEEEGEGEEKKKKKKKEKKGPEEKKEEKXEGEKKEED

SEQ ID NO: 106448 - protein, 76 aa, Gossypium hirsutum
  unsure (1)..(76): unsure at all Xaa locations
  Clone ID: LIB3585-037-P1-K1-D9.pep
ESHEAATQRKTPPDXTKPRARKXRRHNGPXAGXGPEAXREQETKRSXQEXRKEKQQKSXEAGTXPSTKKKKXEEGA

SEQ ID NO: 106449 - protein, 120 aa, Gossypium hirsutum
  unsure (1)..(120): unsure at all Xaa locations
  Clone ID: LIB3585-037-P1-K1-E6.pep
MADIEKQILAKPIQLADQVTKAADEASSFKQECAELKSKTEKLAGLLRQAAXRASSDLYVRPTRRIIDDTEQVLDKAQCLVLKCHANGIMKRVFTINPAAVFCKMXFSFENCMGDVSWLL

SEQ ID NO: 106450 - protein, 162 aa, Gossypium hirsutum
  Clone ID: LIB3585-037-P1-K1-E8.pep
PIHSFPATPKLSFRSKPRPIIRAAAGLEVDSFTKKSGYLFQLSAFEAESLLDYSPSRIAAIYRRKPLILLRRLIQISTTFGKWFGIRYIDNLMERSDQMFKVRAAELRKILVELGPAYIKIAQAVSSRPDLIQPSYLDELSLLQDRITPFSTEVALDTLEKE

SEQ ID NO: 106451 - protein, 146 aa, Gossypium hirsutum
  Clone ID: LIB3585-037-P1-K1-F11.pep
MGENATTHHTNSANNGANDNQIGFKSRVSVIGSGSWGSVAAKLVAFNTLNLSSFHDEVKMWVFEETLQSGEKLTDAINRTNENVKYLPGIKLGKNVIADPDLDNAVKDANMLVVVTPHQFIDNICKSLVGKVRSDAEAISLNKGME

SEQ ID NO: 106452 - protein, 74 aa, Gossypium hirsutum
  Clone ID: LIB3585-037-P1-K1-F12.pep
QQFPVPPPQYGQRPMVPPPGSMMRGPPGPPPPRPGMPAPPPPRPGMPPPPGAVPVFGPPRPGMPPPPNPPNQQQ

SEQ ID NO: 106453 - protein, 90 aa, Gossypium hirsutum
  Clone ID: LIB3585-037-P1-K1-G3.pep
DAWGLIEPFSRVEIAHIAELIELPVDHVEKKLSQMILDKKFAGTLDQGAGCLVIFDDPKADAIYPATLETISNIGKVVDSLYVRSAKIMT

SEQ ID NO: 106454 - protein, 80 aa, Gossypium hirsutum
  Clone ID: LIB3585-037-P1-K1-G4.pep
TAPILKRGASLETYPPKMKILEEVILETKFTTPLLNITRSTNSRTDGHPAIYRKVLTEGKNVSSRHQDCSHRCLPGVPDT

SEQ ID NO: 106455 - protein, 147 aa, Gossypium hirsutum
  Clone ID: LIB3585-037-P1-K1-H4.pep
PTRPDNHCKFWWYICEETALCLWTGILYIMYLKANISRPWWKDAIMILLLIALSISIIFLLLLLLFHSYLVLTNQTTYELVRRRRIPYLRRIPERVYPFSKGICRNLYNFCCVRSSIYSLEPLPSSQELEEKARPYTCLDILTCRCC

SEQ ID NO: 106456 - protein, 63 aa, Gossypium hirsutum
  Clone ID: LIB3585-037-P1-K1-H8.pep
GGHQCEPPYHQLHRMLTNYIHTSFSTMPTQTITHAPYSLQNRQQCCFINRLDDKPQYLELREN

SEQ ID NO: 106457 - protein, 45 aa, Gossypium hirsutum
  Clone ID: LIB3585-037-P1-K1-H9.pep
LALATNQNFLETELLTLFQATRFFRTFFFGFLFGQSFRTPFLQIL

SEQ ID NO: 106458 - protein, 94 aa, Gossypium hirsutum
  unsure (1)..(94): unsure at all Xaa locations
  Clone ID: LIB3585-038-P1-K1-A10.pep
AARQGIDSAYGGMIFAPVYCTGGISRRDIYPSLTVKLXLAWKKALTITVCYMILQXIGAICXGAGVNKSFQKTQSQKLSRGANTIRSCYSKTSG

SEQ ID NO: 106459 - protein, 130 aa, Gossypium hirsutum
  Clone ID: LIB3585-038-P1-K1-A6.pep
MNNQITNVYIWDMDETLILLKSLLNGSYAEAFAGLKDAQKGVEIGKMWEKHILQISDDFFFYEQIENCNKPFLEALSKYDDGQDLSDYDFNQDGFSPPHDDLNKRKLAYRHRLIANKYKQGLHNILDPEM

SEQ ID NO: 106460 - protein, 178 aa, Gossypium hirsutum
  Clone ID: LIB3585-038-P1-K1-A9.pep
MIDNVKEGVKMHDVVRDMVLSIKRGDHFMVKAGIELEDIPSEPKWKESLEKVSLMNNSISEIPLISPKCPNLSTLLLQNNLNLEKILGSFFEHMHGLKVLDLSHTGICYLPNSISNLTKLTALILRWCCQLRHLPSLAKLTTLRKLDLCRTDINAIPHGIEMLENLTYLNLYSRSLKD

SEQ ID NO: 106461 - protein, 97 aa, Gossypium hirsutum
  Clone ID: LIB3585-038-P1-K1-B4.pep
NLKQLGNNYNADSIMRGEFGIGIKMKRKSNPGRNSFMELEYPEIEEDMRLFVAFGCRFRFRSAFDSYSVACEAFSEKRQQILSSSSSSHLIGVRLHL

SEQ ID NO: 106462 - protein, 171 aa, Gossypium hirsutum
  unsure (1)..(171): unsure at all Xaa locations
  Clone ID: LIB3585-038-P1-K1-C1.pep
PRVRVDEVGLWYGRRKGSKQMGHEERTPVMIAATYGSIGVIKLILSSSDADVNRVCGHEKXTALHCAASGGTVNAVDVVKLLLAAGADANMVDANGHRPVDVIGFPLKLQAVKLTLQELLGTESSVIEQNLRVSTAVANSGSLSPSRDNGSPSCSNSLPKLKSTAAPISTS

SEQ ID NO: 106463 - protein, 149 aa, Gossypium hirsutum
  Clone ID: LIB3585-038-P1-K1-C5.pep
ENKKKKQKNPKPQIKRSGSLDNGGFLLKMVFPISLGTNKKKNKKKNDCDANKNCKLSPKPTVLDASGKSVDKEWWKKRSGSNESESGGSTINSGSTRSIRSSSTSSSSSSCRSISNSSRRYLVLGFLRYRLSFQVKFIGFHPEDIGVFK

SEQ ID NO: 106464 - protein, 164 aa, Gossypium hirsutum
  unsure (1)..(164): unsure at all Xaa locations
  Clone ID: LIB3585-038-P1-K1-C7.pep
MPKSPSLFDFHLLLRGTIFSLAAADAIAAARPITQQFKEAPQFYNSEICPKIVGEDDESDNGTSIFLCSDQSVHVAMTLDSAYIRXSMAAVLSILQHSSCPQNIVFHFVASATANASFLHATISSSFPYLSFQVYSFDDSSVSRLISASIRSALDCPLNYARSY

SEQ ID NO: 106465 - protein, 169 aa, Gossypium hirsutum
  Clone ID: LIB3585-038-P1-K1-E2.pep
GIPVEDACADSEEEHMGIAMAKAVFVPKSERETIAERKRLEEEERAMEEAVKRKLEHRKIETRQIVVEKIREDTEIQKNMELEANIEDVDTDDELNEAEEYEAWKAREIARIKRDREEREAMIKEREEIEKVRNMTEEERREWERKNPKPAPPPKQKWRFMQKYYHKGA

SEQ ID NO: 106466 - protein, 116 aa, Gossypium hirsutum
  Clone ID: LIB3585-038-P1-K1-E4.pep
MASTLLSLASATPSASLCFHEINKGKLNLGCINKEKTNPFIKAKSFGRVSMVVASNVSHFEGITMAPPDPILGVSEAFKADDHELKLNLGVGAYRTEELQPYVLDVVKKVSIFFLN

SEQ ID NO: 106467 - protein, 179 aa, Gossypium hirsutum
  Clone ID: LIB3585-038-P1-K1-E5.pep
GSRTRAVLWEGKLRLVPSKPTDLPFFDLVSIAGKLRAGFGAIGIRPPPPGYEESVEEFVRRNLGAEVFERFIEPFCSGVYAGDPSKLSMKAAFGRVWKLEEIGGSIIGGTFKTIQERNKTPKPPRDPRLPKPKGQTVGSFRKGLTMLPEAIANSLGSNVKLSWKLSSIIQMGNGGYNLT

SEQ ID NO: 106468 - protein, 150 aa, Gossypium hirsutum
  Clone ID: LIB3585-038-P1-K1-E6.pep
MLPFSQNSHYKLSGLVLLLWVSRLVDSKSGFELDDSLTYLWPLPSEFTSGNQTLTVDPTLSFSALGKGGNSKILIEGFERYKKIIFKHVSGISLFDKSRGIRSVYDISELRVIVNSDSEELQLGVDESYTLFVAKKDGKSIVGEATIEAN

SEQ ID NO: 106469 - protein, 158 aa, Gossypium hirsutum
  unsure (1)..(158): unsure at all Xaa locations
  Clone ID: LIB3585-038-P1-K1-E7.pep
DDXGAKSRTEADDISECSQEPGMAGCFQPTRDLANAAVHTREHLHLTEISGVEKEKNSCPAPCSEEYYPSLEDVSFSIPEIPGEAGYSTCGDYQFGLTNLANPSSLELGQESSGFKNHCIGTSRCHEVMNVALQTSVGLNTSTSFINTVTTSDKQEHM

SEQ ID NO: 106470 - protein, 74 aa, Gossypium hirsutum
  Clone ID: LIB3585-038-P1-K1-F2.pep
MGREKEKEKLSEKALNLLRSRLSDPNFIFRPLSDSPDSNYSKLKFIISTSVTEACNNSILLLGPRGSRKVAVLE

SEQ ID NO: 106471 - protein, 73 aa, Gossypium hirsutum
  Clone ID: LIB3585-038-P1-K1-F4.pep
ETQSTQTHRFVITRAMVSHYKVYLIHVVKKIIISIHYALWSSWMFKTLPVLYLILLNTIQSRPIWEHLSTVII

SEQ ID NO: 106472 - protein, 56 aa, Gossypium hirsutum
  Clone ID: LIB3585-038-P1-K1-G2.pep
RLEEIMLISTMVIAGKSFSLCYQVIFFKLKLIEKLGELFRFFSVVLGNRFYPFLLQ

SEQ ID NO: 106473 - protein, 55 aa, Gossypium hirsutum
  Clone ID: LIB3585-039-P1-K1-A1.pep
KEPFSWHHGKLILIVVYNTLASIPTWSGDSLPSPTFCYLIMSPILLVKHLYILYS

SEQ ID NO: 106474 - protein, 163 aa, Gossypium hirsutum
  unsure (1)..(163): unsure at all Xaa locations
  Clone ID: LIB3585-039-P1-K1-A2.pep
GKKGTNQDAMLVWENFSSRSDAIFCGVFDGHGPYGHMVXERRDSLPVILCTQWKASLTVDQTCLNKTKTLLXSTMSQDAASFSMDYECCQSLDIEENEQLPEMYLPLKQAMLXAFKLMDNEFKLHPPISCVCSGTTAVTLVKQGLDLVIGNVGDSRAVLAMRD

SEQ ID NO: 106475 - protein, 181 aa, Gossypium hirsutum
  Clone ID: LIB3585-039-P1-K1-B11.pep
IKGKKISNLQKLSAEEKSQMASSSQKGIVITIPVLVLSVSAAAIFLFFLLSSLSSSPCTCPPSIPDSTFTTTAAVVTGGTVVEEVVDRRISVSRDDIEWVKDQIRANGLHMQDNVLRKGINPRTRAQQLEDLNNFKGISHYGGSEANNHTALPCPGELLVEEHHSNYGEPWAGGRDVFEFL

SEQ ID NO: 106476 - protein, 63 aa, Gossypium hirsutum
  Clone ID: LIB3585-039-P1-K1-C4.pep
KAKAMADFGDDEYKHMLCVEAAAIEKPITLKPGEEWRGRQELSAVPSSYCSGQLDPRRVLQGS

SEQ ID NO: 106477 - protein, 182 aa, Gossypium hirsutum
  Clone ID: LIB3585-039-P1-K1-D11.pep
SNARRQSLRSSERLAREGFDEGTGELSSSYGLNADGVSSSSRQSLRANERLPGAVLLARARLVERLRGVSVSANRRSNRAPPNASHREHVTRDDFRIISELSTGLAARGSPLTSEAERFELLRETNKKPPGLTQEALDRLPLEIFRSQDINVERKTSRESRDCSICLESFGEGDVLTQLPCG

SEQ ID NO: 106478 - protein, 177 aa, Gossypium hirsutum
  Clone ID: LIB3585-039-P1-K1-D12.pep
MEKACNSHYHNQSLLLLLPLFLSLLVAGLAYPTQNEQSQIISRFQQYLQINTTQPSPDYQSSTQFLLSQANSLSLESQVIEFVKGKPVILLKWPGSDLSLPSILLNSHMDVVPFEPSKWTHPPLGAYIDEGGNIFGRGSQDMKSVGMQYLEAIRRLKLSGFQPKRSLYLSFVPDEEI

SEQ ID NO: 106479 - protein, 149 aa, Gossypium hirsutum
  Clone ID: LIB3585-039-P1-K1-D3.pep
WDCCSRHCYAHVLKVDVGPHCQETQNTVTMKSAVAPQDMLKFATATEPVQLPDQALTLIHDTSISSSNLESYDSSVIGVWGIEDKIVLLEDEANHVAKMEKSDVPSMCSPEQNKIPEDESKIAPDESSIPICLKLAEKGDDQAKQVEKD

SEQ ID NO: 106480 - protein, 182 aa, Gossypium hirsutum
  Clone ID: LIB3585-039-P1-K1-D4.pep
RTRGQQNLKRLNEDVIDYDLLEDLVCHVDETCDKGAILIFLPGVVEIHTLLDRLAASYRFAGPSSDWLLPLHSSIAADEQKKVFLNPPDGIRKVIIATNIAETSITIDDVVYVIDCGKHKENRYNPQKKLSSMVEDWISRANAKQRRGRAGRVKPGICFCLYTRHRFEKLMRPYQVPEMLRM

SEQ ID NO: 106481 - protein, 93 aa, Gossypium hirsutum
  Clone ID: LIB3585-039-P1-K1-E11.pep
PRVRPRVRPRVRKNKSKQKLPAKSPHKAPPAPDSLFQASASSFYTRLISLLLVPSFIAYPHGSDCKGFLCGTSFPFFYLKLLNPMDSFSLVHI

SEQ ID NO: 106482 - protein, 168 aa, Gossypium hirsutum
  Clone ID: LIB3585-039-P1-K1-F8.pep
PRLRKKQDLIIQLCPRQCPYSCEDGNERRGGTWGSIIVAHAASFDTPAMDPTLKKKIIDDLEMNLMRNAYYKDVEKACKRWYSLYTPPGTGESSLADDMANDLKDDIHDMGLTSARSEAALMRTLLSTTNRSILMIEDIDGISQVLGRQMRNLPDKPPDTTALTLYGI

SEQ ID NO: 106483 - protein, 169 aa, Gossypium hirsutum
  unsure (1)..(169): unsure at all Xaa locations
  Clone ID: LIB3585-039-P1-K1-G6.pep
GCCNRTRQRKRKREGIDYNAGIRLEKRPTPGFYDVADXDRPVEPPKFPTTIEELEGKRRVDIQAQLTKHDIANNKISQRQDTPSAILQANKLNDPQSXRKRSKLILPSPQICDHELEETAKMGYASDLLAENEELAGGSGATLALLANYSQTPRPGMTPLRTPQETPLE

SEQ ID NO: 106484 - protein, 182 aa, Gossypium hirsutum
  Clone ID: LIB3585-039-P1-K1-H10.pep
HDAHVQKTHRDTYPLESLKGGRTRPVVLNWEKRGRSSNYDGPIMSVSPKNASMANMPSVNVYKQRGYPASVEKEMPSASDGDAVADLMEQHDQFISSMQSRLAKLQAVHRYWERKDIKGAIGAIEKMADHAVLADVMSIVIEKMDIVTLDICTCLLPLLSGLLGSDMDRHLSICLDMLLKLV

SEQ ID NO: 106485 - protein, 60 aa, Gossypium hirsutum
  Clone ID: LIB3585-039-P1-K1-H2.pep
GHTYSDAWVNLKCWNVHKTNFERVCFSFFCQSKALLPMLGCVSLVCPHHCMQNLLILDLL

SEQ ID NO: 106486 - protein, 168 aa, Gossypium hirsutum
  Clone ID: LIB3585-039-P1-K1-H4.pep
RQRDLLFEASGMSSFKIRSISWWLFRALLIHQQILDERSSSLFELLQVFKGETLGHFGSFEKVTSYWGAQLQDGEASTIVSMVHLEAGVLEYIYGRLDPCRLDLESAEVAAGLQLSVTGILGLRTVHQVEPKAQMILVANTSSKSVSGDINTSIAPDTQLTGPNVSEA

SEQ ID NO: 106487 - protein, 69 aa, Gossypium hirsutum
  Clone ID: LIB3582-027-P1-K1-A6.pep
PRVRPRVRIWGKCLTDFISVRHFPSPLHPGKFYTLLFCFLSSPPSQNLIPLRKGKPDEILHTAAVFLSF

SEQ ID NO: 106488 - protein, 150 aa, Gossypium hirsutum
  Clone ID: LIB3582-027-P1-K1-B1.pep
MTLSDEEDEFLANFLESELSDEEEPKAKRLRVVKEDEEKEKEGKGDGASSNMNPNPNPGQVKNNNNWNNPRRIESGTFSKIPPELFTQILKFLSSEDLVSCSMVCSFLNYAASDESLWRRLYCMRWGLLPPTKIRECPWKKLYIQRDEED

SEQ ID NO: 106489 - protein, 93 aa, Gossypium hirsutum
  Clone ID: LIB3582-027-P1-K1-B7.pep
THHVSQFAFKSPMQHTSSLRRHTYLSPQLLIIQRASQVPIYHECSIQHSALFSVSPLRSTVSTHESAHSFPSKNNEGSTLPHLKDSASQCVVF

SEQ ID NO: 106490 - protein, 80 aa, Gossypium hirsutum
  Clone ID: LIB3582-027-P1-K1-C11.pep
MSFLSYFGGCNYHLTSKLATGLAADENPLGVVLGGILGQVLCTTAAVLEGKRPTSQISEKIAIQIHIFPSFPYATAMFCI

SEQ ID NO: 106491 - protein, 162 aa, Gossypium hirsutum
  unsure (1)..(162): unsure at all Xaa locations
  Clone ID: LIB3582-027-P1-K1-C2.pep
PTRTPTRAEALDQINEPKRPSDKRLRFPLQDAYKIGGIGTVPVRRAETGVLKPGMVVTFGPSGMTTEAKSVEMHHEALTEALTGDNVRLNVKNAAAKDLKRGFVSXNYKDDPAYEADNFTSHVMIMNDPGQIANGYTPGLDCHTSHIADEFAELLTNIDRRS

SEQ ID NO: 106492 - protein, 172 aa, Gossypium hirsutum
  Clone ID: LIB3582-027-P1-K1-C4.pep
PTRPRTRGSDLVDRPNACNFSWNYAIFWQISRSKSGDWALGWGDGCCREPKEGEESEATRILNLRLEDDTHQRMRKRVLQKLHTLFGGSDEDNYALGLDRVTDTEMFFLASMYFSFPQGERGPGKCFLSGKHVWLSDALQSGSDYCVRSFLTKSAGVQTIVLVPTDAGGVEW

SEQ ID NO: 106493 - protein, 105 aa, Gossypium hirsutum
  Clone ID: LIB3582-027-P1-K1-E11.pep
GRSFVCGALAVVHAFVPHVPVAGTRSFTGISYSSCAALCIRTCSSLLIYSLSANSTACSLASSAAPAVSLPDCGDLSLTRWSNGVRLFSSAYAMPRPRIFSLARP

SEQ ID NO: 106494 - protein, 147 aa, Gossypium hirsutum
  Clone ID: LIB3582-027-P1-K1-E12.pep
KVCYSLELQELECPLGKAGPDCLSERYMLQTVLRKDSTPFESYFLPYGEKVMSDAANFLLEPLLSNYSFGGLNTWTYFILDIPHGAAGGNLHIRLTSDRKLNYEIYVRNGGLPSLVNWDYYYVNKTSNSHGSMFFALYSSSEEKADF

SEQ ID NO: 106495 - protein, 84 aa, Gossypium hirsutum
  Clone ID: LIB3582-027-P1-K1-E6.pep
LFLKPVQWIEKERKDKKAQAFTLIFLLNHRLDSMIKFSFSFILIAVFDLITDQIRLPQILSSNSSMLHKKSQILKVLRFSDQSH

SEQ ID NO: 106496 - protein, 167 aa, Gossypium hirsutum
  unsure (1)..(167): unsure at all Xaa locations
  Clone ID: LIB3582-027-P1-K1-E8.pep
VNVAINPSALSLCLVSLSKGWLARPTFASQHHQNECQINRLLASAPHTRIHSEDCTTEWRNLNCQQLMSAGVSVKTQTMEPNGLVKPSYTKAPQLLYIVTXRGMRGIVMPGCAGTFHDSQPRQHHSRCRYQDQHQKVRRFTHSDIIALPQGVDHWSYNDSHARVATI

SEQ ID NO: 106497 - protein, 41 aa, Gossypium hirsutum
  Clone ID: LIB3582-027-P1-K1-F2.pep
DALCSSSFCAAGVVVSRNVTCTLGSELAPVILGHFRCFVVT

SEQ ID NO: 106498 - protein, 87 aa, Gossypium hirsutum
  Clone ID: LIB3582-027-P1-K1-F3.pep
SLCSQRVWCTICMFWYVMENTFLISFTYWLYVENVSPYHRSFNSLCFQFSDHSQKDPQFLLLENPTISPYLRPQHTPSLALQKEKVC

SEQ ID NO: 106499 - protein, 51 aa, Gossypium hirsutum
  Clone ID: LIB3582-027-P1-K1-F7.pep
ILITIHKIILKFNNINKWSLDLVIYSQVRFLYYSDNHNFIINIPNNTLYRF

SEQ ID NO: 106500 - protein, 59 aa, Gossypium hirsutum
  unsure (1)..(59): unsure at all Xaa locations
  Clone ID: LIB3582-027-P1-K1-G2.pep
KRAIGLTQRITLSGNLXVVFKCLTWVICNVVGELIXCWLFVKLLNLNGNCLQLVLLGYM

SEQ ID NO: 106501 - protein, 91 aa, Gossypium hirsutum
  Clone ID: LIB3582-027-P1-K1-G9.pep
LAQNLGSTLARFQHNPKQMFRSNSPSRMCLQQSPAAARSGIDLLHARRTLHEHLGPSRCPLSVTIGGRGVVGGQGTALTESGGRENKENPS

SEQ ID NO: 106502 - protein, 116 aa, Gossypium hirsutum
  Clone ID: LIB3582-028-P1-K1-B12.pep
RHVGPGPIDRHGLYTVCKTYGKTIHFLQVNKGDTLPLGLPQLMMALTRDGQLHEKLGRDVDKRFGVSFEKERANRAELTGPTHGIHPLADGGVKGLIPKLKEVYCTPTHTVALVFV

SEQ ID NO: 106503 - protein, 83 aa, Gossypium hirsutum
  unsure (1)..(83): unsure at all Xaa locations
  Clone ID: LIB3582-028-P1-K1-B2.pep
MQGHVSQDTPVGVPAALIWDVYRGLELGRLVDKLAPEVLGRVEFLEGDGGVGTIVKLTFPPGTPGRGYMKERFTXMDDENRVK

SEQ ID NO: 106504 - protein, 42 aa, Gossypium hirsutum
  Clone ID: LIB3582-028-P1-K1-B3.pep
LLNELLFYQKESTKFRVNIYKLKKYYLLFNRVNIFQVLYLFK

SEQ ID NO: 106505 - protein, 164 aa, Gossypium hirsutum
  unsure (1)..(164): unsure at all Xaa locations
  Clone ID: LIB3582-028-P1-K1-B5.pep
METIKPKSALTNSNNKSRLARTFEKVINLRTATKIASSNGVGICVLASQRKLPHHGSTPDRKTSSHAPNNSMVKQKAVLEALLAKVFASVTSIKAAYAELQLAQHPYNSDAIQASDQAVVEELRALSEVKRKFLKKDLDLSPXVTLMLAEIQEQQSLMRTYGIT

SEQ ID NO: 106506 - protein, 179 aa, Gossypium hirsutum
  Clone ID: LIB3582-028-P1-K1-C11.pep
PNHPALGGSVSTNSEGMMGHPSASILAMKLYEERVKNPQSVDSETSSALIDANRMALLKTQANPHSLLVQSSRGNMSVALQQIQSQTPLATVTAQDIKSEVNLGGNQKSLPMDPSSIYGQAILQPKSGLGGLNQGVSSLPLRGWPLTGIDQLRYKATLEIQQTLGIQTLVGLVNCLRAT

SEQ ID NO: 106507 - protein, 88 aa, Gossypium hirsutum
  unsure (1)..(88): unsure at all Xaa locations
  Clone ID: LIB3582-028-P1-K1-D1.pep
MHLAARPVDYLMALLRYLSLNDLEPDTLCDDSDVPIVDAFSCDHFRMYEFKVKRCARGRSHDXTEGPYAHPNEKAQWRDSRKFRYSQS

SEQ ID NO: 106508 - protein, 190 aa, Gossypium hirsutum
  unsure (1)..(190): unsure at all Xaa locations
  Clone ID: LIB3582-028-P1-K1-E1.pep
HASDLPNNHLYGEIPPDIFFANSSLRYLNLSNNNFSGHIPNGFISGLVILDLSNNMFSGKIPREIGLFSGLKFLDLGGNVLLGKIPILISNITTLKYLTLASNELVGSIPHEIGKMKSLKWIYLGYNNLSGEIPKEIGVLTCLNHLDLVYNNLTGQIPSSIGXLKDLNYLFLYQNKLTGSIPDSIFGLKK

SEQ ID NO: 106509 - protein, 192 aa, Gossypium hirsutum
  Clone ID: LIB3582-028-P1-K1-E2.pep
IFQHRNGLSTQTKQISFLETLPDDAQVSREERVFRFWINSLGNSTYIDNVFEDLRNGWILLETLDKVSPGIVNWKIANRPPIKLPFKKVENCNQVVKIGKQLKFSLVNIAGNDIVQGNKKLILAYLWQLMRYNILQLLKNLRFHSHGKEITDVDILRWANTKVSDSRSQSRMDSFKDKSLSDGIFFLELLSA

SEQ ID NO: 106510 - protein, 95 aa, Gossypium hirsutum
  Clone ID: LIB3582-028-P1-K1-F5.pep
LFSSQATHPSIHLHCCPSCFKFVLVRPSIEHFVKRKLSKVMIFDLPTHFHYRLNVFYLNWLLLWLLEGLLRSKPLAPSIVSLPQPEHAPSGSPSF

SEQ ID NO: 106511 - protein, 144 aa, Gossypium hirsutum
  unsure (1)..(144): unsure at all Xaa locations
  Clone ID: LIB3582-028-P1-K1-F6.pep
MNEWDSLHPSQGLLTTKELTDTSVVAQMTMLPLEXADPHLTMKDLTLAYVVATYGLYRSLTSEGIKTKMKTGSIDNSVEHEQILSAVRSXLPLSVTTADDANEXNKDVLRLRYRYLDLRRRPMYMNIMLRHILATLILRYLEDV

SEQ ID NO: 106512 - protein, 168 aa, Gossypium hirsutum
  Clone ID: LIB3582-028-P1-K1-G1.pep
MEPLCDFCRGVRAVVYCKSDSARLCLRCDGCVHSANLLSCRHARSLLCEKCNSQSSIVRCLDERLSLCQDCDWNGNGCLSLGHRREPLNCYTGCPSLAEFRRIWSSVLDASSRGGFDTGLSQSGNDDCFANCSDQREQGASFGSAGTKLNELDSSSKLKPCMESSCLI

SEQ ID NO: 106513 - protein, 113 aa, Gossypium hirsutum
  Clone ID: LIB3582-029-P1-K1-A10.pep
IQRVEFEAFPTVYFHCGKYGHLKNSCLFFLAERSMQGEKEDAPVTVDKDADSVTMAEAFGPWMVVQRKSRRNQARKPNHHTKVTEGNPDGSRFTALFTENNQLADLGARKSRA

SEQ ID NO: 106514 - protein, 154 aa, Gossypium hirsutum
  Clone ID: LIB3582-029-P1-K1-A5.pep
PPLSQNGVSLSSNISQPSQHRSNKLRPIWEAPSRTSKMPRLKSFRLTKELVAQRAKDNVIIVTFGNFAFMDFILTWVKHLTDLGVSNLLVGAMDTKLLKALYWKGIPVFDMGSHISTDDVGWGSPIFHKMGRQKVLLINAILPFGFELLMCDTD

SEQ ID NO: 106515 - protein, 201 aa, Gossypium hirsutum
  unsure (1)..(201): unsure at all Xaa locations
  Clone ID: LIB3582-029-P1-K1-B11.pep
ALHKSSWSKEAEIIKEPHFCTVLQNLLLYFPACISTDESGKRLFLSDSNHHRIIIFDGDGKILDXCFEDGEFESAKLLRPAASFYHETEDCLYIVDSENHAIRRADLERRVLETVYPTSSIHKKSTGLWTWIRSKLGFTSDDDVKFEEHDSPSLMCPWHLIKTEDNFLIISRSFETLWGMDFELGEVKEVVRGFSNTLEFC

SEQ ID NO: 106516 - protein, 46 aa, Gossypium hirsutum
  Clone ID: LIB3582-029-P1-K1-D9.pep
LDSESHPPCSHSLRAVWVVLTRRPIHSLASYLALVSFAFLPFLLRT

SEQ ID NO: 106517 - protein, 84 aa, Gossypium hirsutum
  Clone ID: LIB3582-029-P1-K1-E4.pep
PQGQKQNPPKAVQKVSPSESHKDLWLAVRDGSLPDVESALTLLKKTAGTVNCRNRFGLTSLHIATWRNHLPIIQRLLAAGADPD

SEQ ID NO: 106518 - protein, 119 aa, Gossypium hirsutum
  Clone ID: LIB3582-029-P1-K1-F11.pep
MIFVDGLPFSLNFSSSSSSSSKSQPSDLLAALMEHQVLVSATHSFKSIQERKVSASMDSKLITSSNSSRYVYLFQREYATVDPSLVHYVGTDEATTCVGVVIRNRKNGMTSVSHMDSSK

SEQ ID NO: 106519 - protein, 104 aa, Gossypium hirsutum
  Clone ID: LIB3582-029-P1-K1-G1.pep
MQVSVCSNSCSLNLNSNNVKSHLLMGRRELLSTLCSTGSHKEVVSHKPISILRMISERMADFGEVIIGKSIPFATRRVVLAGLFACWTFHPSRYLSAQALGDPS

SEQ ID NO: 106520 - protein, 125 aa, Gossypium hirsutum
  unsure (1)..(125): unsure at all Xaa locations
  Clone ID: LIB3582-029-P1-K1-G3.pep
PTRPPTRTRRRQLKSSATLPTNNTTTASSSSSLSSVYAQGVLHAPTNFLFPHQQVLEIQAQEPNIISPHQIGILYPTSXPFTSFVNSPPSNASLGNNGVEDLVYISNPIYDNDAGTGIAENSVMG

SEQ ID NO: 106521 - protein, 160 aa, Gossypium hirsutum
  unsure (1)..(160): unsure at all Xaa locations
  Clone ID: LIB3582-030-P1-K1-A1.pep
PRVRPRXRFIKSRFPSLRSTQAPFSSSYMRDSSEYNLETLEEDMCVRIRKEMCDTSLSSSLKKDDVSPASGGSLGSSRDADCHRPGKYIASLSSKTSENSLGFENCNGDRELTESASKPFVYDALGLLDCDGIHLSSCGHAVHQDCFDSYLSSLKERYAP

SEQ ID NO: 106522 - protein, 68 aa, Gossypium hirsutum
  Clone ID: LIB3582-030-P1-K1-A4.pep
KVQVTAILSLAAACSSAGVTVLYSRDLGYCKSPQIPCSHFKASILFAFISWFLLAISSHVTFWLLAAV

SEQ ID NO: 106523 - protein, 84 aa, Gossypium hirsutum
  Clone ID: LIB3582-030-P1-K1-A7.pep
KENALITNLKKGYIVFILSMLRREIVDGLTCLYEDMWCIMIALMAIYHHFMAAILFYVSVGLLLLSCKYQKCCQNRVVDADLAW

SEQ ID NO: 106524 - protein, 159 aa, Gossypium hirsutum
  Clone ID: LIB3582-030-P1-K1-A8.pep
MPVEWTIDGGDGFRKFSTVFQSLNRERALHSCSFGTGKPLDFMTPGMSLKERYFHSTGSHFSAKQDYYEILGVPENATRDEIKKAYHALAKKYHPDANKNNPSAKRKFQEITDAYETLQNPEKRREYDTMRAGSSEDMGYGANGAEGFGFYGGGGAKGF

SEQ ID NO: 106525 - protein, 82 aa, Gossypium hirsutum
  Clone ID: LIB3582-030-P1-K1-B12.pep
SHIDATVPDRVLHELIYVADVPDIVLHVNHKSMPTSQAWSYTQSHIEILCHNICILTIPKVHMRTSDVVTQSIQASKYCFHA

SEQ ID NO: 106526 - protein, 59 aa, Gossypium hirsutum
  Clone ID: LIB3582-030-P1-K1-B2.pep
QGFRKFLRKRMINIYKIYYSKIIYISFTMHEMLLQRLAYTRSTVLLNMGTKYEPYTKIE

SEQ ID NO: 106527 - protein, 214 aa, Gossypium hirsutum
  unsure (1)..(214): unsure at all Xaa locations
  Clone ID: LIB3582-030-P1-K1-B5.pep
IEAYGQAALYEEALVAFNTMNEVESKPTIETYNSLLQTFARGGLHKEAEAILSRMNEAGIAKSRDSFNALIEAYRQGGQFEDAIKAYVEMEKARCDPDERTLEAVLSVYCFAGLCDESNEQFKEIKALGVLPSVTSYCMMLAVYAKCDRWDDAYKLLDEMLANKVSNIHQSIGQMIRGDFDDDXKWQMVEYIFDKLNSEGYGFGIRFYNALLET

SEQ ID NO: 106528 - protein, 69 aa, Gossypium hirsutum
  Clone ID: LIB3582-030-P1-K1-B6.pep
NSHPKAIRLKFQQQNPALISPLSYKRCGTILNIDQYHSFFSLIYVIVLRCKMIKATRLVHILYSIFAGI

SEQ ID NO: 106529 - protein, 162 aa, Gossypium hirsutum
  unsure (1)..(162): unsure at all Xaa locations
  Clone ID: LIB3582-030-P1-K1-C3.pep
GPTKVSGPDGFPANFYQKYWHIIGXDTSMFCLDILNNGKSLDEINRTQLVLIPKISNLLNLKNFGSISLCTVIYKIIAKTVANRLQKVLDECIDDSQSAFVPGRLITDNVLLAYEILHSFKNKRTGQKGLMALKLDMSKAYDHVEWPFIKGIMSKMGFVPRV

SEQ ID NO: 106530 - protein, 82 aa, Gossypium hirsutum
  Clone ID: LIB3582-030-P1-K1-D6.pep
MQVTVSGAKGEAEAGNIARSVAASSLVKAAVYGRDPNWGRIAAAAGYAGISFNQNNLQILLGDIMLMDGGQPLEFDRIAASN

SEQ ID NO: 106531 - protein, 167 aa, Gossypium hirsutum
  Clone ID: LIB3582-030-P1-K1-E12.pep
RALLSTHKNSSVCTLKNQPNNHSVPPDTPKEMLSSCLSSNLARRWCCFEWFYSAIDYAWFAKREFVEYLNHVSLDHIPRLTRVEWGVIRSSLGKPRRLSEHFLLEEREKLKQYRESVRQHYTQLRVGTREGLATDLAPPLCVGQRVIAIHPKTREVHDGKVLTVDHD

SEQ ID NO: 106532 - protein, 145 aa, Gossypium hirsutum
  Clone ID: LIB3582-030-P1-K1-E5.pep
MAEDSSRAFVKDVKRIVIKVGTAVVTRNDGRLALGRLGALCEQIKELNSQGYEIILVSSGAVGLGRQRLRYRRLVNSSFADLQKPQVELDGKACAAVGQNSLMALYDTLFSELDISSAQLLVTDSDFRDRDFRKQLNETVEAYYP

SEQ ID NO: 106533 - protein, 171 aa, Gossypium hirsutum
  Clone ID: LIB3582-030-P1-K1-E6.pep
YEAVFLYKGRRKIASKGDAVANWRVHKLVIYCGFGVLAGVLGGMLGLGGGFILGPLFLEMGIPPQVSSATATFAMLFSASMSVVEYYLLKRFPIPYALYLAGVATIAAFVGQHVVGKVIKIMGRSSIIIFILAGMIFGSAISLGGIGIAKMIKRIERKEYMGFENICSYRP

SEQ ID NO: 106534 - protein, 73 aa, Gossypium hirsutum
  Clone ID: LIB3582-030-P1-K1-E7.pep
REPSSRKPPNNMKNPDLNQRFRTFFFIFPLDLLGHLANTYNRSSIRTISVQALQESSTNRREPSGSSFLDCGC

SEQ ID NO: 106535 - protein, 74 aa, Gossypium hirsutum
  Clone ID: LIB3582-030-P1-K1-F4.pep
ITGKTRVATHYDEHDLHIVASHLQLDQCQGQSQGLDQLTWLAGPNSHCSSYHTTHKSMRCSHCMKDLSLIYVEC

SEQ ID NO: 106536 - protein, 59 aa, Gossypium hirsutum
  Clone ID: LIB3582-030-P1-K1-F6.pep
APPKSVYQKKEKKKKKKKKKKKKKKKKNKKKKKKKKKKKKKKKKKKKKKKKKKKKGRPF

SEQ ID NO: 106537 - protein, 122 aa, Gossypium hirsutum
  unsure (1)..(122): unsure at all Xaa locations
  Clone ID: LIB3582-030-P1-K1-G1.pep
RNTGYNLPFGPRMKNIDTSSLSCTSSRAAHDLSFDGSSKDERAASLPSYSKXKSFRLVSGSCYLPHPAKEETGGEDAHFICANDEAIGVADGVGGWVEVGVDAGEFARELMCNSVAAIQDEP

SEQ ID NO: 106538 - protein, 145 aa, Gossypium hirsutum
  unsure (1)..(145): unsure at all Xaa locations
  Clone ID: LIB3582-030-P1-K1-G2.pep
RRSHSKQHRCSTATVLAMLSDLNAMIWRQKYSVAVPLQTMYSXISVWTEIXLPLAHAGSYXWRKKPEAEDPAKTNKIPRQMAKQARYMNPDLSMLIGGILPFGAVHIELSLILTSIWSHQPYYIRGSLFIVXVIIIITRAEITVV

SEQ ID NO: 106539 - protein, 62 aa, Gossypium hirsutum
  Clone ID: LIB3582-030-P1-K1-G6.pep
TSHVSRTVSACVNIRHRLLRVFIPQFSITLASSYTVVFSTAQQPARNEKDQSEAPSSLCHTP

SEQ ID NO: 106540 - protein, 59 aa, Gossypium hirsutum
  Clone ID: LIB3582-030-P1-K1-G9.pep
PTRPIASGRSRSRTPMRKFCMREFSINDLIIIKLYSFISLRSIPILHPQLCQPDRYRID

SEQ ID NO: 106541 - protein, 182 aa, Gossypium hirsutum
  Clone ID: LIB3582-032-P1-K1-A11.pep
PRVRTHLQEVLQLLRTHQLYAKQSKCIFGAVQVEYLGHVISQGTISMDRTKVNGVLDWTIPKSVKELRGFLGLSGYYRQFIRGYGLLATSLTTLLKKNVPWHWSEVEQTTFDQLKAAMCQAPVLTLPNFQEPFCVETDASGHGVGAVLQQKGKPVAFFSKALGVKYQALSIYDKEMLAVILA

SEQ ID NO: 106542 - protein, 183 aa, Gossypium hirsutum
  Clone ID: LIB3582-032-P1-K1-A2.pep
IKAAVQPVRDELENERRLRKRSESMHRKLARELSEVRSSFANAFKELERERKARILLENLCDEFARGIREYEQELRFLKHKYEIDHIDGENPERLILHISEAWLDERMQMKLAEGRTDLAEKNSIVDKLSLDIETFLEAKRSTGSRKSDLKGNCSHQHSLESFPLNEAVSAPQGAADEAYSSG

SEQ ID NO: 106543 - protein, 186 aa, Gossypium hirsutum
  Clone ID: LIB3582-032-P1-K1-A5.pep
GNFGISAWPSDGGTSRAGSVDDLRCDAADTGSRHHSSCGSSPRMSDGPAKELKEEISEFGSDDEEVDDPPEVDSDEDFADRHKQFQEEVGSVDEGSTKSDEEYDDLAMEDMVENDDRLEDEDRRGKVIVSSEDQATPTKGDKASKSDQLSVPREKSEKGFARMRKRSLSNPDMKKHVSIINDCILS

SEQ ID NO: 106544 - protein, 86 aa, Gossypium hirsutum
  Clone ID: LIB3582-032-P1-K1-A6.pep
PNTNTNPLNKPKTNKVKMGNPSLRSSSRKQFPAAGSYAPRRYSRPTRLEPPTPSHPRLPRQPCPILLREAPIEAEVRGADDPQIRC

SEQ ID NO: 106545 - protein, 43 aa, Gossypium hirsutum
  unsure (1)..(43): unsure at all Xaa locations
  Clone ID: LIB3582-032-P1-K1-A9.pep
PSTRGENDRCKRYKDCKRXCKWNTHVQKEQQWLEXSCKLQFGQ

SEQ ID NO: 106546 - protein, 103 aa, Gossypium hirsutum
  Clone ID: LIB3582-032-P1-K1-C3.pep
SFFWRRRTHFHLFEKRRQSWLARCTPSGYTLDMKNPLDESGPSTSLVLTGVTLHDAGVTTHAASWYVPYRTAHRGLRMASRIFMIHYSGPVRAASCISGIIGK

SEQ ID NO: 106547 - protein, 61 aa, Gossypium hirsutum
  Clone ID: LIB3582-032-P1-K1-D1.pep
PTRPPTRPPTRPPTRPNYRRLLIDETRRKGLTQECFSRSWYTNDLHICFLITQRYYFSSKL

SEQ ID NO: 106548 - protein, 81 aa, Gossypium hirsutum
  Clone ID: LIB3582-032-P1-K1-D2.pep
LKRNYINSANPQNCKREHQIVVKNEGKIRGQSRCACCRVDCARCRRGTATAPSSFNIEKQRKLERYSKTLALIGSEAGNQR

SEQ ID NO: 106549 - protein, 67 aa, Gossypium hirsutum
  Clone ID: LIB3582-032-P1-K1-D9.pep
RTLLCKVLKWLLLLQSATGRPGVTKSQDLTLVGNQSMVVIEMKMATELTPSKARGTAMASRTLEDTQ

SEQ ID NO: 106550 - protein, 55 aa, Gossypium hirsutum
  Clone ID: LIB3582-032-P1-K1-E10.pep
RTCPVTVNYSGAMTEGRILLQQYIPREEARKLELCVLFFGNAALICPTFFSIRDV

SEQ ID NO: 106551 - protein, 58 aa, Gossypium hirsutum
  unsure (1)..(58): unsure at all Xaa locations
  Clone ID: LIB3582-032-P1-K1-E9.pep
YALRNMIRKVVNREDALTRVIVTRAEKDLIDIIELYYXRNNASLDQAAAKDTSGDYKA

SEQ ID NO: 106552 - protein, 41 aa, Gossypium hirsutum
  unsure (1)..(41): unsure at all Xaa locations
  Clone ID: LIB3582-032-P1-K1-G2.pep
TPCMEDPKRAGEHPDRRYQDCRQRCQHEEXRLHPHCKQSCT

SEQ ID NO: 106553 - protein, 156 aa, Gossypium hirsutum
  Clone ID: LIB3582-032-P1-K1-G6.pep
ATGAISVDYLFQMGVNDDHKLSLHENGRTTVMEGHRVDFRDGSNPSSYSMMIIECSWDSKDMVWVYMRKRNDKTSPNDLNTYKKVMRSIRDNITADILLKEIDDIICLPIYKHPPTHQLSFNYLCMFMSILIVIFKCHNEKWLFWLTYIWKNKYYH

SEQ ID NO: 106554 - protein, 35 aa, Gossypium hirsutum
  Clone ID: LIB3582-032-P1-K1-G8.pep
FLTILSLLECQLYLQSDSPASRVVHIGNLFCVSFP

SEQ ID NO: 106555 - protein, 74 aa, Gossypium hirsutum
  Clone ID: LIB3582-033-P1-K1-A11.pep
NKNAKCALCAAYIRPNGIIPRKWPIEKLNDRSIIEFICLHCLKLTKLMKAYSVCYVSLFYRLLTPVTCSGGDRQ

SEQ ID NO: 106556 - protein, 72 aa, Gossypium hirsutum
  unsure (1)..(72): unsure at all Xaa locations
  Clone ID: LIB3582-033-P1-K1-A3.pep
AISLAILSILNIDATQHHALTPSPSSTVDNSYLILNMADCXDFESSGNKTSNPEGTCRTGLKTVFKAEPQCL

SEQ ID NO: 106557 - protein, 176 aa, Gossypium hirsutum
  Clone ID: LIB3582-033-P1-K1-A6.pep
MSVSEEQNTKLFKARRTVVQMLRDRGYSVPDSDIKMTRQQFIEKYGENVHLKRDDLLILCSKGDAPTDQIYVFFPAEVKVGVPMVRNCAKRMKADNVYNAILVVQRALTAPAKAAINEINSYFHMEVFEEAELLTNITEHMFVPKHTVLTNQEKKELLEKYRVKETQLPRILVSDP

SEQ ID NO: 106558 - protein, 129 aa, Gossypium hirsutum
  Clone ID: LIB3582-033-P1-K1-C1.pep
MPQESLRSIVYRSFVTCDDPKGVVESRTIRRSKTGSTDTMVRNKTDECRQKTKNRSTKGTSCQLLEVSRRAHKLNNVIDSCSKRLWYDTNSRDVAKDLLKGALDLQDSLHVLGKLQEASHYMAKWDRVR

SEQ ID NO: 106559 - protein, 177 aa, Gossypium hirsutum
  Clone ID: LIB3582-033-P1-K1-C5.pep
ELVKMCRTNEPLWVRNNETGKEVLNLDEHSRMFHWPLNLKQRSSEFRTEASRDSSVVIMNSITLVDAFVDANKWMELFPSLVARAKCVQVISQDVSGTNGCLQLMYAELHVLSPLVPTREAYFLRYCQQQNVEDETHWAIVDFPLDGFHNSLQTSFPLYKRRPSGCLIQDMPNGYSR

SEQ ID NO: 106560 - protein, 120 aa, Gossypium hirsutum
  Clone ID: LIB3582-033-P1-K1-D1.pep
IRYVDVVLTIPKGTLFPMCGMNLAFNRELIGPAMYFGLMGDGQPIGRYDDMWAGWCTKVICDHLGLGVKTGLPYIFHSKASNPFVNLRKEYKGIYWQEEIIPFFQQAVLPKDCTTVQKCY

SEQ ID NO: 106561 - protein, 65 aa, Gossypium hirsutum
  Clone ID: LIB3582-033-P1-K1-D12.pep
QIFSLGICSPVFPSVHGSFIVNPAVSLFIIVLVSDICFFLLLFSVCFCHGFLFSPLEDKVIKKKT

SEQ ID NO: 106562 - protein, 175 aa, Gossypium hirsutum
  Clone ID: LIB3582-033-P1-K1-D7.pep
PTRPQNLIGSGSTGRVYRLDLRKKGVVVAVKRLWDGEGLKVLAAEMEILGKIRHRNILKLYACLMKGRSSYLAFEYMENGNVFQALHRVKKDGKPELDWHRRHKIALGAAKGIAYLHHDCSPPIIHRDIKSCNILLDKDYEPKIADFGVAKVAEKSLKGSEWNCFAGTHGYIAPE

SEQ ID NO: 106563 - protein, 91 aa, Gossypium hirsutum
  Clone ID: LIB3582-033-P1-K1-D9.pep
IRTNGFSDLYQKTTRIILWNSHYERMEENYRRLKEINKKLRREVRQRMGGDLNELNINELMESQEVIDAELSARVLQLINVTDSGFHSQFN

SEQ ID NO: 106564 - protein, 80 aa, Gossypium hirsutum
  Clone ID: LIB3582-033-P1-K1-F2.pep
TPATIVGHRCTRLTRHRTRWSEVQNSSPFQENHRSVARSPVDWCADCDNCSTIEGRAGRGSCLLFAALRIARVSALVFRI

SEQ ID NO: 106565 - protein, 64 aa, Gossypium hirsutum
  Clone ID: LIB3582-033-P1-K1-F3.pep
RSGCLEPIKQYLYYAKLPGNPWPRIGQQNMGRYCFLNLLLLSMLLLLSLCKGFTIRQMRETVRA

SEQ ID NO: 106566 - protein, 151 aa, Gossypium hirsutum
  unsure (1)..(151): unsure at all Xaa locations
  Clone ID: LIB3582-037-P1-K1-A3.pep
RGRVGPRKLCSGFFMDGKFYVIGGMSSHTDCMSCGEEYNMQTRSWRRIENMYPGCNAGGTFHPAMRSPPLVAVVNNQLYSADQATNEVKKYDKVNNSWSVVKTLPVRADWNNGWGLAFKACGNSLLVIGAXRTXSGDNGVICLHSWNPEDG

SEQ ID NO: 106567 - protein, 149 aa, Gossypium hirsutum
  Clone ID: LIB3582-037-P1-K1-A4.pep
LRYKPIHANLTTRADPSATGDSSCGYCDGSWVYDPDAGFDRYDSSCKEIFKGWNCILNNKYNGRDIIKWRWKPRNCDLPPHDPLQYLPTYRDTNIGFIGDSLNRNMFVSLIRTLKRVYNDVKKWRPAGADRGYTILHYDLTIAYHRTNL

SEQ ID NO: 106568 - protein, 121 aa, Gossypium hirsutum
  Clone ID: LIB3582-037-P1-K1-B1.pep
MASHRTKWSESICFCSNRSGSHSPVQNSRLCLCIQELTTDDDKQVYQVDFVILCIGRYSDLPNIPDFPLNKGPEVFNGKVLHSMDYAAMDDDVAADLIKEKRVTVIGFQKSAVDIAAEVAN

SEQ ID NO: 106569 - protein, 152 aa, Gossypium hirsutum
  Clone ID: LIB3582-037-P1-K1-B11.pep
HASAHASADAWEEISKLKDGGVGGGEKKKKVLEQIETDNVVNDDEDDDDMDMDEDDDDEEEEDEEGEEEEKERGTEEESENEGEEKGGIEDKFLKIKELQEYLEEDEAREFGLKKKKTKAESKKEEEDTEEEGDEDDEKDENERSEDDYDEA

SEQ ID NO: 106570 - protein, 69 aa, Gossypium hirsutum
  Clone ID: LIB3582-037-P1-K1-B8.pep
KFRPKRMYLISTPIYNCMTQLLNHKYSNESSNQEKFDGSPLSKSMYAITHPTYLFQLFPCLQESVSPRT

SEQ ID NO: 106571 - protein, 52 aa, Gossypium hirsutum
  Clone ID: LIB3582-037-P1-K1-B9.pep
QMLAAINERNFGFRHSVFSIVNKDSLKQNPILYAAYEQITSRTSINKSVVIY

SEQ ID NO: 106572 - protein, 129 aa, Gossypium hirsutum
  unsure (1)..(129): unsure at all Xaa locations
  Clone ID: LIB3582-037-P1-K1-C6.pep
KMQRVLGTAGTIMRDGGRLHVXTLPTLDEEERERXHQDQRYLHTRGGTQDPGLKEAVCSMTINENLDDPVRLDINNRQAGRIHTLNSVNHHIFQRLELSAERGVLYNRPVSIPQWNVDADTILYMLRCC

SEQ ID NO: 106573 - protein, 76 aa, Gossypium hirsutum
  Clone ID: LIB3582-037-P1-K1-E2.pep
SFILNTSCYHLTKYTCQPKEVITIITSHNRSISTKGNISNIFLYLPMCHGRIIQTTTSPQINFNVQKYISLITFNH

SEQ ID NO: 106574 - protein, 63 aa, Gossypium hirsutum
  Clone ID: LIB3582-037-P1-K1-E3.pep
DSKKKHQNEEKKTKFSLRINLKLKNLNFPFSFLSSLFFVSFSVSFLAILFLFFFVSFFYFIPS

SEQ ID NO: 106575 - protein, 67 aa, Gossypium hirsutum
  Clone ID: LIB3582-037-P1-K1-E6.pep
KKKLQKRFKKKKKKIKIKQKNGEGAHSSGVKRKHACVRGHIYCIELHKDTLLHDAFYSCTTEKPGMT

SEQ ID NO: 106576 - protein, 86 aa, Gossypium hirsutum
  Clone ID: LIB3582-037-P1-K1-F2.pep
GRRLMVWDLSRIDEEQTPEDAEDGPPELLFIHGGHTSKISDFSWNPCEDWVIASVAEDNILQIWQMAENIYHDEDDVPGDEFAKGS

SEQ ID NO: 106577 - protein, 58 aa, Gossypium hirsutum
  Clone ID: LIB3582-037-P1-K1-F8.pep
CKDNMRAGTDKIALISEAAGLPNVRGHYQTWNTHNLGTEGLHGLAQGRWDLSRRAWTY

SEQ ID NO: 106578 - protein, 139 aa, Gossypium hirsutum
  unsure (1)..(139): unsure at all Xaa locations
  Clone ID: LIB3582-037-P1-K1-G1.pep
QRLFVLQFTCAVYLLNISSTRAILNQTPFEAWIGRRPLMKHLRILGCIAFTLVNCQXFHKLDKGSEKCIFVGYCSXIQSKAFRPCNPINGKIITRRDVEFGKESCWKWESRQEVLEEDPLSILKTSHFNVNGTRLRRFK

SEQ ID NO: 106579 - protein, 102 aa, Gossypium hirsutum
  Clone ID: LIB3582-037-P1-K1-G5.pep
GNLSLDHWHASDPHLSMQQILMLSRCMFHAIISLCASMLAISSIHISMAIFVMIVFPVTHHYYSMSFWQCFRSTSPRNSCRQLHRFSSLPTIEYVIQTLCRY

SEQ ID NO: 106580 - protein, 64 aa, Gossypium hirsutum
  Clone ID: LIB3582-038-P1-K1-A12.pep
LSAKYCKYACSRRCRKASRKKVCERACKTCCKKCHCVPPGTYGHKSACPCYAKLKTHGNKLKCP

SEQ ID NO: 106581 - protein, 200 aa, Gossypium hirsutum
  unsure (1)..(200): unsure at all Xaa locations
  Clone ID: LIB3582-038-P1-K1-A2.pep
MGRDQEEEETPPATPTTTASAARKDQEEETWNHQKQILILELSEKLITGDLQAKIEAARDIRKVVRKSSVKTRSKFASAGVIQPLVFMLLSPNLDAREASLLALLNLAVRNERNKVNIVTAGAVPPLVELLKLQNSGLRELATAAILTLSAAAPNKPTIAASGAAPLLVQILSXGSVQGRVDAVTALHNLSTCKENSTPI

SEQ ID NO: 106582 - protein, 51 aa, Gossypium hirsutum
  Clone ID: LIB3582-038-P1-K1-A6.pep
IRMCLNVPTSIGMPGVIGNEVSLHGHGERKERMLLNRWTNRMISIVQVRST

SEQ ID NO: 106583 - protein, 54 aa, Gossypium hirsutum
  Clone ID: LIB3582-038-P1-K1-A8.pep
EILSLKVICWVDSGSGFACIKYYRMLVSEILIYQIYSRSCSSACILIDVFIGLS

SEQ ID NO: 106584 - protein, 166 aa, Gossypium hirsutum
  Clone ID: LIB3582-038-P1-K1-B12.pep
KKLSKPFFLSTLSQAPFIRTLILTKKLLWWRRTNHQVRLSLSFPPFSVLSFFLIMKIRKMVTKKKEQQIKVQPSLETLLFFFYSFVSFYSLANIVSFLFLYSKVPLYIDKSWLFYSRLCYSLVTISFCFYCCVFLCSVLSTCFSVSLFVSCFAGLGGPTGQGLGHF

SEQ ID NO: 106585 - protein, 133 aa, Gossypium hirsutum
  unsure (1)..(133): unsure at all Xaa locations
  Clone ID: LIB3582-038-P1-K1-B3.pep
DAIGAYVPHCVEQGEAVHGAGFPGCPETYQPQMQHRLQDEPHRELQQMLKRFKDGYAAALPDXVANCILNKVRSQLVVDALDDVDNDANHFNENFMKFFLAGSAQRGVVRGGQSTDRNQTQSGTQRGEQSEEN

SEQ ID NO: 106586 - protein, 111 aa, Gossypium hirsutum
  Clone ID: LIB3582-038-P1-K1-B8.pep
YSYSRAGTALLSPFHTASLTLISAKPSAAKDFDRILSLVDTQYMLTDCLEPYQAETHGHTLHDKCPDSRDTLTNEEQTDLYGEYARLGYRHSHYRCLQPHRRISPQREQAI

SEQ ID NO: 106587 - protein, 77 aa, Gossypium hirsutum
  Clone ID: LIB3582-038-P1-K1-C1.pep
RNRARSRPQPINVMTQSFMMSISRNGSGMVAPLTLPHPIQKGHLKTIWVEGTLIKFINQGFFGNDALKIFCLQILLH

SEQ ID NO: 106588 - protein, 163 aa, Gossypium hirsutum
  unsure (1)..(163): unsure at all Xaa locations
  Clone ID: LIB3582-038-P1-K1-C8.pep
KLPKDECSATKADMHHRSWSGVEYYRNEITSLXQEFDVIRAGKSYTCLSNNHMPPDIQKLPCRACYEALSISKKIEAMXKKLVDRMRAYGPFIAVHLRYEKDMLAYSGCTHGIYDAETVELRTIRENTAYCKLKDINATEQRSRGNGPLNTTEVEIVVTGLAY

SEQ ID NO: 106589 - protein, 74 aa, Gossypium hirsutum
  unsure (1)..(74): unsure at all Xaa locations
  Clone ID: LIB3582-038-P1-K1-D1.pep
QFKEEQQRDGDDPQRRYHDCRPHXRQEERTLRTQCHQSGQEQYERDHGHAPGERFKECEHQDQRKEQRAKTAHQ

SEQ ID NO: 106590 - protein, 126 aa, Gossypium hirsutum
  unsure (1)..(126): unsure at all Xaa locations
  Clone ID: LIB3582-038-P1-K1-D5.pep
MVEHEESLMEKVAEKIHDHDSSSDSDDDKPSKTSVXYKVFRLFGRERPVPHVFVGGKPADLFLWRNKKASAGALGXLLEYNLLPLVCHLLVLTLALLFLWSNVTAFIQKSPTRIPEVQIPKDPVLE

SEQ ID NO: 106591 - protein, 161 aa, Gossypium hirsutum
  Clone ID: LIB3582-038-P1-K1-E6.pep
VSLNERKGCEWGSRNGLSALFAQKSNLFNPYFWQMLREILKFKNDVISYLELLENNPDIDRNETLGQFIKSKGYSDLFQKAYLVPVCGSIWSCPTERVMDFSAFSILSFCRNHHLLQIFGRPQWMTVRWRSHRYVNKVREELESRGCQIRTGCEVHSVLSD

SEQ ID NO: 106592 - protein, 61 aa, Gossypium hirsutum
  Clone ID: LIB3582-038-P1-K1-F11.pep
CVVLFLFDLTLRLNFVREKKVLRMKVDKIQALEDQLRELMAQLEAAGKAVEQSSVSNENGR

SEQ ID NO: 106593 - protein, 155 aa, Gossypium hirsutum
  Clone ID: LIB3582-038-P1-K1-F5.pep
LSLHWDPGLKPINPMSSTSNSNNSHNLAVESKQDRSNTVRIPDRVDLRGSPRSRQGSPSHSPRLGPSRFLNGEKSGASFVGAELLGKLWGDRKKQPKNAKRKGGKVWYQKRRVKGLVVVTALVGLFFLVYWIMLLRLQDHRVGSDDRSSRNASVS

SEQ ID NO: 106594 - protein, 162 aa, Gossypium hirsutum
  Clone ID: LIB3582-038-P1-K1-F7.pep
TKQELNETKEYSSLNTSITDSDSLDITINGTPNNATTSLNETIALPLKHSRQVRTKLDKVEAGLQRARSAIREAKNGSQLQDPDYVPIGPMYWDAKAFHRSYLEMEKQFKVFVYKEGEPPVFHDGPCKSIYSMEGNFIYKLDVDTKFQTKDPQKAHVFYLSF

SEQ ID NO: 106595 - protein, 130 aa, Gossypium hirsutum
  unsure (1)..(130): unsure at all Xaa locations
  Clone ID: LIB3582-038-P1-K1-F8.pep
LTLRALSLELARKPGLFHAVDKYCDSDCYTGGLGQASGQNGPSNGGCYFGRYTGRYTDSHLMIDSIAESHVMAYLDALVDYVRTNSSHGADXATAGSTIRPLNTSVQQSSFRHIYLYEHNDEHAETHAGT

SEQ ID NO: 106596 - protein, 93 aa, Gossypium hirsutum
  Clone ID: LIB3582-038-P1-K1-G2.pep
VTKSLLVTFEFRFFLWRGRPKREPCSIYQLKATFLIQVRRRPSSASVVTSSPFAPNLAVSDPSFPSFSSPSVVPNTGWFQFHCHVLFNFHYIG

SEQ ID NO: 106597 - protein, 60 aa, Gossypium hirsutum
  Clone ID: LIB3582-038-P1-K1-H1.pep
DGCYSYSECMKMKANTRMCIMRSLIIDNIHCFLLSLTMPPTTPTIVIWSTILWVLPGSLP

SEQ ID NO: 106598 - protein, 94 aa, Gossypium hirsutum
  unsure (1)..(94): unsure at all Xaa locations
  Clone ID: LIB3582-039-P1-K1-A12.pep
MTKCYPTVSEEYQKSADKAKRKLTXIISVKNCATLMLRLAWHSAGTFDVKTNTGSPFXTMKHPVELXAHAANNSLDIVDRLLEPVKEHFTNLTY

SEQ ID NO: 106599 - protein, 62 aa, Gossypium hirsutum
  Clone ID: LIB3582-039-P1-K1-A5.pep
NIRSRLFHDNSDITVLNHQDRDVHQHYSCSMIASICTTRASSLIAISADDRSASIYVRTSYH

SEQ ID NO: 106600 - protein, 128 aa, Gossypium hirsutum
  unsure (1)..(128): unsure at all Xaa locations
  Clone ID: LIB3582-039-P1-K1-B11.pep
IIVETTGGCTDSFVTHAIKERVNVLYGVELRIHLXHTVYSANEDNWEMLTITXCHLLLNNIGLFXRSLRAAQENSHAYLRIFRLEILDAGFNTRREHLVKLFAVRQRHRMHPVLDLSLQVSPEQMRAL

SEQ ID NO: 106601 - protein, 57 aa, Gossypium hirsutum
  Clone ID: LIB3582-039-P1-K1-B12.pep
PLDTAQYSVPSELKARKEAALLNGTKQGAFHNQKWLLMCKDVRTDLVSISTIGQKDI

SEQ ID NO: 106602 - protein, 73 aa, Gossypium hirsutum
  Clone ID: LIB3582-039-P1-K1-B3.pep
AIAKRLVNISLITKSLAPAGIQQKGDYRHLPYEHWPALIITHTDHTQTAHILLLIIHRSIWSYHMLIIHSLII

SEQ ID NO: 106603 - protein, 117 aa, Gossypium hirsutum
  unsure (1)..(117): unsure at all Xaa locations
  Clone ID: LIB3582-039-P1-K1-B8.pep
HAYVHASGSAVSQQEIVSLYRRFCQLDRNANGFISADELLSDPEFAMNPLCQRLLKMEAGLHFKDYVGFLXAISAKARVQHNVKLIFKVSDSDGNGKVSINDIAKVVPDTSGTFIFD

SEQ ID NO: 106604 - protein, 131 aa, Gossypium hirsutum
  unsure (1)..(131): unsure at all Xaa locations
  Clone ID: LIB3582-039-P1-K1-C12.pep
LAPADTHRWSCGPNLYTTEXEMTVPNPXIDSMLSRNTWKLSYDEGYEYHYQKHGHHIGASIRKNDSKYYSRGXTEMYGFINAXPNTEVGSMRTGPGXHEGLHAVHTNYNYTVPTLAXDASWLCAIEALTGD

SEQ ID NO: 106605 - protein, 106 aa, Gossypium hirsutum
  Clone ID: LIB3582-039-P1-K1-C2.pep
MENKQPSSAASYADSTAVPGDAVLDLSYMTNQTIKLGGGLRQDCDAISATKAGTLTFSKPNKYWIESSQKRYVPCVEDTILGIWRDCKADNFLIDINRPAIGCLPV

SEQ ID NO: 106606 - protein, 91 aa, Gossypium hirsutum
  Clone ID: LIB3582-039-P1-K1-C4.pep
TMQQVMQNPQYMTIAERLGNALMQDPATSSVLESMSNTEQKDQTEERMTRIKEDPSLKHILEDIETGGPSAMMMYWDDQVVLQKFGEAMGL

SEQ ID NO: 106607 - protein, 109 aa, Gossypium hirsutum
  unsure (1)..(109): unsure at all Xaa locations
  Clone ID: LIB3582-039-P1-K1-C6.pep
PNVNNSNMLLLFHNLLTVILPQLFTMISWNEXKSETAFLMVFAGXASPGSVLPLYASLVDLSILLVALKKGERRSGALIXSSIASXIHNSAVPEMLLALMDEVYTVSTI

SEQ ID NO: 106608 - protein, 54 aa, Gossypium hirsutum
  Clone ID: LIB3582-039-P1-K1-C7.pep
LRFLSPTFKAAFLQMLSIIMRRLVSECMLKSDSNNSYTTSYTSCILQKQKLSPR

SEQ ID NO: 106609 - protein, 154 aa, Gossypium hirsutum
  unsure (1)..(154): unsure at all Xaa locations
  Clone ID: LIB3582-039-P1-K1-D11.pep
LTLNGPYDGHRLIHRAVHDICEKINIICDQEFLIRVNYMEMYTEDINDLFHVKNQKLPSHENKKRGMFVASLTAEVHAXVEHVMKLLEPVKVDHHYGKTHLNAXNKHTHSIFIAVIECDVXDPSSSGDYSTTDAIRVSFTKLLAEDGYERIAHT

SEQ ID NO: 106610 - protein, 93 aa, Gossypium hirsutum
  unsure (1)..(93): unsure at all Xaa locations
  Clone ID: LIB3582-039-P1-K1-D2.pep
MFGRAPRKCDXTRSXAVLRVPKSRHQDDLKKACRKAAVKNHPKKGGDPAEIKELAHAYEVLSDPNKREICDQHGEDALKERMRGGGGAHDPQA

SEQ ID NO: 106611 - protein, 51 aa, Gossypium hirsutum
  Clone ID: LIB3582-039-P1-K1-D3.pep
MYAAARLGSYISRGVYTAAGPFHSLEGAVDIIEGEQPDGTCKTSPWYVRFG

SEQ ID NO: 106612 - protein, 44 aa, Gossypium hirsutum
  Clone ID: LIB3582-039-P1-K1-D5.pep
RYVHNTGVHKKDTPSPEFHILMLSQRPEITQFLNSKATSERVTC

SEQ ID NO: 106613 - protein, 119 aa, Gossypium hirsutum
  Clone ID: LIB3582-039-P1-K1-E1.pep
PRVRNKGGNFCPENCTQLLLAFIESNCRENMSPVLKTVQTTLSLNKLSSSNYPRKEKKLLQHGSCSFPINNVQLSFRGGFEVVSNVNRSHKEKENWRPCHTYKLLESFLERSLLQKLLW

SEQ ID NO: 106614 - protein, 51 aa, Gossypium hirsutum
  Clone ID: LIB3582-039-P1-K1-E3.pep
PQPNLNIGYVHVQIRSCLLNSVRLFSYWVIFNPNTCTAQGSIQEEIIICNI

SEQ ID NO: 106615 - protein, 51 aa, Gossypium hirsutum
  Clone ID: LIB3582-039-P1-K1-E5.pep
IKQDRVGYRQGKDGSKDKTSAVMDSIYQRHTTNNLTLGFYMYTCEHSLTRR

SEQ ID NO: 106616 - protein, 180 aa, Gossypium hirsutum
  unsure (1)..(180): unsure at all Xaa locations
  Clone ID: LIB3582-039-P1-K1-E6.pep
MLLRIVGSLALGDLDLSTPEAKCGLFGSTLSSTVYLETSNGDRLAEALHSKGRPYAIYRNNXFSRLAPWHFRQALLSMLQRSCSHIWDAFXLCHACFRLYCKSSTAIACSDSKKQSXLSHGTCILEEPAKIDVSQPQLDMQNERCYLENLPAIXIYDKHVTMRLLVSRSPRLLDAFILGS

SEQ ID NO: 106617 - protein, 87 aa, Gossypium hirsutum
  unsure (1)..(87): unsure at all Xaa locations
  Clone ID: LIB3582-039-P1-K1-E8.pep
MTASIEAALFTKLVISALCYGIEVWNADDGGSVLXPEVWEHTXDDLIVYIASGVFKVTALSFAMSYPTVATVTDMSISAFKIFYAVA

SEQ ID NO: 106618 - protein, 75 aa, Gossypium hirsutum
  unsure (1)..(75): unsure at all Xaa locations
  Clone ID: LIB3582-039-P1-K1-F12.pep
QRSGKYCPGKRSEDASSHKGAMNCAKQYQLYTIIQTAHDKXEDRYETHXKDEQLRDGKDPQRRCHYCXQHCRQEE

SEQ ID NO: 106619 - protein, 159 aa, Gossypium hirsutum
  Clone ID: LIB3582-039-P1-K1-F3.pep
ALSRMQRLLPINLVFPPAYAIFAFMIWKPFILNSNTARSEDIHQLYQSLTMAIGDAIKHRPFRDVCMRDTRGFYDIVAADTIDAEFAAMLELNGLDMHLKSMAFVPLRARLFLNAIIDCKMPNSAFTQDDGNRVSGHSESKALRAETSKLLDKLVCALD

SEQ ID NO: 106620 - protein, 70 aa, Gossypium hirsutum
  Clone ID: LIB3582-039-P1-K1-F4.pep
VNIGSCPSIVTVRLAVIEHSGRHDLDLHGLLDVASAIARPTLQIRYGAISLLSASCSPLMFNPSRLPLPP

SEQ ID NO: 106621 - protein, 153 aa, Gossypium hirsutum
  Clone ID: LIB3582-039-P1-K1-F6.pep
RTRGAGVASGNRWPRQETLALLKIRSDMDATFRDATVKGPLWEDVSRKLAELGYKRSAKKCREKFENVHKYYKRTKETRAGRLDGESYKFFSQLEALQTTSGAAPGNVSIPVIPATVAVTAASLDVAPVSVGIPMPISSAARIVPPTTAVPMS

SEQ ID NO: 106622 - protein, 74 aa, Gossypium hirsutum
  Clone ID: LIB3582-039-P1-K1-G12.pep
QTKHSRGIDIHSRPQIYPDARFAAYEIPSGSHARSTPLSSADVNQVATHKDTPPLLHQRRMPVVQSGMEIKSLT

SEQ ID NO: 106623 - protein, 198 aa, Gossypium hirsutum
  Clone ID: LIB3582-039-P1-K1-G6.pep
PTRPTKSNFLAKKQTRKPLYLTTEEPVGSDFSSGAILATSGDILNTSIAIQANACGRPSHTDVLVDGNSSVPDYNREKTEELSSGKGLLSKFGRRTTALDDNRRATYNISNQPVVRSDSIFTTFEAEIKQLVAVGLQAELSYARSLARFAATLGPVAWKVASGRIEQALPVCCKFGCGWVGEYEPLPTPVLTFETRAP

SEQ ID NO: 106624 - protein, 41 aa, Gossypium hirsutum
  Clone ID: LIB3582-039-P1-K1-H1.pep
TEHEWSPVFLSDETSELLLAFQLTLYPRSSWDLVILFCRMR

SEQ ID NO: 106625 - protein, 67 aa, Gossypium hirsutum
  Clone ID: LIB3582-039-P1-K1-H4.pep
RCSRCSSEFEDSKHIFRECLGYSERGNNEHCFSLLICGMVDMVLPIDMDLILMQSKTVIPPVQCSAL

SEQ ID NO: 106626 - protein, 148 aa, Gossypium hirsutum
  unsure (1)..(148): unsure at all Xaa locations
  Clone ID: LIB3582-039-P1-K1-H6.pep
PRXRKEQEDXXTRPGEQPXXXQKEPQARERTQKPPKEEAXRXEQDSXQAXXNXGANKDXEHKKXEEESXPKXXEKXNKXXTXKXEEXTKXKEETRKRAAHRKXKTKEXEXQXEKQRPXXQEXKKRXXKXEXXXQEXXXQTRKXQRKGE

SEQ ID NO: 106627 - protein, 30 aa, Gossypium hirsutum
  Clone ID: LIB3582-041-P1-K1-A11.pep
CFFTLDTLSGLRFHQPNWKHWLTYNVHCVC

SEQ ID NO: 106628 - protein, 141 aa, Gossypium hirsutum
  Clone ID: LIB3582-041-P1-K1-A5.pep
SSEFDLDVEPDSARDHHEEFNFSEVFVHQMIHSIEFVLGAVSNTASYLRLWALSLAHSELSTVFYEKVLLLAWGYDNIIIRLIGLAVFAFATAFILLMMETLSAFLHALRLHWVEFQNKFYHGDGYKFKPFSFALITDDDD

SEQ ID NO: 106629 - protein, 42 aa, Gossypium hirsutum
  Clone ID: LIB3582-041-P1-K1-B2.pep
MVHRFSTRLLNVCIASLCKAHKLEKAESVIIDGIRLGVLPDV

SEQ ID NO: 106630 - protein, 79 aa, Gossypium hirsutum
  Clone ID: LIB3582-041-P1-K1-B3.pep
SYFTRQWHKRNFLLQYHMTFTIATLYSSTFSTHRPELFLLVTEGTLSLSNNLLLNSVGLEFQMCQLFEYLATRTLSQYS

SEQ ID NO: 106631 - protein, 144 aa, Gossypium hirsutum
  unsure (1)..(144): unsure at all Xaa locations
  Clone ID: LIB3582-041-P1-K1-C3.pep
QYRHCLVSPFRLEGAVIGRVNPELYALAVCTWNLDDDKTWNNQDQTKLEEWLQNYANVLCINSWQVKRYIDVYSASSVIGFSSEDLFRISDLYSKADENWSYTKNLSSYKNGSSNTSLPVLKRQIVAYSNFLSYXAELARFKWT

SEQ ID NO: 106632 - protein, 144 aa, Gossypium hirsutum
  Clone ID: LIB3582-041-P1-K1-D2.pep
MKQQHLPHYKPWVAHLFTPRSTSVRVSLKKQPLDLKRLNAARITRVGLESNVNDQGAGVVYLKNYLDTQYYGEIGIGSPSQSFSVVFDTASSNLWVPSSKCLFSIPCHLHSKFRARWSSTYTKIGIPCTISYDYGDVSGFFSVD

SEQ ID NO: 106633 - protein, 168 aa, Gossypium hirsutum
  unsure (1)..(168): unsure at all Xaa locations
  Clone ID: LIB3582-041-P1-K1-D5.pep
EAYNKLLCMCKAQMAYFAVNLLNVVTELLDNSKQDAMRILGCETLTTFIYSQVDGTYTHSIEKFVHKVCKLAHEDGEEHQRRCLKASSLQCLSAMVWFMAQYSYIFAALDEMVYATLDNYELDTRIDDDNEREPHHNWVDEVVRCEGRGAIVACDSSPSNMIXRPQPE

SEQ ID NO: 106634 - protein, 197 aa, Gossypium hirsutum
  Clone ID: LIB3582-041-P1-K1-E11.pep
GRVGGVQTFPQEVDPVVFLCSNCTQRTNLDGKEDPENSNLQLDPVDESDSGDKTKKQVPKAVEKVLAGSIRTEMALEEFCAKQASEIMQLNRLVQQYKHERECNAIIGQTREDKILHLESLMDGVLPTEEFMEEELVSLTHEHKVYFCSFLFLFQLNICMYIQFLTYCLQLLKEKYENHPEVLRIKDELKRAQDELE

SEQ ID NO: 106635 - protein, 50 aa, Gossypium hirsutum
  Clone ID: LIB3582-041-P1-K1-F4.pep
TSYFRNNTLCRTTCRCVCYSLDSLLSSQYLKTTIPSKEKNQYRVSLLSPS

SEQ ID NO: 106636 - protein, 120 aa, Gossypium hirsutum
  unsure (1)..(120): unsure at all Xaa locations
  Clone ID: LIB3582-041-P1-K1-G10.pep
MYQLSYLGGKAYQPQTNHQSXCQLQHLHALETNHRYTSKAGETQFXDQNXDQFHCAAVALLRHNIQHIPLLSPSFTTAPMLFYVQQKQSIHEPYLPHHPQTYESQFKQIIPDRPQKDQHQ

SEQ ID NO: 106637 - protein, 155 aa, Gossypium hirsutum
  Clone ID: LIB3582-041-P1-K1-G4.pep
PTRPEELDQKSQAHDDVLGVLAQIKMDKDSIESLVGPVETADRIFQEIQGLQAKVEGLEYKFDIRGQGGARTVEDIQSELNDLQSKRDVLLKEVDDLRTEQRYMEKDLQSVKTRWHDIREKKVEVANTLRDFKKAEEELEHLSEEKRQLDLEEKH

SEQ ID NO: 106638 - protein, 95 aa, Gossypium hirsutum
  Clone ID: LIB3582-041-P1-K1-G7.pep
MDSEQNIYRPPPEFEENSSQQLVDFTVSGSTELFLIQWPIHQHPEINDQVVTLQLGPDGKLGCFTDSTGKTYDFVSPASQGPDATVILSFESESK

SEQ ID NO: 106639 - protein, 34 aa, Gossypium hirsutum
  Clone ID: LIB3582-042-P1-K1-A3.pep
LHELLTTNTSPASYASTSSTYDSASTTIKTLVFM

SEQ ID NO: 106640 - protein, 44 aa, Gossypium hirsutum
  Clone ID: LIB3582-042-P1-K1-A4.pep
QIILSVQANSPYDEAQTKLPRRVPSLLDRLVKSNVCQHDAWRRI

SEQ ID NO: 106641 - protein, 62 aa, Gossypium hirsutum
  Clone ID: LIB3582-042-P1-K1-A6.pep
EKTSYYYFISDWIQNIGPTYIIMQLRVKLECMPVRHVDLLYIFIASQIGSGLLICRRRTYTR

SEQ ID NO: 106642 - protein, 52 aa, Gossypium hirsutum
  Clone ID: LIB3582-042-P1-K1-A7.pep
RPRVRIDTGKIGTDNNIQLSWCFLPFPLQNPSVTRYFKRYPNWIELTQFECP

SEQ ID NO: 106643 - protein, 85 aa, Gossypium hirsutum
  unsure (1)..(85): unsure at all Xaa locations
  Clone ID: LIB3582-042-P1-K1-A8.pep
EIVTNSDHHRPLSRNKGSYPPSYCLPTESNWAILRQFRAKTNLDPRAKWPLTWGXPPTGALSTVDLLEQSPPICVDNHEFYTSRL

SEQ ID NO: 106644 - protein, 56 aa, Gossypium hirsutum
  Clone ID: LIB3582-042-P1-K1-B2.pep
SSQHDRLTASRGFFLKRSVLQFHFPFPLPSNTSDSIVHVRTERGSILTEREYIQEH

SEQ ID NO: 106645 - protein, 58 aa, Gossypium hirsutum
  Clone ID: LIB3582-042-P1-K1-B5.pep
TRGIAQPPLRLHIIKSRAANPHQSCDFNEADKDSKAPSTTDKCSFPLIESCFHAKKRM

SEQ ID NO: 106646 - protein, 74 aa, Gossypium hirsutum
  unsure (1)..(74): unsure at all Xaa locations
  Clone ID: LIB3582-042-P1-K1-B6.pep
EESKTYENASALSLATFTSLSIEFVARLENVVDSFEELSEKAHXKEPEELPAAAREPIGLWSRLIRWEWVSPEA

SEQ ID NO: 106647 - protein, 56 aa, Gossypium hirsutum
  Clone ID: LIB3582-042-P1-K1-B7.pep
TTYSSDASHNDSYPISLLDTELNEDHDLEYESEEHDRNDEEDEEDDDGGYGSENGE

SEQ ID NO: 106648 - protein, 97 aa, Gossypium hirsutum
  unsure (1)..(97): unsure at all Xaa locations
  Clone ID: LIB3582-042-P1-K1-B8.pep
FMLWNPLFLPPCLDRSPSNALSKPTSQHSYIDLTTHSRRRRRRQSYSIQFALYQPPLHLLAIPTTTNCAXTSVTPACSTCAESTLTTPYRSAETPST

SEQ ID NO: 106649 - protein, 74 aa, Gossypium hirsutum
  unsure (1)..(74): unsure at all Xaa locations
  Clone ID: LIB3582-042-P1-K1-B9.pep
RHLNTLYELGKIGFKMKQLPFMXVICIVMLFIVYRTTIYQYHKTEMEMKLYRFEMVKDYQQPSGKLRSXPRGIM

SEQ ID NO: 106650 - protein, 67 aa, Gossypium hirsutum
  Clone ID: LIB3582-042-P1-K1-C2.pep
FMFLSLRLYRAKLLILVRGYEHTHTEAIESTIESKVISCYESRVLLRLLSLDLLFLFFFFVLHIIIK

SEQ ID NO: 106651 - protein, 63 aa, Gossypium hirsutum
  Clone ID: LIB3582-042-P1-K1-C6.pep
RGKIMGAKVLFFFALLCLSAVSASAQDEEDQGLVMNFYKDSCPRLKHYKDKLATDSDTKHCFW

SEQ ID NO: 106652 - protein, 43 aa, Gossypium hirsutum
  unsure (1)..(43): unsure at all Xaa locations
  Clone ID: LIB3582-042-P1-K1-C8.pep
VXXWGSXXRWCRLRXXFGSGVXXRXAFXFXXPFGXAVXXRSGV

SEQ ID NO: 106653 - protein, 64 aa, Gossypium hirsutum
  Clone ID: LIB3582-042-P1-K1-D1.pep
SHIDSKRFLFNYYWGTTRGKNKYMKTKMLLHFAKKQANKSYNSRTVLNFSLFPIVNCLTVYFDN

SEQ ID NO: 106654 - protein, 114 aa, Gossypium hirsutum
  Clone ID: LIB3582-042-P1-K1-D3.pep
AATISMARATHQGKVQGSLQLMANPPTQPKRRFYSCPRISSSNSKRDSSVCLQINKGSIFDRTTSRLHRACTAERHSKWLPHLLGDYTVSGQENRDREQREERASEREQYTGQL

SEQ ID NO: 106655 - protein, 56 aa, Gossypium hirsutum
  Clone ID: LIB3582-042-P1-K1-D4.pep
GERHQARPRYWSCRTNRDALDPDCRGACWGCQPDLKLNHRASLRAKSGSDSSRGDT

SEQ ID NO: 106656 - protein, 67 aa, Gossypium hirsutum
  unsure (1)..(67): unsure at all Xaa locations
  Clone ID: LIB3582-042-P1-K1-E10.pep
TESLTFTGQAXVSLDTDVTDSIDGIAILHQRVYHFHSLASHCHRCTXIGKRLFDVDLRCLMYPLVNQ

SEQ ID NO: 106657 - protein, 55 aa, Gossypium hirsutum
  unsure (1)..(55): unsure at all Xaa locations
  Clone ID: LIB3582-042-P1-K1-E6.pep
YSNHGEEQVXARSIALFLFASLAAVLAKDSTQKSRMILTETGLRSSHETWQRTDR

SEQ ID NO: 106658 - protein, 91 aa, Gossypium hirsutum
  unsure (1)..(91): unsure at all Xaa locations
  Clone ID: LIB3582-042-P1-K1-F4.pep
GLTSSIASRATHTSSHTLDREITCTNGETVRSAMKQEHTCSLSXVESTGSLCLGNQTQGQLTIAVLHRPAITLDNSRNSSLLDRXILSHTY

SEQ ID NO: 106659 - protein, 46 aa, Gossypium hirsutum
  Clone ID: LIB3582-042-P1-K1-F5.pep
IPVAHASVTKENMWHNYQEEGYGLDIRIFGSSQVNVMHMTASYAML

SEQ ID NO: 106660 - protein, 72 aa, Gossypium hirsutum
  Clone ID: LIB3582-042-P1-K1-F6.pep
ADPVATRPLSYVPALLCYSEPSGPRVTRCISQPREGRRISRVTDLSNIIDHNAPESRGQINGTGHEMIPCQP

SEQ ID NO: 106661 - protein, 131 aa, Gossypium hirsutum
  unsure (1)..(131): unsure at all Xaa locations
  Clone ID: LIB3582-042-P1-K1-G3.pep
MFLASNPLQNLQRNTTWNRLCLSSDGHMDTRSFLRGIDVNRAPAATVDCEEDGVGVSSPNSTICTISGKTNERDHVAEETEAERDSCSPATDDEDGGRXAGGGDASRKKLTLSKEQYMVLEETVTEHSTSD

SEQ ID NO: 106662 - protein, 190 aa, Gossypium hirsutum
  unsure (1)..(190): unsure at all Xaa locations
  Clone ID: LIB3582-058-P1-K1-E11.pep
KRVNHGTLVVFNLDSSVSSDKLQQIFGAFGEIKEIHETLQKHNPKFIEFYDVRAAEAAFQALNSSDIAGKQIKIEPSHLWGIGCFTQQPESEQDEPNLCKSPFDELSSGNCGLTASGCMDNGSTQVVAPVSTFAETHQSSTVPINLASPARVSPIGKPLSFREPDHALDEMKFANQGVPSFHXHSLPEYH

SEQ ID NO: 106663 - protein, 41 aa, Gossypium hirsutum
  Clone ID: LIB3582-059-P1-K1-B10.pep
TSHFRMAYIHTNQNPTFKKYIPAYTCRSSSSTIKIPKHWIV

SEQ ID NO: 106664 - protein, 158 aa, Gossypium hirsutum
  unsure (1)..(158): unsure at all Xaa locations
  Clone ID: LIB3582-059-P1-K1-F11.pep
MASACVNNIGVSPESFQPKTSYPSFGWLSPRISFSREEESWGRWKSKTDPDTTEIQDVPPGEFEFRLEDPVAMLPADELFSDGKLVPLHLSTVXTTAATTTTTTRTRTTSXLNGLAEIRSRETGSSMEVSGSDHYLFSPKAPRCSSRWRELLGFKNVH

SEQ ID NO: 106665 - protein, 108 aa, Gossypium hirsutum
  unsure (1)..(108): unsure at all Xaa locations
  Clone ID: LIB3582-059-P1-K1-G11.pep
RFFRNSRPKPLLFETPXKYARGAELFNKIWVALAFSIYSSFQCFCFSPSLKDSVLXKMMETVEFEESTAQLEENADTSREMIEIMDYKDPGPNVNPRTGYIFSPPPQG

SEQ ID NO: 106666 - protein, 103 aa, Gossypium hirsutum
  Clone ID: LIB3582-059-P1-K1-H10.pep
RVPWSEHGKTDVDTETDNHMIAANYNVQLPSEEDVSIFDIVRDSNITPLEGHNASVSSCSNHSPPSIIPGWESSGADEVSRPSRNTVGKLTESGARTLRRCRN

SEQ ID NO: 106667 - protein, 110 aa, Gossypium hirsutum
  Clone ID: LIB3582-060-P1-K1-E10.pep
RPSSCPRSRFKEPENCLQGCSILHLACQRGNPVMVELLLQFGADINMRDFHGRTPLHHCISEGNNRLAKHLLRRGARSTIKDWGGLSALERAMEKGAIADEELFILLSES

SEQ ID NO: 106668 - protein, 192 aa, Gossypium hirsutum
  Clone ID: LIB3582-060-P1-K1-E11.pep
PASAHASGLSLSNQNYRVDCHFGKFPVIPSHGFKQRNSFATVPNGRCVMYPCFRVRFVRAEGENCLSDCAEDVLAVDPFSPLDAIEGYLWPKVFTERTEYGELDAEELEQREVLPNLLPSNANSTQAKSSGFIDSMSIDLPEMQEDEANFSQIASEQVHFRELNSGETMSLDETNMGSAGKEQEFPTESTKI

SEQ ID NO: 106669 - protein, 89 aa, Gossypium hirsutum
  Clone ID: LIB3582-061-P1-K1-G10.pep
YPNINNSYKSLKLAWSKKQKRKENKQTVGKIATECNSKVKIRLRKNKLIEIKRRTHSQVHQIRVSSYPIMPEKLEIQIRTNIKMQSNFF

SEQ ID NO: 106670 - protein, 87 aa, Gossypium hirsutum
  unsure (1)..(87): unsure at all Xaa locations
  Clone ID: LIB3582-061-P1-K1-H11.pep
MCATKSRPIKGKSLNSQKKEFVKVTPHINQVKGGXXLDXLSTSXXQFKATGXXSRTRTQGNFXNGFLASLAWALLFGVIHKRRTXXH

SEQ ID NO: 106671 - protein, 71 aa, Gossypium hirsutum
  Clone ID: LIB3583-034-P1-K1-B2.pep
FKFRDPKKKVIRRKQGEVNFESLKRPPPFFIYVFFIIINFYLYFFFFFPPLFYVSFFLLFIYFFFIFFILY

SEQ ID NO: 106672 - protein, 73 aa, Gossypium hirsutum
  Clone ID: LIB3583-034-P1-K1-B3.pep
RQEMAIPVEPPNGIHYQGKHYYSMWRTLIRIDTNMCRQAMGKGIWIVASGMEQHKCIKIHACTCVTELLMTLN

SEQ ID NO: 106673 - protein, 209 aa, Gossypium hirsutum
  unsure (1)..(209): unsure at all Xaa locations
  Clone ID: LIB3583-034-P1-K1-B7.pep
TLCSKTELSDLVGPEAPLPADIFRLPLPKREQQLIDQWKKAGPRPRPLPPPPDRPIYQHEKEGWYAWILEKDKEPDPSPMEHRMQAHRLIWDALDYIVSVEADALFPGFNNDGSGWPDFSGLVIGQRLYERASSRTYRSDRKTIAALFNITRDEMXYHPKRDWMLSVKEHLNRSLSEDGFFRQSLLSKPNSFLSHPLSECSCRIPSVET

SEQ ID NO: 106674 - protein, 181 aa, Gossypium hirsutum
  unsure (1)..(181): unsure at all Xaa locations
  Clone ID: LIB3583-034-P1-K1-C3.pep
MAIMSDHHAWAVAFGVLGNIISILVFLAPLSTFYRIYKKKSTESFQSLPYQVALFSCMLWLYYALIKKGAFLLITINSFGCIVETXYISMFLAYAPRKSRISAIKLXAAMNLGLIFXLILIATHFXVKNSIRIQVLGWINVAISVSVFAAPLNITTRVIKTKSVEFMPFNXSLALTLSGNM

SEQ ID NO: 106675 - protein, 99 aa, Gossypium hirsutum
  unsure (1)..(99): unsure at all Xaa locations
  Clone ID: LIB3583-034-P1-K1-C9.pep
AYLYILIRSEILSNINPSALNNSISPKKHQAKHAAEKYNRARNSGAKVKESNLIDYYYLAXSCIISRTLRDLELSLVFFRIACHHFLVQKAVKLYTVPE

SEQ ID NO: 106676 - protein, 132 aa, Gossypium hirsutum
  unsure (1)..(132): unsure at all Xaa locations
  Clone ID: LIB3583-034-P1-K1-D11.pep
MAPAPNPALRPIDKSKWKKIQASKVGISLSMISYPSWIVLKILHEGGFEAYLVGGCVRDLLLNRTPKDFDVITTANLKQIRKKFHRAEIIGKRFPICRVHIKGSIIEVSSXETSARHDADKEKALSSYYQDM

SEQ ID NO: 106677 - protein, 103 aa, Gossypium hirsutum
  Clone ID: LIB3583-034-P1-K1-E11.pep
SFWNPRRRKRKVPEVERRKRPKRHASSPHPTTLAPNRAAVNAQISANIIIMSARSSLIIARFSLTFQYRRKNEAFQLPAAVDGKVPGDEWPESGTGGLPFLLI

SEQ ID NO: 106678 - protein, 245 aa, Gossypium hirsutum
  Clone ID: LIB3583-034-P1-K1-F7.pep
HASEEIGLEWMLRPAFKTDKKHLEPAAVAQLEEPPTEEIKTMHPRELNPYLKDNGTGYPEEAEEKRAGVDRLLSSSFVGDGGASWRLKALKRAEEQASREGRSIEEVVLERWGSLDILAAYGASRRAAAPRAHLHAIRNRKQGPDNEKQNVANNQRGRKSEGNSERNTTRDYLRDVSLRHSDMKTPKVRDSLSWGKRKNQNIPAKNAGAISTANKFTDDGNFMQEFLRKQGNDTIASGSHTDRDG

SEQ ID NO: 106679 - protein, 87 aa, Gossypium hirsutum
  Clone ID: LIB3583-034-P1-K1-G2.pep
IRHSEFSPLPVVFFPKGFPRKNYLCILYFFFLFSLRYIVIIDILFFYTQEKEIVKEYLSLDKCLQAAVKLQLELAIIILNKNLPFGS

SEQ ID NO: 106680 - protein, 142 aa, Gossypium hirsutum
  Clone ID: LIB3583-035-P1-K1-A1.pep
HTLCKEKKLKEASELLSSASNRGDLLDEVSYGTLLAGYFKDGMADKALQLWSEMRKKEIIPSIITYNTIIGGLCQLGKTEQAICKFKELLRNGLVPDANTYNTTIHEYCNEGTGDKAFELHNTMGEKSVKPYVFTCNILLSG

SEQ ID NO: 106681 - protein, 169 aa, Gossypium hirsutum
  Clone ID: LIB3583-035-P1-K1-A5.pep
LPQVGQWNMMNKKMINGMTVSRWACINFSRSVQESVARGFCNELAQMCQVSGMEFNPEPVIPIYTARPEQVEKALKHVYHASMKTKGKELELLLAILPDNNGSLYGDLKRICETDLGLISQCCLTKHVFKISKQYLANVALKINVKMGGRNTVLLDAISCRIPVVSDIP

SEQ ID NO: 106682 - protein, 134 aa, Gossypium hirsutum
  unsure (1)..(134): unsure at all Xaa locations
  Clone ID: LIB3583-035-P1-K1-B5.pep
MEMIMGKEYGYVAIVVVVYCCLNMWMGFQVVKARKKYKVNFPNLYALESENKNAKIFNCVQRGHQNSLEMMPVFFILIVLGGMGHSCVFAALGLFYTVTRYFYFTGYFTGDPXNRLTIGKYGFLALFGLMICTI

SEQ ID NO: 106683 - protein, 85 aa, Gossypium hirsutum
  Clone ID: LIB3583-035-P1-K1-B6.pep
TFGYKADDLILYGGSQKKYKKSIVYKQRDNKDRSENREVILALVFIYLSSFFLPSSCYLALIQIHHRHKKGYKSIRIRKYLANMP

SEQ ID NO: 106684 - protein, 159 aa, Gossypium hirsutum
  unsure (1)..(159): unsure at all Xaa locations
  Clone ID: LIB3583-035-P1-K1-C2.pep
PTRPVDVSNIQLSLPAQDLYIASDIKHLLYLVNYNSQKGITANEFVKELCQKLESFVRNXDIKFSLQENEFLXVFPIISKNCSKEMQQQLLCISXQVVPLGLLKCVVTWFAAHLSEDESRSILHIIKKGYSLTHASFASLLWEWFLLGYSGKTSSESLE

SEQ ID NO: 106685 - protein, 94 aa, Gossypium hirsutum
  Clone ID: LIB3583-035-P1-K1-C5.pep
PGIPARTRAQIPPPFSIYSSKEGRTTDTFPSLYLFPPPALHLWLQREGSFPSLEGHDTRQDHARPQLCYDRTEDHVLSEIRTGHDVLTGEQSCC

SEQ ID NO: 106686 - protein, 150 aa, Gossypium hirsutum
  Clone ID: LIB3583-035-P1-K1-C9.pep
EPYIMKLTEDQIMQLLSAFWIQATLPDNLPSNIEAISHSFVLTLISLRLKNVNDNLVVRFFQLPLSLKNTSLDLSNGMLTPVLQRSILMLSMSMLMFAAKIYQIPNLNDLIKSIVPFDADPYLGISEDIQVFVRPEADVRGYGSVTESQH

SEQ ID NO: 106687 - protein, 99 aa, Gossypium hirsutum
  Clone ID: LIB3583-035-P1-K1-D6.pep
KIKASIWGFSWNFCGSCADLKKKAIVADARCPRCNVEEEDCNHFFGEYSVLLVVVQRNNVVSSVAVCALCGQTETYLFTNIDKQQGGICHRILDFFSLS

SEQ ID NO: 106688 - protein, 59 aa, Gossypium hirsutum
  Clone ID: LIB3583-035-P1-K1-D9.pep
LQWYNHAKVSIQCLQRFNNIYSFQCKNPCKTGEAGKVLNIRFLARFGFYILLEVSIFNI

SEQ ID NO: 106689 - protein, 70 aa, Gossypium hirsutum
  unsure (1)..(70): unsure at all Xaa locations
  Clone ID: LIB3583-035-P1-K1-E2.pep
KVVPYIWNIIFSYXCSFSVQELDITALGLKSSDNIDLTLYQQRILAKIVNNISAREDLDFALLNRTRYLH

SEQ ID NO: 106690 - protein, 50 aa, Gossypium hirsutum
  Clone ID: LIB3583-035-P1-K1-E4.pep
IRAVDFDFERWLRLQSRRLVSLAVETDWPINNNNFFFYENQQQQQQLSKP

SEQ ID NO: 106691 - protein, 163 aa, Gossypium hirsutum
  Clone ID: LIB3583-035-P1-K1-F11.pep
PRVRAEGIPVSPYSVRIALENTSIPVGGLPEDKLTAGQGLMQVDKAYEYIQKSQDLSCVCYQIKVNQSGKSTPISRGIYLREATACQQSTEWAVHVEPRFHDDASKLEQLVPFEECIELRSSNNAVVRAPEYLLLTHNGRTFNVVVDPFNLADGLHYYEVYGI

SEQ ID NO: 106692 - protein, 153 aa, Gossypium hirsutum
  Clone ID: LIB3583-035-P1-K1-F8.pep
NRKLHILKASSSFLYWIPKPSPSKFSKFPSTPSLTPSSPPCYRVVCSGGSPQPASFPDLSFALHDALESTGIDASHAREARKSFVSQIQKLSDIERETSICINRCVVLGRTSLYIAAEDDSLMSQSSVPLPVDAFLERLDDLSMGYCSHYNSV

SEQ ID NO: 106693 - protein, 121 aa, Gossypium hirsutum
  Clone ID: LIB3583-035-P1-K1-F9.pep
TSMLKTNYAITNNSNFKDLGFAQENMQSPITSKYTTKRPVHVTRKQVLSFRHWYMLQRSIFNFFASFYMHSEGHIPKPMLGYASNMSAVHGYFKKNEELEKHSTQRTTQLIISYLVNLNKT

SEQ ID NO: 106694 - protein, 54 aa, Gossypium hirsutum
  Clone ID: LIB3583-035-P1-K1-G10.pep
CLQMSLNIQVTSSTPRLPFPSLTFQSLLPYFFFSCRQVRLLTITTLVVACQGRI

SEQ ID NO: 106695 - protein, 89 aa, Gossypium hirsutum
  unsure (1)..(89): unsure at all Xaa locations
  Clone ID: LIB3583-035-P1-K1-H9.pep
HFIYYISSKMRAGFFLNSIHIYPLGKTPLTLKRNSTLFDLVPPLTKVNNLIFXPTSVDSSREIIITNFTTCHKTLLYFQPCCLFGTCPY

SEQ ID NO: 106696 - protein, 91 aa, Gossypium hirsutum
  Clone ID: LIB3583-036-P1-K1-A9.pep
ESYTMKKHKELLIMYNCHNTALEHSTPHQFMWGRDEHCSCSRGWKFSDFFCMCTSSAGCVYLYASYISQVLATRHLQVHRRTSLEQKRTRG

SEQ ID NO: 106697 - protein, 62 aa, Gossypium hirsutum
  unsure (1)..(62): unsure at all Xaa locations
  Clone ID: LIB3583-036-P1-K1-B1.pep
LYWVFLFVPTCINQISFPSLFSSIVLVYFFFXNNFEYHESANQNPNKFILRSLTLTVKLAWI

SEQ ID NO: 106698 - protein, 227 aa, Gossypium hirsutum
  unsure (1)..(227): unsure at all Xaa locations
  Clone ID: LIB3583-036-P1-K1-B6.pep
MLSCSIRTLRRLKCCCNKRWSSLFLAKGYCFSKPKVVPSFCNTDIKFSRFYVGERQSSLRQWRRRSLYTVTDTYEAIELALDSVIKIFTVSSSPNYFLPWQNKSQRETMGSGFVIPGKKILTNAHVVADHTFVLVRKHGXSPTKYRAEVQAVGHECDLAILVVESPEFWEGMNFLELGDIPFLQEAVAVVGYPQGGDNISXTKGVVSRGEPTQYVHGATQLMAIQID

SEQ ID NO: 106699 - protein, 159 aa, Gossypium hirsutum
  Clone ID: LIB3583-036-P1-K1-D7.pep
DVVHNSTIELSCVEIYMKEKQRIYDMLSKLQGRINLAIEMWSSPENSKYVCLTAHYVDDEWKLQKKILNFLTLDSSHTEDMLSDVIIKCLMDWDIDCKLFSMTFDDCSTNDDIVLRIKDQISESRPRLSNGQLLDVRSAAHVLNSIAQDAIEALQVVIQ

SEQ ID NO: 106700 - protein, 96 aa, Gossypium hirsutum
  unsure (1)..(96): unsure at all Xaa locations
  Clone ID: LIB3583-036-P1-K1-E2.pep
KGEYTIHSXKKCLLHNGQTQIQSNYRQFYKRLWSLDLPPKIKITNWRFSCNYLPTFGNLYFRRMLGLATYRRCQNKAETMEHLFRECPVRQIHTGR

SEQ ID NO: 106701 - protein, 233 aa, Gossypium hirsutum
  unsure (1)..(233): unsure at all Xaa locations
  Clone ID: LIB3583-036-P1-K1-E4.pep
KPGKIRSLAEVLPDSSRTLHDGLYRALDIYFKAHPWLSDREKEVLCNIIDYGKLSIDACAHASQNKRLPLRVVLQVLFFEQLHLRAALAGCLNVLEAESAPTGQGIAPTEIAGNVTATGETSQRIVQRDGWVTIVRENQVLKVDMERMRSRVGELENKSQXIKLELKKVKKSRNSLSSPCIVAGKFGCKPLSKSSDSQTDVVGSTGLTPRPSFEQPHSSRHSGHRKKLSLFRD

SEQ ID NO: 106702 - protein, 103 aa, Gossypium hirsutum
  unsure (1)..(103): unsure at all Xaa locations
  Clone ID: LIB3583-036-P1-K1-E6.pep
KRPXXFFXXFLXKKVKXXPXXYFKFPFKTXXXTSLKLXTTXKXXLXXLFXHKXPXXYXXIPPPLXXPXTHTQTXLLKELSXCKSFLGTXXIRGVITFSRHALA

SEQ ID NO: 106703 - protein, 169 aa, Gossypium hirsutum
  unsure (1)..(169): unsure at all Xaa locations
  Clone ID: LIB3583-036-P1-K1-F5.pep
MNGDYKGSEFKAERKKMEEKYEVLKQRLRKIVEGHFPTNVAINNTRDHPSVIEVINKEEDEVKIPQLIYVSREKRPSHNHNFKAGALNVLLRVSTMITHSPYIXALDCDMYCNDPTSARKAMCFYCDSQTPSSLAFVQFPQTFRNISQDDIYDNQVRLAFKVHXYGFDG

SEQ ID NO: 106704 - protein, 186 aa, Gossypium hirsutum
  unsure (1)..(186): unsure at all Xaa locations
  Clone ID: LIB3583-036-P1-K1-F9.pep
MAGQENCVRLTRSTVAKKRTAELAGITDEIVTNKKRVVLGELSNNVAGSVSKVQGKKPTTTTTTATTTAQKLQCKGKVKARSKVVRRVLLEGGDEKKEDFDAMSNDPQMCGYYASGYYGYLHQMEVDPKRRXLPDYIEKVRKDCSMSMRGVLVGWXSEVXEEYKLVSDTLYMTVSYIDRFLSLNPL

SEQ ID NO: 106705 - protein, 232 aa, Gossypium hirsutum
  Clone ID: LIB3583-036-P1-K1-G2.pep
TVASDLLELWKKVVIEETTKSKKNGTSSAIKSEKLPKPSAVKSEKLSNTENVKAEKVSKDNSVKSVKVEKREANGDVAMAKKTDRGEMGKVEKICKDDRQSPNVKKSSQPPAGPPKLTSMVKCNDPVRDKFREILVEALSKVPNEVDGDMLDQVNACDPIKGAVSGESVMFEKMGKSNGAQKFKYRSIMFNIKDPNNPDLRRKVLLGEVKPEGLITMTPEEMASEQRQREIN

SEQ ID NO: 106706 - protein, 107 aa, Gossypium hirsutum
  unsure (1)..(107): unsure at all Xaa locations
  Clone ID: LIB3582-054-P1-K1-A7.pep
MGSEQNRFPQQERQKRWGGCWGAFSCFGGTQKGGKRIVPASRMPEGNASATQPNNGTQAVAGLTNQATTLAPSXLAPPSSPASXTNSALPSTAQSPSCFLSLSANSP

SEQ ID NO: 106707 - protein, 236 aa, Gossypium hirsutum
  unsure (1)..(236): unsure at all Xaa locations
  Clone ID: LIB3582-054-P1-K1-A9.pep
AAEGAFFEIGELVPEEYTPSLSDTNRKTRIKADAKQTQILSTAELISSLNQIWNYASSIAIPQQQTNLERARLVSQKEDILVNLGSEENGSGSISAGSKYFCIDLRQLSSLRKPNFDIVKITKKMSMFESSNGNINPLFYQGLFCGGSDFSNADWKGKGLAAVGFSYEFENIYKWMRKMIPAGLQHXLKFPKIENKXNGKYSIAASSDIGNCISADRTSLTDNLPTENAECYSHCI

SEQ ID NO: 106708 - protein, 214 aa, Gossypium hirsutum
  unsure (1)..(214): unsure at all Xaa locations
  Clone ID: LIB3582-054-P1-K1-C4.pep
RVVSWASMISAYVHNGLANEALELFHILNKTNIHPDSIVLXNALSAASSLSALNXGKEIHGFVIRQNFSEGSIASSLVDMYSRCGMVENAHTIFKSIQSKDLVLWTSMINAYGMHXHGKVAIDLFNKMKENLTPDHVAFLSVLYACSHSGLTAEGRQFFEIMKYEYQLEPWPEHYACLVDLLGRANCVEKACEFVKSMXMAPTAEIWCALLRAC

SEQ ID NO: 106709 - protein, 167 aa, Gossypium hirsutum
  unsure (1)..(167): unsure at all Xaa locations
  Clone ID: LIB3582-054-P1-K1-C5.pep
FAALFGQSDKFVKIXFDAAYDRNLRYPAVGTVARDSEGNVFLSFTETHHQVALAFAAEAIACRTVTKIDFDIQWINTIIEGDALSIIKKCKSKSQDKSMMGAYIHDIHQLLAKSKKYCFEYISREANNLAHTLATETLKKKDEIYLIGKVPAYAENLKEKEKMREPD

SEQ ID NO: 106710 - protein, 188 aa, Gossypium hirsutum
  unsure (1)..(188): unsure at all Xaa locations
  Clone ID: LIB3582-054-P1-K1-C7.pep
MQNQVGSYWEGPPEIRQNQLDLNLQRFPESQGSQMDLQCTNFSQYPENPQNIYNFNSYGQVTSNFNFYGQASATSNPNEGLTEVSETSTNNATVEKLEEFCNKGNVKEAVEVLVLMKQQGIPVDLAQILQLMKACGEVKALQEAKTVHEHLIXSFSPLXISIYNRILEMYLKCGSTDDAFDVFEKEPR

SEQ ID NO: 106711 - protein, 101 aa, Gossypium hirsutum
  unsure (1)..(101): unsure at all Xaa locations
  Clone ID: LIB3582-054-P1-K1-D10.pep
LVTGYGWIVQLMQHKRTDQMFALKTINMNIEESPPTQMVKEXKINQTFHRTYAVVXKQSLYKNGAISIIXEYMXGGSLADFLRKXKYITQPYLAPICEQAL

SEQ ID NO: 106712 - protein, 198 aa, Gossypium hirsutum
  unsure (1)..(198): unsure at all Xaa locations
  Clone ID: LIB3582-054-P1-K1-D4.pep
PALPSVRPRVRPASASVRTVDMRAXYLRSKXILVWKLDNRGTARRGLKFEGYLKGNIGRVDAEDQLTGAEWLIXKGLAKPAHIGLYGWSYGGYLSAMVLARFPDVFRCAISGAPVTSWDGYDTFYTEKYMGFPSEGAESFEYGSVMHHVNKMKGRLLLVHGMIDENVHFRHTARLVNALVAAGKPYELLIFSDERHMP

SEQ ID NO: 106713 - protein, 76 aa, Gossypium hirsutum
  Clone ID: LIB3582-054-P1-K1-D6.pep
FMILYILKILSSFLCLLCFYFPGECQFVTVKPLSLGLCVQGMFRIRFVFYFIIFFKLRLTCPCVIDGARSRCMLYK

SEQ ID NO: 106714 - protein, 101 aa, Gossypium hirsutum
  Clone ID: LIB3582-054-P1-K1-E1.pep
HTRDFPSSAFVWCSFPSPLADHNSFTHFTTSEFKHLWQEETSLFFKKIPRKRSYPSYTPFLRFLQPLRLVLKSCYLYILTSAIKYEYFINTSMLHITFLTT

SEQ ID NO: 106715 - protein, 198 aa, Gossypium hirsutum
  Clone ID: LIB3582-054-P1-K1-E5.pep
PRVRSLLQREAITGPEWKRSRSQVVPSYIIKISCPPSFYDLTFEPSKTYVEFKDWRPVCTLIETAVQHLWRKNISYADGLGQAETLKEDANILNVAEDFFDGSSVDLEFATRKRTKKYQPSSSLDKLTIDNLFLMDHEDTPFEECNGNTAQFKDQQNDMKFVHWTDYSLQSLGDFLSKGGSIVNQRVIGIFGHLITIF

SEQ ID NO: 106716 - protein, 162 aa, Gossypium hirsutum
  unsure (1)..(162): unsure at all Xaa locations
  Clone ID: LIB3582-054-P1-K1-E9.pep
MTANAMKTSLGAHCRGHYGAFIAMMSLSTSAGDTVFILDISPDDLVGIISQKPFSKARRAIVNQQRVCAVQVXELHRLIKGQRVIAGSPHILLEDAAYLSKPSFKDSTVKKLPQELIVKPAPQNKPKDDAEKISYNKECSAQNAAGRTSLSSVKKVVSLQIM

SEQ ID NO: 106717 - protein, 228 aa, Gossypium hirsutum
  unsure (1)..(228): unsure at all Xaa locations
  Clone ID: LIB3582-054-P1-K1-F12.pep
SHRQTFCVKFRXKLFSDSESIQARAEAAVLLKQLDFPVDSLQAKLLEKLEQSLGDLQLKTNEIENVLRESNDPSKQGKGFDSVPGIGHEVSVHGFAEAIRAYRVIFPDSESQLIKLAQNLVIKHFEMTEQRVKRRISSTNFLGALRAIWDDVLLMDGVLSEAALSNFSLEVAHATVKKYVASTFTYLLQDISDALLKVKVSPKRQXEEHPLQAAXEASKKQYKQHGCL

SEQ ID NO: 106718 - protein, 95 aa, Gossypium hirsutum
  Clone ID: LIB3582-054-P1-K1-F3.pep
PAEEVKRPTSPKSRAGPHKAPIIAQVSPGQIVQSVPPFSPPRGCSPHFSIMGPRVFTPPPHLFLVFSGFFSPRKFVFPLLCSSLGSLFLEPPPPP

SEQ ID NO: 106719 - protein, 191 aa, Gossypium hirsutum
  unsure (1)..(191): unsure at all Xaa locations
  Clone ID: LIB3582-054-P1-K1-F5.pep
MTRAYCVAPNPANINSLYSRINAIGDPNCSVTPVLQQWVKGKNVKEFQLQRLIRDLRSRRRYTHALEVSKWMSSSDLEFSSSDYAVQLDLIGRVNGLTAAKNFFSSLRDQDKTVKTYGALLNCYVRVGLIDESLSLMKKMKEMGFLSSPLNYNNLMCLYTHXGQFEKVPDVLLEMKMNGVSPDKXSYKICI

SEQ ID NO: 106720 - protein, 163 aa, Gossypium hirsutum
  Clone ID: LIB3582-054-P1-K1-G1.pep
MAKKPRIVIIGAGMAGLTAANKLYTSTGSDHLFELVVVEGGDRIGGRINTSEFCGDRIEMGATWIHGIGGSPVHQIAREIHALESDKPWECMDGFSGEPKTIAEGGFELNASIVDPISTLFKNLMDFAQGKLTEDSAGSGGDACYYNFAAKAALKDCSNGGFG

SEQ ID NO: 106721 - protein, 60 aa, Gossypium hirsutum
  Clone ID: LIB3582-054-P1-K1-G6.pep
AFAPRPSISTDRPFHLRSSTAPPISRISSYKYSSSGYSFNRKKSNRQHSSLIKKGTFANV

SEQ ID NO: 106722 - protein, 209 aa, Gossypium hirsutum
  unsure (1)..(209): unsure at all Xaa locations
  Clone ID: LIB3582-054-P1-K1-G7.pep
SAVKLQVLSLGGNLLNGXVPSFLGNLTELTDFALGYNPFKPSPLPDEIGNLSKLEYLWLTNANLVGEIPFSIGNLVSLKSLDLTCNFLSGKIPEILSKLKKLEQIELYQNQLTGELPESLAELPSLLRLDISQNSLTGKLPEKIAAMPLESLNLNDNFFTGEIPEVLASNQYLSQLKLFNNSXTGKLPSDFGKFSPLEDFDVSTNNFSG

SEQ ID NO: 106723 - protein, 57 aa, Gossypium hirsutum
  Clone ID: LIB3582-054-P1-K1-H12.pep
QFMCSYHVLSSRYCQSTLTSSVFRSCPVHIVVIHSRVFILCLISAGKVTDPPKLLRS

SEQ ID NO: 106724 - protein, 179 aa, Gossypium hirsutum
  unsure (1)..(179): unsure at all Xaa locations
  Clone ID: LIB3582-054-P1-K1-H2.pep
MVVEANKAKQMINDNNNDCAKVNSYSTIDDSIPHSSLSGDTALTFPLMSPRIIELCXDLVRKWAKLDDSCFSVETVSGGITNILLKVSVKEESGDNVAVTVRLYGPNTEYVIDRERELQAIKYLSAAGFGAKLLGVFGNGMVQSFINACTLTPLDMRKPKLAAGIAKQXCRFHQVEFQV

SEQ ID NO: 106725 - protein, 114 aa, Gossypium hirsutum
  Clone ID: LIB3582-054-P1-K1-H4.pep
MADRFFPNEMPTFVAESTVSTGATGGDSLTNLLSLPYKSLSDHLKSAALALKETVVRETWGLSGKRVQDYTLYTGALGTAYLVFKAYQVTKNDNDLKLCSDIVKACDSASKDSG

SEQ ID NO: 106726 - protein, 211 aa, Gossypium hirsutum
  unsure (1)..(211): unsure at all Xaa locations
  Clone ID: LIB3582-055-P1-K1-A3.pep
FTWKGSCSARELIADGLVWRIGIGSSMNICNNPWLHGHGNNRLVVQNINIXSTTINQLIDSVSHTWRKEVLSSLFDDDQMNRILSIPLACHRTHDTLVWKYEATGEYSVKSGYRVLITEQLQSNDSNFMTTAKYKEFYQQLWDLHILAKIKIHMWRLFINYVPHYTNLVQCRLFVQVECPLCNVAPEDSNHLMWNYGVLHQLWAFLKLGSL

SEQ ID NO: 106727 - protein, 100 aa, Gossypium hirsutum
  Clone ID: LIB3582-055-P1-K1-A5.pep
ALRAYCDNGSILMSFSKARESHTSGNFSCEVSLSYVSFFLFGTRWKGFYDLIIESDCNEVVNWSRNSSKSPQNMKSIVSTVQAMFNAGVFRLNPLAFICC

SEQ ID NO: 106728 - protein, 138 aa, Gossypium hirsutum
  unsure (1)..(138): unsure at all Xaa locations
  Clone ID: LIB3582-055-P1-K1-A6.pep
KKTFIIYLIVTNPNIFVGGGTPISTTTKHLFNKGIRNLTLATFTSDQDNHTINIYDYLXRIITRKNQTEFKPMSLHVKFHDFQGKNYRSAVSKLNNEIEPDNCKVILKPTLIIXTLYKASKGNWTDXLHYKKDKLKPI

SEQ ID NO: 106729 - protein, 135 aa, Gossypium hirsutum
  unsure (1)..(135): unsure at all Xaa locations
  Clone ID: LIB3582-055-P1-K1-B2.pep
MSLPKELYPSQDDLLYEEELLRNPFSLKLWWRYLIARSDAPFKKRFIIYERALKALPGSYKLWHAYLRERLEIVRNLPVTHPQYETLNNTFERALVTMHKMPRIWIMYLSTLTEQKLITKTRXTFDRALCALPVT

SEQ ID NO: 106730 - protein, 116 aa, Gossypium hirsutum
  unsure (1)..(116): unsure at all Xaa locations
  Clone ID: LIB3582-055-P1-K1-B9.pep
GICWHLQGRGGLITELRRELRVSDDEHRELLTKVNXDDXLSRRIRXDWRQSGGNQPARLGASDSVHSILPSPTVSASGKKQKTSQSGNLPTIGGGITRFRTLLVVLCVKLSSLDAS

SEQ ID NO: 106731 - protein, 229 aa, Gossypium hirsutum
  unsure (1)..(229): unsure at all Xaa locations
  Clone ID: LIB3582-055-P1-K1-D6.pep
NVGAXRFSDYTGYASSFRFSGDYVDKRSVDFLGRRKTRIVAIDALCSPRMKQYKLKYLIRETNKAFCGFLDQSKYSQYKRIFKMNSVQLNEGSSLPIKAKGESRTEEVRKSDEKSWRLEDCENYIGIATGNWGCGAFGGDPEVKTIIQWLAASQALRPFISYYTFGLEALQSLAQVTQWIILQKWNVGDLWNILIEYSSQKLRGEADVGFFAWLLPSLPKIYNVICYAL

SEQ ID NO: 106732 - protein, 164 aa, Gossypium hirsutum
  Clone ID: LIB3582-055-P1-K1-E8.pep
RGRTLQTKHPPKQAAKNNIQDGALPQQQDCYEGERLIHVLKSIRRGIESARALAGNSLPEKVWLKQQFAIGVNDVTRVLERMAAIIDEGSTAQSPFVRLQAILLAADCNPKWLTKHLPTLAKSRKVPLIIVKDDKKGSLRLGELVKLKTAVAIGVKARGSAINQ

SEQ ID NO: 106733 - protein, 125 aa, Gossypium hirsutum
  Clone ID: LIB3582-055-P1-K1-F8.pep
KTLAPSFAPQQLSAASSIAVASVPAPCVPSSSLPRAPSSNWLRSYLQQNNNPQQTDNKRKIACIFIMIIILFFSLFCYEKPEKRCKWDLFSEKYETKRIQIYIENNSFQVVILNLIFLFILLLSF

SEQ ID NO: 106734 - protein, 206 aa, Gossypium hirsutum
  unsure (1)..(206): unsure at all Xaa locations
  Clone ID: LIB3582-055-P1-K1-G6.pep
PRPLGDMPXKSFEFKRVAYAREFLDVAPGITVMDSLKRVLRLPSVCSKRFLTTKVDRCVTGLVAQQQTVGPLQLPLADVAVIAQSYVDLTGAACAIGEQPIKGLLDPKAMARLAVGEALTNLVWAKVTSLSDVKASGNWMYAAKLEGEGAAMYDAAIALSEAMIELGIAIDGGKDSLSMAAHAXGRVXKAXWXLVISAYVTCPDIT

SEQ ID NO: 106735 - protein, 47 aa, Gossypium hirsutum
  Clone ID: LIB3582-055-P1-K1-H1.pep
ILKSNRILRVFTQTPCVRSFLWLSVVLCCFFWHKFAFALQLVPWTSS

SEQ ID NO: 106736 - protein, 133 aa, Gossypium hirsutum
  Clone ID: LIB3582-055-P1-K1-H11.pep
MWRNQDLIYDDKLLYDLFPYKEIYNGMLSEVQGKGVGQGAIDGDIDANTSAKDADEDEGDDDQSENEADIVDTIRLNEQPHEHTKQDEKHMKKFMKNLTPNLAAEKQESFKKNIEGATKGALSKLKDLQFDIE

SEQ ID NO: 106737 - protein, 175 aa, Gossypium hirsutum
  unsure (1)..(175): unsure at all Xaa locations
  Clone ID: LIB3582-055-P1-K1-H3.pep
MLQWPSKIVFITSMALLMVVMMMKVVVLLWWKPKKIESHFLKQGIKGPPYHFFIGNVKELVGMTLKASATPMPDFSHNILPRVLSFYHHWKKIYGTPFIVWFGPTVRVTVSDPDLIKEIFISKSELYEKXNEAHPLIKQLEGDGLLSLKGQKWAHHRKIIHPLSYGKLKLLVPVM

SEQ ID NO: 106738 - protein, 184 aa, Gossypium hirsutum
  unsure (1)..(184): unsure at all Xaa locations
  Clone ID: LIB3582-055-P1-K1-H6.pep
SLTSKKPIGKGEAMPGGMLVRGDGDDSNLHHNHEAAATSSAGPMIKIDVAYGSAQHKLFVPSHSTVGELKKQIAEETGLEPDKQRVLFRGKEKEDDVHLSSAGMKDKSKILVLENPTGKVKKVEEMANVEEKVEESIARKESKVEEIKETEEMSKAFAAVGRVRXRVDKLSERVAAIEVAVNSG

SEQ ID NO: 106739 - protein, 69 aa, Gossypium hirsutum
  Clone ID: LIB3582-055-P1-K1-H8.pep
SSGEYSVCSAYKLLQNSGENPRAYVLQTNYWNFYKKNFGSKISLLKSRLQSGEYNGIIFLYGLTCSTES

SEQ ID NO: 106740 - protein, 114 aa, Gossypium hirsutum
  Clone ID: LIB3582-055-P1-K1-H9.pep
RLNPPVLIFLQSKEHAKELYEELKFDNIRVGVIHSDLSETQCENVVNDFRAGKTWVLIATDVIARGMDFKGVNCVINYDFPDSAAAYIHRIGRSGRAGRTGEANVMAASGCEVP

SEQ ID NO: 106741 - protein, 89 aa, Gossypium hirsutum
  Clone ID: LIB3582-056-P1-K1-A1.pep
YIFSFLLFINSGFLLRCSQSHEFHVICRRREKGRENQSNYPYKVIEITPPPKSLGVRCFPPVSPTFFLVICCLKFIQLELYLYRFKGGN

SEQ ID NO: 106742 - protein, 199 aa, Gossypium hirsutum
  unsure (1)..(199): unsure at all Xaa locations
  Clone ID: LIB3582-056-P1-K1-A5.pep
DLRRXDVLRLGWNRFDGPVPALNQSFLLIFNVSGNNLTGXIPVTPTLSKFNTTAFSLNPDLCGEIINKACASRAPFFGSPSASGPLGQSAEAQSGGGGGVMVLSPPSSPKKSHRRTGVVLGFTIGIALILFSVLLALAVVKKQRVDSKGTKPTTIASAEVTHSNAGNSRXPYRRTTGEEDNDAGNSKAEKEWEFSVRRW

SEQ ID NO: 106743 - protein, 105 aa, Gossypium hirsutum
  Clone ID: LIB3582-056-P1-K1-B10.pep
ADCISSQVSSPKLTTSSVKPELWAILDGLRLVLSSTYLLHVSLFLWLSAVVSSFFYFQKVNVIAMTVASSVGRRRLFGQINSFIAVFILAGQLTLTVCYTYDEFL

SEQ ID NO: 106744 - protein, 208 aa, Gossypium hirsutum
  unsure (1)..(208): unsure at all Xaa locations
  Clone ID: LIB3582-056-P1-K1-B11.pep
LVRXSKLVLVDLAGSERVQKSGSEGHMXEEAKSINLSLSALGKCINALAENSAHVPIRDSKLTRLLRDSFGGTARTSLIVTIGPSPRHRGETASTILFGQRAMKVENMLRIKEEFDYKSLARRLEIQLDKLIAENERQQKAFDDEVERINLEAQNRVSEVERDFTDALEKERLKCQMEYMESVKKLEEKMIENQRKHQHDGFMKDKCN

SEQ ID NO: 106745 - protein, 68 aa, Gossypium hirsutum
  Clone ID: LIB3582-056-P1-K1-C10.pep
GLSHWRTSSSSLPFLQRRFVLPNTFVSTRAHLILHGGTTTANGAHGGANNDALSKTGVKTCEQRQIER

SEQ ID NO: 106746 - protein, 57 aa, Gossypium hirsutum
  unsure (1)..(57): unsure at all Xaa locations
  Clone ID: LIB3582-056-P1-K1-C11.pep
YPSYRTLQEIRKYQKTTNXIIPAASFIREVRAISYQLAPGISRXQAEALVAIQEIYR

SEQ ID NO: 106747 - protein, 43 aa, Gossypium hirsutum
  Clone ID: LIB3582-056-P1-K1-C12.pep
SVRAGLKKVPWDGYLKYSRPRPKHREQKQQSFAESVLRRLEEN

SEQ ID NO: 106748 - protein, 101 aa, Gossypium hirsutum
  unsure (1)..(101): unsure at all Xaa locations
  Clone ID: LIB3582-056-P1-K1-D5.pep
TKICLRLWYEELISDFQRALVLITMDPAXHMHCLDSMQATKRCTLNHWELMKTASTTLLHELLNVRNVVHTSSQKSLNTIXHHTKRGYRKLVEPLVRAFRY

SEQ ID NO: 106749 - protein, 169 aa, Gossypium hirsutum
  unsure (1)..(169): unsure at all Xaa locations
  Clone ID: LIB3582-056-P1-K1-E1.pep
XXLATISEFVENDQDVGTPGLMELPNLSGDHKVLADHMESEHHNLTELGNECVENASNKSKSLDGDTGPVDQSLHNDVDHDAVPPKNGCHFGDMEKEQTKPPGNSVHDALCVEYTSAVGNVRGSDGLDRVEDMQNGVMHSIDRTEGECAESPSCSNITFDLEDPSRRHV

SEQ ID NO: 106750 - protein, 39 aa, Gossypium hirsutum
  Clone ID: LIB3582-056-P1-K1-E8.pep
LQTFRFPLSLESIMTKILAYQVKIRNQNHSPQNPLLHHC

SEQ ID NO: 106751 - protein, 99 aa, Gossypium hirsutum
  Clone ID: LIB3582-056-P1-K1-F1.pep
NKNNKKEPLIYYLGRVRHSLADPKVAKPEWPWRRERSQKAPPFFAVPQVREISSSNSFKEGRRSPYRTIPVADSWHGHERPPTNPWSAMEEVKMGGLKP

SEQ ID NO: 106752 - protein, 92 aa, Gossypium hirsutum
  Clone ID: LIB3582-056-P1-K1-G1.pep
RFTLTLLMNERKLYGAGWRISNTRTCIPPHWPTSHLAYTTVIHGLLSKITKMRRTWRELKGRMRKRPPKMLTAWLRDAHAGTWKVLCDYRDE

SEQ ID NO: 106753 - protein, 72 aa, Gossypium hirsutum
  Clone ID: LIB3582-056-P1-K1-G11.pep
SYGLQPQRAHIRTENKRELPPMQCLPQKAKLLVLYNKALYAPQLNMNATPNAIPDTANREGLSIKVATMRRQ

SEQ ID NO: 106754 - protein, 55 aa, Gossypium hirsutum
  Clone ID: LIB3582-056-P1-K1-G8.pep
VLKLQFAGTNLPLFYTINYTPTSQNNKNGKKKKKKLKEEKMSSSFTEDCNIYHPF

SEQ ID NO: 106755 - protein, 90 aa, Gossypium hirsutum
  Clone ID: LIB3582-056-P1-K1-H1.pep
IHQSSKKNNLIECETHPLICSKAFPFLYDVRLMTQTKLQVPDSTSSYHPLSRFNIPVQLSRKMYKLRNFRSNRQDIESNYASNKTDTGRG

SEQ ID NO: 106756 - protein, 129 aa, Gossypium hirsutum
  Clone ID: LIB3582-057-P1-K1-B7.pep
MSRPGDWNCRSCQHLNFQRRDSCQRCGEPRPGGGDRGGDYGSFGGRGGSSFGFTGPDVRPGDWYCTVGNCGAHNFASRSSCFKCGAAKDESSGGFESDIPRMRGYGFSTGSSSRSNWKSGDWICTKSGC

SEQ ID NO: 106757 - protein, 69 aa, Gossypium hirsutum
  Clone ID: LIB3582-057-P1-K1-C11.pep
PRVRTESSILFESHIVDILRGVRTGDLGDLSPTQFRLSRSTCMQTNGFCFFGSNSITSPSTNLLIVFLL

SEQ ID NO: 106758 - protein, 59 aa, Gossypium hirsutum
  Clone ID: LIB3582-057-P1-K1-C12.pep
LDWVGSPCSVLRYYHNIFIYYIMIIKIEEYLLYIIILEKIINSMIKNNKRILLCFNRNI

SEQ ID NO: 106759 - protein, 85 aa, Gossypium hirsutum
  unsure (1)..(85): unsure at all Xaa locations
  Clone ID: LIB3582-057-P1-K1-C7.pep
MITLLVGGDLFCLFENLRGVLGLGRFENLDWISILKIVSKRRLLSSLKILSLGHLKKILSFWFDQXGKALKNMALNFKASXLHPS

SEQ ID NO: 106760 - protein, 130 aa, Gossypium hirsutum
  unsure (1)..(130): unsure at all Xaa locations
  Clone ID: LIB3582-057-P1-K1-D1.pep
IQQVSDLASQFPALXTYRSCDLLPSSWISVAWYPIYRVPMGPTLKNLDACFLTYHCLSTPSNGKHLFHHSHSIKELDAAEMPSKLPLPTFGLAFYKFQASIWNAPEVIESPKANSLLQEADNWLRHLQVD

SEQ ID NO: 106761 - protein, 83 aa, Gossypium hirsutum
  Clone ID: LIB3582-057-P1-K1-D4.pep
TKPITKTQNQTQLSPNLKLKPLPTKYFPAMKGGRTLRAVPGHFSPPTRAVPPMCLPAATSVHTARICKQRRKDNTQEKKNRQQ

SEQ ID NO: 106762 - protein, 202 aa, Gossypium hirsutum
  Clone ID: LIB3582-057-P1-K1-E4.pep
KSCPTCLGDCLLSQKPCVCACQAGGKFAYTPEGVIKEDFLEECISMTRDPQKQCLLNCTECPLERSKADDFPEPCKGHLQRKVIKECWIKCGCNKQCGNRVVQRGVNYKLQVFLTPDGKGWGLRTLENLPKGAFVCEFVGEILTIPEFYARNREKHTSPVLLDAYWGLKGVPKDEEALCLDATCYGNVARFINHRCLDANLI

SEQ ID NO: 106763 - protein, 62 aa, Gossypium hirsutum
  Clone ID: LIB3582-057-P1-K1-E9.pep
SHALQGYFYIVLEGSSHVCLLSNLACSLIISWRYTHFITSQAMVCGLAHVIGTASSMAPDAG

SEQ ID NO: 106764 - protein, 197 aa, Gossypium hirsutum
  unsure (1)..(197): unsure at all Xaa locations
  Clone ID: LIB3582-057-P1-K1-F1.pep
VMANRLRLVMDXMLDLAESAFVLGRLISDNSLLAYELLHTLRHKAGEKGCMAAKLDMSKAYDRVEWNFVKDIMKKLGFDSNWVALLIKCVTTVSYSVVLNGNKGEXFFPSKGLRQGDPLSPFLFLFCXEGLSSLIKLGIHEKLMRRVKASKKGPQISHLLLANDCILFRTATEKNATCLKQILHEYEIRSSQRFIFL

SEQ ID NO: 106765 - protein, 67 aa, Gossypium hirsutum
  Clone ID: LIB3582-057-P1-K1-F3.pep
QIGLIPISDHTPILLLYESLNWGPRTFKFINAWFNKKDCMRLIEKEWSDLVSVKGETEVKLRKFKGT

SEQ ID NO: 106766 - protein, 182 aa, Gossypium hirsutum
  Clone ID: LIB3582-057-P1-K1-G3.pep
MVRRHGWELPAHTFQVVAITVFFLLSVAYYAFFAPFLGKDIYEYVAIGVYSIVALSVLILYVRCTAIDPCDPGILLEADKTPTRKSHTEMDLSGNASSIEEPCKIRVKYGRQYNRHRSQWCSKLGGFFCACLVKEDCCKDEDLLQQQSGEEDALFCTLCNAEVRKFSKHCRSCEKCVDGFDH

SEQ ID NO: 106767 - protein, 223 aa, Gossypium hirsutum
  unsure (1)..(223): unsure at all Xaa locations
  Clone ID: LIB3582-057-P1-K1-G6.pep
CGSCVWELAPYYSSGYQCYLLFVDSFSQHTLIYFLQXKSNAFHAFVSFKTCVDXQLGVKQIQTDGGGEFQPFTSYLQQCGILHRVSCPHTSEQNGLVEWCHRQIIETRLLLLAQASLPISYWANVFATAMHLMNVLPTKVLNSVSPRKKLFDHKPDYHQLRVFGCCCYPLLRSYNRHKLQYXSAPCTFIGYASNHNGYKCVDRSSHVYISXHVQFDENGFPFV

SEQ ID NO: 106768 - protein, 138 aa, Gossypium hirsutum
  unsure (1)..(138): unsure at all Xaa locations
  Clone ID: LIB3582-057-P1-K1-H2.pep
RLTGFYGSPYSNKVESWNLLRNLRNGGELPWMVCGDFNEILYSFEKKGRFXREEGRMEAFRTILENCDLRDLGFSRRWFTWERRNLPKTNIQERLDRGVTTEEWITLFPEFQVRHMSHSFSDLFVAHYYQTGGEEKNY

SEQ ID NO: 106769 - protein, 209 aa, Gossypium hirsutum
  unsure (1)..(209): unsure at all Xaa locations
  Clone ID: LIB3582-057-P1-K1-H9.pep
MLRLKGTLVSPFSFFAVFSIILASPTFLSVESYSHRHASTVGQLVLKHDRKLLTQTEHGEISAAIVTDGTKGPYHLQFITLEPNSVFLPVLLHANMVFFVHTGSGTLSWTDDDDMRDVNLRKGDVYRLPEGSAFYVQSSLEAEREKLRIYAIFTNAEDDIYEPYIGAYSSITDVVLGFDTRVXQAAFKVPRDLIEIMRASKPPAIIHAV

SEQ ID NO: 106770 - protein, 162 aa, Gossypium hirsutum
  unsure (1)..(162): unsure at all Xaa locations
  Clone ID: LIB3583-045-P1-K1-B12.pep
CGILLEVVQILTDLDFTITKAYISSDGGWFMDVFHVTDQQXXKITDGRTVGYIERALGPKGHAADGMKNCPGKRVGVHSVGNHTAIELVGRDRPGLLSEISAVLADLQFNVAAAEVWTHNRRIACVLYVNDYSTNHAVHDLNRLSIMGEQLKHILRGSEDDD

SEQ ID NO: 106771 - protein, 78 aa, Gossypium hirsutum
  Clone ID: LIB3583-045-P1-K1-B9.pep
AKAFIDIFALNNSPILRKQPKWKITLSVLEGQMQILAKNMMSTRKQNYPDLFLKANSTQKYFLSDRSIQLISKQYNIY

SEQ ID NO: 106772 - protein, 71 aa, Gossypium hirsutum
  Clone ID: LIB3583-045-P1-K1-C9.pep
HSRRDMNINMQTDACKPANKHIKNMHMSIKPFSPSHGSTQFLEIFLDAVVLQYLIHGVPQLSFSAISLIAT

SEQ ID NO: 106773 - protein, 95 aa, Gossypium hirsutum
  Clone ID: LIB3583-045-P1-K1-D10.pep
QKKNLRSYAILSNKRNTTTEKNKEKQPSPESPYFRNRWAFIGVVSSVHFVCVNIIRKMRRKMKKGKQIRKITFFAFVLFRIASEYVRKMSTLLQD

SEQ ID NO: 106774 - protein, 194 aa, Gossypium hirsutum
  unsure (1)..(194): unsure at all Xaa locations
  Clone ID: LIB3583-045-P1-K1-E8.pep
IIYPVLLQTVIKGDPRICSAKIIWVNPDATTWIRNPSKTQKGELALEVVLEKSAVKQNCDAWRTVIDCCLPVLNIIDTHRSIPYAIKQVEQLLGISCAFEQAVQRLSTSVSMVTRGVLKEHLMLLANSMTCCGNLIGFNSGGYKTLSRSLNIQVPFTEATLFTPRKCXERAAEKCYDDSLSSIVASCSWGKCVA

SEQ ID NO: 106775 - protein, 149 aa, Gossypium hirsutum
  Clone ID: LIB3583-045-P1-K1-G12.pep
MKGALVSRSGREFINGGLELPDSATVADLQEAIYKRTKKFYPSRQRLTVPVPPGSKERPVVLNYKKSLKDYFDEKQNKLTVVFKDLGPQVSYSTLFFFEYLGPLILYPIFYYFPMYKFFGYGEDRVIHPVQTYAVYYWGFHYLKRIMGT

SEQ ID NO: 106776 - protein, 89 aa, Gossypium hirsutum
  Clone ID: LIB3583-045-P1-K1-G7.pep
NGLSYLHQYSAVNLILLLWNFNYCFEYVSCSFSFLKQALILARLLGKCIDLGSIKVSTGTLYCFEVVIIIPLFLSADNYIHWGIKRYAG

SEQ ID NO: 106777 - protein, 160 aa, Gossypium hirsutum
  unsure (1)..(160): unsure at all Xaa locations
  Clone ID: LIB3583-045-P1-K1-H9.pep
PASGLSTGVRGLGKFHQRKCPFKIDIGPVYSVDPAKRHAYAQSGDNVFTPVERELVFDVGXGGYDDVRYCCTGAYVCLXCWPLMTIAIKVIVFFLRDDFGFNHILWVYSGRRGVHCWVCDGKARRLTNEQRAAIADYFHVYKGNENSXKKISLPGLVLHP

SEQ ID NO: 106778 - protein, 88 aa, Gossypium hirsutum
  Clone ID: LIB3583-046-P1-K1-A12.pep
PGVLVALLRLGKSASRGMFIDSCFAHCQTEMQELWFMQDSPLLNKTKIGKAVGDWFYDKKPFQKIDCAYPCNPTCHNRVYDDPHAPHS

SEQ ID NO: 106779 - protein, 118 aa, Gossypium hirsutum
  Clone ID: LIB3583-046-P1-K1-B7.pep
RIWGRIEFLRVHADMVTAVSATVISKRNGGGPRPRSQPQPQPQPQPRPRQRPPLLPSDPDNAIVPRSLKFREVTSRYLSTSSSSNSSTSSSSSSGAYTKPCPSPSGSRTPTVTTPSVC

SEQ ID NO: 106780 - protein, 76 aa, Gossypium hirsutum
  unsure (1)..(76): unsure at all Xaa locations
  Clone ID: LIB3583-046-P1-K1-D11.pep
QQGSDSKISEWSLQTEHVNAMLHPNKGQWRLIILPNLESSGSSNSISCNGFTLTFFXPYSRTIYIIKGKRLVVTPL

SEQ ID NO: 106781 - protein, 94 aa, Gossypium hirsutum
  Clone ID: LIB3583-046-P1-K1-G10.pep
HLRKNTHKTKKRAKICFPLVNNMILETPQTATSQPNKTIYSTSPLFVSSKTPTEATITNNSLTNCFELQYLQLSCRCSSDKPQNMFNKMQGEEG

SEQ ID NO: 106782 - protein, 168 aa, Gossypium hirsutum
  unsure (1)..(168): unsure at all Xaa locations
  Clone ID: LIB3583-046-P1-K1-G12.pep
ISLYIVCGRSRKFDDGGIEGKEEEKNQEKERKRRPEENTEEEAXEESVRRAQKRRDEEEEARRREEEEEAKRIEKKVGQXREEEEEAKIRREEEEANTRREEEEEANRREEKEAIMREEEEEHARRREEEEQSSTEEEEEAITREAEDARQIDDEEGATRWVTNKTRE

SEQ ID NO: 106783 - protein, 100 aa, Gossypium hirsutum
  Clone ID: LIB3583-047-P1-K1-B10.pep
LTLYIESRDLFLFEGNSYRGETHVLNPLLCKTLCTCISCFLLWHLLDRLSLSLCHSISWYNATLSFDGIRFGLWQTRIFSHRQDWISAESVQAFISSSTI

SEQ ID NO: 106784 - protein, 146 aa, Gossypium hirsutum
  unsure (1)..(146): unsure at all Xaa locations
  Clone ID: LIB3583-047-P1-K1-C10.pep
KFLAMLPVDPKLGKMLIMGAIFRCFDPVLTIVSGLSVRDPFLLPXQDKKDLAGTAKSRFSAXKDYSDHMALVRAYEGWKDAEREGSAYEYWWRNLLSAQTLQAIHSLRKQFGYILKEAGLVDAYVAANNKLSHNQSLVRAVICSGL

SEQ ID NO: 106785 - protein, 111 aa, Gossypium hirsutum
  unsure (1)..(111): unsure at all Xaa locations
  Clone ID: LIB3583-047-P1-K1-C8.pep
GRVGGRVGAEVGXRNDMLSLLPISTPAPPHKSVVVGDLKMADFKQFLASKGVKVEFAAGALRCGEYVTLRKVGVASQXGGGSGTQQIIIEGPLCEDYYKIREYLYSQFYLL

SEQ ID NO: 106786 - protein, 79 aa, Gossypium hirsutum
  unsure (1)..(79): unsure at all Xaa locations
  Clone ID: LIB3583-047-P1-K1-D12.pep
FMLFRDGEFNRSNIVDVSIHVCGRMIRRVNYNKRNGNKVQFTXLRVLLWAXNKTPPXXLSLPIDLWMNAFWTVFYLKNL

SEQ ID NO: 106787 - protein, 200 aa, Gossypium hirsutum
  unsure (1)..(200): unsure at all Xaa locations
  Clone ID: LIB3583-047-P1-K1-D9.pep
MVKQAQTDEPIWDTSLEGGREILNQDVYLRTFTPCIGMKSNGFVTEASREAGMEIINRMALGETLMDSNRGSEMFPCMIARTSTTAVISGGVGGTRNGALQLMHAELQALSPLVPAREANFLRICMQHVKRDWAGVDAAVDTNRDTXRAPSFANCRRLSSGCAAHDMPNDYSKVTWMEHAEYHASHVHQLYHPLLKSGMA

SEQ ID NO: 106788 - protein, 204 aa, Gossypium hirsutum
  unsure (1)..(204): unsure at all Xaa locations
  Clone ID: LIB3583-047-P1-K1-F10.pep
VTTTLXNVQEDFLTLVHKDTILVGHSLENDLLALKISHDLIIDTSVIYKHPRGGSYKSALRVLAKRFLSREIQQSGSGHDSIEDARAAMDLALLKIRNGPDFGSPPSFMRRKLLTLLGDCGKTSSFIDDVSIVKRYASESSHAIPVCSDDEALLKARKEVKNDRVHFVWTQFSELNSYFRKQAEDDVKLNGKLAEMISLLTCDK

SEQ ID NO: 106789 - protein, 51 aa, Gossypium hirsutum
  unsure (1)..(51): unsure at all Xaa locations
  Clone ID: LIB3583-047-P1-K1-F7.pep
NLDFIIXFIINLVSQKKKKKKKKKKKKKKKNSGWGGGQXSXXLPCHLFSLL

SEQ ID NO: 106790 - protein, 53 aa, Gossypium hirsutum
  unsure (1)..(53): unsure at all Xaa locations
  Clone ID: LIB3583-047-P1-K1-H12.pep
FSKMFLXWWFIFKKEWSIYRSISYLNSSEFIESYMDNKVYNYLSIYYYPNITI

SEQ ID NO: 106791 - protein, 189 aa, Gossypium hirsutum
  Clone ID: LIB3583-048-P1-K1-B9.pep
HNAGDLVHQCSDEGYKQETNLVNEEEPQIATPCQNSWVEELKQKIDSTVQSEEKKEVMGSIVESPRLNKPEETAPEEEMETLSKGSQDVKDLSQRSENVIENTPKIKDKNLKLGQSAKSHQITAVNMERNDSRIKKKPASPVTKTPQVSTSRTSKQTLTPTMSSASRTRSKTGTTLSYSSPKTKNPSVE

SEQ ID NO: 106792 - protein, 177 aa, Gossypium hirsutum
  Clone ID: LIB3583-048-P1-K1-D10.pep
DIHECKERADAFAAFGALSNYGIGAHKDAFLEQIHATLPRLILHLHDDDLAVRHACRNTLKRFAPLMEIEGLLALFDSHRINSDHRSAYEDFVRDFTRQFVQHLSSRVDTFMASTIQALNAPWPIIQANAIYVSSSILSLSDDPSILALYHAQVLGMLVGKMSRSADAVVRARSSLA

SEQ ID NO: 106793 - protein, 188 aa, Gossypium hirsutum
  unsure (1)..(188): unsure at all Xaa locations
  Clone ID: LIB3583-048-P1-K1-G7.pep
CQRQIAKAEAVSRPTRYLAIATSGGLNQQXTGITDAVVAARILNATLVVPKLDQKSFWKDASNFSEIFDVDWFISSLSKDVKIIKQLPKRGGKSWTPYTMRVPRKCSERCYQNRVLPVILKRHHAVQLNKFDYRLANKLDTDLQKLRCRVNYHALKFADPILEXMGKTLVHRMRMRSKRYIALHLRFE

SEQ ID NO: 106794 - protein, 150 aa, Gossypium hirsutum
  Clone ID: LIB3583-048-P1-K1-H8.pep
QLKLLRLLVCSSLDGNVVNEAGNATTVENGNTVDNVGGASAAPEFVDGSAPPMSCEEDRLWSILRANSLDFNAWTALIEETEKVAENNILKIRKVYDAFLAEFPLCYGYWKKYADHEARIGSMDKVVEVYERAVQGVTYSVDIWLLYCSF

SEQ ID NO: 106795 - protein, 197 aa, Gossypium hirsutum
  Clone ID: LIB3584-008-P1-K1-A4.pep
RAVTIHVSGSTGNRLQGAAITINQVSKDFPFGSAIAHTILGNLPYQNWFVERFNAAVFENELKWYATEPDQGKTNYTLADQMLEFVRAHQIIARGHNIFWEDPKYTPAWVRNLTGPDLQSAVNSRIQSLMSKYKEEFIHWDVSNEMLHFDFYEQRLGPDATLHFYETAHQSDPLATLFMNEFNVVETCSDVKSTVDT

SEQ ID NO: 106796 - protein, 154 aa, Gossypium hirsutum
  unsure (1)..(154): unsure at all Xaa locations
  Clone ID: LIB3584-008-P1-K1-B10.pep
GSKPLQIWDKEVENGHVKRPHDDDIQSXVLEIIGSNIQSTFITCPADPAATLVFFLPFLVMIVKNLKKYFSFEIQVLDDKNVRRRFRASNFQXAVTRVKPYICTMPLRLDEGWNQIQLNLADYTRRAYGTNYVETLRVQVHANCXLRRIYFSDR

SEQ ID NO: 106797 - protein, 87 aa, Gossypium hirsutum
  unsure (1)..(87): unsure at all Xaa locations
  Clone ID: LIB3584-008-P1-K1-B12.pep
PXWXLFXXVWRXXSRLVPXFWFSPPPVXXSLAFXEKKKNPPPPLSXGVGLAGQVYTFYFANNWTNACTHSRTRYLHLKWCXRCFISF

SEQ ID NO: 106798 - protein, 51 aa, Gossypium hirsutum
  Clone ID: LIB3584-008-P1-K1-D8.pep
AMSSIKATNHQILIVNIMTDMMVHAKCQILLDQQRAITAVTIFLALTYDYR

SEQ ID NO: 106799 - protein, 195 aa, Gossypium hirsutum
  unsure (1)..(195): unsure at all Xaa locations
  Clone ID: LIB3584-008-P1-K1-E7.pep
GRVGSIGSYIALGMLRRLPEKAMYCIGLYPFLALNLQSXEQAVIVKVIMSRVLSTMVTLFVASLSLLPRQVLRLISELSNGKSWSNTAHEACCSHLPQYHTIHNVLYMARTEFIKLSETPDWEFMRENQEKISFLYGIDDHWGPLQMFEEVSRQASGIALSIEREGHTHGFCCTEAGSIWVARHVASLIKNKLAR

SEQ ID NO: 106800 - protein, 107 aa, Gossypium hirsutum
  unsure (1)..(107): unsure at all Xaa locations
  Clone ID: LIB3584-008-P1-K1-F12.pep
PPFXLPACXXCXAGFAAXXXLVGFLXCXXXXCXASXXCVSXALVVFXXXXXFXKKKKPPPPPXGXGXXXALLXXGFXGASLXLLXXLVFKEXXXVXAFFPRLLLFFF

SEQ ID NO: 106801 - protein, 170 aa, Gossypium hirsutum
  unsure (1)..(170): unsure at all Xaa locations
  Clone ID: LIB3584-008-P1-K1-H4.pep
AQCKAHHPNVDGGXELLRKGVXXLNIXTIXDEDQGTXGIXIPVQMAVTTHNTALPAVERYRNGGVQVALVWNSRNEKSSNSDKLNALANFLWRNGGSRSKLHLIHSVWANFQTSTNNIIFGNRWRHLLGERDFWEHVGGIDISLDPSSFGQANTRXAFDNLLSELHKYVA

SEQ ID NO: 106802 - protein, 137 aa, Gossypium hirsutum
  unsure (1)..(137): unsure at all Xaa locations
  Clone ID: LIB3584-009-P1-K1-A1.pep
AGXKPAXEXKLGFGKPPSPNLSGLKRTPEHHVEDSSRSHHKVVQSQQQQLSRFDRPEVGSQFNRLADNSKTKQTEIGAKLEVVLEDFGESHKKAPTSAPQQQESKRGSVSQFIKESKIPTSNKMADMDMTXSRXDAV

SEQ ID NO: 106803 - protein, 53 aa, Gossypium hirsutum
  unsure (1)..(53): unsure at all Xaa locations
  Clone ID: LIB3584-009-P1-K1-A12.pep
TCCRQTSPWCGGGRKGEXSAVINPRXNMXLGKAXXLPVQGKRSLVKQXDSKGX

SEQ ID NO: 106804 - protein, 207 aa, Gossypium hirsutum
  unsure (1)..(207): unsure at all Xaa locations
  Clone ID: LIB3584-009-P1-K1-B12.pep
MLTRGGGGGXTPLHIAASKGSENCVLILLDHNADPNIKDSEGSVPLWEAILGGHEGIXXLLKDNGANINVGDVGHFACIAAEQNDLDLLKEIVRYGGNVMCPRYNGYTALHVAVCEGNVEIVKYLLEQGSDIDKRDIHGWTPRDLAAQQGHEDIETIFKSLTEKKKTQPIMTIPEKHEVRFLGRVTSEPGISTATSGDGFGWIIKRQ

SEQ ID NO: 106805 - protein, 51 aa, Gossypium hirsutum
  Clone ID: LIB3584-009-P1-K1-C9.pep
HYPNSLLIASTSEHNKIQVQNPLTNHENIEKCVVYFIDQKNQKKKRALNPF

SEQ ID NO: 106806 - protein, 51 aa, Gossypium hirsutum
  Clone ID: LIB3584-009-P1-K1-D4.pep
RSINGGCYFQDFEVYVFMVLKLNHGVHMVSMLNGNVNQLCTVESFGPSFRQ

SEQ ID NO: 106807 - protein, 142 aa, Gossypium hirsutum
  unsure (1)..(142): unsure at all Xaa locations
  Clone ID: LIB3584-009-P1-K1-E7.pep
KKKGKKKGKEEKKRSKKEVREKKRREKGKKRNKKKKKKKARKKKTKKKTKREKRNESRXKKKGKKKKKNEAPKKKKKKKKKRXTQKKTQKKKKNKRKGPVKSKGKATRKKQQKTGLNSKNKTRPKGHLFYTNIVKGNQGFAK

SEQ ID NO: 106808 - protein, 116 aa, Gossypium hirsutum
  Clone ID: LIB3584-009-P1-K1-F4.pep
MLEEEQDDQDDSSSSQSEMNIDGMKKLVSDLIAEEEMVQRDGCIDKQAAAERVRKRLDSWKDVESNTIDMMVEQDFKRAHMEGWKGNEEEVREAGIEVECAIFGLLMQELIEELVL

SEQ ID NO: 106809 - protein, 92 aa, Gossypium hirsutum
  Clone ID: LIB3584-009-P1-K1-F5.pep
LHTHQTKEKTSINTSSCFVFVFLFFLVLSVWFILFLVLRVFNILSMCRVFLFRFRTVMIYYKTMPAVEIFNELLHFHLRTRTRTCFIFTPTP

SEQ ID NO: 106810 - protein, 56 aa, Gossypium hirsutum
  Clone ID: LIB3584-009-P1-K1-G3.pep
LMKTIFFSDVGNSRRLHSSPEHLLLGVLHCSNFLKYIIKYLTHLTRHHLLPHIQLQ

SEQ ID NO: 106811 - protein, 156 aa, Gossypium hirsutum
  Clone ID: LIB3584-009-P1-K1-G6.pep
SQGTREMKHCDQGSCNIVNHKIEAHNLPSKCCSSHGKLGEKHCHHSSNQQGTKADHCHSTCGGNHTDRQTLGTFVEHSCLESPKPEAHPYSNKCFTDYWESPHTAIDIPMNTSHETAQACMSVEKREMGGCCKSYMKECPPQPGHFRSGLTEIVTE

SEQ ID NO: 106812 - protein, 77 aa, Gossypium hirsutum
  Clone ID: LIB3584-009-P1-K1-H11.pep
TKPGGGGGQDNTPRHTDFLSIIPLHLPLITLPTMTNHPTEETHELSQKKHYQQIRGGGGFVISKRPVPYTLKQMATY

SEQ ID NO: 106813 - protein, 181 aa, Gossypium hirsutum
  unsure (1)..(181): unsure at all Xaa locations
  Clone ID: LIB3584-010-P1-K1-A7.pep
SNNGNKTYLRXLSQYRLLGMANTELQFEMAMREQIIHNQREAQRNLWNLIMGLGLDEKQIWEGAAKQGITIEDWTVTRYPGLSNRGKSPNLASGGYAPFSYGLSINQWRRSSCIYQNHQRVASKSFSQDCWDLSPTFCREKHHSFYYLLAHDNSPPCVRFRRSCDNWVSGGHPISWFGPPV

SEQ ID NO: 106814 - protein, 68 aa, Gossypium hirsutum
  Clone ID: LIB3584-010-P1-K1-B10.pep
KITSVSFNFEIEQIDHIKIRSILITINFPPPPLRAIDHGVLSFIHNFDLYNNNFNPLSLHILLIWHLF

SEQ ID NO: 106815 - protein, 162 aa, Gossypium hirsutum
  unsure (1)..(162): unsure at all Xaa locations
  Clone ID: LIB3584-010-P1-K1-B5.pep
DIFLWWLGCCAKTNFLPHASLRSFTSSPSRSSLSVDPSALTFYLKKPLKNWQTQSRKGGGGGSGSLCHQQLVVERMLASEGIKRVEVGGDEFEKQVWEWKEKYGGIITNQIKRLGASCDXTRECFTLDEQLNRAIIEAFIRLHEKGLIYQDSSLETCGIQEV

SEQ ID NO: 106816 - protein, 101 aa, Gossypium hirsutum
  unsure (1)..(101): unsure at all Xaa locations
  Clone ID: LIB3584-010-P1-K1-C3.pep
RAKTRTQTGKRRPRQRGKTKATKSRPAMQKSNLWRDNKLQADAFQKAQTXRIRSLINHGSCDNSKHGLAHKKYKTLHLFSILQAISTRHNISCLQITKLTN

SEQ ID NO: 106817 - protein, 53 aa, Gossypium hirsutum
  unsure (1)..(53): unsure at all Xaa locations
  Clone ID: LIB3584-010-P1-K1-D3.pep
IIQLNKEXQVSTLIVFTFXXSXTENKFLSRLMLSXCTDRFQYISTDHHFTDNM

SEQ ID NO: 106818 - protein, 89 aa, Gossypium hirsutum
  unsure (1)..(89): unsure at all Xaa locations
  Clone ID: LIB3584-010-P1-K1-G12.pep
AAFKHAIEKDIKNLQMLQEMYNEWPFFRVTFFLFXMXLNKGGGGGFLFFXXXXXXPXRGTXGERPRTNXEETXSXXXQXXAHXXXXEGD

SEQ ID NO: 106819 - protein, 110 aa, Gossypium hirsutum
  Clone ID: LIB3584-010-P1-K1-G8.pep
NGPPFDPSPNGYGIGAFTTCGTAKSGGAPQLPFSPSRPMGGAGGVRRPTDRRERTGAHPEQQIKGVRRLSEVRGTAMIEAWWLRGDQQFGSSMLGARAAAVFSSLQRARV

SEQ ID NO: 106820 - protein, 111 aa, Gossypium hirsutum
  unsure (1)..(111): unsure at all Xaa locations
  Clone ID: LIB3584-011-P1-K1-A3.pep
WWXVKLSGHDVCDSASPSSSNPVLRLMGKNLMVVNKEEEASMPLCQGQPCARSDNRDQDEMPFHHAMSPCSMIFNQNPNDLVERTFDAYSTNGYRKPCHFWQPHHKQIRNF

SEQ ID NO: 106821 - protein, 38 aa, Gossypium hirsutum
  Clone ID: LIB3584-011-P1-K1-D2.pep
EKLVKSDCIYLLMNSSDKLIYFWPPTKGGKNGPTRKVE

SEQ ID NO: 106822 - protein, 152 aa, Gossypium hirsutum
  Clone ID: LIB3584-011-P1-K1-G8.pep
MVGIGGPPMNSNVVQSHGLQSGGMGIVGIGSPGSQISSDVISKNSVHTNSFTAGGGGLASEEKQCSFGESVERRQRRMIKNRESAARSRARKQAYTLELEAEVAKLKEINEELQKKQEEMMEMHKIQTLEAVNRAWGGGKRHCLRRTLTGPW

SEQ ID NO: 106823 - protein, 147 aa, Gossypium hirsutum
  unsure (1)..(147): unsure at all Xaa locations
  Clone ID: LIB3584-011-P1-K1-H10.pep
PQVRKWTLGLRXGEDLIAVIRATGSISRVRSPLSSPSSGIVAEQIIEKIRSVRESKRTRRGXGFDSFGGDALASDLMWREIKLLAASKPVIASMGDVAASGGYYMAMAAQTIVAENLTLTGSIGVVTGKFNLGKLFEXMDSGGHFGG

SEQ ID NO: 106824 - protein, 145 aa, Gossypium hirsutum
  unsure (1)..(145): unsure at all Xaa locations
  Clone ID: LIB3584-011-P1-K1-H4.pep
MNDLLTDSFVGDAKGHRDIEMGRQVPGPGSNSDMGGEAVNKQIQEVEKQVEKLSGLLRKLKDANEESKSVTKASAMKAIKKRMEKDIDEVGKIARNVKARLQAINKDNLANRQKPGCEKGTSVDRSRTNVTNAMATNFKXLMIEF

SEQ ID NO: 106825 - protein, 99 aa, Gossypium hirsutum
  unsure (1)..(99): unsure at all Xaa locations
  Clone ID: LIB3584-011-P1-K1-H9.pep
LPKCASNTILQTELSELLTLILQYHASLLALGGGVFFFXXKXXAIWSIRFKSTXPFNKIHCHPLWLFPFVYLFCFXEFLFCXXAXCFFLRFPLPPAPLF

SEQ ID NO: 106826 - protein, 109 aa, Gossypium hirsutum
  Clone ID: LIB3583-004-P1-K1-A10.pep
KIQLISYYSNPCPFYKKKFPSHTIHPPFILLDTKSILKLLNQCIHNYFPFPKPYKTFITLPTSFFSKLPYTITSDTITSSLYQSLQFPTYLYLYHLTFTLIIQLSTSIF

SEQ ID NO: 106827 - protein, 36 aa, Gossypium hirsutum
  Clone ID: LIB3583-004-P1-K1-A7.pep
FSGDFLKSGNRELRFKYLEMGQKRYLKRNLFKLDIV

SEQ ID NO: 106828 - protein, 174 aa, Gossypium hirsutum
  Clone ID: LIB3583-004-P1-K1-B6.pep
MALLTVLPEAAAEPMKQPPKRRRKQVKRQKQTTTSSWDQIKNLLTCKQMEGSKVHDPSKNNNPAPPHHHQHGYSKLGSSCSSICSFRDVVHGNTRVVHRADNSPESSTLGQETALLRRKAVNGSSSRSLSGSTRSNNSTTTSSSSRAIQFRKLSGCYECHTIVDPSRYPSSRTS

SEQ ID NO: 106829 - protein, 153 aa, Gossypium hirsutum
  Clone ID: LIB3583-004-P1-K1-C1.pep
MVCRSVFEYEKLNKISEGTYGIVYRAKDKMTGEIVALKKVKILDLRDLEEYGFPVISLREINILASFHHPSIVKSREVVVDDHDNVYMVMEYMEHDLKWLMDSMKRRFSTSDVKCLMLQLLEGVKYLHDNWVLHRDLKTSNLLLNNQGELKIC

SEQ ID NO: 106830 - protein, 128 aa, Gossypium hirsutum
  Clone ID: LIB3583-004-P1-K1-D11.pep
MLHLNMQMEFMEEATTHKRSSSFPFHNTIKSHVDANKDQIFNPKVQHSLKQEILQLEEQLQDQFVVRHVLEKALSPRPFTYDVAVDEFHSCKFQAAKELIKDIAVVELEIAYLEKYLLSLYRKMFDRR

SEQ ID NO: 106831 - protein, 111 aa, Gossypium hirsutum
  Clone ID: LIB3583-004-P1-K1-D12.pep
VVGENQQTFDLEGDSGSLILLKGQNGEKPQPVGIIWGGTANRGRLKLKVGQPPENWTSGVDLGRLLDLLELDLITTNEGIQGMYSQNNRAANYSSCQANYMLKWEFHFEWL

SEQ ID NO: 106832 - protein, 134 aa, Gossypium hirsutum
  Clone ID: LIB3583-004-P1-K1-F10.pep
ISLCSFLVSTRIGKGKGRRDRYQMGCSLSCRSSSCGVKNMIRVVHLNGLVQDFDHPVSVSEVTGTDRPPKQFLCTPAQLLSDCSQLGLQPDTILQAGHIYFLLPYTTLQSDVSHVSLASIARKLTAKAKSTKPN

SEQ ID NO: 106833 - protein, 116 aa, Gossypium hirsutum
  Clone ID: LIB3583-004-P1-K1-F5.pep
IFLRKHQDSLMHRVVVAEMLYILDPTKKLEAVKLIEDSSNIVEPTNATLGPIMAWKLKDCIGVHQLLEKVLVDQDAALRWKVRCAEYFPYSTYFEGSRSSAVNNLFNNQEGKTPVN

SEQ ID NO: 106834 - protein, 85 aa, Gossypium hirsutum
  Clone ID: LIB3583-004-P1-K1-F6.pep
NQKIKLHFIVVICCRFCFSPSCMFHLQERPYTSTCGDAREGLVAHVWCSSELLATAREGEPLELLKQSPGPVFGSCIEWAGTLGY

SEQ ID NO: 106835 - protein, 171 aa, Gossypium hirsutum
  unsure (1)..(171): unsure at all Xaa locations
  Clone ID: LIB3583-004-P1-K1-G2.pep
LSDAESMMALRDVLNRMGSNNVWCEGTGTNPSADLRYIYLMNSSIAGLEKADVFLLVGTQPRYEAAMINARIRKTVRASNAKVGYIGPPADFNYDYQHLGVGPKTLIEIAEGRHSFCSAILNAKNPAIIVGSGLFERXDKDAIFYAAETIAKNGNVIRPDWNGFNVLLLSA

SEQ ID NO: 106836 - protein, 63 aa, Gossypium hirsutum
  Clone ID: LIB3583-004-P1-K1-H2.pep
VHFVRGMQMHSYSKNTFILTLLFMNYDSILYTVSNLKNGILLGAKQARNTIIHHIDKIRRSNR

SEQ ID NO: 106837 - protein, 123 aa, Gossypium hirsutum
  Clone ID: LIB3583-013-P1-K1-A11.pep
MLHFHNHNHCHIPLCRQQPMKFCMSSVFYFLVIISIFLPLIVADLNSDKQALLEFHAAVPHRRNLNWNSTNPICTSWVGITCTQDNSSVLALRLPGVGFIGRIPSNTLGKLGALNILSLRSNR

SEQ ID NO: 106838 - protein, 171 aa, Gossypium hirsutum
  Clone ID: LIB3583-013-P1-K1-A12.pep
PTRPPTRPDKLREGEEPDELYLQQYNYVDDYDKGDSGVTIDEVFQRANDEYWEPGEDRFIKNRFELPAKLYERLFGPNGPQTLEELGEIPDAETRYKAHKELHKDDPPSNLPPFDVIDNGKEYDIFNVVADPAWQEKFRNKKPPLAYWTEIRKGRKAWLKKYSPAIPHGSK

SEQ ID NO: 106839 - protein, 86 aa, Gossypium hirsutum
  Clone ID: LIB3583-013-P1-K1-A3.pep
DFRNLSWFNLDLLPLFCPMMENSILIGLFSFSIHLWLLHSTSFHSLSLSLSLYLSLSLSLSLHHTCYLHWQYVGYISHTHIYIHTY

SEQ ID NO: 106840 - protein, 55 aa, Gossypium hirsutum
  Clone ID: LIB3583-013-P1-K1-B11.pep
YRTNCYQATWKCTDKRLNEEPKKKILCGTYSIPKFIGDIQLQESILVNKRWLSWY

SEQ ID NO: 106841 - protein, 171 aa, Gossypium hirsutum
  Clone ID: LIB3583-013-P1-K1-C6.pep
EKTRTRKRPRLGWDVAPSGLEAHQTLAKARRSSPPKRGDDHDGHYVFNLGENLTPRYKILSKMGEGTFGRVLECWDRQTREYVAIKIVRSIRKYHDAAMIEIDILQHLAKNEKGTSGCVQIRNWFDFRNHICIVFEKLGPSLFDFLKRNKYSPFPVGLVREFGHQLLESVA

SEQ ID NO: 106842 - protein, 84 aa, Gossypium hirsutum
  Clone ID: LIB3583-013-P1-K1-D9.pep
LLFVSDSLTDSPFLKLLSAETSIKATPKLKKFNIIDLKTLGFTPNFAILIIKLDQLSVFESLALLTKQIRHLFWYQNLSFSTVS

SEQ ID NO: 106843 - protein, 172 aa, Gossypium hirsutum
  Clone ID: LIB3583-013-P1-K1-E2.pep
GLHCYRSVLKSERNDTVRSPMNPEGKSNSSFDGVAAQISSSKKSAGPSTTRKAKSSQSESASSNAKNLSESSDSEIRPRHEDSSPIPQLSPSKNKIAGKSGILKRNSKRVAERVLICMRKRQKKMEASESDSLVSGGVSPTDMRLRSNPRKENEDATSSSQKDVKSSNTGRS

SEQ ID NO: 106844 - protein, 55 aa, Gossypium hirsutum
  Clone ID: LIB3583-013-P1-K1-H1.pep
NYFLSSLNKSNISSNLQHQAKKEGHCIFSKALGYRNCKHGQTFQKHFSTSMVNWP

SEQ ID NO: 106845 - protein, 138 aa, Gossypium hirsutum
  unsure (1)..(138): unsure at all Xaa locations
  Clone ID: LIB3583-015-P1-K1-A1.pep
NRELQQREESSFSLYGRXDLLLRHRPVDPQKRFERXLLECRLLDNRLRPLSLLKSLFRFELDLLLSQRXFQECLLHCHQLVLKPVRXLLCVKVARXRFLEFPWRXERVVVAVEEVSVVGELVLSHIPFHFHSRSFQSR

SEQ ID NO: 106846 - protein, 68 aa, Gossypium hirsutum
  unsure (1)..(68): unsure at all Xaa locations
  Clone ID: LIB3583-015-P1-K1-A10.pep
GPARFRCLVFGVRFRLPXGVVSDVILVPGRGXAPLARVSLPSPFPLLVAXELFVAAEGMYSGLFVYRG

SEQ ID NO: 106847 - protein, 133 aa, Gossypium hirsutum
  unsure (1)..(133): unsure at all Xaa locations
  Clone ID: LIB3583-015-P1-K1-A11.pep
PEWSWIEELNILPISSHIKSITPVPVKVDPVEAVCICAGPDEFKSRSMSXDFPVGPLILMSCSLDLGLAVVTFLDAILDMYLRCSVALLAARGRGXSAALGLAVAGAIAAGYSNIYVTAPSPENLKTLFEFEC

SEQ ID NO: 106848 - protein, 195 aa, Gossypium hirsutum
  unsure (1)..(195): unsure at all Xaa locations
  Clone ID: LIB3583-015-P1-K1-A3.pep
RRTRTDTSQQDREKPQPHPRTXSRETREAXXNTRREQPDEPXGGRQSHRRQQGQGTXRKASQEQXKTQSQRATAPKRKGSEGHAXNPPSQTXRHPNQNGRXXEXXXXNXQQQPREEDXPXXAPETNKGXXXXPHHXXKATXEXPXTERNGHXEKXSPHPXRQSXHRPXREEEEQEEQEXERRRGQHKRERAQXPT

SEQ ID NO: 106849 - protein, 45 aa, Gossypium hirsutum
  Clone ID: LIB3583-015-P1-K1-A4.pep
LFIFFFFFFFFFFLGTQKVHTSYCTTKQGSLPLHRSPYLFLNMLA

SEQ ID NO: 106850 - protein, 160 aa, Gossypium hirsutum
  unsure (1)..(160): unsure at all Xaa locations
  Clone ID: LIB3583-015-P1-K1-A7.pep
FSFVLTRLVVALHFCALLFVVXRLSLIYVSPVADALLIGLVYMISENLFLSLPDVVLPLRHXHLFDLLSGVLFMPRVPEPFEKHGLVIVCKTYGXTIHFWQVDKRDNLPLGLPQLMMALSREGLLDEELGRDVVIRLGVSFELVRAXRAVLTGPTHGIHP

SEQ ID NO: 106851 - protein, 42 aa, Gossypium hirsutum
  Clone ID: LIB3583-015-P1-K1-A8.pep
LVRVEGVLLYLKGSSFLSSATMNKTVYLSLLNETQVYSVEKA

SEQ ID NO: 106852 - protein, 121 aa, Gossypium hirsutum
  unsure (1)..(121): unsure at all Xaa locations
  Clone ID: LIB3583-015-P1-K1-A9.pep
LSIAELLRPVYFPGLFLLFFPSGLVYPLSYLRIFCRVILVAVFYSRXCCLSCCLVGWLCHRXLLGLGMFRIASLVLIKAXSLVATSPRGLGCEGFAFNLLSQTPRYSNQNGRFYEASPRNF

SEQ ID NO: 106853 - protein, 107 aa, Gossypium hirsutum
  unsure (1)..(107): unsure at all Xaa locations
  Clone ID: LIB3583-015-P1-K1-B12.pep
DLFLVFFLAEYLFSVRVLFSLVDLPFIELLXCSFLSLYCLFLELVFVNGGHLFFLLYRQSLFXVVLARIYAAEIVSAVSHLHSNGILLRDLFPEYILLDAEGHVMLS

SEQ ID NO: 106854 - protein, 106 aa, Gossypium hirsutum
  unsure (1)..(106): unsure at all Xaa locations
  Clone ID: LIB3583-015-P1-K1-B3.pep
FLFLVAPTFSFFSWVFLLPPFYFFFFFLSILRSVFXSXVAWLVIVISGASSGIGVLLAFVYGCCGARFALTARCVLSLLVIADRARDXGSPDVIVIRADVSIVDVC

SEQ ID NO: 106855 - protein, 53 aa, Gossypium hirsutum
  unsure (1)..(53): unsure at all Xaa locations
  Clone ID: LIB3583-015-P1-K1-B6.pep
EEDSYSSLWSWESRDALLFPXSCTFHVMXIRRTCXKKINLRITAVSAMITLLL

SEQ ID NO: 106856 - protein, 92 aa, Gossypium hirsutum
  Clone ID: LIB3583-015-P1-K1-C10.pep
NLKDVGKWKHPPGQGVKINFDGVFDARHFQSVSGIVVRNRERVVHSLLLRNSSRRTHHFRRRSDCWLKENLDMQNSRKSLTVSENLIEDERR

SEQ ID NO: 106857 - protein, 130 aa, Gossypium hirsutum
  unsure (1)..(130): unsure at all Xaa locations
  Clone ID: LIB3583-015-P1-K1-C4.pep
LFSLFLSVGLLCSAKDFPGCXSVDDPSKRYVDCRRXRCVWDTRGLKVLLLCDESSKSQYGEKGLLLRHRPVDPQKXYEESLLVCRQLEERLHPLSQQKSLLRFELDHQLSQKQFQESQQHCHQQVLKPVK

SEQ ID NO: 106858 - protein, 140 aa, Gossypium hirsutum
  unsure (1)..(140): unsure at all Xaa locations
  Clone ID: LIB3583-015-P1-K1-C8.pep
ELLVSSYFAYFLGLSLFFGYVEXSGLPTIFEASFCYAXGYGAGALLHXGFSGLISSVSYLSAPVVVWSVGRSALTSMLVVVRKLGFFKPVIMXSYGSIXGAPFKXFASLREERACXNCYISPGPIQFVERASNAVNHTLL

SEQ ID NO: 106859 - protein, 41 aa, Gossypium hirsutum
  Clone ID: LIB3583-015-P1-K1-C9.pep
KKKKLKNPCKEAMKRHIQGTQEKDLISSSKNERVYDNYILK

SEQ ID NO: 106860 - protein, 155 aa, Gossypium hirsutum
  unsure (1)..(155): unsure at all Xaa locations
  Clone ID: LIB3583-015-P1-K1-D4.pep
HASAHASENTELIVIKERNLSACVGLLFSLFLSLGXLCSAKDFPGRRGDEDPPKRYVVCRRAXERDSRGLKVQLLXEESSKSLYGEIDQLLRHRPVDPQRRYVECLLECRLLVERQRPQCLHRSLKRFELEQLQSQKQFQESQQHCHQQDLRPDR

SEQ ID NO: 106861 - protein, 80 aa, Gossypium hirsutum
  Clone ID: LIB3583-015-P1-K1-D5.pep
VILVFFSYIFLDSLLACVYSNCFFSFIPDSNPLFLFSFGFYSLIYKLFSIIICLFVSLGAGASCRRGGGDLSGGAALVSW

SEQ ID NO: 106862 - protein, 117 aa, Gossypium hirsutum
  unsure (1)..(117): unsure at all Xaa locations
  Clone ID: LIB3583-015-P1-K1-D6.pep
MYHLLVLLLLFGLKGYIAKASFFIKKLIYLLVSAINHCYCAGLLGXSFGATPEMSMXFLIRVVSRMLVEFDRYPTRGDVVLVDSRVCASSXYGLRRDRLVXDSKTGVVLTRSSSVWV

SEQ ID NO: 106863 - protein, 133 aa, Gossypium hirsutum
  unsure (1)..(133): unsure at all Xaa locations
  Clone ID: LIB3583-015-P1-K1-D7.pep
AARFSAPSSGGVLLPLRFRPGSVALRVFRFFLLCTVLLIXLLPFLRACSSYCPSLXTDLRFLSHAVLALQVAAXAFLEGLFVVSFLSAFHAXRVSIMPXVIQLARKIWGERALFPVVWICRLEETIVYFLAYV

SEQ ID NO: 106864 - protein, 68 aa, Gossypium hirsutum
  unsure (1)..(68): unsure at all Xaa locations
  Clone ID: LIB3583-015-P1-K1-E1.pep
RSCLXDREKXRLLRILQIHEKTFKKSIHTRNLLLYLSTSNIDAFVLNPSNGNHPLKTKYAYVQCLRKS

SEQ ID NO: 106865 - protein, 141 aa, Gossypium hirsutum
  unsure (1)..(141): unsure at all Xaa locations
  Clone ID: LIB3583-015-P1-K1-E10.pep
GQXQESQQHRHQQEQRXPEKKQQRGRESKEKDQENPRKGEREEEAEEXEETEEREQEQSHNXXHXHRRPPQPRPKEEQGNPRAPQRPAPRHPTPRGTNEPRPPTPEANPNTXXLPHQRDAEKXNXXTNGRRTXTXXTQENK

SEQ ID NO: 106866 - protein, 140 aa, Gossypium hirsutum
  Clone ID: LIB3583-015-P1-K1-E3.pep
GAWGDRGQARGKDGLWGAKKSTAEKEPKHGEGRTQNGKANRKGQLKEGASMEKRQKGKGEKEGRPKGKAGPGKNQKGRRKAKGRPKKKGDYKASTREESKRAKKKKGLISKKEKNFFLKKKKKKKKKKKKKKKKKKKKKK

SEQ ID NO: 106867 - protein, 85 aa, Gossypium hirsutum
  unsure (1)..(85): unsure at all Xaa locations
  Clone ID: LIB3583-015-P1-K1-E6.pep
GVSFAFYLLYLTPRYSYLYSHFYVACPRVFRATQGHXVTVSALLLYHRSIFEPHYYSXATFEVLVFVSFGFVVXVSPHLPKHSSF

SEQ ID NO: 106868 - protein, 95 aa, Gossypium hirsutum
  unsure (1)..(95): unsure at all Xaa locations
  Clone ID: LIB3583-015-P1-K1-E7.pep
SGVIFVVPAFFPVSFVASLNLFLKMSGFGLYILYFYPDHNQRXIFVAGFFYHVCLWDCLSXVLALGVSSKLEDVIFYCYPXESYFVSRQKLRASV

SEQ ID NO: 106869 - protein, 152 aa, Gossypium hirsutum
  unsure (1)..(152): unsure at all Xaa locations
  Clone ID: LIB3583-015-P1-K1-E8.pep
ALVSSRGHLLGSACSVSLVLSWRSVRRVVLLFASTLAIFXPPYAERGGIPICFPLLGLRGSLELHGFAWYWIWIIDVYPPPLHPYDPSDMAYTDLLLLPSDDDLLIWPFCFEFRLRVSLTADGYLSLMSRIKFIYYKPFSFSIAYLTYFSIS

SEQ ID NO: 106870 - protein, 139 aa, Gossypium hirsutum
  unsure (1)..(139): unsure at all Xaa locations
  Clone ID: LIB3583-015-P1-K1-F10.pep
RPGKEKRTSQKTNRQRDPHRSKRRKREPTNAKKPRESHTPTPTRPAPQKAAQPRPTEKENNKSPPHTTQTPPQTNKATQNTARRNKPPAESRDKRHDPRPRTRPRRSRSSPAHNKTPRQEKPPAQRQXRHAXTSKKPPP

SEQ ID NO: 106871 - protein, 166 aa, Gossypium hirsutum
  unsure (1)..(166): unsure at all Xaa locations
  Clone ID: LIB3583-015-P1-K1-F4.pep
GTTQEKPQEKTHTQPKPRPTQTKKNEAGGHGQPTKRPQATPKRGAEPTTRTTPPPAKSTQRKAAANPKAKRPPPNPKAQTPTPEEQQKTTPKAPEGASKPEKAPSTRHAGKTPHAPPTRGPTPAGPHKSRTTEKXAATGTHTTGKXRTRAPRTNQTAPQQRKKATD

SEQ ID NO: 106872 - protein, 114 aa, Gossypium hirsutum
  unsure (1)..(114): unsure at all Xaa locations
  Clone ID: LIB3583-015-P1-K1-F5.pep
RAQXSSGVLFVVPAEXPGTFVASLFVVLSXLGFGLFFGLVFLWFFVAGFSFFVCLWVRLALVLAFGVVSXLEVVVFFFFPLVSFFESGLSRRGFVVWWGCXSPYQPFLVFARLF

SEQ ID NO: 106873 - protein, 131 aa, Gossypium hirsutum
  unsure (1)..(131): unsure at all Xaa locations
  Clone ID: LIB3583-015-P1-K1-F6.pep
PRGRPRRRKQATEQEHARSPRGSPEPTEAETPXRSRPGKATNPTQQPTGPPKPTPPNRPNNPPREQKPKTRENHAEGEEAPKGPAPAENKQKEPQEXAPPKHRTEENPTPKQXETREHPPPRNSPHXQTPK

SEQ ID NO: 106874 - protein, 53 aa, Gossypium hirsutum
  Clone ID: LIB3583-015-P1-K1-F7.pep
IFVGWVYLPCETKGLPSLESRPLGVSSKLEEVFFFCFPQESYFESRQKLHASE

SEQ ID NO: 106875 - protein, 135 aa, Gossypium hirsutum
  unsure (1)..(135): unsure at all Xaa locations
  Clone ID: LIB3583-015-P1-K1-G10.pep
DFARLVIAGVVYSADDLSIIAALLQYIMAFPVALMSQVMYGSDIGRDLQNLLEVDDLAEILNSKHRPRCIIEFISQSLHLLXLGRIXRTTLESKISSFHESIGVCVQLMEIPIPLSYTRLTSKFLGLWHLTLPII

SEQ ID NO: 106876 - protein, 160 aa, Gossypium hirsutum
  unsure (1)..(160): unsure at all Xaa locations
  Clone ID: LIB3583-015-P1-K1-G11.pep
AFFKVFLDWLDKXADYDAIEDGAYIGLYQQNFAEGGFCVLQLDAVIKEKYTRXGNKRPLVILHNKRVRALXENPSHRKXVDERMAKGVLYTTPHGSNDDWYRLYATVKLRCLLVTYDVMRDLIFELLRSSFFLKWKDRXRYTFLKGALKLQMPPAYSIVI

SEQ ID NO: 106877 - protein, 160 aa, Gossypium hirsutum
  unsure (1)..(160): unsure at all Xaa locations
  Clone ID: LIB3583-015-P1-K1-G12.pep
AYFFFLMEVDSMFLPVPSXFIFMGFDGXGFLEFSLRPDVLVRRFSFIDHVFAHSRIPLIGVLISAVERVIIDIKHHLHFPVICHVYYFFSVHAILMGDXVSTVFVHAIKVLARLDDVSGDRYVSDSLWQVDAVMLVVLFTSLVEYLQLEDAYNIFILNPR

SEQ ID NO: 106878 - protein, 202 aa, Gossypium hirsutum
  unsure (1)..(202): unsure at all Xaa locations
  Clone ID: LIB3583-015-P1-K1-G8.pep
RYSREFAFEDCSYNLSPVELCSKRSLCEALIERXGSLVYREVFVSSSGRXLVVGCAGVGIVNVDLSAATEHGCLVVXAPTANSVAAAVHGIALXAAMARNVAQADASVXAGFRLRFLYVGVSLVGXNACCLGFWXVGSVVARRAKELGMHVIALDPYAPADRARAIXRELESXDEAIATADFIXLHMPLTPATNKMLNVETF

SEQ ID NO: 106879 - protein, 65 aa, Gossypium hirsutum
  Clone ID: LIB3583-015-P1-K1-G9.pep
ESRLELTTEQKDTVAELEQTTQETKRTNIRETEAKLAKTSQQTREPRTDMEEKREKNLSDHPLEL

SEQ ID NO: 106880 - protein, 126 aa, Gossypium hirsutum
  unsure (1)..(126): unsure at all Xaa locations
  Clone ID: LIB3583-015-P1-K1-H1.pep
PRVRPRVRTDSVRLKLVMFNYKITLAETIEATRLFAEEKVLSXCRYGFVFKACYNDGKVLSIRRLPDGSLDENMFRKEAEFLRKVKHRYLTVLRGYYAGPPDLRLLVYDYMPNGNLATLLQEASHQ

SEQ ID NO: 106881 - protein, 73 aa, Gossypium hirsutum
  unsure (1)..(73): unsure at all Xaa locations
  Clone ID: LIB3583-015-P1-K1-H12.pep
ASAFLVFYFVRLLYSTASFACALFYVLPAATFLLAAICCLVAVGFLLASRLAXVISSLVCVGGAMLLSFYHGH

SEQ ID NO: 106882 - protein, 66 aa, Gossypium hirsutum
  Clone ID: LIB3583-015-P1-K1-H2.pep
NTKPTLTGETREDDRLFGAYREPSRARNHDRWHEKHEAETGLGAGEPGQEKKKLAGHELGQLSGVR

SEQ ID NO: 106883 - protein, 151 aa, Gossypium hirsutum
  unsure (1)..(151): unsure at all Xaa locations
  Clone ID: LIB3583-015-P1-K1-H3.pep
RTRGTEAKRAGAXXPTKXTPTPARGRTRKRRAPPPERRAETPPRQAPSRTSPXTHPSPQRTRKTKPRDKTEHTHXEPKAGPXEEXASPQRKTPHRLFPKQPKPRQQNHTPRRQDLQAPHNPLKKGGQPPRRDREARATPEKMQLNRLTQTT

SEQ ID NO: 106884 - protein, 81 aa, Gossypium hirsutum
  Clone ID: LIB3583-015-P1-K1-H4.pep
PRTAQKSPQHEETKNQTSPKKREKKERAERDYENPPPTPPTNETKTKPQSFHRALTTEFITTLLFLYITTATIIGHKKQHE

SEQ ID NO: 106885 - protein, 175 aa, Gossypium hirsutum
  unsure (1)..(175): unsure at all Xaa locations
  Clone ID: LIB3583-015-P1-K1-H9.pep
HASARDAKRLRALRDKRKSXLLGLGMRLELASDGGVRIVVARPLLVELXDVVVVVDGLACMVCREXYSLRPTDLLGVYSYSKRVNLGVGSSSXARGERVYTTVSYFNIIHFQSHXEAIRADAALKNPKIEREGATLKNKESLCNSLFPERGPSVPLAQYVRFVDHYWDYLNALSR

SEQ ID NO: 106886 - protein, 55 aa, Gossypium hirsutum
  Clone ID: LIB3826-001-Q1-K6-A10.pep
DIYYIRTFTFKFYSYLIPLAYRTQLLRFTRFSPFYRIKHLNGKIPLQKFHTIIIS

SEQ ID NO: 106887 - protein, 125 aa, Gossypium hirsutum
  unsure (1)..(125): unsure at all Xaa locations
  Clone ID: LIB3826-001-Q1-K6-A12.pep
KPGSGHIGCVYLXEVSRPKCYVAVRVFDNASLASHTKLVSAQTERQMLQXLESSFLPTLHPHWASKIPRPWAWRSLPGEYFHTLMQRQHAIILRTQAXKFNVANVLLSTLISLHSQGLSIGGLQP

SEQ ID NO: 106888 - protein, 90 aa, Gossypium hirsutum
  unsure (1)..(90): unsure at all Xaa locations
  Clone ID: LIB3826-001-Q1-K6-A3.pep
AFFFLYCFFFFFFFFFFFFLVYDSKLALKNEKLMCNNNIQILIDLHYTGTYLHYNKIFFNLGVNRTSNNMSLSLKNSSKRNSLYPSVPXL

SEQ ID NO: 106889 - protein, 87 aa, Gossypium hirsutum
  unsure (1)..(87): unsure at all Xaa locations
  Clone ID: LIB3826-001-Q1-K6-B7.pep
MCRVLCRHGASSTYGCVLNCSSRIPFVRTSCEXPVGRPDKAPKGSVPSPSLVRHKPPCSLQGSSSSSAAAPSGSGLGPPLPASRAPF

SEQ ID NO: 106890 - protein, 106 aa, Gossypium hirsutum
  unsure (1)..(106): unsure at all Xaa locations
  Clone ID: LIB3826-001-Q1-K6-C4.pep
GFCKSGNLDEANLIVVEMKEKXCYPDKVTYTILIIGHCMKGRMLEAIGIFDKMLSVGCVPDDFAVHSLVSCLFKAGMPNEASRVSTISSLDNNIPLRINRVVPVAA

SEQ ID NO: 106891 - protein, 61 aa, Gossypium hirsutum
  Clone ID: LIB3826-001-Q1-K6-D1.pep
KVHKQTQKKNKKRHRILYIKKRKKQRNIMQNTNEVIFRKQLIITYSLSGGAHAWFMAIWCS

SEQ ID NO: 106892 - protein, 90 aa, Gossypium hirsutum
  Clone ID: LIB3826-001-Q1-K6-D2.pep
PKRKTGTPKKEPPLFLFFFLFFFPLKMVPLFYFIYFFFYLPFIRSLFFFFLSFIFLQFFFLFFFFFFFFFFFFFILVFFFFVFFFFFFFR

SEQ ID NO: 106893 - protein, 149 aa, Gossypium hirsutum
  Clone ID: LIB3826-001-Q1-K6-D8.pep
KKKKKKKKKKKKKKKKKKKKKKKKKKKKKKKKKKKGRPFLKETGLSFLSGSQVYTPFFGATLCFVGGPPIFNHVPGFTHRVPGKNPGVPNLFSLAAFPLLGGGRFALGPQPVPLLKIGPPLLGNWPPPWGGLLPPGGVGVFARGDRSPC

SEQ ID NO: 106894 - protein, 98 aa, Gossypium hirsutum
  unsure (1)..(98): unsure at all Xaa locations
  Clone ID: LIB3826-001-Q1-K6-D9.pep
VRSHCPLLTDSIKLNPRLSDSLHRVLQLFDSSRWSGSSGSSASSYRCTCSIWGTSAKALSTGYSILYAALLIKARCCPLXPVGYHHLPSAALRKKDQC

SEQ ID NO: 106895 - protein, 180 aa, Gossypium hirsutum
  Clone ID: LIB3826-001-Q1-K6-E7.pep
EKGEEGEMEEGEGGNVEEQEDHEEQEVQDEQEEQHEEGFTTSPKGDNLEAVHSANLLEGMETADVPFTTGLHIRDNSSGEFLVSRVDARTVPAVSSFLSNGNKREIGHENDISHNSLNLSNKRLRTDEQWDKSSDFDTCMEQMQHWMDKARMLYAAKDQACGDSSMHQQVLLHELQRRDT

SEQ ID NO: 106896 - protein, 71 aa, Gossypium hirsutum
  unsure (1)..(71): unsure at all Xaa locations
  Clone ID: LIB3826-001-Q1-K6-F5.pep
VSMICALNKLYSLYSKLLLQGNXETLPFQSTQSHQTLNHLHISPMCQHTKLRKFCEAKCITAEAYSPYTAK

SEQ ID NO: 106897 - protein, 92 aa, Gossypium hirsutum
  Clone ID: LIB3826-001-Q1-K6-F9.pep
QGHTKLIHSVCWDPSGELLASVSEDSVRVWSFASGSEGECVHELSCNGNKFHSCVFHPSFQSLLVIGCYQASNFTFNLVFAVIYTTLSMTCS

SEQ ID NO: 106898 - protein, 84 aa, Gossypium hirsutum
  Clone ID: LIB3826-001-Q1-K6-G10.pep
LNSLFGQPPFSGWGPDQSAFQNGPSQWWRMLHAMWRPLCRGALCASALGVSLSWPVPLARSLWFLPFLFCPFCLVSPAGFPWGA

SEQ ID NO: 106899 - protein, 54 aa, Gossypium hirsutum
  unsure (1)..(54): unsure at all Xaa locations
  Clone ID: LIB3826-001-Q1-K6-G11.pep
FKRGFAXYSTTLLFLKALKARLCYSTLAEKMLXVPITVSFAKNNTXKLPAQTTE

SEQ ID NO: 106900 - protein, 54 aa, Gossypium hirsutum
  Clone ID: LIB3826-001-Q1-K6-G12.pep
PLHNVLVATRKYKTGVPYTFNILYYHWFSCSNRVNRYMPALCILMQINRPYFIR

SEQ ID NO: 106901 - protein, 84 aa, Gossypium hirsutum
  Clone ID: LIB3826-001-Q1-K6-G9.pep
NMNTQAPQSSRERQHILLSTHGPTDGSISKGINTAKGPTHSESSIGPYSSYMEVETGQMGKYRQYRHISRYTHPTNDSLTPRPT

SEQ ID NO: 106902 - protein, 107 aa, Gossypium hirsutum
  Clone ID: LIB3826-001-Q1-K6-H6.pep
SFLLGILLFACLALIAFEALYRFSLFGSFGLLGWGTGDLSCFWGINPLRMGWVRLQRDLYICQRGGSRSFDFFPFLFPKVGRFSFLSFIFGASFRFSLYRFKFFGPF

SEQ ID NO: 106903 - protein, 112 aa, Gossypium hirsutum
  Clone ID: LIB3826-001-Q1-K6-H9.pep
RGKPAKQTKKERKKETATAARAKAKDRASCRKHHTRREKGTATGPGPAAKQAAQQKGRRTETSQIAKATAGQSRKWGNPPPPSKARGNQTKTRENHGQTTEPRTPHTTAISF

SEQ ID NO: 106904 - protein, 69 aa, Gossypium hirsutum
  Clone ID: LIB3826-001-Q1-N6-A2.pep
LCWPPILSFCLSEFLIFPQVVPVDLALLPSTFACQVQTNWPFFLWVGLFPGNNLLFVPWVANSKNLNRV

SEQ ID NO: 106905 - protein, 56 aa, Gossypium hirsutum
  Clone ID: LIB3826-001-Q1-N6-A3.pep
NIQVLIDLHFSGTYIHYNKRHINTGANRTSKNRSPNLKKTPDPKTKKPPNPILSGP

SEQ ID NO: 106906 - protein, 85 aa, Gossypium hirsutum
  Clone ID: LIB3826-001-Q1-N6-B10.pep
HELPDGVGFQSKERSTHSLSSCSSRNGRNRKSKGFTPKAFRRSIQMVGRKTQSNGECCFPSRDLCQGFELVPDLGLPPKFKTPEF

SEQ ID NO: 106907 - protein, 103 aa, Gossypium hirsutum
  unsure (1)..(103): unsure at all Xaa locations
  Clone ID: LIB3826-001-Q1-N6-B3.pep
ILPFQISVPKVGPPVLVSLVGVSPFKGAPFKVWPXTLSFPLKIPKLFSKICFPRKSPQTNPHFQGLVLKAWLPKVKSPIFIPPLPPFCTRLFVPYFPPPTLCF

SEQ ID NO: 106908 - protein, 65 aa, Gossypium hirsutum
  Clone ID: LIB3826-001-Q1-N6-C4.pep
KTGFFLIEWPVPRGWALCPFPFVCQMGKQSIFVFSVRNMEKGGAKFIFFPYLFGAIQNPFFLAPP

SEQ ID NO: 106909 - protein, 98 aa, Gossypium hirsutum
  Clone ID: LIB3826-001-Q1-N6-C7.pep
PNAIPNAPKINWFCNPVPKPREFWGLPFVGKKNRGFLGKGFLPPKNRPFCGATWKRKNPFSLCRYRWVIVFLSLFFLVVFKSPCFGFEIFGGFKKLPL

SEQ ID NO: 106910 - protein, 127 aa, Gossypium hirsutum
  unsure (1)..(127): unsure at all Xaa locations
  Clone ID: LIB3826-001-Q1-N6-D8.pep
SQTGFGRFRRKKTPPGGQNKNPPSPRIGPFLYPGVGPFFPPGNPAVSPPPIRLVGPPQRPPRRSPFSXPPPFFFGPPAGINFPPGTPMPLTPPPALAPPPTGXGPPPGTGPPPPGGPPRPQPGPPTR

SEQ ID NO: 106911 - protein, 127 aa, Gossypium hirsutum
  Clone ID: LIB3826-001-Q1-N6-E10.pep
MAMTFVLKKKFRSQMCQVFSEVDVPKILQIPLAQRGQNELLIWRGEASGKYTGRSGYKLLLQGNDYNINGYSPPEITKCYKKLWNCNLPSKVLFTVWRATLNYLPTLVNLRMKRLTNNAICPRCKQG

SEQ ID NO: 106912 - protein, 109 aa, Gossypium hirsutum
  Clone ID: LIB3826-001-Q1-N6-E5.pep
FFPPFTPPQQVFPFWANQGGPLFVFFQGPGVKGNHFFPFSLGKKKTPLGPYKETPFPRGLAFFFIQVAPQVFPLENGQLAPPHLFWFAPPLGPPGFSLFFSGPFFFWHF

SEQ ID NO: 106913 - protein, 181 aa, Gossypium hirsutum
  unsure (1)..(181): unsure at all Xaa locations
  Clone ID: LIB3826-001-Q1-N6-F5.pep
KLEAYLSSARIPPAVNQVEISPMWHQKKLRKFCEEKGIVVEAYSPLGAKGDXWGSDQVMECDVLKRIAQAKEQSVVQVCFRWACEQGVCVILKSFSKERMXQNLDIFDWGLSNDELLKISQLHAVQSISSTXFGSDDGPVESLQELWDGEICVLYTKYRYRHIDMNKGLFMCGKLHINQFI

SEQ ID NO: 106914 - protein, 72 aa, Gossypium hirsutum
  Clone ID: LIB3826-001-Q1-N6-F9.pep
NMHTCIDFINKNSAKTIKDVTIHGFKSSTSRNMHLIQSMNSHLRLRKKNKNKTDVPTKHQKHNVNEQQECPS

SEQ ID NO: 106915 - protein, 160 aa, Gossypium hirsutum
  Clone ID: LIB3826-001-Q1-N6-G10.pep
TLIPPVLYPPVGFSPPGVFPGGAHQRVSPGATLLGPAGFGRLTGGRHTRPGEKHPGGPSPGGLSFLVGRFITGFRPAGLPVGKRPFISVPSLFGGPLLWPPRLGLLCFGAVWCVDFFPQDPFIPAAAPPLNTPPSRETRYPGRGRAGRPRAGPPGRTHAP

SEQ ID NO: 106916 - protein, 120 aa, Gossypium hirsutum
  Clone ID: LIB3826-001-Q1-N6-G2.pep
FPLCPLCPTPLSRRFGRFFFPRGLPGFLLGMGPVGSPLLMWVCSLFGLSGFSPFFFRFVFFVYFSGFSNFPHFPLLPFFPPSFLCPRFRQAWWAFWFGSGFPGSSPGPVQWLVVLRFFSF

SEQ ID NO: 106917 - protein, 135 aa, Gossypium hirsutum
  Clone ID: LIB3826-001-Q1-N6-H3.pep
GGTIAWPQVPFPQAFNPPPPHGPAPAVALSRPPGFRSTFFGVGPPVDGFPPPVQGPPPTGSPSFPFPFPPLPSPPPPPFPPPPLPPLLPFPPPPSLSSPPSFPFPFFFFFFFFFHPPPFAPPCFSPTFLFLKLNF

SEQ ID NO: 106918 - protein, 74 aa, Gossypium hirsutum
  Clone ID: LIB3826-001-Q1-N6-H4.pep
SPPPQAARLTGAPKIRAVLNLNNLLRLKTPRAGGGFSPPEHFPPRGLRRPLAPPPRASAFARFYFASNPLAPLE

SEQ ID NO: 106919 - protein, 163 aa, Gossypium hirsutum
  unsure (1)..(163): unsure at all Xaa locations
  Clone ID: LIB3826-001-Q1-N6-H6.pep
PPKPAFSPGEAGPPAPPFRIFAGWGGPGWTPFPRSTGDTPSPPIPHSPPPRSRGIPPCRPTPRLPPSPGGPRPQAPRPDRFPRWPPXPPPPFHLRPPARSLGPPGPTPPLPPCTPWALVPPNPPPPGNREAPPAPRPPSRAPPPPPGPPEGPAQKPRTPPPPH

SEQ ID NO: 106920 - protein, 109 aa, Gossypium hirsutum
  unsure (1)..(109): unsure at all Xaa locations
  Clone ID: LIB3827-001-Q1-K6-A2.pep
AFVSXAXVRGRFLPLQVHVLPLYRFVFASGGGFGALNFLSGPSXGRVLAVLSLLPIGGALLAXAGFALAGSVFGLVLAAPLFFIFSPVLVPAAFAXALAVSGFLSLGAF

SEQ ID NO: 106921 - protein, 163 aa, Gossypium hirsutum
  unsure (1)..(163): unsure at all Xaa locations
  Clone ID: LIB3827-001-Q1-K6-A6.pep
KKLKSITQGEFIXRQERGFHGIMVXVXSTRFPTSNALELFKDEERHNLELLNDESVTSLDQMKEMLEFRKNVSTALKFGKSPWEAMEGYTEHLLSKLSDEGQGSHFHLELDKAVGTEIRKVGDQGLSIEDVYTLVRIPGEKAPEIIILALQEFVRDQIVYSLI

SEQ ID NO: 106922 - protein, 118 aa, Gossypium hirsutum
  unsure (1)..(118): unsure at all Xaa locations
  Clone ID: LIB3827-001-Q1-K6-B10.pep
MSLLPKSDSIQMRGGWNDNLEEEFALIREIVDDYPYIAXDTEFPGFVLRPVGNFKSRFDYHYQTLKDNVDLLKLXQLGLTFSXGKGNLPPCGTVLXCFWPFNFCEFNVGRDVFALASF

SEQ ID NO: 106923 - protein, 106 aa, Gossypium hirsutum
  unsure (1)..(106): unsure at all Xaa locations
  Clone ID: LIB3827-001-Q1-K6-C1.pep
ALPVAAPPGQWMGAGGXXFLVSAXXTGAVRKHFXGMVTMLDIVAYIAXDXGGDDQMTDVANLEKKMMVPXSSIIGRSFEGLSLWTLIPVTVIVDCLELFSKGIHRS

SEQ ID NO: 106924 - protein, 88 aa, Gossypium hirsutum
  unsure (1)..(88): unsure at all Xaa locations
  Clone ID: LIB3827-001-Q1-K6-C2.pep
MDPRGGDAIPVGDANDFRSSDPPGDDKSLPXTGDGACPGKFFVGGLARETSSAQFIEHFGXCGAISGSVFMKDRKTGQPRXFGFVTFA

SEQ ID NO: 106925 - protein, 64 aa, Gossypium hirsutum
  Clone ID: LIB3827-001-Q1-K6-C4.pep
ANVKISFQSSLLKFYSNGVALITMGSTCNLSFPLKCLVCLKKVVSCQKSSPDLSHFYALLFSFF

SEQ ID NO: 106926 - protein, 122 aa, Gossypium hirsutum
  Clone ID: LIB3827-001-Q1-K6-D10.pep
CYLEFNWGGPWCTPSLTGLNPRAPLLTWLASHAAFTGRPFHQLGPPQWPLGPALHPDFKLGRALGYPLNHRCCCGCPHAHPFPFLPLISRPFRWLSFFCPQFGGLFPVRFKWVAAPRPPITC

SEQ ID NO: 106927 - protein, 175 aa, Gossypium hirsutum
  Clone ID: LIB3827-001-Q1-K6-D12.pep
AGSFTFLLRMRIFLCHNPIHYKGKNVLDSLSMAKLYIDDSSTSTSVKPLTNMQMLPSGPSLGNTGQPSQSRVQGRGVAIPGPKAYHPAPHHNQLNRVSPPTQVNSVQGNPVHGRAISSVQAAAQQLGQHPGIGSQASSPPKTAVSVSSYESGEVESSETSKSKGAIGEQGKKQCS

SEQ ID NO: 106928 - protein, 73 aa, Gossypium hirsutum
  Clone ID: LIB3827-001-Q1-K6-E9.pep
SKGRENYLQNKLHINLQVDAFCLGSYFSRYTLHRAACNRKQHIRRQSEQDSEPMLRNNFSQSLTYILHNALAC

SEQ ID NO: 106929 - protein, 87 aa, Gossypium hirsutum
  Clone ID: LIB3827-001-Q1-K6-G11.pep
VPNLGFFWGGGVLRGDAFSLHFVSRYSIATVFNFTATVFFTLTASKHTAHPNSPLIDITTYGWLFELIRLNLGSNSKNFGCTIHRSG

SEQ ID NO: 106930 - protein, 42 aa, Gossypium hirsutum
  Clone ID: LIB3827-001-Q1-K6-G6.pep
NSSLFSSQARIFVEQLEYNHLHPPLLYHSFSRIRETQSISVT

SEQ ID NO: 106931 - protein, 53 aa, Gossypium hirsutum
  unsure (1)..(53): unsure at all Xaa locations
  Clone ID: LIB3827-001-Q1-K6-G7.pep
YIVEEPPEGAGNKRSFKFPFFACLXFTCEIDVLLRAFAAXDELLNLLFSLEPN

SEQ ID NO: 106932 - protein, 57 aa, Gossypium hirsutum
  Clone ID: LIB3827-001-Q1-N6-A2.pep
RSEKRANRLRTTTGTEKLDLDHAKRRVQDRAEYVGQKTKKVGQKIENKAHEGQTGRT

SEQ ID NO: 106933 - protein, 57 aa, Gossypium hirsutum
  Clone ID: LIB3827-001-Q1-N6-A8.pep
ITNTYLLHTTIDLKEEKSSTNLRRRPFFFFFFSFRAPLNLIRPFKRRTLQSSNCTTN

SEQ ID NO: 106934 - protein, 92 aa, Gossypium hirsutum
  unsure (1)..(92): unsure at all Xaa locations
  Clone ID: LIB3827-001-Q1-N6-C1.pep
AQQTXLPLRALEFTELVSRSPLFASKEGVSAPKQMVSCQPQTALAEVIEKIVSKHVHRVWVVDEQGLLAGLVSLTDIVGALRVSLLSKIDVM

SEQ ID NO: 106935 - protein, 105 aa, Gossypium hirsutum
  Clone ID: LIB3827-001-Q1-N6-C4.pep
FGDRFPSNGLPTQPPPRGKKHPFNSGPFFGQCWGLKKKGVWVFFFKFWGVQAFFLKKKLIFKKKGGGLFFWAGGFKKKSFSPIFFSPPWFYFKPLKSFGAFLGLF

SEQ ID NO: 106936 - protein, 131 aa, Gossypium hirsutum
  Clone ID: LIB3827-001-Q1-N6-D10.pep
PWPGPGGAVPSTFAGPGGERPSPLGRLTGNPLSPRVGQFFNPLCPPVFPFVKAAVTSAFLILIRSLIPPPLFCLFSLRGLPWVDFLGVRICHPGGIFTPYPPPPGTGSAPAPPGPPQGPVRETRVHPREPV

SEQ ID NO: 106937 - protein, 97 aa, Gossypium hirsutum
  Clone ID: LIB3827-001-Q1-N6-D11.pep
SEGLLVLGSSTDKLVIDVGDHKRSGFFVLHSAWSWFLSRLFFHGRGGFPILPSFINNGRGVLCVARVFVGLNSWAKPLGFISCISWALGPLAVPVCL

SEQ ID NO: 106938 - protein, 63 aa, Gossypium hirsutum
  Clone ID: LIB3827-001-Q1-N6-D12.pep
SRTLKTRQACSPKRNNNTISYKEARLKPLRSFIRKPSHKKNRTFKQSECHPSSHTTILELTAA

SEQ ID NO: 106939 - protein, 88 aa, Gossypium hirsutum
  unsure (1)..(88): unsure at all Xaa locations
  Clone ID: LIB3827-001-Q1-N6-D8.pep
PGSGARLVSKFEEAGCGTPASPSCAACMGGPKDTYARMNEAQVCVSTTNRNFPGGMGHKEGQIYLASPYTATVSALTGXTTDPKEFLH

SEQ ID NO: 106940 - protein, 25 aa, Gossypium hirsutum
  Clone ID: LIB3827-001-Q1-N6-E12.pep
ALAWCLYPKLYPSFFLLPVCFSVLN

SEQ ID NO: 106941 - protein, 80 aa, Gossypium hirsutum
  Clone ID: LIB3827-001-Q1-N6-E8.pep
WVGFGLTVHFANVAISPFLCFTGSSSFLKYPYPDIMLDILPNLVQGYDSSRTLHIHDKKKKTNLEIRADISKTHTQTRFE

SEQ ID NO: 106942 - protein, 83 aa, Gossypium hirsutum
  Clone ID: LIB3827-001-Q1-N6-E9.pep
SKGRENSLQNKLHINLQVDAFCLGSYFSRNPLHRAACNRKQHRRRQSEQDFEPMLKNNFSQSLTYILPNALACFIVKKNMCCF

SEQ ID NO: 106943 - protein, 89 aa, Gossypium hirsutum
  Clone ID: LIB3827-001-Q1-N6-F12.pep
MQMEKNRINKDGEIVISSTKTRTQKGNIDDALAKLQAIIDAAAYVPPPPSEEQKKKIAKMAAIGEQKRLKSKKVLSDKKAFRKSRDSWD

SEQ ID NO: 106944 - protein, 117 aa, Gossypium hirsutum
  Clone ID: LIB3827-001-Q1-N6-G1.pep
KKERGGLIAPLAIGSKVSANILGGGPFDGAAMNTARAFGPALAGGRWNHHWINWEGPLTGTGLPDSKCTKYSDHQAEPSTTHAQWLTERYTSSNCFTVLCSPEPPSNTIGSHRDPSS

SEQ ID NO: 106945 - protein, 182 aa, Gossypium hirsutum
  Clone ID: LIB3827-001-Q1-N6-G7.pep
SKVVVCLMLRKTVPLMNYVQVHQDVFCQLVDLIGITSIMEVLVRLVAANDHVYPNFSDVMQWLADSNLLEMIVDKLSPSCAPEVHANAAETLCAITRNVPSALATKLSSPSFVARIFGHALEDSHSKSGLVNSLSVCISLLDPKRSAINSPLMYSFRNQLMYEPPIPVNSETINAMLPQLGE

SEQ ID NO: 106946 - protein, 73 aa, Gossypium hirsutum
  unsure (1)..(73): unsure at all Xaa locations
  Clone ID: LIB3827-001-Q1-N6-H1.pep
GTGGHDNRGNPTAGXGXDTGRKDDPSSKGLGGNTEGATGTTGNQDXPNAAXNNAGTRRNTRGGTQEDPHXRSK

SEQ ID NO: 106947 - protein, 174 aa, Gossypium hirsutum
  unsure (1)..(174): unsure at all Xaa locations
  Clone ID: LIB3828-001-Q1-K6-B11.pep
FFFFFFFFFFFFFFFFFFFFLKGKKISPPPGRGSGQKPGGSPVSAPKSPHLVGGKRKRILSNRESAGGSRFKKQKLLEDLFYEGGGLQKNNPPIWEKKSSXTQRFVKMEASNRVLRAQVIELTESLESLNPMLXRGENISGYHVHIPEIPHPLMKPWKLLWATQPICSTFGGGT

SEQ ID NO: 106948 - protein, 115 aa, Gossypium hirsutum
  Clone ID: LIB3828-001-Q1-K6-C10.pep
MVSSQLSSLNESRINKAFQYQLLVPVGQPDSLTSDHLEFDFSDVFGPAPVQPSMEINSQNPRNLVVAIESNEMLYDVPTVICNRSHSLVGPSTYVSQSLKLSKLTLRETGDSLEL

SEQ ID NO: 106949 - protein, 210 aa, Gossypium hirsutum
  unsure (1)..(210): unsure at all Xaa locations
  Clone ID: LIB3828-001-Q1-K6-D4.pep
LYIQSKENIQVLEAIEDTSPIASMLSPQDSAGRSGVTLFTAQKDTYVSPRIGIAVALRDSEIYSPGISLLELEKKERFDVKAFSSEGYYYKLSALVNMTTDRTKVIHLQPYMLFVNRVGLSFCLQQCYSETVEWIHPTDPPKLLGWQSSSKVELLKLQVDGYGWSKPFSVSTEGVMRISLXKDTGSDHLFLKIEVRSGTKSSRYEVTFRP

SEQ ID NO: 106950 - protein, 211 aa, Gossypium hirsutum
  unsure (1)..(211): unsure at all Xaa locations
  Clone ID: LIB3828-001-Q1-K6-E1.pep
RHLSPQLSRQVIRAISRCRREAMGLEEENRXFMETRIQPLSLKLEEKVTMESKLNGFNGFRGVLYAMRNVSSLLLMMLLYGGVHFWPESSMVRGGNEGCVCFGSTFMISTARLQQRVAEEINGMNGKAGILLYEFRRSKMAMEEVRGELERRGGGXGGXXXXTEVGLREKVDNMRGCFGILRSGVENIVGQIDDFFDEILKGGRALDSAAQ

SEQ ID NO: 106951 - protein, 98 aa, Gossypium hirsutum
  Clone ID: LIB3828-001-Q1-K6-G3.pep
IIKKKKTVSQVFFGPPSHKGLEQCQHLNFLLPNHMRIKKTLINSKPESANNKCTATCSKPLSVPDPYEKPLPELDGQQLYSKQKGQTKISTFTFSPNF

SEQ ID NO: 106952 - protein, 195 aa, Gossypium hirsutum
  unsure (1)..(195): unsure at all Xaa locations
  Clone ID: LIB3828-001-Q1-K6-H6.pep
GLWXEPLPTADGVKENKLWKWVFAVSGILITLVIYGVLQEKIMRVPYGVNKEYFKYSLFLVFCNRITTSAVSAGSLVASKKALDPVAPVYKYCLVSVTNILTTTCQYEALKYVSFPVQTLAKCAKMIPVMIWGTFIMQKKXKGFDYLVAFLVTLGCSIFILFPAGTDFSPYGKGRRNTVWGISLMVGYLGFDGFT

SEQ ID NO: 106953 - protein, 204 aa, Gossypium hirsutum
  unsure (1)..(204): unsure at all Xaa locations
  Clone ID: LIB3828-001-Q1-K6-H7.pep
VASGDMDFKVXGNEDGITAFQMDIKVEGITLPVMREALLQARDGRRRILAEMMKCSPPPAKSLSKYAPLIHIMKVAPEKVNMIIGSGGKKXKSIIEETGVEAIDTQDDGIVKITAKDLSSLEKSKSIISSLTMVPTVGDIYRNCEIKSIVPYGVFVEIAPGREGLCHISELTSDWLAKAEDAFKVGERVDVKLTEVNDKGQLRL

SEQ ID NO: 106954 - protein, 46 aa, Gossypium hirsutum
  Clone ID: LIB3828-001-Q1-N6-A1.pep
APTRPAGMSINYIKMVPSVAVGFASYDMMKVWLRIPPRQKSQTVSS

SEQ ID NO: 106955 - protein, 135 aa, Gossypium hirsutum
  unsure (1)..(135): unsure at all Xaa locations
  Clone ID: LIB3828-001-Q1-N6-A12.pep
THYVINETLRLGIXSWVFRRTIADIPVNGYTIPKGWVLLIIPAVLHLDPNTYEDPLAFNPWRWKNIERNTMAKKFIPFGGGNRACAGAEFSRVLVAVFLHVWLSKFRLTKIKGGNVARAPLLMFKNVFYVKVSEK

SEQ ID NO: 106956 - protein, 41 aa, Gossypium hirsutum
  Clone ID: LIB3828-001-Q1-N6-A3.pep
GLGSPHVMDEKAVLAKIPLFWIFGRPARPVFEHNCIRVGFS

SEQ ID NO: 106957 - protein, 118 aa, Gossypium hirsutum
  unsure (1)..(118): unsure at all Xaa locations
  Clone ID: LIB3828-001-Q1-N6-A4.pep
SNIFPAEQKPVFCEFDWELDELDEFTDKLIEADELDKDXKDAFKDFVKEKVREAKKANRQAREARRKALEEMSEETKAAFQNMRFYKFYPVHTPDTPDVSNVKAPFINRYYGKAHEIL

SEQ ID NO: 106958 - protein, 73 aa, Gossypium hirsutum
  unsure (1)..(73): unsure at all Xaa locations
  Clone ID: LIB3828-001-Q1-N6-A9.pep
RQFCDAHTCSGGPKPFPKGQKNRXXMLYISLSVLTLMLLPLFYFFIYLYQRGIKSGSQELKRISLSGRKKKSF

SEQ ID NO: 106959 - protein, 58 aa, Gossypium hirsutum
  unsure (1)..(58): unsure at all Xaa locations
  Clone ID: LIB3828-001-Q1-N6-B9.pep
FTHSLPIKCLITGXLECSXVMSHKVCIEDSXSVTVLQHSWKTGWQIKRLNDTAHLRLL

SEQ ID NO: 106960 - protein, 60 aa, Gossypium hirsutum
  Clone ID: LIB3828-001-Q1-N6-C8.pep
KIFKKLPKNDCSKPSQTKGLKHLFINRTLAYLNHLFDGCPGEKALGPVFPFSITPAIKYP

SEQ ID NO: 106961 - protein, 208 aa, Gossypium hirsutum
  unsure (1)..(208): unsure at all Xaa locations
  Clone ID: LIB3828-001-Q1-N6-D4.pep
EPIIWRIHEMMQQVNLSRLSDSNTTXVSFDPIIHIGILNISEVRLKVSMAMSPSQRPRGVLGFWSSLMTALGNTENMTVKLNQRFHENLCMRQSMMINNAISNIKNDLLGQPLRLLSGLDILSNASSALGHMSKGVAALSMDKKFIQSRQRQESKSVEDLGDVIREGGGALAKGLFRGVTGILTKPLEGAKSSGVEGFVQGVGKGIIG

SEQ ID NO: 106962 - protein, 97 aa, Gossypium hirsutum
  Clone ID: LIB3828-001-Q1-N6-E1.pep
REEEAFGLLQSQVRDLGKNCKGNQLLFLLTLLFLLIFIFIFMHFIASTMEIVVYFFSSYGCWGAKQMDLGFKNLEESPKKRNFSCRAFSNVVFGILN

SEQ ID NO: 106963 - protein, 64 aa, Gossypium hirsutum
  Clone ID: LIB3828-001-Q1-N6-E2.pep
QYSPNLRCTAIEACAHPFFDDLRDPTACLPNGRALPPLFDFTAQELAGASPELRQRLIPEHARA

SEQ ID NO: 106964 - protein, 106 aa, Gossypium hirsutum
  Clone ID: LIB3828-001-Q1-N6-F3.pep
KKRKKASSRGGTPRNIFTFIKPPFLFWILQNLRGSTIFLRGLTGKRGQKKKRGLLQPRTQKQALLKMPPWNLGLGQMLKLKLKLQLQLELKLEKELERPQQPKPFL

SEQ ID NO: 106965 - protein, 96 aa, Gossypium hirsutum
  Clone ID: LIB3828-001-Q1-N6-G10.pep
FLNPAASLGPASVIFTWDKGWIYWVGPFNGGFLAGLIWEFIFFQQLLGTAPPPPLLSLFFFLIALSVTLKPDFLRFHLGLPLLTVILCFLCGLFSC

SEQ ID NO: 106966 - protein, 100 aa, Gossypium hirsutum
  Clone ID: LIB3828-001-Q1-N6-G3.pep
LKKKNGFTRFFGAPFKKRPRTRPALKLFFPNHRGVKKTLVNSKPESAKKKGPAPWGKPLWGPDPYKKPLPKLGGQQFFCRQKGPPKISTFPFSPKFHGPG

SEQ ID NO: 106967 - protein, 167 aa, Gossypium hirsutum
  unsure (1)..(167): unsure at all Xaa locations
  Clone ID: LIB3829-001-Q1-K6-B7.pep
MGRASRWLKSLFGIKNSKNSFNPRDGKDKENGSIDHSVGDSSISPEKVAWLRSCYNETEREQNKHAIAVAAATAAAADAAVAAAQAAVAVVRLTSHGRGTMFGGVHEKWAAVKIQTVFRGYLARKXLRALKGLVKIQALVRGYLVRKQASATFHSMXALMRAQATLN

SEQ ID NO: 106968 - protein, 176 aa, Gossypium hirsutum
  unsure (1)..(176): unsure at all Xaa locations
  Clone ID: LIB3829-001-Q1-K6-B9.pep
VPRKXDNYFFACXEIQKPLEEILEQNPDFVQPSYRLNEVQGWIKXGLRDFSISRAAVEWGIPVPNDNKQTIYVWFDALLGYISALLEDKEQISLQSAVSSGWPASLHLIGKDILRFHAVYWPAMLMSAGLSLPKMVFGHGFLTKDGMKMGKSLGNTIEPNELVHKFGADAVRYFFL

SEQ ID NO: 106969 - protein, 40 aa, Gossypium hirsutum
  Clone ID: LIB3829-001-Q1-K6-F7.pep
CVHLFAVNFRLNVLDSSLEWLESYFALFEVMKTSYKCILF

SEQ ID NO: 106970 - protein, 44 aa, Gossypium hirsutum
  unsure (1)..(44): unsure at all Xaa locations
  Clone ID: LIB3829-001-Q1-K6-G3.pep
RYLYILKTGQTLEASSNLQEHVVVLNFFTXDEIXXSCSISLKQQ

SEQ ID NO: 106971 - protein, 199 aa, Gossypium hirsutum
  unsure (1)..(199): unsure at all Xaa locations
  Clone ID: LIB3829-001-Q1-K6-H1.pep
SSSPQQQCGGNSKIVTPLVAPPEPSQLPRWTIRSMWELASVLNFLHVFRPLLNIAVEFSAEEFETALITPNYTLADIHIPLLKAIPPITRMPLTRDTWVTVLCRKLRDWWHWVADGDLPIVASHGTEIELYKSLDPGVRVVILKALCDIRVEQDDIRSYIDNSLKHGVXLSAFRKERIGGDSQGINYWYEDDAVVGHRF

SEQ ID NO: 106972 - protein, 94 aa, Gossypium hirsutum
  unsure (1)..(94): unsure at all Xaa locations
  Clone ID: LIB3829-001-Q1-N6-A12.pep
AWLPGTEGQGVTDXLYGDYRFSGKLPRTWFKTVDQLPMNVRDSHYDPLFPLGFGLKTESGASIVSRSTSSATLRRPGLFIFMVTVTLSFYITGK

SEQ ID NO: 106973 - protein, 81 aa, Gossypium hirsutum
  Clone ID: LIB3829-001-Q1-N6-A5.pep
LLDFIFLALLATTTKLTICMFGYMSDTSDTQKPKLSKKCDNESPCYEQFCNPIISFFSLIIFRRERKIDKNTGSWKDYLWH

SEQ ID NO: 106974 - protein, 182 aa, Gossypium hirsutum
  Clone ID: LIB3829-001-Q1-N6-B7.pep
PKARSRRTNTSISDFIDDHTYQTLPSPLPCRCPARLSIPDSRHYQDIDWGFSGDECRFSTAHSTPRFINSCAPATPAKSVSGHNFFRPCGDFPNYMANTQSFKAKLRSHSAPKQRPEPGPKKRLSLNEMMESRSSLSGVKMQRSCSRAQEAIHFKNAVMGKLDRSLEFGKDFERNHLQIRRW

SEQ ID NO: 106975 - protein, 180 aa, Gossypium hirsutum
  unsure (1)..(180): unsure at all Xaa locations
  Clone ID: LIB3829-001-Q1-N6-B9.pep
DVDYSEERFVNIVNAHLAHTIGNILNRTLGLLKKNCQSTLVVDSTMAAEGKYFKDTVXXLVEKARINYENLSLSSACESVLEIGNGGNLYMDKHQPWSLFKQGGAASEVAAKDLVVKLEAIRIKAIALSPVAPSLCRQIYAQLGYSEDQFDNISWSXTKWGGVKGGQVMAQPKPVLARIE

SEQ ID NO: 106976 - protein, 65 aa, Gossypium hirsutum
  Clone ID: LIB3829-001-Q1-N6-D4.pep
FRGVTVVVFQEGVFFLEVKGGIMVREVVDTIPMENRQTGKDFCLEVSKCCFNLDYWRSFFMFIIP

SEQ ID NO: 106977 - protein, 94 aa, Gossypium hirsutum
  unsure (1)..(94): unsure at all Xaa locations
  Clone ID: LIB3829-001-Q1-N6-D5.pep
KEKRPPXGYRPFVEACIDADEKGEALKYIPKLADLRERAEAYARIGMAKEAADAASQAKDGELLGRLKLTFAQNAAASSLFDTLRDRLSFQGVS

SEQ ID NO: 106978 - protein, 118 aa, Gossypium hirsutum
  unsure (1)..(118): unsure at all Xaa locations
  Clone ID: LIB3829-001-Q1-N6-D9.pep
SRLEEEDDXLLLDHVKKLEREKKLDAIVDRNLNKNYNIEEVEAMIQVALLCTQASPEERPAMSEVVRMLEGEGLAERWEEWQHVEVTRREEYERLQRRFEWGEDSLYNQDAIELSGGR

SEQ ID NO: 106979 - protein, 50 aa, Gossypium hirsutum
  Clone ID: LIB3829-001-Q1-N6-F10.pep
KQKKNTGFEKKEKGFDIHIFLKIFRGKLPFYAFRSYRDIETSRDGFWTFP

SEQ ID NO: 106980 - protein, 215 aa, Gossypium hirsutum
  Clone ID: LIB3831-001-Q1-K6-A8.pep
GFSPELALVTIGGGKELEEKLVVRPTSETIVNHMFTQWIHSYRDLPLMINQWANVTRWEMRTKPFVRTLEFLWQEGHTAHATLEEAEKEALQMIDVYTKFAYEQAAIPVIAGRKSKVETFAGADKTYTIEAMMGDRKALQAGTSHNLGQNFSRAFGTQFTDENGLRQHVWQTSWAISTRFVGGIIMTHGDDAGLMLPPRIAPIQVVIVPIWKKLM

SEQ ID NO: 106981 - protein, 151 aa, Gossypium hirsutum
  Clone ID: LIB3831-001-Q1-K6-B4.pep
MMQSLKYWLAEHPSIVNFRWSHTQSFGSTWSFLFAAIAVYIVAVITLHSFLSLILSKSRRIPLGPIPAIHSLCVSLISAVIFVGILYSAAAEIRDTRWFWRRTKTISTPFQWFLCFPLGTRPFRRVFFWSYVFYLSRFLHLFRTFFTILRH

SEQ ID NO: 106982 - protein, 52 aa, Gossypium hirsutum
  Clone ID: LIB3831-001-Q1-K6-C5.pep
TFFFLNRAPLFFFFFFFFFFFFFFFFFFFFFFFFFFFFFFFFFFFFFFFIIL

SEQ ID NO: 106983 - protein, 49 aa, Gossypium hirsutum
  Clone ID: LIB3831-001-Q1-K6-C8.pep
KGPPLFFFFFFFFFFFFFFFFFFFFFFFFFFFFFFFFFFFFFFFKIKVF

SEQ ID NO: 106984 - protein, 221 aa, Gossypium hirsutum
  unsure (1)..(221): unsure at all Xaa locations
  Clone ID: LIB3831-001-Q1-K6-F7.pep
DLVSRLTLQEXVQQLVNTASGIPRLGVPAYQWWSEALHGVSDLGPGTRFNATVPGATSFPAVILSAASFNEMLWLEMGRVVSTEARAMYNVGLAGLTYWSPNVNVFRDPRWGRGQETPGEDPTVVSKYAVNYVRGLQEVGSVGDKLKVSSCCKHYTAYDVDNWKGVDRFHFDAKVTKQDLEDTYQPPFKSCVVEGHVSSVMCSYNXVNGIPTCADPDLLKA

SEQ ID NO: 106985 - protein, 212 aa, Gossypium hirsutum
  unsure (1)..(212): unsure at all Xaa locations
  Clone ID: LIB3831-001-Q1-K6-G11.pep
GGEYGRALGKQKRSTSTTSLQGEENRFLQNSKASLSSIPDNVTREDPSTKYELLNELGKGSYGAVYKARDIRTSELVAIKVLSLSEGEQGYEEIRGEIEMLQQCSHPNVVRYLGSYQGDEYLWIVMEYCGGGSVADLIHVTEEPLEEYQIAYICREALKGLEYLHSIFKVHRDIKXWXIXLLTEQGEVKLGDFXVAAQLTRTMSKRXTFIGT

SEQ ID NO: 106986 - protein, 213 aa, Gossypium hirsutum
  Clone ID: LIB3831-001-Q1-K6-G7.pep
LWATGWLHDRIRVVVSSFFVKVLQLPWRWGMKYFWDTLLDADLESDALGWQYISGTLLDGREFDLIDNPQFEGYKFDPHGEYVRRWLPELARLPTDWIHHPWNAPESVLQAAGIELGSNYPLPIVGIDAAKDRLQEALSVMWQQEAASRAAIENGTEEGLGDSSESVPFAFPQDIQMEENVEPARNDAPATTRRSEDQMVPSMTSSLVRGIHE

SEQ ID NO: 106987 - protein, 55 aa, Gossypium hirsutum
  Clone ID: LIB3831-001-Q1-K6-G8.pep
IMTRIRSLYIYERKNKKKDFFFILYCFFFVPILLSDLIKPRMGLKLKNSKGLFRS

SEQ ID NO: 106988 - protein, 120 aa, Gossypium hirsutum
  Clone ID: LIB3831-001-Q1-N6-A2.pep
QISVDDSTINGPEDGFLVKNTTGFALLVLCLLAASALVYTKRGKPSVAAGLNENNQSQERRKTTYRRESTALSDYSTGSSSYGSVTTYDKIPRKHRGREEGIVTPVRRSSRIRNQVMTSP

SEQ ID NO: 106989 - protein, 130 aa, Gossypium hirsutum
  unsure (1)..(130): unsure at all Xaa locations
  Clone ID: LIB3831-001-Q1-N6-B4.pep
QSFQVLAILLATLLYSVVYGYXFWTAIGLPSACFPFVVNCQVVLLACNLISHFGVLFLHFLKGGCNGMGAWGFNSVLNGVILILFLNFYVKMHLRKKNVEDIDGNSNSSSSSSSSSSSAHGCSRSDIKFD

SEQ ID NO: 106990 - protein, 90 aa, Gossypium hirsutum
  Clone ID: LIB3831-001-Q1-N6-C11.pep
TTRGSLISHSSDKRQNCRLPPQFHSSGKAKPQKVVPISRWWESIGPQIQAARDHEQTCWHGTCWHGEMISLMKMSKPLTPPTLKLQAAAH

SEQ ID NO: 106991 - protein, 62 aa, Gossypium hirsutum
  Clone ID: LIB3831-001-Q1-N6-D10.pep
WGMNVTLPQKNLLLPSPAGSFTCLAMAPAPALNVFANMHQQTHRVVFDVPNSRVGVARDQCF

SEQ ID NO: 106992 - protein, 107 aa, Gossypium hirsutum
  unsure (1)..(107): unsure at all Xaa locations
  Clone ID: LIB3831-001-Q1-N6-D4.pep
QAADEXFKESKRACEVFNAAHPLSRNPPLWGTMKYLSEKIPKDTSSKVRINRDLYSYEKIMETAPTLPDFALALKPDEYQLPPADPSWNENVQLSHIGINQVNHDKR

SEQ ID NO: 106993 - protein, 55 aa, Gossypium hirsutum
  Clone ID: LIB3831-001-Q1-N6-F6.pep
FDTLLFSLGGYETGSSHWSLFIKHFMLHSYIQHYNSRVGICDYTVGSSCEPPIVG

SEQ ID NO: 106994 - protein, 126 aa, Gossypium hirsutum
  Clone ID: LIB3831-001-Q1-N6-F7.pep
DASSVSNCDDLQFNLMIGVKNNGPMDGDHVVLLFWKPPSTKGVTGAPNMQLIGFERVGVKKGKTKNVTVSLNVCKDLSLVDVEGKRKLVIGQHTIFVGTTSEHQVRHHFVVRQAGDESGEPLVSIT

SEQ ID NO: 106995 - protein, 127 aa, Gossypium hirsutum
  unsure (1)..(127): unsure at all Xaa locations
  Clone ID: LIB3831-001-Q1-N6-G8.pep
EEELVAGYPTEYSGIKFGLFYVASHLKLLLFSLFGTVFSLGGWNISLPDVFAPELFXINKINGILGPPIGIFFPLAKTYLFLFISIPPRWAFPRLRMGPFFNFGWEFFLPLSLGNLLLPPSFPLLSP

SEQ ID NO: 106996 - protein, 59 aa, Gossypium hirsutum
  Clone ID: LIB3543-001-Q1-K1-A10.pep
HASAHASAEKKGMGSQLSVFTPFYYMPVCIQLSGSLMLFGFFFLNLIICTLLRFLTFIL

SEQ ID NO: 106997 - protein, 184 aa, Gossypium hirsutum
  unsure (1)..(184): unsure at all Xaa locations
  Clone ID: LIB3543-001-Q1-K1-A2.pep
RTRGNNFNGCVNLRKILNLSRAINLEYLYCSDCKSLVELWNGDDCVDFVNLREINFNGCVNLRKILNLSRAINLEYLYCSDCKSLVELWNGDDCVDFFNLREINFNGCVRLRKDFVNLTXCSNLRKIANLSRAINLEFIDCSNCKSLVELPCLDHLASLDACNLHLDGCYSLKKFLRSHVTFVI

SEQ ID NO: 106998 - protein, 104 aa, Gossypium hirsutum
  Clone ID: LIB3543-001-Q1-K1-A6.pep
MRRGRGLAAAVIPDGEEPKYRGVRKRPWGRFAAEIRDPWKKTRVWLGTFDSAEEAARAYDTAAMTLRGPKAKTNFPINPSNTRFPIDHHHRRLYLMGNFQDPKM

SEQ ID NO: 106999 - protein, 224 aa, Gossypium hirsutum
  unsure (1)..(224): unsure at all Xaa locations
  Clone ID: LIB3543-001-Q1-K1-B10.pep
SSFSRRKYSVKRRDSEGESSSSTWGKKLSGSSPEGLNNSSSLSDSISDSRRARNWSSNRDCGIASSVRTQRSNSSYGSGRLPNQANGNSLTLNESPMVIPQAPQSDIRTDMNAPVPIETASTRTSSYSRSGSIDESLRGFMPSSPSEVSGYHSSVNQGSFQHYNMDGFAEVLLELERIEQDEELTYEQLLVLETSLLLNGLDFYESHRDMRLDIDDMSYXELLA

SEQ ID NO: 107000 - protein, 153 aa, Gossypium hirsutum
  Clone ID: LIB3543-001-Q1-K1-C12.pep
RKDGIKIQKYIDNSNRREKKAKIYQTVYEEQDGDLCNVSLISGKGPNPYDPYVLKPDICAPGEDILCASKYDAQNMYAHYQVMSGTSMANAVVAGMLSYIKTFHKDWGIARIKSAIMTSANPVINFSSAAVLAMGSGCINPLKAMNPGLVYDI

SEQ ID NO: 107001 - protein, 142 aa, Gossypium hirsutum
  Clone ID: LIB3543-001-Q1-K1-D12.pep
PRVRILLAVPCILGVNLSDVDLLEFLHQLADTDGSSTMPPSVSRILNSKACRGAIMFGDSLLPSECSLIVEELKQTSLCFQCAHGRPTTAPLVNLEALHGQIAKMQVRDDEGRELWHGLCRQGVSLERASLRLRAAADEIPN

SEQ ID NO: 107002 - protein, 68 aa, Gossypium hirsutum
  Clone ID: LIB3543-001-Q1-K1-D6.pep
KHSMLYLCDPDLIPVSNMCSHSTNICSMFLYSFLGISEDLLLIKSHCQFKVFNVSSITKLEERTRINE

SEQ ID NO: 107003 - protein, 178 aa, Gossypium hirsutum
  Clone ID: LIB3543-001-Q1-K1-E2.pep
MSNLGDDFSQFDISKEEKDKLVAEVVRYILFKTHQNSGCPIKREELSQLVTKNYRHRSLPAYIINEAKVKLSTIFGYELRELQRSRPSSTSHSRLSQQSGVDAKSYVIISQLPAEVYKKYVEDVNTSHLTGFTFVAISIVQLAGGKIAEDNLWLHLKRMGLHETDENHPVLGNVKAVL

SEQ ID NO: 107004 - protein, 118 aa, Gossypium hirsutum
  unsure (1)..(118): unsure at all Xaa locations
  Clone ID: LIB3543-001-Q1-K1-E7.pep
MRSSLFVNEEEMQRTNESASASASVSASASASVDKFEEEILFCFGFEKQLEEDLQRASSILTDGAAVFLLAKAQGFXRMFLGPINVRASRKEVQFXVKDEYNNYRVSITSLLPFSNFI

SEQ ID NO: 107005 - protein, 143 aa, Gossypium hirsutum
  unsure (1)..(143): unsure at all Xaa locations
  Clone ID: LIB3543-001-Q1-K1-E8.pep
VLEAKHGTIFVAYAFPGYQEAVQDRDHRFLTRAIGEAYKGLECNGGGPSGASVVRPDXVAESCDNMVXKNTDPTVHAEVTALREACDTLNQTELSDCEXYAQCEPCPMCCSAMHLPRINRLPYGSNAEAAITIGLDDFIADAL

SEQ ID NO: 107006 - protein, 113 aa, Gossypium hirsutum
  Clone ID: LIB3543-001-Q1-K1-E9.pep
YCVFCLRSNHSFCFLFSYCFFIFSYFTEIKTTKTQNLPERHGLFAGALISVVGDELKRGTRTASFSFFHFLLAYFGGKGQKPFVLHDAGRHPRWRCEGRTADGGGVPMLGFEP

SEQ ID NO: 107007 - protein, 185 aa, Gossypium hirsutum
  unsure (1)..(185): unsure at all Xaa locations
  Clone ID: LIB3543-001-Q1-K1-G11.pep
ASQISSSAAAQIAAXANALVGLSYEQERVMSIVDEMGVPIVAQVSGDSLMKVQIPAAKLEARMAAHDPVAQEDSCRENEIRPLVTLVSFDTFXDILRHSRXKQSIHSIAQISXRMEKFSICCDRHSSKXSYRPYSNCYSNLHMEGSCMGGNYRKERENETPELKLQLKINCAEALWMLAKGSASN

SEQ ID NO: 107008 - protein, 166 aa, Gossypium hirsutum
  unsure (1)..(166): unsure at all Xaa locations
  Clone ID: LIB3543-001-Q1-K1-G2.pep
MGVDYYNILKVNRHANEEDLKKAYKRLAMIWHPDKNPSYKRPEAEAKFKLLSEAYDVLSDPMKRQIYDLYGEEALKSGQFPPPNQSHASTSASYPRGAGHYYXNSNNNQRQQQPNTGPFRFKPRDADDIYEELFGAEANGGRGNRGFREGNFRNSNGYGTSSTTSN

SEQ ID NO: 107009 - protein, 204 aa, Gossypium hirsutum
  Clone ID: LIB3543-001-Q1-K1-H10.pep
PRPDFLEMEKLACSSNDSTANGAITNAGSTNNKSPEAVNADASGETSCKELQSGKQHDLSPPANHGPIVHPESDADKLLVMKLHSKLSMVLESMSKDADAHKILDDIKCAIQDAQDTLSDHSVNGVSEEVDGSEGKCNRQGHPENGSLTEGKDIAVPPGDKVTTETLQTISQELAVAISQIHDFVISLGKEAVQLTTYLLMPMD

SEQ ID NO: 107010 - protein, 169 aa, Gossypium hirsutum
  Clone ID: LIB3543-001-Q1-K1-H11.pep
PRVRFNGVVIFQKKKKKKKKKKKKKKKKKKGKKLKNKKAYNTLSCDLFAVLWWGLTSLRWCVVLPRPPLENPGFPPFNPLELHPSLAISGSPELPLLALPSYWFGPLICQCVAPCEGALLGGCLAVTRIVPVARSSPLPPFLFPFFRSFSPAFPVLPHPGLSRGWFLGV

SEQ ID NO: 107011 - protein, 212 aa, Gossypium hirsutum
  unsure (1)..(212): unsure at all Xaa locations
  Clone ID: LIB3543-001-Q1-K1-H6.pep
PTRRDSRSVIIPGFIGGRMVKWLKRIIVTTQESDNYYHYXDNRVLPSHVDAELANAEGWWYKPEYIINELNINSAITTPCHEEILPINAWTTQRPYTLRGYAYSGGGKKVTRVEVTMDGGETWQVCTLDHPEQPNKYGKYWCWCFWSLEVEVLDLLGAKEIAVRAWDQTLNTQPEKLIWNVMGMMNNCWFRVKTNVCKPHKGEIGMVFEHPR

SEQ ID NO: 107012 - protein, 136 aa, Gossypium hirsutum
  unsure (1)..(136): unsure at all Xaa locations
  Clone ID: LIB3543-002-Q1-K1-C6.pep
MEGHQHHHHQYQQQQYQYHQQQQQQQQPPTSSVNVDADRFPQWSIQETKEFLMIRAELDRSFMETKRNKLLWEVISTRMREKGFNRSTEQCKCKWKNLVTRYKGCETMEEEAMRQQFPFYNXSAAIFSARMQSILW

SEQ ID NO: 107013 - protein, 199 aa, Gossypium hirsutum
  Clone ID: LIB3543-002-Q1-K1-D10.pep
MSCSSPMRKTSCLSRRFSRSLRLSARTAALTTVSTRENHLESSSTSSPSSPPPLAEAGGDSWSTLLPELLVEIMERVEASEEMWPDRKNVVSSACVCKKWREVTREIVKASSQNSGKITFPSCLKQPGPREFPNQCIIKRNKKNSTFFLYLALSPSFTEKGKFLLAARRYRHGAHIEYIISLDPNELSQGSNAYVGELS

SEQ ID NO: 107014 - protein, 114 aa, Gossypium hirsutum
  Clone ID: LIB3543-002-Q1-K1-D8.pep
EQITFSEDESTFISLLKALALWTEKTNDQSFIMLASSICTLIFDMTSENALLNHPSFSSSCLDSLSRLIARSLASWGQDMSDAAKADMDLLEIVTAGYSRWADRFPQIQKAVGR

SEQ ID NO: 107015 - protein, 222 aa, Gossypium hirsutum
  unsure (1)..(222): unsure at all Xaa locations
  Clone ID: LIB3543-002-Q1-K1-E6.pep
PASETLQLSSLNNVEILPIQVIDIEENKIQEPAVDEFDYSQRGQWLRAAVLGANDGLVSVASLMMGVASVKNDIKAVMVAGFAGLVAGACSMAIGEFVSVCTQRDVEISQMKREKRERSLESDENDEKLPNPGQAAVASALAFAVGAVLPLLAAAFIKQPKVRMAVVFVVASVALVAFGVVGALLGGTPVVKSSARVLXGGWMAMGTTFGLTKXIGIDHGMI

SEQ ID NO: 107016 - protein, 60 aa, Gossypium hirsutum
  Clone ID: LIB3543-002-Q1-K1-E9.pep
TFCRHITRDELEAAMKEYGMGDDDTIKEIISEVDTDNDGKINYEEFRDMMRSGTQHGQLF

SEQ ID NO: 107017 - protein, 195 aa, Gossypium hirsutum
  Clone ID: LIB3543-002-Q1-K1-F11.pep
ALMATSVGLSRVLTHRMRLMESLTITGTSPIVGVVATFISFQILVCMCSTDTRNAHECNKPFNCGIVKEISYPFRQKGSPAYCGKPGFELFCEGGNPMITISSRTYQLLVYNTTLRSLTLEPMSNTDSVLCPRRLVNTSLNLSPFRALWNTQNISLYYGCPIEANQYQGLTNHQFNCSMNGTDTVGYYLVPTAFP

SEQ ID NO: 107018 - protein, 158 aa, Gossypium hirsutum
  Clone ID: LIB3543-002-Q1-K1-G1.pep
MTSGTRMPTWKERENNKRRERRRRAIAAKIFAGLRMYGNYKLPKHCDNNEVLKALCDEAGWTVEEDGTTYKKGCKPVDRMDILGGSASASPCSSYHPSPCASYNPSPGSSSFPSPASSHYQANGNGNADANSLIPWLKNLSSGSSSASSKLAHHLYFA

SEQ ID NO: 107019 - protein, 128 aa, Gossypium hirsutum
  unsure (1)..(128): unsure at all Xaa locations
  Clone ID: LIB3543-002-Q1-K1-H8.pep
SESWGTGRAXVSRIRRVPGGGTHRAXQGAFGNMCRGGRMLCXTTIDLWASWHRXNNDNQTRYSFAVLPYVASAVPSLVMGPGHSIEVVPGYPLEISDAGNSDKKTLGAIKDWKQIAAYADVEKAKDRQ

SEQ ID NO: 107020 - protein, 117 aa, Gossypium hirsutum
  unsure (1)..(117): unsure at all Xaa locations
  Clone ID: LIB3826-002-Q1-K6-A2.pep
LSFSKRGRTTTASVSFVDPNDEKSNSGEHGPKPSEVYGFVGSITTVVATAIYLAWAYIPEPWLHSXRIFYYPSRYWALAVPSYAMVIIVLAXIXYIGLNFMXTPPPTSLNHMFDEFS

SEQ ID NO: 107021 - protein, 48 aa, Gossypium hirsutum
  Clone ID: LIB3826-002-Q1-K6-B1.pep
PWSPWAAPPFFFFFFFFFFFFFFFFFFFFFFFFFFFFFFFFFPFFFLF

SEQ ID NO: 107022 - protein, 57 aa, Gossypium hirsutum
  Clone ID: LIB3826-002-Q1-K6-B10.pep
LNSGLIWKSPLAPTHVLVSEFEGNGVVYTYTYIYHEEEKEILNENVFWCSVYICNIS

SEQ ID NO: 107023 - protein, 69 aa, Gossypium hirsutum
  Clone ID: LIB3826-002-Q1-K6-B3.pep
PGRPCVRGAFPHGGIAYGLDRLVMLLADANSIRDVIAFPKTSTAQCALTRAPSKVDIQQLKDLSLQQAQ

SEQ ID NO: 107024 - protein, 71 aa, Gossypium hirsutum
  Clone ID: LIB3826-002-Q1-K6-C10.pep
VTLTGKILPIGGVKEKTIAARRSEVKTIIFPSANKRDYDELAPNVREGLDVHFVDDYSQIFNLAFDNNTGN

SEQ ID NO: 107025 - protein, 55 aa, Gossypium hirsutum
  Clone ID: LIB3826-002-Q1-K6-E12.pep
VICPLCKQSPSQYHPPSDSDSAHCERLDKLDNLIVDHNPLLVPSIVIANNGAVAS

SEQ ID NO: 107026 - protein, 190 aa, Gossypium hirsutum
  unsure (1)..(190): unsure at all Xaa locations
  Clone ID: LIB3826-002-Q1-K6-E5.pep
MLIWVQMADPLXALMYXVQVMNSLKTLIVRTLREREDSVVEPAAAVHLEPFDDNGDQSPSISCIQDTGKDSEEKELSFIAEEPLSESFRKYSLNNEMKNEDHSSTPTVKGLVPDTDHSDETAAAVETFMSETDAIVANCPKPGTVANTQITKLDEKTKGISNLSCFIKDMRFPLESKISANSSAGSCILF

SEQ ID NO: 107027 - protein, 69 aa, Gossypium hirsutum
  Clone ID: LIB3826-002-Q1-K6-F3.pep
SNFQRVIRNSELPSHFYQLFIPKLEYNKGSKGHSHYQFFKRTLSLSVKSNNTYIGVELLDKNNKKNSIK

SEQ ID NO: 107028 - protein, 62 aa, Gossypium hirsutum
  Clone ID: LIB3826-002-Q1-K6-F4.pep
NYPSFLALVLCFVKRHSVKIDRSLDRGCCMAVVPVPHHIFHALQSYFCLLECLAAGNMNLGA

SEQ ID NO: 107029 - protein, 203 aa, Gossypium hirsutum
  Clone ID: LIB3826-002-Q1-K6-F7.pep
GQVEEAYKLINDMPLELDKTGAWSSLLGSCRIHQKVEIGEIAARNLFHLEPDVASHYVLLSNIYSSAQLWDKATDIRKRMKEMGVKKEPGCSWIEFDDEVHKFIAGDASHPQSGQLYGFLEILSEKMRKEGYVPDTSCVLHNVDEEEKEYLLCGHSEKLAIVFGILNSPPGTTIRVAKNLRVCNDCHEAAKYFSRITDREIIL

SEQ ID NO: 107030 - protein, 153 aa, Gossypium hirsutum
  Clone ID: LIB3826-002-Q1-K6-H5.pep
EIVANKQETNILDEPKTPYPSRIEEDGSSAASIDFAAHAEALKNALNKLAFTEEHNSPFGETCRDEDQGSAKQKDTVSFDERRRAHYDEFNTVNEVQEKGCSLDDELDNCIHVSGSGSTLDIDSIEIDIEDDDDEILPNIDIQETDDLSLPQY

SEQ ID NO: 107031 - protein, 148 aa, Gossypium hirsutum
  unsure (1)..(148): unsure at all Xaa locations
  Clone ID: LIB3826-002-Q1-N6-A10.pep
LLGFPGFPGPGPAGAPPGPPGRGLGAGPPRGHGGFLGARGSPAQCPARAGPGAPRDNPGGPNGGAKKQKLGGPKGPLTQRETGGATGLFEMGKPRGAAAFMKGXPRGGGGAPGKRPKGGFPSPPGPGRNGASPPRPAPPGGQKPGRRG

SEQ ID NO: 107032 - protein, 95 aa, Gossypium hirsutum
  Clone ID: LIB3826-002-Q1-N6-A3.pep
TLMTIAVSCHNCNWSCKGSYSKAPKNYAPNRFQEVRKKKPSVSWKSAKQIITMPQKNVHCHTHKTKQAKFSPFSNKQTLCKQIFSKLANKLGFLP

SEQ ID NO: 107033 - protein, 73 aa, Gossypium hirsutum
  unsure (1)..(73): unsure at all Xaa locations
  Clone ID: LIB3826-002-Q1-N6-A4.pep
KAKPKDFYKKKKTQKFLGTNEFFKPPXGEKFFCPGGGKARALGPKGGFGGPPPPNLQAPPISDFGPFPPLGGK

SEQ ID NO: 107034 - protein, 38 aa, Gossypium hirsutum
  Clone ID: LIB3826-002-Q1-N6-A6.pep
LENVFHLRSLGPIWLVEVEFSLIYHPLLFTSMSWFAMF

SEQ ID NO: 107035 - protein, 106 aa, Gossypium hirsutum
  Clone ID: LIB3826-002-Q1-N6-B11.pep
TETKLYHINSESLTWQQLESWICFQTVKECIFTNCKLKCIKNLTNSLRIGPNLFFYTCRLFFTDWTASPPADLDITNQYWLKHHLRSYDSHQYHEFGLTIHWFQPG

SEQ ID NO: 107036 - protein, 141 aa, Gossypium hirsutum
  Clone ID: LIB3826-002-Q1-N6-B3.pep
LLPNHSQAISKERRKKQILPKANRTAQTKKKRGGERRADGNEGRKGTKQGGAKRGGKKERANGRPTERGPERGNPRRNNRAGWKNRQITGREGTHEGARGREPPPGRARGKEMKDVFDWGYPNQKKNQSNPTASEPPRGKP

SEQ ID NO: 107037 - protein, 88 aa, Gossypium hirsutum
  Clone ID: LIB3826-002-Q1-N6-B5.pep
ELQELRLKTVSAFYPPRSTFEALPSSLLSCWGQDNSSSMSYCLPLTYLSSRSLRRSIFSDNKEERKKQCKNKFKDSAGKAASSIGMES

SEQ ID NO: 107038 - protein, 132 aa, Gossypium hirsutum
  unsure (1)..(132): unsure at all Xaa locations
  Clone ID: LIB3826-002-Q1-N6-C10.pep
GKVGGEGHDTPGSNQGEGAANREGPPQEGGGGRQQPPGRNRGEPPVGRGPQRGGLGREGPKRKQGQQXRSKEDPPPKIQVGNGGEQGEEAPDGREEPQDHGEEHKNPMEKEGDKNPPGGLGPPPPSNAPMRG

SEQ ID NO: 107039 - protein, 64 aa, Gossypium hirsutum
  Clone ID: LIB3826-002-Q1-N6-C11.pep
YRYRIVERWVLLKHGLNLLHDCTIDKHLFLIIHSIQRGHFSFMLLHLLIFILIVTPNLTKDSII

SEQ ID NO: 107040 - protein, 76 aa, Gossypium hirsutum
  Clone ID: LIB3826-002-Q1-N6-C2.pep
QKMLVFDPSKRISVTEALQHPYMAPLYDPNSNPSAQVPLDLDIDEDLGEEMIREKMWKEMLHYHPEAATANGGVCL

SEQ ID NO: 107041 - protein, 139 aa, Gossypium hirsutum
  Clone ID: LIB3826-002-Q1-N6-D4.pep
SKKGFFSGSPPENSWLKGGPPRNPASSKAFWEKFCKVSKVGGPIFLGFLDQVVGVWGGFKVSPKGPAWWQMGSGFPALMGMFYFGGKMFGLGFWFFFFFQENWVFFGLKKPSGGAFCLAPFLILGFFFGFIFSAGESWL

SEQ ID NO: 107042 - protein, 125 aa, Gossypium hirsutum
  Clone ID: LIB3826-002-Q1-N6-E5.pep
MLRGNSICTPYIEYSNSIVMKLEVPFSVSSCSLVGHSWHVENGNPPKKNNGNPPKKNRHPRSAYLLIRVFVPSFCSTTVFGVSTESMQLSYDSRGNIVPTILLLMQRRLYAQGGLQAEGIFRIMP

SEQ ID NO: 107043 - protein, 126 aa, Gossypium hirsutum
  Clone ID: LIB3826-002-Q1-N6-G10.pep
RGPPGGNLKGFLGSPIKIWFSPNLGGATGGGFFLPKPGKLLNKNFPNLFWGGPNKGGPPPRFFPLSFKGEGFSKIKKLGGWIFSAPVWYFPGFSPPWSGIKGGAPGFKKKNPFLRLGAKNFSPLSG

SEQ ID NO: 107044 - protein, 81 aa, Gossypium hirsutum
  Clone ID: LIB3826-002-Q1-N6-G11.pep
NPLFFFTCPAFPLLHPYLNKFCLYMPLTLCIFEKPHVLPIFSSNTKPQGIDPSSHTFVHIFYPICHIDSHWLPSLELLLVQ

SEQ ID NO: 107045 - protein, 93 aa, Gossypium hirsutum
  Clone ID: LIB3826-002-Q1-N6-G4.pep
NHPMIVVDPMPKPNFFRKHVPRNDADFMETEDINWPYEKKIDSEKGQGRENDDDDDDAPPHDERDDAGEPTHSRGFERGLPKEAKASSLMNPP

SEQ ID NO: 107046 - protein, 73 aa, Gossypium hirsutum
  Clone ID: LIB3827-002-Q1-K6-B5.pep
FFVSSYKCKLVFKILEEIYYYLIFSSQPNSSAQTHVIAPAANVTDTQGGSRLMPEPAWSTKNIHPKPQAPAYS

SEQ ID NO: 107047 - protein, 188 aa, Gossypium hirsutum
  unsure (1)..(188): unsure at all Xaa locations
  Clone ID: LIB3827-002-Q1-K6-C5.pep
PGRPASGLSSFQPSKIGLLGSKWPTIPALGWPWRSGSQAXNSVRSPFLGWFXHFXTAWEYGVQESVGHGVKAXXHAGVERRDLFITSKLWCTVLCPERVXPALLNTLQQLQLEYLDLYLIHWPFRLXDXAGXPPKXGVVPEMDMEGVWREMEDLXKDKLVXDIGVCYFXLLXMNKLLXGFAWALPSVC

SEQ ID NO: 107048 - protein, 143 aa, Gossypium hirsutum
  Clone ID: LIB3827-002-Q1-K6-F11.pep
MPPISQLLLFTQDIQTGMTLLEGCMHEVLYRFHFSPSASTGADLSLKSYTSLLNVAQLPSSSLWHNRLGHPCNTVLACVLKACDIFFKQSDLQQVCTACQLGKAHKLHFPATHTVYSLPFELVVSNVWGPAHLSSNGFSYYVS

SEQ ID NO: 107049 - protein, 202 aa, Gossypium hirsutum
  unsure (1)..(202): unsure at all Xaa locations
  Clone ID: LIB3827-002-Q1-K6-F5.pep
LKRLHINEEYEDXGCNKIGVAIVQSALLRRLILTASSSKVLGNAVKLLSTLNKEAADKGDFTDLIIISKDQFPEVARARKALQLAKEKLDNLIGLYRKQFRNHKLEFTCVSGTTHLVELSIDAKVPSNWVKVSSXKKTVRYHPPEVLTALDQLRLANEELTIICRAAWGSFLMEFGEYYMDXQAAVQALATLDCLHSLAILS

SEQ ID NO: 107050 - protein, 60 aa, Gossypium hirsutum
  unsure (1)..(60): unsure at all Xaa locations
  Clone ID: LIB3827-002-Q1-K6-H2.pep
CSERDLDDIHDEVAXIIKEDXWPNPLTYFNXEAXEEDSXGDEEGKDEDDQDDEDEDEDDD

SEQ ID NO: 107051 - protein, 56 aa, Gossypium hirsutum
  unsure (1)..(56): unsure at all Xaa locations
  Clone ID: LIB3827-002-Q1-K6-H4.pep
AGLTMSSHRQQHAAIILSFDFCFLLWVFFFIIELYSLRSLXARLRILMAAFPLLXV

SEQ ID NO: 107052 - protein, 76 aa, Gossypium hirsutum
  Clone ID: LIB3827-002-Q1-K6-H7.pep
VKLSPFSIFFFPKRVENFFPVFRPRKVPQFFFLKTLNKGFNEGKRPIWFNQKLGKVHFAWPKALPRTQNSFLFSQV

SEQ ID NO: 107053 - protein, 127 aa, Gossypium hirsutum
  Clone ID: LIB3827-002-Q1-N6-A9.pep
MKRVSSANVFSTIATTTLLTSPYRPPDKGNCKSNNVKVMGNKKTGVHGNVADYHVFNGGVHSGKPSFMKWTLNDVVNVVRSHRIPCVFAVGMVFFMYVEYTIRMVPHSSPPLDWGFLLTRSFHRALA

SEQ ID NO: 107054 - protein, 85 aa, Gossypium hirsutum
  Clone ID: LIB3827-002-Q1-N6-B3.pep
NYWKAIAELIPHEVPTIEKRGKKDKEKKPSIVVIQGPKPGKPTDLSRMRQILVKLKHSPPPHLKPQMPPPPKVAAVTNTETVSAA

SEQ ID NO: 107055 - protein, 41 aa, Gossypium hirsutum
  Clone ID: LIB3827-002-Q1-N6-B5.pep
IYKEHKNFEQIVTFKFLHYNLVKKQKINLVQSAGENHASTI

SEQ ID NO: 107056 - protein, 185 aa, Gossypium hirsutum
  Clone ID: LIB3827-002-Q1-N6-F11.pep
MINGLLLSLLVVSSLAMTATFGRDDVILKEGHRFIVVEYDQDGKHNTKVSISSPSLHQQTDQGQYFGKETMKDIASALPNVGHVVATSRHSSNTREAEHLQGNGSFCSQAVHYFSKHDTIKLALHNFLLWQHQLLLILERYGLEGFVLARQRELLTEALSQANLASRQQDNEGGSKQSVESTRYS

SEQ ID NO: 107057 - protein, 139 aa, Gossypium hirsutum
  Clone ID: LIB3827-002-Q1-N6-F7.pep
KGPSPPQIDAVPPPPPGGGPFLPLEGFTPPGPPIGFRIPIPLFFFFTPVFFPPPIPISMAGAVFFSSGPFGFTGLFSPNYGFKPLIRPTPPPRVLKGPPKKGILALVENVGPNLETQAPKGGGPFWPKMALSIPVGNLF

SEQ ID NO: 107058 - protein, 52 aa, Gossypium hirsutum
  Clone ID: LIB3827-002-Q1-N6-G4.pep
TLLYANQEQDFGCYQSNRELLENFPDKPIYIPAYINALRRKNSHWQIPILSS

SEQ ID NO: 107059 - protein, 56 aa, Gossypium hirsutum
  Clone ID: LIB3828-002-Q1-K6-A8.pep
SHLGSPNVMTFVSYTILRVRMRLSVNITLSILACIYSFNIHNNSMKNKYLKTFICI

SEQ ID NO: 107060 - protein, 62 aa, Gossypium hirsutum
  unsure (1)..(62): unsure at all Xaa locations
  Clone ID: LIB3828-002-Q1-K6-B10.pep
KKXLFFLIFFFFFFFFFFFFFFFFFFFFFFFFFFFFFFFFFFNTNKRTSTLCCTDLLIYCNS

SEQ ID NO: 107061 - protein, 57 aa, Gossypium hirsutum
  Clone ID: LIB3828-002-Q1-K6-D1.pep
ISLFFVVCDPFGLFFTQPTRDLELFESYSKSLLIFNGLFMFLCSMLFPSYWFRDILL

SEQ ID NO: 107062 - protein, 213 aa, Gossypium hirsutum
  unsure (1)..(213): unsure at all Xaa locations
  Clone ID: LIB3828-002-Q1-K6-D11.pep
VERVGNINWITVHTKPCPQCHKPVEKXGGCNLVSCICGQAFCWLCGGATGRDHTWSTIAGHSCGRYKEDQAKKTERAKRDLYRYMHYLNRYKAHTDSFKLESKLKETILEKISISEERESILRDFSWVTNGLNRLFRSRRVLSYSYPFAFYMFGEEIFVDEMTNKEREIKQHLFEDQQQQLEANVEKLSKIXEEPFDQYSDDKVTEMRMXISI

SEQ ID NO: 107063 - protein, 77 aa, Gossypium hirsutum
  unsure (1)..(77): unsure at all Xaa locations
  Clone ID: LIB3828-002-Q1-K6-D2.pep
RELQCCSIPPKKKKKKKKKKKKKKKKKKKKKKKKKKKKKXPKKKKKKKKKKKKKKKGGGLFREQIFFPRPCQLIFFF

SEQ ID NO: 107064 - protein, 201 aa, Gossypium hirsutum
  unsure (1)..(201): unsure at all Xaa locations
  Clone ID: LIB3828-002-Q1-K6-D9.pep
MMASSANGWTRVIXEKPFGRDSESSAELXTRCLKKHLTEDQIFRIDHYLGKELVENLSVLRFSNLIFEPLWSRNYIRNVQFIFSEDFGTEGRGGYFDNYGIIRDIMQNHLLQILALFAMETPVSLDAEDIRNEKVKVLRSMKPLELEDVIIGQYKGHNKGGRAYPGYTDDSTVPKNSITPTFAAAALFINNARWDGVPFLM

SEQ ID NO: 107065 - protein, 106 aa, Gossypium hirsutum
  Clone ID: LIB3828-002-Q1-K6-E1.pep
FFLYMKIKYVLPLKVFYLINKLCCQRFEKIYTNLNRRVKFILRLAEFYKPYAFFTGIFDDRNLERLQRVAEEKGIDVAEFNFDSKSIDWEDYIMNSHIPGLFNQGL

SEQ ID NO: 107066 - protein, 103 aa, Gossypium hirsutum
  Clone ID: LIB3828-002-Q1-K6-E11.pep
MTWFFETGGSLGNQCLCPFRWTGLSPALVVGGWAFPIWRLAFPPNTWGGGVAFLASCWSRDPAQRPSFGSFVITLNEVASSALSLCAPVLCLCGCGSLPLIAA

SEQ ID NO: 107067 - protein, 218 aa, Gossypium hirsutum
  Clone ID: LIB3828-002-Q1-K6-G5.pep
YGRLVGRLFEPISELDVGLFSLLGAASFLGGTMRMTVSLCVILLELTNDLLMLPLVMLVLLISKTMGDMFNKGVYDQIVKLKGLPYMEAHPEPYMKHLIARDVVTGPLITFSGVEKVGNILHALKNTGHNGFPVIDEPPFSDAPELCGLVLRSKLLVLLKGKAFSKDMVLAGNKVLSKISELDFAKAGSGKGLKLEDLDIQEEEWDMYVDLHPIANTS

SEQ ID NO: 107068 - protein, 82 aa, Gossypium hirsutum
  unsure (1)..(82): unsure at all Xaa locations
  Clone ID: LIB3828-002-Q1-K6-G6.pep
LXTAMAACAQLLLVRYKEQSDGLVARCDAEVPGSIVVRPKRKLDHAWMVYSSLRDDPSEAGAAQVCETLLTLLVEVGXEKKT

SEQ ID NO: 107069 - protein, 58 aa, Gossypium hirsutum
  Clone ID: LIB3828-002-Q1-N6-A8.pep
ISYHIAIHTINQIPFHHHYFQVKLIWLDPQLKIYHNDISLYMSYTIFTKIQKYQLIDR

SEQ ID NO: 107070 - protein, 103 aa, Gossypium hirsutum
  Clone ID: LIB3828-002-Q1-N6-C2.pep
HSLPYHMIEFVLEDSDCKVTVSLRYPDLVSVLPTRVKVLAWPMHQYKKSHTSSAGAMGSQPIPARLSYAEDALRTMSLPEAYAEIVLNLQQALQQMFQGGSPC

SEQ ID NO: 107071 - protein, 114 aa, Gossypium hirsutum
  Clone ID: LIB3828-002-Q1-N6-D11.pep
INLTVITDTLCKKMYECIENDLLGSLQCNTHNIAPYKSKGIEKASELAVCWNSKPSTTEKCVASDSGTSGKRDRPFGFGSSEDSGCPSQRRPKKETYGGVFFDISMPADVLHRN

SEQ ID NO: 107072 - protein, 103 aa, Gossypium hirsutum
  Clone ID: LIB3828-002-Q1-N6-F3.pep
NQGPIFGHLRNPSWNPFKQIRATLITPRIMLIFYGTLPGKIPVSLFTLPKTLKPKKKKGNKKYFRNITLWSKSYGPLLSPPLVCFLFPLFFFPIFVSQSRKKK

SEQ ID NO: 107073 - protein, 56 aa, Gossypium hirsutum
  Clone ID: LIB3828-002-Q1-N6-F5.pep
LKIKQYNYCSKGQTGKTGGVTKYTHFFLQVYEYENKIKFYTIVKIKGGHYFQIIFA

SEQ ID NO: 107074 - protein, 63 aa, Gossypium hirsutum
  Clone ID: LIB3828-002-Q1-N6-G5.pep
TFGFLFLMLECMQSCCWQPLNIIAMEFVVGVVGGFTFYNEHGDDDFVFIVAFFFFIKSKKSSY

SEQ ID NO: 107075 - protein, 88 aa, Gossypium hirsutum
  Clone ID: LIB3828-002-Q1-N6-H11.pep
KFLVMIPMPLKAEMKKRFLIFKMSLMLNQIIWMKTRMKNLHPWNRNRLNSSQSVECIVEWQQRIWGIDFRSLKDSTQLYFVWILRYGL

SEQ ID NO: 107076 - protein, 79 aa, Gossypium hirsutum
  Clone ID: LIB3828-002-Q1-N6-H7.pep
LLHQEGAREVYAFCTHAVFSPPAIERLSGGVFQEVIITNTLPVAEKNYFPQLTVLSVANLLGETIWRVHDDCSVSSIFL

SEQ ID NO: 107077 - protein, 138 aa, Gossypium hirsutum
  unsure (1)..(138): unsure at all Xaa locations
  Clone ID: LIB3829-002-Q1-K6-B2.pep
MEEMSPAVAVTLSLGNSMGDNSGITAHVEITPIKLVTDAASLSKMLPKNGNGSIAPSESMVQESEEDVILSVDTNGIINEGLLVLNAGSDISLQNAEIESGRILAKAIIXGESSIEQVPTAEVLLTTVSSRFKDFWWV

SEQ ID NO: 107078 - protein, 179 aa, Gossypium hirsutum
  unsure (1)..(179): unsure at all Xaa locations
  Clone ID: LIB3829-002-Q1-K6-C7.pep
XXLKHSEAKFLFVDYEFLHIAEGAXENLSNTSAKLPQLVLIPDHDRQVPSRSNTNSTSANLDYDSLLAMGKLDFDIRRPEDEWEPISLNYTSGTTSSPKGVIYSHRGAYLNSLATILLNEMPSMPVYLWTVPMFHCNGWCLTWGVAAQGGTNVCLRNVSAGGIFSNIAKYRXTHMGGAP

SEQ ID NO: 107079 - protein, 175 aa, Gossypium hirsutum
  Clone ID: LIB3829-002-Q1-K6-D10.pep
MGNFYCLYLVLLLFCFGFFVNTLSQADSSSDAITAVYIVSLKQAPAAHYFEEQLRRHNRHGHGFHHNSSSSGRLNRLHKPRNNSRYHPSSGSYISRVHHSLLRRALRGEKYLKLYSYHYLINGFAVLVTPEQANKLSKRREVANVVLDFSVRTATTHTPQFLGLPKGAWSPAGDM

SEQ ID NO: 107080 - protein, 57 aa, Gossypium hirsutum
  Clone ID: LIB3829-002-Q1-K6-D8.pep
QKQMNVLYASFHNLSQKLNEYYLRQTRIKTIDATSSNYTKSQNSSFLVPLGFITSSR

SEQ ID NO: 107081 - protein, 145 aa, Gossypium hirsutum
  unsure (1)..(145): unsure at all Xaa locations
  Clone ID: LIB3829-002-Q1-K6-E11.pep
APLAHIMIAGAVDIADPYRFHPCCLIHLLAMLYATLXIAASTGGLADTLNERFTGXQMGAQNGECNEECPKDDTNEVKTVKKTVATYGTQSLKEMIQNSMQHDFSXMDHQRYHKRCCXNLLVTLSEPGIERDEEGPVANENADTP

SEQ ID NO: 107082 - protein, 65 aa, Gossypium hirsutum
  Clone ID: LIB3829-002-Q1-K6-F11.pep
DGHIVIVHGAWGHFIAGWCYTVRIKQYQAKDWTPHYKKLQPGIPPQERQGILYPRDVAWLYQHET

SEQ ID NO: 107083 - protein, 202 aa, Gossypium hirsutum
  unsure (1)..(202): unsure at all Xaa locations
  Clone ID: LIB3829-002-Q1-K6-F7.pep
KNPSEFMQPFCDAVTEAAKGIDPKXLKEGETLHVGFEGPFVSRRVTPRDLLSEFIGSMVCVVGIVTKCSLVRPKVVKSVHFCPATENFTVREYRDITSNNGLPTGSVYPTRDENGNLLVTEYGLCQYKDHQTLSIQEVPENAAPGQLPRTVDVIVEDDLVDSCKPGDRVATVGLYKALPGKSXGSVNGVFRTVLIANNVSLL

SEQ ID NO: 107084 - protein, 60 aa, Gossypium hirsutum
  Clone ID: LIB3829-002-Q1-N6-A1.pep
IPQTGVPFLSLVVPLKMPFSLTKTPSSLASQSLSFHANHAPKALPSKHVLKSLVNLKKGT

SEQ ID NO: 107085 - protein, 98 aa, Gossypium hirsutum
  Clone ID: LIB3829-002-Q1-N6-B2.pep
MSPGPGLESLVDQTISVITNDGRNIVGVLKGFDQATNIILDESHERVYSTKEGVQQLVLGLYIIRGDNISVVGELDEELDSALDLSNLRAPPLKPVIH

SEQ ID NO: 107086 - protein, 89 aa, Gossypium hirsutum
  Clone ID: LIB3829-002-Q1-N6-B4.pep
NQAKPASQVLQAAERNMTDASQLNYDFRNPFVTCGATYVPIYRGQKDVSCPYCTARFVPTQGGQLCTVCDLAVVGADASGLLCSPSQVR

SEQ ID NO: 107087 - protein, 52 aa, Gossypium hirsutum
  Clone ID: LIB3829-002-Q1-N6-C7.pep
IKYCRDNLPHYMTPRTVVFQDLPKTSTGKTQKYVLREKAKALGSMSKSKSKL

SEQ ID NO: 107088 - protein, 135 aa, Gossypium hirsutum
  Clone ID: LIB3829-002-Q1-N6-D10.pep
YEDYMSFLCGINGSGPVVLNYTGQNCWVYNSTIGSADLNLPSITISRLQQSKTVERTVTNTAGNETYKVGWSAPYGVSVKVTPTRFFIGTGEKQILTIMFNATMNNSVASFGRIGLFGDQGHKLNIPLSVILKFS

SEQ ID NO: 107089 - protein, 80 aa, Gossypium hirsutum
  Clone ID: LIB3829-002-Q1-N6-D7.pep
EDEDEEEYDGTDPDDDEDAFNVHAHAEDGDEDNNPSAELDPAAFSSDEAFARALQDAEEREMAARLLALAGINDSESLLL

SEQ ID NO: 107090 - protein, 120 aa, Gossypium hirsutum
  Clone ID: LIB3829-002-Q1-N6-F4.pep
FGPPAKKSFSSGFFPGVFFPTPFPVLEQNFFFQLAVLFVANLLGGTIWGVFDDCFGGFYPFAPLGIVFFFPMLLEFFFGTANHFFCSIGGLGGFFFFPKVFLMNVMPQLKGIIFFFSSLG

SEQ ID NO: 107091 - protein, 74 aa, Gossypium hirsutum
  Clone ID: LIB3829-002-Q1-N6-G8.pep
LIFFLFRMICPRGIAMPSAPVREEIDSLLEATPLFPHPGKVIGRLDQVLQFDSPSGDGKGRKVKELLKQCPILI

SEQ ID NO: 107092 - protein, 34 aa, Gossypium hirsutum
  Clone ID: LIB3829-002-Q1-N6-H12.pep
VFFFFFFFFFFFFFFFFFFFFFFFFYINKSPIKN

SEQ ID NO: 107093 - protein, 51 aa, Gossypium hirsutum
  Clone ID: LIB3829-002-Q1-N6-H9.pep
AKLEALILIHHLVTKFRWEVVGSESGIQYGPFPVPQQGLPARFWKQSSCPS

SEQ ID NO: 107094 - protein, 74 aa, Gossypium hirsutum
  Clone ID: LIB3831-002-Q1-K6-A10.pep
RRRQIILELKVVDVYHTFIFSAGQTLIHAIHPPSLLSIINNPLPINNLILIFFFFGGGGGVTLTGGNCKKVIRL

SEQ ID NO: 107095 - protein, 161 aa, Gossypium hirsutum
  unsure (1)..(161): unsure at all Xaa locations
  Clone ID: LIB3831-002-Q1-K6-A4.pep
MQQNGGSDSLTEQNQRPQQQPPPQPHPQWVAMQYPPTAAAAMVMQHQMMQPQHFVAPPPPPPQHYVPYHHQYHHHGHALSQQQQQGSGGGGENKTVWVGDLHHWMDENYLHSCFASTGEIVSIKVIRNKQTGLSEGYGFVEXFSHAXGRKSLQXYSGMLMP

SEQ ID NO: 107096 - protein, 205 aa, Gossypium hirsutum
  Clone ID: LIB3831-002-Q1-K6-A8.pep
RGLCYEPPRFPSLDIPFFSCDLISSGSDKQQEYSPFGIRQLMMSSMNCISPFRLSDSPLWDDSPDAKLKSAAKTFTGTPSILKKRHRDLLSPLSERRCGKKLETDMTSNLSKEFSCLDVMLDASGTGNTSQESPSECKTKSGVFIEEKENLCQAVDQEQYNGVDHTEPLDDEGQKKDSNGINSQGDIEKEACVTDAKDKTYANAS

SEQ ID NO: 107097 - protein, 212 aa, Gossypium hirsutum
  Clone ID: LIB3831-002-Q1-K6-B7.pep
RCQSAYHSYRQGIHPPPTFGSSSNLEAVALQARIYHVEDGGSAVNSTSGPFRPMHEITFSTGDRPKLLSQLTSLLAEIGLNIQEAHAFSTTDGYSLDVFVVDGWPSEEIEELKNALEKEISKSKLQEQSYSRKSSVMTEHVKERVVSLPSCVEIPTDGTDVWEIDARQLKIENRIASGSYADLYRGTYCSQEVAIKVLKPEQITREMLREFS

SEQ ID NO: 107098 - protein, 196 aa, Gossypium hirsutum
  Clone ID: LIB3831-002-Q1-K6-D4.pep
VARWKESLTGTLSLTADDIAMITDGQFAIDLFSHIKVLQITEYIKDSVVVPFHFFRRFSNLQKLKMVGCNFKEFSPYEGDVGEERDVVTMLPRIKKLTLQGVDNMEHLWKQDSPFHHICANLETLKVSECDSVISLSCASSSFQNLTTLDVWNCKEMVELITSSKAQCLEQLVTLKIGGCEMMREELQVMEMKHTS

SEQ ID NO: 107099 - protein, 130 aa, Gossypium hirsutum
  unsure (1)..(130): unsure at all Xaa locations
  Clone ID: LIB3831-002-Q1-K6-D7.pep
HANGPPNGAENPGGHPKGFPMPPASLAPYPDPNPDAMTAHGPVHRXPAEAPPHVPQPLTAGCGAGRANGGAPIARHLXHQQSTQTIIATIESSLNNPKENPYRQASLGGPLSETEVHNTGQRPSETFREG

SEQ ID NO: 107100 - protein, 184 aa, Gossypium hirsutum
  unsure (1)..(184): unsure at all Xaa locations
  Clone ID: LIB3831-002-Q1-K6-E5.pep
MFGPPRLRSMNTADSEARPVLGPAGNKTGSLRARKPGSKPSRKIEKCSAEATLAEEKNGLPSSKVNSHSVSVVPSVLRRHEQLLHSNLTLNASCSSDASTDSFHSRASTGRLIWSNSVGTRRKPFPSTPTSVVSDGGLDSLPGDSHRRKRCAWVTPNTDPSYVAFHDEEWGVPVHDDXKLFELL

SEQ ID NO: 107101 - protein, 208 aa, Gossypium hirsutum
  unsure (1)..(208): unsure at all Xaa locations
  Clone ID: LIB3831-002-Q1-K6-F3.pep
LSLSILVLIAIFGSCWSREVVSDNDDGGLYPFIGTNRETLEIIIGGGGGEAPAPSPEDCPPPPPEPECPPPASPPPPPPPPPPPPPPQIRKPKPKPKPKPKPKPTPKPPPKPPPRPPSKCGYRSSNLCFENELLATSYGVIQKFKKLIKPDENGKRYTKTWNGPNVCKYKGFNCDVRPDVKKXTVAAVDFNGAKLSGINGSLPLHDFI

SEQ ID NO: 107102 - protein, 41 aa, Gossypium hirsutum
  Clone ID: LIB3831-002-Q1-K6-G4.pep
NRIQYIGKIMNYFYFKSLRRRKTVGLNSLPQYESNLLGGNK

SEQ ID NO: 107103 - protein, 93 aa, Gossypium hirsutum
  Clone ID: LIB3831-002-Q1-K6-H5.pep
GIMIVNNTLASKSTGPSKQRGKEFTKLTKEMSASYFQLRSLCLQNLKRGQGKECNLCQDTTLLRQRTIHYERSLAQRWARLPLNILFLDNKFF

SEQ ID NO: 107104 - protein, 115 aa, Gossypium hirsutum
  Clone ID: LIB3831-002-Q1-K6-H8.pep
GDQRMFVMDIAGLSDMQKEKQKILVQGCNMIVYNCITTTIVLSQLLPHHISSPSSTQFPSKNKKKWKLQKPNKPSFQENQNTLQNPNLQEKKLQTCRVLQSLLVFLYIFTQSKYK

SEQ ID NO: 107105 - protein, 61 aa, Gossypium hirsutum
  Clone ID: LIB3831-002-Q1-N6-A11.pep
LKLFRVKKRQDCGKIRILLNQIGKFIPTQFLSLHFEKNQQTFQYKGSFESMRQQNMMKKTM

SEQ ID NO: 107106 - protein, 84 aa, Gossypium hirsutum
  Clone ID: LIB3831-002-Q1-N6-B7.pep
GGKLPLKKVPNKGKNGCKIKFFKAFFSPVKKRIFLKKSVVSLKEKKKGFGKFFLWFFFFWGWGMSSIMHNKRVIQFLKLLLPFP

SEQ ID NO: 107107 - protein, 38 aa, Gossypium hirsutum
  Clone ID: LIB3831-002-Q1-N6-B8.pep
KLCLINSSPYQPPFLVFPLKKMSFFFPIRFFFPSTKKG

SEQ ID NO: 107108 - protein, 60 aa, Gossypium hirsutum
  Clone ID: LIB3831-002-Q1-N6-C10.pep
LKLEFNFVSQHKSYKLQVHLLPRLSDPQFINLHHQSFHHHYYNHCYHHLDQECRAQHVAP

SEQ ID NO: 107109 - protein, 135 aa, Gossypium hirsutum
  Clone ID: LIB3831-002-Q1-N6-D4.pep
KHKECLNYNPKNIKPSSLQSQDSGVAHKKLPFKNLTKIPHLLAFHFEIIISLQLFNELHHPASCSYRLSSSVSSNGSHSSLFNCSMVALRSQHLLTPLSVSTSCSFGVLKAPLQKISIAGQKLTSTSSNDGNFKV

SEQ ID NO: 107110 - protein, 56 aa, Gossypium hirsutum
  Clone ID: LIB3831-002-Q1-N6-E9.pep
PPKKVPSPPKGPAKENPFPPTCGAPPPPFFFSPKPSSPPNFLPPPGAPGPTEKKAP

SEQ ID NO: 107111 - protein, 113 aa, Gossypium hirsutum
  Clone ID: LIB3831-002-Q1-N6-F5.pep
RVVGGGVAGLLIAASPVQVVIGSFVPGNQHDQKSKKQKNESLPATLAPNPATVDLPASNAEKEDGIGVQHSQQNSNTLKQNFATTASFRTENWANIQEPRNSATDINISLPAV

SEQ ID NO: 107112 - protein, 51 aa, Gossypium hirsutum
  Clone ID: LIB3831-002-Q1-N6-G4.pep
NRIQYIGKIMNYFYLKSLPRRKTGGEANCPSLKATFSEETSEKAWAINGSK

SEQ ID NO: 107113 - protein, 36 aa, Gossypium hirsutum
  Clone ID: LIB3831-002-Q1-N6-H4.pep
VFGAPINQKSFRIWKESFQAATRELQRIYGKEELNL

SEQ ID NO: 107114 - protein, 145 aa, Gossypium hirsutum
  Clone ID: LIB3831-002-Q1-N6-H7.pep
IVGEHGDSSVALWSSISIGEVPVLSFLKNQQIAYEKQTLENIHKAVVESAYEVISLKGYTSWAIGYSVANLARSLLRDQRKIHPVSVLAKGFYGIDGGEVFLSLPAQLGRGGVLGVTNIHLTDEEVQRLRKSAETILEVPSQLGL

SEQ ID NO: 107115 - protein, 177 aa, Gossypium hirsutum
  unsure (1)..(177): unsure at all Xaa locations
  Clone ID: LIB3825-002-Q1-N6-A11.pep
FFFFFFFFFFFFFFFFFFFFFIFFKFLFCFILKNKKKKKKKKKKKKKKKKKKKKKKNSVVKKKKKKKKKKKKTPPKKKKKKKKKKKKHKKKKKNRKSASQNQRNKKKTRXKKKTWTRKTGTPKKKRAPKRRKKWGKKWITKRAEHKIVRTLGRTRESRPEPGSVPACQEGSPKRNWP

SEQ ID NO: 107116 - protein, 78 aa, Gossypium hirsutum
  Clone ID: LIB3825-002-Q1-N6-A3.pep
RVTTGIFTHFTTPQLIFSFFFPAPWNSISNQKTPWGFLTLNLSHELQPQIAFFFWPFFFYFKSASFFFRQPPFWMLQS

SEQ ID NO: 107117 - protein, 67 aa, Gossypium hirsutum
  Clone ID: LIB3825-002-Q1-N6-B1.pep
QPQKKSNNPPPQKETTNNLKKKGRPGETKETMEEISRHTHHPNHTRLDLMHKSRKKIPTIFIFLKLH

SEQ ID NO: 107118 - protein, 88 aa, Gossypium hirsutum
  Clone ID: LIB3825-002-Q1-N6-B10.pep
KANCFIAMGGSLACPYWPFLICRGEVQGCSNAGLVWFTNDQKGFLEDISFSIHLSVTPDYIVISGKCEILDFILSVFLIIGSASTPCC

SEQ ID NO: 107119 - protein, 100 aa, Gossypium hirsutum
  Clone ID: LIB3825-002-Q1-N6-B7.pep
SLDNQILIYSTRERFQLNKKKRFAGHIVAGYACQVNFSPDGRFVMSGDGEGKCWFWDWKSCKVFRTLKCHEGVCIGCEWHPLEQSKVATCGWDGLIKYWD

SEQ ID NO: 107120 - protein, 48 aa, Gossypium hirsutum
  Clone ID: LIB3825-002-Q1-N6-D1.pep
TRVFFNKKGNTQAPLLILAAKTNGKKLFSQKIKGEVENPTPPTWKTQG

SEQ ID NO: 107121 - protein, 77 aa, Gossypium hirsutum
  Clone ID: LIB3825-002-Q1-N6-D4.pep
MGTKIVSMTCMPRKIIFIYMGYRKNSSCKNLHSKIWPLTKHSMCTLHLQFQVYRCRGPSVLIRELPPATLLKTSIST

SEQ ID NO: 107122 - protein, 100 aa, Gossypium hirsutum
  Clone ID: LIB3825-002-Q1-N6-E3.pep
LASHDKGIFPHSVLSSQQISSISAHLPNSIEELEKIIGKLKTEKYGGRILEEVKKYGNAEHPNNEVLNEEESSEIRPPRKKLKKANKQVIMVDSSNDESD

SEQ ID NO: 107123 - protein, 169 aa, Gossypium hirsutum
  Clone ID: LIB3825-002-Q1-N6-E4.pep
ELDWGNEDHIKAVGPPFDYVIGTDVVYAEHLVGPLLQTIITLSGPKTTIMLGHEIRSTSVHEQMLLTWKNFFEVKIVSKAKMDSKYQHPSIQLFIMGLKPPPVTADSAVCTEKQEKTDWGIDDQVNKTEISSSVDDLLVTRLPDGKLSEWYARRYGSMAARLLRDIKIT

SEQ ID NO: 107124 - protein, 156 aa, Gossypium hirsutum
  unsure (1)..(156): unsure at all Xaa locations
  Clone ID: LIB3825-002-Q1-N6-F1.pep
FYDSLITQMGKEKTQKYIYIKSQNFLGSSSITEAKPVTNVIPICELLGFISGGFHSSFSTFSFSSSSELSDKANMDSPNSASSTEYLSSEFNSVKGCWSFSLALESNSDSLSVPXVGVGVGVGSNWEEGNGVAXLLGESHLALTYSAXRHGGICIP

SEQ ID NO: 107125 - protein, 101 aa, Gossypium hirsutum
  Clone ID: LIB3825-002-Q1-N6-F2.pep
IMVPGTERLRVQLEVNMPARANHKLPQNESDSAEVELFEVNNVILYMGIIDILQEYNAKKKAEHAYKSVKFGPPTISVVEPELYANRFTNFLKQKVFPGHP

SEQ ID NO: 107126 - protein, 126 aa, Gossypium hirsutum
  Clone ID: LIB3825-002-Q1-N6-F3.pep
GGLEIFPKRVKRGPGNSPKRGETNPTGAKKKRGGKPNRAGPGIDRGPTVPVPREKGDPPRPGPGGPPGKPGPGPEGAPPFPGRGGIKGGGGNGQKCPPGEKGVPPQVPPGGAPGGERGKPGGAKGG

SEQ ID NO: 107127 - protein, 41 aa, Gossypium hirsutum
  Clone ID: LIB3825-002-Q1-N6-F5.pep
MEMMLQKRIASSATNFPLIHIKLHQILGYDTTAKTKSRFFS

SEQ ID NO: 107128 - protein, 60 aa, Gossypium hirsutum
  unsure (1)..(60): unsure at all Xaa locations
  Clone ID: LIB3825-002-Q1-N6-F6.pep
SVKVLFFWLDIVXVIHDGDEMEFSVGIASANFPSDNFYESPQCGCGFDCNRFNAFAAASI

SEQ ID NO: 107129 - protein, 105 aa, Gossypium hirsutum
  unsure (1)..(105): unsure at all Xaa locations
  Clone ID: LIB3825-002-Q1-N6-G10.pep
SPSKNPPVIPPLFLSFPSLFTPPPFPFLPFFFLFPXKFTPNRGGPQKTPIPFPPPVMEGTLYGEGWPPPGPRPEIPGRPRAPPFLRVVFLTHLGLPNNRPKIVXP

SEQ ID NO: 107130 - protein, 61 aa, Gossypium hirsutum
  Clone ID: LIB3825-002-Q1-N6-H11.pep
KTKRMETTKSLKPDEHLNSIGITCMPSETNRNVIHQQYYSNYKSLSPAETIFTNIYHAETS

SEQ ID NO: 107131 - protein, 87 aa, Gossypium hirsutum
  Clone ID: LIB3825-002-Q1-N6-H3.pep
WGITGVLVLSHSGLVLISGGETINRAPWFLVTRRGIIWANVVFPWPHILWGKKTRPFVRPNELIRGSNRGVNLGFFTHRAFGLTFGG

SEQ ID NO: 107132 - protein, 62 aa, Gossypium hirsutum
  Clone ID: LIB3825-002-Q1-N6-H7.pep
FFFFFFFFFFFFFFFFFFFFFFFFFFFFFFFFFFFFFFFFFFGPRGAPGEFGPGPGGVFFFP

SEQ ID NO: 107133 - protein, 110 aa, Gossypium hirsutum
  unsure (1)..(110): unsure at all Xaa locations
  Clone ID: LIB3825-002-Q1-N6-H8.pep
SXLRVMFNFSKQRGSPQTTLIQATFTNLSSNVXNDFXFQAAVPKFLQLHLDPASSNTLPASGDGSITQNLKVTNSQHGKKSLVMRVRIAYKTNNKDVLEERQINNFPQNL

SEQ ID NO: 107134 - protein, 39 aa, Gossypium hirsutum
  unsure (1)..(39): unsure at all Xaa locations
  Clone ID: LIB3830-002-Q1-K6-A10.pep
KMTSLPSPFCLIRAMTRCSLILVMLIGFSLRKSAAXRII

SEQ ID NO: 107135 - protein, 77 aa, Gossypium hirsutum
  Clone ID: LIB3830-002-Q1-K6-B5.pep
PFHFINLEPVVFSFPVFSKHAQELFHPGNGLHLLSTLPLQSHEQRCFLTLEYGGSVVFGEMLHILNFLYIALILSYL

SEQ ID NO: 107136 - protein, 159 aa, Gossypium hirsutum
  Clone ID: LIB3830-002-Q1-K6-D12.pep
LNGKPVKDEYVLEPIENITSANYVLGDPYLDVTSYLSTNDELFLEANDFSNPIYPESELFDINEYLSFDDADDQSLAFDYDEIVGSEIPVSGQEPLTETHTNEGTEQDLNAGEHVEEHGNSDASSSKQELEATEFDLGTKYPFMKRASHMLGSLPAPPA

SEQ ID NO: 107137 - protein, 212 aa, Gossypium hirsutum
  unsure (1)..(212): unsure at all Xaa locations
  Clone ID: LIB3830-002-Q1-K6-D5.pep
QTQNKLSENSQKVSRTRDFIPENMHLEDNEEEVGFNLKSSAPSRSHGVQPLGNLYFNPGAINSRNIGLGTLQILSDELVLEILGLLEGTQLGVLATVSKSFYVFTSHEPLWRNLVLDNLKGRFFYNRSWKVTYISTFHPSFDVSRSARSSGLRVRDFYSDYLFQSWLCANLEMKPEWLERXNIIRKRGXSVDDXLTNFEEPKIAVXLEGCMD

SEQ ID NO: 107138 - protein, 77 aa, Gossypium hirsutum
  Clone ID: LIB3825-001-Q1-K6-A11.pep
RKKKKKKKKKKKKKKKKKKKKKKKKKKKKKKKKKKKKKKKKKKKKKKKKKKKKGGGFFGVQIFGPGFCKFFFFFWGP

SEQ ID NO: 107139 - protein, 93 aa, Gossypium hirsutum
  Clone ID: LIB3825-001-Q1-K6-A12.pep
KVLLTRCSPICLPKLFKDLKDKKIDTILHSIDMGPLLQMKSRSMRREVIIYLIERFDAENCAIKVDSHNITLTVEDVASILDLKMMGSMCPLF

SEQ ID NO: 107140 - protein, 204 aa, Gossypium hirsutum
  unsure (1)..(204): unsure at all Xaa locations
  Clone ID: LIB3825-001-Q1-K6-A7.pep
FDQLMGTLPAASYKALPEEYGKLMTDPSSPIYNFYPTDFEIDMHGKRFAWQGVVKLPFIDEKKLLSATXYLEATLTAEEQIRNSVMLDLLYVHPLHPLASQVISYYQMYHHVRPHERFLWPIDTNASGGMNGFLWLSERNGWQHVVSSPVKGLPHIEFNQVLNVTYLNPSHHRHIPRLPQGVLVPKKVLTPLDIKPFXVLWHED

SEQ ID NO: 107141 - protein, 53 aa, Gossypium hirsutum
  unsure (1)..(53): unsure at all Xaa locations
  Clone ID: LIB3825-001-Q1-K6-A8.pep
METQSPNGSLQKQSLPPKNYGITKPISLAXPSEADIQRNTELEKFLIESXLYE

SEQ ID NO: 107142 - protein, 213 aa, Gossypium hirsutum
  Clone ID: LIB3825-001-Q1-K6-B11.pep
ERGAKIVGVLHGDEAAVILQTNRGNLECIYPRKLVLASIVNALNQRRFRDALLMVRRHRIDFNVIVDYCGLQVFTQLASEFVKQVKNLSYITDFVCAIKHENVTEKLYKKFLSPPSCKEQKDLLTNDFKGSDASLDANNKVSLVLLAIRRALDEQVPESPARELCILTTLARSDPPALEEALERVKVIREMELSGSDDPRQVNCPSAEEALKH

SEQ ID NO: 107143 - protein, 51 aa, Gossypium hirsutum
  Clone ID: LIB3825-001-Q1-K6-C2.pep
QGMCQAYLTNTRESLLLREKRGIQGLFSLKMSPIGPRTLVPVHAGDSGALK

SEQ ID NO: 107144 - protein, 124 aa, Gossypium hirsutum
  Clone ID: LIB3825-001-Q1-K6-C3.pep
HRTKLQELKDIWTSWDEGTKQLFYQSYGDIPYLLDVKVDKRLFRGMAQFWNAAYNCFTFGEVDLVPTLEEYTTLLRSPKAQARKIYAKLTNSQTFAKRLVNISGMSESWVTAQIQQKGDSKCIP

SEQ ID NO: 107145 - protein, 181 aa, Gossypium hirsutum
  Clone ID: LIB3825-001-Q1-K6-C7.pep
FLNHIGQSCSIPNSYGPELCLQMILYDTPGVIEKKMHIFYSMMMKNVRSAALNADCVLVIVDACKVPENINEVLEEGVGDFKCTLPTLLVLNKKDLIKPGEIAKKLEWYEKFTDVDEVIPVSAKYGHGVDDIKDWILSKLPTGPPYYPKDIVSEHPERFFVSEIVREKIFMQYRNEVPYAC

SEQ ID NO: 107146 - protein, 116 aa, Gossypium hirsutum
  Clone ID: LIB3825-001-Q1-K6-C9.pep
MEVEKGKGTDVSDVQGEDDLDEEPGEEIESAPPLKVGEERELGNSGIKKKLLNNGIHWETPEFGDEVTVHFVGTLLNGIKFCSTRDNGEPITFELGEGKVAKGLDNGITTMKEGER

SEQ ID NO: 107147 - protein, 194 aa, Gossypium hirsutum
  unsure (1)..(194): unsure at all Xaa locations
  Clone ID: LIB3825-001-Q1-K6-F5.pep
MVMVLGNWLVCRLKRRLLNVNVFTVQVNLNGYSDTFSPVAKMAYVRLFISIAATYGXSLHQLDXKKNVFLHSDLQEEVYMKDPFGFVAQGESAKLCRLQKSLYDLKQSLXAWFGRFCEVIHLEVGMILLVVYVDDFVITGSDDTNILALKSYLHTXFQTKDLGQLKYFLGIEVTRSKKGILLSQRXYTLDLLEE

SEQ ID NO: 107148 - protein, 66 aa, Gossypium hirsutum
  Clone ID: LIB3825-001-Q1-N6-A12.pep
SSFKNIVQFPFHPAHYFLQSAHLTLHRNHVLIDSLFQSTHQVLHCSKLSHQCLKKHVNLTCPLQKG

SEQ ID NO: 107149 - protein, 69 aa, Gossypium hirsutum
  Clone ID: LIB3825-001-Q1-N6-A7.pep
STCRESSKMPNSRCLQNLDLLSEQNTGAAPLPPNTWMGKPVNVNPGSRLKQENASSGAYEKQMKKGLSD

SEQ ID NO: 107150 - protein, 82 aa, Gossypium hirsutum
  Clone ID: LIB3825-001-Q1-N6-B11.pep
QNSKQKPNQASRWYKYKIPMKGSMSKKLGGGILKGFFHKINNPMPALSPELLNLKMHSSYGVYSSFMPVKEKGILHSPMKNI

SEQ ID NO: 107151 - protein, 97 aa, Gossypium hirsutum
  Clone ID: LIB3825-001-Q1-N6-C3.pep
REERAKADQLEKRFQEAQAKNETLERSLAESKNEKDELRARVAELERYLCLYRNCNSVTELKASLNMIEEMKGKIEELETALQNCEMRIEFLEANEE

SEQ ID NO: 107152 - protein, 121 aa, Gossypium hirsutum
  Clone ID: LIB3825-001-Q1-N6-C6.pep
TVAANITKGPKYFFTKTTCLPLSSFSLKTKTKNYYTVCSKEIFAAEEFGFILPANAHVPLTSPRLLFPHYAPTLSTILLRFGILHPKYCYRIRKIWAGAPYNTSHSSPHNINSNHTPSLVL

SEQ ID NO: 107153 - protein, 107 aa, Gossypium hirsutum
  unsure (1)..(107): unsure at all Xaa locations
  Clone ID: LIB3825-001-Q1-N6-C8.pep
EPIWRMQQGFKNKNRTTFFFLRDNAGLCGRGXXISKGRPVLXSXLWVSCLGXXFQKYKVGLRHRATEVIILLTIYSSLISASENHIIIRVSYFNFLLQFSINTFGFF

SEQ ID NO: 107154 - protein, 138 aa, Gossypium hirsutum
  unsure (1)..(138): unsure at all Xaa locations
  Clone ID: LIB3825-001-Q1-N6-D10.pep
PFGAAGPPPSSFRPSRPPPRPPSPLLKLVTPFSGAPPPARVRFDLPNKVLFPLPPPLFYAIACLDSSSLGAISLPPMRRPPFFFAPSLFCPSPCSEFFFFFFYISHFPQAIFYPSGGGGGVFSFFCSPFLSARVVNQX

SEQ ID NO: 107155 - protein, 96 aa, Gossypium hirsutum
  unsure (1)..(96): unsure at all Xaa locations
  Clone ID: LIB3825-001-Q1-N6-D2.pep
NMARAVRGXPQILGHRKTITPDRKGLVRLFDELESGQLRETSXFSDLVQQMHKNRQGAPRKRKGPSPGIKGKARFRTEESFYENPYPECICSSKVV

SEQ ID NO: 107156 - protein, 88 aa, Gossypium hirsutum
  Clone ID: LIB3825-001-Q1-N6-E3.pep
HPGGFLEIPVWDSKTFFLNRRCFDLLWILVLNPLFKTIYFFFPKGFFLIWGGKIWPFVWGFWIFWGVNLKPPRAFFSFMRAFQNFGFF

SEQ ID NO: 107157 - protein, 171 aa, Gossypium hirsutum
  unsure (1)..(171): unsure at all Xaa locations
  Clone ID: LIB3825-001-Q1-N6-F5.pep
ECVRQFILSPTVRHWVTLEQILFYLKGALGCELLYXNCGHIGIECFTNANWGGSKMDRGSTXNFLTQSVXEIMWLQXLLEELGFKKSSPAKLWCENQAALLISSLPVFHERTKHIDVDCHFIHEKIQQKLISTDYVKTGDQLGDXFSKSLSGTQIDYICTKLGMINIYALA

SEQ ID NO: 107158 - protein, 85 aa, Gossypium hirsutum
  Clone ID: LIB3825-001-Q1-N6-H7.pep
PHPMVFFTLLAQLVFPPFNFPRFKHWFPLPLFLSFIIKIAIIKCEGQKRFSLLVFPGECFFLGQFRLCYTPFFLKLIMIKFLNPE

SEQ ID NO: 107159 - protein, 131 aa, Gossypium hirsutum
  Clone ID: LIB3825-001-Q1-N6-H9.pep
PVGRAFKNFFYFGDVFLGLVAPVIFNFPVFFGAIFTGSIKMFNFQKGLQIFGFKIGGRGGAFFLFLNFFFGTGPVTQVKCSPPLQKFFSQFINWFPPSKKKKKKKKKKKKKKKKKKKKKKKKKKKKKKKKK

SEQ ID NO: 107160 - protein, 104 aa, Gossypium hirsutum
  unsure (1)..(104): unsure at all Xaa locations
  Clone ID: LIB3825-002-Q1-K6-A8.pep
LVLFLFLSXXXXSSXXXXLVSSPLXSXXSXXXXXXXECRVLWCFFFWLLFSXXPRLKTRVIFSPPPXXXXXXXXXFPXXVPSSVXLXRCSCXVGXRMXWXFGVC

SEQ ID NO: 107161 - protein, 201 aa, Gossypium hirsutum
  unsure (1)..(201): unsure at all Xaa locations
  Clone ID: LIB3825-002-Q1-K6-B10.pep
FKALTFLLQKRYAKGFLILLNFNISPFCYVIKKEYETVGVEVNGEGSKLSQWKKLNSQDLGISXXXFSKPTRKVLNGLKTKGYDVYLVGGCVRDLILKRTPKDFDIITTAELREVVKAFSRCEIIGRRFPICHVHMDDTIVEVSSFSTSARNFGRGLTYEIEKPAGSDKKDFVRWRNCLQRDFTINGLMFDPFARIIYDYM

SEQ ID NO: 107162 - protein, 47 aa, Gossypium hirsutum
  Clone ID: LIB3825-002-Q1-K6-B3.pep
VPDSLSMLYLYILQHCYSTEEYYNFKSRYMNSRIAPSSQYRDLSLRS

SEQ ID NO: 107163 - protein, 199 aa, Gossypium hirsutum
  unsure (1)..(199): unsure at all Xaa locations
  Clone ID: LIB3825-002-Q1-K6-B7.pep
MDSLQIYADNSDEEDLSHQPSTLSADSSPPRLIPSNXXAPKVDDTMLALTAAEAPHPQSRPIDPTQHVVAFNPTYDQLWAPTYGPAHPYAKDGIAQGMRNHKLGFVEDASIDSFVFDEQYNTFHKYGYAADPSGSNYIGDLDALQKNDAISVYNIPQHEQKKRKIEREKDEDEGDPTXIDNPATDVWLMKNXKSPWAGK

SEQ ID NO: 107164 - protein, 36 aa, Gossypium hirsutum
  unsure (1)..(36): unsure at all Xaa locations
  Clone ID: LIB3825-002-Q1-K6-C10.pep
CYTFYLIRAWRGAQXMNGTWAPRFELVARSCDRCGS

SEQ ID NO: 107165 - protein, 114 aa, Gossypium hirsutum
  unsure (1)..(114): unsure at all Xaa locations
  Clone ID: LIB3825-002-Q1-K6-C12.pep
CLPYIKIIISISVLIKQLRSLFQREVIPFKPYTHRGGGLFFFLGRTTPLWHPNKRAPTPPNGPAAYSAYGTSTPQYKWLERELPKVNTTQTPWLIXLMHSPFYNRYVHHYMEGE

SEQ ID NO: 107166 - protein, 205 aa, Gossypium hirsutum
  unsure (1)..(205): unsure at all Xaa locations
  Clone ID: LIB3825-002-Q1-K6-D4.pep
LYRNSQPFLADGDSVASSKKRSKAPKHHQKQDKMLSTGISSKFLKEALLQQKEIEDEASGGNVRIAFGSXKEEHNKHEEXIRRSPPDIDNFGGXFETQSQFGNYEDEIDEEDEKLLEAFLSKDAGPQRTLADIIIQKIKENDGNVASETRPLPKNLKTLDXIKYXNVAKFLNKYTAGXMPKAFKHIPSMQLWEDVLYLTEPEQWS

SEQ ID NO: 107167 - protein, 55 aa, Gossypium hirsutum
  Clone ID: LIB3825-002-Q1-K6-D8.pep
IVDILLYFFNDRASKGIYNRKVPCTLLRPGFMSQKEMAQTSICPALSLRFGIVPN

SEQ ID NO: 107168 - protein, 109 aa, Gossypium hirsutum
  Clone ID: LIB3825-002-Q1-K6-E3.pep
RPDFWSYIPYTSTTQPRGQGKLKAQAKVHFIYLFIFSIKKMEADEIAEELQNIEFEIHDVEEQIRELIEKQEKLYERRSELQVLLETCPIDVKDGSAPTNVQAERWSRS

SEQ ID NO: 107169 - protein, 136 aa, Gossypium hirsutum
  unsure (1)..(136): unsure at all Xaa locations
  Clone ID: LIB3825-002-Q1-K6-E6.pep
MQEALKHPGGQALATYRGHNVLRTLIRCYFSPAYSTGQKYIYTGSSDGSLYIYDLVTRAEXIXFXFQEKPXRXXEGGPKTPQPITCGXGXXXAXREXPGREEEPXEAGGRRKRKRKKAKKRTGQRRGGQHQKTKGS

SEQ ID NO: 107170 - protein, 77 aa, Gossypium hirsutum
  Clone ID: LIB3825-002-Q1-K6-F11.pep
HFLIPIIIVAACEFEEDKVDSMEVQQALPPVPEASEPLPLAQEPVSPSFEIQAAEVNQEVIWRELEQQEQPAPTGGS

SEQ ID NO: 107171 - protein, 85 aa, Gossypium hirsutum
  unsure (1)..(85): unsure at all Xaa locations
  Clone ID: LIB3825-002-Q1-K6-F12.pep
FLGALFFFFFLXFLVLAXSLXLVFCAXCPXXVPPSFVXXCLSAKXYXNPPPPFSSXXXXXVFXXLGXSLLVLCXCXXXXXXPXLS

SEQ ID NO: 107172 - protein, 49 aa, Gossypium hirsutum
  Clone ID: LIB3825-002-Q1-K6-F3.pep
NFIFYKNNPGGGGFFKIFFFFFFFFFFLFLFFFFLFFFFFFFFFFFFVN

SEQ ID NO: 107173 - protein, 63 aa, Gossypium hirsutum
  unsure (1)..(63): unsure at all Xaa locations
  Clone ID: LIB3825-002-Q1-K6-F6.pep
PVPLXXSXXLXPLGGXPAGXSXCXXPXXAXXXSLAXARXAGXXSXXXPPPLRAXASAXANAVA

SEQ ID NO: 107174 - protein, 181 aa, Gossypium hirsutum
  unsure (1)..(181): unsure at all Xaa locations
  Clone ID: LIB3825-002-Q1-K6-G9.pep
TFIHICCKEGKISSAFRVLKDMXEKKGCNKSVQTYNSLILGLGSKNQIFEIYDLGDEMXRMIYTPNVCIYNNIIQSLCKNGKIQDTTSILDDMLQMGINPNISTFRMLIEAFCKASDFGVAKELFEIGLSICGHKEAFYSLMFNELLSGGQLSEAKVIFEVALDRSFHLGNFLYRISLKNF

SEQ ID NO: 107175 - protein, 96 aa, Gossypium hirsutum
  Clone ID: LIB3825-002-Q1-K6-H3.pep
LSNTGTKRVKPHGLFQVSSFWWAGELRWANMNYRTSASQVICSALTTLLGGQALIAPLQGHEKDKRHPFVEITINANCDLLKGHRQLVTRLLPNDS

SEQ ID NO: 107176 - protein, 151 aa, Gossypium hirsutum
  unsure (1)..(151): unsure at all Xaa locations
  Clone ID: LIB3825-002-Q1-K6-H8.pep
WGXLFXCLSSXXLXLFVLXAXLXRXXXXFFXCWXXVXFXFCVXXXXPLAGFVLLXAXSGCXXXXFXXAAWPRGXLSPFXXXFXPVAWKKKKSGPPRCFXXLXXXLXXLLSXXXXXXXAXSFPXXLXXXAXPSXXSXLXXGVCRRRGFXXSE

SEQ ID NO: 107177 - protein, 212 aa, Gossypium hirsutum
  unsure (1)..(212): unsure at all Xaa locations
  Clone ID: LIB3830-001-Q1-K6-A4.pep
TLVQIQMVVRREGKNIQVDPLAKTATHLISQCHSYSYPNSDTIGASLTCSPPDDIKAENRNISRICTTTRKRKDDDERIKAPSSSETLPQFCEEVVVYLDDIEELRSSRRKEADCQDQRLFKFKSLSMPTKGVVVDGTDGDDESYTDNVEDEKPSSNANNSRRRSFSLEPSSMKDIDHEIYYENHKQQSHHYRKHQKKTVAERKEATXLLKR

SEQ ID NO: 107178 - protein, 220 aa, Gossypium hirsutum
  unsure (1)..(220): unsure at all Xaa locations
  Clone ID: LIB3830-001-Q1-K6-D10.pep
VAWAVRVGNIKSLCIRVIYGVSPQLCIRFHPVNNNFLSVGNANKEITVFNFSTGRVIAKSIFDSEVTSMDHDHTGHLIFCGDAQGCIYSVTMDSRTGALSRSHRYRSSSKQKFPITTVQYRSFSLLAGGPVLLTCTKDGSLSFFSVALEVQGYLTLRCSLKLTPRIHSIRASFCPLLSLNKGEYIVAGSEDSNVYFYDLTRPKXTCVKXTGHRFPVLVVA

SEQ ID NO: 107179 - protein, 205 aa, Gossypium hirsutum
  unsure (1)..(205): unsure at all Xaa locations
  Clone ID: LIB3830-001-Q1-K6-E2.pep
IXLVHVPSTVTIFSVGRTLEQNATQLLHRWQYVAPNLPNDVYPVVTISTTNASENGTKTVLATFVSLFQGGANEFIPLMQERFPELGLVKEDFIEMTWVESLLFMNGLSNETSEILLDRSNRYTILPPFVKSKSDYVREPMPEIALQGLLLHLLEVDEGGTAVQNFYAYGGIMDEISETETPFPHRNGTLYKISYVIAWQEEENI

SEQ ID NO: 107180 - protein, 203 aa, Gossypium hirsutum
  Clone ID: LIB3830-001-Q1-K6-E4.pep
MPIPIEANWYNLEQSVQDNRNNKEVRFASRLHLRVCLDGGYHVLDESIYYSSDFRATSKFLWPPAIGVLELGILNASGLLPMKSKNGRGTTDAYCVAKYGPKWVRTRTIVNSFAPKWNEQYTWDVYDPYTVITIGVFDNCHLQGGSNAVDSQDRRIGKVRIRLSTLNTDRIYTLSYPLIVLEPNGVKKTGEIQLSVRITCSST

SEQ ID NO: 107181 - protein, 135 aa, Gossypium hirsutum
  Clone ID: LIB3830-001-Q1-K6-G5.pep
HSSSSHPPLNGVGAEDEFEPEPEPEPVPVSAPTSGTTSESSDQEEEDKGGVRNEEMRGEKGDGNSIYYDKIEGAESIDETYEMQSEITKTLTMEVSHQTVRNVEDQKGFGLSPAPVEHLHEEANGSFKHFEKEPK

SEQ ID NO: 107182 - protein, 105 aa, Gossypium hirsutum
  unsure (1)..(105): unsure at all Xaa locations
  Clone ID: LIB3830-001-Q1-N6-A4.pep
HLNFQAEQLLKDENIIAXYEILDHFCEFVNIQLSSLRRHKDCPNDINESVSSLIFASARCADLPELPAIRKLFGERYGHRFTTVAVELLPGNLVNREVAHSSANC

SEQ ID NO: 107183 - protein, 51 aa, Gossypium hirsutum
  Clone ID: LIB3830-001-Q1-N6-D10.pep
YDLTRPKHTCVNKLQGHRFPVLVVAWNHGENFLASADLYGVVIVWKRAKTS

SEQ ID NO: 107184 - protein, 92 aa, Gossypium hirsutum
  unsure (1)..(92): unsure at all Xaa locations
  Clone ID: LIB3830-001-Q1-N6-E2.pep
ETNIFQGYISWMSNLYSYMGPFVLKSPREGFVNSRVFDLGSNNFFGKPSFKQASIWGGKYFKNIFDRLVFVKTKIVPXNFFKHEQSIPPGFH

SEQ ID NO: 107185 - protein, 144 aa, Gossypium hirsutum
  unsure (1)..(144): unsure at all Xaa locations
  Clone ID: LIB3830-001-Q1-N6-E4.pep
VVHASQYRKRPRHPPHMDTKLSLVESVQSDDFDEEFDTFPTSKNVKVLKXEYDRLRSIAGRMMTIIGDLATQAERLNSMLSWRDPRATSLFMAFCLIACIAFYLVPWRLFALGFGFFGMRHPRCRRSIPSMPQNFFKRLPEPIV

SEQ ID NO: 107186 - protein, 107 aa, Gossypium hirsutum
  Clone ID: LIB3830-002-Q1-N6-A10.pep
NLPHKIFHFYFVCEKPSLVPDFFHRALLERNYDRKIWIFLFDQDKIQHFEGMETRLQMGKAMLTQRERHCPDKELHRSHCKFLISCCCASFIIRIKVYPGMIIQRHL

SEQ ID NO: 107187 - protein, 159 aa, Gossypium hirsutum
  Clone ID: LIB3830-002-Q1-N6-B3.pep
CFFFFFFFFFFFFFFFFFFFFFFFFFFFFFFFGPPNRFYYYFKKKNFLYGGGDLFFKQERERPQHCPKQKGPQNKRFLVAQAHKQIQTKKNPPPGLFKFQQGYVTTGPFFLKPPFPKWGPKKNPQRALLINPNEKSGAEKKNPKKQKLYPGQKQKTGMA

SEQ ID NO: 107188 - protein, 131 aa, Gossypium hirsutum
  Clone ID: LIB3830-002-Q1-N6-B5.pep
LSTENYGVYTSLRKLKLQFGKFPGIISLRLLILIRCLLQIKSGVPDVNSLRTIPLLSLRMCPTTTKVWRYLDFSWVLNNNIQGIWVWFTWVFNRGTREQCRLFCCGLWLIWSNRDQLLYESKNRTSREISR

SEQ ID NO: 107189 - protein, 172 aa, Gossypium hirsutum
  unsure (1)..(172): unsure at all Xaa locations
  Clone ID: LIB3830-002-Q1-N6-B6.pep
VKLVTSVASLVGVGLYNGFLKRVPLRKIFLATTIIGTAFGMTQVLLVTGLNRQLGISDEWFAIGDSLILTVLGQVSFMPVLVLAAKLCPEGMEATLFATLMSISNGGSXVGGQLGAVLTQVFGVTKDNLTTYLMIILCNLSSLLPLPLLGLLPEDDSGIVSNEDVDIEMKSN

SEQ ID NO: 107190 - protein, 116 aa, Gossypium hirsutum
  Clone ID: LIB3830-002-Q1-N6-B7.pep
SSCKEIELQVLGIPSLIILDKPFSVHLNLTNHTDRELGPFEVWLSKNSAHEKFVMFNGLQTMALPAVEAFGSTDFHLNLVATKLGVQRISGLIVFDTIEKKTFEPLADVEIFVESD

SEQ ID NO: 107191 - protein, 137 aa, Gossypium hirsutum
  Clone ID: LIB3830-002-Q1-N6-C4.pep
FNRYGDLRHIRRLRFWPLNKVPVEKYEFSEQDANEMTDFLVPILDFVPEKRPTATQCLQHPWINAGPRLLEPSKSSSHSRVVDANVSEKKKTEMDEREAMEVGMGKIAISAESKPAKDLQSSSKCAMAAATSSRLGT

SEQ ID NO: 107192 - protein, 115 aa, Gossypium hirsutum
  Clone ID: LIB3830-002-Q1-N6-C7.pep
YLTVFFTFFFFLTNTNFFKTFCVHEQTSGKINKRTGGGKLFFLTRGRKNPKNQACVKNNTTPPGPLKTKNRQKRKDPKEKKLNTSGSATNPCDLKGDSPTGGGGTHPGKEQTSFL

SEQ ID NO: 107193 - protein, 164 aa, Gossypium hirsutum
  Clone ID: LIB3830-002-Q1-N6-D5.pep
CICKAAEVIFVQHGWWHLVINLEESVAITQNYVSRRNLLNVLDFLKKPNASKLVSGTTDRINLYDNFKNAIEASFPGTIDGLRLKAKQKIMSFWDSVPDYKLGTMERLGEARTVCKSHRKWSPVKTEGELLWSRPSNSFHCLPLASLYSKHRIDSSKVKKFIMF

SEQ ID NO: 107194 - protein, 100 aa, Gossypium hirsutum
  Clone ID: LIB3830-002-Q1-N6-D6.pep
HRHDRKSKNKHSYSSEDSDCCRHEPRKKTMQKPYNSEDSDIVRHNSRREKYRLKHHYSSEDDAYRHLKGEKSRHKPSSSCGYEDYSNSGLERRSKHHRHH

SEQ ID NO: 107195 - protein, 145 aa, Gossypium hirsutum
  Clone ID: LIB3830-002-Q1-N6-F2.pep
PPRGPFGCLLLPAVGPFLFASGQAGFPVWIGGVGSFPFRVGWLPLWAPRVLRFWFRVRFVGGICGGSPFSPGARLSPFFPQVLFGPPLGKVGGRAGPVRFFLVFPRGPLYLRGKFPPPPPFFVLFSGFLAFGFGGPGPWFFYWFH

SEQ ID NO: 107196 - protein, 41 aa, Gossypium hirsutum
  Clone ID: LIB3830-002-Q1-N6-F4.pep
FPFVVFITRIFRGVVDVLGVLKSQIGPPNSSLIIKDLIKAE

SEQ ID NO: 107197 - protein, 121 aa, Gossypium hirsutum
  unsure (1)..(121): unsure at all Xaa locations
  Clone ID: LIB3830-002-Q1-N6-F6.pep
EKRKAIGFPGEPPPPGGRAPPPSPPFWKNQPGKPGPRRRDPPTPPPPWGGIAQEGGPFWETKPYRVPLSGGLRNFFLRPPPQGPISPPGPXAPLSLFPEPPRGAEPIKGAPPPGYPRPWGG

SEQ ID NO: 107198 - protein, 128 aa, Gossypium hirsutum
  unsure (1)..(128): unsure at all Xaa locations
  Clone ID: LIB3830-002-Q1-N6-H1.pep
DKEFIELGSRLIGXRVPSNNQGLLNQTIELLRDHWRRSTPSSIPLKELGPLLRDYQRLISRHHLANSGSDFQSIDSWLSGKEAYKFYHLKNVSQLRMNDVPKLLAEYKKILPEQNASGPRAGFEEQVL

SEQ ID NO: 107199 - protein, 36 aa, Gossypium hirsutum
  Clone ID: LIB3146-046-B4-F4B.pep
EMHKKTAVGRYKSTGCQIYSSSSAKHKHITDSLSTS

SEQ ID NO: 107200 - protein, 72 aa, Gossypium hirsutum
  Clone ID: LIB3149-025-Q1-K1-G3-F2A.pep
ESFDSSNSDDFSQSISTEASLSLQDETKPDLSPQLSLLEKWLFDDAANQGKYYQLSDITLDENPSFFLEGGI

SEQ ID NO: 107201 - protein, 115 aa, Gossypium hirsutum
  unsure (1)..(115): unsure at all Xaa locations
  Clone ID: LIB3272-035-P1K1-D12-F2A.p
SHEEFKSILSFENINNVVWDKSTCESTSKGACQDSGNDDDGDDDDDDXXGGGGGGXKVNVAMAPENYKKQKVDHPNNNNNKNNPPLSFLEKWLFDESSSGQVEEMNQMMELSSVF

SEQ ID NO: 107202 - protein, 119 aa, Gossypium hirsutum
  Clone ID: LIB3543-044-Q6-K6-A6.pep
KKRFFSSFTFCISTLTDFSSSKSFRNQINIPKKFTLPCHCTPPYTCMQHEQNKNRDGREHLKSLYNYQNPSIPRSKEISYHLEISLPSYSSLKPCTRPHQHIQTFPATADYVSSSARGN

SEQ ID NO: 107203 - protein, 161 aa, Gossypium hirsutum
  Clone ID: LIB3543-044-Q6-K6-B6.pep
MNAKASFDRDLAKTRKFLLRNVSVIRMFTSGFFRSKWRSIAGKRRILSMDAREKSRSTILESSKDKRVPIFVMMPVDIFTLDASGCPRIRKLKALTVSLKALKLAGVHGIGVEVWWGIVERFSPFDYDWSLYEELFKLISDSGLKLHVALSFHSNIHSTHG

SEQ ID NO: 107204 - protein, 160 aa, Gossypium hirsutum
  Clone ID: LIB3543-044-Q6-K6-B7.pep
MMSNLQDWPEPIIRVQSLSESGLPMIPDRYVKPLSDRPSSNRPENGENGDANIPIIDLTGLTDDKTELSRSTMDRISSACRDWGFFQVVNHGVSPGLMDQARETWRSFFHLPMEIKQAYANSPKTYEGYGSRLGIEKGAILDWSDYYYLHYLPLTLKDST

SEQ ID NO: 107205 - protein, 170 aa, Gossypium hirsutum
  Clone ID: LIB3543-044-Q6-K6-C7.pep
AKRGPYSRAMWDFSFQARYKVVLNTKSLSTELKVTNTDNKPFTFSTALHSYFRASITGVSVKGLKGCKTLNKDPDPKNPIEGREERDAITFPGFVDCIYLDAPNEVHLDNGLGDVISIRNTNWSDAVLWNPHLQMEACYKDFVCVENAKIGTIQLEPEQSWIAKQHLSIA

SEQ ID NO: 107206 - protein, 198 aa, Gossypium hirsutum
  unsure (1)..(198): unsure at all Xaa locations
  Clone ID: LIB3543-044-Q6-K6-E8.pep
NDGVSFTSSPLKIPLSQTPAFQLTGTRHLAFQLIDSLRNRFNNVKHHSTQFNVSAQSELGVRSSTRRSPLLCFASVSLAAEKQSIGRSPLLYSAFLSLTQPDSTESTQDGHLATAGPFGEERVLVGEVLVRNKDGEELERKDLEMEALNALKACGANSALTAXEVQEDVDRIIDSGYFSXCMPVAVDSRDGIRLVFQV

SEQ ID NO: 107207 - protein, 208 aa, Gossypium hirsutum
  Clone ID: LIB3543-044-Q6-K6-F3.pep
VSRTQIQERQARIGKGKEMKGIYLGTFDTEEEAARAYDVAAIRLKGANAITNFDIFEYDLMNILQSSKLPIGKGASKLLMKSSMEDVIRKKKNLIGKTSFACFEDDDGSANPEIAQGFNSFGNDMNIDFNGIQAMEPVGFPMDLSGMDNNSQHQNSSFFPVINGCQNPVEFQGNSSGIFNGGISFPGKDVETDDFQTNFDNFQSLLGL

SEQ ID NO: 107208 - protein, 82 aa, Gossypium hirsutum
  Clone ID: LIB3543-044-Q6-K6-F7.pep
SYPTVRGFTAIGTGGDDFVQAMVVAVESVIQQPIPEGRVRQKLSSRGKYVSVNIGPVQVVSSEQVQAVYNAMKRDDRMKYFL

SEQ ID NO: 107209 - protein, 52 aa, Gossypium hirsutum
  Clone ID: LIB3543-044-Q6-K6-G1.pep
QAKTACFFFLLHAYIHQMVKIHGEQFYGFFFCGSFILHILKESHVKIWFNLF

SEQ ID NO: 107210 - protein, 115 aa, Gossypium hirsutum
  unsure (1)..(115): unsure at all Xaa locations
  Clone ID: LIB3543-044-Q6-K6-G7.pep
LHSLRNGFNNVKHQSAQTIAQAKCELGVRSRSRDLPCMLCIGGSCSCINKEWWRSRCTELHCLGMDSTGLNRKYSGRTLGNSRNSSARRESYXERCWLGTKMERNWRGKTSKWKL

SEQ ID NO: 107211 - protein, 205 aa, Gossypium hirsutum
  Clone ID: LIB3543-044-Q6-K6-H5.pep
MRPASQIEVQPLTAVQSKPIPPKDLLSTAKRRRDEDDPTAAYDTGESAPKRQAKAQDVIFRIVVPSRQIGKVIGKGGHRIQKIREDTKATIKIADAIVRHEERVIIISSKDCENMVSDAENALQQIATLILKEDDGSAEAAKVGAVSAGHVAANTIRLLIAGSQAGGLIGMSGQNIEKLRTSSGASITILAPNQLPLCASAHESD

SEQ ID NO: 107212 - protein, 109 aa, Gossypium hirsutum
  unsure (1)..(109): unsure at all Xaa locations
  Clone ID: LIB3543-044-Q6-K6-H7.pep
RHVVVKIACVGDMQKDDRKEGSMLSLHNYPIDNCDLQTLSVSAQNRDLHLWYTRQEQSRTLKTYTHEGYLCIILTXSPCGNXIVTWSLSRVLTFIDLKLRLPKNSHQDI

SEQ ID NO: 107213 - protein, 198 aa, Gossypium hirsutum
  Clone ID: LIB3543-047-Q6-K6-A5.pep
MKLKSLLSVDSAVEIEGKKGVNTGSKYDAIVIGSGIGGLVAATQLAVKGAKVLVLEKYVIPGGSSGYYQRDGYTFDVGSSVMFGFSDKGNLNLITQALAAVGREMEVIPDPTTVHFHLPNNLSVQVHREYSEFINELMSKFPHEKEGILKFYGECWKIFNALNSLQLKSLEEPIYLFGQFFQKPLECLTLAYYLPQNA

SEQ ID NO: 107214 - protein, 86 aa, Gossypium hirsutum
  Clone ID: LIB3543-047-Q6-K6-A6.pep
PASDLISATVKDCSLMISFRPMVDGDVLSESSHSTVYLGSTKQVFEYKVYFIDLDLKPLKKMEDYYKLDKKIVNCYCQMAKTEHKR

SEQ ID NO: 107215 - protein, 182 aa, Gossypium hirsutum
  Clone ID: LIB3543-047-Q6-K6-C8.pep
MAEDFAKAVEDGLKLAKRIYLGKDKAVMTAPKPPSPPVQGLADYYLPSAPMVYAVISDPGFVDNPDFPSYQPHVYGRCDPPALIPLQMSGVDLEVNCYGDTAFVQISGKWRVHCVMGSHSCDCRIAVPMGNQGSILGVEVDLPKKSYSTELVGLEESKCIEKIARPQDGGFMKPHIFMLTIP

SEQ ID NO: 107216 - protein, 133 aa, Gossypium hirsutum
  unsure (1)..(133): unsure at all Xaa locations
  Clone ID: LIB3543-047-Q6-K6-D9.pep
MPMFQPSKTDGVVVAAFDGSGDGQVLDLDTAVKDGVLGGVXXGVIGAAVGEKLDLKKMIEELDLPEIPSVFICPISLEPMQDPVTLCTGQTYERSNILKWFNLGHYTCPTTMQELWDDSVTPNRTLYHLIYTW

SEQ ID NO: 107217 - protein, 39 aa, Gossypium hirsutum
  Clone ID: LIB3543-047-Q6-K6-E2.pep
LIIFLKNSKKKKKRSGYHVSKLIYHQRNTNSDPNYPLNN

SEQ ID NO: 107218 - protein, 94 aa, Gossypium hirsutum
  Clone ID: LIB3543-047-Q6-K6-E4.pep
PRAKVPIATEIAPTRRIWREKCTCARREDQLRDVRRMESAGGVAARVAASACLLWTMLKSVLGFGLVNDIGLVKENGLFIWVFLFIIFICGPGK

SEQ ID NO: 107219 - protein, 95 aa, Gossypium hirsutum
  Clone ID: LIB3543-047-Q6-K6-G5.pep
PFYCRTHCFSLCLKSIVVGLSVSFWLLCRRLISERTIQSDRVLGLVSVKRAVASAPKCRKSPSMEFITQCKPRTNGSIRAGFGFSERQMCCRFGS

SEQ ID NO: 107220 - protein, 78 aa, Gossypium hirsutum
  Clone ID: LIB3543-048-Q6-K6-A3.pep
SVAYREGAKQEIEDDIVHYHRLYSDTKSATTAETSFSYTPLPNRTYKLLTSSSSSYRTLKPCMRGKIFKSTNQPVTRK

SEQ ID NO: 107221 - protein, 200 aa, Gossypium hirsutum
  Clone ID: LIB3543-048-Q6-K6-A5.pep
MANKNRSSPSSATPKLMEASGFSLMNEDLLRNILSRLPAISFASAATVSKTWNAACCHILSRPKLSSAISLKPLPLVALQEVFDKVMSEPIRPHFAIASVGPGFEIKDVLQFMVEKVRSRTPIIVSSVKGILGRDALSHEFREVKWIDGNIDEVPVNTGIVLTVGFVPGLKVDVIPLLRQRKAPQGSMIDKFVLDIKSYT

SEQ ID NO: 107222 - protein, 142 aa, Gossypium hirsutum
  Clone ID: LIB3543-048-Q6-K6-A6.pep
MVNVTVIWRGNKYMVEMDSGANLKELGDELQKLTDVKSDTMRLIVPQLSGKGSRMLHPFSDEHSCLSLQEASVFMGKSVRMMGVSEDEVDRVIQNSKVDMRIIGFSEEERRLRQRMSDGPSNVPIRLPQGPYIFCDFRTLHI

SEQ ID NO: 107223 - protein, 55 aa, Gossypium hirsutum
  Clone ID: LIB3543-048-Q6-K6-B5.pep
IFVKQNPTTRSQFHANRYARKHQNNQSEGIYKRQSEKFFNVTFGAAKYRTLVSVE

SEQ ID NO: 107224 - protein, 182 aa, Gossypium hirsutum
  Clone ID: LIB3543-048-Q6-K6-B6.pep
STLILPPDSSTIITVPITLDIAANHGVIVALKSEIFDESYTVSLVDNLLQKPSVDELVKNQAILDDGRALLDTGIIAVRGNAWVELVKLACSCQPLISELLKSKKEMSLYEDLVAAWVPTKHDWLQHRPLGEALVNKLGKQRMFSYCAYDFLFLHFGTSSEVLDHLNASDSALVGRRHLCSI

SEQ ID NO: 107225 - protein, 205 aa, Gossypium hirsutum
  unsure (1)..(205): unsure at all Xaa locations
  Clone ID: LIB3543-048-Q6-K6-E2.pep
PTRPPTRPVTELERNSAASGTPSLAGSAGIRLACATADVHCYDVSSNKWARITPFGEPPTPRAAHVATAAGNYXVVIQGGIGPTGSAAEDLHVLDLTQXQRPLRHRVDVQGPGPGPRYGHVMATAGQRYLMAIGGNDGKRPLADVWALDTAAKPYEWRKLEPEGEGPPACMYATESARSDGLLLLCXGRDANSVPLARAYGLAKH

SEQ ID NO: 107226 - protein, 74 aa, Gossypium hirsutum
  Clone ID: LIB3543-048-Q6-K6-E7.pep
QYAKPVGGLSTSHRPTAHPAIFNGCATKKNKTKPKQHFITLHYILPALYMSTIFDRCGMKNPLGWPGVGLSAPK

SEQ ID NO: 107227 - protein, 194 aa, Gossypium hirsutum
  Clone ID: LIB3543-048-Q6-K6-F3.pep
MQNLQRRNIWNELFQSSDGQLETRSVAGGIDVNQAPALAECEEEDGVSSPYSTVSSIGGKRSERDPVCDETEAERPSCSRSSDDEDGGGAGDDASRKKLRLSKEQSLVLEETFKEHSTLNPKHKLALAMQLNLRPRQVEVWFQNRRARTKLKQTELDCEYLKRCCDNLTEENRRLQKEAQELRALKLSPRLYTH

SEQ ID NO: 107228 - protein, 209 aa, Gossypium hirsutum
  Clone ID: LIB3543-048-Q6-K6-H5.pep
LINSPQDSGTASDAFGGPSSSSLSAWEQKRISGSTQGVLKRRSSVLGNDIGSVGPIRRIRQKSNLLSSRNLSLPTSAGPSARIAGNSSAALDTLAENGDNSSPGSSVTTVPSKSSQTASKILQQLDLLVSPMEKSPTKLSPSMLRGQALKSIENVDSSKFLENLQDTDKLSGSCTVLPGICESMSGKHDKARENGSTMMVALPDKVVPA

SEQ ID NO: 107229 - protein, 158 aa, Gossypium hirsutum
  Clone ID: LIB3543-048-Q6-K6-H6.pep
AALKITIPLVGNLSCCKDRFVKTFSAAEEQQKHFIVISIWSLWYRRNKMIHEGVKLSLQELLGFIKGYEHELRFIQETYNLSSRSMAKEIWRPPEARVIKINFDAAFKSSNKRAITAALARNSSGDMIGAETYLFEDVVDAFVAEATCERVLIFAGIM

SEQ ID NO: 107230 - protein, 49 aa, Gossypium hirsutum
  Clone ID: LIB3543-049-Q6-K6-C4.pep
NPAPTRPTQKQTPNQALKQRHEPRLRQRIQWAYILTRQRSKTNPETTVR

SEQ ID NO: 107231 - protein, 170 aa, Gossypium hirsutum
  unsure (1)..(170): unsure at all Xaa locations
  Clone ID: LIB3543-049-Q6-K6-E1.pep
CSKCVQLSPLGLAYISSHLAQVLCLCIHLSCINRXAPHSVTSHVGHYSMPDTASIQQWQNQLTSPEGLQLSAENHIPPSQTDQKLGSSDVKYEYDLSVNGQAIRSDYLDHMNQGAEPNSVISSSSGKAQVDESINASYLVDSQPEPAMPQASSQFHGALRLSSEPMNKIF

SEQ ID NO: 107232 - protein, 132 aa, Gossypium hirsutum
  unsure (1)..(132): unsure at all Xaa locations
  Clone ID: LIB3543-049-Q6-K6-E6.pep
MFPFMLAWEGPLDELXNKLLRGPVPMYRCTPDILVDGCYPFSGDLWPGIXLCQFSFQGVGGCSRLLVPPMLRXTVFAGPEPHVPLLKYRPCYVLRPAGGXQGKSYFGLDMVCGDKWTVGKAILVSVGDPIFV

SEQ ID NO: 107233 - protein, 136 aa, Gossypium hirsutum
  Clone ID: LIB3543-049-Q6-K6-F5.pep
RPRCPASRLGRRVRGFNFLIPCFASKPSDLYPFLISGALGRLKSGEHDACGGYESRCCGRGGGEYSWARFQSFPRLAGRLPAPGPVAGSQERCDLHDLPFAGPGARSPLSLGSRAWLWGSCAVSSVFSLGTLLQTP

SEQ ID NO: 107234 - protein, 91 aa, Gossypium hirsutum
  unsure (1)..(91): unsure at all Xaa locations
  Clone ID: LIB3543-049-Q6-K6-G3.pep
IHFNIXXXIXIPQXXXNXTQKXFPFLXSXXXNXNSXXKPPPHTXLXXIXIILLPPPHNPKQKXKKLKKLNIKLXIXXLKFXILIPLPSPPF

SEQ ID NO: 107235 - protein, 205 aa, Gossypium hirsutum
  unsure (1)..(205): unsure at all Xaa locations
  Clone ID: LIB3543-060-Q6-K6-A2.pep
MATRGSRSEXVKRIFQQFDTNRDGGLNRDEMAALVVAVNPRVKFSDEQINAILDEVFRTYGEFIDGEKGLTYDGLLRTYDDGAGDVDRDFDALGLELNFDENKGASIVSEASSSSIADERVIESQKKQRTVAWAVSLHHGIVFDDTWKLVDDLEILLKRLKAKQAKDAKFRNDNFDAYSDAGWSRELGASAELSEXRVYWEESGP

SEQ ID NO: 107236 - protein, 59 aa, Gossypium hirsutum
  Clone ID: LIB3543-060-Q6-K6-A4.pep
MEPRVGNKFRLGRKIGSGSFGEIYLGTNIQTNEEVAIKLESVKTKHPQLLYESKLYRIL

SEQ ID NO: 107237 - protein, 173 aa, Gossypium hirsutum
  Clone ID: LIB3543-060-Q6-K6-B3.pep
HPGIEDIDVYAFGVYANGDDVKKFLSEKYGNLSAFELKNSKDFNNDLMEADISMTVRLQIVYSKLSIKSIRSAYEESVGSRLQKFSGSDNKELLQRFTSQFKDEYKLPRGSLVELSKEPGYVLKTKIDGKEMGSIESKLLCRSILDLYIGEDPFDRRAKDDVDLNVASLLQQK

SEQ ID NO: 107238 - protein, 184 aa, Gossypium hirsutum
  Clone ID: LIB3543-060-Q6-K6-B4.pep
KATTGSYVGGGQRWGFNEGNPKVEDSDCHFVSGSSSSLAAAADDEIDTRMEGDDGIVEHNHQPISSSMTDSLNGSGSMLHRSSSSSQSFEDAEDTKPKTISVDSSSKITVKATYKDDTVRFKFKPSAGCFQLYEEVAKRFKIQIGTFQLKYLDDEEEWVLLVSDSDLLECLEILEYIGSRSLKF

SEQ ID NO: 107239 - protein, 89 aa, Gossypium hirsutum
  unsure (1)..(89): unsure at all Xaa locations
  Clone ID: LIB3543-060-Q6-K6-D1.pep
QRGSRSREINIDLLGNSRFVCWIGFYSYRMLLFGLRCPPSFSTFAILAPGHSMHPRLEFEVLDGILFFGALYVRLSSSCKQXFXVINKX

SEQ ID NO: 107240 - protein, 109 aa, Gossypium hirsutum
  unsure (1)..(109): unsure at all Xaa locations
  Clone ID: LIB3543-060-Q6-K6-D8.pep
VGRHYGNSRRKIFDFFNYKAEXKPKVTIAMNEHRELCLKQLFWLVREAMIRPLTYVGEDTARYLAISEADGSIDLSLGIKYGEQDRFWRGSRWNSCSKKQRYYCCDGID

SEQ ID NO: 107241 - protein, 198 aa, Gossypium hirsutum
  Clone ID: LIB3543-060-Q6-K6-F5.pep
MVASPLTAINGERAVVFFFVFRVLSSLPLSLLPHALSLSLLSVFSLFVEIRADGSLSLFKTRPGASSGIMLGAVTLPTVMLSKLIQLSRAFSLQQIEIGELEHMTMQFWAASACCCGVLIFLSILMWCAAYNKNPHFSCSVWDAKFSLSCVILFSVVCCISLATISHTGFNTALKLLWLLCHGFAAVKLIQHLLNTFP

SEQ ID NO: 107242 - protein, 170 aa, Gossypium hirsutum
  Clone ID: LIB3543-060-Q6-K6-G1.pep
ILWENSGKEKEYFLGKKEGCCQSKGADSKANRIARWRSTGIVALRDAKLKTFPDEVLELDRSVRTLDLTHNKLVEIPVDISKLVNMQRLILATNLIERLPINIGKLQSLKVMILDGNQITSLPDELGQLVRLEKLSISGNMLMSLPETIGSLRNLSLLNVSNNKLKYLPE

SEQ ID NO: 107243 - protein, 197 aa, Gossypium hirsutum
  Clone ID: LIB3543-060-Q6-K6-G4.pep
MESLPDAIVQYILSHLNNARDVAVCSCVSKRWKESLPYLKSLYFPRNSFDGYTGSDSPDIVIWKMLSSITCLEELVVYSPFTSSGLASWLLLVHSSLKHLELRMDNITDYKACVDSPSKLDCVSAAKNLESLKLWGVLMANSPKWDVFKNLKSLEIVGARLEDSALSAALRACPKLTNLVLLGCQGFRSVSVELPYL

SEQ ID NO: 107244 - protein, 167 aa, Gossypium hirsutum
  Clone ID: LIB3543-060-Q6-K6-H1.pep
MLNDMENGRRNNNKNEDSRMRGFRPSLRGMMLVVAVIWIGVAALYGLLKPISNGCIMTYMYPTYIPISTTEGVSSAKYGLYLYHEGWKKIDFTEHLKKLNGIPVLFIPGNGGSYKQVRSLAAECDRAYQGGPLERTFYREAYLAYKEGGNAENADIQLPDQYANRLD

SEQ ID NO: 107245 - protein, 184 aa, Gossypium hirsutum
  unsure (1)..(184): unsure at all Xaa locations
  Clone ID: LIB3543-060-Q6-K6-H6.pep
MTMATAVGISACGVSLQWTNPNSYSSGKGCKYAGQSVRALPIRILTVXXKKRLPGVQLLVDEYIAKLKSYCHVDDVQIRSNPKNARNAMAQVDDEDIAVINLITSNDWVVILDERGLDLSSEHLAELLGDAGNTAASRLSFCIGGPYGHGQRVRKRANVSIKLSSMVLNHQIALVVLMEQIYRR

SEQ ID NO: 107246 - protein, 90 aa, Gossypium hirsutum
  unsure (1)..(90): unsure at all Xaa locations
  Clone ID: LIB3543-060-Q6-K6-H7.pep
RPQVTIATAIIFCHRFFIRQSHXKNDRRTIATVCMFLAGKVEETPRGGKDVILVSYEIIHKKDPAAAQRIKQKVFFNLMVLSPVYMYSSY

SEQ ID NO: 107247 - protein, 105 aa, Gossypium hirsutum
  unsure (1)..(105): unsure at all Xaa locations
  Clone ID: LIB3543-061-Q6-K6-A5.pep
YLKNVMPKAGLETLWKVMMEIGNMWMQMSPYGGRMAEISESETAFAHRAGTLYIVQYTAHWSEGSSEATKKYVELMRKLYAEMAPYVSSXPREAFLNYRDLDIGS

SEQ ID NO: 107248 - protein, 207 aa, Gossypium hirsutum
  unsure (1)..(207): unsure at all Xaa locations
  Clone ID: LIB3543-061-Q6-K6-B3.pep
PASVLASSSLYFLLIFLSISSFTLLSQSQTSSKLNKFVLPIHQDNKTNLYVANIYKRTPLLQIPFVVDLNGRLLWVTCEQNYLSSTYHAPXCYSTXCARANTHYCHTCFSKARPGCHNNTCGLMSVNPVTGLTAMSELAQDVLSIYSTQGSNPGPLVKIPRFLFTCAPSLLLQPVLPGNVQGVAGLGYSPISLPTQLASHFGYAGFA

SEQ ID NO: 107249 - protein, 58 aa, Gossypium hirsutum
  unsure (1)..(58): unsure at all Xaa locations
  Clone ID: LIB3543-061-Q6-K6-C1.pep
CEKTGVVVDVGDGATHIVPVADGYVIGSSIKSIPIAGKXVTLFIQQLMRVFLFFSYDL

SEQ ID NO: 107250 - protein, 184 aa, Gossypium hirsutum
  Clone ID: LIB3543-061-Q6-K6-E5.pep
MKTWRSEAEKALADGRNRRVLQDIGNFVNERAAAQGKKPITEGAVVVAQAVKGVQRKQVDKPKPENVIVISSDEKSEKSKHVTKRQGSSRKDVKTLTSILSARSKAACGLVNKLNDSIENIDGADAGNELAVTEYVDDIYKFYKLTEDEGRVRDYMDLQPDINAKMRSILVDWLIEVHRKFELM

SEQ ID NO: 107251 - protein, 44 aa, Gossypium hirsutum
  unsure (1)..(44): unsure at all Xaa locations
  Clone ID: LIB3543-061-Q6-K6-E9.pep
SLFSIHPCKKKRNLSDGEMGGLELXEHTXGLPDSFXVLSPYLTS

SEQ ID NO: 107252 - protein, 125 aa, Gossypium hirsutum
  Clone ID: LIB3543-061-Q6-K6-F3.pep
GPPGGRPPPPPPEKAPKKGGPHSQPGGATGRKRGRYAPPRNKTPAAKGGPPHRAYRGAARGVPRPGRGKSGPPWLNRGPPQKGIMLAQPPGLGNRQPFHQPRPLVISSAQALKLEGFPIARLVVL

SEQ ID NO: 107253 - protein, 69 aa, Gossypium hirsutum
  unsure (1)..(69): unsure at all Xaa locations
  Clone ID: LIB3543-061-Q6-K6-F7.pep
QLIVVSKGEERLALIDFLRGLVEFDLAKRWSPFXASKHPFVTGXPFTRPYRPPPETPHLVRDLRMQLCN

SEQ ID NO: 107254 - protein, 108 aa, Gossypium hirsutum
  Clone ID: LIB3543-061-Q6-K6-H3.pep
YMQKRKKNIEDGRKILNRLSNFFHSQYWICVVCVEKYRVQTRAFYSLNLQNKIAKNKNISCCHFVYSVSLFLLVYSLQDHPYGGAGRGTRERSRAKKPLVRPDPLALF

SEQ ID NO: 107255 - protein, 211 aa, Gossypium hirsutum
  unsure (1)..(211): unsure at all Xaa locations
  Clone ID: LIB3543-062-Q6-K6-C5.pep
VLPPXAVVSAGSVNSACTAGGGQLYMWGKIKMXGDDWMYPKPLMDLSGWNLRCMDSGNMHHFVGADASCISWGQAQYGELGYGPMGQKSSAVPKKXDILEGMHVISVACGMGHSMVIVDRENVGDRLDQLDVYDGKATAEGTEVPDANATFPKQTNKRGAKNTSDSLKNLKRKKSKDSSDSEDEEENSDVESDSSGEYINGKAPGKGRGKG

SEQ ID NO: 107256 - protein, 99 aa, Gossypium hirsutum
  Clone ID: LIB3543-062-Q6-K6-C8.pep
RRRREEEQYDDALSDHQNTQSSSSTSTSSGTQKSLDDIDAKLKSLRLRYNSQQSNPNPNFRSYFQKPTVLIIITIFLSVTIRRELFGDYPFRFGCVVAV

SEQ ID NO: 107257 - protein, 48 aa, Gossypium hirsutum
  Clone ID: LIB3543-062-Q6-K6-C9.pep
MIASLSVNEACMLLLPCKHLCLCKSCESKLSFCPLCQSSKFIGMEVFM

SEQ ID NO: 107258 - protein, 85 aa, Gossypium hirsutum
  Clone ID: LIB3543-062-Q6-K6-E1.pep
TTSPAYAPWDKNPSCSSTSISQKSPWLSSLFHFFELIKKRNILNVDIDPLPWWVTIDINHHSENKNIRKGNRKNILFFHRRCELD

SEQ ID NO: 107259 - protein, 126 aa, Gossypium hirsutum
  Clone ID: LIB3543-062-Q6-K6-G6.pep
MSDDMLLHFSSNSSNQSDHSLPTKIAKLEARLVGKASSASAAQQPQQQQQQQQPPWSSLSSASKFVSAEDLPEASSSSDSDDENGGEFLILANTQKRQKVQGDDNLLVLKHAEAISEGRQKIVEAV

SEQ ID NO: 107260 - protein, 47 aa, Gossypium hirsutum
  Clone ID: LIB3543-062-Q6-K6-G8.pep
DDRIPLNKMVNKFHKQKTSERIIEHLPYSHYHNNVEIPFKKEDTIRR

SEQ ID NO: 107261 - protein, 169 aa, Gossypium hirsutum
  Clone ID: LIB3543-062-Q6-K6-H4.pep
MNQLVFFFFFFLFGKLCLCDPRATEAALICTNTTASITARKSFVANFLAVLDSFTPLIVRQRYAVVVKGSGDTRVYGFGECMKDLEQGDCNICFAQCKAQIMRCLPFQIGTRGGRLFYDGCYLRYDDYNFFDESLSETDRTVCATKDVGLSNETGFRANVMQLVRNLTV

SEQ ID NO: 107262 - protein, 63 aa, Gossypium hirsutum
  Clone ID: LIB3543-062-Q6-K6-H9.pep
FFAQILVVHNYKAILTTVIKAVHVIFQFLQTLQIHKYKIIIKYHKRMQLSNESENQILLPNEP

SEQ ID NO: 107263 - protein, 169 aa, Gossypium hirsutum
  Clone ID: LIB3543-063-Q6-K6-B2.pep
EKQDLSHFSRCGARFGDPSIASLFSISNYCLSNDYVNNIVAHPYNFDAGDLALYYVSFLRAVSSKISRDTLCLLVKVHGDVVVSFPMYTEALKFAQHEEKMIQTAIRALTLNIYNICDNNVYQFITTPPASIYFSDLVSSLRKQCLQLDALVNSSEDKCTHQRNKDIFL

SEQ ID NO: 107264 - protein, 111 aa, Gossypium hirsutum
  unsure (1)..(111): unsure at all Xaa locations
  Clone ID: LIB3543-063-Q6-K6-B4.pep
AWSSYRFKQKPPWPWLAITTSIGILVIALLVGYIFHATVNRIAKVEDDCHKMMELKKXAEAADVAKSQFLATVSHEIRTPMNGVLGMLDMLMDTDLDVTQLDYVKTAQASG

SEQ ID NO: 107265 - protein, 173 aa, Gossypium hirsutum
  unsure (1)..(173): unsure at all Xaa locations
  Clone ID: LIB3543-063-Q6-K6-B7.pep
TILQEDLSKSLLIKELRSLNPIDPEPISPSKEXRKRRDLADIRVLFSNHLDEDIIKQQKKILARLGISEASSILAATHFVTDKFVRTRNMLEAIASGKPVVTHLWLESVGQVNIHIDEEAYILRDIKKEKEFGFCMPASLARACRRPLLQGRRVLITPNTKPNKETIVHLVAV

SEQ ID NO: 107266 - protein, 211 aa, Gossypium hirsutum
  unsure (1)..(211): unsure at all Xaa locations
  Clone ID: LIB3543-063-Q6-K6-D2.pep
NADPDLPDNDGRSPXHWAAYKGFADCIRLLLFLDAHRGRQDKEGCTPLHWAAIRGNLEACTVLVQAGKMEDLTVTDNSGLTPEQLASDKNHRQVAFFLGNARRLLEKRCDGNSRLGRFTRLRLAPFLWCIILLLLATYIQSVIMDANLPKLTAGFSFMAWFGVILASTGLVMFYRCSSKDPGYIRMNVHDPMNMKDDEPLLKIETNNXSLL

SEQ ID NO: 107267 - protein, 143 aa, Gossypium hirsutum
  unsure (1)..(143): unsure at all Xaa locations
  Clone ID: LIB3543-063-Q6-K6-D9.pep
QRPRXMMVNLPDAANRAKILKVILAKEDLSPEVDFDAVASMTDGYSGSDLKNLCVTAAHRPIKEILEKEKKERAAALAEGKPPPPLSGSADIRSLNMDDFKYAHERVCASVSSESVNMTELLQWNELYGEGGSRRKKALSYFM

SEQ ID NO: 107268 - protein, 100 aa, Gossypium hirsutum
  Clone ID: LIB3543-063-Q6-K6-E1.pep
AAWASLGLCAFSACLLKKDYRAASKVDAEIRREEYHLRAKDGNLQSRTMLLNGNILSVDSSGNIPPLEPLYVNSAKPITVEPLSIVFIHLSDVILPACKV

SEQ ID NO: 107269 - protein, 135 aa, Gossypium hirsutum
  Clone ID: LIB3543-063-Q6-K6-E6.pep
MILLGKEDHLSYWEFVNSSDYDDDDDDDDDDDDSGDVISVSDDDSLSSPKDTLTPRLIQGYACDGDGEQEVDDGDDDLDDELVPRAFSGKLGMQRMRKLGKRVFAKMHTSKKSPFLYMKPGCVYGKHGLGFKHSF

SEQ ID NO: 107270 - protein, 100 aa, Gossypium hirsutum
  Clone ID: LIB3543-063-Q6-K6-E7.pep
REETYRSTHWKCCTGKKETRSRNILRRGLRPTSLQIGIRIVCTGRGRTNYCIKNDYPLRNCKSIYSRSACRVASSLVGGLPDFACQESEERRPRDTSIEK

SEQ ID NO: 107271 - protein, 205 aa, Gossypium hirsutum
  unsure (1)..(205): unsure at all Xaa locations
  Clone ID: LIB3543-063-Q6-K6-F6.pep
PASAPRPPNAHHSILXQLDLLSIATPPDLEAWTRMAETFDNLTDSVRIAMVGKYVGLTDSYLSVVKALLHACIACSLKPSIDWIAASDLEDDSAESAPEAHAAAWKTLRNAECVLVPGGFGDRGVSGMILAAKYARENNVPYLGICLGMQISVIEYARSVLGFERANSAEFDKETPNPVVIFMPEGSRTHMGSTMRLGSRSTLFQ

SEQ ID NO: 107272 - protein, 210 aa, Gossypium hirsutum
  Clone ID: LIB3543-063-Q6-K6-F8.pep
CTIAKLQKLSNHQASGAEQPNSPMNRGKQVPFAVLLPALLPQLDKDRAMQLHTLYGKLKKNEIAKDGFVRHMRDIVGDQMLRLAVNKLQVQMSSNQFPLQSPAGLRQNTPRMPSVGSATQFAGPHSLAQLHQKGPNSPANSSHAPSTPVPMQTNSSYLSGENKAQKSQDMDCQSDSRFGMLGSQISSTGSTTVNQERGRPSIPAQGINKQ

SEQ ID NO: 107273 - protein, 83 aa, Gossypium hirsutum
  Clone ID: LIB3543-063-Q6-K6-F9.pep
AQIQINPQPKLNPSPKLKKIQPKETLGAPHLGLPIAASLLERRLATAAVRLSLLPTCLLPLESPRDLIDGGPFAVIGVGLKRG

SEQ ID NO: 107274 - protein, 179 aa, Gossypium hirsutum
  Clone ID: LIB3543-063-Q6-K6-G7.pep
MGNQGWRLMQAFMDKAMVTPSQTHFQTPLCKLNLKETSEFVKSFPMAVSNTTTTTTTTGLDVSMQRRRGVNSVTTQRRVLETPCTPGRPVFSFSGGNLARKSFPSKWDDAEKWLISSSCHESPAHTIKSLLESSKVTKQCDNFKQQAEIFAEKSRSLRKKYRVVKGQFHWDIIIQPGVL

SEQ ID NO: 107275 - protein, 187 aa, Gossypium hirsutum
  unsure (1)..(187): unsure at all Xaa locations
  Clone ID: LIB3543-063-Q6-K6-H3.pep
HACAAAWVGPYDECKAQGQVILQLAQSTSFLGQVDLFKVRGKFALSDAYEDHFMLPKGKTIIVTHQRXVLLLHQSSNITHRKLNPMRDPCLVLWDVPWNDLATMELTHGKKDQSKAPPLQLMLYLWTTPSHTKEQARVLKCNRDTHHAPEVYTSMEPAVQTYGQNILKEMVTXEVTKPYLPVALPLK

SEQ ID NO: 107276 - protein, 199 aa, Gossypium hirsutum
  unsure (1)..(199): unsure at all Xaa locations
  Clone ID: LIB3543-063-Q6-K6-H5.pep
LCRGEELLARLHHRHLVALRGFCIKKRKRFLMYEYMSNGCLKDXIFIPPXKTPLSWETRIQIAIDVANALEYLHFYCDPPLCHRDIKSSNILLDEDFVAKVSXADFGLAHASKGGSICLEPAKTDIRGTPGYMDPEYVVTQELTDKSDVYSYGVLLLEMVTARRVVQDGVTLVESTQILLASESRLTELLDPHIKDSFN

SEQ ID NO: 107277 - protein, 184 aa, Gossypium hirsutum
  Clone ID: LIB3543-063-Q6-K6-H9.pep
SFLSVTASLNDVKRQLEFLRSESIEDYSEGPGMVVSSDDETDPTEDSLKECDVNEYSTKSFRIAESRDFSYLVDVLTEAGFHTRNPDILNGWHSAETPISLSVFETLEKKYGEQISWKRSARRLLFDRINLGLIKILQPCLRDPMWTKPVARRLISYAQNLKEIEEELYMLLVSQENEAKTNSS

SEQ ID NO: 107278 - protein, 70 aa, Gossypium hirsutum
  Clone ID: LIB3543-027-Q6-K6-A3.pep
PASAQRPIRTDKSTPNDINTYRKVMQSINDNITEEILLNEINEIIRLPIYADRIRMDSKAHLHTNSARRR

SEQ ID NO: 107279 - protein, 87 aa, Gossypium hirsutum
  unsure (1)..(87): unsure at all Xaa locations
  Clone ID: LIB3543-027-Q6-K6-A8.pep
RXRGFRLSSPCRRRCRSRSIHGLRHPSLRSRRGWDESRQSQVYVRERRTWRRPTPSLAALGEAAGGGGCWWNLVSGLLGLGLGFILF

SEQ ID NO: 107280 - protein, 66 aa, Gossypium hirsutum
  Clone ID: LIB3543-027-Q6-K6-B12.pep
VLVSSLSMRSELVSSQRKQCYSLAFIISVPALFLHSVCSFVGVFLSFVALIVEGIRRPFFHQATGI

SEQ ID NO: 107281 - protein, 70 aa, Gossypium hirsutum
  Clone ID: LIB3543-027-Q6-K6-B4.pep
RNLINAVPILQRREGTEDKCYFKQTLFQGWLPDKSLPPVYHVFHIYSFWKHLEFYEILFSMKLLKLVILN

SEQ ID NO: 107282 - protein, 211 aa, Gossypium hirsutum
  unsure (1)..(211): unsure at all Xaa locations
  Clone ID: LIB3543-027-Q6-K6-B5.pep
PASGLIEVGLGDDDQCIEDDFTAWRELLWPELDQLLRXEDDENSPXTPYTAAIPKYRVVIHDPSMMHIEDNHSNTENGNASHDIHHPCRVNVAVQRELHKPESDRSCIHLEFDISGTSITYETGDHVGVYADNSIETVEEADGLLGQPLDLLFSIHTDNKDGTPSGSSLPPPFSGPCTLKTALARYADLLNPPRKAALVALAAHATEPSEA

SEQ ID NO: 107283 - protein, 54 aa, Gossypium hirsutum
  Clone ID: LIB3543-027-Q6-K6-B6.pep
PCDYISETYCDSLQEQVKKLKERAKENTGDYFEREVSDKSTADVLQPDQTMLST

SEQ ID NO: 107284 - protein, 133 aa, Gossypium hirsutum
  unsure (1)..(133): unsure at all Xaa locations
  Clone ID: LIB3543-027-Q6-K6-C10.pep
MTYIGCMKXGPVITDLTEWYEKSGHLIGNEYFLHAYGPIYVLSAEVVASLAGARNDSLRMFNNEDVTIGSWMLAMNVHHEDNRAICDPRCTPTSVAVWDIPRCSGLCNPASKLKELHKIGMCSKSPTLPPDDI

SEQ ID NO: 107285 - protein, 124 aa, Gossypium hirsutum
  Clone ID: LIB3543-027-Q6-K6-D6.pep
GRKAAAIAAADVAVMIQGTRPRAVHYSIAAGPSATLQQEGPQAIHYSVASGLSMTQPEQPHTIHYSIAAPAPSATPQQEQPQAIHYSLAPGPSATPQQEQPLTIHYSIAAPGPSTTPQQKASLQ

SEQ ID NO: 107286 - protein, 162 aa, Gossypium hirsutum
  Clone ID: LIB3543-027-Q6-K6-E7.pep
ANPLVNSCFNEESVEVILRGSHNIGIAMATPNGLVVPNIKNVQSLSILEIRKELSRLQQLSLDNKLSPADISGGTITLSNIGAIGGKFGAPIVNLPEVAIIAMGRIQKLPRVADDGDVYSASIMTVNIGADHRVLDGATVARFCNEWKRFIEKPELLMLHMK

SEQ ID NO: 107287 - protein, 200 aa, Gossypium hirsutum
  unsure (1)..(200): unsure at all Xaa locations
  Clone ID: LIB3543-027-Q6-K6-F10.pep
KNTGLECQDQNSERSSLLNAWGLAGIVAASVFIIFASAFVVRRWIMRSGQLSDPEEIEEEQIKXFLDQNLCFLSSSSRSKEPLSINIATFEQPLLKLTLGDILEGTHHFCKTNIIGDGGFGTVYKAKLPSGKTVAVKKLSQAKTQGNREFIAEMETLGKVKHQNLVPLLGYCSLGEEKLLVYEYMINGSLDLWLRNRSGA

SEQ ID NO: 107288 - protein, 91 aa, Gossypium hirsutum
  unsure (1)..(91): unsure at all Xaa locations
  Clone ID: LIB3543-027-Q6-K6-F11.pep
HLIEDGYSCPFFNFSPWRXILCIFSYRLPMMSSFSPWAIVCLFVLSRCHSQFFKVHASESSSFSVDAMHGSPPDLWSPAVMIGMSNAYRLL

SEQ ID NO: 107289 - protein, 64 aa, Gossypium hirsutum
  Clone ID: LIB3543-027-Q6-K6-F2.pep
QKVTFSITLKSTDRDFQSLCLVSCESVLTVFNFLLYESFSLQAGYQGNTFKLRVPFPRRAEDRK

SEQ ID NO: 107290 - protein, 92 aa, Gossypium hirsutum
  unsure (1)..(92): unsure at all Xaa locations
  Clone ID: LIB3543-027-Q6-K6-F4.pep
MQAFHCGSLYALVFLISCFWLTYFCLLGSDPSYATFHDEEWGVPVHDDKKLFELLVLSGALSELTWPAILSKRQMFREVXMDFDPAAVSKLN

SEQ ID NO: 107291 - protein, 135 aa, Gossypium hirsutum
  Clone ID: LIB3543-027-Q6-K6-F6.pep
MLQLLSPTISYPSPLFHLTSHPFPPKPHFCSTHRLSFYLPPKMASFSGFLAKSQMGMTAGGGGGDGANGFSSLMDYVGKGGLDVGDDLLVLLYHIQFACKRIAALVASPFNSALGKHSALTGATSGAAASDRDKP

SEQ ID NO: 107292 - protein, 189 aa, Gossypium hirsutum
  Clone ID: LIB3543-027-Q6-K6-G10.pep
MLSFIALALLAHALPIECQNLLKHKLNIIILAGQSNMAGRGGVANETSTGIGTWDGVVPPQCQPNPSIFRLSADLAWVKAREPIHADIDARKTDGVGPGMSFANAVLTKDPNFGVVGLVPCAVGGTTISQWQKGEFLYEQLVKRAEMAQQSGGVYRAMLWYQGEADTVNEEDVELYKGRLKTFFDDLRS

SEQ ID NO: 107293 - protein, 209 aa, Gossypium hirsutum
  unsure (1)..(209): unsure at all Xaa locations
  Clone ID: LIB3543-027-Q6-K6-G3.pep
TVLFAQVDVATELGLSSYIYLTXKASFFGLVLYLQALHRQNGSEFEYPNPENPNKDLGHLIPGFANPVPSHVLPSLMFNKHGSYTAFVKIAERFKDAEGIVINTFEELETYALSCFVNGQNPPIYPVGPVIHPDSLPHPELEQLQRDRIMKWLDNQPESSVVFLCFGSHGCHGPPQVKEIALGLEQSGQRFLWSLRMPETPLNDAAGAV

SEQ ID NO: 107294 - protein, 61 aa, Gossypium hirsutum
  Clone ID: LIB3543-027-Q6-K6-G4.pep
PKTKFLTNLLKLIRRQDRHKHSHASSLAKSDHVHDPATYTSSTMSDSVPMASPLSDRLTTT

SEQ ID NO: 107295 - protein, 118 aa, Gossypium hirsutum
  unsure (1)..(118): unsure at all Xaa locations
  Clone ID: LIB3543-027-Q6-K6-H10.pep
CISQLCKYKEATRDIHSLLAHTQSIYTTLDMKAKECENXPVRTGEQGAETNKVQAMGQELKDIDVELKFTFTMYRHEFTDSIDVFKAMDSEYKACPHIQSLKSXLDEQNLELHVKTAN

SEQ ID NO: 107296 - protein, 149 aa, Gossypium hirsutum
  unsure (1)..(149): unsure at all Xaa locations
  Clone ID: LIB3543-027-Q6-K6-H11.pep
GGDVWALCLIFGHRIGYLFTSDEEVANSVADLSLLLSFSVLLNSVQPILXRGAGGAGRQXMVACVNICSYYVVGVPLGILLGYVAKMEVKGIWIGMIIGVAAQTFVLAYITSRTDWEEEVNKASERLNKWLLEPSETSYGKLSGETVNE

SEQ ID NO: 107297 - protein, 97 aa, Gossypium hirsutum
  Clone ID: LIB3543-043-Q6-K6-A10.pep
LWGCDPQVYDPSLHFEACYYQAIEAAIELNLSTVEAGAQGEHKIQRGYLPVPTYSCHYFIDEGFEQAIGEFLVRESNQVDLVMKLFHESGPFKEGIH

SEQ ID NO: 107298 - protein, 78 aa, Gossypium hirsutum
  unsure (1)..(78): unsure at all Xaa locations
  Clone ID: LIB3543-043-Q6-K6-A3.pep
GEFIPPGGFSFXIPGWMGWVGPSSLFPVRGEKKPPMRGIIFNVELPPGIIPRGFFWPVPPSREFIKGALFVDDPPMGY

SEQ ID NO: 107299 - protein, 195 aa, Gossypium hirsutum
  Clone ID: LIB3543-043-Q6-K6-B3.pep
RFEHLESCEREGRLSKVFETLLQSFRVTVLSAYKSKFAQFVMFYACALDPENCGMRFATMLADLFVQDSQPQPTRMSAVSYLASYLSRAKFLAASSISSMLKRLVDWCLEYCEAHDGDINPNAHRVFYSGCQAIMYVLCFRMKVFVDVPRLKSELLIPLEQVLKHKLNPLKVCLPSVVEEFLRQAKAASLFTVCK

SEQ ID NO: 107300 - protein, 44 aa, Gossypium hirsutum
  unsure (1)..(44): unsure at all Xaa locations
  Clone ID: LIB3543-043-Q6-K6-B6.pep
PRRPNXIDIMFWIYVQVICGSTTCIVRNYLAWSLGIKSMISLLA

SEQ ID NO: 107301 - protein, 64 aa, Gossypium hirsutum
  Clone ID: LIB3543-043-Q6-K6-B8.pep
YPQEQQSKCSISVEYGNKQTSDLTNASSSHYGPKPVTPLTANSYSITQQIMKVNKPHWFFRSHS

SEQ ID NO: 107302 - protein, 199 aa, Gossypium hirsutum
  unsure (1)..(199): unsure at all Xaa locations
  Clone ID: LIB3543-043-Q6-K6-C1.pep
MHAPPSPLVENYLREARFWHVATVGRGCKLESKLISALIERWRPETHTFHLPCGECTITLEDVHLHLGLPVDGHPVTGSAQSSNWEAVCYELLGAVPDKMDGGKVEMGWLRATFPSLNENSTEIERIRYARSYILQIIGGYLMADTSRSRVHLRWLLKLVDXRAAGELSWGSAVLATLYREMCGATNTERAKIGVACHY

SEQ ID NO: 107303 - protein, 215 aa, Gossypium hirsutum
  unsure (1)..(215): unsure at all Xaa locations
  Clone ID: LIB3543-043-Q6-K6-C10.pep
LNIPIMRTTVRKEELSAKLLEFLESPCATTDILLAEKEQKGKKRKATPSKNIASGETSEKSAKKRQSHPXGEKRKRSSKVEEKDEDVESPVSEDDSHEDDVDTTVKEESDDEETNSKEEEDAPKKSSHKSTSKKIAMDRPDSKLKETSASGKKLTSAKSSRKSSGSTSKQGASDGDRTPGSKLKGSASKKQKVGKEGSIDGKLSTKSEVPGKKQM

SEQ ID NO: 107304 - protein, 68 aa, Gossypium hirsutum
  Clone ID: LIB3543-043-Q6-K6-C5.pep
IPVGGFKYDPLSYAQNFDDGYGDDDPEVLFIMDFLLDMLLLHQDQLQTSENGFGGEALKIFHVFAVCV

SEQ ID NO: 107305 - protein, 156 aa, Gossypium hirsutum
  Clone ID: LIB3543-043-Q6-K6-C9.pep
DAKLSSPKFFNAFEFISSMSSGFDLSGLFEDKRKSGTMFTSRCSASAIMSKVEAVAKGLNFRVGKAKDFKMRLQGSSEGRKGRLFVTAEVFEVAPEVAVVEFSKSAGDTLEYAKFCEEDVRPALKDIVWTWQGDSFNEAEEHEKQVQQDTAEPNTL

SEQ ID NO: 107306 - protein, 85 aa, Gossypium hirsutum
  Clone ID: LIB3543-043-Q6-K6-E1.pep
SFHFTVPLIFLDVKSALSRSITTSLLFFVLMSGVIFLKICIFQIGLVGLFLADVHMFLFVGPGYIQCHTCFSGILCDVHDFYHYR

SEQ ID NO: 107307 - protein, 201 aa, Gossypium hirsutum
  Clone ID: LIB3543-043-Q6-K6-E10.pep
QLIRRGARESRQITQVYGFYDECLRKYGSVNVWRYCTEIFDYLSLSALIENKIFSVHGGLSPAISTLDQIRTIDRKQEVPHDGAMCDLLWSDPEDIVDGWGLSPRGAGFLFGGSVVTSFNHTNSIDYICRAHQLVMEGYKWMFNNQIVTVWSAPNYCYRCGNVAAILELDENLNKQFRVFDAAPQESRGTPAKKPAPDYFL

SEQ ID NO: 107308 - protein, 138 aa, Gossypium hirsutum
  Clone ID: LIB3543-043-Q6-K6-E11.pep
MIVVFLYELLYSLFNNIVSMFIEYFNAQSESGPEAVQKQATQTPKNVVFKGRKSFICPPTKLPSSIAYPFAFIKPCGFHGDVTLKDINQRIQTPPPSKPKQSNEDLPTSAFSGKLVVGKTKIRTEGGKGSITIMRTKG

SEQ ID NO: 107309 - protein, 137 aa, Gossypium hirsutum
  unsure (1)..(137): unsure at all Xaa locations
  Clone ID: LIB3543-043-Q6-K6-F12.pep
GGGGVXPYHTLPAYGISVDTIRPRKNASETYQTDIHQLSSHETYTNTPGHIFTLNAXTFEDIDHTXYDGXDIAARQTTEYMALDAFVLNMVHNIGNSGKPVDSIXPGQLILAAANADEGLKSTDFPAVGPTLIAAGA

SEQ ID NO: 107310 - protein, 101 aa, Gossypium hirsutum
  Clone ID: LIB3543-043-Q6-K6-F3.pep
ILTPKKMGPPKKHFVPFLLLLAFCILLLLYSPRPNSISTQFPLNPHSIATSTATSASASSTFSLTIKVLTFNRLNSLTRCLTSLSKAHYHPDHPVHLHIFV

SEQ ID NO: 107311 - protein, 215 aa, Gossypium hirsutum
  Clone ID: LIB3543-043-Q6-K6-G4.pep
DNSKADFVEKYLEDAAVARALTEGCERQDGRPFRQRLLVVANRLPVSAVRRGEDSWSLEISAGGLVTALLGVKEFETRWIGWAGVNVPDEIGQKALTKALAEKWCIPVFLDEEIVHQYYNGYCNNILWPLFHYLGLPQEDRLATTRSFQSQFAAYKKANQMFADVVNMHYEEGDVVWCHDYHLMYLPECLKNHNNNMKVGWFLHTPFPSSEIIGH

SEQ ID NO: 107312 - protein, 183 aa, Gossypium hirsutum
  Clone ID: LIB3543-043-Q6-K6-H6.pep
PSVRNDPMTDGLITWGKANNSFIVIDLLDFSQRILPVYFKHSNFSSFVRQLNTYGFKKVDPDKWEFANEWFLRGQKHLLKNIARRKHNKNPFMQLKAEDLEDEEIVMEIARLKDEQKSLEEELQGMNKRLEATERRPQQMMEFLYKVVEDPDLLPRMMLEKERTRQLNADKKRRLTMMPSNSS

SEQ ID NO: 107313 - protein, 195 aa, Gossypium hirsutum
  unsure (1)..(195): unsure at all Xaa locations
  Clone ID: LIB3543-044-Q6-K6-F10.pep
LISSLLGPFTTHAVGCEVIGVLVYLNLDLNSMSDLLQPAKISLMVDILNEGSIETKINCTRLIGMLIEGTDFASQNVASLSLLVGLLRLVKDKKHPNGVVAGLNLLKTICSHEPVRNSFVNVGAVPQLVELIPGMNNECLELVLHILELLSSTPEGRLAXKDCPSTIPNVVKLLMKAXXNCTQLALSILWSICKF

SEQ ID NO: 107314 - protein, 201 aa, Gossypium hirsutum
  Clone ID: LIB3543-044-Q6-K6-F11.pep
AAWADAWVRSLSGNKFIANPNNSAVSVFSASMLDSGNFVLYNKDNHTIWESFEHPTDTLLGGQTLLTNHELISSSSENDHSGGRFHLSMQGDGNLVLYPRQSEDSAINAYWSTNTFWMGLSLRLFLNATGLLQLINNDDSSIYETINLSFFPEPTYNDYNESSSNNNNSTVFSASLDVDGNFRLYAHLFERNGGFQTYPLL

SEQ ID NO: 107315 - protein, 62 aa, Gossypium hirsutum
  Clone ID: LIB3543-044-Q6-K6-H11.pep
MGLKQTIRSLDAFPRTEEHWLQKTQSGALVSIVGLVIMATLFTHELTYYLTTYTVHEVCIFF

SEQ ID NO: 107316 - protein, 169 aa, Gossypium hirsutum
  Clone ID: LIB3543-047-Q6-K6-B12.pep
VVGALLAARAFGAPRIVTVDGNRLSVAKELGADGVVEVSTNMQDIPKEVETIGDVMGAKVDVSFDCAGLSKTMSTALSVTRAGGKVCLVGLGHNEMTVPLTPAAAREVDVIGVFRYKNTWPLCIELLRSGKIDVKPLITHRFGFSQKEIEEAFETSAGGGNAIKVMFNL

SEQ ID NO: 107317 - protein, 200 aa, Gossypium hirsutum
  unsure (1)..(200): unsure at all Xaa locations
  Clone ID: LIB3543-047-Q6-K6-G10.pep
PASAQLVQQQSQMGHPQMQQPQQQLQQQLQQQPQPQLQPQQSPLHQQQQQSPRMPGPAGQKTLSLTGSQPNATASGTTTPGGSSSQGTEATNQLLGKRKIQDLVSQVDSQGKLEPEVEDLLLEIADDFIDSVTTFACSLAKHRKSSTLESKDILLHLEKNWRLTIPGFSSEERNQTRPLSSDXHKKRLEMIRALMGSSQP

SEQ ID NO: 107318 - protein, 141 aa, Gossypium hirsutum
  Clone ID: LIB3543-047-Q6-K6-G12.pep
MGQAFRRATGRLRSMDQSQPTKPRRPLGPTDEQKISRVSQHENLDHASVARSNPENVLEERDPKYDAMLSQMVGRISAKPGGKLEMGEAFVAENPSRPLPKLRNTTVESGRYEERPAPPGTLNVKQLRHIMLLHQGKADDH

SEQ ID NO: 107319 - protein, 59 aa, Gossypium hirsutum
  Clone ID: LIB3543-048-Q6-K6-C11.pep
PRPVLDRFNPSGTVDSSKDELIKISFGGLKKLVLEAITFGSFLWDGESFVDSRYHFVMN

SEQ ID NO: 107320 - protein, 149 aa, Gossypium hirsutum
  Clone ID: LIB3543-048-Q6-K6-E11.pep
GSVVSYASSSAFSLDAASVKDPTRHGHRRHEHDSGCEDVEESRTWACNMRARGGAWCTDVRGGGALNAGCGPRENGNPRVSEIPKNLSLSGMFNLGLYLGLFFGGLVSFFGFVILFFMCMGCNWVFGLGLGSPGKICVSQYKCINYICY

SEQ ID NO: 107321 - protein, 46 aa, Gossypium hirsutum
  Clone ID: LIB3543-050-Q6-K6-A12.pep
SKKLYSYLLSNTNAICHLTKPSNYTPNHYKVPLIPDLMIHISIAPD

SEQ ID NO: 107322 - protein, 209 aa, Gossypium hirsutum
  unsure (1)..(209): unsure at all Xaa locations
  Clone ID: LIB3543-050-Q6-K6-A3.pep
FKKDEEFQNKXIYCPKXVLLHGPPGTGKTLLAKAIAGEAGLPFFAANGTDFVEMFVGVAASRVKDLFANARSFAPSIIFIDEIDAIGSKRGGPDIGGGGAEREQGLLQILTEMDGFKVSTSQVLVIGATNRLDILDPALLRKGRFDKIIRVGLPSKDGRLAILKVHARNKFFRSEEDKEALLEEIAMLTEDFTXAELQNILNEAGILTA

SEQ ID NO: 107323 - protein, 163 aa, Gossypium hirsutum
  unsure (1)..(163): unsure at all Xaa locations
  Clone ID: LIB3543-050-Q6-K6-B11.pep
ATRSTQRGGGGRGSQHYRALTVPELTGALCGXKELMCACXPRNGPFLTDSAXLHATNEQRGRVDQQMLNVHNKNCYTLISGIPXNNEKSTVCDIPPTALKMELALIGIATSIQEMFKRVSEQEKAXVRMKAFLSWYTWESLYEMEFTEAGSSMNDLAYKYHQY

SEQ ID NO: 107324 - protein, 121 aa, Gossypium hirsutum
  unsure (1)..(121): unsure at all Xaa locations
  Clone ID: LIB3543-050-Q6-K6-B4.pep
PRPRXRGRTRGAKSNRVKSSGGEVDEIQGFDFAEWLKNTVTESDFVVMKMDVEGTEFDLIPRLFKTGAICLIDEIFLECHYNRWQRCCPGQRSAKYEKTYGQCLQLFTSLRESGVLVHQWW

SEQ ID NO: 107325 - protein, 211 aa, Gossypium hirsutum
  Clone ID: LIB3543-050-Q6-K6-D3.pep
QRPVIPCIDQSSADSHNTFASDLIKQFNTIEQQINSVTRGVSKQTGTATSGIEGPTNKINNRKGIRGGSPGLAKRTPAPVESAPPPSPAALRASMSLRLQFIVRLLPIICADGEPSARSMRNMLASVILRLLGSRVVHEDVDLSSNLAQLKRDMELMPIVASTEMSGDSLFDRLLLVLHGLLSSCKPSWLKSKDAKDFSGFDREAVEGLQN

SEQ ID NO: 107326 - protein, 195 aa, Gossypium hirsutum
  Clone ID: LIB3543-050-Q6-K6-D7.pep
QRPPSVRPRVRPRVRPRVRGRVGGEGNHYSPPRIMNPHAAEFVPGQPWVVPNGYPVSPNGFLASTNGMPISPNGYPMPPMTPNGIAVTQNGFLTSPIGSVESPAVITVDIDAENRSGELLAEQTPEISSTYVEGENQSSEQKPPEDQSLDNESKLLENEGKPADVVPVTGGVTLAKEACSEIQVDAKLSKWLGRL

SEQ ID NO: 107327 - protein, 109 aa, Gossypium hirsutum
  Clone ID: LIB3543-050-Q6-K6-E1.pep
TGYMLSYDVFCWGWGVFLHREFQHAIPQRASQLSFLPNIGSSLFFSTYLDLGLLVSPGLFSSSAFDYRMIVLWLMISLDQYIRNRVICLWPILGSILSELKQRLRLCVL

SEQ ID NO: 107328 - protein, 56 aa, Gossypium hirsutum
  Clone ID: LIB3543-050-Q6-K6-E11.pep
SRAYSTDLPHHRGLRGSYTLFSTLAYTVVRNLLFYFFRAYRVGRWVLFNMGLDIYI

SEQ ID NO: 107329 - protein, 97 aa, Gossypium hirsutum
  unsure (1)..(97): unsure at all Xaa locations
  Clone ID: LIB3543-050-Q6-K6-E12.pep
MARELIRLDNKHISVEQIRGGGDRILQCYIRNMHGLPSPLIENYLREAGFWHLAMVGRGCKLDPKLISALIERXRPETYTFHLSCGECTITLEDVNL

SEQ ID NO: 107330 - protein, 212 aa, Gossypium hirsutum
  Clone ID: LIB3543-050-Q6-K6-E5.pep
MDADKALELLKSGATLLLLDVPQYTLFGIDTQVFSVGPAFKGIKMIPPGVHFVFYSSSTRDGKEFSPITGFFIDAGYSQVVVRMWDQQEERLIKVPEEEEERYRQAVRSFEFDKHLGPYDLSLYADWKRLSNYVTKSTIERLEPIGGEITVTYEHGMLKNTYKSAMERVLDDQLRNSKFSSPAEKHPKRGCYYTPIPRIIKRKGIGSEQLTS

SEQ ID NO: 107331 - protein, 166 aa, Gossypium hirsutum
  unsure (1)..(166): unsure at all Xaa locations
  Clone ID: LIB3543-050-Q6-K6-G1.pep
SICRXHAGGNDKIKQLVPGIKVYGGSLDNVRGCTHQLQNGDTLSLGSHLNILALHTPCHTKGHISYYITGKDGEDPAVFTGDTLFIAGCGKFFEGTAEQXYQSLCVTLGSLPKPTRVYCGHEVQRFTVPHLLSVSVVYAELFEIFTMYACQHPVSTKVLAKENFWV

SEQ ID NO: 107332 - protein, 82 aa, Gossypium hirsutum
  unsure (1)..(82): unsure at all Xaa locations
  Clone ID: LIB3543-050-Q6-K6-G4.pep
MRRKLEWIKNRIMVQREASPVAEEKAAETCGEKIDYQAXVSRLVDKIVRGLYRHKQVFLRELVRGTYCYIAKTMLFLNEESH

SEQ ID NO: 107333 - protein, 190 aa, Gossypium hirsutum
  Clone ID: LIB3543-050-Q6-K6-H1.pep
VPTTVKQHVLLRSAEHANVFLVNDFQNPLQRTLSSLELPRAVSLSIVPSMPVSGGESASQENGERTDVDVLDGSPSIRQFYRRERQKVHDPARDISMQVLEKFSLVTKFAREATSQLFWETPTNAFSHFERGSSNLSAIDSSQKPRDDVLELPVPPDPLELDKLSLAWGKPRQPPLGLEEWATFLDSEGR

SEQ ID NO: 107334 - protein, 116 aa, Gossypium hirsutum
  Clone ID: LIB3543-050-Q6-K6-H10.pep
IWNAGEERGDSPICDEQPPVGVKKTPLRDLQNENRIVPNSTGSSPFPKDRGPGIDPIKGSGTKRPSPECPVSPSQCQSPSSCAANGHLVYVRRKCEAELGKSSVFDCTSTSNCQQM

SEQ ID NO: 107335 - protein, 219 aa, Gossypium hirsutum
  unsure (1)..(219): unsure at all Xaa locations
  Clone ID: LIB3543-050-Q6-K6-H3.pep
FRFQKTLFLVGLIAFISFPAEAAVRKYQFDIQVKNVSRLCHAKPIVKVNGRFPGPTIYAREGDRVIVNVTNHAKYNMSIHWHGLKQYRNGWADGPAYITQCPIKTGNSYAYDFNVTGQRGTLWWHAHILWLRATVYGAIVIMPKQGMPYPFPKPNMEQLVVLGEWWHKDVEEIVKQGNNMGLPPNMSDAHTINGKPXPLFPCSEKHTFAMEVESGKTYL

SEQ ID NO: 107336 - protein, 183 aa, Gossypium hirsutum
  Clone ID: LIB3543-050-Q6-K6-H4.pep
PSLQKLPGWGYGRVYTVVVVNCTFPVNPNQDNLGGKLMINAYYGESPRKYERFTALEETPGSYNAAKYRPPFQYEYLYCGSSLYGNLSADRMREWMAYHAWFFGASSHFVFHDAGGVSPEVRAALEPWVRAGRATIQDIRDQEQFDGYYYNQFLVVNDCLHRYRHAANWTFYFDVDEYIYLPD

SEQ ID NO: 107337 - protein, 179 aa, Gossypium hirsutum
  Clone ID: LIB3543-051-Q6-K6-C12.pep
MGGEEEEEDAISSWTRNNNNDGNANNEFESGGDDLAMSAASLSSFKSMLDADWYISPAMNQDLQIRELGFCSNQVDNSLLLHHQIDSSASCSPSQAFTLDPSQSHPLLPPKSCFSSLLNVSCHNPFDNAFDFASEPAFLAQFQPNPTPNLMAFPQTQMGTPEFSSSSEFQGTRLFAGTE

SEQ ID NO: 107338 - protein, 170 aa, Gossypium hirsutum
  unsure (1)..(170): unsure at all Xaa locations
  Clone ID: LIB3543-051-Q6-K6-C7.pep
CIPEXGNKAPGEHLSEVTVMLRTKFRGYLQAVIEXLAENTKLQNSTKLKKILQDSKETMGESDIRVRMQMLKELLRSTINHLHTVFETQVFIAICRWYWDRMAQDVLGFLENRKEYRSWYKGSQIAVSILDDTIASQMQQLVGNALPAKDLEPPRSILEVRSMLGKDAYY

SEQ ID NO: 107339 - protein, 82 aa, Gossypium hirsutum
  unsure (1)..(82): unsure at all Xaa locations
  Clone ID: LIB3543-051-Q6-K6-D11.pep
KLVPVFWKKKKRGGRDXQKFIEIFPPDSLDPSFKDRLQRHFYETCPYLKKKKKKKKTLGDFLNFPHQFPWPLIKGKSKKGLF

SEQ ID NO: 107340 - protein, 160 aa, Gossypium hirsutum
  Clone ID: LIB3543-051-Q6-K6-G11.pep
MKFKGEGAVGSEQSKKSQGRREEGGSVYANNKSVPGKKVLENEESLTTPMASVDQTPRIRQTRGNQELNDELKMKANELEKLFAEHKRRVPGDQLSSARRSKPADEQIEQEGSSQYNKPVAVDVSPLQLPDKNSTSESVGSLSNIANFCTPPTKMVNNQD

SEQ ID NO: 107341 - protein, 142 aa, Gossypium hirsutum
  Clone ID: LIB3543-051-Q6-K6-G4.pep
MKISTRFLLMFFVALGIIFMCVYQPAHLFGMEFEVRVINGFSNNSSLPLVIWCISQQDGDMGGRALQEGDDFGWRLKTNIWGNSHYLCTMKWDAKRRSFDAFKVPRDSQRCAPLNKCSWLVKEDGFYFSSDEVNWKKDFSWS

SEQ ID NO: 107342 - protein, 144 aa, Gossypium hirsutum
  Clone ID: LIB3543-051-Q6-K6-G7.pep
RRGGGNCSNHLQPSSLTIAIAINPLLYRKPTHPHYYHFLKLYPLLNPSPLPWGGSPNTSTSTLLAPFVAALNFCFASRMNQRKKKEPFQLSPAATLLWALMAASFCLVSTSNSLGIVIVNNLVTPVDRGVRHLFRFRKIVCRPQ

SEQ ID NO: 107343 - protein, 96 aa, Gossypium hirsutum
  unsure (1)..(96): unsure at all Xaa locations
  Clone ID: LIB3543-058-Q6-K6-B12.pep
KTLGEEEGWSLKKQNQCFFRVKSKRENYKXKIWTPPPTLLFYFYFFAHRKEKKKRERRVIVCDCTLRCHPLVLXVSLLCFTCLHPPPPPHAWADAG

SEQ ID NO: 107344 - protein, 79 aa, Gossypium hirsutum
  Clone ID: LIB3543-058-Q6-K6-B3.pep
MSGRLRDRSSSQAKRHSHHQTTTTVAAVAMPNFLTETLPCPFGELATNLSDSALRETAYEILVGACRSTGGKPLTYISQ

SEQ ID NO: 107345 - protein, 47 aa, Gossypium hirsutum
  unsure (1)..(47): unsure at all Xaa locations
  Clone ID: LIB3543-058-Q6-K6-C10.pep
PPFXFFFFFFFFFFXFFFFFFFFFFFFFFFFFDQGKKRRSVASIYTL

SEQ ID NO: 107346 - protein, 181 aa, Gossypium hirsutum
  unsure (1)..(181): unsure at all Xaa locations
  Clone ID: LIB3543-058-Q6-K6-D10.pep
CEVKDEEENEEQEENEDDDGDANANAEAEADANANAEDKPIPMETQKSPSVSKQPRQWSTEEVSWDGEPVSKTSSDKPLYKRAIVHGEVVVVGSAVSVEVDLYELPAIYFVEYMFETSKGRKMFHGRMMQRGSETVLGNAASEREVFLTNNCGEFELEDVKQTVVVDIQLXPWGYQHRKDN

SEQ ID NO: 107347 - protein, 162 aa, Gossypium hirsutum
  unsure (1)..(162): unsure at all Xaa locations
  Clone ID: LIB3543-058-Q6-K6-D6.pep
PKDLLSNGNSDASINMPDILTRKKAKRRRSYTSLLMTRSKLLEGNGVKEEEKLPGIDKDDNPLEVAQYVDEIYQYYWTTEALNPLSGXYMSIQKDITPHMRGILINWLIEVHLKFDLMQETLYLMVTLLDRYLSEVQIXKNEMQLVGLTTLLLAXKYEDFWH

SEQ ID NO: 107348 - protein, 158 aa, Gossypium hirsutum
  Clone ID: LIB3543-058-Q6-K6-D8.pep
MDPCPFVRLTVGSVALKVPVASKPARSVVHPSWSPCFCKIKLNNFPLQTAVVPYIPSENHFPDNQPPSIAATFHLSKADIDKLAAKSIFSAKLSLKIAVYTGRSGATCGVNSGRLLGRVSVPLDLTGTDSRACVFHNGWISVGKEGNKNSSARFHLNV

SEQ ID NO: 107349 - protein, 95 aa, Gossypium hirsutum
  unsure (1)..(95): unsure at all Xaa locations
  Clone ID: LIB3543-058-Q6-K6-D9.pep
RTVMEAVTAILGGGLRIGVLLQGKKXRDDNKTLLQTGISRDNQMDALGFSLEPNPSQTFPSHCPGGSPLTFPCDTPLPLARYPATPGLVARVTHD

SEQ ID NO: 107350 - protein, 91 aa, Gossypium hirsutum
  Clone ID: LIB3543-058-Q6-K6-F12.pep
IVTRQRNKKSKKEKAMTCTNDYKSRIYHVKREEGFLVFFIFFGYSVLKKRKRLLDKYIENQKAKQQKKEMLILISISLILLVYFFPFFVFF

SEQ ID NO: 107351 - protein, 163 aa, Gossypium hirsutum
  Clone ID: LIB3543-058-Q6-K6-H8.pep
MMKIMRRHGWQRPLHPLQMVGMAVFSFLVVAFYTFLGLLLGNRIPEITISTIFSFVALSVVFLFVRCTAIDPTNKTSFKKKKKGKSKGILKLNYGFILTQIVVTFFKRLEKKILRTFIRRKYLDPWKTNFQMEPLLPLPLVMKDDAVSPDVKEDDNISYFSLC

SEQ ID NO: 107352 - protein, 89 aa, Gossypium hirsutum
  Clone ID: LIB3543-059-Q6-K6-A4.pep
MRCKEHLTDLSSSVGVCATCLRERLLAVVAAQAQAQLARSAESRRKPDPPPLVFPRSVSPYVSRRKFDDDGDNWIHHQRFYSTPQVGPT

SEQ ID NO: 107353 - protein, 172 aa, Gossypium hirsutum
  unsure (1)..(172): unsure at all Xaa locations
  Clone ID: LIB3543-059-Q6-K6-A7.pep
VIPVRVPCAGPPLQFVPLGNGFAYSCVNAVPCWGGVAGNEKGAVQPVAVAVNGGFPSFQTGQDLRVNGGNGYFSEQNSSRDERKRKTGSNGSPMYSSSTASDLHSSSYQGGCSSETATHTPRINCSVASNLNRQQSEQSATSHQTDSAQSIDKSRKGIENTLSSTATDXTSL

SEQ ID NO: 107354 - protein, 145 aa, Gossypium hirsutum
  unsure (1)..(145): unsure at all Xaa locations
  Clone ID: LIB3543-059-Q6-K6-B2.pep
RKYMHRRRENYEADMIPDKISEDLSVADTTAEICLEKEEFLKLDDGKNDDTEKEDEKTNEGELIRNEIQEDAKEAKTALKICSQTERSVKPEAVAEDEMAVSETLTKKTSDEQIQNPTSALPSKEEECERTITDEMIXKCENTRL

SEQ ID NO: 107355 - protein, 88 aa, Gossypium hirsutum
  Clone ID: LIB3543-059-Q6-K6-B6.pep
YLHSFLWRGVGVVCSRPLVGCSVAISAAADLVVSLSSSLLLLRVVGLSFVAGFSLSSGGGGGRLTYLASALSGLNAGSTCDASAVPLP

SEQ ID NO: 107356 - protein, 54 aa, Gossypium hirsutum
  Clone ID: LIB3543-059-Q6-K6-C12.pep
KGGGRFLQGIFLITGAHSIASVTTYLVLLVKVLHLHFANKIILLVWEKKKRGGG

SEQ ID NO: 107357 - protein, 48 aa, Gossypium hirsutum
  unsure (1)..(48): unsure at all Xaa locations
  Clone ID: LIB3543-059-Q6-K6-C8.pep
RKISHRKFEHPRHGSLGFXPRKRASRHRGKVKAFPKDDPTKPCRLTAF

SEQ ID NO: 107358 - protein, 76 aa, Gossypium hirsutum
  unsure (1)..(76): unsure at all Xaa locations
  Clone ID: LIB3543-059-Q6-K6-D10.pep
MAGMLPGDSSHHSTXILGAARNSQEKQEEVGRWYFSRKEIEENSPSRRDGIDLKKETYLRKSYCTFLQDLGMRLKV

SEQ ID NO: 107359 - protein, 153 aa, Gossypium hirsutum
  unsure (1)..(153): unsure at all Xaa locations
  Clone ID: LIB3543-059-Q6-K6-D5.pep
MSSIVWFRRDLRVEDNPALLAGVRAGPVFAVFIWAPEEEGHYQPGRVSRWWLKHSLALLDSSLRSLGTCLITKRSTDSVSSLLQIVKSTGATQLFFNHLYDPISLVRDHRAKEVLMAHGVAVRSFNADLLYEPWDVNDDNGXPFTTFTAFWEK

SEQ ID NO: 107360 - protein, 92 aa, Gossypium hirsutum
  unsure (1)..(92): unsure at all Xaa locations
  Clone ID: LIB3543-059-Q6-K6-D9.pep
MNSPRSDDKKRGDATAQGKQIALRAAAMFKPDNPFCRVILRPSYVYKGICLHIPRCFALRYLNRLDGIVTLQVXQGKKRPVRCIYRQHSWEF

SEQ ID NO: 107361 - protein, 103 aa, Gossypium hirsutum
  unsure (1)..(103): unsure at all Xaa locations
  Clone ID: LIB3543-059-Q6-K6-E1.pep
NRNSGFRSIEIASITSASAIVSVLLALVILFLFTRKWNSRSKISTTKKEVTIFTEXXRXXXLTFDIVVQATXNFNGPATCDFGNGGFGSTYKAEISPGVXVAI

SEQ ID NO: 107362 - protein, 79 aa, Gossypium hirsutum
  Clone ID: LIB3543-059-Q6-K6-E2.pep
LSPLLSKSFGIHIPIIFTFLRLSTFQKNGRKLSQPPLCINKNETGPSHLSEECIQGGGEHCNLQLEYFKLDQSKIFKYM

SEQ ID NO: 107363 - protein, 204 aa, Gossypium hirsutum
  unsure (1)..(204): unsure at all Xaa locations
  Clone ID: LIB3543-059-Q6-K6-E6.pep
ITGDATIEFPSTHQMARGGILADAMGLGKTIMTISLLATHSERGGLSDSQSSDQPSDQGGEAIDVFGQSPNSVKTATKFPSFDKLSKQRNKLANGGNLIICPMTLLGQWKAEIETHVQPGSLSLYVHYGQSRPKDAKLLAQNDVVITTYGVLASEFSAENSEDNGGLYSVRWFRIVLDEAHTIKSSKSQISMAAAAXVADRRWC

SEQ ID NO: 107364 - protein, 219 aa, Gossypium hirsutum
  unsure (1)..(219): unsure at all Xaa locations
  Clone ID: LIB3543-059-Q6-K6-E8.pep
FDEFDISFKSKPDGLPTFLLVNRGDCFFTLKAWNAQKAGAAAILVADNQDESLITMDTPEEKNASAEYLQNITIPSALISKSLGDSLKNGITFGEMVKISLDWTESLPHPDERVEYEFWTNSNDECGPKCDSQMEFVKNFKGAAQVLEQKGYTQFIPHYITWYCPEAFLLSKQCKSQCINHGRYCAPDPEQDFCKGYDGKDVVLQNXRQACFLKXANES

SEQ ID NO: 107365 - protein, 176 aa, Gossypium hirsutum
  Clone ID: LIB3543-059-Q6-K6-F5.pep
MMSNPTLDNHIPSSKPLIRKKRRKTVDRDAPSSSSCSAYSSSVQKGMRLSSKRRNLRVRFGPVRRADVRDVDSIALPLGMSFAAVVAQVLEKIDVANERLPPDYLSLICTSAVRESLANVFGDKFDCFARNFEKSFGSTLRTLRLINDSSKHKEKHPSNPMWKVLQMKLEAETHLT

SEQ ID NO: 107366 - protein, 75 aa, Gossypium hirsutum
  Clone ID: LIB3543-059-Q6-K6-G1.pep
MKTTQKGGRTERVNNSIIKNTRIFLAGRVSVQVRPQTMSFWCLRSLPKRRHFGCLIKSIFFGKKYLTPCFKKKEL

SEQ ID NO: 107367 - protein, 53 aa, Gossypium hirsutum
  Clone ID: LIB3543-059-Q6-K6-H1.pep
KISIPTPSLPDFHSTIGKLRKKKRVDRRKLKNGEVNQLEPLLAEGRSFAICRP

SEQ ID NO: 107368 - protein, 130 aa, Gossypium hirsutum
  Clone ID: LIB3543-059-Q6-K6-H5.pep
MAVQAAQYPSNVFLLSRNGQDGQQGGGVFVDQSHMFFNNGSNGTNNNTNININNNINQRKRGRELVTGTAAITTPMNSFTLQTPPPQMIDLSQLHHHHQPNVVVSTGLRLSSGDQQQSQNHGYLQQQQQP

SEQ ID NO: 107369 - protein, 88 aa, Gossypium hirsutum
  Clone ID: LIB3543-059-Q6-K6-H9.pep
MTLKESINLCGCRLQTQDLWSVVWCRNWKKQQYNDRSQLYWKMPAVVVSGSGENQEFEGRITVYVIVCVIIAAFGGLMFGYDIGISGG

SEQ ID NO: 107370 - protein, 171 aa, Gossypium hirsutum
  unsure (1)..(171): unsure at all Xaa locations
  Clone ID: LIB3543-060-Q6-K6-A11.pep
MAVSPCLSGNDQKRRGGLTNRKLVDKYIKDARCLIATQEHNEVASALNLLDAALALSPRLEVALELKARSLLYLRRFRDVVDMLQDYIPSLKISTDDSGSVSSDNSSHQLSRERVKLLPSNDSSSDSSSRDPSFKCFSVSDLKKKXMAGLCKNCDKXGKWKYLVLGQTCCH

SEQ ID NO: 107371 - protein, 147 aa, Gossypium hirsutum
  Clone ID: LIB3543-060-Q6-K6-D10.pep
MGFKRPFDSEELQELPFKHPRQFDNNNKLTEGADTISHSYTHQNPHISVDVEGGFRKCQWDEAFETGGLNDERPLVDKDFETSAPLSLITSISSEEDVDTGPAAISPISPEYFDFDFPRRMLGPVEDAYSLLLDRSPRKQVLLGPND

SEQ ID NO: 107372 - protein, 200 aa, Gossypium hirsutum
  unsure (1)..(200): unsure at all Xaa locations
  Clone ID: LIB3543-060-Q6-K6-H11.pep
RPVNQPLSRRGVRLHGQQVPSLPTQLPDRAGLPACTDYTDGGSQYPKLELPGTDYMPPNIPKLSANGSSANSNGSSAAVTSRGSFSSGQLLAQRKLFAESTIGRSSFHKLLEPSSALRPGIAPYRIVLGDIKEKLMKTRRRLELLLEDLPCEYDPWDYYETKDQFLEPLLLCYESLQSCXAGILADGRLADLIRRVSTFG

SEQ ID NO: 107373 - protein, 208 aa, Gossypium hirsutum
  Clone ID: LIB3543-061-Q6-K6-A12.pep
MENYLTPCGAAWTGETHPVSVLPKENGCSVPDSAVADMSAAVSSDPGNRASGRGEMEGGRSPQSDLPTKGLESMEKSMSWESMPFPNFHDSFNKNSSFNVQKLNISEYNPVYVSSFRELEKQSGPRLLLPIGVNETVVPVYDDEPASIIAYALVSSDYHSQISELERRKDAVDSAVSSSLFDSINLLSLNSFSDISDTYRSFGSGDDN

SEQ ID NO: 107374 - protein, 58 aa, Gossypium hirsutum
  unsure (1)..(58): unsure at all Xaa locations
  Clone ID: LIB3543-061-Q6-K6-C12.pep
AISPPQLVIVLIIATLSVVALVCRYKHVQPHRQINRSMQIRLHPFDQEEMXILPPAMV

SEQ ID NO: 107375 - protein, 220 aa, Gossypium hirsutum
  Clone ID: LIB3543-061-Q6-K6-F10.pep
PRVRPRVRGEWVRAPTLAAPLLRLHFHDCFVRGCDGSVLLNSTKNQAEKDAIPNLSLRGCHVIDAVKSAVEQACPGVVSCADILALAARDSVSMINGPSWKVPLGRRDGRVSKLSEALANLPSPFFNVTQLKQNFASKGLNMKDLAVLSGGHTIGTSHCVAFGLRLYNFSGKGDADPSMDPTYVTQLKQKCKPGDITSLVEMDLGSFKTFDEAYYTLVSK

SEQ ID NO: 107376 - protein, 96 aa, Gossypium hirsutum
  Clone ID: LIB3543-061-Q6-K6-G11.pep
FALYICTLHEKLIRLKNTILFSLEYSVILAWYQEPRFSWCSYHKKRRKLCSAHLSWPLMRQLIQHVTHPTPGRLNTRKVMVFLVHQQFITSLSMIP

SEQ ID NO: 107377 - protein, 213 aa, Gossypium hirsutum
  Clone ID: LIB3543-061-Q6-K6-H11.pep
MDGIWGEDGGSLMFRRNRRSHLQELGGSEQAILLADGVLGTREDGSSRFSLAEEGEVGHEIPDGSQSENDSIEHIKTLPEQDEVADMGLDAKGRWTLTRVAKVSLSISPFWFLAQLTFNLSLKYTTVTSNTILSSASSLFTFLVSLAFLGEKFTWIKLVSVLLCMAGTIIVSLGDSSNSKNLRIIASNPILGDILALLSAAFYAIYVTLIRKQ

SEQ ID NO: 107378 - protein, 162 aa, Gossypium hirsutum
  Clone ID: LIB3543-062-Q6-K6-A10.pep
MVKKISVTMLHVVNLDSFPGQKWFVISKRWGAKTEEKEKVPSKQSSKNITVEKAEAEGLPPGWTKEVKITKKGNKVRRDPFYTDPVSGYVFRSMKDALRYVETGKLGKLAFKPKENESNEEDLEEDICEPVIVESKKVAVNGTTDEVEKQTAEHVSNSSGIT

SEQ ID NO: 107379 - protein, 134 aa, Gossypium hirsutum
  Clone ID: LIB3543-062-Q6-K6-A11.pep
KLIFLILSFWPEICLIHIKKKKHYLFLSTNIIKSKFKEWIFPRMLHQLFFISMQCGTVLFLLICCIIDRFTTISPPRLRRQVTISDAVFSSPLLTGFGGSFVEEIVNRRPSPSYKFFASMIRPPPPPHAAADAG

SEQ ID NO: 107380 - protein, 192 aa, Gossypium hirsutum
  Clone ID: LIB3543-062-Q6-K6-D11.pep
LSYDDQRRIQLFLKDQIPTWFSVAGYVTIATISTIGLPFIFPELKWYYVLVIYIFAPTLAFCNAYGTGLTDWSLASTYGKLAIFTIGAWAGPNGGVLAGLIACGVMMNIVSTASDLMQDFKTGYLTLASPRSMFVSQVIGTAMGCIVSPCVFWLFYNAFDDLGLPGSQYAAPLGIVYRNMSVLGVQGFSALP

SEQ ID NO: 107381 - protein, 74 aa, Gossypium hirsutum
  unsure (1)..(74): unsure at all Xaa locations
  Clone ID: LIB3543-062-Q6-K6-G10.pep
WGXTXXGGYQLXNTRLFWGFPLMVGWYGSNFXKSKQAPFKKICXWDHLKVVXTSVFWSWGFEFMKSISLLXFLV

SEQ ID NO: 107382 - protein, 203 aa, Gossypium hirsutum
  unsure (1)..(203): unsure at all Xaa locations
  Clone ID: LIB3543-062-Q6-K6-H11.pep
MQLQANMNLLNGNAGFPGNIAASSRTQAGSGMHTPFSSMGYPQLNGGGQYGQRQQHLADRSEAWRMANYGPIHYDHYGAPSTVRDMDALMRGGNPRPAQFPQRLGAIAERQAGHHSRVSLSPIPLSQFAAQRRRRLLYQVRNYLRLLRRAGNLRLEDAMLLGRSYLNRMRDLDENNDEMRVDVDNMSYEELLDLXEANWDVST

SEQ ID NO: 107383 - protein, 211 aa, Gossypium hirsutum
  Clone ID: LIB3543-063-Q6-K6-C12.pep
QRPPSVRGRVGQDGRKTFKEISDASVVIQSVIRGWLVRRCSGNTGLLKYGASKGNESDEVMVKGSFLAELQRRVLRAEAALREKEEENDILHQRVQQYESRWSEYELKMKSMEEVWQKQMRSLQSSLSIAKKSLAVDDSERNSDASVNNASDDREYSWDTGTNHNGPESNGLRPTSAGLSVISRLAEEFEQRSQVFGDDAKFLVEVKSGQV

SEQ ID NO: 107384 - protein, 178 aa, Gossypium hirsutum
  unsure (1)..(178): unsure at all Xaa locations
  Clone ID: LIB3543-063-Q6-K6-E12.pep
PNPWALTGAGRAAYFPLYSFLGFYXLIIPYVAPKKDSNLLGLMLTFIITLECLIYFLRWGGMDIDIAFISDDVMGHAKVIAEEWKPKLDALDIAANIGASFEAYSLLHLFLTLVIAFDFNDEXLAKLLPMVFPMVYTADLSRDLCLSLKMPXEIPVLINNVRHIDTDNLAFAFDLTLH

SEQ ID NO: 107385 - protein, 76 aa, Gossypium hirsutum
  unsure (1)..(76): unsure at all Xaa locations
  Clone ID: LIB3543-063-Q6-K6-G10.pep
LTFVQGVRGEERQATVGKPSMLGGLFKWVASSVSWSRRARRSKYLYGLSPNNVGLLRVXDKGPRLRQWRCLSSTQV

SEQ ID NO: 107386 - protein, 88 aa, Gossypium hirsutum
  Clone ID: LIB3543-064-Q6-K6-A5.pep
KSHYSPTDYDREGFIARFYYVMSYEFYYFIKASFFLISDLTLPILSVLASVPCERDKSLGRNQVNPASRGKKWENPKQRYTAASSTTL

SEQ ID NO: 107387 - protein, 74 aa, Gossypium hirsutum
  Clone ID: LIB3543-064-Q6-K6-A6.pep
NPFPQCPPALEENESLTPHRGSASAMTAVLVNLDLEVPDTFRAPPAPLPYDVVFGCPHSADSESFRETVSGGKF

SEQ ID NO: 107388 - protein, 165 aa, Gossypium hirsutum
  Clone ID: LIB3543-064-Q6-K6-B2.pep
MEKKQGFFSSLKEDVIRGLSPSRSRSNSLARTGSPMSGLLRRKKTSNQYYAGGGGYVAQPEPLIARSGSLRPVGEALAPLMEGPDPDGVEIGDSKRVGSGIGQWAKGQLSRNPSVTASYKKSDLRLLLGVMAAPLAPVHVNCNDPLPHLSIKDTPIETSSAQYIL

SEQ ID NO: 107389 - protein, 165 aa, Gossypium hirsutum
  Clone ID: LIB3543-064-Q6-K6-B3.pep
MIMEWEDQENQNQREILNVNVNNGGVMYVKVMTDEQLETLREQIAVYAAICEQLVEMHKNLTAQQDLAGGRLGSLYCDPLMTSAGHKITARQRWTPTPVQLQILERIFDQGTGTPSKQKIQEITSELSQHGQISETNVYNWFQNRRARSKRKQLGSSSNNAESEL

SEQ ID NO: 107390 - protein, 58 aa, Gossypium hirsutum
  unsure (1)..(58): unsure at all Xaa locations
  Clone ID: LIB3543-064-Q6-K6-B5.pep
LPRAYLVTPCMQLGMHFDLNCIYHGCGYNIKTTVNVELRVLFSYLPKSLPPIXCXEAN

SEQ ID NO: 107391 - protein, 58 aa, Gossypium hirsutum
  unsure (1)..(58): unsure at all Xaa locations
  Clone ID: LIB3543-064-Q6-K6-B7.pep
RGKNRSWPWDRXVERTCVGEADGVCAAGCCLGLAVSLVDVLGLGYFGFRFISLGLLLG

SEQ ID NO: 107392 - protein, 191 aa, Gossypium hirsutum
  Clone ID: LIB3543-064-Q6-K6-B8.pep
MYQWRKFEFFEEKLGGGKCKIPEEISGKIECASSGRGKLVIGCDDGTVSLLDRGLNFNFGFQAHSSSAFFLQMLKQRNFLVSIGEDEQISPQQSGMCLKVFDLDKMQPEGSSTTSPDCIGILRIFTNQFPQAKITSFLVLEEAPPILLIAIGLDNGCIYCIKGDIAREKITRFKLQVDSSSGEGNSSVTGL

SEQ ID NO: 107393 - protein, 129 aa, Gossypium hirsutum
  Clone ID: LIB3543-064-Q6-K6-B9.pep
SDICSLSSLSQASSSSLFSSGLQAALTSSFSSDISKASSDISSNFSCTETSSNSISFSSFSETFSSSTVNLSKSSVSFTSSISTFFASSIGCSGSSDFLSHGSSSLHTFSSVSSHCSPNLSSVSSSFVS

SEQ ID NO: 107394 - protein, 193 aa, Gossypium hirsutum
  Clone ID: LIB3543-064-Q6-K6-C3.pep
MKRQAEEQKQRTGSVFETKNLAKSQDYSDSSQTSKSFQSWKSIPELYKEKQQNLRVFSLEELSDATNGFNRTLKIGEGGFGSVYKGTIKPLGGRGHPLVVAIKKLNTHGLQGHKEWLAEVQFLGVVNHANLVKLLGYCCADGERGIQRLLVYEFMSNRSLEDHLFNKTSTLLWENKVWRLCLGAAQGLGLFCM

SEQ ID NO: 107395 - protein, 205 aa, Gossypium hirsutum
  Clone ID: LIB3543-064-Q6-K6-C5.pep
RLETRNSNSNSNPLNIKCFASTSQSKSQSQSPPPLPPFKDEGEERKFSDLNMLFRRFWKVAAPYWFSDDKVQARLQLAGVFALTLATTGISVGFNFLGRDFFNALANKDEEQFSKQLLYYLCGFAGGIPFFVLRDYARETLSLRWRCWMTSYFMQRYLTDRTFYKIQSQSIIDNPDQRIVDDLSSFTSTALSFSLTLFNAAVDLI

SEQ ID NO: 107396 - protein, 89 aa, Gossypium hirsutum
  Clone ID: LIB3543-064-Q6-K6-E2.pep
ITHLRPVLIQLFSVSMYILFWHNDKCSPHRLHFLSIWPLLFFFWSYIWPLTFQKRVISLFLTKMVVKTLIFNVVGMTTCMAVHVHIMLT

SEQ ID NO: 107397 - protein, 210 aa, Gossypium hirsutum
  Clone ID: LIB3543-064-Q6-K6-E9.pep
QRPVAAFGERYPTTRPNFVGEGFMDALQRSRNSFKLLFVYLHSPDHPDSPVFCGRTLCSEAVAAFVNENFVAWGADIRASEGFKMSNSLKASRFPFCAVVMPTTNQRIALLQQVEGPTSPEEMLTMLQKVLEESSPVLVAARLDAEERRNNMRLREEQDAAYRAALEADQARERQRREEQERLEREAAEAEQKRKEEEEAHERAAREAAE

SEQ ID NO: 107398 - protein, 171 aa, Gossypium hirsutum
  Clone ID: LIB3543-064-Q6-K6-F5.pep
SLNGDKSTLLVSVQHGVSAERSHLVARLLIGGDIVPDRLLILDSIQSQNFRGKLSPDETYAFKLETLAERKGLGGSNVASSLLKGLDYFPSGSMIDGLAAALLSRCQLKNIKGTLCVSWPEFSSSVVALIRSLLQRNVLPSLDLSFAREMQDQYARFNLIKHQPYDTEMYT

SEQ ID NO: 107399 - protein, 211 aa, Gossypium hirsutum
  Clone ID: LIB3543-064-Q6-K6-F9.pep
SSSPRPGLRALSAVLLRKILTPAADYSFLFPLLAESTRAAIKSTLLSSLQTEQSKANVKKLCDTISELASSVVATRGWPELLPFLFQCVNSKNPNLEESALLIFSRLAQNVGETTETLIPHLNTLHSVFFNCLSNPSSCDVRIAALSASVSFIQCISNPKDRDAFQDLLPLMMQTLTEALNSGLEATAQEALELLIELAGTEPRFLRRQIM

SEQ ID NO: 107400 - protein, 78 aa, Gossypium hirsutum
  Clone ID: LIB3543-064-Q6-K6-G10.pep
LRNKNLSLKHSKLCQGDINPLRGGGGRTFTKTLNKTHLTKRSTTDPSEHSDTTAYRPVYDTTNDDAEHSNGFLNNIRP

SEQ ID NO: 107401 - protein, 81 aa, Gossypium hirsutum
  unsure (1)..(81): unsure at all Xaa locations
  Clone ID: LIB3543-064-Q6-K6-H11.pep
PLQQSLPXXPPTISVGGGGGXXFXPNLXXGTPWETVAKEVSNTLGVDSPVVRAEISKDVNTLVDLIISWMASNSGAKLLNP

SEQ ID NO: 107402 - protein, 215 aa, Gossypium hirsutum
  unsure (1)..(215): unsure at all Xaa locations
  Clone ID: LIB3543-064-Q6-K6-H2.pep
PASATLPCWTCVESSNNKSVAEDVGKSEESFASKNDTVDNNTSNNNAPDTGLGPTNITSEKGVETNISAPVVSFNSSISSVEQHVTPSFDKNEKPKPIQNDFTKPSDNSSPRKAPKMKKKPEMLPPAVTTIADMNNLLDQSRXHESPTPKWSSRADKVLLEARLQIENAPIIKNDPQLYAPLFRNLSMFKRSYELMENTLKVYVYKEGKRPIVHT

SEQ ID NO: 107403 - protein, 188 aa, Gossypium hirsutum
  Clone ID: LIB3543-064-Q6-K6-H8.pep
MFKRSSVASDESRPAVPNDAIDEDLGTATQHMDVGGGEKDEIKMEGYGDVFNKAVATEAPQEDSVSGAETESFISAVEEIDDNSDIALSSAEKEVTSRLNIERQDSDTQMYFSSTSNSEHISGCDFTFAASSSAQSQLSSPTRYQRKKNSAKISFDTPYSGSNVRIPCASSSAQLSPYTGASLHLSPL

SEQ ID NO: 107404 - protein, 50 aa, Gossypium hirsutum
  Clone ID: LIB3543-065-Q6-K6-A8.pep
ITLLTLTFYIFHKLVPIPQKYKINKLSLHNSLAEYTLSSYKSLHVIYFIF

SEQ ID NO: 107405 - protein, 158 aa, Gossypium hirsutum
  unsure (1)..(158): unsure at all Xaa locations
  Clone ID: LIB3543-065-Q6-K6-B10.pep
VGVLAVFASKEGIKWVLGGGGNVEKFDVGVENQLGLIRSATESNADEAIEALKAGKVIAVPTDTLYGFACDACSSKAVNRIYDIKGRKHTSPLAICVGDVSDIEHFAVTDHLPHXLLNSLLPGPVTIVLGRGESSILEKSLNPGLDSIGVRVPDSDFI

SEQ ID NO: 107406 - protein, 122 aa, Gossypium hirsutum
  unsure (1)..(122): unsure at all Xaa locations
  Clone ID: LIB3543-065-Q6-K6-B9.pep
LGIGGGHKVFRLASIAWFKSVSIAARWYCPTYTYSAGDPDNQKKISHLETLQERXDYKIFDADLTDEGXSSDAPIAGCDLELHVATPVDSADEDPKNDLIKPHTQGVENVTEACAKSKTVKR

SEQ ID NO: 107407 - protein, 65 aa, Gossypium hirsutum
  Clone ID: LIB3543-065-Q6-K6-C10.pep
TICGALQNTSFNYSPFIESDTPSEYLIPPYACYFHSLTISYSEAGGGGADPGLNLSDKSLYAQVI

SEQ ID NO: 107408 - protein, 210 aa, Gossypium hirsutum
  Clone ID: LIB3543-065-Q6-K6-C3.pep
PASKKELQSLSLFSISFIALCFTVASAASFDIRNNCPYKVWAAAVPGGGRELSKGGVWNLKVNPGTTGARIWGRTNCQFDRAGRGRCQTGDCGGLLQCNAYGVAPNTLAEFALNQFNNLDFFDISLVDGFNVPMEFSPTSGRCSRGIRCTADIIGQCPNELKAPGGCNNPCTVYKTDQYCCNSGNCVPTDFSRFFKARCPDAYSYPKDDQ

SEQ ID NO: 107409 - protein, 212 aa, Gossypium hirsutum
  unsure (1)..(212): unsure at all Xaa locations
  Clone ID: LIB3543-065-Q6-K6-D11.pep
EIHKQEGGGGREHSSVDEDLLLKEFFAEVSEVERDNEVVRILSCFKLNPFEFLKLPWGGXLDDVKKQYRKLSLMVHPDKCKHPQAKEAFGALAKAQQQLLDQQERDYILSQVTAAKEELRAKRKKQLKKDTASKLKSLVDEGKSELEYEQSEEFQQELKLKVRELLTEQEWRRRKXAMRISEEEXRLKKDEEEQKEMWKXKREHEEQWEGTR

SEQ ID NO: 107410 - protein, 81 aa, Gossypium hirsutum
  unsure (1)..(81): unsure at all Xaa locations
  Clone ID: LIB3543-065-Q6-K6-D3.pep
LCFCKMHSQIIKYIKVKESFXQRKNKNKNTTIWFNENQTSSWGLLSVNSHRWNLCVLALFETKFPIGSAVQCSLQHKPGRG

SEQ ID NO: 107411 - protein, 152 aa, Gossypium hirsutum
  unsure (1)..(152): unsure at all Xaa locations
  Clone ID: LIB3543-065-Q6-K6-E2.pep
VWNGSRDLPDGIEYLHSQGPNVSHGNIKSSNILLTKSYEARVADFGLANIVGSSCRPNRELAYRAPKVTDPRKVSQKADAYSSGETLLELLTGKAPTHSILTAERIDSPIGXPQSVVHQEWTSVIIDLELLKYXNLEEEMVQLLKEAADCTE

SEQ ID NO: 107412 - protein, 98 aa, Gossypium hirsutum
  Clone ID: LIB3543-065-Q6-K6-E3.pep
MVVKVAATSARLQWSQPNLPQPPSSSQALASAISSPSLPRRCRSDGALVLKSVQRLNRSALFGSSSTNIQGSRSCDLLKPRSGTSRRACSASLDAFSD

SEQ ID NO: 107413 - protein, 182 aa, Gossypium hirsutum
  unsure (1)..(182): unsure at all Xaa locations
  Clone ID: LIB3543-065-Q6-K6-E8.pep
PASGEPITTCLAHILFLILVCYPEXILPTIFLYLFVIGIWNYRFRPRHPPHMDARLSQADRTHPDELDEEFDSFPTSRPSDIVRMRYDRLRSVAGRVQTVVGDLASQGERAQAILSWRDPRATAIFIIFSLIWAVFIYVTPFQVVAVLFGLYWLRHPRFRSKLPSVPVNFFKRLPSKSDMLI

SEQ ID NO: 107414 - protein, 83 aa, Gossypium hirsutum
  Clone ID: LIB3543-065-Q6-K6-F11.pep
KTTLLLFLVYYNVFIEYIYIIHKRFEWYHRLRIKAPDKNKSTCYPLGHRSKTFLYKQEKICLHWDLSQTLLITAGYNFLVMQN

SEQ ID NO: 107415 - protein, 166 aa, Gossypium hirsutum
  Clone ID: LIB3543-065-Q6-K6-F4.pep
WNGYFEAMTLNLAEIKVEESWRKSNGRKRGRTKCNVFEKPTKEGRTRRGRQRKDFQSEILPSLASLSRYEVTEDLQIIGGLMEATGTHWESSSSRIAGRNGYTKGRRRTNARAASVTESMTNTMLQSGNSEVGIQPRRLIDWGKITRRPRGPRCPSSNPRLILGQV

SEQ ID NO: 107416 - protein, 214 aa, Gossypium hirsutum
  unsure (1)..(214): unsure at all Xaa locations
  Clone ID: LIB3543-065-Q6-K6-G11.pep
GRLGRVGGYGPTDCRYLSYSGISGRAVTLSPCSSHSDHKICAQVNVRSLKCSXRGIVGGWGXAGPGGHRRNPDFSRQRPGYRGKNRQNEDRENFENLDESEMISSKNGPLLSLSGSTKFQATAAPGPREKEIVELFRKVQAKLRERTAAKEDTKTEASQGKGKESETVDSLLKLLRKHSVEQGKKKNSNGSSRDLNLDTPEVNGSSNEDKSFSF

SEQ ID NO: 107417 - protein, 209 aa, Gossypium hirsutum
  unsure (1)..(209): unsure at all Xaa locations
  Clone ID: LIB3543-065-Q6-K6-G12.pep
SLQILIGGGGGVSKLSRFFHFHFPLGSITSPYWCYRCNRFIRVRIRSPHDSVHCLHCGGVCLXEIQTPSXSPIDHRFPVASLYSGTPSLSPSPTATHRFRRARRNAGDRSPFYPVVVLRGPSSETDGELPERGNTSFELYYDDGSGSGLRHLPDSMSEFLMGSDFDRLLDQLSQLQVNEVGRFEQPPASKAAIESMPVIRIVGRHIRSD

SEQ ID NO: 107418 - protein, 59 aa, Gossypium hirsutum
  unsure (1)..(59): unsure at all Xaa locations
  Clone ID: LIB3543-065-Q6-K6-G5.pep
ITLAVKKHPTYLKTPSSLSLVGSTCICKTASSSSLRVNPAKSISMGSQGKNXXRRGNFA

SEQ ID NO: 107419 - protein, 128 aa, Gossypium hirsutum
  unsure (1)..(128): unsure at all Xaa locations
  Clone ID: LIB3543-065-Q6-K6-H11.pep
PFPPHSLLVPDSKKNXVVAPYXLXLLXGNASPSPHDLKXILGSVLSYSDXXXIYFFFAPGXXKXITXLIXXXRKNLASLPSRGGAVAVAPPAAGGGRGDAAPAAXAXKEENVQEKEESHHDMGFSLFX

SEQ ID NO: 107420 - protein, 188 aa, Gossypium hirsutum
  Clone ID: LIB3543-066-Q6-K6-A1.pep
MGFSKEEKSRRIWRVLKTVFFLITMAISFLVFSAPVFLVLADALLPSALLSASLSPSYLSLQSLSSHFDNYDFRSSLIDIPLISIIRSAVIIVVYSFCDGPKLSRGPYLGITMICSISSLVFVSIKASFVFGSRIPKEGTYVTAMETALFISSLALAIAHMTVAYRTSCRERRKLLVYKIDIEAISAC

SEQ ID NO: 107421 - protein, 78 aa, Gossypium hirsutum
  unsure (1)..(78): unsure at all Xaa locations
  Clone ID: LIB3543-066-Q6-K6-A4.pep
EILKENPNVCEYIKPLVGGGQYIFLIXIPNLCKEDFTKGIKEWGXSKWKIIXVLFXIINGVGMSCVYYEVIKFLGLCP

SEQ ID NO: 107422 - protein, 209 aa, Gossypium hirsutum
  Clone ID: LIB3543-066-Q6-K6-A5.pep
PRVRRKPCCGVQALMDSVEEPLNITFQNVHQGFRAETLVRFLKAREWNVAKAHKMLVDCLRWRVQNTIDDILAKPIVPSELYGAVRDSQLIGMSGYSREGLPVFAIGVGLSTFDKASVHYYVQSHIQINEYRDRVILPSASKKHGRPITTCIKVLDMTGLKLSALSKIKLLTIISTIDDLNYPEKTNTYYIVNAPYIFSACWKVVKPLL

SEQ ID NO: 107423 - protein, 73 aa, Gossypium hirsutum
  Clone ID: LIB3543-066-Q6-K6-C10.pep
HKCLIFRSNETILNCSNVKHINKYISIYTTRKTPAALSDEERWLSLTLDKLMFVNAFQKLVPKPCMFHRESLI

SEQ ID NO: 107424 - protein, 141 aa, Gossypium hirsutum
  Clone ID: LIB3543-066-Q6-K6-C6.pep
PSVTKLLVNRKHKTRSRLWSFWRTRRDGYAAVIILLQSLNELGLLEINRLELQESGAKLSSTPEVKNAHFECISAYKELATERLIGDLRQVKAEYLSCLKHLSSLLDAEGTTEYRGTTLQELKGDIKRVEDDISQSRRHKS

SEQ ID NO: 107425 - protein, 102 aa, Gossypium hirsutum
  unsure (1)..(102): unsure at all Xaa locations
  Clone ID: LIB3543-066-Q6-K6-D3.pep
GTPQGMTMDNARLAIAAIGKLMLAQFXELGNDNLQQWFSHTNLSGGRNPSLDYGFKGAEIAMDSYCSELQYLANNFTXHVQSADQYNQDNNSLGTNLLKENC

SEQ ID NO: 107426 - protein, 217 aa, Gossypium hirsutum
  Clone ID: LIB3543-066-Q6-K6-D7.pep
VAYHDFLLRGGDSEEHAGTKTCFYCNKVFSSHRALGGHLRIHQDGSILRALNYPGGSSGGGNNTGNPPASLPNSQLNSFASFNSLSAITSNSVNNSGNPPASLPNSQPNSSSSFNSPTQFSTSSVNNSGNSPASLPNNQLNSTAFNSLTLLPAAHLACDFSWMIYLNETNQVSRSQFIGGYSGVPLIPVILSPDFSYGYSYGATYHHNSLASRAFAP

SEQ ID NO: 107427 - protein, 107 aa, Gossypium hirsutum
  Clone ID: LIB3543-066-Q6-K6-E10.pep
MGYNCDFCGDQRPVVYCRSDAACLCLSCDRNVHSANALSKRHSRTLLCERCNSQPAFVRCVEERVSLCQNCDWMGHGTSTSNSRHKEQAINCYSGCPSSAELSSIWP

SEQ ID NO: 107428 - protein, 203 aa, Gossypium hirsutum
  unsure (1)..(203): unsure at all Xaa locations
  Clone ID: LIB3543-066-Q6-K6-E3.pep
QRPXNTRLLRXYAKIDVRLRQLAFIVXHWAKSRGVNATYQGTLSSYAYVLMCIHFLQQRRPAILPCLQGMETTFSVTVDDVECAYFDKVENLCNFGSSNQETIAQLVWAFFNYWAYIHDYANSVISVRTGSLISKGEKDWTRRIGNDRHLICIEDPFVVSHDLGRVVDKFSIKVLREEFERAADVMQYDPNPWITLFEPYVPG

SEQ ID NO: 107429 - protein, 207 aa, Gossypium hirsutum
  Clone ID: LIB3543-066-Q6-K6-E8.pep
MDKERSQIAKMLNGRVGKQCRERWHNHLRPDIKKDSWSEEEDMILIAAHKEIGNKWAEIAKRLPGRTENTIKNHWNATKRRQFTRRSKAKDGNSNPPKGSLLQNYIKSVSSPTELTPAAAASSSSQHENEFEMTDANPHMVQLETSSLNSTGWSIGDLNDHVQRQRQQQQEVNYCFDANVYNDIHRNQSFGSMLEGDGNGNGSGMGN

SEQ ID NO: 107430 - protein, 218 aa, Gossypium hirsutum
  unsure (1)..(218): unsure at all Xaa locations
  Clone ID: LIB3543-066-Q6-K6-F2.pep
TYLXCQVYHPSMENDWDLQAVPIAARAPSPGMFSRLGSNGILGSSVESLSPLKGFATTAAQPRQPSENFDPTRKTGCCPQCMQNYKQDLTRLLAAKEHEQRSSDFKSEPTRPALPQWLQNAKAHDSDIKTMDQAQAKDQDMIWTQKTQELQKKWNDTCLHVHPSFHQPSLGSERFTPAALSMTSLYNSSLLGRQPFQPKLPLNKNTGEALQLNPSLVA

SEQ ID NO: 107431 - protein, 177 aa, Gossypium hirsutum
  Clone ID: LIB3543-066-Q6-K6-F8.pep
MAWIPYLKGLASFGDANCIEQLLVHCANAIESNDATLAQQIIWVLNNIAPPDGDSNQRLTSAFLRALIVRAAKSGSCKMLAAMANAHRNLSVETHTFSVIELANFVDLTPWHRFGFTTANAAILEAVEGYSVIHIVDLSSTYCMQIPTLIDAIANRFEGPPLVKLTVPGVPKECPHC

SEQ ID NO: 107432 - protein, 125 aa, Gossypium hirsutum
  Clone ID: LIB3543-066-Q6-K6-G5.pep
LQTVYNNFYKKLGLLNLPSKIKITIWRVPWNYLPTRVNMQHRQLVSNTSCPRCGGRTETIDHIFCECPWSLISFPHVNAAFSVVHFGPSIEFIKIDFDGVYDGSHHQSASSIVVKNEEGIVLLSC

SEQ ID NO: 107433 - protein, 92 aa, Gossypium hirsutum
  unsure (1)..(92): unsure at all Xaa locations
  Clone ID: LIB3543-066-Q6-K6-G9.pep
PSVRTSLKTNTKLEKDWKREKVEPLFTINCFGDPILSIAGLSSSIIRDPFNPTXEKRTFLGFSVEREGLRRVFQCVFVFFFLVFDGFGGCED

SEQ ID NO: 107434 - protein, 40 aa, Gossypium hirsutum
  unsure (1)..(40): unsure at all Xaa locations
  Clone ID: LIB3543-032-Q1-K1-A3.pep
ALSFDDIIIHRMNCIILYLLSMTTKLFXKLYKMKVVFVTH

SEQ ID NO: 107435 - protein, 156 aa, Gossypium hirsutum
  unsure (1)..(156): unsure at all Xaa locations
  Clone ID: LIB3543-032-Q1-K1-A4.pep
MRYRKKDYVDPPPAPLLDMXELKSWSFHRAVLAEFVATLLFLFVLVATVIGHQRQPACQGVGPLGIAWAVGGMIFVLVYCTAGISGGHINPAVTLGLFVARKVSLVRAVAYMVAQCLGAIFGAGLAKSVMKHYYNTLGGGTNVVVAGNSKAPLWEL

SEQ ID NO: 107436 - protein, 131 aa, Gossypium hirsutum
  Clone ID: LIB3543-032-Q1-K1-A8.pep
MVVDWNDAVSCSEVGDGVEDKNGDDGTLEEGTKRSIPVRAYFFSTSVDLRGLVEQNKQNFIPPTSRMTNYVVLKFGDLSSSSGPGVFTSGSDCCFMVVFQYGSIVLFNVHECDVDQYLKIVEKHASGLLPE

SEQ ID NO: 107437 - protein, 194 aa, Gossypium hirsutum
  unsure (1)..(194): unsure at all Xaa locations
  Clone ID: LIB3543-032-Q1-K1-B3.pep
NSRXXGCASDSLDDDFSSCSSSKELLDHFXFQWMKRDEQGSDEWELSESPEHFYVKEKPAYSIQSSDVETMKENFAKLLLGEDITGGRKGVSTALALSNAITNLAASIFGELWKLEPLAEERKNKWRREMDWLLSPTNYMVELVPAKQNGANGRTMEIMTPKARADIHMNLPALQKLDSMLIETLESMVNAQFY

SEQ ID NO: 107438 - protein, 62 aa, Gossypium hirsutum
  unsure (1)..(62): unsure at all Xaa locations
  Clone ID: LIB3543-032-Q1-K1-B7.pep
EPLRRQSQVGNDXTSLLNPHELTNLSLHITAYHFTIVQHVYNFKTSKSRVLDSLLCXLLNRN

SEQ ID NO: 107439 - protein, 93 aa, Gossypium hirsutum
  unsure (1)..(93): unsure at all Xaa locations
  Clone ID: LIB3543-032-Q1-K1-C4.pep
VFEIMRTSWADSVANSASEIAVSDNSYVPRPTRSTYVPPHLRNRQASDAPNLPGPATERAAXTGTAGVSLGSRWSSGLPKPEMGAAWSRLWLL

SEQ ID NO: 107440 - protein, 70 aa, Gossypium hirsutum
  Clone ID: LIB3543-032-Q1-K1-C8.pep
SEVTVLMNPSHFHHPVYMVTSEHELYKQVFFKTKQKERILHKEKGQRKESGVFATNQNSIKVQHVRLTKY

SEQ ID NO: 107441 - protein, 144 aa, Gossypium hirsutum
  Clone ID: LIB3543-032-Q1-K1-D11.pep
MALGGANYTEIDEDLHSRQLAVYGRETMRRLFASNILISGMQGLGAEIAKNLILAGVKSVTLHDEGVVEVWDLSSNFVFSETDVGKNRAVASVQKLQELNNAVIISTLTTKLTKEQLSNFQAVVFTDISFEKAIEFDDYCHNYN

SEQ ID NO: 107442 - protein, 182 aa, Gossypium hirsutum
  Clone ID: LIB3543-032-Q1-K1-D8.pep
SPKGASEEDSEDEFYDAERSDPVQDSPTSDSGSTTTAAAAADAAPMESFFPWKEELEVLVRGGVPMALRGELWQAFVGVRTRRLENYYKGLLANETNSGNNTEQLSFLSECKGSTTESICEPEKWKGQIEKDLPRTFPGHPALDNDGRNALRRLLTAYARHNPSVGYCQAMNFFAALLLLLM

SEQ ID NO: 107443 - protein, 186 aa, Gossypium hirsutum
  Clone ID: LIB3543-032-Q1-K1-E6.pep
SKLESNLLSFYHLPDIVHARQEAVQWILKVHSFYRLRPETAYLSINYLDRFLSARALPQGKGWPMQLLSVSCLSLAAKMEETTVPILLDLQIIKPRFLFKPKTVQRMEVLVMKTLKWRLRTITPFDFLHYFISCINNSQHNSLCHLFCCATDLIINTCKAATDSLDYPPSAIAAAVTLRLTNHSVN

SEQ ID NO: 107444 - protein, 173 aa, Gossypium hirsutum
  unsure (1)..(173): unsure at all Xaa locations
  Clone ID: LIB3543-032-Q1-K1-E8.pep
KTMPKPILPQDWESLVEDFQYGGFRREXRRSLSPSVVELALSSILKKEFPFKIPLVIFLDEFSDLLFPQDPSLASLMDRLVETLRAVVQSPTDGVHVTYALKEQMMVSTTSVLISTNSVESVEVRFTESVVELLLAVINRPNHGPDRHARATACECLRELEKAYPCLLSDIAG

SEQ ID NO: 107445 - protein, 91 aa, Gossypium hirsutum
  Clone ID: LIB3543-032-Q1-K1-F12.pep
RGPPPIFSSADLSVHLCSTSLFLSRSKVQTSCLGWGGAALLKGSLPCSPSSAELYAKGSGLCGHGDWSCTSFFSRACNATPQAYDLLNGRF

SEQ ID NO: 107446 - protein, 200 aa, Gossypium hirsutum
  unsure (1)..(200): unsure at all Xaa locations
  Clone ID: LIB3543-032-Q1-K1-F3.pep
QRSMGGGSESSSNYFHSEIVFFGIDNXIHAMRESFARLRDYLDTHGATSSDGMSSFLRHGGSTWGGGNLSSMSASVSTLGDSGWLIHVQSVLAGSAWITARIALESASVLVHCSDGWDRTSQLVSLANLMLDPYYRTFAGFQALVEKDWLAFGHPFSDRIGMPSVSGTSFDLNRQSSTGNLSSSPVRQSSGSFTPQTSNT

SEQ ID NO: 107447 - protein, 133 aa, Gossypium hirsutum
  unsure (1)..(133): unsure at all Xaa locations
  Clone ID: LIB3543-032-Q1-K1-G11.pep
LLCVYMISFFFFFVVFVSFLVCGPASHVPSFLLVFLSCXLTGMVWGVGGLXTPPCLLSLTLDAAGLPLSSVTALSALPDRVSLGLFLLWSLGAGGXAGGGLXLGLASGXAFFWSLIQALFFGVAGTPVLAAWC

SEQ ID NO: 107448 - protein, 58 aa, Gossypium hirsutum
  Clone ID: LIB3543-033-Q1-K1-A12.pep
FFLNVFSFLVIFFLRFGSGLLIYASFLCLCLLLLFFKFSIFFYVLNDAMDLGFRFMNL

SEQ ID NO: 107449 - protein, 139 aa, Gossypium hirsutum
  unsure (1)..(139): unsure at all Xaa locations
  Clone ID: LIB3543-033-Q1-K1-A5.pep
KRTLPPXPKKRPVEGALPLINSXPHGQLSNXAKKYGPEIGPKNANMKHGVGXTPDTARALLKTLYXNFSNKPSNAETTHISYNCKDMVFADLGRXKLLIKLSNLHMLXGKDLGDSAQTXADDLGNMLMAMWQYSQRVSQ

SEQ ID NO: 107450 - protein, 109 aa, Gossypium hirsutum
  Clone ID: LIB3543-033-Q1-K1-A8.pep
TPKRDPKKRPPIKNFRGKNAKRGKKKREKNQKTGAKGPAKRKGPPGGNPPTPRLKRPQKGGVPFPKKGGKILEKGNGGAPFLKTPPGKKGIFPKGIKLGNPRVFPTPRF

SEQ ID NO: 107451 - protein, 190 aa, Gossypium hirsutum
  Clone ID: LIB3543-033-Q1-K1-A9.pep
PRVRPASAPRPPTRPPTCHVSIYIATNGLVECKHKQIVEAGLSMMEYAGLPITYWNEAFCSAVFLVNKLPSSPLGVSPYEKLFCERPNYLFLRVFGCLCFPNLWLFNTSKLQFRSSPCTFLGYSPYHKGYQCQAADGRVYISRHVTFHENEFPFKKLFSKLTDSQPLVAFSSSKLLVLHSESNAAVSPVL

SEQ ID NO: 107452 - protein, 182 aa, Gossypium hirsutum
  Clone ID: LIB3543-033-Q1-K1-C12.pep
SVDNLLSGMIPETGQLETFPASDFFNNAGLCGVPLPPCGDPVAASSSEHRKSHRKQASLAGSVAMGLLFSLFCIFGVIVAIVETKKRREKQDSALDVYMDSYSHSSTANTSWKLTGAREALSINLATFEKPLRKLTFADLLEATNGFHNDSLIGSGGFGDVYKAQLKDGSVVAIKKLIHISG

SEQ ID NO: 107453 - protein, 70 aa, Gossypium hirsutum
  Clone ID: LIB3543-033-Q1-K1-C4.pep
PWETTRKGSLLRLTNHLSPVPTDQNNIHVYPDRAAMQAYYGPHVNMPPYYSSTAASGHAPPPYMWGPTQS

SEQ ID NO: 107454 - protein, 163 aa, Gossypium hirsutum
  unsure (1)..(163): unsure at all Xaa locations
  Clone ID: LIB3543-033-Q1-K1-E11.pep
GRVGXXPSGGGGDWXVVLGGSXPGPLFLTQSARCVGCGAPFCLLVASGCPFGVFFPVLGCRVXQFWWRVALVRLLVFFFFPEFTGRVCPAPCGGSCVLGVVGNPVCVLGFGCALVVRGFXVPRVVPLPPLCXTGVGLVVVGCGPSGLGGAGRLGWLGGFCSGC

SEQ ID NO: 107455 - protein, 164 aa, Gossypium hirsutum
  unsure (1)..(164): unsure at all Xaa locations
  Clone ID: LIB3543-033-Q1-K1-F7.pep
MWGFGGRYYWGRKERVXKKESGRRXIILVFAWMSSQEKPLKNYVQLYASLGWDSLVCHSEFLNMFFPEKAATLAHDLLKELVEELKIRPCPVVFSSFSGGPKACMYKVLQMIVGSCEVEVNPDDLQLVKECFSGHIFDSSPVDFTSDLGARFVVHPTVLRMSHP

SEQ ID NO: 107456 - protein, 105 aa, Gossypium hirsutum
  Clone ID: LIB3543-033-Q1-K1-G12.pep
PASVSLNSCSEGMDPGIILEQTLTVVLHLTSRASLAHASEKHIQPRWSLSSIFGKRISGRCVLAETSNVYFLLDRGLVAELEHIHKENVLISEKFWTNPSFELSA

SEQ ID NO: 107457 - protein, 189 aa, Gossypium hirsutum
  unsure (1)..(189): unsure at all Xaa locations
  Clone ID: LIB3543-033-Q1-K1-G7.pep
SPXELRAEVLSAQQGQVVQPXNVEQQNSGDIDPEFLAALPPDIRAEVLAQQQAQRNHQSQELEGQPVEMDTVSIIATFPSDLREEVLLTSSDAILANLTPALVAEANMLRERFAHRYHNRNLFGMYPRNRRGESSRRGEGIGSSLDRIGGSIVSRRSVSAKVIEAEGIPLVGTEALQAMVRLLRIVQPL

SEQ ID NO: 107458 - protein, 88 aa, Gossypium hirsutum
  unsure (1)..(88): unsure at all Xaa locations
  Clone ID: LIB3543-033-Q1-K1-H2.pep
GRVGSAVYSQFQFRLKWTDHRSCQVRFWRGEFRSMEDEILSWEKHQLLQMMNLQAPWFWLQKGQIGRTFFAISSIISVXWDIXQPALL

SEQ ID NO: 107459 - protein, 79 aa, Gossypium hirsutum
  Clone ID: LIB3543-033-Q1-K1-H4.pep
SNSGVSLTLGLPDCENLSLSGNHQNFVPNQTINDVEGATQSDFCAINTQPQPSHSTTYDTMEMQSRKRFAAPLLPDFVA

SEQ ID NO: 107460 - protein, 152 aa, Gossypium hirsutum
  unsure (1)..(152): unsure at all Xaa locations
  Clone ID: LIB3543-033-Q1-K1-H8.pep
PSVRSSLLVWSLVRRFDQPQKYKPFVSRCIAQXKPRGLASLREVYVKSGLPATTSTXRLELLDDNEHILSIRIVCGDHRLKNYSSIISLHPEIINGRPGTLVIESLVVDVPEGNTQDETCYFVEALIKCNLKSLADISEGLAIQDRTEPIDL

SEQ ID NO: 107461 - protein, 95 aa, Gossypium hirsutum
  unsure (1)..(95): unsure at all Xaa locations
  Clone ID: LIB3543-034-Q1-K1-A3.pep
KWTSPPKKTILAKHEMCSQSRINFRKRPPPFFIFLFCLNFVHFYFFYFFFILIFFFFFFFFFFFFFFFFFFFFFFFFFFFFFFFFFXRTRGXRTR

SEQ ID NO: 107462 - protein, 145 aa, Gossypium hirsutum
  Clone ID: LIB3543-034-Q1-K1-A4.pep
NQRWPSSQWSNKAFMQKKALEYATGGSSSSARQAANSHQPGTNIGQHNVRNYLSAVNSFNSGHSRHGAASPIPSNFYQVSTEVRQADNFGRNTRLRRTASQPVPTSANLQAWNSINSNAQPTSQCPVTLTSLAPAPVLANPAMQH

SEQ ID NO: 107463 - protein, 109 aa, Gossypium hirsutum
  Clone ID: LIB3543-034-Q1-K1-A7.pep
CEVPRKRSYHICSYIQILNLLSLSLSLSLMIYKLIAINICLLTTQNLMHQVLFKWYEIQIPTYHIKQCTPTFMPYASQQIPRFESYLQAFPSKDSLKCSSKICLRHKMF

SEQ ID NO: 107464 - protein, 178 aa, Gossypium hirsutum
  unsure (1)..(178): unsure at all Xaa locations
  Clone ID: LIB3543-034-Q1-K1-B1.pep
MGFRPNSVTFNVMIKGXLNGAEFDEACNMFDEMLEXKLEPSVVTYNSFINFLCKKGEVEKAKKLFEDMVKKGKYPNAVTYALLMKGLCSLGEYKEAKKLMFDMEYKGCKTKVINFGVLMSSLGKKGXIEEAKSLLSEMKKRRFKPDVVIYNILVNYLCKESKVEEAYKVLIEMQVRGC

SEQ ID NO: 107465 - protein, 54 aa, Gossypium hirsutum
  Clone ID: LIB3543-034-Q1-K1-C1.pep
IKKKGFLFSSQQSNSIALAIGFDALAPTYKAYFHSSKGLACSVETDSIFYRKKN

SEQ ID NO: 107466 - protein, 158 aa, Gossypium hirsutum
  unsure (1)..(158): unsure at all Xaa locations
  Clone ID: LIB3543-034-Q1-K1-C12.pep
MGVWVDANYLVSSSFYLLVLCLICSRKGNATAANGCDLFTGRWVFDPSYPLYKASACPFIQKEFSCQKNGRQDLLYTQYRWQPLGCTLXVPSAQFNISRVGDVTTFEFLDYEVKVMVDRSVYLVDVVMEKIGXVLKLDSIQGGKLWKGIDMLIFNTWH

SEQ ID NO: 107467 - protein, 54 aa, Gossypium hirsutum
  Clone ID: LIB3543-034-Q1-K1-C7.pep
MDLHLKNLFDRFQEQFGSGPGLGPGSGTCLMKVEGISSNFIKPLFKASAALYRT

SEQ ID NO: 107468 - protein, 189 aa, Gossypium hirsutum
  unsure (1)..(189): unsure at all Xaa locations
  Clone ID: LIB3543-034-Q1-K1-D10.pep
ARSSLSRXTRELTQEXHELREERXSVKADIENLTVQYQQRRMMVFPWTGIDFSSVMAPPYPYPVPLPVTTGPIIMHPSLQPYPFFGNHNPGAINNPCSTFMPYSTTTSNPLIEQPSSQYTSSSHTSGKRDSKSKSADHQRGSNRESNGSNNVRTKVELKNPGSSTNEDLSARKRKGMXKKKKDRTNGCS

SEQ ID NO: 107469 - protein, 112 aa, Gossypium hirsutum
  Clone ID: LIB3543-034-Q1-K1-D11.pep
MYFQSLGSSGRTFSRPFVVNSSSSTTSLNTHQGIWEDPDDGSGSEYDDEDDDDDEKEEVEQNDGSDFQQGNRVGVVDNHTMNQYEEDLVKEVEQLLGPEEKAILQQNASPNL

SEQ ID NO: 107470 - protein, 60 aa, Gossypium hirsutum
  Clone ID: LIB3543-034-Q1-K1-D5.pep
CYPLIYVIKIPWICWLWLCSTDQISLKVASLNNLLIMGQKVNYGGKEDNQNEINVAAKIN

SEQ ID NO: 107471 - protein, 189 aa, Gossypium hirsutum
  Clone ID: LIB3543-034-Q1-K1-E2.pep
VRNLLKRSFFAGKDISATPAVANGVVYFPSWNGYLYAVNAFNGALIWRQNLSELTGQSGTGVVVNVTVSRSTPTVDGDLLIVGIYGPAIVIAVARSNGRLVWSTTLDPRPRVLITGSGTVYMGAYYVGVSSLEEGLPPEQCCTFRGSVVKLALRTGAMLWKTYMLPDNGGRLGGYAGAAVWGSSPAIDT

SEQ ID NO: 107472 - protein, 109 aa, Gossypium hirsutum
  Clone ID: LIB3543-034-Q1-K1-E6.pep
SYMRCSVTALVVEPPRWFQVEQRIQVPRLHSSAGSASFGYSASCSPCRRFGTKVIWCSVADLFLYSVTLSPSCKGSWGYMHPSAVAIVIPRQFKEREDRGITRRRSGKG

SEQ ID NO: 107473 - protein, 59 aa, Gossypium hirsutum
  Clone ID: LIB3543-034-Q1-K1-E7.pep
QNASFSTCVEPCFEETALLYGEHITTHHYFIYGESLARTKLGHEEAKPLTQAVCQEITS

SEQ ID NO: 107474 - protein, 69 aa, Gossypium hirsutum
  unsure (1)..(69): unsure at all Xaa locations
  Clone ID: LIB3543-034-Q1-K1-F1.pep
RRPQNKQQGPPRPPKGHKEQGKGRQEARTTQKEKRHTREWPKIKGGDRAHQTSQGSPPGGXAKXSXERG

SEQ ID NO: 107475 - protein, 86 aa, Gossypium hirsutum
  unsure (1)..(86): unsure at all Xaa locations
  Clone ID: LIB3543-034-Q1-K1-G12.pep
RXKRISFSLRRNPDAPPLEFRFRRSERGPAASNRKVSLSPVSFYFIYAYVCINNKTKNERKKNDXKKKKTESPREKKNLCCIDIFF

SEQ ID NO: 107476 - protein, 66 aa, Gossypium hirsutum
  Clone ID: LIB3543-034-Q1-K1-G6.pep
IVSPTISRFPSIQVEKVRWHNGVGSHPSRLPFLMNRIGVAILLRSVLGLNPSLGHPCRAQPPATSR

SEQ ID NO: 107477 - protein, 197 aa, Gossypium hirsutum
  Clone ID: LIB3543-034-Q1-K1-H4.pep
STQRPPSVRLIRSLRQWPPLQLQQQYHCCSRILTVSTKTPSHCFSFATSTSSRRNARLRPRGARLPNAPSTSDLRENEISDDSESDVKKSRNQKKREARRAVRWGMDLASFSTPQIKLILRASSLEQDVFDALMLVKRLGPDVREGKRRQFNYIGKLLREVEPELMEALIQATKVGDQKTLQALAGSETQIIEEEDD

SEQ ID NO: 107478 - protein, 92 aa, Gossypium hirsutum
  Clone ID: LIB3543-034-Q1-K1-H5.pep
ACIETSRAAHIFLLSNSRRTTRCWKGRVSIENEANVKIASKSDERPVKITSTFSVSDTSNPDAARDFCTNRSNEKMIRCTPYLTYRLRRGKV

SEQ ID NO: 107479 - protein, 137 aa, Gossypium hirsutum
  unsure (1)..(137): unsure at all Xaa locations
  Clone ID: LIB3543-035-Q1-K1-A2.pep
ILGDSALGPPPTIWHTSVRWANWWRFLYMFLMEDLDTFGPMNVPCEKTGVSANYRESVQXILEIGGERELLPEPIILAFGGLKKCAANVNMEYGLDPTIGNVIVQAAQXVADRKLNHHFSLDTRQTGSATQSYMNAN

SEQ ID NO: 107480 - protein, 108 aa, Gossypium hirsutum
  Clone ID: LIB3543-035-Q1-K1-A3.pep
TYKLSSVGFFALFISLPFCFFSFSFHFSFTVSLSYLSSENLLTPSGNSSFPRRRKSLIRRNLLISLLLLISYDILSICSRGSDLDLRVCIRPRVVRMWRVWLMLDALV

SEQ ID NO: 107481 - protein, 186 aa, Gossypium hirsutum
  unsure (1)..(186): unsure at all Xaa locations
  Clone ID: LIB3543-035-Q1-K1-A5.pep
GRVGGRVGAVTQPVLNFKGYLVGNGFTNVEFDGNSFVPFAYGMDLISDYLYEEVTNECMGNFYNPHNXILXXNETXKKLMRTYDXLNIYNILEPCYHDPDAAETKDVKIRLLSSFWKLGETDKPLAVLKRMFGRAWPFRAPVRDGIVLTWPELLNRQSVPCTNDEVATAWLNDGAVRKAIHAEGRG

SEQ ID NO: 107482 - protein, 113 aa, Gossypium hirsutum
  unsure (1)..(113): unsure at all Xaa locations
  Clone ID: LIB3543-035-Q1-K1-B1.pep
KKRKKKKGQKQGRRQNRRRQTKNDARTKPTNIKRRRKKPYHKKARAEPSTEVEKGSETTITETRTTRVHKGKKHHTTHRQPARRRLXSSRATIGQAQTPRGKTTHDRNSWNAS

SEQ ID NO: 107483 - protein, 132 aa, Gossypium hirsutum
  unsure (1)..(132): unsure at all Xaa locations
  Clone ID: LIB3543-035-Q1-K1-B2.pep
RKRLIILLTHCLDVLISNLRSXLPAIDVVKQLETEPVTNSVRNSGLTSDVTDKITAKMEASLMDRRKTIXGSITGXNTVYNAGFVVHIVMDKXPDSYLALYCAKNYAKKQGDNEYDIKYYITENHKGMLKAN

SEQ ID NO: 107484 - protein, 188 aa, Gossypium hirsutum
  Clone ID: LIB3543-035-Q1-K1-B6.pep
SETATTSFTAPKLSSPTFQTLCRNFPLSLPIPKTLSSFSFHLSPFLSRFHLHHHHYHPPRFHPRRLFAVRAESENGAEPIRHYDFDLFTIGAGSGGVRASRFAANFGASVAVCELPFSTISSETTGGVGGTCVLRGCVPKKLMVYASKYSHEFDESNGFGWKYDTEPKHDWSTLMANKNAELQRLTGI

SEQ ID NO: 107485 - protein, 196 aa, Gossypium hirsutum
  Clone ID: LIB3543-035-Q1-K1-C12.pep
LVSSITTCSVPMQKELKSLVKGLLCKSSVYEKEQPDINKEDFYAVCQSCMSELHNLFEEASDAIPHERMTRKEMGKPLIARISKQVDNINFLLEILLDRQMAEEFVDLWVNQGNLLKLHERASPMVRYELSRVSAILFIAMGTRKLHCCSEARSGLLQAWFGPMLLDFGWLQRCRKGLDMKALEEAMGQTLLTLPL

SEQ ID NO: 107486 - protein, 115 aa, Gossypium hirsutum
  Clone ID: LIB3543-035-Q1-K1-C5.pep
MQSAAFSLPSPSSHPYLKPRNFASNPTFYPIRGVSKGRDFSDSTNAISIPSFPKRSWSLSSSSPLPLRAWTSAPSLSKPSPLHLRATAAENAGEAGKSGSLLKTLELGLLFGLWY

SEQ ID NO: 107487 - protein, 124 aa, Gossypium hirsutum
  Clone ID: LIB3543-035-Q1-K1-C7.pep
CIIGEFRNEYIGTAPYISCSPSLRHHRLCPRDQFLILSSDGLYQYLSNQKVVSLVESFMEKFPDGDPAQHLIEEVLMHAAKKAGMDFHELLDIPQGDRRKYHDDVTVMVISLEGRIWKSSGKYV

SEQ ID NO: 107488 - protein, 68 aa, Gossypium hirsutum
  Clone ID: LIB3543-035-Q1-K1-E12.pep
PSNNFQLQPPHEETGSSARVPAVFDARSTRSISRLDGHLCFRTDESSSPGRLRCDRRSKGTEFHCGTF

SEQ ID NO: 107489 - protein, 55 aa, Gossypium hirsutum
  Clone ID: LIB3543-035-Q1-K1-F11.pep
KTSSLKIYMVDFCEMRLLQLEYFETILNPFFTSDARESMKSLQGVLLEKATESLS

SEQ ID NO: 107490 - protein, 142 aa, Gossypium hirsutum
  Clone ID: LIB3543-035-Q1-K1-F2.pep
GTKGLNESIDPAPLSGWVLDALNYQQPFQILKCQPEKSDKGLSLMPRNLTPTFPGSSAKFSYQNLILPKPEIIENNRPMNTQTVQTEEHQNRYNLLQQLQTGRKKNKLSNSITADQKLGYIKDEENKPVDDTVDSFLSHDHD

SEQ ID NO: 107491 - protein, 68 aa, Gossypium hirsutum
  Clone ID: LIB3543-035-Q1-K1-F7.pep
PGAEVHVWRRCSALRGSWRLADVLELLTAAASEESRNPKGFWKYLGDLGQYSWVLSKFSIRTSVMGQM

SEQ ID NO: 107492 - protein, 156 aa, Gossypium hirsutum
  Clone ID: LIB3543-035-Q1-K1-F9.pep
MALSPFPVTHQACVLSSSHSLYYLILQTKTQNNSFRALKFKSYCVSHQTIKVGIDISKKKRKPKPSFLYQIKDKWSQKPIISTREKLPWQEKEELEEQEEVQKEQTFEATASETESDEDPRVEASDQVSFPLPSRVIAAPWSHGRKFNELHFDFVP

SEQ ID NO: 107493 - protein, 166 aa, Gossypium hirsutum
  unsure (1)..(166): unsure at all Xaa locations
  Clone ID: LIB3543-035-Q1-K1-G1.pep
AMXXCQLLGLTKAIGVSNFSXEKLEEILSFAKIPPAVNQVEMNPLWQQKELNEYCKAKGIHVSAHSPLGSKGTLWGDNRIFDCHALKEIAEAKGKTIAQICLRWVYEQGASVIAKSFNKKRMEENLEIFDWSLSVEELEKIRGLPQCKFNSIGTFIEPSAELEAQL

SEQ ID NO: 107494 - protein, 89 aa, Gossypium hirsutum
  unsure (1)..(89): unsure at all Xaa locations
  Clone ID: LIB3543-035-Q1-K1-G10.pep
XPAIPGRPSVRPAFVHAFAVATITTLGLFFFFLLLVLCLNAVCGGCSFGTSSFWPGPVLAFGPFSSPFCVGHSXFPGCYLRVSDREHMY

SEQ ID NO: 107495 - protein, 101 aa, Gossypium hirsutum
  unsure (1)..(101): unsure at all Xaa locations
  Clone ID: LIB3543-035-Q1-K1-G4.pep
LCKGDLPSVLKIGFSNRXFLWLVFLFIGFEALSGLFTTDAEVLQIAWSGTLFVAGSQPVNAVAFVLXGLYYGVSDYEYVAVSMXIYDQVYAIIVFGQTDIK

SEQ ID NO: 107496 - protein, 116 aa, Gossypium hirsutum
  Clone ID: LIB3543-035-Q1-K1-G6.pep
MEDDNGLELSLGLSCGASSAKARGKISSSSDTRTEEGDRGVKIVDNFKNFLQAGNEKQDPSVGSQRSDPIKPLENFFNDLSKGNGEVEATVNLNGRGLWGTNSNRSAEIDEDKRSE

SEQ ID NO: 107497 - protein, 100 aa, Gossypium hirsutum
  unsure (1)..(100): unsure at all Xaa locations
  Clone ID: LIB3543-035-Q1-K1-G9.pep
PRVRPASAQRPGRTRNKQIQASIAQIFQRQSEALVKRRSLXKXSSTFLTRSQRHHRSAHPRRRRNSRGVEHQGSEDNEDENDDNGGKDSSSTDERCAEVR

SEQ ID NO: 107498 - protein, 169 aa, Gossypium hirsutum
  Clone ID: LIB3543-035-Q1-K1-H5.pep
LRKPGRKRTVAPGTTKGETPRLRILDQALRQQRAFQQMSMMESHPWRPQRGLPERSVSVLRAWLFEHFLHPYPSDVDKHILARQTGLSRSQVSNWFINARVRLWKPMVEEMYLEETKEHENNMDSSDNGGTDGGDDNNNNGRLNIPLADQKPTPDQLVRVDSECLSSII

SEQ ID NO: 107499 - protein, 77 aa, Gossypium hirsutum
  Clone ID: LIB3543-036-Q1-K1-A11.pep
NKIIVRLFSPSEPASIEADPKKISKEHKILGFQQNKLFFCPSFFLSFIPFLSQKKNTTKYRESQERELDENYQKQKQ

SEQ ID NO: 107500 - protein, 182 aa, Gossypium hirsutum
  unsure (1)..(182): unsure at all Xaa locations
  Clone ID: LIB3543-036-Q1-K1-A7.pep
MSLSLLXGYSSAEDEEPAEPDHIHYGDSSDDDDDDDDYGGGGGIKNHSAAPKRYDSSVFDFPDPSRKSDLPSAFDAFSQVSGPPEFLNHAVEEPISAGDAAQQQGRRSDRKDFKDKKDMPSGAVVEAKAQLVGIHERVRSDIEGSKPPVSAVPSAKQDGAXRVASASNPNAEDAAELLRMCL

SEQ ID NO: 107501 - protein, 123 aa, Gossypium hirsutum
  Clone ID: LIB3543-036-Q1-K1-B2.pep
MASIKVHELRNKSKTELLSQLKDLKAELAILRVAKVTGGAPNKLSKIKVVRLSIAQVLTVISQKQKSALREAYKKKKFLPLDLRPKKTRAIRRRLTKHQASLKTQREKKEEMYFPLRKYAIKV

SEQ ID NO: 107502 - protein, 141 aa, Gossypium hirsutum
  Clone ID: LIB3543-036-Q1-K1-C1.pep
MDFTESTKIVYNRIQKLEPENVSKIIGYLLLQDNGDLDMIRLAFSPDALLHSLIHKAKSQLSLNKPPVSQVSPTPVVDFPMQLTPFSRAVSTQRAAATPFWDPPVTAAEQHVNSLEFAPPGYSDAVAEDYSLQSQMHFLNI

SEQ ID NO: 107503 - protein, 157 aa, Gossypium hirsutum
  unsure (1)..(157): unsure at all Xaa locations
  Clone ID: LIB3543-036-Q1-K1-C6.pep
PASAPRPVIIFVSGVCNKYXIEERNERSLCEKSMKMVVNIIRLSSFSIAKMSLGEPTTATTKSPEPTTGSDTFTDGPSRFAGSHKQSRSKPYSFMMEPAASEENESRMVREEKEHSDGRFAAYIRKVHEKNRRNSHEASKHSSYILPPPPTPLRRRK

SEQ ID NO: 107504 - protein, 95 aa, Gossypium hirsutum
  unsure (1)..(95): unsure at all Xaa locations
  Clone ID: LIB3543-036-Q1-K1-D1.pep
PVDPASVQFFYCCSGTRHSSRQPQXTIKIYMRGGTASLLPSIYKFKQICPLAGSWGTVATSTPRKSDNNGSKETGSVSNDQTDCLFLDHWLPFHS

SEQ ID NO: 107505 - protein, 78 aa, Gossypium hirsutum
  Clone ID: LIB3543-036-Q1-K1-H10.pep
HTTNTLTPLNHHLSAPLRLYQKPLDHPYCRHQSHHSPVPVTNLPTISPLMSHHRNTTLNPTNQITKSQNANKPTAKII

SEQ ID NO: 107506 - protein, 191 aa, Gossypium hirsutum
  unsure (1)..(191): unsure at all Xaa locations
  Clone ID: LIB3543-036-Q1-K1-H4.pep
PASGGIENLKSLXGLDVSYNIISNFSELEFLVGLSFLQSLWLEGNPLCCARWYRAQVFSYFSHPENLKLDDKEINTTDYWKRKIIVASRQKRPSRFGFYSPAKDDAEAEGCIKKXRIMVSRLACIESEQDSTYICSDLDSVSCGNETQSREKILSEDLAEIVDLMNRVEQLKKECSILWLQEFKDWIVYAS

SEQ ID NO: 107507 - protein, 66 aa, Gossypium hirsutum
  unsure (1)..(66): unsure at all Xaa locations
  Clone ID: LIB3543-036-Q1-K1-H7.pep
NLSWXCLIKQAPHFMVVTSNCMKGIXLRALLHRALVNVRCNCHHCVLEICCQFPGKTRYAWFLRVA

SEQ ID NO: 107508 - protein, 195 aa, Gossypium hirsutum
  Clone ID: LIB3543-037-Q1-K1-A10.pep
AFAPRDNFKVEGRAHAAAASGLLGHTELRLHMPPSIAFATRGRLQGLRLQLALLDRESDEGGGDTLRVLDDNTSTSHSMSEEDINALPVHKYKVHGPESAGSSLQQASSSSVTIEQKQDSRKGDGNMKASDDELTCSICLDQVNEGELVRSLPCLHQFHTTCIDPWLRQQGTCPVCKFRMGSGWQENRESESDDS

SEQ ID NO: 107509 - protein, 73 aa, Gossypium hirsutum
  Clone ID: LIB3543-037-Q1-K1-A7.pep
ETSQTYKVITSMKLIPCKTDYSHLQNLDSQIKACKQPPNFNPKPNLLAHNPRLAGWFFIYLLPLIYNIQHFPS

SEQ ID NO: 107510 - protein, 91 aa, Gossypium hirsutum
  Clone ID: LIB3543-037-Q1-K1-B8.pep
QICKVKNSLDSQLTSKIKFGKVFNCLYPHYSQVFAKTQSSFTSDSPISANLTNLLQTPPWVSISWNLEHEFDRKIIYKSLDVGGFKPEKVS

SEQ ID NO: 107511 - protein, 138 aa, Gossypium hirsutum
  unsure (1)..(138): unsure at all Xaa locations
  Clone ID: LIB3543-037-Q1-K1-D3.pep
WRLLCCAIKNGYRRYVIGCSXADNEKEIGFXVLKXLFEDGXXXRRGRSLXITSKLWXAXXHAPEDVPXXLNNTLQDLQLDYLDLYLIHWPASMKKGSVGFKPENLTKPDIPSTWXKAIEALYDSXKXARAIGVSNFSS

SEQ ID NO: 107512 - protein, 72 aa, Gossypium hirsutum
  Clone ID: LIB3543-037-Q1-K1-D5.pep
PCIPSPPGYANVSALLPIVSSPLFRSLMRIAPTAFLDCLLNLLSDVSADPVAGLFSDSTWKFTVSIPEAFLT

SEQ ID NO: 107513 - protein, 125 aa, Gossypium hirsutum
  unsure (1)..(125): unsure at all Xaa locations
  Clone ID: LIB3543-037-Q1-K1-D9.pep
SSEFRLCLSLPHPTPYPMRLAVLAVLPLAPCVAYASDHWAFLSTSWGGGGFSSCCPLSPLCCRALLACPHRLAVPCMQRTLRVPYTRCRXRPFASCRATPFPLLLFIXSRPLTFLRLVGSASSRL

SEQ ID NO: 107514 - protein, 191 aa, Gossypium hirsutum
  unsure (1)..(191): unsure at all Xaa locations
  Clone ID: LIB3543-037-Q1-K1-E2.pep
SCPRHRVGGLLYWKSLSNDVKQXVRECIVCQCCKIETSASPGLLQPLPIPDRAWAVVGGGFIEGLPPSQGKSTILVVVDRLTKYDHFLALAHPFTALTVATEYLQHNYKLHGLPHSIVSDRDHLFLSHFWQELIRHLGTKLKMSKAYHPQTDGQIETLNKCLESYLHCMTGEKPSAWVIWLLLAEWWYNTT

SEQ ID NO: 107515 - protein, 89 aa, Gossypium hirsutum
  unsure (1)..(89): unsure at all Xaa locations
  Clone ID: LIB3543-037-Q1-K1-E3.pep
KKRXEKXKPKAKAXXSRKXKXXXXXXGTTXXAXENKLGGGRXXXNXLYFNFKMIFYYLGLTRKSKPRKLGYDFSNLQNAKYCLFLEVLF

SEQ ID NO: 107516 - protein, 156 aa, Gossypium hirsutum
  Clone ID: LIB3543-037-Q1-K1-E9.pep
MGKQGSPRSARPILQNTNSLFRTKDYHIRSSSDSLGASTDPSIGRRILGGDNYWNSKVVLLHGLKDNSGKFTPCKGVYVGKKHTWFGRNVKPIAFILVLMASLFLLDSLMVSIFGSINLQGSSPTIPSDAHEDDNVVSIHEERPTVQMYGRLLKLA

SEQ ID NO: 107517 - protein, 173 aa, Gossypium hirsutum
  unsure (1)..(173): unsure at all Xaa locations
  Clone ID: LIB3543-037-Q1-K1-F1.pep
LGFSPSFFTLLTVISFCVPVLCSVRTKTGKYGCTEKGATGRVSEDPEELARHPLQAILLADSFTTKFRPITLERPKVLVPLVNIPMINYTLAWLESAGVEEVFVFCCAHSKQVIDYLESSEWSSQPNLSVTTIESHNSINAGDALRLIYERNVIHGXDFVLISGDTVSNMSLT

SEQ ID NO: 107518 - protein, 179 aa, Gossypium hirsutum
  unsure (1)..(179): unsure at all Xaa locations
  Clone ID: LIB3543-037-Q1-K1-F4.pep
FLGVGTVVAFVGLGGFFTNLLVSLSRAXIVVCDTGKPGCXGGLCXIASFLWEWGGLSTDSNFPFLAFDGSCDAALVYSPAVAIVGLEYVPAYDVDALLHAVAHHPVSVALVAGMLAFRFCSAGVFSGDCGTELFHGCSAVGSGTTLVGTPCWLAGEPLACRPGVRNGYLSLVSWDPLPS

SEQ ID NO: 107519 - protein, 174 aa, Gossypium hirsutum
  unsure (1)..(174): unsure at all Xaa locations
  Clone ID: LIB3543-037-Q1-K1-G12.pep
KTVFYRERXAGMYSAMPYAISQVIIEMPYIFIQAATYGLIVYGGGGFEWTAAKFFWYLFFMYFTLLYVTFYGMMAVAVTPNYHIASIVSAAFYGIWNLFSGFIIPRPSMPVWWQWYYWACPVAWFLNGLFVSQFGDIKTPLEDGDFVGQSVEQYLRSRYGFRHDFLGVVVTVIL

SEQ ID NO: 107520 - protein, 175 aa, Gossypium hirsutum
  unsure (1)..(175): unsure at all Xaa locations
  Clone ID: LIB3543-037-Q1-K1-G2.pep
LSLAFSGKKWLPRLQGMAVHXDCMLTVLELTAKTTYRFVVPKIEDKRGGGGSEKVGXPTACYEAFTASLPAAECRCAVYDSDSATAETCLKSRFLFIAWSPDPSTVGRKMVYASSKVRFKRELDGFQVELQATDPSAMDLPVIGQPCQLQCVSHFFIEMELYTMWPTSMQCLYQL

SEQ ID NO: 107521 - protein, 154 aa, Gossypium hirsutum
  unsure (1)..(154): unsure at all Xaa locations
  Clone ID: LIB3543-037-Q1-K1-G4.pep
MAEEHRCQAPKLCANNCGLMGGPATQNLCSKCHRDLQLKQHRSSSAKHAVNQTSIPSPSSFPSVSSSSSADKDGGSLAETKAAEVVEVEVRPKRCLSCNKRVGLTGFKCRCGMVFCGIHRFPEEHGCKFDFKAMGXNTRFAQANPVVKAFKLHK

SEQ ID NO: 107522 - protein, 163 aa, Gossypium hirsutum
  unsure (1)..(163): unsure at all Xaa locations
  Clone ID: LIB3543-037-Q1-K1-G6.pep
MNPLTLVKRLQXFNAKEADLGISEEASWHARVAGDSAYIFVGGLPYDLTEGDLLAVFAQYGEIVDVNLVRDKGTGKSKGFAFLAYEDQRSTILAVDNLNGAQILGRIIRVDHAEKYKKKEEEEDEEEEQKKKEARGVCYAFQRGECTRGAGCKFSHNEQVGFI

SEQ ID NO: 107523 - protein, 119 aa, Gossypium hirsutum
  unsure (1)..(119): unsure at all Xaa locations
  Clone ID: LIB3543-037-Q1-K1-H10.pep
AEHSKXEEGGKDXXEXEGXXKXXKGXGGEXGRRENPXPQEXXERAXXRREXAXRXXKNNKKGXXPXPKTEXXXXXKTXXXXXXXEPEGEQXXXXXXXPFLLFKISVVHVFPINFFLSAS

SEQ ID NO: 107524 - protein, 72 aa, Gossypium hirsutum
  Clone ID: LIB3543-037-Q1-K1-H6.pep
KFLLFPQLYTVASHYAISYFLIVACSLLSCILYAGLKFVNKASKRKHQGVKKKKKKKKKKKKKKKKRKDDIK

SEQ ID NO: 107525 - protein, 203 aa, Gossypium hirsutum
  Clone ID: LIB3543-038-Q1-K1-A10.pep
QSYFLIAGIAGINPHQGTIGTAAWAHYLVEFGTQWELDARDAPKDWPTGYIGINTRGPNEKPPLDYKTEVFELNPKLQAKAFALSHQVSLSESKESAAWRVKYPYAPANQPPVVSRCDTLAGNTWFSGTRLSDRAEVWTRLLTDNKGVYCTTQQEDNSTYEALLRASKAGRVDINRLAVVRAGSDFDRPVRANSEVDPGRPVP

SEQ ID NO: 107526 - protein, 92 aa, Gossypium hirsutum
  Clone ID: LIB3543-038-Q1-K1-A6.pep
PENGVHMIVIPAFSQRNASKVVPEAVQKTLSNTKWEHPVPCLWCQTEKVPKPDACTGFPSRRHPEPVQAFTLVQYLLRSHQMKASIFFLAPR

SEQ ID NO: 107527 - protein, 203 aa, Gossypium hirsutum
  Clone ID: LIB3543-038-Q1-K1-B11.pep
RPSVRQGVVIRDAKRLVNGDINTYSKGDVYPVEPFDGFPVNQVLDAHWGVLYDEDSRGLRSHTLAMVVNDSPGVLNVVTGVISRRGYNIQSLAVGPAEKDGLSRITTVIPGTDETLAKLFQQLRKLVDLYEVQDMTHSPFAERELMLIKVAVSPAARRDILDIANIFRAKAVDVSDHTITLELTGDLNKMVALQKLLEPYGIC

SEQ ID NO: 107528 - protein, 93 aa, Gossypium hirsutum
  Clone ID: LIB3543-038-Q1-K1-B12.pep
GANATTPTIKQAIKRRRMTQSSKSSVASKTSLLFTLPRKRYRMPFEGKMGRGGIRSTTYSLLRRSSFEDSLFFFFDFLDLLSTKCTSLKTSAH

SEQ ID NO: 107529 - protein, 81 aa, Gossypium hirsutum
  Clone ID: LIB3543-038-Q1-K1-B6.pep
YLRTYSSDLVVPKLLFPTLPKNGLLYKLSNIYTFSQFNFKFKKSTNLSFSFPQTFSNNLKMVLFFIFKNIKRRVLKKEKAA

SEQ ID NO: 107530 - protein, 73 aa, Gossypium hirsutum
  Clone ID: LIB3543-038-Q1-K1-B9.pep
NSITDTDSRTTQKTVVFLSLGINDSALKLGQLQGPNYKYHKFLTSKVTLPFSLCIKSLYLDTLKNGSSDSYCY

SEQ ID NO: 107531 - protein, 188 aa, Gossypium hirsutum
  unsure (1)..(188): unsure at all Xaa locations
  Clone ID: LIB3543-038-Q1-K1-C1.pep
XCVYFVCDGPALSHXPYLGTVALCSFVSILVLSVKACVFTVNSQXVAEASSGYSLARQRLHFKKSWGMPVLFLSSVVFALGHIVVAYRTCCRARRKLLFHRVDPEAVLLCKNVFSSFQKVPRSPTPSIGKTXKVMXETRRKPFGQSGDDGEVPIRLLADVDSLFITLQGLTVHYKLCFPGSPPRALSS

SEQ ID NO: 107532 - protein, 60 aa, Gossypium hirsutum
  Clone ID: LIB3543-038-Q1-K1-C10.pep
DQQSPRDRLQGHSRMPYLGPCSTRSYCQLLPQSSRLVSIHYPEYHHRSIPIKFRRPPWSM

SEQ ID NO: 107533 - protein, 162 aa, Gossypium hirsutum
  unsure (1)..(162): unsure at all Xaa locations
  Clone ID: LIB3543-038-Q1-K1-C3.pep
MGHGGVVSADDTLIKTQCHNAKVPKACIQCVKSDSHSQSTDKVGGGGIVITCISNKAVTLESNMTVLASSVHDKKLKLVLQDCQKEFSDAKTNLTTAMDRLKNKDYDQTNYLVNHALQKEFYCXNNVGDLQYTLPTTVLNDMTLYEELSEAAMTIIDRFLWV

SEQ ID NO: 107534 - protein, 126 aa, Gossypium hirsutum
  unsure (1)..(126): unsure at all Xaa locations
  Clone ID: LIB3543-038-Q1-K1-C7.pep
SRLSGVGLCKSGKVYAVASEDMDSLTFGTPKFLRHLMDPSSRKVPVMEFGVAXVLEELNLTMDQFIDLCILSGCDYCDSVRGIGGQTALKLIRQHGXSVEEILXNINKEGXSIPDDWPYEEARRLF

SEQ ID NO: 107535 - protein, 201 aa, Gossypium hirsutum
  unsure (1)..(201): unsure at all Xaa locations
  Clone ID: LIB3543-038-Q1-K1-C8.pep
PGRPSVRXKXTDGPRGQAMSGPRRQIEKKRSQQKXVTLSVLQPYFSGSLKDAAKSLGVCPTTLXRICRQLGIPRWPSRKINKVNRSLRKIQTVLDSVQGGLKFDPTTGEFIAAGTVMQEVDTQKTLVLSNKNLPIRISEPLDLEKSSAASLESCPDEENSVVKLEEDECSLGGNYSMAARSVLVPSTCEEVKQSGVPCIDC

SEQ ID NO: 107536 - protein, 193 aa, Gossypium hirsutum
  unsure (1)..(193): unsure at all Xaa locations
  Clone ID: LIB3543-038-Q1-K1-C9.pep
XRFLXAFVPXGFPGSVTPDYVPFQVWDSLQGLSTYIRTMLSTQALLSAIGVGEKSATIIGATFQWFLRDLTGMLGGILFTLYQGSNLDSNAKMWRLVADLMNDLGMLMDLLSPLFPSAFIFIVCLGSLSRSFTGVASGATRAALTQHFALQNNAADIAAKEGSQETMATMIGMALGMLLARITTENPVAIWFS

SEQ ID NO: 107537 - protein, 131 aa, Gossypium hirsutum
  Clone ID: LIB3543-038-Q1-K1-D6.pep
MATSSECEGDGEENEEQFLFHQTQKLLSLYLGVSFSVFLAYLPESSLALLPKLQTQTRDITARLLTAEEQLRQMKSRRKEDSKANARVVEIFATHRNTWQAEEKQLLQQIQDQRAKIEELERETHESKRRI

SEQ ID NO: 107538 - protein, 154 aa, Gossypium hirsutum
  Clone ID: LIB3543-038-Q1-K1-E1.pep
MPSSPKFFHARTSPPATPHTRSTGGIFAFLLTFAILSFLFALSSFLSSGGSGYRCRNSDPRSVRVIWDKTGHGNNGRSAAGDDDGTKRHKIMGFVGIQTGFGSTGRRQSLRKTWMPSDRQGLQRLEEATGLAFRFVIGRTNDKSKMAELKKEVA

SEQ ID NO: 107539 - protein, 122 aa, Gossypium hirsutum
  unsure (1)..(122): unsure at all Xaa locations
  Clone ID: LIB3543-038-Q1-K1-E3.pep
MLILSDSSNRAPAVGFCAADEAVLSHCRYVPGRMGSQLARRLTLVGLPLAVPVADXAICNVSPNFFYCMLYGTLLXIXCDLFVHIGGHKTHVQSFVFRLIMACAADTYFDPAYKQRIILLNC

SEQ ID NO: 107540 - protein, 64 aa, Gossypium hirsutum
  Clone ID: LIB3543-038-Q1-K1-F1.pep
GLSVRLSNRCLVKLCGPGFRLFTLWKSDFFGLSVYSGWLVALLVCSSLFSFCGDMCSLVVWSVF

SEQ ID NO: 107541 - protein, 51 aa, Gossypium hirsutum
  unsure (1)..(51): unsure at all Xaa locations
  Clone ID: LIB3543-038-Q1-K1-G10.pep
ANSEEDFMGVMLPILRDAEEHDADTINKATSLVRSFLLKFSIFLGGGAYXF

SEQ ID NO: 107542 - protein, 124 aa, Gossypium hirsutum
  unsure (1)..(124): unsure at all Xaa locations
  Clone ID: LIB3543-038-Q1-K1-G2.pep
QNIAQNKNKTLVQNPIKNGPKGPNSSEIPKTLEVSENLLAPQASHSHEWFPTLTLTLTLMNAPFERPSPMEPSGVHHRGTLYSSRRELEFKXWGSSGENRPRALALMEMGISDYEGEMMIEWGC

SEQ ID NO: 107543 - protein, 105 aa, Gossypium hirsutum
  Clone ID: LIB3543-038-Q1-K1-G3.pep
PPSPSPIRTRGRGGARPFLAAPLSSHQGPCGPLTLRGGGVPVTLRHSGFLRNHPENFRCPNIVVQYINIYVSTISRLLVMSVITSGTPNKLWYIKTCKLIIKLSS

SEQ ID NO: 107544 - protein, 192 aa, Gossypium hirsutum
  unsure (1)..(192): unsure at all Xaa locations
  Clone ID: LIB3543-038-Q1-K1-G6.pep
PRVRDLTGELTAMLITFVIILVCMLTSLFTTXWLQDKVRNEVEPAMKTHLIIHTIIITVGMAIGTGIGAPIGLTIYNTMDNKGVQNGELNWHLCVGLCAGLITGLITEYYTNYYNSPAHNPAHYGTNSATTKAISNLILGHKLGNIPMIILTITISVSISVTAIYGIVDAILGTVITMATTMATDADSPTND

SEQ ID NO: 107545 - protein, 95 aa, Gossypium hirsutum
  unsure (1)..(95): unsure at all Xaa locations
  Clone ID: LIB3543-038-Q1-K1-G9.pep
VKVHILEIAHFPQAHFIXFKPIHKFKFFNPLHXMLNLNAVGGGGVSLALXMEIIPNPRMSQDPNSLXLQTAACASFLFFAHAIGINVPAYAIPSM

SEQ ID NO: 107546 - protein, 156 aa, Gossypium hirsutum
  unsure (1)..(156): unsure at all Xaa locations
  Clone ID: LIB3543-038-Q1-K1-H6.pep
MLKLWKWYQNCLAIHPVKTQVLSSGLVGAFGDIAAQTITHSTAKKHHHLXYEGLDRCIRFRLRLRPYSFRFVATKVAVDGFIFGPLDLLVFFTYMGFSAGKSVPQIKEDVKRDFVPALILEGGLWPIVQVANFRYIPVRYQLLYVNMFCLLDSCFL

SEQ ID NO: 107547 - protein, 71 aa, Gossypium hirsutum
  unsure (1)..(71): unsure at all Xaa locations
  Clone ID: LIB3543-038-Q1-K1-H7.pep
NLSGSYSHKEVRNMVMVNDRKRRITHMLLLMGVLSRMIERSQRCLVDSVAPVRNLESMLTHPISDRESRRX

SEQ ID NO: 107548 - protein, 129 aa, Gossypium hirsutum
  unsure (1)..(129): unsure at all Xaa locations
  Clone ID: LIB3543-038-Q1-K1-H9.pep
GEGREGGEKGVKQAVKPVEEPKAERPTEETPAATPPTPHDTLLEVFMHGDXACSKRGPRCLKGCQGVEDGVTDCMTDCVVVKGEKAGPLAVPERVLRKSHRKEQLLAPVPKPPSTPEKQAEEQHKPKPE

SEQ ID NO: 107549 - protein, 99 aa, Gossypium hirsutum
  Clone ID: LIB3543-039-Q1-K1-A12.pep
RDKYKNRKRTAVEKWKPCKQAKGEREAENPQQMHVPSASSLYLRTACISPHLIASSTLKPSYIIHLLVFRSPRPVQNDLPGSYFHFKSLSNLFFSFTSF

SEQ ID NO: 107550 - protein, 200 aa, Gossypium hirsutum
  unsure (1)..(200): unsure at all Xaa locations
  Clone ID: LIB3543-039-Q1-K1-C12.pep
HLLQGLIPNTFMRREGAPKERELLCGRLIDRPIRPLFPAGFYHEIQVMASVLSSDGKQDPDVLAANATSAALMLSDIPWGGPIGVVRMGRICGQFIVNPTMDELSLSDLNLVYACTRDKTLMIDVQAREITEKDLEAGLRLAHPEXKYLEPQIRLAAKAGKQKKEYKLSMVSEQIFEKVRNLAEAPIDAVFTDPSYGKFE

SEQ ID NO: 107551 - protein, 185 aa, Gossypium hirsutum
  unsure (1)..(185): unsure at all Xaa locations
  Clone ID: LIB3543-039-Q1-K1-C4.pep
NNYPXXLHQMYIVNAGXFKLLWNTAKXFLDPRTTAKIHVLGNKFHNKLLESIYPSQLPEFLGGTCSCLNDGGCLRSDKGPWNNSEIMKLVHSGDALYLRKTESSSDNDNLEAKLLSTKVASSEISYASDVRPHTSDLMQLVSLSDKGQMSALKSMHDIIEPESAAITEEANSTNDVISIVTPRNP

SEQ ID NO: 107552 - protein, 188 aa, Gossypium hirsutum
  unsure (1)..(188): unsure at all Xaa locations
  Clone ID: LIB3543-039-Q1-K1-D8.pep
MTSSFRLLPLALLLLLLAMAHARLQPTIRLPSDDGTRWAVLVAGSNGYYNYRHQADICHAYQILKKGGLKDENIIVFMYDDIAHNLENPRPGVIINHPXGGDVYAGVPKDYTGKEVNVKNLFAVLLGNKTAVSGGSGKVVDSGPNDHIFVFYSDHGGPGVIGMPTYPYVYGDDLVDVLKKXHAAGTYK

SEQ ID NO: 107553 - protein, 79 aa, Gossypium hirsutum
  unsure (1)..(79): unsure at all Xaa locations
  Clone ID: LIB3543-039-Q1-K1-E4.pep
FVQLDNLIEQLGFRVSFDSTTGRTSHHVLKHGVGLILLMRSGRPWPPLALCGQVPCXMLPNGGFRSPSLSTKRSLRWVL

SEQ ID NO: 107554 - protein, 196 aa, Gossypium hirsutum
  Clone ID: LIB3543-039-Q1-K1-F2.pep
HAVRKKKCQNQANKSSFRESLKALEADIQHANSLAAALPRDYGGSCYQMRLSYSPFAPFILFLIEWMDYSCTDTLPSYLGLLHILVYKAYVDGMPALSSKDKKATLREFYAVIYPLLRQLGDEFIESEDNKKGRCTEVSSRKKLEDHKRIPDKDSERDDECGICMENCTKMVLPDCGHALCVDCFHEWNRRSQSCP

SEQ ID NO: 107555 - protein, 48 aa, Gossypium hirsutum
  Clone ID: LIB3543-039-Q1-K1-F3.pep
DLVQIQRLWVFYLFKIRAFSSGVLVTFYGSISKGLILKGIIASLGVFG

SEQ ID NO: 107556 - protein, 143 aa, Gossypium hirsutum
  unsure (1)..(143): unsure at all Xaa locations
  Clone ID: LIB3543-039-Q1-K1-F6.pep
XGLQFXAFVTCDSCDGRGYPPNAKVKICSICRGSGTITIPPFTSTCHACKGSGRIIKEYCMSCQGSRFVEGVKEIKVTIPAGVDSGDTIRVPEAGNIRRQGSQLGNLFIKIKGAADPVFTRDGADVYVYSNISFTQTILGGAV

SEQ ID NO: 107557 - protein, 74 aa, Gossypium hirsutum
  unsure (1)..(74): unsure at all Xaa locations
  Clone ID: LIB3543-039-Q1-K1-F9.pep
RSCRQDAEGYQLGRSGSRALLYYNNITCALQIDTDGSSSFHCLHQIPPRESNFSTAPTIPSXFLTHLXLIGRRG

SEQ ID NO: 107558 - protein, 194 aa, Gossypium hirsutum
  unsure (1)..(194): unsure at all Xaa locations
  Clone ID: LIB3543-039-Q1-K1-H3.pep
DFQXLSSLYCGQEFVAHEGSILTMKFSLDGEFLATAGEDCILRVWKIVEDDSLDKFDIQDLDPSCLYFRMNHLSQLIPLNADKQNIDKIKRLRRSSDSTCVIFPPKVFRVLEKPVHEFQGHSAEILSLSWSKKGFLLSSSVDMTVRLWQVGYDGCLRVFSHNNYVTSVAFNPVDDNYFISGSIDGKVRIWEVLR

SEQ ID NO: 107559 - protein, 196 aa, Gossypium hirsutum
  Clone ID: LIB3543-039-Q1-K1-H5.pep
RPSVRPASAPRPGTASAIGSKSYNAIMGELVALETRNMEISPKNNSEDCVDFAAATTATLGVPCPCLSKTRSFDDSPHSVSDQQSLRKGDLEEEAELMKALKLSEAELPTSNGDPGSLDIRSCSNNPVSVDSVDKQEGDRSAEHQNLHQHEPSFSDNCISLSNNSVGKTCFQTVSKEELLKTDDINQDQSFYVKSG

SEQ ID NO: 107560 - protein, 112 aa, Gossypium hirsutum
  Clone ID: LIB3543-039-Q1-K1-H9.pep
KRKSKLMVDPADGTTKPISMSTNYPINTSRHVNSSSNHVKANYKNYFLNLHIHLLHSSSKLGIMFFLDQSSSNIITTFNTRYSMLQHPHPKGKTNSKIGTNYSEDLARYRYK

SEQ ID NO: 107561 - protein, 47 aa, Gossypium hirsutum
  Clone ID: LIB3828-003-Q1-K6-D2.pep
DSPCHRSLSPVAVVVTRSTYRYTSHGPSTLSFLLFPLLNGQLRTMCP

SEQ ID NO: 107562 - protein, 67 aa, Gossypium hirsutum
  Clone ID: LIB3828-003-Q1-K6-E3.pep
LMFAEITFYHVIIANPNYTSMMSKMRQLLAMLCTSKSEQMKDRCIIDLTVFILTRVEIQSGFAICIL

SEQ ID NO: 107563 - protein, 95 aa, Gossypium hirsutum
  Clone ID: LIB3828-003-Q1-K6-H2.pep
MSEVVKLGNKIIKKPDLRKVSSTANSQSSARKQNRKGENPIRVLPATEQSSDHGFSSSWICKNSACRAILSIDDTFCKRCSCCICHLFDDNKDPS

SEQ ID NO: 107564 - protein, 71 aa, Gossypium hirsutum
  unsure (1)..(71): unsure at all Xaa locations
  Clone ID: LIB3828-005-Q1-K6-A1.pep
YLRPTIPIHTXPQLAELLESCWQQDPALRPDFSEIIEILQQIAKEVGDDGEDRRKEKSSGGFLSALRRGHH

SEQ ID NO: 107565 - protein, 48 aa, Gossypium hirsutum
  Clone ID: LIB3828-005-Q1-K6-B2.pep
MREVISVHIGQAGIQVGNSCWELYCLEHGIQPDGMMPTEGNAGGNHDA

SEQ ID NO: 107566 - protein, 188 aa, Gossypium hirsutum
  unsure (1)..(188): unsure at all Xaa locations
  Clone ID: LIB3828-005-Q1-K6-B4.pep
RVASSPQYFIAKNRIRREIKPPKKYAEADLVAYVLNVVEDIDANXELSNYSEVVSCEDSEKWMFAMHEEMESLHXNRTWDLVKLPKGKKAIRCKWVFKKKEGTPGVEEPRYKARLVAKGYSQIPGVDFTDVFSPVVKHSSIRVLLGIVAMDDLELEQLDVKTAFLHGELEEDIYMQHPEGFIVSEKED

SEQ ID NO: 107567 - protein, 106 aa, Gossypium hirsutum
  unsure (1)..(106): unsure at all Xaa locations
  Clone ID: LIB3828-005-Q1-K6-C5.pep
SVLGDFWWTWSSWFVSFTSNIYITYHLGRSSCSRPVFCWRVYSHFKFPSPXQGIIEKVKKTADALGQELEDAMQKDLQETTQNLEKFVRIIGEPYRDAAQNRLDKL

SEQ ID NO: 107568 - protein, 191 aa, Gossypium hirsutum
  unsure (1)..(191): unsure at all Xaa locations
  Clone ID: LIB3828-006-Q1-K6-A1.pep
VIIKLTAQFVAXNGKSFLTGLTSREINNPQFNFLRPTHSMFTFFTELADAYSKVLMPPRXLTEKLRKSVVDMTTVLERCLHRLEWERSQEQARQKAEDEIEQERMQMAMIDWHDFVVVETIDFADDEDEDLPPPMTIEEVIRRSKITAMEEDEIVEPGKEVEMEMDEEEVQLVEEGMRAASIGENDGEKRI

SEQ ID NO: 107569 - protein, 104 aa, Gossypium hirsutum
  unsure (1)..(104): unsure at all Xaa locations
  Clone ID: LIB3828-006-Q1-K6-A4.pep
IKINGCPIKLGEHIILHKKAVKSNILLCRQRCCCWYIRILVKGWGYTKKIYSFHKKISKDLIAFYQKLVXQQKMKDIKDKEQTYYRTIMVDDTIMKQPQKTDGK

SEQ ID NO: 107570 - protein, 65 aa, Gossypium hirsutum
  Clone ID: LIB3828-006-Q1-K6-D6.pep
NILHIAMRKNHSFPPPLLKGDVFFSSLFGPNNMASACVLYIIYIKPFFLFLHFHGVVSYHTSGRH

SEQ ID NO: 107571 - protein, 71 aa, Gossypium hirsutum
  unsure (1)..(71): unsure at all Xaa locations
  Clone ID: LIB3828-006-Q1-K6-F1.pep
LTLVMFWRLGFLPQTHWTSVSCASKGEAEDVVISYCDFCKTDIQKDTLNRDICFDDFTPFAFIRPVSADXL

SEQ ID NO: 107572 - protein, 79 aa, Gossypium hirsutum
  Clone ID: LIB3828-006-Q1-K6-F3.pep
SEVNKSDYFNSLPLSVFIILLQVPLLQLKKSEQMQVVKIILKLSSSSPLFLSIVYHPPPPSPTSPTEKKNTANAEQTKT

SEQ ID NO: 107573 - protein, 203 aa, Gossypium hirsutum
  unsure (1)..(203): unsure at all Xaa locations
  Clone ID: LIB3828-006-Q1-K6-G4.pep
QAKXNETQPFTSRSGSRSPVVNLLPKRFGNSTMLAESIPVCEFQGRPIADHPAIKFGRPPGALRVPREPLDAVTVAEAVSVISCWYEDKTEWGERVGWIYGSVTEDVVTGFRMHNRGWRSVYCITKRDAFRGSAPINLTDRLHQVLRWATGSVEIFFSRNNALLATRKLKFLQRLAYLNVGIYPFTSFFLIVYCFLPALSLIS

SEQ ID NO: 107574 - protein, 108 aa, Gossypium hirsutum
  Clone ID: LIB3828-011-Q1-N6-A3.pep
LPHPKTCFFLTKKEFFKGLLNSKTGKRKNILHWGGPPQAKEITPKRKKKILKKFQAGPPRGGGNNQTGESNRGGKTSPPGTKKKSAPAGPGPPPGGGGQKPPAKKWGG

SEQ ID NO: 107575 - protein, 68 aa, Gossypium hirsutum
  unsure (1)..(68): unsure at all Xaa locations
  Clone ID: LIB3828-011-Q1-N6-C3.pep
LEFAHIHLIFKKYKLNRSSTPPCTVLAQKKKKKKKKKKKKKKKKKKKKKKGRAALXFFFFFFFIPKRN

SEQ ID NO: 107576 - protein, 74 aa, Gossypium hirsutum
  unsure (1)..(74): unsure at all Xaa locations
  Clone ID: LIB3828-011-Q1-N6-H1.pep
NFNRRCQADQICCFHLXWIKPSSSDLXALPLPDLLFIFRHILPXLFSFQPIKSSCAPGSHCRKFNFWPMIHLRW

SEQ ID NO: 107577 - protein, 109 aa, Gossypium hirsutum
  unsure (1)..(109): unsure at all Xaa locations
  Clone ID: LIB3828-011-Q1-N6-H3.pep
QWSMGSSHSGXVERELXFGIGKCKFCPXSTNGXQXXPQYKGWXVSAPXCCXYRXTXSXSXHLWGSLLTSLVLPSPALPAPLLRXXLGAPAIGVLLSPQGXPPHPFHARA

SEQ ID NO: 107578 - protein, 162 aa, Gossypium hirsutum
  Clone ID: LIB3828-012-Q1-N6-B1.pep
VTIDRGISSYLTNLECYCDNSFVTCVQGDGLILSTTSGSTAYSLAAGGSMVHPQVPGILFTPICPHSLSFRPLILPEHVTLRIVVPFNSRSPAWASFDGKDRKQLAAGDALLCSMAPCPVPTACQVDSTSDFLSSIQDGLHWNLRKTQSFDGPRELQDIIQI

SEQ ID NO: 107579 - protein, 155 aa, Gossypium hirsutum
  Clone ID: LIB3828-012-Q1-N6-B2.pep
PAWDAAQFFFPQTGGAPPPAPFFISRPLNFPWPNPDLAPVSPFLFSPALVFFPNPQFFFCPFLRVFAPKKRDLSPLFFWPKKKKKKEKKGVGPFLKVFLTELNIFWGFFPPPGGELGLPLCLVLGPGSKGGLFFFFPILFYRVWFFIRGVLFVCF

SEQ ID NO: 107580 - protein, 42 aa, Gossypium hirsutum
  Clone ID: LIB3828-012-Q1-N6-C1.pep
QILCHYIRFNLGLAIYKSFPKIIHLVQCCTFIFGFVMKPTLS

SEQ ID NO: 107581 - protein, 122 aa, Gossypium hirsutum
  Clone ID: LIB3828-012-Q1-N6-E3.pep
MGAESKKDNEIFSEFLNLSKSSESVKHEAIAMGSREDVIAALRSMSNSTLFLVGRTSPAMPLSDRSSDCPELGHVGSYLASSDFSTTSSILVIQQYDPSINAMEKPLDDINEASNKTMSNGV

SEQ ID NO: 107582 - protein, 123 aa, Gossypium hirsutum
  Clone ID: LIB3828-012-Q1-N6-F4.pep
APVLSSCVLLCTFFFLEISSVHPLGFCPPFTFCQKVALISSPFPRVIFSMFLRSISPVLILLPHPLPLFSILPLPFPQHVIPPLFFFPQFPASFSRLAPSSSPPPCPSFFLPMFAPNFMPVMF

SEQ ID NO: 107583 - protein, 110 aa, Gossypium hirsutum
  unsure (1)..(110): unsure at all Xaa locations
  Clone ID: LIB3828-012-Q1-N6-H2.pep
KSSLGGAKDTQLGSREPLIQKMKTEGAAXQGSGWGGLGVNKELKKPVIETTPNQDPLVXKGPHLVPLLGKNVWEXANYLQDKNVSPDYLKNIWKVINWKNASEVYEKECA

SEQ ID NO: 107584 - protein, 52 aa, Gossypium hirsutum
  Clone ID: LIB3828-012-Q1-N6-H3.pep
KAPLFFFFFFYNAKWQVSPLIGRKYSSFLSKPYQLKNKRMNLFLFFEFKVKI

SEQ ID NO: 107585 - protein, 120 aa, Gossypium hirsutum
  unsure (1)..(120): unsure at all Xaa locations
  Clone ID: LIB3828-013-Q1-N6-A6.pep
ALCATFPIPESGLGVILIYSEVANPKTDHGSCYISPLSTSXFGFLRHTTIQRVLLLSNVQGAEGKGLLPVSRVKGKNTIPPGAQNASPLSLGDSLIHKAARVSGFPTGQWAVSTTRLMCV

SEQ ID NO: 107586 - protein, 137 aa, Gossypium hirsutum
  Clone ID: LIB3828-013-Q1-N6-B1.pep
KKREVIVRGVLSVMVISGENLPPVDFNGKADPFVVLTMKKSETKSKTRVANETLNPVWNQTFDFVVEDALHEMLIIEVWDHDTFRKEKIGRIVMTLTRVLLEGEFQDNFTIDGAKSGKLHLHLKWSPQLVFRDRDTK

SEQ ID NO: 107587 - protein, 118 aa, Gossypium hirsutum
  Clone ID: LIB3828-013-Q1-N6-B3.pep
PDTISCLNDIEVLNLAHNQLSGELPDLVCSLRSLMNLTVAYNFFSGFSQECSKLFIRNGGFDFSLNCIPGRDMQRPQPECSGIPGSGLSCLRIPSAQPLVCGTLLGNLEANLTSSSSP

SEQ ID NO: 107588 - protein, 88 aa, Gossypium hirsutum
  Clone ID: LIB3828-013-Q1-N6-B4.pep
RRAAAAKQVENEAKTDENKTKRSPDWLSSKTDNELNMNNILKKETQDSSMGNLDLGLCLKGHDGSHNSVGEKVDQVKPASSTGFWAIG

SEQ ID NO: 107589 - protein, 169 aa, Gossypium hirsutum
  Clone ID: LIB3828-013-Q1-N6-C2.pep
KNPNGIDIPALLKHKEKADSLKDFEGGDAMDLNDVLVHECDVLIPCALGGVLNKENAADVKAKFIIEAANHPTDPEADEILSRKGVTILPDIYANSGGVTVSYFEWVQNIQGFMWEEEKVNYELKRYMKRAFNDIKAMCHTHNCNLRMGAFTLGVNKVARATVLRGWEA

SEQ ID NO: 107590 - protein, 55 aa, Gossypium hirsutum
  Clone ID: LIB3828-013-Q1-N6-C4.pep
FIFLNMACIGLKLYYFCAIENQPNVLAWVGNPSFCIKPQMMANIHFDLYAKILFS

SEQ ID NO: 107591 - protein, 142 aa, Gossypium hirsutum
  Clone ID: LIB3828-013-Q1-N6-D2.pep
FSAPLSNPNGWIAWSINPTTTHMVGSQAIVAFKNKCSLVVKTYNLSSYNSIVEGKLSFDVWELEAETNDDEKMIIYGSLKVPSSAEKVNQVRQVGPGVTNDHPRKHGFAKDNLSSFGELKLMNKMSSGASLLAPTPQVANND

SEQ ID NO: 107592 - protein, 111 aa, Gossypium hirsutum
  Clone ID: LIB3828-013-Q1-N6-H4.pep
PPGPGPETPGAPPGRNFSKPRARKKIPRARQGPPPPQKPGPGRGGFPSPIPGFSPTPSGSFSFGNGPRPKFPPPNPPKPCYWAPGWAPPCFFSFPPFSGNPPPKRGEPPKN

SEQ ID NO: 107593 - protein, 104 aa, Gossypium hirsutum
  Clone ID: LIB3828-013-Q1-N6-H5.pep
EVANHMKLACNVADCTTLNYGGSCNAIGAKGNVSYAFNSYYQLQMQNEKSCNFDGLGMVTFLDPSVGDCRFLVGVTDTSASFRPYQRWVVGCILMLWQVWAFRV

SEQ ID NO: 107594 - protein, 87 aa, Gossypium hirsutum
  Clone ID: LIB3828-014-Q1-N6-A4.pep
KEFFLARGGLFATIMLFPKLATSFLGGIFQWGLGLVYLVCFEMNKTLDKSLSCVDAHLGGILVSKDRWAPFRVLFYLTCSYKVPCFC

SEQ ID NO: 107595 - protein, 99 aa, Gossypium hirsutum
  Clone ID: LIB3828-014-Q1-N6-B4.pep
LFQLPSISWMFSTKTSKNLIGSCNLKAHPFVSGWFRTFKYKFLVLGVFIYTTTRIVIIVDKPECSSKIFISQYTSISEFLILSLICHTFEQNQIFCKYE

SEQ ID NO: 107596 - protein, 51 aa, Gossypium hirsutum
  Clone ID: LIB3828-014-Q1-N6-G3.pep
GVSPDYSPSSPQYSPSAGYSPRAPGYSPPSTSRSPPSTKDGRTNKDARGNR

SEQ ID NO: 107597 - protein, 66 aa, Gossypium hirsutum
  Clone ID: LIB3828-014-Q1-N6-G6.pep
SLLTFFLFPNNSFIFLFPSFLAFFSVWGFYIIMCLATLPFDGMLLFERVIRMWGGERGKRGRDLFI

SEQ ID NO: 107598 - protein, 59 aa, Gossypium hirsutum
  Clone ID: LIB3828-014-Q1-N6-H4.pep
QNSRNPPNPPVPPNPPNSPNPPDPPGPPDPPGPQNPPKPRPVGILKWKVFPPGFWWAFF

SEQ ID NO: 107599 - protein, 88 aa, Gossypium hirsutum
  unsure (1)..(88): unsure at all Xaa locations
  Clone ID: LIB3828-015-Q1-K6-B2.pep
TSILLCTGVLFSTKKHPRTKDLSPEDFWFSAPKKGVMVFALPXEPGLTQLAGDFKVHFHDRQGDFYCWLNTTTIENRKVLNTKELDWF

SEQ ID NO: 107600 - protein, 49 aa, Gossypium hirsutum
  Clone ID: LIB3828-015-Q1-K6-B6.pep
ITFLILRHLILVIYFKYIIILFIFNLINFVYKLINFIYNFYFEYVNTFM

SEQ ID NO: 107601 - protein, 60 aa, Gossypium hirsutum
  Clone ID: LIB3828-015-Q1-K6-C4.pep
RPPPFRNLQLLMELRRGLLHSLHPQMASYILACTRINHIWWQHQIQGPLGYYRLNIVYEL

SEQ ID NO: 107602 - protein, 97 aa, Gossypium hirsutum
  Clone ID: LIB3828-015-Q1-K6-E3.pep
CSKFGGRVASAVRRRYIQASSKREAQACERAKETVKQGVNEAKEVNKKANSKAQSAWDSAKETAQKAKDNMFGKADESKEVIKQNAEKIKQSMNKKD

SEQ ID NO: 107603 - protein, 119 aa, Gossypium hirsutum
  Clone ID: LIB3828-015-Q1-K6-G2.pep
SVNQSIEEKPSLFQLVSNTFSLLKKSHQSSWVKVKTVIHEFQLQFTPSSLDFRGTGGKDPCKASDGTGEKVKEAVKDSIETSEAIAEETAKTAAEAVHKTDEKVKESASSKPDDSHEEL

SEQ ID NO: 107604 - protein, 64 aa, Gossypium hirsutum
  Clone ID: LIB3828-015-Q1-K6-H1.pep
TISLLFISGPFYGLRPILFKLGWCSGKAPPNITTTRIDLSPNDSGKNPLQFFQPPLVSHMFYEL

SEQ ID NO: 107605 - protein, 182 aa, Gossypium hirsutum
  Clone ID: LIB3828-015-Q1-K6-H5.pep
IVVTSRMVIAWNNGEMPLHHGVLPPFLYGKGVYNHWLINEALSSGLRFVFDASWTISNIALGDSSYQSNCFVKSSNVSDIEKGSWEYDCNSHLAAVYGLSSLHGFNYSAVMKLVKCDGRYLLINATEDFLHTYAYKRKSLWKRHIPKCRRSKTTLACVVRTIKTQNETSGCSLKEGSVHTKT

SEQ ID NO: 107606 - protein, 200 aa, Gossypium hirsutum
  Clone ID: LIB3828-016-Q1-K6-A6.pep
AGHEFGKKMLLRERGWWRQFWLLLKRAWMQASRDGPTNKVRARMSIASAIIFGSVFWRMGRSQTSILDRMGLLQVTAINTAMAALTKTVGVFPKERAIVDRERAKGSYALGPYLLSKLIAEIPVGAAFPLMFGAVLYPMARLHPTFSRFGKFCGIVTVESFAASAMGLTVGSMVPTTEAAMALGPSLMTVFIVFGGYYVT

SEQ ID NO: 107607 - protein, 82 aa, Gossypium hirsutum
  Clone ID: LIB3828-016-Q1-K6-B3.pep
KISRAPRVSIHERSSHVVLTGGYRWSVQSIMIVMFRCTTESCSRMLVETNYKPSACVSIAEDCHIATAYSGRRCPTYTRDFQ

SEQ ID NO: 107608 - protein, 185 aa, Gossypium hirsutum
  Clone ID: LIB3828-016-Q1-K6-C6.pep
MNQAQHLVNREENSIGLRHGTSCRVGSTVRKLFAERSSCRSENADARDDLLQFPASDGQSAGLSYIDSEEPGELLQANALNFVERFVNDKMTELDDQVDLGKSTGRKSLISCAIIGPQSLAKKTVERTAGETQIFDWDDALEDEGGGGIYCRRKEEFYGDGSHAQKNSNHAHKPKGSKLNESCNV

SEQ ID NO: 107609 - protein, 46 aa, Gossypium hirsutum
  Clone ID: LIB3828-016-Q1-K6-D4.pep
QIGAPAYIECSAKSQRNVKSVFDSAIKIVLQPPKQKKKKNKPCSIM

SEQ ID NO: 107610 - protein, 64 aa, Gossypium hirsutum
  Clone ID: LIB3828-016-Q1-K6-E6.pep
PNSVSSYSMADPIRSLSTNCNSLIISLSFIRSLGCSLEQATPILSSSFKLSCIWSLFECLLGCK

SEQ ID NO: 107611 - protein, 66 aa, Gossypium hirsutum
  Clone ID: LIB3828-016-Q1-K6-F4.pep
TILPSFDRSNFNANEVEPVIMPQPFAPSNPYCTILLHVLQHPMNYDDSDVHHDVQQNDQWSYIVNI

SEQ ID NO: 107612 - protein, 52 aa, Gossypium hirsutum
  Clone ID: LIB3828-017-Q1-K6-B4.pep
NLFKNQKFNPRGHSKSRPAPSLPTRAHPMLDSRPNTSKPKNRGVTRCTTWAE

SEQ ID NO: 107613 - protein, 98 aa, Gossypium hirsutum
  Clone ID: LIB3828-017-Q1-K6-B6.pep
GISEWHLLWVIGDAYTIGFIRFVSSINVDYIFGKVEAAISFRRQAIFVYSKAMPISFFLSIFFVNLLGYPFLVTLGESFPKDTPLYNPRLIAGKCSTW

SEQ ID NO: 107614 - protein, 76 aa, Gossypium hirsutum
  Clone ID: LIB3828-017-Q1-K6-C1.pep
KKNYKTHHPFFFHKQILSRFPSKILSISFQNSLKLSISFQNPLIFLQKISQIHIKFQFSLNFIFLKIILNFLYFGH

SEQ ID NO: 107615 - protein, 102 aa, Gossypium hirsutum
  Clone ID: LIB3828-017-Q1-K6-C4.pep
FILSSHSRLCILFFKDKGACAYSEHWLWYQIIHNRKGRRCSCLSHLSAVGRRVIRCQLLQSVQYSVQLQEQKCQLWCIWLAYQVCTLSRISPRRSHACSQYM

SEQ ID NO: 107616 - protein, 121 aa, Gossypium hirsutum
  Clone ID: LIB3828-017-Q1-K6-F1.pep
PNTSVIRIRPHVNVNSFRERINGAPLTLHKRRYLPPRNMPEMLKPVFFFNFLRSCKIDRLNSAYSVCQQVKAPISKHFDPKETTTAHIKCAHYLTLSFSSQTGKSSKSFGEEHSRFCWKCF

SEQ ID NO: 107617 - protein, 89 aa, Gossypium hirsutum
  Clone ID: LIB3828-017-Q1-K6-G2.pep
DGGGSHVLHVPMGLVLPCIRQHVIIHNIHLDNIVSLSTRMRAYARTRLGTTLRRGPGATEIAFPFIGAANGCHHHLSGDQCCDSIMNAI

SEQ ID NO: 107618 - protein, 59 aa, Gossypium hirsutum
  Clone ID: LIB3828-017-Q1-K6-H3.pep
GSVPKQDLPVNVEARTKVGVGVAGLKIGMVGVTVKCDGMSKKQLDGGDMPKCVINMLKW

SEQ ID NO: 107619 - protein, 192 aa, Gossypium hirsutum
  unsure (1)..(192): unsure at all Xaa locations
  Clone ID: LIB3828-017-Q1-K6-H4.pep
VLQDVGSQDKDKINVWRSSTQDNYLHLKIEIDIRGGSSVADASVSTKNFSSEKRNKDEIKESLNFTMCKKLVQMMQGNVWISTNSVGFAQSMTLLLRFQIQSYVQRTMFAAGNSERSNSYSRFRGLRVLLADDDDINRTVTKKLLEKLGCEVTAVSSGFECLSAVSHAENSFRIVVLDLHMPXEMDGFEVAM

SEQ ID NO: 107620 - protein, 207 aa, Gossypium hirsutum
  unsure (1)..(207): unsure at all Xaa locations
  Clone ID: LIB3828-018-Q1-K6-A1.pep
LIQAFFALHDKNTNGVGDAENIIGKGVDLALEQWWQLPEMSVHARVPLLQQFQQLVEVQESAGILVDIANGSKLSGNSVVGVHGNLYADLKDILETWRLRTPNDWDNMSVWYDLLQWRNEMYNAVIDAFKEFSTTNPQLHHLGFRDKAWNVNKLARIARKQGLYDVCVTILEKMYGHSTMEVQEAFVKITEQAKAXFEMKGELTSGL

SEQ ID NO: 107621 - protein, 211 aa, Gossypium hirsutum
  unsure (1)..(211): unsure at all Xaa locations
  Clone ID: LIB3828-018-Q1-K6-B2.pep
PAHGHGHQQTQQPHGQSSSMGACVEVGKFGLEEEVERLKRDKNVLMQELVRLRQQQQTTDNQLQNMVQRLQGMEQRQQQMMSFLAKAVQNPSFFAQFVHQQNESNRRISETNKKRRLKQDGIIGEDHSTASDGQIVKYQPLMNDAKAMLMQMMKGDASPRRDSFNNSNEHTLIGDGSLSSSGLDGGNSSSHVSXVTLQEVSPNFSISGHCP

SEQ ID NO: 107622 - protein, 39 aa, Gossypium hirsutum
  Clone ID: LIB3828-018-Q1-K6-B3.pep
RLLECLFLGTPAVATTVSTPSIVHSCGCYEVRVVAAKGF

SEQ ID NO: 107623 - protein, 133 aa, Gossypium hirsutum
  Clone ID: LIB3828-018-Q1-K6-C2.pep
MSSYQGVIVSDPWLQSQFTQVELRTLKSKFINVRTQHGRVTLGDLPPVFSKLKAFTEMFNEDEIKTVLGESNSDMGEEIDFEGFLRAYLNLQTHAIEKSGGTKSSFLKATTTTFHHAINESEKASYVAHINNY

SEQ ID NO: 107624 - protein, 80 aa, Gossypium hirsutum
  Clone ID: LIB3828-003-Q1-N6-A1.pep
ECVENLMNSFAWEGIEDIWVWRGNLLGNFLYEAPINYYIKVLLTVIIDIMSLGSYTISKKTFKRKNLSAENHLEFTDYFR

SEQ ID NO: 107625 - protein, 117 aa, Gossypium hirsutum
  Clone ID: LIB3828-003-Q1-N6-A4.pep
RQLAILRAGQKNLSGQGFNPPKTLFRANSKQLFEPGGEPNPSRGVGIKRIIPQKPFNNRTPPFQRPKGKTNPPRKGPFILIPKGKILKNKSQFIPAGLFSPKGKIRGKTKATLSPGP

SEQ ID NO: 107626 - protein, 96 aa, Gossypium hirsutum
  Clone ID: LIB3828-003-Q1-N6-C4.pep
SCLLKKAPASLPSSVMSSDEDLGLEYELSALRQAIDSGFTYFLAHGDVRAKKNILFLKKLVINYFYAFLQRNCRVGAANMSVPHMNILQVGMTYMV

SEQ ID NO: 107627 - protein, 68 aa, Gossypium hirsutum
  unsure (1)..(68): unsure at all Xaa locations
  Clone ID: LIB3828-003-Q1-N6-E4.pep
PTIAYARTLLGSGQWYMFIVGAFFAFWVLAHLYPFLKGLMGRRKKTPPTVXVWAGFIAIIICLVMSSL

SEQ ID NO: 107628 - protein, 65 aa, Gossypium hirsutum
  Clone ID: LIB3828-003-Q1-N6-E6.pep
GALGPELGFSLAASVEPAARPPPTMVCLANLGLARQNRGGLGPLLIFVLGPPWGKESPVGRGVWI

SEQ ID NO: 107629 - protein, 135 aa, Gossypium hirsutum
  Clone ID: LIB3828-003-Q1-N6-F1.pep
MKKKLILSFDMANEKFWVSLIPEFVGFYPQNDILEVLVFNGSLGVIAYTVERTDTSFDLWVMNGEVWTKQFSIEPIPGVVRQLGFWKNGEMFLLNTNYEVVLFDPSTQELKVLGINTYLDHHREYVSLFFFMLRA

SEQ ID NO: 107630 - protein, 73 aa, Gossypium hirsutum
  Clone ID: LIB3828-003-Q1-N6-F4.pep
REPEMIQIQNNPEPNIVEYKMHGTQNDRPTLVKPVQLPPLAPTLKLVWNFNLDPKLRSEDTLGYNIQMKESND

SEQ ID NO: 107631 - protein, 48 aa, Gossypium hirsutum
  Clone ID: LIB3828-003-Q1-N6-G4.pep
KAYRKATLCIHPDKVQQKGANLQQKYISEKVFDLLKEAWNKFNSEELF

SEQ ID NO: 107632 - protein, 32 aa, Gossypium hirsutum
  Clone ID: LIB3828-003-Q1-N6-G5.pep
VLNLSFLMQLLFHLYVFKATVEFCIVLVVLPN

SEQ ID NO: 107633 - protein, 72 aa, Gossypium hirsutum
  Clone ID: LIB3828-004-Q1-N6-A3.pep
KRNCENRKTISSSMKTTLLSIRQSNHLVSMHAPKKDTIRIARAPIRLWFFWYGKKYTCHPKTPPLQKSSRIV

SEQ ID NO: 107634 - protein, 104 aa, Gossypium hirsutum
  Clone ID: LIB3828-004-Q1-N6-D6.pep
TGALVWRTQSQDRCPGQRQHSGSRKRNPSINVENTTCIDSGLYNARASVARNSGYSASRRIQAPLRQWSTIVRNAVQDRNPRAFPYLLSQHRRGHGMVHGQPDP

SEQ ID NO: 107635 - protein, 139 aa, Gossypium hirsutum
  Clone ID: LIB3828-004-Q1-N6-E2.pep
FLNLVIVIIILMGHEIPPPPAPSPRQLDEKVDYSRELEEEADEFLRKFKKITLEAKDQYIKVEDPVAADKEGIEVEDSTKRKEKSGGDTSRVSWSIVDKNEMIVDCVSNEEYYNEAWSKILEHKVIGKLLSALSPVPWD

SEQ ID NO: 107636 - protein, 94 aa, Gossypium hirsutum
  Clone ID: LIB3828-004-Q1-N6-F2.pep
YEGAKVLFHAALAIFMMKEDELLLTHQVGAIINILQRTTHPLFDPDELLTVAFDKIGFMAPNPISKQRKKQEPEVMKELDERLRRLNSFRTDDK

SEQ ID NO: 107637 - protein, 59 aa, Gossypium hirsutum
  Clone ID: LIB3828-004-Q1-N6-G6.pep
GRRKPYVCHANIRARRSHNRENKFTLQIRTNYFPFKRNMKFESSIQIKKKGGTLLTESF

SEQ ID NO: 107638 - protein, 82 aa, Gossypium hirsutum
  unsure (1)..(82): unsure at all Xaa locations
  Clone ID: LIB3828-005-Q1-N6-A4.pep
LELAPPVYFVRDPGRCSLCEIRCPSNLAVDFGESGPVXCSLCKGDIYPFIKFVGQERKFICNLCAPPVFRSIACKPPFNVSK

SEQ ID NO: 107639 - protein, 85 aa, Gossypium hirsutum
  Clone ID: LIB3828-005-Q1-N6-C4.pep
PLMKQTRELNTEPVLMLLLFTTSGKSYALKSGFSSKDLPGAYRRYSSVERTEKGKNKDKREGEGVTKNRMNLALSEHYGKHGSSG

SEQ ID NO: 107640 - protein, 79 aa, Gossypium hirsutum
  Clone ID: LIB3828-005-Q1-N6-D2.pep
FFFFFFFFFFFFFFFFFFFFFFFFFFFFFFFFFFFFFLGHAGGNPEIRDGARGGNKFSQKGGEKKRGKKKGKAGPGEKR

SEQ ID NO: 107641 - protein, 56 aa, Gossypium hirsutum
  unsure (1)..(56): unsure at all Xaa locations
  Clone ID: LIB3828-005-Q1-N6-E3.pep
RRSRNRXGAFFFATRVIASCDRRAHKFIPGRVLKNNPKFKLLRLQMRLIQPRGLQI

SEQ ID NO: 107642 - protein, 106 aa, Gossypium hirsutum
  Clone ID: LIB3828-006-Q1-N6-A3.pep
CQAGYLTFLLGVKILIRKEPNLNCKKSCTESFFSTFTSTYIVGGGSLKQTERNPSSLYPGPLLGINQRNQYENTPANMGIDEEHDIGIKALGTDAGVRLIDADLIR

SEQ ID NO: 107643 - protein, 66 aa, Gossypium hirsutum
  unsure (1)..(66): unsure at all Xaa locations
  Clone ID: LIB3828-006-Q1-N6-A6.pep
KVEGTSAKEVMDLIMITQXFDTIKDLGNSSKNTTVFIPHGPGHVRDIGEQIRNGLMEASTAQINVE

SEQ ID NO: 107644 - protein, 76 aa, Gossypium hirsutum
  Clone ID: LIB3828-006-Q1-N6-B5.pep
SGGTTMFAGIADRMSKEITALAPSSMKIKVVAPPERKYSVWIGGSILASLSTFQQMWIAKAEYDESGPSIVHRKCF

SEQ ID NO: 107645 - protein, 63 aa, Gossypium hirsutum
  Clone ID: LIB3828-006-Q1-N6-F3.pep
NIRSKQFYKITIIIHFWILCIALTISVKYQKPNSQLFTISKKRLKKSLFWIFIEEQYKIVTLS

SEQ ID NO: 107646 - protein, 99 aa, Gossypium hirsutum
  Clone ID: LIB3828-006-Q1-N6-F4.pep
GRVGGRVGSGGRCDGYGQRVECSSALISPHALGWNCRISLLVLVVSYFLSIVVPASLSDLDLGFSASINCLWCSLSRFFFFSILLFVFGHNAVCAFFFG

SEQ ID NO: 107647 - protein, 107 aa, Gossypium hirsutum
  unsure (1)..(107): unsure at all Xaa locations
  Clone ID: LIB3828-006-Q1-N6-G4.pep
AGQYEDDIYADLYIVKWASLMIPPIVIAMVNIIAVIIAXARTLFGTGQWNMFIGGALFAFWVLAHLYPFLKGLMGRRRKTPTIVFVWAGLIAIIICLVYGVRIYNSE

SEQ ID NO: 107648 - protein, 72 aa, Gossypium hirsutum
  Clone ID: LIB3828-006-Q1-N6-G5.pep
CFCGTFGGNFLFGSRKKWMGKFFCSPPGGVFMCFKKASFSRNFFLSLFLNSGDRVQKFVYILVIFLGLFFPL

SEQ ID NO: 107649 - protein, 75 aa, Gossypium hirsutum
  Clone ID: LIB3828-007-Q1-N6-A6.pep
NIDKEFLRLWFRENCNPYEDKVLPDAPEELVCELAWRYIFLYETITKSRFEMQPMGEPIHDRISRNVSSALSSLQ

SEQ ID NO: 107650 - protein, 42 aa, Gossypium hirsutum
  Clone ID: LIB3828-007-Q1-N6-B12.pep
VLPIHPCSYPRPKLPADLRRPTYPHLVCIEYMHFQWPFCLLL

SEQ ID NO: 107651 - protein, 101 aa, Gossypium hirsutum
  unsure (1)..(101): unsure at all Xaa locations
  Clone ID: LIB3828-007-Q1-N6-B5.pep
KRKKKKKKKGGGVVFFFFPPPPQKNFFLSPPPPPPXXPLPLKKKRGEKKKRLVGKXGXXAPPKKKNFFLKNIKKGPPPPPPKNSWPPFLTLAHLVVPPKVP

SEQ ID NO: 107652 - protein, 46 aa, Gossypium hirsutum
  Clone ID: LIB3828-007-Q1-N6-B7.pep
CFPYPMLRMAFLLLISCSVCGDFRFFGTMNFDECRLGNVQTHAFYN

SEQ ID NO: 107653 - protein, 102 aa, Gossypium hirsutum
  Clone ID: LIB3828-007-Q1-N6-C10.pep
KNSKKKKDTNLGANINYFPQSNAHFIILLLTLSAHFNTPIPTHTLLSLFRFTLSFPFVVDITHAQGVVERGVVLDSVGGVCPSDPFEGSSDDCRNPSSVSTL

SEQ ID NO: 107654 - protein, 74 aa, Gossypium hirsutum
  Clone ID: LIB3828-007-Q1-N6-D2.pep
DATPLPWVLCFQLAMMEAAKASYGSMDLDSDIEVLDNILIIICSGFRVKVDKIDLDLKIYFLDLLNLADLNICR

SEQ ID NO: 107655 - protein, 102 aa, Gossypium hirsutum
  Clone ID: LIB3828-007-Q1-N6-D4.pep
PATAEIIPMMEIDLKKAAGRIPEKVKELCKKKSVNEVNVEVMEGDPRDVLCEAVDKHHATILVLGSHGYGIVKRAVLGSVSDYCAPHAHCSVMIVKKPKNKE

SEQ ID NO: 107656 - protein, 52 aa, Gossypium hirsutum
  Clone ID: LIB3828-007-Q1-N6-D5.pep
NLIYGLNSFLLFQLLHSLKSMFHLSLQLLSYSTVKIWFLFVLMLCVRRNSFI

SEQ ID NO: 107657 - protein, 51 aa, Gossypium hirsutum
  Clone ID: LIB3828-007-Q1-N6-D9.pep
SPIFYSSTLNAFVYSCGLTENRGQRKKQGGLQPRAQKQALLKLPPWSPDPW

SEQ ID NO: 107658 - protein, 66 aa, Gossypium hirsutum
  unsure (1)..(66): unsure at all Xaa locations
  Clone ID: LIB3828-007-Q1-N6-E11.pep
RSARAVPPTKGQALYDQYGIKFFPTSAXSDLNVKEVFFSIATNAXPRLTESDSTAIPAGLTINKLD

SEQ ID NO: 107659 - protein, 101 aa, Gossypium hirsutum
  Clone ID: LIB3828-007-Q1-N6-E2.pep
KVAMASTLSILATFTIIRITFNDFVPKEIRDYLWSFIRRFSSEFTLVIEESHDGSRNHIFQATMEYLGSHVLSASAAEGSPKRLTVGKSEKVRKFTFGLDR

SEQ ID NO: 107660 - protein, 49 aa, Gossypium hirsutum
  Clone ID: LIB3828-007-Q1-N6-G10.pep
CNTKIKVGPSGWSEGECKGKAGWFPSAYVESQEKAPASKLIEPNSAASA

SEQ ID NO: 107661 - protein, 82 aa, Gossypium hirsutum
  Clone ID: LIB3828-007-Q1-N6-G8.pep
AFPHRLDTRPCEPHGLAHNHLPNRVDFAICIPNLRKNIASRLSRNSKVYKYQIEKEKRELPENIEENNSKNTIGANSEVDFY

SEQ ID NO: 107662 - protein, 87 aa, Gossypium hirsutum
  Clone ID: LIB3828-007-Q1-N6-G9.pep
KRMVEAIFRGNPVGRNQEQAPPPVVNDRDLFSSIAVVINSESQMDPPVEINSGVSLWAWFFKKKNDVLRVSDVDTGDFRGHRRSRLN

SEQ ID NO: 107663 - protein, 69 aa, Gossypium hirsutum
  Clone ID: LIB3828-007-Q1-N6-H3.pep
AEVEAEKPNPTIFVKACELLGIKPEEAVHVGDDRRNDVWGARDAGCDAWLWGSDVYSFKEVAQRIGVQV

SEQ ID NO: 107664 - protein, 86 aa, Gossypium hirsutum
  Clone ID: LIB3828-007-Q1-N6-H7.pep
TERGARLAGAGTVAIVKKLGRIANRRSVIIMEGGLYEPYRIFRNYLHSGVWEMLGNELSDNIVVEHSHGGAGTGPLFLAASPTPDS

SEQ ID NO: 107665 - protein, 43 aa, Gossypium hirsutum
  Clone ID: LIB3828-008-Q1-N6-A2.pep
TGGVVEYCIQNATCMAVAVRRKSKKLGGYLITTKRHKDFWLLA

SEQ ID NO: 107666 - protein, 114 aa, Gossypium hirsutum
  Clone ID: LIB3828-008-Q1-N6-B3.pep
RETRSMEGTLKLSMELLTDVYLQYLNQIMENPGFRTFWLGVLRRMDTCMKADLGEYGETKLHEVVPELLRKMITKMQETGILVRKEEDDLWDITYIQIQWIAPSLKEELFPDEI

SEQ ID NO: 107667 - protein, 80 aa, Gossypium hirsutum
  Clone ID: LIB3828-008-Q1-N6-B5.pep
IGTFSSANSLHPKLAQAITLLFLPCTCIKMIHVVFKCNLFFLFVDYVGILCQSQYVICYLVHVILLLRIYSFIWCCNFTK

SEQ ID NO: 107668 - protein, 55 aa, Gossypium hirsutum
  Clone ID: LIB3828-008-Q1-N6-D1.pep
KVESFKAFKYQANNFCFTVQNQSQILVHQKAFPGAPHYFDDNRLTKFIKKCVTST

SEQ ID NO: 107669 - protein, 70 aa, Gossypium hirsutum
  Clone ID: LIB3828-008-Q1-N6-D5.pep
PKMLNCLMYKLCYYRFGEMLTEYGKPPGYDRARGVEIGNKDVKLEHLEEAFTTSNWIVRIYRVKPPNNRW

SEQ ID NO: 107670 - protein, 73 aa, Gossypium hirsutum
  Clone ID: LIB3828-008-Q1-N6-E7.pep
IGCHLKAAPPITKKHKNQSKAYLGAIFMGLFSPPAPFYGLFHLKRLLFFTIKPCLHGHITKKGFSQTGNSHLE

SEQ ID NO: 107671 - protein, 103 aa, Gossypium hirsutum
  Clone ID: LIB3828-008-Q1-N6-F11.pep
ILQHCHHIIFRSSILSSKIIKFNAVGFCFLHFICVLYMMMIMLFQDSGSKTGQVWLMSFNYFRCNWMLMFFNLIESCFCYTGKCNIKYDLVIADQLLICPVTV

SEQ ID NO: 107672 - protein, 30 aa, Gossypium hirsutum
  Clone ID: LIB3828-008-Q1-N6-F7.pep
SPFFYLIIGIKPSIYKTYSNTSKMNGSCWS

SEQ ID NO: 107673 - protein, 115 aa, Gossypium hirsutum
  unsure (1)..(115): unsure at all Xaa locations
  Clone ID: LIB3828-008-Q1-N6-G6.pep
LGKGKKKEKWKKKKKERGEKEKGERQAKGKGRRQAKGEGRDRGRVLKTEQXKRVRKQKTGPKPKPWTGKKIKTFKKKKQNPRAIKKKKSPGPAGKPETGTGRGTRFRIRDRNRNG

SEQ ID NO: 107674 - protein, 140 aa, Gossypium hirsutum
  Clone ID: LIB3828-008-Q1-N6-H1.pep
ALGFPGIRPALWLPRPPGGTGKNGAGPGGATTFPEGRGNKGGGKKRKKAGRGKKKTRGKKRKKKRPESKKGKPGGAKGGNHPTQRGEGKRPPSKGENLAAQPQKRIPHPPGKGGQLMGPQGGFLFNRGKGEHGGAPNRGK

SEQ ID NO: 107675 - protein, 69 aa, Gossypium hirsutum
  Clone ID: LIB3828-008-Q1-N6-H5.pep
QGAQQSSNRSIVVNVGGMKCSVDSQYISNHDFLEDELTAWLLATTRTGGKIPSEEELTTKVKERRTLGL

SEQ ID NO: 107676 - protein, 55 aa, Gossypium hirsutum
  Clone ID: LIB3828-009-Q1-N6-A4.pep
SSWSRASKSSRDDWLIGSGSRSTRSPARDRNFGGSCFNCGRSGHRASDCPEKVDF

SEQ ID NO: 107677 - protein, 48 aa, Gossypium hirsutum
  Clone ID: LIB3828-009-Q1-N6-A5.pep
FIVPIKQRSQQSPSMRYYIYTFHKMLDFLSYVKRVRHCVHTPKQYSAE

SEQ ID NO: 107678 - protein, 79 aa, Gossypium hirsutum
  Clone ID: LIB3828-009-Q1-N6-A7.pep
VVHSTEDEKAKSCCRAHRHSFGNLRERSTTVNEEKNKGQVSGERGGKLKDRAKQVKDATKSSPAKLTEQQSNANISVQS

SEQ ID NO: 107679 - protein, 109 aa, Gossypium hirsutum
  Clone ID: LIB3828-009-Q1-N6-B11.pep
PPRASEIAFGLEGELGVGFFPPPHGLISRGFKKGEIFGFPKGLGPFPKTLGKTRAFAIPGFESPFSGTRSLAPPLFAAPPAIPNDVLGRAFPIPPRGVGGTRGQLPPKK

SEQ ID NO: 107680 - protein, 139 aa, Gossypium hirsutum
  Clone ID: LIB3828-009-Q1-N6-C12.pep
ITCPAPFLKNQGTPDNARKSFCVPKHCRIQSSDHVRSLATLRRSTSSISYGLHYENQPVTCRTFGTYSDAPTSRNTELIHQYGIATKGFPTKAILACNNTNHTAHHTLRPSYHQNSYQPCPHQAHKSLTQRLPGHYNER

SEQ ID NO: 107681 - protein, 83 aa, Gossypium hirsutum
  unsure (1)..(83): unsure at all Xaa locations
  Clone ID: LIB3828-009-Q1-N6-D2.pep
VVMVSEGRSKGGVEVVKNRGXHKGSFXAIHVQHGAGQEFATGLGKVFAIGKGPKPWVSLPKGEGIQLSIIGKARHRLDALNSA

SEQ ID NO: 107682 - protein, 82 aa, Gossypium hirsutum
  Clone ID: LIB3828-009-Q1-N6-E4.pep
DSNKTNFIDLQKQIMNEEQQSFGLHKGGGNHHQPNSIKQGQGQSKWAIIPTSLGAGLFLPTGGPSITNSGGKNFFRENRNGT

SEQ ID NO: 107683 - protein, 106 aa, Gossypium hirsutum
  Clone ID: LIB3828-009-Q1-N6-G3.pep
FHTNIPHQPASMENPSFDHLHSFTYPIDASYSLDSNTVRQDQENKGFEAADVPSVSKSKEGLDSPVSRDDALEQEQHQQLPQRLPSMNDDYLYPNLFGSGDSFKRT

SEQ ID NO: 107684 - protein, 90 aa, Gossypium hirsutum
  Clone ID: LIB3828-009-Q1-N6-G7.pep
FRGDNLQKPQTIGAPGPFHFTKPPLFWLLLRNPKKKALLKVLTHKREKKISLLGVFFLTPSFVFFSKPLLELGALLIFGGAFSMGPKPSF

SEQ ID NO: 107685 - protein, 69 aa, Gossypium hirsutum
  Clone ID: LIB3828-009-Q1-N6-G9.pep
SVKKKPFGFWGCKICGKVKAGGVYTFNPANPLSFRRPFRGFREPTKTWAPPGGGFGIPFHGTFFGRFHQ

SEQ ID NO: 107686 - protein, 93 aa, Gossypium hirsutum
  Clone ID: LIB3828-010-Q1-N6-A11.pep
ITNALAFEKPRIQDKPNPRLIRKRVFHQNSSNIENMARGGFTPRRGDNLLTPVINTAKRVKRPLKKTRPDNLFFGAPLPEPLPRFLNETKAIK

SEQ ID NO: 107687 - protein, 100 aa, Gossypium hirsutum
  Clone ID: LIB3828-010-Q1-N6-A5.pep
SLRSFAFKSKPSLFQKSTHWDFWKFFPCCQLKVCAPQSFFSYGPPRGFYPVMGPIFRGFFFTPRKFFSCHFSPGPTPSRSRGFGAHSPPPIFKAPPMVVP

SEQ ID NO: 107688 - protein, 102 aa, Gossypium hirsutum
  Clone ID: LIB3828-010-Q1-N6-A6.pep
LKRQHWGGFQNWERGPYISVLEHKGASNGGWSNSNNSRELKSSPGGGTRSPGLRRGGASISRGTWGAATGCGGGGPNSGGNQGKGGHGDQSKNNNWGGHWVY

SEQ ID NO: 107689 - protein, 77 aa, Gossypium hirsutum
  Clone ID: LIB3828-010-Q1-N6-D1.pep
ELGPEFKKVSNFLSRFKTIPSIINLDSLTVTGDVWFGAGMVLKGKVKIAAKPGEKLEIPDGIVIENKEINGPGDLSS

SEQ ID NO: 107690 - protein, 32 aa, Gossypium hirsutum
  Clone ID: LIB3828-010-Q1-N6-D5.pep
FIRGPRNQINLWEVINHIFITLNSYSWPLFIE

SEQ ID NO: 107691 - protein, 64 aa, Gossypium hirsutum
  Clone ID: LIB3828-010-Q1-N6-D8.pep
YGGDNSEPFFSLCIISVALVWRALKLVVCSAIPSFLGLVNQHALRFCSNIKWWYNGTRYELQKV

SEQ ID NO: 107692 - protein, 58 aa, Gossypium hirsutum
  Clone ID: LIB3828-010-Q1-N6-D9.pep
GKNDAAGVLRPLNLDDFIQSKAKVGSSVAYDAASMNELRKWNEQYGEGGSRRKSPFGF

SEQ ID NO: 107693 - protein, 97 aa, Gossypium hirsutum
  Clone ID: LIB3828-010-Q1-N6-E10.pep
FFFFFFFFFFFFFFFFFFFFFFFFFFFFWEKGGHFLKNPNFLITAKKIFGYPPKIFFFIILKKSIFKPQKGVGVFPQRKKYHPRKSPKGARKKTKNP

SEQ ID NO: 107694 - protein, 80 aa, Gossypium hirsutum
  Clone ID: LIB3828-010-Q1-N6-F12.pep
RVPVRIHGSEEIPVRNVTFRDMNVGITYKKKHIFQCAFVQGRVIGTIFPAPCENLDIYDEEERPVKLSTAQNVTEIDYGV

SEQ ID NO: 107695 - protein, 48 aa, Gossypium hirsutum
  Clone ID: LIB3828-010-Q1-N6-F3.pep
LHMSASFLCFFLLLLIFFLLSSHIHIYIYKLSLTFSYDQTVGASVLTS

SEQ ID NO: 107696 - protein, 71 aa, Gossypium hirsutum
  Clone ID: LIB3828-010-Q1-N6-F4.pep
YTGDIIKKKEGKIGKIPPNLVDLFNSYRVSYENNKRSKEQQHYQKWRGEKGKTSQQQTYFPLQTLICLRRL

SEQ ID NO: 107697 - protein, 73 aa, Gossypium hirsutum
  Clone ID: LIB3828-010-Q1-N6-G10.pep
SGWTHGSPKIVCLFHAAKPPRVCQDGVKGTGFSPLAVKIGDIIKLCEICVVSPHFFVGGALLKLFPLNFGGLE

SEQ ID NO: 107698 - protein, 49 aa, Gossypium hirsutum
  Clone ID: LIB3828-010-Q1-N6-G12.pep
EECIIEVANAVKERLGSMDPVFARAAKAMLDWVKLWQSVGSSSSRSSAV

SEQ ID NO: 107699 - protein, 59 aa, Gossypium hirsutum
  unsure (1)..(59): unsure at all Xaa locations
  Clone ID: LIB3828-010-Q1-N6-G7.pep
REGLYMYSFYCFILVNQQVQSGRKTNRNKRGRKMGQNTKHTRQQLTTLPEPLQNKIYXP

SEQ ID NO: 107700 - protein, 84 aa, Gossypium hirsutum
  Clone ID: LIB3828-010-Q1-N6-H12.pep
GMFKQEINVKNSNSQVKHGQKFPVKIRGNGEIDHHELRVTISSPPYVAHAAPTRQRLLRFASVAFTKNVAIKTTRTVIRAPSLT

SEQ ID NO: 107701 - protein, 61 aa, Gossypium hirsutum
  Clone ID: LIB3828-011-Q1-K6-B6.pep
LRAPHTHTHIFCQQRFPPSCNLCCSIFLIQVSYDLKLTLQVSLCKYQMCSVACFHGQRGIF

SEQ ID NO: 107702 - protein, 214 aa, Gossypium hirsutum
  unsure (1)..(214): unsure at all Xaa locations
  Clone ID: LIB3828-011-Q1-K6-E2.pep
AWQALGSALEGGTNFVQKLEHSAVNIADSIQHGGLPAGSVAPSLIESGKAFTTKGMQVLEYVGKETMDLLINETGIEVEKNSKGTEHLSDEDQSVEEVSFDRCFYIYGGPEQLEELEALSSHYALLFNRRKAKLPSEQKSVYEGKLKQIQQIFSLDAEIDGNGPQSAKGKKIETGIDGSHDEMKIXHDSSVSKAADMAVGFTNALAGLAVNDVI

SEQ ID NO: 107703 - protein, 109 aa, Gossypium hirsutum
  unsure (1)..(109): unsure at all Xaa locations
  Clone ID: LIB3828-011-Q1-K6-F2.pep
FLSXIIIYLFLVISGSFFRSLFLGFWDWNFWGMEVSVLWSCSQATVPSSVLGFSVSLFIFGAFIVILFSRVPFGVSFVCPFGWVNLGSYFHRMLPFLFAFLFRSLLRFS

SEQ ID NO: 107704 - protein, 190 aa, Gossypium hirsutum
  Clone ID: LIB3828-011-Q1-K6-G5.pep
MSGDLKSVIRKGNVAYGNFHDDGDLCSPDLGELCDGKSENGFKLERDAKGLETGKSSIANTCPSKDPVALPMTYSAPVNSKRDVKLPSRGDRIPNASFSRHRNDIKLGSRDDDENFSRFNRLSYRFKASRPPTRIGDRRIRKLLTSKYWKVAPKLKDFEHSKADGGIRPLYRKRKSYYNYDRCQYETHYK

SEQ ID NO: 107705 - protein, 181 aa, Gossypium hirsutum
  Clone ID: LIB3828-011-Q1-K6-H3.pep
METGQTVTPIPLWNIVVISAIAAGIQFGWALQLSLLTPYVQTLGVPHVWAAFIWLCGPISGLVVQPIVGYSSDRCTSRIGRRRPFIAVGACFVAVAVFMIGFAKDIGHRSGDSLQNPTKPRAVAIFVTGFWILDVANNMLQGPCRAFLADLSSNDHKRMRIANAWFSFFMAVGIVLGYAAG

SEQ ID NO: 107706 - protein, 126 aa, Gossypium hirsutum
  Clone ID: LIB3828-011-Q1-K6-H6.pep
GRAFWALFRNWRQGGIRGEGHSRWVRFGVFPGFPRCLTLGQGGQFRWTLVSILLFLFCLWFGCVFFFLFFFFFFFFFFFFFFFFFFFFFFFFYFPKLHFNFFIIHHMFLTNKIKNKIKYSFTCMIF

SEQ ID NO: 107707 - protein, 64 aa, Gossypium hirsutum
  Clone ID: LIB3828-011-Q1-N6-A12.pep
LFINSCFAHCQSERQDTWFADNSPEIRNKPIAIAVGDWYFDRTAVKVVDCPYPCDKTCHNLVFR

SEQ ID NO: 107708 - protein, 71 aa, Gossypium hirsutum
  Clone ID: LIB3828-011-Q1-N6-A9.pep
LELSAMPGFLVERSLEGGSQLRVPMFKIQLYFFENLNQADVFFVRWALFFFGPIRLFKLVLTLLKKILNFC

SEQ ID NO: 107709 - protein, 67 aa, Gossypium hirsutum
  Clone ID: LIB3828-011-Q1-N6-E9.pep
NIKLGLGLLHFTYTGTGKGGLKIQANILGVKQKRTKPRGEGTHPGKTLIFGRKGPLTKIQGGGHNNI

SEQ ID NO: 107710 - protein, 102 aa, Gossypium hirsutum
  Clone ID: LIB3828-011-Q1-N6-G9.pep
FEQGIEMINIFKNYESHSSILDDFYFYEERQKAMQERKARQLTSLVASDDLVCEASNLVSLPNDIVKKMSKSFAEVLLLNENEKAGGGTGKVLSAACGGHVR

SEQ ID NO: 107711 - protein, 74 aa, Gossypium hirsutum
  Clone ID: LIB3828-012-Q1-K6-A2.pep
NFSFFFSPSFGRKCLVLCLKTDIYQNQDELGLVIKHEIPFLLDGCSTRYVNSSFIYQTSLMSSSFRSFVPIYDF

SEQ ID NO: 107712 - protein, 46 aa, Gossypium hirsutum
  Clone ID: LIB3828-012-Q1-K6-B4.pep
YPILSNYKDFDTFRREKYMYIYIRISIVREELIDLNLQILMDYCEE

SEQ ID NO: 107713 - protein, 92 aa, Gossypium hirsutum
  Clone ID: LIB3828-012-Q1-N6-F7.pep
GPRQTPNFPVDELNLAPMGPKFGPPEMFPPGPPPEFVGVFFPDPFKMGFWGGGPGPPLAFGPRAFSLVVPPVFQGPSGGSSPVDLPRGPFNF

SEQ ID NO: 107714 - protein, 100 aa, Gossypium hirsutum
  Clone ID: LIB3828-012-Q1-N6-G10.pep
GLSHGSAFPLDSIKNIYLFFFFFKISPPPLSWLAQFCLSSPLFSLPLLGLKRRLCPPPFFFPRLLPLPPLFPPPPLAPAVPLPPPPAVLSPPPLLGPFLS

SEQ ID NO: 107715 - protein, 212 aa, Gossypium hirsutum
  Clone ID: LIB3828-013-Q1-K6-A4.pep
PSVRRWKQTASNNNNRNETQREKEEQLWSWGAGTDGQLGTLRLQDEHLPQLLNVPSLSSASSVSMLACGGAHVVGLTSSGKVLTWGRGNSGQLGHGDMDCLLSPKIVMSLESYCITQVSAGWSHSGFVSDEGCVFTCGDGSFGQLGHGDYRSHCSPVKVSFFVNKHVEQIACGMRHSLVLLKDGSGNLLYGFGSGKRGQLGISIDRIKSVNA

SEQ ID NO: 107716 - protein, 83 aa, Gossypium hirsutum
  Clone ID: LIB3828-013-Q1-K6-A6.pep
KKKKKKKRAEGWSMIQAPRRRARECVALVLRYRNPISLFRGRTTYNTGDSPKPCPSPILIAAYSTFPPSGSCSNKAPGRSPLP

SEQ ID NO: 107717 - protein, 82 aa, Gossypium hirsutum
  unsure (1)..(82): unsure at all Xaa locations
  Clone ID: LIB3828-013-Q1-K6-B4.pep
TQTEPGTGNHATQEKKNKHTTGAGATNARHRPSKPATFTNRVGDHRQPPTHRKXSTNLRPRATSQETHVPHGDGMSRLSNVA

SEQ ID NO: 107718 - protein, 110 aa, Gossypium hirsutum
  Clone ID: LIB3828-013-Q1-K6-D1.pep
SHHSHVKCLDQSGENCSTNIYINDQSFHGSLFICIGRHTASTDVPTQERIPGTYELTVYKASYFHVTYLNQNDVRRQTHIFVYDSLSAEVIKPIQLIFNGRELRILYPVQ

SEQ ID NO: 107719 - protein, 109 aa, Gossypium hirsutum
  Clone ID: LIB3828-013-Q1-K6-E1.pep
MGGETESAAVCSYYLQRETLSVWHRLRLPVDGVTNSCCVVTPNAAVTYEDIGGAQGGAFMGGTGADAAQAGGAAADAEASAAEEKNEQKDDSEDDTGFSLVDEAHLLPY

SEQ ID NO: 107720 - protein, 104 aa, Gossypium hirsutum
  Clone ID: LIB3828-013-Q1-K6-E4.pep
GKSREAARPNKNQTTNTPPAAHTGQEKTSAGPQETDKRRKPRRNHTKGHEAEHPQAQRHRQQEERTRNTQAKATKHHPQRQAPQHDATDHKTQEKTGGGPPERG

SEQ ID NO: 107721 - protein, 68 aa, Gossypium hirsutum
  Clone ID: LIB3828-013-Q1-K6-F2.pep
TQESWGGGGPVDEDIADDERPSWPVTLIELTLVCSLLAPYCLLLEVNAVCLAWTVLMALVGACIVLMT

SEQ ID NO: 107722 - protein, 62 aa, Gossypium hirsutum
  Clone ID: LIB3828-013-Q1-N6-C12.pep
LIILLFSASLSSSLSDDLLAKTTIEVVRNVGSKGTKSELIRTNIQMIGALRSLPLSPHTAYE

SEQ ID NO: 107723 - protein, 71 aa, Gossypium hirsutum
  Clone ID: LIB3828-013-Q1-N6-G10.pep
KKVTFCLRLFYSQLATCLHCYLLFLFCFSAGAIGAVEQGWQRQCDSGGGRLGRLRCAAPRVFFLKIFKILG

SEQ ID NO: 107724 - protein, 81 aa, Gossypium hirsutum
  Clone ID: LIB3828-013-Q1-N6-H12.pep
NLFGRLKSQQAHLILTMVIVSFPLTFEQKTERKSKFIYLHLQHFQEQAHRCNYFVPGFLPTHRLGYQFGRDFHHVNQLRNR

SEQ ID NO: 107725 - protein, 50 aa, Gossypium hirsutum
  Clone ID: LIB3828-014-Q1-K6-A4.pep
IHESYLNWHHHSLYFYLCFYSFQSKPNRLTTNTIEICCSGMMLLAMGIAL

SEQ ID NO: 107726 - protein, 52 aa, Gossypium hirsutum
  Clone ID: LIB3828-014-Q1-K6-B6.pep
SLQMLVHLVLRFFIYLQFVFVHLGIKQVMLISLSHWFWFHRKLAYGQLYFFR

SEQ ID NO: 107727 - protein, 51 aa, Gossypium hirsutum
  unsure (1)..(51): unsure at all Xaa locations
  Clone ID: LIB3828-014-Q1-K6-C2.pep
VPIXNSRFRAHTIHFLEGSWXEANTALGKKACSTRSTCQFSVFSGAEIVAR

SEQ ID NO: 107728 - protein, 45 aa, Gossypium hirsutum
  unsure (1)..(45): unsure at all Xaa locations
  Clone ID: LIB3828-014-Q1-K6-F6.pep
XXFFXXFFFFXFFFFFFFFFFFFFFFFFFFFFFFFFFFFXLVENH

SEQ ID NO: 107729 - protein, 82 aa, Gossypium hirsutum
  unsure (1)..(82): unsure at all Xaa locations
  Clone ID: LIB3828-014-Q1-K6-H2.pep
PNRSLSFLVVGDWGCFGFSNPSDVAFSLGRIGEKXFLFFVFSPGDGFFDHGXSGRFVPAFRDSFSFCFLPXGLRFPWFSVLG

SEQ ID NO: 107730 - protein, 52 aa, Gossypium hirsutum
  Clone ID: LIB3828-014-Q1-K6-H3.pep
KRKVAESHPNWLLRCLMAEIPPSIMPKRDSGLRFEPVYHGAAYQSDKKVITR

SEQ ID NO: 107731 - protein, 106 aa, Gossypium hirsutum
  Clone ID: LIB3828-014-Q1-N6-E12.pep
VDQVIEHFRKFNSAFEEAYKKQTSWVVTDPKLRDEIKLSLARRIGPIYKELFDKYGGVQLMKEMWAESLVRYTPDDLGNYCSDLLFGSGSSGSISSSSSQGGAYSR

SEQ ID NO: 107732 - protein, 89 aa, Gossypium hirsutum
  unsure (1)..(89): unsure at all Xaa locations
  Clone ID: LIB3828-014-Q1-N6-E8.pep
VPPAGHGIVTMAYELGFVPVGDTVLPFVLLLQQSMPTYVRLGTCVKLKGCGAQSALELCWVHIXPFFLTAGSTVSIMNMLFKTVLTSLC

SEQ ID NO: 107733 - protein, 67 aa, Gossypium hirsutum
  Clone ID: LIB3828-014-Q1-N6-G10.pep
TLKVENGAEPKRDRMMPNICVICLEQEYNAVFIQCGHMCCCTTCASHLTSCPLCRRRIEQVVKVFCH

SEQ ID NO: 107734 - protein, 108 aa, Gossypium hirsutum
  Clone ID: LIB3828-014-Q1-N6-H12.pep
FFFFFFFFFFFFFFFFFLRANGKGTFYFFLKGNYWKPFFTKTMGGAFIIVCIGFIIFSRFWCLFKENWVLWGFLNIMGGHFALLRFLPPAGSGATSGFGSGETGFSSA

SEQ ID NO: 107735 - protein, 158 aa, Gossypium hirsutum
  Clone ID: LIB3828-014-Q1-N6-H8.pep
GGGFPIIILSPLRTQKTALGFFLLVPPFRPLKVSSPRWPQIFYPKLGGAPKTLLPTFSKLFSPFQKLNPLFFRGGGAPSKPPRGAPKRSKTCSFTSFGTFQRFSKKNPPIFGFFFPSPKNSSWGFFTPPYPIILAPWGFFFCPRPKKKFPLLFFLKFF

SEQ ID NO: 107736 - protein, 188 aa, Gossypium hirsutum
  Clone ID: LIB3828-015-Q1-K6-B10.pep
GVSSITTRDNLSPTNGSNKFANSPINITPSAAASVPFRSSGNSPRLATAERNQTPVRMTMEKRATAQAQSRNDFFNLLKKKSTSNSASSVLDSGSAVSPPVSEKSDELGTEDSSTSVTLQDGGVPSSEISIADLPADNRSEVALNGDAYAESQHGSSNGDEHSRPDAYLYPDEEEVAFLRSLGWEEEC

SEQ ID NO: 107737 - protein, 58 aa, Gossypium hirsutum
  Clone ID: LIB3828-015-Q1-K6-B7.pep
TVHSNYFFKKKIVISTRTLPLNRLHKNITPPLTSFLTILHSSLLLFDTCFSLNNRFVF

SEQ ID NO: 107738 - protein, 108 aa, Gossypium hirsutum
  Clone ID: LIB3828-015-Q1-K6-C10.pep
MHKRCSLKAKYSHGHSLKPLSSLDSCLMAQLHMQHVKMEEYVLSFLPSPTTPILRPLLITDGSRIINRASGGFSIGSNGTGDSKLHNLATFEKNRYVHAVPPLPKIDS

SEQ ID NO: 107739 - protein, 196 aa, Gossypium hirsutum
  Clone ID: LIB3828-015-Q1-K6-D10.pep
CQYFKQNRQFEKLSQESSDIKVEVVRDGRRQFISVFQVVVGDVVSLKIGDQIPADGLFLDGHSLKVDESSMTGESDHVEINGSNNPFVLSGTKVTNGFGSMLVTSVGMNTAWGEMMSSINRELDEETPLQARLNKLTSAIGKIGLAVAVLVLAVLLIRYFTGNTKDDQGNKEYIRGKTKFDSMMNSVVEIISAAIT

SEQ ID NO: 107740 - protein, 66 aa, Gossypium hirsutum
  Clone ID: LIB3828-015-Q1-K6-D12.pep
DTYLIGCPKHTLPKYRVRIQDSRISLQECTTNLNVRTVLIENKSERINCDLRIFNTYTITRVFFLR

SEQ ID NO: 107741 - protein, 213 aa, Gossypium hirsutum
  unsure (1)..(213): unsure at all Xaa locations
  Clone ID: LIB3828-015-Q1-K6-F8.pep
RNKESMLASGVIKLLENMISNSDAHEPGAALYLNLSCLEQAKSVIGSSKAVPFLVRLLGSETDQQSKLDALHTLYNLSTVQSNIPSLLAAGIVSALQSLLVLGDHTWTEKSIAVLINLASSPAGRDEMVSACGVISGLATVLDAGELIEQEQAVSCLLVLCNGDEKCSQMVLQEGVIPALVSISVNXGTTRAREKSQKLLMLFREQRQRAHAA

SEQ ID NO: 107742 - protein, 210 aa, Gossypium hirsutum
  Clone ID: LIB3828-015-Q1-K6-G12.pep
AVGGTNICLRTVSAKFIFDSIVLHNVTHLCGGPAILNLIADASLTVPFKVRLIVAGVLPMSRVMKVEGLGYTVSHAYGMTEVLGPAIVKPWRSTNEHKKDNIVVENVDVKEPETMASVRHDGKTIGEVMFKGNTLMLGYLKDPKATEEAFKDGWYRTKDLGVIHPNGVIQLKDRAKDIIFTGGEIVSTLEVEAVLLSHPKVSEAAVVGKR

SEQ ID NO: 107743 - protein, 115 aa, Gossypium hirsutum
  Clone ID: LIB3828-015-Q1-K6-H7.pep
MMADRHQHPSVMLKIAGQLHLGSSLSQDVRYRYGGFQRPAVHQKRFASASCNATLQHPMTQLACHPVSYNLSLFGSSSSPVIAQAPSEKGISGFVIDFLMGGVSAAVSKTAAAPI

SEQ ID NO: 107744 - protein, 133 aa, Gossypium hirsutum
  Clone ID: LIB3828-015-Q1-N6-B2.pep
APANENKDPGHNDKDYVFSDGEAEESGSLKSRQNKATSAEGIALNSAASKPETNDKSDQVASLVHSTGQVSLGSASSQPMHGTSEPRKAAAAAAAAAPPAAGVQVSSSESEFRAMAADASVFSFGDDEDYESD

SEQ ID NO: 107745 - protein, 49 aa, Gossypium hirsutum
  Clone ID: LIB3828-015-Q1-N6-B6.pep
VYENTEVKKRVAPINGYGKWVSENMSPLNPVNFLSPPLLASEPILSPPQ

SEQ ID NO: 107746 - protein, 100 aa, Gossypium hirsutum
  Clone ID: LIB3828-015-Q1-N6-B7.pep
IFPILVMITITPRRERLRHLFGHFPVKPMGPKKISIFILKQVSLFTVPSPSYFFDGIRCSQRVLTGQGTFLPCVQTCEQLNPCQVFPNEVRLGLPFMLSF

SEQ ID NO: 107747 - protein, 63 aa, Gossypium hirsutum
  Clone ID: LIB3828-015-Q1-N6-B8.pep
AYIWNVFLKGGYLYVIGEAKGMAIDVLRTLHTIMQEQENVDSSKPESMVNKLQMYARNLRYVW

SEQ ID NO: 107748 - protein, 59 aa, Gossypium hirsutum
  Clone ID: LIB3828-015-Q1-N6-C10.pep
MHKDYCFPWMKFEKLKILQLIHIRLAFLTTAISSASFWFLVSNYSLMQSIYSDLGVTWI

SEQ ID NO: 107749 - protein, 113 aa, Gossypium hirsutum
  Clone ID: LIB3828-015-Q1-N6-C12.pep
AIENTVTESYVTEKLFYALDSGAVPIYFGAPNVLDFVPPHSIIDGTKFRSMEELASYVKALANDPVAYAEYHAWRRCGVLGNYAKARATSLDTLPCRLCEAVSKKGGRNARTE

SEQ ID NO: 107750 - protein, 172 aa, Gossypium hirsutum
  Clone ID: LIB3828-015-Q1-N6-C2.pep
VNKAPQNLTSNEKEDLGKRWPRDEVLALINLRCSLYNNGDHEKEGTAIKAPLWERISQGMLELGYKRSAKRCKEKWENINKYFRKTKDINKKRSLDSRTCPYFHQLSTLYSQGTLIAPSDGPENRSPLAENHPKLPETGKDSSQRGDKDSTVHVSGGNETNMVQVPGFEFEF

SEQ ID NO: 107751 - protein, 145 aa, Gossypium hirsutum
  unsure (1)..(145): unsure at all Xaa locations
  Clone ID: LIB3828-015-Q1-N6-C4.pep
EEPVQAIRISSCTILNALNGVHINTWPGEFGGSVSDIHFEAITMSNVSSQVPLILQFWPWDKCNXDIVSEVQFSTVSFYDLRGAYVLPESIXFILAVLRHGSMFTVGDLAIPIKSSWPATVLCLNVXPITSVDLQHLPGPGPVLS

SEQ ID NO: 107752 - protein, 91 aa, Gossypium hirsutum
  Clone ID: LIB3828-015-Q1-N6-C7.pep
NGGGIKIQRQKRHPGKGGSQRGPQHHISLKTKLAHKGKLFMKKNKQMGPLEGNNPGPGKTFRGGGQKIFKAPGPGYELPTETQFGGKKGAK

SEQ ID NO: 107753 - protein, 175 aa, Gossypium hirsutum
  unsure (1)..(175): unsure at all Xaa locations
  Clone ID: LIB3828-015-Q1-N6-D10.pep
GKGQPRRGGSVFAAIYSARIFVFLAKKIINKKQILGSLSYIALDVQERDPGEERLPFLGGEQKTLTGGGREKNLETLRKLGGGKKIGASLETEKKKGIRAKETDLAHRVDVFGANRFQKPPKKSFFSFVXKAFKNTTIIKPWGWAGLSLGFGIKQHGITDGGYKGGRIGIAGFLR

SEQ ID NO: 107754 - protein, 79 aa, Gossypium hirsutum
  Clone ID: LIB3828-015-Q1-N6-D12.pep
QITYTESYNLRVTFICMHINDVDANIFKKQCRFSGNISYPSSLQSIMSFSKLVYPKTHQLSHPGLLGNHDSPPRVAWQR

SEQ ID NO: 107755 - protein, 88 aa, Gossypium hirsutum
  unsure (1)..(88): unsure at all Xaa locations
  Clone ID: LIB3828-015-Q1-N6-D9.pep
GWFYRGGGTGGEGGPGGKGGGGRKAHNIGGGKIKGKAGGPKERAKKNKXGGGEKGGVKRGKKGGKRGERKGQNTGRGGVGKGRQGGDC

SEQ ID NO: 107756 - protein, 100 aa, Gossypium hirsutum
  Clone ID: LIB3828-015-Q1-N6-E12.pep
MGDQFCNEKLVVQILKIGVNLGANKPTMLGDEKSGFILNKEHVKNAIDKLMEQGNEGTEMRKRAKELGDEANKAVEVGGSSYMNITLLIQDILQKSQEMR

SEQ ID NO: 107757 - protein, 124 aa, Gossypium hirsutum
  Clone ID: LIB3828-015-Q1-N6-E3.pep
GKPNKFGFFLKIPKNLENKKGNQIKKKGNYPPRKMPQKTRKEGKGLEGGTQKKRGGWPLGQIYLFGPRGKNLKKKKKTSPFGTSLAKTFRDLGKKPPSIKGVFQKNWFYPLEQSFWGGPKPLGL

SEQ ID NO: 107758 - protein, 60 aa, Gossypium hirsutum
  Clone ID: LIB3828-015-Q1-N6-F4.pep
TYCSLFWARPLKRLPYRQKVVGPPRFRSGIFLVFFFFFGPPFFFFFFFFFFFFFKQNHNF

SEQ ID NO: 107759 - protein, 110 aa, Gossypium hirsutum
  Clone ID: LIB3828-015-Q1-N6-G2.pep
RNHSFHLLPYAGPACGGGLGAFSAVGLLGPKPTLTGFLTFFPGPSLALPGAFPPGPLKSKLGGGNRNWNPWVMGLTFSHELWWDFFNKKKGFETNWNNDGFSSLDRFPSQ

SEQ ID NO: 107760 - protein, 147 aa, Gossypium hirsutum
  Clone ID: LIB3828-015-Q1-N6-H5.pep
NKYPGMCIARPEVFTNPDESLLWPEDSLLPGQKYYIIPSSTVEKLKYRHRKKLKFKQAAEGREDMSDARITWDISGENLEESVNSAQEFYVTKPSKVPKVPKERVSKHSLRRSRRVKKPFVPPLPRTGLLRESGWEPSLTSIQELSP

SEQ ID NO: 107761 - protein, 87 aa, Gossypium hirsutum
  Clone ID: LIB3828-016-Q1-K6-B8.pep
MLYNSENLFEDGDHLYRFLDHDPTVSSQCHNIPRGIIELKPKPIAEIASRLRFLSYAIFEAYASEDGRHVDYRSIHGSEEFARFDAS

SEQ ID NO: 107762 - protein, 204 aa, Gossypium hirsutum
  unsure (1)..(204): unsure at all Xaa locations
  Clone ID: LIB3828-016-Q1-K6-B9.pep
RPRGLRFNNFEGCLPHELFXKDLDALFLNDNRFTCNIPETIGKSSVSVVTFANNKFKGCIPRSIGKMSNLDEIIFSNNNLGGCFPQEIGLLRNVTILDVSKNSFVGSLPANFSSLEKVDVLDISGNKLTGSMPEDICKLPSLSSFKFSYNYFSEEHMACTKPERKNIEVDDTGNCVAGRMKQKTDKECKQVVSNPVDCSKDKCT

SEQ ID NO: 107763 - protein, 109 aa, Gossypium hirsutum
  unsure (1)..(109): unsure at all Xaa locations
  Clone ID: LIB3828-016-Q1-K6-D8.pep
SFFVRHVIGLLEKTTVGKTLSHVLWYSFXDSDILIEQDANGMSVXAEIFKLHGESFFYXKETEVLQMLSSKKQLAVSTAGGAAVLDVNWDYMHEKGIRSSSDVPLEALA

SEQ ID NO: 107764 - protein, 34 aa, Gossypium hirsutum
  Clone ID: LIB3828-016-Q1-K6-E10.pep
KIGFKNFSRLKILILLMWCNISYALGQYCCYHVV

SEQ ID NO: 107765 - protein, 102 aa, Gossypium hirsutum
  unsure (1)..(102): unsure at all Xaa locations
  Clone ID: LIB3828-016-Q1-K6-E9.pep
DEQAIGDNFIAKMKGALRNVVVRRGLYAGVTVQVAQQFSGINTVMYYSPTIVQFAGFASNKTALALSLVTSGLNAVGSIVSMAFVDRXGRRRMMIVSMXGRW

SEQ ID NO: 107766 - protein, 86 aa, Gossypium hirsutum
  unsure (1)..(86): unsure at all Xaa locations
  Clone ID: LIB3828-016-Q1-K6-F11.pep
LKGPPPXXFFFFFFFFFFFFXFFFFFFFFFFFFFFFFFFFFFFFFFFFQKHKTYYQYNKRIQYLYNLQMASLFQQEFDGHKSFPKS

SEQ ID NO: 107767 - protein, 62 aa, Gossypium hirsutum
  Clone ID: LIB3828-016-Q1-K6-G12.pep
TETLFISCDYRISEGLMSTLSKMTLLFIAKRCIPDSRYNFAVLLPPIPYQVYMCEGRGTILL

SEQ ID NO: 107768 - protein, 103 aa, Gossypium hirsutum
  Clone ID: LIB3828-016-Q1-N6-A6.pep
DVQTGEQALYRYSLGGTCMRDTVIAQSRILLFWYSTTYLLLKKNKPKYPQLKAPASEQIEPKLKLEPLLETDQPSPLKQVEQNQQIESTPVDQTEPFILEGAK

SEQ ID NO: 107769 - protein, 112 aa, Gossypium hirsutum
  unsure (1)..(112): unsure at all Xaa locations
  Clone ID: LIB3828-016-Q1-N6-C5.pep
YVCSQTQQGVKHRKLIAVHDGLERVQNVREQLEFFKAKDACVPKVSDLSGRKYVWSIPEQLTVAILVSGHHGELDIEGLRLIIDEGVGLXGNPVSANGLPSMKIVLDNDNFC

SEQ ID NO: 107770 - protein, 55 aa, Gossypium hirsutum
  Clone ID: LIB3828-016-Q1-N6-C6.pep
RWDAHASKFQLFIKVNILRECFQKMNHRGYKCSTLAAPQPWDAEYSNEGCTRGHV

SEQ ID NO: 107771 - protein, 198 aa, Gossypium hirsutum
  unsure (1)..(198): unsure at all Xaa locations
  Clone ID: LIB3828-016-Q1-N6-D10.pep
FFFFFFFFFFFFFFFFFLDKKPQPKTKTQKKKKQTMKKKTPKTPPPKKKNKKKKKKKKKKKKKGKEPRAKEQEHHPNPNGPNPKPPKPKKQKGXKPNQDRKQKKPKKKKATGAGRDPGNPDRDPQGDQLKRKGGEPKAGGNKGKTGAQGKTAPRPKSKKKTNQKGKRQRRGGPKREPTKSNGLTPTGQLAKRKPAGAE

SEQ ID NO: 107772 - protein, 156 aa, Gossypium hirsutum
  unsure (1)..(156): unsure at all Xaa locations
  Clone ID: LIB3828-016-Q1-N6-E6.pep
EQKGIFGKKHPGKGGPKGGPGKRKPQKGGVLKNGGGGGARGGPRGKXGRGGGPGKAGPGPGGEKGFPKGGKKKAGGKKGKRGARGKIGTRAKCHKKKKPKKKKEKPGGPKGGANPNKRGKPQSPLSKGKNRIASKKKKRANPREEAGWQMGTRGEF

SEQ ID NO: 107773 - protein, 128 aa, Gossypium hirsutum
  Clone ID: LIB3828-016-Q1-N6-H3.pep
KRKPKGGGEKKKEGGGLKNLKKKKGAKKKKRGGGFPTKLIWGKGVLFGAWGDPPKKGIKNWWNGVGGGSPNGGEKPQKTLGLGGPKNPPEIKPMGKSPHFKKMGGGGVPKGQKKKFFGAPIKNFKSLN

SEQ ID NO: 107774 - protein, 122 aa, Gossypium hirsutum
  Clone ID: LIB3828-016-Q1-N6-H6.pep
WVVAKSWNPCPLGMLPRTLGSSGRIPLLDCGSDCQKDTEVMEGKNERELNRRNGKREGSDDIQLMNFSSPKKLKETVENKHEQSSEGVSSSGTCRHLMMDGVWKEVGETEVEAIASAVRILV

SEQ ID NO: 107775 - protein, 166 aa, Gossypium hirsutum
  unsure (1)..(166): unsure at all Xaa locations
  Clone ID: LIB3828-017-Q1-K6-A11.pep
VSIERTVFYXRXKAAGLYAPTSYAAAQGLVELPYIVAQTILFGVITYFMINFERTATVVSSAFYSFWNLLSGFLVPKPRIPGWWIWFYYICPVAWTLKGIISSQLGDVETMIVEPTFKGTVKEYVSTVFGIDSDVTGLAVAVLIGFCILFFGVFTLSVKFLNFQKR

SEQ ID NO: 107776 - protein, 92 aa, Gossypium hirsutum
  Clone ID: LIB3828-017-Q1-K6-B7.pep
IFHFKCLFQLYQIPGDYYCKDERRVSGKSRTTRMSGMYFFLGFSNDNNVSAFTCALQLATYDILINMKYITFIHLKEEIYFIVVPWGFYSSK

SEQ ID NO: 107777 - protein, 102 aa, Gossypium hirsutum
  Clone ID: LIB3828-017-Q1-K6-C11.pep
TRPTLEKVEYGKLTLFAYCSCITRTYIIPYSFHLVLHILTLFFSYSTFSVVIFCLKGFFSESKSFDHSGQLSTFMYVQFLFLLTFLLTFPSWALALFHNDNK

SEQ ID NO: 107778 - protein, 79 aa, Gossypium hirsutum
  Clone ID: LIB3828-017-Q1-K6-D10.pep
IRSKLRNLPSRSPTHRAELLLFFILTLPQVKRKRQPMKKGKKRERRQIIGRSPVEEPAFSEPRRNEIAFLLATGLIEPW

SEQ ID NO: 107779 - protein, 67 aa, Gossypium hirsutum
  Clone ID: LIB3828-017-Q1-K6-F11.pep
AASRPPEKRISRALREVDVGTKRSISRIIYIKSVNSQESQIKHALDGECTTQDMAHHPVGGYKNNII

SEQ ID NO: 107780 - protein, 113 aa, Gossypium hirsutum
  unsure (1)..(113): unsure at all Xaa locations
  Clone ID: LIB3828-017-Q1-K6-G10.pep
EKTNLSKYIPDASNAVYNVLQEMAKSHXXKKKRYEEGDADILQKVSDHLITKETLYEKLTQHVEKVDYEMALEYATQTGVREEPREDIYLQSLDGKGNFFDFHSPIFVFKLFL

SEQ ID NO: 107781 - protein, 32 aa, Gossypium hirsutum
  Clone ID: LIB3828-017-Q1-K6-H12.pep
VFFIFFFLFFFFFFFFFFFFFFFFFFFFFFEQ

SEQ ID NO: 107782 - protein, 105 aa, Gossypium hirsutum
  Clone ID: LIB3828-017-Q1-N6-A12.pep
AQNIKIRQSPSCLLAPQQSEPPSASVHANPGLRTPAQPSYATHAPRTCKPPRPNKASTQKNSGAAANREYGMKRRLFSTFFAYKGLKKHWVETTNRFPRQRTPGI

SEQ ID NO: 107783 - protein, 84 aa, Gossypium hirsutum
  Clone ID: LIB3828-017-Q1-N6-B7.pep
RYGICKFGPSCKFNHPMGVFTFNYSASSPFEAPVHRLLGSSSGSGGINLSSEGLVEAGSTKPRRLSLSENRQLSSSDDSIDTEG

SEQ ID NO: 107784 - protein, 85 aa, Gossypium hirsutum
  Clone ID: LIB3828-017-Q1-N6-C1.pep
SSPFYQSPATHGFQTPSPFMMQTPPHTLFFEGGSSSQVRQPDAEPEEQQSALEEEQPPPEARGRKNPAHNRRRPPCGTESPGHRH

SEQ ID NO: 107785 - protein, 102 aa, Gossypium hirsutum
  Clone ID: LIB3828-017-Q1-N6-C11.pep
TRPTLEKGEFGKLTLVAYGSCLTRTYFIPYSFHLGLNILTLFFSNSTFSGGIFCLKGFFFESKSFDHSGQLSTFMYGQFRVLLTFLRTFPFWALALFHNDNK

SEQ ID NO: 107786 - protein, 124 aa, Gossypium hirsutum
  unsure (1)..(124): unsure at all Xaa locations
  Clone ID: LIB3828-017-Q1-N6-C4.pep
IFNNPETAIQSHHLCGYALVEVPVKPGLWSLEXSKGFNLVDTVSRHATQVFAKFWAAILLSLVPCGMWAFGFKKWDGRXLGRQLYESALSPSXSFRVAPGMLEGALVCGVVENMPRPPAAVRVI

SEQ ID NO: 107787 - protein, 87 aa, Gossypium hirsutum
  Clone ID: LIB3828-017-Q1-N6-D10.pep
KKQQGPELGNWGPKGPGWPSSGTKIYFNPKIRIQKIPQKRKAKISNRENRDLLGRGGQRGIIKPISHSISGLKIPPTKSKFLNKTHA

SEQ ID NO: 107788 - protein, 114 aa, Gossypium hirsutum
  Clone ID: LIB3828-017-Q1-N6-F1.pep
HGMVETHDRHRDMRLDVDNMSYEELLALEERIGDVSTGLNEETILELMKQRKYSSTTTESTQEPEPCCICQEEYEDGDNTGILNCGHDFHTNCIKQWLMLKNLCPICKTTGLLK

SEQ ID NO: 107789 - protein, 76 aa, Gossypium hirsutum
  Clone ID: LIB3828-017-Q1-N6-F8.pep
KIFRVWGKIGKFHAFEGLEKPQCGFPLFYIFKVLGGFFKDGFYPFRVPPPLKFLKKFGGFFNLFPLNFFFRDKDFF

SEQ ID NO: 107790 - protein, 120 aa, Gossypium hirsutum
  unsure (1)..(120): unsure at all Xaa locations
  Clone ID: LIB3828-017-Q1-N6-G10.pep
RKRNFSKYIPDASKAVFNVLQKMAKSHALKKKRFEEGDADIFQKVSDHFISKETLYXKLPPHVXKVDFEMALEYATPTGVREEPREDIYFQSLDGKGNFFYFHSPKFVFKLSFIVSLLYP

SEQ ID NO: 107791 - protein, 146 aa, Gossypium hirsutum
  Clone ID: LIB3828-017-Q1-N6-G12.pep
PQPKMGASTQNPQAAQKPKQPKLAKKGKKNRRNPKKRADTDPGRKKSWHAAGKGAPQARAAMGDRPGGKEKSRRGRGTWGKSQKNKKETAGNGEKSPEQQKTKRGSGGKGGKNPAKNRRHVLKGNFQGERKIKSPFSCKRGAWVEG

SEQ ID NO: 107792 - protein, 134 aa, Gossypium hirsutum
  Clone ID: LIB3828-017-Q1-N6-G9.pep
CGQPFPVRIRGNVVIGPHKLQVTFSSPPFFTPGVFINQRLIRLGIVEFNKNVAFNPIPLVFPAPVNSIFAPPGFYMLFVTPDGVPSRRSTWVRIFPSIFRAKHLIVRAPICNSNHCSRFFSPSCYFAFLFYKCG

SEQ ID NO: 107793 - protein, 70 aa, Gossypium hirsutum
  unsure (1)..(70): unsure at all Xaa locations
  Clone ID: LIB3828-017-Q1-N6-H11.pep
GFPGXXVXTPGPGVGLGPPXGGPFPRRPGDLGLGPLGRPAPFFFFFFFFFFFFFFFFFFFFFFTNKFRTY

SEQ ID NO: 107794 - protein, 68 aa, Gossypium hirsutum
  Clone ID: LIB3828-018-Q1-K6-A7.pep
VRVSGLPHVTCSTRARICPCKVVSLQYSNVMLLDRFTALTVNNRLHSLDLVHDWNHRPPSPSEPKSRY

SEQ ID NO: 107795 - protein, 206 aa, Gossypium hirsutum
  unsure (1)..(206): unsure at all Xaa locations
  Clone ID: LIB3828-018-Q1-K6-B11.pep
NRRDRQFVYSRFRPXRTCRDDAGSLLTCVCFLGDSSHIAVGSHAGELKIFYSNSNNVMDSCTGHQLPVTLVQSYFSGETQMVLSSSSQDVRLWDASSFSGGAMHSFEGCKAARFSNSGSSFAALSADSTQREILLYDIQTYQLELKLSDASANSTGRGHVYSLIHFSPSDTMLLWNGVLWDRRVPDPVHRFDQFTDYGGXGGFHPA

SEQ ID NO: 107796 - protein, 71 aa, Gossypium hirsutum
  Clone ID: LIB3828-018-Q1-K6-B12.pep
LTFNLHFFPLCSVKCCHTFLYIFLFYWLLIREQSSKQLQIIKVWLANTHYISLHSIVLNFDKIETKPPFLA

SEQ ID NO: 107797 - protein, 53 aa, Gossypium hirsutum
  unsure (1)..(53): unsure at all Xaa locations
  Clone ID: LIB3828-018-Q1-K6-F10.pep
IFFFFCIFFFFFFFFFFFFFFFFFFFFFFFFFFFFFFFFFFFFXVLAQPHFYI

SEQ ID NO: 107798 - protein, 46 aa, Gossypium hirsutum
  Clone ID: LIB3828-018-Q1-K6-F12.pep
LSLHKQSENVRTRILNLQNWIKCGSIPIVTLITYIKLPSYFSSRIS

SEQ ID NO: 107799 - protein, 132 aa, Gossypium hirsutum
  Clone ID: LIB3828-018-Q1-K6-G10.pep
YQLCATQLEDLKQTVSKLLASTKDTAALLKLIDSMKRLGVAYHFQEQIQQALNQLNSDLNLVSNYLSTVALHFRLLREDCYPITADVLGKFKGGDGRFMGSLCGDVEGLLSLNEASFMAIQGEKILEEAKGF

SEQ ID NO: 107800 - protein, 208 aa, Gossypium hirsutum
  Clone ID: LIB3828-018-Q1-K6-G11.pep
DCLSSTTSKIHQLDVKSAFLNGFLNEEIYVEQPQGFEIAGREHMVYKLKKALYGLKQAPRAWYSRIDGYLTNLGFDRSKSEPTLYVKKQGTQTQLIVSLYVDDLLVTGGDRAVLVDFKTKMQEVFEMSDLREMSYFLGMEVTQAQNGIFLSQRNFATKILTKFSMQNSKATKTPVAVGEKLSSQGDFEKVCETTYRSLVGCLLYLTAT

SEQ ID NO: 107801 - protein, 91 aa, Gossypium hirsutum
  Clone ID: LIB3828-018-Q1-N6-B11.pep
KDTISPQEKTQMGGHCYAFELAEYSQLNPKSEAQNKILHNDYKPAPTIGKRTAPSFHVMPYGVFYSRSQHQKTNTVDEIKIISPVVTGNPK

SEQ ID NO: 107802 - protein, 118 aa, Gossypium hirsutum
  Clone ID: LIB3828-018-Q1-N6-C2.pep
KDKSLSNGVFFLELLTAVEPRVVDWNLVTKGETDEDKKSNATYIISVARKIGCSIFLLPEDVIEVNQKMILTLTASIMYFCLQQQGEGPDDSDLASEVSRLSVDGSVSDAAPSPQAED

SEQ ID NO: 107803 - protein, 81 aa, Gossypium hirsutum
  Clone ID: LIB3828-018-Q1-N6-F12.pep
TKKKGSFEALNGSCGCCGSCVENEVRREQCESAWDFATHFFCHICALCQEGRELRRRLPHPGLDSQPILVMVPPRDQIMGR

SEQ ID NO: 107804 - protein, 141 aa, Gossypium hirsutum
  Clone ID: LIB3828-018-Q1-N6-F7.pep
EGQGLTNRQLSNSTSSSVPHELLNSVDDAIIFKPVDFGPIRRDISDFITKKFCSVIGDRVTIKIVDEALEKITSGVWIGRTGLEEWTEKALVPSLQQLKTRFPASEESSLVFRLELDSETCNRNNGDWLPGSVKVDVDDGF

SEQ ID NO: 107805 - protein, 119 aa, Gossypium hirsutum
  Clone ID: LIB3828-018-Q1-N6-G10.pep
VFSQLFYWSSLITRFSDDLGTSKDEMERGDIPEAVQCYMIEKGVTEEKARNHVKELISNSWKKINEEIFDNRFPRVIVNLSKNMTRTVKCMYQHGDGVGTSTGVTKDYIVSSILRPIPI

SEQ ID NO: 107806 - protein, 126 aa, Gossypium hirsutum
  Clone ID: LIB3828-018-Q1-N6-G12.pep
HVSSSLIMLLSFKIPIGKPHIPRPLEGVEFPKKAITEADIQKTQLWHEYLGTRPPYNRFELVQKTRNDLHPSNQTSNTRFPWNPRFDTCKVGGAGSCSNTAKAIADMKISEPSHNSMFVHGRGQTW

SEQ ID NO: 107807 - protein, 70 aa, Gossypium hirsutum
  Clone ID: LIB3828-018-Q1-N6-H9.pep
KQIKPGSLTYSNFPLHKIRIFQKKKIHKLGCRVLISVLILAEEGKLMSIFSLKIEKDGSGLRDQPRQHKI

SEQ ID NO: 107808 - protein, 115 aa, Gossypium hirsutum
  Clone ID: LIB3828-019-Q1-N6-A10.pep
DYNTKYGVYSEGCGLNNVMMSWGHDDYMYLVSKGNNTTLPPAALFIIRYHSFYALHKSGAYRHLMNEEDTENMKWLQIFNKYDLYSKSKVRIDVEKVKPYYLSLIEKYFPAKLRW

SEQ ID NO: 107809 - protein, 81 aa, Gossypium hirsutum
  Clone ID: LIB3828-019-Q1-N6-B6.pep
TPANESALVLGNGLWLSHDQYGDSSKGSSSQSGSPQGPLQLATNTGGTSTTRGDSTEDEEDAKSEAYSWKTRTHKPGKDHV

SEQ ID NO: 107810 - protein, 43 aa, Gossypium hirsutum
  Clone ID: LIB3828-019-Q1-N6-B8.pep
KFNIDFMRWLFFHIWGLADSSQFAVNSPHTSCHSLKIKVYTIY

SEQ ID NO: 107811 - protein, 87 aa, Gossypium hirsutum
  Clone ID: LIB3828-019-Q1-N6-B9.pep
KFDHLLKLNIKSQLVVVFLLTPYKKLSCRRRVCYLFLLPKKSNYVRMNSSTQYSIFDILKFLLSCLEDHMLLMHVHGNTHDLFCYLI

SEQ ID NO: 107812 - protein, 73 aa, Gossypium hirsutum
  Clone ID: LIB3828-019-Q1-N6-C11.pep
PVVHNSRSHKQAVKAIKASEKGNSVGEDDYKRYFYSRSLDKTRQFYGFNVAYTVFSDSTSGNHNRRSSDLPHL

SEQ ID NO: 107813 - protein, 119 aa, Gossypium hirsutum
  unsure (1)..(119): unsure at all Xaa locations
  Clone ID: LIB3828-019-Q1-N6-C2.pep
NSRTLLLNNKVDLVLFGHLHNYERTCSIYKSECLAMPEKDKNGIDTYDNTNYTAPVQAIVGMAGFSLDKFPDDAPSWSLVRISEFGYVRAHATKDELKLEFVXNSDTKNVDDSFIITKK

SEQ ID NO: 107814 - protein, 77 aa, Gossypium hirsutum
  Clone ID: LIB3828-019-Q1-N6-E12.pep
SHGTGEKLINCQKENLDQGLGKGGGSNMGGFPYFDPGKCKKVEETRQVLPFGPPQTGKKYLTPGTFRIWGPTAQENV

SEQ ID NO: 107815 - protein, 88 aa, Gossypium hirsutum
  unsure (1)..(88): unsure at all Xaa locations
  Clone ID: LIB3828-019-Q1-N6-E2.pep
PISVPREWLCSPPRTMVSFGPSIPSILKGLPTQGLPPCFCKEYFCVRGFGPXSQAPRPLRASLPFPAPTLAKPKGKGVVESEFILPES

SEQ ID NO: 107816 - protein, 124 aa, Gossypium hirsutum
  Clone ID: LIB3828-019-Q1-N6-G10.pep
YKWCGLKLNSFEFFSFQEREKKAKKKAAASTNTINPEEPTEPMAEASESEKVDASAEAPVPAPISVKDKAQKGNAIWYKNRTKGPEVLSRAILRCKKSTNYWTWAAPAALVVLILLALGYYYPV

SEQ ID NO: 107817 - protein, 124 aa, Gossypium hirsutum
  Clone ID: LIB3828-019-Q1-N6-G7.pep
ETKKNQGGFKFRGNQQKRGETRGGNGSLSTKNGGENFENSTRRSWPPGASKLGGGRSREISGRGAFKLLQETSKDPSNFNLQPGTKNFYKKWGKPPTPSKGTLTRGEIFGNFIPSLANLKEKKA

SEQ ID NO: 107818 - protein, 61 aa, Gossypium hirsutum
  Clone ID: LIB3828-019-Q1-N6-H9.pep
DYFFPRVPTITITPIVVSFTPTFPCLDITPNNILLEYSAPPDKTKALRSVKNAQRSKFWAR

SEQ ID NO: 107819 - protein, 78 aa, Gossypium hirsutum
  Clone ID: LIB3828-020-Q1-N6-A1.pep
IPNPMNDALSHSNKVKELGPPPVCKGIFGGGGAPGNPGEVFPDPKTGGNFNAYGNKNKKFLFPPIWTPKIKSLLDCLM

SEQ ID NO: 107820 - protein, 111 aa, Gossypium hirsutum
  Clone ID: LIB3828-020-Q1-N6-B6.pep
TNKAAYSVQLMKMLMVFALPLLLRVIKMTYILMMAGAMYVRLAGSVLHGTSYFSYVQARTGIKKSTSVYGQNGGIKTVPDKGVGNTEKGYPSHFPWSDKHKIRFQPVKGDI

SEQ ID NO: 107821 - protein, 116 aa, Gossypium hirsutum
  Clone ID: LIB3828-020-Q1-N6-C1.pep
GQPKKKNFQWVKERIQPKKKTIAKKAGLQTVTPGGRKGPPQPNPNLGKGAAHYTGKKNTKRGGNRNQSPYKRGGSNPKKKTLANRSPKNRSQGPPNETRTKAGPPKQVGRAGKKTK

SEQ ID NO: 107822 - protein, 104 aa, Gossypium hirsutum
  Clone ID: LIB3828-020-Q1-N6-C11.pep
WGGGKKGLFGGPPRVPDPPTRRGPMGAGLNAKNWAPPNFWGAPGSPDGGKKAPLKKKKPLDPQPQVFHFGKRANPPWKTLLTEKDRGAQKRGPRVKMGGGLVPP

SEQ ID NO: 107823 - protein, 80 aa, Gossypium hirsutum
  Clone ID: LIB3828-020-Q1-N6-C2.pep
KNKKKRGKLFLIDETPFLRPFKRGTKKKNNQSVISNGTEGATPFITGHIRKIFPLLKKKADSGVSPKIKSRDLPAHKFSL

SEQ ID NO: 107824 - protein, 133 aa, Gossypium hirsutum
  unsure (1)..(133): unsure at all Xaa locations
  Clone ID: LIB3828-020-Q1-N6-C6.pep
MLIDKLSKKSLLHAVILGFSKNQCDKSADKRRSERSFQVGDMVYLRLQPYRQQSIRKVSNQKLSPKYYGLFPVIQKVGAMAYTLQLPQHSRIHHTFQISXLKKHVGVFDCNPSQISSFSALRTRLFSRKGILL

SEQ ID NO: 107825 - protein, 103 aa, Gossypium hirsutum
  Clone ID: LIB3828-020-Q1-N6-C9.pep
MYAIGGSRNPTIISQGNRYTASSTLASREVTKRVYAPPEVWKKWNWISEGDHFENGAFFVSSGDPKASKKYGIDKMMPFNPGEMAPKLTQYAGTLNCKPGKPC

SEQ ID NO: 107826 - protein, 79 aa, Gossypium hirsutum
  Clone ID: LIB3828-020-Q1-N6-D11.pep
LGKYGQVKKPPRSQSFFQGFQEWPQKTPGFPPSFPPRGGSQVFWDPGVCREAPQKKWRVSPLGKVFFNGKEIFPFLKFF

SEQ ID NO: 107827 - protein, 188 aa, Gossypium hirsutum
  unsure (1)..(188): unsure at all Xaa locations
  Clone ID: LIB3828-020-Q1-N6-D3.pep
FKLLPIYPKSGLYLLFTYAVVYVKDFCGXVCGFHKLTLPSMVGFXCPYAWVGKSAKFCPEVCAFPFTVPQPMPGWNPLKSPYSDVGVDRMISVYXDYEVAKLAADPLVIAWYAGQDQVAPVXMEYLWGGTYGIVMAGSCAGQLLNVVDGTTYHMRGCRRRNLVAVGLKSIMRVTQSGLMLMNSKFYWN

SEQ ID NO: 107828 - protein, 69 aa, Gossypium hirsutum
  Clone ID: LIB3828-020-Q1-N6-E6.pep
SSHSNPWTVGRCQPLTVPHMLGMITQECGCLASEGSYKEIPCSVLFHGDAVCMVYWCVNKDEPGHIGAG

SEQ ID NO: 107829 - protein, 100 aa, Gossypium hirsutum
  unsure (1)..(100): unsure at all Xaa locations
  Clone ID: LIB3828-021-Q1-N6-A4.pep
HSITCILWLNPPTSPFFTSRQPPTLXVISNLAKTFPNKTPFGKETKVRGRVRTNKGDFQVPVSNVVIERDPPPQTLHPLNCISLGPRCYFGKPRPKLKPN

SEQ ID NO: 107830 - protein, 101 aa, Gossypium hirsutum
  Clone ID: LIB3828-021-Q1-N6-B5.pep
KSFSKLGPNLNPISMAEINLTLAPFFFFFSSPPYPSPQSLAPPPPRVLASPGDPRPLPFPLSRVAKPVSPGFNPGGSPSVFKIEPRRGLEPFLFNFFFLGF

SEQ ID NO: 107831 - protein, 82 aa, Gossypium hirsutum
  Clone ID: LIB3828-021-Q1-N6-C11.pep
VFRLLCLHAGCFSYSEGNVCLHLCGNYGWVFRPAFSVRLCQHYGDLCPQCVSINSSVGPTESSSMSSVGKRVLHVLSCNVNP

SEQ ID NO: 107832 - protein, 31 aa, Gossypium hirsutum
  Clone ID: LIB3828-021-Q1-N6-C3.pep
GWKGARFCRDWLWYKLIVIELSIGWVIHPVL

SEQ ID NO: 107833 - protein, 77 aa, Gossypium hirsutum
  Clone ID: LIB3828-021-Q1-N6-D5.pep
SKKAMAKNTGARGLRAILESILTEAMFEIPNTKMESHRVNAVLVDEEALGSVDERGCGAKILYGEDEMDRFLAKEKH

SEQ ID NO: 107834 - protein, 91 aa, Gossypium hirsutum
  Clone ID: LIB3828-021-Q1-N6-F4.pep
KATAGFFSNSGASMIYPSLFAGPLNGFIAGRQFFPPPRFLFSGMFPIVPLSPLIFIGAVPFFLAKKFPFLKKTLKWWALGFLFIWGPFCFF

SEQ ID NO: 107835 - protein, 106 aa, Gossypium hirsutum
  Clone ID: LIB3828-021-Q1-N6-F5.pep
LERISNITGPPKEPLFDYPHKKHKGGSLLYRPKLADLQGTHRVYPHEKENNTGENKKREHGKTKKKGQGHESYPGIKKYAIRSPFGAEEKPKIKSKDRQVGLGKKK

SEQ ID NO: 107836 - protein, 121 aa, Gossypium hirsutum
  Clone ID: LIB3828-021-Q1-N6-G1.pep
PLILMSFREPFPLWPVFAFAPRITSVLDSDMVLLLSPGVILEFDCPSCFLETQFSSFAPLVAGFPFGSNFGLNLMVMTKTIFLCYPFVMFFFCNCHFFSCFGPFFWLPINDFKNALVSKNK

SEQ ID NO: 107837 - protein, 40 aa, Gossypium hirsutum
  Clone ID: LIB3828-022-Q1-N6-A11.pep
QKNGFLYHLLCQIQVNQLLIWQPTRKLPWTLKQFIFFLQS

SEQ ID NO: 107838 - protein, 85 aa, Gossypium hirsutum
  unsure (1)..(85): unsure at all Xaa locations
  Clone ID: LIB3828-022-Q1-N6-B10.pep
APEMLDLIAASEXFDSSGGGAAKMCTEMGVPFLGKVPLDPQLCKAAEEGKSCFSEQKCSISAPALKSIVEKLMAKYWCKEMSVEQ

SEQ ID NO: 107839 - protein, 101 aa, Gossypium hirsutum
  Clone ID: LIB3828-022-Q1-N6-B5.pep
LPPSPQGMKPLSPGLFLTPQSLGFFAPSFLVSVVKKVPGTHFGQGWLPDNITPGRLDCFFGLLPVLGVINFALYFVCPVWYKPKNPNPPPQMEPLANGPSP

SEQ ID NO: 107840 - protein, 56 aa, Gossypium hirsutum
  Clone ID: LIB3828-022-Q1-N6-C1.pep
RLLVGVMYLGVNERIIEVNHGMFKGLQWWSTAFLSVCVFNGLFLQCFYMFVQPMIS

SEQ ID NO: 107841 - protein, 79 aa, Gossypium hirsutum
  Clone ID: LIB3828-022-Q1-N6-C11.pep
VSRISPANVIHLPCAPSNKSRANFNVNESKTCSKVRRSLKMGELLNDTDMSTMLSPNRKLSPIKNLLLQWSNSFFASSL

SEQ ID NO: 107842 - protein, 84 aa, Gossypium hirsutum
  Clone ID: LIB3828-022-Q1-N6-C12.pep
PRRGNSPPPETLITGVFWVGGRSFPRRAPNFFLLFLERGFIWSPCVQLFRVIPKLCFCATTGALFFFPPGLSLFWFFFNAFCAN

SEQ ID NO: 107843 - protein, 72 aa, Gossypium hirsutum
  Clone ID: LIB3828-022-Q1-N6-D12.pep
SIPIIYRTSEHTCSPLDPLHSNCKASILSLSLTTYQNPLAQGTFNPSNTTHSSEWSTDVIPIFLENPTSQLP

SEQ ID NO: 107844 - protein, 133 aa, Gossypium hirsutum
  Clone ID: LIB3828-022-Q1-N6-D6.pep
GLTQKKMRPKKQSKIQKKGVTKKQKCPIDKKKNLNKLICPVPLFTHFLTLLGQKNFDKPLKIDLPKTKKKSLTDKLKNFLIWKLFTQICHEMGKLNSKYKTILVLGKNPENPFKFFLEKKTLIFLAIGVRNSG

SEQ ID NO: 107845 - protein, 31 aa, Gossypium hirsutum
  Clone ID: LIB3828-022-Q1-N6-F1.pep
HKKLSCFSRVCYIILLLKNSNYQQCIAHTNS

SEQ ID NO: 107846 - protein, 87 aa, Gossypium hirsutum
  Clone ID: LIB3828-022-Q1-N6-F11.pep
FPPFSPFLKSLKFVSGPHLNSTIQTPFPKLGPVFQGYFSPPNFPNPPRFGFSIFPPFKKKIFFYPVGFFFPPPLFFFFNLKNSWVGV

SEQ ID NO: 107847 - protein, 86 aa, Gossypium hirsutum
  Clone ID: LIB3828-022-Q1-N6-F2.pep
FSGVFIPPDFLARGIYVQQVSLVIKNDWPTQPENSLRRIGKSGRFGKKGVAINFVTLNNEKMLFYIQKFSNVVIGGPPSNVGGFLL

SEQ ID NO: 107848 - protein, 109 aa, Gossypium hirsutum
  Clone ID: LIB3828-022-Q1-N6-F6.pep
MGCFRCNSFGSDESLPRKKQPLLMEQKRQKVILLDKEIGFNEALIDERKQGFRKVEDQIGQVNEIFKDLAVFVHKQGGGIDDISSNINASFVSTTQARGQLAKAFNSVK

SEQ ID NO: 107849 - protein, 111 aa, Gossypium hirsutum
  Clone ID: LIB3828-022-Q1-N6-G1.pep
TCIFYGRPARNPWKGGVVAGSRGCFNGVPFGAAGGFPFLKVKENICLGDPCLVPCVWPSLVPWVCFPPGFCPGPAFLAPPVFLGVPLFSALFLLFCPIDLWVPKSFCFVFF

SEQ ID NO: 107850 - protein, 60 aa, Gossypium hirsutum
  Clone ID: LIB3828-022-Q1-N6-H9.pep
LSNISHKVGRPDIHGTTIELLPNLYVKYPCLLVYLLALTIIVFAPYLCFFSCYNHVLFPI

SEQ ID NO: 107851 - protein, 192 aa, Gossypium hirsutum
  unsure (1)..(192): unsure at all Xaa locations
  Clone ID: LIB3825-003-Q1-K6-A4.pep
PSKKKKKPNHKSLEDKRRTASXLVAKLSSVSERTELXALADLLLISRQDPESRPLIADAGAVPYLSETLFSSSPAIQENADATLLNLSITWRDSIMSTRGXLLYALSHALSNSASQGAVQSCAVTLHSILIADESYRSIIGSKRDILYTLLSIIGDKHALARSINDSLEALLGIALYQLNRASLVGLGAVPA

SEQ ID NO: 107852 - protein, 200 aa, Gossypium hirsutum
  Clone ID: LIB3825-003-Q1-K6-A5.pep
LIETRLVDTKAEKEHWMKQSIYRVPAAIAELNKEAYMPQVVSFGPYHHGEDRVKPMEDHKKRALLHFLKRSNKPLDLFVESLNKDLQKLKECYDLLDPIWQDDDKFLQLMIVDGCFMLEILRSATHTMDDYAPNDPIFSNHGKIHVMPFIKRDMLMLENQLPIPVLYSLVAVDSNGTKDEEFVNKLILKFSSPHTPILNM

SEQ ID NO: 107853 - protein, 104 aa, Gossypium hirsutum
  Clone ID: LIB3825-003-Q1-K6-A6.pep
RECLFVLILSVMQIPRWRNVFLLKNSLVPPFLSSKATATVATTHVASFHSTPVTCEKWKSKWDFEERRTQQPIKNHIRYRVHQRRADAKSALKNLLYNSGCSNV

SEQ ID NO: 107854 - protein, 189 aa, Gossypium hirsutum
  unsure (1)..(189): unsure at all Xaa locations
  Clone ID: LIB3825-003-Q1-K6-B1.pep
MGGRRGSRTQRKHFKQSRENVWKRPKTESSSDPNNPAWQPFATQNPSFDEYYKEQRIVSPEEWDAFMEMLRKPLPAAFRINATSQFCEDIRSQLANDFMKSLQAEAIEGGDLEPIKPLPWYPDNLAWQSNFSRMQLRKNQTLERFHEFLKLETEIGNISRQEAVSMVPPLFLDVRPDHXVLDVCAAPGS

SEQ ID NO: 107855 - protein, 89 aa, Gossypium hirsutum
  unsure (1)..(89): unsure at all Xaa locations
  Clone ID: LIB3825-003-Q1-K6-B2.pep
QSFTEVDHEREGSPNDRGKGRGARRRPMSTWNGFVSAEYDDRSWDRTSSYATGRGRRRRRDXRGRRRIGYNGPHFDRLHNECYNYQAPP

SEQ ID NO: 107856 - protein, 76 aa, Gossypium hirsutum
  Clone ID: LIB3825-003-Q1-K6-B6.pep
LPALKKKVEDAFTTSHSMILQPPTSLILQFADRWMIGYFNTHIVYILCAHGDMPDGVNDDITADGSDAAPNIDVTD

SEQ ID NO: 107857 - protein, 99 aa, Gossypium hirsutum
  Clone ID: LIB3825-003-Q1-K6-D3.pep
MDMNSEEVKRVCVEPPWLSSFERIVLRSIFKGSFFYHLINKTSVHFIPNDFLTDLALSMHNPIVFRFFQGNICELDIIHSDKGPSEECIMYALLEDQPL

SEQ ID NO: 107858 - protein, 138 aa, Gossypium hirsutum
  Clone ID: LIB3825-003-Q1-K6-E2.pep
MRPIRLPEPPIGRRSAAEVFEAGIYGIIKRVVVIGNGFSGAENQCIGLVRALGLSGCLTLYRVTRPRGGINKWLHWLPVSLHKKLDYVIRQICIYSGVQGEARWSKVVPFAVEKTGICFQLSNYMVSYCSTKDGTLLC

SEQ ID NO: 107859 - protein, 204 aa, Gossypium hirsutum
  unsure (1)..(204): unsure at all Xaa locations
  Clone ID: LIB3825-003-Q1-K6-E4.pep
KRRLFFKQTCLSTPTTIAXTNKDGKNNDKANAIRSKHSVTEQRRRSKINERFQRLRDLIPNTDQKRDTASFLLEVIEYVQYLQEKVQKYEDSYQGWSSEPAKLMPWRNSHWHVQSLVGHPQAIKNGSGPGATFARKFDENNTNINPTVITSGPNAVETDPIRYVTSKTMDCQTELANNGTHLPIQGENVLVHPLRRPVSETQST

SEQ ID NO: 107860 - protein, 66 aa, Gossypium hirsutum
  Clone ID: LIB3825-003-Q1-K6-F4.pep
LYLWELVHGMLYLVEEIYQPLFWLHSVLTQPKSCINPALLLMPWCPIKCSLLLFLSLGADVASSVG

SEQ ID NO: 107861 - protein, 52 aa, Gossypium hirsutum
  Clone ID: LIB3825-004-Q1-K6-E3.pep
SVTYRLAQGPLTNLVIYSYGFGCSSYSRAGAVLLAHGIWCHLLMSSLVLMLI

SEQ ID NO: 107862 - protein, 51 aa, Gossypium hirsutum
  Clone ID: LIB3825-004-Q1-K6-G1.pep
STPIHQCNWSDRVSHADMDLARNLCSYAPTLNTLCASQHAPSLSAPPRTVN

SEQ ID NO: 107863 - protein, 47 aa, Gossypium hirsutum
  Clone ID: LIB3825-004-Q1-K6-H4.pep
DSKLSFLPSLIYAKKQVSFHFHLLPHATADFLTSNNTPVLISLIHQR

SEQ ID NO: 107864 - protein, 105 aa, Gossypium hirsutum
  unsure (1)..(105): unsure at all Xaa locations
  Clone ID: LIB3825-005-Q1-K6-A1.pep
HIYKIQCAALHNVRQWRNTVATQIKIVAQHIPFSRGGDIEKRPTQSALQHRRTLNGESDTRCVGAXKSAGCGGDTHSDTYTLESAIARSSCALSPLFLDTCRVFP

SEQ ID NO: 107865 - protein, 74 aa, Gossypium hirsutum
  Clone ID: LIB3825-005-Q1-K6-B3.pep
IQISPTAEKLVYPFKPPIWIIIMKYALPRTIDHATRIALPTSYLFRMLLPFFTEPAYETTHVGAKGDRKIRYIT

SEQ ID NO: 107866 - protein, 86 aa, Gossypium hirsutum
  Clone ID: LIB3825-005-Q1-K6-F2.pep
RGGTFKVASQVAKSATPSASSNSQKPDPASESTSQPADTEAEAMQIEPVLPSTRNEVTNPPPKVTLMEESIRVTRGRLRKSRSGTR

SEQ ID NO: 107867 - protein, 204 aa, Gossypium hirsutum
  unsure (1)..(204): unsure at all Xaa locations
  Clone ID: LIB3825-006-Q1-K6-A2.pep
PLDRVKRLLHYASLLPPLPASSRTDSNRVMGCTARVWLDAQMDSEGNIRFWADSDSEITKGFCACLVSVLDGAGPEEVLQLKTEDLAALNVGLPGGERSRVNTWHNVLVSMQKRTRALVAQKEGKTPFEPFPSLVITTEGIQPKGTYAEAQARYLSPDKLKVKELVHVLKEKQIGVVAHFYMDPEVQGILTEAQKXWPHIHISD

SEQ ID NO: 107868 - protein, 54 aa, Gossypium hirsutum
  Clone ID: LIB3825-006-Q1-K6-A3.pep
IWCQAYRWEKRGNLGHERPFTSLPMYRGTARVTVSFRSITAMCYTVVGYRNCIR

SEQ ID NO: 107869 - protein, 66 aa, Gossypium hirsutum
  Clone ID: LIB3825-006-Q1-K6-A4.pep
NNHPCISSVSWAIGGVRLTKSVSFAVHYQSANLGGKWGKPSGNTMKINFNGAYDDGFLDRLQELSL

SEQ ID NO: 107870 - protein, 120 aa, Gossypium hirsutum
  unsure (1)..(120): unsure at all Xaa locations
  Clone ID: LIB3825-006-Q1-K6-B6.pep
MPFCMYTSSHLTDTFTMPRIGYNLKNYSYKLNRAKSLPLLVIYLDLIKRRTDGSYRELXSKTSRVYQLEKLYMEMSLKNELQXKKGRKRKLREDELVCSTSKLADKWRSERKRGQRWLSW

SEQ ID NO: 107871 - protein, 139 aa, Gossypium hirsutum
  unsure (1)..(139): unsure at all Xaa locations
  Clone ID: LIB3825-006-Q1-K6-C1.pep
SAVAYIKXLRSKIDKLEAQLLVXSEKSKLNPINVFENQTTKSAFDNTMKQSSTYWPKTVEVDVKIVGSEAMIRVRSPDIDHPAARLMDALRDLELPVHHASVSNVNDLMLQDVVVRVPTGIFITDEMLSTAILQRCTLN

SEQ ID NO: 107872 - protein, 189 aa, Gossypium hirsutum
  unsure (1)..(189): unsure at all Xaa locations
  Clone ID: LIB3825-006-Q1-K6-C6.pep
FDSAKXSWXXLNHPSLLLRDHNRDSIPVAASGDLVCFRNISGGYIVCNPVTGSCRELPPVDPGQSLLAIAMNAYSNYHGSYKLVLVSGDFPKLSFKVYNSITDCWEEEIMLRRNADDCTKSNDNDEDAVYFLSTAGNVVVTNMQRSPSKQYSSVFTLKDGEEIVYFLTSSGRVIACNLTRKCFSEYPRL

SEQ ID NO: 107873 - protein, 202 aa, Gossypium hirsutum
  Clone ID: LIB3825-006-Q1-K6-D1.pep
KLKIAQSGYDINNLFREAQSRWLKPAEVLFILQNHEKYQLEQEPPHKPTSGSLFLFNKRVLRFFRKDGHSWRKKKDGRTVGEAHERLKVGNVETLNCYYAHGEQNPSFQRRSYWMLDPAYEHIVLVHYREINEAKPCSASTVHSPLSNSASTPSPISYTSQNPGFNSLSSDVHESYQNLPSPGSAEVSSDIVIKNNGIDNTV

SEQ ID NO: 107874 - protein, 61 aa, Gossypium hirsutum
  Clone ID: LIB3825-006-Q1-K6-E2.pep
LLLMTIACVFSAVGKKIGKKTITFTFVLFPFYSRLLQLILHVCRSTSLMWRWSGIQHGGSA

SEQ ID NO: 107875 - protein, 189 aa, Gossypium hirsutum
  Clone ID: LIB3825-006-Q1-K6-G5.pep
MIQQNQQVNSDPSSKSQAEPAQADQQPMSNASLMGTATTMAMPQAAIDSADNVSVVSPSVGPQWKPSESVCDLGLPNVATQVGSMGSPPHPNSARSDSLPSVSQVLGKRQLSGSLPSNGSTDGAQWPQQPQIQQSSTLPPSQQPYQQLQNQHSLLPQQQPLQQQSQQQTLHLQTVQGSLYYRPSNSKLE

SEQ ID NO: 107876 - protein, 121 aa, Gossypium hirsutum
  unsure (1)..(121): unsure at all Xaa locations
  Clone ID: LIB3825-006-Q1-K6-H2.pep
RKTNGLERRKTKICGHISLSVLLALLAVVQTTAFQGVKLNKNEHXNAYATMMYMGTPTDYKFYVATRVLIRSLVKLQVDADLIDIAFLDVTLRWVRALRRXANVLKVDNLNIPYKGHRKFR

SEQ ID NO: 107877 - protein, 79 aa, Gossypium hirsutum
  unsure (1)..(79): unsure at all Xaa locations
  Clone ID: LIB3825-007-Q1-K6-A12.pep
KFLDVPPYNEFQKQIMTEVIPVKDTTLHYADIGALEETKESLQDLVMLPFXTADLFKGGLLKPCKRILLFGTASTGKTC

SEQ ID NO: 107878 - protein, 93 aa, Gossypium hirsutum
  Clone ID: LIB3825-007-Q1-K6-A2.pep
MPFKFQFPLFAYVMEGGNGNDPCESSVLQKDIYQGIDDDVKLNSKDQRDALADEPKCVICGRYGEYVCDETDDDICSLECKQAILLRVANSLP

SEQ ID NO: 107879 - protein, 195 aa, Gossypium hirsutum
  Clone ID: LIB3825-007-Q1-K6-B10.pep
KGSWTLPPKRESPQNRTKDGNSGEDFNKDSIERDERRLTELGRRTVEIFVLSHIFSNKIEVAYQEAVALKRQEELIREEAAWLAESEQKAKRGASEKEKKSKKKQAKQKRNNRKNKEKGREDKAIVAAERKHQEYHPDDEKEAPVMVEEQPVPEKADVLGDVSDSVDAATEVLQPDSEDRDASPVNWDTDTSEIH

SEQ ID NO: 107880 - protein, 205 aa, Gossypium hirsutum
  unsure (1)..(205): unsure at all Xaa locations
  Clone ID: LIB3825-007-Q1-K6-C12.pep
PGKCRRLFSAIEMALCSLXVEKLVIPAIXELTHTWTSVFGFSPIEESLKQDMRSMNMLVFPGIDMLQKLLLEQGNTKTSLTAATGKKQTESGSTECITPEVANKFKPGSLFGHDTESAAADSDSQCPNVSINDTCGTSGSLDASVEPNESAMNSIPDVNPSSIHDANETEIKAGLDSPAENNTQSCMEGDKATESASEDKNMRPP

SEQ ID NO: 107881 - protein, 80 aa, Gossypium hirsutum
  Clone ID: LIB3825-007-Q1-K6-C6.pep
SAAMRNVDSTVNDANTFFFTNGQWLSPPPRVEHRVHRYGHSLRLILALEQELSSVIWRNVACCKEDPCKSEVYGALSLYE

SEQ ID NO: 107882 - protein, 66 aa, Gossypium hirsutum
  Clone ID: LIB3825-007-Q1-K6-E12.pep
AAPQYATLDPTLTGPWNGQTDGNSVCNYLSNATPYVTPHEMPTGLKSAPKPIGAPMVAQHIGSTAL

SEQ ID NO: 107883 - protein, 55 aa, Gossypium hirsutum
  Clone ID: LIB3825-007-Q1-K6-E6.pep
TLRESLGHYSGCVPNVGKKKDSKRGTLCLKRKTLQSKRREKEVNKQILKDLSGAH

SEQ ID NO: 107884 - protein, 73 aa, Gossypium hirsutum
  Clone ID: LIB3825-007-Q1-K6-F2.pep
NSISWSRNHFSTRVRLGVSQAMSILLLCAMVRLEFSKLGLLPKGTTVILGRRRVPQFSLMPLLTKEMLDLPQV

SEQ ID NO: 107885 - protein, 67 aa, Gossypium hirsutum
  Clone ID: LIB3825-007-Q1-K6-F6.pep
RFTNISKNLPIYLTSCQNFYFFINIYETLPIFPNFLNTIPSPNNYQNFYEFTKISNNLPKFIDLQYL

SEQ ID NO: 107886 - protein, 209 aa, Gossypium hirsutum
  unsure (1)..(209): unsure at all Xaa locations
  Clone ID: LIB3825-007-Q1-K6-G8.pep
GDNNESNSMVDCEIRWXEDLHLGEEVGQGSYAVVYRGIWNGSDVAVKVYFAGEYKESTLLDYKKEIDIMRKLRHPNVLLFMGAVYSQERLAIVTEFLPRGSLFKALHKNNQALDVKRRMRMALDVARGMNYLHHRNPPIVHRDLKSSNLLVDRNWNVKVGDFGLSRWKNGTFLTTKSGRGTPQWMAPEVLRNEPSNEKSDVFSFGVILW

SEQ ID NO: 107887 - protein, 75 aa, Gossypium hirsutum
  Clone ID: LIB3825-007-Q1-K6-H6.pep
VVPTVSPRNNPETLRTSTHHFLARLVYVLTSDYPRPSIIDMPDDSTFPVHDTRRFTFASQNQNHPKRIVQLPKPT

SEQ ID NO: 107888 - protein, 47 aa, Gossypium hirsutum
  unsure (1)..(47): unsure at all Xaa locations
  Clone ID: LIB3825-008-Q1-K6-A4.pep
NSDASDLAHTNCELSKNSRSLENHARGVCLRPYSAFFSLHTSXPDAG

SEQ ID NO: 107889 - protein, 69 aa, Gossypium hirsutum
  Clone ID: LIB3825-008-Q1-K6-B11.pep
DNKWGNYRTEEKKWAGVIDALLQEQLGVLPTMYIRVKIVGAPYLSYQATCRLNTSPRINPLICCSLPPL

SEQ ID NO: 107890 - protein, 72 aa, Gossypium hirsutum
  unsure (1)..(72): unsure at all Xaa locations
  Clone ID: LIB3825-008-Q1-K6-B7.pep
ELKEDKTGKTTMPLRKNMLILTPCQFLNHHXKNFTYSELAAATDNFSPGMQFHFKLNFPLFKSNVLAVRNFR

SEQ ID NO: 107891 - protein, 189 aa, Gossypium hirsutum
  Clone ID: LIB3825-008-Q1-K6-C1.pep
FGEQPVNLIRNSIKILEKHKGTFKHIDNKQKPEHIDWFGWNTWDAFYCNVDPEGIKDGLENFSKGGCPPKLLTIDEGWQNIFPSYEENPTGELSRLINLEENAKFKGSKLDKSGKNLRDFIKTIKQKYGLKYVYIWHAMAGYWGGVLPESEVMKKYNPKIQPVVQSPGNLTHVVCSTLDNIQEKGIGLI

SEQ ID NO: 107892 - protein, 48 aa, Gossypium hirsutum
  Clone ID: LIB3825-008-Q1-K6-D6.pep
FERPGRKIWFFKTGPPFFFFFFFFFFFFFFFFFFFFFFFFFFFFFFKN

SEQ ID NO: 107893 - protein, 43 aa, Gossypium hirsutum
  unsure (1)..(43): unsure at all Xaa locations
  Clone ID: LIB3825-008-Q1-K6-D7.pep
RDTAIASIICLHNFSGTMGRGTLXSYPLFXPCRGIVEIPPILL

SEQ ID NO: 107894 - protein, 105 aa, Gossypium hirsutum
  unsure (1)..(105): unsure at all Xaa locations
  Clone ID: LIB3825-008-Q1-K6-E10.pep
RRGKXLDQILEECLEEHKRKRNSGKSYGEHDDFMYMMLSLLEDAEDHPSYDADTINKATCLAIILGGTDTTTVTITWALSLLLNHRDVLKKAQNELDTFVGKDRL

SEQ ID NO: 107895 - protein, 207 aa, Gossypium hirsutum
  Clone ID: LIB3825-008-Q1-K6-E9.pep
AAWADAWAIFYMIGRNKSRIYWRVLKIDRLDPFELNIREDSTTYTEFECSELLRRIHEGNKSTGGLKFVTACYGIVGFVKFLGPYYMLLITKRRRIGAIFGHNVYAVSKSEMIPLPNSSVNPSIADFRKENRYKKLLSSVDLTKDFFFSYSYNVMCSLQKNLYNNEPGEVLYETMFVWNEFLTRGIRNHLKNTLWTVALVYGFFKQA

SEQ ID NO: 107896 - protein, 141 aa, Gossypium hirsutum
  Clone ID: LIB3825-008-Q1-K6-F1.pep
DEQALLVSSTDTGLEVWNQVEPLTSTDSPFRVVVLLLEDALVMPDNWFSSEDSSQETGNLFSKVSLKKSPQKTRRQAGQNISGRRLQVLEVTIPIFTTIITAATNITFIFNITERQMKIFYNTFTTSTIIIRSFNIFQWEI

SEQ ID NO: 107897 - protein, 125 aa, Gossypium hirsutum
  Clone ID: LIB3825-008-Q1-K6-F10.pep
KPTSKGTHLMYSWGGAKLAWRTKRRKENQTERRGEGSGAGEGDQVRAVAYPTTTRRDVTRRGQGRHPTTPGRGGRWVGTADAVPGLLSLSRHQEEKSDAPRGELGGVTAGSCPDRSVVERQRSVF

SEQ ID NO: 107898 - protein, 203 aa, Gossypium hirsutum
  unsure (1)..(203): unsure at all Xaa locations
  Clone ID: LIB3825-008-Q1-K6-G3.pep
AKSFEVRIHYGHPXIFDRIFHLTRGGISKAXKIINLSEDIFAGFNSTLRGGYVTHHEYIQVGKGRDVGMNQISAFEAKVANGNGEQTLSRDVYRLGRRFDFYRMLSFYFTTVGFYFSSMVTVLIVYVFLYGRLYMVMSGLEQEIIENATIHQSKALEEALATQSVFQLGLLLVLPMVMEIGLEKXFRTALGDFIIMQLQLASV

SEQ ID NO: 107899 - protein, 165 aa, Gossypium hirsutum
  Clone ID: LIB3825-008-Q1-K6-G7.pep
MYIANGFELKLFHCRCSSNPKEKKKSKGKEKKKDKKMQKLKKQDARLHNTPAGHAGGRGIGGSVYTTNGNNIADTVHYGGSENHDIPEFTTLGRDPDTGRRDNLKKVGSGRHSQRAYSPTGNQDSPYAGSINPGTRRNTPQGTQYDPHYRSYQTKGSSPCALLQP

SEQ ID NO: 107900 - protein, 128 aa, Gossypium hirsutum
  unsure (1)..(128): unsure at all Xaa locations
  Clone ID: LIB3825-009-Q1-K6-B11.pep
VLMVLAGRSGDRGKGDSXEKGKLSLVVVEIRRKRNGELIALGKQWMATTKDSINAAQLKKNILKLCLCHLSFQEPNQRALIIESQHILDAGGLKMEEDAILQKSLKWLRDLSKGNISHELEALTLERL

SEQ ID NO: 107901 - protein, 84 aa, Gossypium hirsutum
  unsure (1)..(84): unsure at all Xaa locations
  Clone ID: LIB3825-009-Q1-K6-B8.pep
MRVTSETKKVKSNFFGYSLNSNKMQLDLVCMSWRSESIWIEFIXGSRKTSNFCWAFILFFGSLGFLLVGTSSYLGRNLISLFPS

SEQ ID NO: 107902 - protein, 208 aa, Gossypium hirsutum
  Clone ID: LIB3825-009-Q1-K6-C12.pep
TLFSQISQVFSYLTLELEQLHFSAAPKSRCFNVAKVSEEIDLNCDAVSVDRENGDNDVNIKDSGTCLKESVNEAGEGSKVESVKDEEVNLEADIGSLGEEVAFGSGEVSKMEVDGELKGNGDGECVSVEEKKPVVAEEMAVKSSSEVAEDLNVGLCRSGDPLLEGTSVQSVSIVDDTTHSGDERLNSPDLSHENSLPCGDQKESLNHQ

SEQ ID NO: 107903 - protein, 152 aa, Gossypium hirsutum
  Clone ID: LIB3825-009-Q1-K6-C3.pep
MMECSLWISAGDHKNNNSNSNNNSLWGFSNESEHDLALMVSDFLENNGGSAGADSWCSSDSESGFSDLIHLADKISYYKHSVCHYDMDLLSVVHSLILSMGETDLHSVKSGPCNASCIRYSLVKLLRLSGYDAAVCVSRWQRSGKVPGGDHE

SEQ ID NO: 107904 - protein, 121 aa, Gossypium hirsutum
  Clone ID: LIB3825-009-Q1-K6-C5.pep
GRFWNHSKKYKGFVMGSCTYLIKNIRYPTIVEAYACLHGVAFAEDLGFQDIILEGDSLTVIKKLGKQMKRHMRWQHGEEEGICRPSEWKKPRGKSIHSFRRIEGVWNEGKKTQKRTLVSYL

SEQ ID NO: 107905 - protein, 188 aa, Gossypium hirsutum
  Clone ID: LIB3825-009-Q1-K6-D8.pep
FVAATVFTLLELCGDVGALGWWDLFINFGIAECFAFLVCTKWSNPVIHRNSPAIEAGPSTATIRYLDWNSGLVVAPEEDQQQDTMCGLQDIGGHLMKIPIIGFQVLLCMHLEGTPPGARDIPLPVLFSPLFLLQGVGVLFAASILIERIVLLLRSGAGTGLYFRFSSRAHDCLGFLHHGSRLLGWVVN

SEQ ID NO: 107906 - protein, 80 aa, Gossypium hirsutum
  Clone ID: LIB3825-009-Q1-K6-E4.pep
KLCLQLRSNSLWKEGISCRTSPIILCTVSEFKRSLNTANSACNEVRNSLKLKDLTKKILYLGNTLNQGTTMGLSNASFTG

SEQ ID NO: 107907 - protein, 76 aa, Gossypium hirsutum
  unsure (1)..(76): unsure at all Xaa locations
  Clone ID: LIB3825-009-Q1-K6-G1.pep
YRVPTKXSLQEAYSTPILPLDHLXAKXPTENKLDWAKRLLAKYGSQLSVVSIVLLFIYLVATPSKASAAKASKKKS

SEQ ID NO: 107908 - protein, 77 aa, Gossypium hirsutum
  unsure (1)..(77): unsure at all Xaa locations
  Clone ID: LIB3825-009-Q1-K6-G10.pep
TFFNSPILRSLFPSYNFTLIIRPIQSKEPSPRWKYYSNPXKKTSPPTSRISLYPTPEDQTTPNSFQTPRKSLNSKKK

SEQ ID NO: 107909 - protein, 105 aa, Gossypium hirsutum
  Clone ID: LIB3825-009-Q1-K6-G4.pep
MGNTCVGPSISKNGFFQSVSAAMWRSRMPDDSVSSSNGGIGSEVAAREPESPLPVLNKPPEQVTIPKPETKQEAKEEAKPETKPETEPEKPAKPKFPHMKRVSSA

SEQ ID NO: 107910 - protein, 89 aa, Gossypium hirsutum
  Clone ID: LIB3825-009-Q1-K6-G5.pep
WCSEILQRSKSAFQETKMDVHTKLMRKYKQVPEWWFTCILIVNIAATIFLCQYYNDQLQLPWWGVLLACGLAIFFTLPVGVITATTNQV

SEQ ID NO: 107911 - protein, 73 aa, Gossypium hirsutum
  unsure (1)..(73): unsure at all Xaa locations
  Clone ID: LIB3825-009-Q1-K6-G8.pep
PKGPIFSTLGGTFSPLFPPPPPFFPQDFGYLLYNLNPLFFSPKKKKKKKKKKKKKKKKKKKKKKNPRXRPRXR

SEQ ID NO: 107912 - protein, 108 aa, Gossypium hirsutum
  unsure (1)..(108): unsure at all Xaa locations
  Clone ID: LIB3825-009-Q1-K6-H2.pep
QSFISSVSPKTPLSLVPDSYWEEXWRVLHKTEELKQDSLDQTISKWXKKRWSEKVKLVLSRTESDPSPARAEKYKKGHKSSVRRSLLDDLTRQLGLEERDTEKGAVLM

SEQ ID NO: 107913 - protein, 119 aa, Gossypium hirsutum
  Clone ID: LIB3825-010-Q1-K6-A12.pep
SIQQQPSQWEESQAEDDGAVETVSTNHARAPFLPSRNIQEDHYRSSLVYDNDLCNDVNPYQPQRPAFENQQPEDGSSSVAEDRHQLNLHNDDREPPTEEAHPSGIITNCRRVRTPHCAH

SEQ ID NO: 107914 - protein, 70 aa, Gossypium hirsutum
  Clone ID: LIB3825-010-Q1-K6-B11.pep
GHHQVMCISRVRYSSYHVMWKCWGAHGKLQFCIPSSISIYIGNLTKESSHIDQRFSHAIYTEQIKCSLSI

SEQ ID NO: 107915 - protein, 61 aa, Gossypium hirsutum
  unsure (1)..(61): unsure at all Xaa locations
  Clone ID: LIB3825-010-Q1-K6-C10.pep
KLDFXRXKLFHINLTQLLVGIVNTDSMLVWCRQLLSDILCGYNTCGHAWYKEGCFTFFCLL

SEQ ID NO: 107916 - protein, 61 aa, Gossypium hirsutum
  Clone ID: LIB3825-010-Q1-K6-C3.pep
LLHVLFNPFWFCMELYLYVKTLRICFWFLRISALQTKSKNHGLYFLFHLLYENHGSSPMVF

SEQ ID NO: 107917 - protein, 141 aa, Gossypium hirsutum
  Clone ID: LIB3825-010-Q1-K6-D11.pep
MASTGQPPSLKRRDAPLTKEGDQLTITPLGAGNEVGRSCVYMTYKSKTVLFDCGIHPAYTGMAALPYFDEIDPSTIDVLLITHFHLDHAASLPYFLEKTTFRGRVFMTHATKAIYKLLLTDYVKVSKVSVEDMLFDEQDIG

SEQ ID NO: 107918 - protein, 70 aa, Gossypium hirsutum
  Clone ID: LIB3825-010-Q1-K6-E2.pep
FNLGGPKKKVLSWKEGEVKLGSLQNGPPLFFFFFFFFFFFFFFFFFFFFFFFFFFFFFFFFFFFFFKENI

SEQ ID NO: 107919 - protein, 158 aa, Gossypium hirsutum
  Clone ID: LIB3825-010-Q1-K6-F2.pep
KKEKKRKGRGKRGPAKEKGNQGGNNATAGEKGPLQGGCQLPIKAENGWEGPSGGAPSEKNQLAKKGSYARRIKWGTPGVYPKTSGEKKAVTRNENRGAPEKKGKECGRTGKRKQAPPKNGRPQFFFFFFFFFFFFFFFFFFFFFFFFFFFFFFFFFDA

SEQ ID NO: 107920 - protein, 59 aa, Gossypium hirsutum
  Clone ID: LIB3825-010-Q1-K6-F4.pep
PLLFNPLERTIASSIVTDGIQGSCLPAPNRHCVYMVAKQAETITLLNACNLNHFLFSFR

SEQ ID NO: 107921 - protein, 164 aa, Gossypium hirsutum
  unsure (1)..(164): unsure at all Xaa locations
  Clone ID: LIB3825-010-Q1-K6-F5.pep
MEASRRSAVKPVIVLKPSKRVPLVEDTTGKASDALPLPLYLTNAVFFTLFFSVVYFLLSRWREKIRASIPLHAVTFPEIVAVFALVASLIYLLGFFGIDFVQSLIMRPSGDVWSGEDDEEGNEVLLREEDARTVPCGQALDCSVPSXPHMVRNVTAQRLFDEKP

SEQ ID NO: 107922 - protein, 112 aa, Gossypium hirsutum
  Clone ID: LIB3825-010-Q1-K6-F9.pep
YHDTGNKNINTETQRLKKIVYISIKRNDVYKEKICTKLLYNETFSLVKRSVQICETLPFVKKGTKINAIVTIIIRAGNILANTTICSSSPKWSYLNCSIFRVLKLIPVRAPL

SEQ ID NO: 107923 - protein, 48 aa, Gossypium hirsutum
  Clone ID: LIB3825-010-Q1-K6-G8.pep
ERFHFSNGYEHPAILCSSSAMAGSYCLTLTIVLVSGSFRCMHWYLFPC

SEQ ID NO: 107924 - protein, 197 aa, Gossypium hirsutum
  Clone ID: LIB3825-010-Q1-K6-H4.pep
SGFSFCQILRATKLNIVDFFKELPQFVVKAGPVLRNMYGEDWETRLEGTEMQANFVHLSLLSKSYKRAFWELFLTSDANIDKQQNATSSSDYISECHRFGWLLFLALRVHAFSRFKDLVTCANGFVSILAILIIHVPVRFRNFKINDSPHFVKKGDKGVDLLASLCNMYDASEDDLRKTMETSNKLIEEILKKNHVQ

SEQ ID NO: 107925 - protein, 146 aa, Gossypium hirsutum
  Clone ID: LIB3825-010-Q1-K6-H5.pep
EQPVEQATMNATKETQREEIRNTDPESSAKEVCSQGCQPRNPSPEPRTCRATAPATAARRAPRRGPTGKRSVNGFLRATNRAINTGPNTGTATGKSTQKLKKIPANAHADAYAPRALTVTLNKINQKRINGRSNYDSHNDSKNVAI

SEQ ID NO: 107926 - protein, 112 aa, Gossypium hirsutum
  Clone ID: LIB3825-010-Q1-K6-H8.pep
SHKCFRGATIQVPIVVSESFFDNGSMCVGVDLVDNVYGAEDHSNGVDPFPYPFFSFARGVFPYFHALYTSALSITPFHSSVYDLFLPSEYPYLHSQLGMTVVALEQNRLVVY

SEQ ID NO: 107927 - protein, 117 aa, Gossypium hirsutum
  Clone ID: LIB3825-011-Q1-N6-B5.pep
ELVEGRLLAALRVLLSNDREMVQRYDLSVLKSLSAEGPLGVANEVAAFRTIIALCVIALGHFPTKIMDDEFLLKQGVSVSTELAIQFRMQKKSVIIDVMRDFTKRVKVFLSKETTTA

SEQ ID NO: 107928 - protein, 107 aa, Gossypium hirsutum
  Clone ID: LIB3825-011-Q1-N6-B6.pep
VTKAIFRDLKPLNFHFIFRCDVKALEDALCKRVMVTPEEVIKRSLDPQSATVSRDGLAKTLYSRLFDWLVDKINNSIGQDPNSNFLIGVLDIYGFESFKANRYAPCL

SEQ ID NO: 107929 - protein, 46 aa, Gossypium hirsutum
  Clone ID: LIB3825-011-Q1-N6-D1.pep
WVNMRILNKAVDVNAHAINYSTLFPGFNNFEQYVPILCPKFTPVCS

SEQ ID NO: 107930 - protein, 129 aa, Gossypium hirsutum
  Clone ID: LIB3825-011-Q1-N6-D5.pep
SEEADADDEWTESTRERASGIAASGMSSDERNQKQVSARDLMPPPRPSSNSFSNFVRAKSRFGSSSSRNSSIRRTEMSTSSHTSKSSSSSFKAGESSNSKTGNNSNLSSNSDARKPRRKRRPKKRKQQA

SEQ ID NO: 107931 - protein, 47 aa, Gossypium hirsutum
  Clone ID: LIB3825-011-Q1-N6-F1.pep
IQQTAVNLVHIIGTQCTTIVKTFQEGSKNITLALSSTASSNIILISP

SEQ ID NO: 107932 - protein, 56 aa, Gossypium hirsutum
  Clone ID: LIB3825-012-Q1-N6-A4.pep
EFMSRWNLLQTLTWQPTWFNRILPTNSWGSINVLSKNRPWFLSNNNQGVKKISTLK

SEQ ID NO: 107933 - protein, 138 aa, Gossypium hirsutum
  unsure (1)..(138): unsure at all Xaa locations
  Clone ID: LIB3825-012-Q1-N6-B3.pep
HGNTIKAPGGIKTRPYDASRSDFRALFDVHQQKVSYDVEVHMQMTGQNVAXCIAGSNGVTFDDLXSRYHTHCEVGLNASQSLEIAFSISERLSKRRIKSAKYLCNGNSMSCAVSEKERVFCNRINNPLSLMSHCEFGF

SEQ ID NO: 107934 - protein, 41 aa, Gossypium hirsutum
  Clone ID: LIB3825-012-Q1-N6-B4.pep
TPLGKDPFFIKKKTTKAYSNSFYYSLGVIGFKVNLPYPFAP

SEQ ID NO: 107935 - protein, 65 aa, Gossypium hirsutum
  Clone ID: LIB3825-012-Q1-N6-D4.pep
EASAMFYDPTGHHFATHCCEKAPHQEVLLWLLGAPEYAGWAAPHRPWLLLLKSFRLFTFRFWLLI

SEQ ID NO: 107936 - protein, 84 aa, Gossypium hirsutum
  Clone ID: LIB3825-012-Q1-N6-E6.pep
PSVASATAADENKRARPKFSVPLSKKEIEEDFMVMVGRLPRKRPKKRARYVQRELDSLFPGLQLREVRVDSYKVPEVIENGNVS

SEQ ID NO: 107937 - protein, 125 aa, Gossypium hirsutum
  Clone ID: LIB3825-012-Q1-N6-F4.pep
CFFPCFAFLSPSLFFVCVFAVLQGCCLLPFPVFGVSRFYHRFEPFFPLFFVALSLCCIKLCVLFYCSGGLLFLGGFCFSFVMLRVGSCILRFGGPLCFWFPLNIIGWDDLFYLLSPGFVFINFVL

SEQ ID NO: 107938 - protein, 82 aa, Gossypium hirsutum
  Clone ID: LIB3825-012-Q1-N6-G1.pep
RVRANILNLANIQNFKRIAVFRATLQMGCWVFRSPFPPGWEFYDRSLFVFVCMMLGKGNYFRTFLFFLPSFQGGVLDRPFRF

SEQ ID NO: 107939 - protein, 57 aa, Gossypium hirsutum
  Clone ID: LIB3825-012-Q1-N6-H3.pep
LCLKYKIHTTGTTNTSWILTFNAAATLIDKSIGFYLIYIPIINHLLTTASSSFWNSF

SEQ ID NO: 107940 - protein, 42 aa, Gossypium hirsutum
  Clone ID: LIB3825-013-Q1-N6-D3.pep
REFAYDTLQSPFQSIARLSSLEISSYSHLLPTLDPDAELIHQ

SEQ ID NO: 107941 - protein, 63 aa, Gossypium hirsutum
  Clone ID: LIB3825-013-Q1-N6-D6.pep
FTKTFFYQNTFLPWNGPIKHPTSKPLFRVVTPPLHFLIIFHLYEKLPSYFLDFQCPITPRVLR

SEQ ID NO: 107942 - protein, 100 aa, Gossypium hirsutum
  Clone ID: LIB3825-013-Q1-N6-F2.pep
AHSFRRARIPKGLGPFINGGGTLFMVWGGALGETTKGGPLGGSFLHPFHFGTDHIFLKGTGGIMAFINKGDSNPFFHESINGGLKPLAYFFKALGGRPTY

SEQ ID NO: 107943 - protein, 83 aa, Gossypium hirsutum
  Clone ID: LIB3825-013-Q1-N6-F3.pep
QTFSAVILGVHNVLVQTHPDIVTIIVPRHPQHGQEIAEELQKGGQNVALRSQHKELIPGTSIYLVDTLGIEHLVPFHFSLIFL

SEQ ID NO: 107944 - protein, 102 aa, Gossypium hirsutum
  Clone ID: LIB3825-013-Q1-N6-H3.pep
LFFSMIQDLSTSARPSTDEEVFAGLEALPEAQGNRIEQMIDDWNLDEGIPNAFDNQCSSSIEGQNPTPITGGCNLSFEPDALNLPRKRSRTDYCYEGFGFDT

SEQ ID NO: 107945 - protein, 105 aa, Gossypium hirsutum
  Clone ID: LIB3825-013-Q1-N6-H4.pep
PPFFKLFKVRRKKKTGLLTRVPFKKCFWKKINKGEQQAKQEKQQKKSILFTKKWKITYLGGGFLFFLFLEFRLFKAKHDFVKRGDTVFTKKKKSRKVEGGFRFFF

SEQ ID NO: 107946 - protein, 109 aa, Gossypium hirsutum
  unsure (1)..(109): unsure at all Xaa locations
  Clone ID: LIB3825-014-Q1-N6-A5.pep
VQYRKIRSRLXRVDIFVVPAFFPVTLVASQNXILRMHGLGFCNWFISSAHSYRIFVXAGRINHVSLWDSLAKXVGFGVSWRLVYNIFSSNPQKFYFVSRQRQRAYDIKS

SEQ ID NO: 107947 - protein, 122 aa, Gossypium hirsutum
  Clone ID: LIB3825-014-Q1-N6-B2.pep
KDKLEGRRKEILARLNSQRSKGHPVHRVLSSNKAPSLPASSHHIPNQINNRLRDVGDAEFRSHSNNARITRVSSDKDYFPSQSMNQTVKTVRDKLNKIQSSTEHLQAGPTPKKTRVDNRRRI

SEQ ID NO: 107948 - protein, 75 aa, Gossypium hirsutum
  Clone ID: LIB3825-014-Q1-N6-B5.pep
HEIHNWGFVKIAAQKNIWILVLKKVKTHLLVGFIPSKHPFCWDSPVKPHGLLVLNLSCTHWCHSFFYLKKNLHTS

SEQ ID NO: 107949 - protein, 157 aa, Gossypium hirsutum
  Clone ID: LIB3825-014-Q1-N6-B6.pep
CAEEDVKSSNAHCVAYFVKELSKAKKVDDLRQKLRMRGLRCHPMYCRNSTRMQVVPLLASRAQALRYLFVRWRLNVANMFVIVGETGDTDYEELIAGAHKTLIMKEVVTKGSEALLRTTDLRNDIIPSDSPLIASIKGGATPEEISEALKALSKASL

SEQ ID NO: 107950 - protein, 105 aa, Gossypium hirsutum
  Clone ID: LIB3825-014-Q1-N6-D2.pep
GSKKGGKALIHGETVGRKGKKLNKTPGQVLVKRAKQRGTSVVTKSNNPFRIKENIKVFGWEMPQKDFKALGNIPDQKKVLHGKQLFVKKKAGPLKSVAKERDHED

SEQ ID NO: 107951 - protein, 67 aa, Gossypium hirsutum
  Clone ID: LIB3825-014-Q1-N6-D6.pep
LKWEPFIFRPTIFIEIIQRIGCLVKDEEGKQYQKGGCGGFGKGNFSELFKSIEEYEKSLEAKQSQNP

SEQ ID NO: 107952 - protein, 63 aa, Gossypium hirsutum
  Clone ID: LIB3825-014-Q1-N6-F1.pep
LLVSAGFVAYPIMIIFKGVLLVSLMRLLLFLQILYFSYLVLRFCRFCALCYIYVPMFMPVLLF

SEQ ID NO: 107953 - protein, 100 aa, Gossypium hirsutum
  unsure (1)..(100): unsure at all Xaa locations
  Clone ID: LIB3825-014-Q1-N6-F2.pep
PKPGKPTXLSRMRHILVKLKHTPPPHMLPPPPAKEGKEGKDGKNDPKNGKEAASNGTASAEKMAPEKDDTANGSAPEHDATTATKDQSGAEAEPEAKSTA

SEQ ID NO: 107954 - protein, 38 aa, Gossypium hirsutum
  Clone ID: LIB3825-014-Q1-N6-F4.pep
PPTFRSCRLGYMFRQSPKPAFLSISFTSRQNVFQICHV

SEQ ID NO: 107955 - protein, 124 aa, Gossypium hirsutum
  Clone ID: LIB3825-014-Q1-N6-F6.pep
SKFKGKNKKYVHWQDPAGKKKKTRQTAAKNVRRREQRQPQKKQGKKRVRKVLRKRNALGEGPGNTAFEYGSSRERRQKKGRSGQPTKKEQNTAFHGKVRPIIKKGTPKAGGPQKTTMETPRPET

SEQ ID NO: 107956 - protein, 99 aa, Gossypium hirsutum
  unsure (1)..(99): unsure at all Xaa locations
  Clone ID: LIB3825-014-Q1-N6-G2.pep
SLVLWHKDERDLRLHLMXFDEVVEXFCTNLFSNVLCDYVYNLSEILSKFYSITECKVIGSYMLMSRLILCXRLSVVMRKCFDVLVVTLISQIVYALVIL

SEQ ID NO: 107957 - protein, 97 aa, Gossypium hirsutum
  Clone ID: LIB3825-014-Q1-N6-G4.pep
WSEVEASASTSCSSLRPYGVPNACCSVSQGGLSVSAREGRVHGGSLLAMLTAGSCVGSRLQCSVLPAIRQGQINLFSPPIRGRRFISQVLPNYYWES

SEQ ID NO: 107958 - protein, 80 aa, Gossypium hirsutum
  Clone ID: LIB3825-014-Q1-N6-H6.pep
DIGSTVCLLCVEGSLQKLKRMIWVFKAKPQLVQFLVPLVILAVIDNGFHFDPATMVIIDEGTGAFTSALDKMLPCCWPEW

SEQ ID NO: 107959 - protein, 192 aa, Gossypium hirsutum
  unsure (1)..(192): unsure at all Xaa locations
  Clone ID: LIB3825-015-Q1-K6-A11.pep
DFCESVGXVTEVRIMKGKDTSENKGFAFVTFRSVELASKAIDELNNAEFKGRKIRCSTSQSKHRLFIGNIPRNWGEEDLRKVVSEVGLGVTGLELVKDMKNSSSNRGFAFVEYYNNACAEYSRQKMMSPEFRLGDNAPSVSWADPKNADSPAASQVKSVYVKNLPKDVTQDQLKKLFEHHGKITKVVLPPAK

SEQ ID NO: 107960 - protein, 81 aa, Gossypium hirsutum
  unsure (1)..(81): unsure at all Xaa locations
  Clone ID: LIB3825-015-Q1-K6-A5.pep
NTLQFQYKKKKKKKKKKKKKKKKKKKKKKKKKKKKKKKKKKKKKKKKKKKKKKXGGGXXKKKKNXGGGGGKKKFFFGEIKL

SEQ ID NO: 107961 - protein, 77 aa, Gossypium hirsutum
  Clone ID: LIB3825-015-Q1-K6-A6.pep
ISSSLGINQQLLTLKKKKKKKKKKKKKKKKKKKKKKKKKKKKKKKKKKKKKKKKKKKKRGRPLLKKPNFTFPGFAKF

SEQ ID NO: 107962 - protein, 180 aa, Gossypium hirsutum
  Clone ID: LIB3825-015-Q1-K6-B12.pep
KGLNFLEELTENGHRIQEQVLEEILLRNAGTEYLTRFLHGQTDKQLFKNNVPIVTYEDIKPYIDRIANGETSNILLADPISEFIQSSGTSGGQPKLIPMTAENFEKKTLELTLVDPVVKKYFDGLEKGKTMSLFFVKKGSETPSGLTVRTLTSCYFMSDSFKKSAPKICTSPIETILCLD

SEQ ID NO: 107963 - protein, 75 aa, Gossypium hirsutum
  Clone ID: LIB3825-015-Q1-K6-B5.pep
LITYSTSPQSGSHLGKRKVITYIKSQLMKSVISTKSTRFEVANGICNGRGNNADHKMLRVELFSTQILTFPLRTK

SEQ ID NO: 107964 - protein, 149 aa, Gossypium hirsutum
  Clone ID: LIB3825-015-Q1-K6-C12.pep
MDSDFWTSRLAAAKRQYNLQHRHQTSHLDRLTIDDFEVDDEVRPDFPCPYCYEDFDIASLCSHLEDDHPCESKVTICPVCYVKVSRDMLSHITLQHGNLFKLQRRCRLRRVAIPNSQALSLLGRDLREAHLQVLLGGGAYRSSGVNVSN

SEQ ID NO: 107965 - protein, 92 aa, Gossypium hirsutum
  Clone ID: LIB3825-015-Q1-K6-C7.pep
SKLTNLATIFFCFSFKLLYVCVSLLWLQFLVMQHVARLEHSLTKLMNLQTCGSTESHPVSFPMKPCMDFLFEYMQTIQVSTQEQVVLIYACI

SEQ ID NO: 107966 - protein, 200 aa, Gossypium hirsutum
  unsure (1)..(200): unsure at all Xaa locations
  Clone ID: LIB3825-015-Q1-K6-C8.pep
XIAXEIEGEDNQXLHLAEERGVDLHDDFDIDEEMRYSSVYRGRGVDDSGYEEDEDILLDSHNIETFGDSYDSLSRSADGVRMPSSSSLVDDAPSSQAAISEDLNCSRPNDQARQLASELPSKSFSVSASESRIRDKLLGEHGGSSDGNEFPEKQSPSEDLQLSKSVDSGSLLNDKIDGSDKARRSANPTNAPSNASKVSE

SEQ ID NO: 107967 - protein, 146 aa, Gossypium hirsutum
  unsure (1)..(146): unsure at all Xaa locations
  Clone ID: LIB3825-015-Q1-K6-E9.pep
XVKKHPQLLHYSIDDGLLPRINFLRSIGMRNSDILKVLTSLTQVLSLSLEDNLKPKYLYLINELNNEVHSLTKYPMYLSLSLDQRIRPRHRFLVSLKKAPKGPFPLGSLVPSDECFCQQWAGTSLDKYLAFRQRLLLKEFAKKYEK

SEQ ID NO: 107968 - protein, 152 aa, Gossypium hirsutum
  Clone ID: LIB3825-015-Q1-K6-F11.pep
MTNGIMQEQNLEEQIRKQMGCMAGFLQIFDRHQILTGKRLYSTKRLPPSPASETTSEEEKAVESPVSSRELEKRPQGRLALSPERSKRSPVISELRSPAPEPSTPTGSQNKISLPLPIFESKEGSGRSPWKLSKDAPRLSLDSRAVVDATGS

SEQ ID NO: 107969 - protein, 169 aa, Gossypium hirsutum
  Clone ID: LIB3825-015-Q1-K6-F9.pep
MMNTVFKRTTSLASRRILAASAQTLLHHFHSTATVATAARDAETFFINRFKPFPGFPASAAKGFHAKSGPLYFRASTGVQAEYAVEDYVDEKGSEALEISNLGIAPEIVSALKNRGITKLFPIQRAVLEPAMQGRDMIGRAKTGTGKTLAFGIPIMDKIIRYNAKHGPW

SEQ ID NO: 107970 - protein, 82 aa, Gossypium hirsutum
  Clone ID: LIB3825-015-Q1-K6-G4.pep
PQTEQEREKKKTNNIQHNENMPHEHLVDTTKLTTPMAMAKDLRSTVKDILTTCGYAGRTGERKDPKHQQHQIDERDLNTPLH

SEQ ID NO: 107971 - protein, 95 aa, Gossypium hirsutum
  Clone ID: LIB3825-015-Q1-K6-G6.pep
LLNSPPKRFIFSTHTITCFLFLTNCNTDVCTQILYLYLLTTLVSPCKLYFVHKIPNAYSDFRGYFAVVFVRFQMTNSVLYFSAHLYFFPLVFGFT

SEQ ID NO: 107972 - protein, 170 aa, Gossypium hirsutum
  Clone ID: LIB3825-015-Q1-K6-H2.pep
MDSDEEDYVFFGTPIEREEEITSRRKKAAAEASGNLRSLPPWKQEVRDEEGRRRFHGAFTGGFSAGYFNTVGTKEGWAPQSFTSSRKSRAEVKQQSIFNFLDEDEKAELEGTLGTSSQFDTFGFTAAEFARKQADKEQKQRPSAIPGPVPDELVLPASESIGVKLLLKMG

SEQ ID NO: 107973 - protein, 35 aa, Gossypium hirsutum
  unsure (1)..(35): unsure at all Xaa locations
  Clone ID: LIB3825-016-Q1-K6-B3.pep
MGVFTYDYESTSPVAPVRLFKAFTIEAAKVWPTAX

SEQ ID NO: 107974 - protein, 53 aa, Gossypium hirsutum
  Clone ID: LIB3825-016-Q1-K6-B4.pep
VAIQYIYNLKLKYATLFTYLTLKPFINQGGAGIQHRFHLLPSPLSKSFAKIIT

SEQ ID NO: 107975 - protein, 77 aa, Gossypium hirsutum
  unsure (1)..(77): unsure at all Xaa locations
  Clone ID: LIB3825-016-Q1-K6-B6.pep
ICMANGYRYVSNTNRVNLLKSFHVFRSLESHTNVPICSRHKYFKKNEEWEQYKIIMITNQYLTFIRXWNNIGHLYPG

SEQ ID NO: 107976 - protein, 56 aa, Gossypium hirsutum
  Clone ID: LIB3825-016-Q1-K6-B8.pep
LHISPICKALKTYMVHLPAPFIGGRLSGGLDLSHGYSYHRRLDFGAERTGPLRLRL

SEQ ID NO: 107977 - protein, 75 aa, Gossypium hirsutum
  Clone ID: LIB3825-016-Q1-K6-C1.pep
KLPGFLLALGMQFTVESPRWLCRVGDMKDAQTIIRNLWGDSEVDKAIEEFQSIISNDGTDVNSRWMQLLEEPHSR

SEQ ID NO: 107978 - protein, 87 aa, Gossypium hirsutum
  Clone ID: LIB3825-016-Q1-K6-C6.pep
KKKDNECTLDWKAKGTKIQKKRQRKKNHKNKKRNIKRKNLSGGRQLKRLGKTQGMPIVRYSPYISRPKGGEAAKGPPRKGGNNRGAA

SEQ ID NO: 107979 - protein, 189 aa, Gossypium hirsutum
  unsure (1)..(189): unsure at all Xaa locations
  Clone ID: LIB3825-016-Q1-K6-D8.pep
APLVSGLANELVKVGIPTFGPSAEAAALEGSKNXFMKSICDKYGIPTAKYQTFSDASAAKQYIKEQGAPIVIKADGLAAGKGVIVAMTLEEAYEAVDSMLVEGIFGSAGCRVIVEEFLEGEEASFFALVDGENAIPLESAQDHKRVGDGDTGPNTGGMGAYSPAPVLTEELQSLVMESIILPTMKGMSA

SEQ ID NO: 107980 - protein, 55 aa, Gossypium hirsutum
  unsure (1)..(55): unsure at all Xaa locations
  Clone ID: LIB3825-016-Q1-K6-E12.pep
LIATGAVAYTLPNRSFDIHMCRPYIMSINGMNTLQWAPRXERRVGHXVTTCSWVH

SEQ ID NO: 107981 - protein, 69 aa, Gossypium hirsutum
  Clone ID: LIB3825-016-Q1-K6-E4.pep
WNTHKLLVFGGEWHKPSLPIQDILPLNFLNFFGSCNFTLHKLSLCFLFFFGFIFYIFIKKYFNFNFLIF

SEQ ID NO: 107982 - protein, 118 aa, Gossypium hirsutum
  Clone ID: LIB3825-016-Q1-K6-F5.pep
NDKMKKRKHKEEQKRQEVDAREQGMNRCYRKRRKRRKTREIPGAGQTKEKDSQTCGSVMVIMHVCMHVCSMKLLAKEVNIINSRTRLDLKKNNLLTHWRLKLVCLRCCGWMNHQSIHA

SEQ ID NO: 107983 - protein, 71 aa, Gossypium hirsutum
  Clone ID: LIB3825-016-Q1-K6-G6.pep
FYGHGLCIRTLTGHPGRQLNEHEHPINTCDTRISMSRRHETLLHTDRDMGQDPGVSQLDMRLDSHTDTDTC

SEQ ID NO: 107984 - protein, 27 aa, Gossypium hirsutum
  Clone ID: LIB3825-016-Q1-K6-G9.pep
VYGDTNEQSKVAAMEWFMMLAYFFIDS

SEQ ID NO: 107985 - protein, 99 aa, Gossypium hirsutum
  Clone ID: LIB3825-017-Q1-K6-A11.pep
SATSLCCRPLCLRRTLHSRPPHYSLLIPLAITISNKLNKQTIIAFHLKPFVPCEPHPLVQGFGLYLEDGSGTDIHREAYNPIPATIANDTTDACLIPTT

SEQ ID NO: 107986 - protein, 68 aa, Gossypium hirsutum
  unsure (1)..(68): unsure at all Xaa locations
  Clone ID: LIB3825-017-Q1-K6-A12.pep
MEYWGIXEHKSGQPIKAYPGANYMIHVSQAXLGESKNKAKSDPLYVNVDGKKLILGTLSHHDGPQLYL

SEQ ID NO: 107987 - protein, 123 aa, Gossypium hirsutum
  unsure (1)..(123): unsure at all Xaa locations
  Clone ID: LIB3825-017-Q1-K6-A3.pep
LRQLRCQYFNPVQVAERQGKXLAKLLNKICKXGGGHANGAKDMNLGDPFEYKHLGSMATVGRFKALVDLRQSKEAKGISLAGFVSWFIWRSAYLTRVVSRRNRFYVAINWLTTFVFGRDISRI

SEQ ID NO: 107988 - protein, 56 aa, Gossypium hirsutum
  Clone ID: LIB3825-017-Q1-K6-B11.pep
IRTCFLCGIRSVNHRQFFLVILIGSCTTEREGIAVACFARKSRLSLFRKKLYQNLP

SEQ ID NO: 107989 - protein, 89 aa, Gossypium hirsutum
  Clone ID: LIB3825-017-Q1-K6-C6.pep
YSLLSVGTHFSQLYSGTALEQPGPVSMTRGLITCNASPEGDNVARRLRFWSIELGTQEPPNEDATRDEIIGSCSKTLSHLGGRWKTKLE

SEQ ID NO: 107990 - protein, 54 aa, Gossypium hirsutum
  Clone ID: LIB3825-017-Q1-K6-D7.pep
LLRPPLAPSSALSPPCPFALDPLPPAFLGLFFLVFFFGFVFKLQHLVAYVIATQ

SEQ ID NO: 107991 - protein, 110 aa, Gossypium hirsutum
  Clone ID: LIB3825-017-Q1-K6-E6.pep
ASSSPAHNAPNKGRVQGANQGAPRLGRGFGGGLVGASPAVERGMKGEWIAMGFARVFASVLRCQPRVPVYGSLGCTYSISIFVALFRVIYVWIFFWRPPFFFFFFFFFFF

SEQ ID NO: 107992 - protein, 204 aa, Gossypium hirsutum
  Clone ID: LIB3825-017-Q1-K6-F1.pep
AIASQLVNVWLEVFRKAKVSSKRKSLKDPASGKPPLHSQHGAFESKESLQDPFSAGKQYPLNIKENGKSLDIEVEAVDQGMSEEEQAAFAAEAAARAAAKAAAEALASTEANCNKLLQLPKIPSFHKFARREQYAQMDEGKWPGSVFGRQDCISEIDSRNCRVRDWSVDFSAACVNLDNSGMSVDNLSQRSHLKLREHSGESLA

SEQ ID NO: 107993 - protein, 140 aa, Gossypium hirsutum
  Clone ID: LIB3825-017-Q1-K6-G5.pep
MPSFDICCLETEPGLNSNVVSINVGGRIFQTTKQTLTQADPKSLLYRLAETGSDRFVDRDPGQFSLLLSLLRSGTLPSKVKDFDLRDLIEESRFYGVESLLTSSLSDPSHFDAFALRKSSELPLNGRDTPSAIASTPFGS

SEQ ID NO: 107994 - protein, 64 aa, Gossypium hirsutum
  Clone ID: LIB3825-017-Q1-K6-G6.pep
HNLCMGGRSVKTLPGYSAQMNPCLGKSTIDKGSHGSHNISDIISPHVCGACHHPLVRRTRAQHQ

SEQ ID NO: 107995 - protein, 99 aa, Gossypium hirsutum
  Clone ID: LIB3825-017-Q1-K6-G9.pep
TILGTICMCHVLVTIGIIQDESCDKLFCTEGKADDVHLAVDPWTTESLGSGLPSTYTIEEAERSIKYPNHAALEPRVITVKKRDIKDKDACDNVCLRHA

SEQ ID NO: 107996 - protein, 193 aa, Gossypium hirsutum
  unsure (1)..(193): unsure at all Xaa locations
  Clone ID: LIB3825-017-Q1-K6-H5.pep
SLDLLCPKNEEGDKLTKAILAFALPCLLLLIQPVQGASKTPTLQYGTIGRRNNAPWTHPPPVNDPTRGCNAENGCRQFTLSLENRRGTLVEAVGNVTMAEGTLNHREPGTEAIAAGIATWFLNKTESNSNTYGRLRISQDPISSAAVSSQMLQLQAVSRGIARMGLQVYTSMSTEDNSNTPXADGKIEIKVNS

SEQ ID NO: 107997 - protein, 198 aa, Gossypium hirsutum
  unsure (1)..(198): unsure at all Xaa locations
  Clone ID: LIB3825-017-Q1-K6-H8.pep
SSLGVMNGHKLWQAHKAXGSKLLELNKXSEEDICKHRDHVAKMRRLLFRHEMKQKRIKKXKSKTYHRLKNKDKLKVESAEMLMDPEAAKEQARKQEFKRAEERLTLKHKNKSKRAMRILERGLNAQDEGTRAALAEQLHQHAVLTRKINTVKDSSSSSDSSSDDDDEGSNEDRASELLEKAKDKTLKVLEDDEELPNS

SEQ ID NO: 107998 - protein, 186 aa, Gossypium hirsutum
  Clone ID: LIB3825-018-Q1-K6-A8.pep
MAASAIVAEPKPTAEPPFPATRSDLGQYPMVDPTKAEEDDLYCRLKSFQRQLEFIDIQEEYVKDEQKNLKRELLRAQEEVKRIQSVPLVIGQFMEMVDQNNGIVGSTTGSNYYVRILSTINRELLKPSASVALHRHSNALVDVLPPEADSSISLLSQSEKPDVTYNDIGGCDIQKQEIREAVELPL

SEQ ID NO: 107999 - protein, 157 aa, Gossypium hirsutum
  unsure (1)..(157): unsure at all Xaa locations
  Clone ID: LIB3825-018-Q1-K6-B2.pep
GFNNRSVLHYVLGVLGNATALHLFLSTTITFNRIIRSKSTDNYXAIPYGMTLLNCLLSAWYGLAYVSKNNILVXKSHATGALIESIYVXIFIIYAPKKEKAKIYGLFTYVITVLTGAGLICLFSIHGNGRKLXCGLSTTIYSMMMDTSALSIMMLVI

SEQ ID NO: 108000 - protein, 203 aa, Gossypium hirsutum
  Clone ID: LIB3825-018-Q1-K6-B4.pep
GSKTGPAEDRKRKGREPDDAECHSEDAEFESPETKKQSRGSSSTKRSRAAEVHNLSERRRRDRINEKMRALQELIPRCNKSDKASMLDEAIEYLKSLQLQVQMMSMGCGMLPMMFPQHYMPTMGMGIGMGMVMDMGLSRPMMPFHNVMAGSGLPTPAASAHLDPRFPMPAFHMSPQVPVPDPSRIQPNNQSDAMLNPLGMQNP

SEQ ID NO: 108001 - protein, 49 aa, Gossypium hirsutum
  Clone ID: LIB3825-018-Q1-K6-E1.pep
LVTLKILFFLLKLPGFIKFGSKQKSSFLIFFLNANHKIWVISSLLNTGF

SEQ ID NO: 108002 - protein, 172 aa, Gossypium hirsutum
  unsure (1)..(172): unsure at all Xaa locations
  Clone ID: LIB3825-018-Q1-K6-E10.pep
XKKKKKKKKKKKKKKKKKKKKKKKKKKKKKKKKKKKKKKKKKKRGRPVLKRTQLYFPGLATYYFFFGAPKFNFTGRGLTTWGRENPWGSQIKSLCKKSPFPQWGKYQKGPPQSPFQKFAHPNWQRDPPFYRPFNPGGGGGSPQGNRYICQPLSPRSFGFFPFLFPHFRRFSP

SEQ ID NO: 108003 - protein, 171 aa, Gossypium hirsutum
  Clone ID: LIB3825-018-Q1-K6-E7.pep
MDKMSIYEEDKGRKDNLPPPTHPVASELYPTGSHNQFSPGPSPPLDTGTPAETMDTKPEEHPRNVAADEPVNQSSYTEKISSATSVIADKAVSAKNIVASKLGYGEKDESRTTTNGSNPTTQGSAIDYGKKMAATMADKLSPVYEKVAGAGSTMVSKLHGPGSGTAIEVYP

SEQ ID NO: 108004 - protein, 202 aa, Gossypium hirsutum
  unsure (1)..(202): unsure at all Xaa locations
  Clone ID: LIB3825-018-Q1-K6-F4.pep
VAVKGDDTNVLATITFDLKFSYVLAGWEGSAHDSCILSDALSRPRGLRIPEGKYYLADAGYGIRNGFIIPYRGVRYHLKEFSARGLKXANELFNLRHTSLRITIERVFGILKKRFRVLDAEPFXNFQTQVDIVLACCIIHNHIMGVDPSDLLNQGLYEEPESDLIISTFTEREEREEAREWSAKRDEIAQTMWTDYMARNIK

SEQ ID NO: 108005 - protein, 92 aa, Gossypium hirsutum
  unsure (1)..(92): unsure at all Xaa locations
  Clone ID: LIB3825-018-Q1-K6-G3.pep
AKQIILYNNQIWYYSTNLCICQNQQSNCQLLSTLSAVFFLVLRHRSCNYSSQGKLGGQQQWLQRFRQGWRLVLSANSISVNHPFXLSXPSDE

SEQ ID NO: 108006 - protein, 52 aa, Gossypium hirsutum
  unsure (1)..(52): unsure at all Xaa locations
  Clone ID: LIB3825-018-Q1-K6-G7.pep
GXXNYXATTTNYIGNILHGISWIKCQKKHTQHDFVIMEKIRATYNPMNRGVF

SEQ ID NO: 108007 - protein, 126 aa, Gossypium hirsutum
  unsure (1)..(126): unsure at all Xaa locations
  Clone ID: LIB3825-018-Q1-K6-H11.pep
IIKDARXLYVPYFHLLRKSALTHSQKNIVNLIVIYLNEEKKRKKKNEKTKKKKKKRKSKKEKKKKERKKRSERRNKRGGGTKGCSTCIRGMARITFFSGAPKTSLWGRALKTLGRGNPWGAKGKGV

SEQ ID NO: 108008 - protein, 182 aa, Gossypium hirsutum
  Clone ID: LIB3825-019-Q1-K6-A4.pep
MFPAATMSSSTSLSEEANVSSGTRVQDFGGLNPIVTHQQLPQKIKKKRSLPGNPDPDAEVIALSPKTLLATNRFICEICNKGFQRDQNLQLHRRGHNLPWKLKQRNSKEVKKKAYVCPEPTCVHHHPSRALGDLTGIKKHYCRKHGEKKWKCEKCSKIYAVQSDWKAHSKTCGTREYRCDCG

SEQ ID NO: 108009 - protein, 73 aa, Gossypium hirsutum
  Clone ID: LIB3825-019-Q1-K6-B10.pep
SGSLQNERPISLPVQPSINAHSVLGQILFDACVPKNIEGWDIRYSGSSKGQPFASARRRSPPLGIKCNRRSRL

SEQ ID NO: 108010 - protein, 206 aa, Gossypium hirsutum
  unsure (1)..(206): unsure at all Xaa locations
  Clone ID: LIB3825-019-Q1-K6-B2.pep
GSVGYVPCAXCEHCGRHQDPKFQPDLSSTYQPVKCNLDCNCDSDRVQCIYERQYAEMSSSSGVLGEDIFSFGNQSELVPQRAVFGCENEETGDLYSQHADGIMGLGRGDLSVVDQFVEKGVISDSFSLCYGGMDIGGGAMVLGGISVPSDMVFSYADPVRSFGMATXPYYNIDLKEIHVAGKQLSLNPRVFDGKYGTVLDSGTTYA

SEQ ID NO: 108011 - protein, 161 aa, Gossypium hirsutum
  Clone ID: LIB3825-019-Q1-K6-B7.pep
MSSSSASSRKALSKIACNRLQKELVEWQVNPPSGFKHKVTDNLQRWVIEVNGAAGTLYTNETYQLQVDFPEHYPMEAPQVIFLQPAPLHPHIYSNGHICLDILYDSWSPAMTVSSICISILSMLSSATVKQCPEDNDRYVKNCRNGRSPKQTRWWFHDDKV

SEQ ID NO: 108012 - protein, 70 aa, Gossypium hirsutum
  Clone ID: LIB3825-019-Q1-K6-C11.pep
NCNPHTKNVDLFHVRFTHKLVICLSINFPVVSSCRCPFFFLVPKGLAILIYNFGEEKGKKERDSSCYYQA

SEQ ID NO: 108013 - protein, 207 aa, Gossypium hirsutum
  unsure (1)..(207): unsure at all Xaa locations
  Clone ID: LIB3825-019-Q1-K6-D8.pep
KPQQRTIENSVNLPPEQDDIPLFYSDLMPLLVNDEPSVGEDAFVWLGSLVPLVADIVNGRFTFETLTAPTGNRLFFPAYDKFLKEIDKXALKLCLNDCMKHLQKQATPKGVELADDEYILHVEGTATTRRVVRHIEGTSWPGRLTLTNHALYFEASGVLTYDDALKIDLSRDIEHGVKPAATGPWGAPLFDKAIIYESPEFQEGVLL

SEQ ID NO: 108014 - protein, 201 aa, Gossypium hirsutum
  Clone ID: LIB3825-019-Q1-K6-G6.pep
ASFETHHDWHSSSLQSLTDSPPESLLYSYTEAFNGFAASLNEEQAESLSKSESILGVYEDTVYTLHTTRSPQFLGLDADLGLWATGGSTQASEDVIIGVLDTGVWPESKSFDDSGMPEIPSKWRGECESGPDFGPKFCNKKLIGARSFSKGYRMAIGGGINKKPKEIDSPRDKDGHGTHTASTAAGSHVANASLLGYASGI

SEQ ID NO: 108015 - protein, 201 aa, Gossypium hirsutum
  Clone ID: LIB3825-020-Q1-K6-A1.pep
VLHFSSKTKLAAEYREPLLKKKHYKNCPGCKVDEMKELEQGLPIRPLLSIWIIVLCTALPISSLFPFLYFMIRDFHIAEREEDIGSYAGYVGSAFMLGRALTSVSWGIFADRYGRKPVIIMGTTSVVIFNTLFGLSVNFWMAVITRFLLGSLNGLLGPIKAYAVEIFRDEYQALGLSTVSTAWGIGLIIGPALGGFLAQPA

SEQ ID NO: 108016 - protein, 49 aa, Gossypium hirsutum
  Clone ID: LIB3825-020-Q1-K6-A8.pep
YCAVICHFPQPRSYVSLVIRSLSHLFYPADGSRVPFSFISEVHKAFSAY

SEQ ID NO: 108017 - protein, 213 aa, Gossypium hirsutum
  unsure (1)..(213): unsure at all Xaa locations
  Clone ID: LIB3825-020-Q1-K6-B12.pep
FPSSFHLLHPSKSSQTLKSVSSNSISRQPKSPTIKLPSHNPLSILQNSPILQTVAKTHVSFTLFNLFTSFPCLAVADTVISSPEPGKVNLEAVLVSVDEFFNKNPFFVAGCTFIWLVVVPLTKQYLSKCKFIPAIDAFRKLRDDPSAQLLDIRENKTLASLASPNLSFLNKDTVQLQFTAEXEDGFVKEVLEKFPNPANTVXCVLDNFDGNSL

SEQ ID NO: 108018 - protein, 69 aa, Gossypium hirsutum
  Clone ID: LIB3825-020-Q1-K6-B3.pep
RNLNSHGRGVTTQRLDWQSRDLTQPTCIASHFRQLRWYKREQDRSDCPSQQQPKRKVERDVHWSITLSA

SEQ ID NO: 108019 - protein, 113 aa, Gossypium hirsutum
  Clone ID: LIB3825-020-Q1-K6-B5.pep
MVLQKRLDYGFNGYQVPTIPRATRSARKRVPFRKRVEGNRISAFDLLATVAGTLLLDKESSPASNNAWNAEDQSAVEKNNVKEERQDGDQSLKLETCNVSELVPQTNDPNYSS

SEQ ID NO: 108020 - protein, 133 aa, Gossypium hirsutum
  unsure (1)..(133): unsure at all Xaa locations
  Clone ID: LIB3825-020-Q1-K6-B6.pep
AFVRYXTLLADDGKSPLTEHVDPGYIRPLPPNEKGNAQSGFEVNDVVDARYRDGWWTGVVRKVLSKSKYRVYFDNPPDVIEFDRKDLRVHWDWIDGNWVRPEKQVWGEVFILFNFSVFFIWKFGGGFILELRA

SEQ ID NO: 108021 - protein, 213 aa, Gossypium hirsutum
  unsure (1)..(213): unsure at all Xaa locations
  Clone ID: LIB3825-020-Q1-K6-B7.pep
VAGGSVLYLQDQYINHIINETGATVMLRGCGSGNLESLQGXEAQPPLHLFLSSNNPKSLDDAKRLAENLLDTISVEFGASRISSSKVYGAVPPPQQLLTGVQCSATGRNVNASSAAGLASMPVATPAPPVAVPVATTGYSQAMAVGMPNSGPPQANSVGYPQPLVTRGTSYIGYGGIYPQATPLQQVALALKQSSPISSTGCTCTSVASAVVP

SEQ ID NO: 108022 - protein, 113 aa, Gossypium hirsutum
  Clone ID: LIB3825-020-Q1-K6-B9.pep
VSPFNFFCVFVFQKCIDCARKKITMSRGFGFIVDTEIRDIQKIEIEIEYKFSFCCCFLLYVFAVVVCSFAGTDAVLAYGGVAWRRGLCAGRTVLQALAWAEALEGLGRLRHKQ

SEQ ID NO: 108023 - protein, 94 aa, Gossypium hirsutum
  unsure (1)..(94): unsure at all Xaa locations
  Clone ID: LIB3825-020-Q1-K6-D3.pep
KLINWKNPAVTKINRLKKNPLFDSCSKKKKARTDDLSKHFLNLKIKWDAPFTHTXTAPFVGVTPTVTFTFSIPLLPSLFGFFPPFITKWAAFPR

SEQ ID NO: 108024 - protein, 36 aa, Gossypium hirsutum
  Clone ID: LIB3825-020-Q1-K6-G2.pep
CKAIYDTTPAVNILDAIDDSNIRDRRHRTTRLYLYV

SEQ ID NO: 108025 - protein, 216 aa, Gossypium hirsutum
  unsure (1)..(216): unsure at all Xaa locations
  Clone ID: LIB3825-020-Q1-K6-H11.pep
KAALLLLLXKASEAIVYFSSIGCSPLIAMNPAEFLLDLANGNLTDISVPSELEDKVQMENSETETGNGKPPPAVVHEYLVEAYESRVADTEKKKLMAPLPLDDELKSKVSSSKRQWGASWWQQYCILFCRGIKERKHDYFSWLRITQVLSTAIILGLLWWQSDSKTIRGRQDQAGLLFFIAVFWGFFPVFTAIFTFPQERAMLGKERAADMYRLSA

SEQ ID NO: 108026 - protein, 213 aa, Gossypium hirsutum
  unsure (1)..(213): unsure at all Xaa locations
  Clone ID: LIB3825-020-Q1-K6-H3.pep
VAGTGEPKIIASRRRILELRSFKIGADAADQPPLENDRKRHEXLHRNLFLPVSCRNCDYAVQNSKDTGLTTKVYFLMATVKLMIEKPMEDEKEPPKFGMASVCGTRRDMEDAXVAIHPSFCKQSSQVQISSDIHFFAVLDGHGCTHVAMKCIDRFHEIVKEEVQACGVFEGXEWKNTMEKSFERMDEQVREWTVNAKESSTCRCQLRTPQCDA

SEQ ID NO: 108027 - protein, 203 aa, Gossypium hirsutum
  unsure (1)..(203): unsure at all Xaa locations
  Clone ID: LIB3825-021-Q1-K6-A2.pep
HAVRSDAIVLGYQLQRVPGRDVSIPEWYTXAENELGLSTGSPTSEMSESNAITEFCTDDFEILHGDLQGLSDTRSFLNSLVELNNVSDSEKNNEKRQMRERKAAAGLFNWEVDIFVTRAPGRLDVMGGIADYSGSLVLQMPIREACHVAVQRNHPSKHRLWKHALARQNAKGQGPMPVLQIVSYGSELSNRGPTFDMDLSDFM

SEQ ID NO: 108028 - protein, 195 aa, Gossypium hirsutum
  Clone ID: LIB3825-021-Q1-K6-A9.pep
CEEVSRTQLDSEESTKPNVKGKTPPEKPPINKGKVKTLKKPNTGVLPMKKGKGSKLQNGTEDASESGLGNPDLGPFLLKQARDLVSAGDNPQKALELALRAAKSYELCSSGKPNLELVMCLHVTAAIYCSLGQYNEAIPLLEQSIEIPVIEEGQEHALAKFAGHMQLGDTYAMLGQLENSITCYSTGFEVQQRVL

SEQ ID NO: 108029 - protein, 80 aa, Gossypium hirsutum
  Clone ID: LIB3825-021-Q1-K6-B4.pep
MEGSQGSCNGPPPFLTKTYEMVDDPVTDSLVSWSETGYSFVVWNPPDFSRDLLPRYFKHNNFSSFVRQLNTYGFRKIDPD

SEQ ID NO: 108030 - protein, 173 aa, Gossypium hirsutum
  Clone ID: LIB3825-021-Q1-K6-B6.pep
FIVNYQELAGLSVATSINEVYKPSEYNRVLAICGPGNNGGDGLVAARHLYHFGYKPFVCYPKRTQKPLYSGLVTQLESLSIPFLSVDELPMDLSKDFDILVDAMFGFSFHGAPRPPFDDLIKKLINLHYYEQAQRKPPVIVSVDIPSGWHVEEGDVGGDGIKPDMLVSLTAPK

SEQ ID NO: 108031 - protein, 75 aa, Gossypium hirsutum
  Clone ID: LIB3825-021-Q1-K6-D3.pep
TSSAVGVALTRTVTVALAIALAPAPFSLFPFFIATCSACPALALKLRLRLRFRAIALLHLNQQELDYGERSRTGP

SEQ ID NO: 108032 - protein, 78 aa, Gossypium hirsutum
  Clone ID: LIB3825-021-Q1-K6-D9.pep
TAIGSSNVPVTPEEPIEVQNETDGTRRGRGRTVLSDLYDLDPVERVQVSSNSFGQPVGSEARLLARYMGILARNAKYV

SEQ ID NO: 108033 - protein, 178 aa, Gossypium hirsutum
  Clone ID: LIB3825-021-Q1-K6-E1.pep
PQEKPPEGGPKGGKKSKRRGGKGLGKGTGPLGGTPRAGGVKGAGQRGPPGEVPFALVFKGHLEGANGGGPLGGKGGGEKGVFPGGTQGGSPTVFFKTGAKKKGFRGPKIRGQERGMPGGGSLGSLKMGPPLFFFPFFFFFFFFFFFFFFFFFFFFFFFFFFFFFFFFFFFFFFFGRAW

SEQ ID NO: 108034 - protein, 202 aa, Gossypium hirsutum
  Clone ID: LIB3825-021-Q1-K6-F1.pep
KVGMLLLSVISAAVFVWVVYVGKGEYQDSDNVRKVNDSLPINNSGFPLIYEVQSVKIDNWTSLVASDSVEGTEVRKMPPPPPSYFLGYTLPPGHPCYTFSLPPPPADKKRTGPRPCPVCYLPVEEAIALMPKVPSFSPILKNLTYIYEENLNKDKEFGGSDFGGYPTLKQRDDSYDIRELMNVRCGFVKGSKPGRGSGFDIN

SEQ ID NO: 108035 - protein, 73 aa, Gossypium hirsutum
  Clone ID: LIB3825-021-Q1-K6-F11.pep
ADYILSHNIIHNQTQIQKLTVKKNSFAARDYLTANEFQTAIANTIVNKNIKLKLQQNQKSTHFSKTLRLITSM

SEQ ID NO: 108036 - protein, 206 aa, Gossypium hirsutum
  unsure (1)..(206): unsure at all Xaa locations
  Clone ID: LIB3825-021-Q1-K6-F9.pep
DAWVRSNRHQHVQNLDPYYHEERSSIQSEQEKARKEKELAKKHFKPRMIVHPRFQNITADEAVEYLCDKEPGESIVRPSSRGPSYLTLTLKVYDGVYAHKEIVEGGKEHKDITSLLRIGKTLKIGEDTFEDLDEVMDRYVDPLVSHLKAMLSYRKFRKGTKSEVDKLLTIERQEYPMRIVYXGXGISHEHXSTFISTYIRSTNPLM

SEQ ID NO: 108037 - protein, 206 aa, Gossypium hirsutum
  Clone ID: LIB3825-021-Q1-K6-G4.pep
SSDGDLIVTGSADKNLRIWGLDFGDCHKSIFAHADSVMAVQFVRNTHYIFSVGKDRLVKYWDAGKFELLLTLEGHHADVWCLAVSNRGDFVVTGSHDRSIRRWDRTEEPFFIEEEKEKRLEEIFEADIDNTFEDKHIPKEELPEEGAVALAGKRTLETLTATDSIIDALDVAEVELKRIAEHEDEKARGKVAEFQPNMIMLGLSPS

SEQ ID NO: 108038 - protein, 103 aa, Gossypium hirsutum
  unsure (1)..(103): unsure at all Xaa locations
  Clone ID: LIB3825-021-Q1-K6-H1.pep
EAWAXAWAVSLMNLKMELQGVSSINKLNSEDTESKEQSLPDVEEQSAEDPSRLMMSRKKRGLYKAIEMGKQQKKERVEKLKERKRNIEAAQKSEKKHKKAQVS

SEQ ID NO: 108039 - protein, 182 aa, Gossypium hirsutum
  unsure (1)..(182): unsure at all Xaa locations
  Clone ID: LIB3825-021-Q1-K6-H6.pep
MAIQAQLYSDNIGFPICGSLDLIDNGCGLVGAAAGFNQQISSQLQQLQQFQHLQNQHQRDQTFSFGSTNNNRESIMFEKQRYEIDQFIKSQNERLRLLLQEQRKQQYEVLVKKIESKASFLLRQKDEEIVKARNKTMELQNMLKKLEMENQAWQRVAQENEAMXXSXNNRLEQVREEQASLS

SEQ ID NO: 108040 - protein, 187 aa, Gossypium hirsutum
  Clone ID: LIB3825-022-Q1-K6-A3.pep
MNPTMTRLAEEEHPNKAFGWAARDSSGVLSPFKFSRRATGEKDVAFKVLYYGICHSDLHMAKNEWGISVYPLVPGHEIVGEVTEVGSKVQKFKVGDRVGVGCVVGSCHSCDTCSNNLENYCPKSILTYGAEYHDGSITYGGYSDTMVADEHFIVRIPDNLPLDAAAPLLCSGITVYSPLRYYGLDKP

SEQ ID NO: 108041 - protein, 192 aa, Gossypium hirsutum
  Clone ID: LIB3825-022-Q1-K6-A6.pep
MAAQSLARTLILSSTLTPNINPPSFNCLKSMDPTVSTTTTLAPPQRRTMSAFEARISLVFALASQASSVSQRLLMDLASETAKYVFPKRFESQNLEEALMAVPDLETVRFKVLNRTDKYEIREVEPYFIAETTMPGKTGFDFNGSSESFNVLAEYLFGKNTSKEKMEMTTPVITSRTRSDGERMEMTTPVIT

SEQ ID NO: 108042 - protein, 215 aa, Gossypium hirsutum
  Clone ID: LIB3825-022-Q1-K6-B10.pep
SLFLNPSSCIRKLFFSLNHKDQVSETLCKNPWKQREGRETTGLLDKILPPRLEDAGLEDCALPPDSIHEAFLKAASAIKSRAANIFHSDDEDEVERGCLDDPFLDKSKCSSDVLVSPPCPDMSDAVVVGGGSPDPTSDAVEGCVKEKGCGKEVEEGKDMVIVGGDGGEAADGKGCLDDELKGMKIKGEEKKKKNQNQEDDDEREKEKPILVEGFV

SEQ ID NO: 108043 - protein, 107 aa, Gossypium hirsutum
  Clone ID: LIB3825-022-Q1-K6-C2.pep
MRQGEGEAISTVEQAIDLISVVKEIHGLNSQELNKLLRDSENFTILFVTEQGLDVKIDVEKLAGFLPLHLIAVLVSSDRDEALLRYLLCGIRILHSLCELAPRHTKL

SEQ ID NO: 108044 - protein, 217 aa, Gossypium hirsutum
  unsure (1)..(217): unsure at all Xaa locations
  Clone ID: LIB3825-022-Q1-K6-D10.pep
GEPXSGLVLMLIALGLIILVNIHDLLAHLAGIDYRFTLMGFDPQLALVEFSVPLVQILGSLLLFLGILFLFIQAEKGYGFFKLERHALGMLIAGPVLWVAGSIHNSCQIYERADAHVQILQQSVHVPFLIGSVLFMVGAILNGREQTGVIRHGLQLLGKRWVWLGICGSVMFXIGGLTNVVKVFKMQQMNGIRLEKLRGGAQDGLVEGREGQVPLII

SEQ ID NO: 108045 - protein, 114 aa, Gossypium hirsutum
  Clone ID: LIB3825-022-Q1-K6-D3.pep
MQSKTSSIGAPKFKTGAGGKKRGEGKNPGVTQINRLAKNPLLKRGGKNKKAPTGPPSQKLGTQNGKGAPPRSGPKNPGGGGVTRKGPETPANPLAPGPFPSFPSFPPPDAGFPR

SEQ ID NO: 108046 - protein, 128 aa, Gossypium hirsutum
  Clone ID: LIB3825-022-Q1-K6-E1.pep
STTNSSISSSWGASPCQHHRSFHHNLSVYHRFHHNHPHPHLHHHQARHCHHHQHHPYLFLHTEHHYFGYDFPPLPNLHHFLLPPHLHHQQHIDSRSASHTDYYLQKAFDDSKNGNQAGDQHHMDLKGV

SEQ ID NO: 108047 - protein, 45 aa, Gossypium hirsutum
  Clone ID: LIB3825-022-Q1-K6-E3.pep
FYLRHSMLSNILSASNLVVSSYITHFGYAVLSHRLFFLIPASSSY

SEQ ID NO: 108048 - protein, 81 aa, Gossypium hirsutum
  unsure (1)..(81): unsure at all Xaa locations
  Clone ID: LIB3825-022-Q1-K6-E5.pep
RASADSKNDDVFPSPTGNSHRSIQREAALTKFRLKRKDRCFEKKXRYESRKKLAEQRPRVKGQFVRQPQADLSHYGNSSDG

SEQ ID NO: 108049 - protein, 173 aa, Gossypium hirsutum
  Clone ID: LIB3825-022-Q1-K6-F1.pep
MGFRFHFRNLGYNDSSIEVLAENCDDHDDGCNDSCASLSCFQDDGSIAHHHSALRTKYLIIIFTVLAFSFFILCLYVYYVRYYRRRPDFRRRRSNETTETRDEFLDEDHGPVVDHHVWYINTVGLQPSIIDSIAVFKYVKGEGLVEGTECSVCLNEFEEGPIPIVLCAEHLLF

SEQ ID NO: 108050 - protein, 46 aa, Gossypium hirsutum
  Clone ID: LIB3825-022-Q1-K6-F12.pep
NKKFGAPAQHVGSNDALASTSAPMSYALLMHKITFSINRNLSPFFH

SEQ ID NO: 108051 - protein, 208 aa, Gossypium hirsutum
  unsure (1)..(208): unsure at all Xaa locations
  Clone ID: LIB3825-022-Q1-K6-G5.pep
AAWAXIPSQLQLGLLSPLYLRKLFERMGATYIKLGQFIASAPTLFPPEYVEEFQKCFDRAPAVPFEDIQAILREELGRPIDSIYEYIDPTPIASASIAQVHGARLKGSQDDVVIKVLKPGIKDILVADLNFIYIAARXLEFLNPDFSRASLVGIVKDIRESMLEEVDFNKEATNIESFRRYLEVMGLTRQATAPRVYNYCSTRRVLTM

SEQ ID NO: 108052 - protein, 57 aa, Gossypium hirsutum
  Clone ID: LIB3825-022-Q1-K6-G9.pep
NGLTFPPSFNHSKDAFIVLMACRNKLFLTSVWVSIHTLPCSAAIMLCFYICYYKESI

SEQ ID NO: 108053 - protein, 77 aa, Gossypium hirsutum
  Clone ID: LIB3828-003-Q1-N6-A7.pep
VMVMATINAFYCIPTSLDNNAVGILLQIIFPIFYSRYYIEGGVIVLRERFYQLIAKPTRKPTALRYGGMLTNMALAL

SEQ ID NO: 108054 - protein, 116 aa, Gossypium hirsutum
  Clone ID: LIB3828-003-Q1-N6-B12.pep
NTKNLRGKQKIYNPNGVQKKNIQNRKGTIRIGTWSHGPWGVPAKNRDQLKKHQLPQGGQNYHNPLGDTHNQNNFGSRKAKTFPHYIRYGDRPVSPSFEGNQAHTFSISCGRGKGPT

SEQ ID NO: 108055 - protein, 88 aa, Gossypium hirsutum
  Clone ID: LIB3828-003-Q1-N6-C9.pep
GAAPWVIMSEIFPINVKGVAGSLVVLVNWLGAWAVSYTFNFMMTWSSYGTFYIYSGVSIITILFVVKFVPETKGKTLEEIQACINSHR

SEQ ID NO: 108056 - protein, 85 aa, Gossypium hirsutum
  Clone ID: LIB3828-003-Q1-N6-D10.pep
HPHVRRSSFGYPACASPEAWHSRLPPPAPYSLTMPSPESSPMRTRIPQKREGSGEGSNGVETSFVFYESRSLFLKINVVFEVFFK

SEQ ID NO: 108057 - protein, 95 aa, Gossypium hirsutum
  Clone ID: LIB3828-003-Q1-N6-E11.pep
IAMLHLFHLVGTCGHNSAWVINTPKTENMVRQALPGRNCRGCPSGRRKSLNLTLPGLINSFLFSPHHLGASTHWALIEIFFGVQGLKSKRLFLKN

SEQ ID NO: 108058 - protein, 89 aa, Gossypium hirsutum
  Clone ID: LIB3828-003-Q1-N6-E8.pep
GTQSVNLHNLDKPYKKDRCVFQITSVGRQIPSFPFTWKRKHRSNFPSFFREHIAKACQSQMTGLITSWIPRMFHLNNNMPIFTYSSPVG

SEQ ID NO: 108059 - protein, 63 aa, Gossypium hirsutum
  unsure (1)..(63): unsure at all Xaa locations
  Clone ID: LIB3828-003-Q1-N6-F8.pep
MTLVITGVPXTIESHKLILDIEDFRNGKVDTAFIPKHEEELAAPQKMVLATAAKELTSASATA

SEQ ID NO: 108060 - protein, 99 aa, Gossypium hirsutum
  Clone ID: LIB3828-003-Q1-N6-H9.pep
FETRPPEEFLGKCSVFDADLWDILDGLKLVQRRGHDQVIILSDCLEVVKALLGSSSTSSNSALIRHIHTLLSQETQWTLRFILREQNQVADCLAKQALI

SEQ ID NO: 108061 - protein, 50 aa, Gossypium hirsutum
  Clone ID: LIB3828-004-Q1-N6-C10.pep
IKNLIVLSMTSSGKEYDFGRNPNLVGMKPVMPTVERINPANRTFERLQFA

SEQ ID NO: 108062 - protein, 128 aa, Gossypium hirsutum
  unsure (1)..(128): unsure at all Xaa locations
  Clone ID: LIB3828-004-Q1-N6-C7.pep
PPWGSLFGFDYPVGGVTPPPPHXGALKFAFFLEGKLRVGFFPPPHVFFSRPFQKGEIFFFPKGFLPFPKTLGEPRAFAFSGFETPFSGTPPLASPLFAPPPPFPIFFFGRAFPFFPKGVWRIRGHFPP

SEQ ID NO: 108063 - protein, 138 aa, Gossypium hirsutum
  Clone ID: LIB3828-004-Q1-N6-D10.pep
YSFGVVLLELISGKKPVSVEDFGPELNIVHWARSLIRKGDVISIVDPFLVGNVKIESIWRIAEVAIQCVEQHGYSRPKMQEIILAIQDAMKIEKGDEGNAKLACGSSRGQSSRKTLLASFLEIESPDLSNGSLVPSAR

SEQ ID NO: 108064 - protein, 104 aa, Gossypium hirsutum
  Clone ID: LIB3828-005-Q1-N6-A11.pep
TQDKSPTDRASKMFNRDCQLMGLTWLLARNKTAYIPTVSAVLRAIMYSAHPHESKCSPDQENMPLAVDSLQFEKAQSSSPKSPPSWASFTFPVLPPIILGLLFG

SEQ ID NO: 108065 - protein, 87 aa, Gossypium hirsutum
  Clone ID: LIB3828-005-Q1-N6-B10.pep
KKEGPHTRRGVSRGLGKKSKQARARLKNFNLKKNSATKERGWGTGTTANCWQKKKTRKGGRFWCTVTAKKGKNSPPPKGGLFKKHRL

SEQ ID NO: 108066 - protein, 126 aa, Gossypium hirsutum
  unsure (1)..(126): unsure at all Xaa locations
  Clone ID: LIB3828-005-Q1-N6-B9.pep
IICTASVASCIGXIATIGYTTSKHAVVGLVRGACSELGGYGIRVNCVSPFGVATPLACKIFDMEPSEVEANTCSRSNLKGIVLKARHISEAVLFLASDESVYISGQNLAVDGGFSVVNRSFPEVQN

SEQ ID NO: 108067 - protein, 77 aa, Gossypium hirsutum
  Clone ID: LIB3828-005-Q1-N6-C7.pep
CCCILARFSSHHILACISPNLSRLQCISHTYQEAKIDFFLLLLTLESNIKLSSTVCKWSRREAEKLDSWLFKRKTNS

SEQ ID NO: 108068 - protein, 91 aa, Gossypium hirsutum
  Clone ID: LIB3828-005-Q1-N6-C8.pep
GHNPSGRLGIFAPLAPLPFPVKKLSFQVPQLRRHPSQKGFVRPSVLCLYKCALRLSWGVPSHFLFFKSAYPVHGRRHDQIKSIGFYGNIAL

SEQ ID NO: 108069 - protein, 164 aa, Gossypium hirsutum
  Clone ID: LIB3828-005-Q1-N6-C9.pep
LPNMKQKNLAFGAAASMVHPATGYSIARSLSEAPNYASVIEKILKRDYSKGFLTFKRNNWNMSIEAWNTLWPQERKRQRSFFLLGLALLLQLDTEGSRTFFRIFFRLPSWMWQGFLGSTLSSIDLVVFAFSMFVTAPMDMKMLLIRHLLKDPTATTMISTYLTI

SEQ ID NO: 108070 - protein, 112 aa, Gossypium hirsutum
  Clone ID: LIB3828-005-Q1-N6-D12.pep
TINFDILTLSSIKKKHPKGLQCILGGINLSVDALILNNHFMFLPCKCRGIYLVVVVDDDLIWHFFWIFLFRGGTFQGINLVVVVVEANEVILHLIGGVNLPCALGIKLFPLA

SEQ ID NO: 108071 - protein, 75 aa, Gossypium hirsutum
  Clone ID: LIB3828-005-Q1-N6-G7.pep
FNVHKQNYKMKLKGDKSGRKGQLSVATEVFEVAPCLHMIELRKTGGDTLEFHKFYKQFSSGLKDVVWKAEDIAEE

SEQ ID NO: 108072 - protein, 83 aa, Gossypium hirsutum
  Clone ID: LIB3828-005-Q1-N6-H12.pep
HPHQSHKIVTQNGASIFRVMGHQGVLKGYMTPLLSRKWKSQLGFKQVAQNWTKQSTLYHIHIHAPIIPTSSCFMKFFLLFDLF

SEQ ID NO: 108073 - protein, 59 aa, Gossypium hirsutum
  Clone ID: LIB3828-005-Q1-N6-H8.pep
KPFGVIDCILPFNKITPTLQFQLYPVPHVKNSHGLCVPYPNSFGFGGPPSVVVFAPFYP

SEQ ID NO: 108074 - protein, 79 aa, Gossypium hirsutum
  Clone ID: LIB3828-006-Q1-N6-A11.pep
GWNVGPNPPQAFLVYPWGLFSPPKTPFFSPRAPPFPPRVPPPPKLTPPPPKGCFFWVPPKLSPPPHAPVLIPPKPPLWF

SEQ ID NO: 108075 - protein, 45 aa, Gossypium hirsutum
  Clone ID: LIB3828-006-Q1-N6-B9.pep
WHPSTPSLLSFLTLTHHLHGTTLFSSHDYLCPRLNLPKLLFIFNI

SEQ ID NO: 108076 - protein, 70 aa, Gossypium hirsutum
  Clone ID: LIB3828-006-Q1-N6-D12.pep
QGGGVPDFSVPVRNLDPTSGVHFRLSLSDRSDFSPQFKRIFRLGHSQQLKRGEREATRRRKRKQAWERIV

SEQ ID NO: 108077 - protein, 104 aa, Gossypium hirsutum
  Clone ID: LIB3828-006-Q1-N6-E11.pep
QLFTNDRDVMQLMNLSFPFIAVTQPINTLAFVFDGVNYGASDFAYSAYSMVLVAVVSIFCLFILSSSTGYIGIWIALTIFMNLRVFAGLLRVGTGTGPWGFLRN

SEQ ID NO: 108078 - protein, 73 aa, Gossypium hirsutum
  Clone ID: LIB3828-006-Q1-N6-F10.pep
QFLWTPKNNKNNNNNNYKGLPQGSLIHKLTIYAYPLNRVLPGKPSFSYQPQLTNKSQGITPLTSHAPKQLDCN

SEQ ID NO: 108079 - protein, 135 aa, Gossypium hirsutum
  Clone ID: LIB3828-006-Q1-N6-G11.pep
AQGKTRIDENTGTVIQNCRIVPEQKLFIDRFKFPTYLGRPWKPYSTTIIMESTLGDFIRREGWMPFATQNHEDTLYYAEYNNRGPGANLDARVNWKGYHKIDKATAMKFTVEAFLHSKENWLPLTGVPFTAGLRY

SEQ ID NO: 108080 - protein, 60 aa, Gossypium hirsutum
  Clone ID: LIB3828-006-Q1-N6-H10.pep
SFPLFFIPSLLNAPPEPLLYNVALLTLICYLELLLKDLILRICALFFRADFAHGEPHPNH

SEQ ID NO: 108081 - protein, 197 aa, Gossypium hirsutum
  unsure (1)..(197): unsure at all Xaa locations
  Clone ID: LIB3828-007-Q1-K6-A5.pep
AAQXADEAKSVVEMANQELSKLKEEAEQAKAGAGTLESRLLAVEKEIAAVKASKESALVAIETLQDINNVDSSDSVVLSLEEYYDLRKRAYEVEEQASMIAAATVSQIEEAKQSQSRSLVKLEEVNREMAERKKALEIALEKAEKAKEGKLGVEQELRQWRAKHEKRRKASGSSHGGNPPRSSFEGKRQSNKVEPVT

SEQ ID NO: 108082 - protein, 195 aa, Gossypium hirsutum
  Clone ID: LIB3828-007-Q1-K6-A6.pep
CFAQLWSQRRIFASIKASLYNCLSETNLQLTVPGLKSKTRGKVRDIYDSGDYLVLVTTDRQSAFDRILASIPFKGQVLNETSLWWFNRTRHMIPSAVLSVPDKNVTIAKKCSVFPVEFVVRGFVTGSTETSLWTVYKNGVRNYCGNVLPNGLVKNQKLTANILTPTTKAEDHDVPVTPDEIIERGLMTQDEFDEA

SEQ ID NO: 108083 - protein, 117 aa, Gossypium hirsutum
  unsure (1)..(117): unsure at all Xaa locations
  Clone ID: LIB3828-007-Q1-K6-A7.pep
TFVFAFTYLLLTLPCPFIKKPKWHMLKRQPLSHPFIKRKKGKKKTLLNPWKRNQHFHHFPLFFLFFDFFFHNTAYCRVQMESILLSRTLCFACPPLLHHSSDSNFFXYIFGKYHPTI

SEQ ID NO: 108084 - protein, 96 aa, Gossypium hirsutum
  Clone ID: LIB3828-007-Q1-K6-C3.pep
NPTKTDSNPKNKTLPQTLNTYLQIRPNWPTNPKHFDKGNPSSPFCAVCKQQASRRRTLHVPSRRAPLHYATSVARSITNLGLFLEPTSEAEALKRR

SEQ ID NO: 108085 - protein, 95 aa, Gossypium hirsutum
  Clone ID: LIB3828-007-Q1-K6-C4.pep
PLLLTLILTYHGHDQDLCAVLGAVVSMSAVLAAGAAAGASPASSPAAAAAAAAASGPGSDPSLEIRTMPVIEPVVEATLGAPLAYFLHYATQKNG

SEQ ID NO: 108086 - protein, 166 aa, Gossypium hirsutum
  Clone ID: LIB3828-007-Q1-K6-C6.pep
MSWLLKSLQSEVPRSPTSSPDHSPTNLNGGVKDDLSLIGETIGRQLRGVAAFLAPPPSQPSVTASEGGLEQEQVQEPQSDKLLGIRNDLAEIGGSFKSGLSLLSSNRAVTEISRFASSLLQFPDQDDHGGHDEDDDDEDYDDGVPGITDEVIKFVEEISNRPELWT

SEQ ID NO: 108087 - protein, 56 aa, Gossypium hirsutum
  Clone ID: LIB3828-007-Q1-K6-D5.pep
GLNYFLLFLLKNSLKSKLIILLKILSNSTVKIWFLYVKMLCVRCNCLIILLVILIF

SEQ ID NO: 108088 - protein, 43 aa, Gossypium hirsutum
  Clone ID: LIB3828-007-Q1-K6-E12.pep
TLILLKTARPFFFFFFFFFFFFFFFFFFFFFFFFFFFFFFFYD

SEQ ID NO: 108089 - protein, 155 aa, Gossypium hirsutum
  Clone ID: LIB3828-007-Q1-K6-E2.pep
LKDRNRMVKFHTVRRERWSSSAVNLDHPMTFDTLALDGDLKKTIMEDLDSFINGKEYYKKIGKVWKRGYLLYGPPGTGKSSLIAAMANHLNFDIYNLNLSAVNSDSSLEYLLLHVSNRSILVIEDIDCTVKLQNRDAGDTTASYPHVQVIHQLES

SEQ ID NO: 108090 - protein, 203 aa, Gossypium hirsutum
  Clone ID: LIB3828-007-Q1-K6-F12.pep
AGAVVLLASKGNSSKILVFSEDLFFLYLLPPIIFNAGFQVKKKQFFKNFTIILMFGIFGTVISFCLISVGAFLLFNRIGVTSLNTQDYLAVGAILSATDTVCTLQVLSQDETPFLYSVIFGEGVVNDATSIVLFNAVQSLDFNNIDAMISLKLLGIFLYLFFTSTILGVVAGLLSAFIIKTLYFGRHSTDREVALMMIMAYLS

SEQ ID NO: 108091 - protein, 90 aa, Gossypium hirsutum
  Clone ID: LIB3828-007-Q1-K6-F9.pep
MLTKKKKKKKKKKKKKKKKKKKKKKKKKKKKKKKKKKKKKIKKKKKKKKKGKLKKKKKTNTKREKKKKKGGDGGKKKQTSPPRFKRTNFF

SEQ ID NO: 108092 - protein, 42 aa, Gossypium hirsutum
  unsure (1)..(42): unsure at all Xaa locations
  Clone ID: LIB3828-007-Q1-K6-G10.pep
DRKIKYEFNEFEFSILYTSYLXXAVAFLKKKECGADYKXWSV

SEQ ID NO: 108093 - protein, 125 aa, Gossypium hirsutum
  unsure (1)..(125): unsure at all Xaa locations
  Clone ID: LIB3828-007-Q1-K6-G8.pep
RPRGFPPRFVXLTTTVTMNLLLATAIILLLLHRHPSTIMAATFAHHHVKQPHFILFSSLPLILLVPFSFSHYFLLYSILLFLLLLCQVFVRSSLSPSSGHYASTGFGDLSIFLHYFPTSFILFST

SEQ ID NO: 108094 - protein, 70 aa, Gossypium hirsutum
  Clone ID: LIB3828-008-Q1-K6-A12.pep
FYFGGPKKKIFFFQPRGVKFGSFKTGPPLFFFFFFFFFFFFFFFFFFFFFFFFFFFFFFFFFFFFFFFFL

SEQ ID NO: 108095 - protein, 198 aa, Gossypium hirsutum
  Clone ID: LIB3828-008-Q1-K6-A2.pep
KNRARLPGFCLNRIRPHVRVKSPPIQAKPNLDSSKTDQKDEISGKVGEDKSRNGEKTGFLIGRKIMIVVDSSIEAKGALQWALSHTVQCHDTLVLLHVTKPSKQVPNTNEDHDKNRAPRACEPVYSLQNMSKQKRPEVEVEVAVVEGKEKGLTIVEEAKKQGVALLVLGQKKKSMTWRLVMMWAGSRMTGGVVEYCIQ

SEQ ID NO: 108096 - protein, 84 aa, Gossypium hirsutum
  Clone ID: LIB3828-008-Q1-K6-C3.pep
HILFMSRTVRLKGCVNLSNPSTSRAALALYLLKVEHLPNSYSLLPVPSTCKKFMLLIYPSCHHFHECLKYLHLSICFTSHLIHI

SEQ ID NO: 108097 - protein, 109 aa, Gossypium hirsutum
  unsure (1)..(109): unsure at all Xaa locations
  Clone ID: LIB3828-008-Q1-K6-D3.pep
QIVLGTLKIFXGKLPYDSIVFKKKKKKKKKKKKKKKKKKKKKKKKKKKKKKKKKKKKKKKKKKKIKYTYLKSNITAHFPDTYPNYQKHLPSPHLHPLSSNLKKPPIGPN

SEQ ID NO: 108098 - protein, 179 aa, Gossypium hirsutum
  Clone ID: LIB3828-008-Q1-K6-E1.pep
MDDLEQPQIDNSASDLKQTSQETNSQDQMMQREAHSETEVSCLSSKPEIESEQPKRTTKRFASEQLETEAKKFVFKSRKGSNPAFIGAQTKFEELSSTAYSSISVDSSHQDVGVESNLDTVSSGADTSRSKEPSITENAVLNNRRGQYGDSECWTAVSITSTLDSPDKSEVGTIEYKHG

SEQ ID NO: 108099 - protein, 64 aa, Gossypium hirsutum
  Clone ID: LIB3828-008-Q1-K6-F6.pep
ITSNFSMKAALFAGFFHHFCCYRFHLGVNFILTDVMPYMMLYEINIFHSFSYPSIFALLYSLIT

SEQ ID NO: 108100 - protein, 75 aa, Gossypium hirsutum
  Clone ID: LIB3828-008-Q1-K6-F7.pep
LHVRPIKVCFLTQVKVHFLKKIPKSVNVVFIKLIGQPLDNFGAFQNELWFNVVWYVGQTTTYFGSICASDRLAQW

SEQ ID NO: 108101 - protein, 62 aa, Gossypium hirsutum
  Clone ID: LIB3828-008-Q1-K6-F9.pep
YQYKPRHLKLEIAFARTKLCSCCLLTLLGFSDNKNQSPRFQIIQLITFRTRFLIYIYMYILD

SEQ ID NO: 108102 - protein, 167 aa, Gossypium hirsutum
  unsure (1)..(167): unsure at all Xaa locations
  Clone ID: LIB3828-008-Q1-K6-H5.pep
LTRFVTSMLLQSLVTXENFNFLNVFNERFKEPICGSRVGPPTRPKIASITLSPSNRSSEANIAVGVEKDRGSTSSSLGKRKMKTENIDSDPSSEAKTFRNIGYKSNLQGSLWITRFTPKASSSLFNRDTDGAVECLSDCMKPDLCPRNDVNVSNKPEEEASTGLRSL

SEQ ID NO: 108103 - protein, 199 aa, Gossypium hirsutum
  unsure (1)..(199): unsure at all Xaa locations
  Clone ID: LIB3828-008-Q1-K6-H7.pep
GNAAAALMAGLAPKTKXKRGKWCEQEAAILVPGDIISIKLGDIIPADARLLEGDALKVDQSALTGESLPVNKNPGDGVYSGSTVKQGELEAVVIATGVHTFFGKAAHLVDSTNNVGHFQKVLTAIGNFCICSIAVGMLVEIVVMYPIQRRKYRDGIDNLLVLLIGGIPIAMPTVLSVTMAIGSHRLSQQGAITKRMTAI

SEQ ID NO: 108104 - protein, 193 aa, Gossypium hirsutum
  unsure (1)..(193): unsure at all Xaa locations
  Clone ID: LIB3828-009-Q1-K6-A2.pep
PGVPVLLPLSKGWSPLMVARSWXQNWLEEILSSQPEGQSQALPSPFLSLPLMSIIRIARECGWRTGDSLFSCQDPCAVCLDRQCTVAAEGCDHEFCTHCALYLCSTNHTTNVAKGPTGSIACPLCRHGIVSFVKLPGAKPIVKAVARTSLSLSFCTCSSEMLEPTSMTTPLCKPVVHCARISPPGSSFCSISG

SEQ ID NO: 108105 - protein, 129 aa, Gossypium hirsutum
  unsure (1)..(129): unsure at all Xaa locations
  Clone ID: LIB3828-009-Q1-K6-B9.pep
MASLNVSSPSSTXHFLVLGHQSFQSFNELHRKNLVFANGYASGLAFVRFGGRLSSVIKSVGKTRAAVQSGEGKNVVSTNDAVSISNGFPVDNDEFNLDRATEGFASIPEAIEDIRQGKMVVVVDDEDRE

SEQ ID NO: 108106 - protein, 57 aa, Gossypium hirsutum
  Clone ID: LIB3828-009-Q1-K6-C10.pep
KTHFAKKKKKKKKKKKKKKKKKKKKKKKKKKKKKEKKKKKKKKKKKKKKKKKKGGPL

SEQ ID NO: 108107 - protein, 173 aa, Gossypium hirsutum
  unsure (1)..(173): unsure at all Xaa locations
  Clone ID: LIB3828-009-Q1-K6-D2.pep
NLTNNSFILQLANGLKKHXEELNAHRPRMLAKLGGCLYXKPCSGPHKCKESXAWSLISRNPLNAALTYRXRHGYKDAKHVMGDGKVMTDKTYPYSCIDGGIISKTNEDYRLLVXDPKGENGLQTITGKETKYKLCKXRSVQTGSERLTXYVNTYDGPSIPQXDTLIRANDTIN

SEQ ID NO: 108108 - protein, 178 aa, Gossypium hirsutum
  unsure (1)..(178): unsure at all Xaa locations
  Clone ID: LIB3828-009-Q1-K6-F10.pep
MAADGRLSHLKLRLYGVFEVQGWIYRWMLPQGMHDRNFERESTHHTGVMVGMGQKATYVGXDEAQSXRGIITLKNPIEHGIVNNWDDMENIGHHTFNNELREAPEEHSVLITEAPLNPKANREKMTQIMFETFNAPAMYVAIHAVLSLYASGTTTGIVFDSGDGVSHTVPIYEGYALP

SEQ ID NO: 108109 - protein, 184 aa, Gossypium hirsutum
  Clone ID: LIB3828-009-Q1-K6-G4.pep
MSPGPVVEAALPDTELLPNPSAEEPQKKPLSEEEEAVVEDVKEIEIEDDEEEEEEEEDDDDKEDSAQGANASSKQSRSEKKSRKAMLKLGMKPVTDVSRVTIKRTKNILFFISKPDVFKSPNSETYVIFGEAKIEDLSSQLQTQAAQQFRMPGLASVMAKSDTSAAAAGTAADEEEEEIDETGV

SEQ ID NO: 108110 - protein, 79 aa, Gossypium hirsutum
  Clone ID: LIB3828-009-Q1-K6-G5.pep
NIKFVEKKKKKKKKKKIKKKKKKKKKKKKPKKKKKKKKKKKKKKKKKKKKKKKGGALLKEPNFLPGAWKVKTFFLGPQN

SEQ ID NO: 108111 - protein, 83 aa, Gossypium hirsutum
  Clone ID: LIB3828-009-Q1-K6-H2.pep
FLCLYKRVIPILQSHMDYYDQHWTARELVSIDNLHTAYHYNPDDVDRPYNDLFFRTMLRVLYHQKGVGIIKTGNLGRYQPLLQ

SEQ ID NO: 108112 - protein, 65 aa, Gossypium hirsutum
  Clone ID: LIB3828-009-Q1-K6-H6.pep
NHELPSWGDCLLYITSCFSCDSLQTSSILRLCMVSIGDKNNLPTWFSSAPLSVILFYGLLKLSQL

SEQ ID NO: 108113 - protein, 200 aa, Gossypium hirsutum
  Clone ID: LIB3828-010-Q1-K6-C11.pep
PLQWRNCFFFPRLLQSLIFTILWTVRAQLPGTWELLVPNAGVASMHTAVTRFNTVVLLDRTNIGPSRKMLPKGHCRIDSNDVVLKKDCFAHSVVLDLQTNQIRPLMILTDTWCSSGQFLPDGTLVQTGGDLDGFKKIRKFEPCEPGEFCDWVELKDVELANGRWYATNQILPDGTVIIVGGRGTNTVEYYPPRKNKNGAI

SEQ ID NO: 108114 - protein, 56 aa, Gossypium hirsutum
  Clone ID: LIB3828-010-Q1-K6-C6.pep
LGSWSFIYYPYIGLYYIIFIPSIWNFGLSIIYISQKANAGKMMYTMLNLKFLFLQL

SEQ ID NO: 108115 - protein, 198 aa, Gossypium hirsutum
  unsure (1)..(198): unsure at all Xaa locations
  Clone ID: LIB3828-010-Q1-K6-D5.pep
GRPLGRPXGILLNGKAGKVGVKQEPLFTMEPGKTYKYRVCNVGLKASLNFRIQGHKLKLVEMEGSHTVQNLYESLDVHIGQCFSILVAADQDPKDYYMVASTRFLKEVQTTTAIIRYKNGKGEASTELPPAPIGWAWSLNQFRTFRWNLTASAARPNPQGSYRYGAINITRTIRLVNSVSRANGKLRYGFNGVSHTDP

SEQ ID NO: 108116 - protein, 38 aa, Gossypium hirsutum
  Clone ID: LIB3828-010-Q1-K6-E1.pep
NQLSTCAKLVINHTICTTKIIQNIQDMFKTSLRLHNTS

SEQ ID NO: 108117 - protein, 60 aa, Gossypium hirsutum
  unsure (1)..(60): unsure at all Xaa locations
  Clone ID: LIB3828-010-Q1-K6-E3.pep
GFFFFPXFFFFFFFFFFFFFFFFFFFFFFFFFFFFFFFFFFFFFEGKTYQFTRKNIIHIY

SEQ ID NO: 108118 - protein, 63 aa, Gossypium hirsutum
  unsure (1)..(63): unsure at all Xaa locations
  Clone ID: LIB3828-010-Q1-K6-F10.pep
FQPFGRVVHVIRPTRGLAGTTRVRQSKMTRASQRGRFFAFGRVFSGKVATGMKVRKYTXESKE

SEQ ID NO: 108119 - protein, 134 aa, Gossypium hirsutum
  Clone ID: LIB3828-010-Q1-K6-F12.pep
TDSCEDVVIEDCYICVGDDAIAIKSGWDQYGIVYGRPSRNILIRNLIVRSMVSAGVSIGSEMSGGVSNVTVENVTVWSSRRAVRIKTAVGRGGYVRHITYRNLTFDDAQVGIVIKTDYNEHPDMDFDKNAFPIL

SEQ ID NO: 108120 - protein, 135 aa, Gossypium hirsutum
  unsure (1)..(135): unsure at all Xaa locations
  Clone ID: LIB3828-010-Q1-K6-F3.pep
MKKNKGGVGSRKSNLLAAGLQRNDCLKPXVTQINGLALNTPLAGKPLGXQALTDWPSNHFCTLDGKWKGPCRGALTKVGAVFTRSGTPPFASYLARGGWGFPPWLLVNLAGFYRQVLNLGLLFWPPFRAFSPLRP

SEQ ID NO: 108121 - protein, 189 aa, Gossypium hirsutum
  Clone ID: LIB3828-010-Q1-K6-F4.pep
SVAAAPQAVHLFRQPFPPNYFPYPHYLSPFYMHPMHQFLNPTGLPQQPSTGNVYMPPGVTPPGVKFPLPQFKPGTNAGNPAHLAIPSGYGPLTSPPIGFNLPLPSVTSGSSSSKEDIAALQLKENQIYTTGPLNESSALWMPAPGQDLSNLQVNSLYNLSLHGPQLPFSPAQAGHGAFAGLYQSPPQTM

SEQ ID NO: 108122 - protein, 161 aa, Gossypium hirsutum
  Clone ID: LIB3828-010-Q1-K6-G7.pep
GGLDYNTNASSSSLYVGSGSGTIGGNAFGNSGINWGSSAISSQGEGNNVSRNSVEFGYGSGDNSFGLGTTGYGRNSGTNLTPTSAYAASNGGYDGAFADLYSGASVYGDATRGSSMSERDGSGSFGYGLDSATSGVLRKSSPGYIGGYSVNRRQANSGIAT

SEQ ID NO: 108123 - protein, 106 aa, Gossypium hirsutum
  Clone ID: LIB3828-010-Q1-K6-H12.pep
MITRSNLADQLREYQLRSKHDWASVSFFASTSNLTTSRVDVVAFVIWELVILAFLVFSAVSLYFRHMQLAFILVCITLLLLLCMKITKQVSVAGKKKRRMLLPLSM

SEQ ID NO: 108124 - protein, 137 aa, Gossypium hirsutum
  Clone ID: LIB3828-011-Q1-K6-A9.pep
MKERAIQVSQLVTKNGGPYCREMMERAIQVSQLVTKNGGSYYRELMKRNKTYIKEPSSVETCQLLAKQLFYTRLASIPRRYEAFWKELDSLKELLKTKEAWNIENASMAALIGVECYAWFFGGEIIGRGFTITGYHV

SEQ ID NO: 108125 - protein, 103 aa, Gossypium hirsutum
  Clone ID: LIB3828-011-Q1-K6-B9.pep
WFTHSNIINDIKSDIKWRLSSTGQVFASSSLYLSKTDIMIEPSLSIYGDFLNKKIHQERIRQNEHHKFTSLIIFFRRESVNLVLNTVNPTSPICLLMIYDTTP

SEQ ID NO: 108126 - protein, 76 aa, Gossypium hirsutum
  unsure (1)..(76): unsure at all Xaa locations
  Clone ID: LIB3828-011-Q1-K6-C7.pep
HQLVGDYTXVHGIQARFTYQPALVRASGMIAGGSGLTTMCQAVRAMSGNPKQCQTXHLIDANVTYEDILKKDRLDS

SEQ ID NO: 108127 - protein, 67 aa, Gossypium hirsutum
  Clone ID: LIB3828-011-Q1-K6-D7.pep
PYCLQYGYRGPMVRGPVSPPWMTELLGVIQATVLLMKLLLILEPILHLMLPGLLLTIGICYELNTLL

SEQ ID NO: 108128 - protein, 59 aa, Gossypium hirsutum
  Clone ID: LIB3828-011-Q1-K6-E11.pep
NWIFLKGPPLFFFFFFFFFFFFFFFFFFFFFFFFFFFFFFFFFFFFFGLFPQICYELYE

SEQ ID NO: 108129 - protein, 75 aa, Gossypium hirsutum
  Clone ID: LIB3828-011-Q1-K6-F11.pep
MAHRFSTYENTFTIGSSHAVDPFTVVKTRFSDNGKVGMLCQREWRPKSLVTFSAEYDSKAINASPKMGLALALKP

SEQ ID NO: 108130 - protein, 71 aa, Gossypium hirsutum
  Clone ID: LIB3828-012-Q1-K6-A11.pep
LGINGCNLKGSLPMCFSNLTSLKMLSLSSNQFSGNISILKSLKLLKKKKKKKKKKKKKRKNKKKKNKKNIH

SEQ ID NO: 108131 - protein, 76 aa, Gossypium hirsutum
  unsure (1)..(76): unsure at all Xaa locations
  Clone ID: LIB3828-012-Q1-K6-B7.pep
RFYFLSYIVCVHFFCLCKKKIELNRSLFKVALFILSSQIMVYDQSYCAXVLSRAEGAFQALAPLYCLKRKKDSQVK

SEQ ID NO: 108132 - protein, 133 aa, Gossypium hirsutum
  Clone ID: LIB3828-012-Q1-K6-C11.pep
AELRILFLIYFIMSGDNFTDGIPKVRPVLGDISNRSVKRGFSSISEKLGFDSQEEADSQFAKQVRIGVETFIKEKSQKPEFEPNPNFLPTCCGDIDILKEDLVSVNDKFGEAKEGFELSDSDDTLEEVKVLRK

SEQ ID NO: 108133 - protein, 53 aa, Gossypium hirsutum
  Clone ID: LIB3828-012-Q1-K6-D9.pep
EYERAIRRLMVEPEGQEMRERIKLIKDKINLCLKPGGSSYKSLDNLVSYILSM

SEQ ID NO: 108134 - protein, 126 aa, Gossypium hirsutum
  Clone ID: LIB3828-012-Q1-K6-E8.pep
LLNTKKEKENEGVVISVLVVVAMVQLMVRPGEATISCEEVINLVRPCASYIMTGIGSPTVACCNGLDQLRKSATTTADKQQACQCAKDAAAGFPMINEQAAASLPTICKIHIDFPISKNINCQEIH

SEQ ID NO: 108135 - protein, 91 aa, Gossypium hirsutum
  Clone ID: LIB3828-013-Q1-K6-A9.pep
LCRRTSPAVAFLSMKLATVNPRLDFSIQALVAKDIIQSHSCPFLDSGIFYSCIYGLSYIASILTWTCVKLLSLAYRNSTDVIHTALSSQIT

SEQ ID NO: 108136 - protein, 114 aa, Gossypium hirsutum
  unsure (1)..(114): unsure at all Xaa locations
  Clone ID: LIB3828-013-Q1-K6-C12.pep
LNELNXEGFKADSDLEIKLSNIILQQLDDVAGDVSGLAVKCLAPLVKKVGEPRVVEMTNKLCEKLLNGKDQHRDIASIALKTIISEISTPSLAQSVLISLSPQLIRGITGGASF

SEQ ID NO: 108137 - protein, 67 aa, Gossypium hirsutum
  Clone ID: LIB3828-013-Q1-K6-C7.pep
LGDCVKQCMLGSYGSRYPHYQVQKVRIDLTHIVFPHLYSRLFLVINMRHPAPLDSHRAPLCCSHTLC

SEQ ID NO: 108138 - protein, 175 aa, Gossypium hirsutum
  unsure (1)..(175): unsure at all Xaa locations
  Clone ID: LIB3828-013-Q1-K6-F7.pep
ITGHSRNKKEDFAVEHYYRVDIFFXTIYTQLQELKSRFNDNVVELLTLTKALDLKDFFMLVDIDKIFILVNKFYLEDFSQQEKERLPYELKHYELDVCNHPNLRKISTLFELCRSLVESGKSVMYPLVDRLIHLILTLLVSXSILKMAFSAMKILNTRLHRKIEKLINKLQKKLI

SEQ ID NO: 108139 - protein, 60 aa, Gossypium hirsutum
  unsure (1)..(60): unsure at all Xaa locations
  Clone ID: LIB3828-013-Q1-K6-G11.pep
TLGYVLYLLLLLMYLILVFSTESGLGSKMLGLGQIFVGFAVGLHYYXAVFHRVVLHGPSN

SEQ ID NO: 108140 - protein, 61 aa, Gossypium hirsutum
  Clone ID: LIB3828-014-Q1-K6-E8.pep
TPHSVPFWFAPTANNAAPTADLQRACECSHDADDGCSMINTQARASLTSICNIDFVSPNLT

SEQ ID NO: 108141 - protein, 57 aa, Gossypium hirsutum
  Clone ID: LIB3828-014-Q1-K6-G8.pep
MAKIINKLIPLTIVVSLQAISTPVSSQALHSSLTPQSFLFMYGRPQYTVRLTRPQVM

SEQ ID NO: 108142 - protein, 151 aa, Gossypium hirsutum
  Clone ID: LIB3828-019-Q1-K6-A12.pep
IMFGNPSSSPPATVSGVGALHLILQSDGNIQQDDQRERVTVHFDAAFDHQSSRSTKGLIVRNEVGEILALKTVIHSEIVTPFTVEAHAGLQEVILGIFMGFNKMEVVGDSKTIIKKCQSTDIDKSVMEQLLETYKAKKIDFRRLSFILSPK

SEQ ID NO: 108143 - protein, 197 aa, Gossypium hirsutum
  unsure (1)..(197): unsure at all Xaa locations
  Clone ID: LIB3828-019-Q1-K6-B2.pep
QQDVGLKEWIEKNPKXLGHKVLEKWGSDLPFLFKVLSVGKALSIQAHPDKELAKELHKMKPNLYKDANHKPEMALAITEFRALCGFITLQELKEVLEDVPEIEELVGTASAKQVMEIDERGGDTADKAKTALRSVFTQLMSASKEMTTKAISKLKSRLLLQSQLRSLTEKEELVLQLEKQYPGDIGVLSAFFFNYVK

SEQ ID NO: 108144 - protein, 203 aa, Gossypium hirsutum
  Clone ID: LIB3828-019-Q1-K6-B9.pep
MTFFTFISFYLSLGSCLIAASLEDSIAQQKLDKVHNLPGQSFTVDFAHYAGYVTVNKHSGRALFYWFFEAAKDPDSKPLLLWLNGGPGCSSVAYGEAEEIGPFHIRPDGKTVYLNPYSWNQVVNILFLESPVGVGFSYSNTSSDLLNNGDKRTAKDSLTFLLKWLERFPQYKERDFYIAGESYGGHYVPQLSQAIVRYNKATN

SEQ ID NO: 108145 - protein, 212 aa, Gossypium hirsutum
  Clone ID: LIB3828-019-Q1-K6-C2.pep
EVRTCAGSLSFHVVNIRTNIDFVFFAGGFSTPCILTKTDVPLKFSNPNSPLHGHLSSIDSTATSMRLTWVSGDKEPQQVQYGDGKSQTSEVTTFSAADMCSEFRLGSVVVPSPAKDFGWHDPGYIHTAVMSGLQPSSTFNYKYGSDAVGWSAEIQFRTPPAGGSDELKFLVFGDMGKAPLDSSAEHYIQPGSISVIKGMTEEVENGNVDSIF

SEQ ID NO: 108146 - protein, 184 aa, Gossypium hirsutum
  Clone ID: LIB3828-019-Q1-K6-C5.pep
MSSEKQAEEAIVSSLNETMEHEEEDQGDNSIFSVKSLLWHGGSVYDAWFSCASNQVAQVLLTLPYSFSQMGMLSGIILQVFYGVLGSWTAYLISVLYIEYRTRKEKENVSFKNHVIQWFEVLDGLLGPYWKAIGLAFNCTFLLFGSVIQLIACASNIYYINDKLDKRTWTYIFGACCATTVFIP

SEQ ID NO: 108147 - protein, 48 aa, Gossypium hirsutum
  Clone ID: LIB3828-019-Q1-K6-C7.pep
IWSFNFELIDIYLYIHTRTLRYLHDYKSHCLSLSLSMIYIYGCRKLVT

SEQ ID NO: 108148 - protein, 127 aa, Gossypium hirsutum
  unsure (1)..(127): unsure at all Xaa locations
  Clone ID: LIB3828-019-Q1-K6-D10.pep
RSEKRKRLWRCKVLGTSCLKLPVRVGXETGSRQAEDYLMDYGPFANVPATDPAKITDPVFSVNDEEDAPKRLKNNPLSKRRQATXIPHDFYTIHHGTSSWPGSASALKLGYLRIHNIGHTHASNETF

SEQ ID NO: 108149 - protein, 83 aa, Gossypium hirsutum
  Clone ID: LIB3828-019-Q1-K6-D7.pep
DTKGTTLPLQANMLIVKFSTKNRFLHQAKLLVWSLYQSAWHLKMRALAYPALSSATNVIELQQRIHKQNQYGGLQLHQYTKYA

SEQ ID NO: 108150 - protein, 127 aa, Gossypium hirsutum
  Clone ID: LIB3828-019-Q1-K6-D9.pep
ALAASLLGVESGQDAVIRTLLYLRANETVKPYGVTVAGFTDRISEIRNRLGRCGMKDEGLIVPMQLGAENRTTSNILSADADSLSYSRTQAEILRIIYGTGDESRPGGFLPDGGRGRIAMGFLATRN

SEQ ID NO: 108151 - protein, 52 aa, Gossypium hirsutum
  Clone ID: LIB3828-019-Q1-K6-E12.pep
VAWAKIRKDGDTSDQIKFSQVVGAEKQIVSGIKYFLTVEGIRIMGKAGCLIR

SEQ ID NO: 108152 - protein, 90 aa, Gossypium hirsutum
  Clone ID: LIB3828-019-Q1-K6-F3.pep
AVTVNVIACWMLVKLRMADIEALMNLAMMEVHSPTKIDSNSLRLDYANYNAEDGRHCSLPHHERALTGRCGQYNAIAVEKTVLRGFCMAQ

SEQ ID NO: 108153 - protein, 73 aa, Gossypium hirsutum
  Clone ID: LIB3828-019-Q1-K6-F8.pep
LFEESPGIIFPILLISDVGKLLLMRNAPDADPGLKKVSMCSESAWVFKKGNNAQCRLFCYALWSIWVKSSDPI

SEQ ID NO: 108154 - protein, 204 aa, Gossypium hirsutum
  unsure (1)..(204): unsure at all Xaa locations
  Clone ID: LIB3828-019-Q1-K6-G1.pep
MQCALKFACSAAPPSSASIASLLFPNTHNKKKKLRNGCSIRAELSDDNDPLLQAAINSASLRFHETHRQDPLFIDPYAGCFVSTHTQMDMETKAKQYCIATKFIDDKLLSTVNHMDGLKQVVLLSDGMDTRPYRLNWPSSTIMFDISPLRVFQKAAEKLDGVGAKIXQRCLFLHVPLETPNIQETSVTKGSNCTRPSVWAIQXL

SEQ ID NO: 108155 - protein, 169 aa, Gossypium hirsutum
  unsure (1)..(169): unsure at all Xaa locations
  Clone ID: LIB3828-019-Q1-K6-G4.pep
LGISAGKLLFEPVQSEGLXVLVPRGLYHAAKGMYEQMLPDVRTHSKWHGTRATLRFTXHSIGGTLGTIXYNLMLLIRREVPPSFLLTVDTFGSPXLMCGGDSLLHRLGSPLNHIQAIIMHSDIAPRAFFSNYTDHVTELIKANNTNFRHLSCLKNHXILCAPMMQVLIL

SEQ ID NO: 108156 - protein, 195 aa, Gossypium hirsutum
  unsure (1)..(195): unsure at all Xaa locations
  Clone ID: LIB3828-019-Q1-K6-H7.pep
NTDVDRELTESTSQPLVYDGFGPLDCDGIYLSSCGHAVHQSCLDRYLSSLKERFARRSFFEGAHIVDPNQGEFLCPVCRRLANSVLPVVNGTSRKAGRQPMTSTVDQVPPLGSSSAANKETCSLLLQQGLCLLKTAANVVGRPDFFEGLSFQRKESLSQNLEPISCVLSKMYFSKMQDRFLGSPXKPPIIXWDTL

SEQ ID NO: 108157 - protein, 64 aa, Gossypium hirsutum
  Clone ID: LIB3828-019-Q1-K6-H8.pep
RLWMWLQYVSFAHFSTLLQDRTLSAARRRCYKIKEHTPYFLGNPKQKRNKVLLTFTFSFLKNTR

SEQ ID NO: 108158 - protein, 97 aa, Gossypium hirsutum
  Clone ID: LIB3828-020-Q1-K6-B10.pep
RTRGRTRGRTRGVRRRNDWRKWVPYQVSTVPGSLSPGGSSAEMLASSFQQITVREESTNQSGAGNVNPHAEDALGRHPSDGHSHLSNGDGSEGTCLN

SEQ ID NO: 108159 - protein, 211 aa, Gossypium hirsutum
  unsure (1)..(211): unsure at all Xaa locations
  Clone ID: LIB3828-020-Q1-K6-C4.pep
PXSAVAKLFASAXRKDASYGALCHCLQLLPSEGQVRATAIEVQNLLVSGRKKEALQLAQEGQLWGPALVLASQLGEQFYIDTIKQMALHQLVAGSPLRTLCLLIAGQPADVFSTGSTIDGMDLSQQHAEVRTNLMLDDWEENLAVITANRTKDDELVIIHLGDCLWKERSEITAAHVCYLVAEANFESYSGSARLCLIGADHLEVPRTYAS

SEQ ID NO: 108160 - protein, 206 aa, Gossypium hirsutum
  unsure (1)..(206): unsure at all Xaa locations
  Clone ID: LIB3828-020-Q1-K6-C6.pep
PSVRPRVRFGYKAVHVPEGPTFGAPLGNGQIKNGADSSLTDNSQQTDTSTDADTDYKNQLHGVQHEAVMVNTVDQSKSKSGYQKTLRKLAQNRKAARKSRLRKKAYVQQLESSQLRLSEIEQELQKARQQGIFITSGLSGDHGHTVAGNAALGFDMEYGRWLDEHQRLINDLRLAVNSHMGDNELCILVXGVMAHYDEVYRLKSIG

SEQ ID NO: 108161 - protein, 203 aa, Gossypium hirsutum
  unsure (1)..(203): unsure at all Xaa locations
  Clone ID: LIB3828-020-Q1-K6-D3.pep
NTVESAKEIPKFVEFFKDQINMAEVKYPLEHFKTFNEFFVRELKPGARTIASIERDDVAVCAADCRLMAFKSVEDSLRFWIKGRKFSIQGLLGKEVCSNAFIDGSLVIFRLAPQDYHRFHLPVSGTIGKFVNIPGCLYTVNPIAVNSKYCNVFTENKRVVTIISTAEFGKVAFVAIGATMVGSITFVKKEVXCQKGEEFGYFS

SEQ ID NO: 108162 - protein, 64 aa, Gossypium hirsutum
  Clone ID: LIB3828-020-Q1-K6-D7.pep
VVALIQGSLSSTFPIENQNNLVTMRTLKNHLDRTKSLPFVKRIADFHLLLFLAMSHGLGSDVLA

SEQ ID NO: 108163 - protein, 180 aa, Gossypium hirsutum
  unsure (1)..(180): unsure at all Xaa locations
  Clone ID: LIB3828-020-Q1-K6-F12.pep
MRPLETLPPTETLEIENGLSLVPRVKLNLTIHPSLPSVSKPIDEWQLKRALIDFLKTSLSVSVTVPEEDLQIKRLKDLKKRKRDEPVAHGALFIRDIRFLSSKKKIEEVDNEEEDVKELEKKFLEWRSYVAEKMDGIELNLEGVKYNLSVEIPASDDFXKMRKDWEESYAFRNRCYSRGG

SEQ ID NO: 108164 - protein, 63 aa, Gossypium hirsutum
  Clone ID: LIB3828-020-Q1-K6-F5.pep
YSLLLFFVLYLFIIIFIFCICIILRDSGCPKAYHPACIKRDEAFFKSKAKWNCGMFGLIIYHF

SEQ ID NO: 108165 - protein, 124 aa, Gossypium hirsutum
  Clone ID: LIB3828-020-Q1-K6-F6.pep
KNCLKRPRSQPLVDTPKNTTVEPTSITSELEHFEIVDSNTSREIFTASISASSATFVPAAPKNIPLAIPSKSLKIPPQPALSSLATPQILNFNHPYGWGLQKETVKLSLWDTTRQFGSKPPKLL

SEQ ID NO: 108166 - protein, 107 aa, Gossypium hirsutum
  Clone ID: LIB3828-020-Q1-K6-F9.pep
HQAVEKEVVSSPGDEPEPADAELAENLDESLVEYGSDINYIYSRYGNYTIEQHQDKEIKEILNCDGANPNVYILSSGRWSVNQEAQQTKRKPTIDQEFEQYFSMLML

SEQ ID NO: 108167 - protein, 90 aa, Gossypium hirsutum
  Clone ID: LIB3828-020-Q1-K6-G11.pep
VFLFGSKIIALINFVWLVLVNKKKKKKKKKKKKKKKKKKKKKKKKKKKKKKKKKKKKKKKKKKKKKKKKKKKKGGAPFGEPQFPPPGRPK

SEQ ID NO: 108168 - protein, 65 aa, Gossypium hirsutum
  Clone ID: LIB3828-020-Q1-K6-H3.pep
PNSSHVVGIPDFIHLSVYRKSAVPVCLTKLGNEPDWLMGLPLAGKINDADMSGTPNMGLCHLPRP

SEQ ID NO: 108169 - protein, 112 aa, Gossypium hirsutum
  Clone ID: LIB3828-020-Q1-K6-H7.pep
PENRRTGKPREGSKKKGQEPKGGGVRGLAKGEATKRGNLKAPDKEGPHQGAGPGASSGGPIGGGRLWEGPNWPKRPSGYKGKKVWEPPRVWPTPGVLQGRAQWKCQRRGPYK

SEQ ID NO: 108170 - protein, 63 aa, Gossypium hirsutum
  Clone ID: LIB3828-020-Q1-K6-H8.pep
FYFFISFLIYFYFNFRLELGHGSPGVRVLSNFDFFDRLSFHRCQWLFLNSSRKIKYKNKLERK

SEQ ID NO: 108171 - protein, 154 aa, Gossypium hirsutum
  Clone ID: LIB3828-021-Q1-K6-A4.pep
LSLLHIHVKLLGFSLHSITPWPNNPSIFYLNGKRISRVEILGVVTSRDYKPNKFLRFTLDDGTHSITCILWLNHLTSPFFASRQPATLRVISDLAKCFADDIQFGKVARVRGRVSSYRGDLQVTVSDVVIERDPDAETLHRLDCISLGRRCYFG

SEQ ID NO: 108172 - protein, 212 aa, Gossypium hirsutum
  unsure (1)..(212): unsure at all Xaa locations
  Clone ID: LIB3828-021-Q1-K6-C12.pep
VDIKASLLXXITLNKHIQQTLLSPHKTGNTLQNATVLDPAYAGYSFDRCRKVDLKFSERRTIEWKPKPNKFLFAICLSGQMSNHLICLEKHMFFAAVLNRALVIPSSKFDYQYNRVLDTEHINDCVGKKAVIPFEDFMEMKKNHAHIDRFICYFSSPHPCYVDEEHLKKLRSLGISMGKLESAWKSEDIKKPSQKTIKDLEEXFASDDDVIA

SEQ ID NO: 108173 - protein, 211 aa, Gossypium hirsutum
  unsure (1)..(211): unsure at all Xaa locations
  Clone ID: LIB3828-021-Q1-K6-C3.pep
GLHISDEAVKXIRSLVMERYGSRFTPENACKYYKKVKNAQEAHEAIRPTNIRRLPSMLVGALDEDSLKLYTLIWSRTMACQMEPSILEQIQLETGNCDESIIFRSSCSRVEFLGYQSAYQDVESGTIRFKDNEASHNAEAFGILSSLKKGDQLCIGEVEIKQHHTQAPPRYSEGSLVKKLEELGIGRPSTYASTLKVLQDRNYVTVKSRVL

SEQ ID NO: 108174 - protein, 105 aa, Gossypium hirsutum
  Clone ID: LIB3828-021-Q1-K6-D12.pep
FFYTIPIQKTYKGSSFCFIAKIKSKIKYTIVLFLFAVLFLFVCLLRKYGRTMTWRGATRKGAARRRGTWQWRTCEGKVCVRLRRDSLLQKLLGFSDSFFVLGSLG

SEQ ID NO: 108175 - protein, 60 aa, Gossypium hirsutum
  Clone ID: LIB3828-021-Q1-K6-D7.pep
SSTNITLHVTYQKCQNLLTQQAYLFRYMPYDFKTYIYIQNKIVKVSKLNLRVGCLTMKLL

SEQ ID NO: 108176 - protein, 213 aa, Gossypium hirsutum
  Clone ID: LIB3828-021-Q1-K6-D9.pep
LDLHLNKQNASSTGSFSSSPLRQSSGSSQASNSSHAQNNYSPIFLQWVDCVSQLLRIYPFAFEFSSNFLVDFLDCVLSCRFGNFLCNSEKERQICGVDESCGCLWAYLADMRSSEGRSHAHYNLFYDTLKHNGPLLPPAAALAPTLWPQFHLRWACPFESQAGELEAECRNMAIKFSELQKAKEVAEMKAKEYLAAMEILNVDLQNEKQVSSS

SEQ ID NO: 108177 - protein, 194 aa, Gossypium hirsutum
  Clone ID: LIB3828-021-Q1-K6-E1.pep
MFLNDSATNNNSGSTNGFSLIKNVSQLLWGASLPPGILISTVRTAWTSTWQIMMSQLAPSDPSGAYTRPPSKFRLNPTAATTKLHLYVGLPCPWAHRTLIVRALKGLEEAVPVSVAGHGLDGSWEFKDVPDKDNDILVPTMDRVNRCRNLKEVYRLRKGGYDGRATVPMLWDVEKKEVVCNESYDIIEFFNSGL

SEQ ID NO: 108178 - protein, 114 aa, Gossypium hirsutum
  Clone ID: LIB3828-021-Q1-K6-E2.pep
KIGIRNRHAMEKGWRFYDVSFLAEIIFIGKNINILKTKKLVSTTIEESKTTYLLLNDRIHSNICVTITTAHSRQELQPDYWKNPEEPNLLDLHNLPFAHLDIQKESTDRKTLLK

SEQ ID NO: 108179 - protein, 209 aa, Gossypium hirsutum
  unsure (1)..(209): unsure at all Xaa locations
  Clone ID: LIB3828-021-Q1-K6-E4.pep
MDYQLTKHECSSLGRGNSECSTTESSDDIEKQELEEVSYEEGTLFFDTEEYFTEPAVSCGSVRGAMDHADDLQETKKQLDNVEKIHSDNEDCDSRYPQIERRKKLPDPVEEVKGVSLWSMIKDNVGKDLTRVCLPVYFNEPISSLQKCFEDLEYSYLLDRAYKYGKEGNSLQRILNVAAFAVSGYASSEGRHCKPFNPLLGXTYEADYP

SEQ ID NO: 108180 - protein, 214 aa, Gossypium hirsutum
  unsure (1)..(214): unsure at all Xaa locations
  Clone ID: LIB3828-021-Q1-K6-F4.pep
TGGMNCQDCGNQAKKXCAHLRCRTCCKSRGFQCQTHVKSTWVPAAKXRERQQQLAALQQTQQQQQNQQQEHQQLFRGDNPKRQRDNHGSPSLACTRLSPTTSGLELGQFPPEVSSPAVFRCVKVSAMDDVEGEFAYQTAVNIAGHVFKGILYDRGPESRYTCGGESSQQLNLITTASTTAAAATTTTAATSSNPGTSMIDPSLYPAPLNAFIAG

SEQ ID NO: 108181 - protein, 67 aa, Gossypium hirsutum
  Clone ID: LIB3828-021-Q1-K6-F7.pep
IFLKLRIIINNKILQQEGFLYNISLLFLQQIKYNIVYIHMYILSISFILFSFSTSSYMYMYMFNTRY

SEQ ID NO: 108182 - protein, 115 aa, Gossypium hirsutum
  Clone ID: LIB3828-021-Q1-K6-H12.pep
SSIYLRRKYPLFFFSFTGDGRVKMPLSPTVHGSQQTPFGLGHSLGSSIQLTESSLYPSTSSVSHSYSSSSLGQMQFDNSSVGSFWSPHRSQMRLQSRRSQSREDLNSSLAETQMV

SEQ ID NO: 108183 - protein, 55 aa, Gossypium hirsutum
  Clone ID: LIB3828-021-Q1-K6-H2.pep
KNVKFSFNLPCQFNLKMVSFLLQCSLSLLLSFYRHIVLFVVYRTVKCYRFKVYGK

SEQ ID NO: 108184 - protein, 52 aa, Gossypium hirsutum
  Clone ID: LIB3828-021-Q1-K6-H5.pep
KRPPPFFFFFFFFFFFFFFFFFFFFFFFFFFFFFFFFFFFFFKFNFKLKFYI

SEQ ID NO: 108185 - protein, 211 aa, Gossypium hirsutum
  unsure (1)..(211): unsure at all Xaa locations
  Clone ID: LIB3828-022-Q1-K6-A11.pep
QSKHLKLPPGPTGWPIVGNLFQVARSGKPFFQYVDDLRRKYGPIFTLRMGTRTIIILSDAMLCHEAFIXKGAIFASRPRENPTRNIFSCNKFTVNSAVYGLEWRSLRRNLVQNMLSSSRIKEFHSIRSQAMDKLIDRLRAEAKANGGVVSVLKNARFAVFCILLMMCFGIEMDEETIEKMDLITKNVLITLDPRIDDFLPILRPFFGKQRK

SEQ ID NO: 108186 - protein, 66 aa, Gossypium hirsutum
  Clone ID: LIB3828-022-Q1-K6-B3.pep
CLVLVCHPKSRVFLVRLDPLLNYPLFFVVLILIFHFFIKKKREREKTSEEEIFWVCILRKVVRVFG

SEQ ID NO: 108187 - protein, 140 aa, Gossypium hirsutum
  Clone ID: LIB3828-022-Q1-K6-B9.pep
KSKSATEVIRSLTAQLKEVTDKLPAGKSALHNSSSIATNTQRMHSDNSHATSIRLPRSEVSCNLDNISMSHGTKGQTEKSETIIQDEPGVYLTLSPLPNGNHELKRVRFSRKHFTEEQAENWWAEHGDKVCERHNIRNTC

SEQ ID NO: 108188 - protein, 205 aa, Gossypium hirsutum
  unsure (1)..(205): unsure at all Xaa locations
  Clone ID: LIB3828-022-Q1-K6-C11.pep
MATRAFSKSKFPILTSILLQNLTXNSITRSPFLVKPQIPPVQPDIHKPISGFKLYHDGRPRGPLWKGKKLIGKEALFVILGLKRFKDDEDKVLKFIKTHVLRLLKMDLIAVLSELERQEETSLAVKVFEVIQKQDWYKPDVYLYKDLIIALAKCRKMDEAMKLWESMRKENLFPDSQTYTEIIRGFLRDGSPADAMNIYEDMIKS

SEQ ID NO: 108189 - protein, 72 aa, Gossypium hirsutum
  Clone ID: LIB3828-022-Q1-K6-D10.pep
HIYIYVCICSVEKIFLKEELRHYQHYILNKIINRYKITLSHKAIRHLNTWLINDLILEYSVYYWRKRLGKNY

SEQ ID NO: 108190 - protein, 205 aa, Gossypium hirsutum
  unsure (1)..(205): unsure at all Xaa locations
  Clone ID: LIB3828-022-Q1-K6-D12.pep
VVLLETRVSGLRADKVIKKSSFNWSHRVEAKGFSSGIWIHWDESVRVEVLCNHSQFVHFAIVSNSLQQRVLYAAVYGSSNSRKXRSLWTGLNAVAQGIVEPWVLLGDFNALLHTDEKQGGLVSRVATCKRFQTFLFDNNLKDLGFKGPKFTWCQGRVHELLDGVLYNASWERRYQFSSVYHLQRIKFDHWPLLLVLNDSCRPMGL

SEQ ID NO: 108191 - protein, 80 aa, Gossypium hirsutum
  Clone ID: LIB3828-022-Q1-K6-F6.pep
GERLPAAPLKLPAPTSTANPKTRDVIHTYTRFVQRLRKYVLSDHITLINLNIFKVASFTSQRASSRSISYSYSLCMGLQL

SEQ ID NO: 108192 - protein, 96 aa, Gossypium hirsutum
  unsure (1)..(96): unsure at all Xaa locations
  Clone ID: LIB3828-022-Q1-K6-F7.pep
AAARIQNAFRAHSFRKRQQXRXANIAASVDEYGISLGEIQNLSTMSKLAFGNARDYNSAALSIQKKFRGWKGRKDFLALRQKVVKIQVSLLFIRIY

SEQ ID NO: 108193 - protein, 67 aa, Gossypium hirsutum
  Clone ID: LIB3828-022-Q1-K6-G10.pep
DIPPLTRPRGVGTPTRLSLKKLSYKTKGRAIFFGGIESPHPVDLDPSFIALLKPRVTFATILPGLVG

SEQ ID NO: 108194 - protein, 183 aa, Gossypium hirsutum
  Clone ID: LIB3828-022-Q1-K6-H3.pep
LLPHYPIPSAKHHLLNLISDQERGLKTQNDTNKRDSIIKAIDAMAVLGRNTVTTGDSLSATWRLLWTTEKEQLFIIEKAYLFGTQAGDVLQVIDVDNKTLNNVITFPPDGVFFVRSSIEIASSQRVNFKFTSAVLRGKNWEFPLPPFGQGWFETVYLDDEIRVVKDIRDDYLVVERAPYNWKE

SEQ ID NO: 108195 - protein, 179 aa, Gossypium hirsutum
  unsure (1)..(179): unsure at all Xaa locations
  Clone ID: LIB3829-011-Q6-K6-A5.pep
RNQWPPVREAKTLTNWDGNTPLKLDLLLMPKVAVNYLSLSATTLAXRLHGPKHKYHPSXYYASGXYFILSKANFTTHSTIQHLIYSVPXEKGCQGVHVTLYLDGQLKLGPYVEWDAYVPDTTNFLNKFDYSESAEHDARFYPQIRXVYPNLKNGSIIPGYSMIRPDLHGPGQSACDFLI

SEQ ID NO: 108196 - protein, 155 aa, Gossypium hirsutum
  unsure (1)..(155): unsure at all Xaa locations
  Clone ID: LIB3829-011-Q6-K6-C5.pep
MRISKLRKSENALAVLARVLRAQLVLAGSDVTXMWLPGSKGDARFKHGHKALIQKCLSXDHPTLEIYVGTGLTPVTQQPLPLKQMEEECIPLFQPKSAGHRRTSGKVWKLKSTCLSRFKALDYIPMKLDGNFESTLGDLYSEVSNLSRQLKDLLI

SEQ ID NO: 108197 - protein, 144 aa, Gossypium hirsutum
  unsure (1)..(144): unsure at all Xaa locations
  Clone ID: LIB3829-011-Q6-K6-C6.pep
SAKKRWXTITERLSALDNLYFPRALQSSASDPSNRKSILHDLLSRDVPVFLERXGSQLTSDELHEFDALNDDYEVNWHLKHLRSKMSPTSEELKLRSVTVKNRRRAYLNKLVCDGHYFSEDAMREREPYLHHEYLGRFQDLSGR

SEQ ID NO: 108198 - protein, 179 aa, Gossypium hirsutum
  Clone ID: LIB3829-011-Q6-K6-D6.pep
MAASQLQNPLKTPSSQLSIKKHKPCFLKPRRLTVSAAHPHLNGRKLRVAVIGGGPAGSSAAEALASGGIETFLFERSPSTAKPCGGAIPLCMVDEFSIPHHLIDRHVTKMKIISPSNLTVDFGSKSLRAHESIPMLRREVLDAFLRTRAESAGAQLIPSLVTHLEIPASSLSPYIIHHT

SEQ ID NO: 108199 - protein, 202 aa, Gossypium hirsutum
  Clone ID: LIB3829-011-Q6-K6-F4.pep
VFQHFPPASSFGLGSPVKLPPGEPLALPPLGDDLGPLLRTKNGGFLRSMNPSLFRNSKSGGNLIMQVSGPVVVPAEMGSDIMDILKQLASIGIEKLSMQANKLMPLEDITGKTMQQVAWEAASTLEVSERQYRLQHDLEFGQNMPSRQKRIKRSPGPTSNKFSSSSVNKMDLDYVSLEDLVPLAMDKIEALMMEGLRIQSGM

SEQ ID NO: 108200 - protein, 196 aa, Gossypium hirsutum
  Clone ID: LIB3829-011-Q6-K6-G1.pep
AAWADAWACCGGDGIDAIINAASKRFSEMKEATLFALASLSEQLLEAEVSGLTKVSIGNLLEQMITEDMGIGVHEYPFLYARMFISVAKFSSVMSGGILEHFLLAAMKTIGMDVPPAVKVGACRALSQLLPEAKKNTIEPQMMGLLSSLTDLLHRASDETLHLVLETLQAAIKAGHESSASAEPIISPIILNMWVF

SEQ ID NO: 108201 - protein, 203 aa, Gossypium hirsutum
  unsure (1)..(203): unsure at all Xaa locations
  Clone ID: LIB3829-011-Q6-K6-H4.pep
QAFTGHRKCDNSTDFXRNKRLELAGELLXREHEVHIAHARRRMAKTLQRXLYADRTVRPIEHYLDASIVTNGLSRAFSTGAWSHPYKKMERISGVVANLGRANSLHTMVDLRKTRQQVQYTGKVGDARYPHPSYWGKVCFLSTPDGENCGLVKNLATTALVSTNIVKSVVESIVYTLFDSGMEKVVNDTSSXLMGKGKVFLNG

SEQ ID NO: 108202 - protein, 115 aa, Gossypium hirsutum
  unsure (1)..(115): unsure at all Xaa locations
  Clone ID: LIB3829-011-Q6-N6-A5.pep
LKFGPDVEWIPHVHDPANFLNKFAYSVSADHVATFYPXIRKCYPNLKDGSXLIPGYAGIRHKSSXDVCSTACDFVIQGXSLHGVGGLVXLFGIESPGLTSSMAIAQYVAPSLLEG

SEQ ID NO: 108203 - protein, 161 aa, Gossypium hirsutum
  unsure (1)..(161): unsure at all Xaa locations
  Clone ID: LIB3829-011-Q6-N6-D6.pep
AHPIPEHPRPVRVRGRVALVGDPAGYVTKCSGEGIYFAAKSGRMCGEGIVRASEGGEWMISXDDLKREYLMEWDKKYVSTFRFLDLLQRVFYGSNEAREALVEVCGSEYVQRMTFDSYLYKKLAKGDRWEDLKMVXGTFGSLMRCKIVGRDMAAFNLQLFS

SEQ ID NO: 108204 - protein, 88 aa, Gossypium hirsutum
  Clone ID: LIB3829-011-Q6-N6-F4.pep
GSITQQKSGSRWLLANGMGKSSKHPLLKSNAASKSSTPSTTKVHPGDTLWSISSGIHGTGAKWKDWAAPNRHIRNPDVIIHNETSRLR

SEQ ID NO: 108205 - protein, 102 aa, Gossypium hirsutum
  unsure (1)..(102): unsure at all Xaa locations
  Clone ID: LIB3829-011-Q6-N6-G1.pep
YWEKIHGDMDFDKNLLSSAAATPFGRFGYEHFXAMAKAYNENQKGEDEAHILSVSDPLNELNLANYFTDFLSKFFQSDRQLFXNFCQCFTRAEQNAIKIALN

SEQ ID NO: 108206 - protein, 93 aa, Gossypium hirsutum
  unsure (1)..(93): unsure at all Xaa locations
  Clone ID: LIB3829-011-Q6-N6-G3.pep
LIPREAKFFRFFKIVGVGFKAKAXTQGRLLFFKLGSRLGVELPVPPAVRVFCFKNNFFFCPGLAKQRGPQFSPPVXSCNPPKVFKGKGLMSPF

SEQ ID NO: 108207 - protein, 128 aa, Gossypium hirsutum
  unsure (1)..(128): unsure at all Xaa locations
  Clone ID: LIB3829-011-Q6-N6-H4.pep
EDKVKFGCSGPVPPLPRHPVPVGKSYGGIKFGKMDRHCLIAQGASPYLHERLFTFSDCSQMHVCQICKNPTNIIXRTVATGXKIRAPYCRVCQYXDYFGKVSAPNGAKLLCQELFSRGITLKFETHLC

SEQ ID NO: 108208 - protein, 141 aa, Gossypium hirsutum
  Clone ID: LIB3829-012-Q6-K6-A3.pep
MVFKKRLDYGFNTFNVPDVPRAPRSIRRRCRSKRVVEDSQICAFELLASLAGKLLQESESSASSNASEGHDHVSIGKDVLKQEIQYNDDEKPLKVECVEQGSCDASAVASESTNENSDDLKEFKPADSVLDRASIKTRPAC

SEQ ID NO: 108209 - protein, 207 aa, Gossypium hirsutum
  Clone ID: LIB3829-012-Q6-K6-D4.pep
VNVYDITNSSDHLIMYGHQNQDGDLALLHESKLDFGDPFRKHQMICRYHQKAPTSWTALTTAFLFFVICLLVGYILYGAAIHIVKVEDDFHEMEELKVRAEAADVAKSQFLATVSHEIRTPMNGILGMLALLLDTDLSSTQRDYAQTAQVCGKALITLINEVLDRAKIEAGKLELETVPFDLRSILDDVLSLFSEKSRNKGVELAVF

SEQ ID NO: 108210 - protein, 67 aa, Gossypium hirsutum
  Clone ID: LIB3829-012-Q6-K6-E1.pep
GLSQGLQQPRLERFIHQMFLQLKVYSRDVFLKSALRTVAASVAACRSRRRINRSFILSSSSVTTAIV

SEQ ID NO: 108211 - protein, 35 aa, Gossypium hirsutum
  Clone ID: LIB3829-012-Q6-K6-E6.pep
VLPYWYVHPVYSSNILIKALQSSLLSNLLTLMASI

SEQ ID NO: 108212 - protein, 204 aa, Gossypium hirsutum
  Clone ID: LIB3829-012-Q6-K6-H2.pep
CEKGTRPGKVNFKIGDEIIVCDRQKIASLSAPFHAMLNGYFTESSSQDIDLSENNISPLGMRTIGEFSITGSLSEVHPDLLLEILVFSNKFCCERLKDACDRKLASLVCTKDDAVEFMEYAIEQNSPVLAASCLQVFLHELPDCLNDERVVEIFSHADRQQRSIMVGLASFSLYCLLSEVAMNLDPRSDKTVCFLEQLIESAET

SEQ ID NO: 108213 - protein, 89 aa, Gossypium hirsutum
  Clone ID: LIB3829-012-Q6-N6-A6.pep
KDSSTTAVMRCLHIGLRCVQENVAERPNMAAVALRLPSYSVPLPLPSQPAFFMRSDTQSEVEMLWSEDLNSGATKCRQCQKGNCGSFWR

SEQ ID NO: 108214 - protein, 101 aa, Gossypium hirsutum
  Clone ID: LIB3829-012-Q6-N6-C1.pep
MAADQPMAAESVADIEVTMVETHANLKILSKKRPRQLLKLVAGLQSLSLTIFHLNVSTVDEMALYSISVKVEEGCHLNTVDEIAAAVNQMLRSIQKKAAFS

SEQ ID NO: 108215 - protein, 55 aa, Gossypium hirsutum
  Clone ID: LIB3829-012-Q6-N6-D4.pep
EWHIPILAMTADVIHATYDECLKCGMDGYVSKPFEEENLYLAVAKFFKTKPISDS

SEQ ID NO: 108216 - protein, 58 aa, Gossypium hirsutum
  Clone ID: LIB3829-012-Q6-N6-E3.pep
ESNSNLGHIRQISGANLVIHDPKPGATEGLVVVSGTSDQLRTAQSLIQAFILCGQTAA

SEQ ID NO: 108217 - protein, 42 aa, Gossypium hirsutum
  Clone ID: LIB3829-012-Q6-N6-E4.pep
MAIVRVSFFAFYALSLNLELCIEHEWSSSFMPDLFFSRRTRA

SEQ ID NO: 108218 - protein, 51 aa, Gossypium hirsutum
  Clone ID: LIB3829-012-Q6-N6-H6.pep
KPPTASSFPQNVPPFFGGLFLKNPCPKTWGLFFSPKPALRDFVKSPPPLGF

SEQ ID NO: 108219 - protein, 192 aa, Gossypium hirsutum
  Clone ID: LIB3829-013-Q6-K6-A5.pep
QVHWTEIEQYFCNLEVTLKKKSEELVAKEKEYEVKEAETLALILEKEAVVATKEQDYLDRVQGLKDAAVAAIAEARANFRPTTAESLDTAENGDTKLAKAIADEWKPKLSNASSGAAIDNSLEAEAFLQLLATFRIASEFDEEQLCKLVFVVAHRRQAPELCRSIGLTPKMPGLVELLINSGRQVDAVRFIH

SEQ ID NO: 108220 - protein, 196 aa, Gossypium hirsutum
  Clone ID: LIB3829-013-Q6-K6-A6.pep
HKLEGKPDWLGLPAGVKFDPTDQELIEHLEAKVEAKDMKSHPLIDEFIPTIEGEDGICYTHPEKLPGVTTDGLSRHFFHRPSKAYTTGTRKRRKIQTECDLQGGETRWHKTGKTRPVMLNGKQKGCKKILVLYTNFGKNRKPEKTNWVMHQYHLGQHEEEKEGELVVSKIFYQTQPRQCNWSDRTATAVEVSNANR

SEQ ID NO: 108221 - protein, 191 aa, Gossypium hirsutum
  Clone ID: LIB3829-013-Q6-K6-B1.pep
MAENAEVDERVDLDDNYMEEEDDDVEEHVDEDGVDSGGDENGEENDEEEFEDSKSGVDGKDQSLEVEKSHIETEHVEDEEKPTASISEEEKEKHAQLLALPPNGSEVFIGGLPKDTSEEDLRELCEAIGEIFEIRLIKDKESGESKGYAFVAFKTKEVAEKAVDELHSKEFRGKTIRCSFSETKNRLFIGN

SEQ ID NO: 108222 - protein, 165 aa, Gossypium hirsutum
  Clone ID: LIB3829-013-Q6-K6-B5.pep
RSRERKTGVIPDEQTFTGLLSACSHCGLVDEGMEFLNQMSKEFGIMPNVHHYGCVVDLLGRAGLLEQAYRVIISMKVKPDATIWRTLLGACRIHGHFTLGERVIEHLIELKAQEAGDYVLLLNIYSSTGSWEKVSELRKFLKDKGIQTTPGCSSIELKGIVHEFI

SEQ ID NO: 108223 - protein, 204 aa, Gossypium hirsutum
  unsure (1)..(204): unsure at all Xaa locations
  Clone ID: LIB3829-013-Q6-K6-C1.pep
PRPELVSEXIIIRQGRFRMLRRQGRHVLILDDVWESFSLEDVGILKPTSENGCKLVLTTRSESIVRSMEFKKVQVPCLPIEEAINLFLSKVGHDMLPNPNLESXMKLVVRECDGLPLAIVTLAGCMRGVIDPRVWENAVDELRGYIRNICNMEDKVHGCLKFSYERLKQRDRECFLYCALYPEDYKIGKNELIEHWMERGLIDE

SEQ ID NO: 108224 - protein, 68 aa, Gossypium hirsutum
  Clone ID: LIB3829-013-Q6-K6-C6.pep
NMQLVMVLMLRRGIRRTTYIAINQNCFVQHIHYNIMSPKHNRVAKRGQRREWKHPRETQLNYLMADSD

SEQ ID NO: 108225 - protein, 204 aa, Gossypium hirsutum
  unsure (1)..(204): unsure at all Xaa locations
  Clone ID: LIB3829-013-Q6-K6-D1.pep
ITPXIHSIATSFYLEESDLKALLTPGCFYNYHAYLEITVFMGRKGTHFGVGVKRQQIGTFKLAVGPEWGEGKPVILFNGWIGIGKNKHENGKPGAELHLRVQLDPDPRYVFQFEDVTMLSPQIVQLQGSVKQPIFSCKFSRDRASQVDLLNAYWPGSADNLDIETGRRERKGWKVKIHDLSGLAVAAAFITTPFVPSTGCDWVA

SEQ ID NO: 108226 - protein, 203 aa, Gossypium hirsutum
  unsure (1)..(203): unsure at all Xaa locations
  Clone ID: LIB3829-013-Q6-K6-F5.pep
EAEDRGTGSRGAPKXVFEVIREIQVQFVRAAESGTEIAKLLEVGTLPHHRKHVSKILHVVTPSLSVVPSQPSTSQTGESSSSADNTDPAFLDINEEMARKTKNLSATLQKLHLWEKKLYNEVKAEEKMRVAYDRKSHKLRRLDQRGAEANKIESTRNTIRGLSTKIRIAIQVVDKISVTINKIRDEELWPLLNELIEGLDRMW

SEQ ID NO: 108227 - protein, 134 aa, Gossypium hirsutum
  Clone ID: LIB3829-013-Q6-N6-A5.pep
KGWLNSKKQKQTIRKEGGILVNITRGRNQGPMVDFEDIGDLQVGKLHQFTTRGLHLQECQKGILMQVRIPTIIKYRINLHMSLKRMIKDYTTILKMTKLQRRHIMQQLLLTMEATVAADCNLRIHSSHFCRFFF

SEQ ID NO: 108228 - protein, 116 aa, Gossypium hirsutum
  Clone ID: LIB3829-013-Q6-N6-A6.pep
RDPLCHSFLSLFSSSILPSQYMKKSSFEPYFSSGFSSNFLFLVIYHLWLMIKIPLSSSSSSSIILFTRKPNYFFIQTHHCLIICLFLCFFPSSLRNIRSQNSFYGFCYIEKAITGI

SEQ ID NO: 108229 - protein, 102 aa, Gossypium hirsutum
  Clone ID: LIB3829-013-Q6-N6-B5.pep
KASVLGLALTFMGVGVFFWPRPFPFSSPSRFCFNYGLGLAPFFYFLAPGLGFLRSLSLLGWWECAFAFALGPGTRGRGFCFAFLFIFWHLGLGESFWAVFVF

SEQ ID NO: 108230 - protein, 132 aa, Gossypium hirsutum
  Clone ID: LIB3829-013-Q6-N6-C1.pep
SFPKFPKLTTLLLSLNSLKEIPESFFEHFPNLKILDLSYNPFKSLPNSISSLEKLEVLLLNYCYELESFPSVLKLQALKKLNLRSTAINKIPQGLEMLVNLRYLNLGCTRRLKEIPTGLLSKLCRLQYLVIH

SEQ ID NO: 108231 - protein, 96 aa, Gossypium hirsutum
  Clone ID: LIB3829-013-Q6-N6-C6.pep
NFHYSIENSQHYTMFFATIRDHTAFKRYFLCIQTKDGINVSYACNFPLVLRYSPVTGLSNLFRSNRMTDNSTAMSQIPDILNLIIYSLGGPTGGIN

SEQ ID NO: 108232 - protein, 97 aa, Gossypium hirsutum
  Clone ID: LIB3829-013-Q6-N6-D6.pep
RSACSSEKSEDEAEQLDLQSFWGLFLICGIACVLALFVYSLLMFRQYRRHCPEELDSTSHNNSFSAHLRTCLSFIDGKVEKSKSSSKRKRDSMHSDV

SEQ ID NO: 108233 - protein, 128 aa, Gossypium hirsutum
  Clone ID: LIB3829-013-Q6-N6-F3.pep
NTPNYIFPFNLAAKKKNGGIHNYYHHFFGCAHAPPTHEDDMVTMNAVKVVLEMLNNNDNTMMEATVAASPMLPGFGQTPLARQLRITDSPFPLRDVDEDNGYVDKAAEDFINRFYKDLRQQDKRLSEL

SEQ ID NO: 108234 - protein, 94 aa, Gossypium hirsutum
  Clone ID: LIB3829-013-Q6-N6-F5.pep
VSDGLMASTVKLVKSRRQILHFQNLTQGATLDILSSRHEAAPVSLKNIRQRKADGVPNHWSKQILHQFCKMKSFKNVVFMNICESLEYPESNVV

SEQ ID NO: 108235 - protein, 51 aa, Gossypium hirsutum
  Clone ID: LIB3829-013-Q6-N6-G4.pep
LGWQTFLHDFEWLPSDQNPVDLSEVLRLSCEMANPLSVNVRPRRKLSLSHQ

SEQ ID NO: 108236 - protein, 104 aa, Gossypium hirsutum
  Clone ID: LIB3829-013-Q6-N6-G6.pep
SSAACSNAVNPKTEMSKSNLPQEESKKAIPTTNMVGNHVKSSENVQGQQQQVGKKHDKTKIPQFRCTICNITCGRSEDLNSHLWGRKHLANIQKLNNLGEGQLA

SEQ ID NO: 108237 - protein, 53 aa, Gossypium hirsutum
  unsure (1)..(53): unsure at all Xaa locations
  Clone ID: LIB3829-014-Q6-K6-B1.pep
SVSYKTKHGRKTKXESFQRRNQPTIFHRSSRADAWQILYENGFFLIIIWCYPT

SEQ ID NO: 108238 - protein, 211 aa, Gossypium hirsutum
  unsure (1)..(211): unsure at all Xaa locations
  Clone ID: LIB3829-014-Q6-K6-B2.pep
SFYQLLRSQLIWRRELDDDAAPELMDVLVDTLLSLLPQSSAPMRTAIEQVFRYFCGDVTDDGLMRMLRIIKKDLKPARHQEAGSEDDDDNDDDLLGIEEDEEEDEDMDEAETGETADSDEQSEDSEAVVGSEGADKDIPXDSDESDGGMDDDAMFRMDTYLAQIFKEKKNQAGGETAQSQLVLFKLRVLSLLEIYLHENRGKPQVLTVFSN

SEQ ID NO: 108239 - protein, 71 aa, Gossypium hirsutum
  Clone ID: LIB3829-014-Q6-K6-E1.pep
SIVIFISFVEIKCQHKICKGLRLSNTLNQGFYSVVRVCLSPSIKMVERLICSKFWGLTEWGNGMYFFYTIF

SEQ ID NO: 108240 - protein, 100 aa, Gossypium hirsutum
  Clone ID: LIB3829-014-Q6-K6-G1.pep
IILPFFFFFFFFFFFFFKKKKKGFSMNSSEFTKLFGPNHLKDQKIDKMGGFLVFISPPNCMHIHLSNSNLTVHFNQKRPPSPVFFNSRVKTACFMLSRLE

SEQ ID NO: 108241 - protein, 91 aa, Gossypium hirsutum
  unsure (1)..(91): unsure at all Xaa locations
  Clone ID: LIB3829-014-Q6-N6-A6.pep
IPGRWIHPFRGGTYHTKFAPPKVPGFDDVPGEPLIQRRDDPPAVFKSRLEAFYXQIEPVIHYYGSKGIFANFSGEKPPKKVTFEVQKVFFS

SEQ ID NO: 108242 - protein, 90 aa, Gossypium hirsutum
  Clone ID: LIB3829-014-Q6-N6-B2.pep
MNSNESKRDASKKFLKSHLQSLGHLIETLVTKMPEKKSRKTEVHKCCDKIFQMITTLDLTKAFLKCLEPGTLSACESQLGPVFLKLKKLK

SEQ ID NO: 108243 - protein, 60 aa, Gossypium hirsutum
  Clone ID: LIB3829-014-Q6-N6-B5.pep
LVLVSTPMQRHVLASTRTKIRETTGSTANQFPSARDFMADFLVCKTSCVDCKITEHFGFL

SEQ ID NO: 108244 - protein, 57 aa, Gossypium hirsutum
  Clone ID: LIB3829-014-Q6-N6-E1.pep
PRGAPLIKTSPPFPPFFSKWEVKTPPSPCPYGFPPLTLWKSFPPLLNMGCMPPGPPF

SEQ ID NO: 108245 - protein, 119 aa, Gossypium hirsutum
  Clone ID: LIB3829-014-Q6-N6-F6.pep
PVLSLWSLQQRPGNILRRTWAGHTQHKGHHNPDGNTLHSYIPTERGSIGIFGTWGICGTWGIGGPTGIGGIPRELWDWGDFWNSWDFRNLRKWRNESTRDYNYRNRRKNNIYQGPLQNQ

SEQ ID NO: 108246 - protein, 76 aa, Gossypium hirsutum
  Clone ID: LIB3829-014-Q6-N6-G2.pep
NLFIIRKVHYNGRECVQVLYFARNRLCSSLLNANCYTSNRLHLQRISPKKILKSISKDIFWTEKSPSTKTKLVDGT

SEQ ID NO: 108247 - protein, 95 aa, Gossypium hirsutum
  unsure (1)..(95): unsure at all Xaa locations
  Clone ID: LIB3829-014-Q6-N6-H3.pep
SVSVPPKEDDYDFLKKGRKQTEERLQKALARVKSMAQNPAGRDQYSRMKNVVTEIQEKVLYDKVLNFAGETTDLDKDLIDLEXLLDEDTFMLTAP

SEQ ID NO: 108248 - protein, 101 aa, Gossypium hirsutum
  Clone ID: LIB3829-014-Q6-N6-H6.pep
GGAPPQRESQKNPPPIGGGHLPIGGQNKFKWEGKKPLNQKGGSESGFKKIRAPIAKVHFPQKGGGKNPKGAPLIKGKNLSLPGKKSKKKPPFFDKKQVFGS

SEQ ID NO: 108249 - protein, 52 aa, Gossypium hirsutum
  unsure (1)..(52): unsure at all Xaa locations
  Clone ID: LIB3829-016-Q1-N6-A12.pep
CSSAFSISKLAVIFXVWYLHMHXPFVMFLCSSTKSVLSHNIFSSVQSYILVF

SEQ ID NO: 108250 - protein, 57 aa, Gossypium hirsutum
  Clone ID: LIB3829-016-Q1-N6-A5.pep
KPPGVFLFPRGTLGVIPGGAKYNFPLFAVLGFFNNVFNPFWGFFSPPPPIFPLLGSV

SEQ ID NO: 108251 - protein, 49 aa, Gossypium hirsutum
  Clone ID: LIB3829-016-Q1-N6-A9.pep
PSSSVTLKSGIENMLMHYVPKVKGVEQKFYAKNEDEDPALVGKLEKFKG

SEQ ID NO: 108252 - protein, 60 aa, Gossypium hirsutum
  unsure (1)..(60): unsure at all Xaa locations
  Clone ID: LIB3829-016-Q1-N6-B1.pep
KAVLGKENRGYVQIQVDKVKAAKNVLVSDARYVINQMQQLQTTSVDNSSELDDIDDDDDX

SEQ ID NO: 108253 - protein, 128 aa, Gossypium hirsutum
  Clone ID: LIB3829-016-Q1-N6-B4.pep
RLRAPPVDTCSYDLHISNSLFDLKPGDHIEIQWRRNREFPYGWWYGVVGHMESCNGNEYHCRCQDTDTVMLEFKQYPSSSRWRKTMINRENHREVGNEGDGFYGGIRKLYNQQEISMWQSLWPNQVIE

SEQ ID NO: 108254 - protein, 154 aa, Gossypium hirsutum
  Clone ID: LIB3829-016-Q1-N6-B8.pep
AQILLILFGKRRKCISKRRIRAAVWCSYLLADSLASIALGILTNDLGEIYDKGGALDLSTELKATWAPFLLLHLGGPDAITAYSLEDNQLWLRHLFGLIVQTIVTIYILFMAWTGSLLSKLTIPMIVAGSIKYAERTWTLWRASPGELRDSMLT

SEQ ID NO: 108255 - protein, 66 aa, Gossypium hirsutum
  Clone ID: LIB3829-016-Q1-N6-C2.pep
SSSSIQSPAFLNVSLSNSEVVGREATNVQLGNNLPTTVASGDSNIWLKEKWTPGEIPEEAPPDAYV

SEQ ID NO: 108256 - protein, 63 aa, Gossypium hirsutum
  Clone ID: LIB3829-016-Q1-N6-C8.pep
GDFFKSYECRDSGATDSTRILQLCSRSAVAGGTSCWCSWNIWRLMGSCCETMPLDGSESPPSS

SEQ ID NO: 108257 - protein, 67 aa, Gossypium hirsutum
  Clone ID: LIB3829-016-Q1-N6-D9.pep
EAHPFRIFMVVRDFLSILDQVCKEVAKVNERTIYSSARPLQNPPTPSVFPGLNVRRHYSSSDDETPS

SEQ ID NO: 108258 - protein, 40 aa, Gossypium hirsutum
  Clone ID: LIB3829-016-Q1-N6-E1.pep
DKKPGAFYLTSGSKRNSFTCCVIFKVLSFDEFCKQSYAYL

SEQ ID NO: 108259 - protein, 84 aa, Gossypium hirsutum
  Clone ID: LIB3829-016-Q1-N6-E5.pep
IRKQHIRTLILSTGWKFADSNGEMKKKKKNKKITPEEALCSIKSRAQPKTKKGRTQEHCKKNKNLLTKRRPPTLQSGKNHPCQP

SEQ ID NO: 108260 - protein, 135 aa, Gossypium hirsutum
  Clone ID: LIB3829-016-Q1-N6-E6.pep
GAFYLPPLGFLQKGPLLGGPLNAPLSGPGGEGLFAGGRPVFLKKNRPGAPSPIRLFSSPLGTPPASGFFCFPVVSGGFWRDPFFFGWPAFLASPAFLFLLPVWVFCGPFSVVPLFSWGRPVALFSPRLLCGLIYG

SEQ ID NO: 108261 - protein, 34 aa, Gossypium hirsutum
  Clone ID: LIB3829-016-Q1-N6-F2.pep
TGNIEGINYWNVKCSECKYKFFLALKQVAFYLMI

SEQ ID NO: 108262 - protein, 47 aa, Gossypium hirsutum
  Clone ID: LIB3829-016-Q1-N6-F7.pep
LLVTPIGDPLKDTFGPSLNILIKLMAVESLVFAPFFATQGGLLFKIF

SEQ ID NO: 108263 - protein, 68 aa, Gossypium hirsutum
  unsure (1)..(68): unsure at all Xaa locations
  Clone ID: LIB3829-016-Q1-N6-G1.pep
SKLTYLLQPCLGGDSKTXLMFVNVSPXPSSVGESLCSLRFAARVNACEIGVPRRQMTLRAADSRLSCG

SEQ ID NO: 108264 - protein, 143 aa, Gossypium hirsutum
  Clone ID: LIB3829-016-Q1-N6-G6.pep
GKKGTPSITKKEIIKWVMPKPTLENGKTLFKKGKGGPKNTTGKKLGFLLKGKVLKPYHLRVYGILGFFLFFFLLALKNPGPINRNRGFPAPLGLFFFFFQKLFWIGGKNLNLNLGLFFFFLPNLFLSLRKRIPFTLFRGLLLF

SEQ ID NO: 108265 - protein, 73 aa, Gossypium hirsutum
  Clone ID: LIB3829-016-Q1-N6-H6.pep
QVAHLFSLNQIMWILLHMRVIGPNRYIVSYIDKNRVMFCPSRVTPKIGSEKASVDLPIGSQSQFHTRTSVVFG

SEQ ID NO: 108266 - protein, 79 aa, Gossypium hirsutum
  Clone ID: LIB3829-016-Q1-N6-H8.pep
FQGSVSVFIIPQTSHLLGYFWSTVRKNNWVLKFKMLDGLGEPVFFLHWVVLGKAFLLSNYVLYERPRGGQRRFINPGEW

SEQ ID NO: 108267 - protein, 56 aa, Gossypium hirsutum
  Clone ID: LIB3829-016-Q1-N6-H9.pep
RQQRSPSHENVRKLMKYPTQVSLKGIGVCYGKAACIFGVCSSFLLIIFRSENRYRI

SEQ ID NO: 108268 - protein, 172 aa, Gossypium hirsutum
  Clone ID: LIB3825-003-Q1-K6-A10.pep
FLLVLLIFLFYWSTNSQTKMIHKRPYTDDSQEVACKHMRQCDDTVHIASFVDVNDVHPNNAFQNHQIPEGKWEDIYTGCQDEGRFAEDQCNNVHRGTNKEYESGASACVPHFWWVNGNGMDADAESNVAVHLPLFPEYFASGNQVQAFLHSDEIYSSLLSPKKVSVGPEYQA

SEQ ID NO: 108269 - protein, 91 aa, Gossypium hirsutum
  Clone ID: LIB3825-003-Q1-K6-B7.pep
AENRHVVGSYMLECSCREIQAYPRGSCCQAQCYSWLSCHRIISSLRMPKRCDYDCIRFIIIQTERETSPHKENGNTYKRHRDNLAPYGKCK

SEQ ID NO: 108270 - protein, 173 aa, Gossypium hirsutum
  Clone ID: LIB3825-003-Q1-K6-D9.pep
RRRSNCRQKASFLSRRTTFDGNIPSPEIPQSSGPITPPALPSGETLDSRSFWKAGNYVIGPTSKPALLEGALEHARVHPKFLHSNATSHKWAFGAIAELMDNAVDEIQHSATFIKVDKIDIKMDNSPGPALLFLDDGGGMDPVLLRKCMSLGYSSKKSNTTIGQYGNGFKTST

SEQ ID NO: 108271 - protein, 161 aa, Gossypium hirsutum
  Clone ID: LIB3825-003-Q1-K6-F10.pep
MNRSAWWSLIASSVSCFPVHALQNVEWPEQFPFKDEDFQRFNETPDSLFYEAPRFVTHIDDAAIAALTKYYSEVFPPSNTPGVSILDMCSSWVSHFPKGYKQERVVGMGMNEEELKRNPVLTEYVVQDLNLKPKLPFEDNSFDVITNVVSVDYLTKPLDVF

SEQ ID NO: 108272 - protein, 101 aa, Gossypium hirsutum
  Clone ID: LIB3825-003-Q1-K6-F12.pep
LKFYAFLCFFIFNFFLRREENIMKITARKRMLEVAGRRLERKNVRKEEWYNNVEAGAGGNTALARVLVPVEKKGEGRSSVDRESNNQQLIQLEEKDVGTSA

SEQ ID NO: 108273 - protein, 62 aa, Gossypium hirsutum
  Clone ID: LIB3825-003-Q1-K6-G12.pep
DAPCIGALITGGVGGTHTQTDTLASDLPTAPFFFFPSFLATYAGFPRQAINKGLALWMRSID

SEQ ID NO: 108274 - protein, 64 aa, Gossypium hirsutum
  Clone ID: LIB3825-003-Q1-N6-A10.pep
SHVCSIFLNQKLNTFFVPKMKPPLNKEESKYIILAKRPNFKSNRELLKFWSVTTRMLLYYFQHP

SEQ ID NO: 108275 - protein, 96 aa, Gossypium hirsutum
  Clone ID: LIB3825-003-Q1-N6-A5.pep
KYCKKAWNEWRANLIHTYFRNPWAMLSLIGAIFLFALTIVQTVYTIYPYYHDSSPSPPPPLAPPPKAPPPIAQPPTAPPMASPKHRVPSQSNRTHH

SEQ ID NO: 108276 - protein, 121 aa, Gossypium hirsutum
  unsure (1)..(121): unsure at all Xaa locations
  Clone ID: LIB3825-003-Q1-N6-A6.pep
GNKWYTWTSGGDKSFKNPESGFEWREKSGWINQRTKEWENTSDSESESEEEKSYDVGSCSDREILGLPXAGPIKIEDVKNAFHISALKWHPDKHQGPSQEMAEEKFKMCVGAYKSLCHALS

SEQ ID NO: 108277 - protein, 117 aa, Gossypium hirsutum
  Clone ID: LIB3825-003-Q1-N6-A7.pep
KGEQMKEGLKEKPEPANQKPLEPPEPANQKPMEPPKPANQKPKGPPKPPTAKPNQPPEVVKGKAKEPKEPSGGIFHQPGKKLRNRAQGGINPVKQPFGMANPDENDHNYPAPVPRKV

SEQ ID NO: 108278 - protein, 68 aa, Gossypium hirsutum
  Clone ID: LIB3825-003-Q1-N6-B1.pep
VVKMDPPWRFPIFNPLKSRIPMLVNRPKNEKVSRFYKTFSNFKVFLTASPKLFLLFRNFKVFFLPPWV

SEQ ID NO: 108279 - protein, 68 aa, Gossypium hirsutum
  Clone ID: LIB3825-003-Q1-N6-B12.pep
EGLPIKVCLYDESDHIPVHTEEKIFYVEDDYREYLLRRGYTGLREINGYRNIDNLDDLRTNAIYRGVS

SEQ ID NO: 108280 - protein, 78 aa, Gossypium hirsutum
  Clone ID: LIB3825-003-Q1-N6-B2.pep
VGVTCFSSYPVFAMYSWRRRSPSYSPRGLKAMGNMVSGSVYISGKVRVKGFFFGYLPMCLIMRFFQRQMLMVFLKNEA

SEQ ID NO: 108281 - protein, 77 aa, Gossypium hirsutum
  Clone ID: LIB3825-003-Q1-N6-B4.pep
MVRKSNGKLIARSVSMPTLSEMVDGGIAFAHYCLTGNEFLRLCTGAIPGTRDYGRQQCKDLHLLPPQVESPIYGCYL

SEQ ID NO: 108282 - protein, 52 aa, Gossypium hirsutum
  Clone ID: LIB3825-003-Q1-N6-B6.pep
EDPAIQTRTLKPATDTRISKRETNRYQLPQKIQSTPYLNTRPNKINVCIQHY

SEQ ID NO: 108283 - protein, 91 aa, Gossypium hirsutum
  Clone ID: LIB3825-003-Q1-N6-C12.pep
RTLILAMQEVYHQILMLPGRIKRVRTRLEDLLKMPKDDEPFVVYKQNFYSFSLFKKSIQHFDKVYWDKYQMLILAMQEVCHQILIPGRIKG

SEQ ID NO: 108284 - protein, 66 aa, Gossypium hirsutum
  Clone ID: LIB3825-003-Q1-N6-C2.pep
RKSFFGGFPTLARASPPPVGDSFWVFCLVWAHFTPCLPPKPYSLFRGGRFLSWDFSPAWGNQFFRF

SEQ ID NO: 108285 - protein, 71 aa, Gossypium hirsutum
  Clone ID: LIB3825-003-Q1-N6-C7.pep
QWCKEPRCSVAADCLMFLLDLGDNCRTIGSWGFSRLGNSSKSQRVWFLNVYFILRPDLFSFLFFKNKGHQP

SEQ ID NO: 108286 - protein, 64 aa, Gossypium hirsutum
  Clone ID: LIB3825-003-Q1-N6-D11.pep
CNRQEYHDLKRMIEREAQRKRFRLNFFGRVSIIEYVYILLLLSARLSFDRSICRNCFKLHSTMC

SEQ ID NO: 108287 - protein, 99 aa, Gossypium hirsutum
  unsure (1)..(99): unsure at all Xaa locations
  Clone ID: LIB3825-003-Q1-N6-D6.pep
NPASPDPQKVAPPLGPDPVSPMPGQALQAFLAPGPVSRAISPNVFXAEGLYRALXKLGIFWGKVGSPLENEGVGSFQKSFSTLFAPLQEKATPLKFVIF

SEQ ID NO: 108288 - protein, 69 aa, Gossypium hirsutum
  Clone ID: LIB3825-003-Q1-N6-D9.pep
MNRFSFDLFCFQKKKKKKKKKKKKKKKKKKKKKKKKKKKKKKKKKKKKKKKKKGGAPPFFFFLKKKKFF

SEQ ID NO: 108289 - protein, 73 aa, Gossypium hirsutum
  Clone ID: LIB3825-003-Q1-N6-E2.pep
CTTGKPVYVIGAERCTWKFADFQKSLRERGAVCPFTGKEDISESWSYTPLNDTAEAASQVMKALAAQGWTIDA

SEQ ID NO: 108290 - protein, 64 aa, Gossypium hirsutum
  Clone ID: LIB3825-003-Q1-N6-F10.pep
GLPVCIDVKTCIMNISNLKASKFMVAINLSLKEIHFCLQAVEISPNPGRPDPMYIVFSRKLSTA

SEQ ID NO: 108291 - protein, 65 aa, Gossypium hirsutum
  Clone ID: LIB3825-003-Q1-N6-F11.pep
NPKGIPSPNLQGDQQIKVSPSLSFKKHPFNNNHLVTIGVTNNQPPPLIFCFGVPGTINWPNLCLP

SEQ ID NO: 108292 - protein, 70 aa, Gossypium hirsutum
  Clone ID: LIB3825-003-Q1-N6-H8.pep
KALGISRLKVYLSSNCGVFGPGVLVGPGIVFLLGPPDWEGFLSFRPRDFIKFFRPGSPFLPVSPGWVLLF

SEQ ID NO: 108293 - protein, 135 aa, Gossypium hirsutum
  Clone ID: LIB3825-004-Q1-K6-A10.pep
MVSRSYSNLLDLASGDSPSFGGERKRFPRVATVPGLLSEVDDETCNSVGSEAPSSVSQERMIIVGNQLPLRAHRNEDNGEWCFSWDEDSLLLQLKDGLGEDVEVIYVGCLKEQVALNEQDDVAQTLLETFKCVPA

SEQ ID NO: 108294 - protein, 178 aa, Gossypium hirsutum
  unsure (1)..(178): unsure at all Xaa locations
  Clone ID: LIB3825-004-Q1-K6-B8.pep
MKKXIDVIRAKDIAQGGLTQGQQTQIARNEQRITQILEELESLEETLNESIRESIGARGGTTRGKRKGGPDDDEEDFSSDDDEFYDRTKKKPTVQKIGETQSIETADSLLDKRDAITKEIEDKKELLLTEKNKMASDTGLETEAGDALDAYMSGLSSQLVLDRTVQIEKELSALQSEL

SEQ ID NO: 108295 - protein, 90 aa, Gossypium hirsutum
  Clone ID: LIB3825-004-Q1-K6-C12.pep
MTLTYRTVYVPMIGSHSALGSRASPCHRDSTTVNGLNPRQPLPSKERAMDTVSLMLDMNESRNGKSSMNKNIEPVYSSYSAKNGSVSTQD

SEQ ID NO: 108296 - protein, 88 aa, Gossypium hirsutum
  Clone ID: LIB3825-004-Q1-K6-E12.pep
SELMACTSAKATHSISLTNFSPLTRPLRPSRLGRLNSFHCKPLLFSPLSTRYKPLFLPLNSDTISNRCVANDEHTHTHESGHDNDHLS

SEQ ID NO: 108297 - protein, 87 aa, Gossypium hirsutum
  Clone ID: LIB3825-004-Q1-K6-F10.pep
YSLHSSSVFLPPSADSDLISLEFSCDFCLHTVIRFATFIMCFVQTLNVSLHILYPSAHIYHFHSHILHPLCFDHFLSRYFSSEISFP

SEQ ID NO: 108298 - protein, 59 aa, Gossypium hirsutum
  Clone ID: LIB3825-004-Q1-K6-G12.pep
LYLVVHHHWKLNSDRSTVYFNVVYQHLQFSLLPKSQPKHATHTRSFSLLISLSSYPNMF

SEQ ID NO: 108299 - protein, 155 aa, Gossypium hirsutum
  unsure (1)..(155): unsure at all Xaa locations
  Clone ID: LIB3825-004-Q1-K6-H7.pep
WRPRRPRTRRPPTKLPWGELYEDDREDLNFLLPPIASNSDTLEERGSRNVIEYKFNXEXNKVKITTTTRLLKLLNARLSKQAEDLXSYPKYYDAAREYVCSRLTIVSTEEIILERPRAPGTXSXEPNATRDYLAQLRKGGAVLIVCRTCSNKGDH

SEQ ID NO: 108300 - protein, 138 aa, Gossypium hirsutum
  unsure (1)..(138): unsure at all Xaa locations
  Clone ID: LIB3825-004-Q1-N6-A2.pep
GKRKRTGKGGGLKFRPRTPTYPPPKRGFKKAGPGSSSTGSFFPGDVAKPLPLDGVSLDSKQGQGXLLKPFMPPTNYRTRLLATXKRVISPPACYPRWVESLQFDIKRTGQKSHCGSLRRDQRNAWLXLNSGIPLVRTS

SEQ ID NO: 108301 - protein, 71 aa, Gossypium hirsutum
  Clone ID: LIB3825-004-Q1-N6-A8.pep
DAMIRIQCKRKNHPAARLMAALKELNLDVQHASVTVVNDLMIQQATVKMGNPFYTQEQLRLALISKIGSEI

SEQ ID NO: 108302 - protein, 143 aa, Gossypium hirsutum
  Clone ID: LIB3825-004-Q1-N6-B9.pep
YWLKSGLMTLKYEFNMQTRPRGQQKKKHSGTFQPKKNRVPTQKKENEKYKNIGEKTRHGKQTQPPKKKKKLPPKKNSRKLPLLWPKKPWGKKKKNLGFNGKKAQPLHFFKKSRCRGNFLFWFPGKKNFWELLQKRLAIFHRCK

SEQ ID NO: 108303 - protein, 49 aa, Gossypium hirsutum
  Clone ID: LIB3825-004-Q1-N6-C6.pep
LYFDTLGYGQYYCSSYEPTRNLELSHLYIFRFSSKAEIKDYDFWTKKYT

SEQ ID NO: 108304 - protein, 156 aa, Gossypium hirsutum
  Clone ID: LIB3825-004-Q1-N6-C9.pep
QKTKIKKSAQPAWKTIKRRVLILRETFPQIKKGKNGGERAKKKKKGGPGHPKNLTSKTQNIIKGKKRGKNPKKKTEPPPRKKQKLTGTHQTIGKSSKTWGNRGGKKKLEPRLGQLTGGGGLPPKKRLPFLEKLFFLGLKTRGLTKKKHPLKSFGEG

SEQ ID NO: 108305 - protein, 47 aa, Gossypium hirsutum
  Clone ID: LIB3825-004-Q1-N6-D4.pep
KNKKNFWHRGNFTGKKRILKPQRFAKKKKGVPFWKNYPSNNTSTGNL

SEQ ID NO: 108306 - protein, 97 aa, Gossypium hirsutum
  unsure (1)..(97): unsure at all Xaa locations
  Clone ID: LIB3825-004-Q1-N6-E1.pep
VVADIMVVVGYDDEDSXCYIMPLSTIIQHFFLLGRPSVVRFLLLFXEQQVKNNHLLSVFLVKKKTTMVANNQPASSRGLLDSLIQQAAQVFCLLNSQ

SEQ ID NO: 108307 - protein, 50 aa, Gossypium hirsutum
  Clone ID: LIB3825-004-Q1-N6-E10.pep
PKTKAFMPTFPAQHAQDRRMRRMLKSPDPLEEQCRKELQQGEFGTGGLFG

SEQ ID NO: 108308 - protein, 83 aa, Gossypium hirsutum
  unsure (1)..(83): unsure at all Xaa locations
  Clone ID: LIB3825-004-Q1-N6-E11.pep
ILVKDLKVFASLNKEHFKEITQLLTLDNFRQNKQLSNYSDKKSARNIMLVELKMLIGANPLFRDKLAFPAFKXSQLRTLMNQR

SEQ ID NO: 108309 - protein, 47 aa, Gossypium hirsutum
  Clone ID: LIB3825-004-Q1-N6-E3.pep
YSLQLMAVKMLLPYIINSLLVIISYRKRPKNNSTIKKTQIDIKLDSD

SEQ ID NO: 108310 - protein, 64 aa, Gossypium hirsutum
  Clone ID: LIB3825-004-Q1-N6-F10.pep
FLKVEKTDSVNTPVKTMVAFIRFFTGGQEKLSLTQSMTQTVLSNKYSILPKLRFIIALHRTYNL

SEQ ID NO: 108311 - protein, 91 aa, Gossypium hirsutum
  Clone ID: LIB3825-004-Q1-N6-F6.pep
FTQYQAIETIRKQAQEQSKQYQKGDKQYRNNLHEKDPSKDPHKPGRSSDNPGAPANDKRTTPNEDRSKPKESTEKRKKSHVKNLRHSLKQS

SEQ ID NO: 108312 - protein, 77 aa, Gossypium hirsutum
  Clone ID: LIB3825-004-Q1-N6-G8.pep
VGLGHLLQGSKDIAKVKDDQEWEIIETRKALSRTGPIDAYKPKKISLEEELKALQQKVDINNYDYKRIPKPNEGNSG

SEQ ID NO: 108313 - protein, 63 aa, Gossypium hirsutum
  Clone ID: LIB3825-004-Q1-N6-H3.pep
LIDNGNLEGISTPLSELEALQDIQDEYMVQLETEQMLLLNKIKELGQEMLNSSPSLSRNSFGS

SEQ ID NO: 108314 - protein, 97 aa, Gossypium hirsutum
  Clone ID: LIB3825-004-Q1-N6-H4.pep
FRGGPAESSSEELNMFHSNEAGGRQPSYPQSSKKRFRTKFSRDQKDKMMEFAEKLGWRIQKQDEPEVQQFCAQVGVKRQVFKVWMHNSKQAMKKKQM

SEQ ID NO: 108315 - protein, 83 aa, Gossypium hirsutum
  Clone ID: LIB3825-004-Q1-N6-H8.pep
VGFIQLPSPDFVSRSLRVPPGQKRSEESFKGLTKLKGDASHFVFEASRFRESIFPYRILVPIDHQSGCFVSRSCMVHQCVEGL

SEQ ID NO: 108316 - protein, 170 aa, Gossypium hirsutum
  Clone ID: LIB3825-005-Q1-K6-A9.pep
MMNLSSTMNAYGCRYCVSPLKQLLHTTNHHLRFRPCSPSLFSSSFNNLKLPNFNLLLTSNSFFFTMEHLWDRSGMNTNKKMVEHLQQYGVISSEKVARVMETIDRALFVPDKTPAYADCPQEIGYNATISAPHMHATCLQLLEEKLQPGMHALDVGSGTGYLTACFAMMV

SEQ ID NO: 108317 - protein, 67 aa, Gossypium hirsutum
  unsure (1)..(67): unsure at all Xaa locations
  Clone ID: LIB3825-005-Q1-K6-B12.pep
AFTYVKSQEEKDAHDSHEILRKANTSRAXDPLAVSXDSGYDKNCKXFIAEVLKAFGQIDILAYNAVD

SEQ ID NO: 108318 - protein, 184 aa, Gossypium hirsutum
  unsure (1)..(184): unsure at all Xaa locations
  Clone ID: LIB3825-005-Q1-K6-B8.pep
ANISAQSIGXISALXGKGFGVSGSLGLDGTGGLQLLDIKNNGDDVDGLMGLSLTLDEWMRLDSGELNDDEDQISERTSRILAAHHAISLDLIRRGSKGEKRRVKKCGLLGNNFTVALMVQLRDPLRNYEPVGTPMLALIQVERVFVPPKPKIYTTVSASRNDNQEDDDSDSAVNEVNEEEIKEE

SEQ ID NO: 108319 - protein, 75 aa, Gossypium hirsutum
  unsure (1)..(75): unsure at all Xaa locations
  Clone ID: LIB3825-005-Q1-K6-B9.pep
SSAEACKLIIANETGQVHLVMRQSQDSQDXTNHLVLPTMTXQEHAMNPXSLLWHASDYADRELQDNLFCLRSASV

SEQ ID NO: 108320 - protein, 114 aa, Gossypium hirsutum
  Clone ID: LIB3825-005-Q1-K6-C7.pep
SKQNSKIIKKLKKIMMERKHLSSIANHVLQRSAEELGSSVDHLVKEFEAKWTPEVGDYSKKLVEFCSSKALIKFCQNINEKISDGSYSRFTYDMMLAWDNPRAVDEESSTARIY

SEQ ID NO: 108321 - protein, 88 aa, Gossypium hirsutum
  Clone ID: LIB3825-005-Q1-K6-C8.pep
ISSLGSLPSFCLFCTFSFKEKWAFDFFCTSNSMFLSVCCAPEYFFWSCHRFLFSGWSLRFFIFFWNFLPLKLFWFLMSCSSLNRILFS

SEQ ID NO: 108322 - protein, 63 aa, Gossypium hirsutum
  Clone ID: LIB3825-005-Q1-K6-C9.pep
SLIAFRLLSSTKALESAESFCLHRAIPGVVWHALNKMVSCRGEALARDHRIAMNEELSVRYRR

SEQ ID NO: 108323 - protein, 91 aa, Gossypium hirsutum
  unsure (1)..(91): unsure at all Xaa locations
  Clone ID: LIB3825-005-Q1-K6-F10.pep
PYKLVTDTLFYYKQYSLVDEAYFDGENQLXTFVLIVHDLNPIKLTSSALMLFTRLFGPKLEISIMTTDSYTQAGXRANEHILAGDIFHIAL

SEQ ID NO: 108324 - protein, 96 aa, Gossypium hirsutum
  Clone ID: LIB3825-005-Q1-N6-A3.pep
SEHQKTMVGGNFFSLFGEVGPDAAAQVTGVFFEMGPTGVFHLVGFPKGFKAKVSKTMEVFRAVGQPQQQAGGGVDQLGLLFFNKNPFLLVGRSVGL

SEQ ID NO: 108325 - protein, 92 aa, Gossypium hirsutum
  unsure (1)..(92): unsure at all Xaa locations
  Clone ID: LIB3825-005-Q1-N6-A9.pep
KKAFFLRHVGNGREGWPKWAPXDAIHVGAAAPEMPRALLVQLKPGGRMVFPVGNIFQVLKVVAKNPEGSISIRSEGFVRYVPLPSGEAQLQS

SEQ ID NO: 108326 - protein, 54 aa, Gossypium hirsutum
  unsure (1)..(54): unsure at all Xaa locations
  Clone ID: LIB3825-005-Q1-N6-B12.pep
SRVKYNVLDGRDILXLWSTSISIGRHCKYGLPSSLYLDFCTVTCHSIFNLVPFC

SEQ ID NO: 108327 - protein, 71 aa, Gossypium hirsutum
  Clone ID: LIB3825-005-Q1-N6-B8.pep
KSNKHPLLKSYSKTAPKTSTPSTAKVQPGDTLWSISSRIHGTGAKWKELAALNPHIRNPNVIFPNETIRLK

SEQ ID NO: 108328 - protein, 123 aa, Gossypium hirsutum
  Clone ID: LIB3825-005-Q1-N6-B9.pep
TGTLGYMAPEVLNGNPYNRKCDVYSFGICLWEIYCCDMPYPDLSFSEVTSAVVRQNLRPEIPRCCPSSLANVMKRCWDANPDKRPEMDEVVSMMEAIDTSKGGGMIPHDQAQGCLCFRRYRGP

SEQ ID NO: 108329 - protein, 177 aa, Gossypium hirsutum
  unsure (1)..(177): unsure at all Xaa locations
  Clone ID: LIB3825-005-Q1-N6-C9.pep
KINSWQCLNYEKSTFFFSTNTEQGVRGDVTMILRVRRANDLKRYLGLPSLVGKQKKSSFQSLKDRLKGLTXWSITFLSQGGKNVYLSGSXTIPTYSMSCFLLPKTFCADLERIVANFWWRKRMNRKSIHWLTWENLCLLKEDGGFGFRNFAKFNIALLAKQGWRLVNCPNSLLARVL

SEQ ID NO: 108330 - protein, 116 aa, Gossypium hirsutum
  Clone ID: LIB3825-005-Q1-N6-D1.pep
ANGFGVPPTKKQKKKPVAVQGSGLSSGNPFQRRCSHCQVQKTPQWRTGPLGAKTLCNACGVRYKSGRLFPEYRPACSPTFSGDLHSNSHRKVLEMRKRKELAVNDSVESTRLVPSF

SEQ ID NO: 108331 - protein, 132 aa, Gossypium hirsutum
  Clone ID: LIB3825-005-Q1-N6-D3.pep
NKEKIYNTKNLPEENSIICCKPFYLHRQSRVQVCGLRNAALLYQSASRDGTYDLCTVHQKLIWLQNKTSSAHSFASLRNDTVRICYQRFCSNMFAFSRPGLPTVSYSILWDTPVLQFMFCTQLEQEDQTIRL

SEQ ID NO: 108332 - protein, 82 aa, Gossypium hirsutum
  unsure (1)..(82): unsure at all Xaa locations
  Clone ID: LIB3825-005-Q1-N6-F10.pep
PKVQAMKLIDQLKVGRRARYSGGFAGFSFAGDSYIALALKTIVFQSGLRYHNMXKEKSERDVKLGDALLQAGAEIVPASVPR

SEQ ID NO: 108333 - protein, 89 aa, Gossypium hirsutum
  Clone ID: LIB3825-005-Q1-N6-F5.pep
PPHWGPHRRPLWLLRARLPLPPWVPPPRFWVFFRPAKFPPPFWVLRKNKGFFRFPGGPKLSQLGVLQFLGLKEPPRGFPGWSFFLVPFN

SEQ ID NO: 108334 - protein, 76 aa, Gossypium hirsutum
  Clone ID: LIB3825-005-Q1-N6-F7.pep
QPQVFLNLFFFPCHGIWMEDPLLCYKTSPKGEKVPFFDPLAIGCPNIRGRPPKFKTQVNTHPHTQPLKTGGLKKQG

SEQ ID NO: 108335 - protein, 77 aa, Gossypium hirsutum
  unsure (1)..(77): unsure at all Xaa locations
  Clone ID: LIB3825-005-Q1-N6-H6.pep
QKIPRPVLVGAINTEGLTLDESLEPRAANRGWIFQKGPGRGQLKVFPRNDFTHPELKKIAAXSVPLEPITGFFPFFG

SEQ ID NO: 108336 - protein, 85 aa, Gossypium hirsutum
  Clone ID: LIB3825-006-Q1-K6-B12.pep
TEPNYIKIKQQSWLLHSVQKPFVRTKQNELSSIAAGLDSSKHLAPCCIAVQLSTPYEVKKKKFINNSVILQYSQVTWPEFVLKKI

SEQ ID NO: 108337 - protein, 164 aa, Gossypium hirsutum
  unsure (1)..(164): unsure at all Xaa locations
  Clone ID: LIB3825-006-Q1-K6-C11.pep
LELIKMLWTMIFGLYFTQVMGLAPLLLGQIPKLVALSLRXNFTVSPVFSDAVSPALNRADAHGNANLATPGIQNQVATTNNLPLHPSQVTNSMSNHEYGSLQNIPRHVSRSSIAVQALPAMSQTQTPTQQRSSNSVNTKNTTSSARIPHQMQSXIQQERSFVPA

SEQ ID NO: 108338 - protein, 138 aa, Gossypium hirsutum
  Clone ID: LIB3825-006-Q1-K6-C7.pep
MAAGLIGGAALGAGFGELLRVIVEASKTAAMFRDNLEELASMLSPIEPVIKEIQSFNKAFDKEYETEQLVEIVKRGKKLVTKCCKIRRWDIIKKPYYSHKLLGLKKSLERFCQIVMQTHQARDIKEVLFETKEISVGN

SEQ ID NO: 108339 - protein, 104 aa, Gossypium hirsutum
  unsure (1)..(104): unsure at all Xaa locations
  Clone ID: LIB3825-006-Q1-K6-H11.pep
AETVIYRIFYHMKRXGKGRLTLRELKRGELISAMQQADEEDDINKVLRYFSYEHFYVIYCKFWELDTDHDFFIDRENLIRYGNHALTYRIVDRIFFTGSSEVCW

SEQ ID NO: 108340 - protein, 101 aa, Gossypium hirsutum
  Clone ID: LIB3825-006-Q1-K6-H8.pep
KKGIRRKTKKRGKKRGEPNQTQGKKPAQGGAMGYPKKEGTRGETPDRKGGNNEKGQRGYRWPNRTAQKLGRAPGFGAFSLRPPRAKRVIYKKAHKLGPNFD

SEQ ID NO: 108341 - protein, 135 aa, Gossypium hirsutum
  unsure (1)..(135): unsure at all Xaa locations
  Clone ID: LIB3825-006-Q1-K6-H9.pep
KILIVDDDRTCLLVLERMLRKFSYQVTKCQLAREALALLXQDKNRFDIDLCDLHMPDINGFELVQIIEVKMDLPGVMMSSDDGKGVAMKGIVHGACDYSVKPVRMEAIGLIRQHVVRKKKKRLSGEITKSLPLQR

SEQ ID NO: 108342 - protein, 116 aa, Gossypium hirsutum
  Clone ID: LIB3825-006-Q1-N6-A12.pep
WPNGLTFFNALTGRNEDAKLLVNPESLGNKQDPNHHPLMVEGKDSNQNSDTDANPTEFLSLDSHPENIRKMENKFKRSFTLPARMATSSSSALLDQQQQQQADAGMYADAMDTFLK

SEQ ID NO: 108343 - protein, 53 aa, Gossypium hirsutum
  Clone ID: LIB3825-006-Q1-N6-A3.pep
TMSKLGQKRLRRCWESHHNAVSVSEGRILFQYCTWGRSSCYCSIWVLDVHFRY

SEQ ID NO: 108344 - protein, 101 aa, Gossypium hirsutum
  Clone ID: LIB3825-006-Q1-N6-B10.pep
PRKTGWAFPSRARTAGPPPTPTISRFSPPPLSVDPINNPPPRPTPFGLAPPLGILGGVGPGFGPPGTGVPPDSRSDGGFWVQNCFFSYAPPLFSGLMLLWG

SEQ ID NO: 108345 - protein, 111 aa, Gossypium hirsutum
  Clone ID: LIB3825-006-Q1-N6-B4.pep
DTHEYMNSNLNRFNRHAAKNYRYCCSPTKMVHLSTLPQDVTEEEIVNHLAEHGTIVNTKLFEMNGKKQALVMFENEEQATEALVSKHATSLGGSIIRISFSQLQTIRENSQ

SEQ ID NO: 108346 - protein, 100 aa, Gossypium hirsutum
  Clone ID: LIB3825-006-Q1-N6-C1.pep
TKSAFGNTMKQSFTYWPKPVEVYVKIVGSRSYFGVRSPNIVHPAARFMDALRALKLPVPHASVSNVNVFLLQDVVVKVPPGIFITPEMLSPPTPQKCPFN

SEQ ID NO: 108347 - protein, 100 aa, Gossypium hirsutum
  Clone ID: LIB3825-006-Q1-N6-C11.pep
AASRPDTSADLAFEQNWRPTGRMRGSLTGRVYFESFSQMMIQPTQSTQAARPQTNITSPPSVPPHLQAFLANSRNPVTPQMRNNATTETTATNGGSGPAR

SEQ ID NO: 108348 - protein, 91 aa, Gossypium hirsutum
  Clone ID: LIB3825-006-Q1-N6-C7.pep
FFFFFFFFFFFFFFFFFFFFFFFFFFFFFYRGPNKRGFWVKNGSLKIRGKRFREPPWGGGLLKKKKILKRGKLRDGGREGKNRAPFKKKVC

SEQ ID NO: 108349 - protein, 104 aa, Gossypium hirsutum
  Clone ID: LIB3825-006-Q1-N6-D12.pep
LAPHPKRKSLVKGGRGFNKRPPKRKRLGPPPKIKKPQAPLKVEIHSSPPMPKGLWESKPRNLRGDRLVFPKTFPPSKKPKLQRANKLNPPRQRTEKGGPPIPSN

SEQ ID NO: 108350 - protein, 78 aa, Gossypium hirsutum
  Clone ID: LIB3825-006-Q1-N6-D9.pep
GEGGAKGQTPIKWGPDPGPRGVFSNGRGPPKQGGQNLKGGTPKKKGGPKKNPIFKKPKQQETGKIKTYFPQKGNLKKI

SEQ ID NO: 108351 - protein, 124 aa, Gossypium hirsutum
  Clone ID: LIB3825-006-Q1-N6-F3.pep
EVHSLYCDLSDNYENEVQQELRWLKAQYQMELRELRDQQQLGIVSDFSNCSNKDKNRNNDIPPLSTFAPNKHFNSDFHDNKNKRCPNSANRGGQYRKPAESPRVKEMVTAQNFFTGPLLPQFFS

SEQ ID NO: 108352 - protein, 60 aa, Gossypium hirsutum
  Clone ID: LIB3825-006-Q1-N6-G1.pep
KGGPKRGLRGPGISIGKKTGGKNIYLGEGKRPAVNGPERVKGPTWDGQEKGPRNKPPGGG

SEQ ID NO: 108353 - protein, 81 aa, Gossypium hirsutum
  Clone ID: LIB3825-006-Q1-N6-G5.pep
YHIGIAMWKEVAAICRLEIHGKYWTFFGVSTFWFLGHHVYNHLEYREVETDIVAFVHRSHLPFSRFLSFWPSRSVHVFITL

SEQ ID NO: 108354 - protein, 52 aa, Gossypium hirsutum
  Clone ID: LIB3825-006-Q1-N6-G9.pep
QPIGGPLVSAVGRPVNLPASAHMGYGVTVPGAPMNMGPATYPMPHSTAHSHR

SEQ ID NO: 108355 - protein, 54 aa, Gossypium hirsutum
  Clone ID: LIB3825-006-Q1-N6-H11.pep
DPLSNIFEMNEEWLHGDIADQIISQIAFYMYMSTSMLYARPFANLCCAALKTEV

SEQ ID NO: 108356 - protein, 61 aa, Gossypium hirsutum
  Clone ID: LIB3825-006-Q1-N6-H2.pep
VCCKSFSCFSSMRFVMPVLIGVGWVRSWHVLKFRLKGINFSQKWLNVHQLWASPGCIETQT

SEQ ID NO: 108357 - protein, 128 aa, Gossypium hirsutum
  Clone ID: LIB3825-006-Q1-N6-H7.pep
FFFFFFFFFFFFFFFFFFFFFFFFFFFFFFFFNKRRGPPRGSFKPLLGKNPPKNKRGESWKTKLGKSPKSLGTPKGAFSFLNKEGVGPKTPGFWGWAKRILNWGKAWGGALFFGTKRFFPQGLFPPWV

SEQ ID NO: 108358 - protein, 99 aa, Gossypium hirsutum
  Clone ID: LIB3825-006-Q1-N6-H9.pep
FPPISNGVAISNDNEFPPNDGVANSNDESLYCNVVDGTELSNPFSAVAVDGTELSNPLSAVAVDGTELSNPLSAVEDLIHEPSFLVGQYDQQAFFRGPI

SEQ ID NO: 108359 - protein, 157 aa, Gossypium hirsutum
  unsure (1)..(157): unsure at all Xaa locations
  Clone ID: LIB3825-007-Q1-N6-A12.pep
SHPATKNEGDDIAPASKVSEILLANEFEKGLRPXVTLSGEVGVAFSDVGAFTXSTKESLQGLVMLPLPSPDLCKGGFFKPRTGILLFGPPSERNAMYVRAIAQXAGPSFLNVPMASMMWNVVREYHFNAGALYAHADDVSPTTNYXDKLDSMQGPVP

SEQ ID NO: 108360 - protein, 127 aa, Gossypium hirsutum
  Clone ID: LIB3825-007-Q1-N6-A2.pep
ALSIHGTKSMKERREIMRMFLVGEVSVVVSTGILGRGIDLLAVRQVIVFDMPNSIKEYVHQIGRASRLGEEGNAIVFVNDEDKKLIPEFVDILKSSGAIIPRELGNSRYNVVSLPSGKNFKKRKYGG

SEQ ID NO: 108361 - protein, 53 aa, Gossypium hirsutum
  Clone ID: LIB3825-007-Q1-N6-B1.pep
CLSISVFNFPFLLFVFPICFVFLFTLVCLLLMDFSCLLLRPNCYKRISVQKKF

SEQ ID NO: 108362 - protein, 74 aa, Gossypium hirsutum
  Clone ID: LIB3825-007-Q1-N6-B11.pep
TKGPAIAATSSNVYPFQSTRMGTQEHRDYVPKNYKLLSNITLEGFLDVHRNLNRHQGRLYPMANIGYGVDRHQC

SEQ ID NO: 108363 - protein, 92 aa, Gossypium hirsutum
  Clone ID: LIB3825-007-Q1-N6-B6.pep
MYNIVQWLDHDTFNHFFEYQSLRLCIRLPSYQTLVRHKYVADITLDLIFPSFLYGVMKLSFACGSGSITSAVIFIYSTQNRSGTFFVCNMLW

SEQ ID NO: 108364 - protein, 55 aa, Gossypium hirsutum
  unsure (1)..(55): unsure at all Xaa locations
  Clone ID: LIB3825-007-Q1-N6-B7.pep
QMRRDTETFGDFPRHRXGRGGRGPFHGGRARGSYYGRGYGYGGRGRGYGTENRTN

SEQ ID NO: 108365 - protein, 66 aa, Gossypium hirsutum
  Clone ID: LIB3825-007-Q1-N6-F12.pep
PPSHENITLEKGLKFENVQTKDGAPNCQFLVLVEGPPKAYLGFFFFSKKNFRGNTLHLNNGFKHLL

SEQ ID NO: 108366 - protein, 81 aa, Gossypium hirsutum
  Clone ID: LIB3825-007-Q1-N6-F2.pep
IPNFHILYALSRIHLSCSPTFFKYNILIFGISIKHNLIIVCSSTHTTRYIQFNKKQKPYLIQLTPNSSCKKYHCRISFSSP

SEQ ID NO: 108367 - protein, 84 aa, Gossypium hirsutum
  Clone ID: LIB3825-007-Q1-N6-F5.pep
PRYGYVLSVWVDCSGLSGSPFALCLFVFFPLLIFFWGLTVVGQVSCFNLMVFSLPFFNFVLEDPLICLIGHSDWFKILWQTPTV

SEQ ID NO: 108368 - protein, 63 aa, Gossypium hirsutum
  Clone ID: LIB3825-007-Q1-N6-F6.pep
GLKFSGLKIYFSPFKGDLALVLRWVWIHRGVMGPNNPQILPALGIWRHPPKNPNRFATRGPIF

SEQ ID NO: 108369 - protein, 90 aa, Gossypium hirsutum
  Clone ID: LIB3825-007-Q1-N6-G3.pep
FADRTYLPPLPLELTRNSVPFGQVGHTCSKYASAYNVFNIGILPYIKDNLLKAALYHKWFHENPLKTNCVRDLFCKRIEGCKKCFNVNND

SEQ ID NO: 108370 - protein, 72 aa, Gossypium hirsutum
  Clone ID: LIB3825-007-Q1-N6-H1.pep
ELKLQATCSIFLFLCIPGSDIFLLYNGQLRLLIILSLSLAFRAFVCVFVFHSSKHCCFLFLSSSARACLRWA

SEQ ID NO: 108371 - protein, 52 aa, Gossypium hirsutum
  Clone ID: LIB3825-007-Q1-N6-H6.pep
LDAFQVEFSIDWVRLGFGWINLDRFNSGYKVFRSFWFGFGCLKQLMGGNFDR

SEQ ID NO: 108372 - protein, 128 aa, Gossypium hirsutum
  unsure (1)..(128): unsure at all Xaa locations
  Clone ID: LIB3825-007-Q1-N6-H8.pep
QKKKKLMGNGGKKGGRGKKKTKIPGDKIIKETNRERGGEGKKKKGGKKTNRGNKTRKPGREKPSKQKRGKAIKGGGEIGRKGVAWGKRGHQRWKSRLGEKKREGVPPGLLKKAREDRCLXGEGKKNGF

SEQ ID NO: 108373 - protein, 62 aa, Gossypium hirsutum
  Clone ID: LIB3825-008-Q1-N6-A1.pep
FQKSLEIHKYYPIQTIWSWKPYSPPLIFTTNKSCIYLSNLGPSCKRIKRKTLPPPPPNQHLN

SEQ ID NO: 108374 - protein, 114 aa, Gossypium hirsutum
  unsure (1)..(114): unsure at all Xaa locations
  Clone ID: LIB3825-008-Q1-N6-A4.pep
YRGLAHTVAEVVWLEXLLKELYVXFSVKTXVWCDSSGVVAVSANPVLHFKFKHVELDLFFVREKVTAGQLTVGHIPTYEQIADVFTKPLSAPLFTKFRTGLKLGPKSMCLPGVD

SEQ ID NO: 108375 - protein, 46 aa, Gossypium hirsutum
  Clone ID: LIB3825-008-Q1-N6-B11.pep
TYYGNRQPYLCENKKRFEYSDPLGLNDVSHFYSLASGSRTQNYTFL

SEQ ID NO: 108376 - protein, 94 aa, Gossypium hirsutum
  Clone ID: LIB3825-008-Q1-N6-B3.pep
GGLSGKPLFNLSTNILKEMYVLTRGKIPLIGCGGISSGEDAYKKIRAGATLVQLYTAFAYGGPALIPQIKAELAECLERDGFKSIHEAVGADCR

SEQ ID NO: 108377 - protein, 68 aa, Gossypium hirsutum
  Clone ID: LIB3825-008-Q1-N6-B4.pep
GLEMTLFCPHGQRHRRAFQSCLAHGRAFWLCFPYILKFQNRMLKIDHTAWHTDVWLGRVTPKFKCITS

SEQ ID NO: 108378 - protein, 100 aa, Gossypium hirsutum
  Clone ID: LIB3825-008-Q1-N6-B5.pep
SYGIVLLETVFCRRNLDTTVSNPEEIILSILVYKCLVEKKLDKLVLGEEVDKKSLERMVMVALWCIQDEPALRPSIKTVVMMLEGITDICIPPCPTASSI

SEQ ID NO: 108379 - protein, 84 aa, Gossypium hirsutum
  Clone ID: LIB3825-008-Q1-N6-B8.pep
NEHVISSLKFSLIHFHFLVISAFKFQWQIVSSSGDVSFLIGKRIPIIPVFKGGVQFGPFTNKLSSLILICCKTCKMTRITINTD

SEQ ID NO: 108380 - protein, 112 aa, Gossypium hirsutum
  unsure (1)..(112): unsure at all Xaa locations
  Clone ID: LIB3825-008-Q1-N6-C1.pep
KVAGENWRGHCAVYAXPSGSLKTMSKNAKFQVALEHLKCEVFTVFPIRAFSEDFRFAPIGLLDMYNSGGAVXAMDSQNQSSECKIKVRIPGCGRFGAYSNKKPKCFSMNQKN

SEQ ID NO: 108381 - protein, 116 aa, Gossypium hirsutum
  Clone ID: LIB3825-008-Q1-N6-C3.pep
APAGQTGGGGIGGTGSPPAGDNKGDSGGYGGTGGHYNRGDPPPGSGFYTGRQNSLPSMGFGGKTGGAFGSTGNQNFPSGGPNNAGTKRSPPGGPPDDPYYRSHLMKGAPFCALPPP

SEQ ID NO: 108382 - protein, 144 aa, Gossypium hirsutum
  Clone ID: LIB3825-008-Q1-N6-D12.pep
VWNYRYRPRYPPHMNTSLSCADAVSPDELDEEFETFPASKSSDIVRMRYDRLRSVAGRIQTVVGDIATQGERLQALLSWRDPRATTIFVLLCLVAAIVLYVTPFQMIALLAGFYVMRHPRFRHKTPSAPINFFRRLPARTDSML

SEQ ID NO: 108383 - protein, 94 aa, Gossypium hirsutum
  Clone ID: LIB3825-008-Q1-N6-E10.pep
IGPCPHSFENMPPYKILIFQQTTFFFWGDLFIQKRGKTRGKNNIKGGGFEIIKPGSSPMGTWSLNGGGILNDCHKIPRGKCKTWKANEIPGQNL

SEQ ID NO: 108384 - protein, 138 aa, Gossypium hirsutum
  unsure (1)..(138): unsure at all Xaa locations
  Clone ID: LIB3825-008-Q1-N6-E2.pep
QKVFFGVRLIAVAPGPICTPXIPAGSHKKLWGQFGVQVPIFPPCYPSEDVSRFVFLASKLCSSNMTGLPFHKVGGPIVNGLYVPPRPSPSFPFRFFLGLNKPFCGCFESWCKQELAIVFSFKNFLLYVSPQASQFQGY

SEQ ID NO: 108385 - protein, 119 aa, Gossypium hirsutum
  Clone ID: LIB3825-008-Q1-N6-E9.pep
DRCLETGRIFFSERGDGFNYSNFVDLDCISSSGNSCEDEPFDGSSVLTSSSFAGLSLENVVNGVIGEATPSSSECGSSMKGRQQTGTELSFGNSQQSNVLEEFSDSFVQWVNSGEMLCY

SEQ ID NO: 108386 - protein, 83 aa, Gossypium hirsutum
  Clone ID: LIB3825-008-Q1-N6-F10.pep
FYTGTGMGAKLTYREGNESKARPRQEQSGEGKFHPFRGQQNKKGRARRSEKQSAPKERREQKKKKGEERPRKMKEKKRARPTK

SEQ ID NO: 108387 - protein, 95 aa, Gossypium hirsutum
  Clone ID: LIB3825-008-Q1-N6-G7.pep
QGAPQVSLVERRERVDITSVWVPPPVRGPEAFSSYVSPSVWGLAWNRRALSPRGGPWPSLPRGLTILAIGGTPPPVARGAPFSGSPPGTGRVFFF

SEQ ID NO: 108388 - protein, 93 aa, Gossypium hirsutum
  Clone ID: LIB3825-008-Q1-N6-H3.pep
HNWRDIHSSILLGITHNFITITNCTKENKSKSFTIIEPQTRARFHCVDGVGGFHVVVRKTIYHDLTDIINLLTPTWLLRTQGRGVAMKASSFF

SEQ ID NO: 108389 - protein, 98 aa, Gossypium hirsutum
  unsure (1)..(98): unsure at all Xaa locations
  Clone ID: LIB3825-009-Q1-N6-B8.pep
NVGSGYDRFDRKEXIVCIFRWGFPGKNRRIFLRFLMKDIQSIRIEVKEGIYARRVLYMEIRGQGAVPLTRTDENLTPREIEQKAAELAYFLRVPIEVF

SEQ ID NO: 108390 - protein, 124 aa, Gossypium hirsutum
  Clone ID: LIB3825-009-Q1-N6-D10.pep
VPAYDWDYSAFREGCQEDFQVTPRPRWITTEFGGHDIEHVLKSFGSNIIFSNGLLDPWSGGSVLKNISETIIALITKEGAHHIDLRASSTEDPDWLVEQRATEIKLIQGWIDNYRKKMKATFEI

SEQ ID NO: 108391 - protein, 53 aa, Gossypium hirsutum
  Clone ID: LIB3825-009-Q1-N6-D9.pep
FFFFFFFFFFFFFFFFFFFFFFFFFFFFFFFFFFFFFFLRRDKGGPKEPPWGF

SEQ ID NO: 108392 - protein, 105 aa, Gossypium hirsutum
  Clone ID: LIB3825-009-Q1-N6-E10.pep
EPVLGTRNNLAKQKGSSKRILPKVSTLRKPPEKNPRQNQIPHPTYALYPSSLGNPTEHSNPQLIRPPQGPGPWGKPPRKKGPFLWKSDPYLPWVFTGGFHVQAPP

SEQ ID NO: 108393 - protein, 66 aa, Gossypium hirsutum
  Clone ID: LIB3825-009-Q1-N6-E5.pep
ACFKFCYGSQKGFIFPCPCKKHWPVFTPRESYSFTDMSPLSCYMFIFAVGDLFLGPFFLFECPCVF

SEQ ID NO: 108394 - protein, 159 aa, Gossypium hirsutum
  unsure (1)..(159): unsure at all Xaa locations
  Clone ID: LIB3825-009-Q1-N6-E9.pep
VCCFNKWNARERSYRCDQEAGGDRTNCKSRTXTAHVLTCLALLPIGGPXLHYTGLTLTGTDIGLCVASPLLLISSPALLPTAMAAFMAEAGFLAYGAYGWTGLDWVSYVSNRGRQATGTDQLDSDRTKRGMQDVAGCVGQKTEEAGQTIENTAHEGGST

SEQ ID NO: 108395 - protein, 86 aa, Gossypium hirsutum
  Clone ID: LIB3825-009-Q1-N6-F1.pep
YNILHLTRPFPLLLFLLTFFTSCFSITLLLFLFECRVFGFCAKSSPSPSPSPSNFMLELCWESDMATSFSFTSATSMEASPTLVAF

SEQ ID NO: 108396 - protein, 149 aa, Gossypium hirsutum
  Clone ID: LIB3825-009-Q1-N6-G10.pep
LPPGAPSLFVFPSKKKGPRFLKRTPLSPGPLFGGPPKLSRPLGCFQKFPLCWGLGGPSPFWENPFFFFPPPLGLYVPGGPWVGGPQGPSFLGWGALLGPWGLKALWAFLPPPQFPLLGGGWFLAGFKVFLSPGLGFFLGVKILNFYFPG

SEQ ID NO: 108397 - protein, 178 aa, Gossypium hirsutum
  Clone ID: LIB3825-009-Q1-N6-G5.pep
SFCRFLKLKSLKSHRALHEKEERAKGRLTRNQFFLIAFTCSFAYYVLPGYLFPTLTSLSWICWVFPTSILAHQLGSGLHGLGIGAIGFDWSSISAYLGSPLASPWFATVNIAVGFALITYIITPIAYWLNLFNAKHFPIFSDGLFTSTGQSYNISAIIDSNFHIDMAAYERGGSLYLS

SEQ ID NO: 108398 - protein, 48 aa, Gossypium hirsutum
  Clone ID: LIB3825-009-Q1-N6-H4.pep
MAISFRQQLSISIRPASFHLTIDRDGWHAGRGRSLIGGSTRASSSRSR

SEQ ID NO: 108399 - protein, 75 aa, Gossypium hirsutum
  Clone ID: LIB3825-010-Q1-N6-B11.pep
RSLSTCNLGVVTVSRVVGNLIFHKVVWVCNQLRPLTYWSVRVETDGVCAYFQLKCLLLWRKLGRVVWQLWVFFRS

SEQ ID NO: 108400 - protein, 98 aa, Gossypium hirsutum
  Clone ID: LIB3825-010-Q1-N6-C2.pep
GILTGCRTAFSWNSSFTIYAAKSCSHTAYQSRFLQGTLDNVANWTRVICRLHQNFSWIIFHLQQKNVSYHALQHILELPCEMIRLQPKYEEEKITSKT

SEQ ID NO: 108401 - protein, 92 aa, Gossypium hirsutum
  Clone ID: LIB3825-010-Q1-N6-C3.pep
ALRIGGGDFGSSSSNLGLLQGYGVPFLGSQHHQQTQFQWPAAGNSYYQQNWHQNFINEAVTSTVKVTNTSNSKTASSLSPNQWPDLPAYGAP

SEQ ID NO: 108402 - protein, 82 aa, Gossypium hirsutum
  Clone ID: LIB3825-010-Q1-N6-D4.pep
LFKSNCFCSKNNAKQEFLPFKTGKILLKSAFEATRRNWLEEFILGNCDCERLYQATCMSRQSSQGSSPSTPISSSLLLHMFY

SEQ ID NO: 108403 - protein, 101 aa, Gossypium hirsutum
  Clone ID: LIB3825-010-Q1-N6-E10.pep
FPPPQFCWWDPKDPGLVFFAGLFHPLGGCPEITIPRPRTFSPLIKMGHFGPPFHLFSPPLGQPLFFLLKKESPFPWGKKRWVFLPLPGKMFCQKIPSGFLF

SEQ ID NO: 108404 - protein, 79 aa, Gossypium hirsutum
  Clone ID: LIB3825-010-Q1-N6-E7.pep
PKINIWGNPLGQEHFPPIIKQKPPDYLRSQKTQPLLRSKNLKTWQQLQKRGKKKLLTNKKRGLKHGKKGKKNLPPPGKG

SEQ ID NO: 108405 - protein, 90 aa, Gossypium hirsutum
  Clone ID: LIB3825-010-Q1-N6-G12.pep
FINYPFYCCQEKKYPGEEKPKSAPKKKRYSPEKSQNRSKRLQRIQKTHSLLDNQVRSQKKMERKRHGPAGSPHKERGLHAQTQKKKKPRH

SEQ ID NO: 108406 - protein, 107 aa, Gossypium hirsutum
  Clone ID: LIB3825-010-Q1-N6-H1.pep
SFSFPPPILPGHVPLRKGGPFKNQSPAWASFYGKAQNPFAAGDAFLCRRAPCPVPPACQVVFPSVFFSRPPGGPPWNLKKTPSFDGPRGFPAQTPILVPPFQLGSYP

SEQ ID NO: 108407 - protein, 62 aa, Gossypium hirsutum
  Clone ID: LIB3825-010-Q1-N6-H8.pep
NLLSSSPDISYSVYCGTTNKTCFHPFPYIPLETIPRDASLYPRSVITLQITSTTNLHKSLAS

SEQ ID NO: 108408 - protein, 51 aa, Gossypium hirsutum
  Clone ID: LIB3825-011-Q1-K6-A9.pep
DDACLRKSLSFVDKCIKICLNSLPVAQMEFYLKELVNLLLKLGVNCKHSTK

SEQ ID NO: 108409 - protein, 143 aa, Gossypium hirsutum
  Clone ID: LIB3825-011-Q1-K6-B11.pep
MDPSIVKLLEEEEDESMHSGADVEAFQAALNRDIEGDASNSQQSGSNIAVLSQGSNPASSQSVAQWPASGQDGNSNFQNQQVLQSAQQQQQTLSESEQKQHGAVVTGSQQQVQQPNDVPKEHSRLPPQQKQPQEDHPQGVTEQ

SEQ ID NO: 108410 - protein, 59 aa, Gossypium hirsutum
  Clone ID: LIB3825-011-Q1-K6-B6.pep
CINFTNEKLQQHFNQHVFKMEQEEYTKEKINWSYIEFVDNQDVLDLIEKVRSPIDYVNH

SEQ ID NO: 108411 - protein, 72 aa, Gossypium hirsutum
  Clone ID: LIB3825-011-Q1-K6-C12.pep
FFLGLAAGSVHIPLPHVFSQCYTGQQRWPFIVTKYGGGLLTRFGPSIMARVRVVKAGNHPSMIHYYDMLLAA

SEQ ID NO: 108412 - protein, 78 aa, Gossypium hirsutum
  unsure (1)..(78): unsure at all Xaa locations
  Clone ID: LIB3825-011-Q1-K6-C9.pep
LETSLQQIWSEFQKXRERDSSDDIFEDICGVLRKDLAGDAINGWDGCPIQMSEAILDIERLIFRDLISETIRDLAALA

SEQ ID NO: 108413 - protein, 63 aa, Gossypium hirsutum
  Clone ID: LIB3825-011-Q1-K6-D10.pep
SQISISFNIYWKNNVVSFDCFSYLVLASTRISFWMNKFICLILIILYNIMLASFCFPPYCRFT

SEQ ID NO: 108414 - protein, 175 aa, Gossypium hirsutum
  Clone ID: LIB3825-011-Q1-K6-D5.pep
MAHGGYGKRRVGEGKRVGRRSKGPGLDKKLKPKAVSLKNQIRSIERMLRKDLPPEVREAQETKLEGLKKQEEIHTRLAVERKLFLRDRKIKFFERRKIERRIRRLEKQQRISPGQAQDMEIAEQLSKLKEDLEYVRFFPKTEKYVSLFTGGDGSDLIDKRNRLRKQIKANLVAAA

SEQ ID NO: 108415 - protein, 99 aa, Gossypium hirsutum
  Clone ID: LIB3825-011-Q1-K6-E6.pep
FFLSLIVCRERKSQDIPKLLHSLHLSLSRAFLPGLEFYLLAGSFDQSFVVQLTMELENNKNEADTKAEDLAKSESSEKKSPNLLKAKSDIAKSVAKNFL

SEQ ID NO: 108416 - protein, 76 aa, Gossypium hirsutum
  Clone ID: LIB3825-011-Q1-K6-E7.pep
GIEVSSNLVFDMHFFRFVSNVFKQRYAYNMIFKCIQLKHFDHTHVSRAFDIHSQLRETQISTLTTHLCSIYERLTR

SEQ ID NO: 108417 - protein, 63 aa, Gossypium hirsutum
  Clone ID: LIB3825-011-Q1-K6-E9.pep
GVGIGFSLQNVYKAIYISLLVVRITKDFTLIYGHSNIPGKIKIHVWRLFNNLVPHYGNLTRRK

SEQ ID NO: 108418 - protein, 182 aa, Gossypium hirsutum
  unsure (1)..(182): unsure at all Xaa locations
  Clone ID: LIB3825-011-Q1-K6-F1.pep
SYQEKKGLKELNSGGFIELSEEEQKRDEEGDKGESVTCLSHGFISVIGRRRAMEDAVKVAIGVIQGYDFFAVYDGHGGAGVANACRDRMHRLVVKEVQERTRGGGGGGKGVGWXEKVMSACXEKMDEEVTGVECGTTAAVDEVMETMGSTAVVVLVSREEVVVANCGDSRAVLCRAGTAVAL

SEQ ID NO: 108419 - protein, 195 aa, Gossypium hirsutum
  unsure (1)..(195): unsure at all Xaa locations
  Clone ID: LIB3825-011-Q1-K6-G1.pep
HRGIAFVQFAVAEEXNRAIELKNGSSVGGRKIGVKHAMHRASLEQRRSKATQDDATKTKNDKDGLLTSAVEAHGSDLPKLEKPVQPKKAATLCSDLADKENCSEKQRVARTVVFGGLRNAEMAEDVHRLAKEIGTVCAVTYPLPKEELEEHGLAQDGCKMDASAVLFTSVKSAHTAVAMLHQKEIHGSIVWARQL

SEQ ID NO: 108420 - protein, 154 aa, Gossypium hirsutum
  Clone ID: LIB3825-011-Q1-K6-H11.pep
MEKQVENSSRLVLVIYPFQGHINPMLQLATIFHAKGYSITIIHPEFNSPNPSNHPQFTFISIPDKLLESKVSLSPGDFMNLVLALNNNCAAPFKKCLKQMLDDEHPHERIAGVIYDGLMYFAQTVADDLGLPGISMRPTAAAMLLFAVIPQIEQ

SEQ ID NO: 108421 - protein, 112 aa, Gossypium hirsutum
  Clone ID: LIB3825-011-Q1-N6-B12.pep
FLLYPFVTIHQNVFLLGRASVRGLLHLSLSQPVDEDQLFVVCLVGKKTTLAGDQHAASLCALVDSFIHVAGQVCFLNREQSVSANQCMLVRSLVTPGWLLYVCGWFVVCVCL

SEQ ID NO: 108422 - protein, 99 aa, Gossypium hirsutum
  Clone ID: LIB3825-011-Q1-N6-B8.pep
VPRFKTFTQIIILAFNMEGNGRIFRARGGKNSRGAPLGGGKKKTFINPRGLLKKKQRAYPSGKTPPLYMVWPHGLEKKGPPPLGGLKKLHFRPRKKNHP

SEQ ID NO: 108423 - protein, 56 aa, Gossypium hirsutum
  Clone ID: LIB3825-011-Q1-N6-C8.pep
FYQQSEQPYTTHQPNNLYATKFESKPIIFIYFKCRAAPLMLPALHNPSNIIMSVYL

SEQ ID NO: 108424 - protein, 72 aa, Gossypium hirsutum
  Clone ID: LIB3825-011-Q1-N6-D11.pep
QLLVGRLGGVISLSWLNAGTGKSPQRMHAPVAGGGKKKACLSSKNAPGFKKKHHPPRPTCLVCWKENIALQK

SEQ ID NO: 108425 - protein, 34 aa, Gossypium hirsutum
  unsure (1)..(34): unsure at all Xaa locations
  Clone ID: LIB3825-011-Q1-N6-G7.pep
FDFXFDLXXNSIMVXKLIYINSRVNYQNSYFCLS

SEQ ID NO: 108426 - protein, 114 aa, Gossypium hirsutum
  Clone ID: LIB3825-011-Q1-N6-H11.pep
LAHCAVGGFWTHCGWNSTLESVSEGVPMLCRPCFGDQFLNMRYICYIWNIGLELENELERGKIEGAIKTLLLNIEGKEMRNKAMESKGKTELCLREGGSSSSSLDEFTKRILSV

SEQ ID NO: 108427 - protein, 69 aa, Gossypium hirsutum
  Clone ID: LIB3825-012-Q1-K6-A7.pep
IFHALISCIGNVTYTHFVFNMCVTSCRFSYGQDHTITCEFLSLYARILPFYIARNVFRFVMSHNLDLVS

SEQ ID NO: 108428 - protein, 119 aa, Gossypium hirsutum
  Clone ID: LIB3825-012-Q1-K6-B1.pep
MATGQIEGEEAKNNKVYTRKNHNKPKNSTFIPHQTLATTTTTDDNNSQQLPLQPFDAVASDDSSSHSRLQQGVRNVTNGVSTSGYVKYDNLVSISLNVLSKNEVRGLKGKLVNLNKFGI

SEQ ID NO: 108429 - protein, 82 aa, Gossypium hirsutum
  Clone ID: LIB3825-012-Q1-K6-B6.pep
ASVENVPLSSARAINKTLEPISLASQLLKQHGQGDTPSSISFSATTLKDPAQRMRYTPQRSSTQYSDYVELVCHPEPTVNMD

SEQ ID NO: 108430 - protein, 178 aa, Gossypium hirsutum
  unsure (1)..(178): unsure at all Xaa locations
  Clone ID: LIB3825-012-Q1-K6-D1.pep
MDLLFKAYSNTSDDEPEPEPDPEPKPVNHHHLPFRPSKRPKPEYLFPTLDLQKREEAPLPGRYISKRERALAGAVSQAHEPNPIHRDHHVINQSVLGSISELDLPHDVLSLMRHKPKGRTQLSQIPGKLSVALHGHAKAVNAVHWSXLMFIYLLLRGWIKQSAYGMYGAEVRKKLVCL

SEQ ID NO: 108431 - protein, 93 aa, Gossypium hirsutum
  Clone ID: LIB3825-012-Q1-K6-D10.pep
MQGNEFVEQNASNIGGEPNEIRRFEQLRNELIELEKRVTTSAQTAYEEDIKVTDGYPGSINDAGHAQVVEVQKKESIIEKSLVKIKETSTDVL

SEQ ID NO: 108432 - protein, 170 aa, Gossypium hirsutum
  Clone ID: LIB3825-012-Q1-K6-D4.pep
MLISFKRVARIRFLHLLSLQHKRLHPLLSSQDSQVELETVETQPEQEIPSKTVNVRFQLEKECSFGEHFFIVGDHPMLGLWDPDNAVPLTWSEGHVWTVELDVPVGVSIQFKFILKTSTGNLLWQPDPDRIFESRETETNSTIVVCEDWDKAEHQKIIEEEALTNQDGPL

SEQ ID NO: 108433 - protein, 184 aa, Gossypium hirsutum
  unsure (1)..(184): unsure at all Xaa locations
  Clone ID: LIB3825-012-Q1-K6-D5.pep
PASAPRPLFLGPCNAYDPXHRRIYFESSEDGHWEVIDTEEALRALLAVLDDRGKREALLIESLEKRGTSLRQEMSSRHLHDAEIRHTPSYSPEMDAVREDSCSPVSDVDNLSLTVAMNASLTSCGAIVLHAGKKGAEQNRMWRRLQEFDVWIWDCFYLNLNAVKHNKRSYLDSLTRCESCHDLY

SEQ ID NO: 108434 - protein, 86 aa, Gossypium hirsutum
  Clone ID: LIB3825-012-Q1-K6-E6.pep
LYTDRAMHPDDSVCIRWRLEGRIPDITVWRHTTGSVKRPRYASLLICGMACWATHQLAFESGAAAIMMVADLSSTPKTLAGLLIGR

SEQ ID NO: 108435 - protein, 85 aa, Gossypium hirsutum
  unsure (1)..(85): unsure at all Xaa locations
  Clone ID: LIB3825-012-Q1-K6-F1.pep
ISFHVYHISRVCVVFLFVCVKKKKKKKKKKKKKKKKKKKKKKKKKKKKKKKKKKKKKKKKKKKKKKKXXGAPLKKNQISPRGVEK

SEQ ID NO: 108436 - protein, 194 aa, Gossypium hirsutum
  Clone ID: LIB3825-012-Q1-K6-H1.pep
TAVVDDRSVDQNFDRQVSLPRFSSGSSYAGSLFSATTLDGNLSSDVKDTWTKETSSTTVPPTGEVEAQEEAKDNLALKSKESYYLQVMLARRLTSQASLLGEPLLLQCSGPDVVDAETVSYRLWVSGCLSYNDKISDGFYNILGMNPYLWVMCNELEEGRRLPPLMSLKEIEPSETSMEVVLVDRRGDSRLKEL

SEQ ID NO: 108437 - protein, 90 aa, Gossypium hirsutum
  Clone ID: LIB3825-012-Q1-K6-H10.pep
MTIGIISSALANSETILASDHGSIVSINLFVALLCGCIVIGHLLEENRWMNESITALAIGVCTGVIILLTTGGKSSRLLVFSEDLFFIYL

SEQ ID NO: 108438 - protein, 53 aa, Gossypium hirsutum
  Clone ID: LIB3825-012-Q1-N6-C11.pep
FKFYICNSHQLNEFYICVLYFLGSIIVPFFLFCFVLVWDYLLLGNPFNFLLHY

SEQ ID NO: 108439 - protein, 85 aa, Gossypium hirsutum
  Clone ID: LIB3825-012-Q1-N6-D10.pep
MWIHHLITTKDLDFITDKVTVQYLGYSSHCLKSSIPVLHERKKNTFKMIAILSHEIFQGLISPGYLKIENQHGDICTKLPYGNQV

SEQ ID NO: 108440 - protein, 84 aa, Gossypium hirsutum
  Clone ID: LIB3825-012-Q1-N6-D11.pep
LIFPLFRFCSTIKKHPIKGIPGKGLIMLFLIPQYFYNPSPKMLLYSCKAKLKNYVERSNCALCLFAFIFEHQKVADICSFSCCG

SEQ ID NO: 108441 - protein, 144 aa, Gossypium hirsutum
  Clone ID: LIB3825-012-Q1-N6-D12.pep
TFPVHLPPQSSAATSDGSFYAWSNGVGVAPSNKQGPIPAVGVPQKKDENYYKNLIQQHGGERPGTTQSFDSRYNHQLKPNLEVTSNPKSRDSKTRIMKPCLYFNTARGCRNGVNCAFQHDTLSQNNVSDAPNAKRMKMDREISS

SEQ ID NO: 108442 - protein, 165 aa, Gossypium hirsutum
  Clone ID: LIB3825-012-Q1-N6-E12.pep
VWGLMQRIEGLYKAASFGNLLLFLYTGRYRNLIERALRARLVYESPNMNRAVSFEYMNRQLVWNEFSEMLLLLLPLLNSSTVKSVLHPFSKNKSSSSTEDDSTCPICRASPTTPYLALPCQHRYCYYCLRTRCAAAPSFRCSRCSEPVVAMQRHGSIVEHKTHNQ

SEQ ID NO: 108443 - protein, 114 aa, Gossypium hirsutum
  Clone ID: LIB3825-012-Q1-N6-F10.pep
TQKKTGLPVQIYCQMGGLTPPKNPILEGGGKYKIPPPKEMGVGKTNKAGPKKIPYKKGWLNPFGLKTLQPFWLEKPQQPNLKGIRKKFPPQGAAIKNFRKGDLKWGHWGKSDGT

SEQ ID NO: 108444 - protein, 100 aa, Gossypium hirsutum
  Clone ID: LIB3825-012-Q1-N6-G12.pep
WGVPRGFSMSILWPSFGQIAGRIFLPNHVRAQPKKWHLVGFSRLWNPKAACKDIIRVPLPQGFLGKLGLFARWVYFGIIEIKELVPEISPYCSVFSGGIC

SEQ ID NO: 108445 - protein, 123 aa, Gossypium hirsutum
  Clone ID: LIB3825-012-Q1-N6-G8.pep
TYTILALLRVLEGLNQLAPRLRAQIVSDNFAEGNVLTLDELSTSGSRVPHEEFINGKLTPKLARQIQDVLALCSGSLPSCCCLSVSSQVQSPLARWYVALDVEHDCWSAGAYGASLWAHGGRT

SEQ ID NO: 108446 - protein, 34 aa, Gossypium hirsutum
  Clone ID: LIB3825-012-Q1-N6-H9.pep
TCTETSSILNLGNLHNFLKGGMCSCLHSKATNYL

SEQ ID NO: 108447 - protein, 47 aa, Gossypium hirsutum
  Clone ID: LIB3825-013-Q1-K6-C5.pep
SDAVIQFLPKKDNMILMLVASIHQINLFSINSKQESFPTSFLQSHNS

SEQ ID NO: 108448 - protein, 99 aa, Gossypium hirsutum
  unsure (1)..(99): unsure at all Xaa locations
  Clone ID: LIB3825-013-Q1-K6-C6.pep
NADDASIQHSILKVRIKLCPQRKILLLIQESLSFXFKKLKKANSMYLFMQQEYPLQTYPSFQLIVYIMPAHFGRKGSISLIVQSYSIQQSLKNVWLCTK

SEQ ID NO: 108449 - protein, 73 aa, Gossypium hirsutum
  unsure (1)..(73): unsure at all Xaa locations
  Clone ID: LIB3825-013-Q1-K6-C9.pep
MIRLLIQRDWRFLFQXKELKYIDVSSLRRMILPKRAAEGHLPILESXKGSSINMDDLDGLNVSSFEYRVCPDN

SEQ ID NO: 108450 - protein, 150 aa, Gossypium hirsutum
  Clone ID: LIB3825-013-Q1-K6-E11.pep
MTPVIPYSVSNITFIPGAACTVRKNTSLTRCSSSRKHTRYALPSQRFILPLSTSVTSFRKYGTGYALHGKLGICLSTAGTDVAVEESDSSVTKVSSGGSEIPSDAVETSEDSTSQPDSTPPTQSKRARPVRKSEMPPVKNEELIPGAMFT

SEQ ID NO: 108451 - protein, 121 aa, Gossypium hirsutum
  Clone ID: LIB3825-013-Q1-K6-F10.pep
SYLNSIDRPSTNNGLTEKYPGPTQLNWLEIHPSLASWLNNKQAPTDLPNKHSRRLNSETHPPCSHSSSAVGGVLTRRPTHSLASYLPPVPFAFFPFFLRTSAGSAKQSINGWLPGCDRLIA

SEQ ID NO: 108452 - protein, 82 aa, Gossypium hirsutum
  unsure (1)..(82): unsure at all Xaa locations
  Clone ID: LIB3825-013-Q1-K6-F8.pep
FARSSRWXEKVLLFNSKLKLFPDKLKSRWLGPFIITEVHHHGAIEIRSLKTNKIFKVNGHRLKHFHEGEQAAWLEEINLEDP

SEQ ID NO: 108453 - protein, 83 aa, Gossypium hirsutum
  Clone ID: LIB3825-013-Q1-K6-G12.pep
TNLTYPMHSQMIHIPQRAPFSPVTVAPANQQPILSTTHLITALLSQLASRAHRPFTTVRLISHIIKHSERNPKILSHIGNSSL

SEQ ID NO: 108454 - protein, 190 aa, Gossypium hirsutum
  unsure (1)..(190): unsure at all Xaa locations
  Clone ID: LIB3825-013-Q1-K6-G2.pep
QTLLVLLLRSKSGKIYQFCPISFCIVLYKFITKTTVNRLRPLMVKLICQNQLRFIPGRNITXNIVMAQEVVHLLKGFKGNIYGMVLKIDLEKAYNRIRWDFLKDTPSEAWFPQLLVDVIXDYVSFSTLQVLWNGSVTESFQSTQGIRXRGPLSLYLFMLCMERLRNLVGEAVEQGXWKPLFLSRRGLTLS

SEQ ID NO: 108455 - protein, 52 aa, Gossypium hirsutum
  Clone ID: LIB3825-013-Q1-K6-G3.pep
TELEGREVVRMIEQLPVTKILPYPNLCQHDLSQAIVLYLLLMILGFPFKMND

SEQ ID NO: 108456 - protein, 123 aa, Gossypium hirsutum
  Clone ID: LIB3825-013-Q1-K6-H10.pep
FTNLTHVGQLDQKQKRPLLHISLCAHGSAKCCTIFFDGSTQFIPCRVPLPTTSQNGLIAHYPTLSSGAYYALYPIATAAIACRIDPIYFCRNLLMKKGKNKISSLTVGANKKGYAHRSDQPMA

SEQ ID NO: 108457 - protein, 105 aa, Gossypium hirsutum
  Clone ID: LIB3825-013-Q1-K6-H4.pep
DFIPCPSRCHAHRGATANRARSQVSRSFLYFIFCKKNENRAKEKREKNEKETENHLLLLCILFFFVKSVSLRFTDSCLALYSRNNRERKNRNPSSNYVIFHFFVI

SEQ ID NO: 108458 - protein, 72 aa, Gossypium hirsutum
  unsure (1)..(72): unsure at all Xaa locations
  Clone ID: LIB3825-013-Q1-K6-H8.pep
DDASLICVPTKVHCPYKLQRPDWEHPGVPHLNRPATHPHFFXWNGDEKAHTERPLQHHLKLLGKRHAPCDPT

SEQ ID NO: 108459 - protein, 110 aa, Gossypium hirsutum
  unsure (1)..(110): unsure at all Xaa locations
  Clone ID: LIB3825-013-Q1-N6-C10.pep
AAFVKKTFFAPKMVFFSKSFCPFCRKAKFVFKGFKKVPFFVGLFERDYGWNIRDPLSEIVGGGFVPQVFFNGKPIGGSADFVXAYQGGKLVKLLGFGVETKDDFWVHKQN

SEQ ID NO: 108460 - protein, 148 aa, Gossypium hirsutum
  Clone ID: LIB3825-013-Q1-N6-C9.pep
DGLHVWSFKYRFWPNNNSRMYVLENTGEFVSTHGLQLGDFIMVYQDSLNQNYVIQAKKASDEDVYSDIARNGVNDLFLHDYEATKSSNYYYPMMDDNGMSFIYDTTLSFSNDCPLDFLGGSMTNYSRMGSLESFGSVENLSLDEFYQL

SEQ ID NO: 108461 - protein, 89 aa, Gossypium hirsutum
  Clone ID: LIB3825-013-Q1-N6-F8.pep
FPEGRVLQIVRLPFSQLAEFTSCYSSSLIGLLVKFLKKILLAATLLYFFSVFLHTLFSAAVISIYGIITSHNSKLNSILSPFFLASPVA

SEQ ID NO: 108462 - protein, 86 aa, Gossypium hirsutum
  Clone ID: LIB3825-013-Q1-N6-H10.pep
VIELGFQLFGWELVLLGIRRGEWLIRISYRFLVAECHPVWLGLSNRITVCTSEVVVLAAKVSLLCIIEVPFVTFCSYKKENLLLFF

SEQ ID NO: 108463 - protein, 89 aa, Gossypium hirsutum
  Clone ID: LIB3825-013-Q1-N6-H7.pep
GPPGPLFFYKRFPGGLPVAFIIYKNPPGSPAFFPGAPLLNFCPPPFLGGERGPPWGVWGSPMEKIIPPFFLNLKIKPPVGKSLSGGYWF

SEQ ID NO: 108464 - protein, 151 aa, Gossypium hirsutum
  Clone ID: LIB3825-013-Q1-N6-H9.pep
AALERVESGTESVGDEDVARALLAACKGAAEPSLNTYDQLLSNGAILSSPNLRLRLLQSVLVVLREWAMSVFAQRMGTTAAGASLILGGAFSPEQTMVLNQGIRDKITSAANRYMTEVRRLPLPQSRTEAVYRGFRELEESLIAPFSFDRF

SEQ ID NO: 108465 - protein, 135 aa, Gossypium hirsutum
  unsure (1)..(135): unsure at all Xaa locations
  Clone ID: LIB3825-014-Q1-K6-A9.pep
MCTVLVFDHKRDLQVLCLTASVNRKLRAIAKRLLWRKLCVYRAPRMVSALVNGSPSGRIGGGWDALAKLMFFCCGCESTRNFKLSRSSPGHFAGASRFSKTSGRSFLTKKXRADLLFVSDPCEHPVGDKRDDLGI

SEQ ID NO: 108466 - protein, 190 aa, Gossypium hirsutum
  unsure (1)..(190): unsure at all Xaa locations
  Clone ID: LIB3825-014-Q1-K6-B6.pep
NPHKPMILALSRPDPXKNITTLLKAFGECRPLRELANLTLIMGNRDDIDEMTGGNASVLITVLKLIDKYDLYGLVAYPKHHKQTDVPDIYRLAAKTKGVFINPALVEPFGLTLIEAAAHGLPMVATKNGGPVDIQRALNNGLLVDPHDQQAIADALLKLVSEKNLWHDCRRNGWKNIHLYSWPEHCRTYL

SEQ ID NO: 108467 - protein, 81 aa, Gossypium hirsutum
  Clone ID: LIB3825-014-Q1-K6-C2.pep
GSVHFVNSQNIYKCHIYDCMRRTISINIMIRSLKCHVPWSLPPTGFSQPPKLGIFPITSGKTGWIYIHTYNYDQLKMNREI

SEQ ID NO: 108468 - protein, 67 aa, Gossypium hirsutum
  Clone ID: LIB3825-014-Q1-K6-E3.pep
LPVKKKKKKKKKKKKKKKKKKKKKKTKKKKKKKKKKKKKKKKKKKKKKQKKKKNGGGPLQGGHCSTP

SEQ ID NO: 108469 - protein, 201 aa, Gossypium hirsutum
  Clone ID: LIB3825-014-Q1-K6-F8.pep
IGSMLRAVQETFGHAKEAVVGNKGHEAEDFTGRGTEKTWEMKDKAGEYKDYATDKTKDAAERAKEATDATKEKASEYTDYAAHKAKETRDSTAHKAKESKDSVTGKASEYGDYVAQKAKESKDAATGKAADYADYASQKAKETRDSASQKAKEAKDNITGKASEYKDYAAEKAKEAKDMTAEKAKEAAKAREGTEYAAEKA

SEQ ID NO: 108470 - protein, 87 aa, Gossypium hirsutum
  Clone ID: LIB3825-014-Q1-K6-G1.pep
SSCCTRSTNMYFLRVLEYSITSASSVLHGTIPLFGVLMFPLHICYTSSRYDVTVRPCQVLRAPGYQVASPRLLHNSPVPGPCQFARA

SEQ ID NO: 108471 - protein, 203 aa, Gossypium hirsutum
  unsure (1)..(203): unsure at all Xaa locations
  Clone ID: LIB3825-014-Q1-K6-G2.pep
DCSYPKSSHVGVGLVLGKSMEKRFXTLNTVIARLVDLLGDSQGSHSEAALIERGQGEQXTEXCEIESSAEAIRYCAXKHAHLKNNLLTNYTFNCDHMLNDRGHTAVYLIYANALICIIMRRSGKDILELTNTGTLVLGHNDERDLGLHLLNVAEVVEXACTNLLPNVLCDYLYNLSEIFXKLYSNPECKVISSDMETSQLLLC

SEQ ID NO: 108472 - protein, 168 aa, Gossypium hirsutum
  Clone ID: LIB3825-014-Q1-K6-G3.pep
AQIPRGWTEGFRNTKQNGSANNLEVLNEQNESGLIPSNEKRVTYVKPKSNQLVATSDSDHTSIFDVDKNQSLSASSDGYYKKRKNQLIRTALESHMKQAVTSSDDISNSVREIAAKVISSRTFGKRRSNKVVAKTHKPSKFSLVWTPHSARLSNNDGSSLCYPKVRPQ

SEQ ID NO: 108473 - protein, 40 aa, Gossypium hirsutum
  Clone ID: LIB3825-014-Q1-K6-G7.pep
DSPPDPHQKQTIHFNRVRSSRICCCHAQERLATDTMKKFR

SEQ ID NO: 108474 - protein, 107 aa, Gossypium hirsutum
  Clone ID: LIB3825-014-Q1-N6-A9.pep
RQVAFDDRVRCPYCGTRVWSMTAARLVPKSAARRLGSRDGRLEYFVCVNGHLHGTCWLVPLSSEEENCEEVEEEEDEDEDGGDFNGEAYKKHEKVTNGTGSRSSLMF

SEQ ID NO: 108475 - protein, 155 aa, Gossypium hirsutum
  Clone ID: LIB3825-014-Q1-N6-C7.pep
GKKKNRVFFTGEIWGGPPPLALLGRNQNNFKPQDPQLGGGGKFSKNGPPKNWPNGKHLRPPITWGGGKKFGFPSHGPPLPLWGDFFGGGGGPPFYGGFIGGHLGSRNPGQSIRGCPSPSSTLIPGGGPLQNPGGGWLNLWAGNKKRGPFWGCPPF

SEQ ID NO: 108476 - protein, 138 aa, Gossypium hirsutum
  Clone ID: LIB3825-014-Q1-N6-C9.pep
DSHKPNQLEPVASSEAKKKNEGVEETKKAEGENGPSESGDADDKTDEAKKNKDSKGIRAFKFALVEFVKDLLKPTWKEGQIGKEAYKNIVKKVVDKVIATVQGTNIPQTPEKIDQYLSFSKPKLSKLVQAYVEKFQKS

SEQ ID NO: 108477 - protein, 107 aa, Gossypium hirsutum
  Clone ID: LIB3825-014-Q1-N6-E9.pep
ATKRISSRFRNLLSSWLCARILTTLSQVDRKKVKDLEFLFLHGFTLSKLRLDRLLNQNRDFLQSVPIHPCLHRKKKRKKKSILPLEMRLLEAATYSVYKRTELLQSP

SEQ ID NO: 108478 - protein, 102 aa, Gossypium hirsutum
  Clone ID: LIB3825-014-Q1-N6-F8.pep
MGFLTGKTEETKHTASETADRTKEKLSETTESARQKMEEMKLKGNDGGRGVSERVVVKVEDTRPGAFASTLKASDQMSGQTFNDVGRVNDEGVYDRSDKTNL

SEQ ID NO: 108479 - protein, 71 aa, Gossypium hirsutum
  Clone ID: LIB3825-014-Q1-N6-F9.pep
PPRRGPPRTSLGPLLLKFLGPSGTVSPPVFSNLFPPPGFSQKKKKTGGVPLGGWIKFFPGGQGAFSAPPIC

SEQ ID NO: 108480 - protein, 100 aa, Gossypium hirsutum
  Clone ID: LIB3825-014-Q1-N6-H10.pep
KQIKEVMQVDDLTNDEVKSHLQKYRLHIRKLPPSSARNQCSENMKSQSGSPQCPLTVSALAKGMSSTGGDSMDGEDDEKSDGLSWRSGVHKPGEIECIVR

SEQ ID NO: 108481 - protein, 37 aa, Gossypium hirsutum
  Clone ID: LIB3825-015-Q1-N6-A10.pep
SILLLVSLRGTHDDRSTSIKYIRLCAQYYLLILGDSD

SEQ ID NO: 108482 - protein, 151 aa, Gossypium hirsutum
  Clone ID: LIB3825-015-Q1-N6-A11.pep
MKASKSSEKYELDGQVVECFLAKPQTDQKTSGGSSSQNSGFLPSYPPQVGYGPVGGAYGALGPGYGVAGLPQPVIYGRGPTPTGMSMMPMLLPDGRVGYVLQQPGSQLQSPPIHQSSNRGGGKSGSSSSSRGKPGSNDNSNRRKMIVHEII

SEQ ID NO: 108483 - protein, 27 aa, Gossypium hirsutum
  Clone ID: LIB3825-015-Q1-N6-B1.pep
PTYLIYASLMYDYWVIWYSRKPNVCEL

SEQ ID NO: 108484 - protein, 118 aa, Gossypium hirsutum
  Clone ID: LIB3825-015-Q1-N6-C12.pep
KWGYKKKRMTKSYHEASTFRLNASLGFDQNDMISRFLSYPEMPHNKIPITTLISFYRFNLLIFVSRLKELSTANLERIRLSPWLAESFFRVLRSSMTDPNLISTCVLVPYSLWWYLRN

SEQ ID NO: 108485 - protein, 63 aa, Gossypium hirsutum
  unsure (1)..(63): unsure at all Xaa locations
  Clone ID: LIB3825-015-Q1-N6-E11.pep
SKQLYTCFISFSLSRCTLKPSRGVNHPRQVSSWLDLCFGPPLPSDQLAXYWMVHVPLMKQLQL

SEQ ID NO: 108486 - protein, 79 aa, Gossypium hirsutum
  Clone ID: LIB3825-015-Q1-N6-E9.pep
IPNAVKLKCFYFLSNCLSYYPFCCFGYKFMRSHDMSISHYISISLQADILTVIKRRIPETSCSYPGDTCRDFPFLFTFY

SEQ ID NO: 108487 - protein, 80 aa, Gossypium hirsutum
  Clone ID: LIB3825-015-Q1-N6-F12.pep
LLQPNKLDKKIRVRFSHRVTCEKQVQLVTYDFACGHQKKHSQIREREREMSRGGEGVSPSSMVVAFTEGFVCWKLIGDER

SEQ ID NO: 108488 - protein, 61 aa, Gossypium hirsutum
  Clone ID: LIB3825-015-Q1-N6-G4.pep
RIVYSLERNINITIMNLLLQIFREVTIKCSPNGNTRAQSLLYRASKELRTGPGTDYLTDLY

SEQ ID NO: 108489 - protein, 134 aa, Gossypium hirsutum
  unsure (1)..(134): unsure at all Xaa locations
  Clone ID: LIB3825-015-Q1-N6-G6.pep
PHPIWWFPMDGKVEFGFPVGTYXLFFRPPLGKFSKRLGRGVCNSKPPPGWEIKPVRFQLTTSKGQSVESRCPLTNPGNWVLSKVGDFFVQNPNAFPKIKFSFPPIACPPPQGGLCVDAAFFSPPPVAKKIRSCS

SEQ ID NO: 108490 - protein, 130 aa, Gossypium hirsutum
  Clone ID: LIB3825-016-Q1-N6-A12.pep
RDPTRMIKQMQQRRSTIGIFGAVTEAANNANGEEAHPEGDPELLDDSEFYQQLLKEFFETVDPTSSETAFYALKRLQTKKRKIVDRCASKSRKIRYHVHEKIVNFMAPEPMKLPPMAPKLFENLFGLKTQ

SEQ ID NO: 108491 - protein, 73 aa, Gossypium hirsutum
  unsure (1)..(73): unsure at all Xaa locations
  Clone ID: LIB3825-016-Q1-N6-A4.pep
KKKGFVFFREKGSLFFGCGAKTRVNLDQCFEELFLKILEPPTLVVGGFFGVKKNFFXQNPPQRGAPTSGFCSG

SEQ ID NO: 108492 - protein, 187 aa, Gossypium hirsutum
  Clone ID: LIB3825-016-Q1-N6-A7.pep
RDLEQGDYLGKTVQVVPHITDAIQEWIERGALIPVDGKEGPADICVIELGGTIGDIESMPFIEALGQFSYRVGPGNFCLVHVSLVPVLNVVGEQKTKPTQHSVRGLRGLGLTPNILACRSTMALDENVKEKLSRFCHVPAENIVTLYDVPNIWHIPLLLRDQKAHEALLKELNLLRIARKPDLTEWT

SEQ ID NO: 108493 - protein, 72 aa, Gossypium hirsutum
  Clone ID: LIB3825-016-Q1-N6-B8.pep
LKMPVHCGFDFDFYSSGFFLPPCIGVGFTLNPIGKVALVHAYRNRNRFWFQNWANWEWCIATVKIVSPIGDS

SEQ ID NO: 108494 - protein, 56 aa, Gossypium hirsutum
  Clone ID: LIB3825-016-Q1-N6-B9.pep
FFFFFFFFFFFFFFFFFFFFFFFFFFFFFFFLGGEKKNGVKTNKGDPNPFHQNKKN

SEQ ID NO: 108495 - protein, 49 aa, Gossypium hirsutum
  Clone ID: LIB3825-016-Q1-N6-C1.pep
FGVASVYAGFGSVSVLSAIFAYYFLVETKGRSLEEIEMSLNSNMRGGGR

SEQ ID NO: 108496 - protein, 79 aa, Gossypium hirsutum
  Clone ID: LIB3825-016-Q1-N6-C10.pep
FPALGILAFKEGSSQARYFVSRLIPANKDPPYEQEARFPQLRTLTIEQRTKLKSSFIHFDDPSFCEWIRGLKAVPPEPI

SEQ ID NO: 108497 - protein, 116 aa, Gossypium hirsutum
  Clone ID: LIB3825-016-Q1-N6-C2.pep
FILFPKHFGDFFASGCITPKQGALANEQLRFFFSQVRPNVIALVDAFNYPAPSLGFVFGRYNGNVYPKLFEEGWKNPFNETFIPDGFPEYIWPIFKQHIWVARLLKNNPPSCCLIV

SEQ ID NO: 108498 - protein, 125 aa, Gossypium hirsutum
  Clone ID: LIB3825-016-Q1-N6-C3.pep
RCHEHNHSDTISGSGNGNCHCSKRRKNRVKKVIRVPAISSKIADIPADEYSWRKYGQKPIKGSPYPRGYYKCSAFRGCPARKHVERDSDDPSMLIVTYEWEHRHSEPAMEKNMVPAEGLVSESTR

SEQ ID NO: 108499 - protein, 100 aa, Gossypium hirsutum
  Clone ID: LIB3825-016-Q1-N6-C7.pep
MGHSVHLPEYQPRWGVFLSKYFPNKLEKSLICTFPVFLALAFFNSLPVYFLNGESILEVALSHFTSLSSRKTRKIPQVCVVGGSLVSVLAFLRMTFINFF

SEQ ID NO: 108500 - protein, 71 aa, Gossypium hirsutum
  Clone ID: LIB3825-016-Q1-N6-D5.pep
KDPQFFKTGDAGIIKMFPPPPRVVGPFSGAPPLGRFSVRAMGPPGAVGVFKRVEKRAPPGARVPKFAAKKK

SEQ ID NO: 108501 - protein, 83 aa, Gossypium hirsutum
  Clone ID: LIB3825-016-Q1-N6-D6.pep
QCQLKSSRLGNELHSTVLILSIDAIHASPLFCGAAFFGFGPFSRFEESHPWLISINPCKYYVQEPLARKSLSFHNHLVKFSHE

SEQ ID NO: 108502 - protein, 87 aa, Gossypium hirsutum
  Clone ID: LIB3825-016-Q1-N6-E1.pep
KKNWGLKPKKNGLKWEGLKKNPKKKREWWSFLSFLKRNPSQGKPLEKKFVFSIKKPRFFLKVPRFFRLLKAAPPLFPFKTFDSPVFF

SEQ ID NO: 108503 - protein, 59 aa, Gossypium hirsutum
  Clone ID: LIB3825-016-Q1-N6-E3.pep
NLRTHARDGRQNPCQRRQTFFEIFIICPEQRTRKLIDLPRWLTQEVKVCECLEDPHLES

SEQ ID NO: 108504 - protein, 89 aa, Gossypium hirsutum
  Clone ID: LIB3825-016-Q1-N6-E6.pep
TRLATAAAATEVAASAANPTGVELDLPVDPNEPTYCLCNQVSYGEMVACDNPNCKIEWFHFGCVGLKEQPKGKWYCPDCATVKNRRKGR

SEQ ID NO: 108505 - protein, 135 aa, Gossypium hirsutum
  unsure (1)..(135): unsure at all Xaa locations
  Clone ID: LIB3825-016-Q1-N6-F3.pep
KKKKKKKKKKKKKKKKKKKKKKKKKKKKKKKGKGAKRKERKEKKRKEKKGKASREPGLKALNELREELVVEKEGKRKRQQRVGQEKRKKRISSNQPYNPKKNGKXKKKKKKKKKDKGGKQITSKKKRKGRQNTIN

SEQ ID NO: 108506 - protein, 77 aa, Gossypium hirsutum
  Clone ID: LIB3825-016-Q1-N6-F5.pep
VYRCGHLSYFLLIATRVNEVIILTSFAKSFIEHTCMHTCLMTITLTHVCEYFSLVEATPGISLDYLLIYSFLTPIYP

SEQ ID NO: 108507 - protein, 98 aa, Gossypium hirsutum
  Clone ID: LIB3825-016-Q1-N6-F7.pep
AKQKFCGRQIIGWADCRYGAGWMTHCSLVYSVFFFIVLILLLKFACVLGLFLMYSFGGSVFLKFTWDRVSQNLFPLKYPQFYWHNLDLWSMFNQCVLL

SEQ ID NO: 108508 - protein, 100 aa, Gossypium hirsutum
  Clone ID: LIB3825-016-Q1-N6-G3.pep
PNKKIRKKKKTLAVRSTPFYPHLPLTTPVASPLSNPPPLVLANINKNREKARLEACKRLFKAESKTIVISDIFSNTKKEHRFKQKNSIISPQEIREKASK

SEQ ID NO: 108509 - protein, 82 aa, Gossypium hirsutum
  unsure (1)..(82): unsure at all Xaa locations
  Clone ID: LIB3825-016-Q1-N6-H1.pep
YQNLNPKYKPDKPIAFRTDKTLGFSLSRRSQASALTSVPPSAIRSVPSSSHARASTRPPSRATHSXPANEYKTTQQHIGKED

SEQ ID NO: 108510 - protein, 59 aa, Gossypium hirsutum
  Clone ID: LIB3825-016-Q1-N6-H11.pep
KALAADPCCKKLEHFCHARSSPGFGEFAIIWLLECYFLWSKYLGDEVKPPFHYSGREAT

SEQ ID NO: 108511 - protein, 90 aa, Gossypium hirsutum
  Clone ID: LIB3825-016-Q1-N6-H9.pep
IKQNSISIFCCYISFLQDFTTLVFSKRIFMIHLIVLLGLYNLNKSLLERCYMSSNILIQSFISTLIILIQHYHAFCPLNYFLLLDTSLEK

SEQ ID NO: 108512 - protein, 60 aa, Gossypium hirsutum
  Clone ID: LIB3825-017-Q1-N6-A12.pep
PNAKHFNSKFKHALFHLANPIQNATSLELRRETLDRPQTSSTGYTTLSLLIHQTLGDPAE

SEQ ID NO: 108513 - protein, 110 aa, Gossypium hirsutum
  unsure (1)..(110): unsure at all Xaa locations
  Clone ID: LIB3825-017-Q1-N6-A6.pep
AGNPVCCTGDLSVLMFIAKXKHQAHCSDLASPGSDAGGLLQSLEEFSEYVRGTAVRVGVDLLNIRKYEAPDKEENLIMFQXITKQIVSPVKGCPHAKGFFIDPPMCVLGR

SEQ ID NO: 108514 - protein, 102 aa, Gossypium hirsutum
  Clone ID: LIB3825-017-Q1-N6-B11.pep
MHDIEWADLTIYSNVVCVVCQVLVDVYADPNLLVAYVPEENLLAPEQPDLRRFDHPYVPFLFYGMDAAGDFIPIKQLREKYNRPRHEIPLDPEGDEGGGAAA

SEQ ID NO: 108515 - protein, 129 aa, Gossypium hirsutum
  Clone ID: LIB3825-017-Q1-N6-C12.pep
KEPNPGAKHGGIPAQREKTGKTQFLIKTKTGWLGAKTFGAKAKFPPNKINRQIQRPPPTGGGKKQFGGQNPENQNPNFFGKNQLGKWGPGRHFCFTLPGGRKGRALNSLTFFLGWERGPLFLGVFMGIG

SEQ ID NO: 108516 - protein, 120 aa, Gossypium hirsutum
  Clone ID: LIB3825-017-Q1-N6-C6.pep
RKGGLPPPPSMGGSPPPPSLGGLPPPPRMGVLPPRGSMGGGFPPPPPMGASRPPAPRGGALPPPRPMGGMPPGPPVLGWFGTMGANAPNFQNPSPGNPPIVQYPPSPPPLLGGPGGVFPF

SEQ ID NO: 108517 - protein, 33 aa, Gossypium hirsutum
  Clone ID: LIB3825-017-Q1-N6-D12.pep
ALYFGFNLLPKGRNWFLMGQILYLYIVRCRIYI

SEQ ID NO: 108518 - protein, 69 aa, Gossypium hirsutum
  Clone ID: LIB3825-017-Q1-N6-D6.pep
TRKKGVFLSALHKKKITFNAPRFLHDGMQARAAKNKSCWDTATPFKLYQLLREGNLIFGSYHLFVSIYQ

SEQ ID NO: 108519 - protein, 57 aa, Gossypium hirsutum
  Clone ID: LIB3825-017-Q1-N6-E10.pep
VKNLRLLNSCVKNSSLSLNAKCKSIYAVSAIDIENSEVFQCILLSGTISSIWCQVEM

SEQ ID NO: 108520 - protein, 116 aa, Gossypium hirsutum
  Clone ID: LIB3825-017-Q1-N6-E8.pep
GPKGEPQGRPPGAPRGQKTPRGGGLNPTNEGKTFPRAYKRPGLGPPPQPGWVHPPSQSGDRFLPFQIQPGRIAGPNPFPSQQFKTLFDFFLKGLLIFPSGNLFAIGLSPELNLGRN

SEQ ID NO: 108521 - protein, 135 aa, Gossypium hirsutum
  Clone ID: LIB3825-017-Q1-N6-F6.pep
KAKLAPGVLATMTQIAHGELPRLPFLKFRNSELDDVSQLGHQVPIVIPVSAAMALCALHLLLRYGEKSDGLVTCRDAEVPGSVIVRPEQKLDHAWMVYSSKKKNPNEPDATEMCEAILTLLVELGKRKQEEIEKY

SEQ ID NO: 108522 - protein, 49 aa, Gossypium hirsutum
  Clone ID: LIB3825-017-Q1-N6-G12.pep
GSPLPDIFQTNFPSQTPSSMMNSSKKEDTRAFDFISDHLAAARDPKRTV

SEQ ID NO: 108523 - protein, 116 aa, Gossypium hirsutum
  Clone ID: LIB3825-017-Q1-N6-G5.pep
GEVLNADLRCLGAVNTDANDNSNPWMCVENRRKVVNGKKEGLGCKIESHGNQVFCSKGGDIELWSEVAVGSGGRLKGKVFRKNVMGRVKAMGGLKVTNLAFGGNKMFVTRKDQQAV

SEQ ID NO: 108524 - protein, 91 aa, Gossypium hirsutum
  Clone ID: LIB3825-017-Q1-N6-H9.pep
PPLLRRKNFGGYISCLSKVTGLKTSGMLYNGFNCKAFFLGLGNPPTPGGMKFKWPKKINQIVLPPQLHAPNLQQKLLSQVFFFFPVVKMPL

SEQ ID NO: 108525 - protein, 70 aa, Gossypium hirsutum
  Clone ID: LIB3825-018-Q1-N6-A10.pep
IKHVQSSPVCLVLYVLVSSMYSARSLHTYMIHIYMHTYINYIYISTCRVLQNGIDFSSKPTNILRQIKSL

SEQ ID NO: 108526 - protein, 48 aa, Gossypium hirsutum
  Clone ID: LIB3825-018-Q1-N6-A7.pep
KIFKYKPGSPLLLYKLALAQCSPSTDVLEVYVPLLGLYLMLSYRTFMP

SEQ ID NO: 108527 - protein, 99 aa, Gossypium hirsutum
  Clone ID: LIB3825-018-Q1-N6-A9.pep
YRTPVDLRDKWRNLLRSSSAHKHNRKELQGETNVKHYVRPLPKTVVCRIRELATIHPYPKARSPNLSSINSDPSSKQPTTTKAAPINTHGRNLRGKKCN

SEQ ID NO: 108528 - protein, 55 aa, Gossypium hirsutum
  Clone ID: LIB3825-018-Q1-N6-B4.pep
PLNIGWLFKFWTSFAWVFLLIRPPPPLNFLPCGFPIQAGVFPERFFLNPFSSFVV

SEQ ID NO: 108529 - protein, 49 aa, Gossypium hirsutum
  Clone ID: LIB3825-018-Q1-N6-D2.pep
AITKPDTRHSHPHAVRSCLVMQHNVSIKLDFSFARSIMDKDHANISINM

SEQ ID NO: 108530 - protein, 37 aa, Gossypium hirsutum
  Clone ID: LIB3825-018-Q1-N6-D3.pep
FVRLSGYFDSGIRKSANEIMLYSPVSHSILAFWPDRA

SEQ ID NO: 108531 - protein, 115 aa, Gossypium hirsutum
  Clone ID: LIB3825-018-Q1-N6-D6.pep
KSHARSRKTKKNRLKSKNLYGTQKSPFKVLMTFFCIQFAYIVRVYVKKKEEDPCNRFPPWLYSRIIKRRENTEIFSLAATLAAVFVFSCRYERRRGGTRVAYRGVQGVVRRRAGG

SEQ ID NO: 108532 - protein, 142 aa, Gossypium hirsutum
  Clone ID: LIB3825-018-Q1-N6-E8.pep
AVPLLVPRRTTSKINIGGYDIPSNIMVFFNSWAIHRDPEVWEKPEEFIPERFEKSSDDFKSQDFEYIPFGFGRRGCPGMAFAVAFIVDLVANLLYWFDWKLPDGENAENLDMDEGYGLTVFKKAPLRVFPIFRNFESQVDRV

SEQ ID NO: 108533 - protein, 69 aa, Gossypium hirsutum
  Clone ID: LIB3825-018-Q1-N6-E9.pep
FCFLLKKIIFLKMFPKGLPPLWVFFFLLGGSLSGCDVSLCFCKIKIFFTFFFSLGGPLVYTPLIGFPGI

SEQ ID NO: 108534 - protein, 101 aa, Gossypium hirsutum
  Clone ID: LIB3825-018-Q1-N6-G10.pep
MLMHGKREKRTPPYGRGGPGKRQRRAAAIRISQSNTETTNRIPINPSSGGDRPSSGVFGGGVGRGGGGSMLDVEIRLRKDNLYTARLLYKMMNYHPTSKSW

SEQ ID NO: 108535 - protein, 112 aa, Gossypium hirsutum
  Clone ID: LIB3825-018-Q1-N6-G7.pep
CMGIKKIKTKFLHVFIHSFEEKKRNKKYKFFLYIKAKSDLLFFLVLCIDSVGTQNTMFFHGIYSRNENENTMFCLFFPCWLGFAGVRRVKVACDGGGAYGNVRRSKKALEAL

SEQ ID NO: 108536 - protein, 49 aa, Gossypium hirsutum
  Clone ID: LIB3825-018-Q1-N6-G8.pep
FMSGSYVVRAVTFFRTILFLRGFKAPVSPSATDSTFPCLMPRSPRPETM

SEQ ID NO: 108537 - protein, 90 aa, Gossypium hirsutum
  Clone ID: LIB3825-018-Q1-N6-H1.pep
EQGVFFFVFAPGFGPLPLFVYLLVSPPFFFFFYNYCPNEPQNFVLLGDFPQGVAQFGALIFFVGMKNSIPKGHLRGKSPNQKAFFLLSKK

SEQ ID NO: 108538 - protein, 158 aa, Gossypium hirsutum
  Clone ID: LIB3825-019-Q1-N6-B2.pep
IILDMSLSVNHSYLKPQINKLTEFIAKELDVNASQVHLLNFTSEGNSSLVRLAIVPSDSLTYISNETATNIISRLAEHRVKLPDTFGNYQLVQWKVESSTKQTWWGRNYTVVVMALIIIVVIGLSVYGVWGMWRRKQQTVNSYKPVGAAAPEQELQPL

SEQ ID NO: 108539 - protein, 111 aa, Gossypium hirsutum
  Clone ID: LIB3825-019-Q1-N6-E7.pep
GLHQITLWVIVQPRSVKQKMTNTRGVSSSEGDQCIILTVKGGSQVTVPRHVVTLAENQDAIARMKSDTRVTFQDNLRGSGGWNGYNYPKGINRMERVAIKGGQNQLDSTWE

SEQ ID NO: 108540 - protein, 101 aa, Gossypium hirsutum
  Clone ID: LIB3825-019-Q1-N6-G11.pep
RARTAIDYEKKANIELMEQRQAMEKNMVSMAREVEKLRAELFSVDARPWAAGAPYGMKFNSSEGAFPASYEGYGAHLGAADKGPFYGPGRAFWEKPRMNRR

SEQ ID NO: 108541 - protein, 79 aa, Gossypium hirsutum
  unsure (1)..(79): unsure at all Xaa locations
  Clone ID: LIB3825-019-Q1-N6-G2.pep
GKTAIAKEYYSSAMQLCGVRGGGNAPAQALFWLAKKGFSVVLAFESKRDXNAAIMLARKFAFDCNIMLAGPDDRISLET

SEQ ID NO: 108542 - protein, 181 aa, Gossypium hirsutum
  Clone ID: LIB3825-019-Q1-N6-G6.pep
AGHVDPQKALSPGLIYDITTKQYISFLCSLGYTIDQVKTIVKRPNITCSNRFKDPGELNYPSFSVLFGDKRVVRYTRELTNVSPARSIYKVAVDGPSSVGISVRPRTLVFRHIGEKKRYSVIFVAKRTRRGSTARSEYGSIVWGNAQHQVKKPSYFLHGHFCKHLENVKSLMKNLRSNSDF

SEQ ID NO: 108543 - protein, 110 aa, Gossypium hirsutum
  Clone ID: LIB3825-019-Q1-N6-G8.pep
DSAVKTLYGSDLATMIQAIQRNITDAWSNDVSSWENCGHNQTVCPNLYASESVRMACKFAYRNATPGSTLEDEYFLSRLPIVEKRLAQGGIRLAAVLNRLFNSEVKIAQA

SEQ ID NO: 108544 - protein, 95 aa, Gossypium hirsutum
  Clone ID: LIB3825-019-Q1-N6-H12.pep
SNEDKLKNVEISTVDGFQGREKEAIIISMVRSNSKKEVGFLSDRRRMNVAVTRARRQCCLVCDTETVSSDGFLKRLVEYFEEHGEYLSASEYCNE

SEQ ID NO: 108545 - protein, 110 aa, Gossypium hirsutum
  Clone ID: LIB3825-019-Q1-N6-H9.pep
TGLGKIQREGGERQPTPKPWFGGIPWNRPRAVAGPRPGFLHKGGGNPPLEKVGNPPQGFKPDWGQGPTGGLKQGAPGFKAWPALTRGQPSSPYKCGKGKTFGGPLKRGPN

SEQ ID NO: 108546 - protein, 95 aa, Gossypium hirsutum
  unsure (1)..(95): unsure at all Xaa locations
  Clone ID: LIB3825-020-Q1-N6-B3.pep
GLNAIHSIVQSGLWFGYQISVMGLYDTQLRSCYIVPFPPIGXYFRVLGQRSVLRLTLLCQGDEVQSNHLCLVALKKRHPGVPYNTHLSSRGGLFI

SEQ ID NO: 108547 - protein, 109 aa, Gossypium hirsutum
  Clone ID: LIB3825-020-Q1-N6-C1.pep
IMSPQTPPNEIHQPLHYIFFITSQGNLKKKRGNPTLFLKQNWGPTKNRPLALKIKNKKNAGLRGHFTYGLKIKPIPPCSKKSFAPLSQSKKTVGKKKRGQNFFGPCCQS

SEQ ID NO: 108548 - protein, 89 aa, Gossypium hirsutum
  Clone ID: LIB3825-020-Q1-N6-D11.pep
WGKQTTPGQRGKKKGAILTCFAPNKTKFNPHFYSFFKTIIQQGPCHLPPLNTLKFGARPRWQSLGEEKLIHLYNLVGLQFLSKKPGHLL

SEQ ID NO: 108549 - protein, 163 aa, Gossypium hirsutum
  unsure (1)..(163): unsure at all Xaa locations
  Clone ID: LIB3825-020-Q1-N6-D3.pep
KTQTKRGSKTRPKPTHPPPPTSPKKPRQTPQPPKPKPGGRGGPPGNPGPEPEGGPTYPKRRPLKAGGNHGXPAPRGKRPPPQKSPPGPTRKQKNKNRGGPTSGPPHKKGAGPTARIKERKPGGPEALKKPPTRGERRLAKRAPRGFFSPPGRPGKSECPPPPG

SEQ ID NO: 108550 - protein, 145 aa, Gossypium hirsutum
  Clone ID: LIB3825-020-Q1-N6-D8.pep
GGEFNSGGKNGDGGDNHEVEEYYKRMVEENPGNPLFLGNYAQFLYQSKRDLQGAEEYYSRAILVDPKDGETLSQYAKLVWELHRDEERASSYFERAVQVSPQDSHVHAAYASFLWETEEDGDECAAPSKIETIPTQFHQGTLASA

SEQ ID NO: 108551 - protein, 76 aa, Gossypium hirsutum
  Clone ID: LIB3825-020-Q1-N6-E1.pep
MNKAVSAVGVQEENNEVEKLSEELMAYENYMKFYQIPYLDGESPTQNGVAPQDSVVGELWSFDDDGVAAPETSTAM

SEQ ID NO: 108552 - protein, 70 aa, Gossypium hirsutum
  Clone ID: LIB3825-020-Q1-N6-G10.pep
RLVSKEPRQRGGDHILLCFVDFSSPACAATAMSALQGYKMDEHDPDSNYLRLQFSRYPGPRSGPGTRGRR

SEQ ID NO: 108553 - protein, 116 aa, Gossypium hirsutum
  unsure (1)..(116): unsure at all Xaa locations
  Clone ID: LIB3825-020-Q1-N6-G11.pep
GGGLGAPSGGFSLYKIPPGSVGMPTGGYPETAHXSLFSWGAFPSQVPQGGGTSPGPKVPPGAMYPNGPPFYWGLCQLVGGKGFLGFWGLPESSLKKLWLDECIRWGFTAPFFDLPL

SEQ ID NO: 108554 - protein, 56 aa, Gossypium hirsutum
  Clone ID: LIB3825-020-Q1-N6-G7.pep
HSSTNKSYLGEMKNLVNRVKNLPKKKNSKRAKLKACVTKDPFNSKGAHLSFRRPSF

SEQ ID NO: 108555 - protein, 139 aa, Gossypium hirsutum
  Clone ID: LIB3825-020-Q1-N6-H11.pep
VVYFMAELRLSASHFFLSMLTVFLCIVAAQGLGLAIGATLMDLKRATTLASVTVMTFMLAGGYFVKKVPVFISWIRYMSFNYHTYKLLLKVQYQDIMPTVNGIKTDSGLKEVGALVAMIFGYRFLAYLSLRKMQLHCEA

SEQ ID NO: 108556 - protein, 106 aa, Gossypium hirsutum
  Clone ID: LIB3825-021-Q1-N6-B4.pep
RGYHFTQLNPTGFTGIKKNNLQFKGKMGGKITKREKMDKRKPKNTGAFNLIALHNSRGEKEYRGKSIAHFYHLTYTKFFNREKGALAGNLNGRDLLGGRRRIRNLG

SEQ ID NO: 108557 - protein, 91 aa, Gossypium hirsutum
  Clone ID: LIB3825-021-Q1-N6-E8.pep
YRDGCSLHSGHAQFKDISTLNADAALQSPTFFLNFFSKLTKFQAHFSHLCSLMPFHFFQLNMAPVRSCWLVFQDHDKIVKRKIQLPISLFL

SEQ ID NO: 108558 - protein, 82 aa, Gossypium hirsutum
  Clone ID: LIB3825-021-Q1-N6-F1.pep
RRNFVVQKYHKDVLAHMAPPTVYPPPQPLRSANKPPGKFAVEISGENIILKAPFRNILPRRGRDKRSDSRRQRKVSNEIISS

SEQ ID NO: 108559 - protein, 63 aa, Gossypium hirsutum
  Clone ID: LIB3825-021-Q1-N6-F11.pep
VTSQSLSSFNIYFKIFILIEFFGGLSKKKSLFPCFIPCSLTLFFVCCSILLSFSLLFFFLEMG

SEQ ID NO: 108560 - protein, 106 aa, Gossypium hirsutum
  Clone ID: LIB3825-021-Q1-N6-F12.pep
APVVGKPPLPIFKWGGLLFPFPVLKAPVLGPPPPPGGNSPPFFNPIFKLEFKGPLGGAKAVFFLPKNFTLLGLGPRFFPSLNLRGKGKGKFFFPPWDGIPLFYPPI

SEQ ID NO: 108561 - protein, 135 aa, Gossypium hirsutum
  Clone ID: LIB3825-021-Q1-N6-F5.pep
RYYRRRDRSYSPDDRYYRRRDCSYSPDDRYYRRHDRSYDSTDCRSYRYRSASGSATPSRSRKSSRRSFSRSLSPKQRSSSRRSYSRSASPVERRSRGSITPRKKTTPHSHSRSRSASPSSRSFSRSATPRSDSSS

SEQ ID NO: 108562 - protein, 88 aa, Gossypium hirsutum
  Clone ID: LIB3825-021-Q1-N6-G4.pep
QLISTPSARPVLAVLKEIIYARVKECKDTLGFNLAAMDHLKQLMASRSDALFRDAKSKLLEIRSQQSKRLEARTETKTENRKKKKRKK

SEQ ID NO: 108563 - protein, 135 aa, Gossypium hirsutum
  Clone ID: LIB3825-021-Q1-N6-H4.pep
GIPKFILISVHDYNLPSFLLSSGYFTGKRKAESEVLSKYPNSGVVLRPGFIYGKRRVDGFELPLDLVGEPLERILSAVENFTKPLNALPASDLILVPPVSVDDVAYAVVNAVRDDDFFGVFTIEQIKEAAAKVKV

SEQ ID NO: 108564 - protein, 121 aa, Gossypium hirsutum
  Clone ID: LIB3825-021-Q1-N6-H6.pep
MVVSLNNRLEQVREEQASCRFNNGVDDAESCCECEDNNEGIMETKGNGSFAAVDSSNQSQEEQEEKTPMVCKCCYCRNSSVLFLPCRHLCSCKDCATFLDSCPVCRTPKKACIEALFFRSR

SEQ ID NO: 108565 - protein, 112 aa, Gossypium hirsutum
  Clone ID: LIB3825-022-Q1-N6-A2.pep
KRKPAVFLTRKGGGNWGLLWGPKPQTGGHPPPPKSGASFSPWGPGKDKKSPGSPKWGGSHPGGAFPLPKWGKRKILKTGGGKPPFLRGNGFWAPPIIFNGHRKPRFFNKKTP

SEQ ID NO: 108566 - protein, 69 aa, Gossypium hirsutum
  Clone ID: LIB3825-022-Q1-N6-A6.pep
SSCSCCFSGFVTDEEVKRRELRLRDALKNDREFRVKEGASVEVSQYNPPFMLPFTPRNEIALELEKKEE

SEQ ID NO: 108567 - protein, 60 aa, Gossypium hirsutum
  Clone ID: LIB3825-022-Q1-N6-B10.pep
CFLMKRPKKNVLLFFLPIFCFILKSLRIMDVFHLYYESRPCLFNQTPWKVFSRITCWNSD

SEQ ID NO: 108568 - protein, 107 aa, Gossypium hirsutum
  Clone ID: LIB3825-022-Q1-N6-B5.pep
SKVSRPYKQAEFEIIFGEGVSKLGCILDCAEMMDVVTKKGSWYSYGDHRLGQGRDRALQYLRDNPVLRDEIEKIARSMIADGTEHLSSTHVKSLSFPSQDEDIYEEV

SEQ ID NO: 108569 - protein, 94 aa, Gossypium hirsutum
  Clone ID: LIB3825-022-Q1-N6-B9.pep
MVKTFFSPVAFIGLEERLRFLRVYLNSSGKKPRDSEVQQLLQDVEKYTLASHLTWGVWGIISEYVNEIDFDYKEYAKQRLQQYWKRKPELLGSS

SEQ ID NO: 108570 - protein, 168 aa, Gossypium hirsutum
  Clone ID: LIB3825-022-Q1-N6-C2.pep
RLARLSKDARPPPEPDNAFAGKQGGPQQGHSLRAPDSPGQETTPSNTRGTRSMSRMNTSENSVAPEFVDYGAAEFVQCKPGQFIVLVDGRGQEIGKGKVHQVQGKWWGKSLEESGACVVDVVDLKADRWVKLPYPSESTGTSFEDAEKKLGVMRVMWDSNKIFMLRPQ

SEQ ID NO: 108571 - protein, 127 aa, Gossypium hirsutum
  unsure (1)..(127): unsure at all Xaa locations
  Clone ID: LIB3825-022-Q1-N6-D10.pep
QSVPVPFLIGSVLFMVGAIFNGREQTGVIRHGFQLLGKKWGWLGICGGVMFIIGGFPNVVKVFKMQQMNGIRLXKLGGGAQNGLVXGREGQGPLIIYALRRKMEVYGVKTPPVGTPPPYKDGLFGRA

SEQ ID NO: 108572 - protein, 62 aa, Gossypium hirsutum
  Clone ID: LIB3825-022-Q1-N6-E3.pep
EVLNKVSTRISRGVIFYRLMPHPSRYISQIEGFISKMLVFLPKQGHVTSLFPVSMGESWFYK

SEQ ID NO: 108573 - protein, 117 aa, Gossypium hirsutum
  Clone ID: LIB3825-022-Q1-N6-F1.pep
RNTEDEDGVLQPVRRSVSLDSMAASQISQALANNGLAEGSNGSNLDNELGKGKESSLRIVPRRGAGNQGLLRLMCNSSIGRRSLQIRPIFMKRSFSCNGKFSLPISNRNRNPPLRSF

SEQ ID NO: 108574 - protein, 134 aa, Gossypium hirsutum
  Clone ID: LIB3825-022-Q1-N6-G5.pep
YESMASALIEMGATNQNIDSKAFARDLEKIFSSIQELDTEVVVATARGTNTNATAVSANIIVDERQMNALFLDVVRVSESYGLRFPREFALLMKQLLYFDRYTRLLAPDMNMLQDQRITIVSNRRRSNYRDNLR

SEQ ID NO: 108575 - protein, 68 aa, Gossypium hirsutum
  Clone ID: LIB3825-022-Q1-N6-G9.pep
SIDLMRNPFLAMGEKQIQRHWWVVLVNAEELAEFSNNCRNLLQAIGTADSSIVFSRPKLQFQNTRSKS

SEQ ID NO: 108576 - protein, 124 aa, Gossypium hirsutum
  Clone ID: LIB3825-022-Q1-N6-H11.pep
STLKNKQMFNLICELPETVARSLVPRMRVVKGAGKAINYLTPPRILLALITAWLRQGRWFDEQGRALYAAEADRIRNWAENRTRFSFTDAMEMYTENTWVSVFSLSVVCAFIILSSTSSTLPGT

SEQ ID NO: 108577 - protein, 131 aa, Gossypium hirsutum
  Clone ID: LIB3825-022-Q1-N6-H2.pep
AVRKAIHAEEETAIGKWELCTDKILYDHDAGSMIMYHKNLTSGGYRALIYSGDHDMCVPFTGSQAWTRSIGYEIVDEWRPWMSNGQVAGYLQGYANNLTFLTIKGAGHTVPEYKPQEAFDFYSRFLAGKAI

SEQ ID NO: 108578 - protein, 62 aa, Gossypium hirsutum
  Clone ID: LIB3825-023-Q6-K6-A4.pep
RSGLPVDHAFAFASNFTFLLIFLEKANFKIVLKKCISIYLYIYILEMGKPPGGQKWLKRSMD

SEQ ID NO: 108579 - protein, 195 aa, Gossypium hirsutum
  unsure (1)..(195): unsure at all Xaa locations
  Clone ID: LIB3825-023-Q6-K6-C6.pep
RSKYGSRVPASDSAVLTLRCDRLNRESSEVTYLSTDSVRVTGGFEFEAYEDXKEVLLCGSLERMEGEWSMDCYLAAAAKEPGNSAFFKPKMGVSAPSIEVYIAGCCAGRPVILTKTILGSPRRKGASRLKWMLDAIPEDEEFGKGNDKGGNGFIRHRKLQVTDAEVEDYDSDGKIGLSHYAEEMYAGEDGQLSWF

SEQ ID NO: 108580 - protein, 59 aa, Gossypium hirsutum
  Clone ID: LIB3825-023-Q6-K6-D2.pep
CVPFWKPYGTCARKAIDQVLPLGLRLDGYRHHAHEELHQAEGKRTWAIKHDRQHEALRH

SEQ ID NO: 108581 - protein, 91 aa, Gossypium hirsutum
  unsure (1)..(91): unsure at all Xaa locations
  Clone ID: LIB3825-023-Q6-K6-D3.pep
MTTAARPTWQLAKGENEXGDTRIFGPSQKYSSMDLAAHTTLILXKHRKDGQDTQDELQKRNLRAELEERERRHFSSKDKSKHATNCSSYIA

SEQ ID NO: 108582 - protein, 160 aa, Gossypium hirsutum
  unsure (1)..(160): unsure at all Xaa locations
  Clone ID: LIB3825-023-Q6-K6-F2.pep
DKEGSPRRPTKREGGGKTXXRGRXXXRXXXQKEXXXXXXXRXRGGGGGXXKXXTGKTXXGEGEXXRTXDKGKAKXQDKEXXPPDQQRXXXXGKQXEEGRTXADXXXQKEXTXXXXXRXXGGXQXXXKXXXGKXXXXEGERADTXDXXKAKKQDKEGXPPD

SEQ ID NO: 108583 - protein, 91 aa, Gossypium hirsutum
  Clone ID: LIB3825-024-Q6-K6-B4.pep
FKWLYVPKVNGGREGRSIGAYELAKVVEELGAGEILLNCIDCDGQGKGFDIDLIKLISDAVSIPVIASSGAGAVEHFSEVFMKTNASAALA

SEQ ID NO: 108584 - protein, 155 aa, Gossypium hirsutum
  Clone ID: LIB3825-024-Q6-K6-C2.pep
TSEKGKGKVRNSKYSSLMKQPECGGGEGEGEGEDKELEEDDISQDSDCFSSLSNSKPVKSWHFVRLEKTCQRNEQVALLLKVLKCDKSVIPSIYEFRSLLSFHAYLTLDEAENLSELEEVEEIGLPSMSVLARKAKRIRQHSLAAETKQREMEVQ

SEQ ID NO: 108585 - protein, 143 aa, Gossypium hirsutum
  unsure (1)..(143): unsure at all Xaa locations
  Clone ID: LIB3825-024-Q6-K6-E4.pep
WSVLSGGCEVHYCWCYLIIVSLQSPWRLSIXKLXGSLPXMDFLFTFLGMCXDPRQMRVSVQGSGLYINRERGYSIDPIHIDDPLFPTNNVGRNCFRIHQCIKAFSEAYSILEDELSCLSNNTTSSSNPPCRLLQKIIPSITLS

SEQ ID NO: 108586 - protein, 62 aa, Gossypium hirsutum
  Clone ID: LIB3825-024-Q6-K6-F3.pep
LYSMYFFTPHLYKRLGIHIYIYSNTYQSHLVTVYDKLALEFTKLKADSITTYWIHGSPPPHT

SEQ ID NO: 108587 - protein, 101 aa, Gossypium hirsutum
  unsure (1)..(101): unsure at all Xaa locations
  Clone ID: LIB3825-024-Q6-K6-G3.pep
EVALVLKALYDNDILVDEFIMEWXQXGVAGGNKSSQIWKNCKPFIKWLQNAESETGGRSDSKAIAICDYCAFYGRRAIYSAIIFSTVAIVLTVRDLAAFFK

SEQ ID NO: 108588 - protein, 187 aa, Gossypium hirsutum
  unsure (1)..(187): unsure at all Xaa locations
  Clone ID: LIB3825-024-Q6-K6-G4.pep
QCRTKRFAEGLVTGRESSSRRNPIEILKRLQRESFSDLMKLRDRQDKVERLFSFYKSSKGNPFQESSTVLRGEVDFLGAVLLMSRVDEEHWGGIGRAGIRTGVDSRFRFETAVGDKGSVGIEFVANQKRVASNDGDVLETPLSLSKLFYKANAANGFSAIAIPIGAXVKDLDVASDYSLXEEKASLI

SEQ ID NO: 108589 - protein, 161 aa, Gossypium hirsutum
  unsure (1)..(161): unsure at all Xaa locations
  Clone ID: LIB3825-025-Q6-K6-A1.pep
AAWVTVGQHCRNTSKDGLTIICSKRGGNVFLHGHSNWLQTVPAKPEGILFKFVPITSLLTGIPGSGYLSHAINLYLRYKPAPEDLRFFLEFQVPLQWAPMFCELPLRHHRKKASCPSLQFAXLGPKIQVSSTQVSSDLKPAVGLRLYLEXRNATRLAIHVQ

SEQ ID NO: 108590 - protein, 150 aa, Gossypium hirsutum
  Clone ID: LIB3825-025-Q6-K6-A4.pep
MGPFTLAVDTESSSLVSSDVSNRKIKNLQLQTKKCFASVSMEEEKPFDFLRILFEGIIAGGTAGVVVETALYPIDTIKTRLQAARGGGKIVLKGLYSGLAGNLAGVLPASAVFVGVYEPTKQKLLKLFPENLSAVAHLTAGAIGGIAASL

SEQ ID NO: 108591 - protein, 79 aa, Gossypium hirsutum
  Clone ID: LIB3825-025-Q6-K6-B1.pep
SNIYSPLSYIVLVHFVSWIEGNSLFCFCCEYILALFQGNYCVPLLYLDPLSASSSSVKIPAVKGGTCFVHCLVFNKFQS

SEQ ID NO: 108592 - protein, 193 aa, Gossypium hirsutum
  Clone ID: LIB3825-025-Q6-K6-B5.pep
FDEGSQHSVPVTCPVDQNTSQLLANQKLFLNGFLGNVFMAKSYNLSMDIDWMEFVCPNCLSLLGAYPFYNGAAPIDGGVRLFKCYVSTSSSAGGSGDLFRKYSLERMFTNQLVENAKDELSFRTLIRDFKTKSPLLQIVLLNPNSWCCSGYCLDTTSAAESILKLDLLPIIKVIFSDCGETPASQPRVHEDWI

SEQ ID NO: 108593 - protein, 200 aa, Gossypium hirsutum
  Clone ID: LIB3825-025-Q6-K6-C2.pep
ISKFLGTYDFDSLPFDWGEDYKLPNIPERDLVVYEMNVRAFTADESSCLDQDIRGTYAGLIEKIPHLLELGINAVELLPVFEFDEFEFQRRPNPRDHMINTWGYSTINFFAPMSRYGSGGGGAVSASREFKEMVKALHGAGIEVILDVVYNHTNEADDKHPYTTSFRGIDNKVYYMVDLNNEGQLLNFSGCGNTFNCNHP

SEQ ID NO: 108594 - protein, 57 aa, Gossypium hirsutum
  Clone ID: LIB3825-025-Q6-K6-D3.pep
IRFRAVCGTRVVKTIHWIIKGSTLFFIWTVICAQCADKDHVSYQYYRAVGIWRSVLL

SEQ ID NO: 108595 - protein, 168 aa, Gossypium hirsutum
  Clone ID: LIB3825-025-Q6-K6-F2.pep
MVNSRNGEFVDDRVDRDDDELIGSSDASSSMNGVVDTLRVGSGTTSGQNGEVRNEIGLTERLTDIFVEENNGDLLLQQSDREDRVLQWLQALDMQVIGACRTDERLKPLLKVNVSNGVAEDRLLAHLSQHFEPSEVGMLARCFCIPLVSIRVGKINKQGTCFQPTAAR

SEQ ID NO: 108596 - protein, 85 aa, Gossypium hirsutum
  Clone ID: LIB3825-025-Q6-K6-F3.pep
WSSTDKESSARNKENRGRQGNIGLEVDLIECMNYFESEMVDVECQDATEFSSSFTDTISVDEDGSIVNDEVRIISADLEAVWIVI

SEQ ID NO: 108597 - protein, 165 aa, Gossypium hirsutum
  Clone ID: LIB3825-025-Q6-K6-F5.pep
MMAKCSVAPSVEPMFQTFNGLQHLAETRRFKAWFLDQFGVLHDGKQPYPGAISTLEKLATTGAKMVIISNSSRRASTTIEKLKNLGFDPSLFVGAITSGELTHQYLQRRDNAWFAALGRSCIHMTWSDRGAISLEGLGLQVIENAEEADFILAHGTEALGLPSGL

SEQ ID NO: 108598 - protein, 195 aa, Gossypium hirsutum
  Clone ID: LIB3825-025-Q6-K6-G6.pep
GSCKTLLEAALEGPDEDADQDQEVKEEDQKSLSVGIIGAPNAGKSALTNFMVGTKVAAVSRKTNTTTHEVLGVMTKGDTQICFFDTPGLMLNRSGYLHKDMKVRVESAWSSVNLYDVLMVIFDVHRHLTKPDSRVIRLIKRMGEEPNPKQIRILCMNKVDLIEKKKELLKVAEQFKDLPGYGRIFMISGLKGSGV

SEQ ID NO: 108599 - protein, 64 aa, Gossypium hirsutum
  Clone ID: LIB3825-026-Q6-K6-C2.pep
ISLQFQDLGLGFSEIWGFWFFRLINLREGQFASHMAILILCFLAAFDLLSPLWPDPFFSWRALF

SEQ ID NO: 108600 - protein, 52 aa, Gossypium hirsutum
  Clone ID: LIB3825-026-Q6-K6-C6.pep
MKGKSGIPGNFYVLNTGAKIPAIGLGTWQSGGDLCVDAVKTALSVGYRHIDC

SEQ ID NO: 108601 - protein, 48 aa, Gossypium hirsutum
  Clone ID: LIB3825-026-Q6-K6-D2.pep
FAQRKMIVDSTRHYIKIRFLLHMCWIHRQALRVSCMAPARSVHQQFIN

SEQ ID NO: 108602 - protein, 194 aa, Gossypium hirsutum
  Clone ID: LIB3825-026-Q6-K6-H5.pep
QFSTTIKTVRSDNGTEFFKNECNEFFHMNGILHQSSCVYTPQQNGVAERKHRHLLEVARSLKFQSHMPSKFWGECILTACFLINCLPTPVLNWKCPFELLHKVAPDFSRLKVFGYLAYATIPNYHDKFSHKVVPSVFMGYSPVQKGYLLFSLESKKNFVNRDVVFHETIFPFAFPNQQFLPFPDTDNSVFLHLE

SEQ ID NO: 108603 - protein, 204 aa, Gossypium hirsutum
  Clone ID: LIB3825-031-Q6-K6-A2.pep
CLVFHAEKYGSYDGFNKGFQSSPQHVSMCLDGGDVFSSTFLGLQGTGYGKGDSFGSYSIGYNQSNDLSSVPSWHDNQRNYLLEQRMEQSRGLDNRGMLLQGAFTTRPYIGNPFVCSQQCGIDGNGGRAAIDSLSSPGFLHSKIPLEENVMEDHSVIIQGRGLKYDIKNKGFDSFKCCKKKTLKEFGLQNLQEKTLNLIKDMEKM

SEQ ID NO: 108604 - protein, 67 aa, Gossypium hirsutum
  Clone ID: LIB3825-031-Q6-K6-B2.pep
PLPSMARGSRYFLYTCWTLGKASGYEITLAIAAKGIGMAYKEVMDHLNEELVHHRYNTRLILPAVAY

SEQ ID NO: 108605 - protein, 115 aa, Gossypium hirsutum
  unsure (1)..(115): unsure at all Xaa locations
  Clone ID: LIB3825-031-Q6-K6-C1.pep
GTLSGVHDLREXISGTMNAQPINADPRKQKVKAAQPARKSVAVETPELDPRRAANTPARKRGKQSADTSVEGFLQSLGLEKYAITFQAEEVDMTALVHMTDGDLKALGIPMVTLN

SEQ ID NO: 108606 - protein, 64 aa, Gossypium hirsutum
  Clone ID: LIB3825-031-Q6-K6-F2.pep
CTRPLTAHYALVTCWLPASLPIHLPAPYFPLFSFFFVTFSAFSPDFLNKLYILGFLYSAYLELY

SEQ ID NO: 108607 - protein, 111 aa, Gossypium hirsutum
  Clone ID: LIB3825-032-Q6-K6-A2.pep
KLYIWDRALGIHSSAALYTLQDPLLDFKELHPFVSPLTNNKYLLLCLNLEKMAKKKEKETLVTPPTLNLSTLFDTHIYIWLSRRGLKSSDPKTFKSKQAEDHYLTYKKKQA

SEQ ID NO: 108608 - protein, 62 aa, Gossypium hirsutum
  Clone ID: LIB3825-032-Q6-K6-F1.pep
KAPCLDPLIKRGVGGTYTQTDPFTSQLPTARFFFFLSFLSTHVGFLCQAIYKWLALWMRSID

SEQ ID NO: 108609 - protein, 196 aa, Gossypium hirsutum
  Clone ID: LIB3825-032-Q6-K6-F2.pep
MDSVQTNLNDPQSFSAQTLNSYNQNPPPPPSQTFDSDPGLEHNNANNGALSNPDAHSNTINNTYSFKPDIHKPLLSENGLTNTHSGTTDKDYSGGEEETTSRRRRRSRWDPPSNSNNHQTGNDESASGTKKRKSRWADDEPKPVIQLPDFMKDFTGGIQFDPEIQALNSRLLEISRMLQSGLPLDDRPEGARSPSP

SEQ ID NO: 108610 - protein, 133 aa, Gossypium hirsutum
  Clone ID: LIB3825-033-Q6-K6-C3.pep
MTLPNLGLESENDSNASSQVASNISAQEASTDPSKDTTTTTSCLSNPVKVQPDPGSVSLDLTLHFSANDAEMKGATGETMGINTLSTPRVFSCNYCRRKFYSSQALGGHQNAHKRERTMAKRAMRMGLLSDRY

SEQ ID NO: 108611 - protein, 210 aa, Gossypium hirsutum
  unsure (1)..(210): unsure at all Xaa locations
  Clone ID: LIB3825-033-Q6-K6-D3.pep
TEFMNQLVTGYLPSVILMLFMYAVPPTMMLFSTIEGNVSHSERKKXAGIKVLYFTIWNVFFVNVLSGSIIRQLSVFSSFRDIPTQLAKAVPTQATFFTTYVLTSGWASLSCEVIQLFPLLCNGFRRFILRRQEEPCSNHALTFPHHTEIPRLLLFGLLGFTCSIMAPLILPFLLVYFFLAFLVYRNQILNVYVPKYESGGQFWPVVHNTT

SEQ ID NO: 108612 - protein, 184 aa, Gossypium hirsutum
  unsure (1)..(184): unsure at all Xaa locations
  Clone ID: LIB3825-033-Q6-K6-G1.pep
KQQTQQRSQQLGSKTGVEPVASQAFAMSFSSANGTTAPGLGISSLAPNHAILQSLPGSAXRGYXHIMAAQQKKDNYHAYEEGKRGTHDASSVQEEKKAGKSSGTTGQSIAFSRPDMPDSSDSTLAGKNVIDSSICTLGSAPARTSGPVMPASIGSVNVANAQQQLQRNQQQQLPIWGLPSAPRE

SEQ ID NO: 108613 - protein, 108 aa, Gossypium hirsutum
  unsure (1)..(108): unsure at all Xaa locations
  Clone ID: LIB3825-034-Q6-K6-A3.pep
GGGGYNQKGPTRPPFQPVAHPDGQWDPPLYRALNPGGGGGSPQGTRSIGKALTPRSFGFFPFFFGTVGGFSRQGFKWGVPLRVPIKGLPDLHPQKLGXGEGYRMGPSP

SEQ ID NO: 108614 - protein, 164 aa, Gossypium hirsutum
  Clone ID: LIB3825-034-Q6-K6-B3.pep
CFKGHLNLKDEEDERNGGEGAAFEDRDYVEEDECISDDEPGSKRKKLGRGSVDLFVEGRTESTPTTRNRALQSGKDLLSGPGAALVEFPDGLPPAPSKKQKDKLSEVELQLKKAEAAQRRRMQSEKAARDAEVLPSFFFSSFDWVYNCSTIIQETVFSRVFELL

SEQ ID NO: 108615 - protein, 45 aa, Gossypium hirsutum
  unsure (1)..(45): unsure at all Xaa locations
  Clone ID: LIB3825-034-Q6-K6-D3.pep
SEAFTLLLLGGGGGTXCSFPIHPSHHWVISQVLKTYPLNLPNKRQ

SEQ ID NO: 108616 - protein, 212 aa, Gossypium hirsutum
  unsure (1)..(212): unsure at all Xaa locations
  Clone ID: LIB3825-034-Q6-K6-G2.pep
ASGDTALVVCAKYKHEECVRVLTGAGADFGLVNISGQSASSIAGSNQWSRGFQQAVLGGSGGGRIPKSSNVSVFSPLMIVAETGDVEALKAVIGSGQFNLDHQNENGFSAVMVAALKGHVEAFRLLVYAGADVKLLNKSGETAITLSELNQNRDLFEKVMLELALEKXNRNSGGFYALHCAARYGDLDAVTLLTRRGYDVNVPDGDGYTPLM

SEQ ID NO: 108617 - protein, 94 aa, Gossypium hirsutum
  Clone ID: LIB3825-034-Q6-K6-H1.pep
VAVHCRQSAQSVKTNFDRAYDGRLCQSASGIVARNSEKNVLIVCSVIHQEVASAFVAEALTYRKVAQIGIACSHQCALDIAESQKEYDRVRESD

SEQ ID NO: 108618 - protein, 117 aa, Gossypium hirsutum
  unsure (1)..(117): unsure at all Xaa locations
  Clone ID: LIB3828-003-Q1-K6-F11.pep
TCSQTLTSQXXXXXXXXXXXXXXXXXXXXXXXXXXXXXXXXXXXXXXXXXXXXXXXXXXXXXXXXXXXXXXPNHIYLYTCINCGGLSLLSFPLNSQDPLDHPKIINTPFFPESSGMG

SEQ ID NO: 108619 - protein, 172 aa, Gossypium hirsutum
  unsure (1)..(172): unsure at all Xaa locations
  Clone ID: LIB3828-003-Q1-K6-H9.pep
SEFSFLMKLCFKLVLNKDAFWVRVVRAKYXSKGENPQCINRNKCSFLWKSLSKIWALFRENLYWSIGDGHKIQCWKDNWIPHIGPLIRYITPNLNLNPNCLLHEMTSEDGSWNLDLFXTWLSEDVIQAIKGILPPQHSEGPDRISWRHTSFGDFSVKSAYKALNEGELEPER

SEQ ID NO: 108620 - protein, 123 aa, Gossypium hirsutum
  unsure (1)..(123): unsure at all Xaa locations
  Clone ID: LIB3828-004-Q1-K6-C10.pep
AKLKHFKCSIGWFYIFLLWTLRAXXXXXXXXXXXXXXXXXXXXXXXXXXXXXXXXXXXXXXXXXXXXXXXXXXXXXXXXXXXXXXXXXXXXXXXXPSRLSCVSLPKSXTLYQXPSHXRELLVS

SEQ ID NO: 108621 - protein, 36 aa, Gossypium hirsutum
  unsure (1)..(36): unsure at all Xaa locations
  Clone ID: LIB3828-004-Q1-K6-D10.pep
ETKYLQSANPPTLPDYNXPDAGSTRNXDGTAGDQLK

SEQ ID NO: 108622 - protein, 198 aa, Gossypium hirsutum
  unsure (1)..(198): unsure at all Xaa locations
  Clone ID: LIB3828-004-Q1-K6-E11.pep
RWRPETHTFHFQWRVHYHFXXXXXXXXRVNMQLGLPVDGYPVTGSVQFGDWGAVCYELLGAIPEKINGGXIEMGWLQDTFLDPDDDSTKVERIRYARAYILQIIGGYLMPDLSRNLVHLIWLLKLVDFRAAGELSWGSAVLATLYREMCGATRPSKAKIGSCLSLLQSRARFRFPFLRPRVYHPYTFPLITRWEPSGN

SEQ ID NO: 108623 - protein, 62 aa, Gossypium hirsutum
  unsure (1)..(62): unsure at all Xaa locations
  Clone ID: LIB3828-005-Q1-K6-C7.pep
XRADRSAELSISNASDMXXEWVEQDEPGVYLTIRAVPGGSRELRRVRFRYVTSWLLFSWFQT

SEQ ID NO: 108624 - protein, 118 aa, Gossypium hirsutum
  unsure (1)..(118): unsure at all Xaa locations
  Clone ID: LIB3828-005-Q1-K6-E8.pep
KLXTMKELSIIGIETLLLLLXIIHCHHIXDWKKKKKKKKKKKKKKKKKRKKKKKKKKKKKKKKKKKKKKKKKKRGGPVLKRTKVNFPGQGKVKVFLWGNQNKIKGPGFKNGGRGKTRG

SEQ ID NO: 108625 - protein, 162 aa, Gossypium hirsutum
  unsure (1)..(162): unsure at all Xaa locations
  Clone ID: LIB3828-005-Q1-K6-H11.pep
AFDEQDLQYYTRLFVEDIKRNPTNVELFDIAQSNSEHSRHWFFTGXIVIDGQPMDRTLMQIVKSTLKANPNNSVIGFKDNSSAIKGFLAYRLLPVKPGTACLLNETTREIDVLFTAETHNXPCAVAPYPGAETGAGGRIRDTHATGRGSFVVASTAGYTTGS

SEQ ID NO: 108626 - protein, 76 aa, Gossypium hirsutum
  Clone ID: LIB3828-005-Q1-K6-H9.pep
MEGDSDTYSGLGTGEIDSKVVQTFQKSFVQVQNILDQNRLLINEINQNHESKIPHNLTRNVGLIRELNNNIRKVVD

SEQ ID NO: 108627 - protein, 114 aa, Gossypium hirsutum
  Clone ID: LIB3828-006-Q1-K6-A9.pep
MGETENGYSPATHTAMNAVQAIGKGFDVNFDTRLLYCKGVTGSKIVEIDEGHGRDIYLYDQTVLPNVSRDIKNSQEPIGRLSSGVFNFNEMVEYFNKNANVSGSFPLGSFNSAF

SEQ ID NO: 108628 - protein, 55 aa, Gossypium hirsutum
  Clone ID: LIB3828-006-Q1-K6-D9.pep
MSHFTVSVPLIVKSIYPAPILITATSIFNAINGGSFMHTSPSFSPNNWESFGYGV

SEQ ID NO: 108629 - protein, 154 aa, Gossypium hirsutum
  unsure (1)..(154): unsure at all Xaa locations
  Clone ID: LIB3828-006-Q1-K6-E11.pep
GYMGVNSESPMLNIAPKVLNIKXLGAPAILLSLAAQGVFRGLKDTXKTPLYAIIIGDSMNVILDPILMFVLRLGIKGAGIAHVVSQYLIFLILIWRLAGKIELCPPNFKKLQFSRFLKMDYDICVLSPXSGFHLLVKVISTTSCVTVAASLAAR

SEQ ID NO: 108630 - protein, 142 aa, Gossypium hirsutum
  unsure (1)..(142): unsure at all Xaa locations
  Clone ID: LIB3828-023-Q6-K6-A3.pep
HSTSRKRGENSQKKKGHEDRREPKQSRTPHKERAGKDTKKRRPRTGTQRPQSKRKQERRRRRKYRETPPPVGERKDQGXXAPPPTDRXXXEKKKKKKRPREEKKAETTVALTQAAPSPNCXREIXLGXARPPPPPLLKGCGG

SEQ ID NO: 108631 - protein, 151 aa, Gossypium hirsutum
  unsure (1)..(151): unsure at all Xaa locations
  Clone ID: LIB3828-023-Q6-K6-A6.pep
STPKWFLFSSFRAPDLLLVHVSGICNTALTGGGTYSRRVLTARSVAGFLSDVYPAAAXEVGKIHLIADERVQGAVFDLPEEIARELLAXETPPGNTISKITKLPPLRDDGPSRDFYGTFSSWDRFSSRDRFPRGGFKARGGGSRTPWGWVF

SEQ ID NO: 108632 - protein, 141 aa, Gossypium hirsutum
  unsure (1)..(141): unsure at all Xaa locations
  Clone ID: LIB3828-023-Q6-K6-B3.pep
KRGKKPGGKRTEPGEENKAGERAHCGPSTESKSQGKKPRRTRSKRITHRSTQDQAAMERSEPLXRASTAMVRRRXXASGSSPPPKRTLRXXKKKKGASDXVMFKAGQEEDKASNTPPMKKTRKAPVLAXAPPPPPCGKLIK

SEQ ID NO: 108633 - protein, 144 aa, Gossypium hirsutum
  unsure (1)..(144): unsure at all Xaa locations
  Clone ID: LIB3828-023-Q6-K6-D5.pep
RFGXYDVFLSFRGEDTRDGFVSHLXRMIWXRXNIHTFKDNEKVGRGDEISGALLTAIEGARVSVFLFSKHYASSRWCLDELVKIMDCKKLNGHNFVFPVFYDVDPSYYETTIHANYELIKVESSPGSSLFCKLPICIEIIITFK

SEQ ID NO: 108634 - protein, 69 aa, Gossypium hirsutum
  unsure (1)..(69): unsure at all Xaa locations
  Clone ID: LIB3828-023-Q6-K6-F1.pep
TPXSTIASKRSLKIESRYAVRQPCLSPPPPHKARLVLKKNKQPKSKAVRPSGLRTTKPNTFHATSHALP

SEQ ID NO: 108635 - protein, 185 aa, Gossypium hirsutum
  unsure (1)..(185): unsure at all Xaa locations
  Clone ID: LIB3828-023-Q6-K6-F2.pep
WGRTRANEDGSHQATGSTTAETKCAISQREPHIXQEADTPPALXDRGERNTRTPHTHLQHPPSGNGAKHHQVTGHMGAEKVGSIPRGSKEHPHRTPPASKSQTLQQSPHRQXRARRLGSRTPKPRKNKPHPHRQARTQSSGPRSFPPRQQYQTDPEHQKKTQANGAAQAEARQRGGTLSFSSSWI

SEQ ID NO: 108636 - protein, 178 aa, Gossypium hirsutum
  unsure (1)..(178): unsure at all Xaa locations
  Clone ID: LIB3828-023-Q6-K6-F4.pep
AEADGFMIKREEASDLRCVHNNPQGGHFAVYAPHPAIVLKMEDGTGLLLPXIIVLEMPSAXLMATLRNVQIARPTMYXVEKNMIDKMGYTVKLVRVTKIVHEAYFAQLYLTKDXDETESVCCDLTTSDAINIAVRCKVPIQVNKYLTYRDCMRVIESGKLXTQYSASDGLLFTELDQP

SEQ ID NO: 108637 - protein, 115 aa, Gossypium hirsutum
  unsure (1)..(115): unsure at all Xaa locations
  Clone ID: LIB3828-023-Q6-K6-H3.pep
TCSYXMVGMQIMEWLIPPLELXGGSTSYPPSYGGPVGGXAGXGLXDVRTGGRGGPPGGCGSGGPRFLGGGYGGPPVCAPAWISLCDGFCGVSCVRSCLFFSVFASCCLSCRFVRP

SEQ ID NO: 108638 - protein, 55 aa, Gossypium hirsutum
  Clone ID: LIB3828-023-Q6-K6-H5.pep
QCFSLSHRWALCRGDRNCSEKLKSDLVSSVGVVMCTDGLTTPSIFGLWVKFYDDF

SEQ ID NO: 108639 - protein, 93 aa, Gossypium hirsutum
  unsure (1)..(93): unsure at all Xaa locations
  Clone ID: LIB3828-024-Q6-K6-A4.pep
TSTQLILLSQIGTSMHSIYLYLSSQPIKQLNLHKQKDIDSTHINKMQENIFPLFYNSYIKQGQTIHYSKVFTMRTHANLNKLKNTKRVGXXPG

SEQ ID NO: 108640 - protein, 198 aa, Gossypium hirsutum
  unsure (1)..(198): unsure at all Xaa locations
  Clone ID: LIB3828-024-Q6-K6-B4.pep
NGRPXKSVENAHDESVWTATWVPATGSRPPLLLTGSLDETVKVWRPDELDLLRTNTGHCLGVVSVAAHPSGVIAASAALDSFVRVFDVDTNATIATLESPPSEVWQMQFDPKGTTLAVAGGGSASIKLWDTATWRLVATLSIPRPEGSKPSEKSGSKKFVLSVAWSPDGRRLACGSMDGTISVFDVARAKFLRHLEGH

SEQ ID NO: 108641 - protein, 65 aa, Gossypium hirsutum
  unsure (1)..(65): unsure at all Xaa locations
  Clone ID: LIB3828-024-Q6-K6-B5.pep
PRPPPGGGGGGGRIRXVGDVSWDSGLGLNLFSLHLVNSLCFSCLTHKISDIATLYLLGGGANFLE

SEQ ID NO: 108642 - protein, 68 aa, Gossypium hirsutum
  unsure (1)..(68): unsure at all Xaa locations
  Clone ID: LIB3828-024-Q6-K6-B6.pep
TYLRGGAXXCCTXLSWPCLGAFPRCFFLLSTSFGFGGGDEALCCVFGPVSGGVPFSLSPXWAWPLVSR

SEQ ID NO: 108643 - protein, 82 aa, Gossypium hirsutum
  unsure (1)..(82): unsure at all Xaa locations
  Clone ID: LIB3828-024-Q6-K6-C6.pep
FLXXXIYTVWGGSKSNVSFQTSRGTKGRVGSXRRAALVXYXXXLXNXGTFFAFSXFKAVLLGRVEXILXXAFPIALLKGRLT

SEQ ID NO: 108644 - protein, 197 aa, Gossypium hirsutum
  Clone ID: LIB3828-024-Q6-K6-D4.pep
MFQNRLGWRIVLMVGALPAALTYYWRLKMPETARYTALVAKNAKQAASDMSKVLQMDIEAEPQKIEQEKIRYGLFSKEFAKRHGLHLLGTTTTWFLLDIAFYSQNLFQKDIFSAIGWIPSAKTMNALEEVYKIARAQTLIALCSTVPGYWFTVAFIDIMGRFAIQLMGFFFMTVFMFALAIPYDHWIHKDNRIGFVV

SEQ ID NO: 108645 - protein, 68 aa, Gossypium hirsutum
  Clone ID: LIB3828-025-Q6-K6-A6.pep
FGSGAAGGNWTMPSKTVCCSRIIIVSSFFMPSYSMNFLRFGSEKKKKNLKQFFSLHLIWFLENFVSQS

SEQ ID NO: 108646 - protein, 80 aa, Gossypium hirsutum
  Clone ID: LIB3828-025-Q6-K6-B2.pep
RSLGTSPPTPADTLTRVLRPTCRSMSLVSVDGELGAVISMVSLILAALYLLACLSGPMAHPGSYMLYGNYSAVPCLRSLR

SEQ ID NO: 108647 - protein, 52 aa, Gossypium hirsutum
  unsure (1)..(52): unsure at all Xaa locations
  Clone ID: LIB3828-025-Q6-K6-B5.pep
PPPPPPPGGARGGEAQGHSWEHDDQELVHIACPHYGTTVXXXPLXSFFXFSI

SEQ ID NO: 108648 - protein, 126 aa, Gossypium hirsutum
  unsure (1)..(126): unsure at all Xaa locations
  Clone ID: LIB3828-025-Q6-K6-B6.pep
RHGTGHGSGXSYLNVHEGRITLAPVPQSRFVPLQGLMTGAEEPGYYEDGCFGLRLENVLFIQEADSEFIFGHMGFLSLEHIAWAPVSHPLMDLSILAPGEILGVNRYHWKXREISRPLLGFLCDVM

SEQ ID NO: 108649 - protein, 68 aa, Gossypium hirsutum
  Clone ID: LIB3828-025-Q6-K6-E1.pep
MPETQSQGTPTLFSPYKMGKFNLSHRVVLAPMTRCRALNGNPRPALAEYYTQRSTPGGFLITEGTLVS

SEQ ID NO: 108650 - protein, 122 aa, Gossypium hirsutum
  Clone ID: LIB3828-025-Q6-K6-E4.pep
LTIFTNYSMAGSRSWIGGVLNRLSNKRSDKFLDYPLTPIQEQRLQKLQKRIQIPFDETRPDHQEALRELWHIAFPNVALKGLVSEQWKEMGWQGPNPSTDFRACGFISLENLLFYGRTYPAS

SEQ ID NO: 108651 - protein, 163 aa, Gossypium hirsutum
  unsure (1)..(163): unsure at all Xaa locations
  Clone ID: LIB3828-025-Q6-K6-G3.pep
KKKEETKQTREKKKKKKKAKNKKQKKNRKTKTNNKKKTTKKKTKKKKKIEQDKDRKHKRXNKHPEQRQRKNRKKPXRAQPNHAEXAGSQQRAKRSTRTRQQDLARTHIHKDRRRQEPRRWDTEAGPHEKLGGKSEEEEKCAVGDHAGIIYGQGITNKQDRREL

SEQ ID NO: 108652 - protein, 92 aa, Gossypium hirsutum
  Clone ID: LIB3828-025-Q6-K6-H5.pep
GGKKASPESLVVSSPEGSPSSSGSGRIRRGRLFFRNFGLRRLSLQGRLETRLKACPRASSAIVFSGGAAVGRCLPWSAKQKATREERKAAVF

SEQ ID NO: 108653 - protein, 48 aa, Gossypium hirsutum
  Clone ID: LIB3828-026-Q6-K6-A6.pep
NIIRFMIYKGPKKAKYAYPELLERYEVPPGTCHFETRILDMQQKLTWE

SEQ ID NO: 108654 - protein, 66 aa, Gossypium hirsutum
  Clone ID: LIB3828-026-Q6-K6-C1.pep
FVAAVRAQFFVRLEDGFLISTFPAPCYFFLLEQTLPLHSMGELSPKPYPEENLVGLRSLNIPLFQF

SEQ ID NO: 108655 - protein, 139 aa, Gossypium hirsutum
  Clone ID: LIB3828-026-Q6-K6-C6.pep
KGKREAQETLEGGGTVKKQKKNDGVAQAVVKKKVEAKTQKKKKDETSSSSDDSSDSEDEPVPLKKQAATTKSGSVPAKKAKQASSLKSSESSSEDDSSSDEEAPQNKKPVVSKNGPVPAAKTVKADSSSESSSEEDSSS

SEQ ID NO: 108656 - protein, 68 aa, Gossypium hirsutum
  unsure (1)..(68): unsure at all Xaa locations
  Clone ID: LIB3828-026-Q6-K6-D1.pep
XNWLERXCFIYSGERNTILAQMHKKCSVESEFLGKDKFMVTIYPNVDYAFVVALIAILDGINNDDDFE

SEQ ID NO: 108657 - protein, 148 aa, Gossypium hirsutum
  unsure (1)..(148): unsure at all Xaa locations
  Clone ID: LIB3828-026-Q6-K6-D3.pep
SLSISGGGRGGAFNDLGSAAGLKKLGEXLLTRELLSGSXASXDDXTVXAAXSGAPSWGGVDVSXWSIHIVALWGISRVSGEGCGVTVEGFAPAVAVASPPVAVSRAAAAVVVVDFVVVLFGGATAAVLMAAAERAAAVVACGSWLVSG

SEQ ID NO: 108658 - protein, 82 aa, Gossypium hirsutum
  unsure (1)..(82): unsure at all Xaa locations
  Clone ID: LIB3828-026-Q6-K6-D4.pep
PKFTYSGAIISVHSGNXGSXCLRDXXIAKSKXXXFGEHPTXXKAKXKXKXSVXKPNHYVNXTSLFVCWCVXTLNFVNSXIIS

SEQ ID NO: 108659 - protein, 140 aa, Gossypium hirsutum
  unsure (1)..(140): unsure at all Xaa locations
  Clone ID: LIB3828-026-Q6-K6-D6.pep
FLRFAFRLSVGGGGFAGSSISMQPRPFGGGSVSGLXLGSFLXPGSSTLSFSMRPMPARLGGGGAAXPETVVLVCGGVGXLXAFDTGXPLTGESSFLDLGAASLAPVVIVXGLVADFGLSVVEVFALFLSSVFVACFSSCH

SEQ ID NO: 108660 - protein, 196 aa, Gossypium hirsutum
  unsure (1)..(196): unsure at all Xaa locations
  Clone ID: LIB3828-026-Q6-K6-E1.pep
MKQSGPLILFVKDIEKSVXLGNTDVYASLKSKVENLPANVVVIGSHTQMDSRKEKSHPGGLLFTKFGVNQTALLDLAFPDNFGKLHERSKETPKTMKQVTRLFPNKVTIQLPQDEVLLLDWKQQLERDAETLKAQSNTVSIRSILHQNGLDCPDLETLCIKDQTLTNESVGKVVGWALSHQFMYSSGVLLKDAKLV

SEQ ID NO: 108661 - protein, 201 aa, Gossypium hirsutum
  unsure (1)..(201): unsure at all Xaa locations
  Clone ID: LIB3828-026-Q6-K6-E4.pep
PASGSTKVLVEKRNFXKVASSSAPGDPRRCCQVWNKMVQRIATLEFDRDRKSMGVIINSSSGNKSLLVKGAVENLLERSSFIQLLDGSTVELDKYSKDLILQVLREMSTDALRCLGFAYKEELPEFATYNSDEDHPAHQLLLNPSNYSSIESNLIFVGLVGLRDPPRKEVRQAIEDCKAAGIRVMVITGDNKNTAEAICRE

SEQ ID NO: 108662 - protein, 158 aa, Gossypium hirsutum
  unsure (1)..(158): unsure at all Xaa locations
  Clone ID: LIB3828-026-Q6-K6-E6.pep
AAWXEAKRGDRAAKINIGLISAMACSIVASFIEKXRRTAALKHGSFKSPMSILMLLPQGGVSGLVEAFAAVAIMEYLTTQLPESMRTVAGAIFFISLSMASYLNSMLVNIVHKTTKKGGKTSWLGGHNLNIGXLENFYYLAXFIEALNFLYFNXFARR

SEQ ID NO: 108663 - protein, 79 aa, Gossypium hirsutum
  unsure (1)..(79): unsure at all Xaa locations
  Clone ID: LIB3828-026-Q6-K6-F3.pep
PGSXPRVPVLILNFXFVKTAXNKGEYXPQNCXNGFDRAFCSKPXDPAXGLTLNWRLFVRAVPKVLNLSCPSNEQLGALN

SEQ ID NO: 108664 - protein, 76 aa, Gossypium hirsutum
  Clone ID: LIB3828-026-Q6-K6-G1.pep
MLQNLLVSISWQLVVASLRAFAFQPLLFQMVLLHILPSVYQWQALTREARPTVILHLSVELHGSKITAYPLLDQFT

SEQ ID NO: 108665 - protein, 66 aa, Gossypium hirsutum
  unsure (1)..(66): unsure at all Xaa locations
  Clone ID: LIB3828-026-Q6-K6-G2.pep
RSDGEASLSCAVLVANNAYRAEDVMTRKKPXNVYLNYLLANSNAIGVNNGRQKKMLCGNTGPIVQK

SEQ ID NO: 108666 - protein, 139 aa, Gossypium hirsutum
  unsure (1)..(139): unsure at all Xaa locations
  Clone ID: LIB3828-026-Q6-K6-G3.pep
LCFQKVQVQGGDTAFDAYVVGXEXAPGIVVLQEWWGVDFXIXKPALXISQLGPGFKALVPDLSXGKVGLXVAEAHHLMDGLXWHGAVXDICASVVWLKANGSXXVGVTGFCLGGALSIAXSVLVPHVAAVAAFFGVPSP

SEQ ID NO: 108667 - protein, 67 aa, Gossypium hirsutum
  Clone ID: LIB3828-026-Q6-K6-G6.pep
QACCNPLKDFFRLALNPVKNRVCMYACMYACRYACMYVHDSLNFGFYSMLFILPMLDFKVWGLGGTR

SEQ ID NO: 108668 - protein, 187 aa, Gossypium hirsutum
  Clone ID: LIB3828-026-Q6-K6-H1.pep
FRVGGRVGFGGHEMNESVSWNASGSLLATCGRDKTVWIWEVMPGNEFECIQVLQGHTQDVKMVEWHPTMDILFSCSYDNTVKVWWSDDADGDWSCVQTLGESSNGHSSTVWSLAFNAKGDKLVTCSDDLTMKIWEADIIRMQSGDGYAPWNHLCTLSGYHDRTIFSVHWSREGIIASGAADDAVRLF

SEQ ID NO: 108669 - protein, 79 aa, Gossypium hirsutum
  unsure (1)..(79): unsure at all Xaa locations
  Clone ID: LIB3828-026-Q6-K6-H6.pep
LFKHIKKANQQWXDKSYICGSIKEIKVRARRFQYSSFGFMPGTANSANHVLAEEGRRYVSFEYGIEEEPVRVDEEACQD

SEQ ID NO: 108670 - protein, 163 aa, Gossypium hirsutum
  Clone ID: LIB3828-031-Q6-K6-C3.pep
MKSFKKLFTSKPKTHNPESSFKIGGMASLKVLDVIPSPEDDSHKLKKAFQGFGTDEDVIIEILGHRDANQRKKIRETYHQLYNETLIDALKSELSGDFGKAVILWTYDPSERDARLANEALKSKKKGIKHLEIIVEMSCASSPQHVVAVRQAYCTLFDHSIEE

SEQ ID NO: 108671 - protein, 176 aa, Gossypium hirsutum
  Clone ID: LIB3828-031-Q6-K6-H1.pep
PRVRKSPSSCFSSISSMKMKALIQTLIYTQASRLIRAFSKAKSIVIQIYKQNNPIQYLISISKTAEKKYKHNKLFFGSFRLHYNWCSSHVTPVPAPVLEGCTTTHFYYDSTWNSAISTHDQQKEDGLESELSGYLQWLEENKVNREANKAETEVDDIDRLAEMFIASCHEKFMLEK

SEQ ID NO: 108672 - protein, 176 aa, Gossypium hirsutum
  unsure (1)..(176): unsure at all Xaa locations
  Clone ID: LIB3828-032-Q6-K6-F2.pep
APFSGVRIHXLWPQKGKSSSDLPAGKRVLEVTSKMVQIPAGPAPRQVEPGSQTEQAPPSAVVDLAPEEMHGFRFLTISVAPRPXLCGAQTISGRPPPATSMAVGQFFNPDEGEIDFTPVSMLLSIHSHKDIFLKEDHPLAFNLSFAISLGLLPVTFSLKTAGCGIKDSGLLDEAGD

SEQ ID NO: 108673 - protein, 54 aa, Gossypium hirsutum
  unsure (1)..(54): unsure at all Xaa locations
  Clone ID: LIB3828-032-Q6-K6-G2.pep
KLKSLHRSKGSVSPNNQTPPQAPHENFERMIEKITLSKPMGHKDKKISXARSTR

SEQ ID NO: 108674 - protein, 76 aa, Gossypium hirsutum
  Clone ID: LIB3828-032-Q6-K6-H1.pep
PSLHTAPGPNSVSKICVAVDNVLLPPLQTDQHYLLLLVSSHSGSLHVRSLHCIVKVPAFRLHHSLSRLACGFWLAL

SEQ ID NO: 108675 - protein, 77 aa, Gossypium hirsutum
  Clone ID: LIB3828-033-Q6-K6-A1.pep
LLVILLHLSKFFFEQNTYISKKGRKIRKSKFNKGLYIGQKNRIIFHPTVYVNKRQTIYDRIYTGYLRSLSSLRMNQG

SEQ ID NO: 108676 - protein, 85 aa, Gossypium hirsutum
  unsure (1)..(85): unsure at all Xaa locations
  Clone ID: LIB3828-033-Q6-K6-D2.pep
IVTIIVINIWGGNLLFLSKKKKKKKKKKKKKKKKKKKKKKKKKKKKKKKKKKKKKKKKKKKKKKXHPFLKNKNYHHFPFKQHFLS

SEQ ID NO: 108677 - protein, 86 aa, Gossypium hirsutum
  unsure (1)..(86): unsure at all Xaa locations
  Clone ID: LIB3828-033-Q6-K6-E2.pep
DGFCTPSMLKLVFCSSYRGHWLNTVAPRLRVKSDSNCVXXXDAVGRLTGLSRRRGGNSLSRAFFCSDSNDGXRNRVQGXPKTPWVF

SEQ ID NO: 108678 - protein, 181 aa, Gossypium hirsutum
  unsure (1)..(181): unsure at all Xaa locations
  Clone ID: LIB3828-034-Q6-K6-G3.pep
GSTSRSENFXEXXDGGGHFPESGRGRRWKNPLEQGRHWQHNRRKLAFSTVGTPDYIAPEVLFNKGWGVECDWWSLGAIMYEMLVGYPPFYSDDPVTTCRKIVHWRNHLKFPEEARLTPEAKDLICKLLCDVDHRLGTQGADQIKAHPWFKDTRWDKLYEMEAAFKPHVEGEFDTQNFMKFD

SEQ ID NO: 108679 - protein, 81 aa, Gossypium hirsutum
  Clone ID: LIB3829-003-Q6-K6-B3.pep
VLGYPQLLGSTKVCASPDHMEPFPSSACKVAHSEYMRQPTRCALKDAQAGLCAWEFSWRPQRHLTHLGQALALTSGYRLRA

SEQ ID NO: 108680 - protein, 90 aa, Gossypium hirsutum
  Clone ID: LIB3829-003-Q6-K6-B6.pep
KNFGCSSTRPSMYHQQCGDRDPHIGWNLQSSDAITIPMLLIVRFVYNRTSDQHRKSTLLLHCHQPTLHYRGYGARITIPCLDYTCIPPAK

SEQ ID NO: 108681 - protein, 91 aa, Gossypium hirsutum
  Clone ID: LIB3829-003-Q6-K6-B9.pep
NNSNSGFESLFEAYTVLSSLNILSFTGSVTIVGVRTLSVHLPRVLCRQIPASIRRRALAEPIIAAWDLPPFSGEVLFRRKGSLKIPKDKPK

SEQ ID NO: 108682 - protein, 85 aa, Gossypium hirsutum
  Clone ID: LIB3829-003-Q6-K6-D1.pep
CPSKANHTVSYQCLLREAQQPWLIETGGCFSRTLGCWYLHPTPLQTLWLRPWLSQWYGVAGRACCFLPPVGGVTVIVVIRDPELG

SEQ ID NO: 108683 - protein, 115 aa, Gossypium hirsutum
  unsure (1)..(115): unsure at all Xaa locations
  Clone ID: LIB3829-003-Q6-K6-D11.pep
ECGPSVLRGPSWPPRCYEIFACLHCPLVAINWLEIAPFDRWEVPGLALFRVLCSLPLLAHGVKRRCVHSAGPIQKFFCPKGNFVDAVVSDIQSRCVECSTRRIRLTDNFXHCDKC

SEQ ID NO: 108684 - protein, 70 aa, Gossypium hirsutum
  unsure (1)..(70): unsure at all Xaa locations
  Clone ID: LIB3829-003-Q6-K6-D4.pep
KPPPPPPKKWGGAQFFFKKKKKKNFFLKGFHIPREKGKFRKTTQNCVFGLPISRIXGEEKRLRQXMDSYN

SEQ ID NO: 108685 - protein, 173 aa, Gossypium hirsutum
  Clone ID: LIB3829-003-Q6-K6-D8.pep
MKLSSSIFTFRFLNFNSLFIKSHPSFKISAATKRTMTQFPNFSTKISNSCPANTAEDSQVSPPEPRPQSPPRKPWLIVGLGNPGKKFNGTRHNVGFMMVDAIAEAEGISINTVNFKAQIGKGFIGNVPVMLAKQQTFMNSSGESVGAIVSYYKIPLKQVLVIFDDLDLPFAKL

SEQ ID NO: 108686 - protein, 177 aa, Gossypium hirsutum
  Clone ID: LIB3829-003-Q6-K6-E2.pep
AKSVDSNYEHVSSQTDMLTDQNLSESRALVPVPAMNVEALAVVPVNQKIRKSELAQRRTRRPFSVSEVEALVQAVEELGTGRWRDVKLRAFENADHRTYVDLKDKWKTLVHTAKISPQQRRGEPVPQELLDRVMAAHAYWSQHQTKQQGKHHPGTLRITDSQADRIGFAVAIPTITM

SEQ ID NO: 108687 - protein, 143 aa, Gossypium hirsutum
  unsure (1)..(143): unsure at all Xaa locations
  Clone ID: LIB3829-003-Q6-K6-F7.pep
SLVNQMKPVRESMTEALQLWKKIAGKGEDGAADDLKALSHDGDNIQSAESSEKNGSKDPSAGDKKKHILQXSVSEGKGGSIIDKAVVILKKKSPALTDRELNPEFFQKLETRGSDDLPVEVVVPRRYLNSSNLKSEEVSDPNG

SEQ ID NO: 108688 - protein, 76 aa, Gossypium hirsutum
  unsure (1)..(76): unsure at all Xaa locations
  Clone ID: LIB3829-003-Q6-K6-G7.pep
LHLALVVSLSMTFSNAPTSALTLFLLFSATSLLAVSSITSLYGVAGSFFPCTWLLATTFATSVPAFALLCLWXFFL

SEQ ID NO: 108689 - protein, 87 aa, Gossypium hirsutum
  unsure (1)..(87): unsure at all Xaa locations
  Clone ID: LIB3829-003-Q6-K6-H1.pep
MDSQVLVALALSLVGGLSTSLGALFVILNQAPNLKMLGLLQGFAAGLMLSISFLDLAHNAMNSIGFLKGNLWFFSGVIFFAVVANXI

SEQ ID NO: 108690 - protein, 184 aa, Gossypium hirsutum
  Clone ID: LIB3829-003-Q6-K6-H4.pep
MNPRGEKSIMSATDYTDAVHNFILSQKLTTLLGNFPEVLQISDLLEHNGAVSDQSVVILLVFLLSQLIVKKNVDQLNFHKLLGCGCQSLERRHSLTQRQSASSDTVVHNKERDIDTTKDAAKKFKAIQAWWRNMTEQNYRSSVRSATSISNCSTAQKTSFDILRENAATIIQSHYRRLKERRNF

SEQ ID NO: 108691 - protein, 174 aa, Gossypium hirsutum
  Clone ID: LIB3829-003-Q6-K6-H9.pep
MMKHKEEELALFLEMRKREKEQSSFLNHCSEDFDAPLGSIPGTSPIFSLSASATAPARKMGGAADDFLNSECDKNDYEWLLTPPGTPLFPSLESQKTVMSQIGAPKASPTVLKSKLANPQAESAARSNLSPKQPALSPGLNSTGIRRPSSSGGPGSRPATPTGRPTLTGASKPT

SEQ ID NO: 108692 - protein, 76 aa, Gossypium hirsutum
  unsure (1)..(76): unsure at all Xaa locations
  Clone ID: LIB3829-003-Q6-N6-A10.pep
YNIMRLXQVKLKKKLPGTGNVSVMKTTYKAQKSGHTKNRLXPFTYGLSVKPTXGRSXRGCXFLFLLLLLFRLFYTG

SEQ ID NO: 108693 - protein, 64 aa, Gossypium hirsutum
  Clone ID: LIB3829-003-Q6-N6-B11.pep
CFFFVFCFSWSLCFFQIAYRVGETYLFAVKSTDDNLRKLAFNYPIVLESRGVVNTIQHPHDQKL

SEQ ID NO: 108694 - protein, 62 aa, Gossypium hirsutum
  Clone ID: LIB3829-003-Q6-N6-B6.pep
QSLSPSWGVLASLLSQEKFAFMTLVPRAVDSHMGSLSSNRFLIIGCFGGVQAGSWGRAIVSL

SEQ ID NO: 108695 - protein, 97 aa, Gossypium hirsutum
  unsure (1)..(97): unsure at all Xaa locations
  Clone ID: LIB3829-003-Q6-N6-B8.pep
RNIVKKPQAFDNTXSPSSLVEQQVGDLISGLLNKEPKAWLGSKRGAAKVKTHPFFKALNFALIRXVTPPEIAGLRRQSTASYFLPKSEEQSPALDFL

SEQ ID NO: 108696 - protein, 104 aa, Gossypium hirsutum
  Clone ID: LIB3829-003-Q6-N6-B9.pep
EHIKHISLIRENVGIFLLFLFFCCMGFNPNFPMPKPYNLTRLADNNSLFHFQTLFEAYGAVDSVGILSFTGSGTIVGVWTQRFHLQRHRPRSQFDNVYNYLLSR

SEQ ID NO: 108697 - protein, 45 aa, Gossypium hirsutum
  Clone ID: LIB3829-003-Q6-N6-C11.pep
PTLNSIILKINIKLTPWKRNDNGDHLIMDGPLSSTCALPHSLTRT

SEQ ID NO: 108698 - protein, 61 aa, Gossypium hirsutum
  Clone ID: LIB3829-003-Q6-N6-C8.pep
KSFYFTILKGVSENCLNKTWAPFIVETFSGFPKLDIFWPLMNLFSGSKKPCFKQDLTIKTH

SEQ ID NO: 108699 - protein, 42 aa, Gossypium hirsutum
  Clone ID: LIB3829-003-Q6-N6-D4.pep
KTPTQTSINFKKKKGLRLFPRKRNSKHKWGWLQFQNSGEEKR

SEQ ID NO: 108700 - protein, 65 aa, Gossypium hirsutum
  Clone ID: LIB3829-003-Q6-N6-D8.pep
RIGIGRPQGRMDTINFVLRAFNKKEREELEFTFHNGMEAVRILLLEGFDKSATYVNSTKAMEQLG

SEQ ID NO: 108701 - protein, 72 aa, Gossypium hirsutum
  Clone ID: LIB3829-003-Q6-N6-E10.pep
NLILLFSNEVLFSKNKYLFIIQLSYKPTGITKDSLLLCELAKGHRRFIKQNVIFNAIGEKGCSEVTLTFHDD

SEQ ID NO: 108702 - protein, 47 aa, Gossypium hirsutum
  Clone ID: LIB3829-003-Q6-N6-E2.pep
LPSWQNRICGRQSDHYYVKEEGKGKIANDEAQGGKKKEHVLIDSGFM

SEQ ID NO: 108703 - protein, 88 aa, Gossypium hirsutum
  Clone ID: LIB3829-003-Q6-N6-E5.pep
NPGLPFSKIKKNSAQVNLLGGPFNQKQGKQGLFSRGNFGPAKSTWVAFQPKTGKTGAAFEGQPREGNSLPFTKTAFEGRPKKKLKRIF

SEQ ID NO: 108704 - protein, 144 aa, Gossypium hirsutum
  Clone ID: LIB3829-003-Q6-N6-F10.pep
GDEKATAETLDSEGWLKTGDICYFDSEGFLYVVDRLKELIKYKAYQVPPAELEHLLHSHPEIVDAAVIPYPDEEAGQIPMAYVVRNPGSNITQAQVMDFIAKQVAPYKKIRRVAFINSIPKTPAGKILRRELINHSLSNGLSKL

SEQ ID NO: 108705 - protein, 66 aa, Gossypium hirsutum
  Clone ID: LIB3829-003-Q6-N6-F5.pep
CQKALVKNKSILGPGSVPGLGKIRMSTRIGEGGEVHNKRPWLMNSVGLKLLETHLPGMPWMWVHLL

SEQ ID NO: 108706 - protein, 94 aa, Gossypium hirsutum
  Clone ID: LIB3829-003-Q6-N6-F7.pep
EIANEALHSIVQFLMEQDLFDICLSWIQQLVKVVIENGPDALGIPMELKKELLLNLHEAASTMDPPENWEGAVPDQLLLQLASAWKIELQQFDK

SEQ ID NO: 108707 - protein, 93 aa, Gossypium hirsutum
  Clone ID: LIB3829-003-Q6-N6-F8.pep
RVTSEGLRDAFASQPGLLSAKVIYEKDTGRSRGFGFISFESAETVESALTAMNGVEVEGRPLRLNMAADRAPRTPLPAENSLERSELVSSVTV

SEQ ID NO: 108708 - protein, 62 aa, Gossypium hirsutum
  unsure (1)..(62): unsure at all Xaa locations
  Clone ID: LIB3829-003-Q6-N6-G1.pep
IWLTREKIDXDIFAMTGSKVSKRPKKRAKNVQKXQLDCVFPGLWLSSITPDSYRVPEPPLKG

SEQ ID NO: 108709 - protein, 110 aa, Gossypium hirsutum
  unsure (1)..(110): unsure at all Xaa locations
  Clone ID: LIB3829-003-Q6-N6-G7.pep
VFLLDPWCNPVVERQAQDSIPRIGLCXPIRLVRFVIKHPIEDSIFQLQLKKALVFVGSVGGSSKALEKLTQPPHHSSICVTSAGLGWVLLAKFYLNVKNFSLFCFYMRTY

SEQ ID NO: 108710 - protein, 109 aa, Gossypium hirsutum
  Clone ID: LIB3829-003-Q6-N6-H1.pep
GVAVALPVYFATQSKWQAFKLATLSGFAEPLGVVIVAYLFPSSLSPEILEGLLGSVGGVMAFLTLHEMLPLAFDYAGQKQAVKAVFFGMAFMSASLYFLELSLPKDMSL

SEQ ID NO: 108711 - protein, 127 aa, Gossypium hirsutum
  Clone ID: LIB3829-003-Q6-N6-H4.pep
IPDQQVLKHALSTLRNLARYPHLAEVLIDTPPSVEIILWEMLRNKEEGYFIASEILKKICSNPKGVKAVHKFPALLKRLHTLVEELTRKLNTEKRNPRTVVLKENTDRRLKKAVQLLRLITNGYRIQ

SEQ ID NO: 108712 - protein, 62 aa, Gossypium hirsutum
  Clone ID: LIB3829-003-Q6-N6-H6.pep
MVPYRHNSVGRNGSEICLKLLMNLELKVLDQPIWNLAPFIFPLKARANTLFCFTNHRSFPFA

SEQ ID NO: 108713 - protein, 71 aa, Gossypium hirsutum
  Clone ID: LIB3829-003-Q6-N6-H7.pep
GNCGWTCWVMPAQYCSWKEHARQLKQGEELQTHVALLMAHLSLNKKFQMVPLPERLYKVLSLAFIRTSLMV

SEQ ID NO: 108714 - protein, 67 aa, Gossypium hirsutum
  Clone ID: LIB3829-003-Q6-N6-H9.pep
LFLILEYFTFGRKPIPRKNPERNHYFKIKVKLVKFASCFVIPPPCIFTKVNEKNFFFYSFFNRVSFF

SEQ ID NO: 108715 - protein, 125 aa, Gossypium hirsutum
  Clone ID: LIB3829-004-Q6-K6-A5.pep
MSCGCFGGSVVKRRQSTARATGGIDEQLIRTVNHFSYDQLKLATDDFHSSNKIGRGGFGTVYKGILKDGTEVAVKTLAAQSKQGAREFLTEINTISNVKHPNLVELIGCCIQGANRILVYEYVEN

SEQ ID NO: 108716 - protein, 160 aa, Gossypium hirsutum
  Clone ID: LIB3829-004-Q6-K6-B2.pep
MAQQIQISSPLILQKLYCEKEEESFEDDNGSEICVETVKKETFLPSFFIENDCFFEQDDELFVLMSKEKQTHHGYIDVNLNKPLVLARKQALGLFFKVKEHYGFNALTMVLAVNYFDRFISSLKLQQDNPWMSQLAAVACLSLAAKVEEAQVPLLLDLQV

SEQ ID NO: 108717 - protein, 186 aa, Gossypium hirsutum
  Clone ID: LIB3829-004-Q6-K6-C5.pep
TFLIVLALIFLRLWWRYWSTTGGGPKNLPPGPPGWPLVGNLIQIILQRQHFIFIVRGLRKRYGPIFSMQMGQRTMVIVTDSRLIHEALVQRGPTFASRPPDSPIRLVFSVGKRAINSAEYGPLWRTLRKNFVTEVITPTRVKQCGWIRKWAIENHMKRIESDAMETGVVEVMSNCRLTICSILICL

SEQ ID NO: 108718 - protein, 79 aa, Gossypium hirsutum
  Clone ID: LIB3829-004-Q6-K6-D4.pep
RDLASMHWPADHNGWTVKTISIPRLNSLTAHDPSDRRGRLKKARAPSPNTHKVNAESATGTRPGSRHESLRLQCIHSKR

SEQ ID NO: 108719 - protein, 95 aa, Gossypium hirsutum
  Clone ID: LIB3829-004-Q6-K6-D5.pep
GWSSILGSKPSQSFIDDGLLKPFAIGKGYRWIRVIFQCVNTWPRRVCILMSQQHPESGLSHSYPLCFSLFLITPTRLVFVPTVCHEEHLQTSVLM

SEQ ID NO: 108720 - protein, 69 aa, Gossypium hirsutum
  Clone ID: LIB3829-004-Q6-K6-E12.pep
SSLAREGLIPDHVGSGSVPYIIYGPGLWLAIASWKPLAPVGVARKEPPFATAFADLTVCVATGRFGSNC

SEQ ID NO: 108721 - protein, 187 aa, Gossypium hirsutum
  Clone ID: LIB3829-004-Q6-K6-F12.pep
ENFLCALIIRFAKRNEDNRWLLEHKDVTDFESRRHLAMMMFPEVKEDYEELHEMLIDRSQLLSESFEYIAHADPESLHAGLFMEFKNEEATGPGVLREWFFLVCQAIFNPENALFVPCSNDRRRFFPNPASRVDPLHLEYFRFAGRVIALALMHKVQVGVVFDRVFFQQLAGMHISLEDIRETDPCL

SEQ ID NO: 108722 - protein, 190 aa, Gossypium hirsutum
  unsure (1)..(190): unsure at all Xaa locations
  Clone ID: LIB3829-004-Q6-K6-F9.pep
PPXGPEXWPXNNSKRQWLVFYRVNQMSLQXGGAIDGRGQXWWDLPCKPHKGINATTLPGPCDSPVAIRFFMSSNLTVQGLKVKDSPQFHFRFDGCQNVHVESLHITAPALSPNTDGIHIANTNGVQIYNSVISNGDDCVSIGSGCYDVDIRNLTCGPGHGISIGSLGNHNSKACVHNVTVRDSVIKVSDN

SEQ ID NO: 108723 - protein, 187 aa, Gossypium hirsutum
  Clone ID: LIB3829-004-Q6-K6-G12.pep
RPRGRPRGRTRGGGLETSVIVPWLRENYGCEVVCFTADVGQGIKELDGLEAKAKASGACQLVVKDLKEEFVKDYIFPCLRAGAIYERKYLLGTSMARPVIAKAMVDIAREVGADAVSHGCTGKGNDQVRFELTFFALNPELNVVAPWREWDITGREDAIEYAKKHNVPVPVTKKSIYSRDRNLWHLS

SEQ ID NO: 108724 - protein, 200 aa, Gossypium hirsutum
  unsure (1)..(200): unsure at all Xaa locations
  Clone ID: LIB3829-004-Q6-K6-H10.pep
XALXNLAFAFRGHNLVLEIQATMPSTFKNPAHVPMWRGAKVAYFFIAMCLFPVAIGGFWAYGNLMPSGGILNALYAFHSHSIPRGLLALTFLLVVFNCLSSFQIYSMPAFDSFEAGYTSRTNRPCSIWVRSGFRVFYGFVSFFIGVALPFLSSLAGLLGGLTLPVTFAYPCFMWVLIKKPXKYSFNWYFNWILGWVGCCL

SEQ ID NO: 108725 - protein, 207 aa, Gossypium hirsutum
  Clone ID: LIB3829-004-Q6-K6-H3.pep
LMEKKGQVNCNSKSSDQSPCSNYDVCSGDDTFRNVTPLEGTDFTAKESSPYTGIDDSNIGGQIESSQNLVLDSCQSNNFPEKVDNDRTCNLAVKNSDAMLVGESSVMTQGANVSPRNEGAEANDSSVMVTSEKYYPEQNAEPDKVCDKKNCFSNRDSTCVASCLEADVNVDGTNKMHSREDKTCSNSEEGVIAEVQAVQNNKVLSCP

SEQ ID NO: 108726 - protein, 59 aa, Gossypium hirsutum
  Clone ID: LIB3829-004-Q6-K6-H5.pep
TSAGGAGAHREDGCHGIPVHSREASRGGTGPNGKQRWFYLLRRWSRVTYWRKVYLGRVP

SEQ ID NO: 108727 - protein, 111 aa, Gossypium hirsutum
  unsure (1)..(111): unsure at all Xaa locations
  Clone ID: LIB3829-004-Q6-K6-H7.pep
FTILISFMSKXDMINLRTFHRLMFLLAGLEXKKSFEEVNGVGNPNNNQSAYLEESSLLSYQPALVSEILAMLSIIPELPPELQQQLLRLPADLARRLISRASARTIQRIFL

SEQ ID NO: 108728 - protein, 101 aa, Gossypium hirsutum
  Clone ID: LIB3829-004-Q6-N6-A11.pep
KHKTSLNPFSQIFKNQGGNPLFKGPEPNIPSSHSRYWYPPWIPQIPPHCFRKKVRIPLVLKYRVVLSPLFCYVLGSKNANKKLHPFKNLFRQKKTPPPPHI

SEQ ID NO: 108729 - protein, 165 aa, Gossypium hirsutum
  Clone ID: LIB3829-004-Q6-N6-A4.pep
MVIKNTPGRAFYGKKSAVDKRRKKASFNTTFVINISNKDSPEVGEGLAFVLSADSNVPQESFGQWLGIVNATTNGTSRARIVGVEFDTRKSYEEEPDGNHVGLDINSCYSIEQQSLSGYGVNLSMGVDVRAVVQYDGKNMTVFVSNGSETQSSNPVLSVPVDLSS

SEQ ID NO: 108730 - protein, 60 aa, Gossypium hirsutum
  Clone ID: LIB3829-004-Q6-N6-B12.pep
GGFFFFFFFFFFFFFFFFFFFFFFFFFFFFFFFFFFFFFSAPGAPPKIWGGGGGPSPLSL

SEQ ID NO: 108731 - protein, 98 aa, Gossypium hirsutum
  Clone ID: LIB3829-004-Q6-N6-B2.pep
GVLKICEDEVNSCYELISELLESRGHKRKRRLVPSPSSPNGVIDASFSSDNLVDSWAVTTSSVSSSSYPQFKRSRAPDQQMRLPSVNRMFVDPVSSPR

SEQ ID NO: 108732 - protein, 103 aa, Gossypium hirsutum
  unsure (1)..(103): unsure at all Xaa locations
  Clone ID: LIB3829-004-Q6-N6-B5.pep
QPGVLGPGPQPPPSPGFFXIVTFWFFSFPKSKMEGSIILVPYSLRKLVPFSCSIVFKYNVYCSCKCFLYFLSVFCVVHIDFASLHFGFYNCCNALCILGTSFT

SEQ ID NO: 108733 - protein, 98 aa, Gossypium hirsutum
  Clone ID: LIB3829-004-Q6-N6-B6.pep
TTYASTLQLLVCLRMLMRKCVCENISKDDIQKLFPSEVLPELVRLLTLLLQKFQREWRADVHMDKVSLPRLKTMAWNLPWMPLCYRLEIFTCMELAPK

SEQ ID NO: 108734 - protein, 129 aa, Gossypium hirsutum
  Clone ID: LIB3829-004-Q6-N6-C5.pep
LSHAAIKDTELGGYTIPEGVHVEFYTAWITEDPDIWSDPGEFRPDRFLRGDGVGVDVTGTRSVKMLPFGAGRRICPAWNLGVLHIKLSLAKMVQAFKWQPVPDSPPDMTETYAFTVVMKNPLKAVILPR

SEQ ID NO: 108735 - protein, 50 aa, Gossypium hirsutum
  Clone ID: LIB3829-004-Q6-N6-D4.pep
IILYIIDPELQTKLQIPARQSLFRTNIKENQTWMRTSGPYGPKRPPTPTK

SEQ ID NO: 108736 - protein, 106 aa, Gossypium hirsutum
  unsure (1)..(106): unsure at all Xaa locations
  Clone ID: LIB3829-004-Q6-N6-D5.pep
CIHQAGPLEHTVLSCFIKFDGGNVVMGTGGSLIGRAGVINNRXKAQGQHXTTHVQEASGHEFATRLGXVFPIGKGPKPXVSLPKGKGSQLTLSEKARKRLTAQQVG

SEQ ID NO: 108737 - protein, 144 aa, Gossypium hirsutum
  Clone ID: LIB3829-004-Q6-N6-D9.pep
DDDDWRNEKREKKVNNSKGKGSRGRYAKKPQSERMKQGGDDQVNADHGGNSSGASMVPDSVSTAESSRRKQMKRGTKVLGKLDLNVEFRNEAEEPVAGRSKGNDAGNEEEDNNEGNGFFEGLDEFFSSLPILSVVGDDKVKASE

SEQ ID NO: 108738 - protein, 94 aa, Gossypium hirsutum
  unsure (1)..(94): unsure at all Xaa locations
  Clone ID: LIB3829-004-Q6-N6-E10.pep
PRGILRPPKKGFAVQGPPTRPLPPVHEAMLKNVVFPPKIVGKPPRYRIDGSKIMKGFLAPKGGNSPEATLXPFFAVYRKLAGKDVGFWFPVMGA

SEQ ID NO: 108739 - protein, 68 aa, Gossypium hirsutum
  Clone ID: LIB3829-004-Q6-N6-E12.pep
PVSRPCLRQGIFFWAARPPVVGQLCSPPLQCKIRRSSVSGSGVWFKVKELHSPSFCSPRSACLDSPRV

SEQ ID NO: 108740 - protein, 51 aa, Gossypium hirsutum
  Clone ID: LIB3829-004-Q6-N6-E7.pep
QQSFGLLTKEFLFLFSPSISILYNLTTGLCHPLWFLVPVQRGDHVTGLQTI

SEQ ID NO: 108741 - protein, 83 aa, Gossypium hirsutum
  Clone ID: LIB3829-004-Q6-N6-F3.pep
KTASGGEIGPLVVLTSPKIDRGIGIFPIGIVEAIVFQGSQRTRGCPSKKRDVGEKTNNGANQSSRGAFIAQGPATKISPRGLG

SEQ ID NO: 108742 - protein, 135 aa, Gossypium hirsutum
  Clone ID: LIB3829-004-Q6-N6-F7.pep
IPVTLGRLDSGEPDPEGKMPEESLDASGLKQCFRRKGFSTQELVALSGAHTLGSKGFGSPVAFDNSYFKILLEKPWNSSAGMTSMIGLPSDRAIVEDDKCLRWITKYADDQNMFFEDFKNAYMKLVNCGAKWKSM

SEQ ID NO: 108743 - protein, 128 aa, Gossypium hirsutum
  Clone ID: LIB3829-004-Q6-N6-F9.pep
GAVSGIMFGNIHMISVRNPIIIDQFYCLTKDCLNQTSAVYVSDILYEGIKGTYDTRSPPMHFGCSDSVPCTNITLSDIELLPAQGDIVLDPFCWNAYGELETLTIPPVYCLREGVPRSILDNKDMDHC

SEQ ID NO: 108744 - protein, 168 aa, Gossypium hirsutum
  Clone ID: LIB3829-004-Q6-N6-G1.pep
PNVSSYNTMFTALWSTGDKFKALEMILEMLNKRIGPDEITYNSLISCLCRDGIVDEAIELLIDMGRSKIQPTVISYNIVLLGLCKVHRIDDAIEVLAAMVEKGCQPNETTYVLLTEGIGFAGWRSQAMELANALFRMKAISEDSFKRLTKTFPLLDVYKEFALSDSDK

SEQ ID NO: 108745 - protein, 72 aa, Gossypium hirsutum
  Clone ID: LIB3829-004-Q6-N6-H1.pep
VKTPFQKYRFYTRKFPVFFSGQGNKLCSAQNQGNVKIKPTLSPFGSPQGPPLGRGSPKNMSRPGGATMAPQN

SEQ ID NO: 108746 - protein, 91 aa, Gossypium hirsutum
  unsure (1)..(91): unsure at all Xaa locations
  Clone ID: LIB3829-004-Q6-N6-H10.pep
LPFLSTLSVLLKHLTLPLTFPYPCFIXILIKTPPKSHLPXYFNWILGXLNIPFNLPFSISGIXXIVPPPPPSQFFQXPIKKKKKNTLSLYI

SEQ ID NO: 108747 - protein, 84 aa, Gossypium hirsutum
  Clone ID: LIB3829-004-Q6-N6-H3.pep
MDKISEFDPIRQHRHFCPWIAPMSGGAPGWQQTLSALLYGKDFPHSSPVYSTSTVSMIKVDDPIASVRKLFMSPTAKRTKITRE

SEQ ID NO: 108748 - protein, 61 aa, Gossypium hirsutum
  Clone ID: LIB3829-004-Q6-N6-H5.pep
YHTQPQFIKEWHHKGIGGSNKSSQTGRTSSPSCPTMFVIKDLTIIIISQMVNLAPALHPIM

SEQ ID NO: 108749 - protein, 139 aa, Gossypium hirsutum
  Clone ID: LIB3829-004-Q6-N6-H6.pep
NPSQKESYNRHAYKEEGSWVPPLFNLGGPGVTGFHHPVVGLFGEMVYARVFGNSESLYTYPNWYSLTGSSSPRLRRHEMQAARSLKRIPIFQFGGSLLGLMGFWVFLGILVKKNPYPGCKPYAKKPCGWVRMSPHIYPY

SEQ ID NO: 108750 - protein, 67 aa, Gossypium hirsutum
  Clone ID: LIB3829-004-Q6-N6-H7.pep
LYVVSNSRLIRGFKVFPIFALSLPLRALMLVFLLSFSSIFNSIRLKMNLFSSPTSPPIHYFKWGSSS
